United States Patent Application Publication US 2011/0183924 A1 - sequence listing, part 269

SEQ ID NO: 781874 - protein, 1013 aa, Homo sapiens
MAAARRLMALAAGISPRLQPLGPRAAGRQGRSRGFSSSCAHPDHTKEAAEAESGMAPGGPGEGDGSLVNASRDLLKEFPQPKNLLNSVIGRALGISHAKDKLVYVHTNGPKKKKVTLHIKWPKSVEVEGYGSKKIDAERQAAAAACQLFKGWGLLGPRNELFDAAKYRVLADRFGSPADSWWRPEPTMPPTSWRQLNPESIRPGGPGGLSRSLGREEEEDEEEELEEGTIDVTDFLSMTQQDSHAPLRDSRGSSFEMTDDDSAIRALTQFPLPKNLLAKVIQIATSSSTAKNLMQFHTVGTKTKLSTLTLLWPCPMTFVAKGRRKAEAENKAAALACKKLKSLGLVDRNNEPLTHAMYNLASLRELGETQRRPCTIQVPEPILRKIETFLNHYPVESSWIAPELRLQSDDILPLGKDSGPLSDPITGKPYVPLLEAEEVRLSQSLLELWRRRGPVWQEAPQLPVDPHRDTILNAIEQHPVVVISGDTGCGKTTRIPQLLLERYVTEGRGARCNVIITQPRRISAVSVAQRVSHELGPSLRRNVGFQVRLESKPPSRGGALLFCTVGILLRKLQSNPSLEGVSHVIVDEVHERDVNTDFLLILLKGLQRLNPALRLVLMSATGDNERFSRYFGGCPVIKVPGFMYPVKEHYLEDILAKLGKHQYLHRHRHHESEDECALDLDLVTDLVLHIDARGEPGGILCFLPGWQEIKGVQQRLQEALGMHESKYLILPVHSNIPMMDQKAIFQQPPVGVRKIVLATNIAETSITINDIVHVVDSGLHKEERYDLKTKVSCLETVWVSRANVIQRRGRAGRCQSGFAYHLFPRSRLEKMVPFQVPEILRTPLENLVLQAKIHMPEKTAVEFLSKAVDSPNIKAVDEAVILLQEIGVLDQREYLTTLGQRLAHISTDPRLAKAIVLAAIFRCLHPLLVVVSCLTRDPFSSSLQNRAEVDKVKALLSHDSGSDHLAFVRAVAGWEEVLRWQDRSSRENYLEENLLYAPSLRFIHGQSGPHLLS

SEQ ID NO: 781875 - protein, 465 aa, Homo sapiens
MAAARRLMALAAGISPRLQPLGPRAAGRQGRSRGFSSSCAHPDHTKEAAEAESGMAPGGPGEGDGSLVNASRDLLKEFPQPKNLLNSVIGRALGISHAKDKLVYVHTNGPKKKKVTLHIKWPKSVEVEGYGSKKIDAERQAAAAACQLFKGWGLLGPRNELFDAAKYRVLADRFGSPADSWWRPEPTMPPTSWRQLNPESIRPGGPGGLSRSLGREEEEDEEEELEEGTIDVTDFLSMTQQDSHAPLRDSRGSSFEMTDDDSAIRALTQFPLPKNLLAKVIQIATSSSTAKNLMQFHTVGTKTKLSTLTLLWPCPMTFVAKGRRKAEAENKAAALACKKLKSLGLVDRNNEPLTHAMYNLASLRELGETQRRPCTIQVPEPILRKIETFLNHYPVESSWIAPELRLQSDDILPLGKDSGPLSDPITGKPYVPLLEAEEVRLSQSLLELWRRRGPVWQEAPQLPSH

SEQ ID NO: 781876 - protein, 114 aa, Homo sapiens
MKLKVKTLSSHNINPSKKGDCGLGSMAHACDPSTLGGRDGRITRSGMETILTSAVKPCLYWKYKKSAGRGGGRLWSQLPGRLRQGNGMSPGGGACSGPRLRHCTPASETEQHSA

SEQ ID NO: 781877 - protein, 100 aa, Homo sapiens
SRCNVRSHWRAQGLLASRDRLHSAGARRSGGRLSAVGLALTCRTPGPGAWANLGPLGVQRGPSARAFREWTCAPLGPAHHPPPTSVGPPWGEEKMPEADT

SEQ ID NO: 781878 - protein, 81 aa, Homo sapiens
AGLSPRYNVIPNECTSKSSIKVSINHFDLCGWIKHISISDIDRVLLNFTVSCHMPYVIADCTLLNLEPKPVVNTLHPIRYQ

SEQ ID NO: 781879 - protein, 70 aa, Homo sapiens
SDKTGRQEVNVSKARRCANTGRENRSRGAQLGELQETDLKKSKAELRIYSLVPTALQGPRYKDIQPAVVV

SEQ ID NO: 781880 - protein, 238 aa, Homo sapiens
MLFLLSAGRWLCSPPDQLWKVKKALKMTIFWRGLMPEFQFGTYSESERKTEEYDTQAMKYLSYLLYPLCVGGAVYSLLNIKYKSWYSWLINSFVNGVYAFGIPLHAAPALCELQVEVSGTSALEGLHYKASTAFIDDVLPSSSPCPRFTPAGLLSGDDVVVTVYLVPAEGLILGDKRTSDELGTHKEGHGAKERAQGARQAQDERLGRGEPEGRTNEEEHHRKRGKPGSERQRGEGEG

SEQ ID NO: 781881 - protein, 71 aa, Homo sapiens
IGGGGPAGPLRPVGTVPTLLSNLHLKLAAGGGKMTWVGASTKPGRTQRQSPALASWEDAQRPYKAAREGEI

SEQ ID NO: 781882 - protein, 62 aa, Homo sapiens
IPVMFRSTFPGAFARSLLKALPAFTHGLTEGVRRLPHMLGSATAVPHFQVPNPVPGICCCIA

SEQ ID NO: 781883 - protein, 124 aa, Homo sapiens
ALDYGGTLLSLPGQFATSVGCVCAGLFCFKVLEHSMCTTWKTSEFLHEINFAQESGHIDTSTFGGAWCTPGTVWGERVPFRSEFPDPGHSALLLVGRVKSVMISRTPPRFSFQFIAHSGLKTVL

SEQ ID NO: 781884 - protein, 68 aa, Homo sapiens
GFAGAVQLGLIAEFEARIRLEFEAREARTALRKDEKGVEKMLERENFRFYTKNNGNIKMKGSKSLNTK

SEQ ID NO: 781885 - protein, 98 aa, Homo sapiens
TLSRVRDARGETLCSDTGAVVAVWNQRGNRCAGAQWLEGSGGVVSGHFQAEGSTCPLGGAASALPPPPQGAGPLFISPSQHRPILGSGLSQARWPPCH

SEQ ID NO: 781886 - protein, 104 aa, Homo sapiens
TGVSHCARPPVLLSVPPFGFVLAHPQNLGYLLHFLPSSLGGKTKTISVPYFRATFYRKSYFQKMAATISLTLNVLFQYDFTTPLIKNRSLFLLLLDLDWPKQHA

SEQ ID NO: 781887 - protein, 60 aa, Homo sapiens
RSLAEQFQRMQGVSMRDSTGFKDRSLSGSLRKNSSPSDSKPPFSQGQEKGHWPWAKQQSS

SEQ ID NO: 781888 - protein, 75 aa, Homo sapiens
HHTCHLPGKREPRSRGLASHRPSWRGGQRAARQHRLSSSCQSHYQHGKITILVGNYYLEVGPEMQVKPQDATTQP

SEQ ID NO: 781889 - protein, 113 aa, Homo sapiens [sequence omitted]

SEQ ID NO: 781890 - protein, 203 aa, Homo sapiens
GGCNHMVCRNQNCKAEFCWVCLGPWEPHGSAWYNCNRYNEDDAKAARDAQERSRAALQRYLFYCNRYMNHMQSLRFEHKLYAQVKQKMEEMQQHNMSWIEVQFLKKAVDVLCQCRATLMYTYVFAFYLKKNNQSIIFENNQADLENATEVLSGYLERDISQDSLQDIKQKVQDKYRYCESRAKGFVTAVHEGYEKDLWEYIED

SEQ ID NO: 781891 - protein, 161 aa, Homo sapiens
MRVPTLQPQPVPICVPQTQRCPPQRRRHGPLPPCITVPCSHRLPVHPLPCCDLLCLCFLLGKTGIPQRAAVQQDKFTHETLGMLLAHRQGEASLVPIVTFSISSGCITKCHRLRGLHSRNLLPPSSGGQKAKIKVPANSVSVEILFRLLTISSQGLFSRHA

SEQ ID NO: 781892 - protein, 99 aa, Homo sapiens
FSFLLPCEEGCICFSFCHDRKFPEASPAMLNCKDTFRRGTKAWKEKHQGNDAYVSPPPSGLPPVLPLAEANQKPQDSITQAGVQQRDLGSLQRPPPGFK

SEQ ID NO: 781893 - protein, 83 aa, Homo sapiens
FSFLLPCEEGCICFSFCHDRKDTFRRGTKAWKEKHQGNDAYVSPPPSGLPPVLPLAEANQKPQGKGSQAIGHPQVSHPGFGAS

SEQ ID NO: 781894 - protein, 60 aa, Homo sapiens
LSVFGDIWENRIPEVTGWGAKLWLPGCKADVQGERSQAPLVAGGWGYKMVSSKLQGGVGW

SEQ ID NO: 781895 - protein, 41 aa, Homo sapiens
MSTNASASFPGGTGTGTSTRTSTGTGTSTRTSTGTGTSTRT

SEQ ID NO: 781896 - protein, 89 aa, Homo sapiens
SQTGQQAYSCAPEVDHQPSTSPLDQGPGDSRDHPGPRQDPRLLEPLIVGSPTVDSIVDPAAVMLPGSKSIWLQSHRQTHLPGNLYCLGT

SEQ ID NO: 781897 - protein, 79 aa, Homo sapiens
GSQQASLPLPSCSLYALPPAFHPVDDNARWMQCSSIGYLAPQIICGKEWGLLNCPLPMGCRVTVPEGSPSGHSWPGVAL

SEQ ID NO: 781898 - protein, 52 aa, Homo sapiens
PTTGWTGRQLGGGKEPVCKIEDRSTLFCTGSENDSQGEGGRSGSSVPNVNEV

SEQ ID NO: 781899 - protein, 371 aa, Homo sapiens
QNLEDREVLNGVQTELLTSPRTKDTLSDMTRTVEISGEGGPLGIHVVPFFSSLSGRILGLFIRGIEDNSRSKREGLFHENECIVKINNVDLVDKTFAQAQDVFRQAMKSPSVLLHVLPPQNREQYEKSVIGSLNIFGNNDGVLKTKVPPPVHGKSGLKTANLTGTDSPETDASASLQQNKSPRVPRLGGKPSSPSLSPLMGFGSNKNAKKIKIDLKKGPEGLGFTVVTRDSSIHGPGPIFVKNILPKGAAIKDGRLQSGDRILEVNGRDVTGRTQEELVAMLRSTKQGETASLVIARQEGHFLPRELKGEPDCCALSLETSEQLTFEIPLNDSGSAGLGVSLKGNKSRETGTDLGIFIKSIIHGGAAFKVG

SEQ ID NO: 781900 - protein, 81 aa, Homo sapiens
TRCSARRRVHPVRASNLLNGKVISVRRGVEGGGRELSIGEENEHVVPCTLVPHDEGRTKSQALSDEGKDRMTQGRDGPTPG

SEQ ID NO: 781901 - protein, 111 aa, Homo sapiens
TGCRKYRRDANVASRGANPDTSHPRGLTTATHTYQGAPPTGAGACRSPKPSANKPLSPLFLLPRPPFLPTVLQAPGDWCPGTNMNRQTRSMLAAKPRPSRVPRTLISASRR

SEQ ID NO: 781902 - protein, 55 aa, Homo sapiens
AASGLSLALASEEQPPELPSTPSPVPSPVLSPTQEQALAPASTASGAASVGQTSA

SEQ ID NO: 781903 - protein, 875 aa, Homo sapiens
LQAGGPSAALGAPAPPLLLLGLSCPGSARAWGEARRARTRSMAVEDEGLRVFQSVKIKIGEAKNLPSYPGPSKMRDCYCTVNLDQEEVFRTKIVEKSLCPFYGEDFYCEIPRSFRHLSFYIFDRDVFRRDSIIGKVAIQKEDLQKYHNRDTWFQLQHVDADSEVQGKVHLELRLSEVITDTGVVCHKLATRIVECQGLPIVNGQCDPYATVTLAGPFRSEAKKTKVKRKTNNPQFDEVFYFEVTRPCSYSKKSHFDFEEEDVDKLEIRVDLWNASNLKFGDEFLGELRIPLKVLRQSSSYEAWYFLQPRDNGSKSLKPDDLGSLRLNVVYTEDHVFSSDYYSPLRDLLLKSADVEPVSASAAHILGEVCREKQEAAVPLVRLFLHYGRVVPFISAIASAEVKRTQDPNTIFRGNSLASKCIDETMKLAGMHYLHVTLKPAIEEICQSHKPCEIDPVKLKDGENLENNMENLRQYVDRVFHAITESGVSCPTVMCDIFFSLREAAAKRFQDDPDVRYTAVSSFIFLRFFAPAILSPNLFQLTPHHTDPQTSRTLTLISKTVQTLGSLSKSKSASFKESYMATFYEFFNEQKYADAVKNFLDLISSSGRRDPKSVEQPIVLKEGFMIKRAQGRKRFGMKNFKKRWFRLTNHEFTYHKSKGDQPLYSIPIENILAVEKLEEESFKMKNMFQVIQPERALYIQANNCVEAKDWIDILTKVSQCNQKRLTVYHPSAYLSGHWLCCRAPSDSAPGCSPCTGGLPANIQLDIDGDRETERIYSLFNLYMSKLEKMQEACGSKSVYDGPEQEEYSTFVIDDPQETYKTLKQVIAGVGALEQEHAQYKRDKFKKTKYGSQEHPIGDKSFQNYIRQQSETSTHSI

SEQ ID NO: 781904 - protein, 768 aa, Homo sapiens
LQAGGPSAALGAPAPPLLLLGLSCPGSARAWGEARRARTRSMAVEDEGLRVFQSVKIKIGEAKNLPSYPGPSKMRDCYCTVNLDQEEVFRTKIVEKSLCPFYGEDFYCEIPRSFRHLSFYIFDRDVFRRDSIIGKVAIQKEDLQKYHNRDTWFQLQHVDADSEVQGKVHLELRLSEVITDTGVVCHKLATRIVECQGLPIVNGQCDPYATVTLAGPFRSEAKKTKVKRKTNNPQFDEVFYFEVTRPCSYSKKSHFDFEEEDVDKLEIRVDLWNASNLKFGDEFLGELRIPLKVLRQSSSYEAWYFLQPRDNGSKSLKPDDLGSLRLNVVYTEDHVFSSDYYSPLRDLLLKSADVEPVSASAAHILGEVCREKQEAAVPLVRLFLHYGRVVPFISAIASAEVKRTQDPNTIFRGNSLASKCIDETMKLAGMHYLHVTLKPAIEEICQSHKPCEIDPVKLKDGENLENNMENLRQYVDRVFHAITESGVSCPTVMCDIFFSLREAAAKRFQDDPDVRYTAVSSFIFLRFFAPAILSPNLFQLTPHHTDPQTSRTLTLISKTVQTLGSLSKSKSASFKESYMATFYEFFNEQKYADAVKNFLDLISSSGRRDPKSVEQPIVLKEGFMIKRAQGRKRFGMKNFKKRWFRLTNHEFTYHKSKGDQPLYSIPIENILAVEKLEEESFKMKNVSVGPPSLSFGLRPGQVFSALFPYLALGSPFPTHCTPGFSESSCYSGCSPGAGEFVSESRIKAATLSVPGVTGVGWNLPEGGA

SEQ ID NO: 781905 - protein, 252 aa, Homo sapiens [sequence omitted]

SEQ ID NO: 781906 - protein, 847 aa, Homo sapiens
MHTSKGWKRVCDVAGNKHFYAADDVCRFYFLGEAKNLPSYPGPSKMRDCYCTVNLDQEEVFRTKIVEKSLCPFYGEDFYCEIPRSFRHLSFYIFDRDVFRRDSIIGKVAIQKEDLQKYHNRDTWFQLQHVDADSEVQGKVHLELRLSEVITDTGVVCHKLATRIVECQGLPIVNGQCDPYATVTLAGPFRSEAKKTKVKRKTNNPQFDEVFYFEVTRPCSYSKKSHFDFEEEDVDKLEIRVDLWNASNLKFGDEFLGELRIPLKVLRQSSSYEAWYFLQPRDNGSKSLKPDDLGSLRLNVVYTEDHVFSSDYYSPLRDLLLKSADVEPVSASAAHILGEVCREKQEAAVPLVRLFLHYGRVVPFISAIASAEVKRTQDPNTIFRGNSLASKCIDETMKLAGMHYLHVTLKPAIEEICQSHKPCEIDPVKLKDGENLENNMENLRQYVDRVFHAITESGVSCPTVMCDIFFSLREAAAKRFQDDPDVRYTAVSSFIFLRFFAPAILSPNLFQLTPHHTDPQTSRTLTLISKTVQTLGSLSKSKSASFKESYMATFYEFFNEQKYADAVKNFLDLISSSGRRDPKSVEQPIVLKEGFMIKRAQGRKRFGMKNFKKRWFRLTNHEFTYHKSKGDQPLYSIPIENILAVEKLEEESFKMKNMFQVIQPERALYIQANNCVEAKDWIDILTKVSQCNQKRLTVYHPSAYLSGHWLCCRAPSDSAPGCSPCTGGLPANIQLDIDGDRETERIYSLFNLYMSKLEKMQEACGSKSVYDGPEQEEYSTFVIDDPQETYKTLKQVIAGVGALEQEHAQYKRDKFKKTKYGSQEHPIGDKSFQNYIRQQSETSTHSI

SEQ ID NO: 781907 - protein, 445 aa, Homo sapiens
LQAGGPSAALGAPAPPLLLLGLSCPGSARAWGEARRARTRSMAVEDEGLRVFQSVKIKIGEAKNLPSYPGPSKMRDCYCTVNLDQEEVFRTKIVEKSLCPFYGEDFYCEIPRSFRHLSFYIFDRDVFRRDSIIGKVAIQKEDLQKYHNRDTWFQLQHVDADSEVQGKVHLELRLSEVITDTGVVCHKLATRIVECQGLPIVNGQCDPYATVTLAGPFRSEAKKTKVKRKTNNPQFDEVFYFEVTRPCSYSKKSHFDFEEEDVDKLEIRVDLWNASNLKFGDEFLGELRIPLKVLRQSSSYEAWYFLQPRDNGSKSLKPDDLGSLRLNVVYTEDHVFSSDYYSPLRDLLLKSADVEPVSASAAHILGEVCREKQEAAVPLVRLFLHYGRVVPFISAIASAEVKRTQDPNTIFRGNSLASKCIDETMKLAGMHYLHVTLKPAIEEKL

SEQ ID NO: 781908 - protein, 99 aa, Homo sapiens
EDGQVPGGLLHVLSHETSCALSWAHLCPQMFQVIQPERALYIQANNCVEAKDWIDILTKVSQCNQKRLTVYHPSAYLSGHWLCCRAPSDSAPGCSPCTG

SEQ ID NO: 781909 - protein, 78 aa, Homo sapiens
VDCCGDKQNQSRRAARKLCVPKSHHTGREALPMFFCLFVFVCFVLFFETKSHSCAPGWSAMARSRLTATSTSQVQPPE

SEQ ID NO: 781910 - protein, 223 aa, Homo sapiens
KDESLCLSSSCEGAAGTPRPAGEPAWVTQFVQKKEERDLVNRLKAEQARRKQREERLQQLQHRVQLKYAAKRLRQEEEERENLLRLSREMLETGPEAERPEQLESGEEELVLAEYESDEEKKVASGVDEDEDDLEEEHITKIYHCSRTHSQLAQFVHEVKKSPFGKDVRLVSLGSRQNLCVNEDVRSLGSVQLINNRCVDMQRSRHGSHQDHGVAAGGLERVR

SEQ ID NO: 781911 - protein, 35 aa, Homo sapiens
MSAGVVRSSLPKEGLHSLKMASLPGYTSEGILEAA

SEQ ID NO: 781912 - protein, 51 aa, Homo sapiens
VLKLHEGAFGAENTGVSRAMLRGAGLSCCFREWVSQKACGEGGSWCPYSPP

SEQ ID NO: 781913 - protein, 73 aa, Homo sapiens
GLEGKVLATDLIWLPSLDSLFWDTHWAPNLKLLDVKREPGCYSERGLVSSSTKSWCHIANLSKVESGIAIYIY

SEQ ID NO: 781914 - protein, 126 aa, Homo sapiens
MHLSQLLACALLLTLLSLRPSEAKPGAPPKVPRTPPAEELAEPQAAGGGQKKGDKAPGGGGANLKGDRSRLLRDLRVDTKSRAAWARLLQEHPNARKYKGANKKGLSKGCFGLKLDRIGSMSGLGC

SEQ ID NO: 781915 - protein, 277 aa, Homo sapiens
TLPLASGRRRGGRRIRGRRERRRRGAIPPRRSIRRPQPSGGRPRGLGEGTAASVCAALGREGRQAADTAAFPAGGAQPWRRRGLPGHPQVTPGGGRATSSAGDTRAQGPPGQRRAGAEPRGSAGPDGALPRQPRAGRPRVAAWGGGLQRGPRAESPPGGQAMTFGRSGAASVVLNVGGARYSLSRELLKDFPLRRVSRLHGCRSERDVLEVCDDYDRERNEYFFDRHSEAFGFILLYVRGHGKLRFAPRMCELSFYNEMIYWGLEGAHLEYCCQRRL

SEQ ID NO: 781916 - protein, 106 aa, Homo sapiens
GLRGRFSSGLRPAGLEKLRLCASVSFSVKWEVQRGANVCAALGTPGSGSTGQWRWQQGICTCALAGPALGSSTCGSRLRIPTGFSGRGSARCTRWGLGAPPGRVSL

SEQ ID NO: 781917 - protein, 547 aa, Homo sapiens
MDIIFGRNRKEQLEPVRAKVTGKIPAWLQGTLLRNGPGMHTVGESRYNHWFDGLALLHSFTIRDGEVYYRSKYLRSDTYNTNIEANRIVVSEFGTMAYPDPCKNIFSKAFSYLSHTIPDFTDNCLINIMKCGEDFYATSETNYIRKINPQTLETLEKVDYRKYVAVNLATSHPHYDEAGNVLNMGTSIVEKGKTKYVIFKIPATVPEGKKQGKSPWKHTEVFCSIPSRSLLSPSYYHSFGVTENYVIFLEQPFRLDILKMATAYIRRMSWASCLAFHREEKTYIHIIDQRTRQPVQTKFYTGAMVVFHHVNAYEEDGCIVFDVIAYEDNSLYQLFYLANLNQDFKENSRLTSVPTLRRFAVPLHVDKNAEVGTNLIKVASTTATALKEEDGQVYCQPEFLYEGLELPRVNYAHNGKQYRYVFATGVQWSPIPTKIIKYDILTKSSLKWREDDCWPAEPLFVPAPGAKDEDDGVILSAIVSTDPQKLPFLLILDAKSFTELARASVDVDMHMDLHGLFITDMDWDTKKQAASEEQRDRASDCHGAPLT

SEQ ID NO: 781918 - protein, 159 aa, Homo sapiens
RPWTAAALQSLSPAVLGCLTFYTPPSASDILYLRSKKPSMNKDLGPSRLIILVGNGPTSSPHLHPALPLPHWTLAVNWDFSRAEPHLTEVKCPTAAGPSTWLSGDVGIGEVSIGSDSSVDASTVVSVMTSGLIAAWINSGVDTQEGQILPQDFSNPSSR

SEQ ID NO: 781919 - protein, 88 aa, Homo sapiens
ERCPGGAGSGTELTRASGHILVTAATEGPVQNHGTCRSHGPRRGGEPPKQDETNPGRHTRSCTLSIAPRLPSGLMYWSTDTGKQKSEP

SEQ ID NO: 781920 - protein, 102 aa, Homo sapiens
SLVIYAIFPSGGVVADKIQFSVEMCFDNQVSLGFSPSQQLPGAEVELQLQAAPGSLCALRAVDESVLLLRPDRELSNRSVYGMFPFWYGHYPYQVAEYDQCP

SEQ ID NO: 781921 - protein, 187 aa, Homo sapiens
MGKDQELLEAARTGNVALVEKLLSGRKGGILGGGSGPLPLSNLLSIWRGPNVNCTDSSGNTALHHAALNGHSGHQSPTYFSYEASTNVARQQRVSSYSAWLAWHSAMWQRDALVSRTSSPGHDQPMNITARQGHSMDATTAPKIHDDITHGTLDRAHAQWTRPRTPRRTIAECTRRQPGATHEEKSA

SEQ ID NO: 781922 - protein, 108 aa, Homo sapiens
SAMVRSQLTAVSTSAGEQESSVIHGQICSHCGHLFLPATFVPTSLPPVPIARPPTSASCHCQQVPCAGTWLRLLIHYGRSVTGAIMCSRAHSLRFRSRVARQQNNLLA

SEQ ID NO: 781923 - protein, 69 aa, Homo sapiens
ELGTPKAGISSRWALPQLGSSLRAVNSPSPPRSRSISSGRCSFFSNSHMKCTKTKGLSKDEMKECTQRT

SEQ ID NO: 781924 - protein, 51 aa, Homo sapiens
SSVPPRVTQRRTSPRIRRSPSEVPCLTGPVALPRGHLANLSRFLPQSSLEA

SEQ ID NO: 781925 - protein, 31 aa, Homo sapiens
MVAVGRAGITPTECRHVLGTLISLSHGIFLV

SEQ ID NO: 781926 - protein, 177 aa, Homo sapiens
MGKLRPRRGLRPPPSFPSEVAPEPRPGPASFHPALLCARRVLTWRGRTGDQVGVTVTDTWTVLVVFGVGSPRGRVYHSHWELSSPIKASGLKHPEQELRRVKETVTCRLQLVPAPHPVQRPKRLSLPITQHQTLPRDLSLHLLPGSIQPSSLTRSSWATGQHTGAVPSPGRGHTWLG

SEQ ID NO: 781927 - protein, 234 aa, Homo sapiens
MGKLRPRRGLRPPPSFPSEVAPEPRPGPASFHPALLCARRVLTWRGRTGDQVGVTVTDTWTVLVVFGVGSPREDINTGDSQDCWGQMWQVDVSPPPSKPSVLQRTPAECPPTPSGTADSVRSRHLHTHTHTHTHICTHMSCEGQPLELLSEWPDVEVPSVRGTLAHQDSGLVKRDQSDSILTWVGGTHQGTYKAECLVGLKIAVSSSLDTNYYFTEYRCAYGGISEQSPQTCPD

SEQ ID NO: 781928 - protein, 226 aa, Homo sapiens
MGKLRPRRGLRPPPSFPSEVAPEPRPGPASFHPALLCARRVLTWRGRTGDQVGVTVTDTWTVLVVFGVGSPRVWGPKILFSFLSPPLGFGFHDSWTRLLRDLQREGTRSGLRDTQSGLQEDTEARLKREEAGNPARGHCALGLVTGPQDSGRMGELNWQGGAHCHYGPLESRQEEINHMDIRGGRESCLEKVRGQQPAEAEPGGFGAGASVVEGHPPGSNSSHRRF

SEQ ID NO: 781929 - protein, 147 aa, Homo sapiens
MGKLRPRRGLRPPPSFPSEVAPEPRPGPASFHPALLCARRVLTWRGRTGDQVGVTVTDTWTVLVVFGVGSPRDLQREGTRSGLRDTQSGLQEDTEARLKREEAGNPARGHCALGLVTGPQDSGRMGKSVSQPLGTFFTHQSLRAEAS

SEQ ID NO: 781930 - protein, 111 aa, Homo sapiens
MIAHISAAVGSYAETLSTIQIASRVLRMKKKKTKYTSSSSGGESSCEEGRMRRPTQLRPFHTRATVDPDFPIAHLSSDPDYSSSSEQSCDTVIYIGPNGTALSDKELTDNE

SEQ ID NO: 781931 - protein, 44 aa, Homo sapiens
MKDGTMGKLKSSGNVTVINGFNPPLPHTSSLELLTLSFLLYPPI

SEQ ID NO: 781932 - protein, 58 aa, Homo sapiens
MGGTPPTKRRINRGRRKTINTTTRKRAVNTTRKLCLAEKKIRPTERRLQQYTESVEKK

SEQ ID NO: 781933 - protein, 121 aa, Homo sapiens
HPPQETLAPSLQPSPLEQKPPGVYWGQRTANDLSQAQIIYAATNIWKWQFPANCRQFRVICQDAICPIAPGSLQRPARLQPLQTAGWQVSRQPQSLLSRSLNTSLTQNQVAGLQSWSLNPA

SEQ ID NO: 781934 - protein, 201 aa, Homo sapiens
LAPQAMQPPLAGASAATLLTTAQPPSVTLCGCAKPQEGDTHTRIGAGVGGLALPSSVPPMACSCSPAAVPAGLSPPIITHCGPVPSEPHSGYFNLHCQFFRGPSSFRIKARGCMQTLYHFLVLTLSVSLVTPQTQSQAWRPHEARAAGLGHSLTPWLASVVAWTVTGGHQGQLPCDTHALSAEKRRALVSESQHHERGARG

SEQ ID NO: 781935 - protein, 81 aa, Homo sapiens
AAAYYYYCSNSSFYRCTGTCGKEYRWLVTIKLLVVIQDTGRVSREDIWYNIIYSQWFKEDNVEEVVDLALRRSLLTDLVNR

SEQ ID NO: 781936 - protein, 38 aa, Homo sapiens
GVILGLLSLQSTLLGDLPSHGFQYHVCAEDSQISISSI

SEQ ID NO: 781937 - protein, 84 aa, Homo sapiens
LGVSQEHWEGRLGLSSAFSVPLWLEWQSHTEARGSDEATPRQPEETAPRNGQPVPCPLCLFLYPGLATPTSKGPAREAAPRPPL

SEQ ID NO: 781938 - protein, 382 aa, Homo sapiens
MRRETPPQPRKKKQNSTQEYNINTPSGESREVVENKARHTAPPPGHKIAATQTRNLTTRTTLELTRRPNTPTDNNIQPTAAPHRVQDSEHTQTDATPTPPATPRTTAGSTRNRITHDDTRHEPIDNQAAIAETNDPNQAHAKTTNAENGSKNNNTVKRNTTEGQQITRRGHDPRHKHSSITAAAQPPTLHGELTPTPARKNEHSQKDAHRDATSSSDTTQHTADTRTPDTPHDTHQPPRPTDAPRPRTDDTQHATSPTGAATQSARGRSSEGRQDGRERAEAAGAAARQTQTHGERPRTDRAGTARDDRTSRESTSKAEVAKQSARRQRTSSGHTNTDTAQHRKNTDNRRKRERERRTERQSQQADTKTTEKTRNINNEDIE

SEQ ID NO: 781939 - protein, 105 aa, Homo sapiens
SATALVPLILAVLPPMSGFWAGMVILAPRGLHLSFSRRLMQTCSYSGNRVAKEGRSLHSLLKYRPEPVKCHFCHTMLANINQRLSGEIQESWPLKRKWSTQLSSL

SEQ ID NO: 781940 - protein, 41 aa, Homo sapiens
KDSPGGDSSCQHLSTAIEYSDFFIRMLPVKVMAWNLTDLDW

SEQ ID NO: 781941 - protein, 136 aa, Homo sapiens
ENKRGKRQPSPDSCVAGPRLYGTQWTDRPSHALQSSRRFQGRKQTVNKQKARQRTCWVQTEPCSEAGEARRPPRAQTLSAQPSQPQRGGPAVPGPNMLPSQPADICTGLESIPYGSCPSWNLRMPPSLEIGSQRMS

SEQ ID NO: 781942 - protein, 116 aa, Homo sapiens
SSFYFFLNILFKQNLHESSREGKMMLLTLGEFCFPKSFSKLYNNSTNIFETIIISGFREHYCIEHCFTITLLLRRHKCFHFADETGKLRKDQLGCISCKISRWQRLYQGSRLRALT

SEQ ID NO: 781943 - protein, 210 aa, Homo sapiens
VCAVRAELPPGTRLGRARHVEAARLRLLEAKRLQGRVRGVDTRDFGGKGGRCGKDRRGRTESIGNRRDPAPMPLFCWALFEPGRERPGGPTSAPPSGALEGTAGTITSNEWSSPTSPEGSTASGGSQALDKPIDNDAEGVWSPDIEQSFQEALAIYPPCGRRKIILSDEGKMYGRNELIARYIKLRTGKTLTRKQVSSHIQVLARRKARE

SEQ ID NO: 781944 - protein, 208 aa, Homo sapiens
MAGLWRRALATCDCGERRGAGCCGGRCWPPPGAGSHCSWSVVAPRPADPATALLPSLWGHIVRGPIGPGKLGECQYGRGRYNGRKPDACPDGQRRAAITVRCESADRDTHLPVSRYAAVGGRTTGRPVAEQTGAGGNAGRSVNAPETAKSPEDPINTGDFNRPTLNGVPPEMVDNTRTRLVRCFNSGQFHNPTKPQGMDPPVGLFKFQ

SEQ ID NO: 781945 - protein, 263 aa, Homo sapiens
PNSTPESSVSSPGKSLLGKVKEAVKVAIDAEYRHIDCAYFYENQHEVGEAIQEKIQEKAVMREDLFIVSKVWPTFFERPLVRKAFEKTLKDLKLSYLDVYLIHWPQGFKAMEELVDEGLVKALGVSNFNHFQIERLLNKPGLKYKPVTNQVECHPYLTQEKLIQYCHSKGITVTAYSPLGSPDRPWAKPEDPSLLEDPKIKEIAAKHKKTTAQVLIRFHIQRNVTVIPKSMTPAHIVENIQVFDFYMSDEEMATITQFKKRGA

SEQ ID NO: 781946 - protein, 130 aa, Homo sapiens
MRNAIIQGLFYGSLTFGIWTALLFIYLHHNHVSSWQKKSQEPLSAWSPGKKVHQQIIYGSEQIPKPHVIVKRTDEDKAKSMLGTDFNHTNPELHKELLKYGFNVIISRSLGIEREVPDTRSKICTVTLLP

SEQ ID NO: 781947 - protein, 169 aa, Homo sapiens
MRNAIIQGLFYGSLTFGIWTALLFIYLHHNHVSSWQKKSQEPLSAWSPGKKVHQQIIYGSEQIPKPHVIVKRTDEDKAKSMLGTDFNHTNPELHKELLKYGFNVIISRSLGIEREVPDTRSKMDVLVFLDSTVEVNRVWLEPLLHAIAKDPKMVVCALIDVLDDRTLEV

SEQ ID NO: 781948 - protein, 173 aa, Homo sapiens
MRNAIIQGLFYGSLTFGIWTALLFIYLHHNHVSSWQKKSQEPLSAWSPGKKVHQQIIYGSEQIPKPHVIVKRTDEDKAKSMLGTDFNHTNPELHKELLKYGFNVIISRSLGIEREVPDTRSKMCLQKHYPGRLPTASIVICFYNEECNALFQTMSSVTNLTPHYFLEEIILVD

SEQ ID NO: 781949 - protein, 90 aa, Homo sapiens
RGGAGDAPGWAVGSTPCLSSPRVCRSPPAEACRRRPDWGNEQAPGLEFLSGPVWGLPAEAPVPDPATSRVRWEGVAGSGRPLDARVMALA

SEQ ID NO: 781950 - protein, 115 aa, Homo sapiens
RVYAGSAQFSVEKKYSGNTFRMGRGTQPPRPAGTPGAPSPQGLAPASTSSVSFPDEARRVLSSVGVLCLIQPRDIVPGTSPPVATPGQGDGDGQGGDNSSTSNNNPGVSPKPSLH

SEQ ID NO: 781951 - protein, 43 aa, Homo sapiens
LEVAVGVKGEACSECSSECVCTEAQAVVLEAVAGLCLRACAGS

SEQ ID NO: 781952 - protein, 53 aa, Homo sapiens
SEHTHQHAKSEPCSVCNDSPSPAAQRGGDTASPLTLTTQWDPLWQGLAFINHA

SEQ ID NO: 781953 - protein, 129 aa, Homo sapiens
SSASLPASWHRPLIPEMLRANQEKKSVSQVSLSKKFFSLKNNFFSCCSSSPHFTKKGEDRQNPDPPIVFLQCPLGNDVTLVWLPPPMGEVVGDNSMGHAEHEGSLHEAGTPIHLLVPSLCLGSDAFPSC

SEQ ID NO: 781954 - protein, 205 aa, Homo sapiens
MIPIRVLMEDFQLSVKDSKPTVVSDNVFHIQWSLISFKYTSYNVSEKAGSVSVTVQRTGNLNQYAIVLCRTEQGTASSSSRVSSQPGQQDYVEYAGQVQFDEREDTKSCTIVINDDDVFENVESFTVELSMPAYALLGEFTQAKVIINDTEDEPTLEFDKKIYWVNESAGFLFAPIERKGDASSIVSAIGYTVPKSAMGSSLHAH

SEQ ID NO: 781955 - protein, 39 aa, Homo sapiens
QTASSKGLVSKIYKELKQVSKKKSNNPINNWTNDINRHF

SEQ ID NO: 781956 - protein, 108 aa, Homo sapiens
VCVCVCMCVYIHNGIIFSSKRNELLIHATTWCSVKGPYVQNDPQMVKELKNQRRRQTNPICGYGMIYWGNLQTGMSYWVAAIQVDLHTTTRQTQYVLYLGESIHALEG

SEQ ID NO: 781957 - protein, 116 aa, Homo sapiens
WAPVAAQPGAAGRLLAAVSARSRPRSLETFGEACGGWEEKLSSLGTNPPAAPAPLLRLPVRPSCSLPPSPAPAPAGRLPPRVAEPGPRAPQPRPPGLSACAQVAGASRPGARGLTA

SEQ ID NO: 781958 - protein, 58 aa, Homo sapiens
MAKDHGDFIASWAFHIHEVGIGALNQAFLLVFPLLLFWRGMKEILCKRHVLVGRSSPP

SEQ ID NO: 781959 - protein, 77 aa, Homo sapiens
GGALRTPFLSPFGCLRPDPSRNFFLSDWQAKPPWRLAWTHGGRCFWGMMPIPEPGGSRLRALFGNGTLGPLRQQPSL

SEQ ID NO: 781960 - protein, 93 aa, Homo sapiens
EIHDHMEQLKELTSTVRKEHMTLEKGLHLAKEFSDKCKALTQWIAEYQEILHVPEEPKMELYEKKAQLSKYKVVCLLIDRCMQRSHRDQMGGR

SEQ ID NO: 781961 - protein, 99 aa, Homo sapiens
MRAVLTMKDTRLTAIWKLKYHVIARTALGSVTNEEPSEPVAHFLEPAQRLRPREMAQQERIPGSGRPGENELGIREVAGRILCPEPADSNPSAWSQEPH

SEQ ID NO: 781962 - protein, 283 aa, Homo sapiens
RSSSSGLTGRSDSLEFSLEEMTGKLPPISQFPPHSVPGFMIPHPPNPSCPPNTSHSRKPSHSRARESLPLLPSAKPLPPLQKYVDFSVFCPNCYPTVAHTCPPHYPTLILYLHCSSAIHYKPSICQCSSPRTLSGNSLIDHPSPPSSPTGQRLGPRTLPCDSLIRSPVPPPSPPCQRSGPRTLFCDYPVCPPTPPPSPTCKCCRPRAVSWDSSTYGLYPSSLAYFFLVPCTPSPQPPACIPNQTLWFTSLILENGFPGPGAVLEQFRMARTVDSQQSDLVDKG

SEQ ID NO: 781963 - protein, 170 aa, Homo sapiens
LWFICLPAYVKVCHSKVRALKTAYDVLKKMQSKKMDPPDEVCYRILMQLCGQYDQPVLAVRVLFEMQKAGIDPNAITYGYYNKAVLESTWPSRSRSGYFLWTKVRNVVLGVTQFKRALKKHAHLSQTTLSGGQSDLGYNSLSKDEVRRGDTSTEDIQEEKDKKGSDCSSC

SEQ ID NO: 781964 - protein, 147 aa, Homo sapiens
MYMVTSVFRYNFELVFQVCYRILMQLCGQYDQPVLAVRVLFEMQKAGIDPNAITYGYYNKAVLESTWPSRSRSGYFLWTKVRNVVLGVTQFKRALKKHAHLSQTTLSGGQSDLGYNSLSKDEVRRGDTSTEDIQEEKDKKGSDCSSC

SEQ ID NO: 781965 - protein, 110 aa, Homo sapiens
IPAQDVLFSVVEEERGRDCGKIQSLMLTAPGAAPGEVCAKLELFLRLGLGKQAKACTSELPPDLLPEPSAGLPSSLHRDGPGADAEPSVDELLVFEQLIVDGRREHLQEE

SEQ ID NO: 781966 - protein, 134 aa, Homo sapiens
GGRAGIAFLRLDSAQPLGEMSSESAGAWWACHTWLVGQGRGITQIQKKPLEGSKGNAGVRSGRAHVELASGNQGHSLEAEQAGGGFQGIHAFCLCDLSKRAVGLSLPRVSQARGRAPVSSAVLVPISHQGAGGW

SEQ ID NO: 781967 - protein, 71 aa, Homo sapiens
IKWICFNHVVVPVSGLGHRVRLSNSRALAMISALCTFLYFYILPYSQSTQTLHEVQPSPEPPMINLFPQTF

SEQ ID NO: 781968 - protein, 354 aa, Homo sapiens
VTLVFPLGHLYNDLGLGYSQLQLFPLAVEAFLQALPLCWVPGEQATVLRNLGMAHNALGNYQEAREFHQKAADLHGSVGQRWEQGRSFGSLAFALSQLGDHKAARDNYLHALQAARDSGDMKGQWQACEGLGAAAARLGQYDQALKYYKEALAQCQKEPDSVRERLVAKLADTVRTRLAQVGLVQTHTLTSAPGRLQAPGGASQAEGTPAKAGSSTAGVQHRSSSGWEDEEFEEGHQKKKEERSANVPVRAGPGRPELCFLPGTVNHSHHLASSCPTFTKHTPCRGTVLGKASIYSPGPRAHLPFVGPGPPRAEYPSILVPNGPQANRSSRWPRESLSRSRQRRPMESGICTIV

SEQ ID NO: 781969 - protein, 261 aa, Homo sapiens
VTLVFPLGHLYNDLGLGYSQLQLFPLAVEAFLQALPLCWVPGEQATVLRNLGMAHNALGNYQEAREFHQKAADLHGSVGQRWEQGRSFGSLAFALSQLGDHKAARDNYLHALQAARDSGDMKGQWQACEGLGAAAARLGQYDQALKYYKEALAQCQKEPDSVRERLVAKLADTVRTRLAQVGLVQTHTLTSAPGRLQAPGGASQAEGTPAKAGSSTAGVQHRSSSGWEDEEFEEGHQKKKEERSANVPVRAGPGRPERELM

SEQ ID NO: 781970 - protein, 71 aa, Homo sapiens
LELAAAGGQEEDPELGACPGPGGGGGCSWSGVLGALLAATSQRSKCLRLRVPNSGSGGHGGGWGRVTCGNC

SEQ ID NO: 781971 - protein, 71 aa, Homo sapiens; identical to SEQ ID NO: 781970

SEQ ID NO: 781972 - protein, 73 aa, Homo sapiens
WSGLGPARASVWECSMLQPRVRGAGGSPAGGLTEQVPAVEDDCPPACTARALPSSPVWCLHSSPSLWQPWFRL

SEQ ID NO: 781973 - protein, 110 aa, Homo sapiens
MESTEKCEAIITHFNGKYIKTPPGVPAPSDPLLCKFADGGPKKRQNQGKFVQNGRAWPRNADMGVMALTYDPTTALQNGFYPAPYNITPNRMLAQSALSPYLSSPVSSYQ

SEQ ID NO: 781974 - protein, 88 aa, Homo sapiens
KAVMMAVIDDCYTLSPGCTATLGNFAKATFDAISKTYSYLTPDLWKETVFTKSPYQEFTDHLVKTHTRVSVQRTQAPAVAQPGEIYSR

SEQ ID NO: 781975 - protein, 184 aa, Homo sapiens
KAGRQEGWGEHWGAMERAEEPVVYQKLLPWEPSLESEEEVEEEETSEALVLNPRRHQDSSRNKAGGLPGTWVRVVAALLLLAVGCSLAVRQLQNQGRSTGSLGSVAPPPGGHSHGPGVYHHGAIISPAGAMFWGLFHDSSSGNSTALTSGPAQTLAPGLGLPAALPTLHLLHARFGRLPWPRLL

SEQ ID NO: 781976 - protein, 216 aa, Homo sapiens
KAGRQEGWGEHWGAMERAEEPVVYQKLLPWEPSLESEEEVEEEETSEALVLNPRRHQDSSRNKAGGLPGTWVRVVAALLLLAVGCSLAVRQLQNQGRSTGSLGSVAPPPGGHSHGPGVYHHGAIISPAGRELLVAGGNVVDAGVGAALCLAVVHPHATGLGAMFWGLFHDSSSGNSTALTSGPAQTLAPGLGLPAALPTLHLLHARFGRLPWPRLL

SEQ ID NO: 781977 - protein, 105 aa, Homo sapiens
MGCYVQQTTMAHIYLCNKPAHPVHVPWNLKVEEKNKIICSRFLSQNNPELPTVQDLSSTLCRIRNHLPALNHLISSKQILKHHWWQLTVLIIKLNEDVIHLGQGM

SEQ ID NO: 781978 - protein, 78 aa, Homo sapiens
LRHVLAVFHFHHLLLPIINQTASLISQVHPASEHLTTAFKARPTSAASALRACEGAYTFHAPAPTTWPPFNSSDPARL

SEQ ID NO: 781979 - protein, 80 aa, Homo sapiens
LRFHRKPVYFEYGKTQRYSDKEKYIYVYEGEHSLYGHVLSQELLICSDLPASASQSAGITGMSHHARPKDDFLNAQQDKA

SEQ ID NO: 781980 - protein, 106 aa, Homo sapiens
GEHDYFCPGFLQKKFINRMMVNSCCLLTLQMSKEWGAPSPWGRQTGRASTSNPTRTWQGAGSAPSPQDWTKARPTHQRDRTSPQSCAPRAKPLLPHCHVLRLMTSE

SEQ ID NO: 781981 - protein, 50 aa, Homo sapiens
RCYCYHSRAASRSHCLWALAPTTPSQQAWVLRLQWTTFNWKACFLPNRTS

SEQ ID NO: 781982 - protein, 65 aa, Homo sapiens
MTLSPEPDIPADDWECEMSIQERSTDQALATCKDGESRTGQGTSKKRKRQATQDETHPEARLSCA

SEQ ID NO: 781983 - protein, 78 aa, Homo sapiens
MLHAKPWLFLTPSSPPYSTCLRTDIPSRVSQLGGHQVRDSFCLVVSTERRGAISYPYTPHITDNGFHTPPHAALARAY

SEQ ID NO: 781984 - protein, 120 aa, Homo sapiens
VKQSGCHMCVHVCTQGVLCVHGHRHLCVRGYLCVYIHMGTCVYVGGVSMHVPMYNMWVPVCVCREVSGMCPERLCASLTSEGSAWAHPPGVLLMPSSLENAGLQVCSPKLSGELGGSEDI

SEQ ID NO: 781985 - protein, 90 aa, Homo sapiens
PNANSVAWNTQCEDMLCFSGGGNLNIKASIFPVHWQKLQGFVVGYNGSKIFCLHVFISAVEVPQVTGSTCPLSALARPVRPGKPGPWLVL

SEQ ID NO: 781986 - protein, 77 aa, Homo sapiens
LTQVSLPDFCLQRDCVRVVKVSLFSSFLNLDQQSHIRKNGFFGFDFSASDLEESSVIFSLPGRVTVCLCLCLLGPLL

SEQ ID NO: 781987 - protein, 56 aa, Homo sapiens
MPFTNREVFQDHTQFYDTDISSSCHSVAGPIPLCLQGPCAMWKTQVFCLCQDLLPA

SEQ ID NO: 781988 - protein, 82 aa, Homo sapiens
RARSKSSGKEPVRKSKLMHRLTRRAIGPQWPVRMWLGTQEKSSIEACAAFVGRSSILTHSCIRRQVLLSSPLILIRGFEFLD

SEQ ID NO: 781989 - protein, 109 aa, Homo sapiens
PQGLLGQAGASLFNSRQEEELGIGTPLSKALPTNDTSQQGNPLGTKRQWATTGLQKDFSPPHSWRGSGTRYLTGWEAGAASFNPKPWVFFAIRDSCRVQSAALTPPTPK

SEQ ID NO: 781990 - protein, 88 aa, Homo sapiens
MFCGPFLSKGTRNYFWVIIWSFKFRSQSPFSKMGWDPKPSGPMMSWHQPRHLPQRVQSISLHVPHVDRAVRPFTGHTPLCTAVIRAIC

SEQ ID NO: 781991 - protein, 77 aa, Homo sapiens
DGQWRLEYCVQGCWQLEFGLLIIDVKRITVCRGPGSPGADLPKGQILVVTATSLSSLLEAPFSGSAACQACGESSCC

SEQ ID NO: 781992 - protein, 152 aa, Homo sapiens
NNIPANFTRSGNKLNHQKDTRQATFLFRRGLKVQAQLNTEQLLDDVVAKRTRQWRTSTTNGGILTVSIDNPGAVQCPVTQKPRLTRTAVPSFLTKREQSDVKKVPKGVPLQFDINSVGKQTGMTLNERFGILKEQRATLTYNKGGSRFVTVG

SEQ ID NO: 781993 - protein, 117 aa, Homo sapiens [sequence omitted]

SEQ ID NO: 781994 - protein, 96 aa, Homo sapiens [sequence omitted]

SEQ ID NO: 781995 - protein, 100 aa, Homo sapiens
SVLSAAYLFVKSLNSASYLYEVMERPRHGRLAWHGTQDKTTMVTSFTNGGLLRGWLVYQHDDSETTEDDIPFVATRQGESSGDVAWEEVRGVFRVAISRE

SEQ ID NO: 781996 - protein, 73 aa, Homo sapiens
SSVKAGTGHLDVASEAIGQRQSSAAKPRRSGKESESLGPEFQGSGSGCQEEDTEGKKLSSPLEVTDLVLSLKN

SEQ ID NO: 781997 - protein, 181 aa, Homo sapiens
PPPPGSPPGPNHPLLLTQPPSPVPRAFSSLGSCPHLPAAMSNKSPRFRCNCVPCTSCTLHPSPPRAMAQLGHTISVDPCSQPSVLQLQSTPGPATLHADLPGEVWPPKKPTPSHGYTAPPIPLDPPLAAILLTPCMPPPQARSAQGSLTHVALICAQGPLSICACCAPCLECPSSSPAGVQ

SEQ ID NO: 781998 - protein, 119 aa, Homo sapiens
MLGRAGIPRQHPLPSGRPPMQRRRDARCVSALPPGAPVAGGGILHWTGAPQSGGLPQCCSRGLRVSTLCRVPSLPLPVCLHRRADLGPPFTEEGLLDLSHRDPLLCVTFSESWRDYASS

SEQ ID NO: 781999 - protein, 155 aa, Homo sapiens
DATECDIRREGWLYYKQILTKKGKAEDRDDMLGWIRAIRENSRAEGEDPGCANQALISKKLNDYRKVSHSSGPKADSSPKGSRGLGGLKSEFLKQSAARGLRTQDLPAGSKDDSAAAPKTPWGINIIKKNKKAAPRAFRVRLEECQPATENQRVP

SEQ ID NO: 782000 - protein, 146 aa, Homo sapiens
PRQLNTKDFLRTLSVQATELVLEVAVTTLTPGYPGMCPTPQSPSPGIKSFLPISSSFLQSPLSRITGSEAGLLDRWCFFFSFFPEMEFHSVWPRLECSGAVSAHCNLRLPGSSDSPASASQVAGTTGARHHTQLIFIFFRRDGVSP

SEQ ID NO: 782001 - protein, 71 aa, Homo sapiens
SRKLPALDAKIHTPSGAKGEPFGLGREAARGGVITPAQRRAGQRSPTLPIGQEDSRTKARHQLAKDWSFRS

SEQ ID NO: 782002 - protein, 122 aa, Homo sapiens [sequence omitted]

SEQ ID NO: 782003 - protein, 185 aa, Homo sapiens
MNTLFRFWSFFLRDHFNKEMYEELKQLALEDAKEGYRYGLECLFRYYSYGLEKKFRLDIFKDFQEETVKDYEAGQLYGLEKFWAFLKYSKAKNLDIDPKLQEYLGKFRRLEDFRVDPPMGEEGNHKRHSVVAGGGGGEGRKRCPSQSSSRPAAMISQPPTPPTGQPVREDAKWTSQHSNTQTLGK

SEQ ID NO: 782004 - protein, 631 aa, Homo sapiens
MNFNTILEEILIKRSQQKKKTSPLNYKERLFVLTKSMLTYYEGRAEKKYRKGFIDVSKIKCVEIVKNDDGVIPCQNKYPFQVVHDANTLYIFAPSPQSRDLWVKKLKEEIKNNNNIMIKYHPKFWTDGSYQCCRQTEKLAPGCEKYNLFESSIRKALPPAPETKKRRPPPPIPLEEEDNSEEIVVAMYDFQAAEGHDLRLERGQEYLILEKNDVHWWRARDKYGNEGYIPSNYVTGKKSNNLDQYEWYCRNMNRSKAEQLLRSEDKEGGFMVRDSSQPGLYTVSLYTKFGGEGSSGFRHYHIKETTTSPKKYYLAEKHAFGSIPEIIEYHKHNAAGLVTRLRYPVSVKGKNAPTTAGFSYEKWEINPSELTFMRELGSGLFGVVRLGKWRAQYKVAIKAIREGAMCEEDFIEEAKVMMKLTHPKLVQLYGVCTQQKPIYIVTEFMERGCLLNFLRQRQGHFSRDVLLSMCQDVCEGMEYLERNSFIHRDLAARNCLVSEAGVVKVSDFGMARYVLDDQYTSSSGAKFPVKWCPPEVFNYSRFSSKSDVWSFGVLMWEVFTEGRMPFEKYTNYEVVTMVTRGHRLYQPKLASNYVYEVMLRCWQEKPEGRPSFEDLLRTIDELVECEETFGR

SEQ ID NO: 782005 - protein, 631 aa, Homo sapiens; identical to SEQ ID NO: 782004

SEQ ID NO: 782006 - protein, 122 aa, Homo sapiens [sequence omitted]

SEQ ID NO: 782007 - protein, 361 aa, Homo sapiens [sequence omitted]

SEQ ID NO: 782008 - protein, 178 aa, Homo sapiens
MNFNTILEEILIKRSQQKKKTSPLNYKERLFVLTKSMLTYYEGRAEKKYRKGFIDVSKIKCVEIVKNDDGVIPCQNKYPFQVVHDANTLYIFAPSPQSRDLWVKKLKEGIRKALPPAPETKKRRPPPPIPLEEEDNSEEIVVAMYDFQAAEGHDLRLERGQEYLILEKNDVLIANFCS

SEQ ID NO: 782009 - protein, 76 aa, Homo sapiens
YPGRGSHTGDGDARECKGMSGARCDRRLPGTGDSSASAARVVGITGTHHHTQLIGVLGVRGVSPCWPGWSRTPGLK

SEQ ID NO: 782010 - protein, 101 aa, Homo sapiens
TGVGSGILGLCAHRERLCAPQLGHVLETPCTQSPAFSTDRALQQGSGRTRTYAEGQRPVGLQGSGGVEIWACASLSVGPSPLPTGRTSQLGKLFIQPNYVC

SEQ ID NO: 782011 - protein, 34 aa, Homo sapiens
  misc_feature (24)..(24): Xaa can be any naturally occurring amino acid
VEGDLEWGPSNSVEPSPSTRFRRXGPLPPSPSGL

SEQ ID NO: 782012 - protein, 325 aa, Homo sapiens
FFRPGSRCPAGQDVGRKGQSCPVRRSEAGAVALRAPPRLGTKIQVQGCDIVNQDSMHKSRGGIAVALTRNKKSGRQNKWEDVSGAPRVMGRYTRRQQRWQQNGMRGVAREGRTTQRSHTNTHQSDRDATKRHAQTMADNKDETHETKRCSMRRDPDAADSSRLRAAETHTSNKNIRRGQKRQDTSNGGHTLGTSEREKDSGRRTDINEATVAAGETHTSSRGEEGERPQLPHGRDQQATGASTWTPKAAVPPVTRLRNQAGMHNRRLHDERLRGPRRTHANVVPTNNYGRQTDWRQIRGSDGGPSINKRRHTRDEWGNHAIDRKR

SEQ ID NO: 782013 - protein, 30 aa, Homo sapiens
MSLCLSMITAGRMELRLQEELPSGEAGGER

SEQ ID NO: 782014 - protein, 106 aa, Homo sapiens
PLTLTGLLLLTWLKPLTPLPWGPVSVGEKALETFCLFWLAQPGALATGMVTPSPLILYPLFLWAEARIILEPFAVQSVSSVWVSHKTISFLPLKAPQGGGVHKCRL

SEQ ID NO: 782015 - protein, 158 aa, Homo sapiens
MTNTKGKRRGTRYMFSRPFRKHGVVPLATYMQIYKKGDIVDIKGMGTVRKGMPRKCYHGKTGGVYSVTQHAVGIVVNKQGKILAKRINVRIEHIKHSKSRDSFLKRMKENDQKKKEAKEKGTWVQLKHQPAPPREAHFVRTNGKEPELLEPTPYEFMP

SEQ ID NO: 782016 - protein, 68 aa, Homo sapiens
ADPRFIDPPPKTCFLNVEKSQALITSPAHEGTLGAYTLQSHRCQAARGLGSPALTPLCPGCGTGFQKG

SEQ ID NO: 782017 - protein, 58 aa, Homo sapiens
MHKHYVPPPSFPNIPLLPESSSQPCRTLALDSTFRKQCRHPVLQQWSIITKLKQGIQK

SEQ ID NO: 782018 - protein, 35 aa, Homo sapiens
TLLWEEASKMAPNDLSFLVYMPYVNPLPLDVGRHL

SEQ ID NO: 782019 - protein, 67 aa, Homo sapiens
KSWVSRGPGDPSASSGSGLGTTEGIQPKGRVPGRRLYCVDYVDGVDDVDDVQHHKRRAEAQSGALDS

SEQ ID NO: 782020 - protein, 120 aa, Homo sapiens
CHDQKKLFNIDFYCFNNIFFSVAYFIVRIRYITYKTYKIYVDQLSGFQTTVGYSSHFGRVESYTRIFDAVCVPDNRALPCCLRINWILLASFKFSIYPVTCNLLSCLPFLFLVFSIEPST

SEQ ID NO: 782021 - protein, 61 aa, Homo sapiens
MHTQTHGKTSTQTPGKTQRHTDTHMRTHPLPHLCLPALPHAGSASEPLVLPFHAGLSCPPL

SEQ ID NO: 782022 - protein, 91 aa, Homo sapiens
MHPPGVPVASQKKRRRRGDDHLKGPPLHLPGRRVECWVGSGSTLGCLLVPVTPGRSSMQPQAMASAPAQLREHFPSPHRFSCPSLSASNSC

SEQ ID NO: 782023 - protein, 172 aa, Homo sapiens
MEAAETGAFGLVVGLPLRPPRHQQNTYFFSLAALVCRSSSVQLSGCSLNAYWVPGPQRDVSHCPVLRAPTQIPSSQGPQTHPSAGLTTVWSFCLMDGVLSYATGFLGHRSDKSPGICLVAGEMKEDEKAGREGGSKGLREEGGGWRRKRNIARCSHLVAASGTHGNLEGGSL

SEQ ID NO: 782024 - protein, 143 aa, Homo sapiens
FILLCPKAYFFGKVEQFMLVYTRDGKLCLVGQIGPAACVCMACEQRKVFTYLNGWKKYLKNAIFGHKKLYEIKISMSVSFYWDTATAIPLAFVCNSCRVDYLRHVVWSPQTGTVSILAFYRKYLDPGLDKSWLVVMLCEMCTL

SEQ ID NO: 782025 - protein, 104 aa, Homo sapiens
HPFRGTGKPSAQRHPCDVIVTVRFRGGAREGGSLGCADPSQPPLQVTPAPENPHPGPQISQPHDRQTSRPGPLNAPGPGDDRPPHPLTSSASQISKPTLSRGGN

SEQ ID NO: 782026 - protein, 104 aa, Homo sapiens; identical to SEQ ID NO: 782025

SEQ ID NO: 782027 - protein, 139 aa, Homo sapiens
HPFRGTGKPSAQRHPCDVIVTVRFRGGAREGGSLGCADPSQPPLQETFGAQDMSGMRRYEVALEAEEEIYWGCFYFFPWLRMWRRERSSAHPGEQKLEPLRGLMSCLSSGLGPTPQRSGRGFPRRSPTAAAQPASALKI

SEQ ID NO: 782028 - protein, 104 aa, Homo sapiens; identical to SEQ ID NO: 782025

SEQ ID NO: 782029 - protein, 104 aa, Homo sapiens; identical to SEQ ID NO: 782025

SEQ ID NO: 782030 - protein, 37 aa, Homo sapiens
VWALKLTIMHVHAWADSLRPNQTWVRIPAPPPVNTKS

SEQ ID NO: 782031 - protein, 69 aa, Homo sapiens
VNLVRFLSISSTVYDSTCASRPHLCRGFYGEAKSLACCGFSGEDSDWQTVAPVPSSLICLLPVMNTCIL

SEQ ID NO: 782032 - protein, 112 aa, Homo sapiens
MFSIDNILAARPRCKDSVLPVAHSAAAPVVFPALHGDSLYGASGGASSDYGAFYPRPVAPGGAGLPAAVSGSRLGYNNYFYGQLHVQAAPVGPACCGAVPPLGAQQCSCVPT

SEQ ID NO: 782033 - protein, 62 aa, Homo sapiens
VGGRKCMSFTGAIIAESERDKEEGVGKKRGKGRGMEVDRLNQDMPKTFLWKYHLEEPLRLCR

SEQ ID NO: 782034 - protein, 109 aa, Homo sapiens
PARWRPQRPGTCPSRAQLGTAQQPARPRGPPPTPAPTPLAGKAIPRPRFQDIKLSSWTWSLRPSKAGSAHSDWRQQGLPTVPLHPSAGNPGQHRLPGAGGNRASKEKPH

SEQ ID NO: 782035 - protein, 32 aa, Homo sapiens
APAAACLPGPGGGGEESRPLTHPAARGSRLAW

SEQ ID NO: 782036 - protein, 121 aa, Homo sapiens
GLTLEHPSISDRSTNTFKVAPPWPPFFHQEAEAQSEKELPKAPRQFTEPLGVTLNPSNPTSLFSATTINHQGSTATGAQPGVPTGSPKAGRWGWRPCQVHGAQSCLGSLAVRAGHQAVSVG

SEQ ID NO: 782037 - protein, 67 aa, Homo sapiens
SEQAHPAWHVKEFGTAGKIKPRKQISSQQKQELSKNESSSTMKRVALLTAGLLIQEHSTAGSWAELL

SEQ ID NO: 782038 - protein, 106 aa, Homo sapiens
PHTKSTVRERCLGHTHTTLTCHTCTRTYPHVGWHPHISSPYTHTHTHTHTHTYMPMQLATRYAHKGIYPYICNPHTPIHAHTCAYMLTHAHTPATCTHTQECTLID

SEQ ID NO: 782039 - protein, 103 aa, Homo sapiens
AAPPQHVTSQIMASTDFQNLHSRCAASTEKHCVCMFQFCAMFLACHKWKHVQDKSLKTSSTHWRPCHLGKESEEGAWALPVTSRLSLAPSGIWSSQITLLHVS

SEQ ID NO: 782040 - protein, 100 aa, Homo sapiens
MCTNRAPAYRSSCGGREPCVGLLFPGLQQATPWVTSGKALSGPRWPVDKEGRPPLACLPASRGHCEVGGRPGRGATSLCGCQGTLLLLIKSKVANAFPKS

SEQ ID NO: 782041 - protein, 126 aa, Homo sapiens [sequence omitted]

SEQ ID NO: 782042 - protein, 521 aa, Homo sapiens
VSGQELQAGMAGGMSAECPEPGPGGLQGQSPGPGRQCPPPITPTSWSLPPWRAYVAAAVLCYINLLNYMNWFIIAGVLLDIQEVFQISDNHAGLLQTVFVSCLLLSAPVFGYLGDRHSRKATMSFGILLWSGAGLSSSFISPRYSWLFFLSRGIVGTGSASYSTIAPTVLGDLFVRDQRTRVLAVFYIFIPVGSGLGYVLGSAVTMLTGNWRWALRVMPCLEAVALILLILLVPDPPRGAAETQGEGAVGGFRSSWCEDVRYLGKNWSFVWSTLGVTAMAFVTGALGFWAPKFLLEARVVHGLQPPCFQEPCSNPDSLIFGALTIMTGVIGVILGAEASRRYKKVIPGAEPLICASSLLATAPCLYLALVLAPTTLLASYVFLGLGELLLSCNWAVVADILLSVVVPRCRGTAEALQITVGHILGDAGSPYLTGLISSVLRARRPDSYLQRFRSLQQSFLCCAFVIALGGGCFLLTALYLERDETRAWQPVTGTPDSNDVDSNDLERQGLLSGAGASTEEP

SEQ ID NO: 782043 - protein, 475 aa, Homo sapiens
VSGQELQAGMAGGMSAECPEPGPGGLQGQSPGPGRQCPPPITPTSWSLPPWRAYVAAAVLCYINLLNYMNWFIIAGVLLDIQEVFQISDNHAGLLQTVFWLFFLSRGIVGTGSASYSTIAPTVLGDLFVRDQRTRVLAVFYIFIPVGSGLGYVLGSAVTMLTGNWRWALRVMPCLEAVALILLILLVPDPPRGAAETQGEGAVGGFRSSWCEDVRYLGKNWSFVWSTLGVTAMAFVTGALGFWAPKFLLEARVVHGLQPPCFQEPCSNPDSLIFGALTIMTGVIGVILGAEASRRYKKVIPGAEPLICASSLLATAPCLYLALVLAPTTLLASYVFLGLGELLLSCNWAVVADILLSVVVPRCRGTAEALQITVGHILGDAGSPYLTGLISSVLRARRPDSYLQRFRSLQQSFLCCAFVIALGGGCFLLTALYLERDETRAWQPVTGTPDSNDVDSNDLERQGLLSGAGASTEEP

SEQ ID NO: 782044 - protein, 117 aa, Homo sapiens
CVCSRGALSPTAGVAGMGAAAERERGPGLTGGCLGRPWGHLVLPCGHPWLRGVPGLPTTGLWSLERRSKRHTVRPPGSSPPPLSTLDPPSSVPWTILPSTMAAPNCDPHTPMYHPLR

SEQ ID NO: 782045 - protein, 107 aa, Homo sapiens
FLPLLTGKEEGRCRKGQGVGRQGKWMTTSLPPCSSKPSSHLSMAQAFLPCLAHLPNPMLCTCWVLCLDAEGWGILLQCSAPTAPAPPVKSSPGPPRRVQCHLPLAPV

SEQ ID NO: 782046 - protein, 119 aa, Homo sapiens
MWDMPALRCQVDCGLHMAEPQKRGWGCRFRGEAVAETTGVAEIAQQMYRGGEPGLLQQSQLFPSTCKAGSLPTRKCQGQRKLAGLGTWEMRLAAPGTWLKGWAMESPAVRQPQLTRPVM

SEQ ID NO: 782047 - protein, 201 aa, Homo sapiens
GASSQDPGLREPPGRRKRPRKPSLRSFPAVYVVLRVLGQGHGDPATPQAWGKDSGVAGLLSARGVESSCRPLPPHARKAPSHGVRRRPSVNRSRGSATPSGSVGRGSLPLGRPRRVAGHGLGRPSGPRRCAGRRSQPRPRAPGGGGGGGGGDCPGRRRGAGAARRRGGRAAAEGPGRASGGRRARRGKWEARPTGAGAAQP

SEQ ID NO: 782048 - protein, 491 aa, Homo sapiens
MTTDDTEVPAMTLAPGHAALETQTLSAETSSRASTPAGPIPEAETRGAKRISPARETRSFTKTSPNFMVLIATSVETSAASGSPEGAGMTTVQTITGSDPREAIFDTLCTDDISEEAKTLTMDILTLAHTSTEAKGLSSESSASSDGPHPVITPSRASESSASSDGPHPVITPSRASESSASSDGPHPVITPSRASESSASSDGPHPVITPSRASESSASSDGPHPVITPSRASESSASSDGPHPVITPSWSPGSDVTLLAEALVTVTNIEVINCSITEIETTTSSIPGASDTDLIPTEGVKASSTSDPPALPDSTNTKPHITEVTASAETLSTAGTTESAAPDATIGTPLPTNSTIEREVTAPGATTLSGALAITGNPLEETSALSVETPSYVKVSGAAPVSIEAGSAVGKTTSFAGSSASSYSPLEAALKNFTPSETLTTDIATKGPFPTSRAPLPSVPPTTTNSSRRTNSILAKTTTSAKTTMKPLLY

SEQ ID NO: 782049 - protein, 174 aa, Homo sapiens [sequence omitted]

SEQ ID NO: 782050 - protein, 106 aa, Homo sapiens
GLLGNPHWFLANSEKFFSLWKTGSTQPSSRCPVHFHHFPSRSFLAFPLVGCNPAHGGNVTPPFPSSAWPFPSSQDSTLTMETSSFPELSASVPTSPAPWLFHLLKP

SEQ ID NO: 782051 - protein, 121 aa, Homo sapiens
HKSKNSQLSAASQNFGEKHSLISLQSKEYGASKFNYQLNLLAPQSPSNTRNTVGGFQEPEKLDPVEPHQQDTVVLKVAAEKPGRALSDPREKKAGMENRPQIYPLMPQMSGPVTAARATGS

SEQ ID NO: 782052 - protein, 122 aa, Homo sapiens
MLGMEWKMARCLLRLSMPLYAIHKPLTELSVHAFERFLQERPGPKERFSCAGLCQGASAGATLGGQSPGSSSNRKDLSSLCSTCRTKHAGLPHSFPAEKHSPHPPQSPAMPGTQTSQRWGSL

SEQ ID NO: 782053 - protein, 83 aa, Homo sapiens
LTVLEVIKSKTGLTGLFGICSSLDGVDYKATIKACIPSEGSREESVLCLFQLLEAAYIPLHLATSSRFLLSASHPFPGLIDSL

SEQ ID NO: 782054 - protein, 93 aa, Homo sapiens
WWVNPGGLFHVQPALASNGLSEPICCSTLPILWALSTEADERWLPYPSWLCELSSVETITPHLQTPSLGRAIFPLLRDKKAKEIESSPQGTSL

SEQ ID NO: 782055 - protein, 276 aa, Homo sapiens
IFQIAHFHKNFPRKHQSFQLPRNTPIWEKRWLELHLKDGLYLSRVASAQGSPRDGDRELGGNATRLPGNRLRAPVRKRSEAEARASKELRFPALGPYYYLPPRLGEPRLMDRAVQFEPAQQPSIGRAGKKASYCREEASALQVPRKFRPSRLARFPCTAVLRSQASARQECLPRGRARWSGTCRQPPGTPEDAEVGPRAAASMPGWELGRPRAAAVLSQRVPWSLRTEKAEAVPRDRPRATGSGLHLDGCGPHRDGRAGPFGRYLRVASPRARPQA

SEQ ID NO: 782056 - protein, 298 aa, Homo sapiens
RAVGAPRPACECGTSFTHSDSEKPNVCPKRAAPPVGASAPQSPHFYLGPTKNREPGGLGICAPQPSPLQTEPRGGPKASNCPGLAPAETALGLTRSTAPGTPQTSALTPSNTQGALRGKWGSMPEGLLTWWHQIQSEGTRMEDGGSYPQGERGPGRRGPPLLQQDSNDDTEDVSLFDAEEETTNRPRKAKIRHPVASFFHLFFRVSAIIVYLLCELLSSSFITCMVTIILLLSCDFWAVKNVTGRLMVGLRWWNHIDEDGKSHWVFESRKESSQENKTVSEAESRIFWLGLIGCPVLV

SEQ ID NO: 782057 - protein, 172 aa, Homo sapiens
RAVGAPRPACECGTSFTHSDSEKPNVCPKRAAPPVGASAPQSPHFYLGPTKNREPGGLGICAPQPSPLQTEPRGGPKASNCPGLAPAETALGLTRSTAPGTPQTSALTPSNTQGALRGKWGSMPEGLLTWWHQIQSEGTRMEDGGSYPQGERGPGRRGPRGEGSATLGGGGR

SEQ ID NO: 782058 - protein, 124 aa, Homo sapiens [sequence omitted]

SEQ ID NO: 782059 - protein, 231 aa, Homo sapiens
EVICENGSYSLDPENPTKSCKSRGSNLRVHFKNTRETAQAIKGMHIRKATKYLKDVTLQKQCVPFRRYNGGVGRCAQAKQWGWTQGRWPKKSAEFLLHMLKNAESNAELKGLDVDSLVIEHIQVNKAPKMRRRTYRAHGRINPYMSSPCHIEMILTEKEQIVPKPEEEVAQKKKVEELKLGKMVCIPCIVIPVLLWIYKKFLEPYIYPLVSPFVSRIWPKKAIQESNDTNK

SEQ ID NO: 782060 - protein, 55 aa, Homo sapiens
LTPHVTLLSSCLLSVMPLLITILSLNTLISIISMKCELKSSNNLTPSPQVHGTCL

SEQ ID NO: 782061 - protein, 118 aa, Homo sapiens
AQVIPPTSASHSAGITGMSQRIWPPYFQLLAQCNGSISGTANERDAQDKKQDLALSLRMEFSGPIMAHYSLKLPGSSNPTMSAFPVAGTTGWSTVAQPLLTAASTCQAQAMLLPQPPE

SEQ ID NO: 782062 - protein, 106 aa, Homo sapiens
ARNTAPGSQACPSSCPSRHEISLKPQGSQETPGSGPTHPLSDATKWREAKGLLRRCKLSAWPVLSLLRKVLRHQAPVAWGYSCTRTDSPLESCPITGRTVGSGNMK

SEQ ID NO: 782063 - protein, 110 aa, Homo sapiens
SPWGQPMGPRGGKTPGFGDLKSECGSRGMICPRAIPDGEGSSRLPGGRPGGSSRRPGWALEGILAPVSAGVMRFFCASVSRVSWVTSWVWENPGGVHILSPASWEKDIGR

SEQ ID NO: 782064 - protein, 56 aa, Homo sapiens
MAHCSLNPLGPSDLPASASQVVGTTSMCYHAWLIFYSSSSFFLRRSLTLLPRLDCC

SEQ ID NO: 782065 - protein, 34 aa, Homo sapiens
MASELKPGPDSPLLLHLWPVSPLLPLALQLSLPC

SEQ ID NO: 782066 - protein, 96 aa, Homo sapiens
SHWAIGSSRYNLREGNHMKLLLHFSGGESFKTLNDSTRKQSPGKGSVLFGGGNGDCCSGLLKCVWQGIRKDGVAEKEPQKSYRGCCRSLAKSQTMN

SEQ ID NO: 782067 - protein, 37 aa, Homo sapiens
DSSTSLMSRPNVAHFPLGIGAFQPVYLEAVVLCNICL

SEQ ID NO: 782068 - protein, 127 aa, Homo sapiens
LWPGVGAGRGCVPASEGWAGLVAVLLAGGQTGGKNFPCPRVWLSLSFLSSSLTMGFCQTSCRYSPFNNLLKKPPLERTAQASHWFPHKGHSSFRSSGLGRGQGCSGDDVGDGASFGVQQLSCSWSVL

SEQ ID NO: 782069 - protein, 34 aa, Homo sapiens
MSQEQDLLQSQYKSQTAPVSGTEVIEGSIDLNRK

SEQ ID NO: 782070 - protein, 120 aa, Homo sapiens
RDGSSAQASTWRAVSVDFACGNRIPPPWFPQDMSWGPHLAYKGQASFLDARGTFRPAQPEQLVPMPCHFCEGPRGLEEPRSPRRPSRHCLKRVLGALLGSWSPTRCGTPSCWNSTERLSC

SEQ ID NO: 782071 - protein, 120 aa, Homo sapiens; identical to SEQ ID NO: 782070

SEQ ID NO: 782072 - protein, 41 aa, Homo sapiens
MCLLGNKWGTSWTLVHKQTYKNWSQKVHEIMLKEELLLEAL

SEQ ID NO: 782073 - protein, 131 aa, Homo sapiens
HTDQSPWPNTPPGRKKMGEGSGIGSWEPHQGSSPQGTSREGSPLTTAPARFLNLACLPKQPGTSLPAQSEGLYKLWPFSAISSLEVSTEPSKDTQPEGTQASGSTHHPSPEPECQSPSSARGKGRGMRTKP

SEQ ID NO: 782074 - protein, 117 aa, Homo sapiens
LECSGSISAHCNLCLPGSSYSPASASTVAGTTGSCCHARLTFCILVETRFHHVTQARLQLLSSGNPPSLASQSAGITGVSHCTQPTTLIFYTLPFWSKFAQSASLKCVMTNTCKHIL

SEQ ID NO: 782075 - protein, 100 aa, Homo sapiens
VASTRVEASAREEGEPPAWLVDTAWAGGLDVACERQIGGKKDPCCQLPLHQAVGPGHSSGHQPLPTSPHLWTLPSSSLSLSSVLSPGLSSLTPFSPSSSP

SEQ ID NO: 782076 - protein, 32 aa, Homo sapiens
MRKLGLRSPAKAMCPGVGQGGQLAAEPISRCP

SEQ ID NO: 782077 - protein, 242 aa, Homo sapiens
MAQGERGNEEPQHKPGTEQSPHRTHRSPHTQAKVTNTERAETRRHATQQRNTTTPEHQTARPQTRRRHRRQPRHTRHNNPTETQTPNQRPPQKENNRKQQKERKENKYKQRHKNNRRDQHCTERVIDTETEREMKRQKTRQHTKARSTEEARKRRKGEKKKTEIRTKRTTTEVRQKETNVTKTKQHEQHQDTQESEATGGQAYTVRSATEDMKKEQRASGAIRPGAKAPASRRKQKKRQKKT

SEQ ID NO: 782078 - protein, 171 aa, Homo sapiens
AEESRHSMDTPSSVHAPTCPGPSGTVSLVTCVQTQRQVALWEGSVSGLSPVFRHSVRSPCRKAASLGCHLCSDTASGRLAGRQRLWAVTCFQTQRQVIPEPHTCTWAAAPLGGPSLPMGTLCGALSWAWLLPEKCLPPSESACVHKAQKNRRPQWLPRKLRVSSASAPELR

SEQ ID NO: 782079 - protein, 136 aa, Homo sapiens
AYPKYTFHDREEVVKANIRDPLQIIKIIRENEHLGFLYMIPAVPRSSIEYDTYNLKVVSYENINKNDYYTISQRAVTHIYNEDIEFIEIDRWEQEYLYHRELTKIPIFSLFRKWKAFSVWRKNVRSKKITGCQKSL

SEQ ID NO: 782080 - protein, 102 aa, Homo sapiens [sequence omitted]

SEQ ID NO: 782081 - protein, 81 aa, Homo sapiens
LVCMMSTRTHSTCAHTAHAHTHADTAHTAHVHTACVHTHSTCTHSTYTAHVRTQHMRMLTQHVRTNSTYIAHTHMQHMHTH

SEQ ID NO: 782082 - protein, 170 aa, Homo sapiens
MDGESEVDFSSNSITPLWRRRSIPQPHQLLGRSKPRPQSYQSPNGLLITDFPVEDGGTLSAAQIPAQVPTASDSRTVHRSPLLLGAQRRAVANGGTASPEYRAASPRLRRPKSPKLPKAVPGGSPKSPANGAVTLPAPPPPPVLRPPRTPNAPAPCTPEEDLTGLTASPV

SEQ ID NO: 782083 - protein, 107 aa, Homo sapiens
FCPLTSPCLPVFFLGAVRCWEEESSWACAGVPAAFLSPDVLAQRQEPCAWHCTCPSLPIWENQPSLLAFHSAESPPGYCEHIPGAPHIGQEGPQACGSHTIIKAEAC

SEQ ID NO: 782084 - protein, 145 aa, Homo sapiens
MVTKVRLNSHMQLQAPSTLHSTSIWLQEPLSSHRRPHAGWICSLHSHSNSRIQLPARALRLKPYNVWHSMALPLGAQVDKSRGPSKASQAQKHRAHICCQGSEFNSQTEVAGGNVQRAQTATHKTGKREGCQVTGEPANNGQLKN

SEQ ID NO: 782085 - protein, 40 aa, Homo sapiens
MFVTAEGRVRADDPCKCTAGLWLENRGLGWGRGHEAAFVY

SEQ ID NO: 782086 - protein, 138 aa, Homo sapiens [sequence omitted]

SEQ ID NO: 782087 - protein, 104 aa, Homo sapiens
MLGMKRKEGTGGARWRRQMRRRGHRTEEEKAPERLGIREHIYIFEGETRGETNRTYLSPKEEMVFQEESPNEDCRFPVGIFPHRASGSVTGLGRVCVCVCVCVC

SEQ ID NO: 782088 - protein, 76 aa, Homo sapiens
TVMFGAGFQQVHVRRSQTVPLPTPHPQSGFSELHPLADSAQHAPQAGTDLPWDCKDISTSFSFVPSGLIPLQSSKD

SEQ ID NO: 782089 - protein, 111 aa, Homo sapiens
MLNIFHVLIGHRCIFFCKVSVPIFCPLKKVDCPIKLKSFCTAKETTIRVNRQSTEWKKIFAIYPSDKGRISRIYKELKQIYKKKTNNPIKKQTKNMNRHFSKEDIYAANRH

SEQ ID NO: 782090 - protein, 322 aa, Homo sapiens
RRVCSAEGAGSPGPALDPRWLPTEAHLLEAHRLLLQSVLCDRPRESIQLHFRLSMASQLQVFSPPSVSSSAFCSAKKLKIEPSGWDVSGQSSNDKYYTHSKTLPATQGQANSSHQVANFNIPAYDQGLLLPAPAVEHIVVTAADSSGSAATSTFQSSQTLTHRSNVSLLEPYQKCGLKRKSEEVDSNGSVQIIEEHPPLMLQNRTVVGAAATTTTVTTKSSSSSGEGDYQLVQHEILCSMTNSYEVLEFLGRGTFGQVAKCWKRSTKEIVAIKILKNHPSYARQGQIEVSILSRLSSENADEYNFVRSYECFQHKNHTCLVF

SEQ ID NO: 782091 - protein, 355 aa, Homo sapiens
METEAQGGLECNGKISAHCNLRLPGSSDSPASASRVAGTTGDGITLALTCGGSGTLNQQTTEYSTSDVRPSFIYGVFLLLQLVQLDVREITRGIFNTCVDLRRIIRTLVRRPSQEPAPPGLETNCHRVTDLSYLHAVSSSAHVQHAFQKTKIYTYQLNVGIKCSSAFHFTQDSIQSPSQGCPGCFPKLLRAISSWLLALLGPLDAPGSKPGPRRTQPWTVPGPSTWSLPSVSIPKVHLRRETYLDPWVKLRLPEVDPDSSPVSPSNANSICMPFERRTKPGAALKSPEARLHNSSGNGHKAAQPTRRANTRTATADWRTNGQGTRVSRQPMCKHATQTHDKTQQDSINDHATRTT

SEQ ID NO: 782092 - protein, 71 aa, Homo sapiens
SPRRWLIGLQTHNGQDFSLHLPLKPELHLPHLTKCTTSHLCTQVGILEHHLQHSISHSCHNQFSNSLASLS

SEQ ID NO: 782093 - protein, 151 aa, Homo sapiens
QLAILSLHHSQTLKGNKVKTKKLHPKDKGQQHQKIKEHLPSQMRRNQHKNSDNSKTQSVFLPPNDLTSSPAMVVNQIKAAEMTEFRIWMVRKLNEIQEKVETQSRENSKMIQELKDDTAILRKNQTELLELKNLLREFHNTTRSINNNRSI

SEQ ID NO: 782094 - protein, 71 aa, Homo sapiens
RQGLWEALLTHNMVAGCRLEEVDNAYGHYEAFSTLAPKAWLSVELAEPCVPEPGLPPVFANFIQLLSAQWW

SEQ ID NO: 782095 - protein, 105 aa, Homo sapiens
MSGALDVLQMKEDVLKFLAAGTHLRGANLDFQMEQYIYKRKSDVIYIINLKRTWEKLLLAARAIVAIENPADVSVISSRNTGQRAKLTFAAATGATPIAGRFTPE

SEQ ID NO: 782096 - protein, 593 aa, Homo sapiens
MGTARIAPGLALLLCCPVLSSAYALVDADDVMTKEEQIFLLHRAQAQCEKRLKEVLQRPASIMESDKGWTSASTSGKPRKDKASGKLYPESEEDKEAPTGSRYRGRPCLPEWDHILCWPLGAPGEVVAVPCPDYIYDFNHKGHAYRRCDRNGSWELVPGHNRTWANYSECVKFLTNETREREVFDRLGMIYTVGYSVSLASLTVAVLILAYFRRLHCTRNYIHMHLFLSFMLRAVSIFVKDAVLYSGATLDEAERLTEEELRAIAQAPPPPATAAAGYAGCRVAVTFFLYFLATNYYWILVEGLYLHSLIFMAFFSEKKYLWGFTVFGWGLPAVFVAVWVSVRATLANTGCWDLSSGNKKWIIQVPILASIVLNFILFINIVRVLATKLRETNAGRCDTRQQYRKLLKSTLVLMPLFGVHYIVFMATPYTEVSGTLWQVQMHYEMLFNSFQGFFVAIIYCFCNGEVQAEIKKSWSRWTLALDFKRKARSGSSSYSYGPMVSHTSVTNVGPRVGLGLPLSPRLLPTATTNGHPQLPGHAKPGTPALETLETTPPAMAAPKDDGFLNGSCSGLDEEASGPERPPALLQEEWETVM

SEQ ID NO: 782097 - protein, 593 aa, Homo sapiens; identical to SEQ ID NO: 782096

SEQ ID NO: 782098 - protein, 573 aa, Homo sapiens
MGTARIAPGLALLLCCPVLSSAYALVDADDVMTKEEQIFLLHRAQAQCEKRLKEVLQRPASIMESDKGWTSASTSGKPRKDKASGKLYPESEEDKEAPTGSRYRGRPCLPEWDHILCWPLGAPGEVVAVPCPDYIYDFNHKGHAYRRCDRNGSWELVPGHNRTWANYSECVKFLTNETREREVFDRLGMIYTVGYSVSLASLTVAVLILAYFRRLHCTRNYIHMHLFLSFMLRAVSIFVKDAVLYSGATLDEAERLTEEELRAIAQAPPPPATAAAGYAGCRVAVTFFLYFLATNYYWILVEGLYLHSLIFMAFFSEKKYLWGFTVFGWGAGTVSSGNKKWIIQVPILASIVLNFILFINIVRVLATKLRETNAGRCDTRQQYRKLLKSTLVLMPLFGVHYIVFMATPYTEVSGTLWQVQMHYEMLFNSFQGFFVAIIYCFCNGEVQAEIKKSWSRWTLALDFKRKARSGSSSYSYGPMVSHTSVTNVGPRVGLGLPLSPRLLPTATTNGHPQLPGHAKPGTPALETLETTPPAMAAPKDDGFLNGSCSGLDEEASGPERPPALLQEEWETVM

SEQ ID NO: 782099 - protein, 575 aa, Homo sapiens
MGTARIAPGLALLLCCPVLSSAYALVDADDVMTKEEQIFLLHRAQAQCEKRLKEVLQRPASIMESDKGWTSASTSGKPRKDKASGKLYPESEEDKEAPTGSRYRGRPCLPEWDHILCWPLGAPGEVVAVPCPDYIYDFNHKGHAYRRCDRNGSWELVPGHNRTWANYSECVKFLTNETREREVFDRLGMIYTVGYSVSLASLTVAVLILAYFRRLHCTRNYIHMHLFLSFMLRAVSIFVKDAVLYSGATLDEAERLTEEELRAIAQAPPPPATAAAGYAGCRVAVTFFLYFLATNYYWILVEGLYLHSLIFMAFFSEKKYLWGFTVFGWGAGTVSSGNKKWIIQVPILASIVLNFILFINIVRVLATKLRETNAGRCDTRQQYRKLLKSTLVLMPLFGVHYIVFMATPYTEVSGTLWQVQMHYEMLFNSFQGFFVAIIYCFCNGEVQAEIKKSWSRWTLALDFKRKARSGSSSYSYGPMVSHTSVTNVGPRVGLGLPLSPRLLPTATTNGHPQLPGHAKTMGSSTAPAQAWTRRPLGLSGHLPCYRKSGRQSCDQALGAGPADIVDGQMDQKMGG

SEQ ID NO: 782100 - protein, 593 aa, Homo sapiens; identical to SEQ ID NO: 782096

SEQ ID NO: 782101 - protein, 542 aa, Homo sapiens
MTKEEQIFLLHRAQAQCEKRLKEVLQRPASIMESDKGWTSASTSGKPRKDKASGKLYPESEEDKEAPTGSRYRGRPCLPEWDHILCWPLGAPGEVVAVPCPDYIYDFNHKGHAYRRCDRNGSWELVPGHNRTWANYSECVKFLTNETREREVFDRLGMIYTVGYSVSLASLTVAVLILAYFRRLHCTRNYIHMHLFLSFMLRAVSIFVKDAVLYSGATLDEAERLTEEELRAIAQAPPPPATAAAGYAGCRVAVTFFLYFLATNYYWILVEGLYLHSLIFMAFFSEKKYLWGFTVFGWGAGDLSSGNKKWIIQVPILASIVLNFILFINIVRVLATKLRETNAGRCDTRQQYRKLLKSTLVLMPLFGVHYIVFMATPYTEVSGTLWQVQMHYEMLFNSFQGFFVAIIYCFCNGEVQAEIKKSWSRWTLALDFKRKARSGSSSYSYGPMVSHTSVTNVGPRVGLGLPLSPRLLPTATTNGHPQLPGHAKPGTPALETLETTPPAMAAPKDDGFLNGSCSGLDEEASGPERPPALLQEEWETVM

SEQ ID NO: 782102 - protein, 521 aa, Homo sapiens
MGTARIAPGLALLLCCPVLSSAYALVDADDVMTKEEQIFLLHRAQAQCEKRLKEVLQRPASIMESDKGWTSASTSGKPRKDKASGKLYPESEEDKEAPTGSRYRGRPCLPEWDHILCWPLGAPGEVVAVPCPDYIYDFNHKGHAYRRCDRNGSWELVPGHNRTWANYSECVKFLTNETREREVFDRLGMIYTVGYSVSLASLTVAVLILAYFRRLHCTRNYIHMHLFLSFMLRAVSIFVKDAVLYSGATLDEAERLTEEELRAIAQAPPPPATAAAGYAGCRVAVTFFLYFLATNYYWILVEGLYLHSLIFMAFFSEKKYLWGFTVFGWGAGTVSSGNKKWIIQVPILASIVLNFILFINIVRVLATKLRETNAGRCDTRQQYRKLLKSTLVLMPLFGVHYIVFMATPYTEVSGTLWQVQMHYEMLFNSFQGFFVAIIYCFCNGEVQAEIKKSWSRWTLALDFKRKARSGSSSYSYGPMVSHTSVTNVGPRVGLGLPLSPRLLPTATTNGHPQRWGLDLLT

SEQ ID NO: 782103 - protein, 109 aa, Homo sapiens
KVLASGSLGTSTGTSPALITLQRSHPVLPSRDTGRVGHRLLGCCLLRGLCLLLSLLWGLGVLHWKRAKPLVHVGTREEAALERRPPEGRQRSRPCLQGPRPAWLSPSAS

SEQ ID NO: 782104 - protein, 160 aa, Homo sapiens
MASLWLLSCFSLVGAAFGCGVPAIHPVLSGLSRIVNGEDAVPGSWPWQVSLQDKTGFHFCGGSLISEDWVVTAAHCGVRTSDVVVAGEFDQGSDEENIQVLKIAKVFKNPKFSILTVNNDITLLKLATPARFSQTVSAVCLPSADDDFPAGTLCATTGWG

SEQ ID NO: 782105 - protein, 35 aa, Homo sapiens
MQKVLWIFKSQLSVQACSTELSVLMARLAVFPLVN

SEQ ID NO: 782106 - protein, 198 aa, Homo sapiens
TLSCSGRGSDTRIQVVCVPRSLTPRSKQQASRSADSLRGPSPVLRAARAEWKLLCSSGAPRAAVPAPPQGGPRAEEILDFRSEFFTPSGFFPRLRVCFSSLPPQDTVRPPPLAPPRSLHHAPFALPPDLIFGFAGSPLSGRGLSSPARNRAEGGAAGRPEASGRGLESPGCFFFFGDGVSLLLLRLECNGAIPESPSS

SEQ ID NO: 782107 - protein, 174 aa, Homo sapiens
MENLESRLKNAPYFRCEKGTDSIPLCRKCETCVLAWKIFSTKEWFCRINDISQRRFLVGILKQLNSLYLLHYFQNILQTTQGKDFIYNRSRINLSKKEGKVVKSSLNQMLDKTVEQKMKEILYWFANSTQWTKANYTLLLLQMCNPKLLLTAANVIRVLFLREENNISGKQGHR

SEQ ID NO: 782108 - protein, 84 aa, Homo sapiens
FLWLQVLEGSQSTEVGAAHPPAVFCNTGIHFEPTAAPAGRASCQMLSGLARLFESVVMASSVECRPKAIACQLKSVCHVVMPAV

SEQ ID NO: 782109 - protein, 132 aa, Homo sapiens
RRALIHTETLVHTQTCTDTHRDARAHAHRRALIHIERSCTRTQTCTDPQRRSCTRTQTCTDPHRDACAHAHRRALTHRDARAHAHRRALIHIERSCTRTQTCTDPHRDARAHAHRRALIHTETLGHTHTDVH

SEQ ID NO: 782110 - protein, 34 aa, Homo sapiens
SALCELFDPSIHVVGSSHKDNESSLSTDGAVGWE

SEQ ID NO: 782111 - protein, 43 aa, Homo sapiens
RVRAGQAPDPAQPSLRFVCLLVWGLTQAQRQTGHKHRHRQSSL

SEQ ID NO: 782112 - protein, 121 aa, Homo sapiens
PQPATTLTWRPSMGLLASFNCCPLPLHPPQSRSVLFLNLKKDHAAALLKPFTFIESYCPSNKTASPCLSSISSSHTSFSNLRQGALPSLAAILPCWSDFSLSNIPDIPLLLAVFAPALSST

SEQ ID NO: 782113 - protein, 75 aa, Homo sapiens
  misc_feature (2)..(2): Xaa can be any naturally occurring amino acid
DXMTTRFERAVPLTLHVHNSTIHNSQRVERTQLSIYKSINKMGSIQPVEYYSALKRKDNPIHSTTTWMYLEDMKL

SEQ ID NO: 782114 - protein, 216 aa, Homo sapiens
CTLRCTPAHLSPLPSPGCNFAQICPLAVLHILPLLLAGEARSNTLCSPRTRCISFLTLHASFSASCCLHTFPLPGPSFTHSISHLLLPARSGPLLQTHLGHIFPPPHRLHAHHSFSGVPCSLLSPCTLAILCTPPDTLLPPFSYVEALSLLILKNPRFFHSPTLPSHHDTPSPPPPAFPLAPFAPSLLVTPFAHLPPRNCFSHTCSFSSSLPGSHS

SEQ ID NO: 782115 - protein, 88 aa, Homo sapiens
MAFPCLPGSYQPKVAGQLVVPSGEGHPNVHGLVSAPVQSQVQLLAPSPPNHTRSRIQSRVQLLALSPPNHTRPRIQSRVQLLALSPPN

SEQ ID NO: 782116 - protein, 67 aa, Homo sapiens
KGSPEIKPPWGNPQNSERLKAGNPNKAALSLQEIPSTKDLAPNENERNFGLSSWQECLELAFLKSLG

SEQ ID NO: 782117 - protein, 132 aa, Homo sapiens
MGGVRMLGWFHPPISQPGGWTSYLAPRASVPREASRSCVAFPDLAKGITQHHFYGGSHQRLPGFKGKVRRYPLQMGRVSKNLWMFFRTATYLLGVLELTVDSCEVCLQHRENLVNVSTSLSWDLRHRLHRKL

SEQ ID NO: 782118 - protein, 53 aa, Homo sapiens
MSQIISLPTVLQRLPVSLRVKAKCKVQAVPVGPPSSLLLAAYHTSLQHPPHSL

SEQ ID NO: 782119 - protein, 103 aa, Homo sapiens
MNCRLSSFSTPAGTWGRLGLLTRILEGEREYLWQHHWQSPAVHWDSSPHSPPFRNRLHGSRRESLQIQGCHQLTVRAHLGTPGPTSEAAPYSGQRSGVCQASF

SEQ ID NO: 782120 - protein, 113 aa, Homo sapiens
EQTCRALRGSAGTTRSTGTRVPRVPSTENGDLLFCKGFSSLVLTHFCRLEGRQDGYGSGRGGGGCVFREAPLSGTRTPVLGQAGALTSGASFGSKNRVEAKVVEPGTLPAVCL

SEQ ID NO: 782121 - protein, 468 aa, Homo sapiens
  misc_feature (30)..(30): Xaa can be any naturally occurring amino acid
  misc_feature (408)..(408): Xaa can be any naturally occurring amino acid
MNLLHCHWAQEMGALLGAPSPGRGRGRCCXYKSPQDGFGFTLRHFIVYPPESAVHCSLKEEENGGRGGGPSPRYRLEPMDTIFVKNVKEDGPAHRAGLRTGDRLVKVNGESVIGKTYSQVIALIQNSDDTLELSIMPKDEDILQLAYSQDAYLKGNEPYSGEARSIPEPPPICYPRKTYAPSLPGPPPGPLWCLSPPQHCPVDPRSPAAWSDPGLRVPPAARAHLDNSSLGMSQPRRRTLGDGSTDHTHPRRHHKKAQKRPATKPPATHEDHTKERKGSRQKTTKERKERQKQEPPPKPGTRTQDKNTGPTGARQKPRKNGNNHKGQQTPDTKPAHQPTTTHKKTNQATQRQEPNKTTRQTKPKQDTTPDTNQSNTEPGQGTGQSDTRRRGRRRHAGAPQPATASREXRPARDQGRGRTQTGRDESTREDQRSTSHADRRRQKTEKEREKDEADAKTKGRHRKRPGGA

SEQ ID NO: 782122 - protein, 80 aa, Homo sapiens
PGLISDFDFSGSILGAPSQLMPPSVLLLPAIEQLHCSRHYLLFYSHGNPHTKACVAFTVGVEGGPTLRGSPSLSLRSELH

SEQ ID NO: 782123 - protein, 54 aa, Homo sapiens
QEPVHTRARALAFQEWELSLELLRIEALCAEGKSSATLVPWLLCPKDKEVSQPG

SEQ ID NO: 782124 - protein, 51 aa, Homo sapiens
MVLCYHPRVTDGETEAQRLCNCPARLLPYLLPPPAPSFRPGCVLSPLVPPA

SEQ ID NO: 782125 - protein, 100 aa, Homo sapiens
FPPRSGRNNSFPPSSQITLQDGLNSYAHSHTYMHIHTYTHAHTCSLMHTHTHSHSHPHISSHAHTHAHSHMPSHTHMCSHLCTLTPTHTPQSHALTCSIS

SEQ ID NO: 782126 - protein, 71 aa, Homo sapiens
DFVELTFISVAPHKLSSHSTEPTVSSRSISELSVLWRTPCGSFCHIPLPFDIQTTSLFFALISIGVGGDCF

SEQ ID NO: 782127 - protein, 64 aa, Homo sapiens
MGSRSHSGRGRGCQGPNYTSSYGTNSKLSNPSEIESEGKDKLSDWSLKKMIETADISVTAGDAQ

SEQ ID NO: 782128 - protein, 100 aa, Homo sapiens
LIAKVIQNLANFSKFTSKEDFLGFMNEFLELEWGSMQQFLYEISNLDTLTNSSSFEGYIDLGRELSTLHALLWEVLPQLSKEALLKLGPLPRLLNDISTA

SEQ ID NO: 782129 - protein, 139 aa, Homo sapiens
LIAKVIQNLANFSKFTSKEDFLGFMNEFLELEWGSMQQFLYEISNLDTLTNSSSFEGYIDLGRELSTLHALLWEVLPQLSKVSRSPLCPIPRWLQRFLEPEKLPFEDFFSPLVSRGVTTTIPTQAPSTCTLRGPLRAGH

SEQ ID NO: 782130 - protein, 58 aa, Homo sapiens
MPNHFSIMAHMDGDNTVFVGTLKIKEKNGCCLRPPGQDCWQPQATLDVQERGIYFTGS

SEQ ID NO: 782131 - protein, 66 aa, Homo sapiens
SSSLGLALTQAGQIQLLVLQTNRAVLRPQTLARAFCAEGPCEQCLLFKVHSQPENFFLLACLQFMK

SEQ ID NO: 782132 - protein, 120 aa, Homo sapiens
GTDILSSFWLQVAQRGLWWPSEGTCSLLDPKNTATPVMTWEGKGLGREGHLRSLGPLSSIPFSISCFMMSVPGGGLFVDECGFLEALGHTLTWEVGLKPVPHGPEEGVELLADTGKAMKT

SEQ ID NO: 782133 - protein, 93 aa, Homo sapiens
MQKGNVLLMFGLLLHLEAATNSNETSTSANTGSSVISSGASTATNSGSSVTSSGVSTATISGSSVTSNGVSIVTNSEFHTTSSGISTATNSEF

SEQ ID NO: 782134 - protein, 85 aa, Homo sapiens [sequence omitted]

SEQ ID NO: 782135 - protein, 68 aa, Homo sapiens
LRSVDIVKPFILRNIIYVEKTKAQWLSTVLGYGIFHCYMEYSRLRGEAGSDVSLVDLGFQTGVLHVAV

SEQ ID NO: 782136 - protein, 273 aa, Homo sapiens
SFFPHFLGCGQAFLRQGPWPPPRRVTQASAIRPLPGWGTQAATRPSKGWPASRASLAPRPAPPSAFPAACRVLPFPYIAGAGRGPGAGWSAMGVATAAAAVAWGQSRGPEPGRGLQVISWGECEQSSPPLGGCGWQGAQGVLASHPPPWAPASGRSWVGGGWRGCWAETLGSPGLLPCLAPSHARPLAFPREEVAGRVVVGTPAALGKPPRALPAKAVLGQGGRGPGRLGRRVGASPCPPPCLPPHGPQAEKVTPATASGEESREGELGGGRF

SEQ ID NO: 782137 - protein, 281 aa, Homo sapiens
YGSGMRPPPNSLGPPCPGLTWARELADPGPILTVLTQFHTPTPINLYAFFLKKKTTGKTEKKKNKKKKTLLLWAPPWAPPREEPSQEPCAGRGRAREAPQVSGKNAKPAWAQQHRASPRGNTPAGHTRAQLRRACEELSPTVESKKKHPPRGRSTTHDPVSSWHTPNSPHYASNFLEKRLLLPGDLSISSTRGDSPQDAPANLIQQPTSPQAPGGPPPRTRHATQHRSIPTHTVRHHKGRHAPTHKRPTRKHHNTTTTAPTRHTHTDRGTKHQARRGPPHA

SEQ ID NO: 782138 - protein, 113 aa, Homo sapiens
GPFPAHVGCFLPAAFFESHEVHFSAPCKCCILKWSRRPLGSSKGPCWPRALNTFGSRLSIEGLGCWRIRPTLFMGSWPLSGPRPHVRGHGPGSPMSMCKGGTLWLCCRPHSVT

SEQ ID NO: 782139 - protein, 173 aa, Homo sapiens
MPSSLFADLERNGSGGGGGGSSGGGETLDDQRALQLALDQLSLLGLDSDEGASLYDSEPRKKSVNMTECVPVPSSEHVAEIVGRQGCKIKALRAKTNTYIKTPVRGEEPVFVVTGRKEDVAMARREIISAAEPLLHDPRPPANKNPALNGAVPGPPNLPGQTTIQVRVPYRVV

SEQ ID NO: 782140 - protein, 48 aa, Homo sapiens
PPLRRELAGVRGCDWRSADSCPQYRGHVGFGRGAAAPGPASRTWTRDS

SEQ ID NO: 782141 - protein, 104 aa, Homo sapiens
IFQVPEVPQEAAEKEIPVAPPKKPEAPIVPVPEAQEVVPEKKVPKAPPTKPEAPPATVPEVPQEIVPEKKTLVLPKKPEVPPVTVPEAPKEVVLEKKVPLAPPK

SEQ ID NO: 782142 - protein, 46 aa, Homo sapiens
MHVCRDGVTAAASQSGRRVSQIEPRSQIEPRSQIEPRSQIEPRSEI

SEQ ID NO: 782143 - protein, 83 aa, Homo sapiens
LHRSPLTHERAGPNRCSFPRGPPSSSAGALPARVGVAGPPRLLPSYRHGPAALLCGSGPCDVTRKGFPFQQEGGIHTWSSLIR

SEQ ID NO: 782144 - protein, 51 aa, Homo sapiens
PEATHVVVWAVTPEGYSAGETSSASHHRETASRWLVVPKQDSVERKTRDGV

SEQ ID NO: 782145 - protein, 70 aa, Homo sapiens
SYFPIACQLGIQQNGAEAVPLTPTSALNVNSYSIVYRTGKDYPGPSTSFTPSPRIPSSAPLKGHDRKLYL

SEQ ID NO: 782146 - protein, 549 aa, Homo sapiens
MLALLKRKDLANLEVPHELPTKQDGSGVKGYEEKLNGNLRPHGDNRTAGRPGKENINDEPVDMSARRSEPERGRLTPSPDIIVLSDNEASSPRSSSRMEERLKAANLEMFKGKGIEERQQLIKQLRDELRLEEARLVLLKKLRQSQLQKENVVQKTPVVQNAASIVQPSPAHVGQQGLSKLPSRPGAQGVEPQNLRTLQGHSVIRSATNTTLPHMLMSQRVIAPNPAQLQGQRGPPKPGLVRTTTPNMNPAINYQPQSSSSVPCQRTTSSAIYMNLASHIQPGTVNRVSSPLPSPSAMTDAANSQAAAKLALRKQLEKTLLEIPPPKPPAPLLHFLPSAANSEFIYMVGLEEVVQSVIDSQGKSCASLLRVEPFVCAQCRTDFTPHWKQEKNGKILCEQCMTSNQKKALKAEHTNRLKNAFVKALQQEQEIEQRLQQQAALSPTTAPAVSSVSKQETIMRHHTLRQAPQPQSSLQRGIPTSARSMLSNFAQAPQLSVPGGLLGMPGVNIAYLNTGIGGHKGPSLADRQREYLLDMIPPRSISQSISGQK

SEQ ID NO: 782147 - protein, 454 aa, Homo sapiens
GTCLYDSRCRGQGVQPGKGIEERQQLIKQLRDELRLEEARLVLLKKLRQSQLQKENVVQKTPVVQNAASIVQPSPAHVGQQGLSKLPSRPGAQGVEPQNLRTLQGHSVIRSATNTTLPHMLMSQRVIAPNPAQLQGQRGPPKPGLVRTTTPNMNPAINYQPQSSSSVPCQRTTSSAIYMNLASHIQPGTVNRVSSPLPSPSAMTDAANSQAAAKLALRKQLEKTLLEIPPPKPPAPLLHFLPSAANSEFIYMVGLEEVVQSVIDSQGKSCASLLRVEPFVCAQCRTDFTPHWKQEKNGKILCEQCMTSNQKKALKAEHTNRLKNAFVKALQQEQEIEQRLQQQAALSPTTAPAVSSVSKQETIMRHHTLRQAPQPQSSLQRGIPTSARSMLSNFAQAPQLSVPGGLLGMPGVNIAYLNTGIGGHKGPSLADRQREYLLDMIPPRSISQSISGQK

SEQ ID NO: 782148 - protein, 333 aa, Homo sapiens [sequence omitted]

SEQ ID NO: 782149 - protein, 238 aa, Homo sapiens
ERRYPVYHPIPPYTTRLYHQQNKLLEKIYLIKRNRGDRKCKATDYFCWYLGKSCASLLRVEPFVCAQCRTDFTPHWKQEKNGKILCEQCMTSNQKKALKAEHTNRLKNAFVKALQQEQEIEQRLQQQAALSPTTAPAVSSVSKQETIMRHHTLRQAPQPQSSLQRGIPTSARSMLSNFAQAPQLSVPGGLLGMPGVNIAYLNTGIGGHKGPSLADRQREYLLDMIPPRSISQSISGQK

SEQ ID NO: 782150 - protein, 549 aa, Homo sapiens; identical to SEQ ID NO: 782146

SEQ ID NO: 782151 - protein, 458 aa, Homo sapiens
MLALLKRKDLANLEVPHELPTKQDGSGVKGYEEKLNGNLRPHGDNRTAGRPGKENINDEPVDMSARRSEPERGRLTPSPDIIVLSDNEASSPRSSSRMEERLKAANLEMFKGKGIEERQQLIKQLRDELRLEEARLVLLKKLRQSQLQKENVVQKTPVVQNAASIVQPSPAHVGQQGLSKLPSRPGAQGVEPQNLRTLQGHSVIRSATNTTLPHMLMSQRVIAPNPAQLQGQRGPPKPGLVRTTTPNMNPAINYQPQSSSSVPCQRTTSSAIYMNLASHIQPGTVNRVSSPLPSPSAMTDAANSQAAAKLALRKQLEKTLLEIPPPKPPAPLLHFLPSAANSEFIYMVGLEEVVQSVIDSQGKSCASLLRVEPFVCAQCRTDFTPHWKQEKNGKILCEQCMTSNQKKALKAEHTNRLKNAFVKALQQEQVRILTAHWPPVPVCFFQRVAPSSLQEWFM

SEQ ID NO: 782152 - protein, 458 aa, Homo sapiens; identical to SEQ ID NO: 782151

SEQ ID NO: 782153 - protein, 214 aa, Homo sapiens
MLALLKRKDLANLEVPHELPTKQDGSGVKGYEEKLNGNLRPHGDNRTAGRPGKENINDEPVDMSARRSEPERGRLTPSPDIIVLSDNEASSPRSSSRMEERLKAANLEMFKGKGIEERQQLIKQLRDELRLEEARLVLLKKLRQSQLQKENVVQKTPVVQNAASIVQPSPAHVGQQGLSKLPSRPGAQGVEPQNLRTLQAINTGTSSNRHMANC

SEQ ID NO: 782154 - protein, 545 aa, Homo sapiens
NRAGAQGSLLVPHELPTKQDGSGVKGYEEKLNGNLRPHGDNRTAGRPGKENINDEPVDMSARRSEPERGRLTPSPDIIVLSDNEASSPRSSSRMEERLKAANLEMFKGKGIEERQQLIKQLRDELRLEEARLVLLKKLRQSQLQKENVVQKTPVVQNAASIVQPSPAHVGQQGLSKLPSRPGAQGVEPQNLRTLQGHSVIRSATNTTLPHMLMSQRVIAPNPAQLQGQRGPPKPGLVRTTTPNMNPAINYQPQSSSSVPCQRTTSSAIYMNLASHIQPGTVNRVSSPLPSPSAMTDAANSQAAAKLALRKQLEKTLLEIPPPKPPAPLLHFLPSAANSEFIYMVGLEEVVQSVIDSQGKSCASLLRVEPFVCAQCRTDFTPHWKQEKNGKILCEQCMTSNQKKALKAEHTNRLKNAFVKALQQEQEIEQRLQQQAALSPTTAPAVSSVSKQETIMRHHTLRQAPQPQSSLQRGIPTSARSMLSNFAQAPQLSVPGGLLGMPGVNIAYLNTGIGGHKGPSLADRQREYLLDMIPPRSISQSISGQK

SEQ ID NO: 782155 - protein, 333 aa, Homo sapiens [sequence omitted]

SEQ ID NO: 782156 - protein, 549 aa, Homo sapiens; identical to SEQ ID NO: 782146

SEQ ID NO: 782157 - protein, 549 aa, Homo sapiens; identical to SEQ ID NO: 782146

SEQ ID NO: 782158 - protein, 274 aa, Homo sapiens
  misc_feature (274)..(274): Xaa can be any naturally occurring amino acid
MLALLKRKDLANLEVPHELPTKQDGSGVKGYEEKLNGNLRPHGDNRTAGRPGKENINDEPVDMSARRSEPERGRLTPSPDIIVLSDNEASSPRSSSRMEERLKAANLEMFKGKGIEERQQLIKQLRDELRLEEARLVLLKKLRQSQLQKENVVQKTPVVQNAASIVQPSPAHVGQQGLSKLPSRPGAQGVEPQNLRTLQGHSVIRSATNTTLPHMLMSQRVIAPNPAQLQGQRGPPKPGLVRTTTPNMNPAINYQPQSSSSVTWSAVQQSEAGX

SEQ ID NO: 782159 - protein, 191 aa, Homo sapiens
MTFFTELEKTTLKFIWNQKRVHIAKSILSQKNKAGGITLPDFKLYYKATVTKTAWYWYQNRDIDQWNRTEPSEIMPHIYNHLIFDKPDKNKKWGKDSLFNKWCWENWLAICRKLKLDPFLTPYTKINSRWIKDLNVRPKTIKTLEENLGNTIQDIGMGKDFMSKTPKAMATKAKIDKWDLMKLKSFCTAKE

SEQ ID NO: 782160 - protein, 61 aa, Homo sapiens
MGFHCGECPAGPLQAFPRRQPALCRRQKKIEALTEQMVRRKPGGLRWASEDTRRAGGMETA

SEQ ID NO: 782161 - protein, 113 aa, Homo sapiens [sequence omitted]

SEQ ID NO: 782162 - protein, 50 aa, Homo sapiens
LSPLLTPLFLLFWFRPRALEIIDFFHHFTVDVAGVGDICSFALMDVKRHG

SEQ ID NO: 782163 - protein, 70 aa, Homo sapiens
WMHGSGLRKQRRHQRYAVNTKEALRSKESRVFWAAHRVTVISQMRPTDPAHTQRHRRRITLPNKGSSPLS

SEQ ID NO: 782164 - protein, 79 aa, Homo sapiens
DLEDPSQAGRHRECPQNGRTENGNCSSSPTSSSSFLAAPPPLLRLVLSSFFSFLCPSSFLLQQQGSEGKESITGLDTIP

SEQ ID NO: 782165 - protein, 159 aa, Homo sapiens
MSRSFYVDSLIIKDTSRPAPSLPEPHPGPDFFIPLGMPPPLVMSVSGPGCPSRKSGAFCVCPLCVTSHLHSSRGSVGAGSGGAGAGVTGAGGSGVAGAAGALPLLKSQFSSAPGDAQFCPRVNHAHHHHHPPQHHHHHHQPQQPGSAAAAAAAAAAATA

SEQ ID NO: 782166 - protein, 41 aa, Homo sapiens
MWASETSAGAVTEQRGASQSPEVPQQTEVGDKKLEEDTHPH

SEQ ID NO: 782167 - protein, 90 aa, Homo sapiens
KRRNNNCAKKSRGHVQPIRCTNCALCVPKDKPIKKFVSRNIVETAAVRDISEASVFDVYVLPELYVKLRYCVSCAIHSKVVRNRSHEARK

SEQ ID NO: 782168 - protein, 201 aa, Homo sapiens
RATLVVYPSIRIHRSIHPSMHPSVHPSSHPSIHLCVPIYPFIHPSTHPSIHPYISPSIIHPSTHPSIHLAIHPSILLSMHPYMHLSIYPFIHPPIRPPVSPSGPTSPCRAAAVSVELGVERGMSRGASWAVPGRGKGGSSFLAVGMPGVSGKGEEFIILRTERFIDGAVGEKDRQVVRGYTCRASWGAVRSLVSISCSGDP

SEQ ID NO: 782169 - protein, 103 aa, Homo sapiens
TEHCQISVTRRGIMGAPASSLPTPASASAQASSPHLGLPALSALPAKPSNADGKMAPSVSPPFVPSSCTGAQVTSQGDTGEDPGYKEPQDKQINTSTFPRHLC

SEQ ID NO: 782170 - protein, 61 aa, Homo sapiens
MWALLCPRELHLWLAGAVRWAPAVSLQALNLDVSALRKNAQELLQNRCKIETGMMLQQGSR

SEQ ID NO: 782171 - protein, 116 aa, Homo sapiens
MPSSTEIVHLENSSFDFSVISMLRWIFTKSMIIPSGGKLLIKQLLRIFWSESFWNHEYFMFSRAPLSDTSRREPFKVLRQCSYYFPAGGSDCSALHNFAQVPVYMFRAIRYEAKQL

SEQ ID NO: 782172 - protein, 34 aa, Homo sapiens
SAFTVMGCDGEEQVLGGSNSPRRTQRSVLPESIK

SEQ ID NO: 782173 - protein, 65 aa, Homo sapiens [sequence omitted]

SEQ ID NO: 782174 - protein, 70 aa, Homo sapiens
VQIVTRLDLTTRLDYYAARSDYAAVGGAELAGWSELALQQGRLTPQQALWGQMQLPSARWECGRGLERLA

SEQ ID NO: 782175 - protein, 205 aa, Homo sapiens
MAASTASHRPIKGILKNKTSTTSSMVASAEQPRGNVDEELSKKSQKWDEMNILATYHPADKDYGLMKIDEPSTPYHSMMGDDEDACSDTEATEAMAPDILARKLAAAEGLEPKYRIQEQESSGEEDSDLSPEEREKKRQFEMKRKLHYNEGLNIKLARQLISKDLHDDDEDEEMLETADGESMNTEESNQGSTPSDQQQNKLRSS

SEQ ID NO: 782176 - protein, 205 aa, Homo sapiens; identical to SEQ ID NO: 782175

SEQ ID NO: 782177 - protein, 200 aa, Homo sapiens
GVLRSIWDPNDGLSSTTSSMVASAEQPRGNVDEELSKKSQKWDEMNILATYHPADKDYGLMKIDEPSTPYHSMMGDDEDACSDTEATEAMAPDILARKLAAAEGLEPKYRIQEQESSGEEDSDLSPEEREKKRQFEMKRKLHYNEGLNIKLARQLISKDLHDDDEDEEMLETADGESMNTEESNQGSTPSDQQQNKLRSS

SEQ ID NO: 782178 - protein, 108 aa, Homo sapiens
MAASTASHRPIKGILKNKTSTTSSMVASAEQPRGNVDEELSKKSQKWDEMNILATYHPADKDYGLMKIDEPSTPYHSMMGDDEDACSDTEATEAMAPDILARKKKATI

SEQ ID NO: 782179 - protein, 179 aa, Homo sapiens
MAASTASHRPIKGILKNKTSTTSSMVASAEQPRGNVDEELSKKSQKWDEMNILATYHPADKDYGLMKIDEPSTPYHRLAAAEGLEPKYRIQEQESSGEEDSDLSPEEREKKRQFEMKRKLHYNEGLNIKLARQLISKDLHDDDEDEEMLETADGESMNTEESNQGSTPSDQQQNKLRSS

SEQ ID NO: 782180 - protein, 187 aa, Homo sapiens
MAASTASHRPIKGILKNKTSTTSSMVASAEQPRGNVDEELSKKSQKWDEMNILATYHPADKDYGLMACSDTEATEAMAPDILARKLAAAEGLEPKYRIQEQESSGEEDSDLSPEEREKKRQFEMKRKLHYNEGLNIKLARQLISKDLHDDDEDEEMLETADGESMNTEESNQGSTPSDQQQNKLRSS

SEQ ID NO: 782181 - protein, 198 aa, Homo sapiens
MAASTASHRPIKGILKNKTSTTSSMVASAEQPRGNVDEELSKKSQKWDEMNILATYHPADKDYGLMKIDEPSTPYHSMMGDDEDACSDTEATEAMAPDILARKLAAAEGLEPKYRIQEQESSGEEDSDLSPEEREKKRQFEMKRKLHYNEGLNIKLARQLISKDLHDDDEDEEMLETADGESMNTEESNQGFISSAQH

SEQ ID NO: 782182 - protein, 113 aa, Homo sapiens
CLRVSAVPTLLFADPTPSSDPEPTAGAPGNGGLDGLAPAHQGDLEEQDLYDFLYGGVGRTAPRECRRGAEVSAGRDGLGAPPSRRARYLPRPQGRAGGVDAARVPLESLLLPG

SEQ ID NO: 782183 - protein, 205 aa, Homo sapiens; identical to SEQ ID NO: 782175

SEQ ID NO: 782184 - protein, 205 aa, Homo sapiens; identical to SEQ ID NO: 782175

SEQ ID NO: 782185 - protein, 205 aa, Homo sapiens; identical to SEQ ID NO: 782175

SEQ ID NO: 782186 - protein, 185 aa, Homo sapiens
MNQALLTIGIYFKNLKKKKRYKIWLCCPVQWLLTGTVIAHYSLELPTQVILPPPPPSMMGDDEDACSDTEATEAMAPDILARKLAAAEGLEPKYRIQEQESSGEEDSDLSPEEREKKRQFEMKRKLHYNEGLNIKLARQLISKDLHDDDEDEEMLETADGESMNTEESNQGSTPSDQQQNKLRSS

SEQ ID NO: 782187 - protein, 128 aa, Homo sapiens [sequence omitted]

SEQ ID NO: 782188 - protein, 78 aa, Homo sapiens
RNEMGVKLEIFRMIIYLTFPVAMFWVSNQAEWFEDDVIQRKRELWPPEKLQELEEFKERLRKRKRREEKLLRDAQQNS

SEQ ID NO: 782189 - protein, 71 aa, Homo sapiens
RNEMGVKLEIFRMIIYLTFPVAMFWVSNQAEWFEDDVIQRKRELWPPEKVSDLSSLPEGWRSWILVSGMGL

SEQ ID NO: 782190 - protein, 86 aa, Homo sapiens
MGSQGNILIHGLQRFMGEAWFPRRSGTISHHFPWLKLEVHLAPHHSQVGCCPTLLCFILCGWSKLPSQFQCENRGISVEGVEFIHP

SEQ ID NO: 782191 - protein, 33 aa, Homo sapiens
MEASQTLCSDLWGLDPSAVKARKRQGRMVPGGS

SEQ ID NO: 782192 - protein, 77 aa, Homo sapiens
YTGYYFGAPPAPATVWWVGRARRWFPAQLTLRDWELSMQLIACLHVVSELTWLCSSSAFHYDGCPVFILTVFVIVVK

SEQ ID NO: 782193 - protein, 52 aa, Homo sapiens
WGGDEFWEGSFLPGYPQSPQGRVAIQSRSECSVSWSLLSSFLRKRKQDPCVG

SEQ ID NO: 782194 - protein, 38 aa, Homo sapiens
MLTAATVSGKGRYVCHPYSTQTLRTLPKKDLSQGSQHS

SEQ ID NO: 782195 - protein, 138 aa, Homo sapiens
YPFPLLCNRQKERGAYPSRLVVRATPSQCSLLSERPCDWKSSSFSFSPSLSISVAETFLLLPHSRQQGFHFYHTESGMRPHGPLSSLEDSLGVLLGTAASWLMRGCSKSGIPADLKIWCEIAPRTGQPRNILQDGVYL

SEQ ID NO: 782196 - protein, 86 aa, Homo sapiens
SSNPTPIVTIKTVHRHCLASPSGGVKSPMAEKPCSRGNVHTPTHPGQGGASGVTGKGHNLALGLAGGGCISAVALFLGLSAELLWM

SEQ ID NO: 782197 - protein, 94 aa, Homo sapiens
AKALIIPLLFCNGQRSKASRRGESTDEQNGSKKEQRPNGQRGGRRRTKAGQMCSTPAPPPGPLQGQLDDLNSGLSSWRSPTLLMPIPFCLHETL

SEQ ID NO: 782198 - protein, 81 aa, Homo sapiens
CCVSLEGARACKRLVKQCSCFLYLVKIKKEYAHVCWYAHLDVTFCSVELVIASPDLDLSLLIPNPSPVPLHLWGGPCDPGI

SEQ ID NO: 782199 - protein, 69 aa, Homo sapiens
TFQKRDSEVVGSVCQEPLSKALVSLCGPSSDTSPSYTGSGIIKHLIVLWIHQLLKVLLLLEKPSLPLFT

SEQ ID NO: 782200 - protein, 251 aa, Homo sapiens
LLALPKMLKGKKAKGKKVAPVVKKQEAKEVVNPLFEKRPKNFGIGQDIQPKRDLTCFVKWPCYIRLQRQGAILYKWLKVPPAINQFTQALDRQTATQLLKLAHKYRPETKQEKKQRPLAQAEKRAAGKGDVPTKRPPVLRAGVNTITTLVENKKAQLVVIAHDVDPIELVVFLPALCHKMGVPYCIIKEKARLGRLVHRKTCTTVAFTQVNSEDKGALAKLVEAIRTDYNDRYNDIHCHWGGNVLGPKSVA

SEQ ID NO: 782201 - protein, 77 aa, Homo sapiens
DAHPSMPAFHESRVPAGAQCAHIYVYVLPPLWVCMRAWARSAVCSTGLKQAAPLCVGIRAEEDVLLPAGASPALRGY

SEQ ID NO: 782202 - protein, 119 aa, Homo sapiens
MVAADQGRGWNPLDGPTWEVLAMPLPLGPATQVPALFSAALVPPVSSLRPNQMLDWQRLKTPHGAPVACSLGLSGEWVPTPCALSILALLGLQLDPLFGLWGCTRTLFWSEWARESRRP

SEQ ID NO: 782203 - protein, 37 aa, Homo sapiens
MGSGGQADVSKEVVQGRLAVCRTQGQWYKVQMKSAWK

SEQ ID NO: 782204 - protein, 106 aa, Homo sapiens
MATGKARRPVSCPRHSACSCGRECGHLESWRVLQPTSRQVSSLTWEAEGTRLSKGRGILTRPEVPPTPTPSVHTHLRATWLSPAAVKGPQSSLARSSYLHALIIEG

SEQ ID NO: 782205 - protein, 72 aa, Homo sapiens
GLLKCWEPSCAAAGGGHRDRPSGEALGFLCLERPLLCVQQTKTSSAAPRRSPYRNVHCPVVIKLEPETSKKP

SEQ ID NO: 782206 - protein, 86 aa, Homo sapiens
FGCSCLSYLFSVLKNQLDLAVINRRGTRNSRGRETQGKVGEAGLINSKNLPKKFERAGRCGSACNPSTLGGRGGRITRSGDRDHPG

SEQ ID NO: 782207 - protein, 113 aa, Homo sapiens [sequence omitted]

SEQ ID NO: 782208 - protein, 84 aa, Homo sapiens
  misc_feature (17)..(17): Xaa can be any naturally occurring amino acid
DIYMIGVSLGAHISGFXGEMYDGWLGRITGFQYFKCDHQRSVYLYLSSLRESCTITAYPCDSYQDYRNGKCVSCGTSQKESCPL

SEQ ID NO: 782209 - protein, 77 aa, Homo sapiens
LKAPSLIPHSLTLVAIALELYSYATALNVYSWDLCAYCLQYWKQGKSLQHFPLSGLDLQESLTDLNSSAPFTADVAF

SEQ ID NO: 782210 - protein, 169 aa, Homo sapiens
MFQDPVAFKDVAVNFTQEEWALLDISQRKLYREVMLETFRNLTSLGKRWKDQNIEYEHQNPRRNFRSLIEEKVNEIKDDSHCGETFTPVPDDRLNFQEKKASPEVKSCESFVCGEVGLGNSSFNMNIRGDIGHKAYEYQEYGPKPCKCQQPKKAFRYRPSFRTQERDHT

SEQ ID NO: 782211 - protein, 102 aa, Homo sapiens
RTSSHASSHAETYTSHVLARVIARTNTHINRREIFQINNLTLQLGAEEDKELKKEAFPNERQEISIFTSEQLQGQVLVQVPGVENEPFKRMAGDGKSEEEKQ

SEQ ID NO: 782212 - protein, 80 aa, Homo sapiens
GDGSPAHILPSSRPTSPSRPGSRKPRQRPSPQLPSELGRRCLQLWEAAGAHLGTTCGGTRKHAPTSRRTFQKYPWESGLP

SEQ ID NO: 782213 - protein, 379 aa, Homo sapiens
GPRGGSRGGRRPRASRSPGGPGLHPGGLGAMESWYSLMAHYDEFQEVKYVSHCGAGGACGDFLPAGHRAQAGLQLWKRRKLNLLSGWCLQPASAPSWRLCWCSSTWARSRPAAEPVLKAVLSARLRVHRSLLGRQPGRQHRPMPGLILVRLRRLAAAPCHPRRQAHLRHHRGHRLAERGAPAAPAGSAQGWTRRRCPALGALLLPLVPRDARDRTTEPAAHAGGHRGLRGLGPARRGGAPGGCCAMGPQLAAVKKLQGVYSAAALFSLMVSLDDRNSLRYVVRVSARVERPASCRRPGAQWPCPGVPEGGRRVRERRGRESRGGEGAHSGSAREEVISNFPGVTAVFSGAAISQPSGRQWGAGGVRGNIFKLMYKAFEV

SEQ ID NO: 782214 - protein, 121 aa, Homo sapiens
LGLPFSLCLCSFPGRGTRSNRGKRPSPTGWAPSICLVPVGKAYPLGQLFSSNSGGSQSRTQPLADAQEAEEKQSLEAPLLVWSLGCKGYLESTGMNALFIHHSPLKHSVIQQTSIEHLLCA

SEQ ID NO: 782215 - protein, 108 aa, Homo sapiens
MLSKIGLKSETCSSPLDTTGLWFLTLRHLPHTGPRDLERSQPCSSCSHSVRSLLPSQPWGAFHASGFWLCRDRGPTSSLLGWGNHPNRSFLPCSVLCDHGPVTPPPWA

SEQ ID NO: 782216 - protein, 107 aa, Homo sapiens
MRMLDSGSYNRLYIPLSRYHSSVTAVSYGILRNLHIVSHSDCTSLHSYQQCRSVPCLPHPHKCLLFVVLCIMAIYVDVEKLEPSYNVGGNAKCYSHFGKQISFSSKM

SEQ ID NO: 782217 - protein, 66 aa, Homo sapiens
RNPSSPGTLSSQVTSTSTIIKHITSYQSHHVVTINTTSIIPITITTTTNIITPINTTITHIRWVRT

SEQ ID NO: 782218 - protein, 43 aa, Homo sapiens
KLDSPATVLHGHRWPALDRMAACSLDPTQLANQPSALGQPGPR

SEQ ID NO: 782219 - protein, 77 aa, Homo sapiens
LRNSGGESNRETPHGGGVRRAEKRGGGVNEWNSSRCVTEYYITPSLHTHGARRSHTRGGQPARTDAAPTQRQEGPGT

SEQ ID NO: 782220 - protein, 103 aa, Homo sapiens
HPCPSWGWHFRVCRIFVWLDRLVPRPLMSHLPFTQHTENKANAVNPIPPPRLLCSSGGTQEEVLKRFHSMTEFHAEQKPRMQVEMWLQKPPSTKNYRKRAVKW

SEQ ID NO: 782221 - protein, 113 aa, Homo sapiens [sequence omitted]

SEQ ID NO: 782222 - protein, 424 aa, Homo sapiens
ASAHSVQGSATAGGARPGRRPWGARPMESGLLRPAPVSEVIVLHYNYTGKLRGARYQPGAGLRADAVVCLAVCAFIVLENLAVLLVLGRHPRFHAPMFLLLGSLTLSDLLAGAAYAANILLSGPLTLKLSPALWFAREGGVFVALTASVLSLLAIALERSLTMARRGPAPVSSRGRTLAMAAAAWGVSLLLGLLPALGWNCLGRLDACSTVLPLYAKAYVLFCVLAFVGILAAICALYARIYCQVRANARRLPARPGTAGTTSTRARRKPRSLALLRTLSVVLLAFVACWGPLFLLLLLDVACPARTCPVLLQADPFLGLAMANSLLNPIIYTLTNRDLRHALLRLVCCGRHSCGRDPSGSQQSASAAEASGGLRRCLPPGLDGSFSGSERSSPQRDGLDTSGSTGSPGAPTAARTLVSEPAAD

SEQ ID NO: 782223 - protein, 398 aa, Homo sapiens
MESGLLRPAPVSEVIVLHYNYTGKLRGARYQPGAGLRADAVVCLAVCAFIVLENLAVLLVLGRHPRFHAPMFLLLGSLTLSDLLAGAAYAANILLSGPLTLKLSPALWFAREGGVFVALTASVLSLLAIALERSLTMARRGPAPVSSRGRTLAMAAAAWGVSLLLGLLPALGWNCLGRLDACSTVLPLYAKAYVLFCVLAFVGILAAICALYARIYCQVRANARRLPARPGTAGTTSTRARRKPRSLALLRTLSVVLLAFVACWGPLFLLLLLDVACPARTCPVLLQADPFLGLAMANSLLNPIIYTLTNRDLRHALLRLVCCGRHSCGRDPSGSQQSASAAEASGGLRRCLPPGLDGSFSGSERSSPQRDGLDTSGSTGSPGAPTAARTLVSEPAAD

SEQ ID NO: 782224 - protein, 392 aa, Homo sapiens
ASAHSVQGSATAGGARPGRRPWGARPMESGLLRPAPVSEVIVLHYNYTGKLRGARYQPGAGLRADAVVCLAVCAFIVLENLAVLLVLGRHPRFHAPMFLLLGSLTLSDLLAGAAYAANILLSGPLTLKLSPALWFAREGGVFVALTASVLSLLAIALERSLTMARRGPAPVSSRGRTLAMAAAAWGVSLLLGLLPALGWNCLGRLDACSTVLPLYAKAYVLFCVLAFVGILAAICALYALAGLAAHAQRGAPGLCGMLGPPLPAAVARRGVPGAHLSVLLQADPFLGLAMANSLLNPIIYTLTNRDLRHALLRLVCCGRHSCGRDPSGSQQSASAAEASGGLRRCLPPGLDGSFSGSERSSPQRDGLDTSGSTGSPGAPTAARTLVSEPAAD

SEQ ID NO: 782225 - protein, 205 aa, Homo sapiens
MHAQGFFFFFLKPLPRELITYLRRLKVVKHDQNMHMWAHVACLHFPKLVLRGSGDVPQTCWDSYGSLARFRNISSHYASQQQYQCWVASWRLRCFSSYCEASFSARVADLTEELLGAWTTSYSPESYSFMADQGPLYSRRLDDDPFGGNTMVTRAGYAAGQSFLGYVAMLGVAYEAPSLAPGSWRYWAHLCCAHVLAHAQCSAHP

SEQ ID NO: 782226 - protein, 68 aa, Homo sapiens
NRVQNHGERKEQVCLSLPEQLGGGSRGWAWWLGSMSCPGIQDPSSLVLHSATVSPLSALSEMASYHRV

SEQ ID NO: 782227 - protein, 67 aa, Homo sapiens
DSISIPHDIESFDAESHAGIFYNRSDMLSTCCKVRHFTTFLIEKTPGAVGQARPRHRGMDPSNSAGL

SEQ ID NO: 782228 - protein, 35 aa, Homo sapiens
MSVLIIMAFLKSNFSQMSSLLQTRITPFYFETLFV

SEQ ID NO: 782229 - protein, 109 aa, Homo sapiens
THIVAAYQERNGGSQVEPIQPLLRTFKVSGGNRDKQNWNPCDENVKTRECSTMGANVLPRICLFRPDLQTRDHPHPSSIPWSSRLVMVKCHHYPTTGLVGFSFKKYKPN

SEQ ID NO: 782230 - protein, 46 aa, Homo sapiens
MICQSKIKVALPKKGGMHAEPAESIAVHYILYRVATKCFELRQTEV

SEQ ID NO: 782231 - protein, 104 aa, Homo sapiens
NRTAVLFCWFSELGRNAHLCCAISSTVLFTPLSAEWLPHAKQCLISVKKDPSSHPHLIIRGTQAQPTSPAPSTARCISLNGCTSIILFADKPKLLWIMTPDPGS

SEQ ID NO: 782232 - protein, 69 aa, Homo sapiens
MGRNAHLCCAISSTVLFTPLSAEWLPHAKQCLISVKKDPSSHPHLIIRGTQAQPTSPAPSTARCISLNG

SEQ ID NO: 782233 - protein, 104 aa, Homo sapiens; identical to SEQ ID NO: 782231

SEQ ID NO: 782234 - protein, 41 aa, Homo sapiens
MPCQYLLFSQNLDLSHFSLDQELVYPVPVLRAFRQPFWLRR

SEQ ID NO: 782235 - protein, 126 aa, Homo sapiens
VQPSPASYPLHHFDYSSSVIILASEFTGIDCSIVSVSAPFWGGYCFVSNNFIGLSECGSALGKVEIFTLYWVLGCLIIIQSSSFNEYGLLTLILIFPKLVILSCQDCCLSATSCLSHGASCAFYIV

SEQ ID NO: 782236 - protein, 111 aa, Homo sapiens
SRVWGSLQLSPLSIWEPLICVLRTMKGFPCPPPVPPTVGSCGPFEYQRSPWPGSCRLQQPGPIHTRLVGAPRALSKPCAPHLDGTDGPLSWVGNDLHVLTLSSSTKPLPCV

SEQ ID NO: 782237 - protein, 74 aa, Homo sapiens
FSGIVSGCVDGQVRRWMDGRMSEWNCQWMCGWTGEKMDGWRNEWMEFSGIFGGCVDGQVRRWMDGRMSRWHSQE

SEQ ID NO: 782238 - protein, 105 aa, Homo sapiens
MPDRDFYVSPRNRVQQRPRGISDVPKATWLSGSAGTPQPILWHFQFSTPCASASISPFNASGRQVSQRGSVTSLMPCGFIIQQPGISSSAEPPRVPTSPLHVARG

SEQ ID NO: 782239 - protein, 68 aa, Homo sapiens
MLAIWAPIVVKAPPGGCPFGCFETIFIDTSVFLMRSLRCGGRVAGRASGEGSLPPPLPLLAFVSSSAD

SEQ ID NO: 782240 - protein, 339 aa, Homo sapiens
MANLDKYTETFKMGSNSTSTAEIYCNVTNVKFQYSLYATTYILIFIPGLLANSAALWVLCRFISKKNKAIIFMINLSVADLAHVLSLPLRIYYYISHHWPFQRALCLLCFYLKYLNMYASICFLTCISLQRCFFLLKPFRARDWKRRYDVGISAAIWIVVGTACLPFPILRSTDLNNNKSCFADLGYKQMNAVALVGMITVAELAGFVIPVIIIAWCTWKTTISLRQPPMAFQGISERQKALRMVFMCAAVFFICFTPYHINFIFYTMVKETIISSCPVVRIALYFHPFCLCLASLCCLLDPILYYFMASEFRDQLSRHGSSVTRSRLMSKESGSSMIG

SEQ ID NO: 782241 - protein, 339 aa, Homo sapiens; identical to SEQ ID NO: 782240

SEQ ID NO: 782242 - protein, 339 aa, Homo sapiens; identical to SEQ ID NO: 782240

SEQ ID NO: 782243 - protein, 109 aa, Homo sapiens
QRQTMTLGTWHHHCVLWQQLQFIPFFKYCLLRKSFTCWKKNVRLQGLHRLQKFLENHLLLAVPHFGAGLLHISRLLQELHSVSWLPQELDRCYELLDLQTALAEEKHKA

SEQ ID NO: 782244 - protein, 104 aa, Homo sapiens
LLKLGSVRTLGTLTGQPEQGRGGQCGAVQGGGCPGWKLREFRSGLAGLKRGPLRDFAVSASASRSLTEGGLLPGRIGEDLVIHNQVTAPTGRQFQGHVGSPVLV

SEQ ID NO: 782245 - protein, 153 aa, Homo sapiens
MIEDKGPRVADYFVVAGLTDVSKPLEEEIHFNDACHKVAKPKEPITDVSVIIKSLGEEVPQDYICIDVTPTGLSADLNNGSLVGPQIYLCYRRGRDKPPLTDLGVLYDWKERLKQGCEIIQSTPYGRPANISGSTSSQRIYITYRRASENMTQ

SEQ ID NO: 782246 - protein, 120 aa, Homo sapiens
WLLTRHPCFLCSFHLLNAFSLNLWSERILPASSKVSEVKAKERNTHTHRPFHIQPWSDQPSRQRFPLLSKNILLHREPRGPLNSHKRQSLQTPLVLIPILPLTLAHSLLLLRASRILIYK

SEQ ID NO: 782247 - protein, 153 aa, Homo sapiens
KPCIILEPSLSHTSRVQFISKHGRNLTPPHHKPLLPPFLPGSLQQPPDRLRCLALHPSLHSRHHSQGFCTASSAQGPPLASSFAQDKYPAPGSHQQGPLPSLPSPPTPLAHSTCSTWSPFTVLSRAGSPRQASAPASPFRFLNQMSRPQWGLA

SEQ ID NO: 782248 - protein, 105 aa, Homo sapiens
SHLSLLCIIKGYRAGCCHKYSAVHWLQCQRLVLMPQLQWALPPGRTALCHSGVQAPSRLLLCHPSVAVLASPDQVTCLQVKHTWNLRTSGTLTFRSHLGGGILES

SEQ ID NO: 782249 - protein, 80 aa, Homo sapiens
VDIGHIHLFQNRHIVGGKHSQQCKRMEITTNKPDPGHEIVLSLVYEHQKEGLVQQQPEPTDSMGQIKIQNSAKMLKREET

SEQ ID NO: 782250 - protein, 78 aa, Homo sapiens
YHRARHPPTEISHGDFFAVRVSEEAPHQPLCDFRPTRAAQESFLPPATLVTPLNLEGTFTDKEGGDLFSITCGTGMLL

SEQ ID NO: 782251 - protein, 94 aa, Homo sapiens
GLSFRRPNVITLLEKGKAPWMVEPVRRRRAPDSGSKCETKKLPPNQCNKSGQSICQKLVSAQQKAPTRKSGCNKNSVLVKPKKGHSGKKPLKCN

SEQ ID NO: 782252 - protein, 85 aa, Homo sapiens
TIGIDISCPDSQGLGAADSFQHVFSTSSLDSAVAAAMDKTVKKAARGWRYLSLMLDLAEGRTALTRSVVRSPAPQPSLLDPASTV

SEQ ID NO: 782253 - protein, 45 aa, Homo sapiens
MTCRNHALGHKTSSEQIQNADIQRLFSSNPPQEPNFLMKFCGIDK

SEQ ID NO: 782254 - protein, 85 aa, Homo sapiens
RLQREVAQRTSEGAMHEKLIHELEEERHLRLQSEKRLQEVTLESERNRIQMRSLQQQFSRMEETVTKSIAAVKDLQQQKNSTANC

SEQ ID NO: 782255 - protein, 275 aa, Homo sapiens
MPSQITHILCLNCPPSGIGLALCKRLLAEDDELHLCLACRNMSKAEAVCAALLASHPTAEVTIVQVDVSNLQSVFRASKELKQRMIKKWLYVICVEDHVSEIDCIYLNAGIMPNPQLNIKALFFGLFSRKVIHMFSTAEGLLTQGDKITADGLQEVSRPMSLAINPDSGNWSLSSVTVTSISVIWTHLAVAGIYFSLEDSSKERHEPKSPNMPMDLAGAVTTEINQEELNHKGEYSTDVHCNWKGTNIVPITGNDTRMRTICTNRSDPSCHNTSY

SEQ ID NO: 782256 - protein, 107 aa, Homo sapiens
VNSGCYSLNKTYKMDKASQCSRQLHPRYRQGCARPAWRGRLGEQDPSVAPGAALPGPEQDLGENAVFLPLFPRNASIQTILRLSRSPPRPAPLPRDSHLKTQKTLSP

SEQ ID NO: 782257 - protein, 55 aa, Homo sapiens
MQEEEVAAAEEEEVVVEEGEEEEEKEAKEKEAKEKEKEEEGDEMMNKDLRRRRCE

SEQ ID NO: 782258 - protein, 33 aa, Homo sapiens
MKTKEKETREEDQKTRTKRKVMISISHIFSNRL

SEQ ID NO: 782259 - protein, 105 aa, Homo sapiens [sequence omitted]

SEQ ID NO: 782260 - protein, 107 aa, Homo sapiens
HRQPKETDTQAYTLTHTHSFACSHQTRDKLTSPTDLDTPPHQTHTHRYLHTHHGQRQTHTCLGTHTQTQTHTHSPPDLRAHSKPLCAHTVQTHRHTRDSSPGTDTHM

SEQ ID NO: 782261 - protein, 799 aa, Homo sapiens
SQRPLPRPPRLCQRRLRGGGRMKMTVDFEECLKDSPRFRAALEEVEGDVAELELKLDKLVKLCIAMIDTGKAFCVANKQFMNGIRDLAQYSSNDAVVETSLTKFSDSLQEMINFHTILFDQTQRSIKAQLQNFVKEDLRKFKDAKKQFEKVSEEKENALVKNAQVQRNKQHEVEEATNILTATRKCFRHIALDYVLQINVLQSKRRSEILKSMLSFMYAHLAFFHQGYDLFSELGPYMKDLGAQLDRLVVDAAKEKREMEQKHSTIQQKDFSSDDSKLEYNVDAANGIVMEGYLFKRASNAFKTWNRRWFSIQNNQLVYQKKFKDNPTVVVEDLRLCTVKHCEDIERRFCFEVVSPTKSCMLQADSEKLRQAWIKAVQTSIATAYREKGDESEKLDKKSSPSTGSLDSGNESKEKLLKGESALQRVQCIPGNASCCDCGLADPRWASINLGITLCIECSGIHRSLGVHFSKVRSLTLDTWEPELLKLMCELGNDVINRVYEANVEKMGIKKPQPGQRQEKEAYIRAKYVERKFVDKYSISLSPPEQQKKFVSKSSEEKRLSISKFGPGDQVRASAQSSVRSNDSGIQQSSDDGRESLPSTVSANSLYEPEGERQDSSMFLDSKHLNPGLQLYRASYEKNLPKMAEALAHGADVNWANSEENKATPLIQAVLGGSLVTCEFLLQNGANVNQRDVQGRGPLHHATVLGHTGQVCLFLKRGANQHATDEEGKDPLSIAVEAANADIVTLLRLARMNEEMRESEGLYGQPGDETYQDIFRDFSQMASNNPEKLNRFQQDSQKF

SEQ ID NO: 782262 - protein, 799 aa, Homo sapiens; identical to SEQ ID NO: 782261

SEQ ID NO: 782263 - protein, 734 aa, Homo sapiens
MIDTGKAFCVANKQFMNGIRDLAQYSSNDAVVETSLTKFSDSLQEMINFHTILFDQTQRSIKAQLQNFVKEDLRKFKDAKKQFEKVSEEKENALVKNAQVQRNKQHEVEEATNILTATRKCFRHIALDYVLQINVLQSKRRSEILKSMLSFMYAHLAFFHQGYDLFSELGPYMKDLGAQLDRLVVDAAKEKREMEQKHSTIQQKDFSSDDSKLEYNVDAANGIVMEGYLFKRASNAFKTWNRRWFSIQNNQLVYQKKFKDNPTVVVEDLRLCTVKHCEDIERRFCFEVVSPTKSCMLQADSEKLRQAWIKAVQTSIATAYREKGDESEKLDKKSSPSTGSLDSGNESKEKLLKGESALQRVQCIPGNASCCDCGLADPRWASINLGITLCIECSGIHRSLGVHFSKVRSLTLDTWEPELLKLMCELGNDVINRVYEANVEKMGIKKPQPGQRQEKEAYIRAKYVERKFVDKYSISLSPPEQQKKFVSKSSEEKRLSISKFGPGDQVRASAQSSVRSNDSGIQQSSDDGRESLPSTVSANSLYEPEGERQDSSMFLDSKHLNPGLQLYRASYEKNLPKMAEALAHGADVNWANSEENKATPLIQAVLGGSLVTCEFLLQNGANVNQRDVQGRGPLHHATVLGHTGQVCLFLKRGANQHATDEEGKDPLSIAVEAANADIVTLLRLARMNEEMRESEGLYGQPGDETYQDIFRDFSQMASNNPEKLNRFQQDSQKF

SEQ ID NO: 782264 - protein, 765 aa, Homo sapiens
MIDTGKAFCVANKQFMNGIRDLAQYSSNDAVVETSLTKFSDSLQEMINFHTITQSQAVLYSSVRMDYTVVLDNIWKNSLDYQILFDQTQRSIKAQLQNFVKEDLRKFKDAKKQFEKVSEEKENALVKNAQVQRNKQHEVEEATNILTATRKCFRHIALDYVLQINVLQSKRRSEILKSMLSFMYAHLAFFHQGYDLFSELGPYMKDLGAQLDRLVVDAAKEKREMEQKHSTIQQKDFSSDDSKLEYNVDAANGIVMEGYLFKRASNAFKTWNRRWFSIQNNQLVYQKKFKDNPTVVVEDLRLCTVKHCEDIERRFCFEVVSPTKSCMLQADSEKLRQAWIKAVQTSIATAYREKGDESEKLDKKSSPSTGSLDSGNESKEKLLKGESALQRVQCIPGNASCCDCGLADPRWASINLGITLCIECSGIHRSLGVHFSKVRSLTLDTWEPELLKLMCELGNDVINRVYEANVEKMGIKKPQPGQRQEKEAYIRAKYVERKFVDKYSISLSPPEQQKKFVSKSSEEKRLSISKFGPGDQVRASAQSSVRSNDSGIQQSSDDGRESLPSTVSANSLYEPEGERQDSSMFLDSKHLNPGLQLYRASYEKNLPKMAEALAHGADVNWANSEENKATPLIQAVLGGSLVTCEFLLQNGANVNQRDVQGRGPLHHATVLGHTGQVCLFLKRGANQHATDEEGKDPLSIAVEAANADIVTLLRLARMNEEMRESEGLYGQPGDETYQDIFRDFSQMASNNPEKLNRFQQDSQKF

SEQ ID NO: 782265 - protein, 799 aa, Homo sapiens; identical to SEQ ID NO: 782261

SEQ ID NO: 782266 - protein, 439 aa, Homo sapiens [sequence omitted]

SEQ ID NO: 782267 - protein, 405 aa, Homo sapiens
SQRPLPRPPRLCQRRLRGGGRMKMTVDFEECLKDSPRFRAALEEVEGDVAELELKLDKLVKLCIAMIDTGKAFCVANKQFMNGIRDLAQYSSNDAVVETSLTKFSDSLQEMINFHTILFDQTQRSIKAQLQNFVKEDLRKFKDAKKQFEKVSEEKENALVKNAQVQRNKQHEVEEATNILTATRKCFRHIALDYVLQINVLQSKRRSEILKSMLSFMYAHLAFFHQGYDLFSELGPYMKDLGAQLDRLVVDAAKEKREMEQKHSTIQQKDFSSDDSKLEYNVDAANGIVMEGYLFKRASNAFKTWNRRWFSIQNNQLVYQKKFKDNPTVVVEDLRLCTVKHCEDIERRFCFEVVSPTKSCMLQADSEKLRQAWIKAVQTSIATAYREKGDESEKLDKKSSPSPRI

SEQ ID NO: 782268 - protein, 407 aa, Homo sapiens
SQRPLPRPPRLCQRRLRGGGRMKMTVDFEECLKDSPRFRAALEEVEGDVAELELKLDKLVKLCIAMIDTGKAFCVANKQFMNGIRDLAQYSSNDAVVETSLTKFSDSLQEMINFHTILFDQTQRSIKAQLQNFVKEDLRKFKDAKKQFEKVSEEKENALVKNAQVQRNKQHEVEEATNILTATRKCFRHIALDYVLQINVLQSKRRSEILKSMLSFMYAHLAFFHQGYDLFSELGPYMKDLGAQLDRLVVDAAKEKREMEQKHSTIQQKDFSSDDSKLEYNVDAANGIVMEGYLFKRASNAFKTWNRRWFSIQNNQLVYQKKFKDNPTVVVEDLRLCTVKHCEDIERRFCFEVVSPTKSCMLQADSEKLRQAWIKAVQTSIATAYREKGDESEKHGKKSACKSTRPR

SEQ ID NO: 782269 - protein, 129 aa, Homo sapiens
VPAAAPAAPSALPAPPARRRQDEDDCGFRGVSEGLAPLQVTGTAARRHRGAPSRRWGRESRARAPGGGPASAPSDGASGCCRRFPPCEGTAVPTEPSRGATKWRGRGRRLSFLSLPSAGAERPEGRRTL

SEQ ID NO: 782270 - protein, 833 aa, Homo sapiens
DADFCFAVPPARATLRRAPAVDACGNRGGKRCDQPHSVDPSWAALEEVEGDVAELELKLDKLVKLCIAMIDTGKAFCVANKQFMNGIRDLAQYSSNDAVVETSLTKFSDSLQEMINFHTITQSQAVLYSSVRMDYTVVLDNIWKNSLDYQILFDQTQRSIKAQLQNFVKEDLRKFKDAKKQFEKVSEEKENALVKNAQVQRNKQHEVEEATNILTATRKCFRHIALDYVLQINVLQSKRRSEILKSMLSFMYAHLAFFHQGYDLFSELGPYMKDLGAQLDRLVVDAAKEKREMEQKHSTIQQKDFSSDDSKLEYNVDAANGIVMEGYLFKRASNAFKTWNRRWFSIQNNQLVYQKKFKDNPTVVVEDLRLCTVKHCEDIERRFCFEVVSPTKSCMLQADSEKLRQAWIKAVQTSIATAYREKGDESEKLDKKSSPSTGSLDSGNESKEKLLKGESALQRVQCIPGNASCCDCGLADPRWASINLGITLCIECSGIHRSLGVHFSKVRSLTLDTWEPELLKLMCELGNDVINRVYEANVEKMGIKKPQPGQRQEKEAYIRAKYVERKFVDKYSISLSPPEQQKKFVSKSSEEKRLSISKFGPGDQVRASAQSSVRSNDSGIQQSSDDGRESLPSTVSANSLYEPEGERQDSSMFLDSKHLNPGLQLYRASYEKNLPKMAEALAHGADVNWANSEENKATPLIQAVLGGSLVTCEFLLQNGANVNQRDVQGRGPLHHATVLGHTGQVCLFLKRGANQHATDEEGKDPLSIAVEAANADIVTLLRLARMNEEMRESEGLYGQPGDETYQDIFRDFSQMASNNPEKLNRFQQDSQKF

SEQ ID NO: 782271 - protein, 447 aa, Homo sapiens
MLFPFRSCMLQADSEKLRQAWIKAVQTSIATAYREKGDESEKLDKKSSPSTGSLDSGNESKEKLLKGESALQRVQCIPGNASCCDCGLADPRWASINLGITLCIECSGIHRSLGVHFSKVRSLTLDTWEPELLKLMCELGNDVINRVYEANVEKMGIKKPQPGQRQEKEAYIRAKYVERKFVDKYSISLSPPEQQKKFVSKSSEEKRLSISKFGPGDQVRASAQSSVRSNDSGIQQSSDDGRESLPSTVSANSLYEPEGERQDSSMFLDSKHLNPGLQLYRASYEKNLPKMAEALAHGADVNWANSEENKATPLIQAVLGGSLVTCEFLLQNGANVNQRDVQGRGPLHHATVLGHTGQVCLFLKRGANQHATDEEGKDPLSIAVEAANADIVTLLRLARMNEEMRESEGLYGQPGDETYQDIFRDFSQMASNNPEKLNRFQQDSQKF

SEQ ID NO: 782272 - protein, 600 aa, Homo sapiens
SQRPLPRPPRLCQRRLRGGGRMKMTVDFEECLKDSPRFRAALEEVEGDVAELELKLDKLVKLCIAMIDTGKAFCVANKQFMNGIRDLAQYSSNDAVVETSLTKFSDSLQEMINFHTILFDQTQRSIKAQLQNFVKEDLRKFKDAKKQFEKVSEEKENALVKNAQVQRNKQHEVEEATNILTATRKCFRHIALDYVLQINVLQSKRRSEILKSMLSFMYAHLAFFHQGYDLFSELGPYMKDLGAQLDRLVVDAAKEKREMEQKHSTIQQKDFSSDDSKLEYNVDAANGIVMEGYLFKRASNAFKTWNRRWFSIQNNQLVYQKKFKDNPTVVVEDLRLCTVKHCEDIERRFCFEVVSPTKSCMLQADSEKLRQAWIKAVQTSIATAYREKGDESEKLDKKSSPSTGSLDSGNESKEKLLKGESALQRVQCIPGNASCCDCGLADPRWASINLGITLCIECSGIHRSLGVHFSKVRSLTLDTWEPELLKLMCELGNDVINRVYEANVEKMGIKKPQPGQRQEKEAYIRAKYVERKFVDKYSISLSPPEQQKKFVSKSSEEKRLSISKFGPGDQVRASAQSSVIAVNSDEARRESLFCPDELDS

SEQ ID NO: 782273 - protein, 174 aa, Homo sapiens
MNEGTVGGKPRENFGYSEEGSGECGERQVRARCSHLFPVPASRLAHASLPPEILQRRRDPGGALRMPFRKLLLPRAWGLWCSGMGCDAGLQQGLRPLHACHKRFLVLRSRPGCSLPRAVLSQHPQEGRPQAEKPAGAYCPEWASNQPLLGFWGQGPVHKPLQVPPSGLPSPQGW

SEQ ID NO: 782274 - protein, 131 aa, Homo sapiens
GVVSQCGGAALGVLPLAGLMFLSRAVSSLSLSFPSCQIKGTRLRARQGLFPVPSSSWVESPPFCCNAWLPQSPCGLGTDRETEAQGSPPAPASLLEALGSVTTATLHLCVCVWLAGSLSSPTIPKFPGLAV

SEQ ID NO: 782275 - protein, 102 aa, Homo sapiens
MAPGVESDSNLSLPFVSTFPALAFSAAIHLPHPLQLSLSLRFPIPTLQQRYSIASSHSTRTPSYKHGHYPGLHLLNSGYSFHNVSILSLPNSFGKPFSIPSQ

SEQ ID NO: 782276 - protein, 68 aa, Homo sapiens
NHGPFLVLSLLNRTCHAMPLASTFQESHCHLFPLSLPLPSLQLSISRTPCNFLSLSVSLYPLSNKDTP

SEQ ID NO: 782277 - protein, 68 aa, Homo sapiens
LLDLSLFPCKANISTPLQDDLLLHAHSSHWLIAAREPPNPSENCCETEVCLSFLRTRMSQKPSTHGNS

SEQ ID NO: 782278 - protein, 103 aa, Homo sapiens
TVIAPPLRAHLCLYALRFFFNSMYYNPVFLFCYSDGRSLGHGKLRQLGSYVLSSCFPNFLFSATTGHSGCIWNFLGSSSGVRHLRERWSHRSCCKGVSALSLT

SEQ ID NO: 782279 - protein, 117 aa, Homo sapiens
SVFLLCPHMVKSKERVEASCLGSLVVKALIPCRASPLLFNHPPKAPPTNIMSLEIKASIYEFWCGGRGDHKHAVYKMLFNFLRQDLALLPRLQCSGMILVYCNIYLLDPSDPPTSVS

SEQ ID NO: 782280 - protein, 139 aa, Homo sapiens
VPSLLGCPDGPEQGRPWSSPYTPRPAVQHRSQPGPAPVCDLPRTSAFRVSCWLRCYHRLFLDYFRGWLGFPFPFLRCSVMRSFNFCLNFVCLSFSPLACSLSVHAVADSVFAAHSLLPLVFIRCKLRTCGECLLPPAPS

SEQ ID NO: 782281 - protein, 103 aa, Homo sapiens
KERKKERKKERKGREGGKEGRKEEGRKEGRKEGRKEGRKERKEGRKEGRKEMLVPNWYHPQRASHTFSHAFCLDRRSNSLSLWYLGLLEPVLLEINYTSLFAI

SEQ ID NO: 782282 - protein, 51 aa, Homo sapiens
RCLLFSRKLTVASPDPHSHLSDPNPQDNAQSGSTTGCWLQGVDCSSASTGK

SEQ ID NO: 782283 - protein, 161 aa, Homo sapiens
VAGAGDCLRRLFGSYRKQWLEMTLLRRWFGSYRKQWDKGGGDLHPEHACQTHSCPLHTLRCAPSSLLQRGPHGTHVNGTKLLDVWSSVPKASGVPRETRWLPYEHVKEAQVPDLSTEQFLALMLLMGIVYREQTGLEDQQVHTEATSKGHGSSTVGPLLSL

SEQ ID NO: 782284 - protein, 98 aa, Homo sapiens
PRDFPRTPRGETRKPLLQPLLPSPAVPRRPVIALKGFSTRAHLPSDNLIPPASSVPWHPFCNGLLDSYYCLLFAAYGMINSWQGCTEVAGKEKLGCAE

SEQ ID NO: 782285 - protein, 59 aa, Homo sapiens
MITYHHAPEVGSFKPPAAAGSIQPRKTPTSFPLSATLSCLLFQISSPSYPLLIFQVSDT

SEQ ID NO: 782286 - protein, 119 aa, Homo sapiens
ACLTGELTQGVHAQEGVWVLCSTAGLELRSRPKVSLSTTISTQTNNEKGKQKDMPYQFLMYLLNTPVQFAEFVMSSLREKKRHYKLNGNVQQVCHELICWFQQIFPSKGQGLMDQLHAQ

SEQ ID NO: 782287 - protein, 94 aa, Homo sapiens
LRHQLEQAVPSAPRENEAGAVCLTGQGLHGAQGSAWQSHWGAHGGFPAFSGRDPGPSRRTPVPHEVFPDPTADRQHSLQEWGSGTRKGPAWVTE

SEQ ID NO: 782288 - protein, 185 aa, Homo sapiens
QIATETDVPEVEASEVGQSPITPTLVPPVHPSPPSSRSPQPGQDKESGEAQVTPTGPPLSEPLQGPGPTPLSPQRIQDEEIESDKLPPSSSHHDPPKDSSHTDLVQKLAGDSQQALKEETSKPEAIRVSIPHPELPHPQDLATDTKQPQARGAPGTLLPRSRLAPTRLPQPQVLAPLQSRRPTPK

SEQ ID NO: 782289 - protein, 35 aa, Homo sapiens
LKRELGQASPVTGWAHVKEPQQLMGWTFKELLRTF

SEQ ID NO: 782290 - protein, 66 aa, Homo sapiens
VLVDCCWGDGFEATSAASSNVSSRRTLVAAVLGSAIVLRWCDPVAPAARGPFFLSHVFFKLNIERF

SEQ ID NO: 782291 - protein, 71 aa, Homo sapiens
MGAPGEVDTLQGGGCVPRFQDTIWPHPGPGAAGAGPVLSLLSDTAPLSPPKAPTLVGSAPTDLMKLTGVKH

SEQ ID NO: 782292 - protein, 107 aa, Homo sapiens [sequence omitted]

SEQ ID NO: 782293 - protein, 133 aa, Homo sapiens
PSIYPFIHLSIRLSICPSIRPSLHLSLSISPSTSLAISSLSIHPLLHSPTPPSSFSLSGFPAPSHLWSCPWSGQAISSLQSLDRPQPQLFSAAQLGRLGRYLLRGEAYGPEKAWACLSPSFCSRDEAHWALVS

SEQ ID NO: 782294 - protein, 124 aa, Homo sapiens
SFSHSQLTAFQPVPYVKRPRGFCFRHFPDWPTCDPRGDPILISRAWGPSAGNSSLVVFTPRGTSVPIHWTGCADCPQVGTAGPGSSTALPSGQPRTRHLASIRRMYSINHRRIFQSLLRDGDLT

SEQ ID NO: 782295 - protein, 40 aa, Homo sapiens
MDAGPVLVHCSAGIGRTGTFIVIDILIDIIREKVLTATLM

SEQ ID NO: 782296 - protein, 141 aa, Homo sapiens
RQGPPTPAWAIPAQPSRGPGYSPCARVAEFEKRDRVSLCHPGWSVVRQSQLIAPPPLGPSYPPTSASQVAGITGAHHQPRHSLITLSPRLECSSAISGSLEPSTPGFQVILLASGLPGDRLGITGGQGIFLAGHIQHSKGM

SEQ ID NO: 782297 - protein, 68 aa, Homo sapiens
RPISAKGVTVKKLPLLPLQLACAYGAKAQAVGGKGKPRAQPATSDTSRRITDWLCSPAFEVPSFYQNV

SEQ ID NO: 782298 - protein, 116 aa, Homo sapiens
FLFLARNCMRLQVLELDHVSEITQEVAAEVCREGLKGLEMLVLTATPVTPKALLHFNSICRNLKSIVVQIGIADYFKEPSSPEAQKLFEDMVTKLQALRRRPGFSKILHIKVEGGC

SEQ ID NO: 782299 - protein, 52 aa, Homo sapiens
MKTSKSAEKKLWIHRSGGAQEGAYRLPSALVQGRIVRATSNTCKVFGPYPRQ

SEQ ID NO: 782300 - protein, 239 aa, Homo sapiens
MSNNNSQQPQLNRQTIHPRIHSKAHPTDSWTWSTTRVTSGTTTTRGSNTPCNPNRNTQQPTTEHNTTNQKHDKNSNQQQNDNKRTMTHRTIQYSTNEKKNHQHTTDRKKLTTTRDNRQQHTMKANHPTPDTAPTNHTPPTQDTATDQTERAHSTDQAPRNGRHARHKKKTKQDYAPPRHTTPQRHKLKGRRRPPHRHNDKAKTTPQHTQHANRTHTTKRHVRRIRHTNAPTSTKKTRRA

SEQ ID NO: 782301 - protein, 58 aa, Homo sapiens
VACGNNPVYDNASIAEQITNGILLEILDYKLPSCFKEHLIPHSYYPLKPEIILQKLQS

SEQ ID NO: 782302 - protein, 64 aa, Homo sapiens
MKQKWLRPYPPPLCRLSHRTNPTPAYVKLHAGAPEQRDRSLIPFYEACVPPCIHSGSSEKHYLA

SEQ ID NO: 782303 - protein, 154 aa, Homo sapiens
SILPLFGLGRQKTLSQWPLNLPNPSKVAGFMKTLNSYEIKATSLEWHARLSTVWVNSHLLLPSLSALSNTFHGFQLQCLCSHHFLCLKYLFFPFSPKASPSSSSSCSNASSSKMLPRILWETHLPLLELPQRHKASHGICLSVIWCFVKNYPFC

SEQ ID NO: 782304 - protein, 88 aa, Homo sapiens
GRSRPHLSGLWRFQPQTVCLRRISGHPRTNFRISKFPSLGIVKPTQVESTMTHSTYQKYFPQLQDLAFKTGRFLPHVLLGFADLIVSI

SEQ ID NO: 782305 - protein, 31 aa, Homo sapiens
KFPPVPRPQWSLAGGLLEPAAYLSCIGMKPG

SEQ ID NO: 782306 - protein, 74 aa, Homo sapiens
MIPTTTITLIAPLPSYLPSETTAITVTMTNTILPPLPLICLIAMPIITNSITTTLQLTNAAAIITAMICTTTTA

SEQ ID NO: 782307 - protein, 41 aa, Homo sapiens
VEPFASLTELGQQPWGWGLPLSPPAQQRGEEGTAETQLQYV

SEQ ID NO: 782308 - protein, 104 aa, Homo sapiens
MLHVFKHVFLTLAPLKTRFCINRRSCHRPFRSAQHEEENQPVPPLATPKTRQVTQWKEPDRVTGATPSLPSLPGRLQGQVTSRLSLLPLLLRGSHAPSPLVVGK

SEQ ID NO: 782309 - protein, 38 aa, Homo sapiens
MNSSDALQNLHFIDSFLSVQVRNLLPYNGSLCPPAVDG

SEQ ID NO: 782310 - protein, 104 aa, Homo sapiens
MPPLASTPDPWPVVRGANNMTCFHLDLPSPPREKGILAKKRLEEGRTLALRVGLGGAQATLLVRISWLFKVNMMMISLGFLSILRSRPELESTCILGEARGGKG

SEQ ID NO: 782311 - protein, 102 aa, Homo sapiens
MSSLKNISFSFFKKMIWGTGAKQKQFIPPYPGMKSNHASCLLLMVSLSFTCLSLQDQDSIPVPTPPPSNVIPPKACSSAHWVKGILSTQAFHYCLDFFSADH

SEQ ID NO: 782312 - protein, 77 aa, Homo sapiens
PPHVSRDQATSPQPGSPVPVGITDHTQFWNPVFALLDVGSCPLWLCHFSPCCPCGHNQGLAMTCSSLGSLLSCQRLF

SEQ ID NO: 782313 - protein, 60 aa, Homo sapiens
LGRTVIKVRDWALSDEPWAFHSSSQKCCLCSMMCQALPKALEIQQGMNGQKFHFHGAHHV

SEQ ID NO: 782314 - protein, 77 aa, Homo sapiens
MGSGHTTPKYTLATECLQLEKPEKEHVQEGLFDRPLKQVGSPWCEKRPAGTWRKGASYRETMERGWNDMPGSGPRSL

SEQ ID NO: 782315 - protein, 80 aa, Homo sapiens
CTPGQPGSVNHAFPCFAIANQISGSATESSYSNSRPQPPTSRQPPVSLATDLLLRGKATGRLSVPLRNVKRASSPQPGKK

SEQ ID NO: 782316 - protein, 718 aa, Homo sapiens
MFSVESLERAELCESLLTWIQTFNVDAPCQTVEDLTNGVVMAQVLQKIDPAYFDENWLNRIKTEVGDNWRLKISNLKKILKGILDYNHEILGQQINDFTLPDVNLIGEHSDAAELGRMLQLILGCAVNCEQKQEYIQAIMMMEESVQHVVMTAIQELMSKESPVSAGNDAYVDLDRQLKKTTEELNEALSAKEEIAQRCHELDMQVAALQEEKSSLLAENQVLMERLNQSDSIEDPNSPAGRRHLQLQTQLEQLQEETFRLEAAKDDYRIRCEELEKEISELRQQNDELTTLADEAQSLKDEIDVLRHSSDKVSKLEGQVESYKKKLEDLGDLRRQVKLLEEKNTMYMQNTVSLEEELRKANAARSQLETYKRQVVELQNRLSEESKKADKLDFEYKRLKEKVDSLQKEKDRLRTERDSLKETIEELRCVQAQEGQLTTQGLMPLGSQESSDSLAAEIVTPEIREKLIRLQHENKMLKLNQEGSDNEKIALLQSLLDDANLRKNELETENRLVNQRLLEVQSQVEELQKSLQDQGSKAEDSVLLKKKLEEHLEKLHEANNELQKKRAIIEDLEPRFNNSSLKIEELQEALRKKEEEMKQMEERYKKYLEKAKSVIRTLDPKQNQGAAPEIQALKNQLQERDRLFHSLEKEYEKTKSQREMEEKYIVSAWYNMGMTLHKKAAEDRLASTGSGQSFLARQRQATSSRRSYPGHVQPATAR

SEQ ID NO: 782317 - protein, 68 aa, Homo sapiens
MFSVESLERAELCESLLTWIQTFNVDAPCQTVEDLTNGVVMAQVLQKIDPAPSQFTCHFNDNSCSFWG

SEQ ID NO: 782318 - protein, 594 aa, Homo sapiens
MFSVESLERAELCESLLTWIQTFNVDAPCQTVEDLTNGVVMAQVLQKIDPAYFDENWLNRIKTEVGDNWRLKISNLKKILKGILDYNHEILGQQINDFTLPDVNLIGEHSDAAELGRMLQLILGCAVNCEQKQEYIQAIMMMEESVQHVVMTAIQELMSKESPVSAGNDAYVDLDRQLKKTTEELNEALSAKEEIAQRCHELDMQVAALQEEKSSLLAENQVLMERLNQSDSIEDPNSPAGRRHLQLQTQLEQLQEETFRLEAAKDDYRIRCEELEKEISELRQQNDELTTLADEAQSLKDEIDVLRHSSDKVSKLEGQVESYKKKLEDLGDLRRQVKLLEEKNTMYMQNTVSLEEELRKANAARSQLETYKRQVVELQNRLSEESKKADKLDFEYKRLKEKVDSLQKEKDRLRTERDSLKETIEELRCVQAQEGQLTTQGLMPLGSQESSDSLAAEIVTPEIREKLIRLQHENKMLKLNQEGSDNEKIALLQSLLDDANLRKNELETENRLVNQRLLEVQSQVEELQKSLQDQGSKAEDSVLLKKKLEEHLEKLHEANNELQKKRAIIEDLEPRFNNSSLKIEELQEALRKKE

SEQ ID NO: 782319 - protein, 738 aa, Homo sapiens
MFSVESLERAELCESLLTWIQTFNVDAPCQTVEDLTNGVVMAQVLQKIDPAYFDENWLNRIKTEVGDNWRLKISNLKKILKGILDYNHEILGQQINDFTLPDVNLIGEHSDAAELGRMLQLILGCAVNCEQKQEYIQAIMMMEESVQHVVMTAIQELMSKESPVSAGNDAYVDLDRQLKKTTEELNEALSAKEEIAQRCHELDMQVAALQEEKSSLLAENQVLMERLNQSDSIEDPNSPAGRRHLQLQTQLEQLQEETFRLEAAKDDYRIRCEELEKEISELRQQNDELTTLADEAQSLKDEIDVLRHSSDKVSKLEGQVESYKKKLEDLGDLRRQVKLLEEKNTMYMQNTVSLEEELRKANAARSQLETYKRQVVELQNRLSEESKKADKLDFEYKRLKEKVDSLQKEKDRLRTERDSLKETIEELRCVQAQEGQLTTQGLMPLGSQESSDSLAAEIVTPEIREKLIRLQHENKMLKLNQEGSDNEKIALLQSLLDDANLRKNELETENRYLCPSNFPLTTAFAVSHRFRLVNQRLLEVQSQVEELQKSLQDQGSKAEDSVLLKKKLEEHLEKLHEANNELQKKRAIIEDLEPRFNNSSLKIEELQEALRKKEEEMKQMEERYKKYLEKAKSVIRTLDPKQNQGAAPEIQALKNQLQERDRLFHSLEKEYEKTKSQREMEEKYIVSAWYNMGMTLHKKAAEDRLASTGSGQSFLARQRQATSSRRSYPGHVQPATAR

SEQ ID NO: 782320 - protein, 415 aa, Homo sapiens
MFSVESLERAELCESLLTWIQTFNVDAPCQTVEDLTNGVVMAQVLQKIDPAYFDENWLNRIKTEVGDNWRLKISNLKKILKGILDYNHEILGQQINDFTLPDVNLIGEHSDAAELGRMLQLILGCAVNCEQKQEYIQAIMMMEESVQHVVMTAIQELMSKESPVSAGNDAYVDLDRQLKKTTEELNEALSAKEEIAQRCHELDMQVAALQEEKSSLLAENQVLMERLNQSDSIEDPNSPAGRRHLQLQTQLEQLQEETFRLEAAKDDYRIRCEELEKEISELRQQNDELTTLADEAQSLKDEIDVLRHSSDKVSKLEGQVESYKKKLEDLGDLRRQVKLLEEKNTMYMQNTVSLEEELRKANAARSQLETYKRQVVELQNRLSEESKKADKLDFEYKRLKEKVDSLQKEKDREAA

SEQ ID NO: 782321 - protein, 547 aa, Homo sapiens
MFSVESLERAELCESLLTWIQTFNVDAPCQTVEDLTNGVVMAQVLQKIDPAYFDENWLNRIKTEVGDNWRLKISNLKKILKGILDYNHEILGQQINDFTLPDVNLIGEHSDAAELGRMLQLILGCAVNCEQKQEYIQAIMMMEESVQHVVMTAIQELMSKESPVSAGNDAYVDLDRQLKKTTEELNEALSAKEEIAQRCHELDMQVAALQEEKSSLLAENQVLMERLNQSDSIEDPNSPAGRRHLQLQTQLEQLQEETFRLEAAKDDYRIRCEELEKEISELRQQNDELTTLADEAQSLKDEIDVLRHSSDKVSKLEGQVESYKKKLEDLGDLRRQVKLLEEKNTMYMQNTVSLEEELRKANAARSQLETYKRQVVELQNRLSEESKKADKLDFEYKRLKEKVDSLQKEKDRLRTERDSLKETIEELRCVQAQEGQLTTQGLMPLGSQESSDSLAAEIVTPEIREKLIRLQHENKMLKLNQEGSDNEKIALLQSLLDDANLRKNELETENRLVNQRLLEVQSQVEELQKSLQDQLKMLYNSVILFFV

SEQ ID NO: 782322 - protein, 655 aa, Homo sapiens [sequence omitted]

SEQ ID NO: 782323 - protein, 205 aa, Homo sapiens
RSEDPYARSQVEELQKSLQDQGSKAEDSVLLKKKLEEHLEKLHEANNELQKKRAIIEDLEPRFNNSSLKIEELQEALRKKEEEMKQMEERYKKYLEKAKSVIRTLDPKQNQGAAPEIQALKNQLQERDRLFHSLEKEYEKTKSQREMEEKYIVSAWYNMGMTLHKKAAEDRLASTGSGQSFLARQRQATSSRRSYPGHVQPATAR

SEQ ID NO: 782324 - protein, 68 aa, Homo sapiens
MAISSVAEFRRTDSQLQGQVLFRHLAGLAELLPESRRQEYMQNCEQLLLGSSQAFQHVGQTLGDMAGQ

SEQ ID NO: 782325 - protein, 140 aa, Homo sapiens
FFQKAALKIGLHEFTNNLSWISLFHCFPLAISSSSFTSCKSKVPAQHRASDSASMPAFHRHPEPQHPVHSSWTPLLPSALKKVLTSFWDPTEDPGILHPGHTWNFLGELCKKCSCPGLTVELGANHESRVQAGGSREPPL

SEQ ID NO: 782326 - protein, 32 aa, Homo sapiens
MSTFFAFKLLPESSSWSLILFPPAAARTTNIG

SEQ ID NO: 782327 - protein, 108 aa, Homo sapiens
LGFGCREEARVEAGALLRARRIFTFPLISLTEAGCRAFASSDWWNCLHPGPGLPGGGGGGGGAGTRDGDLASSLLSRPQYPSCLLPGDPLGALPLRAREKGASGTERP

SEQ ID NO: 782328 - protein, 92 aa, Homo sapiens
KNCSECHSVKPKPHIREPLASSRTRTDILGEQGQLPPCCDLLGELPVIGWQPSHRSLAKNGTTVDRIREKHSGQHQERFRSRARHRAPHAGC

SEQ ID NO: 782329 - protein, 91 aa, Homo sapiens
EYVGELISDAEADVREDDSYLFDLDTKDGEAYCIDARYYGNISRFINHLCDRNIIPLSQSTDPFSVRHPRPTPASWPAHATTPTLAPLLGI

SEQ ID NO: 782330 - protein, 763 aa, Homo sapiens
MDHLNEATQGKEHSEMSNNVSDPKGPPAKIARLEQNGSPLGRGRLGSTGAKMQGVPLKHSGHLMKTNLRKGTMLPVFCVVEHYENAIEYDCKEEHAEFVLVRKDMLFNQLIEMALLSLGYSHSSAAQAKGLIQVGKWNPVPLSYVTDAPDATVADMLQDVYHVVTLKIQLHSCPKLEDLPPEQWSHTTVRNALKDLLKDMNQSSLAKECPLSQSMISSIVNSTYYANVSAAKCQEFGRWYKHFKKTKDMMVEMDSLSELSQQGANHVNFGQQPVPGNTAEQPPSPAQLSHGSQPSVRTPLPNLHPGLVSTPISPQLVNQQLVMAQLLNQQYAVNRLLAQQSLNQQYLNHPPPVSRSMNKPLEQQVSTNTEVSSEIYQWVRDELKRAGISQAVFARVAFNRTQGLLSEILRKEEDPKTASQSLLVNLRAMQNFLQLPEAERDRIYQDERERSLNAASAMGPAPLISTPPSRPPQVKTATIATERNGKPENNTMNINASIYDEIQQEMKRAKVSQALFAKVAATKSQGWLCELLRWKEDPSPENRTLWENLSMIRRFLSLPQPERDAIYEQESNAVHHHGDRPPHIIHVPAEQIQQQQQQQQQQQQQQQAPPPPQPQQQPQTGPRLPPRQPTVASPAESDEENRQKTRPRTKISVEALGILQSFIQDVGLYPDEEAIQTLSAQLDLPKYTIIKFFQNQRYYLKHHGKLKDNSGLEVDVAEYKEEELLKDLEESVQDKNTNTLFSVKLEEELSVEGNTDINTDLKD

SEQ ID NO: 782331 - protein, 763 aa, Homo sapiens; identical to SEQ ID NO: 782330

SEQ ID NO: 782332 - protein, 221 aa, Homo sapiens [sequence omitted]

SEQ ID NO: 782333 - protein, 763 aa, Homo sapiens; identical to SEQ ID NO: 782330

SEQ ID NO: 782334 - protein, 242 aa, Homo sapiens
MDHLNEATQGKEHSEMSNNVSDPKGPPAKIARLEQNGSPLGRGRLGSTGAKMQGVPLKHSGHLMKTNLRKGTMLPVFCVVEHYENAIEYDCKEEHAEFVLVRKDMLFNQLIEMALLSLGYSHSSAAQAKGLIQVGKWNPVPLSYVTDAPDATVADMLQDVYHVVTLKIQLHSCPKLEDLPPEQWSHTTVRNALKDLLKDMNQSSLAKECPLSQHPGISNMLDNLFINGKINFKKKLPRAPEA

SEQ ID NO: 782335 - protein, 110 aa, Homo sapiens
AWGDEEAGGRQERTLPLLRSEQSQGSPWGPGPRFPADPCRSWEGRASASTMLGEGLPGPRHLDTHLSRAYRDPASPHSSSSHQSSGAQHSSAAVRPQAGHRPLSLRQVLP

SEQ ID NO: 782336 - protein, 1383 aa, Homo sapiens
MYATDSRGHSPAFLQPQNGNSRHPSGYVPGKVVPLRPPPPPKSQASAKFTSIRREDRATFAFSPEEQQAQRESQKQKRHKNTFICFAITSFSFFIALAIILGISSKYAPDENCPDQNPRLRNWDPGQDSAKQVVIKEGDMLRLTSDATVHSIVIQDGGLLVFGDNKDGSRNITLRTHYILIQDGGALHIGAEKCRYKSKATITLYGKSDEGESMPTFGKKFIGVEAGGTLELHGARKASWTLLARTLNSSGLPFGSYTFEKDFSRGLNVRVIDQDTAKILESERFDTHEYRNESRRLQEFLRFQDPGRIVAIAVGDSAAKSLLQGTIQMIQERLGSELIQGLGYRQAWALVGVIDGGSTSCNESVRNYENHSSGGKALAQREFYTVDGQKFSVTAYSEWIEGVSLSGFRVEVVDGVKLNLLDDVSSWKPGDQIVVASTDYSMYQAEEFTLLPCSECSHFQVKVKETPQFLHMGEIIDGVDMRAEVGILTRNIVIQGEVEDSCYAENQCQFFDYDTFGGHIMIMKNFTSVHLSYVELKHMGQQQMGRYPVHFHLCGDVDYKGGYRHATFVDGLSIHHSFSRCITVHGTNGLLIKDTIGFDTLGHCFFLEDGIEQRNTLFHNLGLLTKPGTLLPTDRNNSMCTTMRDKVFGNYIPVPATDCMAVSTFWIAHPNNNLINNAAAGSQDAGIWYLFHKEPTGESSGLQLLAKPELTPLGIFYNNRVHSNFKAGLFIDKGVKTTNSSAADPREYLCLDNSARFRPHQDANPEKPRVAALIDRLIAFKNNDNGAWVRGGDIIVQNSAFADNGIGLTFASDGSFPSDEGSSQEVSESLFVGESRNYGFQGGQNKYVGTGGIDQKPRTLPRNRTFPIRGFQIYDGPIHLTRSTFKKYVPTPDRYSSAIGFLMKNSWQITPRNNISLVKFGPHVSLNVFFGKPGPWFEDCEMDGDKNSIFHDIDGSVTGYKDAYVGRMDNYLIRHPSCVNVSKWNAVICSGTYAQVYVQTWSTQNLSMTITRDEYPSNPMVLRGINQKAAFPQYQPVVMLEKGYTIHWNGPAPRTTFLYLVNFNKNDWIRVGLCYPSNTSFQVTFGYLQRQNGSLSKIEEYEPVHSLEELQRKQSERKFYFDSSTGLLFLYLKAKSHRHGHSYCSSQGCERVKIQAATDSKDISNCMAKAYPQYYRKPSVVKRMPAMLTGLCQGCGTRQVVFTSDPHKSYLPVQFQSPDKAETQRGDPSVISVNGTDFTFRSAGVLLLVVDPCSVPFRLTEKTVFPLADVSRIEEYLKTGIPPRSIVLLSTRGEIKQLNISHLLVPLGLAKPAHLYDKGSTIFLGFSGNFKPSWTKLFTSPAGQGLGVLEQFIPLQLDEYGCPRATTVRRRDLELLKQASKAH

SEQ ID NO: 782337 - protein, 243 aa, Homo sapiens
MYATDSRGHSPAFLQPQNGNSRHPSGYVPGKVVPLRPPPPPKSQASAKFTSIRREDRATFAFSPEEQQAQRESQKQKRHKNTFICFAITSFSFFIALAIILGISSKYAPDENCPDQNPRLRNWDPGQDSAKQVVIKEGDMLRLTSDATVHSIVIQDGGLLVFGDNKDGSRNITLRTHYILIQDGGALHIGAEKCRYKSKATITLYGKSDEGESMPTFGKKFIGVEAGGTLQNMLPQSATDKPF

SEQ ID NO: 782338 - protein, 117 aa, Homo sapiens
GTMGGSARPLLLESELPSREATSLLSSSMRQWTRELTRQTHLCTLPHWNQSFCPGKPLSHWSLSPRSNPDHQHRTPDQGTRQAPQVEQCALSRWNRSLHLGKLPASCPPAPDSGPAN

SEQ ID NO: 782339 - protein, 151 aa, Homo sapiens
CPLHRSRRAWPEGQGASAGFLHCRTPCPVPPAPRVLGPHRPNMPRTLATAGAGPPSWRAYPLGHLMNVSPCSRSFPNLSPECLSSPWLLLHNLHPSVPTPGAGLFSGSGRLASVNAGLSQLLTQEGPRAATFSPCSRFEKVFPWEACVKCV

SEQ ID NO: 782340 - protein, 111 aa, Homo sapiens
LSQESSKYLYMEYHSPDDNRMNRNRLLHINLGIHSPSSYHPGDGAQLNGGRTLVHSSSDGHIDPQHAAGKQLICLVQEPHSAPAVVAATPNYNPFFMNEQNRSAATPPSQP

SEQ ID NO: 782341 - protein, 77 aa, Homo sapiens
EIRKASVGTAVAAWCLRGALGSCLASDPLSLLRPGPRPQGYGHSEPSSQVWPVLSQDNFAQLGTLGSVTTTLTLCTL

SEQ ID NO: 782342 - protein, 32 aa, Homo sapiens
MVVQVCESVCDIYFHSGYEDERGEYVDGLRPG

SEQ ID NO: 782343 - protein, 118 aa, Homo sapiens
REDDSSQEEETTEHLQWGGAKDENLEEEDEKKQDDLQLLFCLYLLAWLAGTRIFSVTYMMNLGVTLDSFICLSRVIQLVSWHYLSCPYSFLNTSLPCLIACLTPVPIIFLINHRATDS

SEQ ID NO: 782344 - protein, 38 aa, Homo sapiens
MGLLFKLVLDIGVSFRGIAPKPITDALTCSPIFWEFLV

SEQ ID NO: 782345 - protein, 105 aa, Homo sapiens
MCPVSPDTPPECFALGCRSLWPHSLRLISGEDCGVAMLCVHDLRIIVTLRPGFRGGRRVVGVLLAPNYHHYRRVSRTCVLVGEEFSWVSELCAALCHSLRLMGTE

SEQ ID NO: 782346 - protein, 77 aa, Homo sapiens
MKDHDLGLFRDRLGHLVMCHLQQLCLHTSSLRLLHVVHKTALVHHDHDLHMRPVSPPLTWAIEKGKSLRSSSWPLLP

SEQ ID NO: 782347 - protein, 74 aa, Homo sapiens
MIKHSWIHLYVMASAMSSSPIFFFFQRWSLTLSLRLECSSAIIKPTAASNSCVQVNLPPSMCDYRHEPLCLAFL

SEQ ID NO: 782348 - protein, 65 aa, Homo sapiens
REDTAHGTQRMEGAAEGWTRGHGTLDAARGGGSRGLDKRTQHRGRSAWRGQQRAGRGDVACRTQH

SEQ ID NO: 782349 - protein, 110 aa, Homo sapiens
MGTHQRFILKCKFQPLSIFKGGCSAEETSAFSAREFPSYLNWGATQPSATRGSGRLRPVKNWRFFPPLSVERLSTPSVTKIKAKSPLQKQREPGLRRAQRRAVCLSLEAK

SEQ ID NO: 782350 - protein, 80 aa, Homo sapiens
AVDLEFPTTGLQWALSCQMDNGGRDGAKELGGNGGYSLRNMTPDPGKGRESCLLKPTALSLPGSQPLHLAETTQRFTSPR

SEQ ID NO: 782351 - protein, 228 aa, Homo sapiens
MVKIYRHESLLGFFKGMSFPIASIAVVNSVLFGVYSNTLLVLTATSHQERRAQPPSYMHIFLAGCTGGFLQAYCLAPFDLIKVRLQNQTEPRAQPGSPPPRYQGPVHCAASIFREEGPRGLFRGAWALTLRDTPTVGIYFITYEGLCRQYTPEGQNPSSATVLVAGGFAGIASWVAATPLDVIKSRMQMDGLRRRVYQGMLDCMVSSIRQEGLGVFFRGVTINSARAF

SEQ ID NO: 782352 - protein, 224 aa, Homo sapiens
MPVEEFVAGWISGALGLVLGHPFDTVKLLGFFKGMSFPIASIAVVNSVLFGVYSNTLLVLTATSHQERRAQPPSYMHIFLAGCTGGFLQAYCLAPFDLIKVRLQNQTEPRAQPGSPPPRYQGPVHCAASIFREEGPRGLFRGAWALTLRDTPTVGIYFITYEGLCRQYTPEGQNPNPTHTHALIIALACASSESLICFSASPLDCELPEVRDCALDGFQPEPGA

SEQ ID NO: 782353 - protein, 270 aa, Homo sapiens
MPVEEFVAGWISGALGLVLGHPFDTVKVRLQTQTTYRGIVDCMVKIYRHESLLGFFKGMSFPIASIAVVNSVLFGVYSNTLLVLTATSHQERRAQPPSYMHIFLAGCTGGFLQAYCLAPFDLIKVRLQNQTEPRAQPGSPPPRYQGPVHCAASIFREEGPRGLFRGAWALTLRDTPTVGIYFITYEGLCRQYTPEGQNPSSATVLVAGGFAGIASWVAATPLDVIKSRMQMDGLRRRVYQGMLDCMVSSIRQEGLGVFFRGVTINSARAF

SEQ ID NO: 782354 - protein, 84 aa, Homo sapiens
QVLIDNNGTLGYRQQTHTHNHSQTSMPFSNNLQGLRLTDNNHTFGCIPHGQHSQMHTILHHSQTCVLPDSLQKHTHRHYLPAQI

SEQ ID NO: 782355 - protein, 105 aa, Homo sapiens
LLPVMNLPSLFHKPPCQVKRLLLGEAPQDLSHSRGTLYLPCQMPPLPHGVPRCIGTSLRARMCLILLLSLQAWSRGRARIYRTRLGAVAHACNPSTVGGPDGWIT

SEQ ID NO: 782356 - protein, 40 aa, Homo sapiens
MLKSCLCAQPSCYPVTDPPFAPPWVSTGSVGPRWSMAMGT

SEQ ID NO: 782357 - protein, 130 aa, Homo sapiens
SQVVPPLAMDPLAPMANPSLLKIQKLARCCGVCLWSHAAREAEAGELLEPGRWRLQGAKTVPLHSSLDNGLRLHLKKKQKQNVWASGDSRFISPPTAHTLSTEKLQALDTNPAHESSHGGYTLQSHRCTV

SEQ ID NO: 782358 - protein, 69 aa, Homo sapiens
SLSPSSVEPELSNAEPSSGRREESFSVSWRCEVRPRKGQLSVLLAAPALALLSGTTTRNSDRFDAELRK

SEQ ID NO: 782359 - protein, 132 aa, Homo sapiens
VSVVHMLCMCVHACECAWVCVCMSQQLSLGFPVPVSRRRRPLHFLGSCLCSTGHSKGSLGWVSPHSNSTCPGSHHRVMERVLVMRWSVCSATRAVGPGSGHTSLGLSFLTGKMWQQNLICEPPLALNNSGSR

SEQ ID NO: 782360 - protein, 48 aa, Homo sapiens
MRNPVSTKTSQAVAVDFSTTNSAENTMIYIHSKLQVHLFFLQQKTISL

SEQ ID NO: 782361 - protein, 249 aa, Homo sapiens
APAPLWDCQAERKEGSLPHSDDAGDYEQLFSSTQGEISEPSQITSEPEEQSGAVRERGLEVSHRLAPWQASPPHPCRFLLGPPQGGSPRGSHHTSGSSLSTPRSRGGTSQVGSPTLLSPAVPSKQKRDRSILTLSKEPGHQKGKERRSVLECRNKGVLMFPEKSPSIDLTQSNPDHSSSRSQKSSSKLNEEDEVILLLDSDEELELEQTKMKSISSDPLEEKKALEISPRSCELFSIIDVDADQEPSQS

SEQ ID NO: 782362 - protein, 68 aa, Homo sapiens
RPLPRSSGICSRRLRGRAGMKMTVDFEECLKDSPRFRCRESRGLFYRLLFPKSLVQCVTSILELGSPR

SEQ ID NO: 782363 - protein, 236 aa, Homo sapiens
PILDKVGSLVNARLEFSRGLMMLVLEKLATDIPCLLYDDNLFCHLVDEVLLFERELHSVHGYPGTFASCMHILSEETCFQRWLTVERKFALQKMDSMLSSEAAWVSQYKDITDVDEMKVPDCAETFMTLLLVITDRYKNLPTASRKLQFLELQKDLVDDFRIRLTQVMKEETRASLGFRYCAILNAVNYISTVLADWADNVFFLQLQTGCTGGVAENNTLSKLQLGPASLYGELCL

SEQ ID NO: 782364 - protein, 79 aa, Homo sapiens
YDNDNANTFYSLRSIFLNLKSSPSLLPHQPIIYTRTAIVRAENWSSSYYLVTHMLLTMPFRADTDLPLPPPKPACQGGY

SEQ ID NO: 782365 - protein, 88 aa, Homo sapiens
PQVILFEMQKAIVIQSLDDLRSWRVHLGICLSFWKMWNWSFLLEKALSQERATVRELQVRCKDLSKTAGEGRVRAAMGAVVQGLVRGS

SEQ ID NO: 782366 - protein, 33 aa, Homo sapiens
MSSAFMPSPGSSLFLRKQPRVTHFPVDTGYQEK

SEQ ID NO: 782367 - protein, 106 aa, Homo sapiens
PKTASAGGDAHPPICLPMPLLPGLTSASSTGPRPASPMVVASHYLTTTSYFSSPLKLPQNQNYSLTALLLPVPGLLHSLLTPPACRPPFTPSAIGPTAWPLQPPSH

SEQ ID NO: 782368 - protein, 49 aa, Homo sapiens
AKHLLEVKVALTQNHCFKLFLQEEYYLFVKILATIYVSGTETKKTNKHE

SEQ ID NO: 782369 - protein, 171 aa, Homo sapiens
CGSPNPLVWEGREFQAQTRSHCPGVRIPRLELSFPLNCNMILSQVLCFSGPQFLHLRCGRGWRDDLQRALTMDDFAPRRKGGQWFPSLSRGLGQQGDSAYLRSLGSERAGPASYLEARGSHKQVTQAVDHKSPHKKGDETWGEWRREPCPAVEPTKDPRLQEVKPPGLQAG

SEQ ID NO: 782370 - protein, 171 aa, Homo sapiens
SLIFKLDFYYLIEKRKRKTEEKGVDKDFESSSMKISKLEVTEIVKPSPKRKMEPDTEKMDRTPEKDKISLSAPAKKIKLNRETGKKIGSTENISRKSDGERERSPRSEPPIKKANEETPKTDNTKSSSSSQKDEKITEPPEKLILDQQKSTRKQHQSRKEKVKKAFPKMSN

SEQ ID NO: 782371 - protein, 1434 aa, Homo sapiens
HASADAWVRKQLPPPPPPIPPPRPLIQRNLQPLMRSPISRQQDPLMIPVTSSSTHPAPSISSLTSNQSSLAPPVSGNPSSAPAPVPDITATVSISVHSEKSDGPFRDSDNKILPAAALASEHSKGTSSIAITALMEEKGYQVPVLGTPSLLGQSLLHGQLIPTTGPVRINTARPGGGRPGWEHSNKLGYLVSPPQQIRRGERSCYRSINRGRHHSERSQRTQGPSLPATPVFVPVPPPPLYPPPPHTLPLPPGVPPPQFSPQFPPGQPPPAGYSVPPPGFPPAPANLSTPWVSSGVQTAHSNTIPTTQAPPLSREEFYREQRRLKEESKSPYSGSSYSRSSYTYSKSRSGSTRSRSYSRSFSRSHSRSYSRSPPYPRRGRGKSRNYRSRSRSHGYHRSRSRSPPYRRYHSRSRSPQAFRGQSPNKRNVPQGETEREYFNRYREVPPPYDMKAYYGRSVDFRDPFEKERYREWERKYREWYEKYYKGYAAGAQPRPSANRENFSPERFLPLNIRNSPFTRGRREDYVGGQSHRSRNIGSNYPEKLSARDGHNQKDNTKSKEKESENAPGDGKGNKHKKHRKRRKGEESEGFLNPELLETSRKSREPTGVEENKTDSLFVLPSRDDATPVRDEPMDAESITFKSVSEKDKRERDKPKAKGDKTKRKNDGSAVSKKENIVKPAKGPQEKVDGERERSPRSEPPIKKAKEETPKTDNTKSSSSSQKDEKITGTPRKAHSKSAKEHQETKPVKEEKVKKDYSKDVKSEKLTTKEEKAKKPNEKNKPLDNKGEKRKRKTEEKGVDKDFESSSMKISKLEVTEIVKPSPKRKMEPDTEKMDRTPEKDKISLSAPAKKIKLNRETGKKIGSTENISNTKEPSEKLESTSSKVKQEKVKGKVRRKVTGTEGSSSTLVDYTSTSSTGGSPVRKSEEKTDTKRTVIKTMEEYNNDNTAPAEDVIIMIQVPQSKWDKDDFESEEEDVKSTQPISSVGKPASVIKNVSTKPSNIVKYPEKESEPSEKIQKFTKDVSHEIIQHEVKSSKNSASSEKGKTKDRDYSVLEKENPEKRKNSTQPEKESNLDRLNEQGNFKSLSQSSKEARTSDKHDSTRASSNKDFTPNRDKKTDYDTREYSSSKRRDEKNELTRRKDSPSRNKDSASGQKNKPREERDLPKKGTGDSKKSNSSPSRDRKPHDHKATYDTKRPNEETKSVDKNPCKDREKHVLEARNNKESSGNKLLYILNPPETQVEKEQITGQIDKSTVKPKPQLSHSSRLSSDLTRETDEAAFEPDYNESDSESNVSVKEEESSGNISKDLKDKIVEKAKESLDTAAVVQVGISRNQSHSSPSVSPSRSHSPSGSQTRSHSSSASSAESQDSKKKKKKKEKKKHKKHKKHKKHKKHAGTEVELEKSQKHKHKKKKSKKNKDKEKEKEKDDQKVKSVTV

SEQ ID NO: 782372 - protein, 882 aa, Homo sapiens
  misc_feature (16)..(16): Xaa can be any naturally occurring amino acid
  misc_feature (23)..(23): Xaa can be any naturally occurring amino acid
FGKVCYVAKVTVTTEXQMKRKKXCTARKRRKGEESEGFLNPELLETSRKSREPTGVEENKTDSLFVLPSRDDATPVRDEPMDAESITFKSVSEKDKRERDKPKAKGDKTKRKNDGSAVSKKENIVKPAKGPQEKVDGERERSPRSEPPIKKAKEETPKTDNTKSSSSSQKDEKITGTPRKAHSKSAKEHQETKPVKEEKVKKDYSKDVKSEKLTTKEEKAKKPNEKNKPLDNKGEKRKRKTEEKGVDKDFESSSMKISKLEVTEIVKPSPKRKMEPDTEKMDRTPEKDKISLSAPAKKIKLNRETGKKIGSTENISNTKEPSEKLESTSSKVKQEKVKGKVRRKVTGTEGSSSTLVDYTSTSSTGGSPVRKSEEKTDTKRTVIKTMEEYNNDNTAPAEDVIIMIQVPQSKWDKDDFESEEEDVKSTQPISSVGKPASVIKNVSTKPSNIVKYPEKESEPSEKIQKFTKDVSHEIIQHEVKSSKNSASSEKGKTKDRDYSVLEKENPEKRKNSTQPEKESNLDRLNEQGNFKSLSQSSKEARTSDKHDSTRASSNKDFTPNRDKKTDYDTREYSSSKRRDEKNELTRRKDSPSRNKDSASGQKNKPREERDLPKKGTGDSKKSNSSPSRDRKPHDHKATYDTKRPNEETKSVDKNPCKDREKHVLEARNNKESSGNKLLYILNPPETQVEKEQITGQIDKSTVKPKPQLSHSSRLSSDLTRETDEAAFEPDYNESDSESNVSVKEEESSGNISKDLKDKIVEKAKESLDTAAVVQVGISRNQSHSSPSVSPSRSHSPSGSQTRSHSSSASSAESQDSKKKKKKKEKKKHKKHKKHKKHKKHAGTEVELEKSQKHKHKKKKSKKNKDKEKEKEKDDQKVKSVTV

SEQ ID NO: 782373 - protein, 753 aa, Homo sapiens
EIVKPSPKRKMEPDTEKMDRTPEKDKISLSAPAKKIKLNRETEEENWKYRKAHSKSAKEHQETKPVKEEKVKKDYSKDVKSEKLTTKEEKAKKPNEKNKPLDNKGEKRKRKTEEKGVDKDFESSSMKISKLEVTEIVKPSPKRKMEPDTEKMDRTPEKDKISLSAPAKKIKLNRETGKKIGSTENISNTKEPSEKLESTSSKVKQEKVKGKVRRKVTGTEGSSSTLVDYTSTSSTGGSPVRKSEEKTDTKRTVIKTMEEYNNDNTAPAEDVIIMIQVPQSKWDKDDFESEEEDVKSTQPISSVGKPASVIKNVSTKPSNIVKYPEKESEPSEKIQKFTKDVSHEIIQHEVKSSKNSASSEKGKTKDRDYSVLEKENPEKRKNSTQPEKESNLDRLNEQGNFKSLSQSSKEARTSDKHDSTRASSNKDFTPNRDKKTDYDTREYSSSKRRDEKNELTRRKDSPSRNKDSASGQKNKPREERDLPKKGTGDSKKSNSSPSRDRKPHDHKATYDTKRPNEETKSVDKNPCKDREKHVLEARNNKESSGNKLLYILNPPETQVEKEQITGQIDKSTVKPKPQLSHSSRLSSDLTRETDEAAFEPDYNESDSESNVSVKEEESSGNISKDLKDKIVEKAKESLDTAAVVQVGISRNQSHSSPSVSPSRSHSPSGSQTRSHSSSASSAESQDSKKKKKKKEKKKHKKHKKHKKHKKHAGTEVELEKSQKHKHKKKKSKKNKDKEKEKEKDDQKVKSVTV

SEQ ID NO: 782374 - protein, 220 aa, Homo sapiens
ARYPVFPFVSSGNKLLYILNPPETQVEKEQITGQIDKSTVKPKPQLSHSSRLSSDLTRETDEAAFEPDYNESDSESNVSVKEEESSGNISKDLKDKIVEKAKESLDTAAVVQVGISRNQSHSSPSVSPSRSHSPSGSQTRSHSSSASSAESQDSKKKKKKKEKKKHKKHKKHKKHKKHAGTEVELEKSQKHKHKKKKSKKNKDKEKEKEKDDQKVKSVTV

SEQ ID NO: 782375 - protein, 1677 aa, Homo sapiens
QTANLAEANASEEDKIKAMMSQSGHEYDPINYMKKPLGPPPPSYTCFRCGKPGHYIKNCPTNGDKNFESGPRIKKSTGIPRSFMMEVKDPNMKGAMLTNTGKYAIPTIDAEAYAIGKKEKPPFLPEEPSSSSEEDDPIPDELLCLICKDIMTDAVVIPCCGNSYCDECIRTALLESDEHTCPTCHQNDVSPDALIANKFLRQAVNNFKNETGYTKRLRKQLPPPPPPIPPPRPLIQRNLQPLMRSPISRQQDPLMIPVTSSSTHPAPSISSLTSNQSSLAPPVSGNPSSAPAPVPDITATVSISVHSEKSDGPFRDSDNKILPAAALASEHSKGTSSIAITALMEEKGYQVPVLGTPSLLGQSLLHGQLIPTTGPVRINTARPGGGRPGWEHSNKLGYLVSPPQQIRRGERSCYRSINRGRHHSERSQRTQGPSLPATPVFVPVPPPPLYPPPPHTLPLPPGVPPPQFSPQFPPGQPPPAGYSVPPPGFPPAPANLSTPWVSSGVQTAHSNTIPTTQAPPLSREEFYREQRRLKEEEKKKSKLDEFTNDFAKELMEYKKIQKERRRSFSRSKSPYSGSSYSRSSYTYSKSRSGSTRSRSYSRSFSRSHSRSYSRSPPYPRRGRGKSRNYRSRSRSHGYHRSRSRSPPYRRYHSRSRSPQAFRGQSPNKRNVPQGETEREYFNRYREVPPPYDMKAYYGRSVDFRDPFEKERYREWERKYREWYEKYYKGYAAGAQPRPSANRENFSPERFLPLNIRNSPFTRGRREDYVGGQSHRSRNIGSNYPEKLSARDGHNQKDNTKSKEKESENAPGDGKGNKHKKHRKRRKGEESEGFLNPELLETSRKSREPTGVEENKTDSLFVLPSRDDATPVRDEPMDAESITFKSVSEKDKRERDKPKAKGDKTKRKNDGSAVSKKENIVKPAKGPQEKVDGERERSPRSEPPIKKAKEETPKTDNTKSSSSSQKDEKITGTPRKAHSKSAKEHQETKPVKEEKVKKDYSKDVKSEKLTTKEEKAKKPNEKNKPLDNKGEKRKRKTEEKGVDKDFESSSMKISKLEVTEIVKPSPKRKMEPDTEKMDRTPEKDKISLSAPAKKIKLNRETGKKIGSTENISNTKEPSEKLESTSSKVKQEKVKGKVRRKVTGTEGSSSTLVDYTSTSSTGGSPVRKSEEKTDTKRTVIKTMEEYNNDNTAPAEDVIIMIQVPQSKWDKDDFESEEEDVKSTQPISSVGKPASVIKNVSTKPSNIVKYPEKESEPSEKIQKFTKDVSHEIIQHEVKSSKNSASSEKGKTKDRDYSVLEKENPEKRKNSTQPEKESNLDRLNEQGNFKSLSQSSKEARTSDKHDSTRASSNKDFTPNRDKKTDYDTREYSSSKRRDEKNELTRRKDSPSRNKDSASGQKNKPREERDLPKKGTGDSKKSNSSPSRDRKPHDHKATYDTKRPNEETKSVDKNPCKDREKHVLEARNNKESSGNKLLYILNPPETQVEKEQITGQIDKSTVKPKPQLSHSSRLSSDLTRETDEAAFEPDYNESDSESNVSVKEEESSGNISKDLKDKIVEKAKESLDTAAVVQVGISRNQSHSSPSVSPSRSHSPSGSQTRSHSSSASSAESQDSKKKKKKKEKKKHKKHKKHKKHKKHAGTEVELEKSQKHKHKKKKSKKNKDKEKEKEKDDQKVKSVTV

SEQ ID NO: 782376 - protein, 1218 aa, Homo sapiens
KILAISAQVPTATPVFVPVPPPPLYPPPPHTLPLPPGVPPPQFSPQFPPGQPPPAGYSVPPPGFPPAPANLSTPWVSSGVQTAHSNTIPTTQAPPLSREEFYREQRRLKEESKSPYSGSSYSRSSYTYSKSRSGSTRSRSYSRSFSRSHSRSYSRSPPYPRRGRGKSRNYRSRSRSHGYHRSRSRSPPYRRYHSRSRSPQAFRGQSPNKRNVPQGETEREYFNRYREVPPPYDMKAYYGRSVDFRDPFEKERYREWERKYREWYEKYYKGYAAGAQPRPSANRENFSPERFLPLNIRNSPFTRGRREDYVGGQSHRSRNIGSNYPEKLSARDGHNQKDNTKSKEKESENAPGDGKGNKHKKHRKRRKGEESEGFLNPELLETSRKSREPTGVEENKTDSLFVLPSRDDATPVRDEPMDAESITFKSVSEKDKRERDKPKAKGDKTKRKNDGSAVSKKENIVKPAKGPQEKVDGERERSPRSEPPIKKAKEETPKTDNTKSSSSSQKDEKITGTPRKAHSKSAKEHQETKPVKEEKVKKDYSKDVKSEKLTTKEEKAKKPNEKNKPLDNKGEKRKRKTEEKGVDKDFESSSMKISKLEVTEIVKPSPKRKMEPDTEKMDRTPEKDKISLSAPAKKIKLNRETGKKIGSTENISNTKEPSEKLESTSSKVKQEKVKGKVRRKVTGTEGSSSTLVDYTSTSSTGGSPVRKSEEKTDTKRTVIKTMEEYNNDNTAPAEDVIIMIQVPQSKWDKDDFESEEEDVKSTQPISSVGKPASVIKNVSTKPSNIVKYPEKESEPSEKIQKFTKDVSHEIIQHEVKSSKNSASSEKGKTKDRDYSVLEKENPEKRKNSTQPEKESNLDRLNEQGNFKSLSQSSKEARTSDKHDSTRASSNKDFTPNRDKKTDYDTREYSSSKRRDEKNELTRRKDSPSRNKDSASGQKNKPREERDLPKKGTGDSKKSNSSPSRDRKPHDHKATYDTKRPNEETKSVDKNPCKDREKHVLEARNNKESSGNKLLYILNPPETQVEKEQITGQIDKSTVKPKPQLSHSSRLSSDLTRETDEAAFEPDYNESDSESNVSVKEEESSGNISKDLKDKIVEKAKESLDTAAVVQVGISRNQSHSSPSVSPSRSHSPSGSQTRSHSSSASSAESQDSKKKKKKKEKKKHKKHKKHKKHKKHAGTEVELEKSQKHKHKKKKSKKNKDKEKEKEKDDQKVKSVTV

SEQ ID NO: 782377 - protein, 1625 aa, Homo sapiens
QTANLAEANASEEDKIKAMMSQSGHEYDPINYMKKPLGPPPPSYTCFRCGKPGHYIKNCPTNGDKNFESGPRIKKSTGIPRSFMMEVKDPNMKGAMLTNTGKPPFLPEEPSSSSEEDDPIPDELLCLICKDIMTDAVVIPCCGNSYCDECIRTALLESDEHTCPTCHQNDVSPDALIANKFLRQAVNNFKNETGYTKRLRKQLPPPPPPIPPPRPLIQRNLQPLMRSPISRQQDPLMIPVTSSSTHPAPSISSLTSNQSSLAPPVSGNPSSAPAPVPDITATVSISVHSEKSDGPFRDSDNKILPAAALASEHSKGTSSIAITALMEEKGYQVPVLGTPSLLGQSLLHGQLIPTTGPVRINTARPGGGRPGWEHSNKLGYLVSPPQQIRRGERSCYRSINRGRHHSERSQRTQGPSLPATPVFVPVPPPPLYPPPPHTLPLPPGVPPPQFSPQFPPGQPPPAGYSVPPPGFPPAPANLSTPWVSSGVQTAHSNTIPTTQAPPLSREEFYREQRRLKEESKSPYSGSSYSRSSYTYSKSRSGSTRSRSYSRSFSRSHSRSYSRSPPYPRRGRGKSRNYRSRSRSHGYHRSRSRSPPYRRYHSRSRSPQAFRGQSPNKRNVPQGETEREYFNRYREVPPPYDMKAYYGRSVDFRDPFEKERYREWERKYREWYEKYYKGYAAGAQPRPSANRENFSPERFLPLNIRNSPFTRGRREDYVGGQSHRSRNIGSNYPEKLSARDGHNQKDNTKSKEKESENAPGDGKGNKHKKHRKRRKGEESEGFLNPELLETSRKSREPTGVEENKTDSLFVLPSRDDATPVRDEPMDAESITFKSVSEKDKRERDKPKAKGDKTKRKNDGSAVSKKENIVKPAKGPQEKVDGERERSPRSEPPIKKAKEETPKTDNTKSSSSSQKDEKITGTPRKAHSKSAKEHQETKPVKEEKVKKDYSKDVKSEKLTTKEEKAKKPNEKNKPLDNKGEKRKRKTEEKGVDKDFESSSMKISKLEVTEIVKPSPKRKMEPDTEKMDRTPEKDKISLSAPAKKIKLNRETGKKIGSTENISNTKEPSEKLESTSSKVKQEKVKGKVRRKVTGTEGSSSTLVDYTSTSSTGGSPVRKSEEKTDTKRTVIKTMEEYNNDNTAPAEDVIIMIQVPQSKWDKDDFESEEEDVKSTQPISSVGKPASVIKNVSTKPSNIVKYPEKESEPSEKIQKFTKDVSHEIIQHEVKSSKNSASSEKGKTKDRDYSVLEKENPEKRKNSTQPEKESNLDRLNEQGNFKSLSQSSKEARTSDKHDSTRASSNKDFTPNRDKKTDYDTREYSSSKRRDEKNELTRRKDSPSRNKDSASGQKNKPREERDLPKKGTGDSKKSNSSPSRDRKPHDHKATYDTKRPNEETKSVDKNPCKDREKHVLEARNNKESSGNKLLYILNPPETQVEKEQITGQIDKSTVKPKPQLSHSSRLSSDLTRETDEAAFEPDYNESDSESNVSVKEEESSGNISKDLKDKIVEKAKESLDTAAVVQVGISRNQSHSSPSVSPSRSHSPSGSQTRSHSSSASSAESQDSKKKKKKKEKKKHKKHKKHKKHKKHAGTEVELEKSQKHKHKKKKSKKNKDKEKEKEKDDQKVKSVTV

SEQ ID NO: 782378 - protein, 1680 aa, Homo sapiens
QTANLAEANASEEDKIKAMMSQSGHEYDPINYMKKPLGPPPPSYTCFRCGKPGHYIKNCPTNGDKNFESGPRIKKSTGIPRSFMMEVKDPNMKGAMLTNTGKYAIPTIDAEAYAIGKKEKPPFLPEEPSSSSEEDDPIPDELLCLICKDIMTDAVVIPCCGNSYCDECIRTALLESDEHTCPTCHQNDVSPDALIANKFLRQAVNNFKNETGYTKRLRKQLPPPPPPIPPPRPLIQRNLQPLMRSPISRQQDPLMIPVTSSSTHPAPSISSLTSNQSSLAPPVSGNPSSAPAPVPDITATVSISVHSEKSDGPFRDSDNKILPAAALASEHSKGTSSIAITALMEEKGYQVPVLGTPSLLGQSLLHGQLIPTTGPVRINTARPGGGRPGWEHSNKLGYLVSPPQQIRRGERSCYRSINRGRHHSERSQRTQGPSLPATPVFVPVPPPPLYPPPPHTLPLPPGVPPPQFSPQFPPGQPPPAGYSVPPPGFPPAPANLSTPWVSSGVQTAHSNTIPTTQAPPLSREEFYREQRRLKEEEKKKSKLDEFTNDFAKELMEYKKIQKERRRSFSRSKSPYSGSSYSRSSYTYSKSRSGSTRSRSYSRSFSRSHSRSYSRSPPYPRRGRGKSRNYRSRSRSHGYHRSRSRSPPYRRYHSRSRSPQAFRGQSPNKRNVPQGETEREYFNRYREVPPPYDMKAYYGRSVDFRDPFEKERYREWERKYREWYEKYYKGYAAGAQPRPSANRENFSPERFLPLNIRNSPFTRGRREDYVGGQSHRSRNIGSNYPEKLSARDGHNQKDNTKSKEKESENAPGDGKGNKHKKHRKRRKGEESEGFLNPELLETSRKSREPTGVEENKTDSLFVLPSRDDATPVRDEPMDAESITFKSVSEKDKRERDKPKAKGDKTKRKNDGSAVSKKENIVKPAKGPQEKVDGERERSPRSEPPIKKAKEETPKTDNTKSSSSSQKDEKITGTPRKAHSKSAKEHQETKPVKEEKVKKDYSKDVKSEKLTTKEEKAKKPNEKNKPLDNKGEKRKRKTEEKGVDKDFESSSMKISKLEVTEIVKPSPKRKMEPDTEKMDRTPEKDKISLSAPAKKIKLNRETGKKIGSTENISNTKEPSEKLESTSSKVKQEKVKGKVRRKVTGTEGSSSTLVDYTSTSSTGGSPVRKSEEKTDTKRTVIKTMEEYNNDNTAPAEDVIIMIQVPQSKWDKDDFESEEEDVKSTQPISSVGKPASVIKNVSTKPSNIVKYPEKESEPSEKIQKFTKDVSHEIIQHEVKSSKNSASSEKGKTKDRDYSVLEKENPEKRKNSTQPEKESNLDRLNEQGNFKSLSQSSKEARTSDKHDSTRASSNKDFTPNRDKKTDYDTREYSSSKRRDEKNELTRRKDSPSRNKDSASGQKNKPREERDLPKKGTGDSKKSNSSPSRDRKPHDHKATYDTKRPNEETKSVDKNPCKDREKHVLEARNNKESSGNKLLYILNPPETQVEKEQITGQIDKSTVKPKPQLSHSSRLSSDLTRETDEAAFEPDYNESDSESNVSVKEEESSGNISKDLKDKIVEKAKESLDTAAVVQVGISRNQSHSSPSVSPSRSHSPSGSQTRSHSSSASSAESQDSKKKKKKKEKKKHKKHKKHKKHKKHAGTEVELEKSQKHKHKKKKSKKKLKKHKKHKKHKKHAGTEVQESS

SEQ ID NO: 782379 - protein, 1615 aa, Homo sapiens
QTANLAEANASEEDKIKAMMSQSGHEYDPINYMKKPLGPPPPSYTCFRCGKPGHYIKNCPTNGDKNFESGPRIKKSTGIPRSFMMEVKDPNMKGAMLTNTGKYAIPTIDAEAYAIGKKEKPPFLPEEPSSSSEEDDPIPDELLCLICKDIMTDAVVIPCCGNSYCDECIRTALLESDEHTCPTCHQNDVSPDALIANKFLRQAVNNFKNETGYTKRLRKQLPPPPPPIPPPRPLIQRNLQPLMRSPISRQQDPLMIPVTSSSTHPAPSISSLTSNQSSLAPPVSGNPSSAPAPVPDITATVSISVHSEKSDGPFRDSDNKILPAAALASEHSKGTSSIAITALMEEKGYQVPVLGTPSLLGQSLLHGQLIPTTGPVRINTARPGGGRPGWEHSNKLGYLVSPPQQIRRGERSCYRSINRGRHHSERSQRTQGPSLPATPVFVPVPPPPLYPPPPHTLPLPPGVPPPQFSPQFPPGQPPPAGYSVPPPGFPPAPANLSTPWVSSGVQTAHSNTIPTTQAPPLSREEFYREQRRLKEEEKKKSKLDEFTNDFAKELMEYKKIQKERRRSFSRSKSPYSGSSYSRSSYTYSKSRSGSTRSRSYSRSFSRSHSRSYSRSPPYPRRGRGKSRNYRSRSRSHGYHRSRSRSPPYRRYHSRSRSPQAFRGQSPNKRNVPQGETEREYFNRYREVPPPYDMKAYYGRSVDFRDPFEKERYREWERKYREWYEKYYKGYAAGAQPRPSANRENFSPERFLPLNIRNSPFTRGRREDYVGGQSHRSRNIGSNYPEKLSARDGHNQKDNTKSKEKESENAPGDGKGNKHKKHRKRRKGEESEGFLNPELLETSRKSREPTGVEENKTDSLFVLPSRDDATPVRDEPMDAESITFKSVSEKDKRERDKPKAKGDKTKRKNDGSAVSKKENIVKPAKGPQEKVDGERERSPRSEPPIKKAKEETPKTDNTKSSSSSQKDEKITGTPRKAHSKSAKEHQETKPVKEEKVKKDYSKDVKSEKLTTKEEKAKKPNEKNKPLDNKGEKRKRKTEEKGVDKDFESSSMKISKLEVTEIVKPSPKRKMEPDTEKMDRTPEKDKISLSAPAKKIKLNRETGKKIGSTENISNTKEPSEKLESTSSKVKQEKVKGKVRRKVTGTEGSSSTLVDYTSTSSTGGSPVRKSEEKTDTKRTVIKTMEEYNNDNTAPAEDVIIMIQVPQSKWDKDDFESEEEDVKSTQPISSVGKPASVIKNVSTKPSNIVKYPEKESEPSEKIQKFTKDVSHEIIQHEVKSSKNSASSEKGKTKDRDYSVLEKENPEKRKNSTQPEKESNLDRLNEQGNFKSLSQSSKEARTSDKHDSTRASSNKDFTPNRDKKTDYDTREYSSSKRRDEKNELTRRKDSPSRNKDSASGQKNKPREERDLPKKGTGDSKKSNSSPSRDRKPHDHKATYDTKRPNEETKSVDKNPCKDREKHVLEARNNKESSGNKLLYILNPPETQVEKEQITGQIDKSTVKPKPQLSHSSRLSSDLTRETDEAAFEPDYNESDSESNVSVKEEESSGNISKDLKDKIVEKAKESLDTAAVVQVGISRNQSHSSPSVSPSRSHSPSGSQTRSRRQTVSRRSSEGILRTT

SEQ ID NO: 782380 - protein, 171 aa, Homo sapiens
QTANLAEANASEEDKIKAMMSQSGHEYDPINYMKKPLGPPPPSYTCFRCGKPGHYIKNCPTNGDKNFESGPRIKKSTGIPRSFMMEVKDPNMKGAMLTNTGKYAIPTIDAEAYAIGKKEKPPFLPEEPSSSSEEDDPIPDELLCLICKDIMTDAVVIPCCGNSYCDECKKC

SEQ ID NO: 782381 - protein, 42 aa, Homo sapiens
MASLACAWVWQVAPRFLEKLRNPSTEGPQLTRGASPLPPQCT

SEQ ID NO: 782382 - protein, 67 aa, Homo sapiens
TPSPQSHTLGLCTGSVEPPELQAQGPVPDRHSRNLGGINKVISSQAGMSITRRFDSLCTHQGAQQEL

SEQ ID NO: 782383 - protein, 84 aa, Homo sapiens
LVLLVQGSLRADLSWTPSPVSTGPLMLSLKNLLWSSESWDMVYVGVLQRDRINVLYRYRRGDLLREWAYAIVEAAKSGDRLSAS

SEQ ID NO: 782384 - protein, 49 aa, Homo sapiens
NRLSCVHVGSAGKDAAGRCSRDVFGFHHGGAGAWITHMDTTQPINLPLR

SEQ ID NO: 782385 - protein, 395 aa, Homo sapiens
FCGEPPAIKDAVITGNNFTFRNTVTYTCKEGYTLAGLDTIECLADGKWSRSDQQCLAVSCDEPPIVDHASPETAHRLFGDIAFYYCSDGYSLADNSQLLCNAQGKWVPPEGQDMPRCIAHFCEKPPSVSYSILESVSKAKFAAGSVVSFKCMEGFVLNTSAKIECMRGGQWNPSPMSIQCIPVRCGEPPSIMNGYASGSNYSFGAMVAYSCNKGFYIKGEKKSTCEATGQWSSPIPTCHPVSCGEPPKVENGFLEHTTGRIFESEVRYQCNPGYKSVGSPVFVCQANRHWHSESPLMCVPLDCGKPPPIQNGFMKGENFEVGSKVQFFCNEGYELVGDSSWTCQKSGKWNKKSNPKCMPAKCPEPSLGHWTRTNRLKAWGSTVLFAELTAANSSQ

SEQ ID NO: 782386 - protein, 76 aa, Homo sapiens
STTARPHTCPPIDTVLSDANTLWHMLCLCQKCQPRAFVARLQCLLFQEVSHTFLGYSSSVPLLLYNQDTGVKPQRD

SEQ ID NO: 782387 - protein, 84 aa, Homo sapiens
RTQRTEVLPLIERKTRQKQKQRGVGSEQDLLPRAERPAPERGSRLVQQRCRSQKERPGKEWAGLLFARSELVQWKGSGAATHRM

SEQ ID NO: 782388 - protein, 98 aa, Homo sapiens
TSLQRQAGSPTWSAERKPLRVCCTAPWGPWLPSPAKAKTPASEEAQRKKNKRAREGSPRRAAEWLAGGSRPSRVASPAADGPEDARSEKLDSGRRRAT

SEQ ID NO: 782389 - protein, 70 aa, Homo sapiens
PQRQSLLSSNLLHPQMANSLSPPLPKLMAHSEHGPCVHSSIPCVLARNAGSWASPDLPKWRLWGQGPGKH

SEQ ID NO: 782390 - protein, 159 aa, Homo sapiens
PVIQLSSTSGISYAESQTVIPVKKGQIYTVSGLLKTDIDSLGTSGGAWIHVYYYGNSGSVNDFATKLVTTDTDWTKYVKTLRPQEDGYYKIRLEMKNASGKAFFDNLRFSYANQVTEYLYDAKQNYVTQIKNQQDQAATYDLDGYGQVKKVITPENQLL

SEQ ID NO: 782391 - protein, 59 aa, Homo sapiens
RPPDGLHLTLVPDPLDSPSSVPQNEQQPHPMCPQDEEGPRQPPGSTRGQVPSPSHRPTG

SEQ ID NO: 782392 - protein, 105 aa, Homo sapiens
RFPELMLMLTKGCGGFGEPMPLMITQETCLAHQIRPHSTHRTVSWLQLVRPVLRRSLTRQAKRSMGMTACTSVSRGLSGWRGRCVSLPNKECVTEQSGHCPASPE

SEQ ID NO: 782393 - protein, 107 aa, Homo sapiens
APPHPRNLSPQYWVSAFPSTSLRILRNAYQVRGPGLSPAITSGWAVLGLGLVFLSHSPVSQGSFYTGSADCLTKWPCRLFSLVSGFMCPCHYTPVAGSTPREGVGGP

SEQ ID NO: 782394 - protein, 85 aa, Homo sapiens
ELNFQDLKNQLNHMSVSSIKQAVDFLSNEGQEKGGVLVAPPVRSVSELRAEQLLAGLVGPAAEGVAETPLTEGIGARDGSLSCSQ

SEQ ID NO: 782395 - protein, 77 aa, Homo sapiens
GHVAGQEGGFERKFPESSEVRDGSHCTLQNIDRAQEAEMNGWACGKVKGPEGHRAVDASNGFGDSRSWLGTRLAQPS

SEQ ID NO: 782396 - protein, 45 aa, Homo sapiens
MPVAWPSPRTSPPPSPLWPLQMNAAAAFSERFSALDLHASLPRHI

SEQ ID NO: 782397 - protein, 99 aa, Homo sapiens
MGTLAVAVKLYILHKYPTVDVLRFRYLLKQALATGMCRSLLARPLNSEARGATGSFKLDPKQQEENPAQGDGPLMVPRRAEKAKGKDAKKPSEAKEDPP

SEQ ID NO: 782398 - protein, 67 aa, Homo sapiens
PGNGAQLRTSVEVSVGGIRGKRHERGMKSEVGRGRLHEAHGPQEGFTMKAMEIGGCRGLLGESIRNF

SEQ ID NO: 782399 - protein, 81 aa, Homo sapiens
FQNGPLFRKSPFHPKINTCQFFTISANLASLYKPMCYQRPQSACVMSLLSGFAAAVKCQVKMPWKIYTTPQQKKGQEMVKC

SEQ ID NO: 782400 - protein, 112 aa, Homo sapiens
MLPRLVSNSWAPATHRLGLPKCWDYRREPPRPAGRWDFNSPEAPHAARCQPTLQPCSPAHTQKPPEASGLSPHCPAAGLACPHHRACSATEQKRHGQGRSGQDKALPPQAGV

SEQ ID NO: 782401 - protein, 110 aa, Homo sapiens
MAPAQKWLTWISSASRQEQRVTEDRPLWGESGALNSCSDSTSESFCLRSLCVPLLFYSPMAAAGSAELTSKAAMKFKRDSVSKDIHRELSTTLISGTIISRGSGKLMQTL

SEQ ID NO: 782402 - protein, 127 aa, Homo sapiens
CDPAKRPPGKSPAGAVGAMQEGAELGWKQALSAADGGSQDAMGLRCPLPTGGARQPEELPLPDAEPSLLTAMEEAGDPAGPRLEGWAWSMHGCGVNASGDLELGSPLFWDTCGRPAAALGIHTWKVG

SEQ ID NO: 782403 - protein, 407 aa, Homo sapiens
MNNSGADEIGKLFVGGLDWSTTQETLRSYFSQYGEVVDCVIMKDKTTNQSRGFGFVKFKDPNCVGTVLASRPHTLDGRNIDPKPCTPRGMQPERTRPKEGWQKGPRSDNSKSNKIFVGGIPHNCGETELREYFKKFGVVTEVVMIYDAEKQRPRGFGFITFEDEQSVDQAVNMHFHDIMGKKVEVKRAEPRDSKSQAPGQPGASQWGSRVVPNAANGWAGQPPPTWQQGYGPQGMWVPAGQAIGGYGPPPAGRGAPPPPPPFTSYIVSTPPGGFPPPQGFPQGYGAPPQFSFGYGPPPPPPDQFAPPGVPPPPATPGAAPLAFPPPPSQAAPDMSKPPTAQPDFPYGQYAGYGQDLSGFGQGFSDPSQQPPSYGGPSVPGSGGPPAGGSGFGRGQNHNVQGFHPYRR

SEQ ID NO: 782404 - protein, 407 aa, Homo sapiens; identical to SEQ ID NO: 782403

SEQ ID NO: 782405 - protein, 407 aa, Homo sapiens; identical to SEQ ID NO: 782403

SEQ ID NO: 782406 - protein, 407 aa, Homo sapiens; identical to SEQ ID NO: 782403

SEQ ID NO: 782407 - protein, 427 aa, Homo sapiens
MRGLSGAWKSRVCRGAVCGCPATSSEGRACPLLPAFGWEGLLWGLLAPTSPARMRGRRCWPFMSVSTHVSGATGSPEAGIQTPALELLLPACVWPWECWGSSLSQTAAPRSSCCPCTSPAQGGRTLCESLGSWEQAVPSEDHRGAGPGVRADATLSFQVTEVVMIYDAEKQRPRGFGFITFEDEQSVDQAVNMHFHDIMGKKVEVKRAEPRDSKSQAPGQPGASQWGSRVVPNAANGWAGQPPPTWQQGYGPQGMWVPAGQAIGGYGPPPAGRGAPPPPPPFTSYIVSTPPGGFPPPQGFPQGYGAPPQFSFGYGPPPPPPDQFAPPGVPPPPATPGAAPLAFPPPPSQAAPDMSKPPTAQPDFPYGQYAGYGQDLSGFGQGFSDPSQQPPSYGGPSVPGSGGPPAGGSGFGRGQNHNVQGFHPYRR

SEQ ID NO: 782408 - protein, 427 aa, Homo sapiens; identical to SEQ ID NO: 782407

SEQ ID NO: 782409 - protein, 173 aa, Homo sapiens
MWVPAGQAIGGYGPPPAGRGAPPPPPPFTSYIVSTPPGGFPPPQGFPQGYGAPPQFSFGYGPPPPPPDQFAPPGVPPPPATPGAAPLAFPPPPSQAAPDMSKPPTAQPDFPYGQYAGYGQDLSGFGQGFSDPSQQPPSYGGPSVPGSGGPPAGGSGFGRGQNHNVQGFHPYRR

SEQ ID NO: 782410 - protein, 135 aa, Homo sapiens
MYTGLFFNLKRGFLSPQFSFGYGPPPPPPDQFAPPGVPPPPATPGAAPLAFPPPPSQAAPDMSKPPTAQPDFPYGQYAGYGQDLSGFGQGFSDPSQQPPSYGGPSVPGSGGPPAGGSGFGRGQNHNVQGFHPYRR

SEQ ID NO: 782411 - protein, 380 aa, Homo sapiens
MNNSGADEIGKLFVGGLDWSTTQETLRSYFSQYGEVVDCVIMKDKTTNQSRGFGFVKFKDPNCVGTVLASRPHTLDGRNIDPKPCTPRGMQPERTRPKEGWQKGPRSDNSKSNKIFVGGIPHNCGETELREYFKKFGVVTEVVMIYDAEKQRPRGFGFITFEDEQSVDQAVNMHFHDIMGKKVEVKRAEPRDSKSQAPGQPGASQWGSRVVPNAANGWAGQPPPTWQQGYGPQGMWVPAGQAIGGYGPPPAGRGAPPPPPPFTSYIVSTPPGGFPPPQGFPQGYGAPPQFSFGYGPPPPPPGSLLTRTPKGPQRTPEGLLSAERLPPAEPLEAPPGSPTQDPLGDASVRARLTLTPAYPSPLNLLTLEEYFSPKSTLDTF

SEQ ID NO: 782412 - protein, 206 aa, Homo sapiens
MNNSGADEIGKLFVGGLDWSTTQETLRSYFSQYGEVVDCVIMKDKTTNQSRGFGFVKFKDPNCVGTVLASRPHTLDGRNIDPKPCTPRGMQPERTRPKEGWQKGPRSDNSKSNKIFVGGIPHNCGETELREYFKKFGVVSFSPPRQHCGDRAASAQAWAFLGLEWPSHRCTGLSGWELAVSYFPNACALRKGGKPGLCLHGHFVSQ

SEQ ID NO: 782413 - protein, 407 aa, Homo sapiens; identical to SEQ ID NO: 782403

SEQ ID NO: 782414 - protein, 407 aa, Homo sapiens; identical to SEQ ID NO: 782403

SEQ ID NO: 782415 - protein, 391 aa, Homo sapiens
MNNSGADEIGKLFVGGLDWSTTQETLRSYFSQYGEVVDCVIMKDKTTNQSRGFGFVKFKDPNCVGTVLASRPHTLDGRNIDPKPCTPRGMQPERTRPKEGWQKGPRSDNSKSNKIFVGGIPHNCGETELREYFKKFGVVTEVVMIYDAEKQRPRGFGFITFEDEQSVDQAVNMHFHDIMGKKVEVKRAEPRDSKSQAPGQPGASQWGSRVVPNAANGWAGQPPPTWQQGYGPQGMWVPAGQAIGGYGPPPAGRGAPPPPPPFTSYIVSTPPGGFPPPQGFPQGYGAPPQFSFGYGPPPPPPDQFAPPGVPPPPATPGAAPLAFPPPPSQAAPDMSKPPTAQPDFPYGQYAAAAALDEGRTTTCKGSTPTDASPRRRDVCTAQTQDSKLVNS

SEQ ID NO: 782416 - protein, 427 aa, Homo sapiens
MRGLSGAWKSRVCRGAVCGCPATSSEGRACPLLPAFGWEGLLWGLLAPTSPARMRGRRCWPFMSVSTHVSGATGSPEAGIQTPALELLLPACVWPWECWGSSLSQTAAPRSSCCPCTSPAQGGRTLCESLGRGNRLCPRKTTCGAGPGVRADATLSFQVTEVVMIYDAEKQRPRGFGFITFEDEQSVDQAVNMHFHDIMGKKVEVKRAEPRDSKSQAPGQPGASQWGSRVVPNAANGWAGQPPPTWQQGYGPQGMWVPAGQAIGGYGPPPAGRGAPPPPPPFTSYIVSTPPGGFPPPQGFPQGYGAPPQFSFGYGPPPPPPDQFAPPGVPPPPATPGAAPLAFPPPPSQAAPDMSKPPTAQPDFPYGQYAGYGQDLSGFGQGFSDPSQQPPSYGGPSVPGSGGPPAGGSGFGRGQNHNVQGFHPYRR

SEQ ID NO: 782417 - protein, 510 aa, Homo sapiens
QVQPVGEPGCAQRCQCWAGQPRPRGSKDMARKRCGCRQTGDWWLWTGPCRKRWGRGQHVLLYIVSTPPGGCHGPQGLAQGYGARHSSVLATGSGAPSVAAAAAMNNSGADEIGKLFVGGLDWSTTQETLRSYFSQYGEVVDCVIMKDKTTNQSRGFGFVKFKDPNCVGTVLASRPHTLDGRNIDPKPCTPRGMQPERTRPKEGWQKGPRSDNSKSNKIFVGGIPHNCGETELREYFKKFGVVTEVVMIYDAEKQRPRGFGFITFEDEQSVDQAVNMHFHDIMGKKVEVKRAEPRDSKSQAPGQPGASQWGSRVVPNAANGWAGQPPPTWQQGYGPQGMWVPAGQAIGGYGPPPAGRGAPPPPPPFTSYIVSTPPGGFPPPQGFPQGYGAPPQFSFGYGPPPPPPDQFAPPGVPPPPATPGAAPLAFPPPPSQAAPDMSKPPTAQPDFPYGQYAGYGQDLSGFGQGFSDPSQQPPSYGGPSVPGSGGPPAGGSGFGRGQNHNVQGFHPYRR

SEQ ID NO: 782418 - protein, 886 aa, Homo sapiens
LVTLRSALLASPLQVRWVPCRRVLSLDGSRPSLRQMAALRTPWVCGVPYPLGGLGSLRSSLFLMQSPHCSLPWRRQEIPPDPAWRAGPGACMGAGSTPQETWSLGAPCSGTLVAVQLLPWESTPGRKLFVGGLDWSTTQETLRSYFSQYGEVVDCVIMKDKTTNQSRGFGFVKFKDPNCVGTVLASRPHTLDGRNIDPKPCTPRGMQPERTRPKEGWQKGPRSDNSKSNKIFVGGIPHNCGETELREYFKKFGVVSFSPPRQHCGDRAASAQAWAFLGLEWPSHRCTGLSGWELAVSYFPNACALRKGGKPGLCLHGHFVSQEGGWAVNQPDSLQGGRPIPLGTPWGPVSEKGSYTETGFSVAWASQPHRADFPLGRWENARAPLSPVPEGAGTAGGGRRGALLVTQGRGVWSPQGPAGTPAVPRRSHSEPRQQDSPACLSTAHVHQVVPEGATGLEPGMRGLSGAWKSRVCRGAVCGCPATSSEGRACPLLPAFGWEGLLWGLLAPTSPARMRGRRCWPFMSVSTHVSGATGSPEAGIQTPALELLLPACVWPWECWGSSLSQTAAPRSSCCPCTSPAQGGRTLCESLGSWEQAVPSEDHRGAGPGVRADATLSFQVTEVVMIYDAEKQRPRGFGFITFEDEQSVDQAVNMHFHDIMGKKVEVKRAEPRDSKSQAPGQPGASQWGSRVVPNAANGWAGQPPPTWQQGYGPQGMWVPAGQAIGGYGPPPAGRGAPPPPPPFTSYIVSTPPGGFPPPQGFPQGYGAPPQFSFGYGPPPPPPDQFAPPGVPPPPATPGAAPLAFPPPPSQAAPDMSKPPTAQPDFPYGQYAGYGQDLSGFGQGFSDPSQQPPSYGGPSVPGSGGPPAGGSGFGRGQNHNVQGFHPYRR

SEQ ID NO: 782419 - protein, 274 aa, Homo sapiens
MNNSGADEIGKLFVGGLDWSTTQETLRSYFSQYGEVVDCVIMKDKTTNQSRGFGFVKFKDPNCVGTVLASRPHTLDGRNIDPKPCTPRGMQPERTRPKEGWQKGPRSDNSKSNKIFVGGIPHNCGETELREYFKKFGVVTEVVMIYDAEKQRPRGFGFITFEDEQSVDQAVNMHFHDIMGKKVEVKRAEPRDSKSQAPGQPGASQWGSRVVPNAANGWAGQPPPTWQQGYGPQGMWVPAGQAIGGYGPPPAGRGAPPPPPPFTSYIVSTPPGGC

SEQ ID NO: 782420 - protein, 245 aa, Homo sapiens
MNNSGADEIGKLFVGGLDWSTTQETLRSYFSQYGEVVDCVIMKDKTTNQSRGFGFVKFKDPNCVGTVLASRPHTLDGRNIDPKPCTPRGMQPERTRPKEGWQKGPRSDNSKSNKIFVGGIPHNCGETELREYFKKFGVVTEVVMIYDAEKQRPRGFGFITFEDEQSVDQAVNMHFHDIMGKKVEVKRAEPRDSKSQAPGQPGASQWGSRVVPNAANGWAGQPPPTWQQGYGPQGMWVPAGQAIGC

SEQ ID NO: 782421 - protein, 138 aa, Homo sapiens
MNNSGADEIGKLFVGGLDWSTTQETLRSYFSQYGEVVDCVIMKDKTTNQSRGFGFVKFKDPNCVGTVLASRPHTLDGRNIDPKPCTPRGMQPERTRPKEGWQKGPRSDNSKSNKIFVGGPETLGASRRNLLSVFLFFV

SEQ ID NO: 782422 - protein, 71 aa, Homo sapiens
LSVSLLSYGMIGFMWSIGRLAYPDMSVLNLWGIVAGMIALSLGQDDGSSSPKRFRRLEPRKTVLGSLVFRD

SEQ ID NO: 782423 - protein, 47 aa, Homo sapiens
MGKAKFSGVQIFLTTPPTGMHVTLRPRHSCKFQEITFYSHHATVHSG

SEQ ID NO: 782424 - protein, 41 aa, Homo sapiens
YRINHHKSTAASNICKSDLDFRKPDTNISIGIYPLDSYARC

SEQ ID NO: 782425 - protein, 96 aa, Homo sapiens
EKPIIVRWEKEDRIINPEMARYLVSTKEVGEEVISTLQILPTVREDSGFFSCHAINSYGEDRGIIQLTVQEPPDPPEIEIKDVKARTITLRWTMGF

SEQ ID NO: 782426 - protein, 146 aa, Homo sapiens
RQGLPKAPGWTEKNSHHSWEPLDAPEGKLQGSRCDNSSCSKLPPQEGRGIAQEQLFQEKKDPANPSPVMPGIATSERGDEHSLGCSPSNSSAQPSLPLYRTCHPIMPVASSFVLHCPDPVQKTNQCLQGQSLKTSLTLKVDRGSEE

SEQ ID NO: 782427 - protein, 109 aa, Homo sapiens
GSQNKFVVGSSSNNVGHGSSTGPWGFSHGAIISTCQVSVDAPESKSESSNNRMNAWGTVSSSSNGGLNPSTLNSASNHGAWPVLENNGLALKGPVGSGSSGINIQCSTI

SEQ ID NO: 782428 - protein, 118 aa, Homo sapiens
YTFVQRMKILFLCQSYQQTWIFIKCCECIISFNYHTNMQNSDIIPIVYNCAVRSHDCMEELAFQQLCCAASLIIHFTLNLVSCFFNQIFRRLSFWLIIYYIHTHTLHLVCVSNFILKD

SEQ ID NO: 782429 - protein, 102 aa, Homo sapiens
YTFVQRMKILFLCQSYQQTWIFIKCCECIISFNYHTNMQNSDIIPIVYNCAVRSHDCMEELAFQQLCCAASLIIHFTLNLVSCFFNQIFRRLSFWLIIYVYV

SEQ ID NO: 782430 - protein, 32 aa, Homo sapiens
MRRMQRDGVQSCAAATTLSSLVRYSDLLTSWQ

SEQ ID NO: 782431 - protein, 114 aa, Homo sapiens
MYGTACENYRFQGRAPFGTGGLTVRANQVWKKLPGEDPHLHGMPPSWGWLAQLTHGGTTSVLPLPNSRAHVPLCLAHKHAHRVSICLMFQGPSHVMEGTWAGTISACTWAGARR

SEQ ID NO: 782432 - protein, 136 aa, Homo sapiens
CYLPISIYPKLRRLPFLLIKHSATTFSAYYASDARMDKTVPTLKDNASSEVRDKPINSAEGISAVCGKQSNEGSEDGKGRVPGGFTFNWCLERLISLTVPPPKSNTPTAQSNLIKIRKKFAFSFHCTPSNHRSSSN

SEQ ID NO: 782433 - protein, 42 aa, Homo sapiens
QEANSSSMELASETKSDSLFLEWVSLVSMTCPFNHCAIFGFS

SEQ ID NO: 782434 - protein, 163 aa, Homo sapiens
VGFLFIFKVESSRTEESQSSAEGALPGPLLGRAHLEPGRRAMKMQTRTSARPRGETPARQELGQVRPGRGRRGRGGDPESRAAGERPPTPGRGEGHRRWRRWQTGKRGLKLRGPSGFVPSRAEPSFPEKPIRSPTEESSDLRPPPGGGSEGAGPSAWSSGARR

SEQ ID NO: 782435 - protein, 123 aa, Homo sapiens
PLHLPTLLPPPPEPSPPTSPCSHLSWLTMPSPWSPGPCCPFLVSSKISSFSGALFCLTHLGSSCPQDPSPDPGAPLVPAVSAAAAFSSLCTFLFPCGPFSGRNRTFPHGSSRESRREQGNKPA

SEQ ID NO: 782436 - protein, 89 aa, Homo sapiens
HKASLTDPILFEAYFGLNELAEGIPAFLHHVLHLQVGGGCKVVDDVPNSEFQGARVAGEEQVGHDACTVHQGDLQLRAGVQQELVPQEG

SEQ ID NO: 782437 - protein, 35 aa, Homo sapiens
MGVVTTAGLGPTLTHTAHAASCLSTKSPLCLHPSP

SEQ ID NO: 782438 - protein, 91 aa, Homo sapiens
TQGRLKCRRDTARCRWALGADGAPSGTTTYNGMATRPKPKLEQIKRALDSMQRSVGSFLKMGELQRFWRSHDHDWPVFRMRALLADGEGTR

SEQ ID NO: 782439 - protein, 105 aa, Homo sapiens
MEFSGQRSCLSLCRRAGERRPGGSGWRSGRAPRGPRARSSRLPWPPKVPRLQPLPGRHPVWEVRSVSAWPPIVWDVRSPSAWLPSLESEERLHPPPSHLGSEERL

SEQ ID NO: 782440 - protein, 158 aa, Homo sapiens
HNPSHTSGTHIRNPHTSGSYTQALTHLRNPHTTPHTPQGLTHNVDTPQGLIHKPSHTSGPTQFITLLRTHIKPLTHLRGPYITPHTPQDSHTILSHTSGLTQPLTHLRTHTQPLTHLRTHTQPLTHVHLIMGSWGCNTTPRSPLPKSSPNDMTYTPTQ

SEQ ID NO: 782441 - protein, 121 aa, Homo sapiens
TQQWASRCQACGGQGFSTVAVLTIQAGSFFAVGAVLDTVGCLAAALASSSPSLPSCENQKCLHTLPHIPWLSAICLSGGVKEHSWPWARRMRNQSKETKAQGLTRQCTSNCQHFSACLPPI

SEQ ID NO: 782442 - protein, 70 aa, Homo sapiens
KDSMDLSDEISGYRSVDIHYLMDHIVYPAADIVDSPLVFFCYHVNSHTLMAKPSTSTNSVDTGGKVTVDN

SEQ ID NO: 782443 - protein, 102 aa, Homo sapiens
MAAINWILISMSRGVPPCVHHHHKPRASTARGLPMIRSSENIRERLSLQSTLQQDFRTLNFRFIISQLRRILPHSWNSAPIGTLKVKLTRKVSLQKKITPLM

SEQ ID NO: 782444 - protein, 71 aa, Homo sapiens
VIQTQDSQDPVSFLHFGLLPPPHWVSWPPIQGPFPCPGGPRFCWPAMRGASELAQLGSWMSGRATRPLPLP

SEQ ID NO: 782445 - protein, 150 aa, Homo sapiens
LCRAHRVPSISFHHGLPFLENTDGRPEEWSCRNGAGITAHLLQPSLLAGRPIAHSRLPISLLIRAPDLLGLLALICSHLTPCAPERMCQEILQTQRTNSAAFPTSTSAVLHLSGLRAWQDTWQGKSISWRASSEYPSQEHQQLTGKQFQL

SEQ ID NO: 782446 - protein, 72 aa, Homo sapiens
GAPQNDTIAGGRRKAPPHTTGYRALGRAPRSLDLPKPAVLEESNGSGAVQKLTSRATWRTMEGLLVALAEQL

SEQ ID NO: 782447 - protein, 109 aa, Homo sapiens
MEKFHFGGSVGVAPNRQDLGSRWGNPHVSPSESLTSPPAPFHSSACDTSGLSGWTPGHPPVLCSQTVNFVRENPSLGWCLRDGWLGVSPGPVRDHKAANFTGPFFSLQS

SEQ ID NO: 782448 - protein, 105 aa, Homo sapiens
LRMEELNMRVALTPETGKDRRRGPKSGPLWAPLRAVSSISHQRPTWKLPFPHLSPGPLPRSPDVWSPTALAGGGHEFHSERTVPGSNPSPTFYGPYYPGQSSSIS

SEQ ID NO: 782449 - protein, 114 aa, Homo sapiens
AETWLIMERAEHIRVGLTPRRTGIRTGVRGVPGYELSVCPLLAKSSRYQNNIASWKLPFPHLSPGPLPRSPDVWSPTALAGGGHEFHSERTVPGSNPSPTFYGPYYPGQSSSIS

SEQ ID NO: 782450 - protein, 36 aa, Homo sapiens
MPTVSSFPTVALFMFQSPLQGPHQDSPPPMLSSDAL

SEQ ID NO: 782451 - protein, 51 aa, Homo sapiens
MGGGEKGGNKGDTEAKRASDRHKRWRNTRGTNQRGPTREAAKTYEKRGHAA

SEQ ID NO: 782452 - protein, 88 aa, Homo sapiens
IRSHSLTPSSGNGHMTQDSPIKFNPRTSTETFNKVISAQGLADLRNVGNELLPAIFPPPGERLPENEANIEESRTERRQREASPDDIT

SEQ ID NO: 782453 - protein, 76 aa, Homo sapiens
HGEGGLVNKCYKARRGSHYQRESAGKTEDKEVGIPSNKKSLCTGREAAKPTWMRGEGQEPLSLETKESGVGGEGRL

SEQ ID NO: 782454 - protein, 40 aa, Homo sapiens
LRSRKILVVISDGAPQMSAFFLLIPVRHLAQPELFQIRFC

SEQ ID NO: 782455 - protein, 122 aa, Homo sapiens
MTGHGLRYISLPLPAPPVNIQLHLELTWEMQNLSKEGTQSHMIQKYESMSSKLWERIKKEETRNWDQPQGPRVVPGRANFPWTLSQFTQYELALAKLRFDYTEQAGSQVSVTCWGKKVCLTQ

SEQ ID NO: 782456 - protein, 163 aa, Homo sapiens
LLCLLRKLEVQDPGVHKDTRPLKPLGEDTSLPLSASGGSRHSLACSNVTPVPFSLSRGLLRASESSPLLFLVFETESHSVAKLECSGMVLTHCNLSLLGSSDSCLSLPSSWDYRRAPPHPANFCSFSRDGVSLCWPGCSRSLDVVIRPLRPPNLSSSYKRTNR

SEQ ID NO: 782457 - protein, 109 aa, Homo sapiens
HVFNIEGVEVACFSPNPTSLIQSLAQSTVRSFQAHYTQSCMETIVDTVEEKKSGKITPLKMHCCHIKSCESHQAQNLCWRKLCLDVVHDFTGFMKEATKEIMKEIVDLT

SEQ ID NO: 782458 - protein, 156 aa, Homo sapiens
NISLPHSLHYGVQGPHNMLVHGQALPQSILTLCYSRHTLSPDPRQPATPKHTCSFLIMFIPFLSSKAPSTPRGPAFHITTFLKGMALFISLILPATYTILLSSQQLTPHFLFLKCALLSNRQQNDTMSPQESNCLASISPLYRRQCWTPYNKITWA

SEQ ID NO: 782459 - protein, 69 aa, Homo sapiens
MLGLWCQRDLSLSPDSITYLLCDPGQVPPASVTCWGNSSAYGTGLCGGCKRSGRDHPSKWDRLYSMVMM

SEQ ID NO: 782460 - protein, 87 aa, Homo sapiens
MALGSAQWTVACTVTPFILRAPGPGGGSSPLPPVRAPEKEALELGAELGVGVRAAEADSQLSLDLSFPRISAFCYPCEKKPGEHSYP

SEQ ID NO: 782461 - protein, 114 aa, Homo sapiens
MLKKNLEVGIRKKIEHDVVMKASKQPAQEAGTAEGPSQEERGSCRHLLQDTFLRTLAPVQANIAPRRVERSTRRVERSTRRGGTVNAKQNKNIYSCRTGAQHIEKLLPAFLTAN

SEQ ID NO: 782462 - protein, 122 aa, Homo sapiens
LCLYILDGVTGLHLEGDGLTSQGLHEDLHPTSETEHQVQGGLFLDVVVRQGASIFQLFPSKDQPLLVRRDASLVLDLCLDILNGVTRLHLESDGLTSQGLHEDLHPTPSGGAPRAPPDGVEL

SEQ ID NO: 782463 - protein, 82 aa, Homo sapiens
LIEHEVDLCRKECPFVIKPKIQRPNTTQEGEEMETDMDVADVAMESSPGSSISMEHRLDVELRASGSSSSTNISSGPSPGPS

SEQ ID NO: 782464 - protein, 197 aa, Homo sapiens
LIEHEVDLCRKECPFVIKPKIQRPNTTQEGEEMETDMDGVQCIPQRAALLKSMLNFLKKAIQDPAFSDGIRHVMDGSLPTSLKHIISNAEYYGPSLFLLATEVVTVFVFQEPSLLSSLQDNGLTDVMLHALLIKDVPATREVLGSLPNVFSALCLNARGLQSFVQCQPFERLFKVLLSPDYLPAMRRRRSSDPLGKL

SEQ ID NO: 782465 - protein, 41 aa, Homo sapiens
MLNFLKKAIQDPAFSDGIRHVMDRSLPTSLKHITPRTWEPL

SEQ ID NO: 782466 - protein, 77 aa, Homo sapiens
MRPPYTHTPARELGLLGLGTPFPRPIRGWKIGVPGVARVDPRRDRLPSPGSRKQSPAQQTCYWKSEGWVAPPVPTSS

SEQ ID NO: 782467 - protein, 69 aa, Homo sapiens
EIVAHIIQKILLSGSETVDVLKEAYMLLMKIQRLHPANAKTVEWDWKLLTYVMEEEEEFPYTGLLPTAM

SEQ ID NO: 782468 - protein, 46 aa, Homo sapiens
DPSTRSGADISPLGDSPQYLMILSSLTVAFVDNVLLAKGWNCLLLG

SEQ ID NO: 782469 - protein, 93 aa, Homo sapiens
MDTQKQIHKTHNSKNQFFTIFFFLSVEFGKEGTRKNFYLLLSIGHYGRKSRRADLGTADTADKTEPECFAASWTFDPNPSVTVSGAHSTAVHQ

SEQ ID NO: 782470 - protein, 75 aa, Homo sapiens
YSRGFALNLLCPCEAEAKKIEKQHKVTRTPNCPEHCKLIRRKEEEGRRAYSSIQPKALSKHPREQQGFVGNQSMK

SEQ ID NO: 782471 - protein, 75 aa, Homo sapiens
SPVLAHGPGVTEDSSAYPVRTSQLLVLLSSWKEEHLIGPTWVCISLPLQSVSVNMEAECLRKWTRRSILQLERRA

SEQ ID NO: 782472 - protein, 154 aa, Homo sapiens [sequence omitted]

SEQ ID NO: 782473 - protein, 160 aa, Homo sapiens
AIFQLVKSEAEEGGGCESREGVPHSVAQLAWGSQQWEHEEIKLWGLSRASSKGGPSQRQGVCWACVGVCWACVGVCWACVGVCWVCARHVLGMCRRVLGMCWACDGYVQACAGVCWVCAGHVLVMCGHVLVMCRCVQACAGMCWACAGHVRVCAGYVPGM

SEQ ID NO: 782474 - protein, 70 aa, Homo sapiens
GCGGCNALASGRSSLGLEPWTPVLPQVSEVPRKAFAMAPRVLLMRGSGIPGQGACFQDPLMRAQVAHDHL

SEQ ID NO: 782475 - protein, 68 aa, Homo sapiens
LAWAVCLPDVGPVGCRPLWKKAHQHLPTASSYPGRHSCLNLTVDPDLNFQPCSEAFLKSLLYTLRPEP

SEQ ID NO: 782476 - protein, 124 aa, Homo sapiens
EVCSAWRDITGLLKIIWKEGRRPSLIVLIDCKQLPLVLAPEQLRLFTRLWVRYKVYTTDYCMRKEERGLGRNTWGLPVNELAMTFTSRWPSRSLVTQVNHLSQPVDTMVDKVLRPRSKSLLCYI

SEQ ID NO: 782477 - protein, 109 aa, Homo sapiens
MAAWYSTIQIFHSLFTHSIVGGHLCCFQFGITIRQCCYEQSHVSLYVNIYVGHIHRSGIVVSWVIMCSALADSAKQCPKWFHLQALHGCPGCPISPPTLAIETSKRGSS

SEQ ID NO: 782478 - protein, 197 aa, Homo sapiens
DLSTGKYLLTFPKKKPIEHMEDLFALLAAFHKSCFQITSPGYALNSMKVWLLEHMKCEIIKEFPEVYFCERPGSFYGTLFTWKQRTPFEGILIIYSRNQTVMFQCLHNLIRILPINCFLKNLKSGSENFLIDNMAFTLEKELVTLSSLSSAIAKHESNFMQRCEVSKGKSSVVAAALSDRRENIHPYRKELQREKKK

SEQ ID NO: 782479 - protein, 140 aa, Homo sapiens
EAITVTEKLEEEYKELPPESLKSQSPTGLPCTQNSPCVFPRENGVPSRTRVSLRLAMTDSPSHVGPGLSSASPCRKVCVPIPAACSCHTLSSSLGWKVPQPLLTPEPALTRGRQQASCAQDVLIPNSALWGHSNFLLWSW

SEQ ID NO: 782480 - protein, 135 aa, Homo sapiens
KTRVFSHSHSSMIPLTHTGFPHSHVVIRSHRDTHKSIHCHLCSGQGPQDPPPGHTHTQGCTGEHATNAHSCKDSRAHRHGGRRVRGGEADGAGGLRRERPRPDHCPCPPLQGSQVPSTLPVQGLARDPFPVLEKT

SEQ ID NO: 782481 - protein, 86 aa, Homo sapiens
QETLTLILCLETGYVVPKDKKPLEPLWIRSYQVLLMTPTAVNLQGLSVDLPLQGQGGTSTQQRTLKPVNQLETFICCSEFSSFTFE

SEQ ID NO: 782482 - protein, 113 aa, Homo sapiens
LAYIVRIKWDTTYQDLPYCYVVTVPASPSPSAVIAIQEAWHQHLLLVRTYGSFHSRQKGEGSRHHMMREKEREEKVPGSFFNNQIWTQELRAISHSLPLPPGPAFNPRDQIST

SEQ ID NO: 782483 - protein, 74 aa, Homo sapiens
QRRSRCMESLSGMPGSGSAGRVCIAIISVMVTDTEQGHQPNHSIVEGHRTRILGGQESTATLRPALTLRKLKRL

SEQ ID NO: 782484 - protein, 81 aa, Homo sapiens
LHWLGRSSPSSSDLSDWLVSADSGATLKTETVLGPPSRALYSLVCFQSTLKAPCCFLHHSFTRSGGTTRPGLASCLCHSFT

SEQ ID NO: 782485 - protein, 127 aa, Homo sapiens
APCCCDSRKRQWFSPRHTHPQIELRLSQPSHFQDGKEGLLLSLFSHSSGCIYTQCGLRLSSPVRLYFMLILTSVPLCINVVERRSQSDAGPLLLQRMVLKGDFPPSSDFGASTYLWITIQSGNLRNN

SEQ ID NO: 782486 - protein, 49 aa, Homo sapiens
QPPQQWAQSAAIRVSAPLCKDWGPDAPSLEATSTTDHCSTENSIKTFYR

SEQ ID NO: 782487 - protein, 30 aa, Homo sapiens
MVPLGGYVFHTVIFSSKTIPSNENVHVKQK

SEQ ID NO: 782488 - protein, 36 aa, Homo sapiens
MTQIPGITFLHLEMPPRTPEDRPLQQHDANTTSHPK

SEQ ID NO: 782489 - protein, 112 aa, Homo sapiens
AHPGSRQLGTPMGVWNFFFWAAWFSPVDRGDSQAGRLSGSGDHESPDAAVQSSRNSETKMPGAGERARLSPHQEDQGEKVTPAPLLRGHFGRNRDVYLAASNNNNKNNTTTS

SEQ ID NO: 782490 - protein, 94 aa, Homo sapiens
LRLLHKQLFHLFLPTRIREVGWGSGIQLRTSKVCQKGLNFCPPCTTKIPMLIEEQIDVLPSLLILRGERQDPETLGRLWLSLSLSQRENSAGRE

SEQ ID NO: 782491 - protein, 76 aa, Homo sapiens
VNSGFCSGDVWAPIKLAACTGAGRARKQEPMQGGHWGQPRLMLGPHVSPPPTTLSKPQLSHLEIRGHSSAWHSSSG

SEQ ID NO: 782492 - protein, 79 aa, Homo sapiens
SPEHWRGMWLGQPDAAASTSGSFSASIASRDPSIWAQLTRPASRPTCRQFSQAGAQLRWRLGWVSSVSLSVYKGGTQVH

SEQ ID NO: 782493 - protein, 126 aa, Homo sapiens
RDSQTLEYPPAPRNPVQGRPELRSRGLHCGTWWGRGPTHHQQKQTQNHPRWMSTAWPHGTPWKTRAPQVRPQHNVTHPKETISATRDDSMQMEQICHLSMSETDRNLQGGSKTRIKEQEREGRMGR

SEQ ID NO: 782494 - protein, 104 aa, Homo sapiens
MGEQHPARATRMLRIWPASGRSVGVRPRATVGNQDVSCPGARHVPCIWFSGRPHPGLCPESLGWDTDGWDTPAWSCPGRQRRRGGLGCFQPHLDNRRTEPPPSP

SEQ ID NO: 782495 - protein, 130 aa, Homo sapiens
PGAGDTSDLKYPLATRLREALTEARFHQLFRGEEQEPELPEERGFPRLFGLWRLRARACSGTGAWRLLLARLPALHWLPHYRWRAWLLGDAVAGVTVGIVHVPQGMAFALLASVPPVFGLYTSFFPVLIY

SEQ ID NO: 782496 - protein, 108 aa, Homo sapiens
SLTLESAGSMQDAIRWTTRWNEKIPPVTWHVKEEPGPGPGQPGMRRPREAQGPRRGVATGQPCSPSPAHVSPAHPGLALLTWPCLSSLAHMALYTWPFTHSPAHPAPS

SEQ ID NO: 782497 - protein, 246 aa, Homo sapiens
FSRQKVSNLYRPTESNRCLYIPPPRTSEDPEWQLVLAGLFLSMCLVTVLGNLLIILAVSPDSHLHTPMYFFLSNLSLPDIGFTSTTVAKMIVDIQSHSRVISYAGCLTQMSPFAIFGAWKRDTLLSVMASDRFVAICHPLYHSAIMNPCFCGFLVLLSFFFFCLLDAQLHNLIALQMTCFKDVEIPNFFCDPSQLPHLACCDTFTNNIIMYFPAAIFGFLPISGSLFSYYKIVSSILRVSSSGGKY

SEQ ID NO: 782498 - protein, 83 aa, Homo sapiens
TGSMARMLATDYVYNRERGSICCVQGQRRQTRWPLSGGGSLVYQCRKLPIEVGAMTETPGKVMVEDGGDLLQMGCSGRASLRR

SEQ ID NO: 782499 - protein, 207 aa, Homo sapiens
GQASPAPAVRMLPTYVGSTPHGTEQGDFVVLELGATGASLRVLWVTLTGIEGHRVEPRSQEFVIPQEVMLGAGQQLFDFAAHCLSEFLDAQPVNKQGLQLGFSFSFPCHQTGLDRSTLISWTKGFRCSGVEGQDVVQLLRDAIRRQGAYNIDVVAVVNDTVGTMMGCEPGVRPCEVGLVVDTGTNACYMEEARHVAVLDEDRGRVCV

SEQ ID NO: 782500 - protein, 139 aa, Homo sapiens
MLGAGQQLFDFAAHCLSEFLDAQPVNKQGLQLGFSFSFPCHQTGLDRSTLISWTKGFRCSGVEGQDVVQLLRDAIRRQGAYNIDVVAVVNDTVGTMMGCEPGVRPCEVGLVVDTGTNACYMEEARHVAVLDEDRGRVCV

SEQ ID NO: 782501 - protein, 70 aa, Homo sapiens
PQESREEWTELPAGAEGGADGVTCRSRGRSGLSYLQESREEWTELPAGVEGGVDGVTCRSREGSGWSSPH

SEQ ID NO: 782502 - protein, 119 aa, Homo sapiens
KEQDLNIALSNLFLTLLQMVCKFYLKTSASVLPAFKLVQLHQPLSLMCLPFTQCWAGEAAVQENLTKSFLLSEILPLCPHPRYNFRKEMRCKTKVSLASMHCQYLACEMSMTSVLFPKD

SEQ ID NO: 782503 - protein, 67 aa, Homo sapiens
FTVVTFTGKGIECPGLDNRGDSFGTGKAVVKKASHIHVVSWPDRRLSARKGEVCISSFTYTFSMSIY

SEQ ID NO: 782504 - protein, 89 aa, Homo sapiens
TQIKAKSKNGKIKSSFSKGSYPKTFFLDRPHGGAMNTTIHTSQGQNKIELPLEKKTTAATIVQPTGIQSVHTAKSKFPLSGSSWEEVSA

SEQ ID NO: 782505 - protein, 69 aa, Homo sapiens
KKSQMKVIKKAGEAVIQSTQSSGFGWEEGWASAFLCISGFSGNGLRVFLSGNSHSLCEDKRYYGLHFST

SEQ ID NO: 782506 - protein, 98 aa, Homo sapiens
PHLPRPLLPLVSPTISSSAAAPGPSSSLLCGGVFLSPNPAPVLCVCPPVLAEGTILLGAGATLHLCCFVVGVDSAQPALLFLFVAVLGFGVCCPEGEG

SEQ ID NO: 782507 - protein, 149 aa, Homo sapiens
GPLRKSLAHVVCHRDSVLRSAPCSAESRGFELRTPAPCTLPIPPNWPQPLKLLLSVLHSSGPEPVEVQLGVMNEPRAWGLRPGVDLQPKLETLVEPSRIFRSQSSWPLPNPRECPFQGEWVLFAKFWLLCGKPGPCTRLRAKQGACDLP

SEQ ID NO: 782508 - protein, 117 aa, Homo sapiens
MLLEPGHRASVRGEVSSLSWQPCAKEGLWVRQLGHATAAGCLSLSEAPGPTAAVACLTSCQRRLQSHVPSCVDSKGYFKQGRWWETGSVPATRSFASFKERGWEPDVPGDRLRSTEQ

SEQ ID NO: 782509 - protein, 95 aa, Homo sapiens
MPSSVVAVWHGSCLVWGLSSVEGVWSGRCLMWGPSSVGLSGVGAIWHGSCLAWGLSGVGAIWRGCRPMWGLSSVEAVWCGSCPIWGLSGVEAVWC

SEQ ID NO: 782510 - protein, 99 aa, Homo sapiens
QFNCLCDEDIGKEFLTDSLFTLASPSRGIIGALPNLHSLTPNMCWAGKKGCNLAGWFPDLALHQPGRSLLYLLFCVQGDTCLGLPEISLAGKFHRFNLV

SEQ ID NO: 782511 - protein, 104 aa, Homo sapiens
PKLWTKDFPSYFAASNCRHKKKEREREREKKHIARKAAVNFYVTVLIVFAQKGVLEISLQLQRKGPISLRSQQDVHLLHSVALFVSLFVLHLILESTFFSAAFT

SEQ ID NO: 782512 - protein, 80 aa, Homo sapiens
MYSQRDPKSEGTAIWAGSLILCSAGRNGRNVVQNETDIPLTFRCFDHTPSEPHLVGCGPRDHPPPARLETKNPHYALSQT

SEQ ID NO: 782513 - protein, 105 aa, Homo sapiens
FSFFPRHLSSNILNSLRIHYTHCLLSIHIFLYQRTTTNTEISSMWAGIFVFHQHYFKYIEQYLANSRGQKKILRYEYINPTQECAIFSKNLSSLDSGREGHKMDN

SEQ ID NO: 782514 - protein, 80 aa, Homo sapiens
LTLNQDTQLPLSHGWALPNTGLATPRGNVTFVLELIVLLWLLTGLFSSLVAKQMSLPCDRFINKQTHFSTLDNYRMHTMS

SEQ ID NO: 782515 - protein, 74 aa, Homo sapiens
GWEADIAGRKELECWGLSTWCHVLPSAQYGGNISLTCQHLPGYQYQLSGIKRSFSKSLCSPGKLKGQSEVRGGL

SEQ ID NO: 782516 - protein, 102 aa, Homo sapiens
GKHIEQLQCILGGSHCRPRTTSNCIMYAQETRAWQTRWQETEYRELSNPSSGPCEASSPPEAGSEPGPFLQRAAGRIMWLAGGGGTKRSTGKKGMATRSGIP

SEQ ID NO: 782517 - protein, 45 aa, Homo sapiens
KSLTFVVFVGKVFVMEVRIDFTYEYIMMIKDMSAMNVEKHLSVMI

SEQ ID NO: 782518 - protein, 92 aa, Homo sapiens
CHAPRRSCPFPYGGTPGCPSPLLINDSHHEYPSSRIPVGTAGSGLVKTHRPHVLTAQLHVYHLHWTLCVPISACVRCCQLLCLVAPPRSCRR

SEQ ID NO: 782519 - protein, 81 aa, Homo sapiens
AGANLAQTSRHRCPDFLDLMTPPAPTASLWNSQLQTAQRSHSLHLISAKRPRSDENSHFERTNSPNSPETSHSAHSTKTAR

SEQ ID NO: 782520 - protein, 232 aa, Homo sapiens [sequence omitted]

SEQ ID NO: 782521 - protein, 246 aa, Homo sapiens
MTPWSHGKRTLTLPQNSKNRSPVASSRRRYAKRRERRMQCPHMLKEGALGAMAYGADMAKSKNHNTHDQFQKRHRNGIKKPQSQRSVSLKGVDPKFLRNMPFAKKHSKKGLKKMQANSAKAMSARAKAIKALVKPKEVKPKIPKGVSRKLNQLAYTGYPKLGKHACARIAKALRLCRPKAKAKDQTKAQAAAPASVPAQAPKGAQSPYKGFRVEISVCQREDRRTGATPPGCHRHGAGVLLCYLYK

SEQ ID NO: 782522 - protein, 195 aa, Homo sapiens
MAYGADMAKSKNHNTHDQFQKRHRNGIKKPQSQRSVSLKGVDPKFLRNMPFAKKHSKKGLKKMQANSAKAMSARAKAIKALVKPKEVKPKIPKGVSRKLNQLAYTGYPKLGKHACARIAKALRLCRPKAKAKDQTKAQAAAPASVPAQAPKGAQSPYKGFRVEISVCQREDRRTGATPPGCHRHGAGVLLCYLYK

SEQ ID NO: 782523 - protein, 195 aa, Homo sapiens; identical to SEQ ID NO: 782522

SEQ ID NO: 782524 - protein, 88 aa, Homo sapiens
KNGYKVHKNHTNSHFFNCNVLKELAVVLIPHSHITPNLGGKKNGSQDNPLPVSWTNVDISITYKSFYVNLQNRALAFDLAQFKCQEFL

SEQ ID NO: 782525 - protein, 152 aa, Homo sapiens
GGSLRGQDCAECSLADDGRGGGFGRGGPGGEACPAHCLLSVARIGTCMGPGNVVLTWGGSPPPGLSSQRHCYRGRDSAAASERSWAPEQHQAWDGPSVPSTEDASVRPGSAGTVYLSALHAADHCAPPPQTVPMDAGAAVDDGAAIMDNGTA

SEQ ID NO: 782526 - protein, 79 aa, Homo sapiens
MAGGFHGLEHWLSLALATQAAGRQPSAVIAGRSRVLLKLICLFQKTLSQPVQRLACQGLPSLQLSSLVKGHALAILRQL

SEQ ID NO: 782527 - protein, 44 aa, Homo sapiens
MGLGNELCFRSGLGRQMGEAGLRAIPPPDQGRGVPKLLGQPRRM

SEQ ID NO: 782528 - protein, 85 aa, Homo sapiens
GLANKERVPSWQDWRVGFHSLPPGHCLPPEPPQPQGGFRTVLDELGTALSQLRQQGDVLGSLTVLRVRVGFRKEITQETRKVRLL

SEQ ID NO: 782529 - protein, 105 aa, Homo sapiens
PSGRNEPSGRNEPSGPEQNSDKGTTCQRGFRLEKRHPKDSVKLAHISLFALFSSFLQLYAPDLNIFSWSLLYFYLACLTLFIIFGKQIISQSSFLISNIPIIIAI

SEQ ID NO: 782530 - protein, 43 aa, Homo sapiens
MRSHSKVGSGWIPGKLHYKTGRKTPRWIDLSIECHSADLMRYF

SEQ ID NO: 782531 - protein, 81 aa, Homo sapiens
AESQLGLSASTIITLGLQRAKHRAGQSSHLSRKNPASLTESTIPTRGPVSLTANHTTLGFGFQQKRRCQVEHVTAPPAAGA

SEQ ID NO: 782532 - protein, 96 aa, Homo sapiens
SHHLILMKSHLLRYIASSDGDRTHVHWKKSSHLLRHPDGALPSGSFILRALKSPDPTIHAGQSRTLLLTLAALETTAPQCPVRTLLLTLAVLESMA

SEQ ID NO: 782533 - protein, 239 aa, Homo sapiens
LKKILKGILDYNHEILGQQINDFTLPDVNLIGEHSDAAELGRMLQLILGCAVNCEQKQEYIQAIMMMEESVQHVVMTAIQELMSKESPVSAGNDAYVDLDRQLKKTTEELNEALSAKEEIAQRCHELDMQVAALQEEKSSLLAENQVLMERLNQSDSIEDPNSPAGRRHLQLQTQLEQLQEETFRLEAAKDDYRIRCEELEKEISELRQQNDELTTLADEAQSLKDEIDVLRHSSDKVF

SEQ ID NO: 782534 - protein, 67 aa, Homo sapiens
QNTAARLITPAQEDRTLLPASSPQPKRTEHCCPPHHPSPRGQNTAARLFSSQLPKTSPATTHPSPKV

SEQ ID NO: 782535 - protein, 126 aa, Homo sapiens
AAPPGMTATASDHEHLLTRRGWMFPRKVYLCSFSLFSLKHSYICAIWLIMNLFFSINVLPPCPERVCVCEIPSNKTAEPACLISGTVSQLSESKLLRKMQHLIRTCFKYQNLQLSGTGLSQDVFAG

SEQ ID NO: 782536 - protein, 92 aa, Homo sapiens
DDGGRPPGSGRSQAVLLDQQGGDGEDSRKPLGFLVQDEIAQEIRTQQRLRAAPGAGLAGGAPSRQLPCGAGRCFWAVTWPGLAAPGSVCAVG

SEQ ID NO: 782537 - protein, 78 aa, Homo sapiens
KPQCPPQSLGAPKGPSREERNKLTLLVAALSLRCHSVTLPWALTTSFPCSTPHALLGLPAPIFPGELSRYHAACLTLE

SEQ ID NO: 782538 - protein, 148 aa, Homo sapiens
MQALNITPEQFSRLLRDHNLTREQFIALYRLRPLVYTPELPGRAKLALVLTGVLIFALALFGNALVFYVVTRSKAMRTVTNIFICSLALSDLLITFFCIPVTMLQNISDNWLGGAFICKMVPFVQSTAVVTEILTMTCIAVERHQGLV

SEQ ID NO: 782539 - protein, 104 aa, Homo sapiens
RSRPCPRNLACWPGGGASEPRRFRFTRPSRRPVPSGSGHSDTFSFGKGYGVAKGRRGPEGFGKRWGRGQRIPVEAPPSPNISILESLSFFLGPAFALSPQVNSR

SEQ ID NO: 782540 - protein, 104 aa, Homo sapiens; identical to SEQ ID NO: 782539

SEQ ID NO: 782541 - protein, 104 aa, Homo sapiens; identical to SEQ ID NO: 782539

SEQ ID NO: 782542 - protein, 76 aa, Homo sapiens
RSRPCPRNLACWPGGGASEPRRFRFTRPSRRPVPSGSGHSDTFSFGQLKVDSVATGEVGEQALFQLRGKQAFTGVP

SEQ ID NO: 782543 - protein, 31 aa, Homo sapiens
MWVWSVASLLQDFPIALRKKARVFALLLKTL

SEQ ID NO: 782544 - protein, 154 aa, Homo sapiens
SSCQNRTVNSNPLEPWPWSSTNAGGSVQNMRPSVTKASRFSRISVFTQGDCIGSSKCANAGRISRPGMALYAPEMCNQVTSSQSIPNLLPCSAQQQQEQQQQQLCALPPTPQQQPPLNNHMISQTDDLSKSFRQMSPSCQGSTKATDSSAALFQ

SEQ ID NO: 782545 - protein, 71 aa, Homo sapiens
NASSSTEVSTARSCPLPACQALCLLHCLAPSSGGCEGLAPNMPVAAVPKPPSDPEGMGLAAVAGERSSSQS

SEQ ID NO: 782546 - protein, 81 aa, Homo sapiens
QAGAARAGWGEVRHAAWLTHIAEYRAHKAPSSTDTEAAKTAATRQPKGNVHLGASHNFSGKEVMSGKEPQPRASKLIPTSN

SEQ ID NO: 782547 - protein, 51 aa, Homo sapiens
LPLMKELRRPKVTHVTSFLWPATPKGEEERTREGGKAIAPGSGVPLPLPAQ

SEQ ID NO: 782548 - protein, 107 aa, Homo sapiens
VGPRPLTAEFRVMKRCKVPYGSLKVMARRGGTSSSTLFASTPRNKWVPRPIYSSYWGTCYIRIIDPVHTLYLGVWHPILVEFAYELVFSCTFSRLFQCSIKLTNSKW

SEQ ID NO: 782549 - protein, 107 aa, Homo sapiens
MVSTGPAHRALRDLSRPSSYLTEASPGRFSLSSGSGDRSAPPPQWPRLGRSCLLQPLKAQLLPLSGFCAPKCPPVSLSWLSSCVLAELLPPVGLYKPSLCCMVASSG

SEQ ID NO: 782550 - protein, 929 aa, Homo sapiens
KASELERLALWPGLAASPSTVHSKPVSDVARPAWLGPKAWHECEMLELLPPFVGLCASLAGHSSAWQAYLSLSSTVLGPAPGPGPEPLSLLQKLILWRVLRPECLAGALADFTTSLLGRPLDENTYAPTMPFKHSQATQPMLILLPPPGHPSATLHPLTVIQKLAAKYQQGQKQLQVIALGSEAWDPVSVVVSTLSQAMYEGHWLVLDNCHLMPHWPKELLQLLLELLGRAKVVADLESEQLLDQPESRNVSTVHRDFRLWLIVPAESSASLPAVLTQHSMPVFWNQSLELGHVLIDSVELAQQVLYMQPPTQALPLLLLHGLLLHRQLYGTRLQAHRGRWSQVTLTQVLQTQDQLWASLSNPRAAMQELAGETLPLPLGVISPQESLEEGGGGIQFTALVLAVVETEGTGTERLYTSSSASVFYGGPLGDTEDREALISLTQACLSPSSGSWVQPHTPQSLLATLMPLPGKPHSGICFGVGNECNAMPPPTEMWTAVSIKVYEGVIFICYGGDGSKGSEEGLLSRVYGWGESILSLTPHLYPQELRELDAMAECKAQMHLLPSPPEPRLCGLSEGPQAWLLRRQSRALLSALQRSSPVWVPESRRGAQLAERRLRQRLVQVNRRLESLQDLLTHVIRQDESDAPWSVLGPNARRPLEGVLETEALELSQLVGTLQRDLDCLLQQLKGAPPCPSRRCAAVAHALWTGRLPLPWRPHAPAGPQPPWHWLRQLSRRGQLLVRYLGVGADASSDVPERVFHLSAFRHPRRLLLALRGEAALDQNVPSSNFPGSRGSVSSQLQYKRLEMNSNPLHFRVENGPNPTVPERGLLLIGLQVLHAEWDPIAGALQDSPSSQPSPLPPVSISTQAPGTSDLPAPADLTVYSCPVYMGGPLGTAKLQSRNIVMHLPLPTKLTPNTCVQRRVHVCSPPLS

SEQ ID NO: 782551 - protein, 428 aa, Homo sapiens
KASELERLALWPGLAASPSTVHSKPVSDVARPAWLGPKAWHECEMLELLPPFVGLCASLAGHSSAWQAYLSLSSTVLGPAPGPGPEPLSLLQKLILWRVLRPECLAGALADFTTSLLGRPLDENTYAPTMPFKHSQATQPMLILLPPPGHPSATLHPLTVIQKLAAKYQQGQKQLQVIALGSEAWDPVSVVVSTLSQAMYEGHWLVLDNCHLMPHWPKELLQLLLELLGRAKVVADLESEQLLDQPESRNVSTVHRDFRLWLIVPAESSASLPAVLTQHSMPVFWNQSLELGHVLIDSVELAQQVLYMQPPTQALPLLLLHGLLLHRQLYGTRLQAHRGRWSQVTLTQVLQTQDQLWASLSNPRAAMQELAGGEWSKSHGSRERAAADRATGPTCGVGPNSWSLAGQSFQPTQPSASRQHQHTGPGHQ

SEQ ID NO: 782552 - protein, 141 aa, Homo sapiens
QLLVRYLGVGADASSDVPERVFHLSAFRHPRRLLLALRGEAALDQNVPSSNFPGSRGSVSSQLQYKRLEMNSNPLHFRVSSRRPSFAVPVPSKSLITPRSYPFLVILPPVTLLASPISLHHDLLPANPHFPPATSQLPSLA

SEQ ID NO: 782553 - protein, 806 aa, Homo sapiens
KASELERLALWPGLAASPSTVHSKPVSDVARPAWLGPKAWHECEMLELLPPFVGLCASLAGHSSAWQAYLSLSSTVLGPAPGPGPEPLSLLQKLILWRVLRPECLAGALADFTTSLLGRPLDENTYAPTMPFKHSQATQPMLILLPPPGHPSATLHPLTVIQKLAAKYQQGQKQLQVIALGSEAWDPVSVVVSTLSQAMYEGHWLVLDNCHLMPHWPKELLQLLLELLGRAKVVADLESEQLLDQPESRNVSTVHRDFRLWLIVPAESSASLPAVLTQHSMPVFWNQSLELGHVLIDSVELAQQVLYMQPPTQALPLLLLHGLLLHRQLYGTRLQAHRGRWSQVTLTQVLQTQDQLWASLSNPRAAMQELAASVFYGGPLGDTEDREALISLTQACLSPSSGSWVQPHTPQSLLATLMPLPELRELDAMAECKAQMHLLPSPPEPRLCGLSEGPQAWLLRRQSRALLSALQRSSPVWVPESRRGAQLAERRLRQRLVQVNRRLESLQDLLTHVIRQDESDAPWSVLGPNARRPLEGVLETEALELSQLVGTLQRDLDCLLQQLKGAPPCPSRRCAAVAHALWTGRLPLPWRPHAPAGPQPPWHWLRQLSRRGQLLVRYLGVGADASSDVPERVFHLSAFRHPRRLLLALRGEAALDQNVPSSNFPGSRGSVSSQLQYKRLEMNSNPLHFRVENGPNPTVPERGLLLIGLQVLHAEWDPIAGALQDSPSSQPSPLPPVSISTQAPGTSDLPAPADLTVYSCPVYMGGPLGTAKLQSRNIVMHLPLPTKLTPNTCVQRRVHVCSPPLS

SEQ ID NO: 782554 - protein, 44 aa, Homo sapiens
EVREGKWTQLQGKMLQEEKPGRGNGHNYKERCCRRRSQGGEMDT

SEQ ID NO: 782555 - protein, 81 aa, Homo sapiens
LQVLPDFALQLPVLRLQDPHSFQVGGQAVAQALHGLLLVLDASHSCQTPAIPAARPPDPKPPRKLLERNTEIREPEPPALA

SEQ ID NO: 782556 - protein, 147 aa, Homo sapiens
RGMSAASRVIFGPGVTMSTCDVMLIDDSEYEEEEEFEIALADASDNARIGRVATAKVLISGPNDASTVSLGNTAFTVSEDAGTVKIPVIRHGTDLSTFASVWCATRPSDPASATPGVDYVPSSRKVEFGPGVIEQYCTLTILDNTFA

SEQ ID NO: 782557 - protein, 159 aa, Homo sapiens
IAMFRGIAMYGETAMFGGTAMFGGTAMFGETALLGGTAMFGGDHDVRRDRDVGENAMFGGIAPVLPEASWPAGQAAAAGIRPGGKEPRRGTECLQPGMFGEIAMFGEMAMFGEIAIFGETAMFGEIALLGERAMFGEAAMFGETTMFGETAPVLPETSW

SEQ ID NO: 782558 - protein, 104 aa, Homo sapiens
HAGCQGSGGKLAVTGLTQLPHKRKGQSHSHHAPSTAPSLFPGSRGSGPENLPQATHLPAVKEKGLVLSPPMESAHRIRALPLLARRLLASSNCYKVQLETSFSL

SEQ ID NO: 782559 - protein, 388 aa, Homo sapiens [sequence omitted]

SEQ ID NO: 782560 - protein, 388 aa, Homo sapiens [sequence omitted]

SEQ ID NO: 782561 - protein, 388 aa, Homo sapiens [sequence omitted]

SEQ ID NO: 782562 - protein, 388 aa, Homo sapiens [sequence omitted]

SEQ ID NO: 782563 - protein, 163 aa, Homo sapiens
RPLLRLVALQSLQMGDNRLRALPAELPRMTGLRGLWLYGNRFEEFPPALLRMGRLHILDLDRNRLGGFPDLHPLRALRVFSYDHNPVTGPPRVADTVFLVGEGAVERMAERDEPTPRPPPRRPARAFEDEEEEDLLIGGAGSRALGAPGGSFRALEAAPGLGT

SEQ ID NO: 782564 - protein, 163 aa, Homo sapiens; identical to SEQ ID NO: 782563

SEQ ID NO: 782565 - protein, 125 aa, Homo sapiens
IQVDHGMLWPPVLYKDVGQELPVVSTAPPHIALLMEPFTSDVVSRLMGRIQVCKDYVLDQLWSVLSQKMSFLPLVARIFPKQMPNCTLMPKASICKTVKEGEENISLLGSYQRRENLDSVCSALF

SEQ ID NO: 782566 - protein, 147 aa, Homo sapiens
GVTLGQRLSVSLGVEVHGEERGAVLKGHMAYATPPAPTPGVASFPLTGEEAAVQGCPHLSSWRMWSLQKGDPVVGDLVQTTHCLLWAFLGLFGSQERRELRLWLLCELDTDAPAAGPSSVNGHREQGPRGCSRGHWQQLCSGLAILE

SEQ ID NO: 782567 - protein, 99 aa, Homo sapiens
PASASQSARITGTSHHTQLKWDPSFIPHAFKTSQAGILSASLLWYFQNVDHAWPLAFSWEVMRPSAEKDKQLMVTPCCACNSVTGEATSRGCRKQSSQC

SEQ ID NO: 782568 - protein, 107 aa, Homo sapiens [sequence omitted]

SEQ ID NO: 782569 - protein, 63 aa, Homo sapiens
RAYDKCFTCPISAVGDKEDHKPFSLWHGETFEQSLRIEQESADTGEAPTQSGGHMVCLESHQQ

SEQ ID NO: 782570 - protein, 113 aa, Homo sapiens [sequence omitted]

SEQ ID NO: 782571 - protein, 100 aa, Homo sapiens
MRICVEVTGARPKAQSVSIHPFEQLSSAMRTTSPRQWRLPQARRGVAAGPGGGGRKRARRRAGKTPRGTARAPHPKGRKAARPWAEERSSGRPEETRSSL

SEQ ID NO: 782572 - protein, 153 aa, Homo sapiens [sequence omitted]

SEQ ID NO: 782573 - protein, 102 aa, Homo sapiens
EEGWGGPFKFITRKLAWNTPPLSPPGYGEKAIKGIYTVAFPQRLRHLGRTEPTSLALDSGADELRTKPVHWTAARCQGNPDPEQAWGPRRVPMNPPPASCSA

SEQ ID NO: 782574 - protein, 114 aa, Homo sapiens
MLQKLSFGLPHPLSCTHMNPEPQTPEADQQARRPAEGWQNDVAEKGRRGGTSECQNEFSWGQSERSPATGQPESRGGSPFHFIPFLCLPIHPAESHLHHSIKPDAAENFLRRAE

SEQ ID NO: 782575 - protein, 110 aa, Homo sapiens
MAFFPILNEKMHFVLLSKSDMDRRRKYWVEKGSSLAKPHPQAWIPAVLNENENRHFCVHAPKVIFWPATPPILHPYESRTPDSRSRPASPQTSRRMAERCGREREKRRNI

SEQ ID NO: 782576 - protein, 143 aa, Homo sapiens
LQFLQLWPSWAFEHRLKTALSASRLWRFWNSNWLPCSSACRRPTVGRHLEIVDMDRRRKYWVEKGSSLAKPHPQAWIPAVLNENENRHFCVHAPKVIFWPATPPILHPYESRTPDSRSRPASPQTSRRMAERCGREREKRRNI

SEQ ID NO: 782577 - protein, 48 aa, Homo sapiens
QPSRSLGEHCFIPHPLYMFAALCGVHISFTHMISFNLFNELDITNPIS

SEQ ID NO: 782578 - protein, 97 aa, Homo sapiens
  misc_feature (3)..(3): Xaa can be any naturally occurring amino acid
YLXPSEQSGCVSQAGVQMVRSRLTATSASRVFQDSQEGAHIRRETVSKSVCAEPWRHQRARDPAPTNFPLKCQKQRGASTSSGQHGGRVNLVFFIGE

SEQ ID NO: 782579 - protein, 114 aa, Homo sapiens
MVRSRLTATSASRVFQDSQEGAHIRRETVSKSVCAEPWRHQRARDPAPTNFPLKCQKQRGASTSSGQHGGRVNLVFFIGDDYSPPSKRQRPTSHHSHQSQNLPMLEERKMREFN

SEQ ID NO: 782580 - protein, 47 aa, Homo sapiens
MEKHFESHTEALRSCCHLQLLSNHTVITRSLEREHLLHLTLSTDGPR

SEQ ID NO: 782581 - protein, 110 aa, Homo sapiens
MGKKLKLQEMTQPQTPGQSGTARGCAGLALPLHQQVPDLRVPPVWATYRKHGWGGFRKLTILVEAEAGRSYMAGGRGGAVPRTSRQPDLEKSYHGNSTKGGSCPQDPITS

SEQ ID NO: 782582 - protein, 73 aa, Homo sapiens
MPPVWTTFSTKQMGLIQSSCPNPDLQDPGQSLRPLFHQLGTQYYQLQDYCTCPICAGERGCLFNKPQAHLLGL

SEQ ID NO: 782583 - protein, 104 aa, Homo sapiens
AATRGGDSPPPPVGPGSSTRDRRGPESRVGQGRPLRVARKGHFTDWSSGASASCPARKTPRFEDRKAFKVRIGSPRLPQRGTPPGPALLGRGPRMLALPERLRR

SEQ ID NO: 782584 - protein, 104 aa, Homo sapiens; identical to SEQ ID NO: 782583

SEQ ID NO: 782585 - protein, 124 aa, Homo sapiens
SDGQRRCGRSETMPLPKKGPRSALGLPKPGPLCFAPPPHSRAARMDGWASEHSCSSGSGPPVPRELEEAFRALNQTAAEGVPVGRAPSPAQRQGHRFGAGTARYVFPRPLGGPHPPCLLPLPTE

SEQ ID NO: 782586 - protein, 1372 aa, Homo sapiens
MCTATPCLATWGSLFSLCRVVAESVRHQVPVTHWVDRFFENVSTDFLHERYIASSSVGSDMKSKGFPFKLGIAAEPQAVSDISTKPLREAGCARVRALPRHCSSFGAGHAWPGPLGRGGCGAASLASTHESQEHPLQFVTTKMSLDFASIPSGQSPFLGPQSEPSALPGLDLFLNSHKLQGAAAVSLARHWPITSNRLGRAPVESPVPSHFRRVALLPRSRSQWPDKQSHSGVVRPGRVSPVGGRGALARRVSGEAKCKALVRGASGSHGGAAGQGPAVTRSPSSLCLALCPQDEMSESGQSSAAATPSTTGTKSNTPTSSVPSAAVTPLNESLQPLGDYGVGSKNSKRAREKRDSRNMEVQVTQEMRNVSIGMGSSDEWSDVQDIIDSTPELDMCPETRLDRTGSSPTQGIVNKAFGINTDSLYHELSTAGSEVIGDVDEGADLLGEFSGMGKEVGNLLLENSQLLETKNALNVVKNDLIAKVDQLSGEQEVLRGELEAAKQAKVKLENRIKELEEELKRVKSEAIIARREPKEEAEDVSSYLCTESDKIPMAQRRRFTRVEMARVLMERNQYKERLMELQEAVRWTEMIRASREHPSVQEKKKSTIWQFFSRLFSSSSSPPPAKRPYPSVNIHYKSPTTAGFSQRRNHAMCPISAGSRPLEFFPDDDCTSSARREQKREQYRQVREHVRNDDGRLQACGWSLPAKYKQLSPNGGQEDTRMKNVPVPVYCRPLVEKDPTMKLWCAAGVNLSGWRPNEDDAGNGVKPAPGRDPLTCDREGDGEPKSAHTSPEKKKAKELPEMDATSSRVWILTSTLTTSKVVIIDANQPGTVVDQFTVCNAHVLCISSIPAASDSDYPPGEMFLDSDVNPEDPGADGVLAGITLVGCATRCNVPRSNCSSRGDTPVLDKGQGEVATIANGKVNPSQSTEEATEATEVPDPGPSEPETATLRPGPLTEHVFTDPAPTPSSGPQPGSENGPEPDSSSTRPEPEPSGDPTGAGSSAAPTMWLGAQNGWLYVHSAVANWKKCLHSIKLKDSVLSLVHVKGRVLVALADGTLAIFHRGEDGQWDLSNYHLMDLGHPHHSIRCMAVVYDRVWCGYKNKVHVIQPKTMQIEKSFDAHPRRESQVRQLAWIGDGVWVSIRLDSTLRLYHAHTHQHLQDVDIEPYVSKMLGTGKLGFSFVRITALLVAGSRLWVGTGNGVVISIPLTETVVLHRGQLLGLRANKTSPTSGEGARPGGIIHVYGDDSSDRAASSFIPYCSMAQAQLCFHGHRDAVKFFVSVPGNVLATLNGSVLDSPAEGPGPAAPASEVEGQKLRNVLVLSGGEGYIDFRIGDGEDDETEEGAGDMSQVKPVLSKAERSHIIVWQVSYTPE

SEQ ID NO: 782587 - protein, 1077 aa, Homo sapiens [sequence omitted]

SEQ ID NO: 782588 - protein, 1330 aa, Homo sapiens
MMEIQMDEGGGVVVYQDDYCSGSVMSERVSGLAGSIYREFERLIHCYDEEVVKELMPLVVNVLENLDSVLSENQEHEVELELLREDNEQLLTQYEREKALRRQAEEKFIEFEDALEQEKKELQIQVEHYEFQTRQLELKAKNYADQISRLEERESEMKKEYNALHQRHTEMIQTYVEHIERSKMQQVGGNSQTESSLPGRRKERPTSLNVFPLADGTVRAQIGGKLVPAGDHWHLSDLGQLQSSSSYQCPQDEMSESGQSSAAATPSTTGTKSNTPTSSVPSAAVTPLNESLQPLGDYGVGSKNSKRAREKRDSRNMEVQVTQEMRNVSIGMGSSDEWSDVQDIIDSTPELDMCPETRLDRTGSSPTQGIVNKAFGINTDSLYHELSTAGSEVIGDVDEGADLLGEFSGMGKEVGNLLLENSQLLETKNALNVVKNDLIAKVDQLSGEQEVLRGELEAAKQAKVKLENRIKELEEELKRVKSEAIIARREPKEEAEDVSSYLCTESDKIPMAQRRRFTRVEMARVLMERNQYKERLMELQEAVRWTEMIRASREHPSVQEKKKSTIWQFFSRLFSSSSSPPPAKRPYPSVNIHYKSPTTAGFSQRRNHAMCPISAGSRPLEFFPDDDCTSSARREQKREQYRQVREHVRNDDGRLQACGWSLPAKYKQLSPNGGQEDTRMKNVPVPVYCRPLVEKDPTMKLWCAAGVNLSGWRPNEDDAGNGVKPAPGRDPLTCDREGDGEPKSAHTSPEKKKAKELPEMDATSSRVWILTSTLTTSKVVIIDANQPGTVVDQFTVCNAHVLCISSIPAASDSDYPPGEMFLDSDVNPEDPGADGVLAGITLVGCATRCNVPRSNCSSRGDTPVLDKGQGEVATIANGKVNPSQSTEEATEATEVPDPGPSEPETATLRPGPLTEHVFTDPAPTPSSGPQPGSENGPEPDSSSTRPEPEPSGDPTGAGSSAAPTMWLGAQNGWLYVHSAVANWKKCLHSIKLKDSVLSLVHVKGRVLVALADGTLAIFHRGEDGQWDLSNYHLMDLGHPHHSIRCMAVVYDRVWCGYKNKVHVIQPKTMQIEKSFDAHPRRESQVRQLAWIGDGVWVSIRLDSTLRLYHAHTHQHLQDVDIEPYVSKMLGTGKLGFSFVRITALLVAGSRLWVGTGNGVVISIPLTETVVLHRGQLLGLRANKTSPTSGEGARPGGIIHVYGDDSSDRAASSFIPYCSMAQAQLCFHGHRDAVKFFVSVPGNVLATLNGSVLDSPAEGPGPAAPASEVEGQKLRNVLVLSGGEGYIDFRIGDGEDDETEEGAGDMSQVKPVLSKAERSHIIVWQVSYTPE

SEQ ID NO: 782589 - protein, 1607 aa, Homo sapiens
MKSKGFPFKLGIAAEPQAVSDISTKPLREAGCARVRALPGTAHLLGLDMHGLGRWDAVGVEQHPWLPPTKARSTPFICDHKNVSGLCKHPLGAVSPTENSYYRGRCVILRFLLEKLRSLVDEAEMCPLSEWPCPVLRGPVPESGGDQRGWAEAEVSTGHDFWKSRLPWSLKGQYKSAVERAGYPLDSSSLGEILSIRVPHGAPSERPREPTQRLPGTGTGATWVPLRPCTFPHLKEGRGPRASSAIAGDQVSYDENVWGSFSPAGSVSLLGKTIGKNVCFAFRISHIECALPSELPEVDGWLRFLVIRAAPTLQNVLVASLSVSRDVVSLRLLMFRGELWSSQATGSAPSGHSLALTEPGEERGAGAGGPSLELFSTVMVTGQRWRHSQPFLGPQSEPSALPGLDLFLNSHKLQGAAAVSLARHWPITSNRLGRAPVESPVPSHFRRVALLPRSRSQWPDKQSHSGVVRPGRVSPVGGRGALARRVSGEAKCKALVRGASGSHGGAAGQGPAVTRSPSSLCLALCPQDEMSESGQSSAAATPSTTGTKSNTPTSSVPSAAVTPLNESLQPLGDYGVGSKNSKRAREKRDSRNMEVQVTQEMRNVSIGMGSSDEWSDVQDIIDSTPELDMCPETRLDRTGSSPTQGIVNKAFGINTDSLYHELSTAGSEVIGDVDEGADLLGEFSGMGKEVGNLLLENSQLLETKNALNVVKNDLIAKVDQLSGEQEVLRGELEAAKQAKVKLENRIKELEEELKRVKSEAIIARREPKEEAEDVSSYLCTESDKIPMAQRRRFTRVEMARVLMERNQYKERLMELQEAVRWTEMIRASREHPSVQEKKKSTIWQFFSRLFSSSSSPPPAKRPYPSVNIHYKSPTTAGFSQRRNHAMCPISAGSRPLEFFPDDDCTSSARREQKREQYRQVREHVRNDDGRLQACGWSLPAKYKQLSPNGGQEDTRMKNVPVPVYCRPLVEKDPTMKLWCAAGVNLSGWRPNEDDAGNGVKPAPGRDPLTCDREGDGEPKSAHTSPEKKKAKELPEMDATSSRVWILTSTLTTSKVVIIDANQPGTVVDQFTVCNAHVLCISSIPAASDSDYPPGEMFLDSDVNPEDPGADGVLAGITLVGCATRCNVPRSNCSSRGDTPVLDKGQGEVATIANGKVNPSQSTEEATEATEVPDPGPSEPETATLRPGPLTEHVFTDPAPTPSSGPQPGSENGPEPDSSSTRPEPEPSGDPTGAGSSAAPTMWLGAQNGWLYVHSAVANWKKCLHSIKLKDSVLSLVHVKGRVLVALADGTLAIFHRGEDGQWDLSNYHLMDLGHPHHSIRCMAVVYDRVWCGYKNKVHVIQPKTMQIEKSFDAHPRRESQVRQLAWIGDGVWVSIRLDSTLRLYHAHTHQHLQDVDIEPYVSKMLGTGKLGFSFVRITALLVAGSRLWVGTGNGVVISIPLTETVVLHRGQLLGLRANKTSPTSGEGARPGGIIHVYGDDSSDRAASSFIPYCSMAQAQLCFHGHRDAVKFFVSVPGNVLATLNGSVLDSPAEGPWSPVPPRSPQGGISQAARAGPGLRKKGRPLASPGSVLGHRLSLRLMGDDVLPGPASCTGLHGAQLPDTLLSA

SEQ ID NO: 782590 - protein, 1657 aa, Homo sapiens
MKSKGFPFKLGIAAEPQAVSDISTKPLREAGCARVRALPGTAHLLGLDMHGLGRWDAVGVEQHPWLPPTKARSTPFICDHKNVSGLCKHPLGAVSPTENSYYRGRCVILRFLLEKLRSLVDEAEMCPLSEWPCPVLRGPVPESGGDQRGWAEAEVSTGHDFWKSRLPWSLKGQYKSAVERAGYPLDSSSLGEILSIRVPHGAPSERPREPTQRLPGTGTGATWVPLRPCTFPHLKEGRGPRASSAIAGDQVSYDENVWGSFSPAGSVSLLGKTIGKNVCFAFRISHIECALPSELPEVDGWLRFLVIRAAPTLQNVLVASLSVSRDVVSLRLLMFRGELWSSQATGSAPSGHSLALTEPGEERGAGAGGPSLELFSTVMVTGQRWRHSQPFLGPQSEPSALPGLDLFLNSHKLQGAAAVSLARHWPITSNRLGRAPVESPVPSHFRRVALLPRSRSQWPDKQSHSGVVRPGRVSPVGGRGALARRVSGEAKCKALVRGASGSHGGAAGQGPAVTRSPSSLCLALCPQDEMSESGQSSAAATPSTTGTKSNTPTSSVPSAAVTPLNESLQPLGDYGVGSKNSKRAREKRDSRNMEVQVTQEMRNVSIGMGSSDEWSDVQDIIDSTPELDMCPETRLDRTGSSPTQGIVNKAFGINTDSLYHELSTAGSEVIGDVDEGADLLGEFSGMGKEVGNLLLENSQLLETKNALNVVKNDLIAKVDQLSGEQEVLRGELEAAKQAKVKLENRIKELEEELKRVKSEAIIARREPKEEAEDVSSYLCTESDKIPMAQRRRFTRVEMARVLMERNQYKERLMELQEAVRWTEMIRASREHPSVQEKKKSTIWQFFSRLFSSSSSPPPAKRPYPSVNIHYKSPTTAGFSQRRNHAMCPISAGSRPLEFFPDDDCTSSARREQKREQYRQVREHVRNDDGRLQACGWSLPAKYKQLSPNGGQEDTRMKNVPVPVYCRPLVEKDPTMKLWCAAGVNLSGWRPNEDDAGNGVKPAPGRDPLTCDREGDGEPKSAHTSPEKKKAKELPEMDATSSRVWILTSTLTTSKVVIIDANQPGTVVDQFTVCNAHVLCISSIPAASDSDYPPGEMFLDSDVNPEDPGADGVLAGITLVGCATRCNVPRSNCSSRGDTPVLDKGQGEVATIANGKVNPSQSTEEATEATEVPDPGPSEPETATLRPGPLTEHVFTDPAPTPSSGPQPGSENGPEPDSSSTRPEPEPSGDPTGAGSSAAPTMWLGAQNGWLYVHSAVANWKKCLHSIKLKDSVLSLVHVKGRVLVALADGTLAIFHRGEDGQWDLSNYHLMDLGHPHHSIRCMAVVYDRVWCGYKNKVHVIQPKTMQIEKSFDAHPRRESQVRQLAWIGDGVWVSIRLDSTLRLYHAHTHQHLQDVDIEPYVSKMLGTGKLGFSFVRITALLVAGSRLWVGTGNGVVISIPLTESEWPAPLQGQWCCQRCTWVHGVALQGHLGGCLAAPTLTALLFSHAPPMSPAVVLHRGQLLGLRANKTSPTSGEGARPGGIIHVYGDDSSDRAASSFIPYCSMAQAQLCFHGHRDAVKFFVSVPGNVLATLNGSVLDSPAEGPWSPVPPRSPQGGISQAARAGPGLRKKGRPLASPGSVLGHRLSLRLMGDDVLPGPASCTGLHGAQLPDTLLSA

SEQ ID NO: 782591 - protein, 1606 aa, Homo sapiens
MKSKGFPFKLGIAAEPQAVSDISTKPLREAGCARVRALPGTAHLLGLDMHGLGRWDAVGVEQHPWLPPTKARSTPFICDHKNVSGLCKHPLGAVSPTENSYYRGRCVILRFLLEKLRSLVDEAEMCPLSEWPCPVLRGPVPESGGDQRGWAEAEVSTGHDFWKSRLPWSLKGQYKSAVERAGYPLDSSSLGEILSIRVPHGAPSERPREPTQRLPGTGTGATWVPLRPCTFPHLKEGRGPRASSAIAGDQVSYDENVWGSFSPAGSVSLLGKTIGKNVCFAFRISHIECALPSELPEVDGWLRFLVIRAAPTLQNVLVASLSVSRDVVSLRLLMFRGELWSSQATGSAPSGHSLALTEPGEERGAGAGGPSLELFSTVMVTGQRWRHSQPFLGPQSEPSALPGLDLFLNSHKLQGAAAVSLARHWPITSNRLGRAPVESPVPSHFRRVALLPRSRSQWPDKQSHSGVVRPGRVSPVGGRGALARRVSGEAKCKALVRGASGSHGGAAGQGPAVTRSPSSLCLALCPQDEMSESGQSSAAATPSTTGTKSNTPTSSVPSAAVTPLNESLQPLGDYGVGSKNSKRAREKRDSRNMEVQVTQEMRNVSIGMGSSDEWSDVQDIIDSTPELDMCPETRLDRTGSSPTQGIVNKAFGINTDSLYHELSTAGSEVIGDVDEGADLLGEFSGMGKEVGNLLLENSQLLETKNALNVVKNDLIAKVDQLSGEQEVLRGELEAAKQAKVKLENRIKELEEELKRVKSEAIIARREPKEEAEDVSSYLCTESDKIPMAQRRRFTRVEMARVLMERNQYKERLMELQEAVRWTEMIRASREHPSVQEKKKSTIWQFFSRLFSSSSSPPPAKRPYPSVNIHYKSPTTAGFSQRRNHAMCPISAGSRPLEFFPDDDCTSSARREQKREQYRQVREHVRNDDGRLQACGWSLPAKYKQLSPNGGQEDTRMKNVPVPVYCRPLVEKDPTMKLWCAAGVNLSGWRPNEDDAGNGVKPAPGRDPLTCDREGDGEPKSAHTSPEKKKAKELPEMDATSSRVWILTSTLTTSKVVIIDANQPGTVVDQFTVCNAHVLCISSIPAASDSDYPPGEMFLDSDVNPEDPGADGVLAGITLVGCATRCNVPRSNCSSRGDTPVLDKGQGEVATIANGKVNPSQSTEEATEATEVPDPGPSEPETATLRPGPLTEHVFTDPAPTPSSGPQPGSENGPEPDSSSTRPEPEPSGDPTGAGSSAAPTMWLGAQNGWLYVHSAVANWKKCLHSIKLKDSVLSLVHVKGRVLVALADGTLAIFHRGEDGQWDLSNYHLMDLGHPHHSIRCMAVVYDRVWCGYKNKVHVIQPKTMQIEKSFDAHPRRESQVRQLAWIGDGVWVSIRLDSTLRLYHAHTHQHLQDVDIEPYVSKMLGTGKLGFSFVRITALLVAGSRLWVGTGNGVVISIPLTETVVLHRGQLLGLRANKTSPTSGEGARPGGIIHVYGDDSSDRAASSFIPYCSMAQAQLCFHGHRDAVKFFVSVPGNVLATLNGSVLDSPAEGPGPAAPASEVEGQKLRNVLVLSGGEGYIDFRIGDGEDDETEEGAGDMSQVKPVLSKAERSHIIVWQVSYTPE

SEQ ID NO: 782592 - protein, 776 aa, Homo sapiens
MRPRTRGKKSTIWQFFSRLFSSSSSPPPAKRPYPSVNIHYKSPTTAGFSQRRNHAMCPISAGSRPLEFFPDDDCTSSARREQKREQYRQVREHVRNDDGRLQACGWSLPAKYKQLSPNGGQEDTRMKNVPVPVYCRPLVEKDPTMKLWCAAGVNLSGWRPNEDDAGNGVKPAPGRDPLTCDREGDGEPKSAHTSPEKKKAKELPEMDATSSRVWILTSTLTTSKVVIIDANQPGTVVDQFTVCNAHVLCISSIPAASDSDYPPGEMFLDSDVNPEDPGADGVLAGITLVGCATRCNVPRSNCSSRGDTPVLDKGQGEVATIANGKVNPSQSTEEATEATEVPDPGPSEPETATLRPGPLTEHVFTDPAPTPSSGPQPGSENGPEPDSSSTRPEPEPSGDPTGAGSSAAPTMWLGAQNGWLYVHSAVANWKKCLHSIKLKDSVLSLVHVKGRVLVALADGTLAIFHRGEDGQWDLSNYHLMDLGHPHHSIRCMAVVYDRVWCGYKNKVHVIQPKTMQIEKSFDAHPRRESQVRQLAWIGDGVWVSIRLDSTLRLYHAHTHQHLQDVDIEPYVSKMLGTGKLGFSFVRITALLVAGSRLWVGTGNGVVISIPLTETVVLHRGQLLGLRANKTSPTSGEGARPGGIIHVYGDDSSDRAASSFIPYCSMAQAQLCFHGHRDAVKFFVSVPGNVLATLNGSVLDSPAEGPGPAAPASEVEGQKLRNVLVLSGGEGYIDFRIGDGEDDETEEGAGDMSQVKPVLSKAERSHIIVWQVSYTPE

SEQ ID NO: 782593 - protein, 617 aa, Homo sapiens
SSVPVQVVLVKPAPGRDPLTCDREGDGEPKSAHTSPEKKKAKELPEMDATSSRVWILTSTLTTSKVVIIDANQPGTVVDQFTVCNAHVLCISSIPAASDSDYPPGEMFLDSDVNPEDPGADGVLAGITLVGCATRCNVPRSNCSSRGDTPVLDKGQGEVATIANGKVNPSQSTEEATEATEVPDPGPSEPETATLRPGPLTEHVFTDPAPTPSSGPQPGSENGPEPDSSSTRPEPEPSGDPTGAGSSAAPTMWLGAQNGWLYVHSAVANWKKCLHSIKLKDSVLSLVHVKGRVLVALADGTLAIFHRGEDGQWDLSNYHLMDLGHPHHSIRCMAVVYDRVWCGYKNKVHVIQPKTMQIEKSFDAHPRRESQVRQLAWIGDGVWVSIRLDSTLRLYHAHTHQHLQDVDIEPYVSKMLGTGKLGFSFVRITALLVAGSRLWVGTGNGVVISIPLTETVVLHRGQLLGLRANKTSPTSGEGARPGGIIHVYGDDSSDRAASSFIPYCSMAQAQLCFHGHRDAVKFFVSVPGNVLATLNGSVLDSPAEGPGPAAPASEVEGQKLRNVLVLSGGEGYIDFRIGDGEDDETEEGAGDMSQVKPVLSKAERSHIIVWQVSYTPE

SEQ ID NO: 782594 - protein, 370 aa, Homo sapiens
SSWYRRSLCGVPRLYVHSAVANWKKCLHSIKLKDSVLSLVHVKGRVLVALADGTLAIFHRGEDGQWDLSNYHLMDLGHPHHSIRCMAVVYDRVWCGYKNKVHVIQPKTMQIEKSFDAHPRRESQVRQLAWIGDGVWVSIRLDSTLRLYHAHTHQHLQDVDIEPYVSKMLGTGKLGFSFVRITALLVAGSRLWVGTGNGVVISIPLTETVVLHRGQLLGLRANKTSPTSGEGARPGGIIHVYGDDSSDRAASSFIPYCSMAQAQLCFHGHRDAVKFFVSVPGNVLATLNGSVLDSPAEGPGPAAPASEVEGQKLRNVLVLSGGEGYIDFRIGDGEDDETEEGAGDMSQVKPVLSKAERSHIIVWQVSYTPE

SEQ ID NO: 782595 - protein, 262 aa, Homo sapiens [sequence omitted]

SEQ ID NO: 782596 - protein, 171 aa, Homo sapiens
TGASPILHLYAGSAPLGSLPAANKTSPTSGEGARPGGIIHVYGDDSSDRAASSFIPYCSMAQAQLCFHGHRDAVKFFVSVPGNVLATLNGSVLDSPAEGPGPAAPASEVEGQKLRNVLVLSGGEGYIDFRIGDGEDDETEEGAGDMSQVKPVLSKAERSHIIVWQVSYTPE

SEQ ID NO: 782597 - protein, 157 aa, Homo sapiens
MGQPGKPGLLLLPLSGEGARPGGIIHVYGDDSSDRAASSFIPYCSMAQAQLCFHGHRDAVKFFVSVPGNVLATLNGSVLDSPAEGPGPAAPASEVEGQKLRNVLVLSGGEGYIDFRIGDGEDDETEEGAGDMSQVKPVLSKAERSHIIVWQVSYTPE

SEQ ID NO: 782598 - protein, 250 aa, Homo sapiens
MMEIQMDEGGGVVVYQDDYCSGSVMSERVSGLAGSIYREFERLIHCYDEEVVKELMPLVVNVLENLDSVLSENQEHEVELELLREDNEQLLTQYEREKALRRQAEEKFIEFEDALEQEKKELQIQVEHYEFQTRQLELKAKNYADQISRLEERESEMKKEYNALHQRHTEMIQTYVEHIERSKMQQVGGNSQTESSLPGRRKERPTSLNVFPLADGTVRAQIGGKLVPAGDHWHLSDLGQLQSSSSYQVL

SEQ ID NO: 782599 - protein, 1606 aa, Homo sapiens; identical to SEQ ID NO: 782591

SEQ ID NO: 782600 - protein, 1077 aa, Homo sapiens [sequence omitted]

SEQ ID NO: 782601 - protein, 1696 aa, Homo sapiens
MKSKGFPFKLGIAAEPQAVSDISTKPLREAGCARVRALPGTAHLLGLDMHGLGRWDAVGVEQHPWLPPTKARSTPFICDHKNVSGLCKHPLGAVSPTENSYYRGRCVILRFLLEKLRSLVDEAEMCPLSEWPCPVLRGPVPESGGDQRGWAEAEVSTGHDFWKSRLPWSLKGQYKSAVERAGYPLDSSSLGEILSIRVPHGAPSERPREPTQRLPGTGTGATWVPLRPCTFPHLKEGRGPRASSAIAGDQVSYDENVWGSFSPAGSVSLLGKTIGKNVCFAFRISHIECALPSELPEVDGWLRFLVIRAAPTLQNVLVASLSVSRDCGFFALAHVQGGALVQSSHRVSTFWSLPGPDLSPGRNVGQARVGPASELFSTVMVTGQRWRHSQPFLGPQSEPSALPGLDLFLNSHKLQGAAAVSLARHWPITSNRLGRAPVESPVPSHFRRVALLPRSRSQWPDKQSHSGVVRPGRVSPVGGRGALARRVSGEAKCKALVRGASGSHGGAAGQGPAVTRSPSSLCLALCPQDEMSESGQSSAAATPSTTGTKSNTPTSSVPSAAVTPLNESLQPLGDYGVGSKNSKRAREKRDSRNMEVQVTQEMRNVSIGMGSSDEWSDVQDIIDSTPELDMCPETRLDRTGSSPTQGIVNKAFGINTDSLYHELSTAGSEVIGDVDEGADLLGEFSGMGKEVGNLLLENSQLLETKNALNVVKNDLIAKVDQLSGEQEVLRGELEAAKQAKVKLENRIKELEEELKRVKSEAIIARREPKEEAEDVSSYLCTESDKIPMAQRRRFTRVEMARVLMERNQYKERLMELQEAVRWTEMIRASREHPSVQEKKKSTIWQFFSRLFSSSSSPPPAKRPYPSVNIHYKSPTTAGFSQRRNHAMCPISAGSRPLEFFPDDDCTSSARREQKREQYRQVREHVRNDDGRLQACGWSLPAKYKQLSPNGGQEDTRMKNVPVPVYCRPLVEKDPTMKLWCAAGVNLSGWRPNEDDAGNGVKPAPGRDPLTCDREGDGEPKSAHTSPEKKKAKELPEMDATSSRVWILTSTLTTSKVVIIDANQPGTVVDQFTVCNAHVLCISSIPAASDSDYPPGEMFLDSDVNPEDPGADGVLAGITLVGCATRCNVPRSNCSSRGDTPVLDKGQGEVATIANGKVNPSQSTEEATEATEVPDPGPSEPETATLRPGPLTEHVFTDPAPTPSSGPQPGSENGPEPDSSSTRPEPEPSGDPTGAGSSAAPTMWLGAQNGWLYVHSAVANWKKCLHSIKLKDSVLSLVHVKGRVLVALADGTLAIFHRGEDGQWDLSNYHLMDLGHPHHSIRCMAVVYDRVWCGYKNKVHVIQPKTMQIEASAPRGPRGGEEAPAGQQLSRIFHTEVHEALRGAHLPCTTYDSGCEQAQSRRWLGGLRGLQVALELWQVWGSPLPLLSPALLMGSHDSKKSFDAHPRRESQVRQLAWIGDGVWVSIRLDSTLRLYHAHTHQHLQDVDIEPYVSKMLGTGKLGFSFVRITALLVAGSRLWVGTGNGVVISIPLTETVVLHRGQLLGLRANKTSPTSGEGARPGGIIHVYGDDSSDRAASSFIPYCSMAQAQLCFHGHRDAVKFFVSVPGNVLATLNGSVLDSPAEGPGPAAPASEVEGQKLRNVLVLSGGEGYIDFRIGDGEDDETEEGAGDMSQVKPVLSKAERSHIIVWQVSYTPE

SEQ ID NO: 782602 - protein, 1613 aa, Homo sapiens
MKSKGFPFKLGIAAEPQAVSDISTKPLREAGCARVRALPGTAHLLGLDMHGLGRWDAVGVEQHPWLPPTKARSTPFICDHKNVSGLCKHPLGAVSPTENSYYRGRCVILRFLLEKLRSLVDEAEMCPLSEWPCPVLRGPVPESGGDQRGWAEAEVSTGHDFWKSRLPWSLKGQYKSAVERAGYPLDSSSLGEILSIRVPHGAPSERPREPTQRLPGTGTGATWVPLRPCTFPHLKEGRGPRASSAIAGDQVSYDENVWGSFSPAGSVSLLGKTIGKNVCFAFRISHIECALPSELPEVDGWLRFLVIRAAPTLQNVLVASLSVSRDVVSLRLLMFRGELWSSQATGSAPSGHSLALTEPGEERGAGAGGPSLELFSTVMVTGQRWRHSQPFLGPQSEPSALPGLDLFLNSHKLQGAAAVSLARHWPITSNRLGRAPVESPVPSHFRRVALLPRSRSQWPDKQSHSGVVRPGRVSPVGGRGALARRVSGEAKCKALVRGASGSHGGAAGQGPAVTRSPSSLCLALCPQDEMSESGQSSAAATPSTTGTKSNTPTSSVPSAAVTPLNESLQPLGDYGVGSKNSKRAREKRDSRNMEVQVTQEMRNVSIGMGSSDEWSDVQDIIDSTPELDMCPETRLDRTGSSPTQGIVNKAFGINTDSLYHELSTAGSEVIGDVDEGADLLGEETSAPSVFSGMGKEVGNLLLENSQLLETKNALNVVKNDLIAKVDQLSGEQEVLRGELEAAKQAKVKLENRIKELEEELKRVKSEAIIARREPKEEAEDVSSYLCTESDKIPMAQRRRFTRVEMARVLMERNQYKERLMELQEAVRWTEMIRASREHPSVQEKKKSTIWQFFSRLFSSSSSPPPAKRPYPSVNIHYKSPTTAGFSQRRNHAMCPISAGSRPLEFFPDDDCTSSARREQKREQYRQVREHVRNDDGRLQACGWSLPAKYKQLSPNGGQEDTRMKNVPVPVYCRPLVEKDPTMKLWCAAGVNLSGWRPNEDDAGNGVKPAPGRDPLTCDREGDGEPKSAHTSPEKKKAKELPEMDATSSRVWILTSTLTTSKVVIIDANQPGTVVDQFTVCNAHVLCISSIPAASDSDYPPGEMFLDSDVNPEDPGADGVLAGITLVGCATRCNVPRSNCSSRGDTPVLDKGQGEVATIANGKVNPSQSTEEATEATEVPDPGPSEPETATLRPGPLTEHVFTDPAPTPSSGPQPGSENGPEPDSSSTRPEPEPSGDPTGAGSSAAPTMWLGAQNGWLYVHSAVANWKKCLHSIKLKDSVLSLVHVKGRVLVALADGTLAIFHRGEDGQWDLSNYHLMDLGHPHHSIRCMAVVYDRVWCGYKNKVHVIQPKTMQIEKSFDAHPRRESQVRQLAWIGDGVWVSIRLDSTLRLYHAHTHQHLQDVDIEPYVSKMLGTGKLGFSFVRITALLVAGSRLWVGTGNGVVISIPLTETVVLHRGQLLGLRANKTSPTSGEGARPGGIIHVYGDDSSDRAASSFIPYCSMAQAQLCFHGHRDAVKFFVSVPGNVLATLNGSVLDSPAEGPGPAAPASEVEGQKLRNVLVLSGGEGYIDFRIGDGEDDETEEGAGDMSQVKPVLSKAERSHIIVWQVSYTPE

SEQ ID NO: 782603 - protein, 1337 aa, Homo sapiens
MMEIQMDEGGGVVVYQDDYCSGSVMSERVSGLAGSIYREFERLIHCYDEEVVKELMPLVVNVLENLDSVLSENQEHEVELELLREDNEQLLTQYEREKALRRQAEEKFIEFEDALEQEKKELQIQVEHYEFQTRQLELKAKNYADQISRLEERESEMKKEYNALHQRHTEMIQTYVEHIERSKMQQVGGNSQTESSLPGRRKERPTSLNVFPLADGTVRAQIGGKLVPAGDHWHLSDLGQLQSSSSYQCPQDEMSESGQSSAAATPSTTGTKSNTPTSSVPSAAVTPLNESLQPLGDYGVGSKNSKRAREKRDSRNMEVQVTQEMRNVSIGMGSSDEWSDVQDIIDSTPELDMCPETRLDRTGSSPTQGIVNKAFGINTDSLYHELSTAGSEVIGDVDEGADLLGEETSAPSVFSGMGKEVGNLLLENSQLLETKNALNVVKNDLIAKVDQLSGEQEVLRGELEAAKQAKVKLENRIKELEEELKRVKSEAIIARREPKEEAEDVSSYLCTESDKIPMAQRRRFTRVEMARVLMERNQYKERLMELQEAVRWTEMIRASREHPSVQEKKKSTIWQFFSRLFSSSSSPPPAKRPYPSVNIHYKSPTTAGFSQRRNHAMCPISAGSRPLEFFPDDDCTSSARREQKREQYRQVREHVRNDDGRLQACGWSLPAKYKQLSPNGGQEDTRMKNVPVPVYCRPLVEKDPTMKLWCAAGVNLSGWRPNEDDAGNGVKPAPGRDPLTCDREGDGEPKSAHTSPEKKKAKELPEMDATSSRVWILTSTLTTSKVVIIDANQPGTVVDQFTVCNAHVLCISSIPAASDSDYPPGEMFLDSDVNPEDPGADGVLAGITLVGCATRCNVPRSNCSSRGDTPVLDKGQGEVATIANGKVNPSQSTEEATEATEVPDPGPSEPETATLRPGPLTEHVFTDPAPTPSSGPQPGSENGPEPDSSSTRPEPEPSGDPTGAGSSAAPTMWLGAQNGWLYVHSAVANWKKCLHSIKLKDSVLSLVHVKGRVLVALADGTLAIFHRGEDGQWDLSNYHLMDLGHPHHSIRCMAVVYDRVWCGYKNKVHVIQPKTMQIEKSFDAHPRRESQVRQLAWIGDGVWVSIRLDSTLRLYHAHTHQHLQDVDIEPYVSKMLGTGKLGFSFVRITALLVAGSRLWVGTGNGVVISIPLTETVVLHRGQLLGLRANKTSPTSGEGARPGGIIHVYGDDSSDRAASSFIPYCSMAQAQLCFHGHRDAVKFFVSVPGNVLATLNGSVLDSPAEGPGPAAPASEVEGQKLRNVLVLSGGEGYIDFRIGDGEDDETEEGAGDMSQVKPVLSKAERSHIIVWQVSYTPE

SEQ ID NO: 782604 - protein, 1606 aa, Homo sapiens; identical to SEQ ID NO: 782591

SEQ ID NO: 782605 - protein, 928 aa, Homo sapiens
FPGMGRPPRGVLRFSGMGKEVGNLLLENSQLLETKNALNVVKNDLIAKVDQLSGEQEVLRGELEAAKQAKVKLENRIKELEEELKRVKSEAIIARREPKEEAEDDKIPMAQRRRFTRVEMARVLMERNQYKERLMELQEAVRWTEMIRASREHPSVQEKKKSTIWQFFSRLFSSSSSPPPAKRPYPSVNIHYKSPTTAGFSQRRNHAMCPISAGSRPLEFFPDDDCTSSARREQKREQYRQVREHVRNDDGRLQACGWSLPAKYKQLSPNGGQEDTRMKNVPVPVYCRPLVEKDPTMKLWCAAGVNLSGWRPNEDDAGNGVKPAPGRDPLTCDREGDGEPKSAHTSPEKKKAKELPEMDATSSRVWILTSTLTTSKVVIIDANQPGTVVDQFTVCNAHVLCISSIPAASDSDYPPGEMFLDSDVNPEDPGADGVLAGITLVGCATRCNVPRSNCSSRGDTPVLDKGQGEVATIANGKVNPSQSTEEATEATEVPDPGPSEPETATLRPGPLTEHVFTDPAPTPSSGPQPGSENGPEPDSSSTRPEPEPSGDPTGAGSSAAPTMWLGAQNGWLYVHSAVANWKKCLHSIKLKDSVLSLVHVKGRVLVALADGTLAIFHRGEDGQWDLSNYHLMDLGHPHHSIRCMAVVYDRVWCGYKNKVHVIQPKTMQIEKSFDAHPRRESQVRQLAWIGDGVWVSIRLDSTLRLYHAHTHQHLQDVDIEPYVSKMLGTGKLGFSFVRITALLVAGSRLWVGTGNGVVISIPLTETVVLHRGQLLGLRANKTSPTSGEGARPGGIIHVYGDDSSDRAASSFIPYCSMAQAQLCFHGHRDAVKFFVSVPGNVLATLNGSVLDSPAEGPGPAAPASEVEGQKLRNVLVLSGGEGYIDFRIGDGEDDETEEGAGDMSQVKPVLSKAERSHIIVWQVSYTPE

SEQ ID NO: 782606 - protein, 250 aa, Homo sapiens; identical to SEQ ID NO: 782598

SEQ ID NO: 782607 - protein, 250 aa, Homo sapiens; identical to SEQ ID NO: 782598

SEQ ID NO: 782608 - protein, 262 aa, Homo sapiens [sequence omitted]

SEQ ID NO: 782609 - protein, 147 aa, Homo sapiens
PYYYDSPRLARQPRLALTAPTSPDRAASSFIPYCSMAQAQLCFHGHRDAVKFFVSVPGNVLATLNGSVLDSPAEGPGPAAPASEVEGQKLRNVLVLSGGEGYIDFRIGDGEDDETEEGAGDMSQVKPVLSKAERSHIIVWQVSYTPE

SEQ ID NO: 782610 - protein, 250 aa, Homo sapiens; identical to SEQ ID NO: 782598

SEQ ID NO: 782611 - protein, 106 aa, Homo sapiens
MEPPPADSKPAEGRRHPGLLSLPSWASLAYSYLPGPLHSCLGGPYEGSPAPAPTPNQRSTDLGELPHKPRWPPRAAAAALPASPHHPATSTVMYVRSLVCSPRISK

SEQ ID NO: 782612 - protein, 103 aa, Homo sapiens [sequence omitted]

SEQ ID NO: 782613 - protein, 56 aa, Homo sapiens
HTLVDALSHREVTGVLTTCTLLIRPHASENNKAQNMDYSESILFRILFGHAKVDPD

SEQ ID NO: 782614 - protein, 259 aa, Homo sapiens
PQNCLIFQVNCLAWKYWEVSRLSMPPFLLAALPARYLASVPASQCVPFLISLGKSWLDSLVLDSHKKTSVLRKVQQCLDDSIADEYTVDIMGNLLCHLPAAIIDRGISPRAWATALHGLRDCPDLNPEQKAAVRLKLLGQYGLPQHWTAETTKDLGPFLVLFSGDELSSIATKFPEILLQAASKMARTLPTKEFLWAVFQSVRNSSDKIPSYDPMPGCHGVVAPSSDDIFKLAEANACWALEDLRCMEEDTFIRTVELL

SEQ ID NO: 782615 - protein, 148 aa, Homo sapiens
SGSRAPPLRPTRPVLYFGLNEVVRWWLLGGGCSLKMLCKWHAFYKQQWFFCPTCHHWQGTALYVSPFNKSYVSLAGSMSLLQPLEHSVIPTEVNRDSAQQQIRLMFEDWSLWYQWAFSAFSIQLLDSTGTRNSSVVEGRGGFGGSMQR

SEQ ID NO: 782616 - protein, 56 aa, Homo sapiens
HTSTHKHASRHTDSILENMNLIARLFSVYLGNIFAICKSGKVLQELADFLWFNLSL

SEQ ID NO: 782617 - protein, 64 aa, Homo sapiens
EPAPAANSLGLGLKPGQSMMGSRDTRMGTGPFSSSGHTAEKASFGATGGPPAHLLTPSPLSGPG

SEQ ID NO: 782618 - protein, 83 aa, Homo sapiens
QESSSVQSTPFKSKQAKKQVASFSSDHSLQQLSATSKTAAFASDLPAITHENVKFSTTIQSNTSYSKSQRSRNSVQNRAEPQT

SEQ ID NO: 782619 - protein, 122 aa, Homo sapiens
SSGPWSAVQVLPPLLGMWPQAGPDQLPVSPPCPCRGPFCRQGLQLNRRQNPRELAKKASTQELFVIASINSPGKQVFASFGESGGEEKSEQGSSLSNRNVLVCAFRCPVHTLPDVSLDPPSP

SEQ ID NO: 782620 - protein, 122 aa, Homo sapiens
MPSRHTNGMAAFPMGRPPYRCPKDQADGIHCLSFSLHWTHPQGYPVLTSEATSHYAANLTALLPAAMPQSQHYLNTTTGSTCMQLVSELRAQNHPSFPTFLSHLHALQHGMAVLAALRLQTG

SEQ ID NO: 782621 - protein, 122 aa, Homo sapiens; identical to SEQ ID NO: 782620

SEQ ID NO: 782622 - protein, 33 aa, Homo sapiens
MTPGFQLVRARPERSPASSQPSPCRPSPIFPPN

SEQ ID NO: 782623 - protein, 71 aa, Homo sapiens
MRAHRSCLEIRLGLQPCSQFWRPVQIELPSPGPNSPGGVLLPTRALCVWQAVWSEECASHALGSNYALGLS

SEQ ID NO: 782624 - protein, 49 aa, Homo sapiens
NKSNEVLWLMTGFSHPSSAVRVFPWNEKVTSQHDPLLSTAWVWLISVSR

SEQ ID NO: 782625 - protein, 108 aa, Homo sapiens
WVRDDTYQHRAAAAVTLQEDSVGLADLVPPVASAHGDDGELGQDDGPTDGGGHLLGALNTQTDVAIQRLLRRCAMADGVLAGLEKGLSHVSFCRHQVVPLVSNPQPAV

SEQ ID NO: 782626 - protein, 206 aa, Homo sapiens
ARKMTRERMMGEKLFYLSHLHPEGEMKVTLVLEPRSNISSGGSPLSPSAVSHSDSTSSTQSLSHGGAPELLVGLSYNATTGRLSVEMIKGSHFRNLAVNRAPDTYGKLFLLNSVGQEMSRCKTSIRRGQPNPVYKETFVFQVALFQLSDVTLMISVYNRRTMKRKEMIGWIALGQNSSGEEEQDHWEEMKETKGQQICRWHTLLES

SEQ ID NO: 782627 - protein, 61 aa, Homo sapiens
APITVPGSHHHLWDPPEVHSPAICGLSEQLFPGAQKALSRGHCSILQSATRLSLHYISGIQ

SEQ ID NO: 782628 - protein, 89 aa, Homo sapiens
PLPSVLSWAPPGKELPSSLCLLRELAVASPQALLTPAIPAPEPPLHHEPARPPACHCQAPGACPAASGVHQRPEAPCRVEEHTLGGGVP

SEQ ID NO: 782629 - protein, 73 aa, Homo sapiens
PAHGSGMNSSFTGSGMNMATAPLMAEMLKCEENVHLRNYDMQYIDITSTGLASRSAGITGMNMAHLYKNWTTY

SEQ ID NO: 782630 - protein, 36 aa, Homo sapiens
MTKAKSSGESFLETLTAVVMVDLMGNFANLILCQMS

SEQ ID NO: 782631 - protein, 32 aa, Homo sapiens
MPGPELPWRHPGAGPRTHGPYELRNLPWAQGS

SEQ ID NO: 782632 - protein, 82 aa, Homo sapiens
  misc_feature (37)..(37): Xaa can be any naturally occurring amino acid
GLCQVSPILMHGPVVRSPGLPGFSAAPSPQSPNPSGXPPGDWTVSLWSWGCSWWCFQQGSFGCLAPGRGLWRQGVTYRESLK

SEQ ID NO: 782633 - protein, 116 aa, Homo sapiens
LGSQAYLGKGRKGPLQADPLPSCHLRPSVILSHARCPAEAGKPQGPLSLKGRAGSTLGACSHLVWERKFRSSRLWLTLTHGRGFPVCHIASEEGGLHLSHGTLRVSIRTLGGLRAS

SEQ ID NO: 782634 - protein, 52 aa, Homo sapiens
AAAYYYYCSNSSFYDVRESCHLDPADWKFSILSFNCCTPASLGNRVRPCLKK

SEQ ID NO: 782635 - protein, 129 aa, Homo sapiens
GGFSAQADQEWSPPVCAVTGLGTDKGELVREAGPSHRCCLCLAALSRASEQTLTNTLLRVSRSGSWSPAELPIHGKKHRAALLAPRRELGCISKSSMCEARGLGKGVFGEESAVVGGSEVEGKEGHAVG

SEQ ID NO: 782636 - protein, 172 aa, Homo sapiens
GGKDFCHQHGLFEHQKTHNGERPYEFSECGELFRYNSNLIKYQQNHAGERPYEGTEYGKTFIRKSNLVQHQKIHSEGFLSKRSDPIEHQEILSRPTPYECTQCGKAFLTQAHLVGHQKTHTGEQPYECNKCGKFFMYNSKLIRHQKVHTGERRYECSECGKLFMDSFTLGRH

SEQ ID NO: 782637 - protein, 110 aa, Homo sapiens
LWAGGRESMGKEEGGGGQGAEEGESEAEAQKRLPWKGEGTWASRLPVAGPVGRAGVQGTQQLLGSEWGRRDWARGEDQLSSVNWMPFPGNGSRHTPQPTAGRERSASSQP

SEQ ID NO: 782638 - protein, 988 aa, Homo sapiens
RCPVHAARAPQSHPQDPRPRQGLACAPRARPRTTSPAMPRRRPPASGAAQFPERIATRSPDPIPLCTFQRQPRAAPVQPPCRLFFVTFAGCGHRWRSESKPGWISRSRSGIALRAARPPGSSPPRPAAPRPPPPGGVVAEAPGDVVIPRPRVQPMRVARGGPWTPNPAFREAESWSQIGNQRVSEQLLETSLGNEVSDTEPLSPASAGLRRNPALPPGPFAQNFSWGNQENLPPALGKIANGGGTGAGKAECGYETESHLLEPHEIPLNVNTHKFSDCEFPYEFCTVCFSPFKLLGMSGVEGVWNQHSRSASMHTFLNHSATGIREAGCRKDMPVSEMAEDGSEEIMFIWCEDCSQYHDSECPELGPVVMVKDSFVLSRARSWPASGHVHTQAGQGMRGYEDRDRADPQQLPEAVPAGLVRRLSGQQLPCRSTLTWGRLCHLVAQGRSSLPPNLEIRRLEDGAEGVFAITQLVKRTQFGPFESRRVAKWEKESAFPLKVFQKDGHPVCFDTSNEDDCNWMMLVRPAAEAEHQNLTAYQHGSDVYFTTSRDIPPGTELRVWYAAFYAKKMDKPMLKQAGSGVHAAGTPENSAPVESEPSQWACKVCSATFLELQLLNEHLLGHLEQAKSLPPGSQSEAAAPEKEQDTPRGEPPAVPESENVATKEQKKKPRRGRKPKVSKAEQPLVIVEDKEPTEQVAEIITEVPPDEPVSATPDERIMELVLGKLATTTTDTSSVPKFTHHQNNTITLKRSLILSSRHGIRRKLIKQLGEHKRVYQCNICSKIFQNSSNLSRHVRSHGDKLFKCEECAKLFSRKESLKQHVSYKHSRNEVDGEYRYRCGTCEKTFRIESALEFHNCRTDDKTFQCEMCFRFFSTNSNLSKHKKKHGDKKFACEVCSKMFYRKDVMLDHQRRHLEGVRRVKREDLEAGGENLVRYKKEPSGCPVCGKVFSCRSNMNKHLLTHGDKKYTCEICGRKFFRVDVLRDHIHVH

SEQ ID NO: 782639 - protein, 679 aa, Homo sapiens
RCPVHAARAPQSHPQDPRPRQGLACAPRARPRTTSPAMPRRRPPASGAAQFPERIATRSPDPIPLCTFQRQVSEMAEDGSEEIMFIWCEDCSQYHDSECPELGPVVMVKDSFVLSRARSSLPPNLEIRRLEDGAEGVFAITQLVKRTQFGPFESRRVAKWEKESAFPLKVFQKDGHPVCFDTSNEDDCNWMMLVRPAAEAEHQNLTAYQHGSDVYFTTSRDIPPGTELRVWYAAFYAKKMDKPMLKQAGSGVHAAGTPENSAPVESEPSQWACKVCSATFLELQLLNEHLLGHLEQAKSLPPGSQSEAAAPEKEQDTPRGEPPAVPESENVATKEQKKKPRRGRKPKVSKAEQPLVIVEDKEPTEQVAEIITEVPPDEPVSATPDERIMELVLGKLATTTTDTSSVPKFTHHQNNTITLKRSLILSSRHGIRRKLIKQLGEHKRVYQCNICSKIFQNSSNLSRHVRSHGDKLFKCEECAKLFSRKESLKQHVSYKHSRNEVDGEYRYRCGTCEKTFRIESALEFHNCRTGLIAHPGEGGPGGSRLRDLPDDKTFQCEMCFRFFSTNSNLSKHKKKHGDKKFACEVCSKMFYRKDVMLDHQRRHLEGVRRVKREDLEAGGENLVRYKKEPSGCPVCGKVFSCRSNMNKHLLTHGDKKYTCEICGRKFFRVDVLRDHIHVH

SEQ ID NO: 782640 - protein, 315 aa, Homo sapiens
WKLGVTPGRIPSFLAYRLGISWEVLEGGRFHAACNLELFSHLSFPNLLTSLGRFTHHQNNTITLKRSLILSSRHGIRRKLIKQLGEHKRVYQCNICSKIFQNSSNLSRHVRSHGDKLFKCEECAKLFSRKESLKQHVSYKHSRNEVDGEYRYRCGTCEKTFRIESALEFHNCRTDDKTFQCEMCFRFFSTNSNLSKHKKKHGDKKFACEVCSKMFYRKDVMLDHQRRHLEGVRRVKREDLEAGGENLVRYKKEPSGCPVCGKDIALMDDHQREEFIGKIGISSEENDDNSDESADSEPHKYSCKRCQLTLRRGLL

SEQ ID NO: 782641 - protein, 290 aa, Homo sapiens
IEAQIDLQAFWWPELEQSRFTHHQNNTITLKRSLILSSRHGIRRKLIKQLGEHKRVYQCNICSKIFQNSSNLSRHVRSHGDKLFKCEECAKLFSRKESLKQHVSYKHSRNEVDGEYRYRCGTCEKTFRIESALEFHNCRTGLIAHPGEGGPGGSRLRDLPDDKTFQCEMCFRFFSTNSNLSKHKKKHGDKKFACEVCSKMFYRKDVMLDHQRRHLEGVRRVKREDLEAGGENLVRYKKEPSGCPVCGKVFSCRSNMNKHLLTHGDKKYTCEICGRKFFRVDVLRDHIHVH

SEQ ID NO: 782642 - protein, 304 aa, Homo sapiens
WKLGVTPGRIPSFLAYRLGISWEVLEGGRFHAACNLELFSHLSFPNLLTSLGRFTHHQNNTITLKRSLILSSRHGIRRKLIKQLGEHKRVYQCNICSKIFQNSSNLSRHVRSHGDKLFKCEECAKLFSRKESLKQHVSYKHSRNEVDGEYRYRCGTCEKTFRIESALEFHNCRTDDKTFQCEMCFRFFSTNSNLSKHKKKHGDKKFACEVCSKMFYRKDVMLDHQRRHLEGVRRVKREDLEAGGENLVRYKKEPSGCPVCGKVFSCRSNMNKHLLTHGDKKYTCEICGRKFFRVDVLRDHIHVH

SEQ ID NO: 782643 - protein, 605 aa, Homo sapiens
MAEDGSEEIMFIWCEDCSQYHDSECPELGPVVMVKDSFVLSRARSSLPPNLEIRRLEDGAEGVFAITQLVKRTQFGPFESRRVAKWEKESAFPLKVFQKDGHPVCFDTSNEDDCNWMMLVRPAAEAEHQNLTAYQHGSDVYFTTSRDIPPGTELRVWYAAFYAKKMDKPMLKQAGSGVHAAGTPENSAPVESEPSQWACKVCSATFLELQLLNEHLLGHLEQAKSLPPGSQSEAAAPEKEQDTPRGEPPAVPESENVATKEQKKKPRRGRKPKVSKAEQPLVIVEDKEPTEQVAEIITEVPPDEPVSATPDERIMELVLGKLATTTTDTSSVPKFTHHQNNTITLKRSLILSSRHGIRRKLIKQLGEHKRVYQCNICSKIFQNSSNLSRHVRSHGDKLFKCEECAKLFSRKESLKQHVSYKHSRNEVDGEYRYRCGTCEKTFRIESALEFHNCRTGLIAHPGEGGPGGSRLRDLPDDKTFQCEMCFRFFSTNSNLSKHKKKHGDKKFACEVCSKMFYRKDVMLDHQRRHLEGVRRVKREDLEAGGENLVRYKKEPSGCPVCGKVFSCRSNMNKHLLTHGDKKYTCEICGRKFFRVDVLRDHIHVH

SEQ ID NO: 782644 - protein, 187 aa, Homo sapiens
MWTLRWAISLTACPSDQVDGEYRYRCGTCEKTFRIESALEFHNCRTDDKTFQCEMCFRFFSTNSNLSKHKKKHGDKKFACEVCSKMFYRKDVMLDHQRRHLEGVRRVKREDLEAGGENLVRYKKEPSGCPVCGKDIALMDDHQREEFIGKIGISSEENDDNSDESADSEPHKYSCKRCQLTLRRGLL

SEQ ID NO: 782645 - protein, 85 aa, Homo sapiens
PPTSASKSAGIIGQMGILDVTTDIQISTCKNMSHSRFPSFVHAFNKYSMSGDFRILGYNGEQDNDELDAGCFCSNKQRDEQDNFR

SEQ ID NO: 782646 - protein, 40 aa, Homo sapiens
SKRRRRKHNSDVQETPSEQDSSKGYRKAPEGPRALLICGL

SEQ ID NO: 782647 - protein, 127 aa, Homo sapiens
SQGGRSWGFEFLGLRNEGLRRGLLGLKEEGAGGNGSDEEPYGHPLSTGYPELSGRWGRVFTVRLGPRPAVGLCGYAALRDALVLQADAVSGRGSMAVFERFTRGNSEAPALDLPARTLQAGRVNGRG

SEQ ID NO: 782648 - protein, 94 aa, Homo sapiens
MFWRSLQGLGEEAFPTTSLSSWEAGTRSEATFPQDQAPHPQHHPFPRGCAPSLVLSTHTHPCPCPCSHLFCVHSHTPVSTPTPVSRVHSLTPVL

SEQ ID NO: 782649 - protein, 93 aa, Homo sapiens
TSAPATSCSSYNSSSYNSSSYNSSSYNSSSYNSSSYNSSSYNSSSYNSYDLSWRMFHVLMNRMYILQLLGRMFCKCLLSPFVLGYSLSSLFLC

SEQ ID NO: 782650 - protein, 115 aa, Homo sapiens
GAGLKETRQVLGTGSRQARSILCTDGPSRAAAPQITPAGLPEARAGKYQVLSQGLLQPRLVQPCLEQSELLLLHPHKPIQPQPCLKTTLSTNPSHGPRWWLHSLWPLAKCSQLHW

SEQ ID NO: 782651 - protein, 114 aa, Homo sapiens
QYSGKAVTEYCSPDSRHHTSWIKVKNLIIISSWVWCRGAMVALRSGSSKWLCPGRRVFAYLFMQQVFIKQHRGVERAPHWVGRDLDSSSAICKLGDFICKIEDGDSSSRFALWT

SEQ ID NO: 782652 - protein, 145 aa, Homo sapiens
MRKSGNVTLGRPLTDCGRTGLREACQRNDWHSLRTLYQAGPWKWVELAMAWLWVSGPWFPQNPEAAFTSRSSQIALGIAVTRHIPSMVFSFSESVSQGNDCKSQGSHIRGCERGRRLRPRRSVQLRAPSVCALHPSFPLVCLPDP

SEQ ID NO: 782653 - protein, 140 aa, Homo sapiens
RACLLGCRGGGFQPLLSRVRSVAHKLPAQGPQISCLHSDLQVSAPAYCKLGAFLLQNPCPLARKPWNFPRSLRQLQATGRSQMVRKGMNLKEEEPALPTLSGAPPKGTGKLHKQDLEHPGSVWAAEARCANVGTEVACLS

SEQ ID NO: 782654 - protein, 44 aa, Homo sapiens
TVATTANWLLALPKEAVSVPSPSLLAYLWKKNSLYSTVLNAIPP

SEQ ID NO: 782655 - protein, 78 aa, Homo sapiens
VSCCLFDDLKWSPQAACHHLNTKTCCTREGVVQEQEERHRHRSIGGKGHVTTEAEMKCCSHKPRNSKIAGHHQKLEEA

SEQ ID NO: 782656 - protein, 34 aa, Homo sapiens
MVTTHWILLWHWCLCLPSGNLLADLLGPALPFMA

SEQ ID NO: 782657 - protein, 67 aa, Homo sapiens
LWPLQPPYFKWGGLLGVQNVTCRYELHPPWVPLTCGNCGLRYNSGSNLSTKYMPWAYQVPQWLLRLK

SEQ ID NO: 782658 - protein, 85 aa, Homo sapiens
PCSGTSSSVPVASALTSGSDSPCLDTAMFPAAWTLACCPDPGLSPHSLHSAHQTLESCQSPAAGAYLNHIQLLNPPGGSPGVYTP

SEQ ID NO: 782659 - protein, 98 aa, Homo sapiens
TGRRKENEDMRIKLCSVVTLPTRTHELTWQKSNPHPRNTGCEPCDGTLSHSLSCTKVDTGFLDLIFYVDETLVANYTFKSREIHHLHFTIYVIVLVYS

SEQ ID NO: 782660 - protein, 83 aa, Homo sapiens
RVSLCCPGWSAVAIHRRDPTTDQHGSFDLLRFRPGPVHPSLGNLVVPRSREVTILMPNSVRTPDRHSALQPRTPELKGSSSLS

SEQ ID NO: 782661 - protein, 44 aa, Homo sapiens
MGLAATQRLGTQQESSTAPIPIPSSPNYLSHGPHFVDKIKLATF

SEQ ID NO: 782662 - protein, 47 aa, Homo sapiens
MQCPRHLSAGTQLFWSQKALQVLPVNCHPSDARLPATDSAIEYLHTA

SEQ ID NO: 782663 - protein, 128 aa, Homo sapiens
HTPNTVTFTNHIQHTHAFSNTHTVTFTRSHTTHTCILKHTYTVTCTHTQNIHMHSHTLTHSHMHSQHTHPFSHTHPQSHVHNHIQHTHAFSYTLTQSHAITYNTHMHSHTLSHTHSRMHSYAITYTLT

SEQ ID NO: 782664 - protein, 71 aa, Homo sapiens
MVYPLGPLCPLLSRSHWGSWVSSLSDFEAPRLCVLSYLSLFEQIFFFFYLNWVWKLLQKLDWVQDQIRSDN

SEQ ID NO: 782665 - protein, 155 aa, Homo sapiens
DRWRVPFYCLCVLNTALIGLLQSTAHPMAIVPAECIPKMIHCMKFMEDNVELHFVTPVFQPEGAGACYGRKVCLCFGEKVVHHDLPLLFDLSRDPSETHILTPASEPVFYQVMERVQQVMREHQRTLSPVPLQLDRLGNIWRPWLQPCCGPFPLC

SEQ ID NO: 782666 - protein, 91 aa, Homo sapiens
QGNALKPYSRGAGWLCSLHPHLLSAGLGGRVAFRKPASTSPNRRNLDDLSLVLDNLSPTSLKWLGRGMSGGVQRDTATSRPKCKFIFMRAG

SEQ ID NO: 782667 - protein, 78 aa, Homo sapiens
QGNALKPYSRGAGWRWTPRPVLPTSTSPECRPRRQSCVQKTSKHIPQPEIRGNEETWTISALCLTTYPPPPLSGWGGG

SEQ ID NO: 782668 - protein, 106 aa, Homo sapiens
RTTEDPERQPVLTGLFLSMCLVTVLGNLLIILAISPDSHLHIPMYFFLSNLSLPDIGFTSTTVPKMIVDIQSHSRVISYAGCLTQMSLFAIFGGMEERHAPECDGL

SEQ ID NO: 782669 - protein, 103 aa, Homo sapiens
MFRNSGKGRVWVLPWGHLGPGGRWPAFCLLSTSFLQKAPTSCVNRAGAHGPPQAPSPPHPRSLIADYTQSSLIPGQLPSLPQPPLALRDGLGASLGSQESRPG

SEQ ID NO: 782670 - protein, 92 aa, Homo sapiens
SPHRLFVTSHTSTSSSGHFSLHSSSSQHLILPHGLRRSRSPLTVPVVIEATQSDSTHSATQSFTPVTVVAFYNVPWSMILPLPIASFTLLPA

SEQ ID NO: 782671 - protein, 122 aa, Homo sapiens
PRGDWGHRVTLPRHGDLSWVTIHLSADSKFQGSNRRSVPASVHRTESVTRGGRDPGAAQGGEAAHIRAGSIRCPPRARGQREMVRSLQPGGQGHLAGTRINVGHRGDGEGEREGYPQPLFPL

SEQ ID NO: 782672 - protein, 70 aa, Homo sapiens
IVKEVKKLEQDPGLLQESSRLRSLLEELRTIVNDGPQLLGSSDSPTSASPVAGTIDGMSHCAQPCHLFFL

SEQ ID NO: 782673 - protein, 107 aa, Homo sapiens
GQCPTAGMPAVLRSERTVPGTSRQEVFYAYVTLYVAFPSKFCFISGVCVLVENFGFSRISEVNLNRFFPVSWLVYLDGWSCCVLRWARPQAQDQGFGVRQVMCEVPA

SEQ ID NO: 782674 - protein, 91 aa, Homo sapiens
GETGRRGRGHTQIFRPEPTEGGTGREATALHPYSLPAQTPGAARCSQQSPKVQSPEAADLIERSEWKSFRDQDVTPNPLPQVFYQCQPNQS

SEQ ID NO: 782675 - protein, 76 aa, Homo sapiens
LGLVVWGNTDLPSDSLCGFRGSPCFPELPWFPADETEKSPTIRVIVGWGRWHTPVAPVTWEAEAGESLELGRWRLW

SEQ ID NO: 782676 - protein, 81 aa, Homo sapiens
VSGTNSTETLASRPVRKVFPGLRSRRWRPAVPPEAPGRLCFLPFAAHIPGLGPILPPAAEPVPIILSASTHGHGCFLDSAL

SEQ ID NO: 782677 - protein, 106 aa, Homo sapiens
TSEPGAQGELSSALQPQVRIRTFTAAPTGAPQLGASRGLGCWSGWRRVGGVEELGCKPHAGSSGQSALKPSLVKEGKMAPGPQAGKEVSKEEGWRVRRGWQRVRRG

SEQ ID NO: 782678 - protein, 278 aa, Homo sapiens
TSEPGAQGELSSALQPQVRIRTFTAAPTGAPQLGASRGLGCWSGWRRVGGVEELGCKPHAGSSGQSALKPSLVKEGKMAPGPQAGKEVSKEEGWRVRRGWQRVRRGLCCRLRHDLFCTQAGERDFHPDALASSPRLGSPSANFTLGPVSRSYGGQYQVLPSASQTLLRVRRPPGPPGHPDHTDSISDTVSLSAQPGPTVASGENIDLLLSVNGGIWNTFISVTKEGGQIQVPQLTFDHPLFRSSLTIPGRNFPHEFLLTLSPRGNLSGANHSRQLQTT

SEQ ID NO: 782679 - protein, 36 aa, Homo sapiens
MHFRSLRTKLLLMSRNEEATKHLETSKQLAAANRGL

SEQ ID NO: 782680 - protein, 76 aa, Homo sapiens
GQTGERERDESQRGYSWKPMRIWCDKSVARDLNYKAYKLLVSEPTRSQHTQGKSFSFSASISKVLSILQQKLNLPT

SEQ ID NO: 782681 - protein, 103 aa, Homo sapiens
LGDLWIRGVRGVCSNELGDLWIRGVRGVCSNELGYLWIRGVRGVCSNELGYLRIPGVRGVCSNELGFPTGMWGKCTWSVCLNCNKTSLISIFIDDFKPFSCYS

SEQ ID NO: 782682 - protein, 69 aa, Homo sapiens
KAKSGKGTASSEKATTLNPTDAFSHQPQNHPQGLWLTPAHEQMGSTPPTHTLPRRLSAFSRPHSQEPPF

SEQ ID NO: 782683 - protein, 34 aa, Homo sapiens
ETLLPEEQVDAGGAHEVYDFSAEAPLIGDPSSSH

SEQ ID NO: 782684 - protein, 140 aa, Homo sapiens
MKHMNAIHSPIHPSISASICPPNHPLFIHPTTHPSTQSPNHPSIHPSTLPTSIHLSIHPPNHPTTHSSVHLSNHSFIDAFIHPFIQPVTQPPIHHPSIHPSIQLPIHSSIQPTTQPPILQPSTYIYQSTHLPISIHLPYH

SEQ ID NO: 782685 - protein, 46 aa, Homo sapiens
ASLPCYSINLCLLHTHIKSTHSRPGTVAHTCNPSALGGRGGWITGG

SEQ ID NO: 782686 - protein, 100 aa, Homo sapiens
DVIWWLADCGIDVQGLDTALFREHASQMGMNQDSGDECVCVSVGVPGCAQGTAGAKVMLGSQGDHHWSLQHCWVWVTWQKCGARWGLLTKRGLMVPLWLI

SEQ ID NO: 782687 - protein, 36 aa, Homo sapiens
GHWSEVLEPATMNTKFKWPWICPSRGSKMKHVFTNC

SEQ ID NO: 782688 - protein, 51 aa, Homo sapiens
SSTQEDTPRASSTQEDTPRASSTQWNTPRASSPSRSTQLDNPRTSSTQQDN

SEQ ID NO: 782689 - protein, 54 aa, Homo sapiens
LWGPGTARMPRGTAGENGSEEETGAVKVGMPVRQILHSLKANRLTNGTTYGAAS

SEQ ID NO: 782690 - protein, 120 aa, Homo sapiens
MLDCSCEPTRPAVHVFYSMYSFFHVFIHRVLLSAYPVPDTVLGTCEQQGTEQASAFMELKFWGCRECIGDGFLTNKYGVSQIVINSTERNKAGCRDSKCVVVSVGSCSPWCTGGQGWLHG

SEQ ID NO: 782691 - protein, 82 aa, Homo sapiens
GKRALFTHWHKARGVSAEEVGGTLHLLQVEGPWLGHRLQCLLQLAGLKDLLGLRAEPLDQEPGQVLQDGLAVQADKLLPAHL

SEQ ID NO: 782692 - protein, 57 aa, Homo sapiens
MQKTKGETVCEMNLRNQEFQFGHDQFEMIRHQMETFIYTFMQDARTYNIKNDDVTDA

SEQ ID NO: 782693 - protein, 107 aa, Homo sapiens
NTLGNFFFGNTGFMKTHTYTHTNFELYLMKCLPKYAKGQWMDVSYLLWMQLTLKCNKCWDYRHEPLHPAPSGFSTRANKVIPWENNHLINNARTIRKRRKFNLSVYV

SEQ ID NO: 782694 - protein, 141 aa, Homo sapiens
MNQEPKCKSINSKTLRGRHGGNLHDIGLGNNSLDISPEAQATKEKINKLDFIKIKNFCLSKVTTMPNPRIYISNKFPGNAYAAGLETTLEETTPSENSSCLPRGEGMRKRILKKASKLWPTLIEDHRHLKLSAEEDAVVMP

SEQ ID NO: 782695 - protein, 120 aa, Homo sapiens
  misc_feature (18)..(18): Xaa can be any naturally occurring amino acid
YRYRLIQKMDPPSLQELXRSRWQPVLTGLCLSMCLVTVLGNLLIILAVSPDSHLHIPMYFFLSNLSLPDIGFTSTTVPKMIVDIQSHSRVISYAGCLTQMSLFAIFGGMEERHAPECDSL

SEQ ID NO: 782696 - protein, 120 aa, Homo sapiens; identical to SEQ ID NO: 782695
  misc_feature (18)..(18): Xaa can be any naturally occurring amino acid

SEQ ID NO: 782697 - protein, 125 aa, Homo sapiens
GTLGLAGLMLWAAAAVTAELDVSWGNGECRAQGEQVCLERWSVSSRERRKPHRRPAEKETLQGTARAGDVKCCCCLRGWRASSAEVFFWKGMGRWLDSTLACEYHAEPLFLVSVEGPRSSWTQLM

SEQ ID NO: 782698 - protein, 72 aa, Homo sapiens
MLENSPENPENLLTKLEDSPENPENLLTMLEDSPENPENLLTKLEDSPENPENLLTMLEDSPENPENLLTKL

SEQ ID NO: 782699 - protein, 54 aa, Homo sapiens
STATPLLLAKPCRGGNQLTASTNCLSQAGVIMGLGRRGLGCRACCPAGYGKDVP

SEQ ID NO: 782700 - protein, 142 aa, Homo sapiens
WRKRGHESDLGGLSLGWGGEAQGSECGLGATGPTHILVPLLPGWVTVSKSAHLPVHQFPPCKMGVAPQTSWGCGESKPDNTGTRSSMALPMPALLSSCSAHPPANCELFVEGGCLLGVCVPSTGLRASTQALLCAWGWETQK

SEQ ID NO: 782701 - protein, 92 aa, Homo sapiens
GPGARGGTHPASWMEWRTGLVNDSSQTCFVNSSAHSPTPWLPSLSCDIFLLSPPTQSCRHTWTLSINLNCNHLQITDLDTPPFDLPAVLLKK

SEQ ID NO: 782702 - protein, 206 aa, Homo sapiens
MWHFSTFRRNTPSKVGSYSEYYRVNWCQHWFEYFPNPPINILSMIENVLAFHDKELLQHFIDHDITSQLYAWPLLETVFSEVLTREEWLKLFDNIFSNHPSFLLMTVVAYNICSRTPLLSCNLKDDFEFFFHHRNNLDINVVIRQVYHLMETTPTDIHPDSMLNVFVALTKGQYPVFNQYPKFIVDYQTQERERIRNDELDYLRER

SEQ ID NO: 782703 - protein, 165 aa, Homo sapiens
MASVLRMMPGLPGTTEPPTGRLGVGLAQGRSSAIDTHSMWWAGLGGDTGTEKPEKLQPLRRVSATWGKMISWFQPLRRVSGTWGKMTAWSWQLLSLLSPGPCREAWKGGTGLDPEELSDAGLDCFRGHLAHSPPPGEDLLEPGKMKDPPSAVKPRIPPPCRWTAS

SEQ ID NO: 782704 - protein, 111 aa, Homo sapiens
MDEWAPVRPTRGGYRSYRESLSGISERGHQARLKAGGTGSPGPAPHPGGQVAAPAQLGGPRRNRPEDTVMEILRQQWEAGGVKEQWPLPTWIQELWQSNDRSFRSAPQGTA

SEQ ID NO: 782705 - protein, 43 aa, Homo sapiens
MRRLTLHKHATITHSTSPWHLTTRLNTSPPRTTANSLIDDSPT

SEQ ID NO: 782706 - protein, 46 aa, Homo sapiens [sequence omitted]

SEQ ID NO: 782707 - protein, 119 aa, Homo sapiens
FFPSLINSFLPLRFAYSFNKHLLAFSNIPGSVLGHRGKIKAPNAQKSLPWVSFTYLIISPFQNTFCSIRSLRCHLPLIGPFILPEPTHLTQDLPLDPPKTDNTVGASTFLRTALASCVP

SEQ ID NO: 782708 - protein, 198 aa, Homo sapiens
VAESRTRQLQGLPAGGCSLLYVCVRHGCVCVCVGGVRLCVCLCVCTRSACLCADFCLSLTSLSLSLSLSLCLPSRSFRGPLFLSLSVCVCVRLGTHVPCAPEGGFLARRPFFWSASPRVSAWVVWPVGSRRPGGSSLGVCEGLGNVGIGVGPAGVFIPSPSGAASLLGWIQTSAPQPRTTASQALIVHPQEGARRASR

SEQ ID NO: 782709 - protein, 184 aa, Homo sapiens
RPGFAEGPAAGRNPRRKKPQTDRRRGSAGSSLRRARTVCGFCLSLTSLSLSLSLSLCLPSRSFRGPLFLSLSVCVCVRLGTHVPCAPEGGFLARRPFFWSASPRVSAWVVWPVGSRRPGGSSLGVCEGLGNVGIGVGPAGVFIPSPSGAASLLGWIQTSAPQPRTTASQALIVHPQEGARRASR

SEQ ID NO: 782710 - protein, 122 aa, Homo sapiens
MPRCPKLACGPRPNYTPMACHCTMFMPGTAKSGWQEPRQRLLQLEGIISPHPSVIDRNWHTHCQTTLSLGGGRQRWTQPTGLAGTAGSRGARWPPTVKSGRGGTLPTGYPLDQSSSTQSPFP

SEQ ID NO: 782711 - protein, 49 aa, Homo sapiens
IHTQPKHIKSQLPKDQVSRKRMKPPPPVAKNLIIELSFFLLYKTAFALL

SEQ ID NO: 782712 - protein, 166 aa, Homo sapiens
NEIYYFINIKQRKPLEHTRKAKRSHRPLEGGGLPLQAPLDSQGTSSSTVRAYQTSKSRVTMSPGFSSQWNSSQPAWNTYSFPRASLHYQSHASYTYCTGHPASSSTVRAYQTSKSRVTMSPGFSSQWSSSQPAWNTYSFPRASLHYQSHASYTYCTGHPAVKEIQE

SEQ ID NO: 782713 - protein, 166 aa, Homo sapiens; identical to SEQ ID NO: 782712

SEQ ID NO: 782714 - protein, 129 aa, Homo sapiens
EEIGQSQPSNTVREEAADLLWAEHSVLDHTLAAQRPHSTSNRDWSCNFLWGLNPKSPCGPSRASGDGDHLLLGITSGVVTVSSAKEREVLIVRGGTGQISFRDQGSLAESLEVTCMKNGGIWPEGTRSP

SEQ ID NO: 782715 - protein, 120 aa, Homo sapiens [sequence omitted]

SEQ ID NO: 782716 - protein, 30 aa, Homo sapiens
MGRTVTEEEEVNEPEAGRVASGYGDDCKLS

SEQ ID NO: 782717 - protein, 127 aa, Homo sapiens
SALRALHHVWTREWGGSAREWVLPVSGSNSWFTVMILFVFPVFCLAWQQGRKRATGSLQFVLGCSCSHTRALKQAACTLDAFTWGPLVCKSKAWEVFPFHGPARCGWHFTYSCITNVIQIQVKGQVS

SEQ ID NO: 782718 - protein, 518 aa, Homo sapiens
MWDWAPTTSLQEVNKTVLVFALTQHTDQGGRPECALSVISTNNDVSSSVLRRTKSVSSMSEFESLLDCSPYLAGGDARGKKLPNNPAFGFVSSEPGDPEKDTKEKPGLSSRDCNHLGALACQDPPGRQMQRSYTAPDKTGIRVYYSPPVARRLGVPVVHDKEGKIIIEPGFLFTTAKPKESAEADGLAESSYGRWLCNFSRQRLDGGSAGSPSAAGPGFPAALHDFEMSGNMSDDMKEITNCVRQAMRSGSLERKVKSTSSQTVGLASVGTQTIRTVSVGLQTDPPRSSLHGKAWSPRSSSLVSVRSKQISSSLDKVHSRIERPCCSPKYGSPKLQRRSVSKLDSSKDRSLWNLHQGKQNGSAWARSTTTRDSPVLRNINDGLSSLFSVVEHSGSTESVWKLGMSETRAKPEPPKYGIVQEFFRNVCGRAPSPTSSAGEEGTKKPEPLSPASYHQPEGVARILNKKAAKLGSSEEVRLTMLPQVGKDGVLRDGDGAVVLPNEVGGWDLSFLLVGGVSI

SEQ ID NO: 782719 - protein, 518 aa, Homo sapiens; identical to SEQ ID NO: 782718

SEQ ID NO: 782720 - protein, 84 aa, Homo sapiens
SPLPLSTCCYKQVRGPPMSASATVPRVPCSRGPHHLCSSSDPGARQVEEHQQGRLMFQTLLPPVHLFIYAGKVTASTHLAQQGG

SEQ ID NO: 782721 - protein, 32 aa, Homo sapiens
MSVFRAHSLPLFLVVIGRKEDISWTPLQRLEN

SEQ ID NO: 782722 - protein, 194 aa, Homo sapiens
PARPSSSGFPAPPNQRCPAPPLLSREHPPSQPEPGAGAVAPGREVLGFPLARVALGGHPRPGSGGSSPSRFLGASAHPPWPRTRAPPGPGRLLQSAAAPWGDGPGARARTWKPTKWAVPNEVGTGERGAVQKPTPPPAPRGRGNPGQPVARIIPDYTRRPRQTKNTSLNSLPHRSLQAFVHTRYTDCGRIVIHS

SEQ ID NO: 782723 - protein, 55 aa, Homo sapiens
SPFEVTEETSAPPLFEEQHEPPRVSGGMRAACTRKGVQEDPKMCPSDPQPLHTLN

SEQ ID NO: 782724 - protein, 116 aa, Homo sapiens
DTCPSCPARLFKTAEECQNTEMQSPGTFGSTLPAHSQVKMQIFVKTLTGKTITLEVEPSDTIENVKANIQDKEGILPDQQRLIFAGMQLEDGCTLSDYNIQKELTLYLVQRLRCGC

SEQ ID NO: 782725 - protein, 116 aa, Homo sapiens; identical to SEQ ID NO: 782724

SEQ ID NO: 782726 - protein, 33 aa, Homo sapiens
MIESFCSSHFGVTDSFEHLMSLVKNGCLSTQPT

SEQ ID NO: 782727 - protein, 72 aa, Homo sapiens
WPHQGARSKTAPSAPTSPALLDVARSRCDPCPAGGLTADWLLEADCLPVCPQETGQGWSAGGRVAVTSDEPL

SEQ ID NO: 782728 - protein, 107 aa, Homo sapiens
VPTLFISAHWGSQDTDPGFLTPGRHPNQDSDFLISEVVHFFSDLHGNSEPHRGVIPVSSFSEVPHPTPQQVSAALSPPPLLCSCFSWMAECFLRSVCCFTLAPWSGI

SEQ ID NO: 782729 - protein, 67 aa, Homo sapiens
RHPVVMVIPSLKALEAGPSDHLRSYLTVPLLSSHCRRAWSGCSIRSYDSSGAPMGLPPPTTLVPHLS

SEQ ID NO: 782730 - protein, 68 aa, Homo sapiens
PLGTTAPFTISSSYNSSSYNSSSYNSSSYNSSSYNSYKPKHKLTPKHFSLHSLLANVRMLCSIGYESK

SEQ ID NO: 782731 - protein, 35 aa, Homo sapiens
GVGGGEAEAGKGSSPSEREALLGRPGLAICERGAF

SEQ ID NO: 782732 - protein, 74 aa, Homo sapiens
MACIFHLCGLNAQASSCSRLKIQLVLLVSNAITLEPIPEAIEMGMEASMQEVRVLCKEHTYNNGPQTHFFPSVP

SEQ ID NO: 782733 - protein, 78 aa, Homo sapiens
PYTSPYLPPPLRGDTDLLIHPDFSGRSWVLYALGALNAWQLEWVSLEAFRLSFYNHRRAITGREILGAVKQRSSQKSF

SEQ ID NO: 782734 - protein, 77 aa, Homo sapiens
PRDGFIMRVLRVRGLAEIHPDFSGRSWVLYALGALNAWQLEWVSLEAFRLSFYNHRRAITGREILGAVKQRSSQKSF

SEQ ID NO: 782735 - protein, 72 aa, Homo sapiens
  misc_feature (9)..(9): Xaa can be any naturally occurring amino acid
HINEPERKXTLGIHPDFSGRSWVLYALGALNAWQLEWVSLEAFRLSFYNHRRAITGREILGAVKQRSSQKSF

SEQ ID NO: 782736 - protein, 74 aa, Homo sapiens
TCEESMIQVFESFAIHPDFSGRSWVLYALGALNAWQLEWVSLEAFRLSFYNHRRAITGREILGAVKQRSSQKSF

SEQ ID NO: 782737 - protein, 99 aa, Homo sapiens
LRTPPTSRQEGRCDHDRSTRRADGDTGAGGETGVYGVQQAGVDGMRHTNPGTEMEGREREEEREEQEREGERERGMQTGGKFEDTKRGPGNGLNRGGMG

SEQ ID NO: 782738 - protein, 91 aa, Homo sapiens
IRTHSGPARIMWKSGLSAGFLVLVRCLRQTSFDQTYSTTMKSTSIPVLQCGDFVSDTAVFVLPALSPLKMYFSLLEDPKEMTKKTSSLQNS

SEQ ID NO: 782739 - protein, 69 aa, Homo sapiens
PQDCLGIACLSLECQVTTLGWPSEPLTAPHTSQSGQSIRDLSDLSTVTQLVPKKSQGQNLRPVTQAPVQ

SEQ ID NO: 782740 - protein, 123 aa, Homo sapiens
MQWFDDGVGSVPCCGYIVALRLALWHMMSDPLRDLASDMQTYHRPVVGQRLDRDENTFMRDLAAVASVGLPLLGRQAQVAAGRVLVVALFGGFGGLHSRLDGAAICLPGHCHSSRVEVTDQTH

SEQ ID NO: 782741 - protein, 78 aa, Homo sapiens
ACAHIHSCTQDPCQCTCVLLPATRPHTADVSVHTCAPACPHLHSAVSVHACCCLPHIHTLLLMYRCTCAPACHTSTHC

SEQ ID NO: 782742 - protein, 85 aa, Homo sapiens
VRRRLQGPARLGPIHSSAGADQASPLCWKPSPKERVPWGPHPDSGPALRLQGGRWRCPGGPCPSLPSGCTTPRQKGSERDLGRES

SEQ ID NO: 782743 - protein, 58 aa, Homo sapiens
RPWGLSWVYSCPGGRDPKVGQGEGWARWLTPVIPALWEAEAGGSRGQEIETILANTVK

SEQ ID NO: 782744 - protein, 109 aa, Homo sapiens
GPKRERSCESRGVTSFSPGHVGWPIRISTNLSTSPFGLVYFVLFHPAFTLFCSSSLQDKREPTESHRVELENKILVTMEAYALEAKVCSLPEKTFITNGYSIFSSQALG

SEQ ID NO: 782745 - protein, 106 aa, Homo sapiens
MLLSRNTVLQGQPFGGVPTVLCLNIALWVLVLVVYSFLRKAAWDYGRLALLIHNDSLTSLIYGEQSEKTSPSETSLEMERRDKGFCSWFFNSIKMKDEDLINKCGD

SEQ ID NO: 782746 - protein, 127 aa, Homo sapiens
MSASPDDLSTGGRLQNMTVDECFQSRNTVLQGQPFGGVPTVLCLNIALWVLVLVVYSFLRKAAWDYGRLALLIHNDSLTSLIYGEQSEKTSPSETSLEMERRDKGFCSWFFNSIKMKDEDLINKCGD

SEQ ID NO: 782747 - protein, 110 aa, Homo sapiens
MQLTAGLTPCPLYSGRKMRSHGPRPHPSTLESQIPHFHILKSLTLSFPFSLRKLKCSLTVFTRAAIPASALAFRLCQGQNIVLISRTPFWVDPSQVHPALSPRQPWLLSA

SEQ ID NO: 782748 - protein, 77 aa, Homo sapiens
MDAMPCPLRLKCGGDLRLAPVHALATSCLNSTLGGQLDQRPQQTSFTLAGGSTLSDQTQTSVYNWWGPCLGGCLLCV

SEQ ID NO: 782749 - protein, 44 aa, Homo sapiens
MTPTASRRERTGQLPHCRIPLSSAEPGPESGANSDRKEPNIGFL

SEQ ID NO: 782750 - protein, 50 aa, Homo sapiens
AAAYYYYYYCSEFKLLTMYGDMFLNPRSFLRGSGTSAPLLSPKIHFTPTA

SEQ ID NO: 782751 - protein, 89 aa, Homo sapiens
GPTHAQAAFGSQALVAVPRVWGPWGARMLLSSAPAWRPLSPPKLCKLSVVQAPQKPMRLTGRSASGAHPATPEPLAVDCQLAIHAWHCP

SEQ ID NO: 782752 - protein, 38 aa, Homo sapiens
ELGKPHKQLPTCKNSKSYSWEHLLRTLLENKRQATKVT

SEQ ID NO: 782753 - protein, 124 aa, Homo sapiens
SWPRHRQPARLVCEAFPAGRAHPAAPAPVPAPGIWGRFPLLFNRQRHLGPSFPVRWDGAPVRLCLISRNTGTPQKVLPPVVWSPTSRKKPMLSARNSMMFGHLSPVRIPRLRDSGAHVSPGDIV

SEQ ID NO: 782754 - protein, 115 aa, Homo sapiens
AAGASKDIGQTNRLPAKKQLVLPRSPWPSSRFWFPRRCRRWVFLLALLPALPCSSQFHVAAGWSHPEPYSLALFHLPCISESFRHCLVPRYCLFVGPWFPQTLMITSNISLPPPC

SEQ ID NO: 782755 - protein, 81 aa, Homo sapiens
KSAQEVPLNPSNWSNLKTPALPYSPFCDASRATRNLSPMASGRPEGAVPLTCQRGQMPSFPACPSPQETGSRAPGPTPQRE

SEQ ID NO: 782756 - protein, 149 aa, Homo sapiens
LQLLLEHQDCIAPDHQDPLHELLEDLGELPTIPDLIGESIAADGHTDLSKLEVSLTLTNKFEGLEADADDSNTRSLLLSTKQLLADIIQFHPGDTLKEILSLSASREQEAAHKQLMSRRQACTAQTPEPLRRHRSLTAHSLLPLAEKQR

SEQ ID NO: 782757 - protein, 113 aa, Homo sapiens
PHVNFSHLTTKDYMEMYNVIMTVKEDQFSALGLDPCLLEDELDKSVQGTGLAFIAFTEAMTHFPASPFWSVMFFLMLINLGLGSMIGTMAGITTPIIDTFKVPKEMFTGNSSL

SEQ ID NO: 782758 - protein, 41 aa, Homo sapiens
MALACQCPPKLDVTSCPYLTFGSIGHGLSDKGMLWKCGFWP

SEQ ID NO: 782759 - protein, 76 aa, Homo sapiens
TPRLELFWGVYFTLLPELSPKFKLQNHCGSLRVTFLVGSLPPSLITPIPPQNHPHKLLALNPRSKFCFWLSWCGSN

SEQ ID NO: 782760 - protein, 70 aa, Homo sapiens
STNHSTQSALNQSLHTVGAQQITAHSRRSTNPCTQSALNKSLHTVGAEAPLPAYFTPTPVRLRGDVRLSG

SEQ ID NO: 782761 - protein, 64 aa, Homo sapiens
YTHVPNSIIHNSQNMRATCVHQPVSITWIYKMWHIYMAEYYSALKSKEIMSMLQCCCNPTTLDE

SEQ ID NO: 782762 - protein, 137 aa, Homo sapiens
SLCLTHLQAIRAFLSPNLQTYSHLGILHSLLLLPGMLFLYIIPFVSAQSSPSEKVPLTTFLRKTPPLSVPPSYHPLSFVAQHCSQSVVILPFSVFYWDLSASPCWNECFTRPCSSLTLHRPGPQQKPACTTGFLDNY

SEQ ID NO: 782763 - protein, 68 aa, Homo sapiens
SIITRHQQGFSRRYWQAVEKGVRHGASSSRSLCLPSRDPNISQHKHPRELPCGSVGNGSLSRAARSWQ

SEQ ID NO: 782764 - protein, 142 aa, Homo sapiens
LLHSGEMPFSCECGKGFVKHSKLIEHIRTHTGEKPFQCPKCDKSFRLKAQLLSHQGLHTGERPFHCPECDKNFRERGHMLRHQRIHRPERPFACGDCGKGFIYKSKLAEHIRVHTKSCPAPNELDIKKRLSQLFAMIEADWS

SEQ ID NO: 782765 - protein, 48 aa, Homo sapiens
RSRGSQMQPSSVLAENTNRYLVLTPYLLSEILGEESGLLSSPSDSYVH

SEQ ID NO: 782766 - protein, 163 aa, Homo sapiens
MNKRLVPRRPLSASLGQLNEVGLPSAAILPDEGAVDLPSRKPPALPNGIVSTGNTVTQLIPRGTDPSYDSSLKPGKIDHLSSSAPGSPPDLLESVPKSISALPVNPHSIPPRGPADLPPMPVYNKELEHALEKNEVDLPVHSLKDLPTCASSWLHHRSLCKEP

SEQ ID NO: 782767 - protein, 217 aa, Homo sapiens
MNKRLVPRRPLSASLGQLNEVGLPSAAILPDEGAVDLPSRKPPALPNGIVSTGNTVTQLIPRGTDPSYDSSLKPGKIDHLSSSAPGSPPDLLESVPKSISALPVNPHSIPPRGPADLPPMPVTKPLQMVPRGSQLYPAQQTDVYYQDPRGAAPPFEPAPYQQGMYYTPPPQCVSRFVRPPPSAPEPAPPYLDHYPPYLQERVVNSQYGTQPQQYPPI

SEQ ID NO: 782768 - protein, 116 aa, Homo sapiens [sequence omitted]

SEQ ID NO: 782769 - protein, 36 aa, Homo sapiens
MLTQLPSIRCCRRGDALSTRARSTCSFSAMRSAPGH

SEQ ID NO: 782770 - protein, 66 aa, Homo sapiens
SMYMSVSRSMYTSLGVHAQVHASVCMWLCVCAAACVLVHVGICMWLHVASWEQRCPGEEEPAVVWS

SEQ ID NO: 782771 - protein, 103 aa, Homo sapiens
PGRASAGAWHRPGPWPRCSVDCSFLVPGPLAAPGSCPGSSALGAPGSPSSVFHYDQSGYRQEGSGLPPPWATWTESWERLPQTTWVGGPQGPFSPWARSTACV

SEQ ID NO: 782772 - protein, 59 aa, Homo sapiens
NNNNNNNKNNTKNKETSGPGSQGPPVPLHIPFSPSPISIGPYPCAIFLQPPFNFGAIIL

SEQ ID NO: 782773 - protein, 56 aa, Homo sapiens
MPESEAFLLFQPQRGLPLLLILLSTDPLRVLGWGTVRSFPSHEAISQAVSVAGKPW

SEQ ID NO: 782774 - protein, 81 aa, Homo sapiens
RRHDVEKRPSAELIRTPDGALPTGLCVTQVSVPWHLLLGLSCAHPTCRSSRTPYYLSHCPDLPTPFYFLPGTDASVCLLSF

SEQ ID NO: 782775 - protein, 80 aa, Homo sapiens
SGCKQRCYHKDRKQRPHWCSAGLQALPGFIVGEATRPAPSQRDVTHAAGCHPQNSRETLGAPGQEEADVNFNSGDFKRNF

SEQ ID NO: 782776 - protein, 148 aa, Homo sapiens
RRVTLGVSLPVATNAFPNGMIRAAQQPYTRSLNPTSSRKPREVIWEHSTMWGWGRMHPQNGPGVSTAAHTGSGAHLTPLLSPKPLSSPLLDIDKHRGWAWRSPAVCLWMGQDTQEGHQCAESQRARGHTGTCRVALTTHPETKAHKNR

SEQ ID NO: 782777 - protein, 115 aa, Homo sapiens
LCVHACAFVCVCMCTQACAVQVPMCIFKCAHPCAWANVCTSTCVSELLCVCLCDVISPHPYGCRTKAVHTEHPAHALGSTPSFLTVPQCIQRDLNLIPSFASYSLHDLRLVMQAL

SEQ ID NO: 782778 - protein, 208 aa, Homo sapiens
  misc_feature (45)..(45): Xaa can be any naturally occurring amino acid
YVLISSTDSNFQKIYRLNLNEGKMCYKKLEEVKTSALDNNTSRTXYDPVHAAPTTSTRVFYISVGVCCAVIFLVAIILAVLHLHSMKRIELDDSISASRSSQGLSQPSTQTTQYPRADTPNNATPITSSSGYPTLRIEKNDLRSVTLLEAKGKVKDIAISRERITLIKDVLQEGTFGRIFHGILIDEKDPNKEKQALVETKIKLLKFR

SEQ ID NO: 782779 - protein, 69 aa, Homo sapiens
LQPKALGSWDERWTVGTACHPAGTSWPWYQCLRALAVLSRDLEAQTRALQSLSSSNTLQLYFPQQLLVH

SEQ ID NO: 782780 - protein, 107 aa, Homo sapiens
MGVSLCRPGWFQTPRFKPSSSLGLPKCWDYRHEPPCSASPVSLGQYLNTKANLELLDSLQVVNWVLVISRALESDFIGFESLSPFSQLSNLGRVAERVFASASSSVQ

SEQ ID NO: 782781 - protein, 94 aa, Homo sapiens
DQVSQGRVALYLSEKGGLGRPGPSAHLLTGRIGSWDSVGHSLLLPPDVHLTAAPKNPPRPSLAPSPPPSAPGQHSLAQVWAAFAVALPCDCEHL

SEQ ID NO: 782782 - protein, 44 aa, Homo sapiens
MSEEDRFSGLPARDGSCGFLLRQTKLPFWLMAGFTSQMYQVVSP

SEQ ID NO: 782783 - protein, 96 aa, Homo sapiens
GESESSVTAHGKFFNTLQAQGEKASLYVIRLEVQLQNAIQAGILAEKDANQTRLQQLLLGAELNRDLRFRLKHLLRMYANKQERLPNFLELIKMIR

SEQ ID NO: 782784 - protein, 80 aa, Homo sapiens
RIRKLFNLSKEDDVRQYVVRKPLKKVRNLGPKHPRFSVLLLHVFGKRMKEAKEKRQEQIVKRRRLSSLRASTSKSESSQK

SEQ ID NO: 782785 - protein, 68 aa, Homo sapiens
SALHPLSLLVQAIMLAMTLALGTLPAFLPCELQPHGLVNCNWLFLKSKEKPADASKESENKSEVNDKQ

SEQ ID NO: 782786 - protein, 50 aa, Homo sapiens
MYTFLVIHKSSKEYGVSTLFSRKEQNRPKRCLYTGGRWRVHGSPVGLAAS

SEQ ID NO: 782787 - protein, 110 aa, Homo sapiens
DSFQESAVGVRLCHSGPPPQEGLTASVFAPLGALSTTQVVQVERPHGEGQALRSPGGEARPDHHSIRAKPPMASSPGPSSQETPSKSSRRPTQLSPATPQSHARSHNGHF

SEQ ID NO: 782788 - protein, 282 aa, Homo sapiens
RSRRRRSGLPGPGGTAGTMAEPPRLPLTFEDVAIYFSEQEWQDLEAWQKELYKHVMRSNYETLVSLDDGLPKPELISWIEHGGEPFRKWRESQKSGNILCSSVDMHFDPGFEEQLFWGSQQAMNSGKTKSHFQLDPESQCSFGSFVSFRPDQGITLGSPQRHDARAPPPLACGPSESTLKEGIPGPRNLDLPGLWDVPAWESTQHPWPVCGESCWENNHLVMHQRGHSKDRTRRAWEKFNKRAETQMPWSSPRVQRHFRCGVCGKSFRRSWCLLRHLAAHTG

SEQ ID NO: 782789 - protein, 193 aa, Homo sapiens
MAHQYPSWIFINEKTFITREQLNSLLKTYNIFYENQKNLHILYGETEDGKLIVEGMLDIFWGVKRPIQLKIQDEKPFSSFTSMKSSDVFSSKGMTRWGEFDDLYRISELDRTQIPMSEKRNSQEDYLSYHSNTLKPHAKDEPDSPVLYRTMSEAALVRKRMKPLMMDRKERQKNRASINGHFYNHEVSELQFH

SEQ ID NO: 782790 - protein, 109 aa, Homo sapiens
NRPWDSCFLRKKQRQANATLLPEELLGAHCTLITSQGFLMAQDAKSSTHRQGGFNLAKQESSVSYCTPLIPRPSIPCPELLDMSPCAHFIDGKTELQQREVTGAIPYSS

SEQ ID NO: 782791 - protein, 102 aa, Homo sapiens
PGSLAQTGLLLAPLLPSLHPLLGTPSQLLEMVSVLVGPQNCLSLQSMSLSLLEHPLPLFFTEPNYSDPSFKTALSHCTRKPSMTSPRYCHDLLPTSCNCLWV

SEQ ID NO: 782792 - protein, 346 aa, Homo sapiens
VFPAPGIIVITDGVTSVPDVAVCETLLNQLRSGTVACSFVQVGGVYSYDCSFGHVPNVELMKFIAMATFGSYLSTCPEPEPGNLGLTVYHRAFLLYSFLRSGEALNPEYYCGERHTEALSTAYLMSTWSLQAATLPWPCAGRSTLRRRCQPTWSALCPYGFERATVSERSHWPKEGPNLEVKLVLLWKHNMRIEYVAMASWPLEPEGPRVTRVEVTMEGGYDILHDVSCALRQPIRSLYRTHVIRRFWNTLQSINQTDQMLAHLQSFSSVPEHFTLPDSTKSGVPLFYIPPGSTTPVLSLQPSGSDSSHAQFAAYWKPVLSMDANSWQRWLHMHRLVLILEHDTWV

SEQ ID NO: 782793 - protein, 110 aa, Homo sapiens
LAECHVLTSLRSIQQTLKDGQRDRRWSFIMQCDLCCNRVLEARSSKRGVGSTMLSLKMLGRICSMPFHSLLGFPASPDIPWLVDTPPQFPPPSSHGLLSVGASAFPLFFF

SEQ ID NO: 782794 - protein, 102 aa, Homo sapiens
MYHHLSPSTGQAKALQSQAWIIFPGSPSMATPLQSSYSRLLLSCSCALPQAYPALGCPSLIQKSYYEVLVQLKCQSTHHIFFPAYSLQNYYIVFNVLVWFFC

SEQ ID NO: 782795 - protein, 117 aa, Homo sapiens
MRFLLEIFPSSFRTQDRLVWRCSLAKGISCYWFGSAWFCLGWGRCRWGRLGTSSGAMAGHCGISPSSGFGVPACLTWCLHTCTHTHTHTHTHTHTHTHTHTHTHTHTHTHTHTHTHT

SEQ ID NO: 782796 - protein, 82 aa, Homo sapiens
SENGPTLDAALTIIIIEQIGDACSKSQCQPSKDVFLLEDGLTGIIQCSLVSPVPLQLPRRTSSSPWNGAGPSFEVRLHTASL

SEQ ID NO: 782797 - protein, 73 aa, Homo sapiens
QELTTVPPLSQELTTVPALSHEHTSTGAKKSSHVVILETVQRVVGWDLRQESLVAGGRERMWGGSAEEQEQVL

SEQ ID NO: 782798 - protein, 57 aa, Homo sapiens
FYSEVILEKSPECRPSPKPESTSRVCKIKSNRKPETQQRLHRGKVKSFPKDDPSNAG

SEQ ID NO: 782799 - protein, 85 aa, Homo sapiens
MIKREYLLGGSISKKIATRATEIQDVNKIFIKQGICKLYKYGRLMTIRREWPSPLDAVAGTLLQMIWFKWQHLKIKCKHEAVGVE

SEQ ID NO: 782800 - protein, 106 aa, Homo sapiens
RLECNGTISPYCNVRLLASSNSPASASRVAGITGACHSWLIFVFLVETEFHHVGQAGLQLLTSSDPPASIFNSARITGVSSHAQPLVGSLCCGSFSPSHIGVLCAT

SEQ ID NO: 782801 - protein, 101 aa, Homo sapiens
VSIHQRHESWMGVRLVELERRGTQEGGLKTRLGKETMDNDRLGQDPRKWLQFSGKRRGSGKSSFSFASKEAEQLREKVAHSVKTQRNHTECGIIDAGDLEG

SEQ ID NO: 782802 - protein, 154 aa, Homo sapiens
PQHKGATVKDKTGIGPCELCLATLAVEATVDRVTHSLLGLFPPSVGWVYRAGAKPASEAPQPPPHHQVSQVGLLCCGTHTHTQVANSLEVSPSFQICQPKSHSGKYKWEPLQSGTLSGRYREPKNEVAESCCGDLSLLFLTEEDNEAQEHSFLE

SEQ ID NO: 782803 - protein, 119 aa, Homo sapiens
NTITTSTITTNHHHYLHQRYYHQLSSSFPPPPFSSLHHNHQQNHSYHYHYRKQNNHITPVLRRRKKNTHLQILISRNGCISHLMQRLLDILRMVQQVLRHVLCSTHSHYSSVGASSTGG

SEQ ID NO: 782804 - protein, 109 aa, Homo sapiens
DSQGSNDKSHLQGRPSGPRPLPLLRLVKSCSQALNDMLPSPCSQPIPAITIAEQMCGYHPLTLPHICQQQTTPVDHSPAQPTPGSTTNHPDLPPWPATSDQKSLLCLWH

SEQ ID NO: 782805 - protein, 364 aa, Homo sapiens
MCGSAARWEFGFGWLQPASRVKTPTPGAAGSTHGDPRGAAAAPGNWSSRQRPAHPRTPGPAASVFSRSVQRLTMRNTSKELQGATHRYAPCDWYYHVPVKRSEKAVDAPPASQIPGLSNLGDSHSENLPGTRRYWIKETDSEYVKLAKQGGRPDLLKHFAPGTRKGSPVAYSLPDWYIHHSKPPTASQQEVRAVSMLDYMVHEEFNPDQANGSYASRRGPFDFDTKTVWQREAEELEKEKKKLRLPAIDSKYLSKAGTPLGPKNPAGSRLSFPHVPGQKNSSPTKFSKLISNGYKDEWLQQQQRADSDKRTPKTSRASVVSQSPRDLEGPQDAARLQDAEASEGPEDTPGPEESVSASTPAELK

SEQ ID NO: 782806 - protein, 296 aa, Homo sapiens
MCGSAARWEFGFGWLQPASRVKTPTPGAAGSTHGDPRGADWYYHVPVKRSEKAVDAPPASQIPGLSNLGDSHSENLPGTRRYWIKETDSEYVKLAKQGGRPDLLKHFAPGTRKGSPVAYSLPDWYIHHSKPPTASQQEVRAVSMLDYMVHEEFNPDQANGSYASRRGPFDFDTKTVWQREAEELEKEKKKLRLPAIDSKYLSKAGTPLGPKNPAGSRLSFPHVNGYKDEWLQQQQRADSDKRTPKTSRASVVSQSPRDLEGPQDAARLQDAEASEGPEDTPGPEESVSASTPAELK

SEQ ID NO: 782807 - protein, 45 aa, Homo sapiens
MDARTHSTTQASFMHKIPVTNSPDKKDHEKYHLFLITVVQEIVIQ

SEQ ID NO: 782808 - protein, 68 aa, Homo sapiens
GRKSSRHRGSLLFTQQRKVHTGEAAGGTCRRPGWEIPGRRPGNARGSQEGSCAPWWPQVTHGTHEEVP

SEQ ID NO: 782809 - protein, 77 aa, Homo sapiens
HIHHHHYHHSTTTITTSTTTTTTTSTTTTSTSTTTITTITPLPRSPPLPPPSPPLPPPPPPSLPSFHYHQPRDRGVV

SEQ ID NO: 782810 - protein, 110 aa, Homo sapiens
SGVWGNLLMFPAGRVLCWNQHWVCPKRAGYPSQVLYLEFSDYSRCSPIPQKNPQMFLWSLHSPCLSPLPMSGQWSSSLVVLVLLTAQLMLEIKLAGWSMAPSLAWELIED

SEQ ID NO: 782811 - protein, 34 aa, Homo sapiens
MASHSSPARAHHASHGETVSVSLLSESGWPRDDS

SEQ ID NO: 782812 - protein, 114 aa, Homo sapiens
VIHFGRYVLQDSANKVSADQMYCPGIESTALYSTVVTKDNSSRVTDYFVVAGLTDTSTLLDQEINRLDTKSTGPKAPITDIAIIIKSAGETVPEGYTCVEATPSALQANLNYGS

SEQ ID NO: 782813 - protein, 39 aa, Homo sapiens
FLCWDLGLSAGPQPGARDSSEMLCLADLLISCLLPPGLP

SEQ ID NO: 782814 - protein, 131 aa, Homo sapiens
SRARSVPSSPSLLSAPAPGAAGATESSPAPKPKTTSPLTPVTAPKFPSSARPESLHSPNSMFRGPKPPIAPKPRLTAPNEWRASVYLNDSLNKCSNGRLPCVDRGLDEGPRSIPKCSESETDEDYIVVPRV

SEQ ID NO: 782815 - protein, 59 aa, Homo sapiens
MAPHEHTRHKNKQTSTNPTHAQATTTQQQTDEAHADKTQHNKNKRQQTNRQTAEQTSKN

SEQ ID NO: 782816 - protein, 1299 aa, Homo sapiens
MGDMKTPDFDDLLAAFDIPDMVDPKAAIESGHDDHESHMKQNAHGEDDSHAPSSSDVGVSVIVKNVRNIDSSEGGEKDGHNPTGNGLHNGFLTASSLDSYSKDGAKSLKGDVPASEVTLKDSTFSQFSPISSAEEFDDDEKIEVDDPPDKEDMRSSFRSNVLTGSAPQQDYDKLKALGGENSSKTGLSTSGNVEKNKAVKRETEASSINLSVYEPFKVRKAEDKLKESSDKVLENRVLDGKLSSEKNDTSLPSVAPSKTKSSSKLSSCIAAIAALSAKKAASDSCKEPVANSRESSPLPKEVNDSPRAADKSPESQNLIDGTKKPSLKQPDSPRSISSENSSKGSPSSPAGSTPAIPKVRIKTIKTSSGEIKRTVTRVLPEVDLDSGKKPSEQTASVMASVTSLLSSPASAAVLSSPPRAPLQSAVVTNAVSPAELTPKQVTIKPVATAFLPVSAVKTAGSQVINLKLANNTTVKATVISAASVQSASSAIIKAANAIQQQTVVVPASSLANAKLVPKTVHLANLNLLPQGAQATSELRQVLTKPQQQIKQAIINAAASQPPKKVSRVQVVSSLQSSVVEAFNKVLSSVNPVPVYIPNLSPPANAGITLPTRGYKCLECGDSFALEKSLTQHYDRRSVRIEVTCNHCTKNLVFYNKCSLLSHARGHKEKGVVMQCSHLILKPVPADQMIVSPSSNTSTSTSTLQSPVGAGTHTVTKIQSGITGTVISAPSSTPITPAMPLDEDPSKLCRHSLKCLECNEVFQDETSLATHFQQAADTSGQKTCTICQMLLPNQCSYASHQRIHQHKSPYTCPECGAICRSVHFQTHVTKNCLHYTRRVGFRCVHCNVVYSDVAALKSHIQGSHCEVFYKCPICPMAFKSAPSTHSHAYTQHPGIKIGEPKIIYKCSMCDTVFTLQTLLYRHFDQHIENQKVSVFKCPDCSLLYAQKQLMMDHIKSMHGTLKSIEGPPNLGINLPLSIKPATQNSANQNKEDTKSMNGKEKLEKKSPSPVKKSMETKKVASPGWTCWECDCLFMQRDVYISHVRKEHGKQMKKHPCRQCDKSFSSSHSLCRHNRIKHKGIRKVYACSHCPDSRRTFTKRLMLEKHVQLMHGIKDPDLKEMTDATNEEETEIKEDTKVPSPKRKLEEPVLEFRPPRGAITQPLKKLKINVFKVHKCAVCGFTTENLLQFHEHIPQHKSDGSSYQCRECGLCYTSHVSLSRHLFIVHKLKEPQPVSKQNGAGEDNQQENKPSHEDESPDGAVSDRKCKVCAKTFETEAALNTHMRTHGMAFIKSKRMSSAEK

SEQ ID NO: 782817 - protein, 1299 aa, Homo sapiens; identical to SEQ ID NO: 782816

SEQ ID NO: 782818 - protein, 1299 aa, Homo sapiens; identical to SEQ ID NO: 782816

SEQ ID NO: 782819 - protein, 1299 aa, Homo sapiens; identical to SEQ ID NO: 782816

SEQ ID NO: 782820 - protein, 1031 aa, Homo sapiens
MGDMKTPDFDDLLAAFDIPDMVDPKAAIESGHDDHESHMKQNAHGEDDSHAPSSSDVGVSVIVKNVRNIDSSEGGEKDGHNPTGNGLHNGFLTASSLDSYSKDGAKSLKGDVPASEVTLKDSTFSQFSPISSAEEFDDDEKIEVDDPPDKEDMRSSFRSNVLTGSAPQQDYDKLKALGGENSSKTGLSTSGNVEKNKAVKRETEASSINLSVYEPFKVRKAEDKLKESSDKVLENRVLDGKLSSEKNDTSLPSVAPSKTKSSSKLSSCIAAIAALSAKKAASDSCKEPVANSRESSPLPKEVNDSPRAADKSPESQNLIDGTKKPSLKQPDSPRSISSENSSKGSPSSPAGSTPAIPKVRIKTIKTSSGEIKRTVTRVLPEVDLDSGKKPSEQTASVMASVTSLLSSPASAAVLSSPPRAPLQSAVVTNAVSPAELTPKQVTIKPVATAFLPVSAVKTAGSQVINLKLANNTTVKATVISAASVQSASSAIIKAANAIQQQTVVVPASSLANAKLVPKTVHLANLNLLPQGAQATSELRQVLTKPQQQIKQAIINAAASQPPKKVSRVQVVSSLQSSVVEAFNKVLSSVNPVPVYIPNLSPPANAGITLPTRGYKCLECGDSFALEKSLTQHYDRRSVRIEVTCNHCTKNLVFYNKCSLLSHARGHKEKGVVMQCSHLILKPVPADQMIVSPSSNTSTSTSTLQSPVGAGTHTVTKIQSGITGTVISAPSSTPITPAMPLDEDPSKLCRHSLKCLECNEVFQDETSLATHFQQAADTSGQQMKKHPCRQCDKSFSSSHSLCRHNRIKHKGIRKVYACSHCPDSRRTFTKRLMLEKHVQLMHGIKDPDLKEMTDATNEEETEIKEDTKVPSPKRKLEEPVLEFRPPRGAITQPLKKLKINVFKVHKCAVCGFTTENLLQFHEHIPQHKSDGSSYQCRECGLCYTSHVSLSRHLFIVHKLKEPQPVSKQNGAGEDNQQENKPSHEDESPDGAVSDRKCKVCAKTFETEAALNTHMRTHGMAFIKSKRMSSAEK

SEQ ID NO: 782821 - protein, 1136 aa, Homo sapiens
MGDMKTPDFDDLLAAFDIPDMVDPKAAIESGHDDHESHMKQNAHGEDDSHAPSSSDVGVSVIVKNVRNIDSSEGGEKDGHNPTGNGLHNGFLTASSLDSYSKDGAKSLKGDVPASEVTLKDSTFSQFSPISSAEEFDDDEKIEVDDPPDKEDMRSSFRSNVLTGSAPQQDYDKLKALGGENSSKTGLSTSGNVEKNKAVKRETEASSINLSVYEPFKVRKAEDKLKESSDKVLENRVLDGKLSSEKNDTSLPSVAPSKTKSSSKLSSCIAAIAALSAKKAASDSCKEPVANSRESSPLPKEVNDSPRAADKSPESQNLIDGTKKPSLKQPDSPRSISSENSSKGSPSSPAGSTPAIPKVRIKTIKTSSGEIKRTVTRVLPEVDLDSGKKPSEQTASVMASVTSLLSSPASAAVLSSPPRAPLQSAVVTNAVSPAELTPKQVTIKPVATAFLPVSAVKTAGSQVINLKLANNTTVKATVISAASVQSASSAIIKAANAIQQQTVVVPASSLANAKLVPKTVHLANLNLLPQGAQATSELRQVLTKPQQQIKQAIINAAASQPPKKVSRVQVVSSLQSSVVEAFNKVLSSVNPVPVYIPNLSPPANAGITLPTRGYKCLECGDSFALEKSLTQHYDRRSVRIEVTCNHCTKNLVFYNKCSLLSHARGHKEKGVVMQCSHLILKPVPADQMIVSPSSNTSTSTSTLQSPVGAGTHTVTKIQSGITGTVISAPSSTPITPAMPLDEDPSKLCRHSLKCLECNEVFQDETSLATHFQQAADTSGQKTCTICQMLLPNQCSYASHQRIHQHKSPYTCPECGAICRSVHFQTHVTKNCLHYTRRVGFRCVHCNVVYSDVAALKSHIQGSHCEVFYKCPICPMAFKSAPSTHSHAYTQHPGIKIGEPKIIYKCSMCDTVFTLQTLLYRHFDQHIENQKVSVFKCPDCSLLYAQKQLMMDHIKSMHGTLKSIEGPPNLGINLPLSIKPATQNSANQNKEDTKSMNGKEKLEKKSPSPVKKSMETKKVASPGWTCWECDCLFMQRDVYISHVRKEHGKQMKKHPCRQCDKSFSSSHSLCRHNRIKHKGIRKVYACSHCPDSRRTFTKRLMLEKHVQLMHGIKDPDLKEMTDATNEEETEIKEDTKV

SEQ ID NO: 782822 - protein, 1299 aa, Homo sapiens; identical to SEQ ID NO: 782816

SEQ ID NO: 782823 - protein, 1299 aa, Homo sapiens; identical to SEQ ID NO: 782816

SEQ ID NO: 782824 - protein, 1299 aa, Homo sapiens; identical to SEQ ID NO: 782816

SEQ ID NO: 782825 - protein, 512 aa, Homo sapiens
MLLPNQCSYASHQRIHQHKSPYTCPECGAICRSVHFQTHVTKNCLHYTRRVGFRCVHCNVVYSDVAALKSHIQGSHCEVFYKCPICPMAFKSAPSTHSHAYTQHPGIKIGEPKIIYKCSMCDTVFTLQTLLYRHFDQHIENQKVSVFKCPDCSLLYAQKQLMMDHIKSMHGTLKSIEGPPNLGINLPLSIKPATQNSANQNKEDTKSMNGKEKLEKKSPSPVKKSMETKKVASPGWTCWECDCLFMQRDVYISHVRKEHGKQMKKHPCRQCDKSFSSSHSLCRHNRIKHKGIRKVYACSHCPDSRRTFTKRLMLEKHVQLMHGIKDPDLKEMTDATNEEETEIKEDTKVPSPKRKLEEPVLEFRPPRGAITQPLKKLKINVFKVHKCAVCGFTTENLLQFHEHIPQHKSDGSSYQCRECGLCYTSHVSLSRHLFIVHKLKEPQPVSKQNGAGEDNQQENKPSHEDESPDGAVSDRKCKVCAKTFETEAALNTHMRTHGMAFIKSKRMSSAEK

SEQ ID NO: 782826 - protein, 123 aa, Homo sapiens [sequence omitted]

SEQ ID NO: 782827 - protein, 40 aa, Homo sapiens
RFGIWKVLVFQAPDRIWAWVVLFPWDILLICNQCNPLLID

SEQ ID NO: 782828 - protein, 56 aa, Homo sapiens
MLWALENAGPNGVVTEIHTALQGKAPAHSPQEETESESTNHRCLYNCGASDSQGNV

SEQ ID NO: 782829 - protein, 68 aa, Homo sapiens
PLSLQGHFSVHTASQENNAQHVGPQAGALSRGGGLFKGGLRNNDRASKENATGAGLHVPSTRYLELDY

SEQ ID NO: 782830 - protein, 68 aa, Homo sapiens
KWLSASSERWKVPGVTGMGMKRDEGCRWACGFIACGPFHWPTFSTSARKAFKEGFENQPAIFTISSDG

SEQ ID NO: 782831 - protein, 103 aa, Homo sapiens
TTGWHKGVWGVVEAFCIPTVLVIIHIHACEETHTLYPPAKNQCVSPNCCTCSTQPSLSLVIHPVPSQPPRPFCQVPNTCGHFYFLAGHNHAQPFAQEPLLPTF

SEQ ID NO: 782832 - protein, 83 aa, Homo sapiens
YPRAAGKVPGSKFKHVGTSSSLSSYPRIFPDNRSLIPWQSSWGESAQHCKKAVLLQEKLQQRRGMRVNQPRNNGLFRSSIAKL

SEQ ID NO: 782833 - protein, 96 aa, Homo sapiens
RAPCTDGVYVRKWTLKNFQMFGRARWLMPVIPALWEAETGGSQGQEINTILANTVKPYLYKNTKKCTVLPMAHLLTSFKSLQKCHCLKEPYFDQHI

SEQ ID NO: 782834 - protein, 41 aa, Homo sapiens
RACFGNYGCDLVLSQQGQPIPAANICSSSECSKENTRSTAE

SEQ ID NO: 782835 - protein, 175 aa, Homo sapiens
FPSPVGPSPLHSSYHLPLHSSYRKSHVGTDGHHQRGCLAAAHGPPSSSILSFGWFSLLLLSSHPGFNSTSCPSFTEKTEATGTHSILVLLSLSSILLPILHSRKPFTFFPLFSEEVSPFSYSRQFPHLVLGPGLLSIHAPSSVSPVSLSHSQIHVLNQKIHPSFPPPPSSPQEKK

SEQ ID NO: 782836 - protein, 68 aa, Homo sapiens
PSPSSSPFIITVITVIITIIITTTTITITIIVIIITVTTITITVTNIMVLLNLWAALGRAGHGTFLVS

SEQ ID NO: 782837 - protein, 67 aa, Homo sapiens
MVKHTSLKMCCFTIWKGTVERREARSHCCATVATIHLQNLLSPQTETLSPLNPDPQRLVTSFLLSGS

SEQ ID NO: 782838 - protein, 42 aa, Homo sapiens
MNWDCLLLPSAVELGSVVRSLRPVCLSRFFISRVVVVESNDL

SEQ ID NO: 782839 - protein, 67 aa, Homo sapiens
SAFPATLSSPEGLAPRERTRFTATFHCPEHFPAPTGARKYLGMKERPPPTGWGGLQGGLWRIHNSQC

SEQ ID NO: 782840 - protein, 46 aa, Homo sapiens
MGICLLDLGMGIKKSLGSSIRNVTETPESWLVGAGRRCGGGGGGRG

SEQ ID NO: 782841 - protein, 107 aa, Homo sapiens
RYILVFGLGKRFCFCRHVFQRLGGPVLASPLSPSPSGTFLPWMAFPVCPGLCCSHYESPALTATVADAQGVGDSDSAQQAVFMCCSSVHPELSSRSSFINLSHASHT

SEQ ID NO: 782842 - protein, 87 aa, Homo sapiens
PAALRTAPPAPPWATARAAATSSGSTPTSRTRSGARRYWVRKIAPEYYDHLPQHHSWVKVLWDFVFEDSLGPYARVKRVYRLAKDGL

SEQ ID NO: 782843 - protein, 334 aa, Homo sapiens
GRAPNGASRPTMGNSASRSDFEWVYTDQPHTQRRKEILAKYPAIKALMRPDPRLKWAVLVLVLVQMLTCWLVRGLAWRWLLFWAYAFGGCVNHSLTLAIHDISHNAAFGTGRAARNRWLAVFANLPVGVPYAASFKKYHVDHHRYLGGDGLDVDVPTRLEGWFFCTPARKLLWLVLQPFFYSLRPLCVHPKAVTRMEVLNTLVQLAADLAIFALWGLKPVVYLLASSFLGLGLHPISGHFVAEHYMFLKGHETYSYYGPLNWITFNVGYHVEHHDFPSIPGYNLPLVRKIAPEYYDHLPQHHSWVKVLWDFVFEDSLGPYARVKRVYRLAKDGL

SEQ ID NO: 782844 - protein, 333 aa, Homo sapiens
AGAEALSVVTGKIQDKLPEPQGDPGAPSPSHRAARLQAKYPAIKALMRPDPRLKWAVLVLVLVQMLTCWLVRGLAWRWLLFWAYAFGGCVNHSLTLAIHDISHNAAFGTGRAARNRWLAVFANLPVGVPYAASFKKYHVDHHRYLGGDGLDVDVPTRLEGWFFCTPARKLLWLVLQPFFYSLRPLCVHPKAVTRMEVLNTLVQLAADLAIFALWGLKPVVYLLASSFLGLGLHPISGHFVAEHYMFLKGHETYSYYGPLNWITFNVGYHVEHHDFPSIPGYNLPLVRKIAPEYYDHLPQHHSWVKVLWDFVFEDSLGPYARVKRVYRLAKDGL

SEQ ID NO: 782845 - protein, 107 aa, Homo sapiens
FCPQKLRTHLPGQCLLRVLAPTPHALQELLPSHLSSFLFSTTAAQLGLQIDSNPSSLTLKKGKDGKGRRMGMKRGPPSFSSNRISFPCPHAANVPGTASAWGAAGKD

SEQ ID NO: 782846 - protein, 112 aa, Homo sapiens
MRWLLGTAVGGSHVSCVSSEESSSAATALKAASPTQISPRQISPQQISAASLDMASVPWTSRAASPHLLSQVSTPGPLCDLRAPLAANSGLFPLGLQHLGPLLEHPDIPEHP

SEQ ID NO: 782847 - protein, 223 aa, Homo sapiens
MGYGDGPGRLEVPGSLAGIGHEAGPRGHKAMGHRSGYWVASEGDTNSKDGPERARETRLVDGAGPGVEPVMAGMPGTAGGMAHRDSLRGTGVLGSQGGRQTLSDERGSTKDLGGYGTSGIPEASEAAGAKGKPDVKEWQDSSGTPGSSRDRGAPRVKDRSPDQAGIMGASGFLDGKGAVEGETWAGMAALGSGYERDIWKAGPGMTDRGRVAGQGGLASQGGG

SEQ ID NO: 782848 - protein, 55 aa, Homo sapiens
MWIYGVTAKEQQTLNDDETRQKEPGSFDDIMDSICSNSLDCLPVQTFTSGRNFPC

SEQ ID NO: 782849 - protein, 72 aa, Homo sapiens
LLIICFSHSVPHQRKKHPTAQAITEVILDSSFTLIPHPNHQQVIISTTSKIYLKSTHQYTQHHNQLLPQLSR

SEQ ID NO: 782850 - protein, 116 aa, Homo sapiens
DSLRLVAVREGPGKSCRPGCLRQAVTQQAKAEWAGVEGSCLGRVGYAADAPECVGSVSKPRIWVPGRARVTRDRVSMRLTEGPVSGHLSPCHALPRAHAWHRPPSPGLRAAPSPLL

SEQ ID NO: 782851 - protein, 119 aa, Homo sapiens
DLSPPCPANFCIFVETGFHHIARAGLELLSSNDLPVWASQSVGITGVKHSTWPVISIFFSLLLSLFSRCPTMNTHGFYKKEKKAYTFANCIKLSKHRKEQKYGEISIFKHCGLGTVAHI

SEQ ID NO: 782852 - protein, 39 aa, Homo sapiens
LLVYISTLQDWITDSLFRPESHSIPFYYVSLKFYYLLMV

SEQ ID NO: 782853 - protein, 69 aa, Homo sapiens
RWNLALLPRMECSGMILAHCNLCLLGSSNSPASASQETGITGTHHHTQLIFVFLVETGFTMLARLVLNS

SEQ ID NO: 782854 - protein, 287 aa, Homo sapiens
MLLLLGLCLGLSLCVGSQEEAQSWGHSSEQDGLRVPRQVRLLQRLKTKPLMTEFSVKSTIISRYAFTTVSCRMLNRASEDQDIEFQMQIPAAAFITNFTMLIGDKVYQGEITEREKKSGDRVKEKRNKTTEENGEKGTEIFRASAVIPSKDKAAFFLSYEELLQRRLGKYEHSISVRPQQLSGRLSVDVNILESAGIASLEVLPLHNSRQRGSGRGEDDSGPPPSTVINQNETFANIIFKPTVVQQARIAQNGILGDFIIRYDVNREQSIGDIQVLNGYFVHYFAPK

SEQ ID NO: 782855 - protein, 144 aa, Homo sapiens
ASRSGWSPGRCKACPAGSPSVPRPRPAMLLLLGLCLGLSLCVGSQEEAQSWGHSSEQDGLRVPRQVRLLQRLKTKPLMTEFSVKSTIISRYAFTTVSCRMLNRASEDQDIEFQMQIPAAAFITNFTMLTWRQVYQFAPETFAPA

SEQ ID NO: 782856 - protein, 126 aa, Homo sapiens
MIMNVFVATPCSPPDCLGSFPVGLDLEMGVCCWRRGPSGSVEGLCFHGCSLREWPPGCALSGREAGLRWNEPRISRMAFAAALILVLACPFPRVFPKTVFFSWGEAQHCFIWLLANTYTLLEGSGF

SEQ ID NO: 782857 - protein, 114 aa, Homo sapiens
PCPGSNHVTQTWPPTIFHCPCHSDWFTDGCETQAKPTKVLSGTSGAAGRTLALSLDHKPSCCYLETACLGNCAGRGKWTRQERETQLYEHYLNTWMQLCLNSTNVNLLSPEMIW

SEQ ID NO: 782858 - protein, 104 aa, Homo sapiens
RCPSHTEPQNLTGVSEFLLLGLSEDPELQPVLAWLSLSIYLVTVLGNLLIILAVSSDSHLHTPIYFFLFNLSLADIGFTSAMVPKMIVDMQSHSRVISYAGCLT

SEQ ID NO: 782859 - protein, 35 aa, Homo sapiens
GERLDVFSRDQEQDKDTTFPISIEHCTGSSARPIR

SEQ ID NO: 782860 - protein, 110 aa, Homo sapiens
MSWDLLVLTLGKGCSALLIIDQLCLKSQVPALCEPVSFVFTTTWICGFYPNQPPLTKHDCGLQGDHLRRDEWICTEPSLIWKTTQSQLLCLKTTQSWWWGSVIAWRGSGE

SEQ ID NO: 782861 - protein, 110 aa, Homo sapiens
MEHPTTQHCLPSESLSPQQKHNQRLPQLAGLIQAEETWGSFPGMLQQIRVLPKVWQAPEDSIPKAEYSYLVSVAPAGPSGRSPGGKGKEVEAEAEAPVLGGGYQARKTRP

SEQ ID NO: 782862 - protein, 72 aa, Homo sapiens
TTTTTVTIIITTIIIFFTSCSLQVPKQVPDQLIRWDLPTGLHTCWASDIQLLHRAALFCFAVSILHVIVGFS

SEQ ID NO: 782863 - protein, 70 aa, Homo sapiens
HRVSAWESHGPDLWRSTLAKKHSDRTTSLPPNSLHKSNMSPTCDGQGLGGSAGGGGNNPDLVAEKKNTYY

SEQ ID NO: 782864 - protein, 70 aa, Homo sapiens
RVCCRNQCPSGGLAFGGFQFPQKRRLSAGPLCFHRLPVYRKLCFPDTYYLIRKPENTESGVKAKSPASLQ

SEQ ID NO: 782865 - protein, 102 aa, Homo sapiens
MSCFSLIMPVYCLLKQSMVSMRSGNQAFLQCSARQLVGWASTRLTPVQCSSSSILPLSCKTRPPPPGQPPSALQLRTTLPHDALLLPQDSISGIHSNTKNSN

SEQ ID NO: 782866 - protein, 161 aa, Homo sapiens
PPPTQTLTPLSAVRDSAIAPKPHHVFSRPLEIARRLSQYFVANRPIPFDANRVRFLPTSFEFNATASFIPPAITFVLMTMVTLKGVLNMAEPENARSFFSGSPLEEEPLAPQEPYFGLTFNTTWKPPRLTECAFQSCDLNCTWGLLSEAGTGVAWMQRAVS

SEQ ID NO: 782867 - protein, 33 aa, Homo sapiens
PWVYPWVEMDQNSKSRAKKSQVGPPVAQASITA

SEQ ID NO: 782868 - protein, 118 aa, Homo sapiens
QGWSQAENSHPHSDGCADGAALEGGGGSCHSQGKVGVKGRRGRAAGLRPGDCRLLRAASGRVSFLQLRAAHLPPLFPHFCSARLSLKNLAPHAPAVLGFLVPPSLGLLPSSACSKTPE

SEQ ID NO: 782869 - protein, 125 aa, Homo sapiens
TLDGSPVVTHRVGPTHRIYPMCGGWKCQGFLIEKGNKRLCHSQHRSGMSPTMVYTCASVCLCLCHLHVFLCQCLCVCAYVVCLRVCTCVYVCVHVSACMCVSLCMCLCMCCMCVYVVSVSVCVLC

SEQ ID NO: 782870 - protein, 116 aa, Homo sapiens
SLSPALDGSATIPFDHVNDHYADCERSLFTSQSAAACPTGSFHCTNTGYKPLYIPSNRVNDSLFVSCCDGTDELYSGVICENTCPESGRVERESLPQKCACGAHPGTPLGRCHSCP

SEQ ID NO: 782871 - protein, 45 aa, Homo sapiens
LTNRTAFALLVHALTVSSASMGPDSRVPTSQPHLQPCPIYLAIPQ

SEQ ID NO: 782872 - protein, 156 aa, Homo sapiens
GASARPPPPQGAQVWPKLRVVTLLEHPFVFARDPDEDGQCPAGQLCLDPGTNDSATLDALFAALANGSAPRALRKCCYGYCIDLLERLAEDTPFDFELYLVGDGKYGALRDGRWTGLVGDLLAGRAHMAVTSFSINSARSQVVDFTSPFFSTSLGI

SEQ ID NO: 782873 - protein, 133 aa, Homo sapiens
MVIPAALKAEHLKPTRKFACLGHLSHKVDWKYQAVIATLEEKRREKAKIHYQKKQQQKQAQKNGEKKIASSQGSSRPMGFWSEPIKTVYSSKTNKQNKEAECKTGGQPFREAPGCPGKRLSSAGLSISLGPAP

SEQ ID NO: 782874 - protein, 168 aa, Homo sapiens
MIVYLGNPTVSAQNLLKLIGNFSKVSGYKINVQKSQAFLNTNNRQKESQIMSELPFTIASKRIKYPGIQLTRHVKNLFKENYKPLLDEIKEDTNKWKNIPCSLVGRINIVKMAILPKVIYRFNAISIKLPMTFFTKLEKTTLKFIWNQKRARIAKSILSQKNKGGGIT

SEQ ID NO: 782875 - protein, 70 aa, Homo sapiens
PGRGQGPRSLPGKGQMQACAILEQARPGVGAVATDSFSGSEMGTDERVTALLVELRAIMEADRHPGSPDS

SEQ ID NO: 782876 - protein, 114 aa, Homo sapiens
MKLPFCVLSQYLQVLDVPQRPPDMFTTNFSFPLSLTLGALPGLGWPAQAVIPPPNTQIPGCPLGSLLLPDQPPTPSIPTPVLILFSASILVQTLLNLTPTICPLCGRPSARSKI

SEQ ID NO: 782877 - protein, 35 aa, Homo sapiens
KFTNTSSNNQDSTVSLRCPCNHVFDEVSVSWGIND

SEQ ID NO: 782878 - protein, 102 aa, Homo sapiens [sequence omitted]

SEQ ID NO: 782879 - protein, 118 aa, Homo sapiens
MLITLRAKKCLAVFSFTRCTLVDSDVGIGWKAPMEGKERHAGHPCLRHLGGNGITLLEWSEYLVSSQIPMLDPHPQGDGVRCCVLWEVMRVKSHEWDECPYKRDPREIPHPFHHVRTQ

SEQ ID NO: 782880 - protein, 154 aa, Homo sapiens
PDHTSRLAPLQDSPFASGQPLYPQTQLSGPLHHKTSTFGPQFKANTHRPSIQTNSAPGWPSHSQALGLSQCHVDTHGPQLQAGPHGHRYQVSIQTFSLQYSPHGYRLQAIPGGPRFQAGPFKLRLQAQTRLQPSPKKADPQSPRLQARPRTKLA

SEQ ID NO: 782881 - protein, 144 aa, Homo sapiens
FLLVRTCAYVFLWTGTCQGGLLAFLGNFSFPATPPVSMDIPRILPLALLVLSLHSSLLGTCGFSHLLPADATQVPACRFIFPPARGEEIHNLDVYRGRIQNKQVTFNLLLLHQPLLLHDEGSHTTELPPKLQVGPEAPLFLWPF

SEQ ID NO: 782882 - protein, 104 aa, Homo sapiens
KNGENVFSIQIKQGVTGTAPQSRGLALPRRRSPESTPGGLEGCFAQIECGAAIGNGSPVLSCSYLLYISCVFLTQCGDVPTAEWFCPTLLGPLLLHATLTTTQT

SEQ ID NO: 782883 - protein, 40 aa, Homo sapiens
MMFRSDRMWSCHWKWKPSPLLFLFALYIMCVPHSGKTLPL

SEQ ID NO: 782884 - protein, 79 aa, Homo sapiens
EDPAFRPISFLSSHYICPGSSISINPFLMGARFHLSSHQPISKSASLSAVVQSWLTAISASQVQAILLPQPPWLLGLKV

SEQ ID NO: 782885 - protein, 77 aa, Homo sapiens
LSLLFSFSCWRPLSPDTQVYQYSSFGPKWTPAAPLTQSLHQPRISTKPEFPPSQGFHQSRTCNNPELPPTQSFRQSR

SEQ ID NO: 782886 - protein, 102 aa, Homo sapiens
SGTHCVCGWEAGASAHVAATSKDMSTRTHVSIAPSTCHLIWQALTRPLELLAGLARRWMGGLTGDSAGRFLFQVGAGEVRPGVPSEREPGCGTEIVSSQPII

SEQ ID NO: 782887 - protein, 139 aa, Homo sapiens
MAARTDTLMFPSGRTWLWVDTGLGTGLEPQHSRGMAGILRIPEGPVGSFQSPRGLCLPPNPHWECCVDFIRTQQRLRPGLSVSPGPSSSGCFPGPYRAHPAKACTFLGQTPPGDRASQEAHPREQGGGVSHIIFCLSQS

SEQ ID NO: 782888 - protein, 102 aa, Homo sapiens
SRRILSSTYRTCFYIRLLVLFIFGSGRLPCSLGGWGGRDCYVFTKAHFLLHFFCCRWYGFESWSVDCGKRRHKPLLGLVLKTLLQVPLHSPKPHAHWLDTEC

SEQ ID NO: 782889 - protein, 61 aa, Homo sapiens
MQIYDPWVKNEIKMEIKKFFELNNNSDMTYDNLWDTAKGVLRGKCIALNTYIKRSERAQMD

SEQ ID NO: 782890 - protein, 56 aa, Homo sapiens
FDPRVEALGYSTFEKVVQGADNALGVWGGRSQTQLPLDVGGGNGSLVPQISDLGAP

SEQ ID NO: 782891 - protein, 52 aa, Homo sapiens
MAGVTALSVDDGSGETGILTFTSHPLGYLQGRQLRALYLSRNPRLKDQMEPS

SEQ ID NO: 782892 - protein, 70 aa, Homo sapiens
PVFYFFTVALITIYNYGFFPLQCLSSGFLTDVHTKKSRIISVLFTILDGCPGPELEIKSQHIWVEGKTFF

SEQ ID NO: 782893 - protein, 56 aa, Homo sapiens
MTKQPVWREELLTPGSPLCSELNTHWDTLAVERSYPLWVSSELFCHPIKLLFTLLT

SEQ ID NO: 782894 - protein, 107 aa, Homo sapiens
RKNTTGRLYTPCNTDIRNNITGQEYTPCDICGEERSIRRFMKMHKWKIMMVFFMAAAAELQRGMFIQESFLKQKQQFHGQSERQWQMAAGCWKKWKKKTRKCCRDFA

SEQ ID NO: 782895 - protein, 52 aa, Homo sapiens
REEWNSQEELWTGSLRSLRVVNKKNAEKGDKHKPRQLAMFQMQFVVVKPQAK

SEQ ID NO: 782896 - protein, 55 aa, Homo sapiens
MAWPGAHICAPDHVMCFQLETRGLLRAGACCVDHSVECVEIYRRMRNGPDGRACG

SEQ ID NO: 782897 - protein, 30 aa, Homo sapiens
MRSGSLEWGQAEGCGVTDTWHFQALCGAWR

SEQ ID NO: 782898 - protein, 87 aa, Homo sapiens
DSRGYTDDAENPICSLAGFRELRKPPFETESRSVAQLEEGSNIVTLTYRGQVPEGFLHHISVEILLGRIQQSPLLLGEAHIYILKDH

SEQ ID NO: 782899 - protein, 63 aa, Homo sapiens
LAVTVGGGCLGSCGWLWGGVGHLLPLLKQSLCYPWHGRSLVDPIKRNRDSPTVRRERVATVYE

SEQ ID NO: 782900 - protein, 67 aa, Homo sapiens
PGVFADIWGQAGEGARRRGAGHGTLYMLTGTHRSARVHTQADEEVHTSQPHRPTRYQGLHSKGMTWG

SEQ ID NO: 782901 - protein, 112 aa, Homo sapiens
MAGEMGTHRYFIFIVLGVSIFNLQIELQTLVGFLLGLLRTFRTHLHCHVQSAPVPLIAASSSLGCTPTSDLSTPCHGHLIAVNSRPPQTMLTRPSYRPTLSLGCVSVAGEGL

SEQ ID NO: 782902 - protein, 462 aa, Homo sapiens
MAQRCVCVLALVAMLLLVFPTVSRSMGPRSGEHQRASRIPSQFSKEERVAMKEALKGAIQIPTVTFSSEKSNTTALAEFGKYIHKVFPTVVSTSFIQHEVVEEYSHLFTIQGSDPSLQPYLLMAHFDVVPAPEEGWEVPPFSGLERDGVIYGRGTLDDKNSVMALLQALELLLIRKYIPRRSFFISLGHDEESSGTGAQRISALLQSRGVQLAFIVDEGGFILDDFIPNFKKPIALIAVSEKGSMNLMLQVNMTSGHSSAPPKETSIGILAAAVSRLEQTPMPIIFGSGTVVTVLQQLANEFPFPVNIILSNPWLFEPLISRFMERNPLTNAIIRTTTALTIFKAGVKFNVIPPVAQATVNFRIHPGQTVQEVLELTKNTVADNRVQFHVLSAFDPLPVSPSDDKALGYQLLRQTVQSVFPEVNITAPVTSIGNTDSRFFTNLTTGIYRFYPIYIQPEDFKR

SEQ ID NO: 782903 - protein, 502 aa, Homo sapiens [sequence omitted]

SEQ ID NO: 782904 - protein, 85 aa, Homo sapiens
KSSGKPCGQVCESGLSFCNPDLSFLISKRGRMVPRAWSSEEAQDVTHRSSPKVSTLLSEQPVFCTDACLRYVMVREKRYRFHGET

SEQ ID NO: 782905 - protein, 33 aa, Homo sapiens
MNSSHPGFVSPVKSSNLSYTENFLNKNLASLAS

SEQ ID NO: 782906 - protein, 352 aa, Homo sapiens
  misc_feature (1)..(1): Xaa can be any naturally occurring amino acid
XPGGVLAGSYPEGAPAVLADKRQQFGSRFLRDPARVFHHNACNHPAPSPGLSLAVCPAASEHSEKPLTAGHESSCPTRPRVKLPYPRHSPRGEKLLGQRLTLLSSQDVKPLSCPFDFLRDNVEWSEEQAAAAERKVQENSIQRVCQEKQVDYEINAHKYWNDFYKIHENGFFKDRHWLFTEFPELAPSQNQNHLKDWFLENKSEVPECRNNEDGPGLIMEEQHKCSSKSLEHKTQTPPVEENVTQKISDLEICADEFPGSSATYRILEVGCGVGNTVFPILQTNNDPGLFVYCCDFSSTAIELVQTNSEYDPSRVFCLCSQTCVDDKKEFPVAQGGGYYNSFLNLRHCSEQC

SEQ ID NO: 782907 - protein, 278 aa, Homo sapiens
  misc_feature (2)..(4): Xaa can be any naturally occurring amino acid
EXXXPGGVLAGSYPEGAPAVLADKRQQFGSRFLRDPARVFHHNAWDNVEWSEEQAAAAERKVQENSIQRVCQEKQVDYEINAHKYWNDFYKIHENGFFKDRHWLFTEFPELAPSQNQNHLKDWFLENKSEVPECRNNEDGPGLIMEEQHKCSSKSLEHKTQTPPVEENVTQKISDLEICADEFPGSSATYRILEVGCGVGNTVFPILQTNNDPGLFVYCCDFSSTAIELVQTNSEYDPSRVFWLCSQTCVDDKKEFPVAKGGGYYNSFLNLRHCSEQC

SEQ ID NO: 782908 - protein, 127 aa, Homo sapiens
GGNARATLLWEKSQHASLPFQIPSDLLPLAFLLPQWGFSTTDRCFPVLCGQGTHVVKHSGVWLCKEVKSTMQISRSPNPGQMAVTEAHAPPPSCATLGQVTSPLWASTSSLERQNANIHPASCQDVL

SEQ ID NO: 782909 - protein, 450 aa, Homo sapiens
LQELGAGPRPQGPPRLPAPPGALSTGPVLGPVHPTPPPSSPQEPKRPSQLPSPSSQLPTEAQLPPTHPGTPKPQGPTLEPPPGRVSPAAAQLADTLFSKGLGPWDPPDNLAETQKPEQSSLVPGHLDQVNGQVVPEASQLSIKQEPREEPCALGAQSVKREANGEPIGAPGTSNHLLLAGPRSEAGHLLLQKLLRAKNVQLSTGRGSEGLRAEINGHIDSKLAGLEQKLQGTPSNKEDAAARKPLTPKPKRVQKASDRLVSSRKKLRKEDGVRASEALLKQLKQELSLLPLTEPAITANFSLFAPFGSGCPVNGQSQLRGAFGSGALPTGPDYYSQLLTKNNLSNPPTPPSSLPPTPAPSVQQKMVNGVTPSEELGEHPKDAASARDSERALRDTSEVKSLDLLAALPTPPHNQTEDVRMESDEDSDSPDSIVPASSPESILGEEAPRFP

SEQ ID NO: 782910 - protein, 103 aa, Homo sapiens
SHGPRAVMSAAVNFVSMGAKLKFLLSFLGRVRSSEQRELEHKDRLGGCGEVSGDAEQRGDHFFPVWPQRKATLPSWYCFVTSVSCLCDCFPTGALRARLLERL

SEQ ID NO: 782911 - protein, 64 aa, Homo sapiens
WSQGIPRGQSLPEHSKASVLVAGSLGRRTLGQLRALGFFKAPCGWTGLYRLPALGVWPACGDCA

SEQ ID NO: 782912 - protein, 79 aa, Homo sapiens
GPGCNRCPGTTPPDAPTRAGQDPQTWSCVLLPECGARPAMEKPTRVVGGFGAASGEVPWQVSLKEGSRHFCGATVVGDR

SEQ ID NO: 782913 - protein, 70 aa, Homo sapiens
LCGRTLRLGVHFITCQRNTVNFRKIQGITMYFPQIIINQYFGHTSYKNLKLAKTTLLFSLHSTSPRVVTI

SEQ ID NO: 782914 - protein, 164 aa, Homo sapiens
QACWVGRNCSPSELRMAAPGPLPAAALSPGAPTPRELMHGVAGVTSRAGRDREAGSVLPAGNRGARKASRRSSSRSMSRDNKFSKKDCLSIRNVVASIQTKEGLNLKLISGDVLYIWADVIVNSVPMNLQLGGGPLSRAFLQKAGPMLQKELDDRRRETIGKSM

SEQ ID NO: 782915 - protein, 109 aa, Homo sapiens
MYSKLRMMWQSDGNRKQNINPRDQEGIKYHLIPTWTLHLKEEKLMMTLGLLAVVVSPFLHYYYYYYYYYYYFWRRSPALSPKLECSGAILAHCSLPPRVQAILWPQPPE

SEQ ID NO: 782916 - protein, 72 aa, Homo sapiens
GHGTSAGALGCQAMPQGLQARFHRSLSQKSCPSNASPWPGHRCQDRAIIFCSFFGVPETGQGILHCVSVCVS

SEQ ID NO: 782917 - protein, 59 aa, Homo sapiens
DKPARKVPGLLLGHCKQAEIIQTLSSDKRPSPLDIHLEKHYWSRGVSHSLVTHIMDAGA

SEQ ID NO: 782918 - protein, 163 aa, Homo sapiens
KRCKESCFYESRRFPKDLTPSPSISAGMVWLCRGEGASLKCFGENLLTWRGVCLPVHLNLIKFALSLERHVWGIKLIEILKYSNVVENLWLCKYPQNSLCWSNMKSRWLCSSLPTGLRGAGEGDLSNIKEKGQRGARTHSGPFLDPSQGRRAREAHSDYGPSL

SEQ ID NO: 782919 - protein, 136 aa, Homo sapiens
SCECVWPPVCFRMVRAKFFTVWKGDLGTFSQVTSHLCSVMCSCEHSRVAVLGSHKASWCPGYRMLSQNPSGAPHLSPHFGWGSCFPWVDPKIPADLEGSELRAPPAVLAQVSSFCYYMPRPSWPRLEAPRVQKTGA

SEQ ID NO: 782920 - protein, 426 aa, Homo sapiens
EEARGGRLRWRRLDDCLSAAESDTVAYEDLSEDYTQKKWKGLALSQRALHWNMMLENDRSMASLAGRNMMESSELTPKQEIFKGSESSNSTSGGLFGVVPGGTETGDVCEDTFKELEGQPSNEEGSRLESDFLEIIDEDKKKSTKDRYEEYKEVEEHPPLSSSPVEHEGVLKGQKSYRCDECGKAFYWSSHLIGHRRIHTGEKPYECNECGKTFRQTSQLIVHLRTHTGEKPYECSECGKAYRHSSHLIQHQRLHNGEKPYKCNECAKAFNQSSKLFDHQRTHTGEKPYECKECGAAFSRSKNLVRHQFLHTGKKPYKCNECGRAFCSNRNLIDHQRTHTGEKPYKCNECGKAFSRSKCLIRHQSLHTGEKPYKCSECGKAFNQISQLVEHERIHTGEKPFKCSECGKAFGLSKCLIRHQRLHTSE

SEQ ID NO: 782921 - protein, 131 aa, Homo sapiens
LHTYHGCRKEDRKKSSDFFSSISGTWISLNLCHRPLSSSQPLQSSLPTPNFSGLSLSRIEYTPPPRASGAPQSGRDKGLPLQSTPLPPDPCQCSPTHALRSCQPELQAAWLLQPLHRLLPLPGMPTPSLSH

SEQ ID NO: 782922 - protein, 124 aa, Homo sapiens
MAPLNSSLKDKARLYLKENVNHMPAAQATPQSPLAIPPYHFHMGFHWCQISSLIPNLTLAFLPQISSSLLGLLTLAKTLSPKQLLKPKTWGVILYTSLSFTTPSNPTPSPFQILPHCSISLPLE

SEQ ID NO: 782923 - protein, 103 aa, Homo sapiens
  misc_feature (72)..(72): Xaa can be any naturally occurring amino acid
MASYNAFLLGFVDEGQKCRWQRGLIGGHVKIRDWESLRPPFLAYHCSSPNWEDYNEEQAGTQVAGHGDAPKXWLCLPLPTGKLREEWREGGRSHNFGGSRWVR

SEQ ID NO: 782924 - protein, 104 aa, Homo sapiens
MSSHPESQNLVSHSGLSSPLTIAPKDIKILLNSLPQVSWYFLFPFCACSNDLIGSLMVFFLNTARPLVLLSMNSSSTPQPVIHLLCTSDYTTGGWENVPWANQQ

SEQ ID NO: 782925 - protein, 253 aa, Homo sapiens
LSFNFVLGAVSPAVVVLYTMVLQENGYGVEKDIPTLLMAASSMDDILALTGFNTCLSIVFSSGGMLNNAIASIRNICISRLAGIVLGIFVQYFPSEDQKKLTLKRGFLVLTTCVSAVLGSQRIGLHGSGGLCTLCVEFHCEDKMVRRKEMTSHHVAQAGMELLRSSTPPSLGFQSASDNKGVVTAASRWRHLLLNIDPMQPATNEEFPQFVRCNGEQNLELVGALMVSNVLVTSDWLARYDSNDEDDNNVTPG

SEQ ID NO: 782926 - protein, 153 aa, Homo sapiens
SSLTPFLTRPPAPDEQSIWNVTVLPNSKWANITWKHNFGPGTDFVVEYIDSNHTKKTVPVKAQAQPIQLTDLYPGMTYTLRVYSRDNEGISSTVITFMTSTGERGPGLAIPCKHGAFHSHPQLPACLSPRKEDSSPTPFPTLHGVSQLLLCIS

SEQ ID NO: 782927 - protein, 153 aa, Homo sapiens; identical to SEQ ID NO: 782926

SEQ ID NO: 782928 - protein, 109 aa, Homo sapiens
FSTIYYELLSVYYVYYEVLSVVLGDGLDNGVSSALSYLFHGCGGTLLSGAGSPCLPMKTQMVTVGANPDKGGCAELLVKFTEVCVRFEGAALASRLRQKCDVFPLKLLS

SEQ ID NO: 782929 - protein, 76 aa, Homo sapiens
TPKMSWNTQDGALTCLPVDVDYWLGFQLGLSTVATTHSLCMWLELPQHGGWVLRDSVPTASVLRVSKQKLPVFLKS

SEQ ID NO: 782930 - protein, 69 aa, Homo sapiens
VSQGKLEAAPQPFLPQSSCAKVTKGGGEHRHCQALGWKVTHDISVRITGGPWFWVWTSWRAVLVPTPMP

SEQ ID NO: 782931 - protein, 85 aa, Homo sapiens [sequence omitted]

SEQ ID NO: 782932 - protein, 178 aa, Homo sapiens
SILPVIDNHVPPGLRRFYGSVVVPVCKDMHLLLWLQKRIEMHKAEQCEEEEAMTPRPTKARAPLPSAYVPPLSLPPCPRERLKGMLKEIKPRLSRNCREDPQGCLLNLLLQSHSRSPERPLQRRERRYLQRRREKLMLARRGITLQKMEMPKQTRHRKLKVLEMPSEVCAFLITVYFW

SEQ ID NO: 782933 - protein, 167 aa, Homo sapiens
FSALDFADESGSVSCKDMHLLLWLQKRIEMHKAEQCEEEEAMTPRPTKARAPLPSAYVPPLSLPPCPRERLKGMLKEIKPRLSRNCREDPQGCLLNLLLQSHSRSPERPLQRRERRYLQRRREKLMLARRGITLQKMEMPKQTRHRKLKVLEMPSEVCAFLITVYFW

SEQ ID NO: 782934 - protein, 150 aa, Homo sapiens
AGITGMQPLGPANFVVLVETGFLYVGQAGRELPTSGDPPTSASQSAGITGVSHCTRLHYHLSFSLVYKEDQTPSASLPNTWQTHLYQFHPYLLSFLRGGTVLFLFEGLSLHVLTLISSLLRSWDLTLLIDLFIYSLSLFLSSSTSHLTLG

SEQ ID NO: 782935 - protein, 93 aa, Homo sapiens
LPNNHKTDILPKCTQNIYRGQPYSGPYNIKGFKLYTKIFEKCLNTWKLNRYLNKLDKQVEGEIKRAITKYFELNEKENATNQNLGDAMKAILV

SEQ ID NO: 782936 - protein, 152 aa, Homo sapiens
TTGAQREAWRKRSSSPTSPGHRAGEARPQAGLGPARAHPSSAVRSCPFPSLASTLLSGIPGQRPSHRGKRRVLAGRTGPIFGSSDRPRQELLRHQLPGAHRRASREDHHSPFYRWTNQGHLLLHHLSLGTVPGMPGRKAAVAQGEAEMEQEG

SEQ ID NO: 782937 - protein, 67 aa, Homo sapiens
GQPPGSHRGCCPSIRGSPSLQHWWGHLQALPAWSPALQLVRHPHKVPETTWSNHHFPHKQTKMQVFS

SEQ ID NO: 782938 - protein, 103 aa, Homo sapiens
MFEESYCICPVSSVNRVPLCFWEVKKNPEPSSDFPLGLGIMRRWLTSFIELSFTSNPSESLIDPIFLTQPLPWTSFLSPISLISLSHGSRGQKCEIKVSVEPR

SEQ ID NO: 782939 - protein, 35 aa, Homo sapiens
LLVVLVLMVVLVESMGAILGLTELVAGGIGEFGGG

SEQ ID NO: 782940 - protein, 35 aa, Homo sapiens
MAGGKEEQVTSYMDDSRQRKSSKYTGPEEGVAWLV

SEQ ID NO: 782941 - protein, 64 aa, Homo sapiens
MMSEGSGGELAGTVKDTKDLQSEVQAVGVTPRPMAGGCCWGTEHPAGSRPWMLIPAPLATIWGH

SEQ ID NO: 782942 - protein, 100 aa, Homo sapiens
VSMTTANVSWEPGYDGGYEQTFSVWMKRAQFGPHDWLSLPVPPGPSWLLVDTLEPETAYQFSVLAQNKLGTSAFSEVVTVNTLAFPITTPEMLVLVSPTR

SEQ ID NO: 782943 - protein, 67 aa, Homo sapiens
AAEKEMTSVVAEFGTGLVGSLELEEEQPELKMCGFIFRSPLNKDKAAAAGMDELIRLKCAPREEGQR

SEQ ID NO: 782944 - protein, 61 aa, Homo sapiens
EAFCPGLGEKECMCEAGIQWPWSGARAHRQHQARGGFKTRVLSLSHPTGTLDPSLLRPWNS

SEQ ID NO: 782945 - protein, 81 aa, Homo sapiens
SWSCSADEVMHFSDCKIQNGTSGICFIYTGEGRPSGEAFVELESADEAKLALKTEKPWDTDTLKYSSLIVLKWIGYRSTQV

SEQ ID NO: 782946 - protein, 37 aa, Homo sapiens
SHTCPCLRAQPRALERLPFSIPARPCQLLSGMDSHSL

SEQ ID NO: 782947 - protein, 45 aa, Homo sapiens
MTLLAPSPREAFSAWHHRWLGPWCVHLPLWLPFLIFYLIPKNRFP

SEQ ID NO: 782948 - protein, 66 aa, Homo sapiens
KEDEDAYKKQFSQYIKNSVTPDMMEEMYKKAHAAIRENPVYEKKPKKQKRRGGTIPKYPLLRRKIR

SEQ ID NO: 782949 - protein, 154 aa, Homo sapiens
KEDEDAYKKQFSQYIKNSVTPDMMEEMYKKAHAALNSLLSDIITRESFGTVRDRQASIHSSLQGTKNFIASGSSGKACIQIAGEGTWLTINAFHIVFITSHLHLAFIDLVHAKHIEKLAGQQQASTICCSIICQANLHTIFWQFVCIRRAEFEG

SEQ ID NO: 782950 - protein, 55 aa, Homo sapiens
EEEREARLWGAAGSQAGLLRSAWPQEWGRLVVSGLAGEVVGEIVLLGGWPPLSPH

SEQ ID NO: 782951 - protein, 96 aa, Homo sapiens
NRPYAGLQVFIHGKQLQLASGKRREGHNEIHSLKSERLATLSAEENPEQLESSYLVGRNGQQYNLHGISMAGDESHTFFFFIIFFGERLFRPCALG

SEQ ID NO: 782952 - protein, 91 aa, Homo sapiens
SSRDVSPSPACFISPAVLVVGTQKSEHIYLLAAGGHSAPSLGHAPLCMSVPIPQGYRPAPPTQGTPWSLLGDLQTQGRWGLDLPFLRCPRS

SEQ ID NO: 782953 - protein, 198 aa, Homo sapiens
  misc_feature (198)..(198): Xaa can be any naturally occurring amino acid
EAVNTKNPSWVCVAVIADIVEDRLRVHFDNWDDSYDYWCDVNSPYVQPVGWCQENGRTLIAPQGYPNPENFSWTEYLEATQTNAVPAKVFKMRLPHGFLPNMKLEVVDKRNPRLIRVATIVDVDDQRVKVHFDGWDHKYDYWVEADSPDIHPIGWCDVTGHPLEVPQRTNDLKILPGQAVCPTPGCRGIGHIRGPRPX

SEQ ID NO: 782954 - protein, 34 aa, Homo sapiens
KPPPPLSWPPQGALKGPGHAGAVDALLAPLWAPT

SEQ ID NO: 782955 - protein, 50 aa, Homo sapiens
GASALAPNSACLPTCRSLGQAHTASCISLDVFLDVPSSGKLASCSLAKSD

SEQ ID NO: 782956 - protein, 84 aa, Homo sapiens
QLMSSKTPGAGRAAGASFREPVNADSQVSLGVSDLVLGRALEVWILTNFLGYSAVQSISEALLQGRESADPLWPPSFSGRSHEH

SEQ ID NO: 782957 - protein, 68 aa, Homo sapiens
REGTHTSTRTAQMFKAAYCVTTKGKRPKWLSTDEWVSTVWPIRGGTGSAEGDLSTHWNMTRPRTGTRL

SEQ ID NO: 782958 - protein, 93 aa, Homo sapiens
ECSAWSGDTPGKPNIVLCAVMWPYSARNREALLLELPGQMGCVGSWHRQNLADHWLPVPAKALQTPETLMETQALGAPPNELGRILCFLPSGG

SEQ ID NO: 782959 - protein, 129 aa, Homo sapiens
FYLIINLYSKETSTVKSLIFSYLLCAPEHFPYLISPLNQELQNSTFCSSVLIFKLPVSLTTPSLPLGSQTFYEATGEIYLLHSNHSPLEPNHFWLPHKNDWGEGCLMDTTLPSDCLKEDYSVPLLCPRH

SEQ ID NO: 782960 - protein, 51 aa, Homo sapiens
GPHSTSFTHTSPPAPAWTPAISTLVASKARTYSAPKHTANTQLLNTQHPNT

SEQ ID NO: 782961 - protein, 109 aa, Homo sapiens
SEHTHLLHEGFPPSPLQLASPSQPINMFLSHASVKHKNQNASNICLPLAVSSFMLSFLRSCLYLLISHPPHTFTPQSRHFPDLNILNQHHLPALWEFSLNLFLSFSKTL

SEQ ID NO: 782962 - protein, 95 aa, Homo sapiens
QHSSSRPLLGGLEPSPQDTKRNETHAGVESRERSMHGVRTRGEARVPGTHQGRLLGGKRRSQALRHELRQKHKAWALRRLGGLKSWGRAPAREAG

SEQ ID NO: 782963 - protein, 102 aa, Homo sapiens
RRLWSSGIPNYLAMSESGELFTEQMPGFAEGHQLQGLCPQVRGLRLDYYTLGSTDVQLWEPGHLHHGNLSLGLKLAPALPLTHDETLCGAYSEPVSSSGKRG

SEQ ID NO: 782964 - protein, 120 aa, Homo sapiens
NAAEDPENLQGPCPRPATATPQGPWSLSGNAGHLREAGPQIPRVAGRGCCVWRGKGCCLNFQGNDVGTPGGRDALTPLHSRGHGEPIRLWPCGPSPFSDGLIVIFSHLLFATQRQSGCKR

SEQ ID NO: 782965 - protein, 118 aa, Homo sapiens
PERFQLLTSQLGDPADTDYTAVGCAITTISSNLTEMSKGVKLLAALMDDEVGSGEDLLRAARTLAGAVSDLLKAVQPTSGEPRQTVLTAAGSIGQASGDLLRQIGENETDERFQVRYL

SEQ ID NO: 782966 - protein, 99 aa, Homo sapiens
TGDGVGAEARPPKQPRRRGKIRRFPQGQGPAKPLPKDSPPRKVLPHGREAAGPSGLECPCGPPDLTPSSSVTCEWKKVSLPVLRRGISTMTREGADESF

SEQ ID NO: 782967 - protein, 91 aa, Homo sapiens
PRDHRRYFYVNELSGESQWEFPDGEEEEEESQAQENRDETLAKQTLKDKTGTDSNSTESSETSTVVYSDPGSDWLCNGEQNEASAFNSVRG

SEQ ID NO: 782968 - protein, 204 aa, Homo sapiens
IWRPSFSEGTDLFSFFRDVGLKILSNAKIKKPVDCSHRSPEYSTAMGGGGHPEAFESSTPLHQAEDSQVRQYFPETWLWDLFPIGNSGKEAVHVTVPDAITEWKAMSFCTSQSRGFGLSPTVGLTAFKPFFVDLTLPYSVVRGESFRLTATIFNYLKDCIRVQTDLAKSHEYQLESWADSQTSSCLCADDAKTHHWNITAVKLG

SEQ ID NO: 782969 - protein, 39 aa, Homo sapiens
GPQFVTTNVEKGTEALPHPSKTELLAVRINAHYFSRIKA

SEQ ID NO: 782970 - protein, 83 aa, Homo sapiens
EESGEAEHGVRGEESGEAEHGVRGEESGEAEHGVRGEESGEAETGSVGRRVVRLSMGCVEAEHRVRGEESGEDEHGVHGGGGQ

SEQ ID NO: 782971 - protein, 96 aa, Homo sapiens
GICPTLGLGALGRESSLQEASQRVTQNRSVVCTWLGIKLHVDELVNPTSRQTDMWGMSAAGAQTCGPEGQRSAPSSVQLTQELASVAKIALLPSVL

SEQ ID NO: 782972 - protein, 241 aa, Homo sapiens
PSADLEVQAGQVNVKLPEGPLPEGAGFKGHLPKVQMPSLKMPKVALKGPQMDVKGPKLDLKGPKAEVMAPDVEVSLPSVEVDVEAPGAKLDSVRLEGDLSLADKDVTAKDSKFKMPKFKMPSFGVSAPGKSIEASVDVSAPKVEAEVSLPSMQGDLKTTDLCIPLPSADLVVQAGQVDMKLPEGQVPEGAGLKGHLPKVDMPSFKMPKVDLKGPQTDVKGAKLDLKGPKAEVTAPDVEVSL

SEQ ID NO: 782973 - protein, 101 aa, Homo sapiens
TIKIIEENLGNTVLLGKEFVAKSLKAIATKTKIDKCDLIKLKGFCTAKINSRWVKDLNVKPKTIKSLEDIRGNTILDIGPGKDFTTKMPKAIATKTKIGKW

SEQ ID NO: 782974 - protein, 533 aa, Homo sapiens
GAGDLGAGSSPHPSLTEEEDSQTELLIAEEKLSPEQEGQLMPRYEELAESVEEYVLDMLRDQLNRRQPIDNVSRNLLRLLTSTCGYKEVRLLAVQKLEMWLQNPKLTRPAQDLLMSVCMNCNTHGSEDMDVISHLIKIRLKPKVLLNHFMLCIRELLSAHKDNLGTTIKLVIFNELSSARNPNNMQVLYTALQHSSELAPKFLAMVFQDLLTNKDDYLRASRALLREIIKQTKHEINFQAFCLGLMQERKEPQYLEMEFKERFVVHITDVLAVSMMLGITAQVKEAGIAWDKGEKRNLEVLRSFQNQIAAIQRDAVWWLHTVVPSISKLAPKDYVHCLHKVLFTEQPETYYKWDNWPPESDRNFFLRLCSEVPILEDTLMRILVIGLSRELPLGPADAMELADHLVKRAAAVQADDVEVLKVGRTQLIDAVLNLCTYHHPENIQLPPGLPASEPSPFFTLLLEGLGPPAWSFAAFNPENIGLAAWEEYPTLKMLMEMVMTNNYSYPPCTLTDEETRTEMLNRELQTAQREKQE

SEQ ID NO: 782975 - protein, 243 aa, Homo sapiens
GAGDLGAGSSPHPSLTEEEDSQTELLIAEEKLSPEQEGQLMPRYEELAESVEEYVLDMLRDQLNRRQPIDNVSRNLLRLLTSTCGYKEVRLLAVQKLEMWLQNPKLTRPAQDLLMSVCMNCNTHGSEDMDVISHLIKIRLKPKVLLNHFMLCIRELLSAHKDNLGTTIKLVIFNELSSARNPNNMQVLYTALQHSSELAPKMNCNTHGSEDMDVISHLIKIRLKPKVLLNHFMLCIRCVASRG

SEQ ID NO: 782976 - protein, 82 aa, Homo sapiens
HALTARGYRLCNPYDSELPSVGSPSDYDLESYFTEKTEAIKRDFQNPPQSNVIHFNNVPFQPKLKTDFITTLKHKKLNAIWY

SEQ ID NO: 782977 - protein, 65 aa, Homo sapiens
CHAHKSLDFQVSDHTQSLDVQFMPTPGGLSCFEAEQPQDTKDAVQEDCLISESLLPFQLHPQTFH

SEQ ID NO: 782978 - protein, 46 aa, Homo sapiens
LNTIKSRAGQLFPHTQGGGMDPQDHQHLRGHAPSPATPGTNWDITE

SEQ ID NO: 782979 - protein, 76 aa, Homo sapiens
CGGHASMESCTNRPIKPHIDSVWTFEKVADAMKQMQEQTVQVMTAELDLSNFISHSLNNPKLKNEYSTMTILISFQ

SEQ ID NO: 782980 - protein, 167 aa, Homo sapiens
QGQESCVWGPSFSQRLRPCTLLAPYLGSQRRSELAEVTQSGGIWDLNPGVLGPMACVHPFSQGLPDTGSLPLPSAEPLGTRLHRPGLRVSLGFAATHNLYSMNDCAQKILPVLCGLTVDPEKSVRDQAFKAIRSFLSKLESVSEDPTQLEEVEKDVHAASSPGMGGA

SEQ ID NO: 782981 - protein, 38 aa, Homo sapiens
MAGATQSSQVWLPLSQCSDWDSKAGRCSLSQQTSPSVG

SEQ ID NO: 782982 - protein, 720 aa, Homo sapiens
AAKVDPAGSPSVPRPRPAMLLLLGLCLGLSLCVGSQEEAQSWGHSSEQDGLRVPRQVRLLQRLKTKPLMTEFSVKSTIISRYAFTTVSCRMLNRASEDQDIEFQMQIPAAAFITNFTMLIGDKVYQGEITEREKKSGDRVKEKRNKTTEENGEKGTEIFRASAVIPSKDKAAFFLSYEELLQRRLGKYEHSISVRPQQLSGRLSVDVNILESAGIASLEVLPLHNSRQRGSGRGEDDSGPPPSTVINQNETFANIIFKPTVVQQARIAQNGILGDFIIRYDVNREQSIGDIQVLNGYFVHYFAPKDLPPLPKNVVFVLDSSASMVGTKLRQTKDALFTILHDLRPQDRFSIIGFSNRIKVWKDHLISVTPDSIRDGKVYIHHMSPTGGTDINGALQRAIRLLNKYVAHSGIGDRSVSLIVFLTDGKPTVGETHTLKILNNTREAARGQVCIFTIGIGNDVDFRLLEKLSLENCGLTRRVHEEEDAGSQLIGFYDEIRTPLLSDIRIDYPPSSVVQATKTLFPNYFNGSEIIIAGKLVDRKLDHLHVEVTASNSKKFIILKTDVPVRPQKAGKDVTGSPRPGGDGEGDTNHIERLWSYLTTKELLSSWLQSDDEPEKERLRQRAQALAVSYRFLTPFTSMKLRGPVPRMDGLEEAHGMSAAMGPEPVVQSVRGAGTQPGPLLKKPYQPRIKISKTSVRGFRREEQIFSNVMKFPFASILEL

SEQ ID NO: 782983 - protein, 728 aa, Homo sapiens
MRNYDSGPPPSTVINQNETFANIIFKPTVVQQARIAQNGILGDFIIRYDVNREQSIGDIQVLNGYFVHYFAPKDLPPLPKNVVFVLDSSASMVGTKLRQTKDALFTILHDLRPQDRFSIIGFSNRIKVWKDHLISVTPDSIRDGKVYIHHMSPTGGTDINGALQRAIRLLNKYVAHSGIGDRSVSLIVFLTDGKPTVGETHTLKILNNTREAARGQVCIFTIGIGNDVDFRLLEKLSLENCGLTRRVHEEEDAGSQLIGFYDEIRTPLLSDIRIDYPPSSVVQATKTLFPNYFNGSEIIIAGKLVDRKLDHLHVEVTASNSKKFIILKTDVPVRPQKAGKDVTGSPRPGGDGEGDTNHIERLWSYLTTKELLSSWLQSDDEPEKERLRQRAQALAVSYRFLTPFTSMKLRGPVPRMDGLEEAHGMSAAMGPEPVVQSVRGAGTQPGPLLKKPYQPRIKISKTSVDGDPHFVVDFPLSRLTVCFNIDGQPGDILRLVSDHRDSGVTVNGELIGAPAPPNGHKKQRTYLRTITILINKPERSYLEITPSRVILDGGDRLVLPCNQSVVVGSWGLEVSVSANANVTVTIQGSIAFVILIHLYKKPAPFQRHHLGFYIANSEGLSSNCHGLLGQFLNQDARLTEDPAGPSQNLTHPLLLQVGEGPEAVLTVKGHQVPVVWKQRKIYNGEEQIDCWFARNNAAKLIDGEYKDYLASHPFDTGMTLGQGMSREL

SEQ ID NO: 782984 - protein, 217 aa, Homo sapiens
LFDWSPTRRKKQRTYLRTITILINKPERSYLEITPSRVILDGGDRLVLPCNQSVVVGSWGLEVSVSANANVTVTIQGSIAFVILIHLYKKPAPFQRHHLGFYIANSEGLSSNCHGLLGQFLNQDARLTEDPAGPSQNLTHPLLLQVGEGPEAVLTVKGHQVPVVWKQRKIYNGEEQIDCWFARNNAAKLIDGEYKDYLASHPFDTGMTLGQGMSREL

SEQ ID NO: 782985 - protein, 960 aa, Homo sapiens
AAKVDPAGSPSVPRPRPAMLLLLGLCLGLSLCVGSQEEAQSWGHSSEQDGLRVPRQVRLLQRLKTKPLMTEFSVKSTIISRYAFTTVSCRMLNRASEDQDIEFQMQIPAAAFITNFTMLIGDKVYQGEITEREKKSGDRVKEKRNKTTEENGEKGTEIFRASAVIPSKDKAAFFLSYEELLQRRLGKYEHSISVRPQQLSGRLSVDVNILESAGIASLEVLPLHNSRQRGSGRGEDDSGPPPSTVINQNETFANIIFKPTVVQQARIAQNGILGDFIIRYDVNREQSIGDIQVLNGYFVHYFAPKDLPPLPKNVVFVLDSSASMVGTKLRQTKDALFTILHDLRPQDRFSIIGFSNRIKVWKDHLISVTPDSIRDGKVYIHHMSPTGGTDINGALQRAIRLLNKYVAHSGIGDRSVSLIVFLTDGKPTVGETHTLKILNNTREAARGQVCIFTIGIGNDVDFRLLEKLSLENCGLTRRVHEEEDAGSQLIGFYDEIRTPLLSDIRIDYPPSSVVQATKTLFPNYFNGSEIIIAGKLVDRKLDHLHVEVTASNSKKFIILKTDVPVRPQKAGKDVTGSPRPGGDGEGDTNHIERLWSYLTTKELLSSWLQSDDEPEKERLRQRAQALAVSYRFLTPFTSMKLRGPVPRMDGLEEAHGMSAAMGPEPVVQSVRGAGTQPGPLLKKPYQPRIKISKTSVDGDPHFVVDFPLSRLTVCFNIDGQPGDILRLVSDHRDSGVTVNGELIGAPAPPNGHKKQRTYLRTITILINKPERSYLEITPSRVILDGGDRLVLPCNQSVVVGSWGLEVSVSANANVTVTIQGSIAFVILIHLYKKPAPFQRHHLGFYIANSEGLSSNCHGLLGQFLNQDARLTEDPAGPSQNLTHPLLLQVGEGPEAVLTVKGHQVPVVWKQRKIYNGEEQIDCWFARNNAAKLIDGEYKDYLASHPFDTGMTLGQGMSREL

SEQ ID NO: 782986 - protein, 488 aa, Homo sapiens
MRNYDSGPPPSTVINQNETFANIIFKPTVVQQARIAQNGILGDFIIRYDVNREQSIGDIQVLNGYFVHYFAPKDLPPLPKNVVFVLDSSASMVGTKLRQTKDALFTILHDLRPQDRFSIIGFSNRIKVWKDHLISVTPDSIRDGKVYIHHMSPTGGTDINGALQRAIRLLNKYVAHSGIGDRSVSLIVFLTDGKPTVGETHTLKILNNTREAARGQVCIFTIGIGNDVDFRLLEKLSLENCGLTRRVHEEEDAGSQLIGFYDEIRTPLLSDIRIDYPPSSVVQATKTLFPNYFNGSEIIIAGKLVDRKLDHLHVEVTASNSKKFIILKTDVPVRPQKAGKDVTGSPRPGGDGEGDTNHIERLWSYLTTKELLSSWLQSDDEPEKERLRQRAQALAVSYRFLTPFTSMKLRGPVPRMDGLEEAHGMSAAMGPEPVVQSVRGAGTQPGPLLKKPYQPRIKISKTSVRGFRREEQIFSNVMKFPFASILEL

SEQ ID NO: 782987 - protein, 647 aa, Homo sapiens
MRNYDSGPPPSTVINQNETFANIIFKPTVVQQARIAQNGILGDFIIRYDVNREQSIGDIQVLNGYFVHYFAPKDLPPLPKNVVFVLDSSASMVGTKLRQTKDALFTILHDLRPQDRFSIIGFSNRIKVWKDHLISVTPDSIRDGKVYIHHMSPTGGTDINGALQRAIRLLNKYVAHSGIGDRSVSLIVFLTDGKPTVGETHTLKILNNTREAARGQVCIFTIGIGNDVDFRLLEKLSLENCGLTRRVHEEEDAGSQLIGFYDEIRTPLLSDIRIDYPPSSVVQATKTLFPNYFNGSEIIIAGKLVDRKLDHLHVEVTASNSKKFIILKTDVPVRPQKAGKDVTGSPRPGGDGEGDTNHIERLWSYLTTKELLSSWLQSDDEPEKERLRQRAQALAVSYRFLTPFTSMKLRGPVPRMDGLEEAHGMSAAMGPEPVVQSVRGAGTQPGPLLKKPYQPRIKISKTSVDGDPHFVVDFPLSRLTVCFNIDGQPGDILRLVSDHRDSGVTVNGELIGAPAPPNGHKKQRTYLRTITILINKPERSYLEITPSRVILDGGDRLVLPCNQSVVVGSWGLEVSVSANANVTVTIQGSIAFVILIHLYKKPAPFQRHHLGFYIANSEGLSSNCHGLLESGILIQELTQQSVAVAGR

SEQ ID NO: 782988 - protein, 728 aa, Homo sapiens; identical to SEQ ID NO: 782983

SEQ ID NO: 782989 - protein, 960 aa, Homo sapiens; identical to SEQ ID NO: 782985

SEQ ID NO: 782990 - protein, 997 aa, Homo sapiens
AAKVDPAGSPSVPRPRPAMLLLLGLCLGLSLCVGSQEEAQSWGHSSEQDGLRVPRQVRLLQRLKTKPLMTEFSVKSTIISRYAFTTVSCRMLNRASEDQDIEFQMQIPAAAFITNFTMLIGDKVYQGEITEREKKSGDRVKEKRNKTTEENGEKGTEIFRASAVIPSKDKAAFFLSYEELLQRRLGKYEHSISVRPQQLSGRLSVDVNILESAGIASLEVLPLHNSRQRGSGRGEDDSGPPPSTVINQNETFANIIFKPTVVQQARIAQNGILGDFIIRYDVNREQSIGDIQVLNGYFVHYFAPKDLPPLPKNVVFVLDSSASMVGTKLRQDIGFSLAVQNWVPKGYLDISCVTLQVQCNWKGKAKAKTKDALFTILHDLRPQDRFSIIGFSNRIKVWKDHLISVTPDSIRDGKVYIHHMSPTGGTDINGALQRAIRLLNKYVAHSGIGDRSVSLIVFLTDGKPTVGETHTLKILNNTREAARGQVCIFTIGIGNDVDFRLLEKLSLENCGLTRRVHEEEDAGSQLIGFYDEIRTPLLSDIRIDYPPSSVVQATKTLFPNYFNGSEIIIAGKLVDRKLDHLHVEVTASNSKKFIILKTDVPVRPQKAGKDVTGSPRPGGDGEGDTNHIERLWSYLTTKELLSSWLQSDDEPEKERLRQRAQALAVSYRFLTPFTSMKLRGPVPRMDGLEEAHGMSAAMGPEPVVQSVRGAGTQPGPLLKKPYQPRIKISKTSVDGDPHFVVDFPLSRLTVCFNIDGQPGDILRLVSDHRDSGVTVNGELIGAPAPPNGHKKQRTYLRTITILINKPERSYLEITPSRVILDGGDRLVLPCNQSVVVGSWGLEVSVSANANVTVTIQGSIAFVILIHLYKKPAPFQRHHLGFYIANSEGLSSNCHGLLGQFLNQDARLTEDPAGPSQNLTHPLLLQVGEGPEAVLTVKGHQVPVVWKQRKIYNGEEQIDCWFARNNAAKLIDGEYKDYLASHPFDTGMTLGQGMSREL

SEQ ID NO: 782991 - protein, 960 aa, Homo sapiens; identical to SEQ ID NO: 782985

SEQ ID NO: 782992 - protein, 530 aa, Homo sapiens
MRNYDSGPPPSTVINQNETFANIIFKPTVVQQARIAQNGILGDFIIRYDVNREQSIGDIQVLNGYFVHYFAPKDLPPLPKNVVFVLDSSASMVGTKLRQTKDALFTILHDLRPQDRFSIIGFSNRIKVWKDHLISVTPDSIRDGKVYIHHMSPTGGTDINGALQRAIRLLNKYVAHSGIGDRSVSLIVFLTDGKPTVGETHTLKILNNTREAARGQVCIFTIGIGNDVDFRLLEKLSLENCGLTRRVHEEEDAGSQLIGFYDEIRTPLLSDIRIDYPPSSVVQATKTLFPNYFNGSEIIIAGKLVDRKLDHLHVEVTASNSKKFIILKTDVPVRPQKAGKDVTGSPRPGGDGEGDTNHIERLWSYLTTKELLSSWLQSDDEPEKERLRQRAQALAVSYRFLTPFTSMKLRGPVPRMDGLEEAHGMSAAMGPEPVVQSVRGAGTQPGPLLKKPYQPRIKISKTSVDGDPHFVVDFPLSRLTVCFNIDGQPGDILRLVSDHRDSGKFYLPLQHLGKDQVGTASPSVLQMDVQ

SEQ ID NO: 782993 - protein, 111 aa, Homo sapiens
ISWSFWKQHGGEMGEFPEPLCLMFDRGVACLFGHHPFNPLRDGEQAAGQVQEPKWACVTVCPFSLAVHGWLECWPAQWTLCLSVRAECQCDSSLYPKLLSSILGEAGHTCT

SEQ ID NO: 782994 - protein, 97 aa, Homo sapiens
  misc_feature (28)..(28): Xaa can be any naturally occurring amino acid
FVCCPLPEGSNNVDSADPEEDDSDVWWXGADTDYADGSEDKVVEDKALSSTLYTSKIDKATLFILSKINLLLLVLLGVSCLRYPGTCKLKKVKVILI

SEQ ID NO: 782995 - protein, 35 aa, Homo sapiens
MEGATEELRNTQLARGPERADASSETTESDGDLTL

SEQ ID NO: 782996 - protein, 107 aa, Homo sapiens
CNWFSIPERRPSDGRPPEVTHLKGLRRAHPQGSRTWNRRVCTRHPMQGISSSSNSPGQMQRWMCGIFKGSLAAEVPWQNLFLLTPDILASTSVPESVINPQELISTF

SEQ ID NO: 782997 - protein, 96 aa, Homo sapiens
SEVWLSFGGELVTSSGLVCNMSVVVTGLEVRSEVTGRGEEEIVTGNVEEMGGGEVVAGKDSREGRELGFSREGELCHDISPGPLLMRVVISECGNL

SEQ ID NO: 782998 - protein, 76 aa, Homo sapiens
MGIRGGLWVVPILFLGAGVKSKPVVGKLAPSLVATLLGLGVKLPPALGEECEGREAAVLFIHRSWRRVMAAWRKSS

SEQ ID NO: 782999 - protein, 86 aa, Homo sapiens
QRRRSSRSSSRGKREEEEEEEEEEEEEEEEEEEEEEEEEEEEEEEEEEEEEEEEEEEEEEKRRRRRQIIHVSFYYCDHNSIENCLV

SEQ ID NO: 783000 - protein, 110 aa, Homo sapiens
MGSLIPVPSCHSLSTGHPHLPITSHPSHGQPHPCPQLSCLHRGCSLAAQVHVKFLTLKPPELASPLLLHVLLSPPFTASFPQKVTSTVHLVSRPPPAPQPAADFLSPYPN

SEQ ID NO: 783001 - protein, 1270 aa, Homo sapiens
RDFQSEVLLSAMELFHMTSGGDAAMFRDGKEPQPSAEAAAAPSLANISCFTQKLVEKLYSGMFSADPRHILLFILEHIMVVIETASSQRDTVLSTLYSSLNKVILYCLSKPQQSLSECLGLLSILGFLQEHWDVVFATYNSNISFLLCLMHCLLLLNERSYPEGFGLEPKPRMSTYHQVFLSPNEDVKEKREDLPSLSDVQHNIQKTVQTLWQQLVAQRQQTLEDAFKIDLSVKPGEREVKIEEVTPLWEETMLKAWQHYLASEKKSLASRSNVAHHSKVTLWSGSLSSAMKLMPGRQAKDPECKTEDFVSCIENYRRRGQELYASLYKDHVQRRKCGNIKAANAWARIQEQLFGELGLWSQGEETKPCSPWELDWREGPARMRKRIKRLSPLEALSSGRHKESQDKNDHISQTNAENQDELTLREAEGEPDEVGVDCTQLTFFPALHESLHSEDFLELCRERQVILQELLDKEKVTQKFSLVIVQGHLVSEGVLLFGHQHFYICENFTLSPTGDVYCTRHCLSNISDPFIFNLCSKDRSTDHYSCQCHSYADMRELRQARFLLQDIALEIFFHNGYSKFLVFYNNDRSKAFKSFCSFQPSLKGKATSEDTLNLRRYPGSDRIMLQKWQKRDISNFEYLMYLNTAAGRTCNDYMQYPVFPWVLADYTSETLNLANPKIFRDLSKPMGAQTKERKLKFIQRFKEVEKTEGDMTVQCHYYTHYSSAIIVASYLVRMPPFTQAFCALQGGSFDVADRMFHSVKSTWESASRENMSDVRELTPEFFYLPEFLTNCNGVEFGCMQDGTVLGDVQLPPWADGDPRKFISLHRKALESDFVSANLHHWIDLIFGYKQQGPAAVDAVNIFHPYFYGDRMDLSSITDPLIKSTILGFVSNFGQVPKQLFTKPHPARTAAGKPLPGKDVSTPVSLPGHPQPFFYSLQSLRPSQVTVKDMYLFSLGSESPKGAIGHIVSTEKTILAVERNKVLLPPLWNRTFSWGFDDFSCCLGSYGSDKVLMTFENLAAWGRCLCAVCPSPTTIVTSGTSTVVCVWELSMTKGRPRGLRLRQALYGHTQAVTCLAASVTFSLLVSGSQDCTCILWDLDHLTHVTRLPAHREGISAITISDVSGTIVSCAGAHLSLWNVNGQPLASITTAWGPEGAITCCCLMEGPAWDTSQIIITGSQDGMVRVWKTEDVKMSVPGRPAGEEPPAQPPSPRGHKWEKNLALSRELDVSIALTGKPSKTSPAVTALAVSRNHTKLLVGDERGRIFCWSADG

SEQ ID NO: 783002 - protein, 1006 aa, Homo sapiens
RDFQSEVLLSAMELFHMTSGGDAAMFRDGKEPQPSAEAAAAPSLANISCFTQKLVEKLYSGMFSADPRHILLFILEHIMVVIETASSQRDTVLSTLYSSLNKVILYCLSKPQQSLSECLGLLSILGFLQEHWDVVFATYNSNISFLLCLMHCLLLLNERSYPEGFGLEPKPRMSTYHQVFLSPNEDVKEKREDLPSLSDVQHNIQKTVQTLWQQLVAQRQQTLEDAFKIDLSVKPGEREVKIEEVTPLWEETMLKAWQHYLASEKKSLASRSNVAHHSKVTLWSGSLSSAMKLMPGRQAKDPECKTEDFVSCIENYRRRGQELYASLYKDHVQRRKCGNIKAANAWARIQEQLFGELGLWSQGEETKPCSPWELDWREGPARMRKRIKRLSPLEALSSGRHKESQDKNDHISQTNAENQDELTLREAEGEPDEVGVDCTQLTFFPALHESLHSEDFLELCRERQVILQELLDKEKVTQKFSLVIVQGHLVSEGVLLFGHQHFYICENFTLSPTGDVYCTRHCLSNISDPFIFNLCSKDRSTDHYSCQCHSYADMRELRQARFLLQDIALEIFFHNGYSKFLVFYNNDRSKAFKSFCSFQPSLKGKATSEDTLNLRRYPGSDRIMLQKWQKRDISNFEYLMYLNTAAGRTCNDYMQYPVFPWVLADYTSETLNLANPKIFRDLSKPMGAQTKERKLKFIQRFKEVEKTEGDMTVQCHYYTHYSSAIIVASYLVRMPPFTQAFCALQGGSFDVADRMFHSVKSTWESASRENMSDVRELTPEFFYLPEFLTNCNGVEFGCMQDGTVLGDVQLPPWADGDPRKFISLHRKALESDFVSANLHHWIDLIFGYKQQGPAAVDAVNIFHPYFYGDRMDLSSITDPLIKSTILGFVSNFGQVPKQLFTKPHPARTAAGKPLPGKDVSTPVSLPGHPQPFFYSLQSLRPSQVTVKGDSLAMHCLVSCPRVVPSVAGFLWRSSTTYLGKVLGTDFEWLHLQSQPDSRGVSSLGSV

SEQ ID NO: 783003 - protein, 1006 aa, Homo sapiens; identical to SEQ ID NO: 783002

SEQ ID NO: 783004 - protein, 73 aa, Homo sapiens
HYYTHYSSAIIVASYLVRMPPFTQAFCALQVSCCHSLYTHTHTHTHTYACITRLRPVLEQRQDASAKNSVISQ

SEQ ID NO: 783005 - protein, 44 aa, Homo sapiens
FCWFGCLSASLQTQALTLTRPPAQLAMWPYSVISLEFNLDSEDP

SEQ ID NO: 783006 - protein, 55 aa, Homo sapiens
TPVASPGITDKSHRVRPPVPFSKQGTRNPESQLEFQIPSFLYVIHLTKLRVSEYL

SEQ ID NO: 783007 - protein, 121 aa, Homo sapiens
MSHQCTHFADEERCLSTGMASLACVGQCLYRSPASTHLFQSIHIFHQQNEFTRNLSSNWYKDYMTWHVMTHTQRRSFFQHAGRGDPIHGLGGGFPHCSVRSPSSSGSRSDYLRFADEEAEP

SEQ ID NO: 783008 - protein, 132 aa, Homo sapiens
EVNQVHRKRLQLHLPSCRRLSRLHTLTLFGLTLPDKGDSWPRLQSESTSFLQAQKSQELEHLPGDRDLEGSPRPHFLRPPLYQERPDNSIILSFLEANVLLLHFPEGPALTSEPLLGAQPPLFPPQEEAGGW

SEQ ID NO: 783009 - protein, 135 aa, Homo sapiens [sequence omitted]

SEQ ID NO: 783010 - protein, 108 aa, Homo sapiens
WHNLSSPQPPPLGFKRFCCLSLPSSWDYRHVPPRMSNFVFLVETGFLHVGQAGLELPTSGDPPALASQSAGITGVSHRARPKRALSSFMGQGPAQTIPVPSYNSGSTG

SEQ ID NO: 783011 - protein, 103 aa, Homo sapiens
LEDETQIILIQCEKVYGCVEEGFLEFLERMILSSVLTKEELLRLKVDEKGLLIKRNKTGLRGVKQILCMVNYNELGVFCSPKVQGIKRQKMILEYRQRILHLS

SEQ ID NO: 783012 - protein, 84 aa, Homo sapiens
CRTCKTRWTPECSYAILCHAQSSPASSLLIDWVLFSHLHLLHPPSNISYYIQTSLWLRNSPPDTGILTMWDDYYCMTPSIDAGL

SEQ ID NO: 783013 - protein, 31 aa, Homo sapiens
EDCLSLVVVKYDWATVVQPGQQSMNLMNLFP

SEQ ID NO: 783014 - protein, 136 aa, Homo sapiens
GEARSVLHGGRRESKGEETHTYQTTRSHENSVMRTASGGLGQGVCPHDSVTFHQATLPTHGDYNSSLDLGEDTESNRINIFKMRRLNKMVSKDFSSAVRSILFSFSAYKGARAAVYTFLGCVLHNSRGACHMITQM

SEQ ID NO: 783015 - protein, 142 aa, Homo sapiens
RCQCHCVSVLPSETAGFPRGLCTHLPIQAERNTVEHFSVTPGHPGNSHLCTLDNLAAQSFWFCFFSFPSSWAVDHHLSVVLGLPLSVLEAVPRGEWRICCLVQILTLVCSIYRSFCQGLSPSETPCIHRQSGDNQTCLIRGT

SEQ ID NO: 783016 - protein, 58 aa, Homo sapiens
EHARILRFFTTLFFFCIIPACMIPSFIESLLKCHFLHVAFLDTLFKIVVLLPHIHDPT

SEQ ID NO: 783017 - protein, 70 aa, Homo sapiens
TSLCSPPLILAGKAGLPEKRGGFAHLDPKLIESGVKTKGTQTGVSVLFYAHSRRSQDWLLPAGSAVLRVR

SEQ ID NO: 783018 - protein, 70 aa, Homo sapiens; identical to SEQ ID NO: 783017

SEQ ID NO: 783019 - protein, 84 aa, Homo sapiens
TVRRSSERRNRLNRDYGFSVPQCTTVSKSQTYQPLLLLLSRDEAPDSSGGGHGAAHCPAQPHQPRPWQAHPFLLLGRHSSAGTF

SEQ ID NO: 783020 - protein, 91 aa, Homo sapiens
SRSEYVVLKKDVALLHSKVELWQGGCLNDEITSSGPTGDGLTELQSQISDTSVVLSMDNSRSLDLDCIIAEIKAQYEEMAKCSRAEAEAWY

SEQ ID NO: 783021 - protein, 76 aa, Homo sapiens
IVSGIGGLLVSLTSRMKPRTLTTYHGGALQGLQYKWLKHQEKLPVFLARGTRITCPTKLQSVRRLLDQKQSEKGIL

SEQ ID NO: 783022 - protein, 40 aa, Homo sapiens
MPGAPASTIEMTTDVPRRGLVLRGKLLSTNHGVLPLTPAP

SEQ ID NO: 783023 - protein, 55 aa, Homo sapiens
GAGTPSRKALSITAEAEPVRTRQGHGHDYGERPSPVVSLQFPAPLQTLQGPQRDL

SEQ ID NO: 783024 - protein, 89 aa, Homo sapiens
VVERRQAGRSTWLKVGEAHADSTTFTDAHVEPGRKYTFRVRAVTSEGAGEAWSLRRYWWLLRLSPSPFRASHPVGLQPGHHTDMDSTSG

SEQ ID NO: 783025 - protein, 191 aa, Homo sapiens
QSAQSGTTVTCCLSPDLAWTCEMPAQSAERPMRCSGVTGFVSGQQPSPILGEPTASQPRHSRDGAWTQQRWSMERSNSRVPPPFLPPIPGLTPGRPDLCSPWSFHHLFSGQSDQEPTHPEGKNDQGALPGPKTCQASSSQRPSSAATVCPSSMFSSTEEPSTGQEASTSACFLPVSLQFSSCKPLKGLETP

SEQ ID NO: 783026 - protein, 55 aa, Homo sapiens
KTNRTVRGNRQICNISLLEFHRTSRQSIKKNPGDLNKNISCVWSCQEAGTKTGFN

SEQ ID NO: 783027 - protein, 70 aa, Homo sapiens
FYHVRARVTSSAGVNTKGMSLTGFAVLKTRGKCKQWSAVATRRHDAPNSSSVMGKKRKKEPLYKEELETY

SEQ ID NO: 783028 - protein, 79 aa, Homo sapiens
GARWPLLPAYTGNAHLRLSAEMQGLRRGAGDSSETLGRIPSPPAMEWKTHRDLIAHQQRPRRRRRASHSPANAHESHVA

SEQ ID NO: 783029 - protein, 48 aa, Homo sapiens
AAGITGLSYHEPRNFMRISLLLDGFWSKTTWVRLLAPLLTSCVTLRTL

SEQ ID NO: 783030 - protein, 56 aa, Homo sapiens
MAHQEHRIRNLSVTYRSTRSLPGASCRVRPARFPGRTSQGRKTASSIQEPFPFENH

SEQ ID NO: 783031 - protein, 80 aa, Homo sapiens
RMRNWEGLDIITITEVGVGGLSVGGPQWVHGTAVCKRACPHSGLGSSQLWHFRTEHVTVQGEAAIVICLNRQGLPRMRNW

SEQ ID NO: 783032 - protein, 101 aa, Homo sapiens
RGCNELRSCHCMPAWVTEQDPASKNKKQFVNYGTFGKLTEASTQNSVFVGYIYFSSPRSPKGINKELFSISSEQYVYGDRRMGRWSKLGRIKKYARGLLSM

SEQ ID NO: 783033 - protein, 112 aa, Homo sapiens
HPFPTPVFILEMGMDKASMVSLVAQRGQGSYCCETAVVGRSWYKKANPEAWDCSAENKWARTWGRGGSGEAPRQTAQRGCWAVGPRAPAPVTVLGLWRCLHPASWLWAGSEW

SEQ ID NO: 783034 - protein, 84 aa, Homo sapiens
GRTSYNRARRCHLDDGWTSRDRDMIGSEAPRQYIKISAILLTRASSNIDARKGQGMNHLKRTEYFINEHTMCYAVMSKRFGKEL

SEQ ID NO: 783035 - protein, 102 aa, Homo sapiens
MVRHGLVKVPPVVIGTAQVAISPGLFSLVPQVLGYLQMLLMALHSILKVTHGNIHSSHVAKFSGFRKFIFGLLGKKNTLFVTGQCIGVVSNGCVHVAQTAQG

SEQ ID NO: 783036 - protein, 101 aa, Homo sapiens
SLAFVLAQQPLRPSQHCTSTLHVWLGTPNKTPWTGGLNDRNLISHRSGGWKSKTKVSAGLVSCEASFLGSQMVIFLLCPHMIVPESVCLSSSDKDTSPIGL

SEQ ID NO: 783037 - protein, 125 aa, Homo sapiens
TCLWMAEVCPAASSCIHHPCPHLRLGIHSQQAAQLAQSWPESGRWRSLSAFSWKDPVGGRSGPGAGEGVCSQSLVSLPGSRNVHGIWFGCASPWEAVLGQVLPVLAQGLSISMEWTPSLHTRISV

SEQ ID NO: 783038 - protein, 105 aa, Homo sapiens
CWHFGILERDGGNAGVLVAEGPHWEPPRAPSLALRRLLLGRAACHLPPHDFPFNYCSLPVLAQLVINSFILMCEWLSVPSNLAGRGVNLMEGILGGLLSSPISPF

SEQ ID NO: 783039 - protein, 117 aa, Homo sapiens
GAHSDLVGASSDDWGIPASNMTKKKRENLGVALEIDGLEEKLSQCRRDLEAVNSRLHSRELSPEARRSLEKEKNSLMNKASNYEKELKFLRQENRKNMLLSVAIFILLTLVYAYWTM

SEQ ID NO: 783040 - protein, 117 aa, Homo sapiens; identical to SEQ ID NO: 783039

SEQ ID NO: 783041 - protein, 165 aa, Homo sapiens
GAHSDLVGASSDDWGIPASNMTKKKRENLGVALEIDGLEEKLSQCRRDLEAVNSRLHSRELSPEARRSLEKEKNSLMNKASNYEKELKFLRQENRKNMLLSVAIFILLTLVYAYWTMSPPPSPLHAGAHPHGHCEQQAGGLSFQVSCENSISPLTGLIEHRLIGS

SEQ ID NO: 783042 - protein, 117 aa, Homo sapiens; identical to SEQ ID NO: 783039

SEQ ID NO: 783043 - protein, 138 aa, Homo sapiens
GAHSDLVGASSDDWGIPASNMTKKKRENLGVALEIDGLEEKLSQCRRDLEAVNSRLHSRELSPEAREGTEVSSAREPEEHAALCGHLYPPDARLCLLDHVSLALPHNQHRLPLGPLVRIKQALQASIGPRCWGVPLPT

SEQ ID NO: 783044 - protein, 61 aa, Homo sapiens
MGREGTQNIQHHLEKEEVGLTLPNFKTYYKGKVNETGWYWHKDRHIDQWNKNESSEINPPT

SEQ ID NO: 783045 - protein, 103 aa, Homo sapiens [sequence omitted]

SEQ ID NO: 783046 - protein, 262 aa, Homo sapiens
RQWLLGEWACKLYTGFVFLTFSTSNCLLVLISVDRCISVLYPVWALNHRTEQRASWLAFGVWLLAAALCSAHLKFRTTRKWNGCMQCYLQFNLENETAQMWTQEVFGRQMAVIMAHFLLGFLGPLAIIGTCAHLIRAKLLREGWVHANRPKRLLLVLVSAFICWFPFNVMLLVHLWRRVMLKEFYHPQMLLILQASFALGCVNNCLNPFLYVFVGRDFQEKFFQSLTSALARAFGEEEFLSPVPVATPPGNDGRLQLEAGSR

SEQ ID NO: 783047 - protein, 57 aa, Homo sapiens
GLIEAVATGLRQSDSSSVHHEAKKIQCRMLDSKTVEKIKAVKGNRVLAACRVLTVLY

SEQ ID NO: 783048 - protein, 53 aa, Homo sapiens
GQKTCQGSFLGHFLNVGSESACSYMKASPDQTGLQPSLSPGLRLEGILLEGIF

SEQ ID NO: 783049 - protein, 34 aa, Homo sapiens
MRKVGAAEALTSKRGKVHMWMVSSLRGGQQTSPT

SEQ ID NO: 783050 - protein, 46 aa, Homo sapiens
MGAGIPKELKVGAASCWAAPSSIQHFCGKWRMASLWANPSSHRVLT

SEQ ID NO: 783051 - protein, 112 aa, Homo sapiens
SDLEIHITHFPHCILKHNSIPGTFRISSSQASELEPNPRSHTLLHPNTAMTCDLAVQRPCQCLQAHSTKSLKGRGRKGLTALRARIRKALRSQIRVKQLVPRAVMTPGTPRH

SEQ ID NO: 783052 - protein, 101 aa, Homo sapiens
IWFPLGGGHYRGIRCGHQTSSSYLGMPQDTWAQHSFWHSAPLPPAGPVPLPRALSPKNGSRKKHSSVSAFPPHLTLLRPVPSISKSRLLYVGSYSPPPLHS

SEQ ID NO: 783053 - protein, 84 aa, Homo sapiens
GQEIRGAGTTGDPPRRGPGHSTEEAQGSLLSPLLHLLTSEGQKLHPQIRLTPLVFAHREGVKLDCAYAWFWVCSWFLLVGSWSR

SEQ ID NO: 783054 - protein, 159 aa, Homo sapiens [sequence omitted]

SEQ ID NO: 783055 - protein, 124 aa, Homo sapiens
VRWCVAPSPRLHVSGAVREASVVTSASFPSEGCPGPAEPISPLWLQPDPASKHRNLGSFCQGRREAEMQEGGVGKGDKRQKNRERDRGETEKAQTDIWTDQKWEDKTVTETAIAKLEAFSGPQL

SEQ ID NO: 783056 - protein, 97 aa, Homo sapiens
PLKGPAGNINKWNEWGSSDEYSIFHVWGADITELLPCGNLSPVVPGLLSYSKRSKNSSLCYSFQFLNIGSILKICSPKKTVLWADFGLQAPVSHLCL

SEQ ID NO: 783057 - protein, 93 aa, Homo sapiens
TCPCSWSTCPYLPLTGVSAGIIFCLNCWAPPAALRHPRAATSRAFTAQAPGAVIRGQQGHWVAKGTRAPRCAAHLGQGGPDSGFQNYSHCPAH

SEQ ID NO: 783058 - protein, 52 aa, Homo sapiens
MAGGKQLEVKVVSQTTGLVDGGWPLFRGHWEDRTTKDTLCEEGTLAYSWKQR

SEQ ID NO: 783059 - protein, 84 aa, Homo sapiens
PGDNRTLLLLLKPVWEHPHPGTPRQPGSPLTRWLKEQVEQEVGASDPGSPGGQAWWPMSMESPTRQRPPAMPPGYQATHGRGWG

SEQ ID NO: 783060 - protein, 75 aa, Homo sapiens
SSDWRLSEERSREELWSDGRTGQCNDCEGPNNQDQEVLLCGEHIVSLNGEWDRGVWGYRVDECPLPAAGLCLSYH

SEQ ID NO: 783061 - protein, 91 aa, Homo sapiens
GSPSTAWFTSWMNSCSFITRVAAWPSAFPDAASLEPALKAALIHSFTSKSSARNLEKSMAELPQAWRPELKSWLRAATGMQKRASLREHRG

SEQ ID NO: 783062 - protein, 109 aa, Homo sapiens
RNSHDAYDEERKTNPSAVVAAQSNWEKVAPESLGFQEGTHELCYNTACALIDHGQLNQAMNILQKAEGLCHHSLSEDTDETEEDPQAGLAITYGQMAYILQLQGQTEEA

SEQ ID NO: 783063 - protein, 96 aa, Homo sapiens
SCSLGMHTGMVGSGYKPLPSLPTSYVSVNALSSVSKLHPNPLHLYLLSTVLVLATITTTNHIMCPLCKPLLTQQPESSFRSRPCLKCFGGFLFHIG

SEQ ID NO: 783064 - protein, 242 aa, Homo sapiens
SPTEKLACSLPLEGWSPALKTQGKLNTRPGKVIFFSESGCQGSGREVWGDIVDASGWAPVASIRVVRGCWVLYEEPEFRGQKLVLPEGDMELRTPGTKWSPQGIGSLRRVVWDYSTPEISLFSEEGLKGEQVKLTEALKNSQGLEKPLQVASATVSAGLWLLYPKPLFEDTPYILEPGEYPTSEAWGTSDPSVGSLKPRDWAAKCGEARGAQAVVYEAQAFRAAAGSEPRIYNFRAEDSRAP

SEQ ID NO: 783065 - protein, 105 aa, Homo sapiens
DAKCHNYIPHCSGELLGSSNPPASASHVAGSPGPGTGQAAFCRREEGGPTEGQVFLCSQRPAGGLDPRDTPIHEYPKGILSWGLEEGQSLHQGKGAEGPCPLLPF

SEQ ID NO: 783066 - protein, 668 aa, Homo sapiens
NEKGEVLQIAANQCCPECVLRTPGSCHHEKKIHEHGTEWASSPCSVCSCNHGEVRCTPQPCPPLSCGHQELAFIPEGSCCPVCVGLGKPCSYEGHVFQDGEDWRLSRCAKCLCRNGVAQCFTAQCQPLFCNQDETVVRVPGKCCPQCSARSCSAAGQVYEHGEQWSENACTTCICDRGEVRCHKQACLPLRCGKGQSRARRHGQCCEECVSPAGSCSYDGVVRYQDEMWKGSACEFCMCDHGQVTCQTGECAKVECARDEELIHLDGKCCPECISRNGYCVYEETGEFMSSNASEVKRIPEGEKWEDGPCKVCECRGAQVTCYEPSCPPCPVGTLALEVKGQCCPDCTSVHCHPDCLTCSQSPDHCDLCQDPTKLLQNGWCVHSCGLGFYQAGSLCIACQPQCSTCTSGLECSSCQPPLLMRHGQCVPTCGDGFYQDRHSCAVCHESCAGCWGPTEKHCLACRDPLHVLRDGGCESSCGKGFYNRQGTCSACDQSCDSCGPSSPRCLTCTEKTVLHDGKCMSECPGGYYADATGRCKVCHNSCASCSGPTPSHCTACSPPKALRQGHCLPRCGEGFYSDHGVCKACHSSCLACMGPAPSHCTGCKKPEEGLQVEQLSDVGIPSGECLAQCRAHFYLESTGICEGQNLDFCQNLEVISAVCLGISSTEN

SEQ ID NO: 783067 - protein, 335 aa, Homo sapiens
MGKVKVGVNGFGRIGRLVTRAAFNSGKVDIVAINDPFIDLNYMVYMFQYDSTHGKFHGTVKAENGKLVINGNPITIFQERDPSKIKWGDAGAEYVVESTGVFTTMEKAGAHLQGGAKRVIISAPSADAPMFVMGVNHEKYDNSLKIISNASCTTNCLAPLAKVIHDNFGIVEGLMTTVHAITATQKTVDGPSGKLWRDGRGALQNIIPASTGAAKAVGKVIPELNGKLTGMAFRVPTANVSVVDLTCRLEKPAKYDDIKKVVKQASEGPLKGILGYTEHQVVSSDFNSDTHSSTFDAGAGIALNDHFVKLISWYDNEFGYSNRVVDLMAHMASKE

SEQ ID NO: 783068 - protein, 158 aa, Homo sapiens
LTVPLLFVYFFPFCAETHLSSTNTRMRNWNFSAGSLRNYDLVLIPSDPIALTLSDASTAPCTGRCGVGRASACGTALPTGKEEDMAGTWPDSRCAPSCRVFHMAGLPPVPAHILGPCDLELHKVKSVQIQMVCGSNFLPQEALHNLALHASSEPTLPV

SEQ ID NO: 783069 - protein, 130 aa, Homo sapiens
RRVAGKLVVVRCGGSRVCPAVAYPTPPCPRRAAMSSSSLCRCLAGREHQASSGLPKAWAPGGATVGICLRLSVSRRQVTAWPLQSLQDHHEARRTSWSSPYRLPGLTLGSRVLGAASSGTSGPGSSSLRI

SEQ ID NO: 783070 - protein, 101 aa, Homo sapiens
MVRQGWWGLRSPPSTVLYGQACLGRGPRLADWGVRWALGERPPVSPLPRPLLVRGLFELTSRLTPKSSALVLVVNIGCMGLLSAKRPCSVRLFAHLHGPAA

SEQ ID NO: 783071 - protein, 98 aa, Homo sapiens
MAHAGGTLAWNLRAPEAELEAWYWGILGMRVGGWVGARREERTGPTWKTSQVWVRSYKHERARGILIVLSGAGEKRAGQEAPTFLSTILQSSFSLQMG

SEQ ID NO: 783072 - protein, 46 aa, Homo sapiens
DTRIHTQTHARAHTRQLTLAKGCELKHYRTQTPTHRHWLESAHNLF

SEQ ID NO: 783073 - protein, 208 aa, Homo sapiens
RGRGGRRGTRALAGLEGLNIAGCSGVPRPASPKSYTDADRGGVLPRPRFTSRAPNAGSSDVRFPVRLLPDTRRLSPALAGRAPCKVGNAEPRTRSRRLRLAQGGSPGGARGRGTRRGPRPRRGARATQNKEKKRTKKEKKRKKKENKKKKTQKGNEKQTTQKKSNKKKQKKKKKRKKKPTKDKNNKQTQKRKNRYKKKQIEKETTEQK

SEQ ID NO: 783074 - protein, 157 aa, Homo sapiens
GVGTENSESMEISSHSPSSFGNSFLFRKDNSQRPSHIITQNLDAKPCAPMELGRIQTFVRSTNIYVYIKYVLFSFFSLETGSPLSPRLEYSDAVMAHCSLNLPGSRNPPTSASQVAGSVVVHHHTWLIFGFFFVCLFVFETESRTFIQARLQWRDLG

SEQ ID NO: 783075 - protein, 68 aa, Homo sapiens
WSQVSVDSGEEVGKTQPAESLSHLPAGGPHTPDGQNAPQTEESAAHPPDVSKAEICFLGLATIFIEQF

SEQ ID NO: 783076 - protein, 111 aa, Homo sapiens
MPPPSQHLPPNYRKAHRARYHLMFTWPTKSGHAKLGQRNLLQDGSFHCYGPASMVHQKGTPLRCPPTLLDVAKNKRTRFLYFWHPQLPVSFQILRNYPSLKGSSFSLVPTA

SEQ ID NO: 783077 - protein, 152 aa, Homo sapiens
GFHIQGGVRPAEARKPGSPPPPPGGYVPIILVVGLQLNVELGEVGDGGEHDRHTLTGLIVELIIAPLAGQEVSGHVLGQDVVQQPPVVGLQLLHLLFLLCGLRERDCKSPRCQCEPRCRPLHLLLSVAWRKSTSMNSLSTSANSLSTSTNSL

SEQ ID NO: 783078 - protein, 129 aa, Homo sapiens
MSPWAPGDGDNKGGHSPAEQATGICPHPQLHFREHQGSYPRKTLRTTAVFLRAKEAGFPAWVLHEGTSRNKQRKENDRTKTWRPRGWNSITAGEGENHLHIYRGQVPGPLCGAWCHVRMQTLGHGSLKG

SEQ ID NO: 783079 - protein, 196 aa, Homo sapiens
YGGEPTPLFRPEFSVAPDCPTCQNPGGPAPQTKCVKKIFLGALTAPKKVFCLFCFIIFFGDANYFIAGRWGCREMETTRGATPLLSQATGICPHPQLHFREHQGSYPRKTLRTTAVFLRAKEAGFPAWVLHEGTSRNKQRKENDRTKTWRPRGWNSITAGEGENHLHIYRGQVPGPLCGAWCHVRMQTLGHGSLKG

SEQ ID NO: 783080 - protein, 77 aa, Homo sapiens
GAPRTLGFTWLLCFAWAADFWRSPFFLLSPDAEHTQSPWGNRPSSATPWSLLLFPSLTLCPASPSLWRLLELVRSPA

SEQ ID NO: 783081 - protein, 92 aa, Homo sapiens
RPACTPSTLLTLQAHPLPRLLRAAWQPSSRLAGQPSQYNCPLMSTRVPAPALSTPGQRYSPLPKCTVSMGIIIPQPALLSPPPASLSPCQHD

SEQ ID NO: 783082 - protein, 143 aa, Homo sapiens
VLAFWSEHAHYHLRGLEATHHHHGGRGVGGIIGLQSRHTSIRQTQNCSSRRRRHRCMKRTHFPLERSKYQRGITARQGPVIASWEQSSFDIMSNFLLKQILEDFTEAAVDEDDEDEEEGEEWQLNRRNTSNSGTSHLKHHSTS

SEQ ID NO: 783083 - protein, 107 aa, Homo sapiens
EYGSEALERMFLSFPTTKTYFPHFDLGHGSAQFKGHGKKVADALTNSVAHVDDMPYASVRQLSDMHAHKLRVDPVNFKLLSHCPRCFCPYTEDAGDATALAIHPMPL

SEQ ID NO: 783084 - protein, 105 aa, Homo sapiens
CQSMLLATTCTPTWKLTPAFFKGSSLGAETVPHESSRQKRPREGDWVQTQNLGPILSLWARCAFRKSFGVRLLPTLLPAPPSLLPSQRSHKCDLHHIPSQSSKHQ

SEQ ID NO: 783085 - protein, 81 aa, Homo sapiens
VALQLVRAREALAAEEPVAHEGTVAAVPAQVRLQVRRLGVGFPAARDVAVVQMLLLAPIGPTWSPQSLRLQTVGAATDGLA

SEQ ID NO: 783086 - protein, 302 aa, Homo sapiens
LRTLLQAALSTDPLDAGVDYSGYSPMHWASYTGHEDCLELLLEHSPFSYLEGNPFTPLHCAVINNQDSTTEMLLGALGAKIVNSRDAKGRTPLHAAAFADNVSGLRMLLQHQAEVNATDHTGRTALMTAAENGQTAAVEFLLYRGKADLTVLDENKNTALHLACSKGHEKCALMILAETQDLGLINATNSALQMPLHIAARNGLASVVQALLSHGATVLAVDEEGHTPALACAPNKDVADCLALILSTMKPFPPKDAVSPFSFSLLKNCSIAAAKTVGGCGALPHGASCPYSQERPGAIGLD

SEQ ID NO: 783087 - protein, 102 aa, Homo sapiens
MCSAVLGTEVVLTSGCCYCVSIVTVGGGQVESRKALSEALVYANPALLDVLCGPRRVSPPFWTPSSPCCLRHMMEMVVLGTTLRPGRMESLPRLCLCKVPGL

SEQ ID NO: 783088 - protein, 75 aa, Homo sapiens
REPLTLREPLTLREPLTLREPLTLRHPLTLREHFPLDLLGPNCRQSQDTRSGQQNQANLNFSAVMPSPKQRLQAP

SEQ ID NO: 783089 - protein, 81 aa, Homo sapiens
TVSLTLGEDESPEGNSNSVQVIEDNNVKETLISVMHKYAVIMAEDTRADAESHFVNGLDYLITLPYCGGRIVKKNAFETVS

SEQ ID NO: 783090 - protein, 74 aa, Homo sapiens
ETRMYSLVNKRQKGRLEVRDLGKRLLAGSTVDLEVEVVRVSGCCQMVREQTSIYQQLHHALRKSHRLNLQNSQQ

SEQ ID NO: 783091 - protein, 38 aa, Homo sapiens
MMRGRHSLNLWGLVDGRGANTPVNLSSIQCFGAATRFR

SEQ ID NO: 783092 - protein, 61 aa, Homo sapiens
MRLDPQLFLDLAYRVLGKLLQPGACHRLQPASLKSEHQGNDPDLVIVPTDGPAKASCANGP

SEQ ID NO: 783093 - protein, 114 aa, Homo sapiens
MPSSHLEDLFNADTGPYPQGQPRARHKGLQLNRSWSNRDKGDSFLQGQEEICCYPVYPEFHLQPLVVSEKLVRVRCFIYETMISQHLTTLSVSQKLWAAGYTWVLCLLAYLERS

SEQ ID NO: 783094 - protein, 60 aa, Homo sapiens
MEGRTRLRLGHAVCPGLQLRLWLKGLGSQDLTGRDSLYRTLVPQDFRNKPFHPYFGEIPF

SEQ ID NO: 783095 - protein, 154 aa, Homo sapiens
MEIAARLKGTYWVGDIYKRVLKIFQNGKDFGRTKRNYRIIAYIDTIEWEAIISLKGNDQAVPAEIEVPAEGYEGIMAQVAVSTLPIEDEESMEDEESVEDEESVEDESAESRMLVTLLISALESTFWRPQVQNQGVGQKCCSLCRLLGRILAFF

SEQ ID NO: 783096 - protein, 104 aa, Homo sapiens
TPCPQVAGTTAMCHHAWLILFCYVLWTWALHVFWPSVALSCPYLSPVSTSASQSAEMTGVSHCAQPVFVFDNLVISGIFTDMCNHHDSQLVKHFDDLKKKPLCL

SEQ ID NO: 783097 - protein, 117 aa, Homo sapiens
EHSPKTQKYTARNKHFSLQMEAKSLEYKSSRLSPRSQPRHLEFFVLHEQGLTVHHSVIPFSFLTNYSCTISEAETHEFSVFVLHTPSPVYRDMKMHSERSTGTAWSHGISVCFCAYL

SEQ ID NO: 783098 - protein, 42 aa, Homo sapiens
MLMLFVFGVLLHEVSLSGQNEAPPNTHSIPGEPLYNYASIRL

SEQ ID NO: 783099 - protein, 90 aa, Homo sapiens
AASNWLPVQLVQSRGEECGISWLAESSGFHLYSMSDASFCSSCPWTSDSRFFATGLSDLTSRLPGVCQGFGHRLKAALLASLLLRLLDLY

SEQ ID NO: 783100 - protein, 125 aa, Homo sapiens
RGASAGGRNQRMLLRLPSSSSGRYAQPFFGDLIMEKGKKEHCCVKAAQQETGEGEVTCSKRQTQVWVNLEENLGILAPWIPEKSVCPRQCGFLLHKQLFYYSHSLAPARLLQHLPLENTVEEKGS

SEQ ID NO: 783101 - protein, 107 aa, Homo sapiens
PSSVPSSGHALPFYAEAQPPPPSPFARQPHARGSRHAHPAHTTPTRLAQGQVRGLPSPSGCLLLLSSALLGRGGPHTAPPPEGRGWPQATEVTFICSQSKATANRSG

SEQ ID NO: 783102 - protein, 156 aa, Homo sapiens
VEGPTPQGVWDVPLMPLTAPSIQPSFPLAEEESEIQALERFFRGHMAAGLSFRTHAASRKRGPGASADTVGVPLWGPGPLTLRCWKEASSFLVPSNIYFPCEKPSVSVSLGLFTCVVEGLRKDQEIQGKLSKRRVRTAASCPPSVSTEPFSVPLQK

SEQ ID NO: 783103 - protein, 113 aa, Homo sapiens [sequence omitted]

SEQ ID NO: 783104 - protein, 113 aa, Homo sapiens [sequence omitted]

SEQ ID NO: 783105 - protein, 181 aa, Homo sapiens
MKRRRRRDILRVQLVRIFELLADAGVISHSASGGLDNETHFLNNTLLEYVDLTRQLLEAENEKDSDTLKDIRCHFSALVANIIQNVPVHQRRSIFPQQSLRHSLFMLFSHWAGPFSIMFTPLDRYSDRNMQINRHQYCALKAMSAVLCCGPVADNVGLSSDGYLYKWLDNILDSLDKKVIM

SEQ ID NO: 783106 - protein, 181 aa, Homo sapiens; identical to SEQ ID NO: 783105

SEQ ID NO: 783107 - protein, 113 aa, Homo sapiens
TVRLHSSALGWSNGTGRRGAGGGARRGGSGRTGALGVGGRLRAGRLLRVRGPPSPRPPGLGQPRKGLPQCSGGLKGSSSAAKVGAQAEEAGRASEGCEDCQHAVTSRFYFILG

SEQ ID NO: 783108 - protein, 84 aa, Homo sapiens
RCACIPQPLGGRMGLGAVEQGVVLVEEARAAQEPLEWVGGLGLAGCSECGARQAHAHPELQLAGKRGTQPRFPLAPLPPHLPAS

SEQ ID NO: 783109 - protein, 134 aa, Homo sapiens
WGGTVSTGNICQRHRKGFRKDNRRRGQIPSLPCTMQIEEVGSDSALYRACGFTQSSLLSWQETDQPSVGEGGGLLFSDHTLLQTLKQFPLNIFYFFQIKDDNVNREWHYSPWEAVFLHPRDVYVCTFIFLGVWM

SEQ ID NO: 783110 - protein, 90 aa, Homo sapiens
VALNGRQAEATRASPPRSPAEPKGSALGPNPEPHLTFPRSFKVPPPTPVRTSSIPVQEAQEAPRKEEGATKKAPSRLPLPPSFHIRPASQ

SEQ ID NO: 783111 - protein, 116 aa, Homo sapiens
FIEYYQQHYLAGKPVDNIYFLIIEKNTRSNECCYIIRSEEMRKNAGFDLPSWRAAWKGRRKASCAPCVWARGRRDEKQTAPGRTQSVCGTPEEFELSTDQGGGRSKTSVFCNIEGK

SEQ ID NO: 783112 - protein, 135 aa, Homo sapiens
PQVQMAPPVSLEPMGSLSASLENQLEAFLDGTLPSANEIPPLQSSSEDREPFSLIEDLQNDLLSHSGMLDHSHSPMETSETQFAAGTPCLSLDLSDSNLDNMEWLDITMPNSSSGLTPLSTTAPSMFSADFLDPQ

SEQ ID NO: 783113 - protein, 222 aa, Homo sapiens
GTHSSQKAACLLTPREKQAGPRPHGDTCTWPVCRLVTSPRLLWLQSLSLLGREPGAAKDLGNPDNQGPRSQNWVGDRERPRALQAQPVLNPDSRECRSNPGPLPAGQPQGSGVAQQAVPMLSCWLGTSHWVLWLGAREQTDLSFSCPTRPPGCAVCPGVLTFTGSRLHPAERGTSPGERLDSEARSVLSLYREAVPSMELELRDVGEKSCPSHNNHHRLLRA

SEQ ID NO: 783114 - protein, 92 aa, Homo sapiens
RGQKVRGTRGGVPQAGGATAASTTVGEALTQFPWSPRTQKLGGPQGDSSLYRVPVVSRLCARPTSLDHTLLMGSNGYLGFAAGTLGFSPVQS

SEQ ID NO: 783115 - protein, 204 aa, Homo sapiens
PHATLRLDLAGRELTDYLMKILTERGYRFTTTAEQEIVRDIKEKLCYVALDSEQEMAMAASSSSVEKSYELPDGQVITIGNERFRCPEALFQPCFLGMESCGIHKTTFNSIVKSDVDIRKDLYTNTVLSGGTTMYPGIAHRMQKEITALAPSIMKIKIIAPPKRKYSVWVGGSILASLSTFQQMWISKQEYDESGPSIVHRKCF

SEQ ID NO: 783116 - protein, 126 aa, Homo sapiens
PLFQVASRPMPVHTTSKRPCVDPELADRSATEMSGRGSVLASLSPLRKASLRSSSSLGPKERQTGAAADIPQPAVRHQGPEPLLVVKPTHSSREGGCREVPQAASKTHGLLQAVRPQAQDKRPAVT

SEQ ID NO: 783117 - protein, 76 aa, Homo sapiens
KHSLKICTKISGQGKSYHQEGTDLLAKCSDLAQETRCFSAPDIRLGQAVKCSKKCSNFDPAHLGQKLNGSTMILLS

SEQ ID NO: 783118 - protein, 55 aa, Homo sapiens
DWVMVGHSVDALNTTGLHTRMDLVLCELNLNQNTPDIQDLQLLPQYVPFNILCSN

SEQ ID NO: 783119 - protein, 116 aa, Homo sapiens
CTRSALPTPSRFLQGLACSTLSPSLSPGYPGHIPAGNMGPLKPRLLLHAPSQRWGSTALLSRELSPVFIHCSEGLAPAASSNCSWHLASSYAWHLPGNSLPGPQGKASSKFHQYSP

SEQ ID NO: 783120 - protein, 120 aa, Homo sapiens
SELLGRLKKRLWAELSGTNSPTCSPDRSPRLLQSGSYRSRRWGCYHAASHRTIALAQSTPGRGASYPGPLPTASHQSLISRAGVTRRGYCEEVWGGFSTFWPLDADQIIHRHPMVQVIVS

SEQ ID NO: 783121 - protein, 120 aa, Homo sapiens
PPLHSLRATRVDPLGPALPWGYGGSETSGSHRGAHISCRCVCCQEGLFKDSEVLQRLTPHGNSAPTNPAWQPLLRTLIQGRETPAKGGAEGSVEGHPWGLACCCPPLGRPAPPALLSGHC

SEQ ID NO: 783122 - protein, 99 aa, Homo sapiens
AIPWCLETGPMPAIHINGEQAGCFGLERCRHYPWWSFPSKWTCIKQLKNSGEMPQELGECEGEGGELEGAGHEGLWEETLAMAPLCWQQVAVSWPLVDC

SEQ ID NO: 783123 - protein, 78 aa, Homo sapiens
MMKVGRPSLVQLQDGAERQLRVRGPTQLPRPGSSSHEKQERLSRRRWPTRTRRCHAQGPDTHRASPCVQNAHRYIYRG

SEQ ID NO: 783124 - protein, 77 aa, Homo sapiens
MKPQSAGVDRHTTASPTCLDSCWLYHLRMGPSPLSLPCSAPSQLWGQSKSRSQDLLFLTGAVAMSQCQGLGCVKQDE

SEQ ID NO: 783125 - protein, 77 aa, Homo sapiens
PFCQYPYQFLLDYCNELQDDHTCSYPNFNGIPICHFDSSAQYTTFINKESSSKNPQVPPRFYKNGKKSHLAGLNATP

SEQ ID NO: 783126 - protein, 70 aa, Homo sapiens
VPWSCRFCSQQDDGQDRERLTYFQNLPESLTSLLVLLTTANNPDVMIPAYSKNRAYAIFFIVFTVIGECR

SEQ ID NO: 783127 - protein, 221 aa, Homo sapiens
  misc_feature (35)..(35): Xaa can be any naturally occurring amino acid
  misc_feature (62)..(62): Xaa can be any naturally occurring amino acid
  misc_feature (74)..(75): Xaa can be any naturally occurring amino acid
  misc_feature (77)..(77): Xaa can be any naturally occurring amino acid
  misc_feature (81)..(81): Xaa can be any naturally occurring amino acid
  misc_feature (94)..(94): Xaa can be any naturally occurring amino acid
  misc_feature (100)..(100): Xaa can be any naturally occurring amino acid
  misc_feature (118)..(119): Xaa can be any naturally occurring amino acid
  misc_feature (124)..(124): Xaa can be any naturally occurring amino acid
  misc_feature (127)..(129): Xaa can be any naturally occurring amino acid
  misc_feature (131)..(133): Xaa can be any naturally occurring amino acid
  misc_feature (136)..(138): Xaa can be any naturally occurring amino acid
  misc_feature (141)..(141): Xaa can be any naturally occurring amino acid
  misc_feature (143)..(143): Xaa can be any naturally occurring amino acid
VGCWMAEPQAESEPLLGGARGGGGDWPAGLTTYRXIQVGPGAAARWDLCIDQAVVFIEDAIXGYLFGWAHFQKXXWXLGYXVVLVVSLVDWTVXLSLVCXEPLRIRRLLRPFFLLQNXXMMKKXLKXXXWXXXEMXXXGLXLXIHLCLFTMFGMLLFAGGKQDDGQDRERLTYFQNLPESLTSLLVLLTTANNPDVMIPAYSKNRAYAIFFIVFTVIGECR

SEQ ID NO: 783128 - protein, 149 aa, Homo sapiens
FPDPVGRVLVLGCVSVVCARAPGGKDQATWREKEGPGAAYNPPKGTLCPRETDKKHCRSGLTSSSKYLFTWPPPTHSFSSASLSPTSLTPPTLPPWLWQREEDERESRCRCDGHHIDRCSDSGERRESGTEKKRKRGKYNRHCSTIKRE

SEQ ID NO: 783129 - protein, 50 aa, Homo sapiens
MSQAREQLDFQSRGMAEFKSIQETSPSRSPIFMAKTALVYFSNRITRSGY

SEQ ID NO: 783130 - protein, 143 aa, Homo sapiens
EAEPDSCTCPGTAVPQRLPGTSVRVTTKSLCGEFTRINCLSINFPLKPEKPQSFASSPGPGSSRYNWMLIVFVPKQTSMRSINNDQKPAGVLRVPLATSVRLHFSHRENSHRAFQDISGTETGFYTLLINNNHKPSSSTEYPG

SEQ ID NO: 783131 - protein, 120 aa, Homo sapiens
  misc_feature (116)..(116): Xaa can be any naturally occurring amino acid
RRASGCWGVRDDGESGARPSRGDTAFQELSPGKLTDIFKEASWTFCFLLLITGFDGVSLFIFQVAVSRDCATALQPGHTARLCLKNKIRTLELRTIVELRTIVELRTIVELSIVEXEDHR

SEQ ID NO: 783132 - protein, 72 aa, Homo sapiens
IQAFYLLLASFHPLSSLNLLHNPLLQPATCTSNLIIILDSVFFLTHYSVNHYDVLIFNISHISPYASISIAV

SEQ ID NO: 783133 - protein, 161 aa, Homo sapiens
VREGKLMFVRSEQRNEFWAPLLEKAYAKLHGSYEVMRGGHMNEAFVDFTGGVGEVLYLRQNSMGLFSALRHALAKESLVGATALSDRGEYRTEEGLVKGHAYSITGTHKVSVPHGWGGRPCPGITPTDDAAPGVPGLHQGAAAAAAEPMGLRGVDGGLERQ

SEQ ID NO: 783134 - protein, 118 aa, Homo sapiens
MRNLKASLENSLREVEARYTLQMKQLNGILLHLESELAQTWAEGQRQAQEYEALLNIKGKLEAEITTYRRLLEDGEDFNLGDALDSSNSMQTIQKTTTRRIVDGKVVSETNDTKVLRH

SEQ ID NO: 783135 - protein, 120 aa, Homo sapiens [sequence omitted]

SEQ ID NO: 783136 - protein, 88 aa, Homo sapiens
SLVHWTLLPSARLVPHLIFLSIVPSASKKKTSACQRPSFTFFSSRSTGAAILVHCKRLRSGSWTEIGWGRARLTLCAGLSSAPAHELD

SEQ ID NO: 783137 - protein, 120 aa, Homo sapiens
EIIPLHSSLGNRARLSPKKIKNKTASWVNLIPSKCGGYTGSQRSTHLSQETGLTSQPHHAVAPRFSFLVCEMRLTLTLPSSWRFVRIKSHESKGEGVMCYRNARCYSFLCLPLPCLHPCL

SEQ ID NO: 783138 - protein, 71 aa, Homo sapiens
AIERVPDRGFAGGWSFPTALTTERWNVALTSRLLLGMFCIPLPGSGQVASSKNEGQQLPKKKKREEEKDSL

SEQ ID NO: 783139 - protein, 61 aa, Homo sapiens
SIRISLSLIPLSLISLSLIPLSLISISFISAFSYFAILFFLEITSTTIPATTAIITTTITA

SEQ ID NO: 783140 - protein, 48 aa, Homo sapiens
FSLALESCRTVFNTNPSWHLVDIVLSTKPHSCCRRYLTLILLACVIHL

SEQ ID NO: 783141 - protein, 72 aa, Homo sapiens
PGSEASSGATTIRMKSERREEVMRMPPKEPTVGRRKLLASPWLTHETWVPLEPSQQLLTLLFPASRPGLGSL

SEQ ID NO: 783142 - protein, 71 aa, Homo sapiens
MNQPQEGSNGKESPRSAGLMNAVGTVHTYQPCLEFSMSGPVHPGPWTQSGLPRAALQVSLPTAQHRQGWDI

SEQ ID NO: 783143 - protein, 105 aa, Homo sapiens
TFIFKAGRQGRWGYRVCWCPVAAAVTNPQTGRFTAATSVPSQFWTPESKISVIEPTSPCGQGCGPLGKYPLLVSSASGGCQHFLADSRITAISASLCIAFSFLWV

SEQ ID NO: 783144 - protein, 101 aa, Homo sapiens
MGCGSNGNLILKAFAAIIFIFFVYPVPGKLSLVPARAARGDTKSFPRLGHLCASWWVRHVVGSPYGCLLAAPVLLGREGKSWTYQVKEPSWARITAIVGSL

SEQ ID NO: 783145 - protein, 225 aa, Homo sapiens
DERDSHCPYLLSSETTPTSGGRPLEVLEKPVHLPRPGHPGPSEPADQKLSAVGEKQTLSPKHPKPSTVKDCPTLCKQTDNRQTDKSPSQPAANTDRRAEGKKCTEALYAPAEGDKLEAGLSFVHSENRLKGAERPAAGVGKGFPEARGKGPGPQKPPTEADKPNGMKRSPSATGQSSFRSTGLPEASGASIDTSFSQGPGGIAEAFSPNNLAHWKGNPVREGPNP

SEQ ID NO: 783146 - protein, 122 aa, Homo sapiens
FHDIHGVLNSRCQCHFHDIHGVLNSRCGCHFHDIHSVLNSPCWCHFHDIHGVLNSRCQCHFHDIHGVLNSRCQCHFHDIHGVLNSRCGCHFHDIHGVLNSPCWCHFHDIHDVLSSPCRCHFA

SEQ ID NO: 783147 - protein, 83 aa, Homo sapiens
GSRPQSLVSGYSVELPMPLMHPWAHTCTLTHALVCTQTYVHTCMYTCTCIHMYTMHSCTNTRAHTPPSTWFLESIVLTSQGCT

SEQ ID NO: 783148 - protein, 57 aa, Homo sapiens
PPDSTSTWPKARRQPHPPIKAQEGNKHGPHGALETREALLPTGALPHSSVPHASTPQ

SEQ ID NO: 783149 - protein, 90 aa, Homo sapiens
PKLRLPIQPIWQKTEPKAASCWPHFRLWLLGPGVFGTGFVPCRPGRRAAEKSPCVVRDPSSSSTPCDPCCADLGENKGTRIVTQQVVWGC

SEQ ID NO: 783150 - protein, 123 aa, Homo sapiens
GELGGVYSGSISHKVTHSHWHMRAQRITLTHTGMLHLPQSNRHRRPHTKNLALTHRHLEAPGHTRTHRCGITHSGTCMWVQTHGTRAVTRSHAMKHTAQTQALPPSNAAPQAQLETHSTHTQS

SEQ ID NO: 783151 - protein, 131 aa, Homo sapiens
AGSMPFAPRSTVVFAPLSRDGGCRLCQRQAPPPYGAAHGPGCLPTCRGLSYRGILMITQGWAPTPYQEPETKEDLGRELGSPTGDVRERRREGLSSLPLCSEPPEPGIQSSGRLLQTSPVLMGVPKPSSWG

SEQ ID NO: 783152 - protein, 30 aa, Homo sapiens
MLRARINDIAWVIDIMSHFALKLIAMEGRV

SEQ ID NO: 783153 - protein, 122 aa, Homo sapiens
PVLQDMCSFPVAVLFMGSELLVVSQLGLAADHRHLLPHGAHWGSCLVPHSLSFFCGWFRHLNVLLFFTVLSSPAPEGMLSCSVQVACVSAVPHSHPFQQPKVSLGFLVSATFPSCLSWMMFA

SEQ ID NO: 783154 - protein, 67 aa, Homo sapiens
GFEVLRVVFRVVFLEALIPDLVEKDGMNVFLGGCLDKGVQPLGDKAEYKGSHSVTQTGVQWRNLSSL

SEQ ID NO: 783155 - protein, 50 aa, Homo sapiens
MFLLLWPPRCNKLAVYLDLCLIFLLLRFSLRIRFFLHLALMAPRFQKNGA

SEQ ID NO: 783156 - protein, 112 aa, Homo sapiens
SLPPPQISRSHSVGEDAQPHSPGKASSSSGEAGQEPASCMSDPRPCPEPGLSLPGWNMASPPRTPCPEARPQFPGLGFLAAPQARGCTSLPRQHSALVIGSEISRQAEKQHH

SEQ ID NO: 783157 - protein, 89 aa, Homo sapiens
FHDPRMDLNLQLEKPTTLEELIPYSAGSSIPDRWKLAAIFLVSSSLHVLLTNTPYTRPPVLKATTCFTSPHLCQSDFLCSLLDLQGPPG

SEQ ID NO: 783158 - protein, 117 aa, Homo sapiens
NSLGSGSAQGKESLEGGLLHSPPSPQNAQQLQRVSLRDKTAIIPIPNSSPQALRFCLKEESAHKQITPNLFPKELNSFATKHREVQTCLGVVAHDVIPALWEAEAGRSFEVRSLRPA

SEQ ID NO: 783159 - protein, 64 aa, Homo sapiens
MVLIASGSVARFNFGKRAHFLKICLHRLGQKHNVPLCALDGPWVLPGLPYLLPDGSLPSPAPAS

SEQ ID NO: 783160 - protein, 548 aa, Homo sapiens
MAEPQAESEPLLGGARGGGGDWPAGLTTYRSIQVGPGAAARWDLCIDQAVVFIEDAIQYRSINHRVDASSMWLYRRYYSNVCQRTLSFTIFLILFLAFIETPSSLTSTADVRYRAAPWEPPCGLTESVEVLCLLVFAADLSVKGYLFGWAHFQKNLWLLGYLVVLVVSLVDWTVSLSLVCHEPLRIRRLLRPFFLLQNSSMMKKTLKCIRWSLPEMASVGLLLAIHLCLFTMFGMLLFAGGKVMIPAYSKNRAYAIFFIVFTVIGSLFLMNLLTAIIYSQFRGYLMKSLQTSLFRRRLGTRAAFEVLSSMVGEGGAFPQAVGVKPQNLLQVLQKVQLDSSHKQAMMEKVRSYGSVLLSAEEFQKLFNELDRSVVKEHPPRPEYQSPFLQSAQFLFGHYYFDYLGNLIALANLVSICVFLVLDADVLPAERDDFILGAALVTLWNLMVVNNWQVFLDAYRRYSGPWSKIYFVLWWLVSSVIWVNLFLALILENFLHKWDPRSHLQPLAGTPEATYQMTVELLFRDILEEPGEDELTERLSQHPHLWLCR

SEQ ID NO: 783161 - protein, 718 aa, Homo sapiens
MAEPQAESEPLLGGARGGGGDWPAGLTTYRSIQVGPGAAARWDLCIDQAVVFIEDAIQYRSINHRVDASSMWLYRRYYSNVCQRTLSFTIFLILFLAFIETPSSLTSTADVRYRAAPWEPPCGLTESVEVLCLLVFAADLSVKGYLFGWAHFQKNLWLLGYLVVLVVSLVDWTVSLSLVCHEPLRIRRLLRPFFLLQNSSMMKKTLKCIRWSLPEMASVGLLLAIHLCLFTMFGMLLFAGGKVMIPAYSKNRAYAIFFIVFTVIGSLFLMNLLTAIIYSQFRGYLMKSLQTSLFRRRLGTRAAFEVLSSMVGEGGAFPQAVGVKPQNLLQVLQKVQLDSSHKQAMMEKVRSYGSVLLSAEEFQKLFNELDRSVVKEHPPRPEYQSPFLQSAQFLFGHYYFDYLGNLIALANLVSICVFLVLDADVLPAERDDFILGILNCVFIVYYLLEMLLKVFALGLRGYLSYPSNVFDGLLTVVLLVLEISTLAVYRLPHPGWRPEMVGLLSLWDMTRMLNMLIVFRFLRIIPSMKPMAVVASTVLGLVQNMRAFGGILVVVYYVFAIIGINLFRGVIVALPGNSSLAPANGSAPCGSFEQLEYWANNFDDFAAALVTLWNLMVVNNWQVFLDAYRRYSGPWSKIYFVLWWLVSSVIWVNLFLALILENFLHKWDPRSHLQPLAGTPEATYQMTVELLFRDILEEPGEDELTERLSQHPHLWLCR

SEQ ID NO: 783162 - protein, 642 aa, Homo sapiens
MAEPQAESEPLLGGARGGGGDWPAGLTTYRSIQVGPGAAARWDLCIDQAVVFIEDAIQYRSINHRVDASSMWLYRRYYSNVCQRTLSFTIFLILFLAFIETPSSLTSTADVRYRAAPWEPPCGLTESVEVLCLLVFAADLSVKGYLFGWAHFQKNLWLLGYLVVLVVSLVDWTVSLSLVCHEPLRIRRLLRPFFLLQNSSMMKKTLKCIRWSLPEMASVGLLLAIHLCLFTMFGMLLFAGGKQDDGQDRERLTYFQNLPESLTSLLVLLTTANNPDVMIPAYSKNRAYAIFFIVFTVIGSLFLMNLLTAIIYSQFRGYLMKSLQTSLFRRRLGTRAAFEVLSSMVGEGGAFPQAVGVKPQNLLQVLQKVQLDSSHKQAMMEKVRSYGSVLLSAEEFQKLFNELDRSVVKEHPPRPEYQSPFLQSAQFLFGHYYFDYLGNLIALANLVSICVFLVLDADVLPAERDDFILGILNCVFIVYYLLEMLLKVFALGLRGYLSYPSNVFDGLLTVVLLPMAVVASTVLGLVQNMRAFGGILVVVYYVFAIIGINLFRGVIVALPGNSSLAPANGSAPCGSFEQLEYWANNFDDFAAALVTLWNLMVVNNWQVFLDAYRRYSGPTSFTSGTPAATCSPLLGPQRPPTR

SEQ ID NO: 783163 - protein, 303 aa, Homo sapiens
MAEPQAESEPLLGGARGGGGDWPAGLTTYRSIQVGPGAAARWDLCIDQAVVFIEDAIQYRSINHRVDASSMWLYRRYYSNVCQRTLSFTIFLILFLAFIETPSSLTSTADVRYRAAPWEPPCGLTESVEVLCLLVFAADLSVKGYLFGWAHFQKNLWLLGYLVVLVVSLVDWTVSLSLVCHEPLRIRRLLRPFFLLQNSSMMKKTLKCIRWSLPEMASVGLLLAIHLCLFTMFGMLLFAGGKQDDGQDRERLTYFQNLPESLTSLLVLLTTANNPDVMIPAYSKNRAYAIFFIVFTVIGHVSI

SEQ ID NO: 783164 - protein, 31 aa, Homo sapiens
MFLSPFQDFELHHLLDPVFGFYRDPILTHQH

SEQ ID NO: 783165 - protein, 174 aa, Homo sapiens
MAEPQAESEPLLGGARGGGGDWPAGLTTYRSIQVGPGAAARWDLCIDQAVVFIEDAIQGYLFGWAHFQKNLWLLGYLVVLVVSLVDWTVSLSLVCHEPLRIRRLLRPFFLLQNSSMMKKTLKCIRWSLPEMASVGLLLAIHLCLFTMFGMLLFAGGKVGHPWSGSGNGAALCCD

SEQ ID NO: 783166 - protein, 752 aa, Homo sapiens [sequence omitted]

SEQ ID NO: 783167 - protein, 667 aa, Homo sapiens [sequence omitted]

SEQ ID NO: 783168 - protein, 552 aa, Homo sapiens
MAEPQAESEPLLGGARGGGGDWPAGLTTYRSIQVGPGAAARWDLCIDQAVVFIEDAIQYRSINHRVDASSMWLYRRYYSNVCQRTLSFTIFLILFLAFIETPSSLTSTADVRYRAAPWEPPCGLTESVEVLCLLVFAADLSVKGYLFGWAHFQKNLWLLGYLVVLVVSLVDWTVSLSLVCHEPLRIRRLLRPFFLLQNSSMMKKTLKCIRWSLPEMASVGLLLAIHLCLFTMFGMLLFAGGKQDDGQDRERLTYFQNLPESLTSLLVLLTTANNPDVMIPAYSKNRAYAIFFIVFTVIGSLFLMNLLTAIIYSQFRGYLMKSLQTSLFRRRLGTRAAFEVLSSMVGEGGAFPQAVGVKPQNLLQVLQKVQLDSSHKQAMMEKVRSYGSVLLSAEEFQKLFNELDRSVVKEHPPRPEYQSPFLQSAQFLFGHYYFDYLGNLIALANLVSICVFLVLDADVLPAERDDFILGILNCVFIVYYLLEMLLKVFALGLRGYLSYPSNVFDGLLTVVLLLKEVLTSGTNPWGPGPSSDFSPKAPFGENVLEMSFIIIP

SEQ ID NO: 783169 - protein, 38 aa, Homo sapiens
MWATGSLPDFPAAAKFLGFRQRCIPRSLCLSECPLEPP

SEQ ID NO: 783170 - protein, 184 aa, Homo sapiens
MAHEQEEFVKEKATPGAAQESSNDQFQTLEEQLGYNLREVCPVQEIDGKAGTWNVELAPKREISQEVKSLIQVLGKQNGNITQIPEYGDTCDREGRLEKQRVSSSVERPYICSECGKSFTQNSILIEHQRTHTGEKPYECDECGRAFSQRSGLFQHQRLHTGEKRYQCSVCGKAFSQNAGLFHH

SEQ ID NO: 783171 - protein, 71 aa, Homo sapiens
RLPGREVVVKVRMLHFHLKDPNLKINKEQYDKQNIYRYGEYITKRSAKRIEQEIGRGGLEGHCISQRLENP

SEQ ID NO: 783172 - protein, 71 aa, Homo sapiens
WDSSLWSTAGFLSLSAVDTWGQVLLVMFSSIPGLYPLMALAATTLVTTPDEDHMHIHIENPWQEGGKGVEA

SEQ ID NO: 783173 - protein, 127 aa, Homo sapiens
NPNIQRQPSRQSERPRPQPVVLRGPSAEMQGYMMRDLNSSMDMARLPSPTKEKPPPPPPGGGKDLFYVSRPPLARSSPAYCTSSSDITEPEQKMLSVNKSVSMLDLQGDGPGGRLNSSSVSNLAAVG

SEQ ID NO: 783174 - protein, 138 aa, Homo sapiens
MTRKTEDKLTRPHQQATEQTTTSKENTRREGATETVREQQETYQSQEEKDNRKKNMKARTYKTRKKETSQIEQATKEERNRETRDNIEDNNKRQTTRKKHSTRETKLPTQTTQQRKQSKNDHYVDDQEQNKREDQQQT

SEQ ID NO: 783175 - protein, 55 aa, Homo sapiens
MRHLDKPPDHNLAPSSVLTQPVVPAMLKWLQEFPLQPGVQGLTWSQLSAHMAWGK

SEQ ID NO: 783176 - protein, 130 aa, Homo sapiens
LMRLSHVNIPCHLKSWRHPPGEGRRALTSSPLFSSRDLARPGVGRLGASRAGDREPLGRGGAAGRGRGGGAGPQPPMPGARAGDPGSPARGRGTENEPSVAWRRIPPSGQNFPHLAIRKGSQHSHPERPR

SEQ ID NO: 783177 - protein, 141 aa, Homo sapiens
AQCASSACSREKERKLRRGSVGFSTSDNHVFPDRRPEPCSFAIRRGLQRASSSIWAPLPRKSPAIPFRTGSLRGEFSSVDSDLLRLTSLGNPASRGTSAAGHTGFTPAPPHQQAHSQVVRLRMDHELSKRKKVEILNYAAI

SEQ ID NO: 783178 - protein, 120 aa, Homo sapiens
AQCASSACSREKERKLRRGSVGFSTSDNHVFPDRRPEPCSFAIRRGLQRASSSIWAPLPRKSPAIPFRTGSLRGEFSSVDSDLLRLTSLGNPASRGTSAAGHTGFTPAPPHQQAHSQRRK

SEQ ID NO: 783179 - protein, 120 aa, Homo sapiens
AQCASSACSREKERKLRRGSVGFSTSDNHVFPDRRPEPCSFAIRRGLQRASSSIWAPLPRKSPAIPFRTGSLRGEFSSVDSDLLRLTSLGNPASRGTSAAGHTGFTPAPPHQQAHSQIKH

SEQ ID NO: 783180 - protein, 120 aa, Homo sapiens; identical to SEQ ID NO: 783179

SEQ ID NO: 783181 - protein, 80 aa, Homo sapiens
AEQEIPGENPSARTPLNTREDSLPSASPPGLLHFPQLPKGSRLPRTRDHVCSVGPTATIRTQLRAQRCSEDRQWICTSGS

SEQ ID NO: 783182 - protein, 129 aa, Homo sapiens [sequence omitted]

SEQ ID NO: 783183 - protein, 112 aa, Homo sapiens
RPLFSDHLIMSGRGKGGKGLGKGGAKRHRKVLRDNIQGITKPAIRRLARRGGVKRISGLIYEETRGVLKVFLENVIRDAVTYTEHAKRKTVTAMDVVYALKRQGRTLYGFGG

SEQ ID NO: 783184 - protein, 106 aa, Homo sapiens
QFSPTQLPAHLSFRPIPFCPSMWGWAGSSLSPDMHSSDQSLRPLCPPSTRDPAGTMGKGIMEGVPCPLSRRPAPWLLPAGGHLCCGLSPPQSCGCRAGSPGAPAEL

SEQ ID NO: 783185 - protein, 43 aa, Homo sapiens
TKEDSHVSPAPHCTYDSTSKEFILNFPDNLSSVVSVAMEVGKR

SEQ ID NO: 783186 - protein, 59 aa, Homo sapiens
MLRIPILPFLSLPWSSSSGSSRGFERTGSPALPLRFTPLCWRSQSHCPIRAPECKCEAC

SEQ ID NO: 783187 - protein, 61 aa, Homo sapiens
TFKVKQCKETFHAGRGGQPHCLSAFVEFHFTVGFSGSTPLVPRGQSPGLLLCGMLWPVWGS

SEQ ID NO: 783188 - protein, 145 aa, Homo sapiens
TLYPPLEPTQEDGLRPRVQSPIDLHSQTWARCHGSLLLSPPFGRPRRLENLRLGVRDPPGPRGETPSPLKIPKSAGRVGTRLPSPLFGKPRKENHLNLGGGNCSELKSCPCTLASASEPHSVSPKKKKKARNVKRCFNRTDYRIQ

SEQ ID NO: 783189 - protein, 77 aa, Homo sapiens
VRDGVWCRGAWVKGKAKAVQTGLLAAALLPGPNRHRDWEPPSRFLVALLPSPKWLNFVWIPCWRAGPGALLAVTAPQ

SEQ ID NO: 783190 - protein, 82 aa, Homo sapiens
VSYKVLRNETVLEFMTALCQRTGLSCFTQTCEKQLIGLIVLTRYNNRTYSIDDIDWSVKPTHTFQKRDGTEITYVDYYKQVG

SEQ ID NO: 783191 - protein, 35 aa, Homo sapiens
MKKSPGAEDLEQCKKPHTSKTGSWDEIHSSTEEAN

SEQ ID NO: 783192 - protein, 142 aa, Homo sapiens
MPSGGLGIAQPSSPPLAPQHSSQDMLHSTCLCHYSWHPAVCATCRSEVWPAQPFITNTNMNCLIPREFSHHWSQAMRATSGRDHYVSQCGSRTRGLSQVGCTQPGGDRAEKARSGGTRVGEPATHGNRGESRGGRSTKEQKI

SEQ ID NO: 783193 - protein, 112 aa, Homo sapiens
LPRLECSGTILAHCNLCLLGWINSPASASRVAGITGAHHHAWLIFVFLVETGLRHVGQAGLEPLTSGDPPNLASQRAGITDVSHRALLEEIFVVWISDQISHNIPLSQTLSQ

SEQ ID NO: 783194 - protein, 72 aa, Homo sapiens
IREVVERGERGTWTERRIHLELRNRTRQLFENLSVDIANKIRNIKRLTLEHRKPVTKFLNNNRQLRKENDHG

SEQ ID NO: 783195 - protein, 120 aa, Homo sapiens
RPSPFGCPSPFVCPSPFVCPSPFVCPSPFVCPSPFILFLKTTRTTKISINVENINERQIYNLMTSTNNYFNMLDSSPLFLMRILMLGSKHFNYSSFEEVEVQRNPDKFSSFFYVTPHLLF

SEQ ID NO: 783196 - protein, 37 aa, Homo sapiens
MGGHSPLQERRQMVNLIYAACKHGNGTLPVKQVGDID

SEQ ID NO: 783197 - protein, 141 aa, Homo sapiens
ASELYKNLKKSLPTTKKLRLNCRKKRQRLMSFKQSYKLLSLSLVPCQLIVIFLCLPLKKVELATQHFLLRLHCLLVEGCRSTPPPHSSTSRNADAIQWSCASTTPLGFLWRTKFSSSTNPAIGLKPTERIKPEISMRRLNG

SEQ ID NO: 783198 - protein, 128 aa, Homo sapiens
MSPKLTPFCCSTGLQVQVTACCVHSRELHFLEELASRGWMSDWVLFCPEKNGRCFLRNSLGSGEVSLGFEPPTSQHGDFCCIPAAERGQPQPPAPPLTLSDPRKPPRDPQVTSPDLSCLCPPPHCVPL

SEQ ID NO: 783199 - protein, 66 aa, Homo sapiens
SSSPPAIRPPPPPPPFLQTRNEVMFEAMRVILGPSGSQENASLGPCCHYAAEPTLESSSPRLIIMG

SEQ ID NO: 783200 - protein, 104 aa, Homo sapiens
HGDIACSPAGLVWRSCCGLVSTDVAAAVLLNRRLLRENALQGAEQLGEIIRTLNGELCPLLLWDPLASPGLSLGDWLFTTSKRVIPRNHSSSDCFPDLEGQGEA

SEQ ID NO: 783201 - protein, 94 aa, Homo sapiens
GDKQYKCDVCGKLFNHEQYLACHDRCHTVEKPYKCKECGKTFSQESSLTCHRRLHTGVKRYNCNECGKIFGQNSALLIDKAIDTGENPYKCNEC

SEQ ID NO: 783202 - protein, 122 aa, Homo sapiens
SLWYPGWSAVAQVIAPCSLDLFPGSKDPPTSASKGVGTTDVHHHTQLVKKKIVEMGSCSVAQAGLKILGSSNPSNSAFQGAGITGVSHYACFLFVSFLLVELYLDKFLKEDKTEVFPHSLKS

SEQ ID NO: 783203 - protein, 30 aa, Homo sapiens
MREAQVGNEAVQGLRPRPPVPYCSILPVFG

SEQ ID NO: 783204 - protein, 107 aa, Homo sapiens
PPGPRGFDDQRAPPREPHLFPAGLERPEREAAEHGEPTIRDAWPNPLPFMGAGRNGVAADVPSLIPKPHKSQNTHANSHQRISQTQKLKTTHENITRSPTKTYSSKK

SEQ ID NO: 783205 - protein, 108 aa, Homo sapiens
PELADRSATEMSGRGSVLASLSPLRKASLRSSSSLGPKERQTGAAADIPQPAVRHQGPEPLLVVKPTHSSREGGCREVPQAASKTHGLLQAVRPQAQDKRPAVTWQPG

SEQ ID NO: 783206 - protein, 112 aa, Homo sapiens
RTYMNWTGRGWTCVESVIASTDITVQKALSFVLLAVFLIQQGILISGSSMRVNDSGIAGITLDKEMIIVRSKEVQRQEGNFSFFLRDPLQEHINKPNVKNHSLKADFKVTTL

SEQ ID NO: 783207 - protein, 102 aa, Homo sapiens
TQDRRQGEKHTRKLRLRQCHRHTKKQQSQDRSERKNHTKRQKRKHHEKQTKEWKKGKDYRVSKRGQQNKRIQRKREKRTGGNQTEADERQRWKINKGLRSRM

SEQ ID NO: 783208 - protein, 109 aa, Homo sapiens
SAASTRPLQQRPPGPPRALPRLHGSPPPGPSCVDKGYPSQKSSHLDSGHPPGTPWEPHPRGPRPQPASTRVPRPPASPPTSNAKQRHVSELAGGPEAAGPALSGRAQRP

SEQ ID NO: 783209 - protein, 145 aa, Homo sapiens
DPCQGAEKRCTHHGRHDHTHSPWPLHTNTNPNWQEQRDQETVPRVRNPMCSDSSVSKISPPTGCQESPPRGPLHRDSAPLLGLSLSWKPAHLEAPCPPKWNTGTGSRPCPHHLLQAGPHHATETGRPGLRDGAFLTSLVTPSLTR

SEQ ID NO: 783210 - protein, 308 aa, Homo sapiens
HSCSGSIFLSQWEKFFYILETFNLIRHLLLVLFLVFLDYAVFWVLDLARHQLQGEIVARSPVLVSLTVEGTGYAGNIYRDLVSAFDVLQQGNISILSRRCLLRPSEPDSTGYIVIGAPAYGPFVSHFWLHQAYCLGCGQPQDEGDMENTVSCSTPGCQGLYCLTCFRLLDNTCSVCASPLSYQGDLDLELDSSDEEGPQLWLAAAQRKDPEQAWLLQQQLQEVLGRSLSMESTSESSDLDEEKGPQQRKHGQQPLPEAHQPVSILTSPEPHRPPETSSATKGAPTPASEPSVPLSPPSLPDPSHPPPK

SEQ ID NO: 783211 - protein, 118 aa, Homo sapiens
TLNPTSGSLLKAVDGGPSHFWASATAAVGAQRSEVRCNQRSQTSRTRSCRKRNASSSSHSSTEGLPELKRRRVSASSRCQLALSSSKTVSEDGPQAVSSGHTRCEKAADTAPGQTLTP

SEQ ID NO: 783212 - protein, 106 aa, Homo sapiens
KREEKGRGGTKRPEWQSCSDSSGLRPALGKPGWGDFKVNYTTCFQDAGMKVLGRHNYLRRHSSRAVEEPRLLSVGILCPRWAFLLFVFEMESCSVTQAGVQWRNLS

SEQ ID NO: 783213 - protein, 42 aa, Homo sapiens
MWRGRQHQWATDLTLSRTDALDGCYVAFSEVTGMKDHWALDE

SEQ ID NO: 783214 - protein, 98 aa, Homo sapiens
  misc_feature (84)..(84): Xaa can be any naturally occurring amino acid
ECSGEWYSLYGKQWKMGFHYVGQAGLERLTSGDPFAFASQSAGMTDMSHRTRAHPLILRWLIRQSSPAVDECLHLKSSWDFIDXLMNVQVPGVKVPRL

SEQ ID NO: 783215 - protein, 106 aa, Homo sapiens
YSFLYFPNIYEVFTLCQTCVRKDTDKRSNPYPQGAAYMIGKAKTERKPSCTLYKVLFLSAVSVLFKSDSPLDPMPSWVLAKARKASVPLVYAGLKNHRSSSHILQP

SEQ ID NO: 783216 - protein, 37 aa, Homo sapiens
KVLGAGKQIRWFQAVRMDVLPSASEGGGVAQVPAVPF

SEQ ID NO: 783217 - protein, 79 aa, Homo sapiens
QSCPTGCRWHLGLSAADNNMQTPPSPLLELENKQTTHSLPDSGSNICLRKGRGGGTQKLLGGKGVGLPAVPGPAPPHPT

SEQ ID NO: 783218 - protein, 106 aa, Homo sapiens
APEEWKNEIGKKASSQRGWRGLLEARVWPRGVELLCVSRNPLPPGLVRTCLRGPSGSSSEVDRKGQAHCLRTPPWGVRATSALEKSPSIPLPVLRPLPYHQTSSEA

SEQ ID NO: 783219 - protein, 110 aa, Homo sapiens
MIFQTRRPSRKAQRVPCPQTQLLGRCPVTSSLLYRMIPPRSLGRCAPGTRDFLSVVIRGEMDPLIGSFLMERRARVSLRSAADQGGPACPGAPGAVLGVRLKGQTLMAYG

SEQ ID NO: 783220 - protein, 108 aa, Homo sapiens
IHTPLTVTLETLALAHPSCASPCSFFPVIPALFSLSLLRSLPWWLPTDVLLASAVLPMPPIPSKQADLLGAVALARPDMDSHSVCLSRHAFSLESSLLGMVCFCSVLL

SEQ ID NO: 783221 - protein, 118 aa, Homo sapiens
EPSGSRGASPQGAGERALLAEERKDSSRAFVEQKEGQWAGMHRLASGAVRPVTSRRARHHLWCSSLCPTSWNSAGNMVHTQEIFGQLQWLTPVIPALWEAEVGGSLEPRSSRPAWAIW

SEQ ID NO: 783222 - protein, 41 aa, Homo sapiens
MTGIVPVIGGGRLKSQSRPGEGVICLPFKPHDTATNTRGAK

SEQ ID NO: 783223 - protein, 80 aa, Homo sapiens
QQLLLMKRKGGPVTWGYEPTNLTTCLLLRVTYDLSGSRRGATIPCGQGLPLPSVSCMPLSGPWPCLPLTALPFDVCTSSH

SEQ ID NO: 783224 - protein, 65 aa, Homo sapiens
ICSSQTAYISNDAGSAHRACSSRSAFGSNKANSSTDGHSSKNSCESTSVGSSSGTHNSKNSPGSE

SEQ ID NO: 783225 - protein, 67 aa, Homo sapiens
AQQQPLNPDPAGENLIDTDARTRGIAWETKPGVDAETQPRERRNSFGVSPFLGRPGKLLRFTCASSR

SEQ ID NO: 783226 - protein, 64 aa, Homo sapiens
SGSRPHVFLHSAAAAFLLSKTTRWLKSNIFLLEGKGHLLTLALLSTVDTWLLFPASLHVSRSPN

SEQ ID NO: 783227 - protein, 38 aa, Homo sapiens
MPVAKLGPSLPGEMGELVIPRESGRQNYMFPDFTLASE

SEQ ID NO: 783228 - protein, 86 aa, Homo sapiens
PSSVRTSGHVLVTTYVLLCSFYQVCWPCPSFPGSERCSRHLRSFSGCGSTALFLVAQCPVLPLRGGALFLVAQCPVLPLRGGALFL

SEQ ID NO: 783229 - protein, 91 aa, Homo sapiens
MELPAGPKSPETSIRLFLSGRVAFKGGLRTQGPLHFPGPEPQCGNHILQTHSAPQIPIQVRRQKVTAFQAYVDPASVFLVSPASEVWRSMF

SEQ ID NO: 783230 - protein, 134 aa, Homo sapiens
AEVVRGLAVLQPLQQPQEAAHLPPQVRENTHTASERGNASSSQKEKVLPEAGAGEDSPGRNMDTALEELQLPPNAKGPVKQISPRSPQAAETVGRPAGPAGLRRPPDKQPSDHSYALLDLDSLKKKTLPHSEGK

SEQ ID NO: 783231 - protein, 37 aa, Homo sapiens
LQKHLKEWSINSERRLTDCWLLSASSAVFKASYLLIV

SEQ ID NO: 783232 - protein, 131 aa, Homo sapiens
MQPIPSFSGSTWAEDRCRGAQRRALTSQETQFGVAIVTHSPGVCFDLPLPPYYFFCYLVSPWYLRILQLPSGLTDGRIKEKWHRFHLKSYKHFTRWYSLGRAFVKQMPAHCFTLLISTSAKHFSRKADPEQ

SEQ ID NO: 783233 - protein, 108 aa, Homo sapiens
WEKRHVNSIPILFLDGLRFVLIHAGQSGRTMKRWTSEFERNWSYPREVRPPPTCNSLASWIPKQRQSLALSLGLEYSDTITVHCSLDLPATQEAEAEESLEPRRQRLQ

SEQ ID NO: 783234 - protein, 80 aa, Homo sapiens
DLVNVTLHVTSQGKRDFAEVIKLRILNYRDYPGLPVWAWCNHKGPLEREAGRGVKGDMMTEQRAERDLKILCCYFKNGGG

SEQ ID NO: 783235 - protein, 118 aa, Homo sapiens
VRPCPPNFKNQHFIHLAAQDKSSGKPCQIHLLNTPQLASSRHCHCHDLSRPHPIHATWTTEAASSLAGFHSAGMQLIPCGMLITSHSPVLRSQPLAAASEALCKLQSSGREFSSSRRP

SEQ ID NO: 783236 - protein, 108 aa, Homo sapiens
VFPNFPGRLGGALSVGRKWGSEELGVHSGSHCKLGAELGWETLRQMLAPGHLQAVAYDSCCLTDHTAEHSCPGLQQGLGTQSPRERVLPAQPREGFSGEVSLMLGLSG

SEQ ID NO: 783237 - protein, 33 aa, Homo sapiens
MCVDVKVRGIDDLKISCGSENEEKYLDTECEEQ

SEQ ID NO: 783238 - protein, 98 aa, Homo sapiens
SHECSQEMVPCMHRSSQTSIHHIKPGICVRRHAFILQAVYKTALAFVFCLLQSLKVSQKRVTGNFFIPISLLASHHCHNDCQFPGLNLESQKQLFLYS

SEQ ID NO: 783239 - protein, 76 aa, Homo sapiens
NSLGVHGPKRETDSAKNQKYPHRSKQASDGKEENFPFKVWTFLKDSPLSLYKPHAPLKEHNQGPMNLEQSCQLRVN

SEQ ID NO: 783240 - protein, 97 aa, Homo sapiens
RGQALEGGALVLLSVFTSERGLGAGPVDGQQLVGTQPQPGGRGPRTLPGSFRGVPLPEMEAQGGKETPQVAGAPGACGVPDHSEGGEFISSVSTQQG

SEQ ID NO: 783241 - protein, 112 aa, Homo sapiens [sequence omitted]

SEQ ID NO: 783242 - protein, 62 aa, Homo sapiens
MDSLEWPGAPGKQRRSYLAAHFKNIEILLELVKGHFLSLECADLNSPGLPSHSFTHKHLPSE

SEQ ID NO: 783243 - protein, 55 aa, Homo sapiens
ASQPTVTTENSEDDKEEEDVPQTVKSPQSPAKNGSKPVHSNQHPQSPAVPPTYPS

SEQ ID NO: 783244 - protein, 52 aa, Homo sapiens
MPGSPLSYSAHVVYLSLSEPWSDYGTQTLPVRTCECALDTETDSEDGEPSQD

SEQ ID NO: 783245 - protein, 79 aa, Homo sapiens
KGPGLYEPRGKIGSSEPGLKHLLPGAVIVIPAAPCGLQHGPDFSEPSALFFSESPTLQGTGSGGQQTGCICSMSHTFHG

SEQ ID NO: 783246 - protein, 36 aa, Homo sapiens
MKCQNVRHIRRAQDSSSIAPLTQHSIFGTRGTVVPL

SEQ ID NO: 783247 - protein, 102 aa, Homo sapiens
PSPLMGDLGTVAGMWEAQLSDAGSEEQSWLAWGGGVTAVSGMRVRPHTATYWICDSRSRHFLFPDLSFLVEMGSILLRISELVKGEPEMHASQEPAQSPGIS

SEQ ID NO: 783248 - protein, 126 aa, Homo sapiens
MQGGQAGQVPTAPHEGLVSPDEVSTRATGTVLVALQQGLRPGHAEDSGVPRLALFDVREPQHWQVPLPFPRARNQSKADSSFHRWHPCLVSCAGCHLTSVRFRPACHLLQRPGAPLRCWCFTFGQF

SEQ ID NO: 783249 - protein, 74 aa, Homo sapiens
PRGHPLCPGATPSGSDSVQLTLPSLRVLLPPAARAPAAIGAHERADQAQVAASPHPLFPGPTPLPGDDREAQRP

SEQ ID NO: 783250 - protein, 42 aa, Homo sapiens
EEQFRSVLEGPSICVCLMFPPGTGMLQKQCCVLSVSHQETLG

SEQ ID NO: 783251 - protein, 155 aa, Homo sapiens
IINMVLELPIQNEPPGQAAAEEKHTCVVQYILFPPHSTSTKDSFSTDDDNDVEVEALEGDSELNLVTEVWVEPQYGRVGPGPGIWKHLQDLTYSEIPQALHPRDAACIGSMLSFEYLIQLCQSKEWGPLPPEPRSLMDWIREETPASMRSLSILT

SEQ ID NO: 783252 - protein, 70 aa, Homo sapiens
YVLDSVTIGMVVCACSSSSRGYGRRICLYPGCEGCSELRSCHCTPGWLTERDSASGHGGAHACNPSYSGG

SEQ ID NO: 783253 - protein, 68 aa, Homo sapiens
FDGRIQYWVKISDLSQEHRNIGCPDKHFLDYGCGQELGKTTHTHTHTHTHTHTRILFSHKGRMKSCLL

SEQ ID NO: 783254 - protein, 109 aa, Homo sapiens
MPVNTSRAPKAGCARRIRPSNLRGEQSPANTVTCSSGLQNCENINVCCFKPPNVWFFVMAALALLSLNHHHSALPLNIPSKSHLKQPCLNRACLGNVEKRLSPFYEFAA

SEQ ID NO: 783255 - protein, 45 aa, Homo sapiens
VFDDDVIQVGSLQCEASKVQSPPPTAQSLALWGWKPDITHSSRNT

SEQ ID NO: 783256 - protein, 181 aa, Homo sapiens
MAQIFPVQTVAVAAAALARPCGALEGAFLSDQSWNLACGSKALSQSTLQQVWAALYSSPGCRTPVSLKGTHAYSPDHRQKKHRKLSELENLTKCLTVMRGEMRERGVTEVSPTYSSDPESSDYGHVQSPPSCTTPHQMYVDHYRSLEEDQERIVHTKKPGKGTAMLSGRLGASKNELVNPG

SEQ ID NO: 783257 - protein, 68 aa, Homo sapiens
RARALQLPYPDVSPPSSAVGAVGPGRVVFKERVQERPELLGHSGTSVGPGAARNSAGGTLGVPGSGKE

SEQ ID NO: 783258 - protein, 105 aa, Homo sapiens
IRRSHTRRRRNAVLTHKGSMRYSHTGEVRMRYSHTGRSRNAVLTHGRSKNAVLTHRRSKNAVLTHKGSMRYSHTGEVRMRYSHTGEVGMRYSRTREVCGTHTQEK

SEQ ID NO: 783259 - protein, 76 aa, Homo sapiens
MWDSVQNPISLEHGNTWQTSHPGRTGALRCLLPCFRRRHRPPAAHLWMGSRVGRPPTGRTLCPMALLRPARRPLTA

SEQ ID NO: 783260 - protein, 83 aa, Homo sapiens
LYQVLGTEPNRQECSHFAGKEKCGPDHGGSPQQRSSASPEGGRKEQCALRGSLLPSQHLEKKGSGMRRGFFSQSHKAEGILPV

SEQ ID NO: 783261 - protein, 148 aa, Homo sapiens
KNTIKQKTGESDYIKSNDFSSTHFKDPSQSAAYIFTLSKVSSVHFLWQGLGKRLYGAVSGHEDGKKPLRQPKKQAQERDRDDEASSRKQNRPEPQGAESTGRREAQPQLELRPLAESTLLPLPGRWRPGLHSCFNTCTPARTAFAIFS

SEQ ID NO: 783262 - protein, 54 aa, Homo sapiens
MLRRSLAFDKLLIQEASQMHLKMCPFRGRKHLPNSRLRSKRGGYSCRVLLAALS

SEQ ID NO: 783263 - protein, 69 aa, Homo sapiens
IRIHLSAWQWSARSQQETIDKKVPRGLGRVEAELSFRELEKSWRGRPKKKQFMINLLRVFVSNPIPILT

SEQ ID NO: 783264 - protein, 146 aa, Homo sapiens
LDAMNRDCGIPLSHLQVDGGMTSNKILMQLQADILYIPVVKPSMPETTALGAAMEAGAAEGVGVWSLEPEDLSAVTMERFEPQINAEESEIRYSTWKKAVMKSMGWVTTQSPESGDPSIFCSLPLGFFIVSSMVMLIGARYISGIP

SEQ ID NO: 783265 - protein, 117 aa, Homo sapiens
LDAMNRDCGIPLSHLQVDGGMTSNKILMQLQADILYIPVVKPSMPETTALGAAMEAGAAEGVGVWSLEPEDLSAVTMERFEPQINAEESEIRYSTWKKAVMKSMGWVTTQSPESGIP

SEQ ID NO: 783266 - protein, 122 aa, Homo sapiens
SLRPISVNQRGWLVTQPCLQATNSTSCPVTYCYQVAKILPEGYVGKLLHSFGSHYQSLVYEPPNNINSNQWCKPDGRRCAHQEEQYNRFMKLVGGKRRSRSKSSDPDLRRSLDKQPTDSGGG

SEQ ID NO: 783267 - protein, 211 aa, Homo sapiens
LSHALRGEACPVRVRGGIYPTIRRRFDLEPQWQPSWDPKGGREGGLLSAMQPSEQRGCNLGRDKVQVTCTLIGPLLKPLSQSFHLGADRWSSLLNVVLGLRPGWTRFCLGGCTWQPLVAFLGTGPAHSTTSTSALAPQQPLESNRVGPGPGPWEGLLQGIQCCWSGAVLHMGPESRFLVKTSRASSLGYSDSLPALILGTSKMGCSCLPCR

SEQ ID NO: 783268 - protein, 77 aa, Homo sapiens
YQIFDHAFYLFLGHIDILCRALQGDLVFALCELDVNLWHLLSDFGGSELGMGGHLSMTSHMSGHRHPGHPSWVSNRF

SEQ ID NO: 783269 - protein, 149 aa, Homo sapiens
FPSIPLPREWRKGVRKTSIRFDWRKTQRWRRIHTSLGGRPSGGRLDRRRERRCDAPGAPSFDATGITSESSRHEGALPRGLDAVEAGSSSTTRAQSATRPPQCHCLPALPPRAAAPPSPRQPGRESQASAPERTHSPRAPSRAAPTARP

SEQ ID NO: 783270 - protein, 75 aa, Homo sapiens
ALGVGRSQEEACLVEEAQTPMMIPQDWGQRVKEVHLQTADEGGQAGRAGSELPEVVQLLSHGAHPWSPSRRHKIR

SEQ ID NO: 783271 - protein, 140 aa, Homo sapiens
THVARVPLLCFHSPILGQVTVQQLQGVRPDGYLRRGSWKASWAGPGRDSGLGSLAKSPLSPCVSLFPATPMDPVLLASPAWGPTTLSPRNPMSCVLTDTSSPFPPAASPYYLPFPTHSECSLLAPVPSVLTLLIPSWPST

SEQ ID NO: 783272 - protein, 85 aa, Homo sapiens
RPFRKHGVVPLATYMRIYKKGDIVDIKGMGTVQKGMPHKCYHGKTGRVYNVTQHAVGIVNKQVKGKILAKRINVHIEHIKHSEPR

SEQ ID NO: 783273 - protein, 108 aa, Homo sapiens
MPAACLFRNNAQSFLVLRNLQPTLPTACATSFRHLTLALPTLLSTVFQTYHSNCLPFLPSLPHEVGPACLCLGHALGSSKIYENCKVVMLGEVARVFSHFCLNSLVRR

SEQ ID NO: 783274 - protein, 102 aa, Homo sapiens
TGSQEPAPHGTEHSPSPCQLKVPHKVRISQNHWPDAHFNNRKRRAASREAPLLGLQLSSFLHDRKNVCYGSVEAKLTYKLGNGRRGPPRPLWAPAGPPHPAS

SEQ ID NO: 783275 - protein, 110 aa, Homo sapiens
LSGAQRKCLVRTCSSQQVCHVQGVAVSGSLFRVVVQGGSIARVGFGQEHLSHGDSFLLTAFPPGRAYRVLFLLLVILKLAYQYLPVLSLTSILCRNTKKILNYLFCKIPK

SEQ ID NO: 783276 - protein, 50 aa, Homo sapiens
MVECLLLLGADANQAKEGSSLICQVCEKESSPKLVELLLNSGSREQDVRK

SEQ ID NO: 783277 - protein, 102 aa, Homo sapiens
EEKIHEQEKIREEEKRQEQEEMWRQEEKIREQEEIWRQKEKMHEQEKIRKQEEKVWRQEEKMHDQEEKIREQEEKMWRQEEKIREQEEKIREQEEKIREQEE

SEQ ID NO: 783278 - protein, 34 aa, Homo sapiens
MVACENSTLQTRCHIYLRIHTFHQFGEETQKRGF

SEQ ID NO: 783279 - protein, 65 aa, Homo sapiens
LSTWADENFTSVLFHKPTRVHTYTHTPTTDSRRRHTHQPDTSYTFSHVRAHTYTFSASYTFHPRS

SEQ ID NO: 783280 - protein, 70 aa, Homo sapiens
PALVTPLLLRAPRTAGNLLKNLGNFPEAGSPVSSPSVILKLTNTQTHTFRLSVQGKRSQTHLEMHRFFFF

SEQ ID NO: 783281 - protein, 171 aa, Homo sapiens [sequence omitted]

SEQ ID NO: 783282 - protein, 152 aa, Homo sapiens
AVREVPTSTQRGGRVGAVREVRTSTLERGPRGPRQGSTDKHTERGPRGRRQGSADKHTERGPRGRRQGSADGNHSEAPAHSPGGSDNQINCRHLELSRPRGGGLVHTRPSNAAEPLWTASHHSQRWPSSPVPGSLLKRNENRGSHINANVYH

SEQ ID NO: 783283 - protein, 236 aa, Homo sapiens
MAFPHLQQPSFLLASLKADSINKPFAQQCQDLIKVIEDFPAKELHTIFPWLVESIFGSLDGVLVGWNLRCLQGRVNPVEYSIVMEFLDTGGPMMKLVYKLQAEDYKFDFPVSYLPGPVKASIQECILPDSPLYHNKVQFTPTGGLGLNLALNPFEYYIFFFALSLITQKPLPVSLHVRTSDCAYFILVDRYLSWFLPTEGSVPCHSPPAQGGPAPHRLPGHQPCPLLPMASTTLAS

SEQ ID NO: 783284 - protein, 207 aa, Homo sapiens
MAFPHLQQPSFLLELHTIFPWLVESIFGSLDGVLVGWNLRCLQGRVNPVEYSIVMEFLDTGGPMMKLVYKLQAEDYKFDFPVSYLPGPVKASIQECILPDSPLYHNKVQFTPTGGLGLNLALNPFEYYIFFFALSLITQKPLPVSLHVRTSDCAYFILVDRYLSWFLPTEGSVPCHSPPAQGGPAPHRLPGHQPCPLLPMASTTLAS

SEQ ID NO: 783285 - protein, 153 aa, Homo sapiens
MEFLDTGGPMMKLVYKLQAEDYKFDFPVSYLPGPVKASIQECILPDSPLYHNKVQFTPTGGLGLNLALNPFEYYIFFFALSLITQKPLPVSLHVRTSDCAYFILVDRYLSWFLPTEGSVPCHSPPAQGGPAPHRLPGHQPCPLLPMASTTLAS

SEQ ID NO: 783286 - protein, 82 aa, Homo sapiens
MKLVYKLQAEDYKFDFPVSYLPVSKPQWREWCSGQWALHSPVVMGNLLQSSEGKLRSDSFQGCERQRKWVLHDCYPCCLQLF

SEQ ID NO: 783287 - protein, 86 aa, Homo sapiens
QDFTEEVVDFMRPTEGQSEDENHMDQSQEGATLQEVTARVMQTLQVMITEYRRGWQMATSRIAGDVGTRCHARLDNLQKHFLMFFN

SEQ ID NO: 783288 - protein, 130 aa, Homo sapiens [sequence omitted]

SEQ ID NO: 783289 - protein, 92 aa, Homo sapiens
FRGSGTNDSQLPDEAAFLSPGPRPAKVAVLTAAALPGENTLAMLSFLTGDRGDVHGTQRDGLKQENLKTALTLGGPLQPKALLPSWEGHSYS

SEQ ID NO: 783290 - protein, 111 aa, Homo sapiens
MFSDVHFCNNHSGCFCMWGVCADVCCVCSDVCWVSADGVLGVHCGCAGCVLMCAGVLGVLMCADVGTGVRGVCGCVRGAVMLRWERGCGAGVSADVCCVCCVFQRVCASGC

SEQ ID NO: 783291 - protein, 282 aa, Homo sapiens
SSLKATAIDQISISACSQAETSYGLGKFETRPSEFAEKTTNGHKTDPDCKLSDSCGSISKADHSGSLDPTNKGDAREKKPASPQVVKEKESTGTDTSDAKTLLLNPKSQESGGTESAANPTPSPIRKNQESTLEENRQTKTATSLSLPSDPMGDSSPGSGKKTPSRSVKASPRRPSRVSEFLKEQKLNVTAAAAQVGLTPGDKKKQLGADSKLQLKQSKRVRDVVWDEQGMTWEVYGASLDAESLGIAIQNHLQRQIREHEKLIKTQNSQTRRSISSDTSSN

SEQ ID NO: 783292 - protein, 125 aa, Homo sapiens
PSSLHCAQGFPFPVGLQPLSSHASSPWPFSLPAAHSTPGCASVLSYQQLYLLSSTSSSLSSPFPEASLLSSSLPAFGILFFSLISFVSFFCSFKLSLSRPCRQGWPMTRGQPVTFMACSTSDTSS

SEQ ID NO: 783293 - protein, 124 aa, Homo sapiens
MRKLIAGLIFLKIWTCIVRTSTDLPQTEGCFQYIHQVTEVGQKIATVLLFYSYYECLGTPKGTCLYNNTQYKVCNPGSDQPDVCYDPFEPPMITVFEVGLRTGHSLSDTSKVIARTEEKGVPKM

SEQ ID NO: 783294 - protein, 195 aa, Homo sapiens
GQRVSCGMGPMPGCSWLIPGPAKMLLAHTWPWEDAPGSHLALGGCSWLTPGRGWWSRLTPGCECWSRLTPGHGWWFKFTADRGWWSRLTPGPGWWSRLTHDPVRMTLAYTWPWEDDPGSHLAMGGGLDPQLAVSGGSGSYLGSGCWSRLTPGPGWWSRLTPGRGCWSRLTPGRGCWSRLTPGRGCWSRLTPGPGC

SEQ ID NO: 783295 - protein, 124 aa, Homo sapiens
  misc_feature (41)..(41): Xaa can be any naturally occurring amino acid
RVFGYVTGALRFLELGSLLVRVGTGKSDLPARSCVLPAEEXMMIIPHLLRDKDQRATTATSPRTRQCWGMENEGVQLWPSQSSGGDETHLPLSLWAHLMPGASVDRGHAPGLPKLEKAARLRPT

SEQ ID NO: 783296 - protein, 107 aa, Homo sapiens
RVMRLQTQGLEHCSFSSSWWGIMGWKCTLPVGSHPTTHQRYIPSRLHIYYLPGPGGILLCILDWESQGLRTNVLPPGSRRVRSEYSRSGISGDVAAPSSLHLRGTAT

SEQ ID NO: 783297 - protein, 70 aa, Homo sapiens
RVYSLDVLSHHAVIEAAGEKCPSSLRLNFLKAAAERVPPPSPSCVVSLLHTHTAESRAVVLSEHHPLLDD

SEQ ID NO: 783298 - protein, 112 aa, Homo sapiens
CLPLPTPSVYSFQQHWPSFFQQSELKTSDFLFLYLAVSSKRHSLPDPLMESSPVPVSHFLIYCFVADNCKKLFIYYLSSHPQRRMSARYVQGQCQSLCAYYTAKNLPQRKTL

SEQ ID NO: 783299 - protein, 82 aa, Homo sapiens
MSQEHAIALHPGRQIKTLSQKKQNKQTPREFLAQASDPHHHYHQGIFCCSPKSSLHPLNSWGNATRLSPSPFREFASSQSCS

SEQ ID NO: 783300 - protein, 86 aa, Homo sapiens
ANAYKKQPIIKLLFLFWFTELEDHRTLGSEGTLAVIESNFGHFKDVAASLKVDLNNESLNALSPSHESTPHHTRVGGTEMKAMPRN

SEQ ID NO: 783301 - protein, 106 aa, Homo sapiens
ASASQVAGTTGARHHARLSFVFLVEMGFHCVGQKNPWIHGGSHGRHSWAAALPSGEEPQDGRWPLQGPAVAKDLGVLRLFLQHLGTVFDSGFRERELGPREENLLI

SEQ ID NO: 783302 - protein, 67 aa, Homo sapiens
KAHNLSQPLLCSPGHCFAESFYYAAPQTQSPAATCPQRHRGPANCKHGTSGSCFSGYFHYCNFFVLR

SEQ ID NO: 783303 - protein, 107 aa, Homo sapiens
LESKGRDVLLRGLLVSQEKNLWLLLVLSDAKTLLSQRSCYRHRASTHGHSRQWAIEYKRPRCPEVKVDCVFPSLRLLCLQHAPEGSEAHPPRGFFCLFVCFCCCCCF

SEQ ID NO: 783304 - protein, 122 aa, Homo sapiens
DQNCFHAAGLIYCEGVGLLQDWFPRLSGTPGLWPGGSLEPQCKEDPSPTPGRATPTHVHTHTHTPHRHRQAYSHLCSHTHSYPHKGTGRRSHTPCAHTHSYPHIGTGRLYSHPCAHTLIPLT

SEQ ID NO: 783305 - protein, 71 aa, Homo sapiens
ALSNTNKNLRAWAWLSGMVLTWGWFLGLGCSRGSLEAGSGLAARKPCTRANRPRASCLLLVTLRPHMSVFL

SEQ ID NO: 783306 - protein, 107 aa, Homo sapiens
  misc_feature (25)..(25): Xaa can be any naturally occurring amino acid
  misc_feature (31)..(31): Xaa can be any naturally occurring amino acid
  misc_feature (97)..(97): Xaa can be any naturally occurring amino acid
  misc_feature (104)..(104): Xaa can be any naturally occurring amino acid
LAERGWKQASTNQQPAPRPPRREQXAGSGRXSETNKRDGGREGPGRCGPGLGFAAFNPSHSAAGNPRRTSPRGLSSGLTLRGWGSGSASRPPADSPXEAAGPPXRPQ

SEQ ID NO: 783307 - protein, 57 aa, Homo sapiens
MVGLPQMRKPGERIWGHQRKLQRPLGVHLQPGTADPDLTVRIPGSVPPPLGPPLLGP

SEQ ID NO: 783308 - protein, 52 aa, Homo sapiens
MCTYENNFKIVRSHANVRMLMMMAEEEQQKENGEKEEEEGKGSNSRPLVCVQ

SEQ ID NO: 783309 - protein, 44 aa, Homo sapiens
TYIDKKCPFTGDVSIRGRILSGVVTKMKTQRTTVIRRDYLHYIR

SEQ ID NO: 783310 - protein, 124 aa, Homo sapiens
MLVVLATWEAEARESLELRKQKLQRANFWSSSALQTGKQSKTLSRKKKKERKRKKGRKRKKGRKEERKEGRRGRRRRRRRRRRRRRRRRRRRRKRRRRRRREGRKEGRKEGRKEGKKEGTSRDC

SEQ ID NO: 783311 - protein, 107 aa, Homo sapiens
SRRKSSCAKLWNKRAWPEETTTAKALGQKELDMMEDRKERSLQPQKRVWFYSKCPWACLLNTHSVFKAQFHAASPMKPSLNACLALPCQPLGPSGSHPTLALSPLLS

SEQ ID NO: 783312 - protein, 56 aa, Homo sapiens
HSWLVTSGSPARSRRKKGVQTGEVIPGPPGNSCSTLRKPVRKLPSLRKPSSMNSRM

SEQ ID NO: 783313 - protein, 39 aa, Homo sapiens
HFLVDTQNNNKDSLPLKPALPSSFLTPCWTPTAGKESST

SEQ ID NO: 783314 - protein, 264 aa, Homo sapiens
MAEEKKLKLSNTWCLALRSSMKGGGVISQWRIATEFRERDLRRLLEQDEVSYRIERRIAQDAIEVHAHGERGQKLTTSDIDYALKLKNVEPLYGFHAQEFIPFRFASGGGRELYFYEEKEVDLSDIINSPTAPGDPGRLPQSSLAEHRGLQPAIPENPPPGPKEQQKAAATEALKAGKAGRRKRTLKGKVRGNTADARTRDGRPAEGPWTGPRGHNRCEASDSRNARRGTGAGGAAESSQEDEGGDSEGGRGTGKRGNRTKRQA

SEQ ID NO: 783315 - protein, 242 aa, Homo sapiens
MAEEKKLKLSNTWCLALRSSMKGGGVISSGAIATEFRERDLRRLLEQDEVSYRIERRIAQDAIEVHAHGERGQKLTTSDIDYALKLKNVEPLYGFHAQEFIPFRFASGGGRELYFYEEKELMAEHRGLQPAIPENPPPGPKEQQKAAATEALKAGKAGRRKRTLKGKVRGNTADAGRETGDQQRGPGHDPEVTIAARRATAGMRGGGQEPGERQSRARRTRGETAKADEAQANGETEPRDKR

SEQ ID NO: 783316 - protein, 592 aa, Homo sapiens
MLLWVILLVLAPVSGQFARTPRPIIFLQPPWTTVFQGERVTLTCKGFRFYSPQKTKWYHRYLGKEILRETPDNILEVQESGEYRCQAQGSPLSSPVHLDFSSASLILQAPLSVFEGDSVVLRCRAKAEVTLNNTIYKNDNVLAFLNKRTDFHIPHACLKDNGAYRCTGYKESCCPVSSNTVKIQVQEPFTRPVLRASSFQPISGNPVTLTCETQLSLERSDVPLRFRFFRDDQTLGLGWSLSPNFQITAMWSKDSGFYWCKAATMPHSVISDSPRSWIQVQIPASHPVLTLSPEKALNFEGTKVTLHCETQEDSLRTLYRFYHEGVPLRHKSVRCERGASISFSLTTENSGNYYCTADNGLGAKPSKAVSLSVTVPVSHPVLNLSSPEDLIFEGAKVTLHCEAQRGSLPILYQFHHEDAALERRSANSAGGVAISFSLTAEHSGNYYCTADNGFGPQRSKAVSLSITVPVSHPVLTLSSAEALTFEGATVTLHCEVQRGSPQILYQFYHEDMPLWSSSTPSVGRVSFSFSLTEGHSGNYYCTADNGFGPQRSEVVSLFVTGKCWVLASHPPLAEFSLTHSFKNLFALSSFLP

SEQ ID NO: 783317 - protein, 1008 aa, Homo sapiens
MLLWVILLVLAPVSGQFARTPRPIIFLQPPWTTVFQGERVTLTCKGFRFYSPQKTKWYHRYLGKEILRETPDNILEVQESGEYRCQAQGSPLSSPVHLDFSSEMGFPHAAQANVELLGSSDLLTKASQSAGITASLILQAPLSVFEGDSVVLRCRAKAEVTLNNTIYKNDNVLAFLNKRTDFHIPHACLKDNGAYRCTGYKESCCPVSSNTVKIQVQEPFTRPVLRASSFQPISGNPVTLTCETQLSLERSDVPLRFRFFRDDQTLGLGWSLSPNFQITAMWSKDSGFYWCKAATMPHSVISDSPRSWIQVQIPASHPVLTLSPEKALNFEGTKVTLHCETQEDSLRTLYRFYHEGVPLRHKSVRCERGASISFSLTTENSGNYYCTADNGLGAKPSKAVSLSVTVPVSHPVLNLSSPEDLIFEGAKVTLHCEAQRGSLPILYQFHHEDAALERRSANSAGGVAISFSLTAEHSGNYYCTADNGFGPQRSKAVSLSITVPVSHPVLTLSSAEALTFEGATVTLHCEVQRGSPQILYQFYHEDMPLWSSSTPSVGRVSFSFSLTEGHSGNYYCTADNGFGPQRSEVVSLFVTVPVSRPILTLRVPRAQAVVGDLLELHCEAPRGSPPILYWFYHEDVTLGSSSAPSGGEASFNLSLTAEHSGNYSCEANNGLVAQHSDTISLSVIVPVSRPILTFRAPRAQAVVGDLLELHCEALRGSSPILYWFYHEDVTLGKISAPSGGGASFNLSLTTEHSGIYSCEADNGLEAQRSEMVTLKVAVPVSRPVLTLRAPGTHAAVGDLLELHCEALRGSPLILYRFFHEDVTLGNRSSPSGGASLNLSLTAEHSGNYSCEADNGLGAQRSETVTLYITGLTANRSGPFATGVAGGLLSIAGLAAGALLLYCWLSRKAGRKPASDPARSPSDSDSQEPTYHNVPAWEELQPVYTNANPRGENVVYSEVRIIQEKKKHAVASDPRHLRNKGSPIIYSEVKVASTPVSGSLFLASSAPHR

SEQ ID NO: 783318 - protein, 281 aa, Homo sapiens
MSPLGKISAPSGGGASFNLSLTTEHSGIYSCEADNGLEAQRSEMVTLKVAVPVSRPVLTLRAPGTHAAVGDLLELHCEALRGSPLILYRFFHEDVTLGNRSSPSGGASLNLSLTAEHSGNYSCEADNGLGAQRSETVTLYITGLTANRSGPFATGVAGGLLSIAGLAAGALLLYCWLSRKAGRKPASDPARSPSDSDSQEPTYHNVPAWEELQPVYTNANPRGENVVYSEVRIIQEKKKHAVASDPRHLRNKGSPIIYSEVKVASTPVSGSLFLASSAPHR

SEQ ID NO: 783319 - protein, 608 aa, Homo sapiens
MLLWVILLVLAPVSGQFARTPRPIIFLQPPWTTVFQGERVTLTCKGFRFYSPQKTKWYHRYLGKEILRETPDNILEVQESGEYRCQAQGSPLSSPVHLDFSSASLILQAPLSVFEGDSVVLRCRAKAEVTLNNTIYKNDNVLAFLNKRTDFHIPHACLKDNGAYRCTGYKESCCPVSSNTVKIQVQEPFTRPVLRASSFQPISGNPVTLTCETQLSLERSDVPLRFRFFRDDQTLGLGWSLSPNFQITAMWSKDSGFYWCKAATMPHSVISDSPRSWIQVQIPASHPVLTLSPEKALNFEGTKVTLHCETQEDSLRTLYRFYHEGVPLRHKSVRCERGASISFSLTTENSGNYYCTADNGLGAKPSKAVSLSVTVPVSHPVLNLSSPEDLIFEGAKVTLHCEAQRGSLPILYQFHHEDAALERRSANSAGGVAISFSLTAEHSGNYYCTADNGFGPQRSKAVSLSITVPVSHPVLTLSSAEALTFEGATVTLHCEVQRGSPQILYQFYHEDMPLWSSSTPSVGRVSFSFSLTEGHSGNYYCTADNGFGPQRSEVVSLFVTVPVSRPILTLRVPRAQAVVGDLLELHCEAPRGSPPILYWFYHEDVTPG

SEQ ID NO: 783320 - protein, 977 aa, Homo sapiens
MLLWVILLVLAPVSGQFARTPRPIIFLQPPWTTVFQGERVTLTCKGFRFYSPQKTKWYHRYLGKEILRETPDNILEVQESGEYRCQAQGSPLSSPVHLDFSSASLILQAPLSVFEGDSVVLRCRAKAEVTLNNTIYKNDNVLAFLNKRTDFHIPHACLKDNGAYRCTGYKESCCPVSSNTVKIQVQEPFTRPVLRASSFQPISGNPVTLTCETQLSLERSDVPLRFRFFRDDQTLGLGWSLSPNFQITAMWSKDSGFYWCKAATMPHSVISDSPRSWIQVQIPASHPVLTLSPEKALNFEGTKVTLHCETQEDSLRTLYRFYHEGVPLRHKSVRCERGASISFSLTTENSGNYYCTADNGLGAKPSKAVSLSVTVPVSHPVLNLSSPEDLIFEGAKVTLHCEAQRGSLPILYQFHHEDAALERRSANSAGGVAISFSLTAEHSGNYYCTADNGFGPQRSKAVSLSITVPVSHPVLTLSSAEALTFEGATVTLHCEVQRGSPQILYQFYHEDMPLWSSSTPSVGRVSFSFSLTEGHSGNYYCTADNGFGPQRSEVVSLFVTVPVSRPILTLRVPRAQAVVGDLLELHCEAPRGSPPILYWFYHEDVTLGSSSAPSGGEASFNLSLTAEHSGNYSCEANNGLVAQHSDTISLSVIVPVSRPILTFRAPRAQAVVGDLLELHCEALRGSSPILYWFYHEDVTLGKISAPSGGGASFNLSLTTEHSGIYSCEADNGLEAQRSEMVTLKVAVPVSRPVLTLRAPGTHAAVGDLLELHCEALRGSPLILYRFFHEDVTLGNRSSPSGGASLNLSLTAEHSGNYSCEADNGLGAQRSETVTLYITGLTANRSGPFATGVAGGLLSIAGLAAGALLLYCWLSRKAGRKPASDPARSPSDSDSQEPTYHNVPAWEELQPVYTNANPRGENVVYSEVRIIQEKKKHAVASDPRHLRNKGSPIIYSEVKVASTPVSGSLFLASSAPHR

SEQ ID NO: 783321 - protein, 759 aa, Homo sapiens
MLLWVILLVLAPVSGQFARTPRPIIFLQPPWTTVFQGERVTLTCKGFRFYSPQKTKWYHRYLGKEILRETPDNILEVQESGEYRCQAQGSPLSSPVHLDFSSASLILQAPLSVFEGDSVVLRCRAKAEVTLNNTIYKNDNVLAFLNKRTDFHIPHACLKDNGAYRCTGYKESCCPVSSNTVKIQVQEPFTRPVLRASSFQPISGNPVTLTCETQLSLERSDVPLRFRFFRDDQTLGLGWSLSPNFQITAMWSKDSGFYWCKAATMPHSVISDSPRSWIQVQIPASHPVLTLSPEKALNFEGTKVTLHCETQEDSLRTLYRFYHEGVPLRHKSVRCERGASISFSLTTENSGNYYCTADNGLGAKPSKAVSLSVTVPVSHPVLNLSSPEDLIFEGAKVTLHCEAQRGSLPILYQFHHEDAALERRSANSAGGVAISFSLTAEHSGNYYCTADNGFGPQRSKAVSLSITVPVSHPVLTLSSAEALTFEGATVTLHCEVQRGSPQILYQFYHEDMPLWSSSTPSVGRVSFSFSLTEGHSGNYYCTADNGFGPQRSEVVSLFVTVPVSRPILTLRVPRAQAVVGDLLELHCEAPRGSPPILYWFYHEDVTLGSSSAPSGGEASFNLSLTAEHSGNYSCEANNGLVAQHSDTISLSVIVPVSRPILTFRAPRAQAVVGDLLELHCEALRGSSPILYWFYHEDVTLGKISAPSGGGASFNLSLTTEHSGIYSCEADNGLEAQRSEMVTLKVAGEWALPTSSTSEN

SEQ ID NO: 783322 - protein, 238 aa, Homo sapiens
MVTLKVAVPVSRPVLTLRAPGTHAAVGDLLELHCEALRGSPLILYRFFHEDVTLGNRSSPSGGASLNLSLTAEHSGNYSCEADNGLGAQRSETVTLYITGLTANRSGPFATGVAGGLLSIAGLAAGALLLYCWLSRKAGRKPASDPARSPSDSDSQEPTYHNVPAWEELQPVYTNANPRGENVVYSEVRIIQEKKKHAVASDPRHLRNKGSPIIYSEVKVASTPVSGSLFLASSAPHR

SEQ ID NO: 783323 - protein, 150 aa, Homo sapiens [sequence omitted]

SEQ ID NO: 783324 - protein, 126 aa, Homo sapiens
MLFLLTPSSHHQHECVRRAFECGDCHILLDNNVLGVDCHGAGERAVHLDCRGADPGSTTGPSLTQADRFLLVFRVCFCLAPFEIGYDVGGKAAASKPHANSGQQQPVVSWKMDGQRIGKEDHAFPY

SEQ ID NO: 783325 - protein, 45 aa, Homo sapiens
GICSYLSQAPQSLSGYADDGDRLKLKLQEELFAAFKQPRPGTGSD

SEQ ID NO: 783326 - protein, 160 aa, Homo sapiens
NVAKVLITNQALHIIIDFILERNLTSVMNVARFLGHSHNLHVIIDFILERNLTNVKNVTKFSISNHTLKYIGEFILERNHTNVGFATRLLGVIHTLHNIREFTLERNHTNVRFVTRLSSVTHTWHNILEFILERNLSSVVSVAKPFVHSQHLFTIRQSMV

SEQ ID NO: 783327 - protein, 162 aa, Homo sapiens
ATRPDMIRILSAALHVVLRRDMSLNRRLYAWLLGPRSTRHSNPEEHATYYFTTFSKELLVQAMVGILQVNGFGEENTLMQDLKPFRILISLLDKPELGPVILEDVLLQVSSPIIILNAQAAAWISHNCNHPSARILLRSAGGFLPNNSTVDMKTNHYRLTSI

SEQ ID NO: 783328 - protein, 95 aa, Homo sapiens
TSDHVSSRPIPVRSSGSAAVGNSLQTHWCCSKGGSREQGNGCVFWASWPHSLLTSRDHGSSMCVSETSSTDGNVPCPVQQPQGTQGSRALEKRMV

SEQ ID NO: 783329 - protein, 30 aa, Homo sapiens
QAEQKGYLNTARREASLAFKVTETTHNKSG

SEQ ID NO: 783330 - protein, 111 aa, Homo sapiens
VFVVSWLDMSGRGKGGKGLGKGGAKRHRKVLRDNIQGITKPAIRRLARRGGVKRISGLIYEETRGVLKVFLENVIRDAVTYTEHAKRKTVTAMDVVYALKRQGRTLYGFGG

SEQ ID NO: 783331 - protein, 86 aa, Homo sapiens
NGCSQLGPQSHGKSLCYYVDSTVHGLRALTVELFRPGFNNTHFVNLGKFLTSLSLISTIKWDKDIAAALENGLKTRGNLYLVHCKP

SEQ ID NO: 783332 - protein, 104 aa, Homo sapiens
VDFSSRGTVGPELCRAVLPIRWGCSDLSNPWSAGFSRGPQPGCVCLQCSLRCPGGLNLSTCTGRQRLTRPPAGRPLGPASARLLLPPLQLTQPRTTRHTSLLAL

SEQ ID NO: 783333 - protein, 101 aa, Homo sapiens
MGLPRDPATPLLGIQAIEKKTIDQKDTCPHMFTVALSTTACVWNQPTCPSPNEWTKNCGTQTQWNTIHRIKELNPVIRGHVDQSDRCYVKCRHRKINTAHS

SEQ ID NO: 783334 - protein, 75 aa, Homo sapiens
MNYVGQLAETVFGTVKELYRGLNPATLSGGIDVLVVKQVDGSFRCSPFHVRFGKLGVLRSREKVVSAQVAEVATA

SEQ ID NO: 783335 - protein, 90 aa, Homo sapiens
GSGGCSQPSEQSGRKLPGGPGNHFWAPSTYPHLTVDSDSGTPWSGLQPMPWLLRLALFAPGFCSRSPPVFALHRVDLEFTEVMRWGMPAH

SEQ ID NO: 783336 - protein, 109 aa, Homo sapiens
NSWCEVGPYHIELSVSFSHSMHESLTRLYLFSIAALTHYQKLSGLKQQKRIIFLFCRSEVQYDSNQANIKVSVGLQDFWRFSPFLVYSDYGRIQFFGFVGLTFLFPHWL

SEQ ID NO: 783337 - protein, 114 aa, Homo sapiens
MWPFFCFFFPGGLELEIYISLSLSLPTIPLSFSSSPTLPQDRKGHIFYKQGALSLVPFPSAQMKRIFHLTGEVKSETQTGANLSKWGGSTSPTCTAIWNQHLSRNKMLFCFADS

SEQ ID NO: 783338 - protein, 69 aa, Homo sapiens
MQLGVCVSTDTSKNTNTQMNTDWGMWALLFNQSLQPGLLPRSVPFSYDICSLNHGLLPRPCSPGPSSRH

SEQ ID NO: 783339 - protein, 88 aa, Homo sapiens
SGRGRPGSQPHSAGPAQWQRARPLQGLSHVASWKRQLWEQASEQWLPGAVGQGRKSTPKGPKGVFRAVGTYLSCAAVYTTAYTGEGYT

SEQ ID NO: 783340 - protein, 114 aa, Homo sapiens
RECALPGGDQGCTGSISFLGIGEAGPGPSLPSLFPTRGAGRGESPGPGSLCVVWSGDIMWHGDARLRVLAFFPRDLFFFFFGDEVSLCRPSWSCSELRLHHCTPAWVTRVKLRH

SEQ ID NO: 783341 - protein, 79 aa, Homo sapiens
MSILESRTGTSTLSTDPSPASMGDPAQRGTENGHLPADMVARGDKRHNRDSRKPSRAQGRQERVQRGGDSGQGLAWEWG

SEQ ID NO: 783342 - protein, 69 aa, Homo sapiens
ACGDKTTVRGIAKNNSGLSGLGKWMKAEAPFTNGRRVVLVGKTISPIFGHADACGFSRWKSLKGSWIHG

SEQ ID NO: 783343 - protein, 103 aa, Homo sapiens
RWESGLGERARARASAGRGGPGHVMYRHPRYRLAAGVTSPPLTAGGGTSAPSPAAPQPLAPPAGALSQFEWAEGERGFPSGPSPTASPAARSPRPGTGMGAAA

SEQ ID NO: 783344 - protein, 130 aa, Homo sapiens
LETLYHLDFYDDMLSWSPATTRTLTLSPFTASTSLHGHSILSSFLSKPSDIEISHTPKALTITFVRMIPKPVALPFLSHSIPKFSCLPYVSPWRLHSPLKLNGLVIITVKINSCPAPQKKPLSSFSLFSV

SEQ ID NO: 783345 - protein, 104 aa, Homo sapiens
MLPPGHYLLGPALHPVAGLTVITPTVQGGLRDLLSSLPRTGSRMFPCGRLVWPKWTLACCPLGRLQALPSTWGSSILCLTMLCHAGPSPAPQPCCFSPPHPRHL

SEQ ID NO: 783346 - protein, 144 aa, Homo sapiens
WKSLDWSEVGEYVQTQRKTWAQEIYERRDGRAGSGREKSGPQSPSLLSQSQLCSSSGTLHQEPGPGLCSCTVWSQHSLGQSGRVCRLESQGRENKVLVKRAWGGSLASLCRRQAVCQARHALHLFTCPSAHPSTHPSIYSWSRC

SEQ ID NO: 783347 - protein, 112 aa, Homo sapiens
SSHSWAAEFLEWAPCSSFFLHSNQPGLIFRISLFSPGLSFLIFKIRRAIWAGTGEALSCLGHLPHQNSHHGPSVTSQPPPMPGQIPPACQRPHGHLLCQDRDHQPINGPTAT

SEQ ID NO: 783348 - protein, 89 aa, Homo sapiens
MAPQRGYAAWDQARTRAQENTTQSVIEATTSCTTRGNKACSVQGLLGRVSAPSKAASAKPAFLHAHPRSHPAGTWHSPPWPGPEPGLQI

SEQ ID NO: 783349 - protein, 105 aa, Homo sapiens
LCSHLSFPLGPHGTEALCYALLPCLCFQLASEGLAFTVIQSLAVGQARAVTASRMFSSGAPPAQVLGLCEPLASRGGHHTTSISPVQANIPFLGYPPSEAQSQAP

SEQ ID NO: 783350 - protein, 97 aa, Homo sapiens
WDGGLQPQPQPQPRTAGGVGAAVWPPRPHSQLMTLLPQGFLDYPASYLHSHKTTRAELIRLNQSPTLLNNPNFFFPFSAAPCAIYRRLFSLWHQCIF

SEQ ID NO: 783351 - protein, 65 aa, Homo sapiens
MSLTHVFSSPRAGARYPPVTPSHIFQTGTSKPCPGHVSKPASLLQAHVMPSLLRAPRSRRESVGT

SEQ ID NO: 783352 - protein, 98 aa, Homo sapiens
TGDAVGIRCTDIDECVTSSCEGHCVNTEGGFVCECGPGMQLSADRHSCQDTDECLGTPCQQRCKNSIGSYKCSCRTGFHLHGNRHSCVDTPQGFLSAH

SEQ ID NO: 783353 - protein, 84 aa, Homo sapiens
GPGDWFDQVCHLHSSRKDWPSYPNLLLCKYSYYQVVASTPAQMALLVLRHDPDTRGNKEKGAGIAILNVPGFQVQLLAFTYASL

SEQ ID NO: 783354 - protein, 67 aa, Homo sapiens
GAGNCPLSEPPPPRLRIISVKGACDGVAGRAVTPTPQTLVLLLGRVQLVITADNPAAAIHTDIPLKL

SEQ ID NO: 783355 - protein, 71 aa, Homo sapiens
GCYKITRRMMEIGNETIPSALVRSRSGGRHRVTRSTQLPGTGLQEKEHRDWGQMYGGCYILAEKFSCDDLA

SEQ ID NO: 783356 - protein, 68 aa, Homo sapiens
STLPILVQASQITAVAMDLPPSFILVPQLSAEELSGVVRKMHLKLRSDYIIYLLNILRWFPMLFKVMV

SEQ ID NO: 783357 - protein, 104 aa, Homo sapiens
GTQALPFCGTNLLLHPAASREKKAKNGPLQTCSGVERHSVHLLGAQSWGSASCQEAMEQCFWPTLSRPLLPCANAESGCLIFWALWTNFRWPTVGHRSFSCPPP

SEQ ID NO: 783358 - protein, 121 aa, Homo sapiens
TERDLLFHLLDELSKTSDFEGYILKLRKSVTRRQHNYSTVPQESRHFQLRPELELVKKKLLAEVVQGQSRSPRISTPHYRRGNKRRFCRGKSGNSTEAIIIPNANRATKGQETKSGPMQSG

SEQ ID NO: 783359 - protein, 106 aa, Homo sapiens
VQWDHTRGPHNNSVSSRNALQPPSGGGFFCFCLSLYRDSFALLPRLEGLDRLSSSNPPASALRIAGTIDMHHHTYPIFLLFVDTESRYVAQAGLKLLGLSTLHASA

SEQ ID NO: 783360 - protein, 117 aa, Homo sapiens
ACGCACAETGVCGHVCAETGALDSMRVCRDGCVWTRVCAETGVCGHVRVQRRVCVDVRVQRRVCGHLCVQRRVRVTPCMCAETGACGHACVQRWMCVDTHVQRRVRVDTCVCRDGCA

SEQ ID NO: 783361 - protein, 190 aa, Homo sapiens
KKAAKPKEKCEKGLAAYRAKGKPDAAKKGVVKAEKKQEKEEEAEENEEGEEGEDKEMKMKKTMIMNKLVLVFFFLVCKAFSPPVHNSLLFSKHNKQWTYGQALVVNIGCSSTPITFSSFLGYQLTTYYRKRFLLDTPIRLGGAILFPLVIISGRLGVSIGSTQVLECNGTILAHSILCLLGSSDFPASAS

SEQ ID NO: 783362 - protein, 68 aa, Homo sapiens
PQEAIGPWLYGPQTLDKAKYIVLKYQTPMPPESTPGPGSNVDGCWSFILWPLWLISWRFPYSYGKYCQ

SEQ ID NO: 783363 - protein, 104 aa, Homo sapiens
SAPISPGEWRLLWSGAKIGRPRREKGLQSTSQSTRCYNKNIANCHSAFITVPDEETGAEPWSNLRRVSSRKTGPWSDEFTHFGHQGRCWHSLNSRPALSNGNRT

SEQ ID NO: 783364 - protein, 109 aa, Homo sapiens
YFSHPPQEITQWTFPSFFLFSAVGPIGPREGCPGSPLSSSVGQLRRVLFFLAWLTSAVSPQISTTQNAPHIRRVSACVCCVCALRVCVCCVWDLHIGGSLRKACLLTWD

SEQ ID NO: 783365 - protein, 130 aa, Homo sapiens
QWESSETRFLGLELSLNSQSYVQSNWSGADSKAGNTIVVRTRPQVKWLQQSTLSPRKTPERGRVKGPSQCSLDGGFPVPNHPANLPMLHYKQPWGPEVTMILSSVLKSWCLKLKLFSLWWPHYLPTAELR

SEQ ID NO: 783366 - protein, 118 aa, Homo sapiens
TVPGTLPTQGLCSLPGRNALPPELPSHLLTRFLSLLRCHFLNETFHGHLFIIEKNKCIPFLPFPVLFFSLALSILDHNTCCFLIMFFVCFCPLECDLQRGRGVVCFVHCCVPCTEHGA

SEQ ID NO: 783367 - protein, 142 aa, Homo sapiens
MDRFEHHSNILLTFENKDENHLPLVPPNKLEEMKRRINNILEKKFILLLEFHYYKCLVLGLVDEVKSKLDIWNIKYGSRESVELLLEDWHKFIEEKEFLARLDTSFQKCGEIYKNLAGECQNINKQYMMVKSDVCMYRKNIY

SEQ ID NO: 783368 - protein, 45 aa, Homo sapiens
SGIMPSACRGVGCGNHLWTGHPAIQEIRSVQPWDPVVPLYPRSHY

SEQ ID NO: 783369 - protein, 128 aa, Homo sapiens
  misc_feature (14)..(14): Xaa can be any naturally occurring amino acid
LTLRIEVVNRKFGXRIKVLRSRIRFIHLVTGCVLGSSGKVLPKWGWEQLEVTCTPYLKETLNSIWNVEARSRRRAQNPVKVSWLDGSENPPPVQPPSPTHCLPVCLPAGLGPLTRPPACVALLQFSSP

SEQ ID NO: 783370 - protein, 40 aa, Homo sapiens
MSRGDEDCHTHPIKGGPSRPPGAFSLPWHLEDPDTHDPGP

SEQ ID NO: 783371 - protein, 48 aa, Homo sapiens
MGGTGTRWVLYHPKSKGRPKRGAAVPCRASMAVGQGPRQRRGSWTGRP

SEQ ID NO: 783372 - protein, 67 aa, Homo sapiens
MAMPTGDMALSPPEFWGSVEQTDLLLVGTVPLGHCRHLSSQQVSCHSFACEVFTSSSSSSSRQTRPI

SEQ ID NO: 783373 - protein, 199 aa, Homo sapiens
SVTCSCGNKDIFYCAHVVALSLYRIRKPDQVKLHLPISETLFQMNRDQLQKFVQYLITVHHTEVLPTAQKLADEILSQNSEINQVHGAPDPTAGASIDDENCWHLDEEQVQEQVKLFLSQGGYHGSGKQLNLLFAKVREMLKMRDSNGARMLTLITEQFMADPRLSLWRQQGTAMTDKYRQLWDELGALWMCIVLNPHW

SEQ ID NO: 783374 - protein, 122 aa, Homo sapiens
ILTGRARAVSKGGGREVARGGVSTRTRPGVSEEGMTSRRFAKGKPEGYELLGSEMGLSARVFPCRAESPKSPRRQGGQWAWSFPGRQRESRDGTSSSPLTKSVCMAVSPILYLPGLRKSRGD

SEQ ID NO: 783375 - protein, 61 aa, Homo sapiens
SVVKNNIQENITEIKVDLDLHIERAHQVLKTDPEKINTISTLVDTGHKKEFFGHSGKKTKS

SEQ ID NO: 783376 - protein, 110 aa, Homo sapiens
MAGTICSRALNPSRGNPGLGRVHPVPHIFADLCAWQKASVPAACCHVQKHLPLDGTVAPQMTVTSFPSLPLPLSFSICCEQNKTKTHTQSEETKKETGQRAPTSSTAGLP

SEQ ID NO: 783377 - protein, 94 aa, Homo sapiens
GPGPGLRVVTASRGKSLFLPFPPDQPSVFPLWRGSEWEGRTHRCAAAMARILAEHLCWCGGTPSSHFQTSLPMLLPHQGTVPTPSSFEGHYPSS

SEQ ID NO: 783378 - protein, 103 aa, Homo sapiens
APPGVLAMAGGDQTTCRWYRGKLRPRGCRRCAHPYTASPPWPQQLPCSPGPTCRTRILGCRWPRPGSECRVDSWRPQEPPAWPPTQPRQHPSPPLIITLEIFD

SEQ ID NO: 783379 - protein, 103 aa, Homo sapiens
MLAHTQWHTCQRLSQLTHRSILKYLLIDTHACQVLILKHTHASLSLPSCQECFPSSIPSASHLVSHPHPPPSPRWGQTPEGLPAASPCGPGPRSCFSSILPTG

SEQ ID NO: 783380 - protein, 110 aa, Homo sapiens
MWPWYIRKMKGVFSKGVVEVDEPIHVRKGVSLGTVGRLGKEESGLVWRTVGFRIGRVGGIGVRVGVYIVEDNSLMESKQMVVREGWKGGKPQPRMAEEEDKKFLGPLWNP

SEQ ID NO: 783381 - protein, 80 aa, Homo sapiens
LCQGFSRDAEPLSVRNKGVIAGVRLCVMEGGGAGGKVRRRVPGKVPEEPGEVLTGVEDTQGLWGHLLLLGASHKGNWPKS

SEQ ID NO: 783382 - protein, 144 aa, Homo sapiens
TRCEYFLVDPARHPASRQAQVCTDDRTQHMCTHTLPGKKVVLGAQWRRQAGISLHGFWPWLHRASCVTLDKGFFGKPQFRRTSLWGCQQPGGDSGAAFPCWAEAGSPVLATRPLSPPVETCLRLPCPGPHRLHRDAGPRPLFWQ

SEQ ID NO: 783383 - protein, 123 aa, Homo sapiens
LTSATASHLTCCTPAANSQHCHEKDTVKTEVTFRHSSAQNLPVVPLGEAYETITPLQLSWLPHALLLLLPQDCSHTLPTPLPMCPSLSTPAITHKFRLFCSLLHPPDHSMEQVPCTCRMNRQK

SEQ ID NO: 783384 - protein, 105 aa, Homo sapiens
HLSPGSCTLSFSLTRPSNCALNKGKALLLVYIYEKQSRTLGGEGGNEMEPLELELAQLQVKPPSGYSEVRTVTREAKKAMFQLRKNPLWHPQSKAVSPILLSPQL

SEQ ID NO: 783385 - protein, 36 aa, Homo sapiens
MEIVRGQGALAGLLTSQTPGLESDLNQQPSIPSAPV

SEQ ID NO: 783386 - protein, 72 aa, Homo sapiens
AETPHAKWEERHCTASGGLSVSMQQECTGMFALCPGNPTSRTLSRNTPTKTGNVLSIQPLLAALSVTANARE

SEQ ID NO: 783387 - protein, 68 aa, Homo sapiens
THTQMDTRAGTPGSTDPGMDIQPGHKHPEQLVAHAHGLGGDPHLGTQPTHTHTCTQPLRWARDSAQTH

SEQ ID NO: 783388 - protein, 176 aa, Homo sapiens
RPQVRLSSSCSSLAFMSHFSLKRWKSLSFPQARISIYQNMAGRGRQRHHGGQQVPSHSGGSWPVQPPAISTVPSPFSRCFSGGRPSALSLEALFMGPAPLRGSPALPLLQSQKEKAQRARPTWKSYKTAEGQESWKFQAILSQGKRLSPCHFKKASCLHIKVSSLSWDPIDHTGLL

SEQ ID NO: 783389 - protein, 142 aa, Homo sapiens
MCLQTLPNVLLRTDSLRTYGNKPNSLRTYGNKPNSLRTYGNKPNSLRTYGNKPNSLRTYGNKPNSLRTYGNKPNSLRTYGNKPNSLRTYGNKPNSLRTYGNKLNSLRTYGNKRNSLRTYTHTQIHTHKHSAHTCTHTQTDTP

SEQ ID NO: 783390 - protein, 895 aa, Homo sapiens
PKEKQLKNEELVIFSFHENNCKIQEFHVDGKELIPFTEMTNASEKKSSPFKDLMTVPESRDEEMSNSTSVIYSNLTREQAPDISPKSDTLTDSQIDRDLHKLSLLAQASVITFPSDSPQNSSQLQRKVKEDKRCFTANQNNVGDTSRGQVIIISDSDDDDDERILSLEKLTKQDKICLEREHPEQHVSTVNSKEEKNPVKEEKTETLFQFEESDSQCFEFESSSEVFSVWQDHPDDNNSVQDGEKKCLAPIANTTNGQGCTDYVSEVVKKGAEGIEEHTRPRSISVEEFCEIEVKKPKRKRSEKPMAEDPVRPSSSVRNEGQSDTNKRDLVGNDFKSIDRRTSTPNSRIQRATTVSQKKSSKLCTCTEPIRKVPVSKTPKKTHSDAKKGQNRSSNYLSCRTTPAIVPPKKFRQCPEPTSTAEKLGLKKGPRKAYELSQRSLDYVAQLRDHGKTVGVVDTRKKTKLISPQNLSVRNNKKLLTSQELQMQRQIRPKSQKNRRRLSDCESTDVKRAGSHTAQNSDIFVPESDRSDYNCTGGTEVLANSNRKQLIKCMPSEPETIKAKHGSPATDDACPLNQCDSVVLNGTVPTNEVIVSTSEDPLGGGDPTARHIEMAALKEGEPDSSSDAEEDNLFLTQNDPEDMDLCSQMENDNYKLIELIHGKDTVEVEEDSVSRPQLESLSGTKCKYKDCLETTKNQGEYCPKHSEVKAADEDVFRKPGLPPPASKPLRPTTKIFSSKSTSRIAGLSKSLETSSALSPSLKNKSKGIQSILKVPQPVPLIAQKPVGEMKNSCNVLHPQSPNNSNRQGCKVPFGESKYFPSSSPVNILLSSQSVSDTFVKEVLKWKYEMFLNFGQCGPPASLCQSISRPVPVRFHNYGDYFNVFFPLMVLNTFET

SEQ ID NO: 783391 - protein, 356 aa, Homo sapiens
MNTWRRPWSTCARYSGSAKRSLGSSHSPWASPRMRMENSSSPTASWVRTDSSLRPWGGTSSQDRWRLCVPGMTSSAASVATTSQNLGGRPHPRPQAQPALPGQLPDAGLAAAGLLRGLSVLRRAPPMHAAAHPGLRPLRLCHDTADRAGEAAPALKVAAAFRAGWRDLPHSPTLGLRGPGKPLQEGTRSSSGFWSGVPAAAEASGGNTTKKGRQLGPSKGVATRAQQPRSVTAQSSAPAFPSLCQGLMAKPALGAFFPVPIWLLCCTKLGSQPAKSRLGLASPLAGLEVGRVGCGASSLCVGPGRWLKSPLQERIKVSRVVRKPESGSPDSSLWGAFFMFSQLFQDWAVEFHVSGA

SEQ ID NO: 783392 - protein, 374 aa, Homo sapiens
RKTDEYLEKALEYLRQIFRLSEAQLRQFTLALGITQDENGKQQLPDCVVGENGLILTPLGRYQFAGQMAALCSRDDFLGSFCRYHLTEPGLASRHLLSPVGRRQVAGHTRGPRLSLRFLGSYRTLVSLLLAFFVASLFCVGPLPCMLLLTLGYVLLRLCHDTADRAGEAAPALKVAAAFRAGWRDLPHSPTLGLRGPGKPLQEGTRSSSGFWSGVPAAAEASGGNTTKKGRQLGPSKGVATRAQQPRSVTAQSSAPAFPSLCQGLMAKPALGAFFPVPIWLLCCTKLGSQPAKSRLGLASPLAGLEVGRVGCGASSLCVGPGRWLKSPLQERIKVSRVVRKPESGSPDSSLWGAFFMFSQLFQDWAVEFHVSGA

SEQ ID NO: 783393 - protein, 172 aa, Homo sapiens
RKTDEYLEKALEYLRQIFRLSEAQLRQFTLALGITQDENGKQQLPDCVVGENGLILTPLGRYQFAGQMAALCSRDDFLGSFCRYHLTEPGLASRHLLSPVGRRQVAGHTRGPRLSLRFLGSYRTLVSLLLAFFVASLFCVGPLPCMLLLTLGYVLYASAMILLTERGKLHQP

SEQ ID NO: 783394 - protein, 103 aa, Homo sapiens
RSRGSRHVVRTVGRWGRILPVSALQPKMVRSIVTSVTSSAQRHGNRSVVLKYSKYTTTDSLTETSTGSSPSFTPQATCEGEQHLSGDFQTKPLFSVWGFGGLL

SEQ ID NO: 783395 - protein, 374 aa, Homo sapiens; identical to SEQ ID NO: 783392

SEQ ID NO: 783396 - protein, 374 aa, Homo sapiens; identical to SEQ ID NO: 783392

SEQ ID NO: 783397 - protein, 331 aa, Homo sapiens
EEKGVRPSEQKGKLLRSARCRGLADDSGCDSVTDTEPEDEKVVSYSKQQNLPTVTSPGNLMVVQPDRIRCGAETTVYVIVRCKLDDRVATEAEFSPEDSPSVRMEAKVENEYTISVKAPNLSSGNVSLKIYSGDLVVCETVISYYTDMEEIGNLLSNAANPVEFMCQAFKIVPYNTETLDKLLTESLKNNIPASGLHLFGINQLEEEDMMTNQRDEELPTLLHFAAKYGLKNLTALLLTCPGALQAYSVANKHGHYPNTIAEKHGFRDLRQFIDEYVETVDMLKSHIKEELMHGEEADAVYESMAHLSTDLLMKCSLNPGCDEDLYESMAA

SEQ ID NO: 783398 - protein, 389 aa, Homo sapiens
LSTRCVVVLLSAELVQHFHKPALLPLLQRAFHPPHRVVRLLCGVRDSEEFLDFFPDWAHWQELTCDDEPETYVAAVKKAISEDSGCDSVTDTEPEDEKVVSYSKQQNLPTVTSPGNLMVVQPDRIRCGAETTVYVIVRCKLDDRVATEAEFSPEDSPSVRMEAKVENEYTISVKAPNLSSGNVSLKIYSGDLVVCETVISYYTDMEEIGNLLSNAANPVEFMCQAFKIVPYNTETLDKLLTESLKNNIPASGLHLFGINQLEEEDMMTNQRDEELPTLLHFAAKYGLKNLTALLLTCPGALQAYSVANKHGHYPNTIAEKHGFRDLRQFIDEYVETVDMLKKSHKEELMHGEEADAVYESMAHLSTDLLMKCSLNPGCDEDLYESMAAF

SEQ ID NO: 783399 - protein, 56 aa, Homo sapiens
MATHGPIITYLLPSEPIKTSGLSQTHTDVRTTSGGKELPTSVLLDLLGKPNCDKEL

SEQ ID NO: 783400 - protein, 126 aa, Homo sapiens
SVHAQFGPMHMHTGASDRDPPYLKGQSWGSPGKGLSLSPLRGQGRKGSRRVLCPRLPPRCTGTSIVILRPAVCTGREPGASDATWGPHSSPGSSCSHRLENTGFRPGTAARFCHPSTLGCRGGWIT

SEQ ID NO: 783401 - protein, 42 aa, Homo sapiens
VQQPVCRPCAYECVRDPVNPRPASCATPKPVAFPGCAICRCV

SEQ ID NO: 783402 - protein, 69 aa, Homo sapiens
MCSSRHCGSSCNIITPTSVVANVETAGRQAGLSFQLRGKSHCGARIPPGGQGGREGLSESAAPSVSHGA

SEQ ID NO: 783403 - protein, 81 aa, Homo sapiens
RWYDVRVEIKMSEMPKQGMTKDRVLKPTRVEKGMYMGEHPDVTGQSLSELIHGMRVEPTQHRVLESKQSKEDICMKKGLQQ

SEQ ID NO: 783404 - protein, 109 aa, Homo sapiens
SLFIVDHQLEFSLKERIYYKNSEIPCGMWQWEWSWLTGMDGLENHQDPVHVLIGASASVSAQFLPFLHCLPSMDSPWKSPAFSNSIGSFKSHWLVLHKLIQYWIVRQQL

SEQ ID NO: 783405 - protein, 56 aa, Homo sapiens
CPASLQLNSFEQLCINYTNEKLQQLFNHTMFVLEQEEYQREGIPWTFLDFGLDLQP

SEQ ID NO: 783406 - protein, 64 aa, Homo sapiens
MYSSATCVASTYLPELWRGFKVQTQVNTGQCQECNQHLMNPRVMIIMLMFYLSMQGVHGILAPV

SEQ ID NO: 783407 - protein, 74 aa, Homo sapiens
FTDGRQIAAPEDSSKVTAGRESVTSVPGTTGFSGCSETIVTVFGTDVTSGFRSLKQNRLHNSIEIYSQNSNNRL

SEQ ID NO: 783408 - protein, 103 aa, Homo sapiens
NATAHVVLGKLKTLGYSEGHGDPAYPVGQGAGSEGGKGQESPERRQKGGVTAYSGQELLGLVHRTQQPLPEIPFNKGSPAELPWRPGKEEPTVAPTPPGQPIP

SEQ ID NO: 783409 - protein, 104 aa, Homo sapiens
LSTEIILHVEKLNFGWLVWRQSLLPVSRLECSGTISAHCNLCLLFSSDPSASASQSAGITGVSHCTPPRNTLKSLKKELSAIKKYTKGERYTIAYEMSQLSHDH

SEQ ID NO: 783410 - protein, 247 aa, Homo sapiens
QHNVRQGPAVPPSIQAYGAAPFGDLQVDFREMPKCGDLIPRFRLPLRIGSHNGPAFLAAMVQKTAKVSKSHRATESHRSLRTPPPGLSEDPELQPILAGLSLSMYLVTVLRNLLISLAVSSDSHLHTPMCFFLSNLCWADIGFTSATVPKMIVDMRSHSGVISYADCLTRMSFLVLFACVEDMLLTVMAYDCFVAICRPLHYPVIVNPHLCVFLVSVSFSLACWIPSCAVGLCCNSPSSRMWKSLIL

SEQ ID NO: 783411 - protein, 266 aa, Homo sapiens
QHNVRQGPAVPPSIQAYGAAPFGDLQVDFREMPKCGDLIPRFRLPLRIGSHNGPAFLAAMVQKTAKVLGITRKLHAASQPQSSGKVSKSHRATESHRSLRTPPPGLSEDPELQPILAGLSLSMYLVTVLRNLLISLAVSSDSHLHTPMCFFLSNLCWADIGFTSATVPKMIVDMRSHSGVISYADCLTRMSFLVLFACVEDMLLTVMAYDCFVAICRPLHYPVIVNPHLCVFLVSVSFSLACWIPSCAVGLCCNSPSSRMWKSLIL

SEQ ID NO: 783412 - protein, 86 aa, Homo sapiens
ASSGAQVQTCPIGEKEKGRAFWLKEHVIKAVEAWKGTALMCLEMKISPGGGVQEPALCRCGSECHAKVPGTHPGGRRKPLHFFQER

SEQ ID NO: 783413 - protein, 390 aa, Homo sapiens
MASPAIGQRPYPLLLDPEPPRYLQSLSGPELPPPPPDRSSRLCVPAPLSTAPGAREGRSARRAARGNLEPPPRASRPARPLRPGLQQRLRRRPGAPRPRDVRSIFEQPQDPRVPAERGEGHCFAELVLPGGPGWCDLCGREVLRQALRCTNCKFTCHPECRSLIQLDCSQQEGLSRDRPSPESTLTVTFSQNVCKPVEETQRPPTLQEIKQKIDSYNTREKNCLGMKLSEDGTYTGFIKVHLKLRRPVTVPAGIRPQSIYDAIKEVNLAATTDKRTSFYLPLDAIKQLHISSTTTVSEVIQGLLKKFMVVDNPQKFALFKRIHKDGQVLFQKLSIADRPLYLRLLAGPDTEVLSFVLKENETGEVEWDAFSIPELQNFLSSWCIQIYLYY

SEQ ID NO: 783414 - protein, 265 aa, Homo sapiens
MTVDSSMSSGYCSLDEELEDCFFTAKTTFFRNAQSKHLSKNVCKPVEETQRPPTLQEIKQKIDSYNTREKNCLGMKLSEDGTYTGFIKVHLKLRRPVTVPAGIRPQSIYDAIKEVNLAATTDKRTSFYLPLDAIKQLHISSTTTVSEVIQGLLKKFMVVDNPQKFALFKRIHKDGQVLFQKLSIADRPLYLRLLAGPDTEVLSFVLKENETGEVEWDAFSIPELQNFLTILEKEEQDKIQQVQKKYDKFRQKLEEALRESQGKPG

SEQ ID NO: 783415 - protein, 265 aa, Homo sapiens; identical to SEQ ID NO: 783414

SEQ ID NO: 783416 - protein, 265 aa, Homo sapiens; identical to SEQ ID NO: 783414

SEQ ID NO: 783417 - protein, 265 aa, Homo sapiens; identical to SEQ ID NO: 783414

SEQ ID NO: 783418 - protein, 265 aa, Homo sapiens; identical to SEQ ID NO: 783414

SEQ ID NO: 783419 - protein, 265 aa, Homo sapiens; identical to SEQ ID NO: 783414

SEQ ID NO: 783420 - protein, 128 aa, Homo sapiens
TSSPFSLPGEPSGSNCHYCLHYVFLMFHPRSHPQYICDFLFKTASRFVAQAGEQWCDLGSLQPPPHGFKRFSCLSLPSGCDYRHVPPCPANFCIFSREGVSLCWPGWSETPNLVICPPGPPKVLGLQA

SEQ ID NO: 783421 - protein, 101 aa, Homo sapiens
CCGDSSRIPLSAFGLQLLCRRGGVGGCPPPSCFASGPACCSLWLVNTCLSQKPQLKCQFLWEAFPPRRLRTCPSLPWDSSHSFLVQRQDKLVLPLDYLLLP

SEQ ID NO: 783422 - protein, 106 aa, Homo sapiens
AALKDASAQEGIFNKLAEVFSPPPQTTCGPGYITRGREGGVDGALPVSPPHSPPLAKDTCNFLLQAPAIPYLRAFLATGHERTHNLWELMERCPSFLDLQMGIARL

SEQ ID NO: 783423 - protein, 816 aa, Homo sapiens
FTTLNRLDRHEQICMRSSHMPIPGGNQRFLENYPTIGQNGGSFTGPEPLLSENRIGEFSSTGSTLPDTDHMVKFVNGQMLYSCVVCKRSYVTLSSLRRHANVHSWRRTYPCHYCNKVFALAEYRTRHEIWHTGERRYQCIFCLETFMTYYILKNHQKSFHAIDHRLSISKKTANGGLKPSVYPYKLYRLLPMKCKRAPYKSYRNSSYENARENSQMNESAPGTYVVQNPHSSELPTLNFQDTVNTLTNSPAIPLETSACQDIPTSANVQNAEGTKWGEEALKMDLDNNFYSTEVSVSSTENAVSSDLRAGDVPVLSLSNSSENAASVISYSGSAPSVIVHSSQFSSVIMHSNAIAAMTSSNHRAFSDPAVSQSLKDDSKPEPDKVGRFASRPKSIKEKKKTTSHTRGEIPEESNYVADPGGSLSKTTNIAEETSKIETYIAKPALPGTSTNSNVAPLCQITVKIGNEAIVKRHILGSKLFYKRGRRPKYQMQEEPLPQGNDPEPSGDSPLGLCQSECMEMSEVFDDASDQDSTDKPWRPYYNYKPKKKSRQLKKMRKVNWRKEHGNRSPSHKCKYPAELDCAVGKAPQDKPFEEEETKEMPKLQCELCDGDKAVGAGNQGRPHRHLTSRPYACELCAKQFQSPSTLKMHMRCHTGEKPYQCKTCGRCFSVQGNLQKHERIHLGLKEFVCQYCNKAFTLNETLKIHERIHTGEKRYHCQFCFQRFLYLSTKRNHEQRHIREHNGKGYACFQCPKICKTAAALGMHQKKHLFKSPSQQEKIGDVCHENSNPLENQHFIGSEDNDQKDNIQTGVENVVL

SEQ ID NO: 783424 - protein, 82 aa, Homo sapiens
SCRFSSDSASRSKQHREQGEARERCCHRTFDKLSKCGSGTRGEEGWRALRGREHVRECVCVCGGVCMCECVQECVCGRGVHV

SEQ ID NO: 783425 - protein, 88 aa, Homo sapiens
VLTTPSLSPLRETQVARVSGSESWRHLGGQERKLVRGTLRKGTQPVLPKSGHRCRQLGGSFGWSGVTSLRFTQSTLRGCRDDCLVGLC

SEQ ID NO: 783426 - protein, 285 aa, Homo sapiens
MFVDAAATACLREVVAADPVASAGYLSAQAQMRALLDQLMGTARDGKDHLESFIAECDRRTELAKKRLAETQEEISAEVSAKAEKVHELNEEIGKLLAKAEQLGAEGNVDESQKILMEVEKVRAKKKEAEEEYRNSMPASSFQQQKLRVCEVCSAYLGLHDNDRRLADHFGGKLHLGFIQIREKLDQLRKTVAEKQEKRNQDRLRRREEREREERLSRRSGSRTRDRRRSRSRDRRRRRSRSTSRERRKLSRSRSRDRHRRHRSRSRSHSRGHRRASRDRSAKYK

SEQ ID NO: 783427 - protein, 128 aa, Homo sapiens
RPHWKDLAIGDELMENFKPKFVGVKEKMSVKQQAESAEGWGPHSVGTYRVSALEPSDCSGHAPGIGVGGGQDLPPESDGNCPGPGPEIDIGATAAVPGATAGDIVGLPGTEVRNTSNYSDSFGSCNQE

SEQ ID NO: 783428 - protein, 284 aa, Homo sapiens
MFVDAAATACLREVVAADPVASAGYLSAQAQMRALLDQLMGTARDGKDHLESFIAECDRRTELAKKRLAETQEEISAEVSAKAEKVHELNEEIGKLLAKAEQLGAEGNVDESQKILMEVEKVRAKKKEAEEEYRNSMPASSFQQQKLRVCEVCSAYLGLHDNDRRLADHFGGKLHLGFIQIREKLDQLRKTVAEKQEKRNQDRLRRREEREREERLSRRSGSQNQEIAGGNHHLWKHPSKPKSTENFSAPRELLPLRNREVYFTIWCCLDPLLSKKKTVGAPGN

SEQ ID NO: 783429 - protein, 101 aa, Homo sapiens
FKQFSCPSFLSSWDYSTASNLRRDSLTGLCKCKVGFCMTLGVGASLNFAPSATPSPVTLLVPTLMGTNAGKAFQMAGTASTKIQRPERPGVFQEQKLGSHD

SEQ ID NO: 783430 - protein, 56 aa, Homo sapiens
MDLPPDTRASSVLSRLTGDHDAYPLPPSAWVTVSPNSALIIPCCPFKITIWYLYKS

SEQ ID NO: 783431 - protein, 116 aa, Homo sapiens
TSYGLLLFPSSSYSPCFCTLKPFSNASQEDLGTFSLGLPRSSSEASLGPGKASELDLGAPGKDGSDGQLISFLSSGFTDVLPLSGKFLGISEFWNENFGDVPRTGKAASSHRHTPQ

SEQ ID NO: 783432 - protein, 106 aa, Homo sapiens [sequence omitted]

SEQ ID NO: 783433 - protein, 256 aa, Homo sapiens
MTSQRSPLAPLLLLSLHGVAASLEVSESPGSIQVARGQTAVLPCTFTTSAALINLNVIWMVTPLSNANQPEQVILYQGGQMFDGAPRFHGRVGFTGTMPATNVSIFINNTQLSDTGTYQCLVNNLPDIGGRNIGVTGLTVLVPPSAPHCQIQGSQDIGSDVILLCSSEEGIPRPTYLWEKLDKIPSNYLQQLLRTRSREQSPSGTSVPCLQVCTSAWLLMLLEPAPVFWISRLFHGHSFTGEAKIKRRKKKKFLMK

SEQ ID NO: 783434 - protein, 241 aa, Homo sapiens
MSLVELLLWWNCFSRTGVAASLEVSESPGSIQVARGQTAVLPCTFTTSAALINLNVIWMVTPLSNANQPEQVILYQGGQMFDGAPRFHGRVGFTGTMPATNVSIFINNTQLSDTGTYQCLVNNLPDIGGRNIGVTGLTVLVPPSAPHCQIQGSQDIGSDVILLCSSEEGIPRPTYLWEKLDKIPSNYLQQLLRTRSREQSPSGTSVPCLQVCTSAWLLMLLEPAPVFWISRLFHPSPGTLD

SEQ ID NO: 783435 - protein, 242 aa, Homo sapiens
MTSQRSPLAPLLLLSLHGVAASLEVSESPGSIQVARGQTAVLPCTFTTSAALINLNVIWMVTPLSNANQPEQVILYQGGQMFDGAPRFHGRVGFTGTMPATNVSIFINNTQLSDTGTYQCLVNNLPDIGGRNIGVTGLTVLVPPSAPHCQIQGSQDIGSDVILLCSSEEGIPRPTYLWEKLDKIPSNYLQQLLRTRSREQSPSGTSVPCLQVCTSAWLLMLLEPAPVFWISRLFHPSPGTLD

SEQ ID NO: 783436 - protein, 241 aa, Homo sapiens; identical to SEQ ID NO: 783434

SEQ ID NO: 783437 - protein, 58 aa, Homo sapiens
DPPPQALLSHRPREVTVSLRATGLILKAIPASDTEVSGSSHCPLPAAPVTDHTCLNAI

SEQ ID NO: 783438 - protein, 149 aa, Homo sapiens
LKPSSCLGLPQCWDHGREPPAQHPLPFIRTSTSRMTLIPSCTDGDSSNSYKHHQTDLQEQRNSQSRFHPRRALKSSRAACYGEGGTLCLALKASASRVQTSSQPGLTIPPPNLCSHWPLFLEHGPHDPRSTCVTTTPPSRPFPVAPPPC

SEQ ID NO: 783439 - protein, 109 aa, Homo sapiens
ASNSFSDIPTARSGARYSSLRPAGLAPGPLPRGAGGHPGTGDFAGLPTLPRLSDFQALGALCELDWLQKSRRPSLYWRAQVAFWTLEMPTLARTPGLCHPDHSGRTEYA

SEQ ID NO: 783440 - protein, 38 aa, Homo sapiens
MSAAKNVSTCVPKSKNPKKSTITRFPSVKTYHREERAK

SEQ ID NO: 783441 - protein, 93 aa, Homo sapiens
WNTKRRREKEGEEIFEVVMDENFPKLIADNKLQIWEAPRTPSRINTRTTPKRIMFKLQKDKEKILKTARENKHFTYIETKVRITFLISNCARE

SEQ ID NO: 783442 - protein, 109 aa, Homo sapiens
AWQSSLSTDHSFLLSSPTLSQPLELKGPQAFSPFSPPTHSSPIPLAPTIPESTRSEQLQGQRLQVSSPTPWELWLQGKGSDIPLSPSATHQMEGIILQRQWEHIPKKPK

SEQ ID NO: 783443 - protein, 87 aa, Homo sapiens
GGRDSGGATRRPALKKQGTHRSPPSLLQLLMIKEGLYISVIGKLVQPGSGWSSVVKARPRALPLSVFLFLLHPRATLQAAPASGTHF

SEQ ID NO: 783444 - protein, 178 aa, Homo sapiens
IKNSTTFTIAAKKKIKYLGIYLTKELNNLYKENYKMLLKEIIDNRNKWKHIPCSWMGRINIVKMTILPKALYKFKELSIKISPSFFTEEKKTILKFIWNQKRAHTVKARLSKKNKSGGITLSDFNLYYKSIVIKTAWYWYKNRHIEQWNRIENTEINPTTYSQLIFNKANKNIKWGKG

SEQ ID NO: 783445 - protein, 103 aa, Homo sapiens
LGTPKGTCLYNNTQYQVCNPGSDQPDVCYDPSEPPMITVFEVRLRTGPFPGDTSKVIARTEERGVPKHVTLKFDACASINSNQQGIGCSSLDWKKKLHSKKKN

SEQ ID NO: 783446 - protein, 32 aa, Homo sapiens
MRFPFVENMGGGGAMQCSCCLGTTPFHPMFSQ

SEQ ID NO: 783447 - protein, 213 aa, Homo sapiens
KKRASFYENIIKAMRPQPEYFAVGYYGQGFPSFLRNKIFIYRGKEYERREDFSLRLLTQFPNAEKMTSTTPPGEDIKSSPKQYMQCFTVKPVMSLPPSYKDKPVPEQILNYYRANEVQQFRYSRPFRKGEKDPDNEFATMWIERTTYTTAYTFPGILKWFEVKQISTEEISPLENAIETMELTNERISNCVQQHAWDRSLSVHPLSMLLSGIV

SEQ ID NO: 783448 - protein, 148 aa, Homo sapiens
KKRASFYENIIKAMRPQPEYFAVGYYGQGFPSFLRNKIFIYRGKEYERREDFSLRLLTQFPNAEKMTSTTPPGEDIKSSPKQYMQCFTVKPVMSLPPSYKDKPVPEQILNYYRANEVQQFRYSRPFRKGEKDPDNEFAVSSPLLSFKR

SEQ ID NO: 783449 - protein, 153 aa, Homo sapiens
METESGNQEKVMEEESTEKKKEVEKKKRSRVKQVLADIAKQVDFWFGDANLHKDRFLREQIEKSRDGYVDISLLVSFNKMKKLTTDGKLIARALRSSAVVELDLEGTRIRRKKPLGERPKDEDERTVYVELLPKNVNHSWIERVLGNVAMLFI

SEQ ID NO: 783450 - protein, 153 aa, Homo sapiens; identical to SEQ ID NO: 783449

SEQ ID NO: 783451 - protein, 143 aa, Homo sapiens
GPFRRCLCVDKGWACPQDPVRGKPNVPPGWQGWGRESVMAAPRKKRGSRGSRTALTWNSCHCLNEGREECTPVTSGGREAQFQGGFPPHFLPCYSDRLQVSLPTLCPGACRKPQLPMVMAPGVGQNTVEGRGFAMLARLVSNS

SEQ ID NO: 783452 - protein, 70 aa, Homo sapiens
RTWRVGKGGWTTGIASGREECQGKSRYRGTGVHPPKTSGAGKGKIRQVGKDKGCNHKESRLDPRELRAKE

SEQ ID NO: 783453 - protein, 114 aa, Homo sapiens
CHAPGHATDSATPQATLLQTPPHQATLPFPATVPVKPTLSAAPTFPSFSCCRKGCRYEDAHLSPVCGTTTQWQGWARSSPTVKSHTEQRPGGKTPKRHRSNNRVSIPAAELACR

SEQ ID NO: 783454 - protein, 148 aa, Homo sapiens
ADCWFLAALGSLTQNPQYRQKILMVQSFSHQYAGIFRFRFWQCGQWVEVVIDDRLPVQGDKCLFVRPRHQNQEFWPCLLEKAYAKTKAAARTSSTAFYPVKGSASACSPGTGTCRSLARSPSNRGSSCSDPIPICTMASSRMPWWTSQ

SEQ ID NO: 783455 - protein, 111 aa, Homo sapiens
MKCSFQKNFAQPTVCNSHTYPGTSESHLQARVAVGSVNPLARIAYPRLIVKWRQPRLLALLETCWLFLTQALTPVPTPPLHSSGPAPNKPTQHSFPRVVCSACVQHLSLNW

SEQ ID NO: 783456 - protein, 156 aa, Homo sapiens
THSQRHAFAEAACAILHSSVFQECHRLVDKEPFYLRCLAAVCGCDPGSDCLCPVLSAYARRCAQEGASPPWRNQTLCPVMCPGGQEYRECAPACGQHCGKPEDCGELGSCVAGCNCPLGLLWDPEGQCVPPSLCPCQLGARRYAPGSATMKECNRW

SEQ ID NO: 783457 - protein, 51 aa, Homo sapiens
RAAAAAAGTANELRARDRGGWTGLELSGGRSYRACKDVGCPGDGPAGAVHR

SEQ ID NO: 783458 - protein, 143 aa, Homo sapiens
EGCGRRSGHGQRAAGPGSRRLDGAGAVGRAEVSSGAGAAGRPEWRKARRFAVPGCRLRPHQKPPDFVWWGQICKPLSAAWLRAREGTWGSDLGLPPGLRGTTSPVPRTAAQRLRLEKLLCLRGWQDWCGLGPAPGSQTEGPGA

SEQ ID NO: 783459 - protein, 110 aa, Homo sapiens
PPPHPPLPRLPSHLWRWQQQCQGGGGFTLHLYQGRTGQPGLYRAGRWDASDWRDRQGATLVLLKPPSLPESSLGRRQALEATDWGLGQSKGRVRGSLARRHPWEPGFPHL

SEQ ID NO: 783460 - protein, 91 aa, Homo sapiens
MYLSSVCVYVCYFVGPFGRVLAIRKEECRACSHSSLCVGSFMSLGSILRVRLPGHNHVVVVSDYKMRPFIFQSGCVPLRLIHDMMGVPALS

SEQ ID NO: 783461 - protein, 72 aa, Homo sapiens
EQMWKASIPIKHLLFRGLCQAKPKFCLQNKGKHSFRLVGISTGSQLMPGGEIGRTAGFLSNLELKEGKPAEQ

SEQ ID NO: 783462 - protein, 114 aa, Homo sapiens
MPIPLPPCPPAGLLSPFRLLEICLQFIFLYFYNSFIEIQVTYCSNNPFKLYNSVVRLNGIHRIVQPPLHQFSNIFISPKENLIPFSHHPQTFHSTVALDLPILSMSYKCSHTIY

SEQ ID NO: 783463 - protein, 58 aa, Homo sapiens
DVLRLCLSLGFPHRGSEPLKEVYLALGRFGEATTLEAPGQNSQAAPRPVSPEGGAGPA

SEQ ID NO: 783464 - protein, 127 aa, Homo sapiens
LRSENCHSRLVRHSMLGSGGGFPGRNVCVEGKFRAKFCWLVVVSAGFRGTTVSPWSPSHLPSPLAGCVVAGMWAGGRASRDILKEDVCLVGWFGEGLIGGMSWASPCRQLELITNSASLICNRETLC

SEQ ID NO: 783465 - protein, 118 aa, Homo sapiens
RYHVDQAEEDGGFPGRNVCVEGKFRAKFCWLVVVSAGFRGTTVSPWSPSHLPSPLAGCVVAGMWAGGRASRDILKEDVCLVGWFGEGLIGGMSWASPCRQLELITNSASLICNRETLC

SEQ ID NO: 783466 - protein, 78 aa, Homo sapiens
PGALNPPGDLPLQEALQAAPAHAEPQLQSSYQLCQEVRTTGLPSLTPRLLYPPAEALSGFALHPSLLSPCSTDSTSCR

SEQ ID NO: 783467 - protein, 56 aa, Homo sapiens
HREGRLQERTEGRLQECTEGRLQECTEGRLQEHREGRLQEHREGRLQKRTEGRLQE

SEQ ID NO: 783468 - protein, 195 aa, Homo sapiens
TISAHCNLCFPGSSDSPASGSRVVGITGKLSGPQARMSQAWVPGLAPTLLFSLLAGPQKIAAKCGLILACPKGFKCCGDSCCQENELFPGPVRIFVIIFLVILSVFCICGLAKCFCRNCREPEPDSPVDCRGPLELPSIIPPERVRVSLSAPPPPYSEVILKPSLGPTPTEPPPPYSFRPEEYTGDQRGIDNPAF

SEQ ID NO: 783469 - protein, 117 aa, Homo sapiens
LHFLLLPNYSTSKTGTGCYSFAPVAVPRTPDTLSLCLPRVCVCTQIHTSCKQLWWKPKTRLAENGIYFAGHSEGLCELESSLSLTFYIEDMKGWSDWFPKVLPTGTACESAGVPTAP

SEQ ID NO: 783470 - protein, 252 aa, Homo sapiens
EAAEGGRVEGPPLRPPATSRRWAGPTLWRMEVTGDAGVPESGEIRTLKPCLLRRNYSREQHGVAASCLEDLRSKACDILAIDKSLTPVTLVLAEDGTIVDDDDYFLCLPSNTKFVALASNEKWAYNNSDGGTAWISQESFDVDETDSGAGLKWKNVARQLKEDLSSIILLSEEDLQMLVDAPCSDLAQELTSELCHRSSGCSTHLQQVLDQREEVRQSKQLLQLYLQALEKEGSSCQSRKSPKLPLVRRWMP

SEQ ID NO: 783471 - protein, 72 aa, Homo sapiens
PDCVEIFRHEDCASASLANLTCDQLADRQSPVIEFWENKVLRLSGGLEVPGALNWEVTLCLLACWVLVYFCV

SEQ ID NO: 783472 - protein, 83 aa, Homo sapiens
LVPPGAQSSSRSVRFRARGLGAGCACCYRAASASGPSSSSLLKHLLSSITEASSPSPVHLFLVEIPAIKRHLGQLPFFCLLPR

SEQ ID NO: 783473 - protein, 118 aa, Homo sapiens
AGAGRPGGLSELEPRAAAAAAARPQGPVRACTQVPWPRAAASCSAVSPARLVRSRRRPRRRKDRTRNSSTAPWPQAAAHITGLLPAESAASGSPLNCTSSCTASRWPRSHARLSAVRP

SEQ ID NO: 783474 - protein, 180 aa, Homo sapiens
GGSKMAQAIFEALEGMDNQTVLAVQSLLDGQGAVPDPTGQSVNAPPAIQPLDDEDVFLCGKCKKQFNSLPAFMTHKREQCQGNAPALATVSLATNSIYPPSAAPTAVQQAPTPANRQISTYITVPPSPLIQTLVQGNILVSDDVLMSAMSAFTSLDQPMPQGPPPVQSSLNMHSVPSYLT

SEQ ID NO: 783475 - protein, 37 aa, Homo sapiens
MQLHWTLVVYLLDFAPQRLRMLIYLAPLDTPTVSSYD

SEQ ID NO: 783476 - protein, 102 aa, Homo sapiens
MGTWGLCSPCTSPGRNCWTSRMRGQRQGQHCPATEDCGPTDDTLSYQLLHLEDDQEEEGRSASVQSDVSRPGALVIPAFGRLRQADHLRSGVRDQPDQRGET

SEQ ID NO: 783477 - protein, 110 aa, Homo sapiens
CSRGYPPVRCATDSIDTSQRFQSKFEVGSPKLSSAEPFLQAPSCWQAPSTLPGPCNPFSCPPLLQEGEEERRVEKALTLWPRAWNSTSLRPPHKAPMAFWRRGQPPCQKK

SEQ ID NO: 783478 - protein, 141 aa, Homo sapiens
VCSQRGRRETRRVGDLEVRGEERFSRPQWLSVPSAAEKPARKTEKCPVDLLPGKPWVTLARAIVESSGSEPEAILQPSLLSPDIGQCLETFWLSQLSIGVSCWHLAVGDQDYCKHFTMDRIVPHNKELSAETLLESDGGGT

SEQ ID NO: 783479 - protein, 133 aa, Homo sapiens
ICFVGQAPQVGKGLSGSCPPPVPFSKSWNSGTGRMLPAAEGGEQMFECPLSEAHQLSNWGPPLALISNSLARVRGQEVSHSSCWGRRRRPRGQQLCPTFLPKLGLAIFWWIKEGSQLAGQSWAGPCASLGLIR

SEQ ID NO: 783480 - protein, 85 aa, Homo sapiens
DDKEEKNPGAVTARRPQHPRTSARYEHAPTGMSKYSMKCNNAYFYEIYEILAERQRRLDRGDEMKGLSGGKDSLACSFPLSHKMQ

SEQ ID NO: 783481 - protein, 126 aa, Homo sapiens
PGYLGRNTGNRILNHTVISCWRAPGICGPQVLIVECIFVLSLTCRVTSLPLFLCAGFDISQMATVVGRRPGCLVQELMKQNRKTFYGQLWKHSETAALLSNYIYCVCFIPHREGSQGKNTFLFIVL

SEQ ID NO: 783482 - protein, 64 aa, Homo sapiens
MKIKPPACSVQSSFTLSLHSVSWTHHAPSASDLSCVFAQAICSAENTVFPQPSIPLTSGQIRGL

SEQ ID NO: 783483 - protein, 73 aa, Homo sapiens
RRMSPKTYRAIERRKHHIFGVFQLSEACGPQEALQVWEQLKVTVLVFWVAGPLWQVCGHSGVSAPSRHHEIVT

SEQ ID NO: 783484 - protein, 75 aa, Homo sapiens
KTLTLFLAPTLSCFLVLGEASCHSVSCPGDGPCGRDQWWLSAISQHQTEALSPRNHEDLSPAKSHVLLGLEVTTP

SEQ ID NO: 783485 - protein, 75 aa, Homo sapiens; identical to SEQ ID NO: 783484

SEQ ID NO: 783486 - protein, 71 aa, Homo sapiens
CETRAWLRCPELSCRGVAVDSRYQLILVLWHHSDCVLVYLTVPWSLRAFLVPSSCSWLTQTDCCWILLTNL

SEQ ID NO: 783487 - protein, 648 aa, Homo sapiens
SLIRQTTGEKKNPFRYFSKQELRELFTIEDLQNSVTQLQLQSLHAAQRKSDIKLDEHIAYLQSLGIAGISDHDLMYTCDLSVKEELDVVEESHYIQQRVQKAQFLVEFESQNKEFLMEQQRTRNEGAWLREPVFPSSTKKKCPKLNKPQPQPSPLLSTHHTQEEDISSKMASVVIDDLPKEGEKQDLSSIKVNVTTLQDGKGTGSADSIATLPKGFGSVEELCTNSSLGMEKSFATKNEAVQKETLQEGPKQEALQEDPLESFNYVLSKSTKADIGPNLDQLKDDEILRHCNPWPIISITNESQNAESNVSIIEIADDLSASHSALQDAQASEAKLEEEPSASSPQYACDFNLFLEDSADNRQNFSSQSLEHVEKENSLCGSAPNSRAGFVHSKTCLSWEFSEKDDEPEEVVVKAKIRSKARRIVSDGEDEDDSFKDTSSINPFNTSLFQFSSVKQFDASTPKNDISPPGRFFSSQIPSSVNKSMNSRRSLASRRSLINMVLDHVEDMEERLDDSSEAKGPEDYPEEGVEESSGEASKYTEEDPSGETLSSENKSSWLMTSKPSALAQETSLGAPEPLSGEQLVGSPQDKAAEATNDYETLVKRGKELKECGKIQEALNCLVKALDIKSADPEVMLLTLSLYKQLNNN

SEQ ID NO: 783488 - protein, 464 aa, Homo sapiens
RLRGAGVNRTRHLQDGKGTGSADSIATLPKGFGSVEELCTNSSLGMEKSFATKNEAVQKETLQEGPKQEALQEDPLESFNYVLSKSTKADIGPNLDQLKDDEILRHCNPWPIISITNESQNAESNVSIIEIADDLSASHSALQDAQASEAKLEEEPSASSPQYACDFNLFLEDSADNRQNFSSQSLEHVEKENSLCGSAPNSRAGFVHSKTCLSWEFSEKDDEPEEVVVKAKIRSKARRIVSDGEDEDDSFKDTSSINPFNTSLFQFSSVKQFDASTPKNDISPPGRFFSSQIPSSVNKSMNSRRSLASRRSLINMVLDHVEDMEERLDDSSEAKGPEDYPEEGVEESSGEASKYTEEDPSGETLSSENKSSWLMTSKPSALAQETSLGAPEPLSGEQLVGSPQDKAAEATNDYETLVKRGKELKECGKIQEALNCLVKALDIKSADPEVMLLTLSLYKQLNNN

SEQ ID NO: 783489 - protein, 648 aa, Homo sapiens; identical to SEQ ID NO: 783487

SEQ ID NO: 783490 - protein, 411 aa, Homo sapiens
VFQRIPGFLQEGPKQEALQEDPLESFNYVLSKSTKADIGPNLDQLKDDEILRHCNPWPIISITNESQNAESNVSIIEIADDLSASHSALQDAQASEAKLEEEPSASSPQYACDFNLFLEDSADNRQNFSSQSLEHVEKENSLCGSAPNSRAGFVHSKTCLSWEFSEKDDEPEEVVVKAKIRSKARRIVSDGEDEDDSFKDTSSINPFNTSLFQFSSVKQFDASTPKNDISPPGRFFSSQIPSSVNKSMNSRRSLASRRSLINMVLDHVEDMEERLDDSSEAKGPEDYPEEGVEESSGEASKYTEEDPSGETLSSENKSSWLMTSKPSALAQETSLGAPEPLSGEQLVGSPQDKAAEATNDYETLVKRGKELKECGKIQEALNCLVKALDIKSADPEVMLLTLSLYKQLNNN

SEQ ID NO: 783491 - protein, 109 aa, Homo sapiens
LNKAPPSLRLFSKCRQGTVPRPLEATPNLPCDLDPPRLRGISRWQPLQPLPRRLHLRTGGSNTEKRARAPQPLLGALCVLNKHKRLNYQPLRHSEPQAQNSLLFWPHIK

SEQ ID NO: 783492 - protein, 76 aa, Homo sapiens
HEATEDTGYLVGLGRLDFRHRVSCLAEVQVPCKYRYADFYRPVGDHEDFGSKHNRLEALCFCDIRGIALRDQFLPQ

SEQ ID NO: 783493 - protein, 111 aa, Homo sapiens
MLYPLPQCLSSRHSQSRFLHAMQISAKTHLLKKPSLTTQSHLPPLPLQSLPHHLALFSVHLFLVSCVSPASFTRVKFHGGRDGVGVAHRGICRTPNSAGHTEGAGRRKRPL

SEQ ID NO: 783494 - protein, 86 aa, Homo sapiens
SEWRAQVWWLERLWCDALPYFDQGYEASGVQEAAAVLVEKETRRYQPTMNYLRYLTVLDYSCRNGTLGHYMTTTAILTQNLVSWAI

SEQ ID NO: 783495 - protein, 72 aa, Homo sapiens
GEGILVEKGGRKGCGEPCGGGRRRAENPEEGGGQSRSRCEQRKKKRGQERTKEKLETEVFLEQGLGQAAQVG

SEQ ID NO: 783496 - protein, 79 aa, Homo sapiens
QGPRTWLVPIFRGIHGTGWRRRVLRDTGLTVKEAGTRPPGSSQDTLHGRARLSPGTPCSGLQSNAHPGLSPSPSLWPPP

SEQ ID NO: 783497 - protein, 102 aa, Homo sapiens
WCVGRSSTPVSLPVSGAALFSCAQEERPGAGWGCCRCRSQPRTGLSAHRHQGPGVPGVCPTCTDVTAHVGLTQAHTDNVHGCHSTHSLTQTSQHVGLMGTCR

SEQ ID NO: 783498 - protein, 102 aa, Homo sapiens; identical to SEQ ID NO: 783497

SEQ ID NO: 783499 - protein, 109 aa, Homo sapiens
LSAGRPSDSQHGGQETLCKQNCHNHSAFNSYHPDKSAASIVEAGPSTSKKIMTHCRLGGLLLSFFFFFLAMKKPLMSRNTPMGPLSARWNLLKMHHMEQKSAVLKQRFM

SEQ ID NO: 783500 - protein, 114 aa, Homo sapiens
GAAPDRLSWVGTLRDVPSDTQTQEAAVSGGAGEAGTRGPQQSCPPGMPWQSAASTMESILGQAEGWKYGQREEFLALKGLLAGYGDETGTHVHRSPGPGHHAQGTAGIVLAPRA

SEQ ID NO: 783501 - protein, 53 aa, Homo sapiens
VRGDSRGSAGGPEWLGLQDSSEIHFKVKMTTHLKKLKESYCQRQGVPMNSLRS

SEQ ID NO: 783502 - protein, 67 aa, Homo sapiens
HAGESFKVDADIYGKPIPTIQWIKGDQELSNTARLEIKSTDFATSLSVKDAVRVDSGNYILKWGFPS

SEQ ID NO: 783503 - protein, 109 aa, Homo sapiens
HAGESFKVDADIYGKPIPTIQWIKGDQELSNTARLEIKSTDFATSLSVKDAVRVDSGNYILKAKNVAGERSVTVNVKVLDRPGPPEGPVVISGVTAEKCTLAWKPPLQD

SEQ ID NO: 783504 - protein, 155 aa, Homo sapiens [sequence omitted]

SEQ ID NO: 783505 - protein, 155 aa, Homo sapiens [sequence omitted]

SEQ ID NO: 783506 - protein, 78 aa, Homo sapiens
RKWNFLSRKNAHEPKKEKKNSEGSSFLVHTINGQIAEKIALERTGFSRKRDDGERGHKCQHQKGESLGHIPLAGEVCP

SEQ ID NO: 783507 - protein, 89 aa, Homo sapiens
MLESKSRQVSCWFPDLSLIVAPQSETEKPKSLEGIQTSEGIQCWWRPIKSNLYNIPNHVSRGAKRTCPSRKHQETFRKENTNSLEYCHR

SEQ ID NO: 783508 - protein, 46 aa, Homo sapiens
TPPNSRISLTYSPVSLMFSPPALRYSSVSLSYSPTISRFHLESASR

SEQ ID NO: 783509 - protein, 255 aa, Homo sapiens
MWEWKICNSHGARPFAEPAGWEFVNLLRHHKSFLIAPLCLSVPVSRPVLTLRSPGAQAAVGDLLELHCEALRGSPPILYQFYHEDVTLGNSSAPSGGGASFNLSLTAEHSGNYSCEANNGLGAQCSEAVPVSISGPDGYRRDLMTAGVLWGLFGVLGFTGVALLLYALFHKISGESSATNEPRGASRPNPQEFTYSSPTPDMEELQPVYVNVGSVDVDVVYSQVWSMQQPESSANIRTLLENKDSQVIYSSVKKS

SEQ ID NO: 783510 - protein, 341 aa, Homo sapiens
MWEWKICNSHGARPFAEPAGWEFVNLLRHHKSFLIAPLCLSVPVSRPVLTLRSPGAQAAVGDLLELHCEALRGSPPILYQFYHEDVTLGNSSAPSGGGASFNLSLTAEHSGNYSCEANNGLGAQCSEAVPVSISGGWVFLDTEFDVNGCVSPAWRCLLCVKRGKVISVSSGFSSPHTNLKSTDYTSMISYLNLYLTSLYSIYKKGPSLKPLGLKHCFLSSGPDGYRRDLMTAGVLWGLFGVLGFTGVALLLYALFHKISGESSATNEPRGASRPNPQEFTYSSPTPDMEELQPVYVNVGSVDVDVVYSQVWSMQQPESSANIRTLLENKDSQVIYSSVKKS

SEQ ID NO: 783511 - protein, 508 aa, Homo sapiens
MLLWSLLVIFGEFNNLTDSLTLVAPSSVFEGDSIVLKCQGEQNWKIQKMAYHKDNKELSVFKKFSDFLIQSAVLSDSGNYFCSTKGQLFLWDKTSNIVKIKVQELFQRPVLTASSFQPIEGGPVSLKCETRLSPQRLDVQLQFCFFRENQVLGSGWSSSPELQISAVWSEDTGSYWCKAETVTHRIRKQSLQSQIHVQRIPISNVSLEIRAPGGQVTEGQKLILLCSVAGGTGNVTFSWYREATGTSMGKKTQRSLSAELEIPAVKESDAGKYYCRADNGHVPIQSKVVNIPVRIPVSRPVLTLRSPGAQAAVGDLLELHCEALRGSPPILYQFYHEDVTLGNSSAPSGGGASFNLSLTAEHSGNYSCEANNGLGAQCSEAVPVSISGPDGYRRDLMTAGVLWGLFGVLGFTGVALLLYALFHKISGESSATNEPRGASRPNPQEFTYSSPTPDMEELQPVYVNVGSVDVDVVYSQVWSMQQPESSANIRTLLENKDSQVIYSSVKKS

SEQ ID NO: 783512 - protein, 192 aa, Homo sapiens
MWEWKICNSHGARPFAEPAGWEFVNLLRHHKSFLIAPLCLSVPVSRPVLTLRSPGAQAAVGDLLELHCEALRGSPPILYQFYHEDVTLGNSSAPSGGGASFNLSLTAEHSGNYSCEANNGLGAQCSEAVPVSISGPDGYRRDLMTAGVLWGLFGVLGFTGVALLLYALFHKISGCIYHLDSPYFAMTFPLLI

SEQ ID NO: 783513 - protein, 101 aa, Homo sapiens
VHVLEKVEVPLKGSSPRKLPILLPSPGVRVSVLICCFHVLVNLYFVSSCRYYCWALGKREINEDSCFLSILFKEYTILYLASSIRAELPRKLPLSILAFFP

SEQ ID NO: 783514 - protein, 81 aa, Homo sapiens
AHTRHTRTDAHTRHTRTHTHARTRTRTHTHTHTQTHTHTHTRAHTHAHTHTHAEGEPREGIQNRILKKRKNRRFTTRRSES

SEQ ID NO: 783515 - protein, 91 aa, Homo sapiens
MLFTGIPVCVYDVPPSKTNNNTVNVGPGFTKQRPRVIGSTAMCVSVSLHFINFVHCGCTPQNETSLYACNIPCLLQLTIYCLSCYHILAGS

SEQ ID NO: 783516 - protein, 41 aa, Homo sapiens
IAQVQAFIGSHLDYHQTIRSLLIPSSTLRPDSSPPSTHMSY

SEQ ID NO: 783517 - protein, 71 aa, Homo sapiens
LAAEREFRDSSTRGARIQSVTPGGVLGRYWEALTDSGVDGNEALNCERIVGEKEEQGIFIKGIDRDEVSGG

SEQ ID NO: 783518 - protein, 56 aa, Homo sapiens
EKHSPLGAAWEVADFQPEQVETQPRAVSREEPGSLHSGHQEQLNRKRERRPLPKNG

SEQ ID NO: 783519 - protein, 119 aa, Homo sapiens
KLGTGDTYGGSMNQMKYITEEVCFFLLYFPLPPLITLFFFNNRSGLALPRLAQTTSLVLNSTPWTSHKASWSFVLFSHFPLPPEFSHSVFPNYRLCQGAPVLKTVHQVETSVVSVSVFF

SEQ ID NO: 783520 - protein, 119 aa, Homo sapiens
KKQGRWRVCERGSEKGLSHLSGQVCGTQIRLICISSNKLLGSECLKQAECREVSKYVRSEFQAFCSQLLGGAAVPWGVLPCLHRVPCLAALTLRNGLHCGPVETGRRISYPAGLRATGT

SEQ ID NO: 783521 - protein, 54 aa, Homo sapiens
EPTDPWEWGVGRGGVASHCDQGLPGGSGAPSPPPHSPVSPPSQLPGPLMYQSCL

SEQ ID NO: 783522 - protein, 69 aa, Homo sapiens
VQPSVCGQKPESPWQTTDIESSVQKLKNLESDVQGQEASSTGERRRPEDSASLILPTSACFILAVLAAD

SEQ ID NO: 783523 - protein, 108 aa, Homo sapiens
GLFFLQFLPGLVFDCLLWSVSSAFLIGGFPRMSGDAICLCVMGVSTSRPQRLGVCTQGGARGASEQVSVGSSPLPVDSVERVGQSVSSGWSVSQPSLLPRSVPWGSGR

SEQ ID NO: 783524 - protein, 154 aa, Homo sapiens [sequence omitted]

SEQ ID NO: 783525 - protein, 70 aa, Homo sapiens
GDYILLVVQAKDLAVLLEACVSPNPTSNQAAHPAALTFKTSRIQSLLATSTAPHWSEPMSPVTYMMTSAP

SEQ ID NO: 783526 - protein, 101 aa, Homo sapiens
DRQCPIPKVQAGTHGKGILLPSLPLPAPPLRQSLFLVPNPPQRESTRGMYFSFFSGFLFTSLGSAGVCTHLRSCTQPLSKLHIHEWSWDHSLPSPAKQTQP

SEQ ID NO: 783527 - protein, 103 aa, Homo sapiens
SEFFISVIALFSSKLFIWSLCKISTFLLMFSIWGNLQPPSSEALPMSRGLCIPLSSIPQFSNFILLKFLTDQATHEPLPMTHSFMHYWGIISHPPPCMGLFGF

SEQ ID NO: 783528 - protein, 123 aa, Homo sapiens
LPFLKCLGWRVRVKFLTLACYAEQECNERVSSGTEVCRLCSVKSLAQLSSLTFQNFSSCGLHGCVHLSILYPPLSLSFNPEATVPLDKYYYLRLHGCFLKVLSQSLQILSDHLLTHSGVAYGV

SEQ ID NO: 783529 - protein, 68 aa, Homo sapiens
ASEVTGQGPVFSRLAEKESVKDLGPEFQGLWECLPDSSEVPAGPPTAPVLLMKLDYSLQQFLFPCFGL

SEQ ID NO: 783530 - protein, 152 aa, Homo sapiens
PSWGSHTCRGTHQRVLSLKLHLQGVHRAAQLQDLQMTALQLLEQDMACRLMPSDWSTERHNYLPAQVDAESSLLCSLPSSGLGTTAPHPGSWSPPRPHTGPISPLTAQVRSGLSPQLNPELVLCTPQSAGFLCTQKEQTLHSFSPPPNVLPT

SEQ ID NO: 783531 - protein, 101 aa, Homo sapiens
PACLLGHRCPLHQRVVSPTSAFPVVSLSPGLYLGCVARWQTFSRRFQFGFVKAWATWAPASDPQGFSSPPYPEQPLCWDQDDHTPAKDKVLRGAHCPPAGG

SEQ ID NO: 783532 - protein, 79 aa, Homo sapiens
FCYARPQFPHWDHGALSGEGADQERLRGESGDSQNRGGGLQPAGHSSTWSSGSPSEHVTGILGLRAPQSNGVPPPPPTS

SEQ ID NO: 783533 - protein, 104 aa, Homo sapiens
RDKIRIEPDPREGGARASHYAHYVGKRVNRSSNHSITQYTFVTNLCLLHRGYVCIPESKIKIEKEKIIKKIKGMRQMLTVVISRKWKYELFLYSVLLLYALLFL

SEQ ID NO: 783534 - protein, 142 aa, Homo sapiens
MTPSARMSQPEAEEAAWLQVLSAMIVYALMVVSYFLVTGGIIYDVIVEPPSIGSMTDEHGHQRPVAFLAYRVNEQCIMEGLASSFLFTIGGLGFIFLDRWNAPNIPKLNRFLLLFIGFVCVLLSFFMARVFMRMKLPGYLMG

SEQ ID NO: 783535 - protein, 104 aa, Homo sapiens
TQRHTTQTQTHTHTLLSCLTSSVSPAAMEGGFWCLYHALYLFLWESSGQGRALRCYRRAQKWYRSFPVPQVVYFGTFPVIDLGPELRVPGIEGRPHPCPRCHSP

SEQ ID NO: 783536 - protein, 173 aa, Homo sapiens
VDEAANTLMTRLGFLLGEKVTEVQPGDQYSMEVQDENQTSAITQRISPCSTLTSSTASPPASSPCSTLPPISTNATAKDCSYGAVTSPTSTLESRDSGIIATLTSYSENVERTKYAGESSKELGSGGNIKPWQSQKSSMDSCLYRVDENMTASTYSLNKIPERNLETVLSQSV

SEQ ID NO: 783537 - protein, 109 aa, Homo sapiens
HLKGSIQLFEAKLDKGARMLWELAIDFSPRCSENPEKIIATEQNTCAMEKSGRIYTEIIRIWDIVLDHCKLADSIKAICNAYNRGLSCVLRKKLKGINKGQVSANMKIQ

SEQ ID NO: 783538 - protein, 370 aa, Homo sapiens
  misc_feature (10)..(10): Xaa can be any naturally occurring amino acid
  misc_feature (29)..(29): Xaa can be any naturally occurring amino acid
IATGPLRSRXDSLYRIRPSKPVCIHKNSXCLKEQQKRYFSVFSDRVVYTPESLYKELFSQHKGLRDLINTEMRPFSQGILIFSQSWAVDLGLQEKQGVICDALLISQNNTPILYTIFSKWDAGCKGYSMIVAYSLKQKLVNKGGYTGRLCITPLVCVPESLEKAQSVYSSYLQIYPESYNFMTPQHMEALLQSLVIVLLGFKSFLSEELGSEVLNLLTNKQYELLSKNLRKTRELFVHGLPGSGKTILALRIMEKIRNVFHCEPANILYICENQPLKKLVSFSKKNICQPVTRKTFMKNNFEHIQHIIIDDAQNFRTEDGDWYGKAKFHHSDSKGWPRSSLDLSGLLSDLSLELQWPPPSLRPVSKRRDQ

SEQ ID NO: 783539 - protein, 120 aa, Homo sapiens
LLSLGGNTGPAPHAVAPPSLPLQGAEDKRCPCPGQANRPSLVMGWGGEKCVLLMAGEEEGLDISSQGHARRLVTLQGDAEESGAHSLQLFSPQGRILTPPAQVPPIGLSLAQERKVLWSE

SEQ ID NO: 783540 - protein, 121 aa, Homo sapiens
EQGTPTSLARTGGASAGTCPKGAPSPVILRVRQACQPVLSSLSCSQATRKPLGAQRPRLTRQLGRAGHRGRSDLPRSCSDMEPELKDHHSLQATSLLCCWLSLKTSVFQLTKAVHGNVIGE

SEQ ID NO: 783541 - protein, 78 aa, Homo sapiens
GSVQRIPSDAKWWWGDGGRERRRGENSGTQQESTFKSSSENRSAYMCEKTTDTKKNCWKDRRINLQSTHGSRNSLYAH

SEQ ID NO: 783542 - protein, 87 aa, Homo sapiens
SPNALCSCGKSCYRGIPVLIADTSLERCNLLRVKSPTQHKLCLSTFLTQCPIQHGFYGGVFIWAIVSSFLHVWNFPYIRKPFPIVIK

SEQ ID NO: 783543 - protein, 108 aa, Homo sapiens
  misc_feature (4)..(4): Xaa can be any naturally occurring amino acid
AFGXTPPFSLSIPSHNDLWPNYNSVPSTFHASALWPIIHAVPYSLNLHVKFFMILPHAPPLLAPRSPPYSPFSLSIPSHNDLWPNYNSVPSTFHASALWPIIHAVPPR

SEQ ID NO: 783544 - protein, 90 aa, Homo sapiens
ASPRGVQQAGIHCSLALVPFAGACVWAAGPITRRQPSGYGAGLLQGWIWAVESGWHPGGCVGPAVALLGLTSGWRSEGGGYTEICLYAHI

SEQ ID NO: 783545 - protein, 126 aa, Homo sapiens
FPTHEEEGTRTAWSEDQTGPWGQGGRGRPAKQDLGHRGRKPALPHVETSQREHRQGLTRHSTGPALQSSQRSPELQVAMVPISQAPSGARLASVHTPLTPSPMPSWPLSWRAFPHGTHWMSEGTYL

SEQ ID NO: 783546 - protein, 151 aa, Homo sapiens
TQAQKTRHYSAVKKKLAEAGRQASGLEIAWGCVLALHLVRASWASATSLRCNLDKRGTRQSQDQLDGETWHPADCEVPDAFSGLWGGADYSPSHGHSRLLPVPALSRRAPCVRRSRGAGTPARQGESRCRRLRYTNSASHHARCHAGHSVP

SEQ ID NO: 783547 - protein, 108 aa, Homo sapiens
LHSRLGRQSKTPSQKNKKRKKKKCFLLMEAKELMPLLASPVKAASSFFLWLLSIWLRLAAGIKPGLSLVPNLELLHISHLPQGLFLLCKSTHKNIYPRAACGCQFVYT

SEQ ID NO: 783548 - protein, 39 aa, Homo sapiens
MVKAELTTGGVLQRGGLQRSWQAPIFMDVGEWEQRNWRL

SEQ ID NO: 783549 - protein, 43 aa, Homo sapiens
VIRAEAPLKITQERAPQTHNPNLQAPACKSERYTKSNFLFYSF

SEQ ID NO: 783550 - protein, 84 aa, Homo sapiens
QALGWGVCESATALPTSPHEASSHAEQHVLQYAIFSKSHHLSAASLTQGRLWPQKPRLSSTWNWTQLSLLSFSSQGATSGEAPA

SEQ ID NO: 783551 - protein, 77 aa, Homo sapiens
HQASPSPTNNQQVGTSARDPSAQKHSPSPSGGPETPLPQTRHTLHQGNPASGTTITSTWPRRHSPSPLVTGLLSPLR

SEQ ID NO: 783552 - protein, 110 aa, Homo sapiens
TRGSSIHYLGLLHHPSPGAPPSSLTRGSSIPHPGILRHPSPGISPSLTWGSSVPHLRLLRPSPRALPSSLTQGSSIIPQPGLLCHPSPRAPPSSLTQGSSIIPHPGLPEG

SEQ ID NO: 783553 - protein, 77 aa, Homo sapiens
RYDQEDELVPVGVCHIDPVSLFLYNPCAFLFYSFSARLLWASGPLPWQILSHAPVVCLWTSFLLFLVSLKHPPSLTY

SEQ ID NO: 783554 - protein, 143 aa, Homo sapiens
HPPSTMAVQASPAQSRRAAHSAASETPLGAPAFFFPLIHDFIFFFGFTWRLAGLGSPGSAPLHIVAVAWDPSGARAPAARGVRAPAGLPGGRREDTHCGSRSPSSRSRAPPAGDVIPSASAAAAAAGSGAGPARARHCAAARP

SEQ ID NO: 783555 - protein, 73 aa, Homo sapiens
RRLLLLNSRPRRPPAQKAPALTAFQGAPGPLGKIYTKGHSLGSGPANPSSFIFSTPPTHHADFQPCLNAGSHL

SEQ ID NO: 783556 - protein, 74 aa, Homo sapiens
NSEFSPVKILIVLERNQDKLVFQGATREFGALTVAQNQSLRERGPARFLLKGGGAPDSQGLGPGAGPAAEAPLP

SEQ ID NO: 783557 - protein, 56 aa, Homo sapiens
PQNQHFQTNSQHSKRRQLGGLVPPLDETIPGEHVPLSSKINKSSASKGNHGGHPIP

SEQ ID NO: 783558 - protein, 141 aa, Homo sapiens
GSLTILLPTVCSRISSGVTLDHAVPWNLASPASPSLTPCWAHLVLFPASVLYPCLWRHSSCSQGPSTALSCVSASLLWTHLGSNPGLRPSFIAFSFPKELTHLQGFHSNGFFNSGIFHFQSPQTSLWNSDPGLLTYKQIQA

SEQ ID NO: 783559 - protein, 139 aa, Homo sapiens
ARPERGPRQDRSPQARAPMNLAGAAFTNARAPGRTLFWHSISERPTRPAPPRTKLAAAPARGLPARGQVSGGRGAAVPTPPIARPRPARASPLALPLAAPAPGLGGLSPLQSPTLPAPPLRKGETQRCRRGLPAPLPSP

SEQ ID NO: 783560 - protein, 62 aa, Homo sapiens
MTPRYNVLIKTMPESSGTRIIIPNAFDLLVTVAPTTSCVFPPLWPCPGYVSPLCFHQEKLDQ

SEQ ID NO: 783561 - protein, 113 aa, Homo sapiens
VLLDSSRMPSHLILNLERKRRPKVVFVSLFMCLFLFTSVSVCVDKFFLFSCQSAFCQLIFSKTLEGGGEATFVPISNICAQMKAHHPEFLYFFQPPKYNHLPFPAQDLVPSSS

SEQ ID NO: 783562 - protein, 105 aa, Homo sapiens
MCMCVRERLYGGWECVCAMFRSGAGGVAGGTETLTPFLWGARMKAGSVPREPWCRSPYSGRREPKESWVNPGPAFVSVKCTLYECKLQHGPWQARVVGSGVLKAI

SEQ ID NO: 783563 - protein, 110 aa, Homo sapiens
QQRGGPERAISGFLFLKPGSGCPAHHQHFQYWKLQKLQLPPAQHQRQALCTGLCSDHGQPGERPPAWVEEVLECRGARKAREVDHHGWDRALGSNPAFSFSTSMALSKSS

SEQ ID NO: 783564 - protein, 69 aa, Homo sapiens
QVIRLPLSPRPQRFIRVAVCVCVMGGGVFKVLLASLNQLCPLAVTFQALPGSNSFSGSPSIDQQTHCDT

SEQ ID NO: 783565 - protein, 143 aa, Homo sapiens
QSHRRLSSLNEQFPNPTVIFSSSTNEIVKKPRIFIKLKIKPKHSNLFSKSLLTEKHRKFLILKLPSLLGSLSEIPKCAPNWAFFLSLGRAWGGCGGDELERSSQAGETLQQLGNHLPVVIYSVPLKISMRSQYIKCMTPNICN

SEQ ID NO: 783566 - protein, 38 aa, Homo sapiens
EGSRARMREDYDSVEQDGDEPGPQRSVEGWILFVAGVH

SEQ ID NO: 783567 - protein, 723 aa, Homo sapiens
MPLFFRKRKPSEEARKRLEYQMCLAKEAGADDILDISKCELSEIPFGAFATCKVLQKKVLIVHTNHLTSLLPKSCSLLSLATIKVLDLHDNQLTALPDDLGQLTALQVLNVERNQLMQLPRSIGNLTQLQTLNVKDNKLKELPDTVGELRSLRTLNISGNEIQRLPQMLAHVRTLEMLSLDASAMVYPPREVCGAGTAAILQFLCKESGLEYYPPSQYLLPILEQDGIENSRDSPDGPTDRFSREELEWQNRFSDYEKRKEQKMLEKLEFERRLELGQREHTQLLQQSSSQKDEILQTVKEEQSRLEQGLSEHQRHLDAERQRLQEQLKQTEQNISSRIQKLLQDNQRQKKSSEILKSLENERIRMEQLMSITQEETESLRRRDVASAMQQMLTESCKNRLIQMAYESQRQNLVQQACSSMAEMDERFQQILSWQQMDQNKAISQILQESAMQKAAFEALQVKKDLMHRQIRSQIKLIETELLQLTQLELKRKSLDTESLQEMISEQRWALSSLLQQLLKEKQQREEELREILTELEAKSETRQENYWLIQYQRLLNQKPLSLKLQEEGMERQLVALLEELSAEHYLPIFAHHRLSLDLLSQMSPGDLAKVGVSEAGLQHEILRRVQELLDAARIQPELKPPMGEVVTPTAPQEPPESVRPSAPPAELEVQASECVVCLEREAQMIFLNCGHVCCCQQCCQPLRTCPLCRQDIAQRLRIYHSS

SEQ ID NO: 783568 - protein, 723 aa, Homo sapiens; identical to SEQ ID NO: 783567

SEQ ID NO: 783569 - protein, 615 aa, Homo sapiens
MPLFFRKRKPSEEARKRLEYQMCLAKEAGADDILDISKCELSEIPFGAFATCKVLQKKVLIVHTNHLTSLLPKSCSLLSLATIKVLDLHDNQLTALPDDLGQLTALQVLNVERNQLMQLPRSIGNLTQLQTLNVKDNKLKELPDTVGELRSLRTLNISGNEIQRLPQMLAHVRTLEMLSLDASAMVYPPREVCGAGTAAILQFLCKESGLEYYPPSQYLLPILEQDGIENSRDSPDGPTDRFSREELEWQNRFSDYEKRKEQKMLEKLEFERRLELGQREHTQLLQQSSSQKDEILQTVKEEQSRLEQGLSEHQRHLDAERQRLQEQLKQTEQNISSRIQKLLQDNQRQKKSSEILKSLENERIRMEQLMSITQEETESLRRRDVASAMQQMLTESCKNRLIQMAYESQRQNLVQQACSSMAEMDERFQQILSWQQMDQNKAISQILQESAMQKAAFEALQVKKDLMHRQIRSQIKLIETELLQLTQLELKRKSLDTESLQEMISEQRWALSSLLQQLLKEKQQREEELREILTELEAKSETRQENYWLIQYQRLLNQKPLSLKLQEEGMERQLVALLEELSAEHYLPIFAHHPPEPGSQRPSLITDLLPPSCLD

SEQ ID NO: 783570 - protein, 674 aa, Homo sapiens
MPLFFRKRKPSEEARKRLEYQMCLAKEAGADDILDISKCELSEIPFGAFATCKVLQKKVLIVHTNHLTSLLPKSCSLLSLATIKVLDLHDNQLTALPDDLGQLTALQVLNVERNQLMQLPRSIGNLTQLQTLNVKDNKLKELPDTVGELRSLRTLNISGNEIQRLPQMLAHVRTLEMLSLDASAMVYPPREVCGAGTAAILQFLCKESGLEYYPPSQYLLPILEQDGIENSRDSPDGPTDRFSREELEWQNRFSDYEKRKEQKMLEKLEFERRLELGQREHTQLLQQSSSQKDEILQTVKEEQSRLEQGLSEHQRHLDAERQRLQEQLKQTEQNISSRIQKLLQDNQRQKKSSEILKSLENERIRMEQLMSITQEETESLRRRDVASAMQQMLTESCKNRLIQMAYESQRQNLVQQACSSMAEMDERFQQILSWQQMDQNKAISQILQESAMQKAAFEALQVKKDLMHRQIRSQIKLIETELLQLTQLELKRKSLDTESLQEMISEQRWALSSLLQQLLKEKQQREEELREILTELEAKSETRQENYWLIQYQRLLNQKPLSLKLQEEGMERQLVALLEELSAEHYLPIFAHHRLSLDLLSQMSPGDLAKVGVSEAGLQHEILRRVQELLDAARIQPELKPPMGEVVTPTAPQEPPESVRPSAPPFPTAQEPPS

SEQ ID NO: 783571 - protein, 723 aa, Homo sapiens; identical to SEQ ID NO: 783567

SEQ ID NO: 783572 - protein, 690 aa, Homo sapiens
MPLFFRKRKPSEEARKRLEYQMCLAKEAGADDILDISKCELSEIPFGAFATCKVLQKKVLIVHTNHLTSLLPKSCSLLSLATIKVLDLHDNQLTALPDDLGQLTALQVLNVERNQLMQLPRSIGNLTQLQTLNVKDNKLKELPDTVGELRSLRTLNISGNEIQRLPQMLAHVRTLEMLSLDASAMVYPPREVCGAGTAAILQFLCKESGLEYYPPSQYLLPILEQDGIENSRDSPDGPTDRFSREELEWQNRFSDYEKRKEQKMLEKLEFERRLELGQREHTQLLQQSSSQKDEILQTVKEEQSRLEQGLSEHQRHLDAERQRLQEQLKQTEQNISSRIQKLLQDNQRQKKSSEILKSLENERIRMEQLMSITQEETESLRRRDVASAMQQMLTESCKNRLIQMAYESQRQNLVQQACSSMAEMDERFQQILSWQQMDQNKAISQILQESAMQKAAFEALQVKKDLMHRQIRSQIKLIETELLQLTQLELKRKSLDTESLQEMISEQRWALSSLLQQLLKEKQQREEELREILEEGMERQLVALLEELSAEHYLPIFAHHRLSLDLLSQMSPGDLAKVGVSEAGLQHEILRRVQELLDAARIQPELKPPMGEVVTPTAPQEPPESVRPSAPPAELEVQASECVVCLEREAQMIFLNCGHVCCCQQCCQPLRTCPLCRQDIAQRLRIYHSS

SEQ ID NO: 783573 - protein, 154 aa, Homo sapiens [sequence omitted]

SEQ ID NO: 783574 - protein, 667 aa, Homo sapiens
MPLFFRKRKPSEEARKRLEYQMCLAKEAGADDILDISKCELSEIPFGAFATCKVLQKKVLIVHTNHLTSLLPKSCSLLSLATIKVLDLHDNQLTALPDDLGQLTALQVLNVERNQLMQLPRSIGNLTQLQTLNVKDNKLKELPDTVGELRSLRTLNISGNEIQRLPQMLAHVRTLEMLSLDASAMVYPPREVCGAGTAAILQFLCKESGLEYYPPSQYLLPILEQDGIENSRDSPDGPTDRFSREELEWQNRFSDYEKRKEQKMLEKLEFERRLELGQREHTQLLQQSSSQKDEILQTVKEEQSRLEQGLSEHQRHLDAERQRLQEQLKQTEQNISSRIQKLLQDNQRQKKSSEILKSLENERIRMEQLMSITQEETESLRRRDVASAMQQMLTESCKNRLIQMAYESQRQNLVQQACSSMAEMDERFQQILSWQQMDQNKAISQILQESAMQKAAFEALQVKKDLMHRQIRSQIKLIETELLQLTQLELKRKSLDTESLQEMISEQRWALSSLLQQLLKEKQQREEELREILTELEAKSETRQENYWLIQYQRLLNQKPLSLKLQEEGMERQLVALLEELSAEHYLPIFAHHRLSLDLLSQMSPGDLAKVGVSEAGLQHEILRRVQELLDAARIQPGTSTAPASSRQGSSRMCGLWWGQSFAYISG

SEQ ID NO: 783575 - protein, 92 aa, Homo sapiens
GDTLGACPHPRTFYRNSRAESMWNSCCDSPGAPRLLERLLCSRGVCESPTLSDPTFHPGPETLAAATLLPAYHGTQLLRREGLEASSPQGLQ

SEQ ID NO: 783576 - protein, 360 aa, Homo sapiens
MALDVKSRAKRYEKLDFLGEGQFATVYKARDKNTNQIVAIKKVPLCRTGWSAVASSRLTATSTSPRLKQFSCRSSQLLTSTDLPTIGLPKCWDYRLRATTPSLQLVILSQHYFRILYIRQGFTLIVQSGVELLALSNPPASASQGAGITGVSAGSHYSCECAVSYLKPICLGVHLRPMIKLGHRSEAKDGINRTALREIKLLQELSHPNIIGLLDAFGHKSNISLVFDFMETDLEVIIKDNSLVLTPSHIKAYMLMTLQGLEYLHQHWILHRDLKPKQLVAQIENGVLKLGRFVGLAKSFGEPKLELIHIQVVTQVGIGAPELTYCGRLRLYWGRCWACWAGADISEGTPRVLLRGIQGE

SEQ ID NO: 783577 - protein, 206 aa, Homo sapiens
MALDVKSRAKRYEKLDFLGEGQFATVYKARDKNTNQIVAIKKIKLGHRSEAKDGINRTALREIGHKSNISLVFDFMETDLEVIIKDNSLVLTPSHIKAYMLMTLQGLEYLHQHWILHRDLKPKQLVAQIENGVLKLGRFVGLAKSFGEPKLELIHIQVVTQVGIGAPELTYCGRLRLYWGRCWACWAGADISEGTPRVLLRGIQGE

SEQ ID NO: 783578 - protein, 224 aa, Homo sapiens
MALDVKSRAKRYEKLDFLGEGQFATVYKARDKNTNQIVAIKKIKLGHRSEAKDGINRTALREIKLLQELSHPNIIGLLDAFGHKSNISLVFDFMETDLEVIIKDNSLVLTPSHIKAYMLMTLQGLEYLHQHWILHRDLKPKQLVAQIENGVLKLGRFVGLAKSFGEPKLELIHIQVVTQVGIGAPELTYCGRLRLYWGRCWACWAGADISEGTPRVLLRGIQGE

SEQ ID NO: 783579 - protein, 77 aa, Homo sapiens
DSTGVILSQSYPGSYPQFQTCSWLVRVEPDYNISLTVEYFLSEKQYDEFEIFDGPSGQSPLLKALSGNYSAPLIVTS

SEQ ID NO: 783580 - protein, 76 aa, Homo sapiens
KKKKIPWVKEKESESFLCAFDPSTEEMLNSRNSNPTTEGFEYILQNSKGKTFMLIVEFIRVSDVEKSVGKQRLFVF

SEQ ID NO: 783581 - protein, 126 aa, Homo sapiens
ASRVARTTGTCHYTPLIFVFLVETGFHHVDQAGFQLLTSGDLPASASQSDGITGMSHHTPPNSAHNAMFHLGNALPLSESHFSHLKEEVTVDDSEHLGCAEFYTKHTVSNSPNTPTRQVLLSPFYF

SEQ ID NO: 783582 - protein, 81 aa, Homo sapiens
PSLVGSSCPMQQGKGPTELITYRCPRTTEVSIVTHSLGLQGSQAPLPGLAEGTPQSLLLPAPKAASWVLHSLSHELHPTTG

SEQ ID NO: 783583 - protein, 69 aa, Homo sapiens
LIAAAEATQETVESLMQKFKESFRANTPIEIGQLQPPLRSTSAGKRKRRSKSRGRPSWHIWPGSQKVVL

SEQ ID NO: 783584 - protein, 37 aa, Homo sapiens
PIEETTLAEKLGMSEVSRVGRGIMTRGTSIPAWHSVN

SEQ ID NO: 783585 - protein, 117 aa, Homo sapiens
GCVHTCRGVGVALCVHTWTHVSALVWLHVSAGVCVRGCVGACVCGYMHVWVHVSGYMHVWVHVSGYMHVWVHVSAGVCMCRCVCRCMCLCIWVCACVQGCTDACVHVCGASCGCICV

SEQ ID NO: 783586 - protein, 46 aa, Homo sapiens
GGHQQLSGTADGLRLQTLACSEWGGAPGALSKKKAPGRLGRRRPAP

SEQ ID NO: 783587 - protein, 74 aa, Homo sapiens
TPLPYAQMSDPRSLRARHVSQDLLFHSPTHTDHKSGPPVTLLTDWLQVGVPTSPSLGLYLHGVPHRTLTFTGLL

SEQ ID NO: 783588 - protein, 115 aa, Homo sapiens
EAEWGREEELSCEAGPTATPQGPGVVSWNGLPESRGWDFVPRIPSVTEHECPQEDIACREAGPAALSAPPLQRGPVPQGCRAEDEVCCQDVHKACGSSKDGGSLGDGVQWGHLEE

SEQ ID NO: 783589 - protein, 131 aa, Homo sapiens
AYRGSRLCSQNHVAGTLYPASHQSLSMSVPRRTLPAGKQVLQLCLHRPCSEAPSLRVVVQRTKCAVRMCTRLVGAQRMGAAWGMECSGDILRRQRLSQAFEVELDGQREQNLGVPRGTFGAVSGSDVEGGR

SEQ ID NO: 783590 - protein, 102 aa, Homo sapiens
MLPCTSRPGFSNFLPPASPSLLTHASLSAHAHPPPEPLSIVCSQCALSGCFLSGTDHYTLGMPAMVFDVSEPLLGFPLVLLSCRQRLCMSSGFSKLHEDRET

SEQ ID NO: 783591 - protein, 129 aa, Homo sapiens
DLEYPQAVKTDSTVASRSTILSFTGSSENYNICHTPAPLSFTPYSTTNPFTGTLLLTQMGRGEANRELTMGEYLEKGILSFTPYSTTNPFTGTLLLTQMGRGEANRELTMGEYLEKGYSRQRKQPMQRT

SEQ ID NO: 783592 - protein, 109 aa, Homo sapiens
LTVGLRPVDSVPPIPYPSPEVPFLGQVPPPAGGTEEVATIRVSGVGNNISFEEKKKVLIQRQGNGTFVQTDKPLYTPGQQGKSHIFGVRLKPGETAVHRGKEGICGLTV

SEQ ID NO: 783593 - protein, 39 aa, Homo sapiens
EEARDRMKRRCGLVTGGQQGLDAQSIRFKGTGMYLQSNW

SEQ ID NO: 783594 - protein, 122 aa, Homo sapiens
LVLFPDLSQSSSHAHCFSNSSYHALACGGPATSQASTLDRNSPTKLSNKSLDRDTAGWTPYSYVNVLDSHFQISALEARYPPEDFYIELRHLSRPAEPHSPDKPWIQERTDRTRAERCLWNG

SEQ ID NO: 783595 - protein, 123 aa, Homo sapiens
MEELNPYTKISPALGAERHSVGAVTGIMLLLFLIVVLLGLFAWHRRRQKEKGRDLAPRVSYTPAMRMTSTDYSLSASTTPWWPVMEHLARPFSQRPRTQLSNKSLDRDTAGWTPYSYVNVLGQ

SEQ ID NO: 783596 - protein, 79 aa, Homo sapiens
LNNMPALNSKTCYPGIESNSSCQAWGPCEVTHGQLLVRGQEAGMWGPDPLDPHHEAVVMLWRAQAWHPGTSHRSPGRKL

SEQ ID NO: 783597 - protein, 116 aa, Homo sapiens
KQWMPMAEFSRCFWMEKLLVITISMSIFRVVVLLPRSQADVLWVECGDDQQEGPGLPVEGRDGEVRRLVPRWELDVFRVMVGAQIQNGVDQLGPPHLQHLHIIRLHGSQPHHPLNG

SEQ ID NO: 783598 - protein, 120 aa, Homo sapiens
TQKGVTSPTFHKSSEHCRVTVGTPEIKHGGEAGQGSQEAQHPDSTEPGWAPRPFCHPQTRGFCTSDDSIQISSLSCGPIHAEADSAGTRTIFHTPMIAPHPISSTHSLVPSSLQIILEKP

SEQ ID NO: 783599 - protein, 102 aa, Homo sapiens
AIPLEKGRGGARRIRKPPHLGNWLPHLFSVMPETAARAMSSPLGRPCPYTHLQQRHHLWTCGETPWEVKPHYTERRVGSRAGTNRAVGTEPSSTLVSLQLWP

SEQ ID NO: 783600 - protein, 61 aa, Homo sapiens
MSSLKIEDKATTFHKMRPDHLPPSSPCGLETESTFLSVLDLNVPPCKGNKEWTFRLMASFK

SEQ ID NO: 783601 - protein, 54 aa, Homo sapiens
RGAREMRYGGKADAGEMTQQNSAKTGLRVQESERGLRQGAIAHAHNPNTLKTEV

SEQ ID NO: 783602 - protein, 112 aa, Homo sapiens
GFLRWNPVLRFLFSLGLCNKRPRGSLSILQIFTSSLLSACCRGESEPLLVRTPGNLQAITGNRQDSKWSIKTELVRTPAGGILMDWRPRLSVMMNKHWRRALKGQGVLCCSA

SEQ ID NO: 783603 - protein, 124 aa, Homo sapiens
PPEGDFHGALAICQPRQQVLHLSSLLSPRINCLVPSLSPSLPTQGSSPTWKKGTQSPRPHPAPILGSLGKYLESLHFLFSTLEPTPASVPPLPLHRHCSFHCHLGPTVKHSPDHVSPGCFLLLH

SEQ ID NO: 783604 - protein, 97 aa, Homo sapiens
LHTTLSQYNQSMGYPPDLHTTLSRYNQSMGYPPHLHTTLSRYNQNMGYPPHLHTTPSWYNQNMGYPPHLHTTPSWFNQSMGYPPHLHTTLSQYNQSM

SEQ ID NO: 783605 - protein, 106 aa, Homo sapiens
SSGLARALPSSGILFPQVYTVSVSYLLQVSLSLSLSFFGEGGRALGPSRAGTPMLAGAWGRPTSLNTDGHEHSSPQGSEHLTDGGLCHPSSPCPLGGWGTLSSVGR

SEQ ID NO: 783606 - protein, 39 aa, Homo sapiens
GDEEKHRDHARLIGCVEELEFYSNCSGPQPEGLGYWQED

SEQ ID NO: 783607 - protein, 101 aa, Homo sapiens
LGLQCRSGPKSPGEHRPGHGNRRPGPGQLGMLTLHQAPHWASHGASSLVPPSSELLVPLSVFGRGRKLEALRGRAGIGVHSQLPGLQPAQYPPLPHPLFFY

SEQ ID NO: 783608 - protein, 113 aa, Homo sapiens
ILIPSRGLVGILFHPASFLQRLVTSAKPGPSGWTHTHDSRNELCGNWIAGWPGHPHSPLPPIATTPLVYPIKLAFSLQLLSRTARAWKIIVSCRTSCSYSLSLPSSNMKQESL

SEQ ID NO: 783609 - protein, 48 aa, Homo sapiens
MLPGCAYGSRAHSTDKRWAASQTLPGPRGAPRLGVEWRLASFDSPSHP

SEQ ID NO: 783610 - protein, 51 aa, Homo sapiens
IKTGNADEAVTIHPVTGSISVLNPAFLGLSRKLTIRASDGLYQDTALAYST

SEQ ID NO: 783611 - protein, 140 aa, Homo sapiens
LALSADPSPGSQGTRGGERQRGRCVGPTGPWPRLAHRPSWKTVRMEKPHCGSMKGHIPARHNWSGSHIKSPSVGRHPTANLRVFWGNPSSASVSPSGKQGRTSRGGSLRRFPPTLRSESPPLSQLRGWQQSRTRDGQGPE

SEQ ID NO: 783612 - protein, 222 aa, Homo sapiens
MRRSGEMLKPLVEKRRRDRINRSLEELRLLLLERTRDQNLRNPKLEKAEILEFAVGYLRERSRVEPPAAAAPGVPRSPVQDAKALASCYLSGFRECLLRLAAIAHDASPTARAQLFSALHGYLRPKPPRPKPVDPRPPAPRPSLDPAAPALGPALHQRPPVHQGHPSPRCAWSPSLCSPRAGDSGAPAPLTGLLPPPPPPHRQDGAPKAPLPPPPAFWRPWP

SEQ ID NO: 783613 - protein, 232 aa, Homo sapiens
GAMVTRDRAENRDGPKMLKPLVEKRRRDRINRSLEELRLLLLERTRDQNLRNPKLEKAEILEFAVGYLRERSRVEPPAAAAPGVPRSPVQDAKALASCYLSGFRECLLRLAAIAHDASPTARAQLFSALHGYLRPKPPRPKPVDPRPPAPRPSLDPAAPALGPALHQRPPVHQGHPSPRCAWSPSLCSPRAGDSGAPAPLTGLLPPPPPPHRQDGAPKAPLPPPPAFWRPWP

SEQ ID NO: 783614 - protein, 98 aa, Homo sapiens
PALGVSALSCPQSLATSPPWTSPSPDEEPMMAPILVEAWTFSLALRPCTAGLILLSQHTPLLWAAPWGAQTTACVRKASARTAPSAGMPFLHPHSVSP

SEQ ID NO: 783615 - protein, 250 aa, Homo sapiens
MPELNRLLYIYQITRLRISKVPFICLLQILPRLKQEGGLSPEGPDCSERTMIVYCTPGLGDRVSNKGGKMKLGEGKREKWGEGKRQDPKKGDRDPETGKGREPWRVEAGGSGAHAMRAGRHPHPLLHRDPRTVLFSSQAPPHGLQHTKQGAAAGLPGPGGPQRPQEPAVHLNLLSVPNPRHSVAPAFLGRGSPTFSYSQQCPNPLKSSKAADWEPRYVQPPGPQPHWKQEKEGTPGSDGRVKPHGAQGPG

SEQ ID NO: 783616 - protein, 181 aa, Homo sapiens
MKLGEGKREKWGEGKRQDPKKGDRDPETGKGREPWRVEAGGSGAHAMRAGRHPHPLLHRDPRTVLFSSQAPPHGLQHTKQGAAAGLPGPGGPQRPQEPAVHLNLLSVPNPRHSVAPAFLGRGSPTFSYSQQCPNPLKSSKAADWEPRYVQPPGPQPHWKQEKEGTPGSDGRVKPHGAQGPG

SEQ ID NO: 783617 - protein, 82 aa, Homo sapiens
KMSRKLSLEKTSLIVSSSDTAARKDSGWLVDIQAKDPENHRLNPKSSEVYSKDSKQATFTSGASGSQNRGGGQAQLNCHSRV

SEQ ID NO: 783618 - protein, 150 aa, Homo sapiens
MWHPRSCSCLGSRHTRLSCVVAEEQFPITSVFSSTSDSAVAFLRHLHHFLQQNSLAPGSDSRRLSQAAGTGTRGCHTQLEEQEAPAPTVYSGTSSCSSEKPVRPQLTPVLVPPHALTYTRAHVHTCMLQACVGGLRCVGVHPESGQKSHL

SEQ ID NO: 783619 - protein, 36 aa, Homo sapiens
MEVDLTHRREERFSQHQWSLPSNPHATFRGPQHRRH

SEQ ID NO: 783620 - protein, 68 aa, Homo sapiens
MGNRAEGFTVRDWIFWQSPFLKLGFPIIKGGRFFEQIQTWGMGQRSGTSIVPAMVVVQVYTSRGPRWA

SEQ ID NO: 783621 - protein, 823 aa, Homo sapiens
MKLFGFGSRRGQTAQGSIDHVYTGSGYRIRDSELQKIHRAAVKGDAAEVERCLARRSGDLDALDKQHRTALHLACASGHVQVVTLLVNRKCQIDVCDKENRTPLIQAVHCQEEACAVILLEHGANPNFKDIYGNTALHYAVYSESTSLAEKLLSHGAHIEALDKDNNTPLLFAIICKKEKMVEFLLKKKASSHAVDRLRRSALMLAVYYDSPGIVNILLKQNIDVFAQDMCGRDAEDYAISHHLTKIQQQILEHKKKILKKEKSDVGSSDESAVSIFHELRVDSLPASDDKDLNVATKQCVPEKVSEPLPGSSHEKGNRIVNGQGEGPPAKHPSLKPSTEVEDPAVKGAVQRKNVQTLRAEQALPVASEEEQERHERSEKKQPQVKEGNNTNKSEKIQLSENICDSTSSAAAGRLTQQRKIGKTYPQQFPKKLKEEHDRCTLKQENEEKTNVNMLYKKNREELERKEKQYKKEVEAKQLEPTVQSLEMKSKTARNTPNRDFHNHEEMKGLMDENCILKADIAILRQEICTMKNDNLEKENKYLKDIKIVKETNAALEKYIKLNEEMITETAFRYQQELNDLKAENTRLNAELLKEKESKKRLEADIESYQSRLAAAISKHSESVKTERNLKLALERTRDVSVQVEMSSAISKVKAENEFLTEQLSETQIKFNALKDKFCKTRDSLRKKSLALETVQNDLSQTQQQTQEMKEMYQNAEAKVNNSTGKWNCVEERICHLQRENAWLVQQLDDVHQKEDHKEIVTNIQRGFIESEKKDLVLEEKSKKLMNECDHLKESLFQYEREKTGGVVSIKEDKYFQTSRKTI

SEQ ID NO: 783622 - protein, 246 aa, Homo sapiens
MKLFGFGSRRGQTAQGSIDHVYTGSGYRIRDSELQKIHRAAVKGDAAEVERCLARRSGDLDALDKQHRTALHLACASGHVQVVTLLVNRKCQIDVCDKENRTPLIQAVHCQEEACAVILLEHGANPNFKDIYGNTALHYAVYSESTSLAEKLLSHGAHIEALDKDNNTPLLFAIICKKEKMVEFLLKKKASSHAVDRLRRSALMLAVYYDSPGIVNILLKQNIDVFAQDMCGRDAEDYAISHHLTK

SEQ ID NO: 783623 - protein, 104 aa, Homo sapiens
PGVVQMPKAGRHQAAALQHTGQGCDVSRPVQTPACGGRMQHSTESQRLDREPEGWVTCHLSPCGPGIMCFPRTPRIRSPREDSADHMLRCALRFYRQVGCRLPG

SEQ ID NO: 783624 - protein, 170 aa, Homo sapiens
DFYTLPVGIRTVAVTKSQFLINGKPFYFHGVNKHEDADVCWGSWVLVGAASGHPPLSPSLCPAVEGSSGQMRQMAPNGEGAHGVALQGPGSQRKCSFDRDRGHLALLSPEIRGKGFDWPLLVKDFNLLRWLGANAFRTSHYPYAEEVMQMCDRYGIVVIDECPGVGLALP

SEQ ID NO: 783625 - protein, 336 aa, Homo sapiens
DFYTLPVGIRTVAVTKSQFLINGKPFYFHGVNKHEDADIRGKGFDWPLLVKDFNLLRWLGANAFRTSHYPYAEEVMQMCDRYGIVVIDECPGVGLALPQFFNNVSLHHHMQVMEEVVRRDKNHPAVVMWSVANEPASHLESAGYYLKMVIAHTKSLDPSRPVTFVSNSNYAADKGAPYVDVICLNSYYSWYHDYGHLELIQLQLATQFENWYKKYQKPIIQSEYGAEPIAGFHQDPPLMFTEEYQKSLLEQYHLGLDQKRRKYVVGRAHLELAILTDRTAEWGITGVSLGTNKREVLAADTDMLTGPCCRQGGTVCEDPGLSMIRSRVDHGVNGTD

SEQ ID NO: 783626 - protein, 423 aa, Homo sapiens
DFYTLPVGIRTVAVTKSQFLINGKPFYFHGVNKHEDADVCWGSWVLVGAASGHPPLSPSLCPAVEGSSGQMRQMAPNGEGAHGVALQGPGSQRKCSFDRDRGHLALLSPEIRGKGFDWPLLVKDFNLLRWLGANAFRTSHYPYAEEVMQMCDRYGIVVIDECPGVGLALPQFFNNVSLHHHMQVMEEVVRRDKNHPAVVMWSVANEPASHLESAGYYLKMVIAHTYESAGYYLKMVIAHTKSLDPSRPVTFVSNSNYAADKGAPYVDVICLNSYYSWYHDYGHLELIQLQLATQFENWYKKYQKPIIQSEYGAEPIAGFHQDPPLMFTEEYQKSLLEQYHLGLDQKRRKYVVGRAHLELAILTDRTAEWGITGVSLGTNKREVLAADTDMLTGPCCRQGGTVCEDPGLSMIRSRVDHGVNGTD

SEQ ID NO: 783627 - protein, 150 aa, Homo sapiens
LYTSKRFILLNAVYFSTLYTSQRFILLNALYFSTLYTSSTLYTPQRFILLNALYFSTLYTSQRFILLNALYFLAVNKFPQSVCRFTFLHPQLSPQRFILPRKSEKGEHNALYFRGSQRRGKESLLTISSTGKWGKGIILFTPASSIESSK

SEQ ID NO: 783628 - protein, 68 aa, Homo sapiens
VYASKHREKWRLHFIHPGLHTKSQIRIQEHLLENPSTLYTSEEVREGGTQRFILPRKSEKGEGITFDH

SEQ ID NO: 783629 - protein, 127 aa, Homo sapiens
RFILLNALYFSTLYTSQRFILLNALYFSMLYTSQRFILPQRFILLNALYFSTLYTSQRFIPLNALYFSTLSQRFILPRKSEKGEHNALYFRGSQRRGKESLLTISSTGKWGKGIILFTPASSIESSK

SEQ ID NO: 783630 - protein, 156 aa, Homo sapiens
LVLVALETTGEAVVMAHRFSPVASPQDPWASSNFPVLLLKINRCLHQPSSFQKLWMRSNLPPKARAHLQSFNPKQKEASVFSPQMSLNSPPESLNASHQGSHTCSWFFLRQSSSSFRDSSWASRSHLARVRLSSTLRRPQMSASTSCCSERSLSYL

SEQ ID NO: 783631 - protein, 156 aa, Homo sapiens; identical to SEQ ID NO: 783630

SEQ ID NO: 783632 - protein, 53 aa, Homo sapiens
SAPKKDDKTQCPSSTQGRPSSGGVNPLTFTCFHLRLWSMISAMNYQHSQINQA

SEQ ID NO: 783633 - protein, 132 aa, Homo sapiens
NSHFPSSPVISLCSSEDKPLPAQPSSFQKLWMRSNLPPKARAHLQSFNPKQKEASVFSPQMSLNSPPESLNASHQGSHTCSWFFLRQSSSSFRDSSWASRSHLARVRLSSTLRRPQMSASTSCCSERSLSYL

SEQ ID NO: 783634 - protein, 84 aa, Homo sapiens
LSDLLFTGDTVGQQTKVDVSLPVESKPDQQMFLACYSVCCVVAVIGPRCGGLAGPQEYLGALGIQLNTPIWTLRVVGMPLAVIC

SEQ ID NO: 783635 - protein, 103 aa, Homo sapiens
AAHMTWILAGLGHISVCHITFSNPNLHSYTIMEETNTQMACASKVKIGAKSKKAAAEGKGRSGEDFFQKAKGGRKSLLHKESHDLDSSWTLPHICLPYNLFES

SEQ ID NO: 783636 - protein, 64 aa, Homo sapiens
RIPGITSGAWGRGQGQSSKHVECQLPDGTPICPLLRGATQTPAGLEAHLPEVALIKKQPVLLPL

SEQ ID NO: 783637 - protein, 66 aa, Homo sapiens
GRSRGSRNGGSYPPDTATGMNNRQATKKAGKIHNTPDTATALCSYPSYLAKCIFLLKSLLPLWPLL

SEQ ID NO: 783638 - protein, 176 aa, Homo sapiens
  misc_feature (111)..(111): Xaa can be any naturally occurring amino acid
MGGAPTEEGLIIGARYHARVFLCSTQRGPPLYGGGVLYNPHRALGAGSVLNNGVAVTLGKNRARTRLGRISFWGERESPPYISSLGGRWAAQYLFVRHQHSTLQPRDNFYXARPSRREQSFTLFVTRCLLSVWLTHLKRVAYYPFRRPAKKVFRPQRGDCCTRQEQFFLYPRDYLC

SEQ ID NO: 783639 - protein, 94 aa, Homo sapiens
DDTNEWKHIPCSWMGRINIVKMTILPKAIYKFNTIPIKIPPSFFTELEKTILKLIWNQKGARIAKARLSKKNKSIGITLPDFKLYYKAIVTKTA

SEQ ID NO: 783640 - protein, 106 aa, Homo sapiens
ERKNRPSYLLYLEVIQMLSDESVSESCFCANYKEEKQDLKERIWGTPALLNDTIKPYSGKWIDTQDQKTCFLMTISTCSCIIDMFYEAVQEFPRGSVTFTHHPLLC

SEQ ID NO: 783641 - protein, 207 aa, Homo sapiens
ETSGGGRRPARVYLAPCRAGRGIRHIGAGAEGALEPRREAGGGGGPGLDREGVGSALARKAGELMSLSGKSPPRPLPPLSAAGTRLGAGCGSGSGSGSDRMFSKKPHGDVKKSTQKVLDTKKDALTRLKHLRIVIENAESIDLKQFFDQHFSHIYYVFFENFVTIEASLKQKGHKSQREELDAILFIFEKILQLLPERIHQRWQFHS

SEQ ID NO: 783642 - protein, 34 aa, Homo sapiens
TASAKAQRWEQLGVFKEEQKVKRREGWVSDALER

SEQ ID NO: 783643 - protein, 104 aa, Homo sapiens
EQPGQSPRGPGRVPVMQGGKQATSGDRTSVRGLEEQVGGFQCVWKMRFPGLADGSCEWESSQHPFQIPLVDRDPGLSVDQGTEAAPTRAPRLQPGLLGGRPLPV

SEQ ID NO: 783644 - protein, 59 aa, Homo sapiens
KGPQLDTQVPPRHAHAFLSSPRSLISKHTHWIFPARFLMNAIAMFTRILSFKNWELMKN

SEQ ID NO: 783645 - protein, 148 aa, Homo sapiens
SYGDSFVFYKTGTWCKKMWTAGLERSQMSPPNIQRPLYCVPELGWPQESILSRFFLPSSLLPSLLSFLTSKLRSRYVAQSGLQLLASSNPPSSLSLPSSWDYRHVPPRPANFCIFSRDRVSPYWPGWSRTPDLVIHQPWPPKVLGLQA

SEQ ID NO: 783646 - protein, 85 aa, Homo sapiens
PCCPHHRPAWYDLPPPPYSSDTESLNQADLPPYRSRSGSANSASSQAASSLLSVEDTSHSPGQPGPQEGTAEPRDSEPSQGTEEV

SEQ ID NO: 783647 - protein, 162 aa, Homo sapiens
LEGWFINFCAIFPNKLQANQRQYTGQYGVCSAATPWIGEQAFWPNHGIKEIYDTLLQLSSQTLARLLNCNFQKTFLIIPSGVMSNSTYMPMERKDTCFGRDWKHWATKQNFHHNLDCRCHLPDTGVHSCTGRIRRDKRWGKHLSTNFTGLCLVSQFSRGLQP

SEQ ID NO: 783648 - protein, 145 aa, Homo sapiens
AARGTCLPSASGGAARGTCLPSASGGAARGTCLPSASGGAAWGTCLPSASGGAAWGTCLPSASSGTAWGTCLLPNPRFLLSWFPLGSYLRLYLVAVGVSLVSCSVHRGWCRLSFIKHLLTGRNGSGCWVMVSTLPRMGLPQKVKE

SEQ ID NO: 783649 - protein, 58 aa, Homo sapiens
MIRPTTPHLRCIWWEKCVRRTKKCNVEPSKDSQCYVENLNRLPEWPSLREVTLKLTVE

SEQ ID NO: 783650 - protein, 118 aa, Homo sapiens
LVLFREAIEHITRIVRVIGQPRGNMLLVGIGGSGRQSLARLASSICDYTTFQIEVTKHYRKQEFRDDIKRLYRQAGVELKTTSFIFVDTQIADESFLEDINNILSSGEVPNLYKPDEF

SEQ ID NO: 783651 - protein, 46 aa, Homo sapiens
GQRFLGPYSTVIKTELSQADRTLNKASGAGEFPEPPISIIVDAFLS

SEQ ID NO: 783652 - protein, 108 aa, Homo sapiens
YCSVSLLLCPALVSVTLPAPLIFNYSFLVSFVGSISFLCPLSHFILSHFPASFSSFLEALSSLILLLSKENFIRTLSFFELSLGPKSTSNCFLGSLDVPQVLQAQPYK

SEQ ID NO: 783653 - protein, 104 aa, Homo sapiens
MPPTFFWSQSLALVAQAGVQWCNLRSRQPLPPRFKQFSYLSLLSSWDYRYVPPHLANFVFLVEMGFLYVGQAGLKLLTSGDPPTSASQSAAITGVSHRAWPTHD

SEQ ID NO: 783654 - protein, 65 aa, Homo sapiens
MSRSPLHPASSRPFQGLCSWPGVVFSLLTWLTVTCPSAGDHVRTPRPAHCCSLALSRPWRVPVIA

SEQ ID NO: 783655 - protein, 66 aa, Homo sapiens
LSGRAPHLSPSRVDGATPHGSLLTSPARGRGASSPPTSFMLGSEVDVEEKGVCFILGSTAPLFKVT

SEQ ID NO: 783656 - protein, 104 aa, Homo sapiens
PGALNPPGALNPPGALNPPGALNPPGALNPPGDLNPPGALKPPGALNPPGALNPPLTLPGALNPRREPLTLREPLTLREPLTLKSHKLQRALLQKSPMGSKAKE

SEQ ID NO: 783657 - protein, 67 aa, Homo sapiens
YNSSVTTAPVTTAPVTTVPITTAQLQQLQLQQLQLQQLQLQQLLEAKEFENSLGNIVRLSTKKFLKN

SEQ ID NO: 783658 - protein, 865 aa, Homo sapiens
MTTESGSDSESKPDQEAEPQEAAGAQGRAGAPVPEPPKEEQQQALEQFAAAAAHSTPVRREVTDKEQEFAARAAKQLEYQQLEDDKLSQKSSSSKLSRSPLKIVKKPKSMQCKVILLDGSEYTCDVEKRSRGQVLFDKVCEHLNLLEKDYFGLTYRDAENQKNWLDPAKEIKKQVRSGAWHFSFNVKFYPPDPAQLSEDITRYYLCLQLRDDIVSGRLPCSFVTLALLGSYTVQSELGDYDPDECGSDYISEFRFAPNHTKELEDKVIELHKSHRGMTPAEAEMHFLENAKKLSMYGVDLHHAKDSEGVEIMLGVCASGLLIYRDRLRINRFAWPKVLKISYKRNNFYIKIRPGEFEQFESTIGFKLPNHRAAKRLWKVCVEHHTFFRLLLPEAPPKKFLTLGSKFRYSGRTQAQTRRASALIDRPAPYFERSSSKRYTMSRSLDGASVNENHEIYMKDSMSAAEVGTGQYATTKGISQTNLITTVTPEKKAEEERDEEEDKRRKGEEVTPISAIRHEGKTDSERTDTAADGETTATEELEKTQDDLMKHQTNISELKRTFLETSTDTAVTNEWEKRLSTSPVRLAARQEDAPMIEPLVPEEKMETKTESSGIETEPTVHHLPLSTEKVVQETVLVEERRVVHASGDASYSAGDSGDAAAQPAFTGIKGKEGSALTEGAKEEGGEEVAKAVLEQEETAAASRERQEEQSAAIHISETLEQKPHFESSTVKTETISFGSVSPGGVKLEISTKEVPVVHTETKTITYESSQVDPGTDLEPGVLMSAQTITSETTSTTTTTHITKTVKGGISETRIEKRIVITGDADIDHDQALAQAIKEAKEQHPDMSVTKVVVHKETEITPEDGED

SEQ ID NO: 783659 - protein, 865 aa, Homo sapiens; identical to SEQ ID NO: 783658

SEQ ID NO: 783660 - protein, 906 aa, Homo sapiens
MTTESGSDSESKPDQEAEPQEAAGAQGRAGAPVPEPPKEEQQQALEQFAAAAAHSTPVRREVTDKEQEFAARAAKQLEYQQLEDDKLSQKSSSSKLSRSPLKIVKKPKSMQCKVILLDGSEYTCDVEKRSRGQVLFDKVCEHLNLLEKDYFGLTYRDAENQKNWLDPAKEIKKQVRSGAWHFSFNVKFYPPDPAQLSEDITRYYLCLQLRDDIVSGRLPCSFVTLALLGSYTVQSELGDYDPDECGSDYISEFRFAPNHTKELEDKVIELHKSHRGMTPAEAEMHFLENAKKLSMYGVDLHHAKDSEGVEIMLGVCASGLLIYRDRLRINRFAWPKVLKISYKRNNFYIKIRPGEFEQFESTIGFKLPNHRAAKRLWKVCVEHHTFFRLLLPEAPPKKFLTLGSKFRYSGRTQAQTRRASALIDRPAPYFERSSSKRYTMSRSLDGASVNENHEIYMKDSMSAAEVGTGQYATTKGISQTNLITTVTPEKKAEEERDEEEDKRRKGEEVTPISAIRHEGKTDSERTDTAADGETTATEELEKTQDDLMKHQTNISELKRTFLETSTDTAVTNEWEKRLSTSPVRLAARQEDAPMIEPLVPEETKQSSGEKLMDGSEIFSLLESARKPTEFIGGVTSTSQSWVQKMETKTESSGIETEPTVHHLPLSTEKVVQETVLVEERRVVHASGDASYSAGDSGDAAAQPAFTGIKGKEGSALTEGAKEEGGEEVAKAVLEQEETAAASRERQEEQSAAIHISETLEQKPHFESSTVKTETISFGSVSPGGVKLEISTKEVPVVHTETKTITYESSQVDPGTDLEPGVLMSAQTITSETTSTTTTTHITKTVKGGISETRIEKRIVITGDADIDHDQALAQAIKEAKEQHPDMSVTKVVVHKETEITPEDGED

SEQ ID NO: 783661 - protein, 309 aa, Homo sapiens
MTTESGSDSESKPDQEAEPQEAAGAQGRAGAPVPEPPKEEQQQALEQFAAAAAHSTPVRREVTDKEQEFAARAAKQLEYQQLEDDKLSQKSSSSKLSRSPLKIVKKPKSMQCKVILLDGSEYTCDVEKRSRGQVLFDKVCEHLNLLEKDYFGLTYRDAENQKNWLDPAKEIKKQVRSGAWHFSFNVKFYPPDPAQLSEDITRYYLCLQLRDDIVSGRLPCSFVTLALLGSYTVQSELGDYDPDECGSDYISEFRFAPNHTKELEDKVIELHKSHRGMTPAEAEMHFLENAKKLSMYGVDLHHAKPNSII

SEQ ID NO: 783662 - protein, 261 aa, Homo sapiens
MTTESGSDSESKPDQEAEPQEAAGAQGRAGAPVPEPPKEEQQQALEQFAAAAAHSTPVRREVTDKEQEFAARAAKQLEYQQLEDDKLSQKSSSSKLSRSPLKIVKKPKSMQCKVILLDGSEYTCDVEKRSRGQVLFDKVCEHLNLLEKDYFGLTYRDAENQKNWLDPAKEIKKQVRSGAWHFSFNVKFYPPDPAQLSEDITRYYLCLQLRDDIVSGRLPCSFVTLALLGSYTVQSELGDYDPDECGSDYISEFRFAPFEIV

SEQ ID NO: 783663 - protein, 318 aa, Homo sapiens
MKHQTNISELKRTFLETSTDTAVTNEWEKRLSTSPVRLAARQEDAPMIEPLVPEEKMETKTESSGIETEPTVHHLPLSTEKVVQETVLVEERRVVHASGDASYSAGDSGDAAAQPAFTGIKGKEGSALTEGAKEEGGEEVAKAVLEQEETAAASRERQEEQSAAIHISETLEQKPHFESSTVKTETISFGSVSPGGVKLEISTNEVPVVHTETKTITYESSQVDPGTDLEPGVLMSAQTITSETTSTTTTTHITKTVKGGISETRIEKRIVITGDADIDHDQALAQAIKEAKEQHPDMSVTKVVVHKETEITPEDGED

SEQ ID NO: 783664 - protein, 1214 aa, Homo sapiens
KGLKLLALAAVSRRRPRSLTLRQDGGGCAHVTVLKYCGGPLPRGWEGRQDEVGFPRTVSGRGPPPQLRGASVSPATGGGGNSGEQPWAAGFLPTPESPAHRRRGRAPEPSPHAAARPGSLLIPEQSTMTTESGSDSESKPDQEAEPQEAAGAQGRAGAPVPEPPKEEQQQALEQFAAAAAHSTPVRREVTDKEQEFAARAAKQLEYQQLEDDKLSQKSSSSKLSRSPLKIVKKPKSMQCKVILLDGSEYTCDVEKRSRGQVLFDKVCEHLNLLEKDYFGLTYRDAENQKNWLDPAKEIKKQVRSGAWHFSFNVKFYPPDPAQLSEDITRYYLCLQLRDDIVSGRLPCSFVTLALLGSYTVQSELGDYDPDECGSDYISEFRFAPNHTKELEDKVIELHKSHRGMTPAEAEMHFLENAKKLSMYGVDLHHAKDSEGVEIMLGVCASGLLIYRDRLRINRFAWPKVLKISYKRNNFYIKIRPGEFEQFESTIGFKLPNHRAAKRLWKVCVEHHTFFRLLLPEAPPKKFLTLGSKFRYSGRTQAQTRRASALIDRPAPYFERSSSKRYTMSRSLDGEVGTGQYATTKGISQTNLITTVTPEKKAEEERDEEEDKRRKGEEVTPISAIRHEGKSPGLGTDSCPLSPPSTHCAPTSPTELRRRCKENDCKLPGYEPSRAEHLPGEPALDSDGPGRPYLGDQDVAFSYRQQTGKGTTLFSFSLQLPESFPSLLDDDGYLSFPNLSETNLLPQSLQHYLPIRSPSLVPCFLFIFFFLLSASFSVPYALTLSFPLALCLCYLEPKAASLSASLDNDPSDSSEEETDSERTDTAADGETTATESDQEEDAELKAQELEKTQDDLMKHQTNISELKRTFLETSTDTAVTNEWEKRLSTSPVRLAARQEDAPMIEPLVPEETKQSSGEKLMDGSEIFSLLESARKPTEFIGGVTSTSQSWVQKMETKTESSGIETEPTVHHLPLSTEKVVQETVLVEERRVVHASGDASYSAGDSGDAAAQPAFTGIKGKEGSALTEGAKEEGGEEVAKAVLEQEETAAASRERQEEQSAAIHISETLEQKPHFESSTVKTETISFGSVSPGGVKLEISTKEVPVVHTETKTITYESSQVDPGTDLEPGVLMSAQTITSETTSTTTTTHITKTVKGGISETRIEKRIVITGDADIDHDQALAQAIKEAKEQHPDMSVTKVVVHKETEITPEDGED

SEQ ID NO: 783665 - protein, 316 aa, Homo sapiens
AEARCRWQLGGAATAAAGGARVWRPLPASRSSFPPPSPRLDLGEFEGKSPCGGTCEQPYLSLPLRYFFSPRKVVPAGCEQAPGGAPKEGFGDSDSESKPDQEAEPQEAAGAQGRAGAPVPEPPKEEQQQALEQFAAAAAHSTPVRREVTDKEQEFAARAAKQLEYQQLEDDKLSQKSSSSKLSRSPLKIVKKPKSMQCKVILLDGSEYTCDVEKRSRGQVLFDKVCEHLNLLEKDYFGLTYRDAENQKNWLDPAKEIKKQVRSGAWHFSFNVKFYPPDPAQLSEDITRYYLCLQLRDDIVSGRLPCSFVTLALLGS

SEQ ID NO: 783666 - protein, 295 aa, Homo sapiens
MDGSEIFSLLESARKPTEFIGGVTSTSQSWVQKMETKTESSGIETEPTVHHLPLSTEKVVQETVLVEERRVVHASGDASYSAGDSGDAAAQPAFTGIKGKEGSALTEGAKEEGGEEVAKAVLEQEETAAASRERQEEQSAAIHISETLEQKPHFESSTVKTETISFGSVSPGGVKLEISTKEVPVVHTETKTITYESSQVDPGTDLEPGVLMSAQTITSETTSTTTTTHITKTVKGGISETRIEKRIVITGDADIDHDQALAQAIKEAKEQHPDMSVTKVVVHKETEITPEDGED

SEQ ID NO: 783667 - protein, 318 aa, Homo sapiens
MKHQTNISELKRTFLETSTDTAVTNEWEKRLSTSPVRLAARQEDAPMIEPLVPEEKMETKTESSGIETEPTVHHLPLSTEKVVQETVLVEERRVVHASGDASYSAGDSGDAAAQPAFTGIKGKEGSALTEGAKEEGGEEVAKAVLEQEETAAASRERQEEQSAAIHISETLEQKPHFESSTVKTETISFGSVSPGGVKLEISTKEVPVVHTETKTITYESSQVDPGTDLEPGVLMSAQTITSETTSTTTTTHITKTVKGGISETRIEKRIVITGDADIDHDQALAQAIKEAKEQHPDMSVTKVVVHKETEITPEDGED

SEQ ID NO: 783668 - protein, 78 aa, Homo sapiens
MSGSRVPGRGGNHEGSFLTTRKGLYSSHQEARCSLRSAAGQDLNHSLTQTPLARSHPGFHYREEQQRLHPPAGWSAAE

SEQ ID NO: 783669 - protein, 72 aa, Homo sapiens
LVSGALGNGSKPPAFQPRARNGKNCEIGYLKPAPCFPGPLTIASSDHPGVAFIPSPCSRDPCVVGTGGHFLP

SEQ ID NO: 783670 - protein, 132 aa, Homo sapiens [sequence omitted]

SEQ ID NO: 783671 - protein, 229 aa, Homo sapiens
ELPAQKWWHTGALYRIGDLQAFQGHGAGNLAGLKGRLDYLSSLKVKGLVLGPIHKNQKDDVAQTDLLQIDPNFGSKEDFDSLLQSAKKKSIRVILDLTPNYRGENSWFSTQVDTVATKVKDALEFWLQAGVDGFQVRDIENLKDASSFLAEWQNITKGFSEDRLLIAGTNSSDLQQILSLLESNKDLLLTSSYLSDSGSTGEHTKSLVTQYLNATGNRWCSWSCLRQGS

SEQ ID NO: 783672 - protein, 227 aa, Homo sapiens
PTLRRWEKGGWGGQGPLRGASLVNPAPISGLKGRLDYLSSLKVKGLVLGPIHKNQKDDVAQTDLLQIDPNFGSKEDFDSLLQSAKKKSIRVILDLTPNYRGENSWFSTQVDTVATKVKDALEFWLQAGVDGFQVRDIENLKDASSFLAEWQNITKGFSEDRLLIAGTNSSDLQQILSLLESNKDLLLTSSYLSDSGSTGEHTKSLVTQYLNATGNRWCSWSCLRQGS

SEQ ID NO: 783673 - protein, 227 aa, Homo sapiens; identical to SEQ ID NO: 783672

SEQ ID NO: 783674 - protein, 390 aa, Homo sapiens
ELPAQKWWHTGALYRIGDLQAFQGHGAGNLAGLKGRLDYLSSLKVKGLVLGPIHKNQKDDVAQTDLLQIDPNFGSKEDFDSLLQSAKKKSIRVILDLTPNYRGENSWFSTQVDTVATKVKDALEFWLQAGVDGFQVRDIENLKDASSFLAEWQNITKGFSEDRLLIAGTNSSDLQQILSLLESNKDLLLTSSYLSDSGSTGEHTKSLVTQYLNATGNRWCSWSVSTMLVGKGADGRRKGCGETEAEVGYGAQLECLSLELSQARLLTSFLPAQLLRLYQLMLFTLPGTPVFSYGDEIGLDAAALPGQLWRLQSCCGMSPASLTSRAVSANMTVKGQSEDLVLLSCPAVSDQRSKERSYLAGDFHAFSVGLDLFYSGLGTDEVPGGSLGVG

SEQ ID NO: 783675 - protein, 109 aa, Homo sapiens
VTWLVILEQPSNPGRLARDHVVIVLDYRWADGGSNRSFPGGGRTRTGALIFTTVSSKHHRHGHGRQRGCAGHFSRCESSLATLRTGRVSQELKDEWEPATVGWKSLLGG

SEQ ID NO: 783676 - protein, 149 aa, Homo sapiens
SSSLFAEHKDLTPAWFLGVPIMGFCPTHPVLGTSTACLTISIQVRPGLLRAGLGSPAKRSGYKSMRDFVLVKNLGPVARPLSGPHLNHVYWASSWALPPMQGCLFLLMSCDEKEMLDIHFPSRIPLSLSSIFIDPMLFLNIHESRIRYI

SEQ ID NO: 783677 - protein, 119 aa, Homo sapiens
GVRSSTLTEDWIHLLGDRMKVVLLLNSLSLAAPTEVHVERIPPSMSRMVCSTSPLKGTSTVFPSEALKVGKTLLSSPSGFLKPGLAMSGQVIYGKTLYMQFCYEPKTALKIKSMATRGG

SEQ ID NO: 783678 - protein, 127 aa, Homo sapiens
EWGALLSQPRAEPSLACRFLLLLLWKSRSKIPALGWLSFLLRGMWGYYPAGQTSSPFNDNNDNLHLYKAFHWGILIVSQTIINSPLQVWQSAKQEPLYSAGEGCFPGPATCWGSPTYLTPTHPQGLA

SEQ ID NO: 783679 - protein, 111 aa, Homo sapiens
YGARTRRTAVSREYDTFHRISPLLFYPSSHDCPACTSFICCGSDAGFAIKHVFNPNHATFWQPSMVLDWCEDSIKLVPIPHYLVKAQALSISTKPFLFVHLFIRNILYSNL

SEQ ID NO: 783680 - protein, 159 aa, Homo sapiens
GRHSGGSRSPLPPPHPPCCPRAREGMRQIGEGPDPPKNLNTKLQMYFQSPKRSGGGECEVRQDPRSPSRFLVFFYPEDVRQKVLERKNHELVWQGKGTFKLTVQLPATPDEIDHVFEEELLTKESKTKEDVKEPDVSEELDTKLPLDGGLDKMEDIPEE

SEQ ID NO: 783681 - protein, 112 aa, Homo sapiens
IQRIPLCLTHRLQTCRSLGDRHLQIRIGLGTACVVDLWLEGIWSTLENSARSCVSWAQSWRGGTDAPSNLAAFVRCYCLYSEKSVEEGVVQHLTMEPHNHIAFWDHTLPSEE

SEQ ID NO: 783682 - protein, 438 aa, Homo sapiens
MVQWKRLCQLHYLWALGCYMLLATVALKLSFRLKCDSDHLGLESRESQSQYCRNILYNFLKLPAKRSINCSGVTRGDQEAVLQAILNNLEVKKKREPFTDTHYLSLTRDCEHFKAERKFIQFPLSKEEVEFPIAYSMVIHEKIENFERLLRAVYAPQNIYCVHVDEKSPETFKEAVKAIISCFPNVFIASKLVRVVYASWSRVQADLNCMEDLLQSSVPWKYFLNTCGTDFPIKSNAEMVQALKMLNGRNSMESEVPPKHKETRWKYHFEVVRDTLHLTNKKKDPPPYNLTMFTGNAYIVASRDFVQHVLKNPKSQQLIEWVKDTYSPDEHLWATLQRARWMPGSVPNHPKYDISDMTSIARLVKWQGHEGDIDKGAPYAPCSGIHQRAICVYGAGDLNWMLQNHHLLANKFDPKVDDNALQCLEEYLRYKAIYGTEL

SEQ ID NO: 783683 - protein, 438 aa, Homo sapiens; identical to SEQ ID NO: 783682

SEQ ID NO: 783684 - protein, 438 aa, Homo sapiens; identical to SEQ ID NO: 783682

SEQ ID NO: 783685 - protein, 379 aa, Homo sapiens
MVQWKRLCQLHYLWALGCYMLLATVALNNLEVKKKREPFTDTHYLSLTRDCEHFKAERKFIQFPLSKEEVEFPIAYSMVIHEKIENFERLLRAVYAPQNIYCVHVDEKSPETFKEAVKAIISCFPNVFIASKLVRVVYASWSRVQADLNCMEDLLQSSVPWKYFLNTCGTDFPIKSNAEMVQALKMLNGRNSMESEVPPKHKETRWKYHFEVVRDTLHLTNKKKDPPPYNLTMFTGNAYIVASRDFVQHVLKNPKSQQLIEWVKDTYSPDEHLWATLQRARWMPGSVPNHPKYDISDMTSIARLVKWQGHEGDIDKGAPYAPCSGIHQRAICVYGAGDLNWMLQNHHLLANKFDPKVDDNALQCLEEYLRYKAIYGTEL

SEQ ID NO: 783686 - protein, 301 aa, Homo sapiens
AAAAESSPFVERLLLKGYEVIYLTEPVDEKSPETFKEAVKAIISCFPNVFIASKLVRVVYASWSRVQADLNCMEDLLQSSVPWKYFLNTCGTDFPIKSNAEMVQALKMLNGRNSMESEVPPKHKETRWKYHFEVVRDTLHLTNKKKDPPPYNLTMFTGNAYIVASRDFVQHVLKNPKSQQLIEWVKDTYSPDEHLWATLQRARWMPGSVPNHPKYDISDMTSIARLVKWQGHEGDIDKGAPYAPCSGIHQRAICVYGAGDLNWMLQNHHLLANKFDPKVDDNALQCLEEYLRYKAIYGTEL

SEQ ID NO: 783687 - protein, 438 aa, Homo sapiens; identical to SEQ ID NO: 783682

SEQ ID NO: 783688 - protein, 438 aa, Homo sapiens; identical to SEQ ID NO: 783682

SEQ ID NO: 783689 - protein, 473 aa, Homo sapiens
TARYRSILTRREALKDCVLLHLPCARSPPVSHSVTMVQWKRLCQLHYLWALGCYMLLATVALKLSFRLKCDSDHLGLESRESQSQYCRNILYNFLKLPAKRSINCSGVTRGDQEAVLQAILNNLEVKKKREPFTDTHYLSLTRDCEHFKAERKFIQFPLSKEEVEFPIAYSMVIHEKIENFERLLRAVYAPQNIYCVHVDEKSPETFKEAVKAIISCFPNVFIASKLVRVVYASWSRVQADLNCMEDLLQSSVPWKYFLNTCGTDFPIKSNAEMVQALKMLNGRNSMESEVPPKHKETRWKYHFEVVRDTLHLTNKKKDPPPYNLTMFTGNAYIVASRDFVQHVLKNPKSQQLIEWVKDTYSPDEHLWATLQRARWMPGSVPNHPKYDISDMTSIARLVKWQGHEGDIDKGAPYAPCSGIHQRAICVYGAGDLNWMLQNHHLLANKFDPKVDDNALQCLEEYLRYKAIYGTEL

SEQ ID NO: 783690 - protein, 229 aa, Homo sapiens
MEDLLQSSVPWKYFLNTCGTDFPIKSNAEMVQALKMLNGRNSMESEVPPKHKETRWKYHFEVVRDTLHLTNKKKDPPPYNLTMFTGNAYIVASRDFVQHVLKNPKSQQLIEWVKDTYSPDEHLWATLQRARWMPGSVPNHPKYDISDMTSIARLVKWQGHEGDIDKGAPYAPCSGIHQRAICVYGAGDLNWMLQNHHLLANKFDPKVDDNALQCLEEYLRYKAIYGTEL

SEQ ID NO: 783691 - protein, 100 aa, Homo sapiens
TDSAGAHSLDTGSKVKTGLAGSVFLNFLGTGDKGGGDRAVSPAHLQEIVSLRSPRQQTRARGSAFTGRWAQWLSPGSRRGGDPTLRVEAKAGELPLSTQR

SEQ ID NO: 783692 - protein, 69 aa, Homo sapiens
ARESKCSPSLLSCSPGPQRASLLDAPQTQWVPWSQCLSLTLLSWSLAPCGKPGLQRWLLTSIRGHVAAA

SEQ ID NO: 783693 - protein, 115 aa, Homo sapiens
LETSSDFILRPTLKVLVLTPHFKDKNQPLNQDKGLALLRISSSFGLTPDPNVVEAGTPREQAESGGSTAGRRPGWGHPQASRRSRVPGESGRAVSTRDSSPGRSRHPPTTARAGR

SEQ ID NO: 783694 - protein, 70 aa, Homo sapiens
MVPVCRRQPSYCRIEWLTCMYLEQKKEMPGSPALCSKYSSAFFYIPLFLRTSEMGRCLLSPATCYAFSIL

SEQ ID NO: 783695 - protein, 540 aa, Homo sapiens
MASQEFEVEAIVDKRQDKNGNTQYLVRWKGYDKQDDTWEPEQHLMNCEKCVHDFNRRQTEKQKKLTWTTTSRIFSNNARRRTSRSTKANYSKNSPKTPVTDKHHRSKNRKLFAASKNVRRKAASILSDTKNMEIINSTIETLAPDSPFDHKTVSGFQKLEKLDPIAADQQDTVVFKVTEGKLLRDPLSRPGAEQTGIQNKTQIHPLMSQMSGSVTASMATGSATRKGIVVLIDPLAANGTTDMHTSVPRVKGGQRNITDDSRDQPFIKKMHFTIRLTESASTYRDIVVKKEDGFTQIVLSTRSTEKNALNTEVIKEIVNALNSAAADDSKLVLFSAAGSVFCCGLDFGYFVKHLRNNRNTASLEMVDTIKNFVNTFIQFKKPIVVSVNGPAIGLGASILPLCDLVWANEKAWFQTPYTTFGQSPDGCSSITFPKMMGKASANEMLIAGRKLTAREACAKGLVSQVFLTGTFTQEVMIQIKELASYNPIVLEECKALVRCNIKLELEQANERECEVLRKIWSSAQGIESMLKYVENKIDEF

SEQ ID NO: 783696 - protein, 554 aa, Homo sapiens
MASQEFEVEAIVDKRQDKNGNTQYLVRWKGYDKQDDTWEPEQHLMNCEKCVHDFNRRQTEKQKKLTWTTTSRIFSNNARRRTSRSTKANYSKNSPKTPVTDKHHRSKNRKLFAASKNVRRKAASILSDTKNMEIINSTIETLAPDSPFDHKTVSGFQKLEKLDPIAADQQDTVVFKVTEGKLLRDPLSRPGAEQTGIQNKTQIHPLMSQMSGSVTASMATGSATRKGIVVLIDPLAANGTTDMHTSVPRVKGGQRNITDDSRDQPFIKKMHFTIRLTESASTYRDIVVKKEDGFTQIVLSTRSTEKNALNTEVIKEIVNALNSAAADDSKLVLFSAAGSVFCCGLDFGYFVKHLRNNRNTASLEMVDTIKNFVNTFIQFKKPIVVSVNGPAIGLGASILPLCDLVWANEKAWFQTPYTTFGQSPDGCSSITFPKMMGKASANEMLIAGRKLTAREACAKGLVSQVFLTGTFTQEVMIQIKELASYNPIVLEECKALVRCNIKLELEQANERECEVLRKIWSSAQGIESMLKIPLLGYKAAFPPRKTQNDQRWCP

SEQ ID NO: 783697 - protein, 76 aa, Homo sapiens
VPSHSFTQHDASLFNTCCGSLGIKAESEASAHTWGQGRGWREPGSSHPDGVAEASPFTSVGLIYEMRSMLCCCASC

SEQ ID NO: 783698 - protein, 71 aa, Homo sapiens
MAVGELCDRGPGPTPAELSKNGPARLWASLYDSLDLRVPRTACMPKKPNLSLIEALALPAYRRHRGVTRFL

SEQ ID NO: 783699 - protein, 103 aa, Homo sapiens
MNHLQAETGAVCHMAPLGLSFLSCFFGKAHLLSRLGLLPRPSKTYSWGLGPVKPLALGRSLEPLRRGQAPRPASCRPAPGGTALAGLGPRAGGAAPGSGLQRP

SEQ ID NO: 783700 - protein, 79 aa, Homo sapiens
MGSAEGDAAQGLLTNSLVWLYLETGMDTMTSLDYAWPEVLIGDFLTPSSTSYCEPGHSSIMVCGCFFPPEGSSASCSLC

SEQ ID NO: 783701 - protein, 103 aa, Homo sapiens
MDRCRGIMGFPTGPVISHVGKREELLPHGVCAWEGSRAEKRHFFCPPGCFRQMKTWAGRARNKEESRVLSTQRERMQPGHLTPADHTTSSASSPHLLRLQLPF

SEQ ID NO: 783702 - protein, 61 aa, Homo sapiens
DLGKGRRGIPSVETQTASETPTQPWAFSSCQCPPDKFLGHLCTRRGVSPAAPKTDFAISSP

SEQ ID NO: 783703 - protein, 69 aa, Homo sapiens
PEPYLFSPTAALPSAPRTQFLPTAAHPVLQNPVALAAFLLPGRLGIGCPVPVLKAARVHPGKVPPHMVS

SEQ ID NO: 783704 - protein, 101 aa, Homo sapiens
PSQRGFQSHPLKSSSPLFTCVNPARRCGLRDPSCNQEVRPPPGPGGHLRPAVLEEECFLPAVPTDGLAPHCGDMHHALCGPLFFIPEFIPHRMVQLSYLAI

SEQ ID NO: 783705 - protein, 350 aa, Homo sapiens
MFGLKRNAVIGLNLYCGGAGLGAGSGGATRPGGRLLATEKEASARREIGGGEAGAVIGGSAGASPPSTLTPDSRRVARPPPIGAEVPDVTATPARLLFFAPTRRAAPLEEMEAPAADAIMSPEEELDGYEPEPLGKRPAVLPLLELVGESGNNTSTDGSLPSTPPPAEEEEDELYRQSLEIISRYLREQATGAKDTKPMGRSGATSRKALETLRRVGDGVQRNHETAFQGMLRKLDIKNEDDVKSLSRVMIHVFSDGVTNWGRIVTLISFGAFVAKHLKTINQESCIEPLAESITDVLVRTKRDWLVKQRGWDGFVEFFHVEDLEGGIRNVLLAFAGVAGVGAGLAYLIR

SEQ ID NO: 783706 - protein, 350 aa, Homo sapiens; identical to SEQ ID NO: 783705

SEQ ID NO: 783707 - protein, 350 aa, Homo sapiens; identical to SEQ ID NO: 783705

SEQ ID NO: 783708 - protein, 271 aa, Homo sapiens
MFGLKRNAVIGLNLYCGGAGLGAGSGGATRPGGRLLATEKEASARREIGGGEAGAVIGGSAGASPPSTLTPDSRRVARPPPIGAEVPDVTATPARLLFFAPTRRAAPLEEMEAPAADAIMSPEEELDGYEPEPLGKRPAVLPLLELVGESGNNTSTDGSLPSTPPPAEEEEDELYRQSLEIISRYLREQATGAKDTKPMGRSGATSRKALETLRRVGDGVQRNHETAFQGWVCGVLPCRGPRRWHQECAAGFCRCCWSRSWFGISNKIALL

SEQ ID NO: 783709 - protein, 350 aa, Homo sapiens; identical to SEQ ID NO: 783705

SEQ ID NO: 783710 - protein, 350 aa, Homo sapiens; identical to SEQ ID NO: 783705

SEQ ID NO: 783711 - protein, 350 aa, Homo sapiens; identical to SEQ ID NO: 783705

SEQ ID NO: 783712 - protein, 350 aa, Homo sapiens; identical to SEQ ID NO: 783705

SEQ ID NO: 783713 - protein, 350 aa, Homo sapiens; identical to SEQ ID NO: 783705

SEQ ID NO: 783714 - protein, 350 aa, Homo sapiens; identical to SEQ ID NO: 783705

SEQ ID NO: 783715 - protein, 350 aa, Homo sapiens; identical to SEQ ID NO: 783705

SEQ ID NO: 783716 - protein, 350 aa, Homo sapiens; identical to SEQ ID NO: 783705

SEQ ID NO: 783717 - protein, 350 aa, Homo sapiens; identical to SEQ ID NO: 783705

SEQ ID NO: 783718 - protein, 350 aa, Homo sapiens; identical to SEQ ID NO: 783705

SEQ ID NO: 783719 - protein, 350 aa, Homo sapiens; identical to SEQ ID NO: 783705

SEQ ID NO: 783720 - protein, 350 aa, Homo sapiens; identical to SEQ ID NO: 783705

SEQ ID NO: 783721 - protein, 124 aa, Homo sapiens
MFGLKRNAVIGLNLYCGGAGLGAGSGGATRPGGRLLATEKEASARREIGGGEAGAVIGGSAGASPPSTLTPDSRRVARPPPIGAEVPDVTATPARLLFFAPTRRAAPLEEMEAPAASREAPART

SEQ ID NO: 783722 - protein, 350 aa, Homo sapiens; identical to SEQ ID NO: 783705

SEQ ID NO: 783723 - protein, 234 aa, Homo sapiens [sequence omitted]

SEQ ID NO: 783724 - protein, 132 aa, Homo sapiens
ESDSTGPNVISCMLRKLDIKNEDDVKSLSRVMIHVFSDGVTNWGRIVTLISFGAFVAKHLKTINQESCIEPLAESITDVLVRTKRDWLVKQRGWDGFVEFFHVEDLEGGIRNVLLAFAGVAGVGAGLAYLIR

SEQ ID NO: 783725 - protein, 350 aa, Homo sapiens; identical to SEQ ID NO: 783705

SEQ ID NO: 783726 - protein, 70 aa, Homo sapiens
IQHTFGARAQSGNMNMARSGNHKRYLVHKMYAAVRISSPQIKEERHSSWVKPDDVSGTKVTALDAPDVIL

SEQ ID NO: 783727 - protein, 350 aa, Homo sapiens; identical to SEQ ID NO: 783705

SEQ ID NO: 783728 - protein, 350 aa, Homo sapiens; identical to SEQ ID NO: 783705

SEQ ID NO: 783729 - protein, 350 aa, Homo sapiens; identical to SEQ ID NO: 783705

SEQ ID NO: 783730 - protein, 350 aa, Homo sapiens; identical to SEQ ID NO: 783705

SEQ ID NO: 783731 - protein, 350 aa, Homo sapiens; identical to SEQ ID NO: 783705

SEQ ID NO: 783732 - protein, 118 aa, Homo sapiens
CTLFFLKQTNKQKKNLPSSVSFRRPSPALPCCGKFSFGLRCWCHICCMSSGGSHPTAEICHRLEPSLQKQHLKGIQGSQFWGRLNLQLHLPCKLETGKASLTSIFLFCKMEIRPSWKG

SEQ ID NO: 783733 - protein, 131 aa, Homo sapiens
KTQEQEKKTWDQEEKMREEERMREREKKMREEEEMMREQEEKMQEQEEKMQEQEEKMWEQEEKMWEQEEKMWEQQRLPEQKEKLWEHEKMQEQEKIWEQEEKMRGQEENMWGQEEKMWGQEEKMWGQEEMR

SEQ ID NO: 783734 - protein, 160 aa, Homo sapiens
  misc_feature (123)..(123): Xaa can be any naturally occurring amino acid
MKEAKDARYTNGHLFTTISVSGMTMCYACNKSITAKEALICPSKVVLDPESHPDSVPTDPDLFICFFLPGSMRVTLLSDPQLGPNARASCLIPCSLSSSEGWWLLEYGISRTIWECGGGEAVXAPFCTVIHQAPPFAPEQLLKVRGKLIGERTRMFVCVE

SEQ ID NO: 783735 - protein, 116 aa, Homo sapiens [sequence omitted]

SEQ ID NO: 783736 - protein, 95 aa, Homo sapiens
NNYNGPAREPPSIALGYANSGCKLLEDMVEKTINSDISIPEYKELLQEFIDSDAAAEAMGKFKQCFLNQSHRTLKNFGLMMHTVYDSIWCNMKSN

SEQ ID NO: 783737 - protein, 41 aa, Homo sapiens
MSESMKSAQHGAGRQGTGCECCWGDGGHGEMGKPWSQGTWI

SEQ ID NO: 783738 - protein, 79 aa, Homo sapiens
KVYTPHVSHVDSSNTQALQVAMVPPSYSSQPYQSTHPSTNPTLVDPTRHLQQRPSGYVHQQAPTYGHGLTSTQRFSHQT

SEQ ID NO: 783739 - protein, 76 aa, Homo sapiens
QGTSPRQSESERLPRAGDIAAADLTWEGGVSSQCGGGNSKRELDMQRHRSGQLAALGKQPIVVHGEEGGQGRRGRA

SEQ ID NO: 783740 - protein, 84 aa, Homo sapiens
GVQRIPQALLTSILDQITKKSHSSLISQMLHTLKSTTQLQRKYEAEKKRRCETENVIEDGQLYKFNGHYVEEYWKYAHVKLGSG

SEQ ID NO: 783741 - protein, 66 aa, Homo sapiens
ISSNPMSLSSTLESFFLATGPAPPARCEALHSAVRETQSTGCQPNASHRDMELLDISAPSHLVLSV

SEQ ID NO: 783742 - protein, 116 aa, Homo sapiens
VIPVRCELENSKHASHIACQCLTHSCLLNMFYMLSLSHYPCFPTFHHSKGSNLAFCVKSSSDATHLRAECTDVVLPCSPTNPWLFIPPPTWHCQLLSTCISALFHWHTSLKSQTLS

SEQ ID NO: 783743 - protein, 107 aa, Homo sapiens
MLSLLVWLTGMVKPLKEGTQKFLWTLGHLHSGESKGLKENWDGGELEDGVVFPKTSPDLAIPASPRPSQDPATKSITLVTRRLRLAYVLMGGDVGVRWGVYGNTITN

SEQ ID NO: 783744 - protein, 36 aa, Homo sapiens
TALLSDLAALQLALNQGDLAALGGSIHLWLPPSKDP

SEQ ID NO: 783745 - protein, 35 aa, Homo sapiens
ESTWCSYIKYQHARKNPSFGFGFPSKLEVDSGASF

SEQ ID NO: 783746 - protein, 131 aa, Homo sapiens
MIPQMLDDDVMWHCARLLIIGSRGHSMALRRRTGGSSFLGAALKGWEMGPGSGPMGLAICGARNGALLWHRGPKTRRGRAQAQTRRGTQLGPPETSARAGQNKRPKALGEHHHGKQHSTEKQGTRNTTRGK

SEQ ID NO: 783747 - protein, 130 aa, Homo sapiens
MTTACSLLHRLGSKILPVDLHIFYFLRWSLALSARLEWCNGTISTHCNLRPLDSSDSPASASASHVAGIIDARHHAWLIFVFLVETGFHHVGQAGLELLTSSDPPAPASHSAGIIAVSHRAQPTCTFLTF

SEQ ID NO: 783748 - protein, 162 aa, Homo sapiens
EQKRKYVLADPFNGISREPEPPSNETPSSTETSAIPEEEIDWIEKHCVKINNDLLISKVFYFFFYSAYGSLYPLLPVYYKQLGMSPSQSGLLVGIRYFIEFCSAPFWGVVADRFKKGKIVLLFSLLCWVLFNLGIGFVKPATLRCVPKIRPTTHPTNASHQL

SEQ ID NO: 783749 - protein, 165 aa, Homo sapiens
RHLLSFCGAVAMKVELCSFSGYKIYPGHGRRYARTDGKVFQFLNAKCELAFLSKRNPRQINWTVLYRRKHKKGQSEEIQKKRTRRAVKFQRAITGASLADIRAKRNQKPEVRKAQREQAIRAAKEAKKAKQASKKTAMAAAKAPTKAAPKPKIVKPVKVSRFPSW

SEQ ID NO: 783750 - protein, 69 aa, Homo sapiens
MKLGLEGPVALQQQLILHLHVHTLLLPFMGKLGIRLVTSLSLIIKSHGFCANSVSEVYVSICSIPSPFP

SEQ ID NO: 783751 - protein, 30 aa, Homo sapiens
MAEHVGLSPVRGGTQRGGWGRMGVKVAGDA

SEQ ID NO: 783752 - protein, 35 aa, Homo sapiens
LLQQREFEDRHPSSRAHSGDPVGGAPLAPPSLPVS

SEQ ID NO: 783753 - protein, 89 aa, Homo sapiens
SSAETVHLMQCGESTAEQPSVWGGAQWDQEGRRAGRGSKREKEDRGEGQRASSHFRSQLPEHFTTSAFCQSAHLKAESSKAPLLRKGGE

SEQ ID NO: 783754 - protein, 103 aa, Homo sapiens
MCLSGREQPRPSEARFQHLGCSQQPNCFLGFIYKGFFWYHKGGWTGLPLLPGGSGSFRGRSQLATGVTALRRPMWPASIPVLMAKDRLLLCSAGLEVIWSSGL

SEQ ID NO: 783755 - protein, 149 aa, Homo sapiens
METFSCKGYGGTPAIGISPCLLQHGNILRDLPGLSRATSECKGKECSSRKGMCLSSHHLRARPVPGSAGFLHQHGLFISNHWEGMCAESCQDGKAHVPILTAAERKMAAEGKQQQKEKFDSDGLRGQWQAILVHVSCISESRFVAQAVA

SEQ ID NO: 783756 - protein, 109 aa, Homo sapiens
MLAGQELSTPQMLPGPFRWRSPGCDSQVARGELLEGAGEKGGDPVGCVSGGGLVGAPRPAHTTGLRIHSSPPVHVSAPSTPRAWGPSCAILRPPPGPRAGCPQPLHGGR

SEQ ID NO: 783757 - protein, 102 aa, Homo sapiens
LGWAGAASHCPSPRAGMQGGQPQGTCPSPCLLWVGRLLTEPPGGRALTFRALQRVCQMLEMPPGPVHQPSSFRCLHESPLGPLLGLGTRRSCPVRFLLKLLF

SEQ ID NO: 783758 - protein, 91 aa, Homo sapiens
TRLRCHTSSEPCHCNLSFLSPLQEPLTPHPGMPRRTTSFRLLQCNYLRPPWLFLDLTDTQNSCSWTTFDFNSHNLSSSQFSSLVVPKPLLL

SEQ ID NO: 783759 - protein, 40 aa, Homo sapiens
PALLSLIPKVDKGKNRPAFVTNTDIKFSNIRTSNLDLAIC

SEQ ID NO: 783760 - protein, 130 aa, Homo sapiens
LSLSGGHYLKASGVSPPDRHFLKASGVSPPDRHFLKASGVFPPDRHFLKVSGVSPPDRHFLKASGVFPPDRHFLKVSGVSPPDRHFLKASRVSPPDRHFLKASGVSPPDRHFLKASGVFPPDRHFLKVSG

SEQ ID NO: 783761 - protein, 96 aa, Homo sapiens
LTPEADRRQQRGFYASEARCSLRSTFTTAGLGEVKHLCNENYKTQLKEIREDTNKWKNIPCSWMEESISLKWLYCPKLFTDSMLFLSNYQRHSSQN

SEQ ID NO: 783762 - protein, 116 aa, Homo sapiens
IPTHHPGTGEARLLAAKGENFLRLHPLLPVHRLVGDSPGTFPLIFLLHRSLLCSRHCINNFICSFLCQRSLTKKTSSKVSEHTNSGVYISQQGHMVHPPRKKPCWLSVSISTPTAL

SEQ ID NO: 783763 - protein, 121 aa, Homo sapiens
VKFHLKKKEKKKEMSTHPSSPTPKSLPLIELSVPQGFCQSPDPSSLNPAHQGCVQTRLCHQTDRSSWAGCVLHSAWHGLDTEETDCVSTMPSQCLLETLFPVFPQVTLQKVLLPGLGGRSL

SEQ ID NO: 783764 - protein, 105 aa, Homo sapiens
RTVSPFVFQSTQTLLSQVCPCPNVDSCQALFLSLLVTLPQALTCPQQGQCGVIAGSAICLFFLLLLTPIGHDLISIKSRNSGSWSVCYVTLSIFREELHTFCKCS

SEQ ID NO: 783765 - protein, 67 aa, Homo sapiens
AKLSKAGEFHEVHGYDDRELSQTHTKPLPKRGSDRRKSTRMRPCGTLRRTDGTLGCFSTVAPFMVVL

SEQ ID NO: 783766 - protein, 73 aa, Homo sapiens
ELQCAGYTPIACSELCCWSPAPTNTPQLSFFSLPKRLLYVLFWSQTLALEKVSETSLGEEKVDSGIRRFRFDF

SEQ ID NO: 783767 - protein, 146 aa, Homo sapiens
HHLSLPLLELQAHDNTPGYFFLIFQTGSPYVAQAGLKLLYSSDPPPSASQSDGITDVSHLSGSSDSLTSASQVARTTGTCQHACLIFVFLVEMGFHHVNQAGLKLLTSSNLPASASRSAGITGMSHFTRPRLILKIFVEVVSRYFV

SEQ ID NO: 783768 - protein, 167 aa, Homo sapiens
PCLSLPNSWDYRHVPPRLANFCIFNRDGVSLVGQAGLGEQSLSVEIRPASWPPASLPPAFLCFAIWGLRMWGGVFPLRDEASPVDHSEACQSQLLCLAFSSRSLRMIRSGELPFLETQHVSFPHSGVLHVAGVLDSAGHGWVELCDSGVLRVAGMLDSAGRGWVELC

SEQ ID NO: 783769 - protein, 104 aa, Homo sapiens [sequence omitted]

SEQ ID NO: 783770 - protein, 146 aa, Homo sapiens
RDPQVCPELAPDTKRQELAGTSQPAGTHPGVRGPRHQGAAAQVGGSAAMGRILPLGAAGPIVTGTPSLASRTGLGGCRRELGTQPRSRPVPAPYLAFTVAGTTPGPGGLRVPEGQPRALAWRLLGVRRHRVLSPWRPEEAAVCAAR

SEQ ID NO: 783771 - protein, 197 aa, Homo sapiens
LRLCAHLDCTPDIWALHNWSAWLTPFLRGTTRRFDTAFFLCCLREPPPVYPDLAEVVGYQWSSPSEATESFLSKEIWLPPPQFYEVRRLANFASLSDLHKFCLGRALEGLERWLPIILLTADGMVHLLPGDELYLEDSDFLENLMSTEKKTEEIMKEGKQFHRIVTYHRHLYDIHVTVQPKYKHVYPKNSVVRKSHL

SEQ ID NO: 783772 - protein, 183 aa, Homo sapiens
TCRRQLCKQPLLLSEDEEDTKRVVRSAKDKRFEELTNLIRTIRNAMKIRDVTKCLEEFELLGKAYGKAKSIVDKEGGPPVLNPNIFVGENILEESENLHNADQPLRVRGCILTLVERMDEEFTKIMQNTDPHSQEYVEHLKDEAQVCAIIERVQRYLEEKGTTEEVCRIYLLRILHTYYKFDY

SEQ ID NO: 783773 - protein, 76 aa, Homo sapiens
SGVDVRVMWAYLVRKNEMLCKNGSFSPPQAGSRRRLFSNIPCENLVKLQEVKLIMCRPLMIESSWSKTNVMNGPPN

SEQ ID NO: 783774 - protein, 130 aa, Homo sapiens
QSSLLGLSKCWEPLTGVSHHAQQSFVSQSRSLSYKKASRFSLSLSLSHTDTHTHTHTESPPPTFFSFLSFFGIFFQAENKNISHGYSFESFPLLSASIPRPPQCQSISRASVKSKTNPQRSSLTGPLPAA

SEQ ID NO: 783775 - protein, 35 aa, Homo sapiens
LTINTNSKDYKVITFPQINPFLIPIQLPSPPPLQA

SEQ ID NO: 783776 - protein, 152 aa, Homo sapiens
GGGMSGLTTGASLSCPGTGSMTLVGHWGRCYLLTERRSLPCGLTEHVFRPAPSSLADAEDARKATCLMLAWPGDRSPLGLCPVAAGLAGRGAQQWGASEWSPTFQPWGCCIGLPHVTSQALMLLLLKGVRPDGQVKSVLQGGVYPPLPGGGA

SEQ ID NO: 783777 - protein, 76 aa, Homo sapiens
AKGTSMRKSTRPWSEPSGGPGVVFLGSGGKEGPRAMGQPEGVFLRDGLFLRGLLQWPLDWVPAGMVCAQGLPPELT

SEQ ID NO: 783778 - protein, 247 aa, Homo sapiens
QGPMCARIAWAVSQSEEEEQEEARAESQSEEQQEARAESPLPQVSARPVPEVGRAPTRSSPEPTPWEDIGQVSLVQIRDLSGDAEAADTISLDISEVDPAYLNLSDLYDIKYLPFEFMIFRKVPKSAQPEPPSPMAEEELAEFPEPTWPWPGELGPHAGLEITEESEDVDALLAEAAVGRKRKWSSPSRSLFHFPGRHLPLDEPAELGLRERVKASVEHISRILKGRPEGEPPPHPKHPACPGAPIL

SEQ ID NO: 783779 - protein, 63 aa, Homo sapiens
KASVQSSLQERWGLRVKASVQSSLQVRWGLRVKASVQSSLQVRWGLGVKASVQSSLQDRWGLR

SEQ ID NO: 783780 - protein, 74 aa, Homo sapiens
NDGPQLSAVLPPQLLKALGLYGVNHPCLYQQKYSEKTFEGNASPFLFKISQFLPNDGPQLSHGAWPQMSLLMSG

SEQ ID NO: 783781 - protein, 124 aa, Homo sapiens [sequence omitted]

SEQ ID NO: 783782 - protein, 102 aa, Homo sapiens
ELAPLVSLDTTLSKIFLMSLALGEELPPQGSQQVGGDVAHRGGVLRGLPAPADASSSLSSFTVNCCRLAGPSCGGCRSPRKTHPKITLPGFLWEAKPVWGPP

SEQ ID NO: 783783 - protein, 277 aa, Homo sapiens
QGLGCLGQTRPASPRTARESVLGVSQNMSFNLQSSKKLFIFLGKSLFSLLEAMIFALLPKPRKNVAGEIVLITGAGSGLGRLLALQFARLGSVLVLWDINKEGNEETCKMAREAGATRVHAYTCDCSQKEGVYRVADQVKKEVGDVSILINNAGIVTGKKFLDCPDELMEKSFDVNFKAHLWTYKAFLPAMIANDHGHLVCISSSAGLSGVNGLADYCASKFAAFGFAESVFVETFVQKQKGIKTTIVCPFFIKTGMFEGCTTGSSCANSDTAVKTQ

SEQ ID NO: 783784 - protein, 336 aa, Homo sapiens
QGLGCLGQTRPASPRTARESVLGVSQNMSFNLQSSKKLFIFLGKSLFSLLEAMIFALLPKPRKNVAGEIVLITGAGSGLGRLLALQFARLGSVLVLWDINKEGNEETCKMAREAGATRVHAYTCDCSQKEGVYRVADQVKKEVGDVSILINNAGIVTGKKFLDCPDELMEKSFDVNFKAHLWTYKAFLPAMIANDHGHLVCISSSAGLSGVNGLADYCASKFAAFGFAESVFVETFVQKQKGIKTTIVCPFFIKTGMFEGCTTGCPSLLPILEPKYAVEKIVEAILQEKMYLYMPKLLYFMMFLKSFLPLKTGLLIADYLGILHAMDGFVDQKKKL

SEQ ID NO: 783785 - protein, 110 aa, Homo sapiens
LQLVQAGEETQVGAPARAETRCEPFTMKMLKDIKEGVKQYGSNSPYIRTLLDSIAHGNRLTPYDWEILAKSSLSSSQYLQFKTWWIDGVQEQVRKNQATKPTVNIDADQL

SEQ ID NO: 783786 - protein, 80 aa, Homo sapiens
PDANLILTRRAPPSQVDSHLKSVNPSHSFSLHHWHLMVFLFFMAPNFWFSFYYIIYVLYCNSPHNLFGKKDSIQERKNSR

SEQ ID NO: 783787 - protein, 126 aa, Homo sapiens
LCNPESRWKVFAAVSLECAQEELPCAFLGSKGSRKHFWLHFPQPRAKTRDSCCCCDQDWESDKETAVPFMTPRLRENICREDGTGPAVLGPWPESTLWTHFQLVLLATENTPQSPQHQVTAAFASL

SEQ ID NO: 783788 - protein, 112 aa, Homo sapiens
PGHVIRMQHNLSPNLDLNDSRTRALHKCTLFLSTFLTNWTDHMHTSVHDPPNLLHNRLGQRSNDQSWFSRIAQHSALTDHHHIPLSFIESLEPDKSWFKFWLALHICIMWDK

SEQ ID NO: 783789 - protein, 147 aa, Homo sapiens
MRLRHRSAAQALGSSCPSWCSQWVSASLFPSGRKQICGGGRCWVHGRALLLGSYLRAGRGSCASRRSSSSAPTPYPCIPLSPLSRWPVKSPGTSLDLTLWDRLRQGTAGCRSPRGELPSSPSPPASAFCSTSLLPPLTQENLHPYLL

SEQ ID NO: 783790 - protein, 42 aa, Homo sapiens
MQSESCTPNVPGSAIHPLLCSLPSPVSSPSCGVWVAASVLRR

SEQ ID NO: 783791 - protein, 131 aa, Homo sapiens
VGEGEALSTLQAVEGQQVAGLAVNEPLSTLQAVEGQQAADFLGGLKLYLHSNHWRGGGQLACQVGEALSTQKACGGGRGSVYTAGSGGVAGGRLVVGGEALCTLQAVKGQQACGVGVVPRPALTLRGLFLA

SEQ ID NO: 783792 - protein, 48 aa, Homo sapiens
QIPYFHSQIYLDPIPLSNISRPYTVHHLICYQPSPSHLTSSLDNCKFP

SEQ ID NO: 783793 - protein, 158 aa, Homo sapiens
FNLTLKEIHFLKWLDIYCPHVPFIFKGDDDVFVNPTNLLEFLADRQPQENLFVGDVLQHARPIRRKDNKYYIPGALYGKASYPPYAGGGGFLMAGSLARRLHHACDTLELYPIDDVFLGMCLEVLGVQPTAHEGFKTFGISRNRNTGLALEVDIPLLL

SEQ ID NO: 783794 - protein, 88 aa, Homo sapiens
IPAFLHAATETASHAELILALLRPSSDSFGGKLILQRRLPLSFSSGIPSFLWSALPPDLQIGLTLSEYRLFSGGFWPNRRQISKYQDL

SEQ ID NO: 783795 - protein, 59 aa, Homo sapiens
MAPKWVQLSTSSQPYQLSELIVIHITEQICFRRKSGSPLSSGAVVQEYHLGEKQGINPK

SEQ ID NO: 783796 - protein, 109 aa, Homo sapiens
SRFLKKLNTELPYDLAIPLLGIYPKELKTGTQTDICTPVFTAAPFPIAKPQKTPKCPNEQTKRGVYMQGDISLNGKEMLICPTTQKNLEDIMLSEISQSKRDKYMIPLI

SEQ ID NO: 783797 - protein, 115 aa, Homo sapiens
VLVTPPRCLIANRTQQGVLLSWLPPANHSFPIDRYIMEFRVAERWELLDDGIPGTEGEFFAKDLSQDTWYEFRVLAVMQDLISEPSNIAGVSSTDIFPQPDLTEDGLARPVLAGI

SEQ ID NO: 783798 - protein, 85 aa, Homo sapiens
MAIRYPSRDAEEMNVYRSLNLGERSGLEILTWCLTAYRLCKVMKRIRTLKERKGNRGYQMNCSFQIAEGRETRRNQQKRVGKKQL

SEQ ID NO: 783799 - protein, 117 aa, Homo sapiens
ADPGDRPLRPDPRWSRTPCPAAATRPRRRTGRLRRPRLALGDPSRQAQPRRVLAGPGVPSSRGPRVAGRLSSERRWPARRRLLCGAAALPGAGMCPRRAGPTGFSGRGGSRAHRSRD

SEQ ID NO: 783800 - protein, 194 aa, Homo sapiens
TYILQSSELSVRAFCNQLKHKATQETSLDFKCSQSRLKTTKYSSQKVIGTPHAKSLVQRFREAESFTQLSEEIQMAVVWCRSKKLKAQAIFLGNKLLKSNRLKHLEAQGTSLPKKLECIKTSICNHLLRGSGIKTSKHHLRQRRSQNKFLRRQRKPQRKFPVSERKTYCVCVIKSVLKIHSLLSSNNFWFFIKC

SEQ ID NO: 783801 - protein, 37 aa, Homo sapiens
MIKVILVRSTECSGNTAILWYLGGLVPVPPQTPKSAH

SEQ ID NO: 783802 - protein, 194 aa, Homo sapiens
MHHHAPAINIFTFFWRDELSLSCPGWSQTSGFKQSSHLGLPKSWDYRREPPRSACCLLLSGTSTHGVPYPRGDLKVNDMLSAQAGTWLSVPPEFEPIAAVPDHPLRERLSTPLSPARLLHGGSLRAPRTQEHKSATLPSHSLASAYPGRQSLGCTQPRTAKLRAMIVCGEMAAGVSHILSGKAFLRARQARRQS

SEQ ID NO: 783803 - protein, 174 aa, Homo sapiens
WQGCGEIGMLSHYWWKCEFVQPLWKTMWQFLKDQEPEIPFDPAVPLLGIYPKKYKSFYYKDNMHAYVHCSNIHNSKDRKSTQMPINDRLDKENMVHTHHGILCSYKKEQDHVLCRDMDGPGSHSPQQTNTGTENQTLSVLTYQWELNNENTWTQGEEQHTLGPVGGVRGKRKSG

SEQ ID NO: 783804 - protein, 47 aa, Homo sapiens
MASKCPTEKKNRFSMTWSITTTTTTTTSQTSPTLNFKKLEIVKLSEK

SEQ ID NO: 783805 - protein, 118 aa, Homo sapiens
FCYRYSYQDTFLPFEISMAQRFLLTASIFGFFGRAFNMFALRNMSMRMFEEDTYNSFVVSGILNIAAGVFNLIAVLQNYDAVINSQGITFLPSLQMPFKPDVQEVGTAIQVAGIGVLP

SEQ ID NO: 783806 - protein, 113 aa, Homo sapiens
VIPLQDEDKNGTDGCSALTLTQNSLPLLLQSGLHSMNYARTCARGLIEVGSLSRLKTNCFKTSPFTIKELQVWGASPRLFSMEQHFKLFCNHAQCKKPNGDQTMKAEYNMSTC

SEQ ID NO: 783807 - protein, 38 aa, Homo sapiens
MPEPALGAQDSTVCKVDGAVPFLEPRTPQFARWMVLCP

SEQ ID NO: 783808 - protein, 79 aa, Homo sapiens
PFRPKNLEMTGLLLNHDSVGNGVDTTLMKEHRWDEIQTHQNGSGSQARWLMSVIPALWEAKEAGSLEPRRSRPRPAWIT

SEQ ID NO: 783809 - protein, 79 aa, Homo sapiens; identical to SEQ ID NO: 783808

SEQ ID NO: 783810 - protein, 333 aa, Homo sapiens
LIETGFHHVGQDGLDLLTLCSARLGLPKCWDYRREPPRLADVVHISGVPEELFEVSIWPSQALVEFGQSLVVNCSTTCPDPGPSGIETFLKKTQVGKGPQWKEFLLEDVTENSILQCFFSCAGIQKDTSLGITVYQPPEQVILELQPAWVAVDEAFTVKCHVPSVAPLESLTLALLQGNQELHRKNFTSLAVASQRAEVIISVRAQKENDRCNSSCHAELDLSLQGGRLFQGSSPIRIVRIFEFSQSPHIWVSSLLEAGMAETVSCEVARVFPAKEVMFHMFLEDQELSSFLSWEGDTAWANATIRTMEAGDQELSCFASLGCNGTEDKKASA

SEQ ID NO: 783811 - protein, 135 aa, Homo sapiens
ERLHSLSYPSQRQTETADNSNTIMTSQCQTGPMSNSSISLPYILPRSPPPPPPRYNNQPPSSHRPGTVAHTCNLTLWEAKAGGSLEVRSWRPAWPTWRNPVSTKSTKISWVWWQVLVISATWEAEARELLEARRW

SEQ ID NO: 783812 - protein, 52 aa, Homo sapiens
PSYPLHKHGHLSDPQHLLPSFQCTPSNMLPFSGQGYLCNAYANVTPPLKTDV

SEQ ID NO: 783813 - protein, 124 aa, Homo sapiens
LHRCPSCCLGPFARLLPTWPPFFPTNNVAPRFLQVPSCPVKPLASCQAQEMPSDLFRAFAPQETQPRSRLRHATETQKAPTRAGPGQDYLTAAHPSPEPSAARSSGFPVSPLPPRRPCVQCFGP

SEQ ID NO: 783814 - protein, 30 aa, Homo sapiens
MEKGLSGCRDPPKKGGRVSDQKGGTENMYW

SEQ ID NO: 783815 - protein, 120 aa, Homo sapiens
DTHTHRHVLVSSVHTQEHTYTRTHIHTQMQGLHIRARTHACALVCSALSCILLLTEGAPEASPVPQESHFLLSFPSRATSHQRWAGLAWCLTCFPHLHDADDQCSHGRSPAMCLAHTGPQ

SEQ ID NO: 783816 - protein, 90 aa, Homo sapiens
LWISSPQCQPGTGKACQLQQRCQSIRPKLHSVHSPYLFRCKTQSPSFLVQEESHFKWGERKHPSTCAVDDKGISDALGSVLEILYRELEN

SEQ ID NO: 783817 - protein, 96 aa, Homo sapiens
SPQVTGTCTDGELWNSPWPRKVFAFQGPWDHLGSGCITCMCGYKEPSSLQEATVLLLGPPFSSTLPYSKLPSLYFALFKATITKYQNKGPNSATIV

SEQ ID NO: 783818 - protein, 121 aa, Homo sapiens
PAQPRAAAASGRTEVTFSPYLGNQAFLPGTVLGLKLCILQTFAAIFPLSPRHPAIKPDEYHKTVCPQQLPTPEPNDSSALKKENQACCPSPVAFRWVIRAGPCLPLGFSGLCSDTMTAARG

SEQ ID NO: 783819 - protein, 61 aa, Homo sapiens
MAQPCWSLQPLPPGFKKFSCLSLPSHWDYRCPPPHQANFCIFSGDAVSPCWPGQSRTPDVK

SEQ ID NO: 783820 - protein, 50 aa, Homo sapiens
MKDGEGWPQGARHVANSCERRRGCIVVVHLKDLEHLNPTHGETGLTGAGS

SEQ ID NO: 783821 - protein, 53 aa, Homo sapiens
LHSLAPPQAQPSTGRITGQGLGAANPPPTGVDTYSVPDRRELCLTGPYLSLSL

SEQ ID NO: 783822 - protein, 220 aa, Homo sapiens
TTSPNDKITSSAAESTEHRDRATSANVITPAPAEPIKHAKRTTLAHEKMTQVTEKSTEHPEKTTSTTEKTTRTPEKPTLYSEKTICTKGKNTPVPEKPTENLGNTTLTTETIKAPVKSTENPEKTAAVTKTIKPSVKVTGDKSLTTTSSHLNKTEVTHQVPTGSFTLITSRTKLSSITSEATGNESHPYLNKDGSQKGIHAGQMGENDSFPAWAIVIVVL

SEQ ID NO: 783823 - protein, 79 aa, Homo sapiens
TAGPTPGSLPIGATGQTAAQKHDGNQQGLGGSHSQPRHAPRGQAHIGQGASQLPPRGSVPRAPNAIPSKGRPWQASGSQ

SEQ ID NO: 783824 - protein, 124 aa, Homo sapiens
TTFIVWTEKREQDLCRVIQPVAVSGPQTPGQFPSCCTTPRQRKRNGPSTKHCTEGSWASPEALLCTPPSIHPSILPSLPPFLDPSISPFLYSFIHPSIHLSIHLSIRPSFLLISPFTYPSLHLS

SEQ ID NO: 783825 - protein, 53 aa, Homo sapiens
MSHILEEKCVPCRGPPGALSLRSDQGQCWHRLCHCTLVAPFFSSAFRVAQWGS

SEQ ID NO: 783826 - protein, 113 aa, Homo sapiens
GHPVTSPQTDLPCLPSVPFRPGEVSCCQDVVRPTVTSSLLFLQKHAGRGSAPGWSLSFRVCACRARKQCGEGQGILVFCCVAWHWWTWARRCRRPVPVWCLQLEGPVNGGCVQ

SEQ ID NO: 783827 - protein, 101 aa, Homo sapiens
MHRYDSWHSACYKEEKALPVNQTICEYLQLPNHINFSLSLPGESYSEQLARIRRNKAFFSCSDRALLNVYLPEEGRKRKGLLVTFSSLEEEENSDLMSLSL

SEQ ID NO: 783828 - protein, 140 aa, Homo sapiens
AGPRTIADRPARDPIACPRAMRSPDGSSAPSDPRSRPRAASGMRSAEGPGPDTRRRRHESDLMCFGRTRVVVPCGDGHMKVFSLIQTGGDPYRTAIAKDPNYWIQVHRLEHGSMAGNTRPLMTFFVMSQTHNDRLRRCMW

SEQ ID NO: 783829 - protein, 113 aa, Homo sapiens
MYSLQRAVSILSPSHKRSGGVREDQGRDPCLTPPPGLTLLPAIVPSVNLGWPSLRGLDLPLPRSPSPRVVCNNQDMCRVIFLSTPSFFIEQISAFQELGVSAIFCFLSLPLQR

SEQ ID NO: 783830 - protein, 113 aa, Homo sapiens; identical to SEQ ID NO: 783829

SEQ ID NO: 783831 - protein, 41 aa, Homo sapiens
LALPTALSGRPSVPHCLMYASSAVLLGTVDNPSETRALSAP

SEQ ID NO: 783832 - protein, 124 aa, Homo sapiens
MPVQLGQLGRGVTVPWACQLVKKEVRFGKPGWLTWCSLSISAHTSSAGPEIHSVSTSLHFLLWGISANAFPPQFWALGVRGGGCGYSLLMTLPARIIMMITITIVVIPSSEARGGVSGCRAAQQ

SEQ ID NO: 783833 - protein, 109 aa, Homo sapiens
ILDYFFSNPKSSPHNSWPLFLPSSLLLLLHYSLDPHGSTFDDHLSPLSLTPHITHFSNKMLQSPSVEDAESPLLNWVGRALPDLLTLPLQPDSLYFPMLRRHHSQACPL

SEQ ID NO: 783834 - protein, 53 aa, Homo sapiens
PPATRTSVALDRCHPAGVGWLYSMQETSSKGFFAFLVLHFSSLSLSTYCVLGV

SEQ ID NO: 783835 - protein, 52 aa, Homo sapiens
NKAHSDLSNKLCCPLAVTAAACQCGLLKASTDAELKLLHVPRSSCLCQKSPS

SEQ ID NO: 783836 - protein, 157 aa, Homo sapiens
HPCPGLPSEHPQTWACSNRRAICKPQCHQPHGLWRGLRKAGSACRRGTKRKANSWPLQPRRSPIPPPCLPFRPADTTVCKPWSSSPPLSPPPPPPAGLRRKVATQSPRLGPAWFDFLPCVSPMRWPCPWPVYSCAQAPRDPKARPLSAAAPRRAGRP

SEQ ID NO: 783837 - protein, 46 aa, Homo sapiens
HSSHENRKRQKRRQKQEWGCFPARQRLMGEMCPWKLYLALCSFLSG

SEQ ID NO: 783838 - protein, 234 aa, Homo sapiens [sequence omitted]

SEQ ID NO: 783839 - protein, 36 aa, Homo sapiens
MRERQFCSSCQENTKDDDFPGPEKGMNSTEAGNHHF

SEQ ID NO: 783840 - protein, 119 aa, Homo sapiens
VPLPFQLILFHHPLFPVSPHYSTCLEQVLHLYIHITGYQVCNKLSDAATFIHTPKCTCIHTHTHTHTKVLLNTQRQNQSPLPYTSGVLFNLHNTDLHDSICHKDHCSHIITISHSSLHS

SEQ ID NO: 783841 - protein, 76 aa, Homo sapiens
APFTQAKRWKQLRHGSTGEWISNTRSIRTMEYYSAFKRRGSLTVAAAQVNLADIRLGEISQSQKDKYRVTPLTGGP

SEQ ID NO: 783842 - protein, 45 aa, Homo sapiens
KEKMLLSVTSRPGISTFGYNRNNKKPYVSLAQQMAPPSPSNSTPN

SEQ ID NO: 783843 - protein, 196 aa, Homo sapiens
MGSRSSHAAVIPDGDSIRRETGFSQASLLRLHHRFRALDRNKKGYLSRMDLQQIGALAVNPLGDRIIESFFPDGSQRVDFPGFVRVLAHFRPVEDEDTETQDPKKPEPLNSRRNKLHYAFQLYDLDRDGKISRHEMLQVLRLMVGVQVTEEQLENIADRTVQEADEDGDGAVSFVEFTKSLEKMDVEQKMSIRILK

SEQ ID NO: 783844 - protein, 196 aa, Homo sapiens; identical to SEQ ID NO: 783843

SEQ ID NO: 783845 - protein, 218 aa, Homo sapiens
MDIDRLEKKIEDLSKTETEHQMQLHTYENTLLNKDTSLQKKGLYIEELKSTIIEYGSIIENLRGEKSKLAHELQHLQQALITNGIQLNVNGECNSIISEGEKSLHYELTLAQSAENTETERQHNVINLSSLDAMMDQEMLLLLREPAQKAVEFTATLQKLHEEISKIATLIENSRRWVTNPEITVKEKWEEQLTDSTSIMDREARSLLINAVTFWETK

SEQ ID NO: 783846 - protein, 130 aa, Homo sapiens
  misc_feature (74)..(74): Xaa can be any naturally occurring amino acid
  misc_feature (109)..(109): Xaa can be any naturally occurring amino acid
  misc_feature (112)..(112): Xaa can be any naturally occurring amino acid
  misc_feature (114)..(114): Xaa can be any naturally occurring amino acid
  misc_feature (125)..(127): Xaa can be any naturally occurring amino acid
MINNSGKELPQYRAQQQDLKIDHRLESLGAGVWGESGVTEKMDFCQEIPKLFAIKGAAEIGTQTKCQILMYFLXNQIFFRNLANLITRELINNGTIWKEQFDRESKSKXHRXIXFLKNKGLKLDXXXPRI

SEQ ID NO: 783847 - protein, 67 aa, Homo sapiens
STMAATNQLSSPETLTGSDLSLLSTAKSAAPSYCSESPPLAAFLPSQGLSMVFNLASSTIQDLLSST

SEQ ID NO: 783848 - protein, 68 aa, Homo sapiens
LTVSSHHLIAFSRIVSGFALRKADCPGLLPPEEGAKMSPESKRLFNIIILDGLICVSSHETQMEISCP

SEQ ID NO: 783849 - protein, 35 aa, Homo sapiens
MACVWAVMNGPGRSESWGVIIREGEVWGQRARPAA

SEQ ID NO: 783850 - protein, 118 aa, Homo sapiens
SRLGMMPLCIYLYTWSWSLQQNLTIPYQNIGITLVCLTIPVAFGVYVNYRWPKQSKIILKIGAVVGGVLLLVVAVAGVVLAKGSWNSDITLLTISFIFPLIGHVTGFLLALFTHQSWQ

SEQ ID NO: 783851 - protein, 85 aa, Homo sapiens
KLPIVNDRDELVAIITCTALKNRDYPVASKDSHEQLLGGAAVGTHEDDKYHLDLLTQVGVNVIGLDSSQGNSVYQIAMVHYIKQK

SEQ ID NO: 783852 - protein, 118 aa, Homo sapiens
SGQWSPIPALSSAVRTSGQSLGEPWILTTAPPLSPSSHSPSPTLPWNGEICIGIPPVPLPCASEVHVCSYHVGSRHIEFITFRRAAVPITPVTSMADISVCRWTTSPSPLLHHFLSSV

SEQ ID NO: 783853 - protein, 104 aa, Homo sapiens
MTHPACEEGAPQQETDQNKQHREAWTRDTNHADCARTTQGHERDLVEKRHNNPRGRTSTIRGRPHTRRKNDRPSSKDTTDDATTGNNNQMRGGDKHRNEETETI

SEQ ID NO: 783854 - protein, 133 aa, Homo sapiens
MSSLVKSPLTGGLQPPNPPNLHRIPAPFRFSHPVVWACHILEATGTLEGEACVGLTARDRPLWVSVNQPGIYLSGWHLEPVQGPHLTEEPPGSEVIVQVYALGVDTIAIQGIPQVVELGQRCTSDRVPKAPDT

SEQ ID NO: 783855 - protein, 152 aa, Homo sapiens
MVACFLQIISFYYVFFFYSTQIRNQSKASGSGLCEGDEVVSINGNPCADLTYPEVIKLMESITDSLQMLIKRPSSGISEALISENENKNLEHLTHGGYVESTTLQIRPATKTQCTEFFLAPVKTEVPLAENQRSGPDCAGSLKEETGPSYQR

SEQ ID NO: 783856 - protein, 166 aa, Homo sapiens
MGTGDFICISMTGGAPWGFRLQGGKEQKQPLQVAKIRNQSKASGSGLCEGDEVVSINGNPCADLTYPEVIKLMESITDSLQMLIKRPSSGISEALISENENKNLEHLTHGGYVESTTLQIRPATKTQCTEFFLAPVKTEVPLAENQRSGPDCAGSLKEETGPSYQR

SEQ ID NO: 783857 - protein, 117 aa, Homo sapiens
RIQRPLNSRSPNHSLFVKAELTAKQATMKLSVCLLLVTLALCCYQANAEFCPALVSELLDFFFISEPLFKLSLAKFDAPPEAVAAKLGVKRCTDQMSLQKRSLIAEVLVKILKKCSV

SEQ ID NO: 783858 - protein, 144 aa, Homo sapiens
GADRHCLSYAQAYPIAVDAGGIAEGTVTAWACPTRLTHTLAHGAASSVCREGQGREMRATSVPVVQAAHLAGRACGSRAVGARMPLAWGRSHLFLTFLESPSLHLCLHPTYLPLCSLSNYLKTNPIMWLLLPWLRTSNGSLPMQ

SEQ ID NO: 783859 - protein, 60 aa, Homo sapiens
MCSAGSCSESRSSSDTLNLRSSATTFCLKFCCLVMDVVLTIDLRCFFGFPTSKSSSSKSE

SEQ ID NO: 783860 - protein, 138 aa, Homo sapiens
LGPTPKRGCRGPVGFQRRIHGSRCHVSNRRFKVSCYHGYRNASLFLRVRMDTHMCIRAHMHPQALTEPWVPTAGRPGREHHSALRPPQRLLGCALLLRRRPAPEAALAGVTQPGLQLVGRPAGMAGHPQRPAGGCARR

SEQ ID NO: 783861 - protein, 49 aa, Homo sapiens
SLCSCCHIAFHLCLLCPSCKATCDYKSYLDDPGFSSCFEILNQFFKILL

SEQ ID NO: 783862 - protein, 104 aa, Homo sapiens
DHPSDPSGKSLSFKQDHRQETQQLRSVLWRLASRYLQPREWKKLAYSWEFTEAHVDAIEQQWTGTRSYQEHGHRMLLIWLHGVATAGENPSKALFEGLVAIGRR

SEQ ID NO: 783863 - protein, 210 aa, Homo sapiens
MAVVIRLLGLPFIAGPVDIRHFFTGLTIPDGGVHIIGGEIGEAFIIFATDEDARRAISRSGGFIKDSSVELFLSSKAEMQKTIEMKRTDRVGRGRPGSGTSGVDSLSNFIESVKEEASNSGYGSSINQDAGFHTNGTGHGNLRPRKTRPLKAENPYLFLRGLPYLVNEDDVRVFFSGLCVDGVIFLKHHDGRNNGDAIVKFASCVDASGG

SEQ ID NO: 783864 - protein, 45 aa, Homo sapiens
ELRRPAQLRLQVYRLLSTAGTPENGSEPESRSPDNRTQLAPACMP

SEQ ID NO: 783865 - protein, 137 aa, Homo sapiens
LWSLPDRKRKLLRNLKQGQGCDEIGMAMRKLDVGVAGTCRLHYDLGRMEGQQRGMRWADIWQVVSSMDNHSYSPPQSLLAPCLSPSPTIENNMLCCHLKPPFHGRARWLTPGILAFWEAEAGGSLEVRSLRPAWPTW

SEQ ID NO: 783866 - protein, 133 aa, Homo sapiens
FLDLAFPRSLSFLLPRLLLGNVKAEKTNCRNSYPAARPPFHQSFFGVNGAAASLLLHCQRPRARGAGWELLLRARDPLFLPLQRLGCVKASEGVIPGREKRRRRVTGKPFPWARGAQGARLCRPGLPSERRRA

SEQ ID NO: 783867 - protein, 92 aa, Homo sapiens
GDMIRIELVPLVLEVSIAGALLGRLGHQRLFPLGLTRAVNVSGHLNTALHIRCPVCNGAGFCKHKLPWRNRIIIAHQALWQQCCNQCKHLFI

SEQ ID NO: 783868 - protein, 67 aa, Homo sapiens
MVSTAREAAEQTDATCRRVASLKFGNVQISIYTRRQQQMPAEKALALSHTHGQQVANRALHVMAASQ

SEQ ID NO: 783869 - protein, 112 aa, Homo sapiens
  misc_feature (8)..(8): Xaa can be any naturally occurring amino acid
ITDVSTPXLVVSWLWGHQGISMVGQSGDIHSWKPQSAPTPPSRPPCDHVVSRLHFLNSRQPPSTPLNLIFSRGFSTIWHSTDSTCQRPADFLPRSTGGAKYALTFPKMTCLM

SEQ ID NO: 783870 - protein, 43 aa, Homo sapiens
AASGLERGRGQRKSWFWCIFAGKVVEPADRLEAEDEEEREGKG

SEQ ID NO: 783871 - protein, 123 aa, Homo sapiens
QAGQAPPPISSSPLLHHSLCPSAPGGLFRGLTRPAGAATVSPVPGAGVLCSQGVLRLLLKCGSCWVTRASHLCGIRFQSGLRSRGRWAQLQNCLEPSPASGYVCQSPPGGGQGQVPILVLRGL

SEQ ID NO: 783872 - protein, 107 aa, Homo sapiens
PTSQDNVLLAPQSLKPELVGAGRQPPASICSGGGGVQGGAAGFPLACKQEHRVFLSGCENADENPRMLCHRGGQLIVPIIPLCPEHSCRGRRLQNLLSGPWPKQPME

SEQ ID NO: 783873 - protein, 49 aa, Homo sapiens
ILNLQRTESPHATIPVLNSSLGPENFRYPHFRDFLSTKSNSFIQDKRLF

SEQ ID NO: 783874 - protein, 154 aa, Homo sapiens
WWRLTELGEDGVSVTQAGVQWRNLGSLQLLPPGFKQFSRLSLASSWDYRHTPPCLASFCIFVETGFRCVGQAGLELLTSGDLPTSASQSAGIPGVSHCSWPVFFMETEKPILKFTENLSLSLCHSLSFYKTWCHYVAQAGLELLGSNNHLTSAY

SEQ ID NO: 783875 - protein, 178 aa, Homo sapiens
KPLEQTECLNKTETGALVLHNIGYSAQHLDNLLQALITLKKNKESQYCVLRDFQEYLAAVESSMKALLTDKESLKVGPLDSVTYLDKIKKFIASIEKEKDSLGNLKIKWENLSNHVTDMDKKLLESQIKQLEHGWEQVEQQIQKKYSQQVVEYDEFTTLMNKVQDTEISLQQQQQHLQ

SEQ ID NO: 783876 - protein, 66 aa, Homo sapiens
EDLPARRLPSSSLPISVWMPSSRSFEEVIVIAVRGVIHQVVGEHTPEEPHGLQPRLDGQQGDAEQL

SEQ ID NO: 783877 - protein, 42 aa, Homo sapiens
MSFEDKTRDFKETPSLQRATGGCIPRRQESWDSEEESGNYGM

SEQ ID NO: 783878 - protein, 63 aa, Homo sapiens
PGMKHPQMGNWPEQVHSLSPTYFSPLTVTGSLRCGPGEVRNVRQSQLLTAKGAGIRVHLPEVP

SEQ ID NO: 783879 - protein, 43 aa, Homo sapiens
QTGTSAPRPSNWNMSSPRCLQLHGPETGTSAPSWVSSCMDLKL

SEQ ID NO: 783880 - protein, 76 aa, Homo sapiens
AHGGLRKKSQADVSGIKLEKAVDDGPGLPSSLSLFMGFLFISQKHSDSWIYSKKSSRVSDTVFLSGSGSIKLPGRQ

SEQ ID NO: 783881 - protein, 44 aa, Homo sapiens
ADVLLVMVLVIEVLLAMDVFMVMVSAVEALMVRNVFIITVLVVE

SEQ ID NO: 783882 - protein, 68 aa, Homo sapiens
MRATSLLSTNAPVPSPGHNVVQTLLALTCLWFHGITKNILTSFLLSMGWRQRPEQPPVGHPPRLLRPP

SEQ ID NO: 783883 - protein, 41 aa, Homo sapiens
MALEEDGSAHGVLLLNSNAMDVTLQPTPALTYRTTGGILDF

SEQ ID NO: 783884 - protein, 111 aa, Homo sapiens
EEAFLVGCILLVGLLYSRSKTRFRQNIQASVAGQKVSSQNSRSPRISEQDLVWKQGLCRLSETDSYGLNSEEIAGGRHWQDMRPTSCFFTNRPSFFQHGHKSSTNNGSRLV

SEQ ID NO: 783885 - protein, 70 aa, Homo sapiens
KRPNTSQETTVDQSWEADQTRWRRTTTPTFSISNYIDLTPHLLTCRLTKHLLGYGLLSPVQPPPFPGCVL

SEQ ID NO: 783886 - protein, 124 aa, Homo sapiens [sequence omitted]

SEQ ID NO: 783887 - protein, 126 aa, Homo sapiens
EATAAMEKAGLAPGGTEALERPRGSLARSGWSCALLPGSGPVTWGTGPAKTGPLGASQHLGQAPGGRALADQPRTPNSPTGGPIQGHTSCPQEQDIPEARVQLDRWKGLTLCPLTPLVGTLSASDP

SEQ ID NO: 783888 - protein, 104 aa, Homo sapiens
MRSTHKENGLQHHKLHIHQTGQGLGIESLSGKKTPATLCTLGNIKNQNKTCHINQNINQFSNQSKVPPHQGRPRSGLWRGGPGSRRNPNHAGSQEPEKRQSSPA

SEQ ID NO: 783889 - protein, 176 aa, Homo sapiens
SVYRSIFSSQCLCVLPGVAEEHTSRNAQIEIHIPQKISGRGLHGSPAPTWLEKFSQTVTPVIIMRKTSDQSQCRRILQLRDQQASKLSRVTCLETVKGHQIKTKVSLRNYPAQRLGGASRRPKTDATWGPGIGLIAQSQEASKKKGDLNCTQQVCLHLCPEFNLSTICSCRGTWEM

SEQ ID NO: 783890 - protein, 110 aa, Homo sapiens
PAFSMAPFTTLLGALWPENLCVSCLFLFFETESCSVTQAGECSGVISALCNLRLLGSSDSLASASKVAEITGTCHHAWLIFVFLVETGFCQVGQAALELLTSNDPPTSTS

SEQ ID NO: 783891 - protein, 121 aa, Homo sapiens
KRPLPCAPIHNNTESSGTLALGTNATELQELQTAGAHKTWASDCVLTPGPLSSGKHFTGDMSCAQCLLNTHGRAASLCIHFCVSCIRRPFHKKCGHVSVSLSTVPSMVLGSVQVFNKVFFE

SEQ ID NO: 783892 - protein, 164 aa, Homo sapiens
SALRTARPGSTASTDNAGSDGFKCMPPFRVCCPGREVRGETRQRGRQQPARRRTRCVRAGSGPSGVGGAIASARLGCCSPGPGNRGTCDPGMERPSGLGDPWDRQLWGRVTSRTVRPPRPCTARAPAGEGRLGGEGAGGAGQSGPRAASPSGVTAASPRGPTRR

SEQ ID NO: 783893 - protein, 118 aa, Homo sapiens [sequence omitted]

SEQ ID NO: 783894 - protein, 103 aa, Homo sapiens
RGNFPPKERGVVPTQKGGAELKDREASAFLHMEVIIPLPASPGHSEDLAALEEASPSPTSHGSGEPSELREPFLRHVHLSKASPEPKDQVGFVVSPATGGERR

SEQ ID NO: 783895 - protein, 103 aa, Homo sapiens
HTTKQMGAFQLRIADKPSIIIDKLKNIGSHYCLGRHLPCISLHPWLPSACSSDSPPDSSSCLLIPSPINSSERLLIDTMLFLIYHENQTFHLHNCTINPHYNL

SEQ ID NO: 783896 - protein, 68 aa, Homo sapiens
RLCKDVLEFRKGGEDPLQIFILEQEDPCPTGTLQAPSCPALSLAAWTSQRENNTRAAAADTGSRSCWV

SEQ ID NO: 783897 - protein, 36 aa, Homo sapiens
PSLIVQTHLLQGPRHRRLRSVHCLQLWVELTAGLED

SEQ ID NO: 783898 - protein, 119 aa, Homo sapiens
LPPVCSEHVLRPRGASFLNPRMGATVPGLPHPGSSPYFSMQSDPGTQGRSVRSDPVMQGCSVRSDPVMQGCGVRSDPVMQGCGVRSDPVMQGCGVRSDPGMQGCGVRSDPVRWSLNMPC

SEQ ID NO: 783899 - protein, 121 aa, Homo sapiens
HRRDCVFEIISGPVLCLSLHPCPLPPEPAASSTSGLAGLPHPCPLSLAVSVAPASGLLGKEWCVSSDLGLKRPACFFWLSCHCHKTMSAYPSSWRTMKDTRNRAAPAKAGLEKATQANLQM

SEQ ID NO: 783900 - protein, 101 aa, Homo sapiens
PGWVLGCAPALVPPRGLGIRGPQAAASVPLALWVSPGPAHQPSGLVLGPPCSPGSVLGPPCPLGQPWVSPLCPPFLGEGSAPLDLGGNRKVWLEQMTFSKP

SEQ ID NO: 783901 - protein, 133 aa, Homo sapiens
VRPTTAAVTTHIQRWHAGIPRGDALGRPRHATCAREGRQTETERAGSGFRAQHPDYQKHDTPAVTTWPCLYNTETPTPPSDTRAPLPEGHGTHGHVDTHAPHTHTHTHERTRAHTGRQGEGKEPETAGEVKSG

SEQ ID NO: 783902 - protein, 136 aa, Homo sapiens
IGVARGAGRQGREEDIFFSAYPLRPLKFCGVYTLYPCKIIGIWIFTDCLLCARYHDMHYKHKDELKILYVLQWFKTKSLEFSFQSTFILDDLQSYKWMTFMFTSVAQTSSLNCRLRKSNCLLDNSTWLSMTASQTG

SEQ ID NO: 783903 - protein, 95 aa, Homo sapiens
WVSGWESRWVSGWESGWESGWESAGESGGESGGEWLREWMVEQKGERMGERMGEQMGERMGERMGERMGERMGERMGERMDERMGERMGERMQEW

SEQ ID NO: 783904 - protein, 113 aa, Homo sapiens
PTIYLLLPVYLLPISNLSIWKDGTSLQKAVLGFQSQKELKSYHLLEATLLLKLSPIHTPQCLIQQSPREPPDFHRRHATSATLTPPAIDSHTLWTNICPVCPQCTSWSCPFSS

SEQ ID NO: 783905 - protein, 142 aa, Homo sapiens
SGRSGAVLGRGQGRGRGRCWGRRWDLAPGSPPSLPTCGSRASSVSLIECGPVDTAFMQKVLGGPDQVMDRTNTRTFRLLHYYLHHSKEIYREEAQHPEEVVKVFLTAMRAPKPTLRYFTTRRFLHQLLMRLDDPFGFDYAAA

SEQ ID NO: 783906 - protein, 129 aa, Homo sapiens
  misc_feature (8)..(8): Xaa can be any naturally occurring amino acid
QAGTPPEXWDIVDRACNGMSNRFWGWGREDDEFYRRIKGAGLQLFRPSGITTGYKTFRHLHDPAWRKRDQKRIAAQKQEQFKVDREGGLNTVKYHVASRTALSVGGAPCTVLNIMLDCDKTATPWCTFS

SEQ ID NO: 783907 - protein, 281 aa, Homo sapiens
AWAEREAEAPRRPGRPGRPGCERLPHAPPPLRTMFPSRRKAAQLPWEDGRSGLLSGGLPRKCSVFHLFVACLSLGFFSLLWLQLSCSGDVARAVRGQGQETSGPPRACPPEPPPEHWEEDASWGPHRLAVLVPFRERFEELLVFVPHMRRFLSRKKIRHHIYVLNQVDHFRFNRAALINVGFLESSNSTDYIAMHDVDLLPLNEELDYGFPEAGPFHVASPELHPLYQGLVRVRTSETRAQAPQRGNSQHRSSWLLPCRNVGLVLPDLLIFRKKLECWILK

SEQ ID NO: 783908 - protein, 213 aa, Homo sapiens
AWAEREAEAPRRPGRPGRPGCERLPHAPPPLRTMFPSRRKAAQLPWEDGRSGLLSGGLPRKCSVFHLFVACLSLGFFSLLWLQLSCSGDVARAVRGQGQETSGPPRACPPEPPPEHWEEDASWGPHRLAVLVPFRERFEELLVFVPHMRRFLSRKKIRHQGLVRVRTSETRAQAPQRGNSQHRSSWLLPCRNVGLVLPDLLIFRKKLECWILK

SEQ ID NO: 783909 - protein, 360 aa, Homo sapiens
AWAEREAEAPRRPGRPGRPGCERLPHAPPPLRTMFPSRRKAAQLPWEDGRSGLLSGGLPRKCSVFHLFVACLSLGFFSLLWLQLSCSGDVARAVRGQGQETSGPPRACPPEPPPEHWEEDASWGPHRLAVLVPFRERFEELLVFVPHMRRFLSRKKIRHHIYVLNQVDHFRFNRAALINVGFLESSNSTDYIAMHDVDLLPLNEELDYGFPEAGPFHVASPELHPLYHYKTYVGGILLLSKQHYRLCNGMSNRFWGWGREDDEFYRRIKGAGLQLFRPSGITTGYKTFRHLHDPAWRKRDQKRIAAQKQEQFKVDREGGLNTVKYHVASRTALSVGGAPCTVLNIMLDCDKTATPWCTFS

SEQ ID NO: 783910 - protein, 167 aa, Homo sapiens
MHDVDLLPLNEELDYGFPEAGPFHVASPELHPLYHYKTYVGGILLLSKQHYRLCNGMSNRFWGWGREDDEFYRRIKGAGLQLFRPSGITTGYKTFRHLHDPAWRKRDQKRIAAQKQEQFKVDREGGLNTVKYHVASRTALSVGGAPCTVLNIMLDCDKTATPWCTFS

SEQ ID NO: 783911 - protein, 366 aa, Homo sapiens
AWAEREAEAPRRPGRPGRPGCERLPHAPPPLRTMFPSRRKAAQLPWEDGRSGLLSGGLPRKCSVFHLFVACLSLGFFSLLWLQLSCSGDVARAVRGQGQETSGPPRACPPEPPPEHWEEDASWGPHRLAVLVPFRERFEELLVFVPHMRRFLSRKKIRHHIYVLNQVDHFSLAHLHRFNRAALINVGFLESSNSTDYIAMHDVDLLPLNEELDYGFPEAGPFHVASPELHPLYHYKTYVGGILLLSKQHYRLCNGMSNRFWGWGREDDEFYRRIKGAGLQLFRPSGITTGYKTFRHLHDPAWRKRDQKRIAAQKQEQFKVDREGGLNTVKYHVASRTALSVGGAPCTVLNIMLDCDKTATPWCTFS

SEQ ID NO: 783912 - protein, 265 aa, Homo sapiens
TGLCGDCRSLSRCPPEPPPEHWEEDASWGPHRLAVLVPFRERFEELLVFVPHMRRFLSRKKIRHHIYVLNQVDHFRFNRAALINVGFLESSNSTDYIAMHDVDLLPLNEELDYGFPEAGPFHVASPELHPLYHYKTYVGGILLLSKQHYRLCNGMSNRFWGWGREDDEFYRRIKGAGLQLFRPSGITTGYKTFRHLHDPAWRKRDQKRIAAQKQEQFKVDREGGLNTVKYHVASRTALSVGGAPCTVLNIMLDCDKTATPWCTFS

SEQ ID NO: 783913 - protein, 227 aa, Homo sapiens
AWAEREAEAPRRPGRPGRPGCERLPHAPPPLRTMFPSRRKAAQLPWEDGRSGLLSGGLPRKCSVFHLFVACLSLGFFSLLWLQLSCSGDVARAVRGQGQETSGPPRACPPEPPPEHWEEDASWGPHRLAVLVPFRERFEELLVFVPHMRRFLSRKKIRHQGPALTGCGVARTKTASYAIAATRPPRQAWAGPGHVGCLGRCLPCTVIRERLGCVLSGTPPAFLLTLL

SEQ ID NO: 783914 - protein, 171 aa, Homo sapiens
AWAEREAEAPRRPGRPGRPGCERLPHAPPPLRTMFPSRRKAAQLPWEDGRSGLLSGGLPRKCSVFHLFVACLSLGFFSLLWLQLSCSGDVARAVRGQGQETSGPPRACPPEPPPEHWEEDASWGPHRLAVLVPFRERFEELLVFVPHMRRFLSRKKIRHHIYVLNQVDHFR

SEQ ID NO: 783915 - protein, 73 aa, Homo sapiens
AWAEREAEAPRRPGRPGRPGCERLPHAPPPLRTMFPSRRKAAQLPWEDGRSGLLSGGLPRKCSVFHLFGPGEG

SEQ ID NO: 783916 - protein, 97 aa, Homo sapiens
KDGKVNIDDLVKVIELVDKEDVHISTSQVAEIVATLEKEEKVEEKEKAKEKAEKEVAEVKSSEPLAWAPVLLLCRHPGKGREGDCFVVILSGSSNIL

SEQ ID NO: 783917 - protein, 44 aa, Homo sapiens
STLGRSQPYECNQCGRAFSQLAPLIQHQRIHTGEKPYECNQCGR

SEQ ID NO: 783918 - protein, 176 aa, Homo sapiens
LHRRSHPAAPCHSVPAPAWSLQQGPEDAARLPSAARWREGRLGAAQPASPLRKSSGSLLLAKANTALFFPDRANAPGTRAATHRAPAECSVSSGKAPGVQSRPWANSQDCSSRRERAEARRVPAWPQRPRRPLRHPRAAERTGSREIPCPHSWQRTLWGGRAAGSRRLPAEAATAA

SEQ ID NO: 783919 - protein, 107 aa, Homo sapiens
VAGSGRMSSKREPLLGLEAQAVLSKCKSRAEAGCLEVSSLSWVQFSAMSSRLLPAGLGWTGPHAHLTPHTGPQLRVLHKGRRCYPQQGWTANMIHLGSHVNRLVQDT

SEQ ID NO: 783920 - protein, 74 aa, Homo sapiens
PPPGSICVPVHTRQQPYVLSEEETPKDKHWLPEHQNWRDPLRGAGVWAQPHKTLIICPKTKRSSDRTRTRSLSL

SEQ ID NO: 783921 - protein, 134 aa, Homo sapiens
MTPLPYRSRVKPRSPTNTHAHLELTLVKCSKKDVGWSLGIIPWSSGYPRPLSSHSSPEHIPLEKLCTCAQAPAAGVPSTAQLFMKNRNQPKHLYEEKRRNAEWHVHMMEYYAAENMNNWSHGMNEAERFEASTK

SEQ ID NO: 783922 - protein, 57 aa, Homo sapiens
QLGTPLQTQIKPILFAHALCFRHLSWLTMPALFTLSPGLYMPSSQPSVLCPHLLVKW

SEQ ID NO: 783923 - protein, 113 aa, Homo sapiens
MDASDPTPSPCATIVNIHMEAISPAPSSPQPHLTSMHPATLLLLLVRANEHRSHCHRPTKDFGWHHPLECCGQWSGNTLAPPVQQVHNLVGPENKAEGPIPNPSELEHTAQEG

SEQ ID NO: 783924 - protein, 102 aa, Homo sapiens
MTLVTSLSLMSQVSTGRMCRSFLNRPHEPNGLKNGYHSVNYAWEPPGSPGGWAVYEYPSIPFVHCGQSRPNKMRPLCEWALKAAYDKICSSPSSLPKKNFIL

SEQ ID NO: 783925 - protein, 206 aa, Homo sapiens
LRVRSSGGTEFFTRSATKFKGALAQKFMFVDGDRAVCGSYSFTWSAARTDRNVISVLSGQVVEMFDRQFQELYLMSHSVSLKGIPMEKEPEPEPIVLPSVVPLVPAGTVAKKLVNPKYALVKAKSVDEIAKISSEKQEAKKPLGLKGPALAEHPGELPELLPPIHPGLLHLERANMFEYLPTWVEPDPEPGSDILGYINIIDPNIW

SEQ ID NO: 783926 - protein, 106 aa, Homo sapiens
TKTTPTRPISKIGNHISTCDLEGTNIQTISPGNVICFESTWIDINVATPFSFDGCYGTSFHPLTFFFFFFWQGLPILQNWGSLFSTCVIFIGGTGGDSSRVRPCEA

SEQ ID NO: 783927 - protein, 128 aa, Homo sapiens
CVDVGTSMQLCVTTHLCVSLYTPAYLSIQAWPTGLPEHASLSKHTLSTQGPRHTCGSASSPCSVCGHCSQGPALGSVEMGRLRLERASSPQGSLRGYGWPWATRGYGVVEGHGPADEAALVRGHGAEP

SEQ ID NO: 783928 - protein, 114 aa, Homo sapiens
EDQTMCFFFNSGMNCRWSKGKKNQKKHKRFKSRIIALTDPNANASSYLHPLVMPSHTNTGLGHVAFLLFFKWDSNNLTQSNLITTLKKFVSFLFLLSRPTENPPSGHRCMEKTH

SEQ ID NO: 783929 - protein, 108 aa, Homo sapiens
KDPSHWSHRGYSWNWKLDAKLSLENKVSLSSGMEVSTGSKAGSKKNLAWKRGLELPDKMVHSTPMGLRDFLVAWGQESSIFVLCSFSVSILISDHISFPPRPQFLTLR

SEQ ID NO: 783930 - protein, 104 aa, Homo sapiens
MTISHILIVLIYQHALEFPSKKITRVRAFVPRLNMPCDYTVTATDNSHLLVVNVLVSNSSVCLQNRWALLSDKTKPMQLRQYSNRVKALNLVPMFLLQKNLPLA

SEQ ID NO: 783931 - protein, 158 aa, Homo sapiens
GVGVPPPATGGGDGPFACPLCWKVFKKPSHLHQHQIIHTGEKPFSCSVCSKSFNRRESLKRHVKTHSADLLRLPCGICGKAFRDASYLLKHQAAHAGAGAGGPRPVYPCDLCGKSYSAPQSLLRHKAAHAPPAAAAEAPKDGAASAPQPPPTFPPGPY

SEQ ID NO: 783932 - protein, 71 aa, Homo sapiens
HPNVPWVKHTHILKASSFFYEMGTILLPAAWVPQRELHSLCHNLGNRKTLEPHQKNGSLTCDPLSPTRISS

SEQ ID NO: 783933 - protein, 101 aa, Homo sapiens
RSSLQQSNPIQTTSSPERTDPSSSPSLSSQKWPWSRKEGTPLLLTTSKTCSIPPDHHLELLFRDSTSASVSGVNLPAEMLRPGHSLHCLFSPTVALGLYTT

SEQ ID NO: 783934 - protein, 178 aa, Homo sapiens
HANNSHGTVQAAANIIVQAPPQFTVTPKDQVVLEEHAVEWLCEADGNPPPVIVWTKTGGQLPVEGQHTVLSSGTLRIDRAAQHDQGQYECQAVSSLGVKKVSVQLTVKPKALAVFTQLPQDTSVEVGKNINISCHAQGEPQPIITWNKEGVQITESGKFHVDDEGTLTIYDAGFPDQG

SEQ ID NO: 783935 - protein, 74 aa, Homo sapiens
CVCICLHVHLCVHISVYTDACLHASACVCTWHICGSAPAVNTVGPQRAAAVTVITTTPGSSILIAAHLAVSMGP

SEQ ID NO: 783936 - protein, 72 aa, Homo sapiens
RLKGVGFGLDGADLSLHLQEEVETEVAWEECGHVLLSLCYSSQQGGLLVGVLRCAHLAPMDANGYSDPFVRL

SEQ ID NO: 783937 - protein, 91 aa, Homo sapiens
LGVLELERPTQALEKRAGAFLGCSWPCLGAEVRKTVNAGSSVSEIRLPSKKAAILEEKAPGRALGIGEREKGTGQPTPLASQTAGLGDTWR

SEQ ID NO: 783938 - protein, 91 aa, Homo sapiens
SPSPSIATAASGLTYVLKRMPLPWHKQRVRCMWWTGGLRSVCQPSCWDLDPDVNSRGSAPSTSAFQRPSLEWTRIVIYDFDYPALRNYLGL

SEQ ID NO: 783939 - protein, 128 aa, Homo sapiens
PGLMPTENWDPAQSAGLVAEMMWGAGQSTWMQRGRAARWACPQDNSFLGIRAPGTAHQPREACQLQKRASGVLGDWLPGLGQELGTCTDKGRRNSSQEGVQIHTGMYFVRKVGFHSCKQKTGALDRWG

SEQ ID NO: 783940 - protein, 113 aa, Homo sapiens
WEQACLVQKPEGLGANLITPSLDYGKMKTESGEMKGKTREEILSGVPKHGPGYGHTWGWGDPLACWPLLGSWYWLPGYPRGSSCSSGLMGVQAASWCVQHGLGTPGCFGKVFS

SEQ ID NO: 783941 - protein, 87 aa, Homo sapiens
LQACTPAQAPCCRQEARRALHSGQKAPPLGNFAPKTQGPSGHKHLNYETEKQASALSEDAGKTKTAEKESETPQVTAQMRTGSVLLF

SEQ ID NO: 783942 - protein, 86 aa, Homo sapiens
MGEWMDGCMDAWRNGWMDGCMHGEMDGWVHGGMDGGMHGRMGRWMDGWMEESMEGVMDRWIDGWMDGWMDGRVDGWVNGWMDEWMD

SEQ ID NO: 783943 - protein, 69 aa, Homo sapiens
LLAVEVRPGRQELLEVTETWLQPTASGTAGHCPGGRTRCPGTGAWRGSGQSGVRLSVFPGWHVGRKRLG

SEQ ID NO: 783944 - protein, 109 aa, Homo sapiens
MNGTLAGMATVSPLPSVSGAPDLPVYEEAAKYDDIKKVVKQASEVPLKGILGYTEHQVVSSDCSLAVPGITGAWYHASLNFRRGTGFHHVGRAGLELLTSGDPPALASQ

SEQ ID NO: 783945 - protein, 114 aa, Homo sapiens
FSSIPLPVNHSVNLSPASNPRSVSLTLCSRWSTGLAASYLQFSLAPLSSPWQPRAYPLVPGCFVHILPSADKNAGGIDNTDNVIWSLQLLTCGSEMVSDLSLEPGAATSGCSRC

SEQ ID NO: 783946 - protein, 241 aa, Homo sapiens
  misc_feature (225)..(225): Xaa can be any naturally occurring amino acid
  misc_feature (230)..(230): Xaa can be any naturally occurring amino acid
  misc_feature (239)..(239): Xaa can be any naturally occurring amino acid
CKEIFAQLSREAVQIKSQVPHIVVKNQIISQPFPSLQLSISLCHSSNDKKSQKFATEKQCPEDHLYVLEHNLHLLIREFHKQTLSSIMMPHPASAPFGHKRMRLSGPQAFDKNEINSLQSSEGLLEKIIKQAKHIFLRSRAAATIDSLASRIEDPQIQAHWSNINDVYRISVCKVLITSQGYEQNMQSPFNCNLNIGVEQNSECVHRDGKSNYPVVIQEQELQEXLLSQXSSTRFMQFXNS

SEQ ID NO: 783947 - protein, 40 aa, Homo sapiens
LYSFPQQLNHCYKIANSAQVFQSPRILGYTGYFAFLIVAI

SEQ ID NO: 783948 - protein, 100 aa, Homo sapiens
TKIDTANHWWGVWGGDSNFPCSPGVHRDRKINKCDTVSYVLLEMNIQLVRWKLRRERGKFLVREGGRLRDIPWKTNGSAECRWVVEQTTKLIGIGVGVQG

SEQ ID NO: 783949 - protein, 101 aa, Homo sapiens
IHPPQTLTCTDDQKPNHLCELPASCTHTFHPYTLTDSYTPSGHICTTLMYKHTLFVVLTCLPHCGIHTQTPVANLHTEQCFHTDTCIYLLTHVCIPTNISL

SEQ ID NO: 783950 - protein, 112 aa, Homo sapiens
PSLKVVLARCGGSHLQSQHLGRPRWMDHLRSGVQDQPDQHGETPSPLNTKRTQVVCHHLERGVVLWMAPDGLYAKRLCQSRIYWDGPLALCNDRPNKLERDQTCKLFDTQQF

SEQ ID NO: 783951 - protein, 298 aa, Homo sapiens
MLPLLDSSKRAGTLGSGCGVPRVHSAALSREEGASRDIWRIKVWARVMTTPAGSGSGFGSVSWWGLSPALDLQAESPPVDPDSQADTVHSNPELDVLLLGSVDGRHLLRTLSRAKFWPRRRFNFFVLENNLEAVARHMLIFSLALEEPEKMGLQERSETFLEVWGNALLRPPVAAFVRAQADLLAHLVPEPDRLEEQLPWLSLRALKFRERDALEAVFRFWAGGEKGPQAFPMSRLWDSRLRHYLGSRYDARRGVSDWDLRMKLHDRGAQVIHPRSSDAGGTQASPLNSGTPAPIMCP

SEQ ID NO: 783952 - protein, 323 aa, Homo sapiens
MLPLLDSSKRAGTLGSGCGVPRVHSAALSREEGASRDIWRIKVWARVMTTPAGSGSGFGSVSWWGLSPALDLQAESPPVDPDSQADTVHSNPELDVLLLGSVDGRHLLRTLSRAKFWPRRRFNVSWDEDEAQIPESLREEGIEILKPQFFVLENNLEAVARHMLIFSLALEEPEKMGLQERSETFLEVWGNALLRPPVAAFVRAQADLLAHLVPEPDRLEEQLPWLSLRALKFRERDALEAVFRFWAGGEKGPQAFPMSRLWDSRLRHYLGSRYDARRGVSDWDLRMKLHDRGAQVIHPRSSDAGGTQASPLNSGTPAPIMCP

SEQ ID NO: 783953 - protein, 123 aa, Homo sapiens
MNVEHERYLQANNKEFNSIFGYPKRHQSDDRVNNQPVLLLVNGKIKEDKWMNVQVGDIIKLENNQPVMADILLLSSSEPYSLTYIETADLDGETNLKVKQAISVTSDMEDRLELLSTFNGELG

SEQ ID NO: 783954 - protein, 33 aa, Homo sapiens
CWDYRREIISDLSRILADDLGRLISAWRVWRVQ

SEQ ID NO: 783955 - protein, 75 aa, Homo sapiens
GSGGRVTTWEVMAAVQAEAASFPKSGGNEIGLLIQYGEPGDRSQRQKVEGEMGGEEIEKICFDHEFEKLDCEGRR

SEQ ID NO: 783956 - protein, 79 aa, Homo sapiens
SSYMTGMSTTSSYMSGEGYQSLQSMMKTEGPSYGALPPAYGPPAHLPYHPHVYPPNPPPPPVPPPPASFPPPAIPPPTP

SEQ ID NO: 783957 - protein, 164 aa, Homo sapiens
MVNPTVFLDIAVHGEPLGGIPFELFADKIPKTPENFHALSTGEKGFGYKGSCFHRIIPGVMCQRGDFTSHNGTGGKSIQGEKFDDKNFILKHAGPGILSMANTGPNTNSFQCFICTAKAEWLDGKHVVFGKVKEGINIVEAMERFGSRNGKTSKKITISDCGKL

SEQ ID NO: 783958 - protein, 101 aa, Homo sapiens
MGLPCSSVGLWISGPWRWGRPSRTQALGVWGLRDVGGELGGWATAEAGPMAGDLGECQQGHRAHLGPGRERPLLRTMTCPPDEWRGARLAVCAGWTRGLPH

SEQ ID NO: 783959 - protein, 30 aa, Homo sapiens
MHAQAFSYLHPMGALQPHKGEEPVTVQAPQ

SEQ ID NO: 783960 - protein, 63 aa, Homo sapiens
AKGKECSEWVSKVIHKTYFRGEAKQISNPESPAAKDKNSSKAHHFSLECWLTVSLGSGAEMDF

SEQ ID NO: 783961 - protein, 87 aa, Homo sapiens
SCSRGYTNAAHIPEDDKMPREVSGSWVRIEDDVVVTQDSPLILSADCPKEMNDIDTDMQPGFLTFTAAHMHLRFKMGVFWQPCTCAF

SEQ ID NO: 783962 - protein, 124 aa, Homo sapiens
MKVSDHELKLQAVRAWCRERQPGMMLTCTLYSNVYKVLFQSNQLSHTLYLGLWYSEGSQGLEAGTALPRDTDVCVLLPLICFILPPLGFSCPHYHGSAHRAQGGRETVFGVVLYGFRKYVVGYR

SEQ ID NO: 783963 - protein, 148 aa, Homo sapiens
LGWFGAFLWVVAHRTLLDLGHGHIAAHPTCGHICPRGCFSGLEYKYKAAWLAQVCAHQEQPAGLFHAWYVGAQLPGQPRECPQGVADGAVQVQDMGCWLLGCSGGMPTRAVLWDSFSCSFRGRRTIRQARDISVVGGGTLEPVLRSCA

SEQ ID NO: 783964 - protein, 137 aa, Homo sapiens
DGSCWSMDAYMSTDIPDEGDVHNGTYCAPNKVCLNSACTDKTPVISACNPEKTCNGKGVCNDLGHCHCNEGHAPPDCVTAGSGGSVDSGPPGKLGGTPSGEGENHNMTHSRREEHAVDMMILSFIILFIILLLSTII

SEQ ID NO: 783965 - protein, 109 aa, Homo sapiens
RHEDFCEILRCFEITQAKERYPGQAGGYCNLQPFSWKSEILPYFLSWMGGALSRLSYSFEIVFSQGLSQQWLWRTELFFWLISRPFEGWCLHTPSTGSLNAKVEVELRS

SEQ ID NO: 783966 - protein, 78 aa, Homo sapiens
ELSHEIMLGANWMLLCAHLVDDFLVSGSWGTSALPLRIIELSCTIKGEEEHACPVQRTLHSAHCSIWCLPLSGGWVLC

SEQ ID NO: 783967 - protein, 101 aa, Homo sapiens
FTPLSTLSALYISAVICVPPDYRGAPRAPTLRAKVVFFISQSANVHYIIVYCESVHFLPILLPTLSTKPLSSPELNAAASYVPFPPIIHIDTAASMVGFLL

SEQ ID NO: 783968 - protein, 88 aa, Homo sapiens
TITHPQAQAHARTGARGNMQHPLLPPATPASCILMLLSFSVPPPPLPCLLQRHLSQEEFYQVFGMTISEFDRLALWKRNELKKQARLF

SEQ ID NO: 783969 - protein, 83 aa, Homo sapiens
KQHADMHTHRATRGHAHTHRATRGHAHTHSNTWTCTHTQQHADMHTQTQSNTQTCTHTQSMHRCACISLLLSTSSPICHICFC

SEQ ID NO: 783970 - protein, 104 aa, Homo sapiens
RDLMGHLVYGFQAFDGNSMRSRFDSFSSCTDTPDGMKPHSLWLPSVHALHPGESQSTLVCSIFIKILIHNLCWVSLQFKKHSCIPTSFPDETTDSLVPGATPHL

SEQ ID NO: 783971 - protein, 101 aa, Homo sapiens
LSVGTSGCKCLAAFKASSVSTILGFLINFFFLFLLLSVKSVCSKLVPVGLSASSLLVSFIPSMTTRLTSIKHQPLLSSWAMFNNTPLPLEGIWRLRALSLA

SEQ ID NO: 783972 - protein, 87 aa, Homo sapiens
SVKRGMTSTTSTVGDHKKNQPSPTTQKSQQALQLPRNQKQKGMQYGMTDCESESHRSGFKSRYPLPAVCGLNMATNLLPLFPSRGGV

SEQ ID NO: 783973 - protein, 118 aa, Homo sapiens
LESTNLSEVYSSLSNLLGGKYSNESKHRASPEPHDQRCTQYAPRVQKRPAVKSLRHVPVHLLGDHAEVRPAWFYKLASDGSVPCLLSGSAQLPFPGDMLAGCMALHLLAGARRPGMGP

SEQ ID NO: 783974 - protein, 119 aa, Homo sapiens
SAGQAVTPVGTMLVAAVRISLRFISVSSPCWFSLPASTSEMSLKSPTCLPGHHPRLTLASPNLFPSHISLSWGREGRPGERVHETVNEADVATSGETKLTAEGGGARLTLGCSTWGRGL

SEQ ID NO: 783975 - protein, 139 aa, Homo sapiens
EQNMKVGSSWRGVFVVPSAGSTPGAHPSHVPRAMRNRPLFLPNLSDSSWAAATRSSPEATWQASVIICCRRRGLESLSIEPPRGANALGTREVHRQLHNSAPRERAAPGVSLFTQGLFSYVLYQTQGTPPCLGALNATR

SEQ ID NO: 783976 - protein, 162 aa, Homo sapiens
PSVTLLFTISLSPRVRGPEPTHPQPAFTQLTPSAPSQGAAVSLPSAVTLSQSQSHVLTLGPAPPSGHAGSCITQPPGFEAPSSPPLALSLLSALPFGMSACFSQRSTLRESHLLSLHRLSSWTWTGWNRGGRTSQVVFTDHCRHPPTAAYHPAAWHSGRDTA

SEQ ID NO: 783977 - protein, 77 aa, Homo sapiens
PGLQALSPVPQEAMKTSSGSGLKVKASVFLLLSAFLFAVSFWLLSKKVSVISSIFRCFQQKSHYGIKTITFADTSPS

SEQ ID NO: 783978 - protein, 49 aa, Homo sapiens
CPGPPAYRKSGSLGDWEEVWGPGRVLVCPEGSKKKGEGEWVHLQVANTL

SEQ ID NO: 783979 - protein, 113 aa, Homo sapiens [sequence omitted]

SEQ ID NO: 783980 - protein, 93 aa, Homo sapiens
RISGALYPGDEADQQLREVDEKIRKADIDGDGQVNVMNEFVQSDDCKAEGPPGQLGDALFSMISSLLDARTSRLQRLPGDTACILGSHPRECP

SEQ ID NO: 783981 - protein, 132 aa, Homo sapiens
MLSMLLQAVFCCRRRLYLVSSILFCCFRNRDEGGKLVEGLNLLLLLSAHGLDVGVHLQLKGAQQALVDHDGCDASYNHQLAIASTQTHAGTQDTLDTAAAAHLGEARGTDAGTRPTHVGVAAEGPGPEVDTL

SEQ ID NO: 783982 - protein, 428 aa, Homo sapiens [sequence omitted]

SEQ ID NO: 783983 - protein, 410 aa, Homo sapiens
MSARAAETHRSARPAAASKPLRFPGTTMNNLLCCALVFLDISIKWTTQETFPPKYLHYDEETSHQLLCDKCPPGTYHYYTDSWHTSDECLYCSPVCKELQYVKQECNRTHNRVCECKEGRYLEIEFCLKHRSCPPGFGVVQAGTPERNTVCKRCPDGFFSNETSSKAPCRKHTNCSVFGLLLTQKGNATHDNICSGNSESTQKCGIDVTLCEEAFFRFAVPTKFTPNWLSVLVDNLPGTKVNAESVERIKRQHSSQEQTFQLLKLWKHQNKDQDIVKKIIQDIDLCENSVQRHIGHANLTFEQLRSLMESLPGKKVGAEDIEKTIKACKPSDQILKLLSLWRIKNGDQDTLKGLMHALKHSKTYHFPKTVTQSLKKTIRFLHSFTMYKLYQKLFLEMIGNQVQSVKISCL

SEQ ID NO: 783984 - protein, 233 aa, Homo sapiens
RKTGTLGSLEEPAGGASVSAGSRAVGVAGVAGEAGPPPEREGSGSTKPGTPGNSPSSQRLPSKSSLDPAVNPVPKPKRTFEYEADKNPKSKPSNGLPPSPTPAAPPPLPSTPAPPVTRRPKKDMRGHRKSQSRKSFEFEDASSLQSLYPSSPTENGTENQPKFGSKSTLEENAYEDIVGDLPKENPYEDVDLKSRRAGRKSQQLSENSLDSLHRMWSPQDRKYNSPPTQVTQP

SEQ ID NO: 783985 - protein, 224 aa, Homo sapiens
MRVFPRSIAKEKSHQLADFNLGVISEDCLSVLEQKRTFRLLCSRNLSLNFPQLRAQRNYPEQLRGESDKITFYEADKNPKSKPSNGLPPSPTPAAPPPLPSTPAPPVTRRPKKDMRGHRKSQSRKSFEFEDASSLQSLYPSSPTENGTENQPKFGSKSTLEENAYEDIVGDLPKENPYEDVDLKSRRAGRKSQQLSENSLDSLHRMWSPQDRKYNSPPTQVTQP

SEQ ID NO: 783986 - protein, 107 aa, Homo sapiens
PKRNGSEMAGGMSRMSPTGEVKEERREFQNKSKSKQIAKAKQFWVLLLIHFVYIVLDKRTGKQRGPALVRKEVAFANIPMETNPDHNQLMELSPLQVYHLTSCSALH

SEQ ID NO: 783987 - protein, 103 aa, Homo sapiens
MGDYSTGSLSGPNENHCCCGLATLERRHTLPLPLVSGLGSALLSIGYSDSSGVDKGTEVSRKRERDCRQVLWLWKWVWGALTRPPAPEAHMASSSQAISSQQL

SEQ ID NO: 783988 - protein, 98 aa, Homo sapiens
MMERIRKEMILMERGLHSPTAGKRFSNLSNSAGNAVLEALENSQHPARLSPRLPSAPLHSALGELPAKGKFEIDTLFNLQHTGSESTVSSEISSAAES

SEQ ID NO: 783989 - protein, 70 aa, Homo sapiens
YIISDHHSNVARKFSFMDEKTQAWRDKSPITVGLNVKQRLSDMKIETMTPSCLLIHKGQGKVIVEGTSVY

SEQ ID NO: 783990 - protein, 106 aa, Homo sapiens [sequence omitted]

SEQ ID NO: 783991 - protein, 86 aa, Homo sapiens
EKAFPGQAGSDIPHMGPSGSNYSIGFNILHPNHVTPVSVLRFAEEGIAEGSSNPKMMHVSLVGDLPQTLSPGGSRGSVCKSTQPGH

SEQ ID NO: 783992 - protein, 101 aa, Homo sapiens
SGPGFSHHSVLPCCQGTVGKEAQSHSYFRNPSPKAPQSQLQPQSVCAVRVGRLVLEVAHLAFSVLRFHPFVVLERLCSRPSHITGKYYGPGIWKGLQLDPR

SEQ ID NO: 783993 - protein, 311 aa, Homo sapiens
MCRCPPEHHDGRMTSAEVGAAAGGAQAAGPPEWPPGSPQALRQPGRARVAMAALVWLLAGASMSSLNKWIFTVHGFGRPLLLSALHMLVAALACHRGARRPMPGGTRCRVLLLSLTFGTSMACGNVGLRAVPLDLAQLVTTTTPLFTLALSALLLGRRHHPLQLAAMGPLCLGAACSLAGEFRTPPTGCGFLLAATCLRGLKSVQQNPDLVHSAEDCRSLRSLKISTYSNGLVAERNSCAGSSEKSRARFHALKEGQTWLKHVTRPGREAGVTCRSAWRNKGTLSHRDPIHSARAIYRDRHGDTGLTRENS

SEQ ID NO: 783994 - protein, 239 aa, Homo sapiens
MCRCPPEHHDGRMTSAEVGAAAGGAQAAGPPEWPPGSPQALRQPGRARVAMAALVWLLAGASMSSLNKWIFTVHGFGRPLLLSALHMLVAALACHRGARRPMPGGTRCRVLLLSLTFGTSMACGNVGLRAVPLDLAQLVTTTTPLFTLALSALLLGRRHHPLQLAAMGPLCLGAACSLAGEFRTPPTGCGFLLAATCLRGLKSVQQSKCLGGQLRRWGSGWVHGLDGPVRGMAVVPFYK

SEQ ID NO: 783995 - protein, 65 aa, Homo sapiens
TKVFKEVQLGEETAIQAERILRKDSEAFKELVRKDLQNFLKKENKNEKVIEHIMEDLDTNALDWV

SEQ ID NO: 783996 - protein, 104 aa, Homo sapiens
KHLTQCLAAPQLPTSKASFYFLSWIPCFVRMMSTNQNAFRKYWFTFPFFLNQDIFKCLLELWSTWNPGINILHRCNSSKKQRNKTSYIACVVLPRENSWFVFIF

SEQ ID NO: 783997 - protein, 103 aa, Homo sapiens
GRYNSSSYNSSSYNSSSYYSSSYNGCSHNSSSYNSSSYNSSSYNSSSYNSSSYNSCSYNSSSYNSSSYNSSSYNSSSYNSSCYKSFGICFLKDMLTICNFCLF

SEQ ID NO: 783998 - protein, 78 aa, Homo sapiens
YWSPWLPSPGGSVAESSAGPNVLYPPARNPRGRGDLRREAEGAVDPGLPSPGLRRVGARRRLVAEIRGEFLCVHGLRC

SEQ ID NO: 783999 - protein, 39 aa, Homo sapiens
DSHYPGVHVRINVFPFSVGKTCEYIVGPLNLQIQPATDR

SEQ ID NO: 784000 - protein, 121 aa, Homo sapiens
MAGGLLGGEGDWLLRRRGQGKGPVPQDTGRIFGGKPRTGFSPFCPLGLGARSPEGARASGRPLPPSSHRPRTEKGRPQRASRGRRPLPRAAPTAAQRPLVPGSGARAVQPACPPAAPLPAA

SEQ ID NO: 784001 - protein, 37 aa, Homo sapiens
MSTKAVQKHLVYFETSMNGLLAHHTALMVGGRRAHGL

SEQ ID NO: 784002 - protein, 76 aa, Homo sapiens
DIRPLRSLHQLPAHPPSSSAPAKSVSRCTLANRVGVSTTMGNSGSPRSADSGVNLPEEWRLTHTLWSAPPHYGSRE

SEQ ID NO: 784003 - protein, 102 aa, Homo sapiens
HNLETCLLIASIALLIGQAAWNSKGHCAGVEPLASEVIFSFEVDSCSVTQAGVQCDYRNPLQSLSPVSNLIPRSVILPRPFHLQLSLPPPTNLQPHYLCYTI

SEQ ID NO: 784004 - protein, 237 aa, Homo sapiens
IECRAAQLPDMPLEELGQQVDCDRMRGLMCANSQQSPPLCHDYELRVLCCEYVPCGPSPAPGTSPQPSLSASTEPAVPTPTQTTATEKTTLWVTPSIRSTAALTSQTGSSSGPVTVTPSAPGTTTCQPRCQWTEWFDEDYPKSEQLGGDVESYDKIRAAGGHLCQQPKDIECQAESFPNWTLAQVGQKVHCDVHFGLVCRNWEQEGVFKMCYNYRIRVLCCSDDHCRGRATTPPPTT

SEQ ID NO: 784005 - protein, 102 aa, Homo sapiens
AHLHMPVPITTLGSELSGVCWSKASLKQAAMWRDSMSVVSHLSPSWPCLSTCFCGKHRAPEAGVSGACLSPGQGQHVCMDDCVPGLDLLCACFCLSAGSLLS

SEQ ID NO: 784006 - protein, 111 aa, Homo sapiens
GTGYGDAVELLKQLGIWGMDALEKRIVLKMGQMDEAFEFVKQRRSIKDGSVDVMATARGRETGCRLSAGTGGWQRGAQTALSAYAGDKRNTQAELVTRQGEKPPRPARTLQ

SEQ ID NO: 784007 - protein, 108 aa, Homo sapiens [sequence omitted]

SEQ ID NO: 784008 - protein, 52 aa, Homo sapiens
MPMQKETYAGQWTRFKGFVTVRDKSHISLCVRYSKEVVPAICRPPFTGQPLH

SEQ ID NO: 784009 - protein, 58 aa, Homo sapiens
VSLPGASVAYGCPAAPWTRGWVWTSPRGPSAASTILSKDYRYFLSTCRVPGTVLCADE

SEQ ID NO: 784010 - protein, 79 aa, Homo sapiens
PWFLEDPSLLPDSRTLRVWDRHALGAEGWVRPLCCDRAVTFSYSPPWAQFPLLENAGHADGPSSPAILSLSQLGFPDLR

SEQ ID NO: 784011 - protein, 115 aa, Homo sapiens
RNSLTSAFLFTPWARVDPRPPPHALGGGPGPHALEAPRGDSPWDPCTREEGYRHPSPPPARSSFVTPLRVPSHTSSVRDCEEWAVDSSSQPRPPTRPSLPSAPTRAAAAAAAGGR

SEQ ID NO: 784012 - protein, 200 aa, Homo sapiens
  misc_feature (189)..(189): Xaa can be any naturally occurring amino acid
MAMLPPPGPQSFVHFTKQSLALIEQRIAERKSKEPKEEKKDDDEEAPKPSSDLEAGKQLPFIYGDIPPGMVSEPLEDLDPYYADKKTFIVLNKGKTIFRFNATPALYMLSPFSPLRRISIKILVHSLFSMLIMCTILTNCIFMTMNNPPDWTKNVEYTFTGIYTFESLVKILARGFCVGEFTFLRDPWXWLDFVVIVFAY

SEQ ID NO: 784013 - protein, 102 aa, Homo sapiens
FCTGAFCSRRTSAPRRTSAPARKEITANLEAPAKREITDDLEAPARRDSADNLEAPAKREITDDLEAPARRDSAEFNEQVEKTGEDGSLTGEGDRKKQKCAW

SEQ ID NO: 784014 - protein, 155 aa, Homo sapiens
PTRREIAADLEVPTRREIAADLEVPTRREIAADLEVPTRREIAADLEVPTRQEIIADLEVPTRREIAADLEAPARKEITANLEAPAKREITDDLEAPARRDSADNLEAPAKREITDDLEAPARRDSAEFNEQVEKTGEDGSLTGEGDRKKQKCAW

SEQ ID NO: 784015 - protein, 126 aa, Homo sapiens
FFFEKESLSLSPRLECCGAIFTHCNLCLLSSSNSPASAFQVAGIIGACHQAQLIFLFLVETGFRQAVLELLNSSDPPASASQSAGITGVSHHTQLVWSTFLAGSFMTFLLPGSWMPMLSTSYSSGQ

SEQ ID NO: 784016 - protein, 107 aa, Homo sapiens
YHHHHHHHHNCHHYNITTGITTLSPFQHCHHYLHSGITRITTTSITSPSPSPTLLPCVLGIALATVAIKAKIKGKTFTSYDPYSMLIALCMLNPYNNALRSVFLSDS

SEQ ID NO: 784017 - protein, 103 aa, Homo sapiens
FNLQGHFTSDLSPLEKSNNTSTVTQTMRGRARIRILTVSHKPVPDMWLIIEFDRNPVAACSWLSQDLKFLDILYSLYLYWRFANFLLNSSISHNTILNIKTKT

SEQ ID NO: 784018 - protein, 98 aa, Homo sapiens
WGVAASKHPDHVFDSLCCTAIYLSLGTSELALMGVMAVDHYVAVCNPLRYNIIMNSSTCVWMVIVSWVFGFLFQIWPVYATFQLTFCKSNVLDHFYCD

SEQ ID NO: 784019 - protein, 141 aa, Homo sapiens
MGENQTMVTEFLLLGFLLGPRIQMLLFGLFSLFYIFTLLGNGAILGLISLDSRLHTPMYFFLSHLAVVDIAYTRNTVPQMLANLLHPAKPISFAGCMTQTFLCLSFGHSECLLLVLMSYDRYVAICHPLRYSVIMTWRVCI

SEQ ID NO: 784020 - protein, 198 aa, Homo sapiens
AGARAPPELTAPAPLSDPLSRGRCQMSTMGNEASYPAEMCSHFDNDEIKRLGRRFKKLDLDKSGSLSVEEFMSLPELRHNPLVRRVIDVFDTDGDGEVDFKEFILGTSQFSVKGDEEQKLRFAFSIYDMDKDGYISNGELFQVLKMMVGNNLTDWQLQQLVDKTIIILDKDGDGKISFEEFSAVVRDLEIHKKLVLIV

SEQ ID NO: 784021 - protein, 110 aa, Homo sapiens
CWVSTKGHSVGHGGDRRTGQILHLFFAGCGERAGWESHGLHQAKHCFEMLDHCAEPVDISLGLHAGNLAKKRTFFSPNAQDFVNVNYFRAFSGLLRAVVGVFEEGSFHPH

SEQ ID NO: 784022 - protein, 103 aa, Homo sapiens
MAGRAPAAVWVTGSSGAEADVGVSGLTVLRRQSTGGVGASEDETGGGNILGLAGGSQAVGTSHTCVPGARLWSCPRSLGEETAYENALGMSGTRTAVGVPSVS

SEQ ID NO: 784023 - protein, 90 aa, Homo sapiens
SLSHSLHLLFVLFEPSDLAHPQGAGLIQLQPGPVLLELSCLYHSLLPTSWPHLLKAWVRTLLSQRSSQLSPCSSTGDGLIKLTFWLMQTC

SEQ ID NO: 784024 - protein, 52 aa, Homo sapiens
CDLRIFGIHALIDPELDTNSDLGITAQSYSRVHINNRVYNLDVGSGHPNGVT

SEQ ID NO: 784025 - protein, 98 aa, Homo sapiens
LDGAAGSRVSAGEGAVRVQGEPTHVMGIPGLTRETVVVLMVFQCAHEKSEAQRSAARSQGHTAQAVEIRTLSPVSHTSLLLLGPTFQPWHVGVLVTFC

SEQ ID NO: 784026 - protein, 186 aa, Homo sapiens
PTWHLQPSFQHPGQGGALRGLSMPHTDHGPRMATSFSQLWLPREQEWRSWRRGSCPPARCSLTTPAADAQGPQGPPAPCIAAATTGPSRAFAPAQKEGASAMHPRGSGSCSCGQTPRPWQETRWLSTWLNQLPGHCLVTSQRLLTVPGDGSSAGLICSPLVTCPTQTTGAGQRPSRCTKQGWPKCP

SEQ ID NO: 784027 - protein, 64 aa, Homo sapiens
DQLVHYYRVSGLHGQKSSQCHWFRCSCHPCPFTEPFLTQSQMREVIWQRLFSQLPATSSEHSTG

SEQ ID NO: 784028 - protein, 43 aa, Homo sapiens
MTMRPRQAGLIQAGLTRLDFHKFQTAPIPNSSVCGQEARQGPM

SEQ ID NO: 784029 - protein, 83 aa, Homo sapiens
WQELRTRYGEETDGSHRPALPRQAKDVEVVLRRWGALQACVGVGTGRGGGLHPQCRERRRYRGRDGGWLSLPAYYCAVLRLRC

SEQ ID NO: 784030 - protein, 102 aa, Homo sapiens
DYMHEPPRLAPPTLFLKSLALSPRLESGGTITAHCSFNLLGSGDLPTSASLVALTTGAPYCAWLIFLLVCFCFRPSFLLFFLRLECTGAISAHCNLLTPRFK

SEQ ID NO: 784031 - protein, 102 aa, Homo sapiens
MSLSLNVLICKVGITLSQCCYTFNVMTHTMSWHGKQHLVGSAGRLPPFHHHSSLPNAISAHCSLHLPGSSDSPASASRVAGITGACHHAWLIFVFLLEMGFH

SEQ ID NO: 784032 - protein, 101 aa, Homo sapiens
LDWDCTVTALASGVTRASWGSGESDPCESRWTETSQRERLRRLEQAVLKLRAVSKASQMCWGEAACLANPSAFCLIDGFGCLWNRGLGGRALLTLCYVEGM

SEQ ID NO: 784033 - protein, 207 aa, Homo sapiens
NAKLPIGTPDYMAPEVLTVMNGDGKGTYGLDCDWWSVGVIAYEMIYGRSPFAEGTSARTFNNIMNFQRFLKFPDDPKVSSDFLDLIQSLLCGQKERLKFEGLCCHPFFSKIDWNNIRNSPPPFVPTLKSDDDTSNFDEPEKNSWVSSSPCQLSPSGFSGEELPFVGFSYSKALGILGRSESVVSGLDSPAKTSSMEKKLLIKSKELQ

SEQ ID NO: 784034 - protein, 178 aa, Homo sapiens
SHTVWRQEVGPGQPRGGGGGSCHSCWAPGCLSGSSGHGAWAPFGLRVWAAEDCGHPGAQRGTTEEPHRGRAPPAALHPRKRKPAPDGNRERSGLLQAGRWGLSRVAEPPAPSHRPPGQLGTPRTPPLHPLLTSAGKMAGRAPRLPQPRLSRRSAENPLYFASWALSTRAAGSSIAGSG

SEQ ID NO: 784035 - protein, 91 aa, Homo sapiens
DCHSQPGWGRNSLEESFPEQVLGLDQLGGVERLFQASHAQGICYCRSVWLHQGDREETSLETKWRPEPVESCLYSLGNGSHVGFRKTYLKT

SEQ ID NO: 784036 - protein, 105 aa, Homo sapiens
CFISSLLPAHPLPSLVYGIPWPRVRHSCPHPKQCLGRGEGDPLPWRAGPCKAATVMRKSREVVSASLACRLLGEYAIQESRPQPKHPFHTQTSIHPWTRRHVLTV

SEQ ID NO: 784037 - protein, 96 aa, Homo sapiens
  misc_feature (48)..(48): Xaa can be any naturally occurring amino acid
SIGGYDITRLIEAHRICKVLARPKMLGKCRVEGAPGVTHVFHRYKVFXAFLHSFQRFPGIQDAPSAVSAHSESYILGNKNMSGVGKIMKTKLPVTK

SEQ ID NO: 784038 - protein, 137 aa, Homo sapiens
AVQRLRAFRAACCLCGAECSPQGHPYRWALPLGLHCPARGSLARGPTRQEVIPLQESETLWRYGLRVPHLQFQEKPKTNRPDARNKPQPTALRKPQALCVFREWLHPSWNLSSASVTHTAATPSPEPTAHLSPRHTC

SEQ ID NO: 784039 - protein, 113 aa, Homo sapiens
SPLPKPLTPTSGPASPSPPCPCSELGQSRPGTEKNMGASITPGGSQVRPGTEKNMGASVTPGGSQVRPGTEKNMGASVTPARSQVRPGTTHACVSSLMVLNFICIIVHFHTGN

SEQ ID NO: 784040 - protein, 107 aa, Homo sapiens
EDTLRILCRGLCLLCLPPCTLRGHRPLLWFAGDTLRLYLEKGSGREKLLPLPPGMVAKGLRQAPHGMWGASAPGPPARDVECQCVLISVLKSQAFWDDFFDVLKRRF

SEQ ID NO: 784041 - protein, 45 aa, Homo sapiens
FSVQTVPKKAAPKSRQPQPPDRYLLETPRNQGQGSKRLQAAARSA

SEQ ID NO: 784042 - protein, 52 aa, Homo sapiens
PSVSRHQRITRSLPISRHHRITKSLYVSQHHHIRRSPFIGFTASAGPVHQSA

SEQ ID NO: 784043 - protein, 105 aa, Homo sapiens
MAYKLYLGALVYCCSLIWCPLTSCWLHPGLACHLWIPLTCATSFFLKAFGCLVPSSLIVPPLSPFLPPPLPLLSPHHHSCQSGMLLYLLCQALCLAFGRYSINTC

SEQ ID NO: 784044 - protein, 94 aa, Homo sapiens
CSQNTEAEIIIPSCIGINESANVGDQALRKMMTGVVDLDYCIADEAVETATYADKKWPIRHGIVEDWDLMERFMEQVIFKYLRAEPEDHYFLLV

SEQ ID NO: 784045 - protein, 39 aa, Homo sapiens
TFKMRALTLTRYYSPILTAHPELPTDLMRSSMETQPLIP

SEQ ID NO: 784046 - protein, 102 aa, Homo sapiens
RGSSVSCGSRSSSPAVSVSRRNVNNAEPPTSGGSQSQWSSRDRVTVCTGIGDWHYAIRSHSAYYPWKEFGKLFFLRQGLALSSRLEYSGVIIALCNLKLLDS

SEQ ID NO: 784047 - protein, 533 aa, Homo sapiens
RPRGRECSPTSSLERLCRHKHQRERSHERPDRKESVAWPRDRRKRRSRSPSSEHRAREHRRPRSREKWPQTRSHSPERKGAVREASPAPLAQGEPGREDLPTRLPALGEAHVSPEVATADKAPLQAPPVLEVAAECEPDDLDLDYGDSVEAGHVFDDFSSDAVFIQLDDMSSPPSPESTDSSPERDFPLKPALPPASLAVAAIQREVSLMHDEDPSQPPPLPEGTQEPHLLRPDAAEKAEAPSSPDVAPAGKEDSPSASGRVQEAARPEEVVSQTPLLRSRALVKRVTWNLQESESSAPAEDRAPRAPLHRPQKPREGAWDMEDVAPTGVRQAFSELPFPSHVLPEPGFPDTDPSQVYSPGLPPAPAQPSSIPPCALVSQPTVQFILQGSLPLVGCGAAQTLAPVPAALTPASEPASQATAASNSEEKTPAPRLAAEKTKKEEYMKKLHMQERAVEEVKLAIKPFYQKREVTKEEYKDILRKAVQKICHSKSGEINPVKVANLVKAYVDKYRHMRRHKKPEAGEEPPTQGAEG

SEQ ID NO: 784048 - protein, 138 aa, Homo sapiens
WAEQVMVGDQWLGAGTPRNLPLVLGVDLRAALWSLLLVLFWIFPAMKQHSGQGWAQSTHLPVCRAPRGTTSQATEAPRRSLGHGGCGPHRGQAGVLRAALSQSRASGTRVPRHRPLSGGCLGWRAVGRGQWPGTRATH

SEQ ID NO: 784049 - protein, 109 aa, Homo sapiens
IGGRSRKQGGGSGDGQVRSDGAVFGREAGSEEQRAVPETWEALPMGQGYTGFLAGLSVFLQALDTPHREKGSWKQSNPARGLFLKGQSRGWKTCKPSLRVTAFPRATLP

SEQ ID NO: 784050 - protein, 46 aa, Homo sapiens
YVNVWKQKSTWGDAVCITRLQSPYYPRAPGNCARLPQRCRARERGK

SEQ ID NO: 784051 - protein, 164 aa, Homo sapiens
ICPASEDSRHSPVGLRLPRPRGTAGPGRSWSAVGEGRGGVGPSGPRRSRSAGPERAGPQLPANRNSLGAATATAAGTEGGEAARSKRAAHRVKTGRGAPRGPSEEGGGRPGARTLELCGRPREEPGPERLCELRAPAPRGPVPRAPLRIAGSRPRRRRGGARLG

SEQ ID NO: 784052 - protein, 135 aa, Homo sapiens
  misc_feature (100)..(100): Xaa can be any naturally occurring amino acid
  misc_feature (103)..(103): Xaa can be any naturally occurring amino acid
  misc_feature (133)..(133): Xaa can be any naturally occurring amino acid
MVTAVAYRLAEQHRQIEETLAHFHLTKDMLLEVKKRMRAEMELGLRKQTHNNAVVKMLPSFVRRTPDGTEEMGDFLWAPGIFGREPKFSRAALLGKMLDXGEXLFKKFEPLQGHCQKPLGNLGPVRFLTKPFXGT

SEQ ID NO: 784053 - protein, 960 aa, Homo sapiens
SLIKLILPPPGGAAEQPPEDHGSPGLRRTDRPHACRPATPTASMIAAQLLAYYFTELKDDQVKKIDKYLYAMRLSDETLIDIMTRFRKEMKNGLSRDFNPTATVKMLPTFVRSIPDGSEKGDFIALDLGGSSFRILRVQVNHEKNQNVHMESEVYDTPENIVHGSGSQLFDHVAECLGDFMEKRKIKDKKLPVGFTFSFPCQQSKIDEAILITWTKRFKASGVEGADVVKLLNKAIKKRGDYDANIVAVVNDTVGTMMTCGYDDQHCEVGLIIGTGTNACYMEELRHIDLVEGDEGRMCINTEWGAFGDDGSLEDIRTEFDREIDRGSLNPGKQLFEKMVSGMYLGELVRLILVKMAKEGLLFEGRITPELLTRGKFNTSDVSAIEKNKEGLHNAKEILTRLGVEPSDDDCVSVQHVCTIVSFRSANLVAATLGAILNRLRDNKGTPRLRTTVGVDGSLYKTHPQYSRRFHKTLRRLVPDSDVRFLLSESGSGKGAAMVTAVAYRLAEQHRQIEETLAHFHLTKDMLLEVKKRMRAEMELGLRKQTHNNAVVKMLPSFVRRTPDGTENGDFLALDLGGTNFRVLLVKIRSGKKRTVEMHNKIYAIPIEIMQGTGEELFDHIVSCISDFLDYMGIKGPRMPLGFTFSFPCQQTSLDAGILITWTKGFKATDCVGHDVVTLLRDAIKRREEFDLDVVAVVNDTVGTMMTCAYEEPTCEVGLIVGTGSNACYMEEMKNVEMVEGDQGQMCINMEWGAFGDNGCLDDIRTHYDRLVDEYSLNAGKQRYEKMISGMYLGEIVRNILIDFTKKGFLFRGQISETLKTRGIFETKFLSQIESDRLALLQVRAILQQLGLNSTCDDSILVKTVCGVVSRRAAQLCGAGMAAVVDKIRENRGLDRLNVTVGVDGTLYKLHPHFSRIMHQTVKELSPKCNVSFLLSEDGSGKGAALITAVGVRLRTEASS

SEQ ID NO: 784054 - protein, 961 aa, Homo sapiens
SYKSVLENVYRRGAAEQPPEDHGSPGLRRTDRPHACRPATPTASMIAAQLLAYYFTELKDDQVKKIDKYLYAMRLSDETLIDIMTRFRKEMKNGLSRDFNPTATVKMLPTFVRSIPDGSEKGDFIALDLGGSSFRILRVQVNHEKNQNVHMESEVYDTPENIVHGSGSQLFDHVAECLGDFMEKRKIKDKKLPVGFTFSFPCQQSKIDEAILITWTKRFKASGVEGADVVKLLNKAIKKRGDYDANIVAVVNDTVGTMMTCGYDDQHCEVGLIIGTGTNACYMEELRHIDLVEGDEGRMCINTEWGAFGDDGSLEDIRTEFDREIDRGSLNPGKQLFEKMVSGMYLGELVRLILVKMAKEGLLFEGRITPELLTRGKFNTSDVSAIEKNKEGLHNAKEILTRLGVEPSDDDCVSVQHVCTIVSFRSANLVAATLGAILNRLRDNKGTPRLRTTVGVDGSLYKTHPQYSRRFHKTLRRLVPDSDVRFLLSESGSGKGAAMVTAVAYRLAEQHRQIEETLAHFHLTKDMLLEVKKRMRAEMELGLRKQTHNNAVVKMLPSFVRRTPDGTENGDFLALDLGGTNFRVLLVKIRSGKKRTVEMHNKIYAIPIEIMQGTGEELFDHIVSCISDFLDYMGIKGPRMPLGFTFSFPCQQTSLDAGILITWTKGFKATDCVGHDVVTLLRDAIKRREEFDLDVVAVVNDTVGTMMTCAYEEPTCEVGLIVGTGSNACYMEEMKNVEMVEGDQGQMCINMEWGAFGDNGCLDDIRTHYDRLVDEYSLNAGKQRYEKMISGMYLGEIVRNILIDFTKKGFLFRGQISETLKTRGIFETKFLSQIESDRLALLQVRAILQQLGLNSTCDDSILVKTVCGVVSRRAAQLCGAGMAAVVDKIRENRGLDRLNVTVGVDGTLYKLHPHFSRIMHQTVKELSPKCNVSFLLSEDGSGKGAALITAVGVRLRTEASS

SEQ ID NO: 784055 - protein, 905 aa, Homo sapiens
MAKRALHDFIDKYLYAMRLSDETLIDIMTRFRKEMKNGLSRDFNPTATVKMLPTFVRSIPDGSEKGDFIALDLGGSSFRILRVQVNHEKNQNVHMESEVYDTPENIVHGSGSQLFDHVAECLGDFMEKRKIKDKKLPVGFTFSFPCQQSKIDEAILITWTKRFKASGVEGADVVKLLNKAIKKRGDYDANIVAVVNDTVGTMMTCGYDDQHCEVGLIIGTGTNACYMEELRHIDLVEGDEGRMCINTEWGAFGDDGSLEDIRTEFDREIDRGSLNPGKQLFEKMVSGMYLGELVRLILVKMAKEGLLFEGRITPELLTRGKFNTSDVSAIEKNKEGLHNAKEILTRLGVEPSDDDCVSVQHVCTIVSFRSANLVAATLGAILNRLRDNKGTPRLRTTVGVDGSLYKTHPQYSRRFHKTLRRLVPDSDVRFLLSESGSGKGAAMVTAVAYRLAEQHRQIEETLAHFHLTKDMLLEVKKRMRAEMELGLRKQTHNNAVVKMLPSFVRRTPDGTENGDFLALDLGGTNFRVLLVKIRSGKKRTVEMHNKIYAIPIEIMQGTGEELFDHIVSCISDFLDYMGIKGPRMPLGFTFSFPCQQTSLDAGILITWTKGFKATDCVGHDVVTLLRDAIKRREEFDLDVVAVVNDTVGTMMTCAYEEPTCEVGLIVGTGSNACYMEEMKNVEMVEGDQGQMCINMEWGAFGDNGCLDDIRTHYDRLVDEYSLNAGKQRYEKMISGMYLGEIVRNILIDFTKKGFLFRGQISETLKTRGIFETKFLSQIESDRLALLQVRAILQQLGLNSTCDDSILVKTVCGVVSRRAAQLCGAGMAAVVDKIRENRGLDRLNVTVGVDGTLYKLHPHFSRIMHQTVKELSPKCNVSFLLSEDGSGKGAALITAVGVRLRTEASS

SEQ ID NO: 784056 - protein, 905 aa, Homo sapiens; identical to SEQ ID NO: 784055

SEQ ID NO: 784057 - protein, 905 aa, Homo sapiens; identical to SEQ ID NO: 784055

SEQ ID NO: 784058 - protein, 921 aa, Homo sapiens
MGQICQRESATAAEKPKLHLLAESEIDKYLYAMRLSDETLIDIMTRFRKEMKNGLSRDFNPTATVKMLPTFVRSIPDGSEKGDFIALDLGGSSFRILRVQVNHEKNQNVHMESEVYDTPENIVHGSGSQLFDHVAECLGDFMEKRKIKDKKLPVGFTFSFPCQQSKIDEAILITWTKRFKASGVEGADVVKLLNKAIKKRGDYDANIVAVVNDTVGTMMTCGYDDQHCEVGLIIGTGTNACYMEELRHIDLVEGDEGRMCINTEWGAFGDDGSLEDIRTEFDREIDRGSLNPGKQLFEKMVSGMYLGELVRLILVKMAKEGLLFEGRITPELLTRGKFNTSDVSAIEKNKEGLHNAKEILTRLGVEPSDDDCVSVQHVCTIVSFRSANLVAATLGAILNRLRDNKGTPRLRTTVGVDGSLYKTHPQYSRRFHKTLRRLVPDSDVRFLLSESGSGKGAAMVTAVAYRLAEQHRQIEETLAHFHLTKDMLLEVKKRMRAEMELGLRKQTHNNAVVKMLPSFVRRTPDGTENGDFLALDLGGTNFRVLLVKIRSGKKRTVEMHNKIYAIPIEIMQGTGEELFDHIVSCISDFLDYMGIKGPRMPLGFTFSFPCQQTSLDAGILITWTKGFKATDCVGHDVVTLLRDAIKRREEFDLDVVAVVNDTVGTMMTCAYEEPTCEVGLIVGTGSNACYMEEMKNVEMVEGDQGQMCINMEWGAFGDNGCLDDIRTHYDRLVDEYSLNAGKQRYEKMISGMYLGEIVRNILIDFTKKGFLFRGQISETLKTRGIFETKFLSQIESDRLALLQVRAILQQLGLNSTCDDSILVKTVCGVVSRRAAQLCGAGMAAVVDKIRENRGLDRLNVTVGVDGTLYKLHPHFSRIMHQTVKELSPKCNVSFLLSEDGSGKGAALITAVGVRLRTEASS

SEQ ID NO: 784059 - protein, 879 aa, Homo sapiens
SLIKLILPPPGGAAEQPPEDHGSPGLRRTDRPHACRPATPTASMIAAQLLAYYFTELKDDQVKKIDKYLYAMRLSDETLIDIMTRFRKEMKNGLSRDFNPTATVKMLPTFVRSIPDGSEKGDFIALDLGGSSFRILRVQVNHEKNQNVHMESEVYDTPENIVHGSGSQLFDHVAECLGDFMEKRKIKDKKLPVGFTFSFPCQQSKIDEAILITWTKRFKASGVEGADVVKLLNKAIKKRGDYDANIVAVVNDTVGTMMTCGYDDQHCEVGLIIGTGTNACYMEELRHIDLVEGDEGRMCINTEWGAFGDDGSLEDIRTEFDREIDRGSLNPGKQLFEKMVSGMYLGELVRLILVKMAKEGLLFEGRITPELLTRGKFNTSDVSAIEKNKEGLHNAKEILTRLGVEPSDDDCVSVQHVCTIVSFRSANLVAATLGAILNRLRDNKGTPRLRTTVGVDGSLYKTHPQHNNAVVKMLPSFVRRTPDGTENGDFLALDLGGTNFRVLLVKIRSGKKRTVEMHNKIYAIPIEIMQGTGEELFDHIVSCISDFLDYMGIKGPRMPLGFTFSFPCQQTSLDAGILITWTKGFKATDCVGHDVVTLLRDAIKRREEFDLDVVAVVNDTVGTMMTCAYEEPTCEVGLIVGTGSNACYMEEMKNVEMVEGDQGQMCINMEWGAFGDNGCLDDIRTHYDRLVDEYSLNAGKQRYEKMISGMYLGEIVRNILIDFTKKGFLFRGQISETLKTRGIFETKFLSQIESDRLALLQVRAILQQLGLNSTCDDSILVKTVCGVVSRRAAQLCGAGMAAVVDKIRENRGLDRLNVTVGVDGTLYKLHPHFSRIMHQTVKELSPKCNVSFLLSEDGSGKGAALITAVGVRLRTEASS

SEQ ID NO: 784060 - protein, 960 aa, Homo sapiens; identical to SEQ ID NO: 784053

SEQ ID NO: 784061 - protein, 960 aa, Homo sapiens; identical to SEQ ID NO: 784053

SEQ ID NO: 784062 - protein, 969 aa, Homo sapiens
SLIKLILPPPGGAAEQPPEDHGSPGLRRTDRPHACRPATPTASMIAAQLLAYYFTELKDDQVKKIDKYLYAMRLSDETLIDIMTRFRKEMKNGLSRDFNPTATVKMLPTFVRSIPDGSEKGDFIALDLGGSSFRILRVQVNHEKNQNVHMESEVYDTPENIVHGSGSQLFDHVAECLGDFMEKRKIKDKKLPVGFTFSFPCQQSKIDEAILITWTKRFKASGVEGADVVKLLNKAIKKRGDYDANIVAVVNDTVGTMMTCGYDDQHCEVGLIIGTGTNACYMEELRHIDLVEGDEGRMCINTEWGAFGDDGSLEDIRTEFDREIDRGSLNPGKQLFEKMVSGMYLGELVRLILVKMAKEGLLFEGRITPELLTRGKFNTSDVSAIEKNKEGLHNAKEILTRLGVEPSDDDCVSVQHVCTIVSFRSANLVAATLGAILNRLRDNKGTPRLRTTVGVDGSLYKTHPQYSRRFHKTLRRLVPDSDVRFLLSESGSGKGAAMVTAVAYRLAEQHRQIEETLAHFHLTKDMLLEVKKRMRAEMELGLRKQTHNNAVVKMLPSFVRRTPDGTENGDFLALDLGGTNFRVLLVKIRSGKKRTVEMHNKIYAIPIEIMQGTGEELFDHIVSCISDFLDYMGIKGPRMPLGFTFSFPCQQTSLDAGILITWTKGFKATDCVGHDVVTLLRDAIKRREEFDLDVVAVVNDTVGTMMTCAYEEPTCEVGLIVGTGSNACYMEEMKNVEMVEGDQGQMCINMEWGAFGDNGCLDDIRTHYDRLVDEYSLNAGKQRHPRPLLLSRYEKMISGMYLGEIVRNILIDFTKKGFLFRGQISETLKTRGIFETKFLSQIESDRLALLQVRAILQQLGLNSTCDDSILVKTVCGVVSRRAAQLCGAGMAAVVDKIRENRGLDRLNVTVGVDGTLYKLHPHFSRIMHQTVKELSPKCNVSFLLSEDGSGKGAALITAVGVRLRTEASS

SEQ ID NO: 784063 - protein, 521 aa, Homo sapiens
  misc_feature (8)..(8): Xaa can be any naturally occurring amino acid
  misc_feature (10)..(10): Xaa can be any naturally occurring amino acid
NSSSSFEXSXRTTVGVDGSLYKTHPQYSRRFHKTLRRLVPDSDVRFLLSESGSGKGAAMVTAVAYRLAEQHRQIEETLAHFHLTKDMLLEVKKRMRAEMELGLRKQTHNNAVVKMLPSFVRRTPDGTENGDFLALDLGGTNFRVLLVKIRSGKKRTVEMHNKIYAIPIEIMQGTGEELFDHIVSCISDFLDYMGIKGPRMPLGFTFSFPCQQTSLDAGILITWTKGFKATDCVGHDVVTLLRDAIKRREEFDLDVVAVVNDTVGTMMTCAYEEPTCEVGLIVGTGSNACYMEEMKNVEMVEGDQGQMCINMEWGAFGDNGCLDDIRTHYDRLVDEYSLNAGKQRYEKMISGMYLGEIVRNILIDFTKKGFLFRGQISETLKTRGIFETKFLSQIESDRLALLQVRAILQQLGLNSTCDDSILVKTVCGVVSRRAAQLCGAGMAAVVDKIRENRGLDRLNVTVGVDGTLYKLHPHFSRIMHQTVKELSPKCNVSFLLSEDGSGKGAALITAVGVRLRTEASS

SEQ ID NO: 784064 - protein, 415 aa, Homo sapiens
VWVTLAGSLSSPFVRRTPDGTENGDFLALDLGGTNFRVLLVKIRSGKKRTVEMHNKIYAIPIEIMQGTGEELFDHIVSCISDFLDYMGIKGPRMPLGFTFSFPCQQTSLDAGILITWTKGFKATDCVGHDVVTLLRDAIKRREEFDLDVVAVVNDTVGTMMTCAYEEPTCEVGLIVGTGSNACYMEEMKNVEMVEGDQGQMCINMEWGAFGDNGCLDDIRTHYDRLVDEYSLNAGKQRYEKMISGMYLGEIVRNILIDFTKKGFLFRGQISETLKTRGIFETKFLSQIESDRLALLQVRAILQQLGLNSTCDDSILVKTVCGVVSRRAAQLCGAGMAAVVDKIRENRGLDRLNVTVGVDGTLYKLHPHFSRIMHQTVKELSPKCNVSFLLSEDGSGKGAALITAVGVRLRTEASS

SEQ ID NO: 784065 - protein, 406 aa, Homo sapiens
ARYGRNSGSDGTENGDFLALDLGGTNFRVLLVKIRSGKKRTVEMHNKIYAIPIEIMQGTGEELFDHIVSCISDFLDYMGIKGPRMPLGFTFSFPCQQTSLDAGILITWTKGFKATDCVGHDVVTLLRDAIKRREEFDLDVVAVVNDTVGTMMTCAYEEPTCEVGLIVGTGSNACYMEEMKNVEMVEGDQGQMCINMEWGAFGDNGCLDDIRTHYDRLVDEYSLNAGKQRYEKMISGMYLGEIVRNILIDFTKKGFLFRGQISETLKTRGIFETKFLSQIESDRLALLQVRAILQQLGLNSTCDDSILVKTVCGVVSRRAAQLCGAGMAAVVDKIRENRGLDRLNVTVGVDGTLYKLHPHFSRIMHQTVKELSPKCNVSFLLSEDGSGKGAALITAVGVRLRTEASS

SEQ ID NO: 784066 - protein, 371 aa, Homo sapiens
IGLGTRPGSSNKIYAIPIEIMQGTGEELFDHIVSCISDFLDYMGIKGPRMPLGFTFSFPCQQTSLDAGILITWTKGFKATDCVGHDVVTLLRDAIKRREEFDLDVVAVVNDTVGTMMTCAYEEPTCEVGLIVGTGSNACYMEEMKNVEMVEGDQGQMCINMEWGAFGDNGCLDDIRTHYDRLVDEYSLNAGKQRYEKMISGMYLGEIVRNILIDFTKKGFLFRGQISETLKTRGIFETKFLSQIESDRLALLQVRAILQQLGLNSTCDDSILVKTVCGVVSRRAAQLCGAGMAAVVDKIRENRGLDRLNVTVGVDGTLYKLHPHFSRIMHQTVKELSPKCNVSFLLSEDGSGKGAALITAVGVRLRTEASS

SEQ ID NO: 784067 - protein, 960 aa, Homo sapiens; identical to SEQ ID NO: 784053

SEQ ID NO: 784068 - protein, 252 aa, Homo sapiens
MQGHRSSLPPRVFRTGSNACYMEEMKNVEMVEGDQGQMCINMEWGAFGDNGCLDDIRTHYDRLVDEYSLNAGKQRYEKMISGMYLGEIVRNILIDFTKKGFLFRGQISETLKTRGIFETKFLSQIESDRLALLQVRAILQQLGLNSTCDDSILVKTVCGVVSRRAAQLCGAGMAAVVDKIRENRGLDRLNVTVGVDGTLYKLHPHFSRIMHQTVKELSPKCNVSFLLSEDGSGKGAALITAVGVRLRTEASS

SEQ ID NO: 784069 - protein, 211 aa, Homo sapiens [sequence omitted]

SEQ ID NO: 784070 - protein, 866 aa, Homo sapiens
SLIKLILPPPGGAAEQPPEDHGSPGLRRTDRPHACRPATPTASMIAAQLLAYYFTELKDDQVKKIDKYLYAMRLSDETLIDIMTRFRKEMKNGLSRDFNPTATVKMLPTFVRSIPDGSEKGDFIALDLGGSSFRILRVQVNHEKNQNVHMESEVYDTPENIVHGSGSQLFDHVAECLGDFMEKRKIKDKKLPVGFTFSFPCQQSKIDEAILITWTKRFKASGVEGADVVKLLNKAIKKRGDYDANIVAVVNDTVGTMMTCGYDDQHCEVGLIIGTGTNACYMEELRHIDLVEGDEGRMCINTEWGAFGDDGSLEDIRTEFDREIDRGSLNPGKQLFEKMVSGMYLGELVRLILVKMAKEGLLFEGRITPELLTRGKFNTSDVSAIEKNKEGLHNAKEILTRLGVEPSDDDCVSVQHVCTIVSFRSANLVAATLGAILNRLRDNKGTPRLRTTVGVDGSLYKTHPQYSRRFHKTLRRLVPDSDVRFLLSESGSGKGAAMVTAVAYRLAEQHRQIEETLAHFHLTKDMLLEVKKRMRAEMELGLRKQTHNNAVVKMLPSFVRRTPDGTENGDFLALDLGGTNFRVLLVKIRSGKKRTVEMHNKIYAIPIEIMQGTGEELFDHIVSCISDFLDYMGIKGPRMPLGFTFSFPCQQTSLDAGILITWTKGFKATDCVGHDVVTLLRDAIKRREEFDLDVVAVVNDTVGTMMTCAYEEPTCEVGLIVGTGSNACYMEEMKNVEMVEGDQGQMCINMEWGAFGDNGCLDDIRTHYDRLVDEYSLNAGKQRYEKMISGMYLGEIVRHLVGYQRDPRGNPNRKTGFEQFWNENTDNAQRYQTSRTGRLKRGDRQLRSRKDSATGAHHETGLLRPL

SEQ ID NO: 784071 - protein, 490 aa, Homo sapiens
SLIKLILPPPGGAAEQPPEDHGSPGLRRTDRPHACRPATPTASMIAAQLLAYYFTELKDDQVKKIDKYLYAMRLSDETLIDIMTRFRKEMKNGLSRDFNPTATVKMLPTFVRSIPDGSEKGDFIALDLGGSSFRILRVQVNHEKNQNVHMESEVYDTPENIVHGSGSQLFDHVAECLGDFMEKRKIKDKKLPVGFTFSFPCQQSKIDEAILITWTKRFKASGVEGADVVKLLNKAIKKRGDYDANIVAVVNDTVGTMMTCGYDDQHCEVGLIIGTGTNACYMEELRHIDLVEGDEGRMCINTEWGAFGDDGSLEDIRTEFDREIDRGSLNPGKQLFEKMVSGMYLGELVRLILVKMAKEGLLFEGRITPELLTRGKFNTSDVSAIEKNKEGLHNAKEILTRLGVEPSDDDCVSVQHVCTIVSFRSANLVAATLGAILNRLRDNKGTPRLRTTVGVDGSLYKTHPQFPAFQLTSSDSCLTHLHHPPNYLYT

SEQ ID NO: 784072 - protein, 109 aa, Homo sapiens
TRLTKRWEIPVMALFVGWFLLSKWRQDTFPQDCPPPSRGHCLKASVGIALAASSPPGTHCGLASHRGVSMPQNRVSVEPVLAACDSLAFCLSRGGRWTVLRKCVLSPFG

SEQ ID NO: 784073 - protein, 956 aa, Homo sapiens
LANVLSGGAAEQPPEDHGSPGLRRTDRPHACRPATPTASMIAAQLLAYYFTELKDDQVKKIDKYLYAMRLSDETLIDIMTRFRKEMKNGLSRDFNPTATVKMLPTFVRSIPDGSEKGDFIALDLGGSSFRILRVQVNHEKNQNVHMESEVYDTPENIVHGSGSQLFDHVAECLGDFMEKRKIKDKKLPVGFTFSFPCQQSKIDEAILITWTKRFKASGVEGADVVKLLNKAIKKRGDYDANIVAVVNDTVGTMMTCGYDDQHCEVGLIIGTGTNACYMEELRHIDLVEGDEGRMCINTEWGAFGDDGSLEDIRTEFDREIDRGSLNPGKQLFEKMVSGMYLGELVRLILVKMAKEGLLFEGRITPELLTRGKFNTSDVSAIEKNKEGLHNAKEILTRLGVEPSDDDCVSVQHVCTIVSFRSANLVAATLGAILNRLRDNKGTPRLRTTVGVDGSLYKTHPQYSRRFHKTLRRLVPDSDVRFLLSESGSGKGAAMVTAVAYRLAEQHRQIEETLAHFHLTKDMLLEVKKRMRAEMELGLRKQTHNNAVVKMLPSFVRRTPDGTENGDFLALDLGGTNFRVLLVKIRSGKKRTVEMHNKIYAIPIEIMQGTGEELFDHIVSCISDFLDYMGIKGPRMPLGFTFSFPCQQTSLDAGILITWTKGFKATDCVGHDVVTLLRDAIKRREEFDLDVVAVVNDTVGTMMTCAYEEPTCEVGLIVGTGSNACYMEEMKNVEMVEGDQGQMCINMEWGAFGDNGCLDDIRTHYDRLVDEYSLNAGKQRYEKMISGMYLGEIVRNILIDFTKKGFLFRGQISETLKTRGIFETKFLSQIESDRLALLQVRAILQQLGLNSTCDDSILVKTVCGVVSRRAAQLCGAGMAAVVDKIRENRGLDRLNVTVGVDGTLYKLHPHFSRIMHQTVKELSPKCNVSFLLSEDGSGKGAALITAVGVRLRTEASS

SEQ ID NO: 784074 - protein, 921 aa, Homo sapiens; identical to SEQ ID NO: 784058

SEQ ID NO: 784075 - protein, 921 aa, Homo sapiens; identical to SEQ ID NO: 784058

SEQ ID NO: 784076 - protein, 960 aa, Homo sapiens; identical to SEQ ID NO: 784053

SEQ ID NO: 784077 - protein, 960 aa, Homo sapiens; identical to SEQ ID NO: 784053

SEQ ID NO: 784078 - protein, 960 aa, Homo sapiens; identical to SEQ ID NO: 784053

SEQ ID NO: 784079 - protein, 1000 aa, Homo sapiens
SLIKLILPPPGGAAEQPPEDHGSPGLRRTDRPHACRPATPTASMIAAQLLAYYFTELKDDQVKKIDKYLYAMRLSDETLIDIMTRFRKEMKNGLSRDFNPTATVKMLPTFVRSIPDGSEKGDFIALDLGGSSFRILRVQVNHEKNQNVHMESEVYDTPENIVHGSGSQLFDHVAECLGDFMEKRKIKDKKLPVGFTFSFPCQQSKIDEAILITWTKRFKASGVEGADVVKLLNKAIKKRGDYDANIVAVVNDTVGTMMTCGYDDQHCEVGLIIGTGTNACYMEELRHIDLVEGDEGRMCINTEWGAFGDDGSLEDIRTEFDREIDRGSLNPGKQLFEKMVSGMYLGELVRLILVKMAKEGLLFEGRITPELLTRGKFNTSDVSAIEKNKEGLHNAKEILTRLGVEPSDDDCVSVQHVCTIVSFRSANLVAATLGAILNRLRDNKGTPRLRTTVGVDGSLYKTHPQYSRRFHKTLRRLVPDSDVRFLLSESGSGKGAAMVTAVAYRLAEQHRQIEETLAHFHLTKDMLLEVKKRMRAEMELGLRKQTHNNAVVKMLPSFVRRTPDGTENGDFLALDLGGTNFRVLLVKIRSGKKRTVEMHNKIYAIPIEIMQGTGEELFDQQWVVRGQSCVHRFVCRTLTSGSSFKEGARGKGGIGTFHCGGPFTNGFSFPSFSSAALWTPKDQRKPLNGFPKGAAGGILITWTKGFKATDCVGHDVVTLLRDAIKRREEFDLDVVAVVNDTVGTMMTCAYEEPTCEVGLIVGTGSNACYMEEMKNVEMVEGDQGQMCINMEWGAFGDNGCLDDIRTHYDRLVDEYSLNAGKQRYEKMISGMYLGEIVRNILIDFTKKGFLFRGQISETLKTRGIFETKFLSQIESDRLALLQVRAILQQLGLNSTCDDSILVKTVCGVVSRRAAQLCGAGMAAVVDKIRENRGLDRLNVTVGVDGTLYKLHPHFSRIMHQTVKELSPKCNVSFLLSEDGSGKGAALITAVGVRLRTEASS

SEQ ID NO: 784080 - protein, 960 aa, Homo sapiens; identical to SEQ ID NO: 784053

SEQ ID NO: 784081 - protein, 418 aa, Homo sapiens
RDWRHWNGAAKMQASFVRRTPDGTENGDFLALDLGGTNFRVLLVKIRSGKKRTVEMHNKIYAIPIEIMQGTGEELFDHIVSCISDFLDYMGIKGPRMPLGFTFSFPCQQTSLDAGILITWTKGFKATDCVGHDVVTLLRDAIKRREEFDLDVVAVVNDTVGTMMTCAYEEPTCEVGLIVGTGSNACYMEEMKNVEMVEGDQGQMCINMEWGAFGDNGCLDDIRTHYDRLVDEYSLNAGKQRYEKMISGMYLGEIVRNILIDFTKKGFLFRGQISETLKTRGIFETKFLSQIESDRLALLQVRAILQQLGLNSTCDDSILVKTVCGVVSRRAAQLCGAGMAAVVDKIRENRGLDRLNVTVGVDGTLYKLHPHFSRIMHQTVKELSPKCNVSFLLSEDGSGKGAALITAVGVRLRTEASS

SEQ ID NO: 784082 - protein, 814 aa, Homo sapiens
SLIKLILPPPGGAAEQPPEDHGSPGLRRTDRPHACRPATPTASMIAAQLLAYYFTELKDDQVKKIDKYLYAMRLSDETLIDIMTRFRKEMKNGLSRDFNPTATVKMLPTFVRSIPDGSEKGDFIALDLGGSSFRILRVQVNHEKNQNVHMESEVYDTPENIVHGSGSQLFDHVAECLGDFMEKRKIKDKKLPVGFTFSFPCQQSKIDEAILITWTKRFKASGVEGADVVKLLNKAIKKRGDYDANIVAVVNDTVGTMMTCGYDDQHCEVGLIIGTGTNACYMEELRHIDLVEGDEGRMCINTEWGAFGDDGSLEDIRTEFDREIDRGSLNPGKQLFEKMVSGMYLGELVRLILVKMAKEGLLFEGRITPELLTRGKFNTSDVSAIEKNKEGLHNAKEILTRLGVEPSDDDCVSVQHVCTIVSFRSANLVAATLGAILNRLRDNKGTPRLRTTVGVDGSLYKTHPQYSRRFHKTLRRLVPDSDVRFLLSESGSGKGAAMVTAVAYRLAEQHRQIEETLAHFHLTKDMLLEVKKRMRAEMELGLRKQTHNNAVVKMLPSFVRRTPDGTGTGSNACYMEEMKNVEMVEGDQGQMCINMEWGAFGDNGCLDDIRTHYDRLVDEYSLNAGKQRHPRPLLLSRYEKMISGMYLGEIVRNILIDFTKKGFLFRGQISETLKTRGIFETKFLSQIESDRLALLQVRAILQQLGLNSTCDDSILVKTVCGVVSRRAAQLCGAGMAAVVDKIRENRGLDRLNVTVGVDGTLYKLHPHFSRIMHQTVKELSPKCNVSFLLSEDGSGKGAALITAVGVRLRTEASS

SEQ ID NO: 784083 - protein, 960 aa, Homo sapiens; identical to SEQ ID NO: 784053

SEQ ID NO: 784084 - protein, 231 aa, Homo sapiens
MNAYIRNGCHYTSHVGDQINMEWGAFGDNGCLDDIRTHYDRLVDEYSLNAGKQRYEKMISGMYLGEIVRNILIDFTKKGFLFRGQISETLKTRGIFETKFLSQIESDRLALLQVRAILQQLGLNSTCDDSILVKTVCGVVSRRAAQLCGAGMAAVVDKIRENRGLDRLNVTVGVDGTLYKLHPHFSRIMHQTVKELSPKCNVSFLLSEDGSGKGAALITAVGVRLRTEASS

SEQ ID NO: 784085 - protein, 112 aa, Homo sapiens
ISNRVIIGWRWKITPPDRPSGPPKPILGVPPPCVKCIITSRHCRASLPGALPEGECGHSISCFLPSWHPLWPGIASWCVNATKSCVRGARRARPPHLPCHFAWFDFDLVPHV

SEQ ID NO: 784086 - protein, 275 aa, Homo sapiens
SLIKLILPPPGGAAEQPPEDHGSPGLRRTDRPHACRPATPTASMIAAQLLAYYFTELKDDQVKKIDKYLYAMRLSDETLIDIMTRFRKEMKNGLSRDFNPTATVKMLPTFVRSIPDGSEKGDFIALDLGGSSFRILRVQVNHEKNQNVHMESEVYDTPENIVHGSGSQLFDHVAECLGDFMEKRKIKDKKLPVGFTFSFPCQQSKIDEAILITWTKRFKASGVEGADVVKLLNKAIKKRGDYDANIVAVVNDTVGTMMTCGYDDQHSTPHYNAWD

SEQ ID NO: 784087 - protein, 110 aa, Homo sapiens
MVHGSVTFRDVAIDFSQEEWECLQPDQRTLYRDVMLENYSHLISLGSSISKPDVITLLEQEKEPWMVVRKETSRRYPDLELKYGPEKVSPENDTSEVNLPKQVIKQISTN

SEQ ID NO: 784088 - protein, 110 aa, Homo sapiens; identical to SEQ ID NO: 784087

SEQ ID NO: 784089 - protein, 110 aa, Homo sapiens; identical to SEQ ID NO: 784087

SEQ ID NO: 784090 - protein, 126 aa, Homo sapiens
MGRSPRKIDQFCNSSNMVHGSVTFRDVAIDFSQEEWECLQPDQRTLYRDVMLENYSHLISLGSSISKPDVITLLEQEKEPWMVVRKETSRRYPDLELKYGPEKVSPENDTSEVNLPKQVIKQISTN

SEQ ID NO: 784091 - protein, 91 aa, Homo sapiens
MQAWGRPGLALKGLTVNRGGRRAGCLMWGDRRGADQQGGASLGWSCLSSVPNKDAVGAGGSSRRRERQHKGHKVAEAASCTDNSSVLQAHA

SEQ ID NO: 784092 - protein, 43 aa, Homo sapiens
GEEGAFAPGLGGRTQSQAGRNPCAAIRCLHVPGAEGTPHQPRR

SEQ ID NO: 784093 - protein, 107 aa, Homo sapiens [sequence omitted]

SEQ ID NO: 784094 - protein, 78 aa, Homo sapiens
GGYTCQSGSGWDEFTKHVTSECLGWMRQQRAEMDLVAWGVGAMNEANRFSFILVLRVCYNFLFLWALVREVGVVCVIF

SEQ ID NO: 784095 - protein, 107 aa, Homo sapiens
GGYTCQSGSGWDEFTKHVTSECLGWMRQQRAEMDMVAWGVDLASVEQHINSHRGIHNSIGDYRWQLDKIKADLREKSAIYQLASSSSIHLKAQVYSLFSLPKVGTPS

SEQ ID NO: 784096 - protein, 44 aa, Homo sapiens
FFSPGLSDDASARCQCSLPVLPDTGASEHLTGDYCNWELSLSPF

SEQ ID NO: 784097 - protein, 111 aa, Homo sapiens
MCAFPWLLLLLLLQEGSQRRLWRWCGSEEVVAVLQESISLPLEIPPDEEVENIIWSSHKSLATVVPGKEGHPATIMVTNPHYQGQILTMLLRSLQQPSASWPRDCSSSCSW

SEQ ID NO: 784098 - protein, 138 aa, Homo sapiens
MSLVCSVEKAGMDMTYSWLSRGDSTYTFHEGPVLSTSWRPGDSALSYTCRANNPISNVSSCPIPDGPFYADPNYASEKPSTAFCLLAKGLLIFLLLVILAMGLWVIRVQKRHKMPRMKKLMRNRMKLRKEAKPGSSPA

SEQ ID NO: 784099 - protein, 289 aa, Homo sapiens
MCAFPWLLLLLLLQEGSQRRLWRWCGSEEVVAVLQESISLPLEIPPDEEVENIIWSSHKSLATVVPGKEGHPATIMVTNPHYQGQVSFLDPSYSLHISNLSWEDSGLYQAQVNLRTSQISTMQQYNICVYRWLSEPQITVNFESSGEGACSMSLVCSVEKAGMDMTYSWLSRGDSTYTFHEGPVLSTSWRPGDSALSYTCRANNPISNVSSCPIPDGPFYADPNYASEKPSTAFCLLAKGLLIFLLLVILAMGLWVIRVQKRHKMPRMKKLMRNRMKLRKEAKPGSSPA

SEQ ID NO: 784100 - protein, 128 aa, Homo sapiens
MQSRGQYSCTGQVMYIPQTFTQTSETAMVQVQGSQRRLWRWCGSEEVVAVLQESISLPLEIPPDEEVENIIWSSHKSLATVVPGKEGHPATIMVTNPHYQGQILTMLLRSLQQPSASWPRDCSSSCSW

SEQ ID NO: 784101 - protein, 156 aa, Homo sapiens
TVGSHLLRLLSLSQGGEKRSGIHCQEGLPPGFPTSFFTAVLEAHRRPLKRWSPAHSPPHPPPATPTVPNASSALSSVFFPSREMVVVMKFFRWVRRAWQRIISWVFFWRQKIKPTISGHPDSKKHSLKKMEKTLQVVETLRLVELPKEAKPKLGES

SEQ ID NO: 784102 - protein, 113 aa, Homo sapiens [sequence omitted]

SEQ ID NO: 784103 - protein, 142 aa, Homo sapiens [sequence omitted]

SEQ ID NO: 784104 - protein, 33 aa, Homo sapiens
IKQPCSLTPIKIQGLPLSQPTFCLVLVFGHIPL

SEQ ID NO: 784105 - protein, 210 aa, Homo sapiens
MRKRQQSQNEGTPAVSQAPGNQRPNNTCCFCWCCCCSCSCLTVRNEERGENAGRPTHTTKMESIQVLEECQNPTAEEVLSWSQNFDKMMKAPAGRNLFREFLRTEYSEENLLFWLACEDLKKEQNKKVIEEKARMIYEDYISILSPKEVSLDSRVREVINRNLLDPNPHMYEDAQLQIYTLMHRDSFPRFLNSQIYKSFVESTAGSSSES

SEQ ID NO: 784106 - protein, 131 aa, Homo sapiens
PGCCGPTNHKSYERGSRRREKSQYRLVPATFGKKKFLTRRGACFALGRVALAGAWVTPIPPWRLTSCRGGPPASSWPRAQGASCPGTADAGIASPGRAGGEGGRGGRGTAGCSPPWGIRGAEPRWRPRGPG

SEQ ID NO: 784107 - protein, 116 aa, Homo sapiens
MKANWQDSSFSIKISKLLPAHILFLPASTACTHVPLFSNTRPLGSDPAPSFLLDGGAPAILFPTPASPSSPFSKHLSTISTLKSFRIFHLKIKNRPGMVAHTCCPSTLGGQCGQIA

SEQ ID NO: 784108 - protein, 90 aa, Homo sapiens
LPTWTTPLTWATPHFHSCPQHTPAAPIASSNPLQLKVLTHLSPVQEGPLRPLGVKSKLPITAHQACKEEDDLQKPFTKSACKGEKKQAAE

SEQ ID NO: 784109 - protein, 456 aa, Homo sapiens
MTSSYSSSSCPLGCTMAPGARNVSVSPIDIGCQPGAEANIAPMCLLANVAHANRVRVGSTPLGRPSLCLPPTCHTACPLPGTCHIPGNIGICGAYGENTLNGHEKETMQFLNDRLANYLEKVRQLEQENAELEATLLERSKCHESTVCPDYQSYFHTIEELQQKILCSKAENARLIVQIDNAKLAADDFRIKLESERSLRQLVEADKCGTQKLLDDATLAKADLEAQQESLKEEQLSLKSNHEQEVKILRSQLGEKLRIELDIEPTIDLNRVLGEMRAQYEAMLETNRQDVEQWFQAQSEGISLQDMSCSEELQCCQSEILELRCTVNALEVERQAQHTLKDCLQNSLCEAEDRFGTELAQMQSLISNVEEQLSEIRADLERQNQEYQVLLDVKTRLENEIATYRNLLESEDCKLPCNPCSTSPSCVTAPCAPRPSCGPCTTCGPTCGASTTGSRF

SEQ ID NO: 784110 - protein, 518 aa, Homo sapiens
MTSSYSSSSCPLGCTMAPGARNVSVSPIDIGCQPGAEANIAPMCLLANVAHANRVRVGSTPLGRPSLCLPPTCHTACPLPGTCHIPGNIGICGAYGENTLNGHEKETMQFLNDRLANYLEKVRQLEQENAELEATLLERSKCHESTVCPDYQSYFHTIEELQQKVRCGIAWVCWVCDGRGKTGGIHVSSENFGFLVSLGHDHRHHTWRRSLGHDDFVCELSSCSPQILCSKAENARLIVQIDNAKLAADDFRIKLESERSLRQLVEADKCGTQKLLDDATLAKADLEAQQESLKEEQLSLKSNHEQEVKILRSQLGEKLRIELDIEPTIDLNRVLGEMRAQYEAMLETNRQDVEQWFQAQSEGISLQDMSCSEELQCCQSEILELRCTVNALEVERQAQHTLKDCLQNSLCEAEDRFGTELAQMQSLISNVEEQLSEIRADLERQNQEYQVLLDVKTRLENEIATYRNLLESEDCKLPCNPCSTSPSCVTAPCAPRPSCGPCTTCGPTCGASTTGSRF

SEQ ID NO: 784111 - protein, 108 aa, Homo sapiens
KLDKWQITHCPSHALQPQPRGCRGVTIHWSISCAPATVGVRWCAVSSILRRSTRMKRLRSKREKRFLVCILPFLKAHVWAPTFFRIFSLAQLKLNSYHTKERLGLQTP

SEQ ID NO: 784112 - protein, 119 aa, Homo sapiens
MRDFNTLLTVLDTSLRQKISKDIQDLNSALDQMDLIDVYRTLHQKATEYTFFSSPHGTYSETVSWRKLFHGEEATGLTGNQTLTSLCTCPEAGSCAQWVLSVPRWSCSLFREACFWAHT

SEQ ID NO: 784113 - protein, 113 aa, Homo sapiens [sequence omitted]

SEQ ID NO: 784114 - protein, 59 aa, Homo sapiens
MGTIVILRGVVVKTKAAVSVPAHSERSVSVRWVAYVLDLLRLSASCLYSFLLGRESLLM

SEQ ID NO: 784115 - protein, 325 aa, Homo sapiens
  misc_feature (213)..(213): Xaa can be any naturally occurring amino acid
  misc_feature (269)..(269): Xaa can be any naturally occurring amino acid
  misc_feature (318)..(318): Xaa can be any naturally occurring amino acid
KPVPEAWHSRRPPLQCLGVRALRLRPDLFMGSTATSPDARSHKGPTRMRKPQAESRGSSTASQPHACPDGVGSAVNRRHFSAPQKLHADCEKEMLDGGVPGTTVREMVRELWMWNVEYGGTRSGDLHLGWSALRMPSKGTAWSTSRSGLCARVGIAADGETFGVAEECPQTLEGIRCLLHSRVSLPRAIISGSRKSGSWARAGWLEPLARRTXAEVQAAPVSQAAVSDASLVPEGSQEVCRPGLTSGQHGGRDEKVTGFAAPGDPAEPXPGHPASPAAPRGGLALVTWRPVHKAHDSVPEASPSSANFRNPGPAEARXPRARQRA

SEQ ID NO: 784116 - protein, 87 aa, Homo sapiens
SPAGIATPGQANNTKKTSPVVNKNALTCLKFLRNYRTHTRTKSNGFCNSNINVDTDKVNPHQEELGVLRHRELLQTRAVFYSRTNSE

SEQ ID NO: 784117 - protein, 69 aa, Homo sapiens
PMSPFLFEDKLTEIYSDRTFAPLPEFEQEEDDGEVTEDSDEDFIQPRRKRLKSDERPVHIKKNDMDLFY

SEQ ID NO: 784118 - protein, 159 aa, Homo sapiens
AHSSTAAHSSTHQHKAAHASAQQRTPVHSSTQHHTAAYSSARQSTVAHASAQQHTAAHSSTRQGTAAHASTRQRTAAHSSTRQRTAAHASAQRTAAHSTQQHTAAHTSAQQRTAAHASTQQHTAHSSAQQHTPAHSSTRQRTAAHSSTRQHTPAHSSTR

SEQ ID NO: 784119 - protein, 68 aa, Homo sapiens
FVCFDQSCFFRETHGFCRRPSLAYGLIDTCPLTEAWMDTALGPLENRTWRVLEMAVDMPGSLPMMWHP

SEQ ID NO: 784120 - protein, 102 aa, Homo sapiens
GRGWGRGRGESRSRPLPTTKLLCQSPRAAVTEDHELGGLKQLKCVFSQFWRPEVSNQGARRAMRSLKHIGEVLSFLSSFQCLMGTLGLRLRYFSLSRRLVIF

SEQ ID NO: 784121 - protein, 37 aa, Homo sapiens
MRTTLGSTGVSSCSCLFLSLSLLASTLSIRKPQLVCV

SEQ ID NO: 784122 - protein, 109 aa, Homo sapiens
VWDFASVSLGNSFSGKLLSIPAPSWDWAICLSPCSCQFLSPACHPRTDSSDVDCLVDCLPHCNHALRLGFYFTLDYHHNCLWDFPPFHLSIHPSIRLVDAAANLVVVGG

SEQ ID NO: 784123 - protein, 53 aa, Homo sapiens
LTVRAVEKWGDPRVSVLGCKTCSTPEKIAVGLILAEFYLGLIDPKTDPPGLFK

SEQ ID NO: 784124 - protein, 80 aa, Homo sapiens
TGEFHLTEIRTPVHKDACPVMPAAAKEKNKVQSRPHTRGWATRRTPCHMRDRVPPESRRRPGGALAHSAEGAKRTQEECA

SEQ ID NO: 784125 - protein, 79 aa, Homo sapiens
EDSVDISLSTLYAANCMISWFLEFWGYRQKGKEVSKEDNRSKVSCAADNSAKNKETMAWDRVLFRAYSYCLLLALLSQR

SEQ ID NO: 784126 - protein, 195 aa, Homo sapiens
AVQVELEPVNAQARKAFSRQREKMERRRKPQLDRRGAVIQSVPGFWANVIANHPQMSALITDEDEDMLSYMVSLEVEEEKHPVHLCKIMLFFRSNPYFQNKVITKEYLVNITEYRASHSTPIEWYPDYEVEAYRRRHHNSSLNFFNWFSDHNFAGSNKIAEILCKDLWRNPLQYYKRMKPPEEGTETSGDSQLLS

SEQ ID NO: 784127 - protein, 283 aa, Homo sapiens
VSERKVHKLMLQNISPSDAGEYTAVVGQLECKAKLFVETLHITKTMKNIEVPETKTASFECEVSHFNVPSMWLKNGVEIEMSEKFKIVVQGKLHQLIIMNTSTEDSAEYTFVCGNDQVSATLTVTPIMITSMLKDINAEEKDTITFEVTVNYEGISYKWLKNGVEIKSTDKCQMRTKKLTHSLNIRNVHFGDAADYTFVAGKATSTATLYVEARHIEFRKHIKDIKVLEKKRAMFECEVSEPDITVQWMKDDQELQITDRIKIQKEKYVHRLLIPSTRMSDAG

SEQ ID NO: 784128 - protein, 116 aa, Homo sapiens
LSGSATPGPSWAPSWPQEPKAGCTIHWAQAIRSTDSTWRSTPLTAAGYGGQELTSLVRTQIPGASASREGKAAWSRRGSTSGGTPGLGGMSWVQRQLIGHRRPNRGPGSSRGRVYA

SEQ ID NO: 784129 - protein, 52 aa, Homo sapiens
LFAWISPAEAAEQQILQNGKFCCLILLLKASSQRGTWLYEVSVGPYWEVSPI

SEQ ID NO: 784130 - protein, 69 aa, Homo sapiens
QGDVLVEVFSLHSGGTRTEEKKGIFRLNFKRGSFFFPENSWSPGTWPSQSLRPEVRNQHAYKIQPRIFL

SEQ ID NO: 784131 - protein, 44 aa, Homo sapiens
MCCTVSRASVAPQLMAQEGQLTQGKQTPKQGDESTQMVTSRIFR

SEQ ID NO: 784132 - protein, 132 aa, Homo sapiens
KNKKKFGVESDKRVTNDISPESSPGVGRRRTKTPHTFPHSRYMSQMSVPEQAELEKLKQRINFSDLDQINTNKSKDASTNPPNRETIGSAQCKELFASALSNDLLQNCQVSEEDGRGEPAMESSQVITFVSF

SEQ ID NO: 784133 - protein, 141 aa, Homo sapiens
MGVRGTWEVELSCGVGNDLPAPPAPAVRPVSGKTSSCSRLPEAPRQREAHPAQGRPSMRPGAEVPPLQVCRTRQGLTHRAVPLCAMSLRALRLKLGHPQTLHISTWSFLGFKRAHFPIPSSAQLLSRLSIVHTPLKLWRSC

SEQ ID NO: 784134 - protein, 317 aa, Homo sapiens
ARRPPPGTTYAQVTVSTGPGAPWEEDEIRRDRVEPQSVSLSWREPIPAGAPGANDTEYEIRYYEKGQSEQTYSMVKTGAPTVTVTNLKPATRYVFQIRAASPGPSWEAQSFNPSIEVQTLGEAASGSRDQSPAIVVTVVTISALLVLGSVMSVLAIWRRPCSYGKGGGDAHDEEELYFHFKVPTRRTFLDPQSCGDLLQAVHLFAKELDAKSVTLERSLGGGRFGELCCGCLQLPGRQELLVAVHMLRDSASDSQRLGFLAEALTLGQFDHSHIVRLEGVVTRGSTLMIVTEYMSHGALDGFLRVSGPGAANDHFIL

SEQ ID NO: 784135 - protein, 117 aa, Homo sapiens
MKARRNKKQIPSFRKLIKTSKVKLENKLKNKQFKQQSTLKKYRKEQRKLRQAVKDAVSKKPIPLENPKEKRPGKRIEREEEEEEEALPLDMMDEDDLQLMKDLGQRVSFLTRDLSSR

SEQ ID NO: 784136 - protein, 70 aa, Homo sapiens
RAISPPFEWDLSQHTAFYTVSEEKAKPRYSNKDCIQSQKNYLLTPVSSFTTYRNVEEMDSTLRERKTGLI

SEQ ID NO: 784137 - protein, 116 aa, Homo sapiens
GGVGQRVSVVSGAWSVHFAIAALANSCRCPGPEQAGELWTGSRQWLGAHGMGTLVLTVTPVPFDLRNCGSFQPVISCYDRDLNPSSGWGHEMFARPAQGQALGYGTALLIVVEPRK

SEQ ID NO: 784138 - protein, 295 aa, Homo sapiens
MSGALDVLQMKKEDVLKFLAAGTQLGGSNLDFQVEQYVYKRKSDGIYIINLTRTWKKLLLAARAIVAIENAAAVSVISSRNTGQRVVLKFAAATGATPIAGPFTPGTFTNQIQAAFWEPRLLVVTDPRADQQPLRTEASYVNLPTIALCNTDSPLRYVDIAIPCNNKGAHSVGLMWWMLAREVLRMRGTISREHPWEVMPDLYFYRDPEEIEKEQAAAEKAVTKEEFQGEWTAPAPEFTATQPEVADWSDGVQVPSVPIQQFPTEDWSTQPATEDWSAAPTAQATEGVGATTEWS

SEQ ID NO: 784139 - protein, 101 aa, Homo sapiens
GAISAHRNLRLPDSSDSPASASSGAGITGAHRHARLIFVFLVETGFHYIGQAGLELLTSSNPPASASQSAGITDVIHQDHTRPRLACFHFKSQICHPPQCL

SEQ ID NO: 784140 - protein, 207 aa, Homo sapiens
MKQPNRKRKLNMDSKERLDQDGRLEQAEEEKKPKDSTTPLSHVPSAAAQGAWSWEWYLKEQKAVAAPVELFSKDQSFPEHENGFQIGMRLEGIDPRHPSVFCVLSVAEVCGYRLRLHFDGYLSCYDFWTNAGSPDIHPVGWCEKTKHELHIPKGYRKDKFVWMDYLKACKLQNAPKKLFRNRSPNGPMSKEFQVGMKLEAVDRKNPS

SEQ ID NO: 784141 - protein, 58 aa, Homo sapiens
NEIKRLKEMTLVPLSLHNPFPAWQPADRLDLTTRHFRGSFLHSSRRPFGALHAAECTC

SEQ ID NO: 784142 - protein, 109 aa, Homo sapiens
NFVFVVETGFHHVGQAGLKLLTSGDLPASASQNAGITGVSHHTWPTLINFLMNIPPSVSVHCLITTNGSLNYFRIKFNLFLLTLEGLYDLAIDFVPKGFLILKGLSTVF

SEQ ID NO: 784143 - protein, 118 aa, Homo sapiens
ALRLLSFRDFAELPPALGCPGARRTVPRDPPQLQPLGFPCEIPAPTRDSEIAWSPLPGPSAPPPALHSTNGREAFPAPLGSHPLPNDTLSLMGLAFCCVPKQVRREHSLNVKGSAAEG

SEQ ID NO: 784144 - protein, 55 aa, Homo sapiens
VTFQQSPKASLSQGDNCQKNVPSSTRVPGQAHAWCVWCGGESQQGANELESSDGG

SEQ ID NO: 784145 - protein, 86 aa, Homo sapiens
HLLSSVVAITEAGAAKMKFNPFVTSDRSKNRKRHFNAPSHIRRKIMSSPLSKELRQKYNVRSMPIRKDDLKFRLYVDTIKVSKLAK

SEQ ID NO: 784146 - protein, 89 aa, Homo sapiens
AAATTTKFAARRPPKREAKMKFNPFVTSDRSKNRKRHFNAPSHIRRKIMSSPLSKELRQKYNVRSMPIRKDDLKFRLYVDTIKVSKLAK

SEQ ID NO: 784147 - protein, 122 aa, Homo sapiens
MLKSLREGYDATLRSVRSLSLLGRICYEDVSPLGDYENELAGEAITEAGAAKMKFNPFVTSDRSKNRKRHFNAPSHIRRKIMSSPLSKELRQKYNVRSMPIRKDDLKFRLYVDTIKVSKLAK

SEQ ID NO: 784148 - protein, 100 aa, Homo sapiens
  misc_feature (8)..(8): Xaa can be any naturally occurring amino acid
  misc_feature (12)..(12): Xaa can be any naturally occurring amino acid
LNPLFYYXAARXRQKGLFPFAAITEAGAAKMKFNPFVTSDRSKNRKRHFNAPSHIRRKIMSSPLSKELRQKYNVRSMPIRKDDLKFRLYVDTIKVSKLAK

SEQ ID NO: 784149 - protein, 94 aa, Homo sapiens
RDPELVNSVTQDVVRVSWQLMEAKMKFNPFVTSDRSKNRKRHFNAPSHIRRKIMSSPLSKELRQKYNVRSMPIRKDDLKFRLYVDTIKVSKLAK

SEQ ID NO: 784150 - protein, 86 aa, Homo sapiens
GARPVDSIRPDALSSKMKFNPFVTSDRSKNRKRHFNAPSHIRRKIMSSPLSKELRQKYNVRSMPIRKDDLKFRLYVDTIKVSKLAK

SEQ ID NO: 784151 - protein, 89 aa, Homo sapiens; identical to SEQ ID NO: 784146

SEQ ID NO: 784152 - protein, 100 aa, Homo sapiens
TTTKLPAASTDDEVQVVRGHYKGQQIGKVVQVYRKKYVIYIERVQREKANGTTVHVGIHPSKVVITRLKLDKDRKKILERKAKSRQVGTRNKGQIQGRNH

SEQ ID NO: 784153 - protein, 85 aa, Homo sapiens
GLHGIGHEPKRGRPKMKFNPFVTSDRSKNRKRHFNAPSHIRRKIMSSPLSKELRQKYNVRSMPIRKDDLKFRLYVDTIKVSKLAK

SEQ ID NO: 784154 - protein, 158 aa, Homo sapiens
  misc_feature (1)..(1): Xaa can be any naturally occurring amino acid
  misc_feature (37)..(37): Xaa can be any naturally occurring amino acid
XAFLREWVESMGGKVPPATQKAKSEENTKEEKPDSKXVEEDLKADEPSSEESDLEIDKEGVIEPDTDAPQEMGDENAEITEEMMDQANDKKVAAIEALNDGELQKAIDLFTDAIKLNPRLAILYAKRASVFVKLQKSPSRNTEQGANTRKKPLRRCRN

SEQ ID NO: 784155 - protein, 85 aa, Homo sapiens; identical to SEQ ID NO: 784153

SEQ ID NO: 784156 - protein, 122 aa, Homo sapiens
NLFPSLLPSLKLRAPLAPRDIGLARSLVNLQNRKQRVVLFPFAAITEAGAAKMKFNPFVTSDRSKNRKRHFNAPSHIRRKIMSSPLSKELRQKYNVRSMPIRKDDLKFRLYVDTIKVSKLAK

SEQ ID NO: 784157 - protein, 122 aa, Homo sapiens; identical to SEQ ID NO: 784156

SEQ ID NO: 784158 - protein, 128 aa, Homo sapiens
MRAHSKTQTQESTRTTREKKSNSSRGETQTAQPAECTHNPAANISERRPHSAQQTAASNTETKSERQADPPEQTKDNCEQVREHKKHNAYAHKKMQRDNITEQPRNQQKHERPTTDDTSNVTIDTDDL

SEQ ID NO: 784159 - protein, 85 aa, Homo sapiens; identical to SEQ ID NO: 784153

SEQ ID NO: 784160 - protein, 93 aa, Homo sapiens
HLARSCLTEPVPFAAITEAGAAKMKFNPFVTSDRSKNRKRHFNAPSHIRRKIMSSPLSKELRQKYNVRSMPIRKDDLKFRLYVDTIKVSKLAK

SEQ ID NO: 784161 - protein, 181 aa, Homo sapiens
MKFNPFVTSDRSKNRKRHFNAPSHIRRKIMSSPLSKELRQKYNVRSMPIRKDDLKFRRFQCLVIEEAVEDQYNRIAPNLDSGAVTEAQSRYRLHLQVVRGHYKGQQIGKVVQVYRKKYVIYIERVQREKANGTTVHVGIHPSKVVITRLKLDKDRKKILERKAKSRQVGTRNKGQIQGRNH

SEQ ID NO: 784162 - protein, 85 aa, Homo sapiens
SIRNPTRRPKREAAKMKFNPFVTSDRSKNRKRHFNAPSHIRRKIMSSPLSKELRQKYNVRSMPIRKDDLKFRLYVDTIKVSKLAK

SEQ ID NO: 784163 - protein, 113 aa, Homo sapiens
GRLLLLLLEFKLLTMYGDMPIRKDDEVQVVRGHYKGQQIGKVVQVYRKKYVIYIERVQREKANGTTVHVGIHPSKVVITRLKLDKDRKKILERKAKSRQVGTRNKGQIQGRNH

SEQ ID NO: 784164 - protein, 91 aa, Homo sapiens
GRVGRPTRRPTRPITEAGAAKMKFNPFVTSDRSKNRKRHFNAPSHIRRKIMSSPLSKELRQKYNVRSMPIRKDDLKFRLYVDTIKVSKLAK

SEQ ID NO: 784165 - protein, 122 aa, Homo sapiens; identical to SEQ ID NO: 784156

SEQ ID NO: 784166 - protein, 94 aa, Homo sapiens
EREHNGMSESVWISGRGTEAGAAKMKFNPFVTSDRSKNRKRHFNAPSHIRRKIMSSPLSKELRQKYNVRSMPIRKDDLKFRLYVDTIKVSKLAK

SEQ ID NO: 784167 - protein, 106 aa, Homo sapiens
  misc_feature (7)..(7): Xaa can be any naturally occurring amino acid
RKPWDEXRHFDRTLQFGHYEPGLFPFAAITEAGAAKMKFNPFVTSDRSKNRKRHFNAPSHIRRKIMSSPLSKELRQKYNVRSMPIRKDDLKFRLYVDTIKVSKLAK

SEQ ID NO: 784168 - protein, 96 aa, Homo sapiens
DPNSDPTGSTQVVRGHYKGQQIGKVVQVYRKKYVIYIERVQREKANGTTVHVGIHPSKVVITRLKLDKDRKKILERKAKSRQVGTRNKGQIQGRNH

SEQ ID NO: 784169 - protein, 75 aa, Homo sapiens
LPLLLLNSRPVDHRSGRRVQREKANGTTVHVGIHPSKVVITRLKLDKDRKKILERKAKSRQVGTRNKGQIQGRNH

SEQ ID NO: 784170 - protein, 93 aa, Homo sapiens; identical to SEQ ID NO: 784160

SEQ ID NO: 784171 - protein, 88 aa, Homo sapiens
SSLERRGRIIITEAGAAKMKFNPFVTSDRSKNRKRHFNAPSHIRRKIMSSPLSKELRQKYNVRSMPIRKDDLKFRLYVDTIKVSKLAK

SEQ ID NO: 784172 - protein, 128 aa, Homo sapiens; identical to SEQ ID NO: 784158

SEQ ID NO: 784173 - protein, 85 aa, Homo sapiens; identical to SEQ ID NO: 784162

SEQ ID NO: 784174 - protein, 122 aa, Homo sapiens; identical to SEQ ID NO: 784156

SEQ ID NO: 784175 - protein, 128 aa, Homo sapiens; identical to SEQ ID NO: 784158

SEQ ID NO: 784176 - protein, 102 aa, Homo sapiens
NQLLPLSCHAWLTFWIFSTEGVSLCCPDWSRTPELRQSTHLGLPKCWDYSHEPLRLALAGTFLVFSSSCISGKDSPSPHYFFCIHFGFIYFSTTLAGESSSS

SEQ ID NO: 784177 - protein, 41 aa, Homo sapiens
LGETSVQLFQQCLSPHMNQRQQPHGLLILQSPAQQFPGQPL

SEQ ID NO: 784178 - protein, 36 aa, Homo sapiens
LLLYEDKLIFFLESHRIITKGQGDPLRSFSHSGSIA

SEQ ID NO: 784179 - protein, 114 aa, Homo sapiens
MEKFLSGQSSQAPSLMTQPAPVLLRPPKKLPASHAHHIPPFESRQEVQDRRHCSFSRPLWFLKKLLLAYSPPQKVIQKYFSHPLYSVFSFTSVDFLKNRSQLRNNATSLSVFLI

SEQ ID NO: 784180 - protein, 103 aa, Homo sapiens
RARSGGSGLSPPRPRPPCPESLPKTSRTKWARLLSGEGSPGPQIAGGGGVDARECEVRVSLGCVQCLQVGILRFQKSGRDGVAYTRWGQSLVSPEAGAGLGAL

SEQ ID NO: 784181 - protein, 204 aa, Homo sapiens
MDPSQFNPTYIPGSPQMLTEENSRDDSGASQISSETLIKNLSNLTINASSESVSPLSEALLRRESVGAAVLREIEDEWLYSRRGVRTLLSVQREKMARLRYMLLGGVRTPEKRTNQTRSLRELRRIKTIQWPLQFCVAKGRGPFGKAELGIKTPDPFSHKFYFWPFFFWLEILLTGLRKLLLSCVRLSPNNFDKEFKEVFFLGS

SEQ ID NO: 784182 - protein, 110 aa, Homo sapiens
EGSSYRTNLPYHPDHTSPDATSLLQVPPLPSTDLEIEAQRGTQVTQGHTWSQWDTKFRFLASSPPPATRWRAGDGGNLNRKPFVPCSHLSRWLDSTFSGQRWGWDGVWAL

SEQ ID NO: 784183 - protein, 24 aa, Homo sapiens
MIMAHCSSLLGSGDPPASTSYSGG

SEQ ID NO: 784184 - protein, 67 aa, Homo sapiens
NTKRRKQHPSPANFPFNSPGIQVPGVGEEKGALVILYHQYNDGVAGFFNFMVDGVLIVNIVRVISLM

SEQ ID NO: 784185 - protein, 115 aa, Homo sapiens
THTHTHTHTHTHTKQLRRTTSACRSSEQPYLKICERSIFWGKIFWFPSLHISPWVLFLPLVSCSQTHEAEKQLGMQNLMCFILCGLEESLVPKIIPWGPLLHRQIKAKRSLLSLK

SEQ ID NO: 784186 - protein, 117 aa, Homo sapiens
SECSSRAVSIFNKEGCLEIVLKYLSRFPTNVDLAISVAYCLQTVTEDNPELLKSFSATALNMLESALLSPVSSMESLLLKTLVAGKIWNLKDIIPCKSQAEIINALLKILSEVLGMD

SEQ ID NO: 784187 - protein, 170 aa, Homo sapiens
SLSGGSDFLVSLPSYAAITINVLEHFLTTLLRCNSNTMYFTQSLQFSVFLSIFTDNCSPSPILEHCHPLKRRTLHSSCCPLSFRTHCSPQKEPQCLNTINLHSHPPPAFPAGGHCTPAWVTEPDAVPKKKKKKKEKKNSIQPSCSMIPTSSVPCFRLNILLIVIELLVSS

SEQ ID NO: 784188 - protein, 105 aa, Homo sapiens
QSPMPCWTWWIWVKAQLFLNQSRSQPLLGSPGPKLCDPLPPSLGEDAQWDHLSQVCLSSWWFVFCLADVTEEGTTTHSGFSRHRKSLPLCTDPAPVRWENLYCTV

SEQ ID NO: 784189 - protein, 70 aa, Homo sapiens
SLRARLESVHCSTVPFGAVVHLALIFPICSLLQRLRPFNASGPFNASGPFNASGPINASGPFNASGPFNA

SEQ ID NO: 784190 - protein, 111 aa, Homo sapiens
TPTRTHTHEHKHPHKHEHTHTHTHTHTRSWWLNLPQGQISKNSGGKSDPSSFQPPWGYSPGGLERERGTSDVGDKALWELAKELGVSLAVPDKEEVPPSDRGWKKGSPQRC

SEQ ID NO: 784191 - protein, 30 aa, Homo sapiens
MSTWRQHALQPEPPGQGPLSRQQLYRRESG

SEQ ID NO: 784192 - protein, 53 aa, Homo sapiens
PSSPQDVAQYWANLLVFMATLLIILLLMVCDEWGIHRILYGIFLKSKFKFLQE

SEQ ID NO: 784193 - protein, 73 aa, Homo sapiens
QCSCERVGGEQKLACTLSSPMRRNAYKNVLSWAGGDGAGQEQDSGLCCWLVLPAGTVFPMPAGERKELLILSL

SEQ ID NO: 784194 - protein, 139 aa, Homo sapiens
HGFSSPLWLLQCPCVFELPVFMRFSLMFLISSSPSSWGLLSVAPALLLVRGCFRPLQDARTVPNTLVSSKNPAASPGAVFCVFMLSFLCPGLCSLGGEQEVCLMPGPTPAPPQPLICILYEPVKAVWDYCNFRKTSVLP

SEQ ID NO: 784195 - protein, 104 aa, Homo sapiens
MLSLGRDHLGEEAKITLLTREPLPRAGTPPPGVHSWPRALSGTRIGVSELVTGPPKPSPGVDFGIVPTARGLVVGVGRGPPPPRVTLRETRARPPDSCGGAGVW

SEQ ID NO: 784196 - protein, 82 aa, Homo sapiens
MNCKARAGYIICPTQCKMKMQELLLKNYSELQNGVNGALNHVWGPSKCLALCDSTGHMPMKLALYGVAILVSDKTDFKPTKI

SEQ ID NO: 784197 - protein, 76 aa, Homo sapiens
  misc_feature (20)..(20): Xaa can be any naturally occurring amino acid
WLSGPCSGDTGAYTESSQGXNPQRRVAEFVYLSVHTLLLAPLHLPPHLLPLYPFPEASSASAWHTLSLLLSVPFSL

SEQ ID NO: 784198 - protein, 132 aa, Homo sapiens
SESEVWVEGQRPISGGCPQQGVIYGTEEPRPGEPGPPLHTAWPQLRQWPRAAGLVPRQGSGHGLRNGARSRGLPLNSLVHTHMLCLPQGAAPRGPAVLPVEESSPSPRGKAGSAGGTGFLGPGALICRPSLA

SEQ ID NO: 784199 - protein, 88 aa, Homo sapiens
PAFLTVHAMNVVVSLAACTHVSQGEVNRRLLGQQERTSSPLPENARLLSRLCCCLVPQQEMRTPARPMQGSESDLAIFTTLWGTELDL

SEQ ID NO: 784200 - protein, 158 aa, Homo sapiens
ESQQDALLQGMVELVKIGKEKLAHGHLKQTKSKVALQAQIENHKVFFQKLVADMLLIQAYSAKILPSLLQNRETFWAEQVTEVKILEEKSRQCGMKLQSLLQKWEEFDENYASLEKDLEILISTLPSVSLVEETEERLVERISFYQQIKRNIGGKHAR

SEQ ID NO: 784201 - protein, 53 aa, Homo sapiens
LIYDFRTQIIILPTPIPGRPSPGSVDMPGSVEVRALTHHSPHIPARLLAYMSQ

SEQ ID NO: 784202 - protein, 126 aa, Homo sapiens [sequence omitted]

SEQ ID NO: 784203 - protein, 126 aa, Homo sapiens [sequence omitted]

SEQ ID NO: 784204 - protein, 282 aa, Homo sapiens
PATRGPSPPGDSADSRTRPARQTTNARRPSAESRTAAPLCTWPPPPRRPIGRRPSLVPPKWTPPPPRGTPLAGVPAPANPAPPPRRPIGPAARRQSRGRPGATSAQRTGCRVMRRRLWLGLAWLLLARAPDAAGTPSASRGPRSYPHLEGDVRWRRLFSSTHFFLRVDPGGRVQGTRWRHGQDSILEIRSVHVGVVVIKAVSSGFYVAMNRRGRLYGSRLYTVDCRFRERIEENGHNTYASQRWRRRGQPMFLALDRRGGPRPGGRTRRYHLSAHFLPVLVS

SEQ ID NO: 784205 - protein, 230 aa, Homo sapiens
PATRGPSPPGDSADSRTRPARQTTNARRPSAESRTAAPLCTWPPPPRRPIGRRPSLVPPKWTPPPPRGTPLAGVPAPANPAPPPRRPIGPAARRQSRGRPGATSAQRTGCRVMRRRLWLGLAWLLLARAPDAAGTPSASRGPRSYPHLEGDVRWRRLFSSTHFFLRVDPGGRVQGTRWRHGQDSECGAAGAWGGEAAGDGNAAAVFTVTCARGGVPEAPLCSLGLSFRGL

SEQ ID NO: 784206 - protein, 50 aa, Homo sapiens
MAELGCPILQPSCWVHTRSQGNNATATTARHNSWTVLHAPSSFPSVFSRL

SEQ ID NO: 784207 - protein, 115 aa, Homo sapiens
MIPSRTKHHLPKTASADSFLSNLQQPILPGTSSRHPHFLSHTPHSVHQEILLTQLPNKLYPRLTLCLISTASPLVCATGLISTRLMSWQSDLITRMSLLCSKPSKDSHFRVKHSV

SEQ ID NO: 784208 - protein, 106 aa, Homo sapiens
LWPGPAESPSPEEPSFFACCRGGSVGTVAAGSWRPKEGRSELREGSWPGTGVSELYRIQKVPGVLQPSEEFTEWWATQQPGASAVGVGRSGSLSCILWAQQTLKGW

SEQ ID NO: 784209 - protein, 43 aa, Homo sapiens
SCTIYLFAFMEHKRIISNSVLDCLIHLDTCRLSVESIYFFQSS

SEQ ID NO: 784210 - protein, 30 aa, Homo sapiens
MDLNCRCRQPVEFDKRFLAGRAEHSWSADE

SEQ ID NO: 784211 - protein, 150 aa, Homo sapiens
MLLSSRWAESSPVPWSYTGVKTATTDRRVSSSHLGMRELESLCPIPADREWGSHPSCSEVWPWPLTGRFIKLRGWGPGVTCHQTASGWTGGCPGQHWSTWKTTEKVKIAQWRLGAVAHACNPSTSGGQGGQITRLADHEVRRSRPSWLTR

SEQ ID NO: 784212 - protein, 37 aa, Homo sapiens
MRSWICGLSEVRMPFPALAGVGQCRHLLLRLFPFHST

SEQ ID NO: 784213 - protein, 135 aa, Homo sapiens
DTVIHLPDHFSRLKDLSPCSRNAAFRQPSTVSPSLVIAWMKRTASTKVTFPPTTAANHCPSYKKVRTPDILIVPIHGKSEGPSQFEIFVGLFKDSIENWSQPILFLCPILLSSSPFPSTGVDQTSTPYLHAYLHP

SEQ ID NO: 784214 - protein, 96 aa, Homo sapiens
QYQAAVKSGRRTRLGKATTVELNSHREKNSEAMDAWKWGRAWEKTSEKNSEAMDAWKWGRAWEKTSEVWAGVSGLCLGKWMWRRSNEASVGLEVGA

SEQ ID NO: 784215 - protein, 33 aa, Homo sapiens
ATHSSGYSSLQRLLTPVATPHSSGYSSLQRLLT

SEQ ID NO: 784216 - protein, 42 aa, Homo sapiens
VCARMCVCAYVCPEATDPVQVYLEISSVAHKGLRGHYCAGEI

SEQ ID NO: 784217 - protein, 61 aa, Homo sapiens
MRVVHYGARLRSAVWEAGGVWLREWSLPKGTWLMDGGPTPEKKPLTCDLFSQKPSLCTLAL

SEQ ID NO: 784218 - protein, 108 aa, Homo sapiens
HSCLACFYGLSAFHCEAEELLDFLLLGTPSCPVGGPLCDPSACMPTCNVPDITCPCLCTLKSAWTPPSTAPRAQLSSVALSSCSPLLLNTPQLLLPPDSAALARRCWG

SEQ ID NO: 784219 - protein, 93 aa, Homo sapiens
GEDASYPPGGTGLCFQNQITISLSLACNQLQELFGSWPGSETESLKEGDIKRDQDNFSCTMKHNPLLSQTTSFSLGPDGRLLRGYDQSAYDGK

SEQ ID NO: 784220 - protein, 353 aa, Homo sapiens
MPSPVGLLRALPLPWPQFLACTLRRLAGPRESTGPSQKPPPLCSVPCRVPAMTEEVAREALLSFVDSKCCYSSTVAGDLVIQELKRQTLCRYRLETFSESRISEWTFQPFTNHSVDGPQRGASPRLWDIKVQGPPMFQEDTRKFQVPHSSLVKECHKCHGRGRYKCSGCHGAGTVRCPSCCGAKRKAKQSRRCQLCAGSGRRRCSTCSGRGNKTCATCKGEKKLLHFIQLVIMWKNSLFEFVSEHRLNCPRELLAKAKGENLFKDENSVVYPIVDFPLRDISLASQRGIAEHSAALASRARVLQQRQTIELIPLTEVHYWYQGKTYVYYIYGTDHQVYAVDYPERYCCGCTIV

SEQ ID NO: 784221 - protein, 315 aa, Homo sapiens
MPSPVGLLRALPLPWPQFLACTLRRLAGPRESTGPSQKPPPLCSVPCRVPAMTEEVAREALLSFVDSKCCYSSTVAGDLVIQELKRQTLCRYRLETFSESRISEWTFQPFTNHSVDGPQRGASPRLWDIKVQGPPMFQEDTRKFQVPHSSLVKECHKCHGRGRYKCSGCHGAGTVRCPSCCGAKRKAKQSRRCQLCAGSGRRRCSTCSGRGNKTCATCKGEKKLLHFIQLVIMWKNSLFEFVSEHRLNCPRELLAKAKGENLFKDENSVVYPIVDFPLRDISLASQRGIAEHSAALASRARVLQQVSQGGGAIWL

SEQ ID NO: 784222 - protein, 230 aa, Homo sapiens
WHHLKYNSNHEAFVHIDNTPIVVWWTSVLRPRVLWRPPQSSWRDCPAMTGFFKGAEDRYSSHLWRPQGGPRSKGPGPRSWNTGRTLLPPGSHLWPLQPTVSLVLPSMDLKTDGPLCVPGLEDAGDTSVQNCGLMALRAAMEKCMKMQGEEGGFFPLGGVGARKTSVRGWHGLREGTSRRRGRHAERGPRLGSLSVVPPTVLRVSLHGRCHQPWASAWLGSSHHVASSSSG

SEQ ID NO: 784223 - protein, 106 aa, Homo sapiens
GSWDYCHVPPHPVNFVFLVETGFLHVGQAGLELPTSGDPPASASQNAGITGVSHRARPSFPISYYALSLPEGISVWGYSQGSFDKYSLSCISLEWGHFLQGLQVKK

SEQ ID NO: 784224 - protein, 70 aa, Homo sapiens
SVCGGRFHPQRMIISRHLPSVSSLPFHPQLHPQQMIISRHLPSVCGERLRGPLPPSADDNLKTLSERQLT

SEQ ID NO: 784225 - protein, 125 aa, Homo sapiens
PSKTPSVKDLSLPLYFSCLWASLNGELRDSKDCVFVLQITIHAKHCSVQNLLFCILTSLSRCLSGITDGELFEHMDFVLFIFIAPVLNRLSHRRCSRACRTIEVVQPADRGAKCPHGPPCSFHSM

SEQ ID NO: 784226 - protein, 89 aa, Homo sapiens
GSTCRRGVAGSCGHPSTLNISRNPQTVSTWPHHSDAWQTSPKEELSPRGFLALPRKEFKVEPEVEGNSFTSEVGLQLWLLPQGRASTDS

SEQ ID NO: 784227 - protein, 77 aa, Homo sapiens
GWWSCDSRTRLTVLVRGPFGGWHSQMHCWAPAPQCVLAQEEPKRLESWALGCCPTLRNGPFCHRASWLQHPRGLWEP

SEQ ID NO: 784228 - protein, 140 aa, Homo sapiens
QERDEAVKQLEEFQKISHMVIEEVNFMQNHLEIEKTCRESAEALATKLNKENKTLKRISMLYMAKLGPDVITEEINIDDEDSTTDTDGAAETCVSVQCQKQIKELRDQIVSVQEEKKILAIELENLKSKLVEVIEEVCIS

SEQ ID NO: 784229 - protein, 124 aa, Homo sapiens
HRVGQDTPHHLLGSPAAASGHRIFTQEWEGFRLSLVVLQAPSSALFSADMLSDLYSISPSVVPASSEFKILAPCMWSPCVLLSRLGISAEPFLFLGTPPFEDEPTMVDISPFCLRRTDCSFPSS

SEQ ID NO: 784230 - protein, 157 aa, Homo sapiens
VSIHSEPSKATYPVGTPSSMAETSISTSMPANFETTGFEAEPFSHLTSGFRKTNMSLDTSSVTPTNTPSSPGSTHLLQSSKTDFTSSAKTSSPDWPPASQYTEIPVDIITPFNASPSITESTGITSFPESRFTMSVTESTHHLSTDLLPSAETISTG

SEQ ID NO: 784231 - protein, 34 aa, Homo sapiens
QDLDSGVSGAETETLFGSQIRHRISVRVWPRLVN

SEQ ID NO: 784232 - protein, 215 aa, Homo sapiens
MVLLTMIARVADGLPLAASMQEDEQSGRDLQQYQSQAKQLFRKLNEQSPTRCTLEAGAMTFHYIIEQGVCYLVLCEAAFPKKLAFAYLEDLHSEFDEQHGKKVPTVSRPYSFIEFDTFIQKTKKLYIDSRARRNLGSINTELQDVQRIMVANIEEVLQRGEALSALDSKANNLSSLSKKYRQDAKYLNMRSTYAKLAAVAVFFIMLIVYVRFWWL

SEQ ID NO: 784233 - protein, 215 aa, Homo sapiens; identical to SEQ ID NO: 784232

SEQ ID NO: 784234 - protein, 182 aa, Homo sapiens
MVLLTMIARVADGLPLAASMQEDEQSGRDLQQYQSQAKQLFRKLNEQSPTRCTLEAGAMTFHYIIEQGVCYLVLCEAAFPKKLAFAYLEDLHSEFDEQHGKKVPTVSRPYSFIEFDTFIQKTKKLYIDSRARRNLGSINTELQDVQRIMVANIEEVLQRGEALSALDSKANNLSPSFYRINY

SEQ ID NO: 784235 - protein, 77 aa, Homo sapiens
  misc_feature (14)..(14): Xaa can be any naturally occurring amino acid
IRGRVDTAARRRQXGGSEDGAKGLPGQCWIPVVCEDGVANNDRPSGGRAPAGRLDAGGRTGGLANCGPFVTLILKAN

SEQ ID NO: 784236 - protein, 103 aa, Homo sapiens
TPSSGFRDTSAPRLRGVGGGSDSLRSPAPPSPDPLAARGVQGCCPGKEARRACSRREGWGGRGRRKTKGCEALNSKRCFESQALGFERRWEDGGRAIPIRNAI

SEQ ID NO: 784237 - protein, 96 aa, Homo sapiens
FWGLCKWNKRPWPLSGPAAVGSLWRTTPQSPGSGMHTLGPALSTGPWGLVCSAGDGMHFEEMPLTPGLPYRSVQIAPGTYPENSAVLFTLWRHLSP

SEQ ID NO: 784238 - protein, 87 aa, Homo sapiens
MVPTPRHVMRMNGVNVYKEFRAGPGCEVHSHWAIFSSRTRGVRTDLGTFMDPTQATVRASLCPPALAQYSQGHPQGHVHVLVHLRPL

SEQ ID NO: 784239 - protein, 97 aa, Homo sapiens
MSPTMSPLAQLCPLCPALRLLSAVTTIIPPHVVLCPRPACNLFPSSGRSQPLLHASFLGSLWYLCVHRLLASKSAVPGALSHPVTIASDSKDTAPWG

SEQ ID NO: 784240 - protein, 48 aa, Homo sapiens
SRVKPIPSPAGQVGGLRATAGVQAAFGHLVPQPWVCLWGADPNGNSFQ

SEQ ID NO: 784241 - protein, 126 aa, Homo sapiens
MRRKLLKTPANLLVSCCFELPPTGQTVGAFDLESEPVTLPKIAGIHAKDDPISPKDILRSSMLTADSFLLSHPLLFASSKWYLQMVLYQKRFLQSNQPWLNAIFRHSKFQRILENGLRNPEYFLGS

SEQ ID NO: 784242 - protein, 69 aa, Homo sapiens
TGVILHQYQQHGRDKDKGHLWALTAPCLNCHGRKPPSSKLGAAVVPILQVGTSKVTCPRTEQMRYFGRA

SEQ ID NO: 784243 - protein, 57 aa, Homo sapiens
MAAAIGLASENGLPGKFTQPDLKQLLRGRGAAPGVLAGKQLAAVREPLASRVLTEEC

SEQ ID NO: 784244 - protein, 107 aa, Homo sapiens
TVQGRNFPQAEASAGTQQTHAALIPSPRGLPRLGLLQVLSTPAQLFRLLGYSFCSFSFSLSSQSVQPTFFFFFLVETESCSVTQAAVLEGCGTISAHRNLRLMSSSN

SEQ ID NO: 784245 - protein, 113 aa, Homo sapiens
MRPRSRSLSPGRSPACCDHEIIMMNHVYKERFPKATAQMEERLKEIITSYSPDNVLPLADGVLSFTHHQIIELARDCLDKSHQGLITSRYFLELQHKLDKLLQEVRTMYHIVF

SEQ ID NO: 784246 - protein, 272 aa, Homo sapiens
MDESSILRRRGLQKELSLPRRGSLIDSQKWNCLVKRCRTSNRKSLIGNGQSPALPRPHSPLSAHAGNSPQDSPRNFSPSASAHFSFARRTDGRRWSLASLPSSGYGTNTPSSTVSSSCSSQEKLHQLPYQPTPDELHFLSKHFCTTESIATENRCRNTPMRPRSRSLSPGRSPACCDHEIIMMNHVYKERFPKATAQMEERLKEIITSYSPDNVLPLADGVLSFTHHQIIELARDCLDKSHQGLITSRYFLELQHKLDKLLQEVRTMYHIVF

SEQ ID NO: 784247 - protein, 84 aa, Homo sapiens
CRKKAIPPVLLLPTLGKTSFRKERCQRGRTHQQDCQRPDDHSPSIPQPLRPTAQAPEMHSFNLQSKNPPKPTISSTIGLGNGGF

SEQ ID NO: 784248 - protein, 281 aa, Homo sapiens
DVTGLADRTPGAGAREVLSRPSGLCRIVAGLPGRGRVLAAAARSRVPAAAAAAMVSPVTVVKSEGPKLVPFFKATCVYFVLWLPSSSPSWVSTLIKCLPIFCLWLFLLAHGLGFLLAHPSATRIFVGLVFSAVGDAFLIWQDQGYFVHGLLMFAVTHMFYASAFGMQPLALRTGLVMAALSGLCYALLYPCLSGAFTYLVGVYVALIGFMGWRAMAGLRLAGADWRWTELAAGSGALFFIISDLTIALNKFCFPVPYSRALIMSTYYVAQMLVALSAVESR

SEQ ID NO: 784249 - protein, 105 aa, Homo sapiens
MYLSPLSIQLNHISKMSAFFLNITHLCLRTTASRIANSDKRPCLNCLLLSSLHQLSNLVGLSPSSCPSPDFILHTCQVNRPEHPYSSPYSLKAGPSIRRLRYQHL

SEQ ID NO: 784250 - protein, 109 aa, Homo sapiens
MRPASSSARCPVRHLPPCPLTVPIWGPAAHHPWRPAVTPMDAMGAATCWPAPLSRSCDHCPSPARLSPHAQPAHLSRPGLFLEVATRPRPGPLPKKRGSALPHSPLQSQ

SEQ ID NO: 784251 - protein, 163 aa, Homo sapiens
VEGEERDCRIFLQLNFSFLFKAIIKCLEDRGFFILLTSSALLSEPDFGGKQMGLHGLHLFRSPLSTGVKDLKVEDDISMKVIPILSTLNCALLETKKSLPEERIHPNTLVKRHFQELYKADRSPSLSVAPQDRMKDPTFLGKLPSGFDLIPPAEKCPSESLTQ

SEQ ID NO: 784252 - protein, 56 aa, Homo sapiens
MLTCVDMRVHTNTWTGGYTHVNTDSGRTHTRVGLTLTLGCAVCFQGLCLTVSLSSC

SEQ ID NO: 784253 - protein, 30 aa, Homo sapiens
MKVEKGAVGEGSRDQGYKEKGSVHWQLDRS

SEQ ID NO: 784254 - protein, 36 aa, Homo sapiens
AHPFNDYTFSPLISALIQPTPSMTIPSLSSVPRFCF

SEQ ID NO: 784255 - protein, 155 aa, Homo sapiens
KQPTTVVLTLKTVPKCNICIEKNGGCNHMQCSKCKHDFCWMCLGDWKTHGSEYYECSRYKENPDIVNQSQQAQAREALKKYLFYFERWENHNKSLQLEAQTYQRIHEKIQERVMNNLGTWIDWQYLQNAAKLLAKCRYTLQYTNPYTYYMESGPR

SEQ ID NO: 784256 - protein, 101 aa, Homo sapiens
SLTTKPRVRRQAVCLWISFLPFSFYFFLWRQKLGIRRYEGWSPPLLEEGRNSHLSSPLEASSNSIKELPAFHRHQSRKNLPFLRWKIVKLQKKGVVLQNKL

SEQ ID NO: 784257 - protein, 140 aa, Homo sapiens
FQDEASSPSSQAPVLVTTLPSSVAFTPQWHSTSSPVSMSSVLTSSLVKTAGKVDTSLETVTSSPQSMSNTLDDISVTSAATTDIETTHPSINTVVTNVGTTGSAFESHSTVSAYPEPSKVTSTKCYHLHHGRHHNFQINT

SEQ ID NO: 784258 - protein, 387 aa, Homo sapiens
MAAVILPSTAAPSSLFPASQQKGHTQGGELVNELLTSWLRGLVTFEDVAVEFTQEEWALLDPAQRTLYRDVMLENCRNLASLGCRVNKPSLISQLEQDKKVVTEERGILPSTCPDLETLLKAKWLTPKKNVFRKEQSKGVKTERSHRGVKLNECNQCFKVFSTKSNLTQHKRIHTGEKPYDCSQCGKSFSSRSYLTIHKRIHNGEKPYECNHCGKAFSDPSSLRLHLRIHTGEKPYECNQCFHVFRTSCNLKSHKRIHTGENHHECNQCGKAFSTRSSLTGHNSIHTGEKPYECHDCGKTFRKSSYLTQHVRTHTGEKPYECNECGKSFSSSFSLTVHKRIHTGEKPYECSDCGKAFNNLSAVKKHLRTHTGEKPYECNHCGKSFTK

SEQ ID NO: 784259 - protein, 387 aa, Homo sapiens; identical to SEQ ID NO: 784258

SEQ ID NO: 784260 - protein, 316 aa, Homo sapiens
MLENCRNLASLGCRVNKPSLISQLEQDKKVVTEERGILPSTCPDLETLLKAKWLTPKKNVFRKEQSKGVKTERSHRGVKLNECNQCFKVFSTKSNLTQHKRIHTGEKPYDCSQCGKSFSSRSYLTIHKRIHNGEKPYECNHCGKAFSDPSSLRLHLRIHTGEKPYECNQCFHVFRTSCNLKSHKRIHTGENHHECNQCGKAFSTRSSLTGHNSIHTGEKPYECHDCGKTFRKSSYLTQHVRTHTGEKPYECNECGKSFSSSFSLTVHKRIHTGEKPYECSDCGKAFNNLSAVKKHLRTHTGEKPYECNHCGKSFTK

SEQ ID NO: 784261 - protein, 78 aa, Homo sapiens
HVRTHTGEKPYECNECGKSFSSSFSLTVHKRIHTGEKPYECSDCGKAFNNLSAVKKHLRTHTGEKPYECNHCGKSFTK

SEQ ID NO: 784262 - protein, 387 aa, Homo sapiens; identical to SEQ ID NO: 784258

SEQ ID NO: 784263 - protein, 387 aa, Homo sapiens; identical to SEQ ID NO: 784258

SEQ ID NO: 784264 - protein, 139 aa, Homo sapiens [sequence omitted]

SEQ ID NO: 784265 - protein, 115 aa, Homo sapiens
MTKKRRNNGRAKKGRGHVQPIRCTNCARCVPKDKAIKKFVIRNIVEAAAVRDISEVSVFDAYVLPKLYVKLHYCVSCAIHSKVVRNRSREARKDRTPPPRFRPAGAAPRPPPKPM

SEQ ID NO: 784266 - protein, 92 aa, Homo sapiens
MAKCASQGKVMFFFFQCQGLAVVSGGTRPPDMGLPGAGRVTVGLPGRWLSHGGSCCTDGPGVSGIQDGAARFLSSCDFHPGPRTLPSVCTSL

SEQ ID NO: 784267 - protein, 49 aa, Homo sapiens
TKAQWGLPGQQSWSLQDKGGPSPPRPLPYGGHREAPLQSALILPMHPLI

SEQ ID NO: 784268 - protein, 92 aa, Homo sapiens
VKRDGLRETAGMLTRTSVSNQQGGCLKMTVWKQVGVNRHSTVLQATHTETQGSRPGHTLGRTFHLTFLSSDLCSGSGAWLVRAAGFSCDALG

SEQ ID NO: 784269 - protein, 94 aa, Homo sapiens
IVIAVIPMMYNLVELERFSYSANNPLKSYSWQLIYIVRFIQLALFIFPRVLNSNLLCTGRMKDLEGRGHIMSKGLDSVSGNLLLIPVLLLFNPS

SEQ ID NO: 784270 - protein, 580 aa, Homo sapiens
MFVPRSLKIKRNANDDGKSCVAKIIKPDPEDLQLDKSRDVPVDAVATEAATIDRHISESCPFPSPGGQLAEVHSVSPEQGAKDSHPSEEPVKSFSKTQRWAEPGEPICVVCGRYGEYICDKTDEDVCSLECKAKHLLQVKEKEEKSKLSNPQKADSEPESPLNASYVYKEHPFILNLQEDQIENLKQQLGILVQGQEVTRPIIDFEHCSLPEVLNHNLKKSGYEVPTPIQMQMIPVGLLGRDILASADTGSGKTAAFLLPVIMRALFESKTPSALILTPTRELAIQIERQAKELMSGLPRMKTVLLVGGLPLPPQLYRLQQHVKVIIATPGRLLDIIKQSSVELCGVKIVVVDEADTMLKMGFQQQVLDILENIPNDCQTILVSATIPTSIEQLASQLLHNPVRIITGEKNLPCANVRQIILWVEDPAKKKKLFEILNDKKLFKPPVLVFVDCKLGADLLSEAVQKITGLKSISIHSEKSQIERKNILKGLLEGDYEVVVSTGVLGRGLDLISVRLVVNFDMPSSMDEYVHQENTYKSTWRNPQHFQQDVRMTLGYVGKAQWEEDNQLKVKLGLKKNCSS

SEQ ID NO: 784271 - protein, 619 aa, Homo sapiens
MFVPRSLKIKRNANDDGKSCVAKIIKPDPEDLQLDKSRDVPVDAVATEAATIDRHISESCPFPSPGGQLAEVHSVSPEQGAKDSHPSEEPVKSFSKTQRWAEPGEPICVVCGRYGEYICDKTDEDVCSLECKAKHLLQVKEKEEKSKLSNPQKADSEPESPLNASYVYKEHPFILNLQEDQIENLKQQLGILVQGQEVTRPIIDFEHCSLPEVLNHNLKKSGYEVPTPIQMQMIPVGLLGRDILASADTGSGKTAAFLLPVIMRALFESKTPSALILTPTRELAIQIERQAKELMSGLPRMKTVLLVGGLPLPPQLYRLQQHVKVIIATPGRLLDIIKQSSVELCGVKIVVVDEADTMLKMGFQQQVLDILENIPNDCQTILVSATIPTSIEQLASQLLHNPVRIITGEKNLPCANVRQIILWVEDPAKKKKLFEILNDKKLFKPPVLVFVDCKLGADLLSEAVQKITGLKSISIHSEKSQIERKNILKGLLEGDYEVVVSTGVLGRGLDLISVRLVVNFDMPSSMDEYVHQIGRVGRLGQNGTAITFINNNSKRLFWDIAKRVKPTGSILPPQLLNSPYLHDQKRKEQQKDKQTQNDLVTGANLMDIIRKHDKSNSQK

SEQ ID NO: 784272 - protein, 567 aa, Homo sapiens
MFVPRSLKIKRNANDDGKSCVAKIIKPDPEDLQLDKSRDVPVDAVATEAATIDRHISESCPFPSPGGQLAEVHSVSPEQGAKDSHPSEEPVKSFSKTQRWAEPGEPICVVCGRYGEYICDKTDEDVCSLECKAKHLLQVKEKEEKSKLSNPQKADSEPESPLNASYVYKEHPFILNLQEDQIENLKQQLGILVQGQEVTRPIIDFEHCSLPEVLNHNLKKSGYEVPTPIQMQMIPVGLLGRDILASADTGSGKTAAFLLPVIMRALFESKTPSALILTPTRELAIQIERQAKELMSGLPRMKTVLLVGGLPLPPQLYRLQQHVKVIIATPGRLLDIIKQSSVELCGVKIVVVDEADTMLKMGFQQQVLDILENIPNDCQTILVSATIPTSIEQLASQLLHNPVRIITGEKNLPCANVRQIILWVEDPAKKKKLFEILNDKKLFKPPVLVFVDCKLGADLLSEAVQKITGLKSISIHSEKSQIERKNILKGLLEGDYEVVVSTGVLGRGLDLISVRLVVNFDMPSSMDEYVHQLNIIWVVPFSGININASLIALLYSLLTTINMKFTP

SEQ ID NO: 784273 - protein, 389 aa, Homo sapiens
MQMIPVGLLGRDILASADTGSGKTAAFLLPVIMRALFESKTPSALILTPTRELAIQIERQAKELMSGLPRMKTVLLVGGLPLPPQLYRLQQHVKVIIATPGRLLDIIKQSSVELCGVKIVVVDEADTMLKMGFQQQVLDILENIPNDCQTILVSATIPTSIEQLASQLLHNPVRIITGEKNLPCANVRQIILWVEDPAKKKKLFEILNDKKLFKPPVLVFVDCKLGADLLSEAVQKITGLKSISIHSEKSQIERKNILKGLLEGDYEVVVSTGVLGRGLDLISVRLVVNFDMPSSMDEYVHQIGRVGRLGQNGTAITFINNNSKRLFWDIAKRVKPTGSILPPQLLNSPYLHDQKRKEQQKDKQTQNDLVTGANLMDIIRKHDKSNSQK

SEQ ID NO: 784274 - protein, 232 aa, Homo sapiens
FLGPTGRSAPPFYTHTSHFLRVPGPRAALLRSFRTVQRLFHQSQPIRLRKFCPRGFPYVPLRPELAQPGPVPRFTTSPELGGGVENARSLPAPLLLPPSLPSHCRLPAELRPRGGPASPPPGKRAAAPSQNPGKWILLYAPLRSAPHHQPRAAVLTSGSGLVGRKPGLEPGRGRRPERERERTRPQSCAGERAPEAWAPGRPGAPSPGPGALGRGGRTGAPARPSSHPYSSP

SEQ ID NO: 784275 - protein, 619 aa, Homo sapiens; identical to SEQ ID NO: 784271

SEQ ID NO: 784276 - protein, 388 aa, Homo sapiens
MFVPRSLKIKRNANDDGKSCVAKIIKPDPEDLQLDKSRDVPVDAVATEAATIDRHISESCPFPSPGGQLAEVHSVSPEQGAKDSHPSEEPVKSFSKTQRWAEPGEPICVVCGRYGEYICDKTDEDVCSLECKAKHLLQVKEKEEKSKLSNPQKADSEPESPLNASYVYKEHPFILNLQEDQIENLKQQLGILVQGQEVTRPIIDFEHCSLPEVLNHNLKKSGYEVPTPIQMQMIPVGLLGRDILASADTGSGKTAAFLLPVIMRALFESKTPSALILTPTRELAIQIERQAKELMSGLPRMKTVLLVGGLPLPPQLYRLQQHVKVIIATPGRLLDIIKQSSVELCGVKIVVVDEVSKGSKTGPYFSILRATSEPRVATVFPRGSRSAG

SEQ ID NO: 784277 - protein, 30 aa, Homo sapiens
APSPITTPSPQTLGAGSRPGRKRPERGKPP

SEQ ID NO: 784278 - protein, 43 aa, Homo sapiens
AGVVLEKATFGQENRDNYSHFRATISRLQNGTFAGEPSSFTPY

SEQ ID NO: 784279 - protein, 127 aa, Homo sapiens
RGRYGEVMPVYRRDSHRDVQAGSHDYPGEGIYLLKFDNSYSLLRNKTLYFHIYYTQLKDCWDRGRLYLLAEAGCQLVPLVWDRQEPKVHGGLLSLTPCLACLTVGPRSFFPFLASAGGGVVPLFCSP

SEQ ID NO: 784280 - protein, 118 aa, Homo sapiens
LIVILNSTDLSFLFTLATLKQSHCQHYGFPKHSSLNSSTSKNHGFPFKFPFHELNTFFFSWPISQSYSLSPNAGFVCLTATMGGCSNVVMKEKRMLRLLSVTLKAMETQVMIFFSYIE

SEQ ID NO: 784281 - protein, 160 aa, Homo sapiens
LEQSMREEALLKVQLTQLKESFQQVQLERDEYSEHLKGERARWQQRMRKMSQEICTLKKEKQQDMRRVEKLERSLSKLKNQMAEPLPPEPPAVPSEVELQHLRKELERVAGELQAQVKKNQRISLLNQRQEERIQEQEERLRKQEERIQEQHKSLQQLAK

SEQ ID NO: 784282 - protein, 51 aa, Homo sapiens
TEDVLLSGPLGAVLMSITQHFTTHVLPQRAGLPSELFSTGWVRWLTPVIPA

SEQ ID NO: 784283 - protein, 38 aa, Homo sapiens
MCQHKATPPWTPQHASTRPRLRGHRSMPAQGHASVDTA

SEQ ID NO: 784284 - protein, 151 aa, Homo sapiens
LAQSTAGRLHERWPFEEAEWPAPCLLSRSSSVPPGKPRGVANTRLLFQPNPALFPWEAQESGPAPACYCYPGPALFPRKLRGVAGTRLLLLSWPSFVSQEAKESSLARACYCYPSPALFPRKLRGVAGTRLLSQPSSVSLGSRGKWPAPTC

SEQ ID NO: 784285 - protein, 108 aa, Homo sapiens
TILPQARAWLSPSSPSLPKCHLSPRPSTTRFNTATGWLCLTLPARPYLTAFFFPQRTSPPTVLHGFLIFIVISFYRICKLQQGRHLCPFCSMKDYKSLEQRQTHRGAQ

SEQ ID NO: 784286 - protein, 145 aa, Homo sapiens
SESQAGLPLKPLHRSRLLREVMLLFALLLAMELPLVAASATMRAQWTYSLRCHDCAVINDFNCPNIRVCPYHIRRCMTISIQLSSGDRAAVCPGPHPTFFQPGAWIPTQVTDSKHQPLPAHLTRRHPLHGPGNILPSAINRPTLC

SEQ ID NO: 784287 - protein, 40 aa, Homo sapiens
FLAAQLSYPQQMELLTPTSTGRPGFLGTREELPYDLVPEP

SEQ ID NO: 784288 - protein, 35 aa, Homo sapiens
KFYPHNSNFWYHVGGHAEPSRNLILKPKSHVQILP

SEQ ID NO: 784289 - protein, 51 aa, Homo sapiens
MVSVYFRVSVESLICFCVSGFPAFIFQLHSIASLLSWDLKRHVGMETAALG

SEQ ID NO: 784290 - protein, 78 aa, Homo sapiens
GAFHSKWREVNHTGRTVGEVGTGQATFQRVMRALGVPTMSPVSSSAPHESFTICRRLSMKVLYVLDTQGDTGCPHAYC

SEQ ID NO: 784291 - protein, 101 aa, Homo sapiens
MVPGARLPLCKFPRGRSTLQRGLPGLGLGRLGPRAWKRAWHTVGLLKVLEQMGDRPADCRSWHPRAPSCPARLPGPGAGAARAGGLAVLLPPPGCQNFQKM

SEQ ID NO: 784292 - protein, 91 aa, Homo sapiens
QGEERDIIIWGLMQEYHHWRSTKQVDPGRRIICSLAKGFWFSQVTQSSRKLRGREEAFRTSHLIGNLYETGTRADGPSPFSLPMSRHCGRL

SEQ ID NO: 784293 - protein, 168 aa, Homo sapiens
GAAPGCQMLTWDCGRLLQAVRCPPGGVGAAPRCQMLTWGCGRCSRLSDAHLGVWALLQAVRCSPGGVGAAPGSQMLTWGCGCCSRLSDAPPGGVGCCSRMSDAPLEVWGAAPGCQMLTGGVGCCSRMSDAPLEVWGAAPGCQMLTWGCGCCSRLSDAHLGVWGAVPGC

SEQ ID NO: 784294 - protein, 120 aa, Homo sapiens
VQGVEVGPAPQGEAFSLESCQNWLPGEPHPATAEHCVRLGPTGWCNTDLCSAPHSYVCELRPGGPVQDAENLLVGAPSGDLQGPLMPLARQDGLSAPHEPVEVMVFPGLRLSREAFLTTA

SEQ ID NO: 784295 - protein, 40 aa, Homo sapiens
NTSAWGCGAAGFRPHSPRGLRHFYRVLMPHIIGARALPWP

SEQ ID NO: 784296 - protein, 106 aa, Homo sapiens
MPSHHALLHEAHLDGGEDQVEVNGAVFPKPFVEKPVSAEDHNVYIYYPSSAGGGSQRLFRKIGSRSSVYSPESSVRKTGSYIYEEFMPTDGTDVKVYTSEGLDYAL

SEQ ID NO: 784297 - protein, 102 aa, Homo sapiens
MPSHHALLHEAHLDGGEDQVEVNGAVFPKPFVEKPVSAEDHNVYIYYPSSAGGGSQRLFRKIGSRSSVYSPESSVRKTGSYIYEEFMPTDGTDVKVMVDIGI

SEQ ID NO: 784298 - protein, 101 aa, Homo sapiens
LRQENYLNLRGGGCSEPRSRHCTPAWATELDSVSKKKKKKSDKIDFKTKTVIIDKEYFIMNKVSVPQEAIPVIDMHVPNNRAPKYMKQKLSELKGKNEQLK

SEQ ID NO: 784299 - protein, 111 aa, Homo sapiens
MEKGDPQLCDFLESHFLNQQVKAIKKLGDYLSNLCKSEPQKQAWQSTCLTSSPWAAARKTPEPRWAPQPRCAFPGSGHQAGACMLPFQNVLFNFFPFSVTIIGNKVICSQS

SEQ ID NO: 784300 - protein, 84 aa, Homo sapiens
PKNHRGCSGASAHHPSVHWRPQRCSWLSMGTSLPVCPGSRMEASAGGVGAEGPTLPVLLSSSLEEVGFAPRWPFTPAPSSLHLH

SEQ ID NO: 784301 - protein, 104 aa, Homo sapiens
LNLISVPDTALHDKLMWPCPASAVTRLQTLVPVRNLAVREEMRQWPGWVAAGKGQIFSSAVCKFSSSSSVFSQRPAPLTCHELSLPGKEMLAKATSFLETPVVN

SEQ ID NO: 784302 - protein, 34 aa, Homo sapiens
AGPDEVRARTIRKGTKAPQAAGKIHTDFEKGFIM

SEQ ID NO: 784303 - protein, 101 aa, Homo sapiens
TFFQSKFALNSIHRSSEPPVNAPWTSVGKVWAALFASRAQFNSKASIPFGIILKFKKFFYIHYATQSIMIHVRGHLFIQSSWEIKTLGTKRKTKKSNHHLI

SEQ ID NO: 784304 - protein, 74 aa, Homo sapiens
MRVLEGVLTPLCCGEAFPSFWLPWYPLEPPICCSEAVPAAAGLLQQLEVEERFLGRESSSSDSEFEPWWSNVRH

SEQ ID NO: 784305 - protein, 95 aa, Homo sapiens
AAECVCVCVATCVPSPRAMCTHVPGAVLRHSRSARHWGHVALAELPHSPVPGPLVKAKRARVSHVCPSWVPVCGFCLIGVRPPCVSHITTSWPSV

SEQ ID NO: 784306 - protein, 74 aa, Homo sapiens
GIFYCAAIDQGGTNLEHGESEVPGGNLSGDYQEGIGSEGLKPHSGILAVDEPCNYYGAGWIPKRESIQSEGIRL

SEQ ID NO: 784307 - protein, 109 aa, Homo sapiens [sequence omitted]

SEQ ID NO: 784308 - protein, 144 aa, Homo sapiens
MWNVLEESSSKHQQPRPQDLSSCIGSHLLPIFLSLWVKNWCPAQWEEDITVTITHCYCDRGKDWNCVSSVRRTLIYFSPLRQGLALSPRLECSGAVLAHCSLDLLDSAFCVATGQYEGWERHTHQTPGMISLCRFCGRDMHVSS

SEQ ID NO: 784309 - protein, 56 aa, Homo sapiens
  misc_feature (52)..(52): Xaa can be any naturally occurring amino acid
MVVPFIRAIASAEVKRTQDPNTMFRGNSLASKCIDETMKLAGMHYLHVTLKXAIEE

SEQ ID NO: 784310 - protein, 180 aa, Homo sapiens
TEAAHPQTLLDLGASPDYKDSRGLTPLYHSALGGGDALCCELLLHDHAQLGITDENGWQEIHQACRFGHVQHLEHLLFYGADMGAQNASGNTALHICALYNQESCARVLLFRGANRDVRNYNSQTAFQVAIIAGNFELAEVIKTHKDSDVVPFRETPSYAKRRRLAGPSGLASPRPLQRS

SEQ ID NO: 784311 - protein, 117 aa, Homo sapiens
MAVNHKVTGACWRWNNDSRVIACFFEIMCICLSSIIMFGLIFIYACRFGHVQHLEHLLFYGADMGAQNASGNTALHICALYNQVRLCVLHMPAPASVHILASSGGVCVCGHTGDPVR

SEQ ID NO: 784312 - protein, 117 aa, Homo sapiens
WSAMAQSWLTATSASCVQVILLLQPPEYWDYRHAPTRPANFVFSVETGCLHVGQAGLKLPTSGDPYASASQSTGITGLSHRTWPTHFYIPRDPLIHPKADVSCICNTTFSSNIWSFF

SEQ ID NO: 784313 - protein, 92 aa, Homo sapiens
AGPALLTVLPASGWAPGLLLRGPRSAWEKGVISLLTVSWERLFLSVKPSPLVNWSRQSRSLVEKVGRVGPVGQMPLLLHFGQAEPLLPSRHP

SEQ ID NO: 784314 - protein, 109 aa, Homo sapiens [sequence omitted]

SEQ ID NO: 784315 - protein, 198 aa, Homo sapiens
  misc_feature (82)..(82): Xaa can be any naturally occurring amino acid
MIQQEEIRKLEEEKKQLEGEIIDFYKMKAASEALQTQLSTDTKKDKHLINMDPDSKCYCRSFLKKNLKRNDIKRPIKTCIQXKTKPMQTKPMQNSYVLMVGLNIFPKGFWRTKLCTRSQGPPWKLGPRALIQGPTQEFGFSFAWGFGPSVPGGGQVGEQRSPMADAGLRSPGGLPLLRRCWPWLGPTGPPPPLGARGG

SEQ ID NO: 784316 - protein, 127 aa, Homo sapiens
MAVLQKTEGTFLAITRPPAFTQNPPAPGAAVLAWPVAAHSQALPFPSWSDLCVLLLASPAPCSSTALLMARREALGSTEHPRPGQLKNPFVSLVVPGAESLGFHPAQAGLAAPVDRFVCKVLPTPHQ

SEQ ID NO: 784317 - protein, 73 aa, Homo sapiens
LGHLSQGAGQHPHRIQDHSLPGCFLQSLLYFFLGTTEFFLLAVMSFDRYVAVCNPLHYATIMSKRVCVQLVLC

SEQ ID NO: 784318 - protein, 42 aa, Homo sapiens
FSLILYTVPGLKRKARISVQVQSEDPAGIPNPSAAGEKRVPC

SEQ ID NO: 784319 - protein, 111 aa, Homo sapiens
MLMPVMRFPTLDLQVLAGTRYLQVPGSLQESMLEDVPKKPQDWHRASSQSTNFLEVLVGRRVVLKVRTPDYQHQHHLATWKKWRFPSPTSDFQNPNLQNQSPAIYVCKHPD

SEQ ID NO: 784320 - protein, 58 aa, Homo sapiens
PVPTVIQPPLNNPGHHLAPTGGHQGAHQAHSGLGQRAGLEEGTSNPTDRHAPGARGLL

SEQ ID NO: 784321 - protein, 141 aa, Homo sapiens
GPGTCLGAVVPVGMGSQGLRQSSASLWAEGRRTAPFLGPLIRRVWLHQGGTRGTWLAWEGAAGGWGSRGPPSSSGEVVSGIKGSRQGALAGGVDRCAAVGGPPALAPVSSAPSRLPGVRSVYHADHGPGLRGPQWLERKAG

SEQ ID NO: 784322 - protein, 143 aa, Homo sapiens
VNEACSLLPVMSDSIVIPITPVTVSLDILERQPPQREGTGLPTSHSRGWKEGRVRHHQQPPGLQAQASSSCSGCGACCLLRPRLATAQYCTDLSARNPQRQTEPLTQPGLGLGISGLSFLTGPWGTGCRGPPPPRVHSAQHFA

SEQ ID NO: 784323 - protein, 128 aa, Homo sapiens
MPPHLGKFLNFFFSDRVSLIAQAGLKLLGSSDPPASASQNAWTTGMHHRAQPPFWFSNKAFCSPPSNTSPCSSGLSSNRPGPVPWVLSVLRLLVPCTSPKAPTTKRSKDVGPGAVAYTCISQHSGRLR

SEQ ID NO: 784324 - protein, 105 aa, Homo sapiens
MSVSCPHGDSNVAPQIRPDAVGFVCPPCAPCPCLASPGLNRRSSAPSPPDASSEPGGVLRNTPGGRDMRLSAPWPGSRRGSRSGPEGLQAPGAGRGWRRIAADPA

SEQ ID NO: 784325 - protein, 113 aa, Homo sapiens
NWGKFPPWFLQTEDLGSLFILYLQAMSPQLLSFPYIQAQFPYLFFLQILPILGPSFAMKLSLAVLANINPLLLMATLYMPGTVLDTSYPTACLILPTNLGGELPLSQKNKVKF

SEQ ID NO: 784326 - protein, 97 aa, Homo sapiens
MGKVNWIVPTCMDHRQPMRESEIIDFFLGASLKDEVRRIMPVQKQTRDRPAHQGIKAYGGYTGTTMATSVLDVKCSKEVATDHPWGHTSWSKLSNRP

SEQ ID NO: 784327 - protein, 76 aa, Homo sapiens
MLGEWLFPLIQAMHPTLAGKITGVLLEIDNSELLHMLKSPESLHSKVDEAVAVLQAHQAKETAQKAVNSATGVPTV

SEQ ID NO: 784328 - protein, 138 aa, Homo sapiens
MDRIIGLHLTDSNRIGEHRFLPTNGKKSMLKALKLNSNEARLKFPRLLQIIERYPEETLSLMTKEISSVPCWQFISWISHMVALLDKDQAVAVQHSVEEITDNYPQAIVYPFIISTRYSYSFKDTSTGHKNNNALVAR

SEQ ID NO: 784329 - protein, 68 aa, Homo sapiens
MDRIIGLHLTDSNRIGEHRFLPTNGKKSMLKALKLNSNEARLTSREIPVTNGVGTTEKDQERSTDKVS

SEQ ID NO: 784330 - protein, 34 aa, Homo sapiens
MSTLCQCPESGDKSPGILCPVGLIFLSTVKSTTN

SEQ ID NO: 784331 - protein, 68 aa, Homo sapiens
LMNMCRWDQDCSQPMTSLHGLERGLCHRTQGLGSNTFLGIHQGPWIPCVTTLTHFTDEETEAQENNVA

SEQ ID NO: 784332 - protein, 108 aa, Homo sapiens
ELWPKGAPRDRDRVSTPPPPSLPRTAEWSQEKAQLGGSACCKGSVQRRGRPQCGAGRSGVAGVVFTEDSSRRLGGRRGELINLLKVSSYSIFQSRIQKTGQNSFFRTF

SEQ ID NO: 784333 - protein, 70 aa, Homo sapiens
QLLKGVISHGHRISWGENEEGAISQPKFPKVLKNYTPQKVFALHFAEICYVTVEKMCGVIFSLHFSRGGG

SEQ ID NO: 784334 - protein, 32 aa, Homo sapiens
MTLRLHKPFCQTPIRGTQVRQTMTTGPLQNEE

SEQ ID NO: 784335 - protein, 437 aa, Homo sapiens
KALEHKNRMSRMLEDRDLFVMRSELTESVYEEKLKQFEERLAEERHNRLEERKRQRKEERRITYYREKEEEEQRRAEEQMLKEREERERAERAKREEELREYQERVKKLEEVERKKRQRELEIEERERRREEERRLGDSSLSRKDSRWGDRDSEGTWRKGPEADSEWRRGPPEKEWRRGEGRDEDRSHRRDEERPRRLGDDEDREPSLRPDDDRVPRRGMDDDRGPRRGPEEDRFSRRGADDDRPSWRNTDDDRPPRRIADEDRGNWRHADDDRPPRRGLDEDRGSWRTADEDRGPRRGMDDDRGPRRGGADDERSSWRNADDDRGPRRGLDDDRGPRRGMDDDRGPRRGMDDDRGPRRGMDDDRGPRRGLDDDRGPWRNADDDRIPRRGAEANNFLWPFKLSSPRGGMKKKTTHFVEGGDAGNREDQINRLIRRMN

SEQ ID NO: 784336 - protein, 151 aa, Homo sapiens
NGGTCLVTWNDFHCTCPANFTGPTCAQQLWCPGQPCLPPATCEEVPDGFVCVAEATFREGPPAAFSGHNASSGRLLGGLSLAFRTRDSEAWLLRAAAGALEGVWLAVRNGSLAGGVRGGHGLPGAVLPIPGPRVADGAWHRVRLAMERPAA

SEQ ID NO: 784337 - protein, 89 aa, Homo sapiens
RRDHTTDTASSSRMQALPLPPQAAGAAWCFHTDLAKQEGETVMGHGAQEKVHRAQVAGGAIVHAVYAGALLQPLFSLDIRPAFPCPPLK

SEQ ID NO: 784338 - protein, 84 aa, Homo sapiens
QVLPILHPFYLHRPMLAQTEFLSQQPAHWSSCQCFLSLNHLSHPCWIELPKVDITQLPRAIHTFIGSYSLLNIFEILYLMLKIF

SEQ ID NO: 784339 - protein, 177 aa, Homo sapiens
MAEAASGAGGTSLEGERGKRPPPEGEPAAPASGVLDKLFGKRLLQAGRYLVSHKAWMKTVPTENCDVLMTFPDTTDDHTLLWLLNHIRVGIPELIVQVRHHRHTRAYAFFVTATYESLLRGADELGLRKAVKAEFGGGTRGFSCEEDFIYENVESELRFFTSQERQSIIRFWLQNLR

SEQ ID NO: 784340 - protein, 87 aa, Homo sapiens
LDRESKANYSLKIEARDKAESGQQLFSVVTLKVFLDDVNDCSPAFIPSSYSVKVLEDLPVGTVIAWLETHDPDCAILWSMTIMGDLK

SEQ ID NO: 784341 - protein, 221 aa, Homo sapiens
RGREGTGADRKWGKKSGVIYCRDSDESSSPRQTTSVSQGPAAPLPGLFVQTDAADAIPPSRASGPPSVARVRRARTELGSGSSAGSAAPAATTSRGRRRHCCSSAEAETQTCYTSVKQVSSAEVRIGPMRLTQDPIQVLLIFAKEDSQSDGFWWACDRAGYRCNIARTPESALECFLDKHHEIIVIDHRQTQNFDAEAVCRSIRATNPSEHTVILAVVSRV

SEQ ID NO: 784342 - protein, 232 aa, Homo sapiens
AAAGAGGRAGEPGRGMGCAPSIHVSQSGVIYCRDSDESSSPRQTTSVSQGPAAPLPGLFVQTDAADAIPPSRASGPPSVARVRRARTELGSGSSAGSAAPAATTSRGRRRHCCSSAEAETQTCYTSVKQVSSAEVRIGPMRLTQDPIQVLLIFAKEDSQSDGFWWACDRAGYRCNIARTPESALECFLDKHHEIIVIDHRQTQNFDAEAVCRSIRATNPSEHTVILAVVSRV

SEQ ID NO: 784343 - protein, 67 aa, Homo sapiens
GISPEGTTRMSSTRWLELLCEQGNSKYLASFGDEKVNVIKRLNAITLTPTKTWCLGVDPGVALQSAS

SEQ ID NO: 784344 - protein, 145 aa, Homo sapiens
EGSRRLRADKKPPFGKASESFLGINRRTPTPPPEQTWDAVVFAKREGNLSRASGPGMPLQLHFQKGRAFRNGGGHQTIVFGGVSTGQPVTVSRGTSNKRSELPDGNAARSPRAAPPRLGVPQRSSIRSRTPESGAASRTAAAHHP

SEQ ID NO: 784345 - protein, 198 aa, Homo sapiens
MKKHVNEEVTEFLKFLQNSAKKCAQDYNMLSDDARLFTEKILRACIEQVKKYSEFYTLHEVTSLMGFFPFRVEMGLKLEKTLLALGSVKYVKTVFPSMPIKLQLSKDDIATIETSEQTAEAMHYDISKDPNAEKLVSRYHPQIALTSQSLFTLLNNHGPTYKEQWEIPVCIQVIPVAGSKPVKVIYINSPLPQKKMTM

SEQ ID NO: 784346 - protein, 278 aa, Homo sapiens
MSSKMVISEPGLNWDISPKNGLKTFFSRENYKDHSMAPSLKELRVLSNRRIGENLNASASSVENEPAVSSATQAKEKVKTTIGMVLLPKPRVPYPRFSRFSQREQRSYVDLLVKYAKIPANSKAVGINKNDYLQYLDMKKHVNEEVTEFLKFLQNSAKKCAQDYNMLSDDARLFTEKILRACIEQVKKYSEFYTLHEVTSLMGFFPFRVEMGLKLEKTLLALGSVKYVKTVFPSMPIKLQLSKDDIATIETSEQTAEAMHYDISKIQCEKLVPDIYLR

SEQ ID NO: 784347 - protein, 278 aa, Homo sapiens; identical to SEQ ID NO: 784346

SEQ ID NO: 784348 - protein, 34 aa, Homo sapiens
MSLLEHNIYIVGTQENIQGFDALVSFPSFFVNIL

SEQ ID NO: 784349 - protein, 249 aa, Homo sapiens
MAATLDLKSKEEKDAELDKRIEALRRKNEALIRRYQEIEEDRKKAELEGVAVTAPRKGRSVEKENVAVESEKNLGPSRRSPGTPRPPGASKGGRTPPQQGGRAGMGRASRSWEGSPGEQPRGGGAGGRGRRGRGRGSPHLSGAGDTSISDRKSKVGARQRLEPWLRFSVVCFCFFLLSDAHLSCVSIFQYLSLSLCIWLCFSLPPPPSPPPAPPLLVPPVPSLSRLELVCFSLSLSLLLLLPVFLFLLA

SEQ ID NO: 784350 - protein, 531 aa, Homo sapiens
MAATLDLKSKEEKDAELDKRIEALRRKNEALIRRYQEIEEDRKKAELEGVAVTAPRKGRSVEKENVAVESEKNLGPSRRSPGTPRPPGASKGGRTPPQQGGRAGMGRASRSWEGSPGEQPRGGGAGGRGRRGRGRGSPHLSGAGDTSISDRKSKEWEERRRQNIEKMNEEMEKIAEYERNQREGVLEPNPVRNFLDDPRRRSGPLEESERDRREESRRHGRNWGGPDFERVRCGLEHERQGRRAGLGSAGDMTLSMTGRERSEYLRWKQEREKIDQERLQRHRKPTGQWRREWDAEKTDGMFKDGPVPAHEPSHRYDDQAWARPPKPPTFGEFLSQHKAEASSRRRRKSSRPQAKAAPRAYSDHDDRWETKEGAASPAPETPQPTSPETSPKETPMQPPEIPAPAHRPPEDEGEENEGEEDEEWEDISEDEEEEEIEVEEGDEEEPAQDHQAPEAAPTGIPCSEQAHGVPFSPEEPLLEPQAPGTPSSPFSPPSGHQPVSDWGEEVELNSPRTTHLAGALSPGEAWPFESV

SEQ ID NO: 784351 - protein, 531 aa, Homo sapiens; identical to SEQ ID NO: 784350

SEQ ID NO: 784352 - protein, 301 aa, Homo sapiens
GLKRFCLPRASQSAGITGLSHHARPCPTSSVPCLVDRLSLIRFLTLTSPIFLILLLPCSPSCPLTRYLSPRFKDGPVPAHEPSHRYDDQAWARPPKPPTFGEFLSQHKAEASSRRRRKSSRPQAKAAPRAYSDHDDRWETKEGAASPAPETPQPTSPETSPKETPMQPPEIPAPAHRPPEDEGEENEGEEDEEWEDISEDEEEEEIEVEEGDEEEPAQDHQAPEAAPTGIPCSEQAHGVPFSPEEPLLEPQAPGTPSSPFSPPSGHQPVSDWGEEVELNSPRTTHLAGALSPGEAWPFESV

SEQ ID NO: 784353 - protein, 301 aa, Homo sapiens
MAATLDLKSKEEKDAELDKRIEALRRKNEALIRRYQEIEEDRKKAELEGVAVTAPRKGRSVEKENVAVESEKNLGPSRRSPGTPRPPGASKGGRTPPQQGGRAGMGRASRSWEGSPGEQPRGGGAGGRGRRGRGRGSPHLSGAGDTSISDRKSKEWEERRRQNIEKMNEEMEKIAEYERNQREGVLEPNPVRNFLDDPRRRSGPLEESERDRREESRRHGRNWGGPDFERVRCGLEHERQGRRAGLGSAGDMTLSMTGRERSEYLRWKQEREKIDQERLQRHRKPTGQWRREWDAEKTDGM

SEQ ID NO: 784354 - protein, 146 aa, Homo sapiens
FYFIFEKGSALSSRLQCGGMISAHCNLCLPGSSDSPASASRVAGITGARHHNRLIFFVETGFHNVGQTDLELLTSGDPPASASQGAGITSVSHRPRPVEHLKLLKRTLRFHWHEGARTTPGFQASVPSAWHLLIETRNEGLEAETA

SEQ ID NO: 784355 - protein, 586 aa, Homo sapiens
MAATLDLKSKEEKDAELDKRIEALRRKNEALIRRYQEIEEDRKKAELEGVAVTAPRKGRSVEKENVAVESVSSSLGCGTLRMGRGRGLRPGTQEPPAVLHQWVASILAACLPAPVTVFSPSPLFQEKNLGPSRRSPGTPRPPGASKGGRTPPQQGGRAGMGRASRSWEGSPGEQPRGGGAGGRGRRGRGRGSPHLSGAGDTSISDRKSKEWEERRRQNIEKMNEEMEKIAEYERNQREGVLEPNPVRNFLDDPRRRSGPLEESERDRREESRRHGRNWGGPDFERVRCGLEHERQGRRAGLGSAGDMTLSMTGRERSEYLRWKQEREKIDQERLQRHRKPTGQWRREWDAEKTDGMFKDGPVPAHEPSHRYDDQAWARPPKPPTFGEFLSQHKAEASSRRRRKSSRPQAKAAPRAYSDHDDRWETKEGAASPAPETPQPTSPETSPKETPMQPPEIPAPAHRPPEDEGEENEGEEDEEWEDISEDEEEEEIEVEEGDEEEPAQDHQAPEAAPTGIPCSEQAHGVPFSPEEPLLEPQAPGTPSSPFSPPSGHQPVSDWGEEVELNSPRTTHLAGALSPGEAWPFESV

SEQ ID NO: 784356 - protein, 304 aa, Homo sapiens
MAATLDLKSKEEKDAELDKRIEALRRKNEALIRRYQEIEEDRKKAELEGVAVTAPRKGRSVEKENVAVESVSSSLGCGTLRMGRGRGLRPGTQEPPAVLHQWVASILAACLPAPVTVFSPSPLFQEKNLGPSRRSPGTPRPPGASKGGRTPPQQGGRAGMGRASRSWEGSPGEQPRGGGAGGRGRRGRGRGSPHLSGAGDTSISDRKSKVGARQRLEPWLRFSVVCFCFFLLSDAHLSCVSIFQYLSLSLCIWLCFSLPPPPSPPPAPPLLVPPVPSLSRLELVCFSLSLSLLLLLPVFLFLLA

SEQ ID NO: 784357 - protein, 57 aa, Homo sapiens
WSVCVEYGMVDTELLGLTALTARCPWELIRPGGLGSHHLGLTGLRHLPCGQSRCAEM

SEQ ID NO: 784358 - protein, 99 aa, Homo sapiens
PPKPKPAKPKPAKHKPDKPKPAKPKPAKHKPDKLKPDKPKPAKPKPAKHKPDKLKPDKPKPAKHKPDKLKPDKPKPAKLKPAKPKLSLSPTLVGLSFSY

SEQ ID NO: 784359 - protein, 166 aa, Homo sapiens
  misc_feature (32)..(32): Xaa can be any naturally occurring amino acid
RPRPRPCGSHPGPARPGRAAVAVAEAGQPEAXAVPGRCSPRRRRAPSASPRPPRAPRATRRCPPAPRPAGAPGPGHCPGPSTPQAGLPETRAPRGGPGPLLGARQTASSTPRAAGGPRGSPPAPRSRGPGARGPRRDGRPARTAAGRLDWLRASCASRLKAPEPRH

SEQ ID NO: 784360 - protein, 122 aa, Homo sapiens
MMDGGRGSLNSAYLEGRLETAAVARKPRLGAPGSRPLLWLSDRPGAGPPEEEGARGGAQAAAGRRARAPGIAQPVRRAAAACPRAAVLSARRAADPQAGAKSPAPLAASMGQGLGEGGGGGR

SEQ ID NO: 784361 - protein, 55 aa, Homo sapiens [sequence omitted]

SEQ ID NO: 784362 - protein, 55 aa, Homo sapiens [sequence omitted]

SEQ ID NO: 784363 - protein, 123 aa, Homo sapiens [sequence omitted]

SEQ ID NO: 784364 - protein, 87 aa, Homo sapiens
WAASPGTGPGPSPTGAPEAPRTVATAPTSRKEDQDVSTPEQTFSKYPDVSKGCSDSKENYLQVNLCYWSHSFSVVICSTEFLFSSLP

SEQ ID NO: 784365 - protein, 37 aa, Homo sapiens
PWTTRRMEIPLRKKGKYEHQDVQQEIRNENTAIPTLA

SEQ ID NO: 784366 - protein, 136 aa, Homo sapiens
RSVAVNKGRLKRLGITHILNAAHGTGVYTGPEFYTGLEIQYLGVEVDDFPEVDISQHFRKASEFLDEALLTYRGKVLVSSEMGISRSAVLVVAYLMIFHNMAILEALMTVRKKRAIYPNEGFLKQLRELNEKLMEE

SEQ ID NO: 784367 - protein, 55 aa, Homo sapiens
MGISRSAVLVVAYLMIFHNMAILEALMTVRKKRAIYPNEGFLKQLRELNEKLMEE

SEQ ID NO: 784368 - protein, 146 aa, Homo sapiens [sequence omitted]

SEQ ID NO: 784369 - protein, 128 aa, Homo sapiens [sequence omitted]

SEQ ID NO: 784370 - protein, 109 aa, Homo sapiens
MAEQAELQGRNSSSSTKPWEGLIRIYHSVPRHSGLFPPSGRTHCLKSHLLLFFVLSSGIVIFPVGKIMDNGSRLAWWLTPVISALWEARQVETSLANMVKPCLYSKYKN

SEQ ID NO: 784371 - protein, 149 aa, Homo sapiens
MKIIFFFKQSLTVLPRLECNGTILAHCTLHLLSLSDSLASASQVVGITGTCHHAWLIFAFLVGMGFHQVDQAGLKLLASSDLPASVSQSAGITCMSHHDWPYCENNFDPMDLLKGSPGPLGVPELHLENPCYSLIKSLPIKCDSHFVSV

SEQ ID NO: 784372 - protein, 104 aa, Homo sapiens
HITDPEDLILSVHWVNFHAEHTCVTSTQIKEQNIASPRVPHRAPVVMTPQRGTTAATSKQLGSLLYLIEIRSYSMKPFVPGSRLNMTLVKFSTLFSTVVASSLA

SEQ ID NO: 784373 - protein, 112 aa, Homo sapiens
AGYPLSHLWMARLKECTVTHAHLGFESYRHPPLDAAIGLEPKSTCPSSCTYRYACSPSLKEFELAVAEQRATPLWHTLWWGTRTRELSLFTIMRTGWGNRPQHSFISTWSLV

SEQ ID NO: 784374 - protein, 75 aa, Homo sapiens
GWLGCARQLPGWLETCFPQANQVHTVKVDGGVCSSRKSPGSNYHSLVTLWSLPCFHRSLKLLNPDLCSAEHLFQR

SEQ ID NO: 784375 - protein, 98 aa, Homo sapiens
SSAPRQIGPRRKPKITASRKLLLKVGWGLQNWNSGLGQDKCQPAFSIFIRNPLLTLRCLKSSSLLFNLCSSEKAAVSYLDLGAEALTSHSDSAAAEIL

SEQ ID NO: 784376 - protein, 435 aa, Homo sapiens
MAPFGRNLLKTRHKNRSPTKDMDSEEKEIVVWVCQEEKLVCGLTKRTTSADVIQALLEEHEATFGEKRFLLGKPSDYCIIEKWRGSERVLPPLTRILKLWKAWGDEQPNMQFVLVKADAFLPVPLWRTAEAKLVQNTEKLWELSPANYMKTLPPDKQKRIVRKTFRKLAKIKQDTVSHDRDNMETLVHLIISQDHTIHQQVKRMKELDLEIEKCEAKFHLDRVENDGENYVQDAYLMPSFSEVEQNLDLQYEENQTLEDLSESDGIEQLEERLKYYRILIDKLSAEIEKEVKSVCIDINEDAEGEAASELESSNLESVKCDLEKSMKAGLKIHSHLSGIQKEIKYSDSLLQMKAKEYELLAKEFNSLHISNKDGCQLKENRAKESEVPSSNGEIPPFTQRVFSNYTNDTDSDTGISSNHSQDSETTVGDVVLLST

SEQ ID NO: 784377 - protein, 101 aa, Homo sapiens
LGHEFAASPICRCSMDAQFHLGQYSLSTHYAEVGRYLLSKCVNYKHASFNPRTVFEEWLGRIKHCGFQQWRPHLLMGCFKKKMAFEVGHGGSPCSPSTLGG

SEQ ID NO: 784378 - protein, 104 aa, Homo sapiens
TTGLNTTTASVLQFSIGSGSCRFSYSDPSIIVLYAKNNSADWIQLEKIRAPSNVSTIIHILYLPEDAKGENVQFQWKQENLRVGEVYEACWALDNILIINSAHR

SEQ ID NO: 784379 - protein, 51 aa, Homo sapiens
MGFHSQVEEGNACASERGTLTEETGRSSSPFSSSWAAPHGQLLMGSSSWAA

SEQ ID NO: 784380 - protein, 41 aa, Homo sapiens
WLSPKKLKTEGTGDTQTQGKHLSWLPQHRGRGRTLWKPSGA

SEQ ID NO: 784381 - protein, 96 aa, Homo sapiens
  misc_feature (34)..(34): Xaa can be any naturally occurring amino acid
CLALPSEMNPVPQMEMQKSPSSASPTLEAVDRNXSYSAIFGSSSQQSSLKDLAHRCLLKCGRNTFVCHKTSAGDWSLEEGGEKRRTSGEIVLLIGV

SEQ ID NO: 784382 - protein, 50 aa, Homo sapiens
MSFKKEMILVGHKDNTFARDNTFARDNTFARDNTFARDNTFARDNTFRAD

SEQ ID NO: 784383 - protein, 83 aa, Homo sapiens
QPGPARHPGTAVEAQHLSEEGPAQPGQETVPALPPLKGLLATPAPVLRQTSLRGQAYPEIVHSSVCPIPALQMFLRFGGRRSS

SEQ ID NO: 784384 - protein, 168 aa, Homo sapiens
SLSLDLSLTLSLGLPLTVSLTVSLAVSLSLSLTLSRYLCFSQRLCLSRCLFLSPSLAISLSLSVSDTLSLFLPSSPPWGFPVSFPSSPSLALSSPFSPSPHKLSPLASSPPSPSQLRLSMPAPSFPVPLPVIVLDPSLSSSLLPPARLSLALTAFSVDAAANSVVVVD

SEQ ID NO: 784385 - protein, 30 aa, Homo sapiens
MFSSLLWGLETTAEHTPSKQWPQEDHEELG

SEQ ID NO: 784386 - protein, 73 aa, Homo sapiens
RAAIMDTSRVQPIKLARVTKVLGRTGSQGQCTQVRVEFMDDTSRSIIRNVKGPVREGDVLTLLESEREARRLR

SEQ ID NO: 784387 - protein, 73 aa, Homo sapiens; identical to SEQ ID NO: 784386

SEQ ID NO: 784388 - protein, 40 aa, Homo sapiens
TEQLYYTPVFIPYLHIKEDQESERVYTFPSSNYLYLQARV

SEQ ID NO: 784389 - protein, 71 aa, Homo sapiens
DLRVASPKTRHLFSKVGSWDQVSRGRKSPFNAVHQQSRIMALSVSLTPSWLNDLSRSFLRASVSSSVKRAS

SEQ ID NO: 784390 - protein, 129 aa, Homo sapiens
MLARMVSISWPRDPPTSASQSAGITGMSHRARPSSAFLTKQCTVYISRQVLELPAGRKKGPPGMSDVKGKFQSWVQCFEWGRVAEVCLELFAEAICLHWWWYHLVYIGVSNLLASLGHIGRRRIVLSHT

SEQ ID NO: 784391 - protein, 82 aa, Homo sapiens
SFSVTPTLAILHGLRESSRKLCDESWGTLIWKKALMTGGANLPRMLFSISWDEDTEFLFHPVNVVNEGIEFPALIFLNRIQK

SEQ ID NO: 784392 - protein, 128 aa, Homo sapiens
AHATATVWSGLASAAALTARALLKRSLACAAAPQRCGWRRLLCSSLGSRGHGGQAHRGAHLRVVRYGTASVFGTPRLVASQIQHVPSGPAPRPGASHPATPCIQTLRQPLHLSPDIAVPGASSAGAGA

SEQ ID NO: 784393 - protein, 104 aa, Homo sapiens
MRATGRHLFSHRYGGYKSKVEGSAGLFALRPLLLDGRDPFWLCPLWPFLYEPVLYLWGLSASKYLFFFFQTVLLLFSRLECNGTISAHCNLCLPSSSDSRASAS

SEQ ID NO: 784394 - protein, 69 aa, Homo sapiens
QCAAAGTEVTWTWTVPVSDAGGQDATPEMISNRAGRRKGEDPGGGLVLGPQVLAEEVGLSAQMALRLAE

SEQ ID NO: 784395 - protein, 114 aa, Homo sapiens
PKVSSLNILVTKCTQRAGRVTWRQGTLGPRVVVFPGGPPVRSEGSRRPPHLPGFPRAFLCQEQLPQDPGIPGPPLPPPCSQEPPARCSDHRKQEPSGPLPEDGFCCQPEVLGLA

SEQ ID NO: 784396 - protein, 117 aa, Homo sapiens
SVRAQPHSCPASGTPSPCLERGEWLGGWGSRSENIPVEGPQAERKPGAEPDANNVFPPTQAGGRLAAPRRLESALTSLLCPYFRPWKNADAAEATGLLPGQPDRGFKFSFLLQENFP

SEQ ID NO: 784397 - protein, 80 aa, Homo sapiens
SCASPGFSPVLLRPQCPLPQWLLLTDLCSQSKRRPIKTHWAVISNSPSLGRERTQVMPERQAFNSHGGLRAWLLKTIARG

SEQ ID NO: 784398 - protein, 67 aa, Homo sapiens
LSAAVTCSSSYLVWYQDSASARLLLSNLLILGLDLSDDAVQVQIAVFANTQSYMDASHVPAGSTSAT

SEQ ID NO: 784399 - protein, 101 aa, Homo sapiens
RTLSGSMHTHTHTHTHILTHTHTRTHRVSLCLTLSLSQSLVPGVGLIVHPFLYEQIASLPHFCCVGLELVCPSWDVLGHISHYPSQATAFALSLNYRLWST

SEQ ID NO: 784400 - protein, 110 aa, Homo sapiens
MTPKLPKGGGELQGVNTRVHKACYEINDCIKQRGYYPPCWPQRYEFDERDDKRECCPQVSPERGWNTEGYTKVARVSEGVRTFDARSGGRELLFLSYRFSSQYGNPNKHI

SEQ ID NO: 784401 - protein, 120 aa, Homo sapiens
TGWKGSFCTETVSTCDPEHDPPHHCSRGATCISLPHGYTCFCPLGTTGIYCEQALSIRHPLSEGIGFPGGFGSLKVEKGKFNSGQASRSRGPFLMLHTLKPNQEFFSPREMVLTRTPCAV

SEQ ID NO: 784402 - protein, 173 aa, Homo sapiens
SPDPAAAEMLMPKKNRIAIYELLFKEGVMVAKKDVHMPKHPELADKNVPNLHVMKAMQSLKSRGYVKEQFAWRHFYWYLTNEGIQYLRDYLHLPPEIVPATLRRSRPETGRPRPKGLEGERPARLTRGEADRDTYRRSAVPPGADKKAEAGAGSATEFQFRGGFGRGRGQPPQ

SEQ ID NO: 784403 - protein, 173 aa, Homo sapiens; identical to SEQ ID NO: 784402

SEQ ID NO: 784404 - protein, 95 aa, Homo sapiens
MEMGDYWSLLSGKVRPGWPLHASPLFRKESERLTLRAVCLVALPLVQEQPPCESQLGTGRVGVAGWRAPQVLGGLELLDGLLLKLLKLGFPLTCV

SEQ ID NO: 784405 - protein, 42 aa, Homo sapiens
RKLDLGGESSNLPRRGKNSEVYQRARDQNQNSKAPTSQKWAN

SEQ ID NO: 784406 - protein, 279 aa, Homo sapiens
MCERSLYRAGYVGSLLNLQSPDSFYFSNLRPNGGQLAALPPISYPRGALPWAATPASCAPAQPAGATAFGGFSQPYLAGSGPLGLQPPTAKDGPEEQAKFYAPEAAAGPEERGRTRPSFAPESSLAPAVAALKAAKYDYAGVGRATPGSTTLLQGAPCAPGFKDDTKGPLNLNMTVQAAGVASCLRPSLPDGKRCPCSPGRPAVGGGPGEARKKRKPYTKQQIAELENEFLVNEFINRQKRKELSNRLNLSDQQVKIWFQNRRMKKKRVVLREQALALY

SEQ ID NO: 784407 - protein, 270 aa, Homo sapiens
MCERSLYRAGYVGSLLNLQSPDSFYFSNLRPNGGQLAALPPISYPRGALPWAATPASCAPAQPAGATAFGGFSQPYLAGSGPLGLQPPTAKDGPEEQAKFYAPEAAAGPEERGRTRPSFAPESSLAPAVAALKAAKYDYAGVGRATPGSTTLLQGAPCAPGFKDDTKGPLNLNMTVQAAGVASCLRPSLPDGLPWGAAPGRARKKRKPYTKQQIAELENEFLVNEFINRQKRKELSNRLNLSDQQVKIWFQNRRMKKKRVVLREQALALY

SEQ ID NO: 784408 - protein, 149 aa, Homo sapiens
MVRPERGWRPWGENLGNQFSNNFVINDSPFSKDQSDLGPCQWPQKKTKPISGESRCTGMALYRNGCIVVGTQHKRKTWDPLFKNYEFQDSNSRALKHTQGTSKHGALCTCLGCMPEASPVSVLPSYPQPQTHQPGIGEYWLSGLQPASS

SEQ ID NO: 784409 - protein, 173 aa, Homo sapiens
HAALRGPRDCVLPPLPSGLQSLLGPVSTSSLVLVPPLTPGLPPATLPGPSPPVPPRRWLQPVLGHQPERGCVPSLALPKPGVCVHLWEWLPEGLGAGVGRGGPCATFQAPAVAGACPSGSHAWASAPLAATCGGAGKPRLICCSNPFQRFSGRVATRVEFSLDAPSHLPPLCA

SEQ ID NO: 784410 - protein, 109 aa, Homo sapiens
MHIPCSAVHIIRISHPTAAGCPARALRQEVGQMQTSAPSLAYFRIPQGSLTSEAAWDPRPHLVCRPRLDRGNSQNSTISPSQPPRSPEWGLRPTCTLICGHAGTQQVQS

SEQ ID NO: 784411 - protein, 72 aa, Homo sapiens
MGSRRRTRQAMPSRTLDPFRIPQSSLDAHPLLSSPHHPYLSSHSRGLPSQGPAQLSPHPRAHLVLLLDDFWV

SEQ ID NO: 784412 - protein, 32 aa, Homo sapiens
MSNCYMPGPVLETDEAPVPMELRSEYVDRVSR

SEQ ID NO: 784413 - protein, 1075 aa, Homo sapiens
IRCNGSAGLLDARRSRDQVRVLSSGLSTVDPMGVALRKLTQWTAAGHGTGILEITPLNEAILKEIIVFVESFIYKHPQEAKFVFVEPLEWNTSLAPSAFESGYVVSETTVKSEEVDKNGQPLLFLSVPQIKIRSFGQLSRLLLIAKTGKLKEAQACVEANRDPIVKILGSDYNTMKENSIALNILGKITRDDDPESEIKMKIAMLLKQLDLHLLNHSLKHISLEISLSPMTVKKDIELLKRFSGKGNQTVLESIEYTSDYEFSNGCRAPPWRQIRGEICYVLVKPHDGETLCITCSAGGVFLNGGKTDDEGDVNYERKGSIYKNLVTFLREKSPKFSENMSKLGISFSEDQQKEKDQLGKAPKKEEAAALRKDISGSDKRSLEKNQINFWRNQMTKRWEPSLNWKTTVNYKGKGSAKEIQEDKHTGKLEKPRPSVSHGRAQLLRKSAEKIEETVSDSSSESEEDEEPPDHRQEASADLPSEYWQIQKLVKYLKGGNQTATVIALCSMRDFSLAQETCQLAIRDVGGLEVLINLLETDEVKCKIGSLKILKEISHNPQIRQNIVDLGGLPIMVNILDSPHKSLKCLAAETIANVAKFKRARRVVRQHGGITKLVALLDCAHDSTKPAQSSLYEARDVEVARCGALALWSCSKSHTNKEAIRKAGGIPLLARLLKTSHENMLIPVVGTLQECASEENYRAAIKAERIIENLVKNLNSENEQLQEHCAMAIYQCAEDKETRDLVRLHGGLKPLASLLNNTDNKERLAAVTGAIWKCSISKENVTKFREYKAIETLVGLLTDQPEEVLVNVVGALGECCQERENRVIVRKCGGIQPLVNLLVGINQALLVNVTKAVGACAVEPESMMIIDRLDGVRLLWSLLKNPHPDVKASAAWALCPCIKNAKDAGEMVRSFVGGLELIVNLLKSDNKEVLASVCAAITNIAKDQENLAVITDHGVVPLLSKLANTNNNKLRHHLAEAISRCCMWGRNRVAFGEHKAVAPLVRYLKSNDTNVHRATAQALYQLSEDADNCITMHENGAVKLLLDMVGSPDQDLQEAAAGCISNIRRLALATEKARYT

SEQ ID NO: 784414 - protein, 736 aa, Homo sapiens
MSKLGISFSEDQQKEKDQLGKAPKKEEAAALRKDISGSDKRSLEKNQINFWRNQMTKRWEPSLNWKTTVNYKGKGSAKEIQEDKHTGKLEKPRPSVSHGRAQLLRKSAEKIEETVSDSSSESEEDEEPPDHRQEASADLPSEYWQIQKLVKYLKGGNQTATVIALCSMRDFSLAQETCQLAIRDVGGLEVLINLLETDEVKCKIGSLKILKEISHNPQIRQNIVDLGGLPIMVNILDSPHKSLKCLAAETIANVAKFKRARRVVRQHGGITKLVALLDCAHDSTKPAQSSLYEARDVEVARCGALALWSCSKSHTNKEAIRKAGGIPLLARLLKTSHENMLIPVVGTLQECASEENYRAAIKAERIIENLVKNLNSENEQLQEHCAMAIYQCAEDKETRDLVRLHGGLKPLASLLNNTDNKERLAAVTGAIWKCSISKENVTKFREYKAIETLVGLLTDQPEEVLVNVVGALGECCQERENRVIVRKCGGIQPLVNLLVGINQALLVNVTKAVGACAVEPESMMIIDRLDGVRLLWSLLKNPHPDVKASAAWALCPCIKNAKDAGEMVRSFVGGLELIVNLLKSDNKEVLASVCAAITNIAKDQENLAVITDHGVVPLLSKLANTNNNKLRHHLAEAISRCCMWGRNRVAFGEHKAVAPLVRYLKSNDTNVHRATAQALYQLSEDADNCITMHENGAVKLLLDMVGSPDQDLQEAAAGCISNIRRLALATEKARYT

SEQ ID NO: 784415 - protein, 1044 aa, Homo sapiens
MGVALRKLTQWTAAGHGTGILEITPLNEAILKEIIVFVESFIYKHPQEAKFVFVEPLEWNTSLAPSAFESGYVVSETTVKSEEVDKNGQPLLFLSVPQIKIRSFGQLSRLLLIAKTGKLKEAQACVEANRDPIVKILGSDYNTMKENSIALNILGKITRDDDPESEIKMKIAMLLKQLDLHLLNHSLKHISLEISLSPMTVKKDIELLKRFSGKGNQTVLESIEYTSDYEFSNGCRAPPWRQIRGEICYVLVKPHDGETLCITCSAGGVFLNGGKTDDEGDVNYERKGSIYKNLVTFLREKSPKFSENMSKLGISFSEDQQKEKDQLGKAPKKEEAAALRKDISGSDKRSLEKNQINFWRNQMTKRWEPSLNWKTTVNYKGKGSAKEIQEDKHTGKLEKPRPSVSHGRAQLLRKSAEKIEETVSDSSSESEEDEEPPDHRQEASADLPSEYWQIQKLVKYLKGGNQTATVIALCSMRDFSLAQETCQLAIRDVGGLEVLINLLETDEVKCKIGSLKILKEISHNPQIRQNIVDLGGLPIMVNILDSPHKSLKCLAAETIANVAKFKRARRVVRQHGGITKLVALLDCAHDSTKPAQSSLYEARDVEVARCGALALWSCSKSHTNKEAIRKAGGIPLLARLLKTSHENMLIPVVGTLQECASEENYRAAIKAERIIENLVKNLNSENEQLQEHCAMAIYQCAEDKETRDLVRLHGGLKPLASLLNNTDNKERLAAVTGAIWKCSISKENVTKFREYKAIETLVGLLTDQPEEVLVNVVGALGECCQERENRVIVRKCGGIQPLVNLLVGINQALLVNVTKAVGACAVEPESMMIIDRLDGVRLLWSLLKNPHPDVKASAAWALCPCIKNAKDAGEMVRSFVGGLELIVNLLKSDNKEVLASVCAAITNIAKDQENLAVITDHGVVPLLSKLANTNNNKLRHHLAEAISRCCMWGRNRVAFGEHKAVAPLVRYLKSNDTNVHRATAQALYQLSEDADNCITMHENGAVKLLLDMVGSPDQDLQEAAAGCISNIRRLALATEKARYT

SEQ ID NO: 784416 - protein, 495 aa, Homo sapiens
MGVALRKLTQWTAAGHGTGILEITPLNEAILKEIIVFVESFIYKHPQEAKFVFVEPLEWNTSLAPSAFESGYVVSETTVKSEEVDKNGQPLLFLSVPQIKIRSFGQLSRLLLIAKTGKLKEAQACVEANRDPIVKILGSDYNTMKENSIALNILGKITRDDDPESEIKMKIAMLLKQLDLHLLNHSLKHISLEISLSPMTVKKDIELLKRFSGKGNQTVLESIEYTSDYEFSNGCRAPPWRQIRGEICYVLVKPHDGETLCITCSAGGVFLNGGKTDDEGDVNYERKGSIYKNLVTFLREKSPKFSENMSKLGISFSEDQQKEKDQLGKAPKKEEAAALRKDISGSDKRSLEKNQINFWRNQMTKRWEPSLNWKTTVNYKGKGSAKEIQEDKHTGKLEKPRPSVSHGRAQLLRKSAEKIEETVSDSSSESEEDEEPPDHRQEASADLPSEYWQIQKLVKYLKQKETSQNGRNKRWIRKQNTRVIRSMIFDVGKTS

SEQ ID NO: 784417 - protein, 280 aa, Homo sapiens
MGVALRKLTQWTAAGHGTGILEITPLNEAILKEIIVFVESFIYKHPQEAKFVFVEPLEWNTSLAPSAFESGYVVSETTVKSEEVDKNGQPLLFLSVPQIKIRSFGQLSRLLLIAKTGKLKEAQACVEANRDPIVKILGSDYNTMKENSIALNILGKITRDDDPESEIKMKIAMLLKQLDLHLLNHSLKHISLEISLSPMTVKKDIELLKRFSGKGNQTVLESIEYTSDYEFSNGCRAPPWRQIRGEICYVLVKPHDGETLCITCSAGGVFLNGVSKFLKT

SEQ ID NO: 784418 - protein, 108 aa, Homo sapiens
SCVPIGHMGFCMKATMSSPLNLVILLEIPPVNFYANNLSPLTPRPKVTRVMNRAIAHLFPLNVVVGAHLQKEAVYVEFQIWLFSLQGGGKDSVSLMFITVGQSLSGEG

SEQ ID NO: 784419 - protein, 103 aa, Homo sapiens [sequence omitted]

SEQ ID NO: 784420 - protein, 80 aa, Homo sapiens
AFGIWSGTEGTVSCPGGARCRAEAAHFSVRQPGRGGLGMAANSGAQGPSDEAAGPNLNSKSTVRGVCVQVHRPGRKAWVC

SEQ ID NO: 784421 - protein, 150 aa, Homo sapiens
MIKTLSKIGIQGAYLKVIEATYDRPTANIILNGEKLKSFPVRNRTRQGCRLSPLLSSIVLEVLARAIRQEKEIKDIQISKEEVKLSLSADNMIVYLENSKDYSGKLQELIKEFSKVFRYKINVHKSVTLLYTNSDQLENQIKNSTHFTIA

SEQ ID NO: 784422 - protein, 159 aa, Homo sapiens
QGGNKGPRLPALKQEPDSLFRPWGPRTLLLATRAGFLQASSTWEGWGGMGETGQPAGNTGASQTIASLWGLVPPQAGPGRSGVGPLGNLGPTVACIPGGCSHASQVTLTGWVPLPQTWVLRAGAPCWSPPARYSQARATARPGGTRGPCRGAEVRAVAG

SEQ ID NO: 784423 - protein, 41 aa, Homo sapiens
MTQCTTTQCTTTQCTTDTVHHDTVHHDTVHHDTVHHDTVHH

SEQ ID NO: 784424 - protein, 85 aa, Homo sapiens
VHRLKMVSFSRLIFMDLEIQDCCLFLARALRRMQRGGGGGGLGGEVERTIIRAGLCVGCLSWQRGTQSHLEPVSRHRLKMDIYVC

SEQ ID NO: 784425 - protein, 96 aa, Homo sapiens
PKPGLSPREGSYPSLVWPCKPLLLVHTCAREFFSWLVRAMNEGHWPVEGSARPGLACLKSSDQRGQWGSCPDHTAGRWSAWLHSLLPTSQLSWDGD

SEQ ID NO: 784426 - protein, 53 aa, Homo sapiens
GLYYDFMDKSFTAAMKQKKVRNLLSSFYESSMTWISGYTLKKENEMQNSFKMQ

SEQ ID NO: 784427 - protein, 159 aa, Homo sapiens
SAYAATVLRMDRELHLKLNSNYCKKSKAWWKLNVMVPDRQPQFALAPTCKRTGLGSGLGKRSKAEESQEEVAGGTRFPHVALGRGVLWRLWEETPRCSPGKPPLGRECPGEEDGPPQGVLCLFPALPAHSQDPHTHLSSLHPEDALIATASLFLVGTES

SEQ ID NO: 784428 - protein, 141 aa, Homo sapiens
MDMVKKACMSEDEREALRSSGACHISDILRGAAFEGKPGTSYCILHPYKEERGTALRHLCVLESACTALEDTSLTPLLGNGKTASFEWGPEKKRALLKIWIGRWASLLHRSNGLPGGLFGVGRTLYGISGKLQRKSCSTLS

SEQ ID NO: 784429 - protein, 129 aa, Homo sapiens
SCPSCLTALSVCYLLNCLPLAAESVGAASPTLSTRGLAERGITWTEAERASSWHGFSSGQQHRGLWKLVLLASAWRRGWKGPGRKSSVSILRWGKCKAHWGIGGSHVRPLHLPPPGPALDSDCPRIGNS

SEQ ID NO: 784430 - protein, 129 aa, Homo sapiens
PLGSSSHQSRGMDGVQPTPQAQDCLSTPQPQPDSHTAGNKAERNWRLLLGARHADVICVADPDWRKQTEKGRGRPTPQLQPPWFMVASIPFALRVIDQRFGSQCIPDDATNHERGHSTASRATVYITHR

SEQ ID NO: 784431 - protein, 171 aa, Homo sapiens
EGIALGTRGGLQACSAFCNSAGETPGKKLARANAEAGKRVTVSCGKHKRERGQRRSKRNKGLEDRSLLPCDLGMIGTAARPSVTMGKLPCWGKAPGSQDELNVIRFRSREGLDRRRSIALHKVRAACLFGDTLSPLMASSRLWILGTCDVAGLYLCEFDLWVDLWVFLCLT

SEQ ID NO: 784432 - protein, 72 aa, Homo sapiens
LELAAVQLVIGWCHRRRSVNGESPATRPTHTKAVTSSLGELGSPQGMRFIAKGPREVLNNEKSKDKGTEGLK

SEQ ID NO: 784433 - protein, 94 aa, Homo sapiens
RIQCFYMSQIGIDRSTRETLVLAFTDKHRHTTQNYTHFLHYRERRLNRTGEALGEDCQHEQLSRFTPAVPRRASQRRDNLDTAKRNPAKLQNTS

SEQ ID NO: 784434 - protein, 120 aa, Homo sapiens
MRPGIPQTETAAHCNTASDVVDWRLQQHRRLGPHLRRGDQCLQLLDLHRPSSSSCRQLALACASSFCEEPDIARDLRSHRQCVGCNTVGFGWGHGKPHGEPAPWLTRSVHDEWGWLMGNT

SEQ ID NO: 784435 - protein, 221 aa, Homo sapiens
MEAVLIGNEKLHDVGNKAKNNATNNTTGCGDRTQHDDKDLRRTTRVGTTWHPSRDTANTVGQGDPQEDNRGDQTDAWRMLNQSKRPGRYTLRSWTQPREGREAKKGQQTEDRGGIQYARTGDGSKQGQAETGEKSSEEGEQDRKLRTEKQKRGQVQEAKTKTQNETREETKHRKKESKNERESRLGRKEEEQAKRDNKDSKGQPKDSRNNTKRRNRKSKET

SEQ ID NO: 784436 - protein, 115 aa, Homo sapiens
ACTPQLVLPFSNDSRFLLSSLHLPPLSITCSALIRIQFSEKWNSRITDLRKQVEELSERKYSVSKLEKSCNSLFMSIYTMELLFHHGGTVDKPRAAGESCHPYTSFLVRYFVVSV

SEQ ID NO: 784437 - protein, 264 aa, Homo sapiens [sequence omitted]

SEQ ID NO: 784438 - protein, 136 aa, Homo sapiens
ESGRCMEPGDSWRRRGSTWKGHSLVSLHIANVSHHIPGSLPDLLPGQPRNPRATWGWACSSCSLRSLALLALHLLEEGAGTSPQGPVSAFSCLNSMEKAWRSMGKTPFILGWSGLEARSSFLNPAALPFSLPCTQG

SEQ ID NO: 784439 - protein, 40 aa, Homo sapiens
NTGTLAGGIPAVSCVCTCVHVASPAYSHPADLMRTHPRAA

SEQ ID NO: 784440 - protein, 205 aa, Homo sapiens
MEGNGPAAVHYQPASPPRDACVYSSCYCEENIWKLCEYIKNHDQYPLEECYAVFISNERKMIPIWKQQARPGDGPVIWDYHVVLLHVSSGGQNFIYDLDTVLPFPCLFDTYVEDAFKSDDDIHPQFRRKFRVIRADSYLKNFASDRSHMKDSSGNWREPPPPYPCIETGDSKMNLNDFISMDPKVGWGAVYTLSEFTHRFGSKNC

SEQ ID NO: 784441 - protein, 206 aa, Homo sapiens
AVRRVLDPTSGPVGLPPARALAQLAGHGSEENIWKLCEYIKNHDQYPLEECYAVFISNERKMIPIWKQQARPGDGPVIWDYHVVLLHVSSGGQNFIYDLDTVLPFPCLFDTYVEDAFKSDDDIHPQFRRKFRVIRADSYLKNFASDRSHMKDSSGNWREPPPPYPCIETGDSKMNLNDFISMDPKVGWGAVYTLSEFTHRFGSKNC

SEQ ID NO: 784442 - protein, 196 aa, Homo sapiens
MEGNGPAAVHYQPASPPRDACVYSSCYCEENIWKLCEYIKNHDQYPLEECYAVFISNERKMIPIWKQQARPGDGPVIWDYHVVLLHVSSGGQNFIYDLDTVLPFPCLFDTYVEDAFKSDDDIHPQFRRKFRVIRADSYLKNFASDRSHMKDSSGNWREPPPPYPCIETGGINPVDNFLTFKKIKGPSPYYYCLAFI

SEQ ID NO: 784443 - protein, 205 aa, Homo sapiens
MEGNGPAAVHYQPASPPRDACVYSSCYCEENIWKLCEYIKNHDQYPLEECYAVFISNERKMIPIWKQQARPGDGPVIWDYHVVLLHVSSGGQSFIYDLDTVLPFPCLFDTYVEDAIKSDDDIHPQFRRKFRVICADSYLKNFASDRSHMKDSSGNWREPPPPYPCIETGDSKMNLNDFISMDPKVGWGAVYTLSEFTHRFGSKNC

SEQ ID NO: 784444 - protein, 240 aa, Homo sapiens
AVRRVLDPTSGPVGLPPARALAQLAGHGSEENIWKLCEYIKNHDQYPLEECYAVFISNERKMIPIWKQQARPGDGPVIWADPQKPPLLLVWSRSLQTFSSAFTCMQMYFCNAHDYHVVLLHVSSGGQNFIYDLDTVLPFPCLFDTYVEDAFKSDDDIHPQFRRKFRVIRADSYLKNFASDRSHMKDSSGNWREPPPPYPCIETGDSKMNLNDFISMDPKVGWGAVYTLSEFTHRFGSKNC

SEQ ID NO: 784445 - protein, 187 aa, Homo sapiens
MEGNGPAAVHYQPASPPRDACVYSSCYCEENIWKLCEYIKNHDQYPLEECYAVFISNERKMIPIWKQQARPGDGPVIWDYHVVLLHVSSGGQNFIYDLDTVLPFPCLFDTYVEDAFKSDDDIHPQFRRKFRVIRADSYLKNFASDRSHMKDSSGNWREPPPPYPCIETGDSKMNLNDFISMDPKMKW

SEQ ID NO: 784446 - protein, 221 aa, Homo sapiens
LSPRAPPTPRREPTRATTSPPFPTSGPVGLPPARALAQLAGHGSEENIWKLCEYIKNHDQYPLEECYAVFISNERKMIPIWKQQARPGDGPVIWDYHVVLLHVSSGGQSFIYDLDTVLPFPCLFDTYVEDAIKSDDDIHPQFRRKFRVICADSYLKNFASDRSHMKDSSGNWREPPPPYPCIETGDSKMNLNDFISMDPKVGWGAVYTLSEFTHRFGSKNC

SEQ ID NO: 784447 - protein, 205 aa, Homo sapiens; identical to SEQ ID NO: 784440

SEQ ID NO: 784448 - protein, 240 aa, Homo sapiens; identical to SEQ ID NO: 784444

SEQ ID NO: 784449 - protein, 108 aa, Homo sapiens
MEGNGPAAVHYQPASPPRDACVYSSCYCEENIWKLCEYIKNHDQYPLEECYAVFISNERKMIPIWKQQARPGDGPVIWADPQKPPLLLVWSRSLQTFSSAFTCMQMYF

SEQ ID NO: 784450 - protein, 205 aa, Homo sapiens; identical to SEQ ID NO: 784440

SEQ ID NO: 784451 - protein, 206 aa, Homo sapiens; identical to SEQ ID NO: 784441

SEQ ID NO: 784452 - protein, 188 aa, Homo sapiens
AVRRVLDPTSGPVGLPPARALAQLAGHGSEENIWKLCEYIKNHDQYPLEECYAVFISNERKMIPIWKQQARPGDGPVIWDYHVVLLHVSSGGQNFIYDLDTVLPFPCLFDTYVEDAFKSDDDIHPQFRRKFRVIRADSYLKNFASDRSHMKDSSGNWREPPPPYPCIETGDSKMNLNDFISMDPKMKW

SEQ ID NO: 784453 - protein, 73 aa, Homo sapiens
GCTASFRSYVWSSRSSSGPGPGPASRPWKVMAPLLSTTSRPAPRGTPASTAAATVKKIFGSSVNTSKTMTSIL

SEQ ID NO: 784454 - protein, 72 aa, Homo sapiens
SPASLQEGGRRVRVREEMWQQKQRPEGCGARSQGTQAPLETEKGKEWILPWSLQVEHSQVNPFLTPDTSRMW

SEQ ID NO: 784455 - protein, 79 aa, Homo sapiens
SSRLKAALTMTEKDPTAKLIIVKCQNPEDKERGASESLGYCKYLGIQRANKHEQLGDNGTTDDSRNQLKRLFGLEFFCF

SEQ ID NO: 784456 - protein, 109 aa, Homo sapiens
MSVKSWDITRKSSSSRLIPEWKNLKFLINKILKDIKNDEEPKNDVVLLSDWPETLYRESHHPQNKPFVCFYYSIKVNCFVSLNWMEPCGKMQARNYRRNHSGPTAEYSS

SEQ ID NO: 784457 - protein, 119 aa, Homo sapiens
FFFEFCSITSLVLYFFSLDLYRQEIIGEITLGQLLNIQAEDIQSLLIHVEQQLNENLTLLQREKSFTFSFDIPWSEELKVFSEDMCIPLSEPVKITKPKKRKRHFQARSRKLSMYRVIY

SEQ ID NO: 784458 - protein, 150 aa, Homo sapiens
ACDGSQVVMAPRFPSPGTPGLSSPTCLYSAPCSTNAPIPIHSAARVRNPLGAADPWLPASSPCACSLTPVTAPLHFRWSPDPLGCTPPSLPTLRPKSPALSHSAADPLGRGLRTVLGASVATCPSRLLSSSAQGDPAMACSFLKRAQSGT

SEQ ID NO: 784459 - protein, 195 aa, Homo sapiens
PPATQHTETLHFSPALSLLLPFLYPLPGIHLGTSSLLHASRSPSSRVKPDPILESSHFPSPGTPGLSSPTCLYSAPCSTNAPIPIHSAARVRNPLGAADPWLPASSPCACSLTPVTAPLHFRWSPDPLGCTPPSLPTLRPKSPALSHSAADPLGRGLRTVLGASVATCPSRLLSSSAQGDPAMACSFLKRAQSGT

SEQ ID NO: 784460 - protein, 183 aa, Homo sapiens
PICTMRTKLCPLRLFPALTHCDSEILNPIAVSSGESRPCLMGAPPFPPPPHLTLQWLWESTHIFWKTDPHAQACPCMTAHSSGPGTSSCGQRQGDEGPVSAKAPSGGWHPSSPSQQWRKPLGLPQGSRLGWSQRAGPRVKVITAERGPKGSPCLVTVNSDCDDDDCDKGTRGRCQSSRLCRGT

SEQ ID NO: 784461 - protein, 66 aa, Homo sapiens
GHLRSREVQHLLSIAPCVGLNQGRSSDLGICMLRTGYLSSVWCETASVRSLDLGAGSPGLRSFFWG

SEQ ID NO: 784462 - protein, 352 aa, Homo sapiens
MKPALLEVMRMNRICRMVLATCLGSFILVIFYFQSMLHPVMRRNPFGVDICCRKGSRSPLQELYNPIQLELSNTAVLHQMRRDQVTDTCRANSATSRKRRVLTPNDLKHLVVDEDHELIYCYVPKVACTNWKRLMMVLTGRGKYSDPMEIPANEAHVSANLKTLNQYSIPEINHRLKSYMKFLFVREPFERLVSAYRNKFTQKYNISFHKRYGTKIIKRQRKNATQEALRKGDDVKFEEFVAYLIDPHTQREEPFNEHWQTVYSLCHPCHIHYDLVGKYETLEEDSNYVLQLAGVGSYLKFPTYAKSTRTTDEMTTEFFQNISSEHQTQLYEVYKLDFLMFNYSVPSYLKLE

SEQ ID NO: 784463 - protein, 273 aa, Homo sapiens
MRRDQVTDTCRANSATSRKRRVLTPNDLKHLVVDEDHELIYCYVPKVACTNWKRLMMVLTGRGKYSDPMEIPANEAHVSANLKTLNQYSIPEINHRLKSYMKFLFVREPFERLVSAYRNKFTQKYNISFHKRYGTKIIKRQRKNATQEALRKGDDVKFEEFVAYLIDPHTQREEPFNEHWQTVYSLCHPCHIHYDLVGKYETLEEDSNYVLQLAGVGSYLKFPTYAKSTRTTDEMTTEFFQNISSEHQTQLYEVYKLDFLMFNYSVPSYLKLE

SEQ ID NO: 784464 - protein, 352 aa, Homo sapiens; identical to SEQ ID NO: 784462

SEQ ID NO: 784465 - protein, 395 aa, Homo sapiens
FFATGCLEFIFRLVPGAQFQVSGKLRVLGPGGRERGSHWFLVSAVLMRRSACCSRLVYRVGGGRWEGIFYFQSMLHPSMLHPVMRRNPFGVDICCRKGSRSPLQELYNPIQLELSNTAVLHQMRRDQVTDTCRANSATSRKRRVLTPNDLKHLVVDEDHELIYCYVPKVACTNWKRLMMVLTGRGKYSDPMEIPANEAHVSANLKTLNQYSIPEINHRLKSYMKFLFVREPFERLVSAYRNKFTQKYNISFHKRYGTKIIKRQRKNATQEALRKGDDVKFEEFVAYLIDPHTQREEPFNEHWQTVYSLCHPCHIHYDLVGKYETLEEDSNYVLQLAGVGSYLKFPTYAKSTRTTDEMTTEFFQNISSEHQTQLYEVYKLDFLMFNYSVPSYLKLE

SEQ ID NO: 784466 - protein, 106 aa, Homo sapiens
GREATPILPLSLAQLCPAPPGLRSARRGPCSCAPGALPGHPGPRSQDKAMKPALLEVMRMNRICRMVLATCLGSFILVIFYFQSMLHPGRGRVSVVLLDIFFSLAL

SEQ ID NO: 784467 - protein, 117 aa, Homo sapiens
PQSTTSKTSALSLWLAGGSEQASSSIPLPLCKPPQTGTDCLQQSRRAGEAETPGQGYSQHHTLSPMTGSSPQCYGKAGLSSGNRRWGGDVTGRWQWDPQHLSARSVPDCMLLTRPRI

SEQ ID NO: 784468 - protein, 84 aa, Homo sapiens
PSIGSPGLMPQVTCALSLALPAPRHDGYRCLCEAVLTAHSVPLHPTPSVPLRGRLFALPPIPGFFRLRAQRKAADTKKQLWGVW

SEQ ID NO: 784469 - protein, 35 aa, Homo sapiens
KLRHLCNAGDRILPNLIKNTLMEKYRPGYRKNSKE

SEQ ID NO: 784470 - protein, 183 aa, Homo sapiens
VQQIGILKPHPAYVQLLEKATEPTLTFEAVDVPMFCPPLPWTSPHSGAFLLSPTKLMRTVEGATQHQELLETCPPTALHGALDALAQLGNCAWRVNGRVLDLVLQLFQAKGCPYLGVPAPPSEAPQPPEAHLPHSAAPARKAELHRELAHCQKVAREMHSLRAEALYRLSLAQHLRDRVFWRP

SEQ ID NO: 784471 - protein, 110 aa, Homo sapiens
VGSSGRGVCAGVDESVHLCKKGWMREWNSDWGLGSEKGCQPSVVSRSFQAQVWCVGRLGEKVGPPTSLDTQEASGDPGQFLQEDMDAFGVYLLYSFLPHHAVACTACAGN

SEQ ID NO: 784472 - protein, 139 aa, Homo sapiens
QRCLARLHALHIFVERVISILVECIIQPIMPLIKSFFSHVTNLLFKIFYLPTRKNDLIFVPFPSQKKKKNYLCHMRCDKNWQPFPEIFLQRFTMCYIEKRTKSVISVYEITRLFSCPLIKVHLILTTQDKRDSKGHEFH

SEQ ID NO: 784473 - protein, 45 aa, Homo sapiens
ELGTPATASDEDCLYALYDATYETKRARRRTWCLSSGPLSLCPLR

SEQ ID NO: 784474 - protein, 117 aa, Homo sapiens
LEKRRDVQAEETRCCDKGVDPQGLGGPARELGLHPEEQENALKTAGTGAAWPDVFQRENSGSRLYSSQCPQFLDEETVDLSGAVICPRSSGWVVSIPSFCPRAPFTTPCYHPESSHC

SEQ ID NO: 784475 - protein, 330 aa, Homo sapiens
MLPDWKSSLILMAYIIIFLTGLPANLLALRAFVGRIRQPQPAPVHILLLSLTLADLLLLLLLPFKIIEAASNFRWYLPKVVCALTSFGFYSSIYCSTWLLAGISIERYLGVAFPVQYKLSRRPLYGVIAALVAWVMSFGHCTIVIIVQYLNTTEQVRSGNEITCYENFTDNQLDVVLPVRLELCLVLFFIPMAVTIFCYWRFVWIMLSQPLVGAQRRRRAVGLAVVTLLNFLVCFGPYNVSHLVGYHQRKSPWWRSIAVVFSSLNASLDPLLFYFSSSVVRRAFGRGLQVLRNQGSSLLGRRGKDTAEGTNEDRGVGQGEGMPSSDFTTE

SEQ ID NO: 784476 - protein, 80 aa, Homo sapiens
PLRYGNRGVAGRLQLVIQPPGTDCRDPTPDPPRLGCQEGQRICTSELCALSQALDRLCSRSPSFEQGLTEEPALPGCCSK

SEQ ID NO: 784477 - protein, 108 aa, Homo sapiens
PPRVSENNKVQNIDYSESIPFRILFGHAKVDPDYPVTIVTSSLSSVLTVNIKTIHGRVRWLTPVIPALWEAKAGGLPELRSSGPAWATWETLSLLKYKKLARHGGVRL

SEQ ID NO: 784478 - protein, 106 aa, Homo sapiens
MAEIASGAWLPGLPRTQCILINKKEGPPPLTVPARVGKESTNLANFNDGKRFLSKSYLKTTPKPEFLQLLPGNTEIREMRQAGVEGAEEDVGTQERKRKWMGSSVS

SEQ ID NO: 784479 - protein, 103 aa, Homo sapiens
EVIRGSPLFPAQLGNRGQRFTHSTQRGIPQIFLSAWDVPGPMPAVAWLTPPPGLQPHGRGPQGQVTKKQVTWSCDPCSEENTGGGGGGSSGQACEKGGAPQRQ

SEQ ID NO: 784480 - protein, 78 aa, Homo sapiens
SNMIRLELVPGSSPLSLIIREMQIKTTMAYHLTPVRMVIIKKSTPGMVFVHQVRPPEVGTQHLQLALGPSLVVHDFVV

SEQ ID NO: 784481 - protein, 74 aa, Homo sapiens
PARVHWLLLALVLAWLSGQRMPPVSRPRVAAGTRETLPFEPMLQGLEAWVLTPGPLLCPQRLPSQAQYPCLPQP

SEQ ID NO: 784482 - protein, 84 aa, Homo sapiens
VTDSSEAAHLLPRLPLQVSPPLQLLVSLPGEPPGLIPRMRLSSGPGPPSPLTISLPEPSRYVPNSKSLSSPGCPQSFPYLQPDA

SEQ ID NO: 784483 - protein, 91 aa, Homo sapiens
RTLDEPERRQTPPVMPPPVRCPQQPPSSLWALKELKPQSLSFTMAETRRPLPGGTSPVSLCHPGWSAVAQSQLTANSVPRVHAILLPQPPE

SEQ ID NO: 784484 - protein, 93 aa, Homo sapiens
PGWGCPHPDPSSSGSAGRRSAAAVSVLLPWDEVAAQHDRRRQQQLEGAEPCHPTSTCHALLTQFMGFALFSPLLNKVHINNSAQLCCGTNNLE

SEQ ID NO: 784485 - protein, 108 aa, Homo sapiens
TGWIKVGMGEGVEGELGGRGLCGTETPSRDGEKGCWPPKLPGLILFWLVSAGEVKGPKAWIWRGGNMERWGYGEAGIRRGGDKESGPAAPLVNQNTFSGLFPGWREGI

SEQ ID NO: 784486 - protein, 95 aa, Homo sapiens
MGTHRKENATGTHRGRTPGEHTEERTPREHNAGELQVNARRGERLLNARGWRTPVNAGERTGKRTPREHTGETPHETIQQPRRLIRPLNLVVVVD

SEQ ID NO: 784487 - protein, 105 aa, Homo sapiens
PGCSRCRTAPGRRKGCTTSLQTLLPPAASPPPCGSPRDFVPYSLLSPGPGQRRRCWGFHQYPPTSPRGGKGRKVSGQVQRTDSYVSNSPGSFPGPPQAEQVVWMS

SEQ ID NO: 784488 - protein, 82 aa, Homo sapiens
NYPPMRHTLLPRPDRTRRPCVQHRCVHLRLRVHADVSTIIYNSPHGRQLMMDTQHVVRPHSGVLLSHKNERRSDRRYSEDEP

SEQ ID NO: 784489 - protein, 103 aa, Homo sapiens
TKPKTEERKCRRKEKMKRGRKEKSTPQLGHFHKIERSRATPSSSARPARPAGPWSQPFGRGERRAAEKSSLFITTDLTAAIVAATEFAPVGRTKAAGAHFTKK

SEQ ID NO: 784490 - protein, 124 aa, Homo sapiens
GGVWRMFQRPEPTGVGCGGEGVPRFHPSAPTHQESQAGCCRVMRRCADERRPESSSGRKDGPLSTSQHEAHWHRTPPPPAVLAAQKHPAPASHPEVSPPYGCPQPPLPNGSVGPLVLLLVHWNS

SEQ ID NO: 784491 - protein, 191 aa, Homo sapiens
CQASQHRPLPFAVIAMQGKSPSSQADVLHKAARTCNLATSIHHLGSPLRPDPCLVIKKYLVMAGDPPGDWMGDGGSDDGGVSEDSGSENGGKDRCEGEGKGGSKDGSEGRSKDEGEDKGEVEGEDKGEVEGEDGGEDGEQEEGEDRSEVGEENRREDRDEDGGERGTVSEKRVRMEGKIEVRKGEQRGGWR

SEQ ID NO: 784492 - protein, 82 aa, Homo sapiens
MDLGYPRHSVQFKWYVDGVEVHNAKTKPREEQYNSTFRVVSVLTVLHQDWLNGKEYKCKVSNKALPAPIEKTISKTKGGTRG

SEQ ID NO: 784493 - protein, 67 aa, Homo sapiens
HSGPNSPHETQRLPSAAEEQGGINGIPNPRESSPRMGANFRPIVTRWPHLYCSPFSEDLLKATWCLW

SEQ ID NO: 784494 - protein, 105 aa, Homo sapiens
MYRPTHHWGMYRTPHRGTARDGGCTDPPIVAQPGVRGVQTPPLWHSQGWGVYRPTHHGMPQMPRQREWVVGELATASLWAQALSTHLAVNPPDPPRAPALPCHPA

SEQ ID NO: 784495 - protein, 47 aa, Homo sapiens
HLFVMPSLISALNYTLCSREAGSIKKSIDGGGGGGLHRFEVDSNPDN

SEQ ID NO: 784496 - protein, 80 aa, Homo sapiens
SNTHSSTFNVRAGIALNNHFVKIISWYSDEFGYSNKVVDLMAHMASKRKTTRPPAPERAWEEERGRHCWGVPATLSPPLH

SEQ ID NO: 784497 - protein, 135 aa, Homo sapiens
HWKEKERRKKERKKGRKERKKERKKERKKKKEKKEKERKRKKEGRKERKREKGRKERRKEGRIAGRLRQENGANPGGRACSEPRSRHCTPAWATERDSVSKKRERKRERKEGRKRKERKKERNGRPGREFSSSSR

SEQ ID NO: 784498 - protein, 90 aa, Homo sapiens
WVDRGLWVDRGLWVDRGLWVDRGLWVDRGLWVERGLWVDRAFLSDIWQLWASILSAQHWIPVTSRLSAADSSVLSFMPLSNHPSIRSFIQ

SEQ ID NO: 784499 - protein, 105 aa, Homo sapiens
STTTTKFAAASSCVPGQGGHGVARSRERVKRLVLVGPLGAFVMRGGENPLQQCKQGSDIIHICLCRKCFRHCGDTGVAVERLPGRPLQLSRQEVVGAGTAAGLDL

SEQ ID NO: 784500 - protein, 743 aa, Homo sapiens
MFTWASVLPERLPVLVLCRLARPTGLGVDPNEGAQCRPCCVQAAVGNVCLRKSVPRWPRVVCHRPAPITWARGCCQMPVFPCRPRSRKARCKLGMLELLPWSVKALIIDGSYWRSIPKYPKVESLLGTIMRNGNLGPLQSKAHLVPMFKIRLRGPFGVRSKEGKGLMQVFPCGLDLVHGVQSPFWGRVSRFLVYTYIQASAPPSGDRAHSPHCPTPRARDTRPATMTSSKIEMPGEVKADPAALMASLHLLPSPTPNLEIKYTKIFINNEWQNSESGRVFPVYNPATGEQVCEVQEADKADIDKAVQAARLAFSLGSVWRRMDASERGRLLDKLADLVERDRAVLATMESLNGGKPFLQAFYVDLQGVIKTFRYYAGWADKIHGMTIPVDGDYFTFTRHEPIGVCGQIIPWNFPLLMFAWKIAPALCCGNTVVIKPAEQTPLSALYMGALIKEAGFPPGVINILPGYGPTAGAAIASHIGIDKIAFTGSTEVGKLIQEAAGRSNLKRVTLELGGKSPNIIFADADLDYAVEQAHQGVFFNQGQCCTAGSRIFVEESIYEEFVRRSVERAKRRIVGSPFDPTTEQGPQIDKKQYNKILELIQSGVAEGAKLECGGKGLGRKGFFIEPTVFSNVTDDMRIAKEEIFGPVQEILRFKTMDEVIERANNSDFGLVAAVFTNDINKALTVSSAMQAGTVWINCYNALNAQSPFGGFKMSGNGREMGEFGLREYSEVKTVTVKIPQKNS

SEQ ID NO: 784501 - protein, 743 aa, Homo sapiens; identical to SEQ ID NO: 784500

SEQ ID NO: 784502 - protein, 743 aa, Homo sapiens; identical to SEQ ID NO: 784500

SEQ ID NO: 784503 - protein, 743 aa, Homo sapiens; identical to SEQ ID NO: 784500

SEQ ID NO: 784504 - protein, 669 aa, Homo sapiens
MFTWASVLPERLPVLVLCRLARPTGLGVDPNEGAQCRPCCVQAAVGNVCLRKSVPRWPRVVCHRPAPITWARGCCQMPVFPCRPRSRKARCKLGMLELLPWSVKALIIDGSYWRSIPKYPKVESLLGTIMRNGNLGPLQSKAHLVPMFKIRLRGPFGVRSKEGKGLMQVFPCGLDLVHGVQSPFWGRVSRFLVYTYIQASAPPSGDRAHSPHCPTPRARDTRPATMTSSKIEMPGEVKADPAALMASLHLLPSPTPNLEIKYTKIFINNEWQNSESGRVFPVYNPATGEQVCEVQEADKADIDKAVQAARLAFSLGSVWRRMDASERGRLLDKLADLVERDRAVLATMESLNGGKPFLQAFYVDLQGVIKTFRYYAGWADKIHGMTIPVDGDYFTFTRHEPIGVCGQIIPWNFPLLMFAWKIAPALCCGNTVVIKPAEQTPLSALYMGALIKEAGFPPGVINILPGYGPTAGAAIASHIGIDKIAFTGSTEVGKLIQEAAGRSNLKRVTLELGGKSPNIIFADADLDYAVEQAHQGVFFNQGQCCTAGSRIFVEESIYEEFVRRSVERAKRRIVGSPFDPTTEQGPQIDKKQYNKILELIQSGVAEGAKLECGGKGLGRKGFFIEPTVFSNVTDDMRIAKEEIFGPVQEILRFKTSMWNMGNIYIAFCI

SEQ ID NO: 784505 - protein, 383 aa, Homo sapiens
MFTWASVLPERLPVLVLCRLARPTGLGVDPNEGAQCRPCCVQAAVGNVCLRKSVPRWPRVVCHRPAPITWARGCCQMPVFPCRPRSRKARCKLGMLELLPWSVKALIIDGSYWRSIPKYPKVESLLGTIMRNGNLGPLQSKAHLVPMFKIRLRGPFGVRSKEGKGLMQVFPCGLDLVHGVQSPFWGRVSRFLVYTYIQASAPPSGDRAHSPHCPTPRARDTRPATMTSSKIEMPGEVKADPAALMASLHLLPSPTPNLEIKYTKIFINNEWQNSESGRVFPVYNPATGEQVCEVQEADKADIDKAVQAARLAFSLGSVWRRMDASERGRLLDKLADLVERDRAVLATMESLNGGKPFLQAFYVDLQGVIKTFRYYAGWASRSF

SEQ ID NO: 784506 - protein, 227 aa, Homo sapiens
MRTWLFPLVVDYAVEQAHQGVFFNQGQCCTAGSRIFVEESIYEEFVRRSVERAKRRIVGSPFDPTTEQGPQIDKKQYNKILELIQSGVAEGAKLECGGKGLGRKGFFIEPTVFSNVTDDMRIAKEEIFGPVQEILRFKTMDEVIERANNSDFGLVAAVFTNDINKALTVSSAMQAGTVWINCYNALNAQSPFGGFKMSGNGREMGEFGLREYSEVKTVTVKIPQKNS

SEQ ID NO: 784507 - protein, 422 aa, Homo sapiens [sequence omitted]

SEQ ID NO: 784508 - protein, 743 aa, Homo sapiens; identical to SEQ ID NO: 784500

SEQ ID NO: 784509 - protein, 758 aa, Homo sapiens
  misc_feature (701)..(701): Xaa can be any naturally occurring amino acid
  misc_feature (705)..(705): Xaa can be any naturally occurring amino acid
  misc_feature (707)..(708): Xaa can be any naturally occurring amino acid
  misc_feature (713)..(713): Xaa can be any naturally occurring amino acid
  misc_feature (716)..(716): Xaa can be any naturally occurring amino acid
  misc_feature (720)..(722): Xaa can be any naturally occurring amino acid
  misc_feature (724)..(724): Xaa can be any naturally occurring amino acid
  misc_feature (726)..(727): Xaa can be any naturally occurring amino acid
  misc_feature (729)..(729): Xaa can be any naturally occurring amino acid
  misc_feature (732)..(732): Xaa can be any naturally occurring amino acid
  misc_feature (736)..(736): Xaa can be any naturally occurring amino acid
  misc_feature (743)..(743): Xaa can be any naturally occurring amino acid
MFTWASVLPERLPVLVLCRLARPTGLGVDPNEGAQCRPCCVQAAVGNVCLRKSVPRWPRVVCHRPAPITWARGCCQMPVFPCRPRSRKARCKLGMLELLPWSVKALIIDGSYWRSIPKYPKVESLLGTIMRNGNLGPLQSKAHLVPMFKIRLRGPFGVRSKEGKGLMQVFPCGLDLVHGVQSPFWGRVSRFLVYTYIQASAPPSGDRAHSPHCPTPRARDTRPATMTSSKIEMPGEVKADPAALMASLHLLPSPTPNLEIKYTKIFINNEWQNSESGRVFPVYNPATGEQVCEVQEADKADIDKAVQAARLAFSLGSVWRRMDASERGRLLDKLADLVERDRAVLATMESLNGGKPFLQAFYVDLQGVIKTFRYYAGWADKIHGMTIPVDGDYFTFTRHEPIGVCGQIIPWNFPLLMFAWKIAPALCCGNTVVIKPAEQTPLSALYMGALIKEAGFPPGVINILPGYGPTAGAAIASHIGIDKIAFTGSTEVGKLIQEAAGRSNLKRVTLELGGKSPNIIFADADLDYAVEQAHQGVFFNQGQCCTAGSRIFVEESIYEEFVRRSVERAKRRIVGSPFDPTTEQGPQIDKKQYNKILELIQSGVAEGAKLECGGKGLGRKGFFIEPTVFSNVTDDMRIAKEEIFGPVQEILRFKTMDEVIERANNSDFGLVAAVFTNDINKALTVSSAMQAGTVWDPIVHXAFKXPXXPFGGXSRXLGNXXXKXGXXWXCGXLLQXFKNGGQXKIPPKKNSLKKAQKE

SEQ ID NO: 784510 - protein, 108 aa, Homo sapiens
MGFIQEGEQDQHQHRAGWRPAKPTCPFGSTPLFFPRTLLHPPPPAASQLLQDLCPVPEDTTDLGTPAQCPEDHQRANGQHLQEASGKWGRGPKPKVPSILATLSPGPA

SEQ ID NO: 784511 - protein, 164 aa, Homo sapiens
PGRLNAITGGTRRSRRATAGPGQACCGRRKAPEVGWEGEAERRVSPRPRCRQRGAYGWQPGLGSRVLGARLGNRTSLRGDLCTAPGPPPPCWQPPPQRTKPRHPDSRGAAAAKSSAPPSLAAASAGKCSPGFGAMEPRRKRRVSAAERAEGTEGAEGTNHERPR

SEQ ID NO: 784512 - protein, 158 aa, Homo sapiens
AGGRGAGAVAVVAAEHTDFIVEAHLELPHLLTVPADQAKVQAAFHDLAQLPQGDTRLGLGTALEAQGLLTDGPSGRTDVGVGVKVPARGPRHGVAVSSHSDQAHWGSQPMVTTVVIGADVGLLGSRVEVRVLLGVAVAVVLEVALVWPGVVVPGEGGD

SEQ ID NO: 784513 - protein, 94 aa, Homo sapiens
KFSSHYPNSSGPLLPAWTLTDANIYCVCPDGQNMDLALEKLSEGRQIHEQFLPPAAGDRSPCAVATLTQEGQKGFLRRCPEPGSWTVRVSQVTG

SEQ ID NO: 784514 - protein, 123 aa, Homo sapiens
VGTGVDAGVGVDVGTGVDADVGVGVGSGVDACVSVGVGTGAGAGVGVGVGTGVSVGVGTGVHAGMGVGTGADAGVGVGIGVDAGMGVGVGTSVDGGVGMGVGTGVDAGAGAGLSGREFSSSSR

SEQ ID NO: 784515 - protein, 115 aa, Homo sapiens
MVSQGHSEKRAQSPESKHAALSPHFPLNMVLSTKSGLRILKHLQALGPHPLDSPGTRSLGLNNGKLWYWALYSCIFNRNKTMMCGVSHPFSLPFPLRATFVFANLSLGFGDTEAV

SEQ ID NO: 784516 - protein, 59 aa, Homo sapiens
LVNESGSWLDRRNPRVSQPKHTIHGIKKGTATPMVSPVRNASFHPAKICLCPSCLLNTS

SEQ ID NO: 784517 - protein, 82 aa, Homo sapiens
HRLIITARLYNLKLGFIPILPLAMNYPADTFILSTTVLFQRVHSLPGPHQGNNLQKAASDRNEPVDHEGQGTLKNEIDKTAS

SEQ ID NO: 784518 - protein, 103 aa, Homo sapiens
MPRVTALPLSCYSGQTAYGVYLLHKEQCLCCCTLLFQQKLLYNITHSPLNSFLSKAKNIPRLSPASISADPRLHGEVYMSWIFFYQVFGPPFPLDNNPCGWDW

SEQ ID NO: 784519 - protein, 107 aa, Homo sapiens
MTAGRAAADLEPGLCAGFKPQGPARESGPVSPPLFPPRAGRRGEGGQCTQGSGQQVTQPAALSLLCPELGPHGSGRAARAAHGGAAPTLHSAGPTANLPSTSPRERS

SEQ ID NO: 784520 - protein, 367 aa, Homo sapiens
MKTLETQPLAPDCCPSDQDPAPAHPSPHASPMNKNADSELMPPPPERGDPPRLSPDPVAGSAVSQELREGDPVSLSTPLETEFGSPSELSPRIEEQELSENTSLPAEEANGSLSEEEANGPELGSGKAMEDTSGEPAAEDEGDTAWNYSFSQLPRFLSGSWSEFSTQPENFLKGCKWAPDGSCILTNSADNILRIYNLPPELYHEGEQVEYAEMVPVLRMVEGDTIYDYCWYSLMSSAQPDTSYVASSSRENPIHIWDAFTGELRASFRAYNHLDELTAAHSLCFSPDGPSSSVASTGLCVFFHGPAGRDAKSEAHLEKSRDRAVLPGSLPANSLLGLGALGVCRIWPRVGATVPPVPRAVRPVLCR

SEQ ID NO: 784521 - protein, 59 aa, Homo sapiens
VKMAARLINEINVENVVVIEMRDDCGLNQKMAIEMEKMDGFKRYVKAGISKTSLIEYGA

SEQ ID NO: 784522 - protein, 202 aa, Homo sapiens
RRKWVIQIVERETKTKAYSKEALGLAQKVDPAQKEKEEVGQWLTNTIDTLNMQVDQFESEVESLSVQTRKKKVDKDKQDRIEGLKRHIEKHRYHVRMLETILRMLDNDSILVDAIRKIKDDVEYYVDSSQDPDFEENEFLYDDLDLEDIPQALVATSPPSHSHMEDEIFNQSSSTPTSTTSSSPIPPSPANCTTGSLDDLST

SEQ ID NO: 784523 - protein, 172 aa, Homo sapiens
ALQPLSLALGSPAKQDRIEGLKRHIEKHRYHVRMLETILRMLDNDSILVDAIRKIKDDVEYYVDSSQDPDFEENEFLYDDLDLEDIPQALVATSPPSHSHMEDEIFNQSSSTPTSTTSSSPIPPSPANCTTENSEDDKKRGRSTDSEVSQSPAKTAPSLSTATSTLSPQLCR

SEQ ID NO: 784524 - protein, 197 aa, Homo sapiens
RRKWVIQIVERETKTKAYSKEALGLAQKVDPAQKEKEEVGQWLTNTIDTLNMQVDQFESEVESLSVQTRKKKVDKDKQDRIEGLKRHIEKHRYHVRMLETILRMLDNDSILVDAIRKIKDDVEYYVDSSQDPDFEENEFLYDDLDLEDIPQALVATSPPSHSHMEDEIFNQSSSPASAQASPHHQPNRITRSGIRVE

SEQ ID NO: 784525 - protein, 82 aa, Homo sapiens
MAQQTGQPSSSVQKAVSPIRRPGKGSTIFPKGEPRAEVLPLQEVRCSRGLLGLVWGLQWSQLDTCSTPATSAPTLCSIWHLH

SEQ ID NO: 784526 - protein, 42 aa, Homo sapiens
MRFDKLDGSARDDGKIGQGCKRPELSSHIRYYLHCNHTSQKN

SEQ ID NO: 784527 - protein, 40 aa, Homo sapiens
VFKMETPIVKVNNSSSNNSSPPQARTGRRVNRHGARCFGQ

SEQ ID NO: 784528 - protein, 77 aa, Homo sapiens
ANHAHHSAQCLPWTSISPKPPGPQLSRSGFPTPKARVGARQGDSRSSTSSETPDSQGLTEDLPCARHWVPRSTHHPP

SEQ ID NO: 784529 - protein, 165 aa, Homo sapiens
EKEESSRDWEEAACLSCRSIFTQQSSHVSAFLDLIYKRWQLIKGPLRFFPHLNSKALLSSSKRKQMSLVAHATQKTGEAVFGEIQGLPCDSPRKEIQYEKDTRDTNSSLYQDQAQGLAVQTGYVHWGECYRKGKFIHLFFSLVRERMIQNSLSYHMHMVVVLSSG

SEQ ID NO: 784530 - protein, 63 aa, Homo sapiens
THLRRNDATILRNTRTKPGSDRASGSAIFLKCSFTERAKDRTPCPCPHPRDIKTRGNTRSAIS

SEQ ID NO: 784531 - protein, 70 aa, Homo sapiens
GEHEAQEQNAEYSLSWIAKSVPGHASSGPFLKPAVELAGCGSQVDCKSCSPAHGAVRKLALHCLLQKAGS

SEQ ID NO: 784532 - protein, 321 aa, Homo sapiens [sequence omitted]

SEQ ID NO: 784533 - protein, 356 aa, Homo sapiens
MQMSYHRAQQAGMSIKASPGIWSLSSFLRLCLGRVPAQSGPLPKPSLQALPSSLVPLEKPVTLRCQGPPGVDLYRLEKLSSSRYQDQAVLFIPAMKRSLAGRYRCSYQNGSLWSLPSDQLELVATGVFAKPSLSAQPGPAVSSGGDVTLQCQTRYGFDQFALYKEGDPAPYKNPERWYRASFPIITVTAAHSGTYRCYSFSSRDPYLWSAPSDPLELVVTGTSVTPSRLPTEPPSSVAEFSEATAELTVSFTNKVFTTETSRSITTSPKESDSPAGPARQYYTKGNLVRICLGAVILIILAGFLAEDWHSRRKRLRHRGRAVQRPLPPLPPLPQTRKSHGGQDGGRQDVHSRGLCS

SEQ ID NO: 784534 - protein, 339 aa, Homo sapiens
MSPSPTALFCLGLCLGRVPAQSGPLPKPSLQALPSSLVPLEKPVTLRCQGPPGVDLYRLEKLSSSRYQDQAVLFIPAMKRSLAGRYRCSYQNGSLWSLPSDQLELVATGVFAKPSLSAQPGPAVSSGGDVTLQCQTRYGFDQFALYKEGDPAPYKNPERWYRASFPIITVTAAHSGTYRCYSFSSRDPYLWSAPSDPLELVVTGTSVTPSRLPTEPPSSVAEFSEATAELTVSFTNKVFTTETSRSITTSPKESDSPAGPARQYYTKGNLVRICLGAVILIILAGFLAEDWHSRRKRLRHRGRAVQRPLPPLPPLPQTRKSHGGQDGGRQDVHSRGLCS

SEQ ID NO: 784535 - protein, 346 aa, Homo sapiens
MPRGCDPNNPGGVSGRGLAQPEEAPAAQGQGCAEAASAPAAPPADPEITRGSGWRPTGCSQPRVMFMTAEPQARSYPREGSWHGRRLKDWRVWSVEAGGQRLQLWKRGHAASSWCSIREPFGQCLSVCLPLCLRAPSIWDGRNLWRPHPPPCTLWMTWYPGWTTYWPLSSTSLIWAPDGSLRFPALRVDSVPSSVQNPPVLPFGPLCSCLVFPRNSHPHSISHCGLTNLLSSLRTGLAGSLGMSFIFLSVKLARCPLPFTLENKISLCNMVKPHLYQQNKKTQKLARCGGASLYSQQLGGLRWENGLSLGGRGCSELRSHHCTLARVTKPDLVSKNTGMNMSITLI

SEQ ID NO: 784536 - protein, 97 aa, Homo sapiens
SQLRCWLLPSTSDFLFLPGVFAKPSLSAQPGPAVSSGGDVTLQCQTRYGFDQFALYKEGDPAPYKNPERWYRASFPIITVTAAHSGTYRCYSFSSRD

SEQ ID NO: 784537 - protein, 131 aa, Homo sapiens
DGCEELEFPLPNGFKEESYMECSDFLGYPLWPPYPVRMVNRQLQPLPPDKGKTTKALDILGKKVEGQSSQIQKLPRSAQALASVGDFQTQRWRRSLQTLVIATQSAALVETGACFTDTFKLNVCRGYSQPL

SEQ ID NO: 784538 - protein, 160 aa, Homo sapiens
HAQRREIENEQQRIYVNGDWTQRGGVVSRVKVRSSVVIEDKSTRDPEDVYSQPYGENQLPVWIPTRHLKFYNAPIGDAKKSTSAETETPQSSTVDSQDEQNGDIRTDEVAIHQEVCRCTQQLRRDSDHRERAMMTMVVLSKRKGGNVGKSKRDQIVTVSV

SEQ ID NO: 784539 - protein, 74 aa, Homo sapiens
MRLWVSLSAAEQDDRMAQKAAWRVALPLAQAGEPADTVTLTAPWHRFHPNTGFSEHRLLPSLSHDPEATRAWAA

SEQ ID NO: 784540 - protein, 101 aa, Homo sapiens
GGDLLHNNKQLRHQPNPSSPRAALLLLLNRQSCCQRPTVLGKEPHSHPPLFQLSLFPSWAWGRLGGLFMGLCTCISLHSTVPSSSLRACKPRVVSCVSSNF

SEQ ID NO: 784541 - protein, 111 aa, Homo sapiens
DGKKLCPPGKASSSEKIHERSGPKRGKHAWTHRLRERKQLVIYEEISDPEEMTSNSISEPSAHPPHPCRCAILLCLRDTTHAHDEKQNVVTFHERGHGCGPLVIRCIASES

SEQ ID NO: 784542 - protein, 102 aa, Homo sapiens
RCFGAWRGRSHAWGGWETALSKYAKSKQSRHLGSKIFIRTISFPLMQKTQPSCDLVSGHSDQGAKGQESLPDHQTEQKGGSQDLESGDRWSELERMDHRKSI

SEQ ID NO: 784543 - protein, 81 aa, Homo sapiens
DVTDKDVTDKDVTNFPSPSPRNQPSPPSNQAQPVAQTRRPYDTMDAGHMPVYTQSQILHLTPTKTSTFGQAPWLTPEIPAL

SEQ ID NO: 784544 - protein, 130 aa, Homo sapiens
ILGPFGELLTEDDLVYLEKQIADLQLRRRCQEYESELGRLAAELQALLPEPLVSITVNSHFLPRAPGLEVEEASIPAAEPAGSAEASEVAPGVQPLPFWCSHISRLVRSLSLLLKGVHGLVQGDEKPSTR

SEQ ID NO: 784545 - protein, 47 aa, Homo sapiens
MPLGVSHITQVFGGKPKHKSGRLVRPNSLPEPELESVSLPFHSSRTG

SEQ ID NO: 784546 - protein, 104 aa, Homo sapiens
MCPSEMGTLWHHWSPVLISLAALFSKVTEGRGILESIQRFSLLPTYLPVTYHIQNADVSFFVKEANQDIMRNSSLQSRVESFLIYKSRRLPVLNASYGPFSIEQ

SEQ ID NO: 784547 - protein, 76 aa, Homo sapiens
KYPIWTQQNGRRLGVIPRAGGKGVLMSPPPALPLHSRHPGEQGLGHHLVRGLQQAGGSGPAGFAMGSQHLCPAQEW

SEQ ID NO: 784548 - protein, 83 aa, Homo sapiens
PVLLTQDMASGAMAPGWLEGSEWVISRSQQLLGSYTPRGAGDTVGCPAFLQRHAGPWIETGPRQGMCHGGFDARSFESQERTD

SEQ ID NO: 784549 - protein, 166 aa, Homo sapiens
  misc_feature (13)..(13): Xaa can be any naturally occurring amino acid
AEQLRRQEGGAAXAQMRQEIERLTERLEEKEREMQQLLSQPQHEREKEVVLLRRSMAEGERARAASDVLCRSLANETHQLRRTLTATAHMCQHLAKCLDERQHAQRNVGERSPDQSEHTDGHTSVQSVIEKLQEENRLLKQKVTHVEDLNAKWQRYNASRDEYVRG

SEQ ID NO: 784550 - protein, 41 aa, Homo sapiens
HFPATFLEAVLNFEDLPIWTVKSIAKDTPFSLLNSGEALKH

SEQ ID NO: 784551 - protein, 69 aa, Homo sapiens
SGEYGRGSTTSPQAGACRQGAHTGREAWLPSEGSSPVTGDVGPGQVLLAGSSGYLVGFKFLESHGSDSG

SEQ ID NO: 784552 - protein, 43 aa, Homo sapiens
FPPQWSSPHQASRETQFPRLFVPMRESGAEPLRDPEWRDLPFS

SEQ ID NO: 784553 - protein, 180 aa, Homo sapiens [sequence omitted]

SEQ ID NO: 784554 - protein, 42 aa, Homo sapiens
MNIMKACWPWALVTLDRTSRIHTIVGPPSAHEFHRPRSRSKR

SEQ ID NO: 784555 - protein, 104 aa, Homo sapiens
MKDFSFQTGHLICQMTIMCATYMYFQQVPGSQVLGKLMTGRLSYRTSSLWKRLTAAHLIRAVMKSWINSDFCFSLASKEAYVLWHHVMVIRSQLLPVLLREAKC

SEQ ID NO: 784556 - protein, 151 aa, Homo sapiens
DQRVGPRFTEGVCQVGSEKAAPFSLLFWATGNPPRDRCWSAACGTLHFCLRVALKRQLPIRVPCSPVCCGLWEDVPVLSQAQCSHSTETRGVWSPQSPSCLVSAGLRAGAYSHEVFTSHTLSLATGRSSGRRGWDTREPTRGQSSSAPPSA

SEQ ID NO: 784557 - protein, 265 aa, Homo sapiens
MAPSRNGMVLKPHFHKDWQRRVATWFNQPARKIRRRKARQAKARRIAPRPASGPIRPIVCCPTVRYHTEGARRPRLQALGKELRGAGGLCLGIYFSPNNRNPRFWWGGHLVNPPKSSQVGRTLFLHPLSGFRGRQTFPPQCEQPGRGTLAGPWHEHKPKTWDFPPKRRGQSISTFDPNVYAGPPKAERCAQIVPRRGPTLLVQTTAPGPTPRPILRSPSPPERAPSRVIFTPPPPHHFAEPPPKHPRVFFPHAKNSFFPPPHIPA

SEQ ID NO: 784558 - protein, 178 aa, Homo sapiens
MAPSRNGMVLKPHFHKDWQRRVATWFNQPARKIRRRKAPAAASAWRSSGWPAFTRRWPGPSAFLWIRGGGTSPRSPCRPTCKRLKEYRSKLILFPRKPSAPKKGDSSAEELKLATQLTGPVMPVRNVYKKEKARVITEEEKNFKAFASLRMARANARLFGIRAKRAKEAAEQDVEKKK

SEQ ID NO: 784559 - protein, 107 aa, Homo sapiens
MAPSRNGMVLKPHFHKDWQRRVATWFNQPARKIRRRKAPAAASAGGAQGGRHSQEGGPDHRHFCGSEEAEQVHGVPAGQRAAAEGVPLQTHPLPQEALGPQEGRQFC

SEQ ID NO: 784560 - protein, 292 aa, Homo sapiens
MAPSRNGMVLKPHFHKDWQRRVATWFNQPARKIRRRKPCAQGLAPWWLVPCCDLPPCAFAGLADLPRGGGVLLVLQPVAGTPCLALGVALRANGVDLPACASRHTQGLYMCPVLIAQLACSLLFCFPDSPLLFGVFHNSPGPKFLLAGLLPQHWFLGYFPCIWRWVACCTGVLVLLLYKALGVLANCFLELVGCYRDEFPRNTEQGWCAREKPTPRQLLRWWRMSPEWCNAHVPTPKASPQVLVYPPISNCNTIPGCRSRHALKRGYAIPKSPNPVHLPLLSPPSRQIAHFR

SEQ ID NO: 784561 - protein, 226 aa, Homo sapiens
  misc_feature (125)..(125): Xaa can be any naturally occurring amino acid
MAPSRNGMVLKPHFHKDWQRRVATWFNQPARKIRRRKARQAKARRIAPRPASGPIRPIVCCPTVRYHTKVRAGRGFSLEELRVAGIHKKVARTIGISVDPRRRNKSTESLQANVQRLKESTRIQXRLVTSCLAKSRAPSRARSIGMWRPEIRVDMKREIVDIPELTGPVMPVRNVYKKEKARVITEEEKNFKAFASLRMARANARLFGIRAKRAKEAAEQDVEKKK

SEQ ID NO: 784562 - protein, 522 aa, Homo sapiens
MAAVVAATRWWQLLLVLSAAGMGASGAPQPPNILLLLMDDMGWGDLGVYGEPSRETPNLDRMAAEGLLFPNFYSANPLCSPSRAALLTGRLPIRNGFYTTNAHARNAYTPQEIVGGIPDSEQLLPELLKKAGYVSKIVGKWHLGHRPQFHPLKHGFDEWFGSPNCHFGPYDNKARPNIPVYRDWEMVGRYYEEFPINLKTGEANLTQIYLQEALDFIKRQARHHPFFLYWAVDATHAPVYASKPFLGTSQRGRYGDAVREIDDSIGKILELLQDLHVADNTFVFFTSDNGAALISAPEQGGSNGPFLCGKQTTFEGGMREPALAWWPGHVTAGQVSHQLGSIMDLFTTSLALAGLTPPSDRAIDGLNLLPTLLQGRLMDRPIFYYRGDTLMAATLGQHKAHFWTWTNSWENFRQGIDFCPGQNVSGVTTHNLEDHTKLPLIFHLGRDPGERFPLSFASAEYQEALSRITSVVQQHQEALVPAQPQLNVCNWAVMNWAPPGCEKLGKCLTPPESIPKKCLWSH

SEQ ID NO: 784563 - protein, 148 aa, Homo sapiens
AVQAPPRSPAGRAGGRSLGRLAGRGSAAPVVAMAAVVAATRWWQLLLVLSAAGMGASGAPQPPNILLLLMDDESLPPPRAAGSPRWAPVLPDGCLCPLENAERSDCFPEHALQRPGVRVLTAVAGPFSALSGISLLKILCFRISSFHF

SEQ ID NO: 784564 - protein, 85 aa, Homo sapiens
SPRGSPSAALPAYTPQEIVGGIPDSEQLLPELLKKAGYVSKIVGKWHHRVTMAPKFQAPHGKATGLLTGRCGIWNSRTKLGPTYL

SEQ ID NO: 784565 - protein, 525 aa, Homo sapiens
IFSALENPEETHLGSRHDPQNSPGSSENVEGRSRGHEGHVRRVPGGWEAPHDAPPFTVQGTPAAAMPAALGCAQTLCRVGGQCQHPPRVRPWSFVPAVPRHSPYSVLEGARLTKNFVKVVSVAAQNFRVSPRGVPEVSWVPVSRHLGHRPQFHPLKHGFDEWFGSPNCHFGPYDNKARPNIPVYRDWEMVGRYYEEFPINLKTGEANLTQIYLQEALDFIKRQARHHPFFLYWAVDATHAPVYASKPFLGTSQRGRYGDAVREIDDSIGKILELLQDLHVADNTFVFFTSDNGAALISAPEQGGSNGPFLCGKQTTFEGGMREPALAWWPGHVTAGQVSHQLGSIMDLFTTSLALAGLTPPSDRAIDGLNLLPTLLQGRLMDRPIFYYRGDTLMAATLGQHKAHFWTWTNSWENFRQGIDFCPGQNVSGVTTHNLEDHTKLPLIFHLGRDPGERFPLSFASAEYQEALSRITSVVQQHQEALVPAQPQLNVCNWAVMNWAPPGCEKLGKCLTPPESIPKKCLWSH

SEQ ID NO: 784566 - protein, 504 aa, Homo sapiens
MAAVVAATRWWQLLLVLSAAGMGASGAPQPPNILLLLMDDMGWGDLGVYGEPSRETPNLDRMAAEGLLFPNFYSANPLCSPSRAALLTGRLPIRNGFYTTNAHARNAYTPQEIVGGIPDSEQLLPELLKKAGYVSKIVGKWHLGHRPQFHPLKHGFDEWFGSPNCHFGPYDNKARPNIPVYRDWEMVGRYYEEFPINLKTGEANLTQIYLQEALDFIKRQARHHPFFLYWAVDATHAPVYASKPFLGTSQRGRYGDAVREIDDSIGKILELLQDLHVADNTFVFFTSDNGAALISAPEQGGSNGPFLCGKQTTFEGGMREPALAWWPGHVTAGQVSHQLGSIMDLFTTSLALAGLTPPSDRAIDGLNLLPTLLQGRLMDRPIFYYRGDTLMAATLGQHKAHFWTWTNSWENFRQGIDFCPGQNVSGVTTHNLEDHTKLPLIFHLGRDPGERFPLSFASAEYQEALSRITSVVQQHQEALVPAQPQLNVCNWAVMNWAPPGCGSH

SEQ ID NO: 784567 - protein, 260 aa, Homo sapiens
MAAVVAATRWWQLLLVLSAAGMGASGAPQPPNILLLLMDDMGWGDLGVYGEPSRETPNLDRMAAEGLLFPNFYSANPLCSPSRAALLTGRLPIRNGFYTTNAHARNAYTPQEIVGGIPDSEQLLPELLKKAGYVSKIVGKWHLGHRPQFHPLKHGFDEWFGSPNCHFGPYDNKARPNIPVYRDWEMVGRYYEEFPINLKTGEANLTQIYLQEALDFIKRQARHHPFFLYWAVDATHGPWPSGRGWPSRRGVRARFVSGYV

SEQ ID NO: 784568 - protein, 281 aa, Homo sapiens
GRPGPAPQPSRKGRRTLARSARWPGLRGSRGCHGGGCRGDEVVAAVAGAQRRGDGGLGRPAAPQHPAPAHGRPRAALLTGRLPIRNGFYTTNAHARNAYTPQEIVGGIPDSEQLLPELLKKAGYVSKIVGKWHLGHRPQFHPLKHGFDEWFGSPNCHFGPYDNKARPNIPVYRDWEMVGRYYEEFPINLKTGEANLTQIYLQEALDFIKRQARHHPFFLYWAVDATHAPVYASKPFLGTSQRGRYGDAVREIDDFQFRLSFVHKEFPWTLIMREACSFLSL

SEQ ID NO: 784569 - protein, 183 aa, Homo sapiens
  misc_feature (167)..(168): Xaa can be any naturally occurring amino acid
  misc_feature (179)..(179): Xaa can be any naturally occurring amino acid
IFSALENPEETHLGSRHDPQNSPGSSENVEGRSRGHEGHVRRVPGGWEAPHDAPPFTVQGTPAAAMPAALGCAQTLCRVGGQCQHPPRVRPWSFVPAVPRHSPYSVLEGARLTKNFVKVVSVAAQNFRVSPRGVPEVSWVPVSRHLGHRPQFHPLKHGFDEWFGSGXXGLIRLGGPRNXLLFP

SEQ ID NO: 784570 - protein, 482 aa, Homo sapiens
CGEGEAPSGSGRGVQAWGLGGHRSPHALPLCCMTGTASSLAARAALLTGRLPIRNGFYTTNAHARNAYTPQEIVGGIPDSEQLLPELLKKAGYVSKIVGKWHLGHRPQFHPLKHGFDEWFGSPNCHFGPYDNKARPNIPVYRDWEMVGRYYEEFPINLKTGEANLTQIYLQEALDFIKRQARHHPFFLYWAVDATHAPVYASKPFLGTSQRGRYGDAVREIDDSIGKILELLQDLHVADNTFVFFTSDNGAALISAPEQGGSNGPFLCGKQTTFEGGMREPALAWWPGHVTAGQVSHQLGSIMDLFTTSLALAGLTPPSDRAIDGLNLLPTLLQGRLMDRPIFYYRGDTLMAATLGQHKAHFWTWTNSWENFRQGIDFCPGQNVSGVTTHNLEDHTKLPLIFHLGRDPGERFPLSFASAEYQEALSRITSVVQQHQEALVPAQPQLNVCNWAVMNWAPPGCEKLGKCLTPPESIPKKCLWSH

SEQ ID NO: 784571 - protein, 522 aa, Homo sapiens; identical to SEQ ID NO: 784562

SEQ ID NO: 784572 - protein, 322 aa, Homo sapiens
AVQAPPRSPAGRAGGRSLGRLAGRGSAAPVVAMAAVVAATRWWQLLLVLSAAGMGASGAPQPPNILLLLMDDMGWGDLGVYGEPSRETPNLDRMAAEGLLFPNFYSANPLCSPSRAALLTGRLPIRNGFYTTNAHARNAYTPQEIVGGIPDSEQLLPELLKKAGYVSKIVGKWHLGHRPQFHPLKHGFDEWFGSPNCHFGPYDNKARPNIPVYRDWEMVGRYYEEFPINLKTGEANLTQIYLQEALDFIKRQARHHPFFLYWAVDATHAPVYASKPFLGTSQRGRYGDAVREIDDFQFRLSFVHKEFPWTLIMREACSFLSL

SEQ ID NO: 784573 - protein, 78 aa, Homo sapiens
STPWPRGFPLAGVAASVNGDHSSLASGGSRGRKLTSGPGCPRGQVSLFSLGTLGREVWGAGAAPWLSGGQDCREDAPL

SEQ ID NO: 784574 - protein, 72 aa, Homo sapiens
LGMGTLFMASLHRGSRFRTEALHAPGSLLSEHSPPLLLLFGMLDFLCTCSHTETGFLLSCACESHPSVSPAV

SEQ ID NO: 784575 - protein, 93 aa, Homo sapiens
EQGQQSRMSRNAIIKMIQNEKEAEDKAQCETRVRAQQTSTTGFESESFCFSATAPGLHSLKWPCQCWSQHSRVLNTPELKQSIPLSNKIMDSE

SEQ ID NO: 784576 - protein, 77 aa, Homo sapiens
NWVPGPHISISHSWGAGRRPLVLERQICKASDLWLNTPLRGFWPPGSAGEGMACGPPAFPRQAAWLAFGGWQRLADS

SEQ ID NO: 784577 - protein, 103 aa, Homo sapiens
MEQTAWAWRAGDQVEAAQLCLNSFSHRFPGRHSWQPLRPMTGTVNSLRQKGKDNTNVPMNPRNMKEGHTPTVEHVEAECGSVKGDGAPGPSMFRAACLCSDGR

SEQ ID NO: 784578 - protein, 85 aa, Homo sapiens
MSFPLIKPEALQTPHLFHSSLLSHMQTIIKPWQLNFRIYPKSATPHGLLSKYPTQAPSVQAWVIRVAFKLIVLLPLSPYPISHPD

SEQ ID NO: 784579 - protein, 145 aa, Homo sapiens [sequence omitted]

SEQ ID NO: 784580 - protein, 68 aa, Homo sapiens
QKPRFSGASLPRTRLLALCHRSLAWHHSDSPGGSSVRGAARSAAIGAVNFSFFLMLTDTWGYRGACGG

SEQ ID NO: 784581 - protein, 111 aa, Homo sapiens
SVAHAGVQWRHLGSLQLRPPGFNPFSYLSLPNSWDYRRMPSRPAKFLYFLVETGFHGVPQAGLKLLSSGNPPTSARAIFYSPLPNPWPLPPLFILLPLFGKSSFSSLGLFK

SEQ ID NO: 784582 - protein, 99 aa, Homo sapiens
TGLPSTWCLQDVGGRKRILVPLEVSCHQLQVTWPGSQMVPQYLPLLLIDPRGNQTGAVLITDEGLAERKSQIQISLFFFRQGLALSPRLLIELLTSGDP

SEQ ID NO: 784583 - protein, 68 aa, Homo sapiens
LRHLLAESGCDWLKYHPPLPQNTDAALKSALKANTPGASCSCTRPLAHIAAQQHMAAPDKPSGATETP

SEQ ID NO: 784584 - protein, 122 aa, Homo sapiens
KKRRERPPDRPKPARRCIPRPAPTSAAVAAATMPKRKAEGDAKGDKAKVKDEPQRRSARLSAKPAPPKPEPKPKKAPAKKGEKVPKGKKGKADAGKEGNNPAENGDAKTDQAQKAEGAGDAK

SEQ ID NO: 784585 - protein, 174 aa, Homo sapiens
MPKRKAEGDAKGDKAKVKDEPQRRSARLSAKPAPPKPEPKPKKAPAKKGEKSHRKFSCSQTWVPRLPASEAAAAGHRGNVWRASLRMTRPSLVHPHSLPGDTMCLAMTHTRAGDRLPRPGVSTGEPEVTVVERSCTYVYQTPTHGAHCAASVEAHTMAKPPPHETYRETSKHST

SEQ ID NO: 784586 - protein, 110 aa, Homo sapiens
MKAMPWNWTCLLSHLLMVGMGSSTLLTRQPAPLSQKQRSFVTFRGEPAEGFNHLVVDERTGHIYLGAVNRIYKLSSDLKVLVTHETGPDEDNPKCYPPRIVQTCNEPLTT

SEQ ID NO: 784587 - protein, 173 aa, Homo sapiens
MTEQKKKKKKKTNSVGREHRALRKRYKKPKRRAAGAQEGTRRQGATKEVPTETTRGTRTKAQGDSTQQVKKTPGRNNRHVHGTQSQQGKHPSAATTYCGDTTRTPRGAVTKEQHAPPNPTKNNDTTEHVGRHTSRPRRRRATHSRDATTTSQQDAENQQDSNNDKPDVNRGRT

SEQ ID NO: 784588 - protein, 105 aa, Homo sapiens
MKEESVSQCRSWASAGNFPDCPSGSQEWSSLAQFIPVSQRSQSPLCELGCPRSLGLSLCCPPWDLAPGVALLPLQLSSLLLVPSPGLCMGLALSSFLSLSPLFFL

SEQ ID NO: 784589 - protein, 96 aa, Homo sapiens
DAEKAFDKIQYPFIINTGNKLGIEGTYFHITKAIYDKPTANIILNGEKLNAFLPRTGTKQICSLSPLLFNTVLEVLSKAIRQEKEIKVFRIRKEEV

SEQ ID NO: 784590 - protein, 368 aa, Homo sapiens
FLIESHSHSDQSSKTSLMSEMRNAQSIGRRWEKPSPSNVTERKKRGSSWESNNLSADTPCATVLDKQHISSPELNCNNEINGHTNETNTEMQRNKQDLPGLSSESAREPNAECMNQIEDNDDFQLQKTVYDADMDLTASEVSKIVTVSTGIKKKSNKKTNEHGMKTFRKVKDSSSEKKRERSKRQFKNSSDVDIGEKIENRTERSDVLDGKRGAEDPGFIFNNEQLAQMNEQLAQVNELKKMTLQTGFEQGDRENVLCNKKEKRITNEQEETYSLSQSSGKFHQESKFDKGQNSLTCNKSKASRQTFVIHKLEKDNLLPNQKDKVTIYENLDVTNEFHTANLSTKDNGNLCDYGTHNILDLKKYVTDI

SEQ ID NO: 784591 - protein, 710 aa, Homo sapiens
MSAQGDCEFLVQRARELVPQDLWAAKAWLITARSLYPADFNIQYEMYTIERNAERTATAGRLLYDMFVNFPDQPVVWREISIITSALRNDSQDKQTQFLRSLFETLPGRVQCEMLLKVTEQCFNTLERSEMLLLLLRRFPETVVQHGVGLGEALLEAETIEEQESPVNCFRKLFVCDVLPLIINNHDVRLPANLLYKYLNKAAEFYINYVTRSTQIENQHQGAQDTSDLMSPSKRSSQKYIIEGLTEKSSQIVDPWERLFKILNVVGMRCEWQMDKGRRSYGDILHRMKDLCRYMNNFDSEAHAKYKNQVVYSTMLVFFKNAFQYVNSIQPSLFQGPNAPSQVPLVLLEDVSNVYGDVEIDRNKHIHKKRKLAEGREKTMSSDDEDCSAKGRNRHIVVNKAELANSTEVLESFKLARESWELLYSLEFLDKEFTRICLAWKTDTWLWLRIFLTDMIIYQGQYKKAIASLHHLAALQGSISQPQITGQGTLEHQRALIQLATCHFALGEYRMTCEKVLDLMCYMVLPIQDGGKSQEEPSKVKPKFRKGSDLKLLPCTSKAIMPYCLHLMLACFKLRAFTDNRDDMALGHVIVLLQQEWPRGENLFLKAVNKICQQGNFQYENFFNYVTNIDMLEEFAYLRTQEGGKIHLELLPNQGMLIKHHTVTRGITKGVKEDFRLAMERQVSRCGENLMVVLHRFCINEKILLLQTLT

SEQ ID NO: 784592 - protein, 710 aa, Homo sapiens; identical to SEQ ID NO: 784591

SEQ ID NO: 784593 - protein, 526 aa, Homo sapiens
LASTRLGVESAEEVLNKAAEFYINYVTRSTQIENQHQGAQDTSDLMSPSKRSSQKYIIEGLTEKSSQIVDPWERLFKILNVVGMRCEWQMDKGRRSYGDILHRMKDLCRYMNNFDSEAHAKYKNQVVYSTMLVFFKNAFQYVNSIQPSLFQGPNAPSQVPLVLLEDVSNVYGDVEIDRNKHIHKKRKLAEGREKTMSSDDEDCSAKGRNRHIVVNKAELANSTEVLESFKLARESWELLYSLEFLDKEFTRICLAWKTDTWLWLRIFLTDMIIYQGQYKKAIASLHHLAALQGSISQPQITGQGTLEHQRALIQLATCHFALGEYRMTCEKVLDLMCYMVLPIQDGGKSQEEPSKVKPKFRKGSDLKLLPCTSKAIMPYCLHLMLACFKLRAFTDNRDDMALGHVIVLLQQEWPRGENLFLKAVNKICQQGNFQYENFFNYVTNIDMLEEFAYLRTQEGGKIHLELLPNQGMLIKHHTVTRGITKGVKEDFRLAMERQVSRCGENLMVVLHRFCINEKILLLQTLT

SEQ ID NO: 784594 - protein, 339 aa, Homo sapiens
MSAQGDCEFLVQRARELVPQDLWAAKAWLITARSLYPADFNIQYEMYTIERNAERTATAGRLLYDMFVNFPDQPVVWREISIITSALRNDSQDKQTQFLRSLFETLPGRVQCEMLLKVTEQCFNTLERSEMLLLLLRRFPETVVQHGVGLGEALLEAETIEEQESPVNCFRKLFVCDVLPLIINNHDVRLPANLLYKYLNKAAEFYINYVTRSTQIENQHQGAQDTSDLMSPSKRSSQKYIIEGLTEKSSQIVDPWERLFKILNVVGMRCEWQMDKGRRSYGDILHRMKDLCRYMNNFDSEAHAKYKNQVVYSTMLVFFKNAFQYVNSIQPSLFQEFRR

SEQ ID NO: 784595 - protein, 710 aa, Homo sapiens; identical to SEQ ID NO: 784591

SEQ ID NO: 784596 - protein, 693 aa, Homo sapiens
MSAQGDCEFLVQRARELVPQDLWAAKAWLITARSLYPADFNIQYEMYTIERNAERTATAGRLLYDMFVNFPDQPVVWREISIITSALRNDSQDKQTQFLRSLFETLPGRVQCEMLLKVTEQCFNTLERSEMLLLLLRRFPETVVQHGVGLGEALLEAETIEEQESPVNCFRKLFVCDVLPLIINNHDVRLPANLLYKYLNKAAEFYINYVTRSTQIENQHQGAQDTSDLMSPSKRSSQKYIIEGLTEKSSQIVDPWERLFKILNVVGMRCEWQMDKGRRSYGDILHRMKDLCRYMNNFDSEAHAKYKNQVVYSTMLVFFKNAFQYVNSIQPSLFQGPNAPSQVPLVLLEDVSNVYGDVEIDRNKHIHKKRKLAEGREKTMSSDDEDCSAKGRNRHIVVNKAELANSTEVLESFKLARESWELLYSLEFLDKEFTRICLAWKTDTWLWLRIFLTDMIIYQGQYKKAIASLHHLAALQGSISQPQITGQGTLEHQRALIQLATCHFALGEYRMTCEKVLDLMCYMVLPIQDGGKSQEEPSKVKPKFRKGSDLKLLPCTSKAIMPYCLHLMLACFKLRAFTDNRDDMALGHVIVLLQQEWPRGENLFLKAVNKICQQGKKKKKKKKQQQQTKTKTYKQNPRGASYCAGAAEDTAGIKRGAQGKQGVFETPRFVGHGGKNGAPPIKEAAKKRKSRDP

SEQ ID NO: 784597 - protein, 279 aa, Homo sapiens
MSAQGDCEFLVQRARELVPQDLWAAKAWLITARSLYPADFNIQYEMYTIERNAERTATAGRLLYDMFVNFPDQPVVWREISIITSALRNDSQDKQTQFLRSLFETLPGRVQCEMLLKVTEQCFNTLERSEMLLLLLRRFPETVVQHGVGLGEALLEAETIEEQESPVNCFRKLFVCDVLPLIINNHDVRLPANLLYKYLNKAAEFYINYVTRSTQIENQHQGAQDTSDLMSPSKRSSQKYIIEGLTEKSSQIVDPWERLFKILNVVGMRCEWQMDKGRR

SEQ ID NO: 784598 - protein, 98 aa, Homo sapiens
SYGDILHRMKDLCRYMNNFDSEAHAKYKNQVVYSTMLVFFKNAFQYVNSIQPSLFQGWFTNFRVSKKPVHTVGMVRKMKVFIQYCWIRITVGRYQSFL

SEQ ID NO: 784599 - protein, 188 aa, Homo sapiens
WRRGLAPARSRACSLTSPRSRCSPQNENPLLRIFEVTWKRFNCSGFSEEEGTGGNEEPRGGDCSQNPEKLSRSTLPASVRLQTCAVASPAVAAAAAVAAVAAESPEPDVPAASGWRLESARVMSAQGDCEFLVQRARELVPQDLWAAKAWLITARSLYPADFNIQYEMYTIERNAERTATAGRLLYDM

SEQ ID NO: 784600 - protein, 280 aa, Homo sapiens
MSAQGDCEFLVQRARELVPQDLWAAKAWLITARSLYPADFNIQYEMYTIERNAERTATAGRLLYDMFVNFPDQPVVWREISIITSALRNDSQDKQTQFLRSLFETLPGRVQCEMLLKVTEQCFNTLERSEMLLLLLRRFPETVVQHGVGLGEALLEAETIEEQESPVNCFRKLFVCDVLPLIINNHDVRLPANLLYKYLNKAAEFYINYVTRSTQIENQHQGAQDTSDLMSPSKRSSQKYIIEGLTEKSSQIVDPWERLFKILNVVGMRCEWQMDKGRRS

SEQ ID NO: 784601 - protein, 736 aa, Homo sapiens
MSAQGDCEFLVQRARELVPQDLWAAKAWLITARSLYPADFNIQYEMYTIERNAERTATAGRLLYDMFVNFPDQPVVWREISIITSALRNDSQDKQTQFLRSLFETLPGRVQCEMLLKVTEQCFNTLERSEMLLLLLRRFPETVVQHGVGLGEALLEAETIEEQESPVNCFRKLFVCDVLPLIINNHDVRLPANLLYKYLNKAAEFYINYVTRSTQIENQHQGAQDTSDLMSPSKRSSQKYIIEGLTEKSSQIVDPWERLFKILNVVGMRCEWQMDKGRRSYGDILHRMKDLCRYMNNFDSEAHAKYKNQVVYSTMLVFFKNAFQYVNSIQPSLFQGPNAPSQVPLVLLEDVSNVYGDVEIDRNKHIHKKRKLAEGREKTMSSDDEDCSAKGRNRHIVVNKAELANSTEVLESFKLARESWELLYSLEFLDKEFTRICLAWKTDTWLWLRIFLTDMIIYQGQYKKAIASLHHLAALQGSISQPQITGQGTLEHQRALIQLATCHFALGEYRMTCEKVLDLMCYMVLPIQDGGKSQEEPSKVKPKFRKGSDLKLLPCTSKAIMPYCLHLMLACFKLRAFTDNRDDMALGHVIVLLQQEWPRGENLFLKAVNKICQQGNFQYENFFNYVTNIDMLEEFAYLRTQEGGKIHLELLPNQGMLIKPSSPPMGLLQQEFLPVLQPSIQTADRHHTVTRGITKGVKEDFRLAMERQVSRCGENLMVVLHRFCINEKILLLQTLT

SEQ ID NO: 784602 - protein, 319 aa, Homo sapiens
PGALLARQQQAVNSCWAVAVACGSCAIPGELLYSLEFLDKEFTRICLAWKTDTWLWLRIFLTDMIIYQGQYKKAIASLHHLAALQGSISQPQITGQGTLEHQRALIQLATCHFALGEYRMTCEKVLDLMCYMVLPIQDGGKSQEEPSKVKPKFRKGSDLKLLPCTSKAIMPYCLHLMLACFKLRAFTDNRDDMALGHVIVLLQQEWPRGENLFLKAVNKICQQGNFQYENFFNYVTNIDMLEEFAYLRTQEGGKIHLELLPNQGMLIKHHTVTRGITKGVKEDFRLAMERQVSRCGENLMVVLHRFCINEKILLLQTLT

SEQ ID NO: 784603 - protein, 556 aa, Homo sapiens
MSAQGDCEFLVQRARELVPQDLWAAKAWLITARSLYPADFNIQYEMYTIERNAERTATAGRLLYDMFVNFPDQPVVWREISIITSALRNDSQDKQTQFLRSLFETLPGRVQCEMLLKVTEQCFNTLERSEMLLLLLRRFPETVVQHGVGLGEALLEAETIEEQESPVNCFRKLFVCDVLPLIINNHDVRLPANLLYKYLNKAAEFYINYVTRSTQIENQHQGAQDTSDLMSPSKRSSQKYIIEGLTEKSSQIVDPWERLFKILNVVGMRCEWQMDKGRRSYGDILHRMKDLCRYMNNFDSEAHAKYKNQVVYSTMLVFFKNAFQYVNSIQPSLFQGPNAPSQVPLVLLEDVSNVYGDVEIDRNKHIHKKRKLAEGREKTMSSDDEDCSAKGRNRHIVVNKAELANSTEVLESFKLARESWELLYSLEFLDKEFTRICLAWKTDTWLWLRIFLTDMIIYQGQYKKAIASLHHLAALQGSISQPQITGQGTLEHQRALIQLATCHFALGEYRMTCEKVLDLMCYMVLPIQDGGKSQEEPSKVKPKFRKGTVTCFMTIL

SEQ ID NO: 784604 - protein, 414 aa, Homo sapiens [sequence omitted]

SEQ ID NO: 784605 - protein, 286 aa, Homo sapiens
MQDHPNYKYRPRRRKQVKRLKRVEGGFLHGLAEPQAAALGPEGGRVAMDGLGLQFPEQGFPAGPPLLPPHMGGHYRDCQSLGAPPLDGYPLPTPDTSPLDGVDPDPAFFAAPMPGDCPAAGTYSYAQVSDYAGPPEPPAGPMHPRLGPEPAGPSIPGLLAPPSALHVYYGAMGSPGAGGGRGFQMQPQHQHQHQHQHHPPGPGQPSPPPEALPCRDGTDPSQPAELLGEVDRTEFEQYLHFVCKPEMGLPYQGHDSGVNLPDSHGAISSVVSDASSAVYYCNYPDV

SEQ ID NO: 784606 - protein, 51 aa, Homo sapiens
PAKLYDNLGYLPEQDGSGFEMRSERWTAKEKESLGSQCKSIIVGKICCVLK

SEQ ID NO: 784607 - protein, 768 aa, Homo sapiens
IVEEKLLSEETECLLRAQFSDFKWELYNWRETDEYSAEMKQFACTLYLCSSKVYDYVRKILKLPHSSILRTSGQEAGGKPGDCDGLEAKCRKYFKEGVVHYVKCCWEIRWLSKCQPSPGFNSNIFSFLQRRVENGDQLYQYCSLLIKSIPLKQQLQWDPSSHSFQGFMDFGLGKLDADETPLASETVLLMAVGIFGHWRTPLGYFFVNRASGYLQAQLLRLTIGKLSDIGITVLAVTSDATAHSVQMAKALGIHIDGDDMKCTFQHPSSSSQQIAYFFDSCHLLRLIRNAFQNFQSIQFINGIAHWQHLVELVALEEQELSNMERIPSTLANLKNHVLKVNSATQLFSESVASALGYLLSLDLPPFQNCIGTIHFLRLINNLFDIFNSRNCYGKGLKGPLLPETYSKINHVLIEAKTIFVTLSDTSNNQIIKGKQKLGFLGFLLNAESLKWLYQNYVFPKVMPFPYLLTYKFSHDHLELFLKMLRQVLVTSSSPTCMAFQKAYYNLETRYKFQDEVFLSKVSIFDISIARRKDLALWTVQRQYGVSVTKTVFHEEGICQDWSHCSLSEALLDLSDHRRNLICYAGYVANKLSALLTCEDCITALYASDLKASKIGSLLFVKKKNGLHFPSESLCRVINICERVVRTHSRMAIFELVSKQRELYLQQKILCELSGHIDLFVDVNKHLFDGEVCAINHFVKLLKDIIICFLNIRAKNVAQNPLKHHSERTDMKTLSRKHWSSVQDYKCSSFANTSSKFRHLLSNDGYPFK

SEQ ID NO: 784608 - protein, 730 aa, Homo sapiens
IVEEKLLSEETECLLRAQFSDFKWELYNWRETDEYSAEMKQFACTLYLCSSKVYDYVRKILKLPHSSILRTWLSKCQPSPGFNSNIFSFLQRRVENGDQLYQYCSLLIKSIPLKQQLQWDPSSHSFQGFMDFGLGKLDADETPLASETVLLMAVGIFGHWRTPLGYFFVNRASGYLQAQLLRLTIGKLSDIGITVLAVTSDATAHSVQMAKALGIHIDGDDMKCTFQHPSSSSQQIAYFFDSCHLLRLIRNAFQNFQSIQFINGIAHWQHLVELVALEEQELSNMERIPSTLANLKNHVLKVNSATQLFSESVASALGYLLSLDLPPFQNCIGTIHFLRLINNLFDIFNSRNCYGKGLKGPLLPETYSKINHVLIEAKTIFVTLSDTSNNQIIKGKQKLGFLGFLLNAESLKWLYQNYVFPKVMPFPYLLTYKFSHDHLELFLKMLRQVLVTSSSPTCMAFQKAYYNLETRYKFQDEVFLSKVSIFDISIARRKDLALWTVQRQYGVSVTKTVFHEEGICQDWSHCSLSEALLDLSDHRRNLICYAGYVANKLSALLTCEDCITALYASDLKASKIGSLLFVKKKNGLHFPSESLCRVINICERVVRTHSRMAIFELVSKQRELYLQQKILCELSGHIDLFVDVNKHLFDGEVCAINHFVKLLKDIIICFLNIRAKNVAQNPLKHHSERTDMKTLSRKHWSSVQDYKCSSFANTSSKFRHLLSNDGYPFK

SEQ ID NO: 784609 - protein, 99 aa, Homo sapiens
ARAEKKAAGKGDLHEDPNCPTSRVNPDSTLVENKKPQLVVTARDSRRACCLSVCAVSYSGVPLLRYPGEGRTEMPGLQEDPRKDCHLHTGSLGRQSSSG

SEQ ID NO: 784610 - protein, 105 aa, Homo sapiens
MVILERRKTVQTEATQLAAEVRTEGSPVQDVKDRQQLEIGFVLPATPAARNASQISAAASTSEVHFSSDEGCFSGHTENQQVQLRTKLNHNFWLKTLRQTYLPAQ

SEQ ID NO: 784611 - protein, 79 aa, Homo sapiens
HHRHVVDELLEAVPAGGAAPRVAGIEQRLEAAQQLGVAHLPAVLLQEAQHRRLAHPGSRSGGGGGQRHGGALGSWLPGR

SEQ ID NO: 784612 - protein, 81 aa, Homo sapiens
RPELPVFQNVLWNIQGTLTASHMLQWPLDAKSLVTAWHGPIKEGASSNSCVFHTCRIQVHPGTMYLGICMYQIITKHRWTC

SEQ ID NO: 784613 - protein, 108 aa, Homo sapiens
DLRHSSYADRLCLTFDELQQSGHHQYTAVYPQNLTHATLPACTCPRPPLHCFAITWMDLASPSLPTVGACALYCAIVTSLSAPTPAAKPPLLVQTHTSTSQSWCECIH

SEQ ID NO: 784614 - protein, 122 aa, Homo sapiens
DWLALGWVPPPGSIYHGWGVGAQVPSRATCGEKWPGWVSLSRGSGQACVLRADMVGSGTWQSVRRPGFFLSKNRAFKSSVNTAHCASHFPCEKNHRKAQLHLHEKPRKPSHFPQVWFSQKCI

SEQ ID NO: 784615 - protein, 182 aa, Homo sapiens
MMDISAPFFRDPPAPLGEPGKPFNELWDYEVVEAFFLNDITEQYLEVELCPHGQHLVLLLSGRRKCVETRTSFIVQSVQRRDKMGRQSLSPWSYFPPNVTKFNSFAIHGSKDKRSYEALYPVPQHELQQGQKPDFHCLEYFKSFNFNTLLEKSGTTGIRPGVIGECVFRGMGTYDHFPYTFR

SEQ ID NO: 784616 - protein, 213 aa, Homo sapiens
PSPVTSAEKKKPVFEKSFVRLQMDFKIEHTWDGFPVKHEPVFIRLNPGDRGVMMDISAPFFRDPPAPLGEPGKPFNELWDYEVVEAFFLNDITEQYLEVELCPHGQHLVLLLSGRRKCVETRTSFIVQSVQRRDKMGRQSLSPWSYFPPNVTKFNSFAIHGSKDKRSYEALYPVPQHELQQGQKPDFHCLEYFKSFNFNTLLEKSGTTGSDLG

SEQ ID NO: 784617 - protein, 1462 aa, Homo sapiens
SRTRAQAYRERDILAALSHPLVTGLLDQFETRKTLILILELCSSEELLDRLYRKGVVTEAEVKVYIQQLVEGLHYLHSHGVLHLDIKPSNILMVHPAREDIKICDFGFAQNITPAELQFSQYGSPEFVSPEIIQQNPVSESDIWAMGVISYLSLTCSSPFAGESDRATLLNVLEGRVSWSSPMAAHLSEDAKDFIKATLQRAPQARPSAAQCLSHPWFLKSMPAEEAHFINTKQLKFLLARSRWQRSLMSYKSILVMRSIPELLRGPPDSPSLGVARHLCRDTGGSSSSSSSSDNELAPFARAKSLPPSPVTHSPLLHPRGFLRPSASLPEEAEASERSTEAPAPPASPEGAGPDAQGCVPRPSVIRSLFYHQAGESPEHGALAYVSRRHPARRRHLLKGGYIAGALPGLREPLMEHRVLEEEAAREEQATLLAKAPSFETALRLPASGTHLAPGHSHSLEHDSPSTPRPSSEAAVRHSDCLTTPGGPYQGHGAPSGSKQLPSTGGHPGTAQPERPSPDSPWGQPAPFCHPKQGSAPQEGCSPHPAVAPCPPGSFPPGSCKEAPLVPSSPFLGQPQAPPAPAKASPPLDSKMGPGDISLPGRPKPGPCSSPGSASQASSSQVSSLRVGSSQVGTEPGPSLDAEGWTQEAEDLSDSTPTLQRPQEQATMRKFSLGGRGGYAGVAGYGTFAFGGDAGGMLGQGPMWARIAWAVSQSEEEEQEEARAESQSEEQQEARAESPLPQVSARPVPEVGRAPTRSSPEPTPWEDIGQVSLVQIRDLSGDAEAADTISLDISEVDPAYLNLSDLYDIKYLPFEFMIFRKVPKSAQPEPPSPMAEEELAEFPEPTWPWPGELGPHAGLEITEESEDVDALLAEAAVGRKRKWSSPSRSLFHFPGRHLPLDEPAELGLRERVKASVEHISRILKGRPEGLEKEGPPRKKPGLASFRLSGLKSWDRAPTFLRELSDETVVLGQSVTLACQVSAQPAAQATWSKDGAPLESSSRVLISATLKNFQLLTILVVVAEDLGVYTCSVSNALGTVTTTGVLRKAERPSSSPCPDIGEVYADGVLLVWKPVESYGPVTYIVQCSLEGGSWTTLASDIFDCCYLTSKLSRGGTYTFRTACVSKAGMGPYSSPSEQVLLGGPSHLASEEESQGRSAQPLPSTKTFAFQTQIQRGRFSVVRQCWEKASGRALAAKIIPYHPKDKTAVLREYEALKGLRHPHLAQLHAAYLSPRHLVLILELCSGPELLPCLAERASYSESEVKDYLWQMLSATQYLHNQHILHLDLRSENMIITEYNLLKVVDLGNAQSLSQEKVLPSDKFKDYLETMAPELLEGQGAVPQTDIWAIGVTAFIMLSAEYPVSSEGARDLQRGLRKGLVRLSRCYAGLSGGAVAFLRSTLCAQPWGRPCASSCLQCPWLTEEGPACSRPAPVTFPTARLRVFVRNREKRRALLYKRHNLAQVR

SEQ ID NO: 784618 - protein, 70 aa, Homo sapiens
GKKIMTKSSKAIATKTKIDKWDLIKELLDSKRNHQQSKQTTYKIFTNDASNQGRISRICKEFKQLNKQKP

SEQ ID NO: 784619 - protein, 145 aa, Homo sapiens
RCASKGLSETATQMCRQTYTETDRDNPGKGADLRRQAPGEYPDPASPSPPSSSRGRCYPATAPSGTLGPDTGHHPLGSPSVPQCQDWEFGGLGHSPLQLWEAWWVWPHLCEHGGAARELKSALTAPLSNYQLIAPINTDGLAWLI

SEQ ID NO: 784620 - protein, 87 aa, Homo sapiens
MGCASPQEAPRLPHPSEERRACVCVEDWQLLQSALGPIWRRLCLPLNYTVMSRPGITAAPDGSWMPECSLSTGLQDRSERGAAEPAA

SEQ ID NO: 784621 - protein, 105 aa, Homo sapiens
HLQITARKKICLSFLKGTLALVLLLLIKQHLLTEKAANSKRTLSSVCQDSTSTAKASSNLALQWIPSQYQLLLNNPEKHSDPLPLSIDRINRKCLCVHKARKALN

SEQ ID NO: 784622 - protein, 103 aa, Homo sapiens
ERRWPPSSHALGNSPDSALCRPSLSDAPSADLQGGLNDVQDTTGVGDRKPPATALPSAFFSGPLGPGLSTAEGTGSGGTLLADASQALVWWVLEAPAGTPVAW

SEQ ID NO: 784623 - protein, 54 aa, Homo sapiens
KFDSNLDLTDLAWLSICWLLATFTIKSCAWPSACSAWLQHEMRIVGKLPQRLCG

SEQ ID NO: 784624 - protein, 201 aa, Homo sapiens
MLSPKIRQARRARSKSLVMGEQSRSPGRMPCPHRLGPVLKAGWLKKQRSIMKNWQQRWFVLRGDQLFYYKDKDEIKPQGFISLQGTQVTELPPGPEDPGKHLFEISPGGCWGAGEGAGQTPRRSCSWPAPSVTLEDWVQAIRRVIWAPLGGRDLWAALEETSPHERKYGPRLAPLLVEQCVDFIRERGLTEEGLFRMPGQA

SEQ ID NO: 784625 - protein, 128 aa, Homo sapiens
IQKKFAQTASFIMLPTASSKRRTFAARYFTRSKSLVMGEQSRSPGRMPCPHRLGPVLKAGWLKKQRSIMKNWQQRWFVLRGDQLFYYKDKDEIKPQVRSACPVCHGHRGRAPQEGRPCPGEGRKAQSH

SEQ ID NO: 784626 - protein, 54 aa, Homo sapiens
MPFTSGPHNLHPAQVDLASPNCASFISCKLLLKPAKRMSLLLLLHYCFDIAVVI

SEQ ID NO: 784627 - protein, 90 aa, Homo sapiens
MHTVASLLKLYLRELPEPVVPFARYEDFLSCAQLLTKDEGEGTLELAKQVSNLPQANYNLLRYICKFLDEVQAYSNVNKMSVQNLATVFG

SEQ ID NO: 784628 - protein, 64 aa, Homo sapiens
SDRTAPVCHALQCPLMSQASTEGLPRPLAESLGTCTIILPLQIRKLRQTTGRGRRGREFSSSSR

SEQ ID NO: 784629 - protein, 91 aa, Homo sapiens
PELRPNQELVTCALLNFRMQMDEKLLCLLFPLFSLRYCPPHLTQTKYLSHRSHPWVLTLLLCPRAGSFSWVLGLADFKNEAADLRSKCYSS

SEQ ID NO: 784630 - protein, 456 aa, Homo sapiens
MKIEEVKSTTKTQRIASHSHVKGLGLDESGLAKQAASGLVGQENAREACGVIVELIKSKKMAGRAVLLAGPPGTGKTALALAIAQELGSKVPFCPMVGSEVYSTEIKKTEVLMENFRRAIGLRIKETKEVYEGEVTELTPCETENPMGGYGKTISHVIIGLKTAKGTKQLKLDPSIFESLQKERVEAGDVIYIEANSGAVKRQGRCDTYATEFDLEAEEYVPLPKGDVHKKKEIIQDVTLHDLDVANARPQGGQDILSMMGQLMKPKKTEITDKLRGEINKVVNKYIDQGIAELVPGVLFVDEVHMLDIECFTYLHRALESSIAPIVIFASNRGNCVIRGTEDITSPHGIPLDLLDRVMIIRTMLYTPQEMKQIIKIRAQTEGINISEEALNHLGEIGTKTTLRYSVQLLTPANLLAKINGKDSIEKEHVEEISELFYDAKSSAKILADQQDKYMK

SEQ ID NO: 784631 - protein, 456 aa, Homo sapiens; identical to SEQ ID NO: 784630

SEQ ID NO: 784632 - protein, 456 aa, Homo sapiens; identical to SEQ ID NO: 784630

SEQ ID NO: 784633 - protein, 456 aa, Homo sapiens; identical to SEQ ID NO: 784630

SEQ ID NO: 784634 - protein, 497 aa, Homo sapiens
MKIEEVKSTTKTQRIASHSHVKGLGLDESGLAKQAASGLVGQENAREVWPVDQGVGGCKQGCCGERAAEVGGSGRDARARGLPPLFPQACGVIVELIKSKKMAGRAVLLAGPPGTGKTALALAIAQELGSKVPFCPMVGSEVYSTEIKKTEVLMENFRRAIGLRIKETKEVYEGEVTELTPCETENPMGGYGKTISHVIIGLKTAKGTKQLKLDPSIFESLQKERVEAGDVIYIEANSGAVKRQGRCDTYATEFDLEAEEYVPLPKGDVHKKKEIIQDVTLHDLDVANARPQGGQDILSMMGQLMKPKKTEITDKLRGEINKVVNKYIDQGIAELVPGVLFVDEVHMLDIECFTYLHRALESSIAPIVIFASNRGNCVIRGTEDITSPHGIPLDLLDRVMIIRTMLYTPQEMKQIIKIRAQTEGINISEEALNHLGEIGTKTTLRYSVQLLTPANLLAKINGKDSIEKEHVEEISELFYDAKSSAKILADQQDKYMK

SEQ ID NO: 784635 - protein, 456 aa, Homo sapiens; identical to SEQ ID NO: 784630

SEQ ID NO: 784636 - protein, 456 aa, Homo sapiens; identical to SEQ ID NO: 784630

SEQ ID NO: 784637 - protein, 289 aa, Homo sapiens
MKIEEVKSTTKTQRIASHSHVKGLGLDESGLAKQAASGLVGQENAREACGVIVELIKSKKMAGRAVLLAGPPGTGKTALALAIAQELGSKVPFCPMVGSEVYSTEIKKTEVLMENFRRAIGLRIKETKEVYEGEVTELTPCETENPMGGYGKTISHVIIGLKTAKGTKQLKLDPSIFESLQKERVEAGDVIYIEANSGAVKRQGRCDTYATEFDLEAEEYVPAKGMRHTQKNSSRCDLEDWMWLCAGPRGNKKPSHRGRPKSKQQTPGHIRASNTGDNLPGKSGRGRRN

SEQ ID NO: 784638 - protein, 118 aa, Homo sapiens
MKIEEVKSTTKTQRIASHSHVKGLGLDESGLAKQAASGLVGQENAREACGVIVELIKSKKMAGRAVLLAGPPGTGKTALALAIAQELGSKVPFCPMVGSEVYSTEIIKTLSKEEETKK

SEQ ID NO: 784639 - protein, 127 aa, Homo sapiens
DQGACATPGPAHPSIPCNRQPPPLLTTTRYAYPVTRNPGCNQEKLPSESLSKPEQTWLDRPLTRLGAAAPVFCGPRPGEDQSFVLGDSCLSCFSTNAHAPLSHNEPLRPTTDPGICCRGWKGPTREA

SEQ ID NO: 784640 - protein, 113 aa, Homo sapiens
VLLNWIIQYYGYNVIQYYGGICVIININNTGEISGRQKSEMALTEFKSRCWEGSTPLGGCGGGSISLPSPTYGLCIPWLVAPSSIFKASSVASSHLPHIPLTLTCLPLTKTLA

SEQ ID NO: 784641 - protein, 152 aa, Homo sapiens
DGLSALPGTHLDGLSSLPGKLVPDPPRLPGLGQMQSTSNPSVPRARRSCGRPLMPPGWACGLWRGITTLSQCPGLSPHILALKSGSEILPLPLPAALFARRSWSPPRLHPTRVEWSWGVGPNSTGPVLFQGCPGAPSQLQPQVLPRLHSNPH

SEQ ID NO: 784642 - protein, 93 aa, Homo sapiens
VVLLSASMPGREKNDKSPACEGFSCDKEGPWGRVAGAAEAQEGSTHLEAQAATETVTCVSLGQPCHQEQLARDRDSQLVPRAQENQAQHIVWL

SEQ ID NO: 784643 - protein, 71 aa, Homo sapiens
WVGAGCGGRPAVGASGGHWTFPGWPVAWELHLVRCREVVTSTLSAGMAGALRLGDEVGWRCPGLPCLLLPK

SEQ ID NO: 784644 - protein, 121 aa, Homo sapiens
DHCWHTFRADISVCALALNKMHFFLSAFLSFLMNRLQPSVDRDSESQTVYCDAALETDGATCASVDGVGRSRLLLELSCMLCALVICFTPCRIQGHHLENYYWYSHWMAGTWKNECSFQGS

SEQ ID NO: 784645 - protein, 107 aa, Homo sapiens
DLLEEVRRRGGRQSRVDLLEEMRRRGGRQAVQGGPAGGGETSAGGRSSQQQRPRPGYRLRSLLGHGPDPRMAGGGLKRSWPWGGGFLAADCRGGPGLDPCWAEAAGH

SEQ ID NO: 784646 - protein, 125 aa, Homo sapiens
LAGTQLPRMEGKRREVQLVGVLFIIWYSLPVECSLPLHTHTHTHTHTHTQCTQMLHSDRVPDVSTIGSCLSLDSCSDPLLLALWALPVLSQTLKQSGMRIVKPAMSLGISGTSELRFSSTPAGEM

SEQ ID NO: 784647 - protein, 108 aa, Homo sapiens
CSGAISAHCNLRLLGSSSSTSASRVARITGVRHQAQLFFAFLVKTGFHYVGHDGLELLTSGDLPNSASQNSGITGVSHRAQPHTFSIYSHTEEFLPPSPHWDRIFLLF

SEQ ID NO: 784648 - protein, 61 aa, Homo sapiens
AVPCRCVPFITWQHFPGCKEGDPKMAWQSYHFELEFAGLNTREDDPILTVPEVCRGVPLAE

SEQ ID NO: 784649 - protein, 112 aa, Homo sapiens
HTPASCRGIPLLITACPGHWHCGDHVTERVRLGSYAPELVTRCVGVWMRLFVCGSPVPSVGVGGTTCEAGRGSGPESGGGRALIFARFPRSFPAPPAPEAGWKEGGRHLLGS

SEQ ID NO: 784650 - protein, 84 aa, Homo sapiens
EGVEGGRARVRDEKCLVYKNQSTSTGLNQKKDKRSCKNPHLEALRHRAITGEAECANKLSLRDLSALFHFSRLLCILLAIQPEK

SEQ ID NO: 784651 - protein, 102 aa, Homo sapiens
LPPLHTHTHGGCSICQQTCVEPTACWVDPGDAEVTLPCPLGDPTEGEGMWRGEGMDPSHRYRMEGMPCALETEAGEPRPGSWSGRALQNAPRASARTSHVGG

SEQ ID NO: 784652 - protein, 102 aa, Homo sapiens
VNTLPAPTAARAQEFKTSLGNIARCPISHSTLSGLHLCAHSHSFTPSHLISSHSGSFILVYTHSHTHTLPTHDHTHMLKHSHSSTLACSNAPTPPKALGFQV

SEQ ID NO: 784653 - protein, 531 aa, Homo sapiens
MASYPEPEDAAGALLAPETGRTVKEPEGPPPSPGKGGGGGGGTAPEKPDPAQKPPYSYVALIAMAIRESAEKRLTLSGIYQYIIAKFPFYEKNKKGWQNSIRHNLSLNECFIKVPREGGGERKGNYWTLDPACEDMFEKGNYRRRRRMKRPFRPPPAHFQPGKGLFGAGGAAGGCGVAGAGADGYGYLAPPKYLQSGFLNNSWPLPQPPSPMPYASCQMAAAAAAAAAAAAAAGPGSPGAAAVVKGLAGPAASYGPYTRVQSMALPPGVVNSYNGLGGPPAAPPPPPHPHPHPHAHHLHAAAAPPPAPPHHGAAAPPPGQLSPASPATAAPPAPAPTSAPGLQFACARQPELAMMHCSYWDHDSKTGALQFAPRSLRAHRMPVQTDARMQGRATPAPVAADDAAASLTSHPLGPPLEPAPRVPLCFFAFLSSCRSSLSPQFMSSCAHLPDLCDLALPWPEAASLRAFYWARLFPEPQRLLPKFTAERARGGGATGRRQRRPLGLLSQVGALALRVPRPTAVQSMARRAGQD

SEQ ID NO: 784654 - protein, 129 aa, Homo sapiens
MSRFFTTGSDSESESSLSGEELVTKPVGGNYGKQPLLLSEDEEDTKRVVRSAKDKRFEELTNLIRTIRNAMKIRDVTKCLEEFELLGKAYGKAKSIVDKEGVPRFYIRILADLEDYLNELGKIRKGRRR

SEQ ID NO: 784655 - protein, 129 aa, Homo sapiens; identical to SEQ ID NO: 784654

SEQ ID NO: 784656 - protein, 129 aa, Homo sapiens; identical to SEQ ID NO: 784654

SEQ ID NO: 784657 - protein, 104 aa, Homo sapiens
RDLQGPLRPQTTAHSSFPHSLLAKVSLRPSPDSRSDERASMSFGGQSCKVTGQRVWNLGDLSVPHSRVAAVGPRAASPGLKSRTAIAAPLPILVSLLRTTRLSL

SEQ ID NO: 784658 - protein, 570 aa, Homo sapiens
MENLKSGVYPLKEASGCPGADRNLLVYSFYEKGPLTFRDVAIEFSLEEWQCLDTAQQDLYRKVMLENYRNLVFLAGIAVSKPDLITCLEQGKEPWNMKRHAMVDQPPVTYSHFAQDLWPEQGIKDSFQEVILRRYGKCGHEDLQLRTGCKSVDECNLHKECYDELNQCLTTTQSEIFQYDKYVNVFYKFSNPNIQKIRHTGKKPFKCKKCDKSFCMLLHLTQHKRIHIRENSYQCEECGKVFNWFSTLTRHRRIHTGEKPYKCEQCGKAFKQSSTLTTHKIIHTGEKPYRCEECGKTFNRSSHLTTHKRIHTGEKPYRCEECGRAFNRSSHLTTHKIIHTGEKPYKCEECGKAFNQSSTLTTHKIIHAGEKPYKCEECGKAFYRFSYLTKHKIIHTGEKFYKCEECGKGFNWSSTLTKHKRIHTGEKPYKCEQCGKAFNESSNLTAHKIIHTGEKPYKCEECGKAFNRSPKLTAHKVIHSGEKPYKCEECGKAFNQFSNLTKHKITHIGDTSYKYLECDKAFSQSSTLTKHKVIHTGEKPYNCEEYGKAFNQSSNLIEQSNSYWRETLQM

SEQ ID NO: 784659 - protein, 133 aa, Homo sapiens
MENLKSGVYPLKEASGCPGADRNLLVYSFYEKGPLTFRDVAIEFSLEEWQCLDTAQQDLYRKVMLENYRNLVFLAGIAVSKPDLITCLEQGKEPWNMKRHAMVDQPPDGVSLLLPKLRLHSSLGHRARLHLKS

SEQ ID NO: 784660 - protein, 106 aa, Homo sapiens
RSPGDADVAGLGTLLFPSLLSAASPRKQQQWDAVRMSSCSPAHAAAPSVPLPLLGHAACGAPCFSTRPHTLTLQGVVPLSLSNSTDLFPAANTHAVISPIFRTQLS

SEQ ID NO: 784661 - protein, 62 aa, Homo sapiens
MQEEDFLRRTGNLTTRGLGMHSWRAEPGDEPRRVHCPTIGQPGAEPNRGRAHRDKRPELHKG

SEQ ID NO: 784662 - protein, 106 aa, Homo sapiens
RWSFALSPQLECNGGILAHYKPHLPGSSDSPTSASRVTGITGTHHHVRLIFVETRFHHVGQAGLELLISGDSPTPASQSARITGVNHRIRPNIIFLLRPYLAYLTL

SEQ ID NO: 784663 - protein, 281 aa, Homo sapiens
MSHGTYYECEPRGGQQPLEFSGGRAGPGELGDMCEHEASIDLSAYIESGEEQLLSDLFAVKPAPEARRLKGPGTPAFPHYLPPDPRPFAYPPHTFGPDRKALGPGIYSSPGSYDPRAVAVKEEPRGPEGSRAASRGSYNPLQYQVAHCGQTAMHLPPTLAAPGQPLRVLKAPLATAAPPCSPLLKAPSPAGPLHKGKKAVNKDSLEYRLRRERNNIAVRKSRDKAKRRILETQQKVLEYMAENERLRSRVEQLTQELDTLRNLFRQIPEAANLIKGVGGCS

SEQ ID NO: 784664 - protein, 92 aa, Homo sapiens
GAGPAGNCSFREETRVLFWVSWLGRSAKTGKWHYTMSIYASCRHQKEVHCHAKSLTKNSIKKHKSHNKKPTSHLVTRVGLKWWHLIISHDQF

SEQ ID NO: 784665 - protein, 114 aa, Homo sapiens
KRHVGLSFSGGSCIPAVSLFYLQPKDPCLGLFGPRQASQCFWKLSETDIYCLSPFTAFLPLGPQRELERDVSTFHSPHLYLQSDRIETAWPALAWELGMVKSQESARLARPPKG

SEQ ID NO: 784666 - protein, 130 aa, Homo sapiens
DSCRSLSGVEPQRIWCPDLPKSHRQHVLLAMGHSHGYGKLAWQGLFGWGVSPRAVLPSAREALAEVSEERQDAPRNLLAFRIPISCQCFPFLLPFSSPRLSVLVSCSVKSAPREDLGDGNNPQGLEGSSR

SEQ ID NO: 784667 - protein, 131 aa, Homo sapiens
AHAVAAQSSIMLQAVARAVLMDGEVGDIGGRVGGAHSVRHLHTAGQRLPGFLRAHPPLSARQGLVRGVQDVIHHLLRKGQALPQRLPLLQPREVDQVDLEPIQAARAERAALGELQQGPRHVAAQVVEVRR

SEQ ID NO: 784668 - protein, 293 aa, Homo sapiens
MAQEIDLSALKELEREAILQVLYRDQAVQNTEEERTRKLKTHLQHLRWKGAKNTDWEHKEKCCARCQQVLGFLLHRGAVCRGCSHRVCAQCRVFLRGTHAWKCTVCFEDRNVKIKTGEWFYEERAKKFPTGGKHETVGGQLLQSYQKLSKISVVPPTPPPVSESQCSRSPGRLQEFGQFRGFNKSVENLFLSLATHVKKLSKSQNDMTSEKHLLATGPRQCVGQTERRSQSDTAVNVTTRKVSAPDILKPLNQEDPKCSTNPILKQQNLPSSPAPSTIFSGGFRHVSLIPMLF

SEQ ID NO: 784669 - protein, 225 aa, Homo sapiens
MAQEIDLSALKELEREAILQVLYRDQAVQNTEEERTRKLKTHLQHLRWKGAKNTDWEHKEKCCARCQQVLGFLLHRGAVCRGCSHRVCAQCRVFLRGTHAWKCTVCFEDRNVKIKTGEWFYEERAKKFPTGGKHETVGGQLLQSYQKLSKISVVPPTPPPVSESQCSRSPGRKVSAPDILKPLNQEDPKCSTNPILKQQNLPSSPAPSTIFSGGFRHVSLIPMLF

SEQ ID NO: 784670 - protein, 293 aa, Homo sapiens; identical to SEQ ID NO: 784668

SEQ ID NO: 784671 - protein, 141 aa, Homo sapiens
MGIFLVLVRGTEKESETSLSSQTPALEEQRRMASSPEPQSSYLDHGHRERREGCWGTPILVFGMWSRVSYVPRGYTQGAGDPFLGRQPSPLQRPSLAQAAPRTPAFAAPSSPDRSPGAWEEASPAGQPELSGSHSLRAGVE

SEQ ID NO: 784672 - protein, 86 aa, Homo sapiens
SEAQKRSQGQRGKTERLGITLWKAMKMAAVIYRENVYREGRTLGRAPGCGSQLEEKAGQEVGGWMEAWIEHGPMNEWMQGFTYKRP

SEQ ID NO: 784673 - protein, 170 aa, Homo sapiens
MSRSSGCPSRSSCPGFQPPRSLQSLPSAQFSLHRGSNLSDPLGPPRSQGHRRLGRVRSAFFRDNLRSAHPWPPRPALLPRGCGGLRARLAGALLTVAHRPCAPASSPAVRGRSPGRARPGGWRQAAGGGGERWREGGGRRAGRSQRANKASSARDSPALSAFILSPALLF

SEQ ID NO: 784674 - protein, 35 aa, Homo sapiens
ISDVDYDSYRDPPCSGHSGLECRALIAGLGSHAVL

SEQ ID NO: 784675 - protein, 107 aa, Homo sapiens
LEDVLVERKILICWLKIDSSRSTAVVVNILTFCLYSCAALTSCITLSESFILFCLFLFWRWSLTLLPRLECGGVILAHCDLHLLGSSDPPASASRVAGITGTCHHPC

SEQ ID NO: 784676 - protein, 63 aa, Homo sapiens
LQLLDPIQSGSSLCSSTPPAPGPGGSRLTSLPLPQPAGYELSGPCSVLVSVHGSPAAGGPKGS

SEQ ID NO: 784677 - protein, 58 aa, Homo sapiens
CGMNGQKYEPACVVGTLLIVVGYDFGTRCKMREWRLAWMCTNKTIGKYEREAESHRGQ

SEQ ID NO: 784678 - protein, 148 aa, Homo sapiens
LNLPGSIDCTLACPVPGTTAMRHHTQLIFVFLVEMGFCHIGQADLELLAPNDSPISASQSCGITGAKITFRKCFLTILLNYFFIIFIGADSLRQAIRFNAADYSPGGSSSSNHILYATDRRFLSSTVSSTSIPATFFIDSTIPSYRSA

SEQ ID NO: 784679 - protein, 184 aa, Homo sapiens
RRSAQTARGFVFVGCVSVSAGASEALAPQPHTPELRVARADFSSEAHNRGRPPCRGSGQSQLFPAPGSLSRVPPDSMPPRGAAGATRALAPQSLCAGGGAGRPAPGAWAAAQRPKMRERRGREAGQAPHSRRPARGKKVEKAVWGQTLGSEKPRFRGRTRGGRTHGVQGTLFAAPARRAVGARP

SEQ ID NO: 784680 - protein, 138 aa, Homo sapiens
MPTEVALLHVSQSPTKAATRRPAHPECGAPIPTQPAAPTEERRGDPAPPSPQPARSPPLRQCLRQGLRVLLATPKERLVPRRVAAALPPLCAGKRQSLPEPRPEATRGSPGRGAGPGVRFPRRSRAVPRGCGTVGRAA

SEQ ID NO: 784681 - protein, 103 aa, Homo sapiens
DTHMQPLLHSHSGPPCDNTGCPSVSGSAPFTLMCCLDGDCMITVIMRGPQALGVLSPLELICPYICCPGPRHPTDHIQAPCSGPTGLWWTWGGARLLTLKGQR

SEQ ID NO: 784682 - protein, 105 aa, Homo sapiens
VPVLWCTVSWCTVSWCTVSWCSSLQSTQTHSLHSYQQVDFRRKSKCISPCTHYSTDPLSLAVTYAPYYSKQSPPRQPHDTCLQTSKDFIASDTFLFLISTPPPPT

SEQ ID NO: 784683 - protein, 37 aa, Homo sapiens
TRFTTFCRSCPLLRSSPQCSFFFPPVQAKAGLEVPTT

SEQ ID NO: 784684 - protein, 64 aa, Homo sapiens
MPKLYSQCHGEAPSGPVKRGRLSLTNKSDQLSVIKAKCQRRKSNGCRGREVTILEMNTSKTKKH

SEQ ID NO: 784685 - protein, 57 aa, Homo sapiens
KRGSPEAEVRGPHENRGTPGAQRWGQHVLGVSTKASGSSEFSLSKLLLIHSLIHSAK

SEQ ID NO: 784686 - protein, 196 aa, Homo sapiens
VFPFSACTVQNESISELTMSPTAPEKMESNSTFTSFENTTVWFLGTINCITVALVFSKGKPFRQPTYTNYIFVLVLIIQLGVCLFILFADIPELYRRLDLLCTPVLWRASIVIMLSLNFIVSLVAEEAVIENRALWMMIKRCFGYQSKSQYRIWQRDLANDPSWPPLNQTSHSDMPECGRGVSYSNPVFESNEEQL

SEQ ID NO: 784687 - protein, 93 aa, Homo sapiens
ASGWENLASIVIMHGISCVPVAEEAVIENRALWMMIKRCFGYQSKSQYRIWQRDLANDPSWPPLNQTSHSDMPECGRGVSYSNPVFESNEEQL

SEQ ID NO: 784688 - protein, 127 aa, Homo sapiens
VFPFSACTVQNESISELTMSPTAPEKMESNSTFTSFENTTVWFLGTINCITVALVFSKGKPFRQPTYTNYIFVLVLIIQLGVCLFILFADIPELYRRLDLLCTPVLWRASIVIMLSLNFIVSLVAEL

SEQ ID NO: 784689 - protein, 45 aa, Homo sapiens
DNRCGLAEVGHHSFVAAMKELKPAFTAGFFAPELVKNVMLLFGRA

SEQ ID NO: 784690 - protein, 41 aa, Homo sapiens
RGIQCLWSHEGKPQVSLTTLATADGPRNGLWGQRGSPSREF

SEQ ID NO: 784691 - protein, 71 aa, Homo sapiens
VPGITSHKRNKSKTHKPASTYTWLLKRTRVNGTCPSVLEEENRNPSNQPINQTKNKFHNESTYFVFLHFGV

SEQ ID NO: 784692 - protein, 177 aa, Homo sapiens
PFQRLQLLLLNPLKEMSNINHPDIRLKQLECVLQILQSQGDSLGPGWPLVLGVMGAIRNDQGESLIRTAFQCLQLVVTDFLPTMPCTCLQIVVDVAGSFGLHNQELNISLTSIGLLWNISDYFFQRGETIEKELNKEEAAQQKQAEEKGVVLNRPFHPAPPFDCLWLCLYAKLGELC

SEQ ID NO: 784693 - protein, 96 aa, Homo sapiens
GSRAEQQGEPVFREWAEQQEPGERKENLASWGHRSQGRAASGEIRGVRVEEHHKNAEDAKALSCWVTSESIRVMGGAVSLQWMKEDGREDSRTLGV

SEQ ID NO: 784694 - protein, 157 aa, Homo sapiens
  misc_feature (143)..(143): Xaa can be any naturally occurring amino acid
MFLSLCVQPTLKERVLRAHNYKQMSMNLTFCHSPYSTFTQVKANYILTSIPQFSASSTTLGRSEESTTVHSSPVATATTPSPARSTTSGLVEESTTYHSSPGSTQTMHFSLKATQLQAVVKNQQLPTAAQHNTISSAPKHISXLVEELPATQQPGLK

SEQ ID NO: 784695 - protein, 128 aa, Homo sapiens
MFLFPCKAVRVRGPCMARGWPSCCLPTLGCDCLVPRPLWGCGRLTPHPLGGVAILLPAHWGMAILFPALWGVAILPPAHWGMATCSPPTGVDHPAPCPLGLAILLPAHRGCGHPAPCPLGLAILFPTH

SEQ ID NO: 784696 - protein, 44 aa, Homo sapiens
LQLENLHNHSMDLHIHHDSYGNHNHNNHNNLHIHNNLEDIHNHL

SEQ ID NO: 784697 - protein, 108 aa, Homo sapiens
PPPWGEPRSERPPPRTKCWALGLSERDVPKGGNRIGCQETLQSACPYELETKLSKVSTHTCTLAHAYTYGQPHAAATPTVHAHTLCVKAHLGSRPQRPAGCLQTKGGR

SEQ ID NO: 784698 - protein, 89 aa, Homo sapiens
MGAQHPQTERSDLQTLPGAMPSTWQLADLDSPFLIFLAVPPPGRLVLHLCWSCWAELASDVLYLVWGPLASSGNLASPDLPSTCHIDSL

SEQ ID NO: 784699 - protein, 109 aa, Homo sapiens
SVMEPERAWTPDHPQPLLSTSFSSADLSRGCVHICSPLPLLPLGPPAPTLPSCPPPSQTLPSQPRGESSLHLPHQDPAGAVRYWPLSQHHQALRPQTHAPVLRFLAGFP

SEQ ID NO: 784700 - protein, 131 aa, Homo sapiens
PSPSPSKVTQPITITIQSHQPLHHHYHQALHHHPKSPRPMTITIQSLPDPSSSPFEVTQTHHHHHPKSPSPSPSLSKVTSPFTITIQSHPDPSPSPPKVTQPLHHLHPKSPNLSPSAHHWLPPLSVRLSLK

SEQ ID NO: 784701 - protein, 69 aa, Homo sapiens
EMRMPETSLTEPPQRKGTPQSSREWEELLTRLGPRDPVQQQQQQAEPRRAERMPAVSAQFGEHLDQVEW

SEQ ID NO: 784702 - protein, 88 aa, Homo sapiens
MMIGYKDSLLVMVSENWKMESSSVAQAGVYGTISAHCNLRLPGSSDSFASASQVAGSTGAQHHAYANFCIIEMGFHCVNQNGLDLLTS

SEQ ID NO: 784703 - protein, 95 aa, Homo sapiens
DPAFLLGLHPTSTQKRVHDVHGSINLTVKGGNNPDVHQLMKRMDKTWRVVHLHSRTRLCHRKEGGTPQATTQRNSAEEFGRQRSHVVGSTVRKCL

SEQ ID NO: 784704 - protein, 75 aa, Homo sapiens
EMTVGAEMTAIKRAEQRRRGRGMMQALSFLKEEQLLSEFAEMGELEELGELADTVTKGLHPRGSWLLPFPWNDGH

SEQ ID NO: 784705 - protein, 106 aa, Homo sapiens
INLHERRDPNPGSRSQSLCSYLPNFPSHQLHSIANKLLVLVLRQVCFFSDQWRLPSAQTSAKKGDGTTELEIRLCTMKWLRHGDKGGVLTVSDKSTHWARRSGSAL

SEQ ID NO: 784706 - protein, 88 aa, Homo sapiens
NEPAGTQRVVGFPVLRESFNIPVAGGEAGPTVSPSRQGWRAGVLSVPHTQASPGSVSTWGLPKALSPKLSHSKLRTLQGGGCGPGDGM

SEQ ID NO: 784707 - protein, 87 aa, Homo sapiens
MPLRAPHWPLLLTSWVFCYNCSWLRLYDEEFMPLSSHKATHVAIMASPSWGAIEQQACLGEILAGMAVGTVQSSCGSAALLVASTHS

SEQ ID NO: 784708 - protein, 66 aa, Homo sapiens
QVVWAPFPLMVDRETAPETSSRDIPQVQRVRQAGALPPALDHWDPQPRARVTEPPPPHAAQRLIAA

SEQ ID NO: 784709 - protein, 66 aa, Homo sapiens
MPVTPAPGPRATRLAPFSPSASWPRGPESWEPEGVNEGQSCLGDSMLCFSPREANGAYHLQGLLQL

SEQ ID NO: 784710 - protein, 200 aa, Homo sapiens
SKECSIQSCLYQFTSMELLMGNNKLLCENCTKNKQKYQEETSFAEKKVEGVYTNARKQLLISAVPAVLILHLKRFHQAGLSLRKVNRHVDFPLMLDLAPFCSATCKNASVGDKVLYGLYGIVEHSGSMREGHYTAYVKVRTPSRKLSEHNTKKKNVPGLKAADSESAGQWVHVSDTYLQVVPESRALSAQAYLLFYERVL

SEQ ID NO: 784711 - protein, 60 aa, Homo sapiens
MEGRADLTSDSCCACIRDASRVHGELPAYAQPPRGLGSGICRREAWNITLPAFLTTEAAR

SEQ ID NO: 784712 - protein, 131 aa, Homo sapiens
VFKHRSYLMWHQQTHTGEKPYECSECGKAFCESAALIHHYVIHTGEKPFECLECGKAFRRSAAYLQHQRLHTGEKLYKCKECWKAFGCRSLFIVHQRIHTGEKPYKCEACGKGFTRNIDLHIHFRVHTGEK

SEQ ID NO: 784713 - protein, 96 aa, Homo sapiens
FSSLCQRLPDAAPLEAMKTKKKLNTQEMLPLICPGKDTDPVTLSPPQGAEHPSIWSHPASHDIQVIAQTRDRLGPGTLALATRLLLVLPAGTREAG

SEQ ID NO: 784714 - protein, 50 aa, Homo sapiens
MWLSQNYAGWFSCSSSGVWRVAWGVAGQHYCLSSCMPRVVFTLKSTPWSK

SEQ ID NO: 784715 - protein, 111 aa, Homo sapiens
MQSGTHWRVLGLCLLSVGVWGQDGNEEMGGITQTPYKVSISGTTVILTCPQYPGSEILWQHNDKNIGGDEDDKNIGSDEGSPVTEGIFRIGAKWLLCLLPQRKQTRRCGTF

SEQ ID NO: 784716 - protein, 78 aa, Homo sapiens
GAAGSTVMMQELARPHPGPCSRWCKPVWRLWEGLLIISITAVRTRTRSQVPTHTWCPHHPTEASSGAFHGTGQRNHDE

SEQ ID NO: 784717 - protein, 75 aa, Homo sapiens
EGNPVMCDNVDEPKVIMLSETTQAQKDRYCMSLICGSKTVTTHRNRVGQWLPGAGGMQTVAMLIKGVTSRHKVKF

SEQ ID NO: 784718 - protein, 37 aa, Homo sapiens
PSQHELPAKEPSDWEQIQNSFISLTDRTFLLNCGLKT

SEQ ID NO: 784719 - protein, 93 aa, Homo sapiens
MGSTFSQSAGALCLLPLVDLKAGPIVLLPDAHVPAIQDLQGELLSSHGILRTLSQILPILHSELSSGFSLRVETQIVITAHKALSLSLPPPPP

SEQ ID NO: 784720 - protein, 172 aa, Homo sapiens
EGPGAFPAGRGAPDCGAPWAGAQVSRASGAGRGRPGASALPAPALRCTPARGAGEGSAPPPGGCQGELGRRRGRPGTVRPHPPRQGALRRRGRHWLRALGAAAAGAAGGSRAGPFLLPLSFLSPPLPLARCRRHFPRFLLPLQSGGREGAAGAFLPACKLQRDSRLPSPPRP

SEQ ID NO: 784721 - protein, 146 aa, Homo sapiens
TLKPACAYLHSPLDCRWVPGLCIQKVPSECPMNKPHTNCLGVGHHRRHPLQGPGRGTGLVNVPYRVRGQVGAGLGSWSLRHHSSACRAIPGSKLEAGLSGTPASCHCTPVDGLTKALPELRTEETEQEKGQRASSQEAFQEESFGL

SEQ ID NO: 784722 - protein, 107 aa, Homo sapiens
EAQRRAVLDENHMGQSQEGATRPGSDGQGDADSPGHDDGVSERVADGHVTIVGHQHQQETFAVSKTQTEKGLRHAASKGDGLGWMQEVRQHLGHRVAGVGDVDDSQV

SEQ ID NO: 784723 - protein, 88 aa, Homo sapiens
MASCTNRGGLPEKHSSSKVSSHAQMIQKAVDFLDLLIGHLSKFSPVMIVFQFSPLGFLVRQSSADNVQFLSFAPSLILPSGTGNWLVW

SEQ ID NO: 784724 - protein, 109 aa, Homo sapiens
LGGGACSEPRSRHCTPAWATERDSISKKKKEKEKRKITTIILAYENACDVKITKSYQLFPKDCREMHPLLPTGISGCGIMHFSSCTFYLYFWIYYIIREGKAGHGGSRL

SEQ ID NO: 784725 - protein, 57 aa, Homo sapiens
MRDPAVTDGAVQPRYYTFPMVFANRRLGDSLGCLHHQGPGFQAQNWAAIWADTELAA

SEQ ID NO: 784726 - protein, 143 aa, Homo sapiens
DKALGASQEGLSPLPVPELGLGSERSKDLPSLRAKRESAHRWGEGAGWGWGAWECDTASSPFLTYGPLPTQAFPTSAPSLGRCRRSTGWGGLSHHMEHRHSPQPLPAALTAPAEEGHRGLYSHLGESETRVVPPVPAGGERAG

SEQ ID NO: 784727 - protein, 85 aa, Homo sapiens
GSHRQAPNGSILHQTPAPMWEAHLSAQGGGSAQCVWEEGGDTGNTVAAAPLASKPGSLITSHGTLTFLVCFLICERGSNSPCLLM

SEQ ID NO: 784728 - protein, 154 aa, Homo sapiens
SSSESLVNIRTEGNNGLGYFYHKFSDLYKDTSSHLLQAGTKVISQARLVGNLCAPRGLPSQVTTFVRSLPFLKHLAPHMPLKTDMQSTESHSPEARVGSSESEAAGSLRPAEGAAPYRASVFAATGLPGSSPSSVFRLEYEDARKSSAFKQSLV

SEQ ID NO: 784729 - protein, 72 aa, Homo sapiens
ITIIDIAVITITIFNITITIMIYLGAQEGVSSHLEESTLMMRFGIFTEQENIISSSRHARDIDHQRTECFLF

SEQ ID NO: 784730 - protein, 60 aa, Homo sapiens
SCPVCIDSEDPSRGMHTTGKGAHTRPDAAAQAQRGSEAQPATDLTWAWVSLVLVKISPTA

SEQ ID NO: 784731 - protein, 99 aa, Homo sapiens
LYSAQTPHIPATAAPQSLSTHMLSTKHVLVAIPRTIRAWPSSGKKKYTFFPEYYPTNTLCLDHRSQTLQQNRRNLHTPYLINWEKSITQVFLRVHGRCM

SEQ ID NO: 784732 - protein, 92 aa, Homo sapiens
MGAGDSASAWDDNPGSSSRPESKRLRREVWVFGGGTLGGKGSKGRRRSVTPPGPSAGEAPSDAAGIPRGAAGWPSSRVLPPSQAGPGPAPRA

SEQ ID NO: 784733 - protein, 118 aa, Homo sapiens
CQIPSGPYLKATADCVCSDSTVWPCMQVLPSTLFSHSLSWGSRHSTSTSKEATLFHTSTHFAYAHARFFHLPTCFWKLFFASLLLQSILAQASSLASECRVLQGDADHAGDSSFLCQS

SEQ ID NO: 784734 - protein, 108 aa, Homo sapiens
PRRRSCQGWSLGHVVTFPQQQSRSGIQSESGRAQICSVVWLPSLPWEEAIRCPVDAFPEASASLHLHSGGSAFDPSSAFSSTLPRRVQWSGPTSLQHLPGAAWPWTFV

SEQ ID NO: 784735 - protein, 114 aa, Homo sapiens
AHAHVHRHMHTHTCMHASVHTCTCTHIHAHTYMHTHAHRHTPAHRHTHAHTRMHTPCVHTCTHTYAHTMRPHMHTPTCTHIHAHTYRYTPAHRHMHPHTCTCTHIHALTQARIN

SEQ ID NO: 784736 - protein, 71 aa, Homo sapiens
SGETREIEATVNHDHIPLLDLNGTAACKSHLVDLRHDKARTIWSTLDMALLWLSPTLVAEIRLKKTKTIQQ

SEQ ID NO: 784737 - protein, 136 aa, Homo sapiens
MGSSVPTFPVPCSFLGRTEARPRKVRATLAGRSRTSATGRRRDTFFLWAKLPPPRSERQGASGPAQEAALFLTESRSCRCPPEGPTRLPLACRAPWRSRRPPALPLAPSSGARFSPKPLICSALSASRVTRRLARG

SEQ ID NO: 784738 - protein, 96 aa, Homo sapiens
MLASCPPFSTSESTRAALHGGPMRQPRPQRLALLLCPVPVKAQQALTGPSPLLTAPHSAPHPHCASSPCLAWATVPSCSDQSPGCLSLFPTSTLAP

SEQ ID NO: 784739 - protein, 62 aa, Homo sapiens
ITVPADVTPERVPTHIVDYSEHSIDKVTSRWIPLINERTDKDSRLPLILVWNKSDLVEYSSI

SEQ ID NO: 784740 - protein, 62 aa, Homo sapiens
MRPDQPPDTPPSYCLGYSSPLLCSCLLAPLCWLWLLYPRPPSGSLFPKVGCNKSQTQRLTNH

SEQ ID NO: 784741 - protein, 75 aa, Homo sapiens
NGSRRHWGRPNGSHLCCWNSSYQTTFHVCGRSASIGISSEGTAMACRIAGVFFDPRCFIRFLLCVFCDLAAWDCF

SEQ ID NO: 784742 - protein, 105 aa, Homo sapiens
PGLHPQCSSPSPQVEGGEGQGEHPFYCIHVQEIECPLPSTFKESAPGLSPGSVPRVELPREGWSAWSQSTLSPEPLDIHPEHQTYSVTLSSAVAFKKKFFSFSKT

SEQ ID NO: 784743 - protein, 166 aa, Homo sapiens
GATSPPRGGPSTPSTSVAGGVDPLGLPIQQTEAGADLQPDTEDPTLVGPPLHTPETEESKTQSSGDMGLPPASKSWSWATLEVPVPTGQPERVSRGKGSPKRSQHLGPSDIYLDDLPSLDSENAALYFPQSDSGLGARRWSEPSSQKSLRDPNPEHEPEPTLDTVD

SEQ ID NO: 784744 - protein, 81 aa, Homo sapiens
RQGAPCSLLRRVSVEPTLRQGAPWGHTHVCILSSETTIIRANVCWYLHTLCMISFIFTDEETEATWRLRNSPRVSLSSPCR

SEQ ID NO: 784745 - protein, 100 aa, Homo sapiens
MEELGLAWLLLMLACVCMPVCVCVCVCVCVCVSEWEEALSSSSLFSVSSLLSSHFFLMAQVTAPPPGCHAVIFHYHLYLFQIVKRGQKFFSFLGAVTKHI

SEQ ID NO: 784746 - protein, 90 aa, Homo sapiens
NTQWQIRDIDTNLPVEVACKYLKGNGFEGPLVEPPAKGRKRVEKCPGKDVPQSPFMGHPVLSLVQDCQAPPPFPEHPHFPAAEARSSAGH

SEQ ID NO: 784747 - protein, 83 aa, Homo sapiens
RTRPTTHCTSSRSVRGRVCGAGTRQKCGPKQHPWEPLGIMLWPAKPLRQRQQLWLPSSWTPCCLERQLFLPPFHGHFPSYDTG

SEQ ID NO: 784748 - protein, 58 aa, Homo sapiens
MNLNRNPGHQALRGFLVGEHMAMAGELAPWPHWEGYGSAVFPGPTGRGMEALCPWAPW

SEQ ID NO: 784749 - protein, 33 aa, Homo sapiens
CQAFIFCHLLPLYNAEKFVVCTHAGLVPASVPV

SEQ ID NO: 784750 - protein, 84 aa, Homo sapiens
EDSNIEARILDSSLYHISHTEPSEKSCVVLSSEYPEPEHFSSPSSSSLSSFVWILANVLPTLPTLQSHPHGTLTISAWPPWASM

SEQ ID NO: 784751 - protein, 146 aa, Homo sapiens
RRPGTAAGWLLAHSTVMETLGALLVLEFLLLSPVEAQQATEHRLKPWLVGLAAVVGFLFIVYLVLLANRLWCSKARAEDEEETTFRMESNLYQDQSEDKREKKEAKEKEEKRKKEKKTAKEGESNLGLDLEEKEPGDHERAKSTVM

SEQ ID NO: 784752 - protein, 146 aa, Homo sapiens; identical to SEQ ID NO: 784751

SEQ ID NO: 784753 - protein, 146 aa, Homo sapiens; identical to SEQ ID NO: 784751

SEQ ID NO: 784754 - protein, 108 aa, Homo sapiens
VCVCVCVCFNVFYPYPLIYTLVVSTLAIMTNAAMNKRVQISLQRVVSLPLSRYPEKGLLGHTVILFLIPIGTSVLFFTVAAPIYIPTNNAQRLPFVHILVNTYYPLSF

SEQ ID NO: 784755 - protein, 69 aa, Homo sapiens
FHFTSLSVYSSTASTAHRCRFAHIEKVLFQLQDPPFLKSLSLHLFGSHVLTAAWCSPNLHGINLKLRDN

SEQ ID NO: 784756 - protein, 628 aa, Homo sapiens
YSHLPRRKRMSVAHMSLQAAAALLKGRSVLDATGQRCRVVKRSFAFPSFLEEDVVDGADTFDSSFFSKEEMSSMPDDVFESPPLSASYFRGIPHSASPVSPDGVQIPLKEYGRAPVPGPRRGKRIASKVKHFAFDRKKRHYGLGVVGNWLNRSYRRSISSTVQRQLESFDSHRPYFTYWLTFVHVIITLLVICTYGIAPVGFAQHVTTQLVLRNKGVYESVKYIQQENFWVGPSSIDLIHLGAKFSPCIRKDGQIEQLVLRERDLERDSGCCVQNDHSGCIQTQRKDCSETLATFVKWQDDTGPPMDKSDLGQKRTSGAVCHQDPRTCEEPASSGAHIWPDDITKWPICTEQARSNHTGFLHMDCEIKGRPCCIGTKGSCEITTREYCEFMHGYFHEEATLCSQVHCLDKVCGLLPFLNPEVPDQFYRLWLSLFLHAGVVHCLVSVVFQMTILRDLEKLAGWHRIAIIFILSGITGNLASAIFLPYRAEVGPAGSQFGLLACLFVELFQSWPLLERPWKAFLNLSAIVLFLFICGLLPWIDNIAHIFGFLSGLLLAFAFLPYITFGTSDKYRKRALILVSLLAFAGLFAALVLWLYIYPINWPWIEHLTCFPFTSRFCEKYELDQVLH

SEQ ID NO: 784757 - protein, 628 aa, Homo sapiens; identical to SEQ ID NO: 784756

SEQ ID NO: 784758 - protein, 99 aa, Homo sapiens
YSHLPRRKRMSVAHMSLQAAAALLKGRSVLDATGQRCRVVKRSFAFPSFLEEDVVDGADTFDFSSYLCPVSPSIRLSDGTLWERLWPWSGGREQGGRHK

SEQ ID NO: 784759 - protein, 88 aa, Homo sapiens
RFRLRTALSVGAEPQELWNEDDVKLREELGPPLRHAYRKVPFSRIPGGPGSRSICRYWERRRTRKPSAKGRVGGGDWRSGRGTRGGVT

SEQ ID NO: 784760 - protein, 76 aa, Homo sapiens
MGEPLGPISEGPLREDPGPGDKAAGGSHNIKKRAGGENRRRFLEQSQEGRSGGPSRGFLSPGSSGETEKFKLTAGC

SEQ ID NO: 784761 - protein, 43 aa, Homo sapiens
GKVKMFALLIGFLTDTGSEISVCQNMSCTSCDYTGSQVQIHTP

SEQ ID NO: 784762 - protein, 148 aa, Homo sapiens
LNIHRNQTATSAEHFTGKKNSPHEGKLIWWKDNKNKTWEIGKVITWGRGFACVSPGENQLPVWIPTRHLKFYNEPIRDANENASAETENPQSSIIDSQGEQNGDIRRTNEVTIHQENGTCGEPGRRIERKRDRDQRQTQKVRLGREIV

SEQ ID NO: 784763 - protein, 59 aa, Homo sapiens
KSESAKECVTTHLPNQLALKMDGAGASGPYPAVAGSREWTGAAGAARSARVWCASEGGG

SEQ ID NO: 784764 - protein, 451 aa, Homo sapiens
MHGYFGCNAAAEPGYSAFVGTPQICVTKMSTRNCQGMDSVIKPLDTIPEDKKVRVQRTQSTFDPFEKPANQVKRVHSENNACINFKTSSTGKESPKVRRHSSPSSPTSPKFGKADSYEKLEKLGEGSYATVYKGKSKVNGKLVALKVIRLQEEEGTPFTAIREASLLKGLKHANIVLLHDIIHTKETLTLVFEYVHTDLCQYMDKHPGGLHPDNVKLFLFQLLRGLSYIHQRYILHRDLKPQNLLISDTGELKLADFGLARAKSVPSHTYSNEVVTLWYRPPDVLLGSTEYSTCLDMWGVGCIFVEMIQGVAAFPGMKDIQDQLERIFLVLGTPNEDTWPGVHSLPHFKPERFTLYSSKNLRQAWNKLSYVNHAEDLASKLLQCSPKNRLSAQAALSHEYFSDLPPRLWELTDMSSIFTVPNVRLQPEAGESMRAFGKNNSYGKSLSNSKH

SEQ ID NO: 784765 - protein, 514 aa, Homo sapiens
CASLPGPPRRWWRRRRRFPRGARPRRCLSCAWTSLGKLSGLRVAQMCDLIEPQPAEKIGKMKKLRRTLSESFSRIALKKDDTTFDEICVTKMSTRNCQGMDSVIKPLDTIPEDKKVRVQRTQSTFDPFEKPANQVKRVHSENNACINFKTSSTGKESPKVRRHSSPSSPTSPKFGKADSYEKLEKLGEGSYATVYKGKSKVNGKLVALKVIRLQEEEGTPFTAIREASLLKGLKHANIVLLHDIIHTKETLTLVFEYVHTDLCQYMDKHPGGLHPDNVKLFLFQLLRGLSYIHQRYILHRDLKPQNLLISDTGELKLADFGLARAKSVPSHTYSNEVVTLWYRPPDVLLGSTEYSTCLDMWGVGCIFVEMIQGVAAFPGMKDIQDQLERIFLVLGTPNEDTWPGVHSLPHFKPERFTLYSSKNLRQAWNKLSYVNHAEDLASKLLQCSPKNRLSAQAALSHEYFSDLPPRLWELTDMSSIFTVPNVRLQPEAGESMRAFGKNNSYGKSLSNSKH

SEQ ID NO: 784766 - protein, 514 aa, Homo sapiens; identical to SEQ ID NO: 784765

SEQ ID NO: 784767 - protein, 361 aa, Homo sapiens
NSPGFLIRVPPAPSLPTSPKFGKADSYEKLEKLGEGSYATVYKGKSKVNGKLVALKVIRLQEEEGTPFTAIREASLLKGLKHANIVLLHDIIHTKETLTLVFEYVHTDLCQYMDKHPGGLHPDNVKLFLFQLLRGLSYIHQRYILHRDLKPQNLLISDTGELKLADFGLARAKSVPSHTYSNEVVTLWYRPPDVLLGSTEYSTCLDMWGVGCIFVEMIQGVAAFPGMKDIQDQLERIFLVLGTPNEDTWPGVHSLPHFKPERFTLYSSKNLRQAWNKLSYVNHAEDLASKLLQCSPKNRLSAQAALSHEYFSDLPPRLWELTDMSSIFTVPNVRLQPEAGESMRAFGKNNSYGKSLSNSKH

SEQ ID NO: 784768 - protein, 340 aa, Homo sapiens
MLALTLRPPPLAKSHLKLGGTPAPARVNGKLVALKVIRLQEEEGTPFTAIREASLLKGLKHANIVLLHDIIHTKETLTLVFEYVHTDLCQYMDKHPGGLHPDNVKLFLFQLLRGLSYIHQRYILHRDLKPQNLLISDTGELKLADFGLARAKSVPSHTYSNEVVTLWYRPPDVLLGSTEYSTCLDMWGVGCIFVEMIQGVAAFPGMKDIQDQLERIFLVLGTPNEDTWPGVHSLPHFKPERFTLYSSKNLRQAWNKLSYVNHAEDLASKLLQCSPKNRLSAQAALSHEYFSDLPPRLWELTDMSSIFTVPNVRLQPEAGESMRAFGKNNSYGKSLSNSKH

SEQ ID NO: 784769 - protein, 448 aa, Homo sapiens
MSTRNCQGMDSVIKPLDTIPEDKKVRVQRTQSTFDPFEKPANQVKRVHSENNACINFKTSSTGKESPKVRRHSSPSSPTSPKFGKADSYEKLEKLGEGSYATVYKGKSKVNGKLVALKVIRLQEEEGTPFTAIREASLLKGLKHANIVLLHDIIHTKETLTLVFEYVHTDLCQYMDKHPGGLHPDNVKLFLFQLLRGLSYIHQRYILHRDLKPQNLLISDTGELKLADFGLARAKSVPSHTYSNEVVTLWYRPPDVLLGSTEYSTCLDMWGVGCIFVEMIQGVAAFPGMKDIQDQLERIFLVLGTPNEDTWPGVHSLPHFKPERFTLYSSKNLRQAWNKLSYVNHAEDLASKLLQCSPKNRLSAQAALSHEYFSDLPPRLWELTDNRFSGVWGPGRGEGPKRSYRQLPPSAWGTGVRASGRTETLGQRRSVRDCSDCQAGKGATDRGR

SEQ ID NO: 784770 - protein, 423 aa, Homo sapiens
MSTRNCQGMDSVIKPLDTIPEDKKVRVQRTQSTFDPFEKPANQVKRVHSENNACINFKTSSTGKESPKVRRHSSPSSPTSPKFGKADSYEKLEKLGEGSYATVYKGKSKVNGKLVALKVIRLQEEEGTPFTAIREASLLKGLKHANIVLLHDIIHTKETLTLVFEYVHTDLCQYMDKHPGGLHPDNVKLFLFQLLRGLSYIHQRYILHRDLKPQNLLISDTGELKLADFGLARAKSVPSHTYSNEVVTLWYRPPDVLLGSTEYSTCLDMWGVGCIFVEMIQGVAAFPGMKDIQDQLERIFLVLGTPNEDTWPGVHSLPHFKPERFTLYSSKNLRQAWNKLSYVNHAEDLASKLLQCSPKNRLSAQAALSHEYFSDLPPRLWELTDMSSIFTVPNVRLQPEAGESMRAFGKNNSYGKSLSNSKH

SEQ ID NO: 784771 - protein, 108 aa, Homo sapiens
MVVQYRRQLYSTGHDCTAQGTVTVQDTVVQYRTQLYSTGDGYTAQGTVVQYRAWLYSTGDSYTVQSTVVQYHPAGCQMTWMYHFPSLGGGYNWYRTWTFALFTKWSEN

SEQ ID NO: 784772 - protein, 149 aa, Homo sapiens
CAGDSCYSGFRSDHRHGSKGCRTRDPREANIGGDGSGTRSFAGLQAAPQVQAATGGPGSARGPGQAPARRREGEGKGTPGRSHLNSARRGEPPGSHAHAGPGAQARQVTPADARARPGGASLPPLPRPYLDAPRRAASSRLSAPAPRGR

SEQ ID NO: 784773 - protein, 93 aa, Homo sapiens
NPAPQPRTHLPTHLAPGPISAVLKPMPKLSCLGHFSTGHPEATTPHWPLLLYLLCWLFLLYGHLKDGCYTLNPEPSPSLPAVDAAANLVVVVD

SEQ ID NO: 784774 - protein, 55 aa, Homo sapiens
FSAHAFTFHHLPILWFWVTQSPSRDETFDERVEIAVPHHLEIHTPRSLSIGVGEN

SEQ ID NO: 784775 - protein, 139 aa, Homo sapiens
EEEEEEEEEPGSLERVEKSRKKKKKRNQNKEQTNRKNQNEKPDGRSRYGMKMCARMSRERDTRRRGRRRERRGSARGHVGRCAGQDRRWAQAGWEAAEEGGWGCAAPAVAQRGRAQGPLPETDAKGSAREAGGWREGPR

SEQ ID NO: 784776 - protein, 95 aa, Homo sapiens
KGKLELEMFPILLDGRPLQGFMDSEFGLMCPLQDGDPSTCNVKSCGIEKYLLTQRKYRGGRALWLTPVIPALWEAEAGRSRGQEIETIMANTVKH

SEQ ID NO: 784777 - protein, 77 aa, Homo sapiens
ALGCYGGWHLSALPGNTQSSGPIPALACGLSCDHQGLETQQGVAWVLAGHCQRPGLHEDLQGMLLPSVLSKARSWTF

SEQ ID NO: 784778 - protein, 195 aa, Homo sapiens
DVSVVENAPTGTELLMLRATDGDLGDNGTVRFSLQEAETDRRSFRLDPVSGRLSTISSLDREEQAFYSLLVLATDLGSPPQSSMARINVSLLDINDNSPVFYPVQYFAHIKENEPGGSYITTVSATDPDLGTNGTVKYSISAGDRSRFQVNAQSGVISTRMALDREEKTAYQLQIVATDGGNLQSPNQAIVTITV

SEQ ID NO: 784779 - protein, 107 aa, Homo sapiens
HCPLLFRCRDCPSPSEPPALWCFVAQPQFNHGTPQPPGSCGVGVQGTPRHEGWCSAKATWPRHLSLCKRIERGNILLRRENSEDFKMKLSLSGASFLRTVSRIHTRR

SEQ ID NO: 784780 - protein, 101 aa, Homo sapiens
ALPPIPGANKLILLCNCTMTCTGKSSFPGYKAPLGESFWFALALIFCFGDFACDNITPELWQPSYHHEETATGIKSQSSEDLEERTEPGSQGITETQINSK

SEQ ID NO: 784781 - protein, 79 aa, Homo sapiens
MKFMERKKEKTHSHEQSQLGGMLLLYFCFLNYVCVCVHVCVCACACACMCFEGEGGLIAENGLIHSVDAAANLVVVGGR

SEQ ID NO: 784782 - protein, 47 aa, Homo sapiens
YKPPGINVSGLSVLGFLQRLLATQTHQATDLSSTSTFLQQPQSDQAT

SEQ ID NO: 784783 - protein, 88 aa, Homo sapiens
PPPTSFILQVDGHPVALPFLQEPLLYVELRGHTVILHAQPGLQVRLQGESGWAACWELQSCLGLCICRGGGDASYLLAKKGKEWGTGV

SEQ ID NO: 784784 - protein, 144 aa, Homo sapiens
GSVQDKAPALSPGSCCPRCLPRPASCMAFGDPHYRTFDGRLLHFQGSCSYVLAKDCHSGDFSVHVTNDDRGRSGVAWTQEVAVLLGDMAVRLLQDGAVTVDGHPVALPFLQEPLLYVELRGHTVILHAQPGLQVCCGMGSPRWR

SEQ ID NO: 784785 - protein, 178 aa, Homo sapiens
GSVQDKAPALSPGSCCPRCLPRPASCMAFGDPHYRTFDGRLLHFQGSCSYVLAKDCHSGDFSVHVTNDDRGRSGVAWTQEVAVLLGDMAVRLLQDGAVTVDGHPVALPFLQEPLLYVELRGHTVILHAQPGLQVRLQGESGWAACWELQSCLGLCICRGGGDASYLLAKKGKEWGTGV

SEQ ID NO: 784786 - protein, 128 aa, Homo sapiens
MTDCEFGYIYRLAQDYLQCVLQIPQPGSGPSKTSRVLQNVAFSVQKEVEKNLKSCLDNVNVVSVDTARTLFNQVMEKEFEDGIINWGRIVTIFAFEGILIKKLLRQQIAPDVDTYKEISLFCCGVHNE

SEQ ID NO: 784787 - protein, 128 aa, Homo sapiens; identical to SEQ ID NO: 784786

SEQ ID NO: 784788 - protein, 101 aa, Homo sapiens
SGPSKTSRVLQNVAFSVQKEVEKNLKSCLDNVNVVSVDTARTLFNQVMEKEFEDGIINWGRIVTIFAFEGILIKKLLRQQIAPDVDTYKEISLFCCGVHNE

SEQ ID NO: 784789 - protein, 82 aa, Homo sapiens
MSPGPPAQGLQEKSGQAGVSSVLDRPMPPQVLLASDRPPCLPLDCSVHLCPRSLDRLVGREGGPGEREGEQRLQPDALSYEA

SEQ ID NO: 784790 - protein, 102 aa, Homo sapiens
MPGDQETMIWAAHSPAGSRAKSHQCPFRSGAPPLPRRDRLPAERAGTSTFSAEAPFPSIGSSAAAGPQPEAVRDPRESLPVSLSKEDGPWRSPPCPLSTQIC

SEQ ID NO: 784791 - protein, 44 aa, Homo sapiens
SVYLILHPTVIEQESVKVTRPITSLQKNYSCCISELSRSLCINF

SEQ ID NO: 784792 - protein, 60 aa, Homo sapiens
GTGQVLCSVSPPSKGGGVFSRTCTPLAEKSLWTQAACCPLRALGRHRLPCEGQPGTGPGC

SEQ ID NO: 784793 - protein, 92 aa, Homo sapiens
ARQNSLWTSQKSRPSGTFLPPSENVTEKHNYRKDLRQVFKTQEWASLENGIQGLGRRLRRLLQLLLIFTVSRYCFGSFQTLERVFMALLTPE

SEQ ID NO: 784794 - protein, 131 aa, Homo sapiens
AKGAGRKEQVRRDRRWGESRDPTRVEELRELRGRKRLGAREGPSPREIGCGKIEERQKVPNLDSLLQGTRKVKTKTQRCHYLGCYFRNRTCPLRTTFFFFFFFEMESCSIEQAGVQWRGLSSLEALPPGFK

SEQ ID NO: 784795 - protein, 136 aa, Homo sapiens
MAHTRPTKSKPEQTRQQHTPIDPAPPHYHQRRRKPNARAGQAQPPQNKTAERRDGRRKDGKKPERKRSTKRTQPEHRANRQKAREQEETATDPKDKTTTAPKPATGSRNQPRSKRHRGRRKRPKAPTTERDRAKEG

SEQ ID NO: 784796 - protein, 62 aa, Homo sapiens
CQCGDSSVTMSSYSFDFPGSWEVHVHNSFPSLGRAGPPQPGICVILKILASDSPTHSHPWFG

SEQ ID NO: 784797 - protein, 117 aa, Homo sapiens
GLQELAVVGWGWGRWGEDGTYLIPQARDLSLWRHLVSSWRGEHGRSVCFLLRSPIHRENRAIMGAHAASPPTNISMSPPFLSLPCHPEAEEGPFCSGLIWPPVPRWYPSQEPYNMAL

SEQ ID NO: 784798 - protein, 104 aa, Homo sapiens [sequence omitted]

SEQ ID NO: 784799 - protein, 148 aa, Homo sapiens
LGSDWSHLADAGTETGESLNESAAHSPRGRRTLGPASSRARSAGSCDSSSSSFLPLPSSGHPDPPLPTAIPSGGGGHFPETLRPLGRRSLEKESILSKAQSHTLSGSGLSAPWAGSPSGESHLVIPFVLLFSLPSRLARAATGAEGAA

SEQ ID NO: 784800 - protein, 72 aa, Homo sapiens
YNSLVHLVDLNTPEGRDDAGIAPGLREHSLIYQRLGHPPWGLQEDDLVLNLHSAGYEPVISTPFPPLTAETR

SEQ ID NO: 784801 - protein, 104 aa, Homo sapiens
MTEQRSAFRFRGVGATVNQQTGTQDRLWDCGEIGRQLMSGATSSVAPPAFRAQVGGVMGVPRLLLPLLPSARIRPSLYRVYELSSFSFNTSLHMGGCHRRGEYD

SEQ ID NO: 784802 - protein, 110 aa, Homo sapiens
RLSLEGQRCRLGERSGSGHAGFPVPLRYAHGDVFRREQQIFGVLVLLLPGEVARVTSINQGPERTCLNSPPMQGGEPGLGSRSQLLVSSGQCWCCPWHSHKTGQVGANVS

SEQ ID NO: 784803 - protein, 108 aa, Homo sapiens
LDFSTPNRWKTYNCAVWYLLPPCGRRRSYLWRTKTILDRSMLTGTFKVEQGIVASINIILRNQRVMSKVCVSFGNKTSINERSVHPEIQDQKQIELSCYYLKSVLVLF

SEQ ID NO: 784804 - protein, 125 aa, Homo sapiens
LPGWLCWMCGRQDAWLLDTSWGGCRALPTEHWRISPHFSKGLAIKVPWGTVARVIREFGVDSPFGLGPALKEPLQGTHSSASGVRRRLRGRCCTRREPLGDQGVSDPSGLSPSPFQLRGPHLYWA

SEQ ID NO: 784805 - protein, 142 aa, Homo sapiens
MGGYCMLAICSKEAFWWGKWEDPGTGLLAERVLSAPTAWLLGGGIVGTLRAVTSEGTELASGLRAMDSHSSGSIATDRMLGSDWRLGATRLTSEVISPLALDIPVPHLARVPSLIVFTVDSLALMRSSSATERWGWLARSGW

SEQ ID NO: 784806 - protein, 168 aa, Homo sapiens
MTRKVQNIIFHENYSSPGLHDDIALVQLAEEVSFTEYIRKICLPEAKMKLSENDNVVVTGWGTLYMNGSFPVILQEDFLKIIDNKICNASYAYSGFVTDTMLCAGFMSGEADACQNDSGGPLAYPDSRNIWHLVGIVSWGDGCGKKNKPGVYTRVTSYRNWITSKTGL

SEQ ID NO: 784807 - protein, 92 aa, Homo sapiens
SHTCSGKGTGVEAEAQFESKLCEVQACTPGLVPGSLGTPVSSSSPYCHLTSSATSCHMRSSHTGQVAGRVLHPLKSLTCPQLGFRSAWHHSY

SEQ ID NO: 784808 - protein, 125 aa, Homo sapiens
VRKCSSPSNTPILGVSLSPNINIAPGNQTLSVVLKAQVRKHRAIQLIPLLVGLGMATATGTGIDSLSTSLSYYYTLSKDFSDSLQEITKSILTLQSQTDFLFQKFPLNKNYKKIIQKKEQLDIFV

SEQ ID NO: 784809 - protein, 101 aa, Homo sapiens
EDEGGYTDICSPPRALHREWPLWPWLKCCKGVGLCNYQILQVTNPAMHFFLDRRQGLPEERKTLCTQLELFRVKAETCSIDSKLINCHGVVFSLFPPSTSD

SEQ ID NO: 784810 - protein, 36 aa, Homo sapiens
REQVQPSPGGAGSPLRCAGSGLGVPGFHLPGPEGQR

SEQ ID NO: 784811 - protein, 107 aa, Homo sapiens
QSDNRESYLAKCLRLFLLFQSRLLPHSVSKTLGREAESGSGRAFFSFTCSCRPRALTPLRPTSPDRTFHGSLLCIFPQLDSCLLSHSANLPRPCRHSGSQNQLGCQD

SEQ ID NO: 784812 - protein, 45 aa, Homo sapiens
MPAIPARWERGHRLPGPGLLPPGATQCDLERKRTGRDRQKLPTLP

SEQ ID NO: 784813 - protein, 91 aa, Homo sapiens
CWDYRREPLCQPRIFKKGVSLSRPHSSAGHLCAGQNCSTLLSSPVKAAERMSRLRPELYLGFSSLEVIMDFAKSDGAEIGPVCVKELEEVK

SEQ ID NO: 784814 - protein, 132 aa, Homo sapiens
LSGHVSGLLPPIRQYPMPWDSGGSGIPAFHLFFHLFVLFTLCTKKRGLYYHRLLFLNRNSGWAQWNTPVIPALWEAEAGGSPEVSSSRPAWPTWPNPVSTKNRKISWAWWCASVIPATQKSDAGELLKTQEV

SEQ ID NO: 784815 - protein, 88 aa, Homo sapiens
PTETSPTPHGLTNAEEELTLPSCTDSMLVCSERRLVFATPVASITIPQNSIHGQGIFLIFTMRTECLLNEEIKGVHSGGLVDSQSQGF

SEQ ID NO: 784816 - protein, 109 aa, Homo sapiens
MQDTGNIIIKQWLGCKATTMPTGRRRNPVSVFHGSSFLRFFPKALTITRLRILSPSMTIMWPSRTPPAVLHISEGLGNIHMAAVGSRHPQEKTKPYPRRKRWRPSQMQR

SEQ ID NO: 784817 - protein, 74 aa, Homo sapiens
IPYPPSLLFSVFMGTLIPQQYWSHSIFLSNHNRAYHCCLQAWQHHVWPPTLPNWTPLPLSSLEIDAVAIYATAA

SEQ ID NO: 784818 - protein, 195 aa, Homo sapiens
SIIFIFVNEALSVILRSVHSAVNHTPTHLLKEIILVDDNSDEEELKVPLEEYVHKRYPGLVKVVRNQKREGLIRARIEGWKVATGQVTGFFDAHVEFTAGWAEPVLSRIQENRKRVILPSIDNIKQDNFEVQRYENSAHGYSWELWCMYISPPKDWWDAGDPSLPIRTPAMIGCSFVVNRKFFGEIGLLDPGMDV

SEQ ID NO: 784819 - protein, 252 aa, Homo sapiens
MLLLDLMSSPSPQLLVAAAQQTLGMGKRRSPPQAICLHLAGEVLAVARGLKPAVLYDCNCAGASELQSYLEELKGLGFLTFGLHILEIGENSLIVSPEHVCQHLEQVLLGTIAFVDVSSCQRHPSVCSLDQLQDLKALVAEIITHLQGLQRDLSLAVSYSRLHSSDWNLCTVFGILLGYPVPYTFHLNQGDDNCLALTPLRVFTARISWLLGQPPILLYSFSVPESLFPGLRDILNTWEKDLRTRFRTQNDF

SEQ ID NO: 784820 - protein, 72 aa, Homo sapiens
SRLREKAKLICNSSVHQSTLQSLNAVETLGLVPVTHSERARVKRCELCVLHVEIAFQQSPCPWSNSAFRARS

SEQ ID NO: 784821 - protein, 70 aa, Homo sapiens
RPLPLQIGNTDIPQSSRNPSSLCIHTHNRSFSYVPTSVRTPDSGIPGTLRNICVTNMASLLSGVGHNFNC

SEQ ID NO: 784822 - protein, 293 aa, Homo sapiens
GEDRGTAMAESSESFTMASSPASVGEAMILSPSSPGRSSRRTDALTSSPGRDLPPFEDESEGLLGTEGPLEEEEDGEELIGDGMERDYPRHPQSWTPYDGRGDLALDDEERRGAAGQLSMDRSHQRAIAASVTAHAWARATKQTATYTQTETSLPMRPADRTERRTPASPLAHSKAALAHEPPSREPPAERYPYQLRSRTPQRLESGLRQERPSSAPHPPGAPGLPSQLGRAASPQWRGGLSRPKLLCTLTDTARIVGPRGESGLPHGATPTARRQKYRNPHNTPCTTVAPHA

SEQ ID NO: 784823 - protein, 139 aa, Homo sapiens
MEFSPTGLSCRGRWEGPINSTPLPSLSSVPIENEDKRQDKAAGEQNVMVITNHSDSGACGLANAEGQDGLSCPLRYRQCWALQEVAPPCPSWERVERTHAPCRHAGSPQKGLSYTYLPISSLRFTHRYSHQCKEPGEEP

SEQ ID NO: 784824 - protein, 143 aa, Homo sapiens
ALTESLVQSSFTRDMGLQKPPSLIPGYTSNMQTPPGLSPPCLGQVTSHIYTHTRTRIHTPLWRAGHCPPVPIPETSMLAVWTQPLSARIPGTQVPSLRSHAEELPLLHSRPHQLVIFCDFLGNSRPLLSHGHSHDHGLPSMRL

SEQ ID NO: 784825 - protein, 108 aa, Homo sapiens
MGPKAGQSQSRTLKDRQMQNWEWTCRDGKLEKDGSMNMHVRVHRFGRAWWLTPVIPALWEAEAGRSPQVRNSRPAWPTRRHPVSTKNTKLVRHGGDACNPSYLGGQGR

SEQ ID NO: 784826 - protein, 61 aa, Homo sapiens
GTYIVREQVCGQWSLIMPLVFRLGVRQTNSAWKTSPADLLPQMECEVTIGPASKNRNLRLK

SEQ ID NO: 784827 - protein, 98 aa, Homo sapiens
MCSLMEPMRHHLHPTLWIKYREEWSPKKNGGAVARRRGGRCGPEKQQTPSAPTFLQSYCQVLASGMEEPFTLQDFTLAIWPLREAQTKLTPFPRASHI

SEQ ID NO: 784828 - protein, 429 aa, Homo sapiens
MSGTSSPEAVKKLLENMQSDLRALSLECKKKFPPVKEAAESGIIKVKTIAARNTEILAALKENSSEVVQPFLMGCGTKEPKITQLCLAAIQRLMSHEVVSETAAGNIINMLWQLMENSLEELKLLQTVLVLLTTNTVVHDEALSKAIVLCFRLHFTKDNITNNTAAATVRQVVTVVFERMVAEDERHRDIIEQPVLVQGNSNRRSVSTLKPCAKDVYMLFQDLCQLVNADAPYWLVGMTEMTRTFGLELLESVLNDFPQVFLQHQEFSFLLKERVCPLVIKLFSPNIKFRQGSSTSSSPAPVEKPYFPICMRLLRVVSVLIKQFYSLLVTECEIFLSLLVKFLDADKPQWLRAVAVESIHRFCVQPQLLRSFCQSYDMKQHSTKVFRDIVNALGSFIQSLFLVPPTGNPATSNQAGNNNLGGSVSAPAN

SEQ ID NO: 784829 - protein, 162 aa, Homo sapiens [sequence omitted]

SEQ ID NO: 784830 - protein, 71 aa, Homo sapiens
KLRRGVLEPGATSVPARSRVGTTPEPTVHALAAAPTLSLIGMVDFTELYGVTRPTGLETILSLNNVIYNEF

SEQ ID NO: 784831 - protein, 76 aa, Homo sapiens
ARTFGGGRGGLSREVFLSNVLVLYGVGAMVMLRPASPCGISIPGALWAVSPRGISIPGALWAASPCGISIPGRAEA

SEQ ID NO: 784832 - protein, 126 aa, Homo sapiens
MQGHVTFEDIAVYFSQEEWGLLDEAQRCLYHDVMLENFSLMASVGCLHGIEAEEAPSEQTLSAQGVSQARTPKLGPSIPNAHSCEMCILVMKDILYLSEHQGTLPWQKPYTSVASGKWFSFGSNLQ

SEQ ID NO: 784833 - protein, 126 aa, Homo sapiens; identical to SEQ ID NO: 784832

SEQ ID NO: 784834 - protein, 148 aa, Homo sapiens
MAEAALVNTPQIPMVTEEFVKPSQGHVTFEDIAVYFSQEEWGLLDEAQRCLYHDVMLENFSLMASVGCLHGIEAEEAPSEQTLSAQGVSQARTPKLGPSIPNAHSCEMCILVMKDILYLSEHQGTLPWQKPYTSVASGKWFSFGSNLQ

SEQ ID NO: 784835 - protein, 77 aa, Homo sapiens
FAACERVRGLGVSGSLGPGQVTGAGNRWRWCPPAEELAWSRSERRPAICHRTHAGSRALPPAFPGPAPPKVPWPRQR

SEQ ID NO: 784836 - protein, 50 aa, Homo sapiens
RRGLSQERREFQLLPGWVLINTGPLLSLPVPCCIHIMSRYDSSTKANAPG

SEQ ID NO: 784837 - protein, 84 aa, Homo sapiens
FPFPKTSSERSTYPLADSTKREFQHCSIHRRVQLCELNAIITEKFLRRLLSRFYAKIYPFRTKATEWSKYPLADPTKRVFQTAE

SEQ ID NO: 784838 - protein, 38 aa, Homo sapiens
MEWSGVAGHVTGLEVQHYKHGAHIHNILKRRSWAVGWS

SEQ ID NO: 784839 - protein, 99 aa, Homo sapiens
LRGKGGHEGLTHGVERQNRKWATSWFPGEGFGQAGGPPGPTRDGDQKGGHWCLMLVKGSFHKSCSLKWLSVLHSLRTGMLMSPALGAIPQPSTQMLVTR

SEQ ID NO: 784840 - protein, 102 aa, Homo sapiens
EGRVYIFTDLVRRFIWGQNQVLWGEPTSGNRSSQAREKHPECQGGKGPRNPTLVNTIFFRYGIRQHNLTEDLPGCPGQWEKARWVSRSPGLNNIRVFPCFLD

SEQ ID NO: 784841 - protein, 112 aa, Homo sapiens
PHCGSRKRVTRAINLLVMAPPAASPDGGTGPTPEQVGPPRLDLRGRRCAASPDAGPGRARPPLPPHPPAPGPAAGFPKGFCSGLGCRGFDFFTTRLRRLFAWKSPAIKTKNK

SEQ ID NO: 784842 - protein, 75 aa, Homo sapiens
  misc_feature (33)..(33): Xaa can be any naturally occurring amino acid
  misc_feature (39)..(39): Xaa can be any naturally occurring amino acid
EICLGIKQRRPQSTTISAQEGLGNSSSCPGQVXAPNAWXSAWMWSEEAPLHHHLYTGRMAVAQAAEPGAWINKKF

SEQ ID NO: 784843 - protein, 102 aa, Homo sapiens
VRTCCLQVRGTSSTCGKFPDIPCHCPFSFVHLTVSIESPWNIQHLIDQKQTRSCPHGAPRPGKGRSWREQLYPTIPGPTHTLHLRGSRVFTIDSAWCINHLV

SEQ ID NO: 784844 - protein, 92 aa, Homo sapiens
GTRRDIPELPHTELEALAVEETLSQLCSELQMLNNPEKIAEQISKDLAWLTSHMMTLWTQFLDTVTLHSQVTTYLTQEHHTLRVSGQLLCIL

SEQ ID NO: 784845 - protein, 114 aa, Homo sapiens
EVFAKDSKGSALDAGRDPKHPALPETLCESGWASNTAPTAPPQPGWCLCGKDFKSSCQTPGREKERRLATMHGSCSFLMLLLPLLLLLVATTGPVGALTDEEKRLMVELHNLYR

SEQ ID NO: 784846 - protein, 118 aa, Homo sapiens
MGRQRPRGLDPRLCCQASRVKVGLIFRLVPGPFILSVSQSVIPTGPETFFFFETEFRSCCPDCSPQPPSPGFKRFSCLSLPSSWDYRHVPAHLANFCILSRDGVSPCWPGWSRIPDLK

SEQ ID NO: 784847 - protein, 72 aa, Homo sapiens
RTICANLVRTPDRIAHYSPELLDSSDLPASASRGARITGVSHCLAINFPILTEDYLELEMELSSWMWFNSST

SEQ ID NO: 784848 - protein, 65 aa, Homo sapiens
MVGHLAGHRPCPQEQTPRTTADAAAGLAAHGPDREGTEEGREKKQTKNQGGFPVLPRRVALERGH

SEQ ID NO: 784849 - protein, 149 aa, Homo sapiens
VRPLSLSPGQRAFCILRFLLWYTGRIRSHVGLENECKVLLSGSSSQQMGEPEERWCGKVVFPWSRVSQWLELSSLRPSQTRHSSTRLWPAGVLVPVGMLSTFSQYPAAGVFLLMFSCLCLGVFIGTAWGCGGPGWSWEMQHLGVKAGVP

SEQ ID NO: 784850 - protein, 130 aa, Homo sapiens
IQCGGFEEFFRYPLCSSPPSWAPTDLLGSPRPLSTAPFSSVSSAFFSSDDVILLSSGSPIISSACSHLPVSFCCEYLLFSVYCEHVLISSGISLWFLVGSSVSVDISVVFTRHFLDFLHIFLSFSEELKV

SEQ ID NO: 784851 - protein, 58 aa, Homo sapiens
FKKQKSSRHNDITGSKYLALQNHSPSCIQGRHGSLSQPSFPECEPSFRIQFYAAPWAT

SEQ ID NO: 784852 - protein, 104 aa, Homo sapiens
MGSYRLQRSPPNVSEVKGAAPSRAGRRFLQAGDGQAGCTKSMMHMRSICSQSLNHLMTSGTSLKFTAGFPISLCCPGWSAVAQSQLTATLTSQGSGDPPASAPR

SEQ ID NO: 784853 - protein, 75 aa, Homo sapiens
APPGLKFHALDSSLAAAARSPHLLGAGEETRWRVFCGISGGGGTSSFGGTSSCILWRTLTPHPTLEARNRLPLGT

SEQ ID NO: 784854 - protein, 47 aa, Homo sapiens
ALLNADGFHTLVQLTRCESGHCESGLCAVLCPQFWVHSAVCDSRVPE

SEQ ID NO: 784855 - protein, 89 aa, Homo sapiens
NLPFREPHYVLLPPLSSSSCFLYVGILRTPRPGTRLRKEINDTGRLPGGIIGTRTASSVGYHCWGEPELRPWMEQGTRGSHEAMQPEIR

SEQ ID NO: 784856 - protein, 34 aa, Homo sapiens
METSFCISHQYPQLYKPYTECVISPQVHHSSSNG

SEQ ID NO: 784857 - protein, 89 aa, Homo sapiens
GARKLVTPLQSPVSSGALRFDLSLLEHELRGWQLPPSPQWPSHWAHLRLSQAGLRDPQKPPLQSGSLVRRQWVSYDVRKCGVQGIGVSF

SEQ ID NO: 784858 - protein, 140 aa, Homo sapiens
MPAGEAWGGQWRGVIVNKERLVNPKPLPAEELSKPGALPQLGSTGGFCKQSCPGGAAREGWGQRRGRMDVAGVPGGSWGVRGAGRQGRQRREGGVAAVELLSCLGRPCCLLQELNDFLRERRGEPDCRREGEAETEKPQP

SEQ ID NO: 784859 - protein, 97 aa, Homo sapiens
MPIGVTPSGPVRPLDDAASDVGAPVGFLPVGDGTCWLLEAWLVFPLRRFCEAAGSFVAEPFFCIDISLDSGNGCFTSLSSEVLSPEISSGFLGPCEF

SEQ ID NO: 784860 - protein, 203 aa, Homo sapiens
MLRNGSIVTEFILVGFQQSSTSTRALLFALFLALYSLTMAMNGLIIFITSWTDPKLNSPMYFFLGHLSLLDVCFITTTIPQMLIHLVVRDHIVSFVCCMTQMYFVFCVGVAECILLAFMAYDRYVAICYPLNYVPIISQKVCVRLVGTAWFFGLINGIFLEYISFREPFRRDNHIESFFCEAPIVIGLSCGDPQFSLWAIFAD

SEQ ID NO: 784861 - protein, 108 aa, Homo sapiens
FCIFEEIVCHIAQAGLKLLGSSSLPAPASQVAGITDSCHHARPNFVFSVEMGFHHVSQAGLELLISGDLPATAFQSAGITDMSHCTRPNFYLEVDSVNKYKNKNNVFK

SEQ ID NO: 784862 - protein, 296 aa, Homo sapiens
IPIDEWTAEITVYSPQQIIKVYVGSHWYATTLQTLLKYPELLSNPQRVYWITYGQTLLIHGDGQMFRHILNFLRLGKLFLPSEFKEWPLFCQEVEEYHIPSLSEALAQCEAYKSWTQEKESENEEAFSIRRLHVVTEGPGSLVEFSRDTKETTAYMPVDFEDCSDRTPWNKAKGNLVRSNQMDEAEQYTRPIQVSLCRNAKRAGNPSTYSHCRGLCTNPGHWGSHPESPPKKKCTTINLTQKSETKDPPATPMQKLISLVREWDMVNCKQWEFQPLTATRSSPLEEATLQLPLGSE

SEQ ID NO: 784863 - protein, 196 aa, Homo sapiens
RGAVAAVTSGPARARTAGGGRRGPGPGMAMFRSLVASAQQRQPPAGPAGGDSGLEAQYTCPICLEVYHRPVAIGSCGHTFCGECLQPCLQVPSPLCPLCRLPFDPKKVDKATHVEKQLSSYKAPCRGCNKKVTLAKMRVHISSCLKVQEQMANCPKFVPVVPTSQPIPSGGKAWGPGQGPAWRAGQHVNILFCSWH

SEQ ID NO: 784864 - protein, 90 aa, Homo sapiens
LYPRPASNIPNRSTFACPYCGARNLDQQELVKHCVESHRSDPNRVVCPICSAMPWGDPSYKSANFLQHLLHRHKFSYDTFVALARCHLQS

SEQ ID NO: 784865 - protein, 235 aa, Homo sapiens [sequence omitted]

SEQ ID NO: 784866 - protein, 235 aa, Homo sapiens [sequence omitted]

SEQ ID NO: 784867 - protein, 390 aa, Homo sapiens
MSRGCPGLQSGAAEQAVVLGAWAPPVSPCSEFFSPGQPERIRTGHMQSGLPYPTAAPFSNLGLQMRLCLPGTLLGMCCIPRSPAALRQSWVPSLSPGGPQTPAILQPVALDSGCAVGGGWRPASTEASPACPSVTRSVCPQPGAFLSGLHLASSFFWSKYLNSCRRQRSPYLFPATLLQPGFCPRPDCPAVTCFWPWSSGCSVPEIVLAAEGTGSPCCWQHRRLLTVLWSWTPEVSASPGRPFQILRTALPSLPCLQVTLAKMRVHISSCLKVQEQMANCPKFVPVVPTSQPIPSNIPNRSTFACPYCGARNLDQQELVKHCVESHRSDPNRVVCPICSAMPWGDPSYKSANFLQHLLHRHKFSYDTFVDYSIDEEAAFQAALALSLSEN

SEQ ID NO: 784868 - protein, 128 aa, Homo sapiens
MRVHISSCLKVQEQMANCPKFVPVVPTSQPIPSNIPNRSTFACPYCGARNLDQQELVKHCVESHRSDPNRVVCPICSAMPWGDPSYKSANFLQHLLHRHKFSYDTFVDYSIDEEAAFQAALALSLSEN

SEQ ID NO: 784869 - protein, 154 aa, Homo sapiens
MFRSLVASAQQRQPPAGPAGGDSGLEAQYTCPICLKVQEQMANCPKFVPVVPTSQPIPSNIPNRSTFACPYCGARNLDQQELVKHCVESHRSDPNRVVCPICSAMPWGDPSYKSANFLQHLLHRHKFSYDTFVDYSIDEEAAFQAALALSLSEN

SEQ ID NO: 784870 - protein, 196 aa, Homo sapiens; identical to SEQ ID NO: 784863

SEQ ID NO: 784871 - protein, 388 aa, Homo sapiens
MSRGCPGLQSGAAEQAVVLGAWAPPVSPCSEFFSPGQPERIRTGHMQSGLPYPTAAPFSNLGLQMRLCLPGTLLGMCCIPRSPAALRQSWVPSLSPGGPQTPAILQPVALDSGCAVGGGWRPASTEASPACPSVTRSVCPQPGAFLSGLHLASSFFWSKYLNSCRRQRSPYLFPATLLQPGFCPRPDCPAVTCFWPWSSGCSVPEIVLAAEGTGSPCCWQHRRLLTVLWSWTPEVSASPGRPFQILRTALPSLPCLLGDPGKDESAHFVLPEGPGADGQLPQVRPRGVCPGHPLCVWVLEVCTFLFDDQEEIPAPQPQAVAAPSRGGAGREGASSTQSPGLGPLSPSKLTVPRCGRGRHPSGGKAWGPGQGPAWRAGQHVNILFCSWH

SEQ ID NO: 784872 - protein, 235 aa, Homo sapiens [sequence omitted]

SEQ ID NO: 784873 - protein, 81 aa, Homo sapiens
PIEHIEVFWFALSELYHIKQEMSVSLAALLCSTHWPPLQQHSGEDRGSVFCQPPRTGRSNKALKACRNNTHTEPQGTWIEV

SEQ ID NO: 784874 - protein, 84 aa, Homo sapiens
SHCCVWGAAEHNHKCGSPDTGQLLGLQECADPCPHLFVSPELRIKGFLTTPDHTPHLLSLPLLMKQLSSFSCLMENICLQAPQK

SEQ ID NO: 784875 - protein, 69 aa, Homo sapiens
MVTGHLLAWLGDRKWLSSVLTGCVCHSPPCGHMELTIERETRQRGGVLRTEAQKARDQGLGASCVSVHC

SEQ ID NO: 784876 - protein, 66 aa, Homo sapiens
DRARTQFCFLKPVPASCQSSGSTPGVQGESGSPECICLLVPHCILTLTLSAAVSPAGCSTLKHGKI

SEQ ID NO: 784877 - protein, 1607 aa, Homo sapiens
LYTCATLCLKEQACSAFSFFSASEGPQCFWMTSWISPAVNNSDFWTYRKNMTRVASLFSGQAVAGSDYEPVTRQWAIMQEGDEFANLTVSILPDDFPEMDESFLISLLEVHLMNISASLKNQPTIGQPNISTVVIALNGDAFGVFVIYNISPNTSEDGLFVEVQEQPQTLVELMIHRTGGSLGQVAVEWRVVGGTATEGLDFIGAGEILTFAEGETKKTVILTILDDSEPEDDESIIVSLVYTEGGSRILPSSDTVRVNILANDNVAGIVSFQTASRSVIGHEGEILQFHVIRTFPGRGNVTVNWKIIGQNLELNFANFSGQLFFPEGSLNTTLFVHLLDDNIPEEKEVYQVILYDVRTQGVPPAGIALLDAQGYAAVLTVEASDEPHGVLNFALSSRFVLLQEANITIQLFINREFGSLGAINVTYTTVPGMLSLKNQTVGNLAEPEVDFVPIIGFLILEEGETAAAINITILEDDVPELEEYFLVNLTYVGLTMAASTSFPPRLDSEGLTAQVIIDANDGARGVIEWQQSRFEVNETHGSLTLVAQRSREPLGHVSLFVYAQNLEAQVGLDYIFTPMILHFADGERYKNVNIMILDDDIPEGDEKFQLILTNPSPGLELGKNTIALIIVLANDDGPGVLSFNNSEHFFLREPTALYVQESVAVLYIVREPAQGLFGTVTVQFIVTEVNSSNESKDLTPSKGYIVLEEGVRFKALQISAILDTEPEMDEYFVCTLFNPTGGARLGVHVQTLITVLQNQAPLGLFSISAVENRATSIDIEEANRTVYLNVSRTNGIDLAVSVQWETVSETAFGMRGMDVVFSVFQSFLDESASGWCFFTLENLIYGIMLRKSSVTVYRWQGIFIPVEDLNIENPKTCEAFNIGFSPYFVITHEERNEEKPSLNSVFTFTSGFKLFLVQTIIILESSQVRYFTSDSQDYLIIASQRDDSELTQVFRWNGGSFVLHQKLPVRGVLTVALFNKGGSVFLAISQANARLNSLLFRWSGSGFINFQEVPVSGTTEVEALSSANDIYLIFAENVFLGDQNSIDIFIWEMGQSSFRYFQSVDFAAVNRIHSFTPASGIAHILLIGQDMSALYCWNSERNQFSFVLEVPSAYDVASVTVKSLNSSKNLIALVGAHSHIYELAYISSHSDFIPSSGELIFEPGEREATIAVNILDDTVPEKEESFKVQLKNPKGGAEIGINDSVTITILSNDDAYGIVAFAQNSLYKQVEEMEQDSLVTLNVERLKGTYGRITIAWEADGSISDIFPTSGVILFTEGQVLSTITLTILADNIPELSEVVIVTLTRITTEGVEDSYKGATIDQDRSKSVITTLPNDSPFGLVGWRAASVFIRVAEPKENTTTLQLQIARDKGLLGDIAIHLRAQPNFLLHVDNQATENEDYVLQETIIIMKENIKEAHAEVSILPDDLPELEEGFIVTITEVNLVNSDFSTGQPSVRRPGMEIAEIMIEENDDPRGIFMFHVTRGAGEVITAYEVPPPLNVLQVPVVRLAGSFGAVNVYWKASPDSAGLEDFKPSHGILEFADKQVTAMIEITIIDDAEFELTETFNISLISVAGGGRLGDDVVVTVVIPQNDSPFGVFGFEEKTVS

SEQ ID NO: 784878 - protein, 306 aa, Homo sapiens
LYTCATLCLKEQACSAFSFFSASEGPQCFWMTSWISPAVNNSDFWTYRKNMTRVASLFSGQAVAGSDYEPVTRQWAIMQEGDEFANLTVSILPDDFPEMDESFLISLLEVHLMNISASLKNQPTIGQPNISTVVIALNGDAFGVFVIYNISPNTSEDGLFVEVQEQPQTLVELMIHRTGGSLGQVAVEWRVVGGTATEGLDFIGAGEILTFAEGETKKTVILTILDDSEPEDDESIIVSLVYTEGGSRILPSSDTVRVNILANDNVAGIVSFQTASRSVIGHEGGFLFLLSIFIFFSMDVVFCLVL

SEQ ID NO: 784879 - protein, 672 aa, Homo sapiens
AASALGLALPGGAMAAQRAGRGSPEPGPRPPRPPGPAAGAVPAASVARPARAEISLMMEGSRQTRVSRPYKISESSKVYRWADHSSTVLQRLNEQRLRGLFCDVVLVADEQRVPAHRNLLAVCSDYFNSMFTIGMREAFQKEVELIGASYIGLKAVVDFLYGGELVLDGGNIDYVLETAHLLQIWTVVDFCCEYLEQEVSEDNYLYLQELASIYSLKRLDAFIDGFILNHFGTLSFTPDFLQNVSMQKLCVYLSSSEVQRECEHDLLQAALQWLTQQPEREAHARQVLENIHFPLIPKNDLLHRVKPAVCSLLPKEANCEGFIEEAVRYHNNLAAQPVMQTKRTALRTNQERLLFVGGEVSERCLELSDDTCYLDAKSEQWVKETPLPARRSHHCVAVLGGFIFIAGGSFSRDNGGDAASNLLYRYDPRCKQWIKVASMNQRRVDFYLASIEDMLVAIGGRNENGALSSVETYSPKTDSWSYVAGLPRFTYGHAGTIYKDFVYISGGHDYQIGPYRKNLLCYDHRTDVWEERRPMTTARGWHSMCSLGDSIYSIGGSDDNIESMERFDVLGVEAYSPQCNQWTRVAPLLHANSESGVAVWEGRIYILGGYSWENTAFSKTVQVYDREADKWSRGVDLPKAIAGGSACVCALEPRPEDKKKKGKGKRHQDRGQ

SEQ ID NO: 784880 - protein, 672 aa, Homo sapiens; identical to SEQ ID NO: 784879

SEQ ID NO: 784881 - protein, 436 aa, Homo sapiens
AASALGLALPGGAMAAQRAGRGSPEPGPRPPRPPGPAAGAVPAASVARPARAEISLMMEGSRQTRVSRPYKISESSKVYRWADHSSTVLQRLNEQRLRGLFCDVVLVADEQRVPAHRNLLAVCSDYFNSMFTIGMREAFQKEVELIGASYIGLKAVVDFLYGGELVLDGGNIDYVLETAHLLQIWTVVDFCCEYLEQEVSEDNYLYLQELASIYSLKRLDAFIDGFILNHFGTLSFTPDFLQNVSMQKLCVYLSSSEVQRECEHDLLQAALQWLTQQPEREAHARQVLENIHFPLIPKNDLLHRVKPAVCSLLPKEANCEGFIEEAVRYHNNLAAQPVMQTKRTALRTNQERLLFVGGEVSERCLELSDDTCYLDAKSEQWVKETPLPARRSHHCVAVLGGFIFIAGGSFSRDNGGDAASNLLYRYDPRCKQWIKV

SEQ ID NO: 784882 - protein, 465 aa, Homo sapiens
AASALGLALPGGAMAAQRAGRGSPEPGPRPPRPPGPAAGAVPAASVARPARAEISLMMEGSRQTRVSRPYKISESSKVYRWADHSSTVLQRLNEQRLRGLFCDVVLVADEQRVPAHRNLLAVCSDYFNSMFTIGMREAFQKEVELIGASYIGLKAVVDFLYGGELVLDGGNIDYVLETAHLLQIWTVVDFCCEYLEQEVSEDNYLYLQELASIYSLKRLDAFIDGFILNHFGTLSFTPDFLQNVSMQKLCVYLSSSEVQRECEHDLLQAALQWLTQQPEREAHARQVLENIHFPLIPKNDLLHRVKPAVCSLLPKEANCEGFIEEAVRYHNNLAAQPVMQTKRTALRTNQERLLFVGGEVSERCLELSDDTCYLDAKSEQWVKETPLPARRSHHCVAVLGGFIFIAGGSFSRDNGGDAASNLLYRYDPRCKQWIKVRLKPDYFFSLEDSLGFLNLALTFLTSLGP

SEQ ID NO: 784883 - protein, 546 aa, Homo sapiens
GGILKDPRMDYAFQKEVELIGASYIGLKAVVDFLYGGELVLDGGNIDYVLETAHLLQIWTVVDFCCEYLEQEVSEDNYLYLQELASIYSLKRLDAFIDGFILNHFGTLSFTPDFLQNVSMQKLCVYLSSSEVQRECEHDLLQAALQWLTQQPEREAHARQVLENIHFPLIPKNDLLHRVKPAVCSLLPKEANCEGFIEEAVRYHNNLAAQPVMQTKRTALRTNQERLLFVGGEVSERCLELSDDTCYLDAKSEQWVKETPLPARRSHHCVAVLGGFIFIAGGSFSRDNGGDAASNLLYRYDPRCKQWIKVASMNQRRVDFYLASIEDMLVAIGGRNENGALSSVETYSPKTDSWSYVAGLPRFTYGHAGTIYKDFVYISGGHDYQIGPYRKNLLCYDHRTDVWEERRPMTTARGWHSMCSLGDSIYSIGGSDDNIESMERFDVLGVEAYSPQCNQWTRVAPLLHANSESGVAVWEGRIYILGGYSWENTAFSKTVQVYDREADKWSRGVDLPKAIAGGSACVCALEPRPEDKKKKGKGKRHQDRGQ

SEQ ID NO: 784884 - protein, 672 aa, Homo sapiens; identical to SEQ ID NO: 784879

SEQ ID NO: 784885 - protein, 420 aa, Homo sapiens
AASALGLALPGGAMAAQRAGRGSPEPGPRPPRPPGPAAGAVPAASVARPARAEISLMMEGSRQTRVSRPYKISESSKVYRWADHSSTVLQRLNEQRLRGLFCDVVLVADEQRVPAHRNLLAVCSDYFNSMFTIGMREAFQKEVELIGASYIGLKAVVDFLYGGELVLDGGNIDYVLETAHLLQIWTVVDFCCEYLEQEVSEDNYLYLQELASIYSLKRLDAFIDGFILNHFGTLSFTPDFLQNVSMQKLCVYLSSSEVQRECEHDLLQAALQWLTQQPEREAHARQVLENIHFPLIPKNDLLHRVKPAVCSCCTPTASRAWQCGRAASTSWAATAGRTLPSPRPCRCTTARPTSGAGASTCPRPSLAGPPVSAPWSHGQRTRRRKAKARGTRTGASDPSCASWDHPHRHLPGLCRPAATS

SEQ ID NO: 784886 - protein, 112 aa, Homo sapiens
DSERVKLGSGPGGLTAKLSTSPPCPAISLLMTATVYRVFMGCPLPIFLNPHGPLRRQAVPRLGGGKPGTALSSPSVSARRPCRFTYGHAGTIYKDFVYISGGHDYQIGPYRK

SEQ ID NO: 784887 - protein, 201 aa, Homo sapiens
MTAEEMKATESGAQSAPLPMEGVDISPKQDEGVLKVIKREGTGTEMPMIGDRVFVHYTGWLLDGTKFDSSLDRKDKFSFDLGKGEVIKAWDIAIATMKVGEVCHITCKPEYAYGSAGSPPKIPPNATLVFEVELSEFKGEDLTDRGQMAESFAEYRLAVKAMLSPMRVLSWQGALDRGTTRTSLFDPAGTLRFDHWRGGRN

SEQ ID NO: 784888 - protein, 111 aa, Homo sapiens
GCIQTSPFQGPAPPAPATPPRHTEHMWRKPVFILLKAGELEKEASLRRGEAKGIKLPTMAMFLDFEIQSGKARSGGTPVAIMTANTQGLEGEGRSGKRENLHAALLCSRPT

SEQ ID NO: 784889 - protein, 44 aa, Homo sapiens
MCAVADNASRSPLFPDPDTASCSSAKCPREARHRSVKPGVKDEA

SEQ ID NO: 784890 - protein, 116 aa, Homo sapiens [sequence omitted]

SEQ ID NO: 784891 - protein, 75 aa, Homo sapiens
VHGSSISNCKDVKATSVPIHGGLDKGNVVQIHHGILHSHKTRIKACPLQLEASILSNLTQEQKSKYQMFSLTSRS

SEQ ID NO: 784892 - protein, 117 aa, Homo sapiens
VQDGRAGETVGKRDSLLGFGSETVAGFARTGRGPAGVQFRVDVLGNGRRDRLSKKLRGAEGGRHELHPAQRQDRRARCARSQVCSRVGRVDARRGPGGLCLTFGFLLLEESCLLEII

SEQ ID NO: 784893 - protein, 108 aa, Homo sapiens
PGKSRIPGRDHRRYYHDHWRLEYLMDFNPARHGMVCMVCGSSLATLKLSTIKRHIRQKHPYSLHWSPREKEVISNSWDAHLGLGACGEAEGLGVQGAEEEEEEEEEEE

SEQ ID NO: 784894 - protein, 43 aa, Homo sapiens
FPTSFSALQDCQILVEHILLNAYYMPAMIHGLGDTAENELTGL

SEQ ID NO: 784895 - protein, 253 aa, Homo sapiens
SSFRGSLGGDFGRASGRGGITPVTVNQSLLSPLNLEVDPNIQAVCTQVKEQIKTLNNKFASFIDKVQFLQQQNKMLETKWRPLQRQKTAQSNMDNMFESYINKLLLAAVTLGQEKLKLEVELDNMQGLVEDFKNKYEDDIKKHTEMENEFVLIKKDMDEAYKNKVELESHLEGLTEEISFLRQLYEEEIRELQSQISDTSVVLSIDNSRSLDMNSIIAEVKAPYEEIANHNQAEAESMRSNMRSCRRWLGSMG

SEQ ID NO: 784896 - protein, 82 aa, Homo sapiens
RASRHQEQRHDVAILVAWARVGEGKWSEHEVAAEGAAVLGKAALGHIGRILSAKEPLKVFGQEEPLRPPPGGSSRVRCMRFI

SEQ ID NO: 784897 - protein, 108 aa, Homo sapiens
STVISSPVAFPKSKTKAQHVLLELSISGVQGWVGCKRPGQHSHFIPRPFPKSKARARHVLLEFYNLELRLQNNSHSTIRRLRGCHRVDGREQDHRDNPVGHATLFPRC

SEQ ID NO: 784898 - protein, 110 aa, Homo sapiens
KIKSVPQPEITPISHITTPQLEPLLTKKSKEQGKCFSGNYQHRKILSHIFSYCSNNLLQNKEGSQAKQQQAKEILIEMSLSLLNKKAITVIVIKVDGVLFLCVKLLFSHH

SEQ ID NO: 784899 - protein, 522 aa, Homo sapiens [sequence omitted]

SEQ ID NO: 784900 - protein, 559 aa, Homo sapiens
MPQTCDGTGQMHLGSNCCKNGQTLLQRTCHGVSCCGWWFQAARSILGKGPSAQSLAGWTLESEALRRDMGTWLLACICICTCVCLGVSVTGEGQGPRSRTFTCLTNNILRIDCHWSAPELGQGSSPWLLFTSNQAPGGTHKCILRGSECTVVLPPEAVLVPSDNFTITFHHCMSGREQVSLVDPEYLPRRHEQHQFWPLHPDLEHQSCLEPMTTLLSYELAFKKQEEAWEQAQHRDHIVGVTWLILEAFELDPGFIHEARLRVQMATLEDDVVEEERYTGQWSEWSQPVCFQAPQRQGPLIPPWGWPGNTLVAVSIFLLLTGPTYLLFKLSPRVKRIFYQNVPSPAMFFQPLYSVHNGNFQTWMGAHRAGVLLSQDCAGTPQGALEPCVQEATALLTCGPARPWKSVALEEEQEGPGTRLPGNLSSEDVLPAGCTEWRVQTLAYLPQEDWAPTSLTRPAPPDSEGSRSSSSSSSSSNNNNYCALGCYGGWHLSALPGNTQSSGPIPALACGLSCDHQGLETQQGVAWVLAGHCQRPGLHEDLQGMLLPSVLSKARSWTF

SEQ ID NO: 784901 - protein, 501 aa, Homo sapiens
MGTWLLACICICTCVCLGVSVTGEGQGPRSRTFTCLTNNILRIDCHWSAPELGQGSSPWLLFTSNQAPGGTHKCILRGSECTVVLPPEAVLVPSDNFTITFHHCMSGREQVSLVDPEYLPRRHVKLDPPSDLQSNISSGHCILTWSISPALEPMTTLLSYELAFKKQEEAWEQAQHRDHIVGVTWLILEAFELDPGFIHEARLRVQMATLEDDVVEEERYTGQWSEWSQPVCFQAPQRQGPLIPPWGWPGNTLVAVSIFLLLTGPTYLLFKLSPRVKRIFYQNVPSPAMFFQPLYSVHNGNFQTWMGAHRAGVLLSQDCAGTPQGALEPCVQEATALLTCGPARPWKSVALEEEQEGPGTRLPGNLSSEDVLPAGCTEWRVQTLAYLPQEDWAPTSLTRPAPPDSEGSRSSSSSSSSSNNNNYCALGCYGGWHLSALPGNTQSSGPIPALACGLSCDHQGLETQQGVAWVLAGHCQRPGLHEDLQGMLLPSVLSKARSWTF

SEQ ID NO: 784902 - protein, 188 aa, Homo sapiens
MVPILLLGTPLHLLHRHRRRLRRRPADRQEENKAGLLDLPDASVNGWSSDEEKAGGLDDEEEAELVPSEVLMHQAIHTIEFCLGCVSNTASYLRLWALSLAHAQLSEVLWAMVMRIGLGLGREVGVAAVVLVPIFAAFAVMTVAILLVMEGLSAFLHALRLHWVEFQNKFYSGTGYKLSPFTFAATDD

SEQ ID NO: 784903 - protein, 89 aa, Homo sapiens
PIARQPRLARQEENKAGLLDLPDASVNGWSSDEEKAGGLDDEEEAELVPSEVLMHQAIHTIEFCLGCVSNTASYLRLWALSLAHAQLSG

SEQ ID NO: 784904 - protein, 132 aa, Homo sapiens
SFPSVKWDCPRRSLAGPPCREGFRLRQVGRGLAGTHLPLAPTVSFAAELSEVLWAMVMRIGLGLGREVGVAAVVLVPIFAAFAVMTVAILLVMEGLSAFLHALRLHWVEFQNKFYSGTGYKLSPFTFAATDD

SEQ ID NO: 784905 - protein, 614 aa, Homo sapiens
MTFLISYWGEQIGQKIRKITDCFHCHVFPFLQQEEARLGALQQLQQQSQELQEVLGETERFLSQVLGRVLQLLPPGQVQVHKMKAVYLALNQCSVSTTHKCLIAEAWCSVRDLPALQEALRDSSMEEGVSAVAHRIPCRDMPPTLIRTNRFTASFQGIVDAYGVGRYQEVNPAPYTIITFPFLFAVMFGDVGHGLLMFLFALAMVLAENRPAVKAAQNEIWQTFFRGRYLLLLMGLFSIYTGFIYNECFSRATSIFPSGWSVAAMANQSGWSDAFLAQHTMLTLDPNVTGVFLGPYPFGIDPIWSLAANHLSFLNSFKMKMSVILGVVHMAFGVVLGVFNHVHFGQRHRLLLETLPELTFLLGLFGYLVFLVIYKWLCVWAARAASAPSILIHFINMFLFSHSPSNRLLYPRQEVVQATLVVLALAMVPILLLGTPLHLLHRHRRRLRRRPADRQEENKAGLLDLPDASVNGWSSDEEKAGGLDDEEEAELVPSEVLMHQAIHTIEFCLGCVSNTASYLRLWALSLAHAQLSEVLWAMVMRIGLGLGREVGVAAVVLVPIFAAFAVMTVAILLVMEGLSAFLHALRLHWVEFQNKFYSGTGYKLSPFTFAATDD

SEQ ID NO: 784906 - protein, 614 aa, Homo sapiens; identical to SEQ ID NO: 784905

SEQ ID NO: 784907 - protein, 640 aa, Homo sapiens
MTFLISYWGEQIGQKIRKITDCFHCHVFPFLQQEEARLGALQQLQQQSQELQEVLGETERFLSQVLGRVLQLLPPGQVQVHKMKAVYLALNQCSVSTTHKCLIAEAWCSVRDLPALQEALRDSSMEEGVSAVAHRIPCRDMPPTLIRTNRFTASFQGIVDAYGVGRYQEVNPAPYTIITFPFLFAVMFGDVGHGLLMFLFALAMVLAENRPAVKAAQNEIWQTFFRGRYLLLLMGLFSIYTGFIYNECFSRATSIFPSGWSVAAMANQSGWRLRPGPQPGWGPRSTRSPDRPPLRCRSDAFLAQHTMLTLDPNVTGVFLGPYPFGIDPIWSLAANHLSFLNSFKMKMSVILGVVHMAFGVVLGVFNHVHFGQRHRLLLETLPELTFLLGLFGYLVFLVIYKWLCVWAARAASAPSILIHFINMFLFSHSPSNRLLYPRQEVVQATLVVLALAMVPILLLGTPLHLLHRHRRRLRRRPADRQEENKAGLLDLPDASVNGWSSDEEKAGGLDDEEEAELVPSEVLMHQAIHTIEFCLGCVSNTASYLRLWALSLAHAQLSEVLWAMVMRIGLGLGREVGVAAVVLVPIFAAFAVMTVAILLVMEGLSAFLHALRLHWVEFQNKFYSGTGYKLSPFTFAATDD

SEQ ID NO: 784908 - protein, 630 aa, Homo sapiens
MTFLISYWGEQIGQKIRKITDCFHCHVFPFLQQEEARLGALQQLQQQSQELQEVLGETERFLSQVLGRVLQLLPPGQVQVHKMKAVYLALNQCSVSTTHKCLIAEAWCSVRDLPALQEALRDSSMEEGVSAVAHRIPCRDMPPTLIRTNRFTASFQGIVDAYGVGRYQEVNPAPYTIITFPFLFAVMFGDVGHGLLMFLFALAMVLAENRPAVKAAQNEIWQTFFRGRYLLLLMGLFSIYTGFIYNECFSRATSIFPSGWSVAAMANQSGWSDAFLAQHTMLTLDPNVTGVFLGPYPFGIDPDGEGAPESSPPLLPPWIWSLAANHLSFLNSFKMKMSVILGVVHMAFGVVLGVFNHVHFGQRHRLLLETLPELTFLLGLFGYLVFLVIYKWLCVWAARAASAPSILIHFINMFLFSHSPSNRLLYPRQEVVQATLVVLALAMVPILLLGTPLHLLHRHRRRLRRRPADRQEENKAGLLDLPDASVNGWSSDEEKAGGLDDEEEAELVPSEVLMHQAIHTIEFCLGCVSNTASYLRLWALSLAHAQLSEVLWAMVMRIGLGLGREVGVAAVVLVPIFAAFAVMTVAILLVMEGLSAFLHALRLHWVEFQNKFYSGTGYKLSPFTFAATDD

SEQ ID NO: 784909 - protein, 788 aa, Homo sapiens
MGSMFRSEEVALVQLFLPTAAAYTCVSRLGELGLVEFRDLNASVSAFQRRFVVDVRRCEELEKTFTFLQEEVRRAGLVLPPPKGRLPAPPPRDLLRIQEETERLAQELRDVRGNQQALRAQLHQLQLHAAVLRQGHEPQLAAAHTDGASERTPLLQAPGGPHQDLRVKAEPATWMTFLISYWGEQIGQKIRKITDCFHCHVFPFLQQEEARLGALQQLQQQSQELQEVLGETERFLSQVLGRVLQLLPPGQVQVHKMKAVYLALNQCSVSTTHKCLIAEAWCSVRDLPALQEALRDSSMEEGVSAVAHRIPCRDMPPTLIRTNRFTASFQGIVDAYGVGRYQEVNPAPYTIITFPFLFAVMFGDVGHGLLMFLFALAMVLAENRPAVKAAQNEIWQTFFRGRYLLLLMGLFSIYTGFIYNECFSRATSIFPSGWSVAAMANQSGWSDAFLAQHTMLTLDPNVTGVFLGPYPFGIDPIWSLAANHLSFLNSFKMKMSVILGVVHMAFGVVLGVFNHVHFGQRHRLLLETLPELTFLLGLFGYLVFLVIYKWLCVWAARAASAPSILIHFINMFLFSHSPSNRLLYPRQEVVQATLVVLALAMVPILLLGTPLHLLHRHRRRLRRRPADRQEENKAGLLDLPDASVNGWSSDEEKAGGLDDEEEAELVPSEVLMHQAIHTIEFCLGCVSNTASYLRLWALSLAHAQLSEVLWAMVMRIGLGLGREVGVAAVVLVPIFAAFAVMTVAILLVMEGLSAFLHALRLHWVEFQNKFYSGTGYKLSPFTFAATDD

SEQ ID NO: 784910 - protein, 428 aa, Homo sapiens [sequence omitted]

SEQ ID NO: 784911 - protein, 533 aa, Homo sapiens
MTFLISYWGEQIGQKIRKITDCFHCHVFPFLQQEEARLGALQQLQQQSQELQEVLGETERFLSQVLGRVLQLLPPGQVQVHKMKAVYLALNQCSVSTTHKCLIAEAWCSVRDLPALQEALRDSSMEEGVSAVAHRIPCRDMPPTLIRTNRFTASFQGIVDAYGVGRYQEVNPAPYTIITFPFLFAVMFGDVGHGLLMFLFALAMVLAENRPAVKAAQNEIWQTFFRGRYLLLLMGLFSIYTGFIYNECFSRATSIFPSGWSVAAMANQSGWSDAFLAQHTMLTLDPNVTGVFLGPYPFGIDPIWSLAANHLSFLNSFKMKMSVILGVVHMAFGVVLGVFNHVHFGQRHRLLLETLPELTFLLGLFGYLVFLVIYKWLCVWAARAASAPSILIHFINMFLFSHSPSNRLLYPRQEVVQATLVVLALAMVPILLLGTPLHLLHRHRRRLRRRPADRQEENKAGLLDLPDASVNGWSSDEEKAGGLDDEEEAELVPSEVLMHQAIHTIEFCLGCVSNTASYLRLWALSLAHAQLSG

SEQ ID NO: 784912 - protein, 456 aa, Homo sapiens
MTFLISYWGEQIGQKIRKITDCFHCHVFPFLQQEEARLGALQQLQQQSQELQEVLGETERFLSQVLGRVLQLLPPGQVQVHKMKAVYLALNQCSVSTTHKCLIAEAWCSVRDLPALQEALRDSSMEEGVSAVAHRIPCRDMPPTLIRTNRFTASFQGIVDAYGVGRYQEVNPAPYTIITFPFLFAVMFGDVGHGLLMFLFALAMVLAENRPAVKAAQNEIWQTFFRGRYLLLLMGLFSIYTGFIYNECFSRATSIFPSGWSVAAMANQSGWSDAFLAQHTMLTLDPNVTGVFLGPYPFGIDPIWSLAANHLSFLNSFKMKMSVILGVVHMAFGVVLGVFNHVHFGQRHRLLLETLPELTFLLGLFGYLVFLVIYKWLCVWAARAASAPSILIHFINMFLFSHSMHSAGSLHLVGPISALLTVLAFIHFSRSSPYAAPEWRGGANSPAGARNLENIL

SEQ ID NO: 784913 - protein, 326 aa, Homo sapiens
MTFLISYWGEQIGQKIRKITDCFHCHVFPFLQQEEARLGALQQLQQQSQELQEVLGETERFLSQVLGRVLQLLPPGQVQVHKMKAVYLALNQCSVSTTHKCLIAEAWCSVRDLPALQEALRDSSMEEGVSAVAHRIPCRDMPPTLIRTNRFTASFQGIVDAYGVGRYQEVNPAPYTIITFPFLFAVMFGDVGHGLLMFLFALAMVLAENRPAVKAAQNEIWQTFFRGRYLLLLMGLFSIYTGFIYNECFSRATSIFPSGWSVAAMANQSGWSDAFLAQHTMLTLDPNVTGVFLGPYPFGIDPVSPGMECPWVVKAAGSGGWGSPRF

SEQ ID NO: 784914 - protein, 162 aa, Homo sapiens
MPQEENKAGLLDLPDASVNGWSSDEEKAGGLDDEEEAELVPSEVLMHQAIHTIEFCLGCVSNTASYLRLWALSLAHAQLSEVLWAMVMRIGLGLGREVGVAAVVLVPIFAAFAVMTVAILLVMEGLSAFLHALRLHWVEFQNKFYSGTGYKLSPFTFAATDD

SEQ ID NO: 784915 - protein, 172 aa, Homo sapiens
TLEYPSHSPTDIDHSILLDFTEHVLYCYLLSLPSRVVTWQTSCGEEAELVPSEVLMHQAIHTIEFCLGCVSNTASYLRLWALSLAHAQLSEVLWAMVMRIGLGLGREVGVAAVVLVPIFAAFAVMTVAILLVMEGLSAFLHALRLHWVEFQNKFYSGTGYKLSPFTFAATDD

SEQ ID NO: 784916 - protein, 830 aa, Homo sapiens
MGSMFRSEEVALVQLFLPTAAAYTCVSRLGELGLVEFRDLNASVSAFQRRFVVDVRRCEELEKTFTFLQEEVRRAGLVLPPPKGRLPAPPPRDLLRIQEETERLAQELRDVRGNQQALRAQLHQLQLHAAVLRQGHEPQLAAAHTDGASERTPLLQAPGGPHQDLRVNFVAGAVEPHKAPALERLLWRACRGFLIASFRELEQPLEHPVTGEPATWMTFLISYWGEQIGQKIRKITDCFHCHVFPFLQQEEARLGALQQLQQQSQELQEVLGETERFLSQVLGRVLQLLPPGQVQVHKMKAVYLALNQCSVSTTHKCLIAEAWCSVRDLPALQEALRDSSMEEGVSAVAHRIPCRDMPPTLIRTNRFTASFQGIVDAYGVGRYQEVNPAPYTIITFPFLFAVMFGDVGHGLLMFLFALAMVLAENRPAVKAAQNEIWQTFFRGRYLLLLMGLFSIYTGFIYNECFSRATSIFPSGWSVAAMANQSGWSDAFLAQHTMLTLDPNVTGVFLGPYPFGIDPIWSLAANHLSFLNSFKMKMSVILGVVHMAFGVVLGVFNHVHFGQRHRLLLETLPELTFLLGLFGYLVFLVIYKWLCVWAARAASAPSILIHFINMFLFSHSPSNRLLYPRQEVVQATLVVLALAMVPILLLGTPLHLLHRHRRRLRRRPADRQEENKAGLLDLPDASVNGWSSDEEKAGGLDDEEEAELVPSEVLMHQAIHTIEFCLGCVSNTASYLRLWALSLAHAQLSEVLWAMVMRIGLGLGREVGVAAVVLVPIFAAFAVMTVAILLVMEGLSAFLHALRLHWVEFQNKFYSGTGYKLSPFTFAATDD

SEQ ID NO: 784917 - protein, 172 aa, Homo sapiens; identical to SEQ ID NO: 784915

SEQ ID NO: 784918 - protein, 819 aa, Homo sapiens
MGSMFRSEEVALVQLFLPTAAAYTCVSRLGELGLVEFRDLNASVSAFQRRFVVDVRRCEELEKTFTFLQEEVRRAGLVLPPPKGRLPAPPPRDLLRIQEETERLAQELRDVRGNQQALRAQLHQLQLHAAVLRQGHEPQLAAAHTDGASERTPLLQAPGGPHQDLRVNFVAGAVEPHKAPALERLLWRACRGFLIASFRELEQPLEHPVTGEPATWMTFLISYWGEQIGQKIRKITELLPLPRLPVSAAGGGPPRGPAAAATAEPGAAGGPRGDRAVPEPGARPGAAAAAARAGAGPQDEGRVPGPEPVQREHPVRDLPALQEALRDSSMEEGVSAVAHRIPCRDMPPTLIRTNRFTASFQGIVDAYGVGRYQEVNPAPYTIITFPFLFAVMFGDVGHGLLMFLFALAMVLAENRPAVKAAQNEIWQTFFRGRYLLLLMGLFSIYTGFIYNECFSRATSIFPSGWSVAAMANQSGWSDAFLAQHTMLTLDPNVTGVFLGPYPFGIDPIWSLAANHLSFLNSFKMKMSVILGVVHMAFGVVLGVFNHVHFGQRHRLLLETLPELTFLLGLFGYLVFLVIYKWLCVWAARAASAPSILIHFINMFLFSHSPSNRLLYPRQEVVQATLVVLALAMVPILLLGTPLHLLHRHRRRLRRRPADRQEENKAGLLDLPDASVNGWSSDEEKAGGLDDEEEAELVPSEVLMHQAIHTIEFCLGCVSNTASYLRLWALSLAHAQLSEVLWAMVMRIGLGLGREVGVAAVVLVPIFAAFAVMTVAILLVMEGLSAFLHALRLHWVEFQNKFYSGTGYKLSPFTFAATDD

SEQ ID NO: 784919 - protein, 628 aa, Homo sapiens
ESAEPALQGEPATWMTFLISYWGEQIGQKIRKITDCFHCHVFPFLQQEEARLGALQQLQQQSQELQEVLGETERFLSQVLGRVLQLLPPGQVQVHKMKAVYLALNQCSVSTTHKCLIAEAWCSVRDLPALQEALRDSSMEEGVSAVAHRIPCRDMPPTLIRTNRFTASFQGIVDAYGVGRYQEVNPAPYTIITFPFLFAVMFGDVGHGLLMFLFALAMVLAENRPAVKAAQNEIWQTFFRGRYLLLLMGLFSIYTGFIYNECFSRATSIFPSGWSVAAMANQSGWSDAFLAQHTMLTLDPNVTGVFLGPYPFGIDPIWSLAANHLSFLNSFKMKMSVILGVVHMAFGVVLGVFNHVHFGQRHRLLLETLPELTFLLGLFGYLVFLVIYKWLCVWAARAASAPSILIHFINMFLFSHSPSNRLLYPRQEVVQATLVVLALAMVPILLLGTPLHLLHRHRRRLRRRPADRQEENKAGLLDLPDASVNGWSSDEEKAGGLDDEEEAELVPSEVLMHQAIHTIEFCLGCVSNTASYLRLWALSLAHAQLSEVLWAMVMRIGLGLGREVGVAAVVLVPIFAAFAVMTVAILLVMEGLSAFLHALRLHWVEFQNKFYSGTGYKLSPFTFAATDD

SEQ ID NO: 784920 - protein, 456 aa, Homo sapiens
MTFLISYWGEQIGQKIRKITDCFHCHVFPFLQQEEARLGALQQLQQQSQELQEVLGETERFLSQVLGRVLQLLPPGQVQVHKMKAVYLALNQCSVSTTHKCLIAEAWCSVRDLPALQEALRDSSMEEGVSAVAHRIPCRDMPPTLIRTNRFTASFQGIVDAYGVGRYQEVNPAPYTIITFPFLFAVMFGDVGHGLLMFLFALAMVLAENRPAVKAAQNEIWQTFFRGRYLLLLMGLFSIYTGFIYNECFSRATSIFPSGWSVAAMANQSGWSDAFLAQHTMLTLDPNVTGVFLGPYPFGIDPIWSLAANHLSFLNSFKMKMSVILGVVHMAFGVVLGVFNHVHFGQRHRLLLETLPELTFLLGLFGYLVFLVIYKWLCVWAARAASAPSILIHFINMFLFSHSPSNRLLYPRQEVVQATLVVLALAMVPILLLGTPELDARALRGAVTAEKKAGCD

SEQ ID NO: 784921 - protein, 600 aa, Homo sapiens
MTFLISYWGEQIGQKIRKITDCFHCHVFPFLQQEEARLGALQQLQQQSQELQEVLGETERFLSQVLGRVLQLLPPGQVQVHKMKAVYLALNQCSVSTTHKCLIAEAWCSVRDLPALQEALRDSSMEEGVSAVAHRIPCRDMPPTLIRTNRFTASFQGIVDAYGVGRYQEVNPAPYTIITFPFLFAVMFGDVGHGLLMFLFALAMVLAENRPAVKAAQNEIWQTFFRGRYLLLLMGLFSIYTGFIYNECFSRATSIFPSGWSVAAMANQSGWSDAFLAQHTMLTLDPNVTGVFLGPYPFGIDPIWSLAANHLSFLNSFKMKMSVILGVVHMAFGVVLGVFNHVHFGQRHRLLLETLPELTFLLGLFGYLVFLVIYKWLCVWAARAASAPSILIHFINMFLFSHSPSNRLLYPRQEVVQATLVVLALAMVPILLLGTPLHLLHRHRRRLRRRPADRQVGPGPKVWGAACGERPLSGVSLTPRFLTDLLSGQEQAWRVVGDLLGLECCQHCLLMPQEENKAGLLDLPDASVNGWSSDEEKAGGLDDEEEAELVPSEVLMHQAIHTIEFCLGCVSNTASYLRLWALSLAHAHAVRGSVGLVRGG

SEQ ID NO: 784922 - protein, 283 aa, Homo sapiens
RRSHQEEEDTHCDDDHWQQRASGSPLDYGLTQDKLCPDTHGNQSHCTGAKGQQEDVEQELHTFHSSFHRHGCRASRGRLARQEVVQATLVVLALAMVPILLLGTPLHLLHRHRRRLRRRPADRQEENKAGLLDLPDASVNGWSSDEEKAGGLDDEEEAELVPSEVLMHQAIHTIEFCLGCVSNTASYLRLWALSLAHAQLSEVLWAMVMRIGLGLGREVGVAAVVLVPIFAAFAVMTVAILLVMEGLSAFLHALRLHWVEFQNKFYSGTGYKLSPFTFAATDD

SEQ ID NO: 784923 - protein, 91 aa, Homo sapiens
EVGVAAVVLVPIFAAFAVMTVAILLVMEGLSAFLHALRLHWERPPTGLGCSRREFPSPTPLLLTPRVEFQNKFYSGTGYKLSPFTFAATDD

SEQ ID NO: 784924 - protein, 110 aa, Homo sapiens
NTKPFVPFSLPSTFPNQNYFSYWTLPCKLVPLPEFSLSIEGHSHSNSKPVIFIFFPLYAMTIPVKKILNVSQVLPLLSLVPSYLPTCIHVIVKNLTSSFPGSILPFCQYG

SEQ ID NO: 784925 - protein, 129 aa, Homo sapiens
VKPDHPGLPAARIQLAKFSKNFPTLLEIFRSPHTPLLGYKFPLFFVVFGVGPLSPLYCKIHCDNSYIYRNSPDTVYLTSLTSVRIKFFFHQLPKSSWTHCSHPSLRVCKLLGLGLWLTSPNKPQKKTLS

SEQ ID NO: 784926 - protein, 139 aa, Homo sapiens
RIPDSYTYTQTQPQPYAVHGHYSSDDLKTPSERQLTPLPPSAPPSADDNIKIPAERLRIPLPPSADDNLKTPSERQLTPLPPSAPPSADDNIKTPAERLRGPLPPSADDNLKTPSERQLTPLPPSADDNLKTPSERQLT

SEQ ID NO: 784927 - protein, 98 aa, Homo sapiens
ARMLIERLRRKHRKRNPGYNCYLQVSDWSWNLTLPSWVSMPRVFVVHLPQKDLVPNISQISVIKVFTNTDPCKRPNYHLQQQCNGLPWPYSRAKSART

SEQ ID NO: 784928 - protein, 30 aa, Homo sapiens
MDLGGKGTRTGVRSPGGVHWLAVEAGPVTC

SEQ ID NO: 784929 - protein, 102 aa, Homo sapiens
KILNRNGHSGFTPAKAESQAPTTGEAILGKQRVGLGDSQENPTSGIKKNVLIVTIFTDELSIFQNSLPQNSAPICPGAPQYPKKTCTTVPTTYSSNLLVCLS

SEQ ID NO: 784930 - protein, 116 aa, Homo sapiens
MQVEVQSLSLEECPWRLPGPQCECEALLPSGARRRIDLRLSGRAVAVWVHVRGGPGQFNLSYATGRHKKPNPHQNMNRGMEFIAPVSAPTKSGAPWHFLSQGPTDAQRAVRIRPGT

SEQ ID NO: 784931 - protein, 96 aa, Homo sapiens
QDLPGRPLGPRTPRPPAHPRRVSLIPPDRDPRKREKRVFPTPFMGERKPRGAQEQRPQQDLHPEPQEQPQRPKLHPAKEQKTGPGTAETSLQSSFH

SEQ ID NO: 784932 - protein, 105 aa, Homo sapiens
RPDFPHLMCFFAATRKGNHGSEACQDPQGKLAAGSAAALSWGLLRPVRRNSGGFQSPKDILALKGFLLLKNALCAVCGSSYVLPQLFRKLGQKDCLRLGIQDWPG

SEQ ID NO: 784933 - protein, 104 aa, Homo sapiens
RSSTSLQISWWNLFLTVLVSILVTLRQTILCSHNTDLPTNGEPNKILCCYRTFLCHLHLLVLHHVEGNYTFIYYTSSNIKPRKLYQRQQLFNHPSRYTSFKRQS

SEQ ID NO: 784934 - protein, 35 aa, Homo sapiens
ERSVENDPENSGLSNCGWRCNMLKLGKLDEEQVWE

SEQ ID NO: 784935 - protein, 109 aa, Homo sapiens [sequence omitted]

SEQ ID NO: 784936 - protein, 182 aa, Homo sapiens
PRTGLPGLRPVPSIILQIILRKTSTFFAFFLNTNLPGVNSRRKHTQGFVLHTDFSPWSRERLLFLLNPPRPTPAIWGRGFLRRRRRCRRADSPGFRVARAGPRLAPLPVSVCPRRAAGARRPDKSSGRRAHGPRERSSPEAEGPGTTLRTQRQEVPAPAGSGCSRGSRHARGPRARAPGEGA

SEQ ID NO: 784937 - protein, 244 aa, Homo sapiens
LEAPETPSHELTDAPRSSLSAVPQVGGTGVGRAGSASAAESARTAWGWGSIPGTAGGEHSGNHLWAVWGGGASLEAGRGASMGAATSRRLPAVPGSRRPHGLLSAPWPTAVALVPPSSGGQLRASSALQSPAATAEGLSGPLFGAYTFPTFKFQPRHDSMDWRRISTLDVDRVARELDVATLQENIAGITFCNLDREVCSRCGQPVDPALLKVLRLAQLIIEYLLHCQDCLSASVAQLEARLQT

SEQ ID NO: 784938 - protein, 117 aa, Homo sapiens
MQSPAATAEGLSGPLFGAYTFPTFKFQPRHDSMDWRRISTLDVDRVARELDVATLQENIAGITFCNLDREVCSRCGQPVDPALLKVLRLAQLIIEYLLHCQDCLSASVAQLEARLQT

SEQ ID NO: 784939 - protein, 110 aa, Homo sapiens
MAGYGTSQPTITLQGRPRRAPPLPGEGSPIHAGAGWPRRRWTNLATAPWHHLTRGQLTPPQGSEERSCPGDGCVSLQLPGTCPLNTRCYVSQRKLVSTHPRPVLVLGTPP

SEQ ID NO: 784940 - protein, 131 aa, Homo sapiens
PTPAKGQHPHVSHQHRFGRASTEAAFLPSTFASVPALPWNLPSAPPVLPTSVPPVPSSSHHPFSSPKSGMIRSCLEDPPFLPCPLFVLSPGRSPDPALTKSRSQMPSGSTASIKGSPHFLCLRLCFPPPPS

SEQ ID NO: 784941 - protein, 169 aa, Homo sapiens
GQQNDYILLSLVRTRAVGHLRDVRRLVVAMSRARLGLYIFARVSLFQNCFELTPAFSQLTARPLHLHIIPTEPFPTTRKNGERPSHEVQIIKNMPQMANFVYNMYMHLIQTTHHYHQTLLHLPPALVEEGGDLQNQHTELETRKEAMAVKVTLCPIKQTPACGKKTQPL

SEQ ID NO: 784942 - protein, 152 aa, Homo sapiens
MGSRSSHAAVIPDGDSIRRETGFSQASLLRLHHRFRALDRNKKGYLSRMDLQQIGALAVNPLGDRIIESFFPDGSQRVDFPGFVRVLAHFRPVEDEDTETQDPKKPEPLNSRRNKLHYAFQLYDLDRDGKISRHEKAGGFSPSEWFGGTRWE

SEQ ID NO: 784943 - protein, 190 aa, Homo sapiens
LQQNNFFLETQSPSVAQATVQWHNHELTATSASWAHASFQPDAPEYLALLCLANFFLYCFVETGFCHVAQAGLKLLSSNNPPTLASQVAGIKGVHHHAWLIFVFLVETGFHHDGQAGLEPLTSCDLSALASQTAGITGMSHHARALYSLLLLFVFKRQGLALLPRLKCSSAIVACCSLELLGSNDPPVSA

SEQ ID NO: 784944 - protein, 71 aa, Homo sapiens
AKGPWRPGPWLMLIYTEYTEVLSKCFSEWLLGGETWRQRQNSRQPLPHSLLLHPQGLGSVPQRVRLGEHVS

SEQ ID NO: 784945 - protein, 94 aa, Homo sapiens
PVGRLGPCLPSFTGSGESIRSRAKEKGSPKAPPRPSGDETAPWSQEHQVCRVNPEQLTTYQAKRKTTPRKTQGNSVTRTHSLQRQLFTPELSDN

SEQ ID NO: 784946 - protein, 44 aa, Homo sapiens
MLDRLLSLTKTVIFRTSKLSPRQLIPPTPSSAPRAADRQPCFAN

SEQ ID NO: 784947 - protein, 82 aa, Homo sapiens
DLLSLLAFIFLPCWMLPTLKHWTPSSSAFGLLDLHQWFARGSKAFGHILKAALQASLLLRFGTRTGFLAPQLADGLLWDFTL

SEQ ID NO: 784948 - protein, 253 aa, Homo sapiens
NKQYEKERQRLVTGIEELRTKLIQIEAENSDLKVNMAHRTSQFQLIQEELLEKASNSSKLESEMTKKCSQLLTLEKQLEEKIVAYSSIAAKNAELEQELMLEAQLEKKDQQFKEQEKTMSMLQQDIICKQHHLESLDRLLTESKGEMKKENMKKDEALKALQNQVSEETIKVRQLDSALEICKEELVLHLNQLEGNKEKFEKQLKKKSEEVYCLQKELKIKNHSLQETSEQNVILQHTLQQQQQMLQQETIRN

SEQ ID NO: 784949 - protein, 37 aa, Homo sapiens
LPPPLPSSHTALSRSLSYARLKKNRARNASIALPSAA

SEQ ID NO: 784950 - protein, 103 aa, Homo sapiens
PARASGAQPPLQRRALRFGRRNLQDTASRTPSASGNRQHRRRERPPPPRLLSRVLPVTSLRAGPGRGDISLLPRRLVGPTDGRSQRGPDCGTRPEQLNIRYPE

SEQ ID NO: 784951 - protein, 43 aa, Homo sapiens
RIVIFSWNSVNCILRTSAILMLEDSTTFVVLFPGRDSTTEVVL

SEQ ID NO: 784952 - protein, 114 aa, Homo sapiens
KLANGIDRDDVILLMMKLRHRRVKQLAQSHSNDQWQSQDSNSGFNPTPEPTFLTISRVSLRVNSPKTLGRCTAHSKRHRHNRASHLFKVHAHPWRSPSLPSSILLLPTTFTQIK

SEQ ID NO: 784953 - protein, 58 aa, Homo sapiens
QPMGAAVGHKPCKATGAGLPKAFRAQPSCPCALDVGQRFKKGDFGTVGLNDWPSGFGV

SEQ ID NO: 784954 - protein, 91 aa, Homo sapiens
MATPRGLGALLLLLLLPTSGQEKPTEGPRNTCLGSNNMYDIFNLNDKALCFTKCRQSGSDSCNVENLQRYWLNYEAHLMKEGLTQKVNTPF

SEQ ID NO: 784955 - protein, 163 aa, Homo sapiens
YSLGISIDNYVVSRYSFTSSFPVCPSFLFASLIILVKISSTVQPGVQGTDTLPGLHVRDAVRPPCIISAGFLQVSFSWLRKFSSLPSLLRTLNHKRVLDCYKWLCCSPTEMACTPFHSTETGDFPKRSKHPAFPDGLQPHAIFPTGLSVLLLLPLLCPRSCRG

SEQ ID NO: 784956 - protein, 53 aa, Homo sapiens
MGSSLTPSFPLASLYYSSSPSCARGLAEDDTYLKGCVLASTFLTRKSLPETDH

SEQ ID NO: 784957 - protein, 109 aa, Homo sapiens
SAESGSSRHEHCACKCPVMQTPPACESTVAFHLTKILTVCVPKIKARKSASPPVAMRGRPYRLSKTVDSKIKECCICSSRFSLSTFKLLAQLEKTILPLFLQGEKIRLE

SEQ ID NO: 784958 - protein, 89 aa, Homo sapiens
MKLSRALSDLVKYTKSVATHDIEMEAASSWQVSSFSETKAHQILQQKPAQYLRFNQQQLSRIYPSSYRVDSSNYNPQPFWNAGCQMGGC

SEQ ID NO: 784959 - protein, 120 aa, Homo sapiens
DGNQPLGSPDIGLSRQRLFKNSINREGPLQGELQTTAQGNKRVHKQMETHSMLMDRKNQYCENGYTTQSNLQIQCYSQQATDCLHRIRKNYLKFHMKPKTSPYSQDDTKQKEQRWRHNAT

SEQ ID NO: 784960 - protein, 107 aa, Homo sapiens
RGKRGAWAAPAGVLGGRPRGEPPCLPSGPQRPPLPRRVGEPGSGGRGGGGIRERGGEGAHLQGERGLTKGRRGRPEPGGALWSWPLGSLDPRCREAARSRGLRESLC

SEQ ID NO: 784961 - protein, 32 aa, Homo sapiens
MPTQHSLGGQDPLGQHSEMTELETSVPLPFRP

SEQ ID NO: 784962 - protein, 319 aa, Homo sapiens
DPACTPHKGDSTSQEIHSATTSPSPVSSTLPESISSSPLPVTSLLTSGLAKTTDMLHKSSEPVTNSPANLSSTSVEILATSEVTTDTEKTHPSSNRTVTDVGTSSSGHESTSFVLADSQTSKVTSPMVITSTMEDTSVSTSTPGFFETSRIQTEPTSSLTLGLRKTSSSEGTSLATEMSTVLSGVPTGATAEVSRTEVTSSSRTSISGFAQLTVSPETSTETITRLPTSSIMTESAEMMIKTQTDPPGSTPESTHTVDISTTPNWVETHSTVTQRFSHSEMTTLVSRSPGDMLWPSQSSVEETSSASSLLSLPATTSPS

SEQ ID NO: 784963 - protein, 47 aa, Homo sapiens
NINYCWNVSCSEGKWHDPLPALRLNGCWTTPAWCPAIPDLPLHLTLR

SEQ ID NO: 784964 - protein, 70 aa, Homo sapiens
STAPPLTHRPHLPLHLGVYLPFTPALSALWQTPRLPPGGFKHPSLPEALLLPQRLHPKKCHLQIDQEHLR

SEQ ID NO: 784965 - protein, 109 aa, Homo sapiens
NRKASRDSQLISLLIHFLWETVPEVNSEDVYVQLYLCTNIVNMVCKYRRIWMDIAEIKVHVGVANDDTFANLQAVMPHSSSLLTLTKLYRFFVLYALQVDLKSCSLMLS

SEQ ID NO: 784966 - protein, 2114 aa, Homo sapiens
MGEGRTGAGRAGLPLDQATPAVDQLLPPLPLACPPQSSQPEWALGTLSPETPPLIPPGTQTHPQKPCDLLGSAVGGMGSVPHAAVATKVIHTGPGAPRGAPLDHCLPPSPWHRLQSPMWGLGRGLLAAMPQQAGGLLRAGPLTTSPAIPSGVFNPNSEDPLPGQLKKQLVLRIISGQQLPKPRDSMLGDRGEIIDPFVEVEIIGLPVDCSREQTRVVDDNGFNPTWEETLVFMVHMPEIALVRFLVWDHDPIGRDFIGQRTLAFSSMMPGYRHVYLEGMEEASIFVHVAVSDISGKVSVTPCHQPSWGGATPAPCPMPPHVSPVLGPELRQLRPRVPSPGLCSSISRGAAVGAWLLSHQCPPLISGLALGISGRTGPECSGPCPALCHPCLSQTLGGLAASTPTVLPSGFSAGTERCPSPLYYPPPLYFLVSRGRQLPGFACDSTPSMSVPCPRSGWGLGFRRKWSWCQPCCPGFELGPSALWVLLAAAGPRGTRTHSRRGLPRPSADSLLPCSRAQRCHPAPAVYPPICSSSPRLQGSPRHCCGRLTCSPCLFGLAVGFSMATAYFRSAALLGALKVPGARDSAARRPCMPRPHPISIHDFLVAFGDCRSCDVDHDMAPGALAIPSHSGIYEADPGFSWVAAFSLASPPLPSLSPPSPPSVLPPLPQPLPWRAARWSPHCAPPIPLLLSPAPISDPQAVGSEFASHSLPVLANHASAWDEGTPEAGAPSQNPGSASKWLPSHCDQMRRFGILNQEADSSAGHLNASAQRRPCRGVTHLPGLGRSVHEHGSSWGRGGCCLGGIWHVRAPLASAPWRCGCLPLSSCSAQAGTSWAQLSRKIGCGQVLVGWESEPILAGLRGQQASCGPWGLTEWRAGQDQKRLPGGIQEGFLEEVVLPRARVSPWEWAGHGPGKWASRCTWLLLLWTSYSCLRVGHTQPGSATPVSPAERRGLRASEQVQAVVGQAGARGLSSGGKDLLSMPLKGPTCPGQVRRGQFLPEGWGGPCVLRSVAATVPGRAALGTLLLKALVCPHTPSLRWPSPSDRDTHGTSVARSGELALGEQLQLGWDPWQQLHGLLLLQVKQALGLKGLFLRGPKPGSLDSHAAGRPPARPSVSQRILRRTASAPTKSQKPGRRGFPELVLGTRDTGSKGVADDVVPPGPGPAPEAPAQEGPGSGSPRGKAPAAVAEKSPVRVRPPRVLDGPGPAGMAATCMKCVVGSCAGVNTGGLQRERPPSPGPASRQAAIRQQPRARADSLGAPCCGLDPHAIPGRSREAPKGPGAWRQGPGGSGSMSSDSSSPDSPGIPERSPRWPEGACRQPGALQGEMSALFAQKLEEIRSKSPMFSAGKPLLPCVVLPHAPGMAGPGSPAAASAWTVSPRVLVLVALYPWHCLRGTLLPWLACGPSAPALLSELEALGLGWSWFEARQAGKNQLLLLRVWGRDCGLTCWAPPAGRFPKLTSWAAGDLHVPLMPFLGLGATYHPIPTSLKGRLQGSLLGSLMWAGSAAAGRLLRPWDAWSLLSAAWSRFPGPQGFAALGCSTPLEGCLLSLEGGTYTEPAPHHPAPPDPPDQAFLSAPTHAASVVRNWERRVTGNGAQPRCPVLSQPKEGPVCGTGRGLGPSSSRVGTPSVPRPGDASGWELGLATLGTGHRGHHPDPTPLRLFSLPPSLSSASPSGSLSLPHLPTDTRPLSTQRPLPPLCSLETIAEEPAPGPGPPPPAAVPTSSSQGRPPYPTGPGANVASPLEDTEEPRDSRPRPCNGEGAGGAYERAPGSQTDGRSQPRTLGHLPVIRRVKSEGQVPTEPLGGWRPLAAPFPAPAVYSDATGSDPLWQRLEPCGHRDSVSSSSSMSSSDTVIDLSLPSLGLGRSRENLAGAHMGRLPPRPHSASAARPDLPPVTKSKSNPNLRATGQRPPIPDELQPRSLAPGMAGLPFRPPWGCLSLVGVQDCPVAAKSKSLGDLTADDFAPSFEGGSRRLSHSLGLPGGTRRVSGPGVRRDTLTEQLRWLTVFQQAGDITSPTSLGPAGEGVAGGPGFVRRSSSRSHSRVRAIASRARQAQERQQRLQGLGRQGPPEEERGTPEGACSVGHEGSVDAPAPSKGALGPASAAAENLVLLRL

SEQ ID NO: 784967 - protein, 719 aa, Homo sapiens
ALNYQSEGRMLQLNRAKFSANGGCGYVLKPGCMCQGVFNPNSEDPLPGQLKKQLVLRIISGQQLPKPRDSMLGDRGEIIDPFVEVEIIGLPVDCSREQTRVVDDNGFNPTWEETLVFMVHMPEIALVRFLVWDHDPIGRDFIGQRTLAFSSMMPGYRHVYLEGMEEASIFVHVAVSDISGKVKQALGLKGLFLRGPKPGSLDSHAAGRPPARPSVSQRILRRTASAPTKSQKPGRRGFPELVLGTRDTGSKGVADDVVPPGPGPAPEAPAQEGPGSGSPRVRNWERRVTDTRPLSTQRPLPPLCSLETIAEEPAPGPGPPPPAAVPTSSSQGRPPYPTGPGANVASPLEDTEEPRDSRPRPCNGEGAGGAYERAPGSQTDGRSQPRTLGHLPVIRRVKSEGQVPTEPLGGWRPLAAPFPAPAVYSDATGSDPLWQRLEPCGHRDSVSSSSSMSSSDTVIDLSLPSLGLGRSRENLAGAHMGRLPPRPHSASAARPDLPPVTKSKSNPNLRATGQRPPIPDELQPRSLAPGMAGLPFRPPWGCLSLVGVQDCPVAAKSKSLGDLTADDFAPSFEGGSRRLSHSLGLPGGTRRVSGPGVRRDTLTEQLRWLTVFQQAGDITSPTSLGPAGEGVAGGPGFVRRSSSRSHSRVRAIASRARQAQERQQRLQGLGRQGPPEEERGTPEGACSVGHEGSVDAPAPSKGALGPASAAAENLVLLRL

SEQ ID NO: 784968 - protein, 283 aa, Homo sapiens
ALNYQSEGRMLQLNRAKFSANGGCGYVLKPGCMCQGVFNPNSEDPLPGQLKKQLVLRIISGQQLPKPRDSMLGDRGEIIDPFVEVEIIGLPVDCSREQTRVVDDNGFNPTWEETLVFMVHMPEIALVRFLVWDHDPIGRDFIGQRTLAFSSMMPGYRHVYLEGMEEASIFVHVAVSDISGKVKQALGLKGLFLRGPKPGSLDSHAAGRPPARPSVSQRILRRTASAPTKSQKPGRRGFPELVLGTRDTGSKGVADDVVPPGPGPAPEAPAQEGPGSGSPRVRN

SEQ ID NO: 784969 - protein, 719 aa, Homo sapiens; identical to SEQ ID NO: 784967

SEQ ID NO: 784970 - protein, 719 aa, Homo sapiens; identical to SEQ ID NO: 784967

SEQ ID NO: 784971 - protein, 450 aa, Homo sapiens
ALNYQSEGRMLQLNRAKFSANGGCGYVLKPGCMCQGVFNPNSEDPLPGQLKKQLVLRIISGQQLPKPRDSMLGDRGEIIDPFVEVEIIGLPVDCSREQTRVVDDNGFNPTWEETLVFMVHMPEIALVRFLVWDHDPIGRDFIGQRTLAFSSMMPGYRHVYLEGMEEASIFVHVAVSDISGKVKQALGLKGLFLRGPKPGSLDSHAAGRPPARPSVSQRILRRTASAPTKSQKPGRRGFPELVLGTRDTGSKGVADDVVPPGPGPAPEAPAQEGPGSGSPRGKAPAAVAEKSPVRVRPPRVLDGPGPAGMAATCMKCVVGSCAGVNTGGLQRERPPSPGPASRQAAIRQQPRARADSLGAPCCGLDPHAIPGRSREAPKGPGAWRQGPGGSGSMSSDSSSPDSPGIPERSPRWPEGACRQPGALQGEMSALFAQKLEEIRSKSPMFSAVRN

SEQ ID NO: 784972 - protein, 72 aa, Homo sapiens
SPYVEVAMDEVVLHTPRLHTLRETSIPFSCHPFSCHPLTSLISSISSPGKPRIYFVLVWICLFWTFHINRII

SEQ ID NO: 784973 - protein, 42 aa, Homo sapiens
NIGVLASKDQQARIVTILAEVIELDQQKKVGLYTLGMYVEEQ

SEQ ID NO: 784974 - protein, 126 aa, Homo sapiens
RQASSASLICVQGSLENGMIKTRGHKVSSFPFHREVTISPLVYLGGPRLSVKTPAFVGNGVMQHWNMAGRGDSASSRFPMWRPRLGDSGGLFKTTRFVGSIAPQSTSPLRWPRMGRRKSAEHVKYK

SEQ ID NO: 784975 - protein, 226 aa, Homo sapiens
MRKVVVITGASSGIGLALCKRLLAEDDELHLCLACRNMSKAEAVCAALLASHPTAEVTIVQVDVSNLQSVFRASKELKQRFQRLDCIYLNAGIMPNPQLNIKALFFGLFSRKVIHMFSTAEGLLTQGDKITADGLQEVFETNVFGHFILIRELEPLLCHSDNPSQLIWTSSRSARKSNFSLEDFSTAKGGDLELFQIMPVTFECGFEQELQPAGFLFQCGLVQVQH

SEQ ID NO: 784976 - protein, 39 aa, Homo sapiens
CYTVVKRNEVLIHATTWMSLKIIMLSERRQSQKVTCCMI

SEQ ID NO: 784977 - protein, 163 aa, Homo sapiens
KKKLRDNMPIDNGQITNDNKLTAASAVTGQSAAWEGRGQDCLLLYFLYHPPHVRTNPRKRSPNQSQKTSCFLLAHLQFPTACGQNHLEPSPFSTPCVLAPTHTGDVADSLAVASSEYCFSFGWFSFISTFELLWLRTESICKKCFMLNERSRIKISYMTSVKL

SEQ ID NO: 784978 - protein, 69 aa, Homo sapiens
PPIAQHRYIDKWNRTEAFLITPHIYNRFTFDKQDKKGNGERIPYLINGVEDNITMLSPTPRECYDGIIK

SEQ ID NO: 784979 - protein, 76 aa, Homo sapiens
AEGTPINHIQIQEKKTWAQNEGFQINVQKKVDKGKRLRICACGRSQEIRINHRKKNHHDNVPFTTVFLTTAAPGGT

SEQ ID NO: 784980 - protein, 111 aa, Homo sapiens
SLPSQCPLPSPALVTACGDPGAPRPRRTAVDRGEGGGKDEGYGEAEMGWGKGWWKGKEKTGGMQAAPQPAVPAAASSGAGQAVQYSPPLHLSHHYLSPQPTTRTHPSHPHP

SEQ ID NO: 784981 - protein, 219 aa, Homo sapiens
AACLELVTEFSPKLRQVMLNEMLLLDIHTHEAGTGQAGERPPSDLISRVRGYLEMRLPDIPLRQVIAEECVAFMLNWRENEYLTLQVPAFLLQSNPYVKLGQLLAATCKELPGPKESRRTAKDLGEVVVQICSVSSQHKRGNDGRVSLIKQRESTLGIMYRSELLSFIKKLREPLVLTIILSLLVKLHKVREDIVNDITAEHISIWPSPFPTPVCDFEA

SEQ ID NO: 784982 - protein, 160 aa, Homo sapiens
DRTQRKRARVRIGRSYSGPCAEHQECVLQKSLSLSPRLECSGAISAHCKLRLPGSCHSPASASRVAGTTGVRHHAQGEEKKVHEVKKKQGMREKNGGVSATAQSVSATWSLTLSPGWSAVSSLQPPPPGFKRFSCLRLLSSWDYRYLEIITGTFSGQTRT

SEQ ID NO: 784983 - protein, 133 aa, Homo sapiens
SCRPYVDPHKSGHEIWEEFSMSFTPAVKEVVEFAKRIPGFRDLSQHDQVNLLKAGTFEVLMVRFASLFDAKERTVTFLSGKKYSVDDLHSMGAGDLLNSMFEFSEKLNALQLSDEEMSLFTAVVLVSAGNLCI

SEQ ID NO: 784984 - protein, 383 aa, Homo sapiens
MDNASFSEPWPANASGPDPALSCSNASTLAPLPVPLAVAVPVVYAVICAVGLAGNSAVLYVLLRAPRMKTVTNLFILNLAIADELFTLVLPINIADFLLRQWPFGELMCKLIVAIDQYNTFSSLYFLTVMSADRYLVVLATAESRRVAGRTYSAARAVSLAVWGIVTLVVLPFAVFARLDDEQGRRQCVLVFPQPEAFWWRASRLYTLVLGFAIPVSTICVLYTTLLCRLHAMRLDSHAKALERAKKRVTFLVVAILAVCLLCWTPYHLSTVVALTTDLPQTPLVIAISYFITSLSYANSCLNPFLYAFLDASFRRNLRQLINLPRGSLTPPASGSATARHSWPAREERPRVRDQTGRLCSGETDSRPIPDLADRKRCSCARS

SEQ ID NO: 784985 - protein, 91 aa, Homo sapiens
MSRPFFRPSSAGFAFSLSLGSPDRCLSFSICFILSLCRLWRSSISRSFWDSILSKLVIIRSPSPRSFSLGLASFLPGSLDGATLSFPLLIF

SEQ ID NO: 784986 - protein, 124 aa, Homo sapiens
HACPLHKLLTEDTLCVFFPTQSLNCDSSLFPLSCPQSGLVAYLILKCLECGKTLPYHNYHSFCPRIGEFPKPNSSAYGFVFELPLTSRFAHSYKPFEVGNKHLLSAYPLENETKNKHLQCAWML

SEQ ID NO: 784987 - protein, 52 aa, Homo sapiens
IQHPPHQPCCSCSGVSKQGALSTQMRKVRLREGNRLASGSRTVKLDKVQSVG

SEQ ID NO: 784988 - protein, 154 aa, Homo sapiens
PRTRHEVWRQSSIRRRWKRKWYRAPALPGEVCKHSCSRAREPLEVRPQELHHSGAGAGRGQQRAGVPRSTAPVRAPRTSSCGGRPRPLSRTWRAPPHTLKSPGEQRETDSPTPSRKDTPALPAVHGKGEVANLDGVRRPELRRVAFHGAPGLIS

SEQ ID NO: 784989 - protein, 215 aa, Homo sapiens
QAEGTPPTFPFPPLLQSHPSSFHPFWDVARASLQDLPAGPGPRAPLGAEWGGGMRAYHLHPQALPPEDHPFQALARPPKACGGRAPALPGEVCKHSCSRAREPLEVRPQELHHSGAGAGRGQQRAGVPRSTAPVRAPRTSSCGGRPRPLSRTWRAPPHTLKSPGEQRETDSPTPSRKDTPALPAVHGKGEVANLDGVRRPELRRVAFHGAPGLIS

SEQ ID NO: 784990 - protein, 580 aa, Homo sapiens
MENFILYEEIGRGSKTVVYKGRRKGTINFVAILCTDKCKRPEITNWVRLTREIKHKNIVTFHEWYETSNHLWLVVELCTGGSLKTVIAQDENLPEDVVREFGIDLISGLHHLHKLGILFCDISPRKILLEGPGTLKFSNFCLAKVEGENLEEFFALVAAEEGGGDNGENVLKKSMKSRVKGSPVYTAPEVVRGADFSISSDLWSLGCLLYEMFSGKPPFFSESISELTEKILCEDPLPPIPKDSSRPKASSDFINLLDGLLQRDPQKRLTWTRLLQHSFWKKAFAGADQESSVEDLSLSRNTMECSGPQDSKELLQNSQSRQAKGHKSGQPLGHSFRLENPTEFRPKSTLEGQLNESMFLLSSRPTPRTSTAVEVSPGEDMTHCSPQKTSPLTKITSGHLSQQDLESQMRELIYTDSDLVVTPIIDNPKIMKQPPVKFDAKILHLPTYSVDKLLFLKDQDWNDFLQQVCSQIDSTEKSMGASRAKLNLLCYLCVVAGHQEVATRLLHSPLFQLLIQHLRIAPNWDIRAKVAHVIGLLASHTAELQENTPVVETTSSIGIGILNCLVQHSTPVPRQCLVYV

SEQ ID NO: 784991 - protein, 116 aa, Homo sapiens
MSEGNIPPFGGSGALGTHTVERVLIGPKPFWGSWGHKNGCGQRGFANTFWRSRRFPLGPLGVWGQRLEREKRQRKGVEIHVGGDNFGPVERKWPCDYRGLEISKGEITRVSNTRKA

SEQ ID NO: 784992 - protein, 444 aa, Homo sapiens
MHMKFYSCACFSPALFHLIRSFLGGFVLAAIQMPNRAVLHTLLLGSPVYTAPEVVRGADFSISSDLWSLGCLLYEMFSGKPPFFSESISELTEKILCEDPLPPIPKDSSRPKASSDFINLLDGLLQRDPQKRLTWTRLLQHSFWKKAFAGADQESSVEDLSLSRNTMECSGPQDSKELLQNSQSRQAKGHKSGQPLGHSFRLENPTEFRPKSTLEGQLNESMFLLSSRPTPRTSTAVEVSPGEDMTHCSPQKTSPLTKITSGHLSQQDLESQMRELIYTDSDLVVTPIIDNPKIMKQPPVKFDAKILHLPTYSVDKLLFLKDQDWNDFLQQVCSQIDSTEKSMGASRAKLNLLCYLCVVAGHQEVATRLLHSPLFQLLIQHLRIAPNWDIRAKVAHVIGLLASHTAELQENTPVVETTSSIGIGILNCLVQHSTPVPRQCLVYV

SEQ ID NO: 784993 - protein, 618 aa, Homo sapiens
MENFILYEEIGRGSKTVVYKGRRKGTINFVAILCTDKCKRPEITNWVRLTREIKHKNIVTFHEWYETSNHLWLVVELCTGGSLKTVIAQDENLPEDVVREFGIDLISGLHHLHKLGILFCDISPRKILLEGPGTLKFSNFCLAKVEGENLEEFFALVAAEEGGGDNGENVLKKSMKSRVKGSPVYTAPEVVRGADFSISSDLWSLGCLLYEMFSGKPPFFSESISELTEKILCEDPLPPIPKDSSRPKASSDFINLLDGLLQRDPQKRLTWTRLLQHSFWKKAFAGADQESSVEDLSLSRNTMECSGPQDSKELLQNSQSRQAKGHKSGQPLGHSFRLENPTEFRPKSTLEGQLNESMFLLSSRPTPRTSTAVEVSPGEDMTHCSPQKTSPLTKITSGHLSQQDLESQMRELIYTDSDLVVTPIIDNPKIMKQPPVKFDAKILHLPTYSVDKLLFLKDQDWNDFLQQVCSQIDSTEKSMGASRAKLNLLCYLCVVAGHQEVATRLLHSPLFQLLIQHLRIAPNWDIRAKVAHVIGLLASHTAELQENTPVVEAIVLLTELIRENFRNSKLKQCLLPTLGELIYLVATQEEKKKNPRECWAVPLAAYTVLMRCLREGEL

SEQ ID NO: 784994 - protein, 732 aa, Homo sapiens
MENFILYEEIGRGSKTVVYKGRRKGTINFVAILCTDKCKRPEITNWVRLTREIKHKNIVTFHEWYETSNHLWLVVELCTGGSLKTVIAQDENLPEDVVREFGIDLISGLHHLHKLGILFCDISPRKILLEGPGTLKFSNFCLAKVEGENLEEFFALVAAEEGGGDNGENVLKKSMKSRVKGSPVYTAPEVVRGADFSISSDLWSLGCLLYEMFSGKPPFFSESISELTEKILCEDPLPPIPKDSSRPKASSDFINLLDGLLQRDPQKRLTWTRLLQHSFWKKAFAGADQESSVEDLSLSRNTMECSGPQDSKELLQNSQSRQAKGHKSGQPLGHSFRLENPTEFRPKSTLEGQLNESMFLLSSRPTPRTSTAVEVSPGEDMTHCSPQKTSPLTKITSGHLSQQDLESQMRELIYTDSDLVVTPIIDNPKIMKQPPVKFDAKILHLPTYSVDKLLFLKDQDWNDFLQQVCSQIDSTEKSMGASRAKLNLLCYLCVVAGHQEVATRLLHSPLFQLLIQHLRIAPNWDIRAKVAHVIGLLASHTAELQENTPVVEAIVLLTELIRENFRNSKLKQCLLPTLGELIYLVATQEEKKKNPRECWAVPLAAYTVLMRCLREGEERVVNHMAAKIIENVCTTFSAQAQGFITGEIGPILWYLFRHSTADSLRITAVSALCRITRHSPTAFQNVIEKVGLNPVINSLASAICKVQQYMLTLFTAMLSCGIHLQRLIQEKV

SEQ ID NO: 784995 - protein, 513 aa, Homo sapiens
MVDYFHGCTHGQGGSLKTVIAQDENLPEDVVREFGIDLISGLHHLHKLGILFCDISPRKILLEGPGTLKFSNFCLAKVEGENLEEFFALVAAEEGGGDNGENVLKKSMKSRVKGSPVYTAPEVVRGADFSISSDLWSLGCLLYEMFSGKPPFFSESISELTEKILCEDPLPPIPKDSSRPKASSDFINLLDGLLQRDPQKRLTWTRLLQHSFWKKAFAGADQESSVEDLSLSRNTMECSGPQDSKELLQNSQSRQAKGHKSGQPLGHSFRLENPTEFRPKSTLEGQLNESMFLLSSRPTPRTSTAVEVSPGEDMTHCSPQKTSPLTKITSGHLSQQDLESQMRELIYTDSDLVVTPIIDNPKIMKQPPVKFDAKILHLPTYSVDKLLFLKDQDWNDFLQQVCSQIDSTEKSMGASRAKLNLLCYLCVVAGHQEVATRLLHSPLFQLLIQHLRIAPNWDIRAKVAHVIGLLASHTAELQENTPVVETTSSIGIGILNCLVQHSTPVPRQCLVYV

SEQ ID NO: 784996 - protein, 582 aa, Homo sapiens [sequence omitted]

SEQ ID NO: 784997 - protein, 109 aa, Homo sapiens
MAAKIIENVCTTFSAQAQGFITGEIGPILWYLFRHSTADSLRITAVSALCRITRHSPTAFQNVIEKVGLNPVINSLASAICKVQQYMLTLFTAMLSCGIHLQRLIQEKV

SEQ ID NO: 784998 - protein, 237 aa, Homo sapiens
EEEPEEEEEEEEDLIDGFAIASFATLEALQKDASLQPPERLEHRLKHSGKRKRGGSSGATGEPGDSSDREPGRPPGDRARKWPNKRRRKEVSDDDLDPSFTVSTSKGWSQGLGLEAREGSGVSMSLNCACLPSCPTASGPHGAFNGNCEAKLSVVPKVSGLERSQEQPPGPDPLLVPFPPKEPPPPPVPRPPVSPPAPLPATPSLPPPPQPQLQLRVSPFGLRTSPYGSSLDLSTGR

SEQ ID NO: 784999 - protein, 267 aa, Homo sapiens
EEEPEEEEEEEEDLIDGFAIASFATLEALQKDASLQPPERLEHRLKHSGKRKRGGSSGATGEPGDSSDREPGRPPGDRARKWPNKRRRKEASSRHSLEAGYICDAESDLDERVSDDDLDPSFTVSTSKASGPHGAFNGNCEAKLSVVPKVSGLERSQEQPPGPDPLLVPFPPKEQRERRRSLCGEAQAKKLGNNCVFAPADVTSEKDVQTALALAKGKFGRVDVAVNCAGIGGGSKTYNLKKGSTIPWKIPGSLDVNSWALQCDPLV

SEQ ID NO: 785000 - protein, 165 aa, Homo sapiens
MRLAWVSKWVGSLACRPKVVSSTSLPRVLSPIPWFSFPLLLPPPSIAPPSSSWNQPFSVSPKSGGMSWRRNGVRGALSYPHTHTHQGENTVSDDDLDPSFTVSTSKASGPHGAFNGNCEAKLSVVPKVSGLERSQEQPPGPDPLLVPFPPKEITRSVFSTSCAPT

SEQ ID NO: 785001 - protein, 143 aa, Homo sapiens
EEEPEEEEEEEEDLIDGFAIASFATLEALQKDASLQPPERLEHRLKHSGKRKRGGSSGATGEPGDSSDREPGRPPGDRARKWPNKRRRKEASSRHSLEAGYICDAESDLDERVSGARAWVGSVTACKRDCSIKVFCVQQTAFP

SEQ ID NO: 785002 - protein, 80 aa, Homo sapiens
QTLRLSPARSVPVCRHPLRLNPARSMPVCRHSQAEPRTLRARLQTLSQAEPRTLCARLQTPSQAEPDMLRARLQTLSQTV

SEQ ID NO: 785003 - protein, 68 aa, Homo sapiens
GVLEDPVCHFSKGGDNGVQSVCAFMARNYVLSVAQYSCSKWSHHVYSKSADRGGNPWLCSTIMTTTIY

SEQ ID NO: 785004 - protein, 55 aa, Homo sapiens
KGTLYHFSLCTHENFISLGQVKNCTCRLIECALFLLTLIGSDNLSTTTTTRHIYI

SEQ ID NO: 785005 - protein, 71 aa, Homo sapiens
REGWRFCKHVLRSLEFQILSRPGKSMCIYYQPGGCLKYIPRQPVTGFCPPLLQSQSPSTLGPSDLGHPPAP

SEQ ID NO: 785006 - protein, 109 aa, Homo sapiens
MATSYRSARARDAVTPSKTTGVGLRRLGAFRLGATIRISVNTTDHSSEGVSVTPASMEDRGGPGDGNGRRYGGPPRGRREMKPPENGGGQAGPPWAGGNRGEKKQGGRH

SEQ ID NO: 785007 - protein, 113 aa, Homo sapiens
DGQCPPSLFYWNRSKAEKLKSGAAHGPTVYTEGVMSSPWTTVYTQGVRSSPGTAVYTEGVRSSPGTTVYTESVRSSPGTAVHTKSAKEQPRDRRPHRGRQGADSSPETQGRLT

SEQ ID NO: 785008 - protein, 73 aa, Homo sapiens
PGDEQGTMAKYPPFGGSQPLWPHQEPQSPGAIPGLPGVREGWGQKGFQGQEQTHTARPPKTTLKTLGQQGTLL

SEQ ID NO: 785009 - protein, 279 aa, Homo sapiens
MLLYRGAPAGPGAPGCGLARPGGGPQAFGIRLSTMSPRYLQSNSSSHTRPFSAIAELLDNAVDPDVSARTVFIDVEEVKNKSCLTFTDDGCGMTPHKLHRMLSSSGLNPVLRYLYRCWGDFTCRTFLSRQPSNYTRTQTAKNEEEDEEQEDDTKRQYRGQMKRGQNGCVTATRVIPLKGTQVNAPFFRPLPNQNVEARRSLVGGQDDVESIEQTSVSRQVYSKQDRVVCMKWVNYCQSPGYCMAVRQALDHNCWLLWIQGRSRATRRLVTPGVARRSLA

SEQ ID NO: 785010 - protein, 599 aa, Homo sapiens
MLLYRGAPAGPGAPGCGLARPGGGPQAFGIRLSTMSPRYLQSNSSSHTRPFSAIAELLDNAVDPDVSARTVFIDVEEVKNKSCLTFTDDGCGMTPHKLHRMLSSGIQLTGDVKDLFKENYKPLLNEIKEDTNKWKTIPCSWVGRINIVKMAILPKVIYRFNAIPIKLPMTFFTELEKTTLKFIWNQKRACITKSILRQKKKAGGITLPDFKLYYTATVTKTAWYWYQNRDIDQWNRTEPSEIMPHIYNYLIFDKPDKNKQWGKDSLSNKWCWENWLAICKKLKLDPFLTPYTKINSGGLKTLTLDLNIKLEENLGITIQDIGMGKHFMSKTPKAMATKAKIDKWDLIKLKSFCTAKETTIRVNRQPTEWEKIFTTYSSDKGLISRIYNELKQIKKKKTNNPIKKWAKDMNRHFSKEDIYAAKKHMKKCSSSLAIREMQIKTTMRCHLTPVRMAIIKKSGNNRCWRGCGEIGTLLHCWWDCKLVQPLWKSVWGFLRDLELEIPFDPAIPLLGIYPKDYKSCCYKDTCTRMFIAALFTIAKTWNQAKCPTMIDWIKKMWHIYTMEYYAAIKNDEFMSFVGTINHAAIKTHAHVCLLRHYSQ

SEQ ID NO: 785011 - protein, 275 aa, Homo sapiens
NLRLGTRPWVLRSGCPAVESMASPGAGRAPPELPERNCGYREVEYWDQRYQGAADSAPYDWFGDFSSFRALLEPELRPEDRILVLGCGNSALSYELFLGGFPNVTSVDYSSVVVAAMQARYAHVPQLRWETMDVRKLDFPSASFDVVLEKGTLDALLAGERDPWTVSSEGVHTVDQVLSEVSRVLVPGGRFISMTSAAPHFRTRHYAQAYYGWSLRHATYGSGFHFHLYLMHKGGKLSVAQLALGAQILSPPRPPTSPCFLQDSDHEDFLSAIQL

SEQ ID NO: 785012 - protein, 275 aa, Homo sapiens; identical to SEQ ID NO: 785011

SEQ ID NO: 785013 - protein, 275 aa, Homo sapiens; identical to SEQ ID NO: 785011

SEQ ID NO: 785014 - protein, 275 aa, Homo sapiens; identical to SEQ ID NO: 785011

SEQ ID NO: 785015 - protein, 266 aa, Homo sapiens
TALVRGWGGIGRGSPGAGRAPPELPERNCGYREVEYWDQRYQGAADSAPYDWFGDFSSFRALLEPELRPEDRILVLGCGNSALSYELFLGGFPNVTSVDYSSVVVAAMQARYAHVPQLRWETMDVRKLDFPSASFDVVLEKGTLDALLAGERDPWTVSSEGVHTVDQVLSEVSRVLVPGGRFISMTSAAPHFRTRHYAQAYYGWSLRHATYGSGFHFHLYLMHKGGKLSVAQLALGAQILSPPRPPTSPCFLQDSDHEDFLSAIQL

SEQ ID NO: 785016 - protein, 34 aa, Homo sapiens
MPWNMNRTMEFTPHGNKEEQPFAPLSQPGLVQGE

SEQ ID NO: 785017 - protein, 72 aa, Homo sapiens
LWQVVRVLIGRGSTGCHDLASAPEGSVWLPCGGHGVEQRQEPSESRGRGDLSLGCGAGHGTGRRWLGLRCLF

SEQ ID NO: 785018 - protein, 111 aa, Homo sapiens
MNGIHALSKEAPRLPYPFHHLRTQLGDTVYIPEIHKRRDLIETSTDTKSAVTLILDSPASTTARNKLLLFITLNKQEEKKREHQHKENNGEEKRKRGRAGGPRRGGGAEGG

SEQ ID NO: 785019 - protein, 119 aa, Homo sapiens
APVPALTLQQPLLALLAFLVPIHKPKASLPDCHRHSHPCCHGAQMTRWLWSGCQGSCAWIHASKDRHLEGFSRGAAWGSLHLGVVEGAPMGRTWLPMGGGLDRGAVGTTGLTRSLSPTP

SEQ ID NO: 785020 - protein, 105 aa, Homo sapiens
QTSSFCPRTFVLTALQSGMHFTWSFFVSHFKDGISLCCPIWSAVVVHRHDRSALQPRTPQLKQSSHLSSLSSWEYRHMTPYLVSSSLTTFKNLLRCDHLIAVFTT

SEQ ID NO: 785021 - protein, 105 aa, Homo sapiens
WLFCACVLSPSARSRPQNTRVQRNLGHSPGAQPRWVLGDHIFSGPFIQKPGPGVGGASCLVLFSRFLLLLATSLSLPVLQLFSCGLLFTSLEAALGAQLVGRGAP

SEQ ID NO: 785022 - protein, 52 aa, Homo sapiens
CWDWRCEPPRSTLMDIYYMQTDDYLQGVGVFGIRPGEKRFQDSIYGEFKVWR

SEQ ID NO: 785023 - protein, 124 aa, Homo sapiens
PALCTTPYVALCSSLHLSPLFSFSHHYREVILKCLGCSRSCQTFTNHHVHIRCRDKTAQSLNTLFCITHLGQSKIFQSQLKRGKQKVLQICSLLGTELVLVDKRPCAQRACSPEGRQTRNTGSK

SEQ ID NO: 785024 - protein, 181 aa, Homo sapiens
MGNETKAPRPPLGRGFYSQDGGACLGRSRDRAGLLCMTQRDRDWLGGDGVSIQKAGGGRQGRRPQGGRGMWGWEALTGLWKAKELAGLPGSLWSSWGALLSALPASEVSGCLPGSLKLVCGGSLRGNLKKTQALPLGHCTGPPPGSSSSISHSCPTCPAPSAHPRPCQGHIFTSSAAAEGA

SEQ ID NO: 785025 - protein, 136 aa, Homo sapiens
AGCEECVGGAEVSWQREQSMSSGWVHGGQVQVGARMMPTAPACLQEGALGCAAFGIVSMGAPASGPQKNVAVTGSISELRRRCPDGRGQLGLQAPLPLTQSRPQVGKTRVQVPNAADWPWDCGMLLALLKPQFPHL

SEQ ID NO: 785026 - protein, 121 aa, Homo sapiens
GVLAPVVSAGLGPQAGLSPHRCPRVQRHLPPLTVAFCFLGDSSIRRCVRVTNLLQAGQLSQGGLTRQAGKLTPWGGLAGRCPDGRGQLGLQAPLPLTQSRPQVGKTRVQVPNAADWPWDCG

SEQ ID NO: 785027 - protein, 51 aa, Homo sapiens
LPPPNCQKLVEVPGLPKGPGGRAQPHKAGSLQVTDRKKAPPEPQQALLNCI

SEQ ID NO: 785028 - protein, 268 aa, Homo sapiens
SPGTTGDWSSEGCSTEVRPEGTVCCCDHLTFFALLLRPTLDQSTVHILTRISQAGCGVSMIFLAFTIILYAFLRLSRERFKSEDAPKIHVALGGSLFLLNLAFLVNVGSGSKGSDAACWARGAVFHYFLLCAFTWMGLEAFHLYLLAVRVFNTYFGHYFLKLSLVGWGLPALMVIGTGSANSYGLYTIRDRENRTSLELCWFREGTTMYALYITVHGYFLITFLFGMVVLALVVWKIFTLSRATAVKERGKNRKKVLTLLGLSSLVGV

SEQ ID NO: 785029 - protein, 74 aa, Homo sapiens
SPGTTGDWSSEGCSTEVRPEGTVCCCDHLTFFALLLRPTLDQSTVHILTRISQAGCGVSMIFLAFTIILYAFLR

SEQ ID NO: 785030 - protein, 123 aa, Homo sapiens [sequence omitted]

SEQ ID NO: 785031 - protein, 34 aa, Homo sapiens
MGPGLHWTDGEPEARRRNKTDSSRNCIVGYGCAG

SEQ ID NO: 785032 - protein, 71 aa, Homo sapiens
IGWQMATQRQDRHREKTRERAAAQITPVSPVAEWQVRWGLAYTGQMGNLKPEEETRLTPPETALWVMGVQG

SEQ ID NO: 785033 - protein, 73 aa, Homo sapiens
RQQRNGQGLTNRNSDANCLGDGAAVTGAGVAQTLVGFRVTVQEGSSSCGPVSLLQEQPFPADAQSDPKALPES

SEQ ID NO: 785034 - protein, 119 aa, Homo sapiens
ENQYFYMPTTHNTCSNTGYFFIVALEFETFFLVPGQRQFMQFTVKLNGAGQKKKKSSLKLAKNCRLGVYKFGHLLRTVALNSLREGGIWMQFQLETDLFANNCGRDSVMSEIFFHLSTS

SEQ ID NO: 785035 - protein, 70 aa, Homo sapiens
AVDQTTSVPGATEIVPSSELSPPGFRHLVPKSQTPRTGRALLEIRTSPLPFLSKAVTLSLGGDDDSLGQG

SEQ ID NO: 785036 - protein, 93 aa, Homo sapiens
TDPPRQPGPPQIMCVCWGVGASGAEDKQAGRADSYGCDPRGACNSCPPTSVAPMEANKSGTGNGGLGEKMKRLRIREVSSSFPKGPEPRSVEA

SEQ ID NO: 785037 - protein, 68 aa, Homo sapiens
KELTILSSLEATIQSSSSKRPNPSFSEAISHSNLPGSDLHAKLQEFEGNLRETCRNQLAKEKRSQCVQ

SEQ ID NO: 785038 - protein, 207 aa, Homo sapiens
CVQFWPTAEAMLFKTFSRKVVVVSLMRKMEEEAGVRKEVEGDDVPESIMLEMKANFSLPEKCDYMDEVTYGELEKEEAQPIVTKYKEEARKLLPPSEKRTNRRNNRNKRNRQNRSRGQGYVGGQRRGYDNRAYGQQYWGQPGNRGGYRNFYDRYRGDYDRFYGRDYEYNRYRDYYRQYNRDWQSYYYHHPQDRDRYYRNYYGYQGYR

SEQ ID NO: 785039 - protein, 107 aa, Homo sapiens
RQGLALSLRLMSNGAISAQCNLYLPGPRDPPTSASHLPGATSVYHHAQLIFVFFVVEMGFCHVAQAGPELMGSSDLPTSSSQSAGITGMSHSTQPFYTVLNAQIIYF

SEQ ID NO: 785040 - protein, 64 aa, Homo sapiens
MSWGEGRVKKITSKTIDHFCLGLTPLSAGLTLACCLHSGFAEVRSSCPAGIVVVRPFWRCRVGQ

SEQ ID NO: 785041 - protein, 304 aa, Homo sapiens
VVAHGPEWNLKMPKMKMPTFSTPGAKGEGPDVHMTLPKGDISISGPKVNVEAPDVNLEGLGGKLKGPDVKLPDMSVKTPKISMPDVDLHVKGTKVKGEYDVTVPKLEGELKGPKVDIDAPDVDVHGPDWHLKMPKMKMPKFSVPGFKAEGPEVDVNLPKADVDISGPKIDVTAPDVSIEEPEGKLKGPKFKMPEMNIKVPKISMPDVDLHLKGPNVKGEYDVTMPKVESEIKVPDVELKSAKMDIDVPDVEVQGPDWHLKMPKMKMPKFSMPGFKAEGPEVDVNLPKADVDISGPKVGVEVPDV

SEQ ID NO: 785042 - protein, 88 aa, Homo sapiens
INTPKHLCRKFKNMAFRKYLLLDKCKSPKVPIPRGNENSQHPHVPPESVISFRPTGTQLPASHLRTKLRALKCTQRKMTLSPVQQDSS

SEQ ID NO: 785043 - protein, 92 aa, Homo sapiens
DSTGSRQAIRFNCVGVHMCISVGGAFNRVGVHVCISAGVCIRLYGCACVSVGVCTFNCVGVHVCISAGGCAFDCVDVHMCVSVGVCILNRIA

SEQ ID NO: 785044 - protein, 253 aa, Homo sapiens
PQVDRRQGPEEAAGYQSGPQERAGHGRGEEAAPLPAGTVALREIRRYQKSTELLIRKLPFQRLVREIAQDFKTDLRFQSSAVTALALQEASEAYLVGLFEDTNLCAIHAKRVTIMPKDIQLVSRIRGERAYSEIRSCSQEGLQKGCYESAEEGRREAQAQPQGELLRLRVGGAEAGPPDTGISSKAMGIMNSFVNDIFERIAGEASRLAHYNKRSTITSREIQTAVRLLLPGELAKHAVSEGTKAVTKYTSSK

SEQ ID NO: 785045 - protein, 149 aa, Homo sapiens
  misc_feature (16)..(16): Xaa can be any naturally occurring amino acid
  misc_feature (22)..(23): Xaa can be any naturally occurring amino acid
  misc_feature (27)..(27): Xaa can be any naturally occurring amino acid
LGRQGQAMVFKGPGDXAQCKVXXEAFXLFLLEQQQNHLAGLLSSSSEVSGRCLLLASMAAVTVARGPPQISCQENVGIYERPPLGTASGAGQEDVGGPWPDASYNNEKPEWLGSWQTVACIFLCAIHAKRVTIMPKDIQLVSRIRGERA

SEQ ID NO: 785046 - protein, 127 aa, Homo sapiens
WVWSVGSRQGRAPTGAGTELQSSSSGAQAGWGQGAEAATTEAQPLDMGSGWERAGGPLDSGGGGAICRDREGVGLGLPRRRGLGPVASVMASQLPPPHCPCHRKACPAPGMAPSLGVLAVHPGPQDG

SEQ ID NO: 785047 - protein, 110 aa, Homo sapiens
MQWSAHLCMGHRNQCLGDRHTQPCASAHEFMPTGPRRNTASQVEGSPAVPCTQDTQATPQGQAWPRSPGQPPGGHLAGVGEPRRQEHPQQLCPSSLIPSTKCCGALSWAS

SEQ ID NO: 785048 - protein, 1590 aa, Homo sapiens
ERRRFAARERQLREEAERERRQLADRLRSKWEAQRSRELRQLQEEMQREREAEIRQLLRWKEAEQRQLQQLLHRERDGVVRQARELQRQLAEELVNRGHCSRPGASEVSAAQCRCRLQEVLAQLRWQTDGEQAARIRYLQAALEVERQLFLKYILAHFRGHPALSGSPDPQAVHSLEEPLPQTSSGSCHAPKPACQLGSLDSLSAEVGVRSRSLGLVSSACSSSPDGLLSTHASSLDCFAPACSRSLDSTRSLPKASKSEERPSSPDTSTPGSRRLSPPPSPLPPPPPPSAHRKLSNPRGGEGSESQPCEVLTPSPPGLGHHELIKLNWLLAKALWVLARRCYTLQEENKQLRRAGCPYQADEKVKRLKVKRAELTGLARRLADRARELQETNLRAVSAPIPGESCAGLELCQVFARQRARDLSEQASAPLAKDKQIEELRQECHLLQARVASGPCSDLHTGRGGPCTQWLNVRDLDRLQRESQREVLRLQRQLMLQQGNGGAWPEAGGQSATCEEVRRQMLALERELDQRRRECQELGTQAAPARRRGEEAETQLQAALLKNAWLAEENGRLQAKTDWVRKVEAENSEVRGHLGRACQERDASGLIAEQLLQQAARGQDRQQQLQRDPQKALCDLHPSWKEIQALQCRPGHPPEQPWETSQMPESQVKGSRRPKFHARPEDYAVSQPNRDIQEKREASLEESPVALGESASVPQVSETVPASQPLSKKTSSQSNSSSEGSMWATVPSSPTLDRDTASEVDDLEPDSVSLALEMGGSAAPAAPKLKIFMAQYNYNPFEGPNDHPEGELPLTAGDYIYIFGDMDEDGFYEGELDDGRRGLVPSNFVEQIPDSYIPGCLPAKSPDLGPSQLPAGQDEALEEDSLLSGKAQGMVDRGLCQMVRVGSKTEVATEILDTKTEACQLGLLQSMGKQGLSRPLLGTKGVLRMAPMQLHLQNVTATSANITWVYSSHRHPHVVYLDDREHALTPAGVSCYTFQGLCPGTHYRVRVEVRLPWDLLQVYWGTMSSTVTFDTLLAGPPYPPLEVLVERHASPGVLVVSWLPVTIDSAGSSNGVQVTGYAVYADGLKVCEVADATAGSTVLEFSQLQVPLTWQKVSVRTMSLCGESLDSVPAQIPEDFFMCHRWPETPPFSYTCGDPSTYRVTFPVCPQKLSLAPPSAKASPHNPGSCGEPQAKFLEAFFEEPPRRQSPVSNLGSEGECPSSGAGSQAQELAEAWEGCRKDLLFQKSPQNHRPPSVSDQPGEKENCYQHMGTSKSPAPGFIHLRTECGPRKEPCQEKAALERVLRQKQDAQGFTPPQLGASQQYASDFHNVLKEEQEALCLDLRGTERREERREPEPHSRQGQALGVKRGCQLHEPSSALCPAPSAKVIKMPRGGPQQLGTGANTPARVFVALSDYNPLVMSANLKAAEEELVFQKRQLLRVWGSQDTHDFYLSECNRQVGNIPGRLVAEMEVGTEQTDRRWRSPAQGHLPSVAHLEDFQGLTIPQGSSLVLQGNSKRLPLWTPKIMIAALDYDPGDGQMGGQGKGRLALRAGDVVMVYGPMDDQGFYYGELGGHRGLVPAHLLDHMSLHGH

SEQ ID NO: 785049 - protein, 1554 aa, Homo sapiens
ERRRFAARERQLREEAERERRQLADRLRSKWEAQRSRELRQLQEEMQREREAEIRQLLRWKEAEQRQLQQLLHRERDGVVRQARELQRQLAEELVNRGHCSRPGASEVSAAQCRCRLQEVLAQLRWQTDGEQAARIRYLQAALEVERQLFLKYILAHFRGHPALSGSPDPQAVHSLEEPLPQTSSGSCHAPKPACQLGSLDSLSAEVGVRSRSLGLVSSACSSSPDGLLSTHASSLDCFAPACSRSLDSTRSLPKASKSEERPSSPDTSTPGSRRLSPPPSPLPPPPPPSAHRKLSNPRGGEGSESQPCEVLTPSPPGLGHHELIKLNWLLAKALWVLARRCYTLQEENKQLRRAGCPYQADEKVKRLKVKRAELTGLARRLADRARELQETNLRAVSAPIPGESCAGLELCQVFARQRARDLSEQASAPLAKDKQIEELRQECHLLQARVASGPCSDLHTGRGGPCTQWLNVRDLDRLQRESQREVLRLQRQLMLQQGNGGAWPEAGGQSATCEEVRRQMLALERELDQRRRECQELGTQAAPARRRGEEAETQLQAALLKNAWLAEENGRLQAKTDWVRKVEAENSEVRGHLGRACQERDASGLIAEQLLQQAARGQDRQQQLQRDPQKALCDLHPSWKEIQALQCRPGHPPEQPWETSQMPESQVKGSRRPKFHARPEDYAVSQPNRDIQEKREASLEESPVALGESASVPQVSETVPASQPLSKKTSSQSNSSSEGSMWATVPSSPTLDRDTASEVDDLEPDSVSLALEMGGSAAPAAPKLKIFMAQYNYNPFEGPNDHPEGELPLTAGDYIYIFGDMDEDGFYEGELDDGRRGLVPSNFVEQIPDSYIPGCLPAKSPDLGPSQLPAGQDEALEEDSLLSGKAQGMVDRGLCQMVRVGSKTEVATEILDTKTEACQLGLLQSMGKQGLSRPLLGTKGVLRMAPMQLHLQNVTATSANITWVYSSHRHPHVVYLDDREHALTPAGVSCYTFQGLCPGTHYRVRVEVRLPWDLLQVYWGTMSSTVTFDTLLAGPPYPPLEVLVERHASPGVLVVSWLPVTIDSAGSSNGVQVTGYAVYADGLKVCEVADATAGSTVLEFSQLQVPLTWQKVSVRTMSLCGESLDSVPAQIPEDFFMCHRWPETPPFSYTCGDPSTYRVTFPVCPQKLSLAPPSAKASPHNPGSCGEPQAKFLEAFFEEPPRRQSPVSNLGSEGECPSSGAGSQAQELAEAWEGCRKDLLFQKSPQNHRPPSVSDQPGEKENCYQHMGTSKSPAPGFIHLRTECGPRKEPCQEKAALERVLRQKQDAQGFTPPQLGASQQYASDFHNVLKEEQEALCLDLRGTERREERREPEPHSRQGQALGVKRGCQLHEPSSALCPAPSAKVIKMPRGGPQQLGTGANTPARVFVALSDYNPLVMSANLKAAEEELVFQKRQLLRVWGSQDTHDFYLSECNRQVGNIPGRLVAEMEVGTEQTDRRWRSPAQGHLPSVAHLEDFQGLTIPQGSSLVLQGNSKRLPLWTPKIMIAALDYDPGDGQMGGQGKVACAPSATVLN

SEQ ID NO: 785050 - protein, 94 aa, Homo sapiens
HSFQTLLGILLLEAERSLRRATGTRFQVLGAALVGAGGPLLPIDYLHPERPCVLVAADGRRLSAEQEGDRTSYVLAWGHGQACLLWSFVCLLLF

SEQ ID NO: 785051 - protein, 314 aa, Homo sapiens
MVIYVILRYAKMKTATNIYILNLAIADELLMLSVPFLVTSTLLRHWPFGALLCRLVLSVDAVNMFTSIYCLTVLSVDRYVAVVHPIKAARYRRPTVAKVVNLGVWVLSLLVILPIVVFSRTAANSDGTVACNMLMPEPAQRWLVGFVLYTFLMGFLLPVGAICLCYVLIIAKMRMVALKAGWQQRKRSERKITLMVMMVVMVFVICWMPFYVVQLVNVFAEQDDATVSQLSVILGYANSCANPILYGFLSDNFKRSFQRILCLSWMDNAAEEPVDYYATALKSRAYSVEDFQPENLESGGVFRNGTCTSRITTL

SEQ ID NO: 785052 - protein, 109 aa, Homo sapiens
GDLLLLAFHHDCEASPATWNYQPTLTENRTYVEILGAGFLYTRGVMNIYERRNRTCTARQFTSIEGCALTDGAMNVNSNCCRMSKENSSCCLRISAGATEIKERLLNTH

SEQ ID NO: 785053 - protein, 81 aa, Homo sapiens
ASQEAAEETPPICTPGASDRNPLSYAARSARVPRPETLTTQRCPTGAGPERLSLASEWKHVHTAARTGLSDSRNVMGPWPV

SEQ ID NO: 785054 - protein, 96 aa, Homo sapiens
GHGQRSAPPLCVRNRFNPRWSDMGVCPTGECEAGIGPIPAGHNLELTLSLGEWGRSSGNNPLHQADAWTAVGETLYERSGAWEEPPHRNDNHMRTK

SEQ ID NO: 785055 - protein, 137 aa, Homo sapiens
NPVILTREAQPAPSQALPSSPGSRQPLCHPRVPSPHSLAGPPFHSSTTFPAASLRLQGSRTGASETPGPQRAPRQGQRGQTREGAGPQPRSLFMNGGAGGARPYYYAAQRALRPSAPRPLADRTADVTEPVAGGGAG

SEQ ID NO: 785056 - protein, 106 aa, Homo sapiens
DCGQPLSRGSCLWTAPQQGDHACKQPHSRRIMHVNSPTAGGHACGQPLSRGSCLWTAPQQWVVPVNSPAAGVRACGQLRSRGIMPINSHAAGGHACGQPRSRGSCL

SEQ ID NO: 785057 - protein, 78 aa, Homo sapiens
QRHLRKGLGEAARQGSGAPSSRSPRLWAEARIPTASCAWRRREAQGDGGPRRHPAGCHSFNQDVENAVDKSFKKILKP

SEQ ID NO: 785058 - protein, 109 aa, Homo sapiens
SQLLGRLRQENHLNPGGRGCSEPRSHHCAPAWVTEQDSISKKKNVVITLSIHNTSLQTPGVHLLSVNREPTNRHDISSLSHYSIHILGFLFSFTSFWNLRAEVARDPLF

SEQ ID NO: 785059 - protein, 117 aa, Homo sapiens
SQLLGRLRQENHLNPGGRGCSEPRSHHCAPAWVTEQDSISKKKNVVITLSIHNTSLQTPGVHLLSVNREPTNRHDISSLSHYSIHILGFLFSFTSFWNLRACLEVLAGEHSYLYTLD

SEQ ID NO: 785060 - protein, 109 aa, Homo sapiens
MLSGAPGEVGSVLFSLFWSVQGSLLSWCYLQLKSTDSGAKDLAVDLIEKYVGQFLASMRAILESLFSQYSGKTIVERLCNSVFSMAARQLVIFLLDFCTLDIPHCVLLR

SEQ ID NO: 785061 - protein, 67 aa, Homo sapiens
PGLVFNTPSALKAISTAMFENIRSTQFSVILSQLTLLADKIDSCLPVVISRILGESPSSSLPFYPFP

SEQ ID NO: 785062 - protein, 100 aa, Homo sapiens
RGSSVTRLEAHGPFAGSAHHVHTSSHVVSLPSSVQSMVSNSRPGAALTAIPVSRHGQGQSCLGPPSRARTLHSFCMRTLRLAATAWASSPSKRNGWGKAP

SEQ ID NO: 785063 - protein, 151 aa, Homo sapiens
MTSLGSVCREKIEAVATELNVDCEIVRTWIGNRRRKYRLMGIEVPPPRGGPADFSEQPESGSLSALTPGEEAGPEVGEDNDRNDEVSICLSEGSSQEEPNEVVPNDARAHKEEDHHAVTTDNVTIELIDDDESDLISNSGVEPVNPFVDYR

SEQ ID NO: 785064 - protein, 220 aa, Homo sapiens
TITLTPSAETDVSLVYRGFIYPMLPGGPGGPGAEDVAVWTRAQRLHVLARMARGPDTENMEEVGRWVAHQEKETRRLQRPGSARLFPLPGRDHKYAVEIQGQLNGSAGPGHSELTLLWDRTGVPGGSEISFFFLEPYRSSSCTSYSSCLGCLADQGCGWCLTSATCHLRQGGAHCGDDGAGGSLLVLVPTLCPLCEEHRDCHACTQDPSVSDRIRCTFLD

SEQ ID NO: 785065 - protein, 131 aa, Homo sapiens
LDTSRVTSAIATSLLPHSSSGLLWTTVLCQTPARPQSTMIHLGHILFLLLLPVAAAQTTPGERSSLPAFYPGTSGSCSGCGSLSLPLLAGLVAADAVASLLIVGAVFLCARPRRSPAQEDGKVYINMPGRG

SEQ ID NO: 785066 - protein, 131 aa, Homo sapiens; identical to SEQ ID NO: 785065

SEQ ID NO: 785067 - protein, 112 aa, Homo sapiens
MIHLGHILFLLLLPVAAAQTTPGERSSLPAFYPGTSGSCSGCGSLSLPLLAGLVAADAVASLLIVGAGDPGLLKHDRGGDEGLFMESKMCLKENGQKGLQSLDLIPIEGQCC

SEQ ID NO: 785068 - protein, 131 aa, Homo sapiens; identical to SEQ ID NO: 785065

SEQ ID NO: 785069 - protein, 41 aa, Homo sapiens
MFLEGSAPMFLEGSAPNSGHLRQTFLEGSAPNSGHLRQMFL

SEQ ID NO: 785070 - protein, 68 aa, Homo sapiens
HSGCPVLKLLKLRNLCGMNSTLSTIATLCDSYHENLHFKKQENLKSLVLEVSIAIYLEKQLDELLSRR

SEQ ID NO: 785071 - protein, 51 aa, Homo sapiens
MVTCHPTSAVHKCLQLRWTLSCWTGKRIKLRRPRVCKQREGVDRKPCLLQG

SEQ ID NO: 785072 - protein, 42 aa, Homo sapiens
MFVLDEADEMLSRGFKDQIYDIFQKLNSNTQVVLLSATMPSD

SEQ ID NO: 785073 - protein, 259 aa, Homo sapiens
  misc_feature (1)..(1): Xaa can be any naturally occurring amino acid
  misc_feature (4)..(4): Xaa can be any naturally occurring amino acid
  misc_feature (9)..(9): Xaa can be any naturally occurring amino acid
XLSXSGLSXLRPYQECCIERPPLRLRGFGAALTTTPRLHRPCPPTSGADFTSRNLFPPGIKDFLLLCGRILLLLALLTLIISVTTSWLNSFKSPQVYLKEEEEKNEKRQKLVRKKQQEAQGEKASRYIENVLKPHQEMKLRKLEERFYQMTGEAWKLSSGHKLGGDEGTSQTSFETSNREAAKSQNLPKPLTEFPSPAEQPTCKEIPDLPEEPSQTAEEVVTCVLSRVPKWDCPEEKVFEVLQAHKVLFDWDDEKLGTT

SEQ ID NO: 785074 - protein, 41 aa, Homo sapiens
KRYPKLNHYSSSLTLSLCCNHYHLSHNYLNSLKTISTHSPT

SEQ ID NO: 785075 - protein, 68 aa, Homo sapiens
GRDAMAHWSTLFLAVSASGFWRCCSVGPKFADPGSQDAGRAYAPRRTGRRVGLLLPLLARFAPQSPSL

SEQ ID NO: 785076 - protein, 86 aa, Homo sapiens
IKNNKVLLPKCWDDRPEPLRPPSPWYFLKKGCILTVHGPPSPTPLCPQVTTDLHHGCTDQHTGTSASAPLAAGMIALALEAKYVTA

SEQ ID NO: 785077 - protein, 114 aa, Homo sapiens
DAISWLRSRGRRFALGPIPRPVLLRKRGEKARNQACQALRPLSAVPPPRPSAAGSRLAGTPCLVGGKGRERARHRRLPRPAAGWRRGAVTAANGERAGPLPRRPQAWCSRPMSI

SEQ ID NO: 785078 - protein, 88 aa, Homo sapiens
PLLGTRGKLAEHRANGRRAVCQTVGTEAPQQHRPCCPFNETVVWWPVKAITGSLYRHKPPGTEQCGLSTSLGKALQSSQEQSYCWLLL

SEQ ID NO: 785079 - protein, 194 aa, Homo sapiens
GRWRGAALRARSGGPCDSWCPAGTRGAGFAESAGPRCAGCAPPRNPAPSHPISLFWERRVEPSAPTGSVGAVLGVLPDQPTPPGLSFRSIPTPLRFFFPVVNLRRGGGTVSAQGTAEVPCGGTLRRRYCGGEAGGRRICLRTRGLMACLFLLGQVERFLKAGGGARIVRKTRKDTAFYPMRGRAGLLSAGVEGS

SEQ ID NO: 785080 - protein, 85 aa, Homo sapiens
NKPQRDASATAVLARGLTSPCWKDMDLRLPGPTTTHKLRVKPTQWNLEPKMVRNGVLMIFFVSLIKLYLKPGLFRGMRQKPSFFG

SEQ ID NO: 785081 - protein, 378 aa, Homo sapiens
MARCGEGSAAPMVLLGSAGVCSKGLQRKGPCERRRLKATVSEQLSQDLLRLLREEFHTDVTFSVGCTLFKAHKAVLLARVPDFYFHTIGQTSNSLTNQEPIAVENVEALEFRTFLQIIYSSNRNIKNYEEEILRKKIMEIGISQKQLDISFPKCENSSDCSLQKHEIPEDISDRDDDFISNDNYDLEPASELGEDLLKLYVKPCCPDIDIFVDGKRFKAHRAILSARSSYFAAMLSGCWAESSQEYVTLQGISHVELNVMMHFIYGGTLDIPDKTNVGQILNMADMYGLEGLKEVAIYILRRDYCNFFQKPVPRTLTSILECLIIAHSVGVESLFADCMKWIVKHFARFWSERSFANIPPEIQKSCLNMLIQSLVSIT

SEQ ID NO: 785082 - protein, 250 aa, Homo sapiens
GKRFKAHRAILSARSSYFAAMLSGCWAESSQEYVTLQGISHVELNVMMHFIYGGTLDIPDKTNVGQILNMADMYGLEGLKEVAIYILRRDYCNFFQKPVPRTLTSILECLIIAHSVGVESLFADCMKWIVKHFARFWSERSFANIPPEIQKSCLNMLIQSLLWVAGACLQLRTQGWNQPWTGYHSSAGCTHSTEHSLILGHCREASSLNVHIFGMWEETGVSRENPCRHGENMQTLHRQWPGQESFFPLS

SEQ ID NO: 785083 - protein, 49 aa, Homo sapiens
IIHHEQRSADKISERISIPKKLRSSIKLTKTIGKVMFKTIYKEIRLSKR

SEQ ID NO: 785084 - protein, 79 aa, Homo sapiens
RGTLPHDCCRELEGSQQHSLPPLGSQPAACSAKSNSIHVHGAPPKHPTERNCVFNGLKSGGERNTETCLFVIPSKTSRI

SEQ ID NO: 785085 - protein, 30 aa, Homo sapiens
MVTELQNQRGLLHAGCHLLESEIKCASDTV

SEQ ID NO: 785086 - protein, 100 aa, Homo sapiens
QRRWEWGSRGSAVGCSWAPRLGALSVLSECLAQSLPPRPNMDFREILMIASKGQGVNNVPKRYSLAVGPPKKDPKVKGVQSAAVQAFLKRKEEELRRKGM

SEQ ID NO: 785087 - protein, 99 aa, Homo sapiens
QRRWEWGSRGSAVGCSWAPRLGALSVLSECLAQSLPPRPNMDFREILMIASKGQGVNNVPVSSSWGINVGDPSLPSSECVWPMELLGSPLSAPGEERPG

SEQ ID NO: 785088 - protein, 847 aa, Homo sapiens
MEVMNLMEQPIKVTEWQQTYTYDSGIHSGANTCVPSVSSKGIMEEDEACGRQYTLKKTTTYTQGVPPSQGDLEYQMSTTARAKRVREAMCPGVSGEDSSLLLATQVEGQATNLQRLAEPSQLLKSALWHLINYQDDAELATRALPELTKLLNDEDPVVVTKAAMIVNQLSKKEASRRALMGSPQLVAAVVRTMQNTSDLDTARCTTSILHNLSHHREGLLAIFKSGGIPALVRMLSSPVESVLFYAITTLHNLLLYQEGAKMAVRLADGLQKMVPLLNKNNPKFLAITTDCLQLLAYGNQESKLIILANGGPQALVQIMRNYSYEKLLWTTSRVLKVLSVCPSNKPAIVEAGGMQALGKHLTSNSPRLVQNCLWTLRNLSDVATKQEGLESVLKILVNQLSVDDVNVLTCATGTLSNLTCNNSKNKTLVTQNSGVEALIHAILRAGDKDDITEPAVCALRHLTSRHPEAEMAQNSVRLNYGIPAIVKLLNQPNQWPLVKATIGLIRNLALCPANHAPLQEAAVIPRLVQLLVKAHQDAQRHVAAGTQQPYTDGVRMEEIVEGCTGALHILARDPMNRMEIFRLNTIPLFVQLLYSSVENIQRVAAGVLCELAQDKEAADAIDAEGASAPLMELLHSRNEGTATYAAAVLFRISEDKNPDYRKRVSVELTNSLFKHDPAAWEAAQSMIPINEPYGDDLDATYRPMYSSDVPLDPLEMHMDMDGDYPIDTYSDGLRPPYPTADHMLAQAAWPQCGSSSERLSVQAMGQDRKVPELGKPGCNFLLHPAPPEVLRRVFLGIVFCSCFSVLGMGPGPDTPSRAQVRDPNPQNPKLLLKSSGTVQGRWGGDME

SEQ ID NO: 785089 - protein, 38 aa, Homo sapiens
MAFVLLQKPPVWPKDKNGREKEVSWYYLHKIKLKVNIL

SEQ ID NO: 785090 - protein, 58 aa, Homo sapiens
PTTSPMGPHTPGHCSPALIPLEPGDRQLETASRPQSRLTLFKQLILNLLNLPRPFPPT

SEQ ID NO: 785091 - protein, 115 aa, Homo sapiens
MTKKRRNNGRAKKGRSHVQPIRCTNCARCVPKDKAIKKFVIRNIVEAAAVRDISEASVFDAYVLPKLYVKLHYCVSCAIHSKVVRNRSREARKDRTPPPRFRPAGAAPRPPPKPM

SEQ ID NO: 785092 - protein, 198 aa, Homo sapiens
MIKTQESLTLEDVAVEFSWEEWQLLDTAQKNLYRDVMVENYNHLVSLGYQTSKPDVLSKLAHGQEPWTTDAKIQNKNCPGIGKVDSHLQEHSPNQRLLKSVQQCNGQNTLRNIVHLSKTHFPIVQNHDTFDLYRKNLKSSLSLINQKRRHGINNPVEFIGETGSLERPRQADHLRSEVQDQPGQRGETLCLLKIHTKN

SEQ ID NO: 785093 - protein, 131 aa, Homo sapiens
FVILAGVQWRDLSSLQPLLPDFKRFPCLSLLSSWDYRCAPPCLIFVFLVEMEFHHVGQAGLELLTSSDSPALASQTAGIPGVSHHAPLYLSIYLSIYLSIYLSTYHVSITFKCQRALPNYVPVYQFRKCEL

SEQ ID NO: 785094 - protein, 117 aa, Homo sapiens
RAKTRPSQISSEEAAGQPGAWSLQEQAGAWESPVASALHGALRSAWAGDTVPSGLCGRRQETKHGLPSAPVLPVPPEARVHQRWRVLRRPGRRAHRMQPSGPGVGFLLHTARCWQAP

SEQ ID NO: 785095 - protein, 179 aa, Homo sapiens
QLVRPAFDMGPGLAHACATRRPRVADAWAEKRYDYLEFTDARGRKTRYDTKVGTDKWPKKVTFKAGPRLQFLFHSDSSHNEWGYKFTVTACGLPDVAVSWGLDLQLLVSRLMGRLASQCMALKSVRQLGSNMVVPQAKMALVLSSPLWKPVFRHQVCPELELEASWPTHPHRNSKEGEV

SEQ ID NO: 785096 - protein, 140 aa, Homo sapiens
QLVRPAFDMGPGLAHACATRRPRVADAWAEKRYDYLEFTDARGRKTRYDTKVGTDKWPKKVTFKAGPRLQFLFHSDSSHNEWGYKFTVTACGLPDVAVSWGLDLQLLVSRLMGRLASQCMALKSVRRKCTSLCFPFLQPR

SEQ ID NO: 785097 - protein, 128 aa, Homo sapiens
KAWHAPANQGVTCSSSPCPGLPRAPCRRRSGEGVGGRWSREGPAENSGLGAQRALRLGARQSLSPTGARAGGSAWPCVARWLATLTPQCACASEQPCGRSDCPPFWCTGWEVELVGQSPRVGPLPELN

SEQ ID NO: 785098 - protein, 128 aa, Homo sapiens; identical to SEQ ID NO: 785097

SEQ ID NO: 785099 - protein, 128 aa, Homo sapiens; identical to SEQ ID NO: 785097

SEQ ID NO: 785100 - protein, 181 aa, Homo sapiens
KAWHAPANQGVTCSSSPCPGLPRAPCRRRSGEGVGGRWSREGPAENSGLGAQRALRLGARQSLSPTGARAGGSAWPCVARWLASDAPVRMRVRTALRAERLSSLLVYWVGGGTSRTKPSRRTLARTERHHFLREDLPELSPPHSKCCVWEFLIFCACLYYCIYCVVLYLSACVCFYTPPSL

SEQ ID NO: 785101 - protein, 86 aa, Homo sapiens
PIPSSRPRKSGAPAAELPAPRLPGPAGMRPVPAPRREQPLHSSCRELVPADSRARAAPGTRVGSGDVANLRLAAKPASRLKKDPPR

SEQ ID NO: 785102 - protein, 104 aa, Homo sapiens
MLFKLKKSMKVKASVMTLGFTCFPIVVLQTTPYFLFFSQSLSTQTLHVVSLDFLTTWWPQCIWISHMKAQDSSRRPRRKLTVMSRARPGRVSFSTELSASRVRS

SEQ ID NO: 785103 - protein, 72 aa, Homo sapiens
APAPTGTQRLRAPWWSLSKRSRLTARHPWSLQLWLCQPQTSSNRAHEKKHCFSFAPTAILGPRVHKENIFLK

SEQ ID NO: 785104 - protein, 104 aa, Homo sapiens
MDAPVRVVHVYYNPVGDALVRVVHAYYNLVGDALVRAVHVYYNLVGDALVRAVHVYYNLVGDALVRAVHVYYNLVGDALVRAGGACLLQPGGGTGRCMTITAWW

SEQ ID NO: 785105 - protein, 35 aa, Homo sapiens
LNFRQVIRATFRNTERGALLTTHYMAEAEAVCDRV

SEQ ID NO: 785106 - protein, 138 aa, Homo sapiens [sequence omitted]

SEQ ID NO: 785107 - protein, 364 aa, Homo sapiens
MAASGESGTSGGGGSTEEAFMTFYSEEIKMAYSIPEIHSNQHSNSDSDTKNVFLGLPGACSPWHCLQVKQIEKRDSVLTSKNQIERLTRPGSSYFNLNPFEVLQIDPEVTDEEIKKRFRQLSILVHPDKNQDDADRAQKAFEAVDKAYKLLLDQEQKKRALDVIQAGKEYVEHTVKERKKQLKKEGKPTIVEEDDPELFKQAVYKQTMKLFAELEINRKEREAKEMHERNDKGKEARLKLKKKPNGHTREWQKNFEASRDGRVDSWRKLPSQYEGERTERHIGLSGDHRRYNWGTWSETDQGTQGRNLSRENHIRGWKEAIFPHSSPHMRRHMRVSHTACNRHNAQQKTCGTRSGGGKHTSSTQ

SEQ ID NO: 785108 - protein, 301 aa, Homo sapiens
GGGWAGEMAASGESGTSKNQIERLTRPGSSYFNLNPFEVLQIDPEVTDEEIKKRFRQLSILVHPDKNQDDADRAQKAFEAVDKAYKLLLDQEQKKRALDVIQAGKEYVEHTVKERKKQLKKEGKPTIVEEDDPELFKQAVYKQTMKLFAELEINRKEREAKEMHERNDKGKEARLKLKKKPNGHTREWQKNFEASRDGRVDSWRKLPSQYEGERTERHIGLSGDHRRYNWGTWSETDQGTQGRNLSRENHIRGWKEAIFPHSSPHMRRHMRVSHTACNRHNAQQKTCGTRSGGGKHTSSTQ

SEQ ID NO: 785109 - protein, 330 aa, Homo sapiens
GGGWAGEMAASGESGTSGGGGSTEEAFMTFYSEVKQIEKRDSVLTSKNQIERLTRPGSSYFNLNPFEVLQIDPEVTDEEIKKRFRQLSILVHPDKNQDDADRAQKAFEAVDKAYKLLLDQEQKKRALDVIQAGKEYVEHTVKERKKQLKKEGKPTIVEEDDPELFKQAVYKQTMKLFAELEINRKEREAKEMHERNDKGKEARLKLKKKPNGHTREWQKNFEASRDGRVDSWRKLPSQYEGERTERHIGLSGDHRRYNWGTWSETDQGTQGRNLSRENHIRGWKEAIFPHSSPHMRRHMRVSHTACNRHNAQQKTCGTRSGGGKHTSSTQ

SEQ ID NO: 785110 - protein, 39 aa, Homo sapiens
MLQPPGDQSLPRKAAFSPDHRAEDSLEALSGEGLLGGKR

SEQ ID NO: 785111 - protein, 103 aa, Homo sapiens
GSRGRAPLASRGEARRTQLLCRVEAGKRLLLGPAGRARGGWSLLMMPESPEYAGSANTGRRAGPWAGGWGQRAGGRLHLPTTRSLGGRGLVKVMFGWEKGGGS

SEQ ID NO: 785112 - protein, 170 aa, Homo sapiens
CAVHRMCRGVVKTAHIWCVCTVRKLSGARALRSAGLRAWWVQGAPVARSWWGATVSGWVWGLVGRTALVPPRAERLYPRRVSGAQAPTPQPPGRLIAPCLSPAPPAPGLVPEPTAKWKKRKKTTNVFRAPGTLLPTPGLPQFPSAAAAAAAAMGDSLCSFHANDTRWVAA

SEQ ID NO: 785113 - protein, 69 aa, Homo sapiens
MQCQPICSANLFCKMGMKMTWQQQIPATPLEFFRAKLATAWYLYEECKGAHILTNTYCVPVGILGDNNN

SEQ ID NO: 785114 - protein, 77 aa, Homo sapiens
QPFTDSTPFPPCWPPTDMQVTQELQSGRGLMVTCVTYHTFKDSRNRKAGMKPQAQEASEGKNARAWLCGRVGREDET

SEQ ID NO: 785115 - protein, 282 aa, Homo sapiens
ITSDESLAASKATTETEAIHVFENTAASHVETTSATEELYSSSPGFSEPTKVISPVVTSSSIRDNMVSTTMPGSSGITRIEIESMSSLTPGLRETRTSQDITSSTETSTVLYKMPSGATPEVSRTEVMPSSRTSIPGPAQSTMSLDISDEVVTRLSTSPIMTESAEITITTQTGYSLATSQVTLPLGTSMTFLSGTHSTMSQGLSHSEMTNLMSRGPESLSWTSPRFVETTRSSSSLTSLPLTTSLSPVSSTLLDSSPSSPLPVTSLILPGLVKTTEVLDTS

SEQ ID NO: 785116 - protein, 79 aa, Homo sapiens
PQPPLSHAGGLRQEPQHQHRRVTWARPRDPGLEGPETMGGFLWHTHLAPGPKWGLAEPSWNPCPQGRPRLGEPPGSWQG

SEQ ID NO: 785117 - protein, 56 aa, Homo sapiens
GHLLTVESSGGGRGLRKVAPRGVERRCLTEGHLRSRCILRTELRLDINDVGSAALE

SEQ ID NO: 785118 - protein, 40 aa, Homo sapiens
KANHALSRDEDKIGHDKKESSLEKNRPDSVISSKMFLSIH

SEQ ID NO: 785119 - protein, 135 aa, Homo sapiens
KVKKIIAEICEQIEGCESLQPFELPMNFPGLFKIVADKTPYLTMEEITRTIHIGPSRLGHPCFYHQKDIKLENLIIKQGEQIMLNSVEEIDGEIMVSCAVARNHQTHSFNLPLSQEGEFYECEDERIYTLKEIVE

SEQ ID NO: 785120 - protein, 74 aa, Homo sapiens
MCAGNRQHQGGWGHPKTAAVRLPVEKAGHQVLFSKAVTDRSPVGSSFHKVWGQAGWKQDQEGGYHHSSSMRQQG

SEQ ID NO: 785121 - protein, 290 aa, Homo sapiens
  misc_feature (171)..(171): Xaa can be any naturally occurring amino acid
GVSPLPAKNSSSNWPQDKDKIKVVAISIVKAPEKFTMLGLGVVAHTCNPRPLGGRGGRPGVQGCCELIAPLHSSLSNRARACLFSKKKKKKKKKKPGVFWGGRRQKGASLERAPWGHISVVPETPGLLWWTQGWEDIARGPPYERERQYNNSPIKRHGVNPWHKITFGKKXSYRQHKRAKRTQQRTQINHHRTTGATSAQACTVNQRTDRGEPEEKNTLDRNRRGPTQNNKTNTDPETKEDRQRPSTRQDYKNPETPEQSAQAQEDGGSENAKVEEARTPGKAKTTRKET

SEQ ID NO: 785122 - protein, 57 aa, Homo sapiens
GPLQTAGAQDELPFCETRETSAALELWVNGVISKNVESGACATPGPPTWDRNSKLTN

SEQ ID NO: 785123 - protein, 119 aa, Homo sapiens
SSKNTKVSWAWWQVPAILATREAEAENCLNPGGGGCSGLRSHHCTSTWETNRDSVSKKKCTNQKGKIPSTQQKNVDVDNWKQKRRDPSWWLTSVIPVFSEAEVGELLEARSSRPAQATK

SEQ ID NO: 785124 - protein, 133 aa, Homo sapiens
GDQGLGLRDGSQPGQLETQPIPRLAQDATEMGPYTSLSDSLEQVDHRNEPCPGALKPPTNAAPSLLTQKGWAKVGPDRTRCAMVLTAARRVEIPGEPRPRVPTPHAGDLYAPQLQGFCCLNTRSRYGGRSWHP

SEQ ID NO: 785125 - protein, 598 aa, Homo sapiens
MVQKTSMSRGPYPPSQEIPMEVFDPSPQGKYSKRKGRFKRSDGSTSSDTTSNSFVRQGSAESYTSRPSDSDVSLEEDREALRKEAERQALAQLEKAKTKPVAFAVRTNVGYNPSPGDEVPVQGVAITFEPKDFLHIKEKYNNDWWIGRLVKEGCEVGFIPSPVKLDSLRLLQEQKLRQNRLGSSKSGDNSSSSLGDVVTGTRRPTPPASAKQKQKSTEHVPPYDVVPSMRPIILVGPSLKGYEVTDMMQKALFDFLKHRFDGRISITRVTADISLAKRSVLNNPSKHIIIERSNTRSSLAEVQSEIERIFELARTLQLVALDADTINHPAQLSKTSLAPIIVYIKITSPKVLQRLIKSRGKSQSKHLNVQIAASEKLAQCPPEMFDIILDENQLEDACEHLAEYLEAYWKATHPPSSTPPNPLLNRTMATAALAASPAPVSNLQGPYLASGDQPLERATGEHASMHEYPGELGQPPGLYPSSHPPGRAGTLRALSRQDTFDADTPGSRNSAYTELGDSCVDMETDPSEGPGLGDPAGGGTPPARQGSWEDEEEDYEEELTDNRNRGRNKARYCAEGGGPVLGRNKNELEGWGRGVYIR

SEQ ID NO: 785126 - protein, 478 aa, Homo sapiens
MVQKTSMSRGPYPPSQEIPMEVFDPSPQGKYSKRKGRFKRSDGSTSSDTTSNSFVRQGSAESYTSRPSDSDVSLEEDREALRKEAERQALAQLEKAKTKPVAFAVRTNVGYNPSPGDEVPVQGVAITFEPKDFLHIKEKYNNDWWIGRLVKEGCEVGFIPSPVKLDSLRLLQEQKLRQNRLGSSKSGDNSSSSLGDVVTGTRRPTPPASAKQKQKSTEHVPPYDVVPSMRPIILVGPSLKGYEVTDMMQKALFDFLKHRFDGRISITRVTADISLAKRSVLNNPSKHIIIERSNTRSSLAEVQSEIERIFELARTLQLVALDADTINHPAQLSKTSLAPIIVYIKITSPKVLQRLIKSRGKSQSKHLNVQIAASEKLAQCPPEMFDIILDENQLEDACEHLAEYLEAYWKATHPPSSTPPNPLLNRTMATAALAASPAPVSNLQVQVLTSLRRNLGFWGGLESSQRGSVVPQEQEHAM

SEQ ID NO: 785127 - protein, 205 aa, Homo sapiens
ALHRVDTGLLRSFLQRCPGLRVMEHSRVLTLALHADPTRTRLSDWVHCLSPSSSSSFSLSPNQVLQRLIKSRGKSQSKHLNVQIAASEKLAQCPPEMFDIILDENQLEDACEHLAEYLEAYWKATHPPSSTPPNPLLNRTMATAALAASPAPVSNLQVQVLTSPRSRNMPCSGRPARLPSCSGVGTGVQGTWRRKGRALFCKKIR

SEQ ID NO: 785128 - protein, 585 aa, Homo sapiens
ISRNYYKVNIQVTTTTVRKLYITLWFALSLPSSPVCLLKTKPVAFAVRTNVGYNPSPGDEVPVQGVAITFEPKDFLHIKEKYNNDWWIGRLVKEGCEVGFIPSPVKLDSLRLLQEQKLRQNRLGSSKSGDNSSSSLGDVVTGTRRPTPPASGNEMTNLAFELDPLELEEEEAELGEQSGSAKTSVSSVTTPPPHGKRIPFFKKTEHVPPYDVVPSMRPIILVGPSLKGYEVTDMMQKALFDFLKHRFDGRISITRVTADISLAKRSVLNNPSKHIIIERSNTRSSLAEVQSEIERIFELARTLQLVALDADTINHPAQLSKTSLAPIIVYIKITSPKVLQRLIKSRGKSQSKHLNVQIAASEKLAQCPPEMFDIILDENQLEDACEHLAEYLEAYWKATHPPSSTPPNPLLNRTMATAALAASPAPVSNLQGPYLASGDQPLERATGEHASMHEYPGELGQPPGLYPSSHPPGRAGTLRALSRQDTFDADTPGSRNSAYTELGDSCVDMETDPSEGPGLGDPAGGGTPPARQGSWEDEEEDYEEELTDNRNRGRNKARYCAEGGGPVLGRNKNELEGWGRGVYIR

SEQ ID NO: 785129 - protein, 191 aa, Homo sapiens
ALHRVDTGLLRSFLQRCPGLRVMEHSRVLTLALHADPTRTRLSDWVHCLSPSSSSSFSLSPNQVLQRLIKSRGKSQSKHLNVQIAASEKLAQCPPEMFDIILDENQLEDACEHLAEYLEAYWKATHPPSSTPPNPLLNRTMATAALAASPAPVSNLQVQVLTSLRRNLGFWGGLESSQRGSVVPQEQEHAM

SEQ ID NO: 785130 - protein, 523 aa, Homo sapiens
MVQKTSMSRGPYPPSQEIPMEVFDPSPQGKYSKRKGRFKRSDGSTSSDTTSNSFVRQGSAESYTSRPSDSDVSLEEDREALRKEAERQALAQLEKAKTKPVAFAVRTNVGYNPSPGDEVPVQGVAITFEPKDFLHIKEKYNNDWWIGRLVKEGCEVGFIPSPVKLDSLRLLQEQKLRQNRLGSSKSGDNSSSSLGDVVTGTRRPTPPASGNEMTNLAFELDPLELEEEEAELGEQSGSAKTSVSSVTTPPPHGKRIPFFKKTEHVPPYDVVPSMRPIILVGPSLKGYEVTDMMQKALFDFLKHRFDGRISITRVTADISLAKRSVLNNPSKHIIIERSNTRSSLAEVQSEIERIFELARTLQLVALDADTINHPAQLSKTSLAPIIVYIKITSPKVLQRLIKSRGKSQSKHLNVQIAASEKLAQCPPEMFDIILDENQLEDACEHLAEYLEAYWKATHPPSSTPPNPLLNRTMATAALAASPAPVSNLQVQVLTSLRRNLGFWGGLESSQRGSVVPQEQEHAM

SEQ ID NO: 785131 - protein, 370 aa, Homo sapiens
MRPIILVGPSLKGYEVTDMMQKALFDFLKHRFDGRISITRVTADISLAKRSVLNNPSKHIIIERSNTRSSLAEVQSEIERIFELARTLQLVALDADTINHPAQLSKTSLAPIIVYIKITSPKVLQRLIKSRGKSQSKHLNVQIAASEKLAQCPPEMFDIILDENQLEDACEHLAEYLEAYWKATHPPSSTPPNPLLNRTMATAALAASPAPVSNLQGPYLASGDQPLERATGEHASMHEYPGELGQPPGLYPSSHPPGRAGTLRALSRQDTFDADTPGSRNSAYTELGDSCVDMETDPSEGPGLGDPAGGGTPPARQGSWEDEEEDYEEELTDNRNRGRNKARYCAEGGGPVLGRNKNELEGWGRGVYIR

SEQ ID NO: 785132 - protein, 311 aa, Homo sapiens
ALHRVDTGLLRSFLQRCPGLRVMEHSRVLTLALHADPTRTRLSDWVHCLSPSSSSSFSLSPNQVLQRLIKSRGKSQSKHLNVQIAASEKLAQCPPEMFDIILDENQLEDACEHLAEYLEAYWKATHPPSSTPPNPLLNRTMATAALAASPAPVSNLQGPYLASGDQPLERATGEHASMHEYPGELGQPPGLYPSSHPPGRAGTLRALSRQDTFDADTPGSRNSAYTELGDSCVDMETDPSEGPGLGDPAGGGTPPARQGSWEDEEEDYEEELTDNRNRGRNKARYCAEGGGPVLGRNKNELEGWGRGVYIR

SEQ ID NO: 785133 - protein, 86 aa, Homo sapiens
ECGVSSRLLKMNRLFGKAKPKAAAASLMMHATVDSRAESIDKKISRLDAELVKYKDQIKKMREGPATGIWSSRKPGGVLTRNKRHV

SEQ ID NO: 785134 - protein, 44 aa, Homo sapiens
ELTRDAELEEAMVVISLEGPKCMLGDCLAGIYMTFQAPGSLRFS

SEQ ID NO: 785135 - protein, 70 aa, Homo sapiens
FGGGKTTGFGMIYDSLDYAKKNEPKHRLARHGLYEKKKTSRKQRKECKNPIKKVRGTAKANVGAGKKSKK

SEQ ID NO: 785136 - protein, 66 aa, Homo sapiens
VQALKPGQALKPGQALKPGQALKPGQALKPGQALKPGQALKPGQALKPGQALKPGLKLSNKLSLLL

SEQ ID NO: 785137 - protein, 125 aa, Homo sapiens
MDTFGGHHAANHREESSIRMTVVGWEKLQNEEQGSGLPSPSLHVDTGSLLLHARDLRRGRMSGFFPFISPHFCQEMKSHAALSVSVLVESTFLIGTKTASSISDCPSVSLTASASLSASFCLLSL

SEQ ID NO: 785138 - protein, 97 aa, Homo sapiens
KTKQADVFGGPRVPRLETGPLAVPTCILGQRCGGRTLGLSPAELGPGRGPNHASRRRPSIPPRNREIPARQCSHGVESRVRTWHSQSLDNRLFSPVK

SEQ ID NO: 785139 - protein, 186 aa, Homo sapiens
MMIIPHLLRDKDQRATTATSPRTRQCWGTENEGVQLWPSQSSGGDETHLPLSLWARLMPGASVDRGHAPGLPKLEKAARLRSEGQNSTVSPTESRWEQGRWLPRLCGRIRFLAVEVACTPQLVLPVSNDWSFLLLSLHLPPSPITCSALTRIRVESCSVIQASSGVILARCNVCLLGSDDSPASAS

SEQ ID NO: 785140 - protein, 328 aa, Homo sapiens
MLLPPGSLSRPRTFSSQPLQTKLMTHNGLFRPIPYVTAVSADEATASQQPPQAQLHRYNGLFRPSSCLPAFSPGPELSQVDLTRPSSCFFAASPGPAPASWWPLQAQPLPPVGLYSPNICLTADSSGPASASLWTPQAKLPTFQQLLHTQLLPPSGFFRPSSCFTRAFPGPTFVSWQPSLARFLPVSQQPRQAQVLPHTGLSTSSLCLTVASPGPTPVPGRHLRAQNLLKSDSLVPTAASWWPMKAQNLLKLASPGPAPASCQRLEAQPLPHGGFSRPTSSSWLGLQAQLLPHNSLFWPSSCPAHGGQCRPKTSSSQTLQAPPPDAFI

SEQ ID NO: 785141 - protein, 192 aa, Homo sapiens
PCCPAYASGAWPSDVTAKASVSSRIRRGTCLLSLPRATMSKRNQVSYVRPAEPAFLARFKERVGYREGPTVETKRIQPQPPDEDGDHSDKEDEQPQVVVLKKGDLSVEEVMKIKAEIKAAKADEEPTPADGRIIYRKPVKHPSDEKYSGLTASSKKKKPNEDEVNQDSVKKNSQKQIKNSSLLSFDNEDENE

SEQ ID NO: 785142 - protein, 151 aa, Homo sapiens
RHVARPTHRGRGPVTSQLSASVSSRIRRGTCLLSLPRATMSKRNQVSYVRPAEPAFLARFKERVGYREGPTVETKVSLRQSCFFGSAASPPLSTFASTWRVGAVGSLFSPALEPNSGGTRTPRLVLFKRPQPPTPRKLCSFQSAAVFLKMN

SEQ ID NO: 785143 - protein, 192 aa, Homo sapiens; identical to SEQ ID NO: 785141

SEQ ID NO: 785144 - protein, 134 aa, Homo sapiens
FAAASTRQKGPTVETKRIQPQPPDEDGDHSDKEDEQPQVVVLKKGDLSVEEVMKIKAEIKAAKADEEPTPADGRIIYRKPVKHPSDEKYSGLTASSKKKKPNEDEVNQDSVKKNSQKQIKNSSLLSFDNEDENE

SEQ ID NO: 785145 - protein, 163 aa, Homo sapiens
RHVARPTHRGRGPVTSQLSASVSSRIRRGTCLLSLPRATMSKRNQRIQPQPPDEDGDHSDKEDEQPQVVVLKKGDLSVEEVMKIKAEIKAAKADEEPTPADGRIIYRKPVKHPSDEKYSGLTASSKKKKPNEDEVNQDSVKKNSQKQIKNSSLLSFDNEDENE

SEQ ID NO: 785146 - protein, 535 aa, Homo sapiens
MLSHADLLDARLGMKDAAELLGHREAVKCRLGVGGSDPGGHPGDLAPNSDPVEGATLLPGEDITTVGSTPASLAVSAKDPDKQPGPQGGPNPSQAGQQQGQQKQKRHRTRFTPAQLNELERSFAKTHYPDIFMREELALRIGLTESRVQVWFQNRRAKWKKRKKTTNVFRAPGTLLPTPGLPQFPSAAAAAAAAMGDSLCSFHANDTRWAAAAMPGVSQLPLPPALGRQQAMAQSLSQCSLAAGPPPNSMGLSNSLAGSNGAGLQSHLYQPAFPGMVPASLPGPSNVSGSPQLCSSPDSSDVWRGTSIASLRRKALEHTVIYELHLMQPRPGPLRPQHRPGGRPEALPARTRTPAPCPVPPRPSPRLVSSSPLSSTRSGSPQAPAREASPPPDFDRPRSPVSRPPLFPSHPAAPSARSPAPQPTLPATLASLLALAVLAPSSWPSDGRRSHPHLRRDAYDPPRPPPPLRSPLSPHFATLLPRPAKSILPAILRTRESTQDLKSDTNGLVCGQKHTHSHSRSRSDATHARAQTRCT

SEQ ID NO: 785147 - protein, 82 aa, Homo sapiens
TCTQMSTGTHTHAHTQMSTGTHTHTHMQVHTRTPTCTQCRYTPTPTCTHMQVHTHTPTCTHTDEHGYTHAHPHAHTCRYTHT

SEQ ID NO: 785148 - protein, 88 aa, Homo sapiens
LFWLWVSVSLSLSSLCLPLSLGLCLPLTWVLSLGPHLSLPVSVHLPYLSLSILAPLFHLLSLSLLSLPVSAILALSLLSSYNLASPHL

SEQ ID NO: 785149 - protein, 127 aa, Homo sapiens
MAPSIQGPLPFWSWVRRSQKESSGNSLPSPPDLVLMLFLFFFFLRRSLALSPRLECSGTISVHCNLRLLGSSDSRASASRVPGTTGVYHHTQLTFVFLVEMRFHHVGQAGLKLLASSDLPASASQSA

SEQ ID NO: 785150 - protein, 81 aa, Homo sapiens
SRPLFPKLGTSENPFSSCPAESHGARPGFLRTGFQKYLEPCMTEAELSTLSGSGRGCQTDEEMCRSLGCLSVPCEKFQARQ

SEQ ID NO: 785151 - protein, 109 aa, Homo sapiens
TVPWLTSLPRGTEALLCWCLHVHVLGIESSPARLLLRGGWAGGSSRQGGRQDHSPQVWAFSLPPASFPALCPVPCASPARSPSPSPAARGASPPRAGSPAQPHNYACKI

SEQ ID NO: 785152 - protein, 36 aa, Homo sapiens
PYGCLGCESPSALKGLQMAFSTLAAFGATCSFGKEK

SEQ ID NO: 785153 - protein, 109 aa, Homo sapiens
SLGICLSVSAFSVSRTVSCLSWSLGPERSLALSLMTAGFWLSVLALRVSRPRTAHQLVFPRRGKSTFGVRVSQARRAPPAALRRALSAGGAPLTLLSPLSTSAPPRQAS

SEQ ID NO: 785154 - protein, 711 aa, Homo sapiens
RARFPGSAAASIPAPAEGALTMAPWPELGDAQPNPDKYLEGAAGQQPTAPDKSKETNKTDNTEAPVTKIELLPSYSTATLIDEPTEVDDPWNLPTLQDSGIKWSERDTKGKILCFFQGIGRLILLLGFLYFFVCSLDILSSAFQLVGGKMAGQFFSNSSIMSNPLLGLVIGVLVTVLVQSSSTSTSIVVSMVSSSLLTVRAAIPIIMGANIGTSITNTIVALMQVGDRSEFRRAFAGATVHDFFNWLSVLVLLPVEVATHYLEIITQLIVESFHFKNGEDAPDLLKVITKPFTKLIVQLDKKVISQIAMNDEKAKNKSLVKIWCKTFTNKTQINVTVPSTANCTSPSLCWTDGIQNWTMKNVTYKENIAKCQHIFVNFHLPDLAVGTILLILSLLVLCGCLIMIVKILGSVLKGQVATVIKKTINTDFPFPFAWLTGYLAILVGAGMTFIVQSSSVFTSALTPLIGIGVITIERAYPLTLGSNIGTTTTAILAALASPGNALRSSLQIALCHFFFNISGILLWYPIPFTRLPIRMAKGLGNISAKYRWFAVFYLIIFFFLIPLTVFGLSLAGWRVLVGVGVPVVFIIILVLCLRLLQSRCPRVLPKKLQNWNFLPLWMRSLKPWDAVVSKFTGCFQMRCCCCCRVCCRACCLLCGCPKCCRCSKCCEDLEEAQEGQDVPVKAPETFDNITISREAQGEVPASDSKTECTAL

SEQ ID NO: 785155 - protein, 711 aa, Homo sapiens; identical to SEQ ID NO: 785154

SEQ ID NO: 785156 - protein, 490 aa, Homo sapiens
MQDGRSSCVHEGAFAGATVHDFFNWLSVLVLLPVEVATHYLEIITQLIVESFHFKNGEDAPDLLKVITKPFTKLIVQLDKKVISQIAMNDEKAKNKSLVKIWCKTFTNKTQINVTVPSTANCTSPSLCWTDGIQNWTMKNVTYKENIAKCQHIFVNFHLPDLAVGTILLILSLLVLCGCLIMIVKILGSVLKGQVATVIKKTINTDFPFPFAWLTGYLAILVGAGMTFIVQSSSVFTSALTPLIGIGVITIERAYPLTLGSNIGTTTTAILAALASPGNALRSSLQIALCHFFFNISGILLWYPIPFTRLPIRMAKGLGNISAKYRWFAVFYLIIFFFLIPLTVFGLSLAGWRVLVGVGVPVVFIIILVLCLRLLQSRCPRVLPKKLQNWNFLPLWMRSLKPWDAVVSKFTGCFQMRCCCCCRVCCRACCLLCGCPKCCRCSKCCEDLEEAQEGQDVPVKAPETFDNITISREAQGEVPASDSKTECTAL

SEQ ID NO: 785157 - protein, 324 aa, Homo sapiens
MGANIGTSITNTIVALMQVGDRSEFRRAFAGATVHDFFNWLSVLVLLPVEVATHYLEIITQLIVESFHFKNGEDAPDLLKVITKPFTKLIVQLDKKVISQIAMNDEKAKNKSLVKIWCKTFTNKTQINVTVPSTANCTSPSLCWTDGIQNWTMKNVTYKENIAKCQHIFVNFHLPDLAVGTILLILSLLVLCGCLIMIVKILGSVLKGQVATVIKKTINTDFPFPFAWLTGYLAILVGAGMTFIVQSSSVFTSALTPLIGIGVITIERAYPLTLGSNIGTTTTAILAALASPGNALRSSLQVRTWGTGTGALGVGPPMVLQTGL

SEQ ID NO: 785158 - protein, 505 aa, Homo sapiens
MGANIGTSITNTIVALMQVGDRSEFRRAFAGATVHDFFNWLSVLVLLPVEVATHYLEIITQLIVESFHFKNGEDAPDLLKVITKPFTKLIVQLDKKVISQIAMNDEKAKNKSLVKIWCKTFTNKTQINVTVPSTANCTSPSLCWTDGIQNWTMKNVTYKENIAKCQHIFVNFHLPDLAVGTILLILSLLVLCGCLIMIVKILGSVLKGQVATVIKKTINTDFPFPFAWLTGYLAILVGAGMTFIVQSSSVFTSALTPLIGIGVITIERAYPLTLGSNIGTTTTAILAALASPGNALRSSLQIALCHFFFNISGILLWYPIPFTRLPIRMAKGLGNISAKYRWFAVFYLIIFFFLIPLTVFGLSLAGWRVLVGVGVPVVFIIILVLCLRLLQSRCPRVLPKKLQNWNFLPLWMRSLKPWDAVVSKFTGCFQMRCCCCCRVCCRACCLLCGCPKCCRCSKCCEDLEEAQEGQDVPVKAPETFDNITISREAQGEVPASDSKTECTAL

SEQ ID NO: 785159 - protein, 234 aa, Homo sapiens [sequence omitted]

SEQ ID NO: 785160 - protein, 58 aa, Homo sapiens
EKMLRTQRRVEAEAQVGGQELGWAPEGAGMHSLWTSARHRLRGLLIPRPCCLPPATPG

SEQ ID NO: 785161 - protein, 27 aa, Homo sapiens
MGKACTRCYENKEKGLSHQTGQSRMTF

SEQ ID NO: 785162 - protein, 138 aa, Homo sapiens
RPRPPQLRAQLSEQLSLRLGGAWPLPPGGAFVSSKLSLFSGFLIPGTQTWAVNPPGLRGRCLHRLADPALKCRWWNSPGGTARAEPTGCRGGWGHGPPPSAFSGTAPAEPTGHGDALRAPSSSPSACSGTARAEPTCG

SEQ ID NO: 785163 - protein, 166 aa, Homo sapiens
RTQKARHREMTWEAGKESIPRESLSVTRSGVKWRSLSSLQPLPPRFKQFFCLSLPSSWDYRCWTAESRGSRHQQVWCPPRTLPVVCQHGDVLPGVLTVVPLPLGVPGIALSVYFCVSDLSRPPPNPQGLTDGVHARTGVHRRDLVINAGSVYCDWRSSLRPRLGKR

SEQ ID NO: 785164 - protein, 179 aa, Homo sapiens
PAVPLAVKDAVGRVEPRTRDARPNLVPMGGVGVAEAARPLLSWPTISLTIFTAVNSSQGGGLVQRQLRFHNSHRVLCRRCPCPPTPAWWECDARLLPPPWPPVPPASTSPEILPTPHLHRSPHAPGAPKPPPNPTHPGAGTGVSELSQGPWEVAGTGASCSLFHFPFRIWPGWRTGQDG

SEQ ID NO: 785165 - protein, 179 aa, Homo sapiens; identical to SEQ ID NO: 785164

SEQ ID NO: 785166 - protein, 131 aa, Homo sapiens
TVGQKQTQTHPAQPRSSAISSEDSDVSVSQQLRPWPQVTHYAACTSPQSPPTCGFLQPQALTRVRPPQKERPQPTGSAIGPTPTNSPCDTKGPSLLRLSAALPRASFPSPQVCRRLPPEPWPGSGVLRLAP

SEQ ID NO: 785167 - protein, 88 aa, Homo sapiens
KIMLAIITKMTLTQVSTWFANARRRLKKENKMTWAPKNKGGEERKAEGGEEDSLGCLTADTKGTENVHHPTLRVLQVIKQFGLSKAAL

SEQ ID NO: 785168 - protein, 53 aa, Homo sapiens
MLLPFPHKHAAALRERTRDLLSSSRLAASAAEMNISNRLINCFIVTQENHSVK

SEQ ID NO: 785169 - protein, 51 aa, Homo sapiens
TVEGEAGTSYLAAGEREREKEELSNANKTLDLMRTHYHKNSVGETTSMIHS

SEQ ID NO: 785170 - protein, 132 aa, Homo sapiens
GGRSWGAGGPAPARRGLWASAPRRPSPPARPVGAEFGLPGPGGAACGGAPQRQPGAHAPAPCTPCTPCNPYARRAPGPHPASVRGRGCGCGARGAVRRWGRQGVPLSGPRGSEGGERDGRRLSPAGGVLRRP

SEQ ID NO: 785171 - protein, 110 aa, Homo sapiens
MRLTRSCSPGTFLESSSCLGLCPLHPTPISLMVPGLSAQSEGMCLNADTNGSLKVYNRQQKPCVTWVRRGCMSSFYFRVFRGLYHNFGALAKPTSDFMLHGYVFKQLSPR

SEQ ID NO: 785172 - protein, 372 aa, Homo sapiens
KHQMADDAGAAGGPGGPGGPGMGNRGGFRGGFGSGIRGRGRGRGRGRGRGRGARGGKAEDKEWMPVTKLGRLVKDMKIKSLEEIYLFSLPIKESEIIDFFLGASLKDEVLKIMPVQKQTRAGQRTRFKAFVAIGDYNGHVGLGVKCSKEVATAIRGAIILAKLSIVPVRRGYWGNKIGKPHTVPCKVTGRCGSVLVRLIPAPRGTGIVSAPVPKKLLMMAGIDDCYTSARGCTATLGNFAKATFDAISKTYSYLTPDLWKETVFTKSPYQEFTDHLVKTHTRVSVQRTRAQRGLHIRVSSQKHNGASGVNKTQGGRRRKPRGPHSGTRFGTGPKEGKKRGATKREGKQGREHTWAQKPESRKSGRPLDHNDA

SEQ ID NO: 785173 - protein, 144 aa, Homo sapiens
SKQQMPASVTPPLTESLWDSLKCMSDTVRKRQENEKKTWMFSIFELMQAGDNSCQSCKAEHPEKWNRRIQAPVEGINESRGVWMGLFLSSVWLKLQTPGVTQWVASTLPSTSAGIAKSNGKKNWFVILTPVLKEVGEAEREDWF

SEQ ID NO: 785174 - protein, 46 aa, Homo sapiens
MTSTRVTSTRVKSAHTRDIHTRDTHMRDTSTHVTSTHMTSAHTCDI

SEQ ID NO: 785175 - protein, 50 aa, Homo sapiens
SGRFSRCCSCSDGKWDALGQVWQWRRTQQLDYRHLAPGHVDEEKGRPGMT

SEQ ID NO: 785176 - protein, 107 aa, Homo sapiens
RRSLTLLPRLECSGVILANCNLCLLGSSDSPASASRVAGITGTRHQAQLIFVFSVETGFHHVGQAGLELLTSRDPHALASQSAGITGVSHRAQPDYVLATVIHTYST

SEQ ID NO: 785177 - protein, 103 aa, Homo sapiens
PQPSPRGPLNPHPGFSPQFSPPSLPSAFTPGSPEPTPRGSLPSALTPGSSQPSPQGCLLSLTPGFPPLVPCPLPLIRFQEELRSEPGFLALGSPSLFVCAVLC

SEQ ID NO: 785178 - protein, 68 aa, Homo sapiens
QEEDGNTSGRSGPSLSLKPLLPPLAGSAPSNPADPVGHGKLDSTHEPGLEGGGGMGAGYREGARVRAV

SEQ ID NO: 785179 - protein, 115 aa, Homo sapiens
ALRRSLHTWEDPGRGTISAEYSLCSLEEQCLPQHSDLCDTGACGPAPCPVPRGGHLGTQAVVWCGGSKPSRSLCSHRSHVWRHQEVESGAGQPRLLPVSHRGALRSSQLAWFALL

SEQ ID NO: 785180 - protein, 169 aa, Homo sapiens
IHGEMRLFVSDGVPGCLPVLAAAGRARGRAEVLISTVGPEDCVVPFLTRPKVPVLQLDSGNYLFSTSAICRYFFLLSGWEQDDLTNQWLEWEATELQPALSAALYYLVVQGKKGEDVLGSVRRALTHIDHSLSRQNCPFLAGETESLADIVCGEPYTHYCKIPPTSLRS

SEQ ID NO: 785181 - protein, 256 aa, Homo sapiens
IHGEMRLFVSDGVPGCLPVLAAAGRARGRAEVLISTVGPEDCVVPFLTRPKVPVLQLDSGNYLFSTSAICRYFFLLSGWEQDDLTNQWLEWEATELQPALSAALYYLVVQGKKGEDVLGSVRRALTHMSASCRDCTETARCPGSPALPPKAAPASPLREGLSPMSLRRRSWLPYLKEEIAMAVLLGRRARKFGPVGPSRIQWCCAGEGMCHHQGPFVEFPPGTLVCKRVCGPREPFCGTCTKRSGPDYTTNGSMAE

SEQ ID NO: 785182 - protein, 103 aa, Homo sapiens
SFVELAVAAKLPGESHWFALGTTKMVVLGAVCVNHLVFCVFLACNPAWPCLRGGRLLHAGPFSLHQLLLVDSLYSVQKRRNISVPSFGGLSWWLIIFPPNRTK

SEQ ID NO: 785183 - protein, 51 aa, Homo sapiens
MDFKSSRAQGLYSGAFTLLQKSTKVQDSLTMGKQMSRPRLLLQHTCTQCLP

SEQ ID NO: 785184 - protein, 110 aa, Homo sapiens
AITIRTFKIMRAPVCSSFLITTKALGTPCWMKEAFFPPLYQCGITQVSTWNRRNYLKNGVLKSTLKSAMAHDPLSPVLSDPRLDAMDQWLLSVLATVEQCTDQFGMDTVW

SEQ ID NO: 785185 - protein, 113 aa, Homo sapiens
QRRTLIAIFKENKRPSKEMQVTISQQLGLELNTVSNFFMNARRRCMNRWAEEPSTAPGGPRRRHGHFLQGLRRPGPAPSLPPRPGRCAPTSPPHILPARRPAPRGHLEGVLSG

SEQ ID NO: 785186 - protein, 168 aa, Homo sapiens
CAPYCPPHLRGTRETEYWGHAVVTTACWGHVTAQSLGPPSCNVSMRMGTLAVEEHPPSRSLAGQVLDGGCSGTPNLDQIWGGDPSTTLQGGEGPGVGLHRPYCSHRCGGSGLHWPKTGLKTAGGRTRLFTGWKDEDVLGWGPQRLQLVGQLPAVTTGQQHLELVFPLK

SEQ ID NO: 785187 - protein, 59 aa, Homo sapiens
DSQEARAARLGSGSDSDSDSDCQPRGPRTPACGRPCSRRRPLRRGARVGAGLRGPLGRP

SEQ ID NO: 785188 - protein, 66 aa, Homo sapiens
LFRQPTLSRVIGRYSEAAMEGEPDSCFIPSVEHCKAAAAAALRTNFRLLSARQEDVILPLSFSEGQ

SEQ ID NO: 785189 - protein, 178 aa, Homo sapiens
ANTAAIQAILYNRYRRYGAAGGGCFSAASCDSERLLSAGAWLPGGPRAASSSPTERPRTAWGLVFVCILSQQPRKGRRLAPGLRQCFPAGLLVVRREARRLPGSEADSLRTISVKDSAPGSPGLRRYPRKLCPSALAHRECPALKIWSFLFPESGLLFRFYLCFPFLPSYCQFVFRHY

SEQ ID NO: 785190 - protein, 261 aa, Homo sapiens
MDTMMLNVRNLFEQLVRRVEILSEGNEVQFIQLAKDFEDFRKKWQRTDHELGKYKDLLMKAETERSALDVKLKHARNQVDVEIKRRQRAEADCEKLERQIQLIREMLMCDTSGSIQLSEEQKSALAFLNRGQPSSSNAGNKRLSTIDESGSILSDISFDKTDESLDWDSSLVKTFKLKKREKRRSTSRQFVDGPPGPVKKTRSIGSAVDQGNESIVAKTTVTVPNDGGPIEAVSTIETGPYWTRSRRKTGTLHTPGNQGVQ

SEQ ID NO: 785191 - protein, 259 aa, Homo sapiens
MDTMMLNVRNLFEQLVRRVEILSEGNEVQFIQLAKDFEDFRKKWQRTDHELGKYKDLLMKAETERSALDVKLKHARNQVDVEIKRRQRAEADCEKLERQIQLIREMLMCDTSGSIQLSEEQKSALAFLNRGQPSSSNAGNKRLSTIDESGSILSDISFDKTDESLDWDSSLVKTFKLKKREKRRSTSRQFVDGPPGPVKKTRSIGSAVDQGNESIVAKTTVTVPNDGGPIEAVSTIETGPYWTRSRRKTGTLQPWNSDS

SEQ ID NO: 785192 - protein, 259 aa, Homo sapiens; identical to SEQ ID NO: 785191

SEQ ID NO: 785193 - protein, 259 aa, Homo sapiens; identical to SEQ ID NO: 785191

SEQ ID NO: 785194 - protein, 259 aa, Homo sapiens; identical to SEQ ID NO: 785191

SEQ ID NO: 785195 - protein, 292 aa, Homo sapiens
MDTMMLNVRNLFEQLVRRVEILSEGNEVQFIQLAKDFEDFRKKWQRTDHELGKYKDLLMKAETERSALDVKLKHARNQVDVEIKRRQRAEADCEKLERQIQLIREMLMCDTSGSIQLSEEQKSALAFLNRGQPSSSNAGNKRLSTIDESGSILSDISFDKTDESLDGTLLGEEFQTEAREHEALLLADSRGWTPWTVRKGVHGSEETRGMTHSSNNYRTGPMKGATKLGQLRNGTLARSEEQMKRKRRTGRQKGPEARRWHQKEEPNRQRTHGSGGTRSQEPGPEDTDDTKQ

SEQ ID NO: 785196 - protein, 110 aa, Homo sapiens
QPPGKSCFLEHKEPLRPPAGLEEGVTSLLPAMSWAPFSALHTSSACRVPGHSGCLLCPHMVLASLPPRLPPASVSPPWCTAPHPAPLPPSPPRSCPRDPQSFSSRTSSAR

SEQ ID NO: 785197 - protein, 277 aa, Homo sapiens
NKRLAHSARPAGICCVSRSGLSALAAAGTASMFQLPILNFSPQQVAGVCETLEESGDVERLGRFLWSLPVAPAACEALNKNESVLRARAIVAFHGGNYRELYHILENHKFTKESHAKLQALWLEAHYQEAEKLRGRPLGPVDKYRVRKKFPLPRTIWDGEQKTHCFKERTRNLLREWYLQDPYPNPSKKRELAQATGLTPTQVGNWFKNRRQRDRAAAAKNRLQQQVLSQGSGRALRAEGDGTPEVLGVATSPAASLSSKAATSAISITSSDSECDI

SEQ ID NO: 785198 - protein, 113 aa, Homo sapiens
GGGEGGEGGGEGARGGRSRRIPRTLPAPPAVGLGAQRERRERAFPPRGSPCRWSNLRRCSSVWEEGSLQDRGAVVHTPSVVTSDRWAPGTPGIPPNLLRFGKKPAAIPPPPKS

SEQ ID NO: 785199 - protein, 31 aa, Homo sapiens
MTHTGQLHHHVMIKVNMPECSLGASNCLNNF

SEQ ID NO: 785200 - protein, 112 aa, Homo sapiens
MCGDLTPVLAPAAEAEAQAGGDLLFPGLSRESLHSPQEPALRYHPQGQETSLGESPETGSLAMPWRTHPLYSRTSGFGLGVSAQGSLPSNQPPASEPGPPPPSRCGSLSLSF

SEQ ID NO: 785201 - protein, 114 aa, Homo sapiens
LSDYLVKPPCTTMGETEAQRGKDQTSHNQARGRSGPMPGFLDSQSSALSATHPGALNKEASRVHSAGGPRIVLCPWPNTSPSSVSQSSLLLLRPDIPKRGEGVHELTLRSPPTL

SEQ ID NO: 785202 - protein, 104 aa, Homo sapiens
LSSEQPKAADLAFLPPVSRPTQVKAAKQRQRSPGAWFRPGQQVGGPDWGPGTEEGRPARTGVQGPGFRVPGLEEVAGSPPFQRLEIGWTRPEDPLGLDPDFRSA

SEQ ID NO: 785203 - protein, 151 aa, Homo sapiens
MCVYVHMCICTVEDAINRFVKVKGQAPQRNSQCAPSTSSLSVREFWIILLPGCDFGSGDHDLCLLPHIICLKVTDTAATARFPQASHLSGGEVACYSSQFLEFARQCHWNNGSFMSDFQRVGQHTCENPAVNKPLLSLGAYVPGGKVYICK

SEQ ID NO: 785204 - protein, 99 aa, Homo sapiens
SVTCRQISEMHSLSPSLQTHSRFQKVVPRIASSKGGKNTFIFPELLKVSSALELEARRGSQCRHRHVQTFATIRYLRALVLPPRRVFQELGVCDGGVVG

SEQ ID NO: 785205 - protein, 246 aa, Homo sapiens
PCAPLSPTALPPSTRGSPFASWRGLLPFVRPWSGLPQTPQLPVRRASLESPGPGVSVPSRARSGAGWHVARPSSGMRLPGDGALVQWSDGTSTSWKHRAASCHASSMESIPLFNYTGLIKLAFLILQDHGASSTDLTETADGLHKSLSTEDRIAYELPSSEHLSVADATWLALNVVSGGGSFSSSQPIGMTKIAKSVIAPLADQNISVFMLSTYQTDFILVLKRDLPFVTHTLSSEFTILWSVARL

SEQ ID NO: 785206 - protein, 99 aa, Homo sapiens
RAGCRASCKGECAAAFSFSAASGVVWSGGVSSGQADGAHVPRAEPSGLGWESGLRSQGRAQPPGPGLPRAADRGDMGQAWSRTRSQALDLCGQMRGRGC

SEQ ID NO: 785207 - protein, 117 aa, Homo sapiens [sequence omitted]

SEQ ID NO: 785208 - protein, 135 aa, Homo sapiens
TVGPHSVKLVYEHQGGTSRALAAASSVKSEVKESKDFIKPKLVTVIRSGVKPRKAVRILLNKKTAHSFEQVLTDITEAIKLDSGVVKRLCTLDGKQVTCLQDFFGDDDVFIACGPEKFRYAQDDFVLDHSGKAIL

SEQ ID NO: 785209 - protein, 178 aa, Homo sapiens
EAFGLLLLTDSFNSTQNLPNEHLHMSVLRRFAEEKVELLEKAIAQCFACMEQPLQEGVRTARTSYRCILRACLVRSKGNQGFHQTLKAVCLKNGIYASRTLARIDLNEALTQPVYDQIDPVFGSIFRTGKPTGSALMPHIDAFKQSLQENRLNPGGIGCSEPRSRQPGRRSETMSQKK

SEQ ID NO: 785210 - protein, 117 aa, Homo sapiens
GQRRGQCPCLAQHSLPCAEEAPFVLRAPVASRTSCSNHRAKEGAVQLGFYPLPPHPSSLPPGKPQLMGWAQPRAFMGTWSPAMSHTQAVPRNVVLPYMPISYARYDAKTRGPGFSSL

SEQ ID NO: 785211 - protein, 104 aa, Homo sapiens
AFLLLSILPESSFPPFADSYVQEIIASQCYFPLELPEKVFTVPVPGFHAQNFFFFLFLSFFLFFFFGDGVSLCLPGVECSGVILAHCKLHLPGSMPFSVPQPPE

SEQ ID NO: 785212 - protein, 106 aa, Homo sapiens
MRAYLALTSTTPVKLDAITKVPIFLRKTRNRLSLKEGKNEKCPSSYNGMASIYILGSISLSCPPTLCSFCQASQSKGSQADTQGAGCGEGGSAVEKMCLVASQWRT

SEQ ID NO: 785213 - protein, 44 aa, Homo sapiens
MWSSEVVRRAQKCVFLIIAWMLITASKPPVSRFLHRMEVAGRGG

SEQ ID NO: 785214 - protein, 55 aa, Homo sapiens
GGRIIHLYIKKVGKTPEPACGMCLARLRGVRAMRPEVLVRFPKTETHVSRACGGS

SEQ ID NO: 785215 - protein, 265 aa, Homo sapiens
PGFYQRRYRKATEGYSSGKVSPDHLDPERAMLALFSNPNPAEAWKVAYFYCLSNNKHFLEQILVTALTLLKEEDFPNLGCLLDREFRPLSCLLVLLGWTHCQSLESAKRLLQTLHRTQGPGCDELLRDACDGLWAHLEVLEWCIQQSSNPIPKRDLLYHLHGGDSHSVLYTLHHLTNLPALREEDVLKLLQKVPAKDPQQEPDAVDAPVPEHLSQCQNLTLYQGFCAMKYAIYALCVNSHQHSQCQDCKDSLSEDLASATEPAND

SEQ ID NO: 785216 - protein, 235 aa, Homo sapiens
MLALFSNPNPAEAWKVAYFYCLSNNKHFLEQILVTALTLLKEEDFPNLGCLLDREFRPLSCLLVLLGWTHCQSLESAKRLLQTLHRTQGPGCDELLRDACDGLWAHLEVLEWCIQQSSNPIPKRDLLYHLHGGDSHSVLYTLHHLTNLPALREEDVLKLLQKVPAKDPQQEPDAVDAPVPEHLSQCQNLTLYQGFCAMKYAIYALCVNSHQHSQCQDCKDSLSEDLASATEPAND

SEQ ID NO: 785217 - protein, 80 aa, Homo sapiens
NSNIEFLLEQEKMLKANCVREEEKAAELQLKSKLFSFGEFNSDAQEILIDSLSKKITQVYKVCIGDAEDDGLNPIQKLVS

SEQ ID NO: 785218 - protein, 182 aa, Homo sapiens
NSNIEFLLEQEKMLKANCVREEEKAAELQLKSKLFSFGEFNSDAQEILIDSLSKKITQVYKVCIGDAEDDGLNPIQKLVKVESRLVELCDLIESIPKENVEAIERMKQKEWRQKFRDEKMKEKQRHQQERLKAALEKAVAQPKKKLGRRLVFHSKPPSGNKQQLPLVNETKTKSQEEEYFFT

SEQ ID NO: 785219 - protein, 207 aa, Homo sapiens
GSAVASPQRIQGSEPASGPIECFHIFEQREDVTDQQTGQKIQIVTAVDASGSPKQQFILTSPDGAGTGKVILASPETSSAKQLIFTTSDNLVPGRIQIVTDSASVERLLGKTDVQRPQVVEYCVVCGDKASGRHYGAVSCEGCKGFFKRSVRKNLTYSCRSNQDCIINKHHRNRCQFCRLKKCLEMGMKMESVQSERKPFDVQREKP

SEQ ID NO: 785220 - protein, 95 aa, Homo sapiens
TSRARPPHPPRDTCPWILYPWPARGRLLGKPHQPPRVFSLGYLRCEERREFREGVQGGRPWEGARLEETERGAGAKARAFAPPGRSGSTNWQSWK

SEQ ID NO: 785221 - protein, 147 aa, Homo sapiens
APRCSNFLARSWTSIYSPNSSDSANSHSSPSMSPQACPFPNLPQPRLASLCPTVTWTCLQLPGPAKWGVGVGQCHTVLSPWNIPQQTWSFQLTFSPVLIAFPGSQMTLRSHAPSPAAVPVFTVTCSFTRLPSSSANLILFCSHNPTG

SEQ ID NO: 785222 - protein, 133 aa, Homo sapiens
PHIKGSNTTEVISGSLNSIKCVFLVWAAFLHVPRTFSSAALPSPGTHCYLCPDCGRMMSVEKTYLPFSLGPETMLIPPLTFHWQEQPVRHTWNGKDGEEISLLVGSHLLELPSLDGLTNSSVSEPVLPQITIL

SEQ ID NO: 785223 - protein, 133 aa, Homo sapiens; identical to SEQ ID NO: 785222

SEQ ID NO: 785224 - protein, 123 aa, Homo sapiens
MAQLPSAQMPAPRTQPDLILVHPVLALSGRAPSILCSVPWDACELLATAMWWKTRILWGVFLISRTRPPAPMQILILTLDPSEGEVCCKKRKPGQTGRNRVRMTTATCKPGGEASGETSPGTP

SEQ ID NO: 785225 - protein, 95 aa, Homo sapiens
VKIGDFALKIGDLGSIKSMDTRRVHTAEGPDFISVLERSQALFSSLGCMFCDDGDDDSGDDDGDNGDDDEYDGDNDDDDIGDDDDSTGDGDDDGA

SEQ ID NO: 785226 - protein, 47 aa, Homo sapiens
MFCDDGDDDSGDDDGDNGDDDEYDGDNDDDDIGDDDDSTGDGDDVVH

SEQ ID NO: 785227 - protein, 42 aa, Homo sapiens
CKSYLTSSNLNHRDMHVSCINTRKNTLAREWTVTGLRMISPS

SEQ ID NO: 785228 - protein, 114 aa, Homo sapiens
GNVPSRLSDKGPPQRLKPASLQFSCPDCRWVLCPGAWDALSSRVNRCQSCALQGRPQEGGSSRDTAYSAHQARKGLFPTSDPPSVDHPGLAWRGNLKFCALILTASLGFLWTFR

SEQ ID NO: 785229 - protein, 52 aa, Homo sapiens
MVTITAPGLRDAHSQVDSHSLTCCGLLGDGTACLLCSSLRLAPCSTEKPFSL

SEQ ID NO: 785230 - protein, 55 aa, Homo sapiens
LATPHGTWHSESALLASPHGTRHSQSALLASPPRLPTWRPTLTVGPPGIPTGAAR

SEQ ID NO: 785231 - protein, 99 aa, Homo sapiens
YQLSVSRSLGEEQFSVGSVNFMKQTNIQKNTNTRDTSKKTKDQLIIDAGQKHFGATVCKSCGMIYTASNPEDEMQHVQHHHRFLEGIKYVVSQNIVFQF

SEQ ID NO: 785232 - protein, 80 aa, Homo sapiens
RQGLGPGRPPWGQELGLERPLGGKSGACRGCSPTSAGPVQATGRQELSPKMLLGGQSRAWRRSREEELGPVFHFWQPLGL

SEQ ID NO: 785233 - protein, 27 aa, Homo sapiens
MLVRLVLNSWYQVICPPEPPKVLGLQA

SEQ ID NO: 785234 - protein, 247 aa, Homo sapiens
MIVRVTNRDIICQIAYARIEGDMIVCAAYAHELPKYGVKVGLTNYAAAYCTGLLLARRLLNRFGMDKIYEGQVEVTGDEYNVESIDGQPGAFTCYLDAGLARTTTGNKVLAALKGAVDGGLSIPHSTKRFPGYDSESKEFNAEVHRKHIMGQNVADYMRYLMEEDEDAYKKQFSQYIKNSVTPDMMEEMYKKAHAAIRENPVYEKKPKKEVKKKRWTRPKMSLAQKKDRVAQKKASFLRAQERAAES

SEQ ID NO: 785235 - protein, 153 aa, Homo sapiens
GRTQRCTQASARPFLQDPALHSSLSRALPAELQGHQAGDGSQRLRSPTAQALPVTTSASLSWDQRPHLCSPQPGSAGPVLRPLQTRGLWPPDYSLALGCLGAAGTHPGSLPPAKPTVPPRCLTYCCAVGGIITTSGHAMTLLLICKIKRVWQQ

SEQ ID NO: 785236 - protein, 119 aa, Homo sapiens
QGGLLITAKWGKKFRLSPVAMETCLLTWPSLTPTHGSETCPVRGFGGRGGKEQFLSLCLAGVAWGCRKSSVCGGCTFGPLAREQSLVRISRLLASLSPFLGYMCQIKQNETKTREHTVI

SEQ ID NO: 785237 - protein, 39 aa, Homo sapiens
MLPKFNPNEIKFVYLRCTRGEGGATSALAPKIGPLGLSP

SEQ ID NO: 785238 - protein, 225 aa, Homo sapiens
MSASAQQLAEELQIFGLDCEEALIEKLVELCVQYGQNEEGMVGELIAFCTSTHKVGLTSEILNSFEHEFLSKRLSKARHSTCKDSGHAGARDIVSIQELIEVEEEEEILLNSYTNLQKGSQKRAISTPGNPPNKKECVNLVGPHQLLSPSRFSPSANPSQKYNSTKVTRGPKGYLLRLSHKDVSGLGQGGVGTHKPKASDVRGPTGTLNPVQTPQTIERPDTYND

SEQ ID NO: 785239 - protein, 32 aa, Homo sapiens
MAWRGVCSGSPLNSFSSRNHAEENSEDGFPET

SEQ ID NO: 785240 - protein, 69 aa, Homo sapiens
SSPPQKEVGKRRKSGKLGRLILKFIWRNKHVRPAKKLLKKNEDELALSDINTQYKAEPGKLCMKGQIVN

SEQ ID NO: 785241 - protein, 104 aa, Homo sapiens
ENCLNSGGGGCSEPRSCHCPPALGDRARLRLGEKRKNCLTSFLTLHGLSASLFTSVTSNANGLHQIYSSLRTPLCSYCPCLASLLSSLIDTELTFCLILQTWLF

SEQ ID NO: 785242 - protein, 88 aa, Homo sapiens
APEEKGRVARGSGPQRPHSFSEALRRPASMGSEGLGGDADPMKRKPWTSLSSESVSCPQGSLSPATSLMQVSERPRSLPLSPELESSP

SEQ ID NO: 785243 - protein, 596 aa, Homo sapiens
GGPSERTPGAAARGEVRRSGACISRYAKKPFHPDVLRDNMDQSRVLLWVKAEPFIVGALQVPPPSKFSLHYLRKISTYVQIRATEGAYPRLYWSTWRHIACGKLQLAKDLAWLYFEIFDSLSMKTPEERLEWSEVLSNCMSEEEVEKQRNQLSVDTLQFLLFLYIQQLNKVSLRTSLIGEEWPSPRNKSQSPDLTEKSNCHNKNWNDYSHQAFVYDHLSDLLELLLDPKQLTASFHSTHSSLVSREAVVALSFLIEGTISRARKIYPLHELALWQPLHADSGFSKISKTFSFYKLETWLRSCLTGNPFGTSACLKSGKKLAWAHQVEGTTKRAKIACNTHVAPRMHRLVVMSQVYKQTLAKSSDTLAGAHVKIHRCNESFIYLLSPLRSVTIEKCRNSIFVLGPVGTTLHLHSCDNVKVIAVCHRLSISSTTGCIFHVLTPTRPLILSGNQTVTFAPFHTHYPMLEDHMARTGLATVPNYWDNPMVVCRENSDTRVFQLLPPCEFYVFIIPFEMEGDTTEIPGGLPSVYQKALGQREQKIQIWQKTVKEAHLTKDQRKQFQVLVENKFYEWLINTGHRQQLDSLVPPAAGSKQAAG

SEQ ID NO: 785244 - protein, 328 aa, Homo sapiens
GGPSERTPGAAARGEVRRSGACISRYAKKPFHPDVLRDNMDQSRVLLWVKAEPFIVGALQVPPPSKFSLHYLRKISTYVQIRATEGAYPRLYWSTWRHIACGKLQLAKDLAWLYFEIFDSLSMKTPEERLEWSEVLSNCMSEEEVEKQRNQLSVDTLQFLLFLYIQQLNKVSLRTSLIGEEWPSPRNKSQSPDLTEKSNCHNKNWNDYSHQAFVYDHLSDLLELLLDPKQLTASFHSTHSSLVSREAVVALSFLIEGTISRARKIYPLHELALWQPLHADSGFSKISKTFSFYKLETWLRSCLTGNPFGTSACLKSGKKLAWAHQGIF

SEQ ID NO: 785245 - protein, 416 aa, Homo sapiens
  misc_feature (416)..(416): Xaa can be any naturally occurring amino acid
GGPSERTPGAAARGEVRRSGACISRYAKKPFHPDVLRDNMDQSRVLLWVKAEPFIVGALQVPPPSKFSLHYLRKISTYVQIRATEGAYPRLYWSTWRHIACGKLQLAKDLAWLYFEIFDSLSMKTPEERLEWSEVLSNCMSEEEVEKQRNQLSVDTLQFLLFLYIQQLNKVSLRTSLIGEEWPSPRNKSQSPDLTEKSNCHNKNWNDYSHQAFVYDHLSDLLELLLDPKQLTASFHSTHSSLVSREAVVALSFLIEGTISRARKIYPLHELALWQPLHADSGFSKISKTFSFYKLETWLRSCLTGNPFGTSACLKSGKKLAWAHQVEGTTKRAKIACNTHVAPRMHRLVVMSQVYKQTLAKSSDTLAGAHVKIHRCNESFIYLLSPLRSVTIRFFSQVRRLRFVSGTGPLFANQRX

SEQ ID NO: 785246 - protein, 192 aa, Homo sapiens
GGPSERTPGAAARGEVRRSGACISRYAKKPFHPDVLRDNMDQSRVLLWVKAEPFIVGALQVPPPSKFSLHYLRKISTYVQIRATEGAYPRLYWSTWRHIACGKLQLAKDLAWLYFEIFDSLSMKTPEERLEWSEVLSNCMSEEEVEKQRNQLNKVSLRTSLIGEEWPSPRNKSQSPDLTEKSNCHNKVLLIS

SEQ ID NO: 785247 - protein, 135 aa, Homo sapiens
GGPSERTPGAAARGEVRRSGACISRYAKKPFHPDVLRDNMDQSRVLLWVKAEPFIVGALQVPPPSKFSLHYLRKISTYVQIRATEGAYPRLYWSTWRHIACGKLQLAKDLAWLYFEIFDSLSMNSRRPEFRLSLG

SEQ ID NO: 785248 - protein, 634 aa, Homo sapiens
YSFNIPLEERSDMFTWDPYGPWEGCTKMCQGLQRRNITCIHKSDHSVVSDKECDHLPLPSFVTQSCNTDCELRWHVIGKSECSSQCGQGYRTLDIHCMKYSIHEGQTVQVDDHYCGDQLKPPTQELCHGNCVFTRWHYSEWSQCSRSCGGGERSRESYCMNNFGHRLADNECQELSRVTRENCNEFSCPSWAASEWSECLVTCGKGTKQRQVWCQLNVDHLSDGFCNSSTKPESLSPCELHTCASWQVGPWGPCTTTCGHGYQMRDVKCVNELASAVLEDTECHEASRPSDRQCSVSCGRGTQARYVSCRDALDRIADESYCAHLPRPAEIWDCFTPCGEWQAGDWSPCSASCGHGKTTRQVLCMNYQQPIDENYCDPEVRPLMEQECSLAACPPAHSHFPSSPVQPSYYLSTNLPLTQKLEDNENQVVHPSVRGNQWRTGPWGSCSSSCSGGLQHRAVVCQDENGQSASYCDAASKPPELQQCGPGPCPQWNYGNWGECSQTCGGGIKSRLVICQFPNGQILEDHNCEIVNKPPSVIQCHMHACPADVSWHQEPWTSEDLKVKLLPQRTIILWELMKNIFCHGKHSHMYLINVVTDHLLYPRHCDPETIETYFLSLWSLQFTWGDLKYYKNSL

SEQ ID NO: 785249 - protein, 308 aa, Homo sapiens
  misc_feature (7)..(7): Xaa can be any naturally occurring amino acid
ASRAGCXSARKWTLHLRRRREAQRHLQDVTAHQDLLVPLEDPDSQGQRCHWDAWTCGVPRRRWAVHHWSPRPPGQPGTRGFPGFPGPIGLDGKPGHPGPKGDMGLTGPPGQPGPQGQKGEKGQCGEYPHRECLSSMPAALRSSQIIALKGEQSQASIQGPPGPPGPPGPSGPLGHPGLPGPMGPPGLPGPPGPKGDPGYQATRRKGERGMPGMQAEHGAKGAPGIADGWMKGEPRKSQGTKGEKGAEGSPGLLGSGGSRGEDRRCWPTQLEEGEGNWPQGPGPQAKENRGRGSWPQGAEKGRDAVEKG

SEQ ID NO: 785250 - protein, 93 aa, Homo sapiens
PGSRSRFSHHTSLQAERSGSGLGQPRKGLPQCSGGLKGSSSAAKVGAQAEEAPRASEGCEDCQHAVTSQNYLLRMSEETVLLCCPGRSGVAQS

SEQ ID NO: 785251 - protein, 109 aa, Homo sapiens
MASEAPSPPRSPPPPTSPEPELAQLRRKVEKLERELRSCKRQVREIEKLLHHTERLYQNAESNNQELRTQVRGPPQPRAPSSPGEAFEARDSLGRGPWQGLRTTVEYLK

SEQ ID NO: 785252 - protein, 714 aa, Homo sapiens
MASEAPSPPRSPPPPTSPEPELAQLRRKVEKLERELRSCKRQVREIEKLLHHTERLYQNAESNNQELRTQVEELSKILQRGRNEDNKKSDVEVQTENHAPWSISDYFYQTYYNDVSLPNKVTELSDQQDQAIETSILNSKDHLQVENDAYPGTDRTENVKYRQVDHFASNSQEPASALATEDTSLEGSSLAESLRAAAEAAVSQTGFSYDENTGLYFDHSTGFYYDSENQLYYDPSTGIYYYCDVESGRYQFHSRVDLQPYPTSSTKQSKDKKLKKKRKDPDSSATNEEKDLNSEDQKAFSVEHTSCNEEENFANMKKKAKIGIHHKNSPPKVTVPTSGNTIESPLHENISNSTSFKDEKIMETDSEPEEGEITDSQTEDSYDEAITSEGNVTAEDSEDEDEDKIWPPCIRVIVIRSPVLQIGSLFIITAVNPATIGREKDMEHTLRIPEVGVSKFHAEIYFDHDLQSYVLVDQGSQNGTIVNGKQILQPKTKCDPYVLEHGDEVKIGETVLSFHIHPGSDTCDGCEPGQVRAHLRLDKKDESFVGPTLSKEEKELERRKELKKIRVKYGLQNTEYEDEKTLKNPKYKDRAGKRREQVGSEGTFQRDDAPASVHSEITDSNKGRKMLEKMGWKKGEGLGKDGGGMKTPIQLQLRRTHAGLGTGKPSSFEDVHLLQNKNKKNWDKARERFTENFPETKPQKDDPGTMPWVKGTLE

SEQ ID NO: 785253 - protein, 587 aa, Homo sapiens
MPLSIETSILNSKDHLQVENDAYPGTDRTENVKYRQVDHFASNSQEPASALATEDTSLEGSSLAESLRAAAEAAVSQTGFSYDENTGLYFDHSTGFYYDSENQLYYDPSTGIYYYCDVESGRYQFHSRVDLQPYPTSSTKQSKDKKLKKKRKDPDSSATNEEKDLNSEDQKAFSVEHTSCNEEENFANMKKKAKIGIHHKNSPPKVTVPTSGNTIESPLHENISNSTSFKDEKIMETDSEPEEGEITDSQTEDSYDEAITSEGNVTAEDSEDEDEDKIWPPCIRVIVIRSPVLQIGSLFIITAVNPATIGREKDMEHTLRIPEVGVSKFHAEIYFDHDLQSYVLVDQGSQNGTIVNGKQILQPKTKCDPYVLEHGDEVKIGETVLSFHIHPGSDTCDGCEPGQVRAHLRLDKKDESFVGPTLSKEEKELERRKELKKIRVKYGLQNTEYEDEKTLKNPKYKDRAGKRREQVGSEGTFQRDDAPASVHSEITDSNKGRKMLEKMGWKKGEGLGKDGGGMKTPIQLQLRRTHAGLGTGKPSSFEDVHLLQNKNKKNWDKARERFTENFPETKPQKDDPGTMPWVKGTLE

SEQ ID NO: 785254 - protein, 176 aa, Homo sapiens
MASEAPSPPRSPPPPTSPEPELAQLRRKVEKLERELRSCKRQVREIEKLLHHTERLYQNAESNNQELRTQVEELSKILQRGRNEDNKKSDVEVQTENHAPWSISDYFYQTYYNDVSLPNKVTELSDQQDQAIETSILNSKDHLQVENDAYPGTDRTENVKYRQVDHFASNSQVIKC

SEQ ID NO: 785255 - protein, 399 aa, Homo sapiens
MKKKAKIGIHHKNSPPKVTVPTSGNTIESPLHENISNSTSFKDEKIMETDSEPEEGEITDSQTEDSYDEAITSEGNVTAEDSEDEDEDKIWPPCIRVIVIRSPVLQIGSLFIITAVNPATIGREKDMEHTLRIPEVGVSKFHAEIYFDHDLQSYVLVDQGSQNGTIVNGKQILQPKTKCDPYVLEHGDEVKIGETVLSFHIHPGSDTCDGCEPGQVRAHLRLDKKDESFVGPTLSKEEKELERRKELKKIRVKYGLQNTEYEDEKTLKNPKYKDRAGKRREQVGSEGTFQRDDAPASVHSEITDSNKGRKMLEKMGWKKGEGLGKDGGGMKTPIQLQLRRTHAGLGTGKPSSFEDVHLLQNKNKKNWDKARERFTENFPETKPQKDDPGTMPWVKGTLE

SEQ ID NO: 785256 - protein, 311 aa, Homo sapiens
MTSELDIFVVDTDPYLTRTCIASGSMCYSCDLTRWPCVVRSCESWSRLCATAAVLQSDTMDHYRTFHMLERLLHAPPKLLHQLIFQIPPSRQALLIERYYAFDEAFVREVLGKKLSKGTKKDLDDISTKTGITLKSCRRQFDNFKRVFKVVEEMRGSLVDNIQQHFLLSDRLARDYAAIVFFANNRFETGKKKLQYLSFGDFAFCAELMIQNWTLGAVGEAPTDPDSQMDDMDMDLDKEFLQDLKELKVLVADKDLLDLHKSLVCTALRGKLGVFSEMEANFKNLSRGLVNVAAKLTHNKDVRDLFVDLVE

SEQ ID NO: 785257 - protein, 87 aa, Homo sapiens
CKAGGPDLSASLWHLPPVPSEPQVAHSGLPASTSFFAFGPRLSGEFLTAVPQGCLPQKPSCGREDKEPPTYNEELAVKLWGERYWRE

SEQ ID NO: 785258 - protein, 216 aa, Homo sapiens
KPYIFSDAQRPSSFGSKGTFPHHDIATSVAAVCISLPVRTDHIAQEIHSAESRDHSQTAGRTLTSSSPDSKVTEEGRAQTLLPGRPSSGQRISDSVPLESTEKTHLEIPASGPSSASSHHKEGRHKTFFPSRGQYGCGEMTVPCPSLGSDGRKRQVSGLITRKDSVVPSKPEQPIEIPEAPSKSLKKRSLEGMRKQTRVEFSDTSSDDEDRLVIEI

SEQ ID NO: 785259 - protein, 123 aa, Homo sapiens
VEFLIWFSAWWLLVYSRATHLCTSILYPKTLPNSFTSYRSFLDEFLGFSRYMIISSANCNTLTSSLPLWMLLISFSCLIVLARTSSSVLNRSGESGHPCLVLVLRGNALNFSLFSVMLAVGLS

SEQ ID NO: 785260 - protein, 156 aa, Homo sapiens
MQGSNLEEERKEVRNGPYSGTLEIHGCGIEFSQEECKWLDLRRGIYTKDVMSADFIGHLVSLGNPVLPDLKGTFQGVGGKKEEIPGLWQSGRENRPRSEGRLGSRCDQEPFVTSQRPSSEALVTSGASSGNNGHVQLGRHRGTWITDRSLMQLTDR

SEQ ID NO: 785261 - protein, 119 aa, Homo sapiens
RLAQGTCEGEKSDLEYKLPQHNWPQDCGCFQKTLPSCVELTYSGALGRGVCEHGGHGVRWPPPFRLTAQPVSSLLLCTWRRQGRQGCCLPEGVQSVNKTSPLDLSGESRLGLFETRYMV

SEQ ID NO: 785262 - protein, 246 aa, Homo sapiens
PRRPRPLWLDPETSHGGHPHGNMPGLDRPLSRQNPHDGVVTPAASPSLPQPGLQMPGQWGPVQGGPQPSGQHRSPCPEGPVPSGVPCATSVPHFPTPSILHQGPGHEQHSPLVAPPAALPSDGRDEVSHLQSGSHLANNSDPESTFRQNPRIVNHWASPELRQNPGVKNEHRPASALVNPLARGDSPENRTHHPLGAGAGSGCAPLEADSGASGALAMFFQGGETENEENLSSEKAGLSGQADFDD

SEQ ID NO: 785263 - protein, 81 aa, Homo sapiens
MPVAHGPAVGGAGLGMAPLGLAFGCGLAVAFQPGAGSALPSEAGEGGGEAGRGERRGGLRADWHRRSPGQPRDYQALCRGR

SEQ ID NO: 785264 - protein, 74 aa, Homo sapiens
HTHPFSMCSLENRTNSSLQRTNTQAQWSPKAMLLILNHLRTLLKCRFWLRSSLVGLRVCIFNKLPGTTPVDTNS

SEQ ID NO: 785265 - protein, 133 aa, Homo sapiens
EPQEWSRRSCSRRPCFLLARKSRNDRNRHPRLRPRGAPLRMAGGPAGLLREGIREAEAGEGCEVARGGASRSGATHHTNSLPFPRKSGRGKTRASSGGSPGLWEPGEDRKAEGSAADKPSAPPGRHWWPRGRW

SEQ ID NO: 785266 - protein, 174 aa, Homo sapiens
QAQVEEMRLMMNQLEEDLVSARRRSDLYESELRESRLAAEEFKRKATECQHKLLKAKDQGKPEVGEYAKLEKINAEQQLKIQELQEKLEKAVKASTEATELLQNIRQAKERAERELEKLQNREDSSEGIRKKLVEAEELEEKHREAQVSAQHLEVHLKQKEQHYEEKIKVLDIR

SEQ ID NO: 785267 - protein, 56 aa, Homo sapiens
MKCLTSYPDPGQCQPPRPQPLTHLLQLVAAALYVEPPLSPGRLSCYAALLIFKTIL

SEQ ID NO: 785268 - protein, 80 aa, Homo sapiens
VFAKKKVLPLFTPSCVNGTANALAYCDWTRILTCSCSFPSYGCSQIRPLHRTQSWQLLPGPLQRPVQSSTLAPCLYQSRN

SEQ ID NO: 785269 - protein, 139 aa, Homo sapiens
LVRHKAGEVGSAPEDRRFGSLSYCQKNDVGGHIHLPRCRCDAVSTNWFVGEQTLPQALFEFLTLYTFSELFLPLSSCHFLFYRFHPGCVDARSTQCPGSNFTQDTLRTGFKYDPNLHNPNSAGLSCQVEVGIVASEDLN

SEQ ID NO: 785270 - protein, 51 aa, Homo sapiens
PRLSRHVQQWGVAAQGSPHEATGLHRGSAQGSKAAWVLTWHSGSTQLPPAK

SEQ ID NO: 785271 - protein, 72 aa, Homo sapiens
SDMISARSNIWYYHLDQQLRVELPGCRALGLRDHRSGPPGPRGHPLGPQSGRYQLGNLRQVANLSKLVFPCL

SEQ ID NO: 785272 - protein, 111 aa, Homo sapiens
RNNTRCLLKTTVLSFMQCFCTETAVSCQCTVNGRKTNKMSFQVFLRDGFGTLKTPMASTIKETRNPGERQKAVRTGRDLHSRGRQAHQSGRKEQALLLVSQHTWQAQGSRW

SEQ ID NO: 785273 - protein, 208 aa, Homo sapiens
TCAPLATLVLAPEIPKSVPSPSLPPAGTPPGTKKVDGISHTSALAPVASSPKECPTEDSGASATASSKGTLTYLADSPSPLGVSVSPQTKRPPTKKGSAGPDTPIGNLSSPVSPVEASFLPENSLSFQGSKDSPATTHSPTPPSPKGAPTPSAVTPLSPKGVTLPPKETPTPSVVNLPFPKEGPATPAPKQAPALSMTSSSPKKARAT

SEQ ID NO: 785274 - protein, 155 aa, Homo sapiens
CVLVLVVLVLVELPQCEIKCKPISLQTTSVVWFFAGRTMVNLLKHSLIRHPESSQFLDLLYLFFSFCYSFSFSIHPKPYPGHHQSFYTTNVSSNNPTISPLTTRPPFSLISPTLGSHAAPIPLEAALRNIAHSLSISPPKNFHRPNTSTPFCFIF

SEQ ID NO: 785275 - protein, 102 aa, Homo sapiens
QIMESLKYQCDEIFEHPVSKSVFNFFKRMYLVIVCSGGDTSLNKQAASQSARYSLVLILFSLTATILAQCFITSFLDYVKSPDQVLTFKYYLFWNIWKQCIK

SEQ ID NO: 785276 - protein, 76 aa, Homo sapiens
RAIGEVESGVAGSMSGTQTYSQRMGYSVEKYRRRGNGTRLIMRCMKYLCQKNIPFYGSVLEENQGVIRKTSALGFL

SEQ ID NO: 785277 - protein, 117 aa, Homo sapiens
GTATEEQAASKPGSASLLCVWKNKAASEPGASCWLLYSDPPPLSREANFLRRKEKHQLLVPHPGTPGLVVRVAYTEQACSPFSFALQPEACLPSSLGHRHPEQPFLPPLPTSPALGF

SEQ ID NO: 785278 - protein, 40 aa, Homo sapiens
PWGNAFSKILLQAPSGTYSPLWSGCQVHGGGIHLFQMPAD

SEQ ID NO: 785279 - protein, 131 aa, Homo sapiens
MAINQSPFSSGDTVVFKDGQYWIRGRTSVDIIKTGGYKVSALEVEWHLLAHPSITDVAVIGVPDMTWGQRVTAVVTLREGHSLSHRELKEWARNVLAPYAVPSELVLVEEIPRNQMGKIDKKALIRHFHPS

SEQ ID NO: 785280 - protein, 194 aa, Homo sapiens
NLGLGSEAWAGWLLCPLWVGATCVMMPEFSPQQVWEKFLSSETPRINVFMAVPTIYTKLMEYYDRHFTQPHAQDFLRAVCEEKIRLMVSGSAALPLPVLEKWKNITGHTLLERYGMTEIGMALSGPLTTAMRLPGSVGTPLPGVQVRIVSENPQREACSYTIHAEGDERGTKGPSPCCCPDMPLLGFLPLPCWY

SEQ ID NO: 785281 - protein, 284 aa, Homo sapiens
GPARLTTPRDPAGTRPDPGARAAEDEEECGEADPAPWPRPSREVTGLVHKWAWTKDDVILHVLPLHHVHGVVNALLCPLWVGATCVMMPEFSPQQVWEKFLSSETPRINVFMAVPTIYTKLMEYYDRHFTQPHAQDFLRAVCEEKIRLMVSGSAALPLPVLEKWKNITGHTLLERYGMTEIGMALSGPLTTAMRLPGSVGTPLPGVQVRIVSENPQREACSYTIHAEGDERGTKVTPGFEEKEGELLVRGPSVFREYWNKPEETKSAFTLDGWFKTGRTQPHGS

SEQ ID NO: 785282 - protein, 311 aa, Homo sapiens [sequence omitted]

SEQ ID NO: 785283 - protein, 275 aa, Homo sapiens
QEAGGPLLPLTPAIYTGAVEEPAEVPVPEQEWRNKGAMIIYTSGTTGRPKGVLSTHQNIRTVVTGLVHKWAWTKDDVILHVLPLHHVHGVVNALLCPLWVGATCVMMPEFSPQQVWEKFLSSETPRINVFMAVPTIYTKLMEYYDRHFTQPHAQDFLRAVCEEKIRLMVSGSAALPLPVLEKWKNITGHTLLERYGMTEIGMALSGPLTTAMRLPGSVGTPLPGVQVRIVSENPQREACSYTIHAEGDERGTKGPSPCCCPDMPLLGFLPLPCWY

SEQ ID NO: 785284 - protein, 190 aa, Homo sapiens
GPARLTTPRDPAGTRPDPGARAAEDEEECGEADPAPWPRPSREVTGLVHKWAWTKDDVILHVLPLHHVHGVVNALLCPLWVGATCVMMPEFSPQQVWEKFLSSETPRINVFMAVPTIYTKLMEYYDRHFTQPHAQDFLRAVCEEKIRFRGDPTAWSTGAHCLRKPTEGSLLLHHPRRGRREGDQGKPLCS

SEQ ID NO: 785285 - protein, 416 aa, Homo sapiens
QEAGGPLLPLTPAIYTGAVEEPAEVPVPEQEWRNKGAMIIYTSGTTGRPKGVLSTHQNIRTVVTGLVHKWAWTKDDVILHVLPLHHVHGVVNALLCPLWVGATCVMMPEFSPQQVWEKFLSSETPRINVFMAVPTIYTKLMEYYDRHFTQPHAQDFLRAVCEEKIRLMVSGSAALPLPVLEKWKNITGHTLLERYGMTEIGMALSGPLTTAMRLPGSVGTPLPGVQVRIVSENPQREACSYTIHAEGDERGTKVTPGFEEKEGELLVRGPSVFREYWNKPEETKSAFTLDGWFKTGDTVVFKDGQYWIRGRTSVDIIKTGGYKVSALEVEWHLLAHPSITDVAVIGVPDMTWGQRVTAVVTLREGHSLSHRELKEWARNVLAPYAVPSELVLVEEIPRNQMGKIDKKALIRHFHPS

SEQ ID NO: 785286 - protein, 137 aa, Homo sapiens
KRKKEKCDLEMWRSRLTATPRSKPVAPGERETGLGRLPPLSREAYGQGQVGRGTVLGLWPRLDGRRHFLHKKRQETTTLGFWTFPRNSNQNNRHEGSFLSWLSAAWTPWTSPSCAWATAAAFRASLVGGTTILPLGG

SEQ ID NO: 785287 - protein, 132 aa, Homo sapiens
MSWPRTRCPRSWCWWRRSRGTRWARLTRRRSSGTSTPHDPADWDCGSGGEQQTSPSHREPRGPVQDLASLKPEPPKSGHVESRTVWDEITMWGPQPRASCCSSRRPSLVSPLPGHRRPHLCSAVQPAPGPTC

SEQ ID NO: 785288 - protein, 132 aa, Homo sapiens
GCTTGTPEQGPKQGTPARMPNPRGSGSCWGAVVPVSGGLMRAAPTSSAGFQPQLPHTRAVPSRPPRPDKAPAAKVLRGEGFLGFLKPVFPIVSYVPAEASTVPGPAAHSVSRVCTWHPSFWKSTNNGLPAED

SEQ ID NO: 785289 - protein, 56 aa, Homo sapiens
MIISIDAEKVIDNIQHHSMIKSFNQLHIEEMDRNTIKVICDKPAADIIPNGEKLKA

SEQ ID NO: 785290 - protein, 263 aa, Homo sapiens
PGFWVTAFLNHPQLSAMISPRDEDMLCYLMNLEVRELRHSRTGCKFKFRFWSNPYFQNKVIVKEYECRASGRVVSIATRIRWHWGQEPPALVHRNRDTVRSFFSWFSQHSLPEADRVAQIIKDDLWPNPLQYYLLGDGPAEPGEASQGGPRRPLLGPTGSSLAKCCLGMCGLHKLPHASYGWRIWAQAHGGRSVVCCLLSAVCCLFCALPLCVVRWTQLSNCGPRGQSLLFPYGLLLFCVNITWLSHAAASTLSTQCCGCALP

SEQ ID NO: 785291 - protein, 105 aa, Homo sapiens
LSDNLRTSGASTRFTQQLRGPEKKHRMVWQEKEDMHKQLVEASETLKSQAKELKDAHQQQKLALQEFLELNELMAELYSQKQKVWDKEEEMEVAMQKADMMWQEI

SEQ ID NO: 785292 - protein, 95 aa, Homo sapiens
FLLDEFKLYRNISYIHKGEGKRWNMRRGLFQIRPILQKLSSLLHKERRLLLQGFWSHQNPQTGPTEKAFTETTEDKPNNMANRRYTTKSSHCNIN

SEQ ID NO: 785293 - protein, 98 aa, Homo sapiens
FLLDEFKLYRNISYIHKGEGKRWNMRRGLFQIRPILQKLSSLLHKERRLLLQGFWSHQNPQTGPTEKAFTETTEDKPNNMANRRYTIPCVCVENDRVL

SEQ ID NO: 785294 - protein, 281 aa, Homo sapiens
HQCSGGGPGGPGMGNCGGFRGGFGSGIRGRGRSRRRGRGRGRGARGGKAEDKEWMPVTKLGCLVKDMKIKSLEEIYLFSLPIKESEIIDFFLGASLKDEVLKIMPVQTQTRAGQRTRFKAFVAIGDYNGHVGLGVKCSKEVATAIHGAIILAKLSIVPVRRGYWGNKIGKPHTVPCKVTGRCGSALVHLIPVPRGTGIVSAPVPKKLLMMAGIDDCCTSAWGCTATLGNFAKATFDAISKTYSYLTPDLWKETVFTKSPDQEFTDHLIKAHARVSVQRTQA

SEQ ID NO: 785295 - protein, 262 aa, Homo sapiens
MPQKMSCSASKLWSCLLSRPGIPWSAPPGRAQPYYSASVPGHQHLHPSQSVWGGCKPRGFSSVWSFCAMVGLLILPHHPFGLPHTCPFPGITCVSSLSPFYCNGGLCPGKSRPDGCTGEPHSWMSAQPSNWEEQRLSSSLTPDTRPQWACTGPQKVSLGFAFLVSITVKEALIEQLQCTWSSASAGHLEIGTVMVPALKELMTWWGPVVFKEPRSHWAPKVELKDWGQLALSLPPLHCLPLKNPTPPHDGPLCSPCISVTVN

SEQ ID NO: 785296 - protein, 110 aa, Homo sapiens [sequence omitted]

SEQ ID NO: 785297 - protein, 180 aa, Homo sapiens
MLELNREVTGNTKSGEGGGEAASLAGFGWASGVNSQYREEVSRCRGQPYRVCEFFSPCVETGDCRNKDTRQKDKRQLGPGDNYHQDVETSSIPECQTVLLFIGYKTRGQGKECEPSPMIGKVTWVTCPLDRGPFPVWQPRWRERGETAYAIISAFQRLLILSVILLLVSRRQSQVYRVDT

SEQ ID NO: 785298 - protein, 249 aa, Homo sapiens
KYEEAYRLLFQSRGGGLVDIMYSWLHLASEEMVGGWSRWLISISCPLLPLSRTRAVYRQSHSKYIIQERMLELNREVTGNTKSGEGGGEAASLAGFGWASGVNSQYREEVSRCRGQPYRVCEFFSPCVETGDCRNKDTRQKDKRQLGPGDNYHQDVETSSIPECQTVLLFIGYKTRGQGKECEPSPMIGKVTWVTCPLDRGPFPVWQPRWRERGETAYAIISAFQRLLILSVILLLVSRRQSQVYRVDT

SEQ ID NO: 785299 - protein, 238 aa, Homo sapiens
LVRHGGGAQYDYMVTLASEEMVGGWSRWLISISCPLLPLSRTRAVYRQSHSKYIIQERMLELNREVTGNTKSGEGGGEAASLAGFGWASGVNSQYREEVSRCRGQPYRVCEFFSPCVETGDCRNKDTRQKDKRQLGPGDNYHQDVETSSIPECQTVLLFIGYKTRGQGKECEPSPMIGKVTWVTCPLDRGPFPVWQPRWRERGETAYAIISAFQRLLILSVILLLVSRRQSQVYRVDT

SEQ ID NO: 785300 - protein, 242 aa, Homo sapiens
VDLRRSYYARVLPENLSQMKWVVGGSLYGVDYGILCAHVVTILAGLTAVYRQSHSKYIIQERMLELNREVTGNTKSGEGGGEAASLAGFGWASGVNSQYREEVSRCRGQPYRVCEFFSPCVETGDCRNKDTRQKDKRQLGPGDNYHQDVETSSIPECQTVLLFIGYKTRGQGKECEPSPMIGKVTWVTCPLDRGPFPVWQPRWRERGETAYAIISAFQRLLILSVILLLVSRRQSQVYRVDT

SEQ ID NO: 785301 - protein, 159 aa, Homo sapiens
VTSPTSTLESRDSGIIATLTSYSENVERTKYAGESSKELGSGGNIKPWQSQKSSMDSCLYRVDENMTASTYSLNKIPERNLETVLSQSVQSIPLYLMPRPNSVAATSSAHLEDLAYLDEQRHTPLRTSLRMPRQSMGGARTQQDLRVRFAPYEAPDISL

SEQ ID NO: 785302 - protein, 72 aa, Homo sapiens
HLAVAQGASATAGHMSATAGHTPLPDPSPGSGTGSISHGRSHPTPPEPVPNGGTPGGKTATWSATIPPQTVS

SEQ ID NO: 785303 - protein, 110 aa, Homo sapiens
LALHPPHPSLTGCSWKAQEEHKDPTGDSSPTAFHPRLCSHHTSLFKNLHQRLGMVAHACNPSTLGGQGGWIMRSRDRDHPDQHGETLSLLKIQNLLGVVVHACNPSYSGG

SEQ ID NO: 785304 - protein, 54 aa, Homo sapiens
EIQKVIQDDYEHLYAHKLENVEETNKFLETYNPPILNQEDTESLNRPITSNKTE

SEQ ID NO: 785305 - protein, 100 aa, Homo sapiens
MTHEPPKMHRERCLPPPQAPVHEVTSVQNTEVNEMSVAGSSGIYRLHEPISLQYQSSTTEFAEQQHEIAEQHQEFAEQHHSSTTEYAEQHHEFAEKHHEF

SEQ ID NO: 785306 - protein, 102 aa, Homo sapiens
MNMEGLVMFQDLSIDFSQEEWECLDAAQKDLYRDVMMENYSSLVSLGLSIPKPDVISLLEQGKEPWMVSRDVLGGWCRVELESCFVTQAGLEFLSSSNLPTL

SEQ ID NO: 785307 - protein, 116 aa, Homo sapiens [sequence omitted]

SEQ ID NO: 785308 - protein, 123 aa, Homo sapiens
QPLPLGFKRFSCLSLLSSWDYRHAPPRPANFIFLVETGFHHVSQAGLELPTSGDLPASASQSAGITGMSHRAWLYLGFFACFVFGLHNTWDYAVFFSLSVWPISLGIVFSRFYKGEFYGMRIF

SEQ ID NO: 785309 - protein, 101 aa, Homo sapiens
HFSPCGSIRSKVDIQWTSSVVEMSKFSTVRLDVASAHAPESPPSHLLILLFQAPLDPAKKVLTIGTLTTTPPKPNICSDLSVSRQYLGLNILKRHPSFYQV

SEQ ID NO: 785310 - protein, 50 aa, Homo sapiens
QVNTHMHVGTGRYHRGPDEWHTPALHPHSVLGCPKNKHSIGDKWVQTYTS

SEQ ID NO: 785311 - protein, 158 aa, Homo sapiens
PPNPAINGSAPRDLFDMKPFEDALRVPPPPQSVSMAEQLRGEPWFHGKLSRREAEALLQLNGDFLVRESTTTPGQYVLTGLQSGQPKHLLLVDPEGVVRTKDHRFESVSHLISYHMDNHLPIISAGSELSTATCGAETVICPSALFQKMPSNPFHPIP

SEQ ID NO: 785312 - protein, 154 aa, Homo sapiens
PPNPAINGSAPRDLFDMKPFEDALRVPPPPQSVSMAEQLRGEPWFHGKLSRREAEALLQLNGDFLVRESTTTPGQYVLTGLQSGQPKHLLLVDPEGVVSVAEVWVRGGKKEGTVPYSVSLFLPSLLCRHSRWAAVYGPLLLFKVSGIFLQRLIP

SEQ ID NO: 785313 - protein, 127 aa, Homo sapiens
  misc_feature (93)..(93): Xaa can be any naturally occurring amino acid
MITVLENTIKEPQRQKYLEELKAKSHKLTLLSSELEQRASTIAYLTSQLDAAKKKLMSSSGTSDASPSGDPCWPATSQRPPKTSYPKRLAAAXKKSLSAPLHPEFEEVYRFGAESRKFFCGNSGCYA

SEQ ID NO: 785314 - protein, 77 aa, Homo sapiens
MKVLWMSAWQPQTWRTSCTAHRRTSLLETLVTSRAPPGDPCHLLTNLSQGGTITEQPCVYLKELNKMTLLLIAPLPK

SEQ ID NO: 785315 - protein, 173 aa, Homo sapiens
EAVSGKVSLPTGRPPRFPQAGSGVSAMRLPPGLSTPANKCLIRGLYPHWTVSSRRAWVVSCSSWCPSDQHKGRKKEKEERRKFQVRRDSFFPEFPASDFLLCPAARKKQNRRTSTGLGVVELGTYICASLWASPFSLGLPLLICTMEMSMPSLPTSPSLCESKAETHLGLCKL

SEQ ID NO: 785316 - protein, 54 aa, Homo sapiens
MAGSRAWKPHGSQPLAAAQFPRLHSELVAGREKAQQPGLRVRGLCRGRWSHASG

SEQ ID NO: 785317 - protein, 100 aa, Homo sapiens
NTANAIPIPSPDPHSGADTDTAKTASAIPSPSPDCPSSIPGNHEPFLNFRIFSPHKCDIKRTTQYAAFGGCLPTLRSSRRCVPVVLLLGGVPWYGHSSVC

SEQ ID NO: 785318 - protein, 292 aa, Homo sapiens
AAVWHHLFHLLLLPPSRHPPSTRFSPVVLAPWTRFLRQTVPLKVGDSLFWVHCSPTGSLPSAIMNIRNAQPDDLMNMQHCNLLCLPENYQMKYYLYHGLSWPQLSYIAEDEDGKIVGYVLAKMEEEPDDVPHGHITSLAVKRSHRRLGLAQKLMDQASRAMIENFNAKYVSLHVRKSNRPALHLYSNTLNFQISEVEPKYYADGEDAYAMKRDLSQMADELRRQMDLKKGGYVVLGSRENQETQGSTLSDSEEACQQKNPATEESGSDSKEPKESVESTNVQDSSESSDSTS

SEQ ID NO: 785319 - protein, 58 aa, Homo sapiens
PLFPFKSSHQSTECFADPEPAPIDHPVGAPEAQPGAISKGLWRGALDRTAPGDRCSIS

SEQ ID NO: 785320 - protein, 128 aa, Homo sapiens
CRMEAAEQNEAAGQGRRQRRVRNARSHSTCHCSMHPHRCYALGDLVISERQINSKTGFHPVVLGFVCYYLLICVFAKVVSREVNMNLSLENPGRESWHLGNPCLILVVGLGSRIQIHACLHVKSRCPG

SEQ ID NO: 785321 - protein, 86 aa, Homo sapiens
VPGLETADVCPGEGPSRMLRRRQQMFCSQADPSVPQPGLAFLSRPQGDVSRNHSQCGWAPCSARSLSAEQASSPEQRPSLLERWVV

SEQ ID NO: 785322 - protein, 81 aa, Homo sapiens
QGGGLQREENLQAVSDLDTPFHLLEEGMGLGTWLGAINHQSGSKTCHTRPGGLEPGWGSWSLRCGLVTDVLCRVSRKEPSP

SEQ ID NO: 785323 - protein, 143 aa, Homo sapiens
DVGGISLWTTALNQMPLCQAGMLCLRFPLLKLPYEGVVRQLFPANTPIPRLQAGTLRPLFYFIAVFNHVPTFDLVMPGHLPEILSHDLWIAQLAAAPILSCSDSGALQRTECSFLPGVKIGPVEVVCFLGSTLPTKNTWACRF

SEQ ID NO: 785324 - protein, 398 aa, Homo sapiens
RAVRGKGPRTRRSRRAGQCWPLAERWGSMKCLVTGGNVKVLGKAVHSLSRIGDELYLEPLEDGLSLRTVNSSRSAYACFLFAPLFFQQYQAATPGQDLLRCKILMKSFLSVFRSLAMLEKTVEKCCISLNGRSSRLVVQLHCKFGVRKTHNCPSRTVSPAGPSSTQLVPPLLRAPARVLGEAVSAFSPALAEVTLGIGLAQGHPAQYHEEEADSTAKAMVTEMCLGEEDFQQLQAQEGVAITFCLKEFRGLLNYAESENLNLSIHIDVQSRAANFTIKDSLLDGTLSWHTLRHDSHSQELGPQSVTSQWLSSGLTEQPNLDEFGNDDLTLHDRHGNTIGKEVRGAASSSGGASAKRPGPQRRKGALGGAPQNGCGQGEDTGAGERAPLIRDGDRVPQE

SEQ ID NO: 785325 - protein, 226 aa, Homo sapiens
MKSFLSVFRSLAMLEKTVEKCCISLNGRSSRLVVQLHCKFDSTAKAMVTEMCLGEEDFQQLQAQEGVAITFCLKEFRGLLSYAESENLNLSIHIDVQSRAANFTIKDSLLDGTLSWHTLRHDSHSQELGPQSVTSQWLSSGLTEQPNLDEFGNDDLTLTYRHGNTIGKEVRGAASSSGGASAKRPGPQRRKGALGGAPQNGCGQGEDTGAGERAPLIRDGDRVPQE

SEQ ID NO: 785326 - protein, 434 aa, Homo sapiens
EQKHPMAKDGVLTLANNVTPAKDVPPLSETEDDTSSKLNDMEIAQSTEKEYSEDSHLESLQDVGQSADTYFHDFTMKPSHGTGKRVHACRAEEDSVLEKLGEHGNHATVNLLTLSSDDSGIARPEEGRPVVSGTGNDITTPPNKELPPSPEKKTKPLATTQPAKTSTSKAKTQPTSLPKQPAPTTIGGLNKKPMSLASGLVPAAPPKRPAVASARPSILPSKDVKPKPIADAKAPEKRASPSKPASAPASRSGSKSTQTVAKPQQLLLLPQLAQAVGAPSTLLPKKPTAIKTEGKPAEVKKMTAKVMYQQTLSRHKEHLQQFHEENHHYSDGTAPAAGVVPSRVKATTQCPPRHIHKTIYIDKKHKLRHKPQTNQNTGSNGHGHQKTEPDPKNDRPKDKSEQERDTKGPQMTATENHKTWEECRRNKDTEAKQE

SEQ ID NO: 785327 - protein, 42 aa, Homo sapiens
MVTGRQRDSKSVSFKNIFLCEATILNPEQFFLLGFLLIFHTS

SEQ ID NO: 785328 - protein, 576 aa, Homo sapiens
MNGPALQPSSPSSAPSASPAAAPRGWSEFCELHAVAAARELARQYWLFAREHPQHAPLRAELVSLQFTDLFQRYFCREVRDGRAPGRDYRDTGRGPPAKAEASPEPGPGPAAPGLPKARSSEELAPPRPPGPCSFQHFRRSLRHIFRRRSAGELPAAHTAAAPGTPGEAAETPARPGLAKKFLPWSLAREPPPEALKEAVLRYSLADEASMDSGARWQRGRLALRRAPGPDGPDRVLELFDPPKSSRPKLQAACSSIQEVRRCTRLEMPDNLYTFVLKVKDRTDIIFEVGDEQQLNSWMAELSECTGRGRLESTEAEMHIPSALEPSTSSSPRGSTDSLNQGASPGGLLDPACQKTDHFLSCYPWFHGPISRVKAAQLVQLQGPDAHGVFLVRQSETRRGEYVLTFNFQGIAKHLRLSLTERGQCRVQHLHFPSVVDMLHHFQRSPIPLECGAACDVRLSSYVVVVSQPPGSCNTVLFPFSLPHWDSESLPHWGSELGLPHLSSSGCPRGLSPEGLPGRSSPPEQIFHLVPSPEELANSLQHLEHEPVNRARDSDYEMDSSSRSHLRAIDNQYTPL

SEQ ID NO: 785329 - protein, 161 aa, Homo sapiens
RATASARLPARTVAARGGDGGRCKVSPAAAARGRILPQLSSAGGGNDEALAIFRARVSCLSPARASRERGAGGRERTRPGRGPARPLGISRARGRATPWAGRAQSSCLSGEPAFARAPLLRGREGFCGERGGPVSSSARALRVTPSPKYCPAANSDGGVPG

SEQ ID NO: 785330 - protein, 309 aa, Homo sapiens
MPDNLYTFVLKVKDRTDIIFEVGDEQQLNSWMAELSECTGRGRLESTEAEMHIPSALEPSTSSSPRGSTDSLNQGASPGGLLDPACQKTDHFLSCYPWFHGPISRVKAAQLVQLQGPDAHGVFLVRQSETRRGEYVLTFNFQGIAKHLRLSLTERGQCRVQHLHFPSVVDMLHHFQRSPIPLECGAACDVRLSSYVVVVSQPPGSCNTVLFPFSLPHWDSESLPHWGSELGLPHLSSSGCPRGLSPEGLPGRSSPPEQIFHLVPSPEELANSLQHLEHEPVNRARDSDYEMDSSSRSHLRAIDNQYTPL

SEQ ID NO: 785331 - protein, 576 aa, Homo sapiens; identical to SEQ ID NO: 785328

SEQ ID NO: 785332 - protein, 110 aa, Homo sapiens
ERVGRPTRRHQPPCLANFVFLVETGFHHVGQAGLECLTSGDPPALASQSAGITGASHRAQPTPLLVPTLLGDFMDPKADLTLIQICSPFLRTPVFISSKSSSFLWKMNAN

SEQ ID NO: 785333 - protein, 327 aa, Homo sapiens
MNGPALQPSSPSSAPSASPAAAPRGWSEFCELHAVAAARELARQYWLFAREHPQHAPLRAELVSLQFTDLFQRYFCREVRDGRAPGRDYRDTGRGPPAKAEASPEPGPGPAAPGLPKARSSEELAPPRPPGPCSFQHFRRSLRHIFRRRSAGELPAAHTAAAPGTPGEAAETPARPGLAKKFLPWSLAREPPPEALKEAVLRYSLADEASMDSGARWQRGRLALRRAPGPDGPDRVLELFDPPKWPEPELSRLRFRLKQGLSCAHVPTRCNLAGASGIGHPYHQVAVADPGSDTWQAWVEIVALGLGGSQGLLWGVGEEPLGCAQPA

SEQ ID NO: 785334 - protein, 63 aa, Homo sapiens
MPDNLYTFVLKVKDRTDIIFEVGDEQQLNSWMAELSECTGRGLESTEAKTPKEQRPQKSKDPK

SEQ ID NO: 785335 - protein, 609 aa, Homo sapiens
CVMGPTPACPPAYSLSPPHPRVFQPGRTTWVSAMNGPALQPSSPSSAPSASPAAAPRGWSEFCELHAVAAARELARQYWLFAREHPQHAPLRAELVSLQFTDLFQRYFCREVRDGRAPGRDYRDTGRGPPAKAEASPEPGPGPAAPGLPKARSSEELAPPRPPGPCSFQHFRRSLRHIFRRRSAGELPAAHTAAAPGTPGEAAETPARPGLAKKFLPWSLAREPPPEALKEAVLRYSLADEASMDSGARWQRGRLALRRAPGPDGPDRVLELFDPPKSSRPKLQAACSSIQEVRRCTRLEMPDNLYTFVLKVKDRTDIIFEVGDEQQLNSWMAELSECTGRGRLESTEAEMHIPSALEPSTSSSPRGSTDSLNQGASPGGLLDPACQKTDHFLSCYPWFHGPISRVKAAQLVQLQGPDAHGVFLVRQSETRRGEYVLTFNFQGIAKHLRLSLTERGQCRVQHLHFPSVVDMLHHFQRSPIPLECGAACDVRLSSYVVVVSQPPGSCNTVLFPFSLPHWDSESLPHWGSELGLPHLSSSGCPRGLSPEGLPGRSSPPEQIFHLVPSPEELANSLQHLEHEPVNRARDSDYEMDSSSRSHLRAIDNQYTPL

SEQ ID NO: 785336 - protein, 80 aa, Homo sapiens
IARYELLCTSAEGGLSPEGLPGRSSPPEQIFHLVPSPEELANSLQHLEHEPVNRARDSDYEMDSSSRSHLRAIDNQYTPL

SEQ ID NO: 785337 - protein, 289 aa, Homo sapiens [sequence omitted]

SEQ ID NO: 785338 - protein, 120 aa, Homo sapiens
RGPREVPFPLQAQKCLLQMRGFSRLPVSAPGLSKVLVKSGRFATRPGVRTLGAALPCQPPAASAPSRLWVPTSTGRKAERGLQVPHGTDSQGIAVDKPVNGSRRQIGSRVERGGPGEAPL

SEQ ID NO: 785339 - protein, 197 aa, Homo sapiens
MFVSTNKSEDNLSYLRNPGVEESNGNSGQDSTTQTPKEEMINPGGCLGLGEKIYDDDSAIILELRIKKLTQNCSTTWKLNNLLLNDYWVHNKMKAEVKMFFETNENKDTTYQNLWDTFKAVCRGKFIALNAHKRKQERSKIDTLTSQLKELEKQEETHSKASRRQEITKIRAELKEIETHKNPSKKSMNPGAGFLKR

SEQ ID NO: 785340 - protein, 177 aa, Homo sapiens
MSWIFLYFRLYYPDTKRRNDYTLEAALVKVKKYMYDDSAIILELRIKKLTQNCSTTWKLNNLLLNDYWVHNKMKAEVKMFFETNENKDTTYQNLWDTFKAVCRGKFIALNAHKRKQERSKIDTLTSQLKELEKQEETHSKASRRQEITKIRAELKEIETHKNPSKKSMNPGAGFLKR

SEQ ID NO: 785341 - protein, 127 aa, Homo sapiens
TPVAPSDSTQITVLLSTCCVAFGKLLCSSSETSSMGQGVMVPSFWVFLRMDWAHCAWKVLAQGWATEALCYLLLFLRSEPFGMESWRKRTNAQGLRAGEEIMIMGWQRTSRHCQTLWALGELFSVGD

SEQ ID NO: 785342 - protein, 81 aa, Homo sapiens
ALGTMAEVESLAAFLREEGPVGRDSEMLLPPFLMPSAKSGTVIPSCLVSHRYPGGELILLQRPWFQTHLRALSRRGGAGPG

SEQ ID NO: 785343 - protein, 575 aa, Homo sapiens
MTSKKLVNSVAGCADDALAGLVACNPNLQLLQGHRVALRSDLDSLKGRVALLSGGGSGHEPAHAGFIGKGMLTGVIAGAVFTSPAVGSILAAIRAVAQAGTVGTLLIVKNYTGDRLNFGLAREQARAEGIPVEMVVIGDDSAFTVLKKAGRRGLCGTVLIHKVAGALAEAGVGLEEIAKQVNVVAKAMGTLGVSLSSCSVPGSKPTFELSADEVELGLGIHGEAGVRRIKMATADEIVKLMLDHMTNTTNASHVPVQPGSSVVMMVNNLGGLSFLELGIIADATVRSLEGRGVKIARALVGTFMSALEMPGISLTLLLVDEPLLKLIDAETTAAAWPNVAAVSITGRKRSRVAPAEPQEAPDSTAAGGSASKRMALVLERVCSTLLGLEEHLNALDRAAGDGDCGTTHSRAARAIQEWLKEGPPPASPAQLLSKLSVLLLEKMGGSSGALYGLFLTAAAQPLKAKTSLPAWSAAMDAGLEAMQKYGKAAPGDRTMLDSLWAAGQELQAWKSPGADLLQVLTKAVKSAEAAAEATKNMEAGAGRASYISSARLEQPDPGAVAAAAILRAILEVLQS

SEQ ID NO: 785344 - protein, 590 aa, Homo sapiens
  misc_feature (297)..(297): Xaa can be any naturally occurring amino acid
MTSKKLVNSVAGCADDALAGLVACNPNLQLLQGHRVALRSDLDSLKGRVALLSGGGSGHEPAHAGFIGKGMLTGVIAGAVFTSPAVGSILAAIRAVAQAGTVGTLLIVKNYTGDRLNFGLAREQARAEGIPVEMVVIGDDSAFTVLKKAGRRGLCGTVLIHKVAGALAEAGVGLEEIAKQVNVVAKAMGTLGVSLSSCSVPGSKPTFELSADEVELGLGIHGEAGVRRIKMATADEIVKLMLDHMTNTTNASHVPVQPGSSVVMMVNNLGGLSFLELGIIADATVRSLEGRGSERFXPVALGLEPTLSIVPGQPWEANCPLSQFLSFISLPSRCDEPLLKLIDAETTAAAWPNVAAVSITGRKRSRVAPAEPQEAPDSTAAGGSASKRMALVLERVCSTLLGLEEHLNALDRAAGDGDCGTTHSRAARAIQEWLKEGPPPASPAQLLSKLSVLLLEKMGGSSGALYGLFLTAAAQPLKAKTSLPAWSAAMDAGLEAMQKYGKAAPGDRTMLDSLWAAGQELQAWKSPGADLLQVLTKAVKSAEAAAEATKNMEAGAGRASYISSARLEQPDPGAVAAAAILRAILEVLQS

SEQ ID NO: 785345 - protein, 575 aa, Homo sapiens; identical to SEQ ID NO: 785343

SEQ ID NO: 785346 - protein, 629 aa, Homo sapiens
MAQSRLTTTSASQVQAILLPQPPEELELQTSKKLVNSVAGCADDALAGLVACNPNLQLLQGHRVALRSDLDSLKGRVALLSGGGSGHEPAHAGFIGKGMLTGVIAGAVFTSPAVGSILAAIRAVAQAGTVGTLLIVKNYTGDRLNFGLAREQARAEGIPVEMVVIGDDSAFTVLKKAGRRGLCGTVLIHKVAGALAEAGVGLEEIAKQVNVVAKAMGTLGVSLSSCSVPGSKPTFELSADEVELGLGIHGEAGVRRIKVGGPSGTGRPKAKAPQMQLIPGSLCQMATADEIVKLMLDHMTNTTNASHVPVQPGSSVVMMVNNLGGLSFLELGIIADATVRSLEGRGVKIARALVGTFMSALEMPGISLTLLLVDEPLLKLIDAETTAAAWPNVAAVSITGRKRSRVAPAEPQEAPDSTAAGGSASKRMALVLERVCSTLLGLEEHLNALDRAAGDGDCGTTHSRAARAIQEWLKEGPPPASPAQLLSKLSVLLLEKMGGSSGALYGLFLTAAAQPLKAKTSLPAWSAAMDAGLEAMQKYGKAAPGDRTMLDSLWAAGQELQAWKSPGADLLQVLTKAVKSAEAAAEATKNMEAGAGRASYISSARLEQPDPGAVAAAAILRAILEVLQS

SEQ ID NO: 785347 - protein, 345 aa, Homo sapiens [sequence omitted]

SEQ ID NO: 785348 - protein, 272 aa, Homo sapiens [sequence omitted]

SEQ ID NO: 785349 - protein, 547 aa, Homo sapiens
MTSKKLVNSVAGCADDALAGLVACNPNLQLLQGHRVALRSDLDSLKGRVALLSGGGSGHEPAHAGFIGKGMLTGVIAGAVFTSPAVGSILAAIRAVAQAGTVGTLLIVKNYTGDRLNFGLAREQARAEGIPVEMVVIGDDSAFTVLKKAGRRGLCGTVLIHKVAGALAEAGVGLEEIAKQVNVVAKAMGTLGVSLSSCSVPGSKPTFELSADEVELGLGIHGEAGVRRIKMATADEIVKLMLDHMTNTTNASHVPVQPGSSVVMMVNNLGGLSFLELGIIADATVRSLEGRGVKIARALVGTFMSALEMPGISLTLLLVDEPLLKLIDAETTAAAWPNVAAVSITGRKRSRVAPAEPQEAPDSTAAGGSASKRMALVLERVCSTLLGLEEHLNALDRAAGDGDCGTTHSRAARAIQEWLKEGPPPASPAQLLSKLSVLLLEKMGGSSGALYGLFLTAAAQPLKAKTSLPAWSAAMDAGLEAMQKYGKAAPGDRTMLDSLWAAGQELQAWKSPGADLLQVLTKAVKVSEAGPSHLGRQASSQQTPVSM

SEQ ID NO: 785350 - protein, 242 aa, Homo sapiens
MTSKKLVNSVAGCADDALAGLVACNPNLQLLQGHRVALRSDLDSLKGRVALLSGGGSGHEPAHAGFIGKGMLTGVIAGAVFTSPAVGSILAAIRAVAQAGTVGTLLIVKNYTGDRLNFGLAREQARAEGIPVEMVVIGDDSAFTVLKKAGRRGLCGTVLIHKVAGALAEAGVGLEEIAKQVNVVAKAMGTLGVSLSSCSVPGSKPTFELSADEVELGLGKLVAIHPSPACSLALDFAHLAYP

SEQ ID NO: 785351 - protein, 177 aa, Homo sapiens
MQDRLAGRQQSQILYKGAGASKLRKKPQPEVHLARTWLSCRFPPGHQTSKKLVNSVAGCADDALAGLVACNPNLQLLQGHRVALRSDLDSLKGRVALLSGGGSGHEPAHAGFIGKGMLMGLIARQLVYNPSPRQEEQNHIGRPSSARGANARHKWRTHTNTATTKMSESDKIQNWNQ

SEQ ID NO: 785352 - protein, 575 aa, Homo sapiens; identical to SEQ ID NO: 785343

SEQ ID NO: 785353 - protein, 647 aa, Homo sapiens
MQDRLAGRQQSQILYKGAGASKLRKKPQPEVHLARTWLSCRFPPGHQTSKKLVNSVAGCADDALAGLVACNPNLQLLQGHRVALRSDLDSLKGRVALLSGGGSGHEPAHAGFIGKGMLTGVIAGAVFTSPAVGSILAAIRAVAQAGTVGTLLIVKNYTGDRLNFGLAREQARAEGIPVEMVVIGDDSAFTVLKKAGRRGLCGTVLIHKVAGALAEAGVGLEEIAKQVNVVAKAMGTLGVSLSSCSVPGSKPTFELSADEVELGLGIHGEAGVRRIKVGGPSGTGRPKAKAPQMQLIPGSLCQMATADEIVKLMLDHMTNTTNASHVPVQPGSSVVMMVNNLGGLSFLELGIIADATVRSLEGRGVKIARALVGTFMSALEMPGISLTLLLVDEPLLKLIDAETTAAAWPNVAAVSITGRKRSRVAPAEPQEAPDSTAAGGSASKRMALVLERVCSTLLGLEEHLNALDRAAGDGDCGTTHSRAARAIQEWLKEGPPPASPAQLLSKLSVLLLEKMGGSSGALYGLFLTAAAQPLKAKTSLPAWSAAMDAGLEAMQKYGKAAPGDRTMLDSLWAAGQELQAWKSPGADLLQVLTKAVKSAEAAAEATKNMEAGAGRASYISSARLEQPDPGAVAAAAILRAILEVLQS

SEQ ID NO: 785354 - protein, 345 aa, Homo sapiens [sequence omitted]

SEQ ID NO: 785355 - protein, 557 aa, Homo sapiens
MTSKKLVNSVAGCADDALAGLVACNPNLQLLQGHRVALRSDLDSLKGRVALLSGGGSGHEPAHAGFIGKGMLTGVIAGAVFTSPAVGSILAAIRAVAQAGTVGTLLIVKNYTGDRLNFGLAREQARAEGIPVEMVVIGDDSAFTVLKKAGRRGLCGTVLIHKVAGALAEAGVGLEEIAKQVNVVAKAMGTLGVSLSSCSVPGSKPTFELSADEVELGLGIHGEAGVRRIKMATADEIVKLMLDHMTNTTNASHVPVQPGSSVVMMVNNLGGLSFLELGIIADATVRSLEGRGVKIARALVGTFMSALEMPGISLTLLLVDEPLLKLIDAETTAAAWPNVAAVSITGRKRSRVAPAEPQEAPDSTAAGGSASKRMALVLERVCSTLLGLEEHLNALDRAAGDGELWHHPSPAQLLSKLSVLLLEKMGGSSGALYGLFLTAAAQPLKAKTSLPAWSAAMDAGLEAMQKYGKAAPGDRTMLDSLWAAGQELQAWKSPGADLLQVLTKAVKSAEAAAEATKNMEAGAGRASYISSARLEQPDPGAVAAAAILRAILEVLQS

SEQ ID NO: 785356 - protein, 202 aa, Homo sapiens [sequence omitted]

SEQ ID NO: 785357 - protein, 259 aa, Homo sapiens
MTSKKLVNSVAGCADDALAGLVACNPNLQLLQGHRVALRSDLDSLKGRVALLSGGGSGHEPAHAGFIGKGMLTGVIAGAVFTSPAVGSILAAIRAVAQAGTVGTLLIVKNYTGDRLNFGLAREQARAEGIPVEMVVIGDDSAFTVLKKAGRRGLCGTVLIHKVAGALAEAGVGLEEIAKQVNVVAKAMGTLGVSLSSCSVPGSKPTFELSADEVELGLGIHGEAGVRRIKMATADEIVKLMLDHMTNTVLISIRYRLDL

SEQ ID NO: 785358 - protein, 82 aa, Homo sapiens
HLPINPSETLKIKPFSRLATNPLRFMQEQGRDCPPRALLAGSDLCDSEKLSPGSHSYMKPIHICPTGRCGIRLKTSIKETLE

SEQ ID NO: 785359 - protein, 110 aa, Homo sapiens
MSQRSRLVQEGNWRDGPQRGQGFPSQRGTGTGLRSCCPGKAEGSRVLVSETTCRIEARQWEELPQTTRAGAPQSEQGCCPTPTPTLRLPGWGGQPWRRAVAAAWEKMNLS

SEQ ID NO: 785360 - protein, 171 aa, Homo sapiens
SGLRAQGCAGSQKSSGVRAESADGLTSAAPIGSLARRRPSLARARPIGARGRTRGLGGGGAGPARRGAGSGGSGRDVTGGGRRRPPAAGLQANAPGSGRSRPASRLRRFLLLCLLLLVVLLFLLLLGLPQPLRPCLPRNFPRKFRNSATGLPSGARLPPREPRGSSEGARP

SEQ ID NO: 785361 - protein, 142 aa, Homo sapiens
ESHDHCPVIDRSRGEKSWGFRCHNLTVIQHVTDAKRLPRPPLAASGEICRSEQGRGRQPPCSALTKAHRGHGMSRALISQCQKRVARMRGGSGGQHMGKTPEDAGLEERKSRNIRASFKNLKATWGITVLSFLEVTKQRWAM

SEQ ID NO: 785362 - protein, 204 aa, Homo sapiens
EGCYEEYRGRSPDAHSGGRNSSSNSYGQSHHYGGEGRYEEYRGRSHEARSGGRSTDAHSRGRSDDAYSGGHDSSSWSDCCGGGGRYEEYQGRSLDANSGGCSPEAYSGGHDNSSWSDRYGVGGHYEENRGHSLDANSGGRSPDTHSGGHSSSSNSYGQSHRYGGEGRYEYRGRSHDAHSGGCSADAYSGGHDSSSQSNRYGGGG

SEQ ID NO: 785363 - protein, 35 aa, Homo sapiens
GGPGRRPLPGLEVQMRSFFLWAPLIREAVSDSHWR

SEQ ID NO: 785364 - protein, 78 aa, Homo sapiens
SSSEGIISSVVSKSQAPLSPSPIFPAVVSPSHSFIHSFISYLQEAARRPTDTRQSRPCSSGGTWGDRESYLLGLISIT

SEQ ID NO: 785365 - protein, 133 aa, Homo sapiens
GRSWFSAGPGGGGAVGGAPDLSPIWGVARVRNWLEDGVCVRIWERGKRCRKHAGRFILQLWEWWTRAAALREARGRGGPPQGWSRLWSCQLPLSKAQGRHSLSPGRAWVWGPETRSPVGAVECTSSRRSKPAP

SEQ ID NO: 785366 - protein, 133 aa, Homo sapiens; identical to SEQ ID NO: 785365

SEQ ID NO: 785367 - protein, 258 aa, Homo sapiens
GETCSRRLSAERPWRCFSESGVAWQPAEDEGSAGAAPVVVAAMLGAWAVEGTAVALLRLLLLLLPPAIRGPGLGVAGVAGCGGGRAARERHLGGQRGWRGACGRALGSTSARTLWKAGWCRASDYGMKLPILRSNPEDQILYQTERYNEETFGYEVPIKEEGDYVLVLKFAEVYFAQSQQKVFDVRLNGHVVVKDLDIFDRVGHSTAHDEIIPMSIRKGKLSVQGEVSTFHRETSTIEFVKGYYDNPKVCALYIMAGT

SEQ ID NO: 785368 - protein, 65 aa, Homo sapiens
MPKRKAEGDAKGDKAKVKDEPQRRSARLSAKPAPPKPEPTPKRPCKEGVEKVPKGKKGKADGRIN

SEQ ID NO: 785369 - protein, 156 aa, Homo sapiens
VHAQCLELKAKGLSLGFLEKKHDEASSLSHPDLTSVIHLTRSVQLWPAMEYLAMLWRYKVTADFMAQACLRRCSKNQQPQINEEISHLISFCLYHTPVTPQELRDLWSLLHHQKVKITIRHKPPLHYELVRFSLTDWLGNILFILKIPYWKPQVFL

SEQ ID NO: 785370 - protein, 116 aa, Homo sapiens
TQTSTFPWVARSNSFILGEPSAWRPSLKLDRIPLSGGGGGSIHPGRASTPRMFSVQSRLFPSTDTPSSLFWSLAKSTSCCDSTPPRGKGWMPESQGSGSKRRKGWGCRPQLRGYQE

SEQ ID NO: 785371 - protein, 251 aa, Homo sapiens
MAVGKNKRLTKGGKKGAKKKVVDPFSKKDWYDVKAPAMFNIRNIGKTLVTRTQGTKIASDGLKGRVFEVSLADLQNDEVAFRKFKLITEDVQGKNCLTNFHGMDLTRDKMCSMVKKWQTMIEAHVDVKTTDGYLLRLFCVGFTKKRNNQIRKTSYAQHQQVRQIRKKMMEIMTREVQTNDLKEVVNKLIPDSIGKDIEKACQSIYPLHDVFVRKVKMLKKAQFELGKLMELHGEGSSSGKAAGDETGAKVE

SEQ ID NO: 785372 - protein, 479 aa, Homo sapiens
ISAWFGPPASTPAFTMSIRVTQKSYKVSTSGPRAFSSRSYTSGPGSRISSSSFSRVGSSNFRGGLGGGYGGASGMGGITAVTVNQSLLSPLVLEVDPNIQAVRTQEKEQIKTLNNKFASFIDKVRFLEQQNKMLETKWSLLQQQKTARSNMDNMFESYINNLRRQLETLGQEKLKLEAELGNMQGLVEDFKNKYEDEINKRTEMENEFVLIKKDVDEAYMNKVELESRLEGLTDEINFLRQLYEEEIRELQSQISDTSVVLSMDNSRSLDMDSIIAEVKAQYEDIANRSRAEAESMYQIKYEELQSLAGKHGDDLRRTKTEISEMNRNISRLQAEIEGLKGQRASLEAAIADAEQRGELAIKDANAKLSELEAALQRAKQDMSRQLREYQELMNVKLVLDIEIATYRKLLEGEESRLESGMQNMSIHTKTTSGYAGGLSSAYGGLTSPSLSYGLGSSFGSGAGSSSFSRTSSSRAVVVK

SEQ ID NO: 785373 - protein, 55 aa, Homo sapiens
MSGRRGIALAVSYTSMGESGRGSAQGIEKRVPDLSFLFSKRMINGWQTQIVWSHF

SEQ ID NO: 785374 - protein, 78 aa, Homo sapiens
SGHTLQVLTLASLVVAPPDPPVSCSPSQGKGFIPEVPFMPLFSERMNLSWSDMAVIWIQFPVSLLQSPNCCLVVGRGF

SEQ ID NO: 785375 - protein, 109 aa, Homo sapiens [sequence omitted]

SEQ ID NO: 785376 - protein, 240 aa, Homo sapiens
GEGAGENWEPRVLPYHPAQPGQAAKKAVRTRYISTELGIRQRLLVAVLTSQTTLPTLAVAVNRTLGHRLELCGVPDGRTGACRAPPGMAVVTLGEELTHLDTCTWLLRHLLEQHGDDFDWFFLVPDTTYTEAHGWHCLTGHLSLASAAHLYLGRPQDFIGGEPTPVRTARRLWGACLSRMLLQQLLPPPGRLANDIVSARPDEWLGRCILDATGVGCTGDHEGVHYSHLELSPGEPVQKG

SEQ ID NO: 785377 - protein, 110 aa, Homo sapiens
MLCTSGRSTKIQLPKFGAWKIGFIGGRSLGCATTPQRGVYITRTPLGCIFGQRSLQGGLQKLPFSLDHPCSLVTCEGNWSVSTSALCLINMRSPSSGQRLSPPATQMEGK

SEQ ID NO: 785378 - protein, 110 aa, Homo sapiens; identical to SEQ ID NO: 785377

SEQ ID NO: 785379 - protein, 68 aa, Homo sapiens
SGQGVSHGVAEGCPQVKVAVMGWLKGVPMSVWAHSAPLGFLFECQGHERSSDDTMSGYLLQVGGKRPL

SEQ ID NO: 785380 - protein, 68 aa, Homo sapiens; identical to SEQ ID NO: 785379

SEQ ID NO: 785381 - protein, 32 aa, Homo sapiens
MQASVSRLLPLPSALYVLGDQTVTTSRVTGSS

SEQ ID NO: 785382 - protein, 183 aa, Homo sapiens
LAGLIYKAQFNNDRSQLASVPKILRELVPENLTRLMSSEEWKKSILLAYDKHKDKTVEEAKVAFLKWICRWPTFGSAFFEVKQTSEPSYPDVILIAINRHGVLLIHPKTKDLLTTYPFTKISSWSSGSTYFHMALGSLGRGSRLLCETSLGYKMDDLLTSYVQQLLSAMNKQRGSKAPALAST

SEQ ID NO: 785383 - protein, 132 aa, Homo sapiens
HRAQAGPADLERAWVHPQDQQPRWQGQAGPPAPLAHSKEGGRPSSSRASRNDGPNGRSPPSLSPCPALLVAEEEKVVPESRTPTCPLHPQPLTPPSPVQGYKMDDLLTSYVQQLLSAMNKQRGSKAPALAST

SEQ ID NO: 785384 - protein, 130 aa, Homo sapiens; identical to SEQ ID NO: 742470

SEQ ID NO: 785385 - protein, 102 aa, Homo sapiens
MVYKHSKCRDRSSLRQLLSPKLLKTGTSTGCFHCIILIKAGDRASQSRFGTAAACAQEWEDCCLLQASYHLPLSSALVVSTHHPMDHDPPSCDLFLSWLLVS

SEQ ID NO: 785386 - protein, 231 aa, Homo sapiens
SGGGAVAVTAEKMAVLAPLIALVYSVPRLSRWLAQPYYLLSALLSAAFLLVRKLPPLCHGLPTQREDGNPCDFDWREVEILMFLSAIVMMKNRRSITVEQHIGNIFMFSKVANTILFFRLDIRMGLLYITLCIVFLMTCKPPLYMGPEYIKYFNDKTIDEELERDKRVTWIVEFFANWSNDCQSFAPIYADLSLKYNCTGLNFGKVDVGRYTDVSTRYKVSTSPLTKQSLP

SEQ ID NO: 785387 - protein, 42 aa, Homo sapiens
DDYQVMDEFLYNLSSDDFNDKWIASNWPSKILGQIELVQQQH

SEQ ID NO: 785388 - protein, 204 aa, Homo sapiens
LPTKCMQLCQAGGYRAEALQAAGTPPSPNIAPRSRHVLSRALHTHVHSQAHIPTVTVSLGTLSACPWDLVLMLDRKTPGNPRPFRSPPRKVTSSTPLRGQRCSRSAGITGMSHRARPALRFLKSGSGMPLASFILFSVTSGQRCPRSVTHSNSRSRLYSMPRAGSKRRIAVEQSLLLYAQAELIAPIDLLQDSLQRITHVRPGN

SEQ ID NO: 785389 - protein, 147 aa, Homo sapiens
ISKPGRGDGRFCHSEVSQASEEHTEMQKPDERKMLEHNIQTTYEPQRGKGTPSAVGLPSLNPEIKFSVNQRECDGTNRHHEPRYGTASARTHDAFCRILAMKAKSEPNPEEIIRIIQYTLWDISKDSSGPGVVAHACNPSTLGGQGE

SEQ ID NO: 785390 - protein, 227 aa, Homo sapiens
KAGSPVNGQKQGHAHATPKIPLNLHLHHDPFRSLQEPRHQPPTMGSKERFHWQSHNVKQSGVDDMVLLPQITEDAIAANLRKRFMDDYIFTYIGSVLISVNPFKQMPYFTDREIDLYQGAAQYENPPHIYALTDNMYRNMLIDCENQCVIISGESGAGKTVAAKYIMGYISKVSGGGEKVQHVKDIILQSNPLLEAFGNAKTVRNNNSSRFGKYFEIQFSRGGEPDG

SEQ ID NO: 785391 - protein, 254 aa, Homo sapiens
KAGSPVNGQKQGHAHATPKIPLNLHLHHDPFRSLQEPRHQPPTMGSKERFHWQSHNVKQSGVDDMVLLPQITEDAIAANLRKRFMDDYIFTYIGSVLISVNPFKQMPYFTDREIDLYQGAVRLGLGGRHSPQILAPSPGLRPDLPCQAQYENPPHIYALTDNMYRNMLIDCENQCVIISGESGAGKTVAAKYIMGYISKVSGGGEKVQHVKDIILQSNPLLEAFGNAKTVRNNNSSRFGKYFEIQFSRGGEPDG

SEQ ID NO: 785392 - protein, 178 aa, Homo sapiens
KAGSPVNGQKQGHAHATPKIPLNLHLHHDPFRSLQEPRHQPPTMGSKERFHWQSHNVKQSGVDDMVLLPQITEDAIAANLRKRFMDDYIFTYIGSVLISVNPFKQMPYFTDREIDLYQGAAQYENPPHIYALTDNMYRNMLIDCENQCVIIRYGQSWGATDPAARAPAETSPPPGRFA

SEQ ID NO: 785393 - protein, 57 aa, Homo sapiens
SLEDLVPECSEASCGHPRVPMLSGRCAGCVRVNQILFADGSVWSFLEILLCPEREIL

SEQ ID NO: 785394 - protein, 141 aa, Homo sapiens
LLQLRCCAVGKGEGFVNPGVRFCLPEAAAVRRPPGEATVIMSDQEAKPSTEDLGDKKEGEYIKLKVIGQDSSEIHFKVKMTTHLKKLKESYCQRQGVPMNSFRFLFEGQRIADNHTPKELGMEEEDVIEVYQEQMGGHSTV

SEQ ID NO: 785395 - protein, 131 aa, Homo sapiens
MLRNAQTALHEAACSTTLLTLLDPGHCDLPIFPLHPGLRWRGAVYSCSTGMGGGSCGREGEKDTGTAPVQGRLPLTLQLAVGWLPRTRLSGSNPAFALVTFNKFLNLSDLFLQGRSSYNLCDRLRLNESLI

SEQ ID NO: 785396 - protein, 151 aa, Homo sapiens
LQMGLGFRPGHRIQPSRQCQAGGTSDYGEKSRYELWDQAPRAPRGADHPPTLGIGTRRPAGTQAHKHTCAHTHHTEVFISMQCAPVWGPTTHTHTHTRHHPGPQPAHTYSLLWGHTPSHTRPGRQALSPGHAAGTSGLPGRPPPSQTRLVT

SEQ ID NO: 785397 - protein, 263 aa, Homo sapiens
VGPGRLLRLGEALRSRPDPSGGCRLQPALVGETEMSEKENNFPPLPKFIPVKPCFYQNFSDEIPVEHQVLVKRIYRLWMFYCATLGVNLIACLAWWIGGGSGTNFGLAFVWLLLFTPCGYVCWFRPVYKAFRADSSFNFMAFFFIFGAQFVLTVIQAIGFSGWGACGWLSAIGFFQYSPGAAVVMLLPAIMFSVSAAMMAIAIMKVHRIYRGAGGSFQKAQTEWNTGTWRNPPSREAQYNNFSGNSLPEYPTVPSYPGSGQWP

SEQ ID NO: 785398 - protein, 247 aa, Homo sapiens
VGPGRLLRLGEALRSRPDPSEKENNFPPLPKFIPVKPCFYQNFSDEIPVEHQVLVKRIYRLWMFYCATLGVNLIACLAWWIGGGSGTNFGLAFVWLLLFTPCGYVCWFRPVYKAFRADSSFNFMAFFFIFGAQFVLTVIQAIGFSGWGACGWLSAIGFFQYSPGAAVVMLLPAIMFSVSAAMMAIAIMKVHRIYRGAGGSFQKAQTEWNTGTWRNPPSREAQYNNFSGNSLPEYPTVPSYPGSGQWP

SEQ ID NO: 785399 - protein, 229 aa, Homo sapiens
VGPGRLLRLGEALRSRPDPSGGCRLQPALVGETEMSEKENNFPPLPKFIPVKPCFYQNFSDEIPVEHQVLVKRIYRLWMFYCATLGVNLIACLAWWIGGGSGTNFGLAFVWLLLFTPCGYVCWFRPVYKAFRGWLSAIGFFQYSPGAAVVMLLPAIMFSVSAAMMAIAIMKVHRIYRGAGGSFQKAQTEWNTGTWRNPPSREAQYNNFSGNSLPEYPTVPSYPGSGQWP

SEQ ID NO: 785400 - protein, 263 aa, Homo sapiens; identical to SEQ ID NO: 785397

SEQ ID NO: 785401 - protein, 99 aa, Homo sapiens
NKCYCCKQKVSGLAPPLRAVTLTVRYVASLLKSASPRTHLERRATLDAPPLRAVTLVRVLTFGPPEREISVCLPEVWWQNCVEAAGASVRQWGSQHFLG

SEQ ID NO: 785402 - protein, 120 aa, Homo sapiens
MESIGQKLLHLIAAKRKENTYTDSVILSFFYSVEVDNRSLLLTKRSVLVNIAMNPNSPPSVYLSFIIKSTFFPTSHCLLASALSTPLHSQAPQKSCLLSDLLLLKPLITSLLPNPMDALF

SEQ ID NO: 785403 - protein, 89 aa, Homo sapiens
ALASGQHNAGRIRKARASVDDPLGRSWEKSLFPRADASLRVSFEPQKAQTLTRSFLPPRPCRTPPFLGGEAREASGEARPPGAKSSSER

SEQ ID NO: 785404 - protein, 401 aa, Homo sapiens
  misc_feature (5)..(5): Xaa can be any naturally occurring amino acid
  misc_feature (11)..(12): Xaa can be any naturally occurring amino acid
  misc_feature (17)..(17): Xaa can be any naturally occurring amino acid
  misc_feature (20)..(20): Xaa can be any naturally occurring amino acid
  misc_feature (23)..(25): Xaa can be any naturally occurring amino acid
  misc_feature (31)..(31): Xaa can be any naturally occurring amino acid
  misc_feature (33)..(33): Xaa can be any naturally occurring amino acid
  misc_feature (36)..(36): Xaa can be any naturally occurring amino acid
  misc_feature (40)..(40): Xaa can be any naturally occurring amino acid
  misc_feature (44)..(44): Xaa can be any naturally occurring amino acid
  misc_feature (50)..(50): Xaa can be any naturally occurring amino acid
  misc_feature (52)..(53): Xaa can be any naturally occurring amino acid
  misc_feature (56)..(56): Xaa can be any naturally occurring amino acid
  misc_feature (58)..(59): Xaa can be any naturally occurring amino acid
  misc_feature (61)..(61): Xaa can be any naturally occurring amino acid
  misc_feature (63)..(63): Xaa can be any naturally occurring amino acid
  misc_feature (65)..(65): Xaa can be any naturally occurring amino acid
  misc_feature (67)..(68): Xaa can be any naturally occurring amino acid
  misc_feature (71)..(72): Xaa can be any naturally occurring amino acid
  misc_feature (76)..(76): Xaa can be any naturally occurring amino acid
  misc_feature (79)..(79): Xaa can be any naturally occurring amino acid
  misc_feature (81)..(81): Xaa can be any naturally occurring amino acid
  misc_feature (84)..(84): Xaa can be any naturally occurring amino acid
  misc_feature (86)..(86): Xaa can be any naturally occurring amino acid
  misc_feature (89)..(89): Xaa can be any naturally occurring amino acid
  misc_feature (94)..(94): Xaa can be any naturally occurring amino acid
  misc_feature (99)..(99): Xaa can be any naturally occurring amino acid
  misc_feature (103)..(103): Xaa can be any naturally occurring amino acid
  misc_feature (105)..(105): Xaa can be any naturally occurring amino acid
  misc_feature (107)..(107): Xaa can be any naturally occurring amino acid
  misc_feature (112)..(112): Xaa can be any naturally occurring amino acid
  misc_feature (115)..(117): Xaa can be any naturally occurring amino acid
  misc_feature (130)..(132): Xaa can be any naturally occurring amino acid
  misc_feature (145)..(145): Xaa can be any naturally occurring amino acid
MEKTXRNRKTXXTEEKXKKXTLXXXGAAGKXLXMPXGCVXLGEXKKKKKXKXXNEXKXXGXEXKXEXXSEXXRAKXKKXGXKQXCXKYXKKEGXKERKXAKKXKXIXKKEKXPKXXXQEEVFVNRKEYFXXXEQAKGREEYDWIXDQGYYSERDTSNVVRQVLEAVAYLHSLKIVHRNLKLENLVYYNRLKNSKIVISDFHLAKLENGLIKEPCGTPEYLAPEVVGRQRYGRPVDCWAIGVIMYILLSGNPPFYEEVEEDDYENHDKNLFRKILAGDYEFDSPYWDSSISRGATQSMGSRGLEWVVERERRDRCRRGHLRMRWMSGNAASDKNIKDGVCAQIETELCQCQVEEGCPSDYTLMKRLRAPEQSSTAAAQSASATDTCTPGAADRSATQPQMEV

SEQ ID NO: 785405 - protein, 127 aa, Homo sapiens
MEGTRANLTGWDPQKGLIVRVCVSSAVGCGPWSQPLVVSSHDHAGQKGPPHSRTSWVPVVLGVLTALVTAAALALILLQKRPKETWFGQGFDSVISRGEPAIHFWAARSFNQERPKCIEATLESLGI

SEQ ID NO: 785406 - protein, 80 aa, Homo sapiens
RSLQLPPPQGSLWLHEAPLEKAQKGREVSRPLDCNLKRGHHCPLAPLPPSRTPGPTSGPGPTRSKTKTPPSEAPRNARCR

SEQ ID NO: 785407 - protein, 104 aa, Homo sapiens
MTSAHRLWRVFQIYHILRFCDSQKAGHEKIPSSVYIYGSEKTRGILASKTDIHHKIMVKYSLKQVQSEKRKESQKWGWSFNCIKPEDYLPPNFQEANKVPDCLN

SEQ ID NO: 785408 - protein, 101 aa, Homo sapiens
ASIILIPKPGRDTTHTHTHIHTNPENRQKTRMPSLTTRIQHSVGSSGQGNQARERNKGYSSRKRGSQIVCVADDMIVYLENPIISAQNLLMLISNFSKVSG

SEQ ID NO: 785409 - protein, 236 aa, Homo sapiens
EVGLGDEGLYTCSFQTRHQPYTTQVYLIVHVPARIVNISSPVTVNEGGNVNLLCLAVGRPEPTVTWRQLRDGFTSEGEILEISDIQRGQAGEYECVTHNGVNSAPDSRRVLVTVNYPPTITDVTSARTALGRAALLRCEAMAVPPADFQWYKDDRLLSSGTAEGLKVQTERTRSMLLFANVSARHYGNYTCRAANRLGASSASMRLLRPGSLENSAPRPPGLLALLSALGWLWWRM

SEQ ID NO: 785410 - protein, 97 aa, Homo sapiens
GTEGLLQEARDTPDQEGSTYEQIPACWGGPARAPHPGASPTYSPWVHGYKRISGTPELSEPGNTYEQIPATKSKETGRTHKPDKLRRLFFTYRKHKF

SEQ ID NO: 785411 - protein, 154 aa, Homo sapiens
MGNACWELYCLEHGIQPDGQMPSDKTIGGGDDSFTTFFCETGAGKHVPRAVSVDLEPTVIDEIRNGPYRKVFHPEQVITGKEVLAKNMPWSYYPGKGSWPMLGRGPAAVVPVAGVRGPGVHDVGGPAVVPNPEKGALETEETTGEYINTTPEVL

SEQ ID NO: 785412 - protein, 73 aa, Homo sapiens
TLDFRTLDFRTLDFRTLDFHSDCETASQFKRVRSKPGVPVSTDVVSTGLNSYTCMHNTLSKLFYNFTLEKLAL

SEQ ID NO: 785413 - protein, 68 aa, Homo sapiens
VATVSRKEERGGKVNFPPPTQIFLAGVVFTLPSQEGGVGRSTPIQGSLPRRKEDSQPSRGAWAGPMQA

SEQ ID NO: 785414 - protein, 1115 aa, Homo sapiens
PVHAVVIPVSHLSGFHLIPVWELNSVGKRRKEQLLLLQQRWMERSSSYERSGSYSGRSPSPYGRRRSSSPFLSKRSLSRSPLPSRKSMKSRSRSPAYSRHSSSHSKKKRSSSRSRHSSISPVRLPLNSSLGAELSRKKKERAAAAAAAKMDGKESKGSPVFLPRKENSSVEAKDSGLESKKLPRSVKLEKSAPDTELVNVTHLNTEVKNSSDTGKVKLDENSEKHLVKDLKAQGTRDSKPIALKEEIVTPKETETSEKETPPPLPTIASPPPPLPTTTPPPQTPPLPPLPPIPALPQQPPLPPSQPAFSQVPASSTSTLPPSTHSKTSAVSSQANSQPPVQVSVKTQVSVTAAIPHLKTSTLPPLPLPPLLPGGDDMDSPKETLPSKPVKKEKEQRTRHLLTDLPLPPELPGGDLSPPDSPEPKAITPPQQPYKKRPKICCPRYGERRQTESDWGKRCVDKFDIIGIIGEGTYGQVYKARDKDTGELVALKKVRLDNEKEGFPITAIREIKILRQLIHRSVVNMKEIVTDKQDALDFKKDKGAFYLVFEYMDHDLMGLLESGLVHFSEDHIKSFMKQLMEGLEYCHKKNFLHRDIKCSNILLNNSGQIKLADFGLARLYNSEESRPYTNKVITLWYRPPELLLGEERYTPAIDVWSCGCILGELFTKKPIFQANLELAQLELISRLCGSPCPAVWPDVIKLPYFNTMKPKKQYRRRLREEFSFIPSAALDLLDHMLTLDPSKRCTAEQTLQSDFLKDVELSKMAPPDLPHWQDCHELWSKKRRRQRQSGVVVEEPPPSKTSRKETTSGTSTEPVKNSSPAPPQPAPGKVESGAGDAIGLADITQQLNQSELAVLLNLLQSQTDLSIPQMAQLLNIHSNPEMQQQLEALNQSISALTEATSQQQDSETMAPEESLKEAPSAPVILPSAEQTTLEASSTPADMQNILAVLLSQLMKTQEPAGSLEENNSDKNSGPQGPRRTPTMPQEEAAGEQRWECPLRNAVMSISHLSPRAWQIQSLSQNLKPSQVQWEIPPVQTLCETPELEACKPASFIPNAQMGQVTSLLCLPPPFLLAGLLSLQCLSHPCNPDSTCSSSTNSIPGYLIPSSLKGRVNATMI

SEQ ID NO: 785415 - protein, 1501 aa, Homo sapiens
LFSLLQVRGKGMPNSERHGGKKDGSGGASGTLQPSSGGGSSNSRERHRLVSKHKRHKSKHSKDMGLVTPEAASLGTVIKPLVEYDDISSDSDTFSDDMAFKLDRRENDERRGSDRSDRLHKHRHHQHRRSRDLLKAKQTEKEKSQEVSSKSGSMKDRISGSSKRSNEETDDYGKAQVAKSSSKESRSSKLHKEKTRKERELKSGHKDRSKSHRKRETPKSYKTVDSPKRRSRSPHRKWSDSSKQDDSPSGASYGQDYDLSPSRSHTSSNYDSYKKSPGSTSRRQSVSPPYKEPSAYQSSTRSPSPYSRRQRSVSPYSRRRSSSYERSGSYSGRSPSPYGRRRSSSPFLSKRSLSRSPLPSRKSMKSRSRSPAYSRHSSSHSKKKRSSSRSRHSSISPVRLPLNSSLGAELSRKKKERAAAAAAAKMDGKESKGSPVFLPRKENSSVEAKDSGLESKKLPRSVKLEKSAPDTELVNVTHLNTEVKNSSDTGKVKLDENSEKHLVKDLKAQGTRDSKPIALKEEIVTPKETETSEKETPPPLPTIASPPPPLPTTTPPPQTPPLPPLPPIPALPQQPPLPPSQPAFSQVPASSTSTLPPSTHSKTSAVSSQANSQPPVQVSVKTQVSVTAAIPHLKTSTLPPLPLPPLLPGGDDMDSPKETLPSKPVKKEKEQRTRHLLTDLPLPPELPGGDLSPPDSPEPKAITPPQQPYKKRPKICCPRYGERRQTESDWGKRCVDKFDIIGIIGEGTYGQVYKARDKDTGELVALKKVRLDNEKEGFPITAIREIKILRQLIHRSVVNMKEIVTDKQDALDFKKDKGAFYLVFEYMDHDLMGLLESGLVHFSEDHIKSFMKQLMEGLEYCHKKNFLHRDIKCSNILLNNSGQIKLADFGLARLYNSEESRPYTNKVITLWYRPPELLLGEERYTPAIDVWSCGCILGELFTKKPIFQANLELAQLELISRLCGSPCPAVWPDVIKLPYFNTMKPKKQYRRRLREEFSFIPSAALDLLDHMLTLDPSKRCTAEQTLQSDFLKDVELSKMAPPDLPHWQDCHELWSKKRRRQRQSGVVVEEPPPSKTSRKETTSGTSTEPVKNSSPAPPQPAPGKVESGAGDAIGLADITQQLNQSELAVLLNLLQSQTDLSIPQMAQLLNIHSNPEMQQQLEALNQSISALTEATSQQQDSETMAPEESLKEAPSAPVILPSAEQTTLEASSTPADMQNILAVLLSQLMKTQEPAGSLEENNSDKNSGPQGPRRTPTMPQEEAAACPPHILPPEKRPPEPPGPPPPPPPPPLVEGDLSSAPQELNPAVTAALLQLLSQPEAEPPGHLPHEHQALRPMEYSTRPRPNRTYGNTDGPETGFSAIDTDERNSGPALTESLVQTLVKNRTFSGSLSHLGESSSYQGTGSVQFPGDQDLRFARVPLALHPVVGQPFLKAEGSSNSVVHAETKLQNYGELGPGTTGASSSGAGLHWGGPTQSSAYGKLYRGPTRVPPRGGRGRGVPY

SEQ ID NO: 785416 - protein, 1501 aa, Homo sapiens; identical to SEQ ID NO: 785415

SEQ ID NO: 785417 - protein, 537 aa, Homo sapiens
LDAWVDPRVRIKLPYFNTMKPKKQYRRRLREEFSFIPSAALDLLDHMLTLDPSKRCTAEQTLQSDFLKDVELSKMAPPDLPHWQDCHELWSKKRRRQRQSGVVVEEPPPSKTSRKETTSGTSTEPVKNSSPAPPQPAPGKVESGAGDAIGLADITQQLNQSELAVLLNLLQSQTDLSIPQMAQLLNIHSNPEMQQQLEALNQSISALTEATSQQQDSETMAPEESLKEAPSAPVILPSAEQTTLEASSTPADMQNILAVLLSQLMKTQEPAGSLEENNSDKNSGPQGPRRTPTMPQEEAAACPPHILPPEKRPPEPPGPPPPPPPPPLVEGDLSSAPQELNPAVTAALLQLLSQPEAEPPGHLPHEHQALRPMEYSTRPRPNRTYGNTDGPETGFSAIDTDERNSGPALTESLVQTLVKNRTFSGSLSHLGESSSYQGTGSVQFPGDQDLRFARVPLALHPVVGQPFLKAEGSSNSVVHAETKLQNYGELGPGTTGASSSGAGLHWGGPTQSSAYGKLYRGPTRVPPRGGRGRGVPY

SEQ ID NO: 785418 - protein, 1501 aa, Homo sapiens; identical to SEQ ID NO: 785415

SEQ ID NO: 785419 - protein, 1501 aa, Homo sapiens; identical to SEQ ID NO: 785415

SEQ ID NO: 785420 - protein, 1501 aa, Homo sapiens; identical to SEQ ID NO: 785415

SEQ ID NO: 785421 - protein, 1501 aa, Homo sapiens; identical to SEQ ID NO: 785415

SEQ ID NO: 785422 - protein, 1501 aa, Homo sapiens; identical to SEQ ID NO: 785415

SEQ ID NO: 785423 - protein, 1252 aa, Homo sapiens
LFSLLQVRGKGMPNSERHGGKKDGSGGASGTLQPSSGGGSSNSRERHRLVSKHKRHKSKHSKDMGLVTPEAASLGTVIKPLVEYDDISSDSDTFSDDMAFKLDRRENDERRGSDRSDRLHKHRHHQHRRSRDLLKAKQTEKEKSQEVSSKSGSMKDRISGSSKRSNEETDDYGKAQVAKSSSKESRSSKLHKEKTRKERELKSGHKDRSKSHRKRETPKSYKTVDSPKRRSRSPHRKWSDSSKQDDSPSGASYGQDYDLSPSRSHTSSNYDSYKKSPGSTSRRQSVSPPYKEPSAYQSSTRSPSPYSRRQRSVSPYSRRRSSSYERSGSYSGRSPSPYGRRRSSSPFLSKRSLSRSPLPSRKSMKSRSRSPAYSRHSSSHSKKKRSSSRSRHSSISPVRLPLNSSLGAELSRKKKERAAAAAAAKMDGKESKGSPVFLPRKENSSVEAKDSGLESKKLPRSVKLEKSAPDTELVNVTHLNTEVKNSSDTGKVKLDENSEKHLVKDLKAQGTRDSKPIALKEEIVTPKETETSEKETPPPLPTIASPPPPLPTTTPPPQTPPLPPLPPIPALPQQPPLPPSQPAFSQVPASSTSTLPPSTHSKTSAVSSQANSQPPVQVSVKTQVSVTAAIPHLKTSTLPPLPLPPLLPGGDDMDSPKETLPSKPVKKEKEQRTRHLLTDLPLPPELPGGDLSPPDSPEPKAITPPQQPYKKRPKICCPRYGERRQTESDWGKRCVDKFDIIGIIGEGTYGQVYKARDKDTGELVALKKVRLDNEKEGFPITAIREIKILRQLIHRSVVNMKEIVTDKQDALDFKKDKGAFYLVFEYMDHDLMGLLESGLVHFSEDHIKSFMKQLMEGLEYCHKKNFLHRDIKCSNILLNNSGQIKLADFGLARLYNSEESRPYTNKVITLWYRPPELLLGEERYTPAIDVWSCGCILGELFTKKPIFQANLELAQLELISRLCGSPCPAVWPDVIKLPYFNTMKPKKQYRRRLREEFSFIPSAALDLLDHMLTLDPSKRCTAEQTLQSDFLKDVELSKMAPPDLPHWQDCHELWSKKRRRQRQSGVVVEEPPPSKTSRKETTSGTSTEPVKNSSPAPPQPAPGKVESGAGDAIGLADITQQLNQSELAVLLNLLQSQTDLSIPQMAQLLNIHSNPEMQQQLEALNQSISALTEATSQQQDSETMAPEESLKEAPSAPVILPSAEQTTLEASSTPADMQNILAVLLSQLMKTQEPAGSLELEASGVGQASGVG

SEQ ID NO: 785424 - protein, 67 aa, Homo sapiens
WYHILEATPPTQHGGSNKTQQQGRSQFAQWALESDAVWSSAPQKSLPGGGPLDSAKGPDGHRELYVI

SEQ ID NO: 785425 - protein, 228 aa, Homo sapiens
MYSQPASEECTIISLMTGNWGPRNLIWGLRMRGAGGQLFWGQPLASYSSRSSSRIELRKQTLKAELLTTKLEASRPPLDLCPGRPAQTPVPTHPLPSRCTDASGQNRTLLFSAPVSLVEFCAVASIPSHSGVSYAHCLPIFTQGCEELVTAETLDGTDQSRHSWEENLRGKPGPRQTELAIRQVRSSQSVTAASLQKESAIRKVVDFFLQVPPLLLWSRGNAAVSFHR

SEQ ID NO: 785426 - protein, 155 aa, Homo sapiens [sequence omitted]

SEQ ID NO: 785427 - protein, 110 aa, Homo sapiens
ALNSVWKRLKQANISQNLSTILGVAIHMFVYITEAQNYTIIINNILWTLIIMLFSISKHLISIDNYLLNEWVHWSDQGVIQGRCPCLPTLNLQNGAGSTQQALSELAKNF

SEQ ID NO: 785428 - protein, 127 aa, Homo sapiens
MLPLSIKDDEYKPPKFNLFGKISGWFRSILSDKTSRNLFFFLCLNLSFAFVELLYGIWSNCLGLISDSFHMFFDSTAILAGLAASVISNWRDNDAFSYGYVRAEVLAGFVNGLFLIFTAFFIFSEGS

SEQ ID NO: 785429 - protein, 127 aa, Homo sapiens; identical to SEQ ID NO: 785428

SEQ ID NO: 785430 - protein, 102 aa, Homo sapiens
MDVCIQTATSSRMHTRVCAQMQRQPCVGTYVCVHMRIHTAHTYTCAYTYIPVHKRAHMYMQPGSHDTLGVTFGRSLLQARSSSEWRICLQPSSLPQLWGAEG

SEQ ID NO: 785431 - protein, 31 aa, Homo sapiens
MGLWLTTPSTKKCGRKPTAFAEMSTVTFLFK

SEQ ID NO: 785432 - protein, 180 aa, Homo sapiens
GWKKERVVAEFWDGKIVLVLPHDPSFAIKKVEDVQELVDNELGFQQVVPKCPNKIKTFLFISDEKRVVGCLIAEPIKQAFRVLSEPIGPESPSSTECPRAWQCSDVPEPAVCGISRIWVFRLKRRKRIARRLVDTLRNCFMFGCFLSTDEIAFSDPTPDGKLFATKYCNTPNFLVYNFNS

SEQ ID NO: 785433 - protein, 180 aa, Homo sapiens; identical to SEQ ID NO: 785432

SEQ ID NO: 785434 - protein, 219 aa, Homo sapiens
SCGGSKLAPQAERALVLELAKQQILDGLHLTSRPRITHPPPQAALTRALRRLQPGSVAPGNGEEVISFATVTDSTSAYSSLLTFHLSTPRSHHLYHARLWLHVLPTLPGTLCLRIFRWGPRRRRQGSRTLLAEHHITNLGWHTLTLPSSGLRGEKSGVLKLQLDCRPLEGNSTVTGQPRRLLDTAGHQQPFLELKIRANEPGAGRARRRTPTCEPATPL

SEQ ID NO: 785435 - protein, 73 aa, Homo sapiens
IIIIIIIIYNVISHRAQLRSDGFIMFDSCSFTCSHSLCGHHGSRTCPSAMIVSFLKDFPLCHDSKFPEASPAM

SEQ ID NO: 785436 - protein, 115 aa, Homo sapiens
  misc_feature (18)..(18): Xaa can be any naturally occurring amino acid
  misc_feature (31)..(31): Xaa can be any naturally occurring amino acid
  misc_feature (40)..(40): Xaa can be any naturally occurring amino acid
  misc_feature (53)..(53): Xaa can be any naturally occurring amino acid
  misc_feature (66)..(66): Xaa can be any naturally occurring amino acid
AINDLYRHKTGLNGSYDXLDILGPYRDGREXGAKLPRCVXLIIECQRDYVGQXMWNNGYMPSTRCXTLHTCHTCAIKPWSPTGQYPQSRFHSKTDLGDPAQVQKCPQRCFYLLRC

SEQ ID NO: 785437 - protein, 118 aa, Homo sapiens
ACGLREGGQLLSSRSRSWLVEEICFGHVRSEIPDFPVEESGVQGRRLEAGTRSHQMGPAEDTGRRADRERFKGTAPLRGQGVKVEPAEMSKRSEKQGPGAAAPACNPSTLGGRGRWIT

SEQ ID NO: 785438 - protein, 263 aa, Homo sapiens
SGRKVSREPCQLGHPEGRCWGSGRGRPGGLRRAPPALRLFRSVSLASRSCDAAFLFSCSRARTSAMGAPPCHVGRLLQHPGGPGPVWAGGCGDPCGAATPGTMSRNPGSCCVAELVLNSWPPASVSQSAGITGNVTSLDEYKDLQMSSCRGLQGSQKDHRGPGATCKRRSLWTPRASPSKAGSQPCALKPLKGLEVPIGKEARDCHGIRGPQGGSQESLPAWAKGTAYGKAAGTRPSSRRCAQRRSGGTGSRDRADTRLLFVC

SEQ ID NO: 785439 - protein, 106 aa, Homo sapiens
PGQERGLRWAFTSPPAGGETGPVPEGTRGRGAHAQSGKPKAWRGFREQGLEFLCQAGGWHQTPGRGRRRGPSKDSPQPLCLRLLRLLCADRVLCCVGNAASLLGTW

SEQ ID NO: 785440 - protein, 202 aa, Homo sapiens
TRVSTNQCSGYGSGEGGNAIKDHSSSSREPWESVSRLTPDTGSESKVGKEGQTNLDPSSCKSSHEKRHARVLSVDSGTDVFLSKSSAEIVNDTEKTMPTSKSDLEAKEGQMPNESNFLEFVSLLESINTSKMTASSQLNGSAEQNEESGLLRDNCSQEKKEEILENEKPSGHSSKQGKPDLQSQDHTSTGPACTQPAKTTAL

SEQ ID NO: 785441 - protein, 764 aa, Homo sapiens
MHVFIDEHGEIRSCYLKSGNQKEGPLQPLPSNNDCLSQAREMQVSSSSTTTSESQDPSSGDPAVSALQQQLLLMVARRTQSETPRHVSQDLEASSCSSTQGKFNREQFYKFIIFPGKWIKVWYDRLTLLALLDRTEDIKENVLAILLIVLVSLLGFLTLSQGFCKDMWVLLFCLVMASCQYSLLKSVQPDPASPIHGHNQIITYSRPIYFCVLCGLILLLDTGAKARHPPSYVVYGLKLFSPVFLQSARDYLIVFLYCFPAISLLGLFPQINTFCTYLLEQIDMLFFGGSAVSGITSAVYSVARSVLAAALLHAVCFSAVKEPWSMQHIPALFSAFCGLLVALSYHLSRQSSDPSVLMSFIQCRLFPKFLHQNLAESAADPLPKKMKDSVTDVLKWDLIVCAVVAVLSFAVSASTVFLSLRPFLSIVLFALAGAVGFVTHYVLPQLRKHHPWMWISHPILKNKEYHQREVRDVAHLMWFERLYVWLQCFEKYILYPALILNALTIDAFLISNHRRLGTHWDIFLMIIAGMKLLRTSFCNPVYQFINLSFTVIFFHFDYKDISESFLLDFFMVSILFSKTESCPVTQAGVQWRDLSSLQPLPSNFQRFSCLSLMGSWDYRCTPTHLANFVFLLEMGFHHVGQAGLELLTSGDLPASASQSAGITDMSHCAQLTKENLTVYLGDLLHKLQFVLTYVAPWQMAWGSSFHVFAQLFAIPHSAMLFFQTIATSIFSTPLSPFLGSVIFITSYVRPVKFWEKNYKCFWAT

SEQ ID NO: 785442 - protein, 663 aa, Homo sapiens
MHVFIDEHGEIRSCYLKSGNQKEGPLQPLPSNNDCLSQAREMQVSSSSTTTSESQDPSSGDPAVSALQQQLLLMVARRTQSETPRHVSQDLEASSCSSTQGKFNREQFYKFIIFPGKWIKVWYDRLTLLALLDRTEDIKENVLAILLIVLVSLLGFLTLSQGFCKDMWVLLFCLVMASCQYSLLKSVQPDPASPIHGHNQIITYSRPIYFCVLCGLILLLDTGAKARHPPSYVVYGLKLFSPVFLQSARDYLIVFLYCFPAISLLGLFPQINTFCTYLLEQIDMLFFGGSAVSGITSAVYSVARSVLAAALLHAVCFSAVKEPWSMQHIPALFSAFCGLLVALSYHLSRQSSDPSVLMSFIQCRLFPKFLHQNLAESAADPLPKKMKDSVTDVLKWDLIVCAVVAVLSFAVSASTVFLSLRPFLSIVLFALAGAVGFVTHYVLPQLRKHHPWMWISHPILKNKEYHQREVRDVAHLMWFERLYVWLQCFEKYILYPALILNALTIDAFLISNHRRLGTHWDIFLMIIAGMKLLRTSFCNPVYQFINLSFTVIFFHFDYKDISESFLLDFFMVSILFSKLGDLLHKLQFVLTYVAPWQMAWGSSFHVFAQLFAIPHSAMLFFQTIATSIFSTPLSPFLGSVIFITSYVRPVKFWEKNYKCFWAT

SEQ ID NO: 785443 - protein, 658 aa, Homo sapiens
MHVFIDEHGEIRSCYLKSGNQKEGPLQPLPSNNDCLSQAREMQVSSSSTTTSESQDPSSGDPAVSALQQQLLLMVARRTQSETPRHVSQDLEASSCSSTQGKFNREQFYKFIIFPGKWIKVWYDRLTLLALLDRTEDIKENVLAILLIVLVSLLGFLTLSQGFCKDMWVLLFCLVMASCQYSLLKSVQPDPASPIHGHNQIITYSRPIYFCVLCGLILLLDTGAKARHPPSYVVYGLKLFSPVFLQSARDYLIVFLYCFPAISLLGLFPQINTFCTYLLEQIDMLFFGGSAVSGITSAVYSVARSVLAAALLHAVCFSAVKEPWSMQHIPALFSAFCGLLVALSYHLSRQSSDPSVLMSFIQCRLFPKFLHQNLAESAADPLPKKMKDSVTDVLKWDLIVCAVVAVLSFAVSASTVFLSLRPFLSIVLFALAGAVGFVTHYVLPQLRKHHPWMWISHPILKNKEYHQREVRDVAHLMWFERLYVWLQCFEKYILYPALILNALTIDAFLISNHRRLGTHWDIFLMIIAGMKLLRTSFCNPVYQFINLSFTVIFFHFDYKDISESFLLDFFMVSILFSKLGDLLHKLQFVLTYVAPWQMAWGSSFHVFAQLFAIPHSAMLFFQTIATSIFSTPLSPFLGSVIFITSYVRPVKFWEKNYK

SEQ ID NO: 785444 - protein, 531 aa, Homo sapiens
AGALATQFPMLIVNFVCSFSVFLYCFPAISLLGLFPQINTFCTYLLEQIDMLFFGGSAVSGITSAVYSVARSVLAAALLHAVCFSAVKEPWSMQHIPALFSAFCGLLVALSYHLSRQSSDPSVLMSFIQCRLFPKFLHQNLAESAADPLPKKMKDSVTDVLKWDLIVCAVVAVLSFAVSASTVFLSLRPFLSIVLFALAGAVGFVTHYVLPQLRKHHPWMWISHPILKNKEYHQREVRDVAHLMWFERLYVWLQCFEKYILYPALILNALTIDAFLISNHRRLGTHWDIFLMIIAGMKLLRTSFCNPVYQFINLSFTVIFFHFDYKDISESFLLDFFMVSILFSKTESCPVTQAGVQWRDLSSLQPLPSNFQRFSCLSLMGSWDYRCTPTHLANFVFLLEMGFHHVGQAGLELLTSGDLPASASQSAGITDMSHCAQLTKENLTVYLGDLLHKLQFVLTYVAPWQMAWGSSFHVFAQLFAIPHSAMLFFQTIATSIFSTPLSPFLGSVIFITSYVRPVKFWEKNYKCFWAT

SEQ ID NO: 785445 - protein, 780 aa, Homo sapiens
TRVSTNQCSGYGSGEGGNAIKDHSSSSREPWESVSRLTPDTGSESKVGKEGQTNLDPSSCKSSHEKRHARVLSVDSGTDVFLSKSSAEIVNDTEKTMPTSKSDLEAKEGQMPNESNFLEFVSLLESINTSKMTASSQLNGSAEQNEESGLLRDNCSQEKKEEILENEKPSGHSSKQGKPDLQSQDHTSTGPACTQPAKTTAFFQGNRQRQIIYRVTSQQDSSVLQVISGPETSVQEEISVDAMHVFIDEHGEIRSCYLKSGNQKEGPLQPLPSNNDCLSQAREMQVSSSSTTTSESQDPSSGDPAVSALQQQLLLMVARRTQSETPRNEDIKENVLAILLIVLVSLLGFLTLSQGFCKDMWVLLFCLVMASCQYSLLKSVQPDPASPIHGHNQIITYSRPIYFCVLCGLILLLDTGAKARHPPSYVVYGLKLFSPVFLQSARDYLIVFLYCFPAISLLGLFPQINTFCTYLLEQIDMLFFGGSAVSGITSAVYSVARSVLAAALLHAVCFSAVKEPWSMQHIPALFSAFCGLLVALSYHLSRQSSDPSVLMSFIQCRLFPKFLHQNLAESAADPLPKKMKDSVTDVLKWDLIVCAVVAVLSFAVSASTVFLSLRPFLSIVLFALAGAVGFVTHYVLPQLRKHHPWMWISHPILKNKEYHQREVRDVAHLMWFERLYVWLQCFEKYILYPALILNALTIDAFLISNHRRLGTHWDIFLMIIAGMKLLRTSFCNPVYQFINLSFTVIFFHFDYKDISESFLLDFFMVSILFSKVFLGYVRQK

SEQ ID NO: 785446 - protein, 472 aa, Homo sapiens
MHVFIDEHGEIRSCYLKSGNQKEGPLQPLPSNNDCLSQAREMQVSSSSTTTSESQDPSSGDPAVSALQQQLLLMVARRTQSETPRHVSQDLEASSCSSTQGKFNREQFYKFIIFPGKWIKVWYDRLTLLALLDRTEDIKENVLAILLIVLVSLLGFLTLSQGFCKDMWVLLFCLVMASCQYSLLKSVQPDPASPIHGHNQIITYSRPIYFCVLCGLILLLDTGAKARHPPSYVVYGLKLFSPVFLQSARDYLIVFLYCFPAISLLGLFPQINTFCTYLLEQIDMLFFGGSAVSGITSAVYSVARSVLAAALLHAVCFSAVKEPWSMQHIPALFSAFCGLLVALSYHLSRQSSDPSVLMSFIQCRLFPKFLHQNLAESAADPLPKKMKDSVTDVLKWDLIVCAVVAVLSFAVSASTVFLSLRPFLSIVLFALAGAVGFVTHYVLPQLRKHHPWMWISHPILKNKEYHQREVRG

SEQ ID NO: 785447 - protein, 590 aa, Homo sapiens
MHVFIDEHGEIRSCYLKSGNQKEGPLQPLPSNNDCLSQAREMQVSSSSTTTSESQDPSSGDPAVSALQQQLLLMVARRTQSETPRHVSQDLEASSCSSTQGKFNREQFYKFIIFPGKWIKVWYDRLTLLALLDRTEDIKENVLAILLIVLVSLLGFLTLSQGFCKDMWVLLFCLVMASCQYSLLKSVQPDPASPIHGHNQIITYSRPIYFCVLCGLILLLDTGAKARHPPSYVVYGLKLFSPVFLQSARDYLIVFLYCFPAISLLGLFPQINTFCTYLLEQIDMLFFGGSAVSGITSAVYSVARSVLAAALLHAVCFSAVKEPWSMQHIPALFSAFCGLLVALSYHLSRQSSDPSVLMSFIQCRLFPKFLHQNLAESAADPLPKKMKDSVTDVLKWDLIVCAVVAVLSFAVSASTVFLSLRPFLSIVLFALAGAVGFVTHYVLPQLRKHHPWMWISHPILKNKEYHQREVRDVAHLMWFERLYVWLQCFEKYILYPALILNALTIDAFLISNHRRLGTHWDIFLMIIAGMKLLRTSFCNPVYQFINLSFTVIFFHFDYKDISESFLLDFFMVSILFSKASELAIFFILTF

SEQ ID NO: 785448 - protein, 641 aa, Homo sapiens
MHVFIDEHGEIRSCYLKSGNQKEGPLQPLPSNNDCLSQAREMQVSSSSTTTSESQDPSSGDPAVSALQQQLLLMVARRTQSETPRHVSQDLEASSCSSTQGKFNREQFYKFIIFPGKWIKVWYDRLTLLALLDRTEDIKENVLAILLIVLVSLLGFLTLSQGFCKDMWVLLFCLVMASCQYSLLKSVQPDPASPIHGHNQIITYSRPIYFCVLCGLILLLDTGAKARHPPSYVVYGLKLFSPVFLQSARDYLIVFLYCFPAISLLGLFPQINTFCTYLLEQIDMLFFGGSAVSGITSAVYSVARSVLAAALLHAVCFSAVKEPWSMQHIPALFSAFCGLLVALSYHLSRQSSDPSVLMSFIQCRLFPKFLHQNLAESAADPLPKKMKDSVTDVLKWDLIVCAVVAVLSFAVSASTVFLSLRPFLSIVLFALAGAVGFVTHYVLPQLRKHHPWMWISHPILKNKEYHQREVRDVAHLMWFERLYVWLQCFEKYILYPALILNALTIDAFLISNHRRLGTHWDIFLMIIAGMKLLRTSFCNPVYQFINLSFTVIFFHFDYKDISESFLLDFFMVSILFSKLGDLLHKLQFVLTYVAPWQMAWGSSFHVFAQLFAIPRILSASIFTLQLRFTFYGSKLFIDPWQ

SEQ ID NO: 785449 - protein, 262 aa, Homo sapiens
EGAVGRCAPAGHFPGTPLVFLGPRFSTAPLRVPGFQTPSHDMEEFLQRAKSKLNRSKRLEKVHVVIGPKSCDLDSLISTFTYAYFLDKVSPPGVLCLPVLNIPRTEFNYFTETRFILEELNISESFHIFRDEINLHQLNDEGKLSITLVGSSVLASEDKTLESAVVKVINPVEQSDANVEFRESSSSLVLKEILQEAPELITEQLAHRLRGSILFKWMTMESEKISEKQEEILSILEEKFPNLPPREDIINVLQETQFSAQG

SEQ ID NO: 785450 - protein, 222 aa, Homo sapiens
MCRTAAGYRRGDANRSKRLEKVHVVIGPKSCDLDSLISTFTYAYFLDKVSPPGVLCLPVLNIPRTEFNYFTETRFILEELNISESFHIFRDEINLHQLNDEGKLSITLVGSSVLASEDKTLESAVVKVINPVEQSDANVEFRESSSSLVLKEILQEAPELITEQLAHRLRGSILFKWMTMESEKISEKQEEILSILEEKFPNLPPREDIINVLQETQFSAQG

SEQ ID NO: 785451 - protein, 278 aa, Homo sapiens
SLKQQEPGLMGDPGARVYSSHSMGARVDLEPVSPRSCLTKVELAKSRLAGALCPQVPRTPAKVPTSAPSLGKPNKSPHSSPTKLPSKSPTKVVPRPGAPLVTKESPKPDKGKGPPWADCGSTTAQSTPLVPGPTDPSQGPEGLAPHSAIEEKVMKGIEENVLRLQGQERAPGAEVKHRNTSSIASWFGLKKSKLPALNRRTEATKNKEGAGGGSPLRREVKMEARKLEAESLNISKLMAKAEDLRRALEEEKAYLSSRARQRLVAQPQGPTRGWGRCR

SEQ ID NO: 785452 - protein, 72 aa, Homo sapiens
KAISPEPSSLLVHRATLKEQLIAPVAEEEATVPNNKITVVGVGQVGMACAISILGKSLADELALVDVLEGSF

SEQ ID NO: 785453 - protein, 287 aa, Homo sapiens
MPALCLVLCWFQGLLGEVWNAVDSGHCLQTYSLHTEAVRAARWAPCGRRILSGGFDFALHLTDLETGTQLFSGRSDFRITTLKFHPKDHNIFLCGGFSSEMKAWDIRTGKVMRSYKATIQQTLDILFLREGSEFLSSTDASTRDSADRTIIAWDFRTSAKISNQIFHERFTCPSLALHPREPVFLAQTNGNYLALFSTVWPYRMSRRRRYEGHKVEGYSVGCECSPGGDLLVTGSADGRVLMYSFRTASRACTLQGHTQACVGTTYHPVLPSVLATCSWGGDMKIWH

SEQ ID NO: 785454 - protein, 144 aa, Homo sapiens
AGAAAGFQSSFGLGREEVSMLGPRRGAHAGQGRDRLRGEQLRGPWPWWNLVRPAGLIGEGAFSFSDACRLPYLCQGLPSPSGPLCVCFLSHKGSSEPSRLLPSPQPPPRPGVFQLPAGLPALQAQAVLPGLSTGGLGCWPGGSL

SEQ ID NO: 785455 - protein, 33 aa, Homo sapiens
MGCTYSSPPEEPALRRSVPDTVPGGRLPSCPLA

SEQ ID NO: 785456 - protein, 179 aa, Homo sapiens
MARKLVMFRDVAIDFSQEEWECLDSAQRDLYRDVMLENYSNLVSLDLPSRCASKDLSPEKNTYETELSQWEMSDRLENCDLEESNSRDYLEAKGKMEKQQENQKEYFRQGMIIYDKMSIFNQHTYLSQHSRCHSTEKPYKCKECGKAFRRASHLTQHQSFHTGEKPYECKQCGKAFSRD

SEQ ID NO: 785457 - protein, 69 aa, Homo sapiens
LQPQLESRALRLGSSWAQASAQSFLAGPSAPLLQGLETSSMGLRIISVCGRHMVNLSKRKKWYQYKSKI

SEQ ID NO: 785458 - protein, 63 aa, Homo sapiens
HTPRAHTPLVTKSRCDEVVAAHCQNAHTRYLGIQSFRTAQERPSKIQKFTTRVLTRKKFTPGG

SEQ ID NO: 785459 - protein, 170 aa, Homo sapiens
MTLLAQEWGAASHLLLWGRVSPGSGPRWRICSMSCDVLQPRVTESLLWATKSTQPLAMGHPAGPLDTETCGSQPVVILCPGNTWPSLGSILFVTVYGWGVTRHPTVHRTAPQQTSPTVSSTEPGKPGLEPFLSRVPAREPLTAMENPSPPVSQDSPRVKDGCLPIEGQTN

SEQ ID NO: 785460 - protein, 47 aa, Homo sapiens
MHFGAGVVPASKQTAALGALKEEVGDCHSCCEGARSRLWAQGWGLAA

SEQ ID NO: 785461 - protein, 125 aa, Homo sapiens
MTHRLCSGRCWNLALYTQGWFPSHLPGLHRTMPPPLSKPTLPLTLLEDGLGVGGVNTAKQLTGIAQRKGGERDTLGNAAALGEMDELSHFTGATELTVNIRSNDIDFKVLWFQMSLVLSFSFSLL

SEQ ID NO: 785462 - protein, 53 aa, Homo sapiens
MAKVIFLKYKPPLNCSTVLQCFWNDAPKPSMDLAPDPAFLFSIHIHIFLQLCQ

SEQ ID NO: 785463 - protein, 193 aa, Homo sapiens
EKSFGEELLTLPPGTACPGAGWRQGRAGQSQVLPGKSPWAGAGGLELLAVTVCLSRRVSTVYWYHGPRSRRGMEIRTVPLGPPVCTGGALRQLLKPLSHYTDGADGDTEVQRDSQLSSELDPEPRLLAWPPSAAPHVASEFPVWDWGSSGPWGTTMLFWSCQLGRNPLVPTLCLCGPLLASAVPLGGPTTLFF

SEQ ID NO: 785464 - protein, 57 aa, Homo sapiens
  misc_feature (12)..(12): Xaa can be any naturally occurring amino acid
EDLSDSGPPQTXPTPTSGPAGSQGARPTHQAANPPPNGHVAWDCTEVVTNSTWSERT

SEQ ID NO: 785465 - protein, 89 aa, Homo sapiens
GCLEDPRDKQDTSDNVERSFKHTVRENSEEAEPEKYYNSKNTTCKGKSTYFEDKMSTALGKTGLEMEKLLLSKLGFALRLGNINRETKY

SEQ ID NO: 785466 - protein, 162 aa, Homo sapiens
MPHFLDWFVPVYLVISVLILVGFGACIYYFEPGLQEAHKWRMQRPLVDRDLRKTLMVRDNLAFGGPEVLSRLAKGIGGRHRAAVRASQHGPHNPYHAKYQRPNSPSTLTSNHYGPRGNSTSERWGANASVREEGRMSTHQSSQERAPQHADDRDTTEAITEA

SEQ ID NO: 785467 - protein, 162 aa, Homo sapiens; identical to SEQ ID NO: 785466

SEQ ID NO: 785468 - protein, 88 aa, Homo sapiens
LSGERWNRVRGQGQWGETGTEGEVRVRGGETGTEGEVKVSGGETGTEGEVRVRGGETGTEGEVKVSEERREPRERSRSVTRDGNRARA

SEQ ID NO: 785469 - protein, 230 aa, Homo sapiens
PYPCPECGEAFSLSSHLLSHRRAHAAASGAGAAALRPFACGECGKGFVRRSHLANHQRIHTGEKPHGCGECGKRFSWRSDLVKHQRVHTGEKPYMCSECGETFSVSSHLFTHKRTHSGERPYVCRECGKGFGRNSHLVNHLRVHTGEKPFRCGQCEKRFSDFSTLTQHQRTHTGEKPYTCIECGKSFIQSSHLIRHRRIHTGNKPHKCAGCGKGFRYKTHLAQHQKLHLC

SEQ ID NO: 785470 - protein, 109 aa, Homo sapiens
HLIPICDLSTTQLKLLFQVTDNLQTRLNPNETLLSSRTPHSQQHARQSPRRRSSLEHSPRLASLMSHTRCFLTGHFSVSLVGGLLLSFLPSFFCPTDNTEAPTEVRLWT

SEQ ID NO: 785471 - protein, 209 aa, Homo sapiens
EIIGFVIPGLQWFIGKSTSSGQVGFVPTRNIDPDSYSPMSRNSAFLSDEERCSLLALGSDKQTECSSFLHTLARTDITSVYRLSGFESIQNPPNDLSASQPEGFKEVRPGRAWEEHQAVGSRQSSSSEDSSLEEELLSATSDSYRLPEPDDLDDPELLMDLSTGQEEEAENFAPILAFLDHEGYADHFKSLYDFSFSFLTSSFYSFSEE

SEQ ID NO: 785472 - protein, 270 aa, Homo sapiens
  misc_feature (270)..(270): Xaa can be any naturally occurring amino acid
MKPARLFIKEQLQETQGLCEYAIYVQALIFRLEGNIQESLELFQTCAVLSPQSADNLKQVARSLFLLGKHKAAIEVYNEAAKLNQKDWEISHNLGVCYIYLKQFNKDQDQLHNALNLNRHDLTSIMLGKIHLLEGDWTKAIDSLLRKQWSSQPENTGASYNLGIIYLQLGIYQKAFELLGSALTYDPTKYKAILAAGSMMQTHGDFDVALTKYRVVAVLFQKVLHSGITLECVSLAEEICGGISCLKRATTWHLRLEDLYNLGLSFDMQX

SEQ ID NO: 785473 - protein, 295 aa, Homo sapiens
MPRPGHPRPASGPPRLGPWERPTELCLETYDKPPQPPPSRRTRRPDPKDPGHHGPESITFISGSAEPALESPTCCLLWRPWVWEWCRAAFCFRRCRDCLQRCGACVRGCSPCLSTEDSTEGTAEANWAKEHNGVPPSPDRAPPSRRDGQRLKSTMGSSFSYPDVKLKGIPVYPYPRATSPAPDADSCCKEPLADPPPMRHSLPSTFASSPRGSEEYYSFHESDLDLPEMGSGSMSSREIDVLIFKKLTELFSVHQIDELAKCTSDTVFLEKTSKISDLISSITQDYHLDEQDAEG

SEQ ID NO: 785474 - protein, 195 aa, Homo sapiens
MSNSRPRSRRDAGGGAGAAGRDELVSRSLQSAEHCLGVQDFGTAYAHYLLVLSLAPELKHDVKETFQYTLFRWAEELDALSRIQDLLGCYEQALELFPDDEVICNSMGEHLFRMGFRDEAAGYFHKAVKLNPDFSDAKENFYRVANWLVERWHFIMLNDTKRNTIYNAAIQKAVCLGSKSVLDIGAGTGILSMFC

SEQ ID NO: 785475 - protein, 105 aa, Homo sapiens [sequence omitted]

SEQ ID NO: 785476 - protein, 90 aa, Homo sapiens
SCADNDGNGGNGDDDGVDDGDDNDGIGGNGGSLCWMPLPRKFDRLKQILAEESAHSGVGTLGPGGMGLRVGSSDHWVAQFRGKSTVFPAG

SEQ ID NO: 785477 - protein, 239 aa, Homo sapiens
RVGLLGPAPPAPSSLRPGQDGRWPQQGWPEMEERGPDPGYGETLDVAVDPLTGLWDVIISWGLTVAQEHQDPALPSASHGASPLQEAIQGLHGRGAAPQGGGAWQPARRSSLQPRPQAQCAPQQPCQSPCDTAAGMPGHAAQLGWGRGAGPGAAESAAPGRPRLGKDAGAAGRSLFWEPSGGAPGGGVGGVSGLRPLQPAAWEVRLTGAGCRAAPASEGMSGGLQGGPGQRGALSKGDP

SEQ ID NO: 785478 - protein, 66 aa, Homo sapiens
SNSVQLRDPGWWEALLHVFSQTPIFSGSYSHTCSTYGLYTWFHGNYKDVIFQATLRRRGSAGKSDL

SEQ ID NO: 785479 - protein, 104 aa, Homo sapiens
MLQPSHDPSTFRENGPSCRVKWFRRTLSPHGGLGGFCPRPQRRGDPEFSVSPPQPLPLKLLSPRLWGGTREGLARLLCDPRCSCLAELSPCGLRAAGPSRVSEH

SEQ ID NO: 785480 - protein, 292 aa, Homo sapiens
VVVPRSPTRTPSPGPRPPTWDPFSRASSPDTRPGTPSPGPRPPTRDPFSRASTLDPRPGTPSPGPLPPTRDPFSRASTPDHRPGPFPGPRPPTRDPLPRASTLDPGPLPPGLDPRPPIRDPFPGASIPKSQPGMPSPGPRPLTPNLDPGPRLPTQDPLPRAWTPDHRPRTLSPAPGTPQRQAPFPASSVGGTVRCLFGLSGLGMSGQRAPEKVTVAPPAPNSITANQKDSDRKRSLSARPWSQQLFASILHVGKQRYPVPVEGMYRMAVHPSPVLVRTDSISHAHSEPQKQS

SEQ ID NO: 785481 - protein, 111 aa, Homo sapiens
TAFGDHLATSSEERSLRRFWLQEEGSQRMPGTRGGPQGGQRGSQRGFGVCRENLGVGKTGQLFIPSGLHFGCCLRGGSRACWLGLCFGAHLTFNSVTLNKLITWTSWVQYL

SEQ ID NO: 785482 - protein, 112 aa, Homo sapiens
MKKSLPTRLAPSLTSYPLPREPEAAAVASMDSTKPKPPLFSTAGRTKLRPGPKLWDVLATYFQPHSTQQAWRAGTGPSRTENLLEQIPGNSVSLLFRGLLFFSEALQIDYRK

SEQ ID NO: 785483 - protein, 216 aa, Homo sapiens
LGVTAIKDLVDDVARHKMDKEINNRTCEVIKDGRFKVAKWKEIQVGDVIRLKKNDFVPADILLLSSSEPNSLCYVETAELDGETNLKFKMSLEITDQYLQREDTLATFDGFIECEEPNNRLDKFTGTLFWRNTSFPLDADKILLRGCVIRNTDFCHGLVIFAGADTKIMKNSGKTRFKRTKIDYLMNYMVYTIFVVLILLSAGLAIGHAYWEAQVG

SEQ ID NO: 785484 - protein, 66 aa, Homo sapiens
MGRAMLRLWVPGQVITFLSLGSSFRKMGPYPRLSGAVGEDDRLLHSKGEADKALQSPAPCSGLRAE

SEQ ID NO: 785485 - protein, 44 aa, Homo sapiens
MVKTVLEDEIPAAIYARDKSGVRIGVRKTSWRLQPEALPGFLYR

SEQ ID NO: 785486 - protein, 39 aa, Homo sapiens
SSHKQTRRPQVPPGPCREATTVSGSSEGTAPALRGKKLA

SEQ ID NO: 785487 - protein, 125 aa, Homo sapiens
MLADHSDKGNKLHNSLNEVVRENFTDFTRTGATSLLKCITVSTAEVFRNLLHCLECEQHGRDKLWGSHCIVKPPPSLQGQVSKGKERGLGVPQGPAKDRSRLERSTGPLWPQGWGRPQTLVTSGT

SEQ ID NO: 785488 - protein, 137 aa, Homo sapiens
MGVRLMVDAEQTYFQPAISRLTLEMQRKFNVEKLLIFNTYQCYLKDAYDNVTLDMELAHREGWCFGAKPVRGAYLAQERACAAEIGYEDPINPMYEATNTMYHRCLDYVLEELKHNAKAKVMVASHNEDTVRFALRR

SEQ ID NO: 785489 - protein, 135 aa, Homo sapiens
TQKTSQSICLGTWPVFWITACLGELGIPQLGGREPLFAFLRQGFPLSPRLERSHAVTPHCSLSFPGSSGPPTSASRVAGTAGARRCLWLIFKQFFEMGSRFVAQVGLELLASSVPHVSASHSVGITCMSHCRQSD

SEQ ID NO: 785490 - protein, 105 aa, Homo sapiens
NKTGILKKKSEIVILSLYLFGMAKMCYWSLRVRFHFPNLFLKAFNRSHFLFHSSSHTSKNDLCNIYNMQAVECWLLKMGSIFKYNIFLNHAQKNSPTGTLFHTVY

SEQ ID NO: 785491 - protein, 100 aa, Homo sapiens
CALRPREPGCRAGETSAATGAVAFGSRFRADTRAGLRQVSALPAMGCSSSALNKAGDSSRFPSGETGEKVETDMENEKVSEGAETKEEETGEVVDLSAAT

SEQ ID NO: 785492 - protein, 418 aa, Homo sapiens
CALRPREPGCRAGETSAATGAVAFGSRFRADTRAGLRQVSALPAMGCSSSALNKAGDSSRFPSVTSNEHFSTAEESESCFAQPKPHALGRESTVDGNVQRESRPPLQKLKVSAEPTANGVKPLQEQPLAKDVAPGRDATDQSGSTEKTQPGEGLEESGPPQPGGKEDAPAAEGKKKDAGAGTEAESLKGNAEAQPLGPEAKGQPLQAAVEKDSLRAVEVTENPQTAAEMKPLGTTENVLTLQIAGELQPQGTVGKDEQAPLLETISKENESPEILEGSQFVETAEEQQLQATLGKEEQPQLLERIPKENVTPEVLDRSQLVEKPVMNDPFHKTPEGPGNMEQIQPEGIVGSMEHPARNVEAGAYVEMIRNIHTNEEDQRIEGETGEKVETDMENEKVSEGAETKEEETGEVVDLSAAT

SEQ ID NO: 785493 - protein, 111 aa, Homo sapiens
TVLRQKQFAACSFKGQKNCILADIICLKFLISYFSYGLSFCIGREDAPFIYGSLFLLQLHFHKLMSVLLRKSSALFFTLSTLLRNSIYDTITQSLHLNSTTIHKIVGIHKP

SEQ ID NO: 785494 - protein, 42 aa, Homo sapiens
MNMWLLLIGLTTLMWNTLGYTVLYIYSPFTILKKQYAYLLNL

SEQ ID NO: 785495 - protein, 61 aa, Homo sapiens
MSQPVSLIPDELVWRAEMNDFFFNCNFLLTNQSAIGALTVNRLLSYSTWVPRKRLGVLLSG

SEQ ID NO: 785496 - protein, 81 aa, Homo sapiens
PSLKPDLRRPGEQLCCPEQFFQNSAPQTLPQKILNRALDGGTLDREKWLKPSLSQIISVQMIQERIPTGNPCQIIENGRTT

SEQ ID NO: 785497 - protein, 153 aa, Homo sapiens
MAKVCRAMLRNPLHSAGSWEPRIACEQRRDTHCLQGLQLWQSLNNGVCEGKAQKTGTTGDQSVRMLPMRPHGCPYFYQAVPAHSLNNSLSQTTVHTFLLQLLSSLSNDDRFPFFYNTIKSNPRRTFMSSHLLISQPAAGDPLPSHLPQKGNCL

SEQ ID NO: 785498 - protein, 101 aa, Homo sapiens
  misc_feature (8)..(8): Xaa can be any naturally occurring amino acid
  misc_feature (14)..(14): Xaa can be any naturally occurring amino acid
  misc_feature (39)..(39): Xaa can be any naturally occurring amino acid
SEHKRLLXNVVRLXVYAQKSCTVPLWQYLRKARGCSCTXIGFTVTSAPGHENVHCNHPFLFFIRHNESNSILFFGRFSSPEDDRCHGIAAFNKKQLPVILL

SEQ ID NO: 785499 - protein, 96 aa, Homo sapiens
CLQSEPGRQASPCTIRTAIDTAASNSTWTITEFQAQSPTDLPPAPAAHANKSQGTRPHLEQVPGRREHYLPVGKMGKRTDVPIISIENETVQGQSC

SEQ ID NO: 785500 - protein, 133 aa, Homo sapiens
AKRKHPGRISCNSFPERGRGRPRSEVARRRWGPELRRNWVGAVPGGRPGAARSCPEPLNPLGKANADVNIPTPQGTFGPGLELKFQTEWDRAESSTRQRSMARGQALTPGFVSSGEAGTPARPARVRRGLLGF

SEQ ID NO: 785501 - protein, 123 aa, Homo sapiens
  misc_feature (17)..(17): Xaa can be any naturally occurring amino acid
MEQELQPLTVSCICKGXRKLMTQGGYDMVQKLFLDFFRGGEPEANCRGTEQRNILKPRNEQEEQEEKREIKRRLTRKLSQRPTVEELRERKILIRFSDYVEVADAQDYDRRQISRGPASPLQT

SEQ ID NO: 785502 - protein, 594 aa, Homo sapiens
MAAAVLRDSTSVPVTAEAKLMGFTQGCVTFEDVAIYFSQEEWGLLDEAQRLLYRDVMLENFALITALVCWHGMEDEETPEQSVSVEGVPQVRTPEASPSTQKIQSCDMCVPFLTDILHLTDLPGQELYLTGACAVFHQDQKHHSAEKPLESDMDKASFVQCCLFHESGMPFTSSEVGKDFLAPLGILQPQAIANYEKPNKISKCEEAFHVGISHYKWSQCRRESSHKHTFFHPRVCTGKRLYESSKCGKACCCECSLVQLQRVHPGERPYECSECGKSFSQTSHLNDHRRIHTGERPYVCGQCGKSFSQRATLIKHHRVHTGERPYECGECGKSFSQSSNLIEHCRIHTGERPYECDECGKAFGSKSTLVRHQRTHTGEKPYECGECGKLFRQSFSLVVHQRIHTTARPYECGQCGKSFSLKCGLIQHQLIHSGARPFECDECGKSFSQRTTLNKHHKVHTAERPYVCGECGKAFMFKSKLVRHQRTHTGERPFECSECGKFFRQSYTLVEHQKIHTGLRPYDCGQCGKSFIQKSSLIQHQVVHTGERPYECGKCGKSFTQHSGLILHRKSHTVERPRDSSKCGKPYSPRSNIV

SEQ ID NO: 785503 - protein, 420 aa, Homo sapiens
MAAAVLRDSTSVPVTAEAKLMGFTQGCVTFEDVAIYFSQEEWGLLDEAQRLLYRDVMLENFALITALVCWHGMEDEETPEQSVSVEGVPQVRTPEASPSTQKIQSCDMCVPFLTDILHLTDLPGQELYLTGACAVFHQDQKHHSAEKPLESDMDKASFVQCCLFHESGMPFTSSEVGKDFLAPLGILQPQAIANYEKPNKISKCEEAFHVGISHYKWSQCRRESSHKHTFFHPRVCTGKRLYESSKCGKACCCECSLVQLQRVHPGERPYECSECGKSFSQTSHLNDHRRIHTGERPYVCGQCGKSFSQRATLIKHHRVHTGERPYECGECGKSFSQSSNLIDIAEFTLEKGLMSVMNVEKPLGPNPLLFDTRELTQEKSHMSVVNVGNYSDKASALLYTREFTLQQGLMSVASVGNHLA

SEQ ID NO: 785504 - protein, 35 aa, Homo sapiens
YEGITSRAFVPPHQKHPQKFHEEENKILQETFRLY

SEQ ID NO: 785505 - protein, 71 aa, Homo sapiens
GPRGMQTSPVNHNTHSLAKFRQTFKSFSSQYSNLLPFKAWAFDQWHWHHLGAYNKCRITPVILALWEAETG

SEQ ID NO: 785506 - protein, 137 aa, Homo sapiens
RGTLPIDQDTGPGKRMFQSRGQDGCHFTCYGRFTNKSSLWHESFGKFCNKCISNFTSRHIHVCLSYFAASFSYFPVPLSFYDQFILFRLPVTLPLPPILWVSLERNHSPTQQGLISELCFRILLERLSALSSAIGRL

SEQ ID NO: 785507 - protein, 75 aa, Homo sapiens
CHPMNSLESYAFNMKATVEDEKLQGKINDEDKQKILDKCNEIINWLDKNQTAEKEEFEHQQKELSCCNWVTTAQR

SEQ ID NO: 785508 - protein, 254 aa, Homo sapiens
FPAPAPPPAPAFAPPPKVPSPERSAPRVPLPSPQPSYPFRPAASGGTPPPACLPPAQPCQGSPAMNLFRFLGDLSHLLAIILLLLKIWKSRSCAGISGKSQVLFAVVFTARYLDLFTNYISLYNTCMKVVYIACSFTTVWLIYSKFKATYDGNHDTFRVEFLVVPTAILAFLVNHDFTPLEILWTFSIYLESVAILPQLFMVSKTGEAETITSHYLFVVFCLLDKKKKSFHSLVFDSDDSFFFYSVAPIFIKCF

SEQ ID NO: 785509 - protein, 141 aa, Homo sapiens
MKVVYIACSFTTVWLIYSKFKATYDGNHDTFRVEFLVVPTAILAFLVNHDFTPLEILWTFSIYLESVAILPQLFMVSKTGEAETITSHYLFALGVYRNALSLQLDLALPFRGLLRPHRHCGQAWSRQSSTAISSTSILPKS

SEQ ID NO: 785510 - protein, 267 aa, Homo sapiens
FPAPAPPPAPAFAPPPKVPSPERSAPRVPLPSPQPSYPFRPAASGGTPPPACLPPAQPCQGSPAMNLFRFLGDLSHLLAIILLLLKIWKSRSCAGISGKSQVLFAVVFTARYLDLFTNYISLYNTCMKVVYIACSFTTVWLIYSKFKATYDGNHDTFRVEFLVVPTAILAFLVNHDFTPLEILWTFSIYLESVAILPQLFMVSKTGEAETITSHYLFALGVYRNALSLQLDLALPFRGLLRPHRHCGQAWSRQSSTAISSTSILPKS

SEQ ID NO: 785511 - protein, 258 aa, Homo sapiens
MFSRTFRKHGVVPLVTYMRIYKKGDIVDIKGMGTVQKGMPHKCYHGKTGRVYSVTQHAVGIVVNKQGQILAKSINVHTEHMKHSKSRDSFLKCMRKMIRKKKQKKKKTIFGRLLGLEKVFKPHSLWGAGPQLGYGDTLGQRGPKEKPGHGHPGVGFPHQNKNRGGTRKLFVASTSPRAVSGGPKTGSPHTRVPREIEINAGRRGGKQHNPPPKQVERKNNTTEKARQQQHTENSTKARNKQRQRSNTHIAKRKNDDRQ

SEQ ID NO: 785512 - protein, 112 aa, Homo sapiens
MYTAGASLAIFLPCHLLALFYGALQITAAWNWFLPIPRFGCSVSPEVYSICFQLYPPFLLKLDRIGVFGQTLFKPFKKGLGVWVLWLMPIILAFWEAEVGRSLEARSLRPAW

SEQ ID NO: 785513 - protein, 94 aa, Homo sapiens
KNFCLSKDSGKIKKKASPHNEIPLHSYICWKKKKRITTNVGKDVRQLEAFCIAGGKMELRGCCGKTPLNATPGVTTGSSNSTPDYRPQRIENWC

SEQ ID NO: 785514 - protein, 62 aa, Homo sapiens
MRNTAAASKLIRRVRDSQLLRSADRSTTRGAARGAAAKGVWMIFLEQQFDSTVSILSMKHDC

SEQ ID NO: 785515 - protein, 108 aa, Homo sapiens
HTMFPALSSLLALSSLHCLFLLTWVRVCRSSSPSGSGLRHSKWSFLEREPRSKGTERGVAELRGNQESKISPCPQAIPARWPTGDANVLLPETMQAEEGMSQMETHTR

SEQ ID NO: 785516 - protein, 373 aa, Homo sapiens
MSLLLLLLLVSYYVGTLGTHTEIKRVAEEKVTLPCHHQLGLPEKDTLDIEWLLTDNEGNQKVVITYSSRHVYNNLTEEQKGRVAFASNFLAGDASLQIEPLKPSDEGRYTCKVKNSGRYVWSHVILKVLVRPSKPKCELEGELTEGSDLTLQCESSSGTEPIVYYWQRIREKEGEDERLPPKSRIDYNHPGRVLLQNLTMSYSGLYQCTAGNEAGKESCVVRVTVQYVQSIGMVAGAVTGIVAGALLIFLLVWLLIRRKDKERYEEEERPNEIREDAEAPKARLVKPSSSSSGSRSSRSGSSSTRSTANSASRSQRTLSTDAAPQPGLATQAYSLVGPEVRGSEPKKVHHANLTKAETTPSMIPSQSRAFQTV

SEQ ID NO: 785517 - protein, 366 aa, Homo sapiens
YCIFNFYLEQRSLGLSAPGLTTLCHWEYSLSSSSHHQERQAESYRCLTLPRSIPQVITYSSRHVYNNLTEEQKGRVAFASNFLAGDASLQIEPLKPSDEGRYTCKVKNSGRYVWSHVILKVLVRPSKPKCELEGELTEGSDLTLQCESSSGTEPIVYYWQRIREKEGEDERLPPKSRIDYNHPGRVLLQNLTMSYSGLYQCTAGNEAGKESCVVRVTVQYVQSIGMVAGAVTGIVAGALLIFLLVWLLIRRKDKERYEEEERPNEIREDAEAPKARLVKPSSSSSGSRSSRSGSSSTRSTANSASRSQRTLSTDAAPQPGLATQAYSLVGPEVRGSEPKKVHHANLTKAETTPSMIPSQSRAFQTV

SEQ ID NO: 785518 - protein, 385 aa, Homo sapiens
MSLLLLLLLVSYYVGTLGTHTEIKRVAEEKVTLPCHHQLGLPEKDTLDIEWLLTDNEGNQKVVITYSSRHVYNNLTEEQKGRVAFASNFLAGDASLQIEPLKPSDEGRYTCKVKNSGRYVWSHVILKVLVRPSKPKCELEGELTEGSDLTLQCESSSGTEPIVYYWQRIREKEGEDERLPPKSRIDYNHPGRVLLQNLTMSYSGLYQCTAGNEAGKESCVVRVTVQYVQSIGMVAGAVTGIVAGALLIFLLVWLLIRRKDKERYEEEERPNEIREDAEAPKARLVKPSSSSSGSRSSRSGSSSTRSTANSASRSQRTLSTDAAPQPGLATQAYSLVGPEVRGSEPKKVHHANLTKAETTPSMIPSQTGVQIYLLTRTCGEKVGER

SEQ ID NO: 785519 - protein, 183 aa, Homo sapiens
GRVLLQNLTMSYSGLYQCTAGNEAGKESCVVRVTVQYVQSIGMVAGAVTGIVAGALLIFLLVWLLIRRKDKERYEEEERPNEIREDAEAPKARLVKPSSSSSGSRSSRSGSSSTRSTANSASRSQRTLSTDAAPQPGLATQAYSLVGPEVRGSEPKKVHHANLTKAETTPSMIPSQSRAFQTV

SEQ ID NO: 785520 - protein, 74 aa, Homo sapiens
GLQGTYPCTRVRSYTTPSSLYLTPHDLSASAALNPDFHILHSVGPLCSTWTPAICAMVGSSSKTESWVIMGFTS

SEQ ID NO: 785521 - protein, 106 aa, Homo sapiens
PLHGFNSYLYAHAHTPQTFLLSSQPTLANIPGAPKTHYLPPKRERNWYHYSPVVQVTTFVPLKPICISPSALSLPQADHHHPCLEKSLTTALLDSPQFIHPSHCTQ

SEQ ID NO: 785522 - protein, 173 aa, Homo sapiens
CSVAQAGVRWRDLGSLQPPPPGFKRFSCLSLLSSWDNRCVPPCPANFCIFSTERVPPCWSGWSRTLDLMICPPRPPKVLGLQARATAPGHQPPILFKVTPLLTEIDAYLSCLLWKGSSETLKNVPFVYHPSVTWELRPLFEYSCLRFKLSRLYRWNQCTSYIYQLMPHVSLSV

SEQ ID NO: 785523 - protein, 31 aa, Homo sapiens
AIVAPAGCAGPRTLREARVRGHEFEANLVHM

SEQ ID NO: 785524 - protein, 56 aa, Homo sapiens
KVIHGIPYNRPADLQAQTQGQIEFTCSDSRWRFLIRTGTNPGSVEPKVYAILTALL

SEQ ID NO: 785525 - protein, 79 aa, Homo sapiens
AVSRDRGSTVQPQQQRETVESRRGRQKRGERGEEPQEIFEDIMLKNFPKFMKHHKPQIQESQIPSSRKIPRNTDLGNYY

SEQ ID NO: 785526 - protein, 87 aa, Homo sapiens
FCLHTHLRNPASRTPVTLQEDEEAKAGSSPTGNTELSGASKTAVSPIKEAQMETRDCPHPSPWHRLKRLITGGASQGVGNRPSGWQE

SEQ ID NO: 785527 - protein, 37 aa, Homo sapiens
MWIVFKATRLGCMLCVTKVKCLRCPHKPTVSAEPNNH

SEQ ID NO: 785528 - protein, 87 aa, Homo sapiens
ISDCCASNQRDSVGVGPSEPGAGYNLVVRRFLSPSEKRSIRVGVTRFSRCRPSPLSLTQKRNSLTPCASQVRQCLALLGLTHGAHTH

SEQ ID NO: 785529 - protein, 94 aa, Homo sapiens
LSLTLVWHGEETGEGQKQEALPASAQVFFQAHRAVGNSHGCHLISTQEDLIYCKTLLLLLPPSVRSNIRVTVTATAVIINLVVIILLDEVYGCI

SEQ ID NO: 785530 - protein, 242 aa, Homo sapiens
AELERWRRQLPPGLARGLDLGTPQNGPEGEAPERRAEVRTVMLNALLRASRKWEAAVTPLLVALTPCDPTDLELVAALLTLEVYLDKLRRECPLAQLMDSETDMVRQIRALDSDMQTLVYENYNKFISATDTIRKMKNDFRKMEDEMDRLATNMAVITDFSARISATLQDRHERITKLAGVHALLRKLQFLFELPSRLTKCVELGAYGQAVRYQGRAQAVLQQYQHLPSFRAIQDDCQVITA

SEQ ID NO: 785531 - protein, 68 aa, Homo sapiens
MAPLFIHTQQESGVNVMRGTKLVASLQTNAYIMNRHIKEKVVESVSTPKEKMHIIDPASNHNSEHKSL

SEQ ID NO: 785532 - protein, 96 aa, Homo sapiens
MSVGWSLAGLPKARAGVSDSADLWGAGASSLLISSQLMLMPLVQMPYSENPCAQVTGHLAACEFPVVSGLAQLVVADILSVNFNLESFREQSPVLT

SEQ ID NO: 785533 - protein, 64 aa, Homo sapiens
GPHALFFMRARISLHGRLRSATVPNLTCFLILTLPQSQRNCHIHHKNQTSPNDLSPGELKKRVL

SEQ ID NO: 785534 - protein, 308 aa, Homo sapiens
VLYAPRSRAASLQPASREGCAEGGGAERREVSPPPEPGETRASSVTARRPPCRRVGLETDPAPSGSPPCASDSQTWKVFNVTLNGSPKDALMDDSDTPTYYLQIEPQDGCHPGDSVERSVTCLPSASDENENQLDGDGHEHLTSSDSAMGKPQVSEQDSLNNNESCTLSCEVAAGENSQNTLCEASRDEQAFLGKDKKIPGKRSPRSKKGTAKKIPPGLFSGDIAPLMQEKVLSAVTYAVDDEEAAEVNANEQPEAPKLVLQSLFSLIRGDVEQLDSKSTSPLPSSDSRILFQDEDYDESTDIHSGYE

SEQ ID NO: 785535 - protein, 77 aa, Homo sapiens
GDGHEHLTSSDSAMGKPQVSEQDSLNNNESCTLSCEVAAGENSQNTLCEASRDEQAFLGKDKKIPGKRSPRSNKRDC

SEQ ID NO: 785536 - protein, 275 aa, Homo sapiens
KQAGPPRVMGSVTARRPPCRRVGLETDPAPSGSPPCASDSQTWKVFNVTLNGSPKDALMDDSDTPTYYLQIEPQDGCHPGDSVERSVTCLPSASDENENQLDGDGHEHLTSSDSAMGKPQVSEQDSLNNNESCTLSCEVAAGENSQNTLCEASRDEQAFLGKDKKIPGKRSPRSKKGTAKKIPPGLFSGDIAPLMQEKVLSAVTYAVDDEEAAEVNANEQPEAPKLVLQSLFSLIRGDVEQLDSKSTSPLPSSDSRILFQDEDYDESTDIHSGYE

SEQ ID NO: 785537 - protein, 40 aa, Homo sapiens
MPGGRVCLVLDEVEVGCLVDECVWCWMKLRLVLDEVEIGC

SEQ ID NO: 785538 - protein, 143 aa, Homo sapiens
PSQQLHPIPGTLIHQASISTPSNTRSDTLPLRAAKTSTKQRRDEKVERLVAPLKRVWSPDGLLSMDRSQWTKLLCTRRSPDRLVSLPFYQSLISQPGYQGRVCGVCSVGLCIVYNGLLCIVHVCRPMWYQIGIVGVCRAFGVC

SEQ ID NO: 785539 - protein, 129 aa, Homo sapiens
LCSDPPWLEIIRVDAPDPGADPLASSVNGMCLDIPAHLSIRILISDAGAVEGITQQEILGVETRFSSVNWQYQCGLTCEHKADLLPISASVQFIKIPAQLPHPLTRFQINYTEYDCNRNEVGQNIRWIL

SEQ ID NO: 785540 - protein, 697 aa, Homo sapiens
MGFQPPAALLLRLFLLQGILRLLWGDLAFIPPFIRMSGPAVSASLVGDTEGVTVSLAVLQDEAGILPIPTCGVLNNETEDWSVTVIPGAKVLEVTVRWKRGLDWCSSNETDSFSESPCILQTLLVSASHNSSCSAHLLIQVEIYANSSLTHNASENVTVIPNQVYQPLGPCPCNLTAGACDVRCCCDQECSSNLTTLFRRSCFTGVFGGDVNPPFDQLCSAGTTTRGVPDWFPFLCVQSPLANTPFLGYFYHGAVSPKQDSSFEVYVDTDAKDFADFGYKQGDPIMTVKKAYFTIPQVSLAGQCMQNAPVAFLHNFDVKCVTNLELYQERDGIINAKIKNVALGGIVTPKVIYEEATDLDKFITNTETPLNNGSTPRIVNVEEHYIFKWNNNTISEINVKIFRAEINAHQKGIMTQRFVVKFLSYNSGNEEELSGNPGYQLGKPVRALNINRMNNVTTLHLWQSAGRGLCTSATFKPILFGENVLSGCLLEVGINENCTQLRENAVERLDSLIQATHVAMRGNSDYADLSDGWLEIIRVDAPDPGADPLASSVNGMCLDIPAHLSIRILISDAGAVEGITQQEILGVETRFSSVNWQYQCGLTCEHKADLLPISASVQFIKIPAQLPHPLTRFQINYTEYDCNRNEVCWPQLLYPWTQYYQGELHSQCVAKGLLLLLFLTLALFLSNPWTRICKAYS

SEQ ID NO: 785541 - protein, 600 aa, Homo sapiens
MGFQPPAALLLRLFLLQGILRLLWGDLAFIPPFIRMSGPAVSASLVGDTEGVTVSLAVLQDEAGILPIPTCGVLNNETEDWSVTVIPGAKVLEVTVRWKRGLDWCSSNETDSFSESPCILQTLLVSASHNSSCSAHLLIQVEIYANSSLTHNASENVTVIPNQVYQPLGPCPCNLTAGACDVRCCCDQECSSNLTTLFRRSCFTGVFGGDVNPPFDQLCSAGTTTRGVPDWFPFLCVQSPLANTPFLGYFYHGAVSPKQDSSFEVYVDTDAKDFADFGYKQGDPIMTVKKAYFTIPQVSLAGQCMQNAPVAFLHNFDVKCVTNLELYQERDGIINAKIKNVALGGIVTPKVIYEEATDLDKFITNTETPLNNGSTPRIVNVEEHYIFKWNNNTISEINVKIFRAEINAHQKGIMTQRFVVKFLSYNSGNEEELSGNPGYQLGKPVRALNINRMNNVTTLHLWQSAGRGLCTSATFKPILFGENVLSGCLLEVGINENCTQLRENAVERLDSLIQATHVAMRGNSDYADLSDGWLEIIRVDAPDPGADPLASSVNGMCLDIPAHLSIRILISDAGAVEGITQQEILGVETRFSSRTCYPPP

SEQ ID NO: 785542 - protein, 178 aa, Homo sapiens [sequence omitted]

SEQ ID NO: 785543 - protein, 697 aa, Homo sapiens; identical to SEQ ID NO: 785540

SEQ ID NO: 785544 - protein, 697 aa, Homo sapiens; identical to SEQ ID NO: 785540

SEQ ID NO: 785545 - protein, 677 aa, Homo sapiens
MGFQPPAALLLRLFLLQGILRLLWGDLAFIPPFIRMSGPAVSASLVGDTEGVTVSLAVLQDEAGILPIPTCGVLNNETEDWSVTVIPGAKVLEVTVRWKRGLDWCSSNETDSFSESPCILQTLLVSASHNSSCSAHLLIQVEIYANSSLTHNASENVTVIPNQVYQPLGPCPCNLTAGACDVRCCCDQECSSNLTTLFRRSCFTGVFGGDVNPPFDQLCSAGTTTRGVPDWFPFLCVQSPLANTPFLGYFYHGAVSPKQDSSFEVYVDTDAKDFADFGYKQGDPIMTVKKAYFTIPQVSLAGQCMQNAPVAFLHNFDVKCVTNLELYQERDGIINAKIKNVALGGIVTPKVIYEEATDLDKFITNTETPLNNGSTPRIVNVEEHYIFKWNNNTISEINVKIFRAEINAHQKGIMTQRFVVKFLSYNSGNEEELSGNPGYQLGKPVRALNINRMNNVTTLHLWQSAGRGLCTSATFKPILFGENVLSGCLLEVGINENCTQLRENAVERLDSLIQATHVAMRGNSDYADLSDGWLEIIRVDAPDPGADPLASSVNGMCLDIPAHLSIRILISDAGAVEGITQQEILGVETRFSSVNWQYQCGLTCEHKADLLPISASVQFIKIPAQLPHPLTRFQINYTEYDCNRNEVCWPQLLYPWTQYYQAQPERKYFQGIFVGEM

SEQ ID NO: 785546 - protein, 176 aa, Homo sapiens
MGFQPPAALLLRLFLLQGILRLLWGDLAFIPPFIRMSGPAVSASLVGDTEGVTVSLAVLQDEAGILPIPTCGVLNNETEDWSVTVIPGAKVLEVTVRWKRGLDWCSSNETDSFSESPCILQTLLVSASHNSSCSAHLLIQVEIYANSSLTHNASALWEAKMGGSLEPRSLRPAWTT

SEQ ID NO: 785547 - protein, 300 aa, Homo sapiens
AAYQGDFTIEVPPSTQRLVVTFVDPSGEFMDAVRVLPFDPRGAGVYHEVKAMRKKAPVILHTSQSNTIPLGELEDEAPLGELVLPSGAFRRADGKPYSGPVEARVTFVDPRDLTSAASAPSDLRFVDSDGELAPLRTYGMFSVDLRAPGSAEQLQVGPVAVRVAASQIHMPGHVEALKLWSLNPETGLWEEESGFRREGSSGPRVRREERVFLVGNVEIRERRLFNLDVPERRPLLREGARLRQRQVHPSEQVRAWWSRCTSGAPGFPHPGPGRLSSHGPRAASVCLSLAPLSPVRLPSS

SEQ ID NO: 785548 - protein, 286 aa, Homo sapiens
CDSRIEKEEMIPKQDISEELESQRAKSEDHVRNIFKETEEMSKTEGKLENCWRKYAVEGVKNSFSQKSNFREITMRYVKTLSRENGQKFNAVGENCITDSNPAKHLRGSREESLHPSVSSVENLQQHEDLINLQSFQLGERAYQTDVLVKVPRQSSVLSENQRMNNPERWFESTGRGKTYNQNRAFNQHQRFHSGEKTYEHNECGKAFSWPSILSKHQRIHTGKKLYTCEDCGKSFSVHSYFIQHCKIHTREKPYECIKCGKAFSTHSSYVQHLKIHTGEKHHECN

SEQ ID NO: 785549 - protein, 79 aa, Homo sapiens
GPGLTWLCGFWGLAEMRYTSRPCEDRRAGQCHSPEGGPGQLVESEDLAPSFISLFFSLRIFIIIVLISKPGYCPPTQKK

SEQ ID NO: 785550 - protein, 102 aa, Homo sapiens
VVVAFPGTSSLGPAELSPRGIESGAGQHSEAISSLFCCQISLFSSCTRGGNTKGIGHPETLIEFALPFHLCETLNGCLPSYNLFLHLQCSLTVCTSQRSCER

SEQ ID NO: 785551 - protein, 38 aa, Homo sapiens
MTIIEANNYNPENEEQGAWVKPTAAWAHRGVGNGSPAR

SEQ ID NO: 785552 - protein, 346 aa, Homo sapiens
LVGRGESAEAWLQRIGTPGGRELGLHVPPTDPGVMAFPLLAGTLPHVESHTTSCEPGSPGGPPDSSQARHRQSLFPRLRISKAWGPAHPPLLSRPACPQVSAGRGHLPQPRKTRTPRVQEEAGAGPLGCHSLSPCPGPLPLVLEYALVGGPCSAQPGGSQCHQNQGHGNSIDGFCSPGPPMRGQCVGGAGPPMPMRGQCVWGAGPPMRGQCVGGAGPPRVQGTLVHCPTRHLSQRRGPGRQRGNSLPEPSSMLTCPQKTKSNSCDCLRLSRQASSQDELPLTELEWFRGQCQAGLWRKGRSEVAKPNRVLPVAGRNPRCPGLFAPGFRRKLVQRLASSLTPGRRLG

SEQ ID NO: 785553 - protein, 351 aa, Homo sapiens [sequence omitted]

SEQ ID NO: 785554 - protein, 351 aa, Homo sapiens [sequence omitted]

SEQ ID NO: 785555 - protein, 351 aa, Homo sapiens [sequence omitted]

SEQ ID NO: 785556 - protein, 115 aa, Homo sapiens
MSQDVEMCPWGQKCPQLRICPRGTHPHQASGFCVDQVPRKRNISAGRGGSRLESQHLRPGVPEQPGQRSERPHLYKKKKERKKMRDPGLKIHKHHKETIHYETQQKQQIDSRPRY

SEQ ID NO: 785557 - protein, 179 aa, Homo sapiens [sequence omitted]

SEQ ID NO: 785558 - protein, 351 aa, Homo sapiens [sequence omitted]

SEQ ID NO: 785559 - protein, 351 aa, Homo sapiens [sequence omitted]

SEQ ID NO: 785560 - protein, 138 aa, Homo sapiens
HEASCRFGTRQPHRATFPAAPGLQGCPRTGPSQPSMQLPSYPEDGSGLSRGHKDVRPGPPGQERVQVLRACAPQPQHQVDCSAVGGPVAAREKPPVSRLGSAHQGLPTSAFEGACHALGDPGIFTGLEAGDRTVSVPG

SEQ ID NO: 785561 - protein, 93 aa, Homo sapiens
EAECKEELLKDDSSEHGSHRPTAKRRCSGDIATSLVTRALKCVCQGHHDHSLKEFNMLIADALDGPLDFCDSCHVQPPGDEEEGLFQPSKEQA

SEQ ID NO: 785562 - protein, 150 aa, Homo sapiens
AKSGPLLLVCRVPPGLSCPGRETVTGAIGGRVREGRGPARSRLLVTVFAKRGGRPGEGGALVRAGPQGGACGEGAHSGLAEGRQGRGVYGRGQALALVEEGHQAPHLVQGLRLHEDIVLGEQQRGDLGELAHRRAVRVGDDGSQPVQRVV

SEQ ID NO: 785563 - protein, 83 aa, Homo sapiens
LLRVGVVETRTPQNLRMTIARQLAEILLRGMCEQSYWNPVEDPPCQSPLDDPLRKGANTKTYTLTRRARLKEQTPKIQYISRY

SEQ ID NO: 785564 - protein, 90 aa, Homo sapiens
IGRGTFSEVQDHMLIGTQMAIKIIPKAGSLGITLQRVISILKLLCHFNIVRLYQVIDTPNTSYLFSNGVCKRRTPTQPIHHHGLMREEKA

SEQ ID NO: 785565 - protein, 104 aa, Homo sapiens
PLSGTSQRPGVSQGSPPQARSSAPPGPGKLYLPHLHPGLGVRAAVGLGSTGTGFVLRESGFPNHPRGHCVSLFSQMWLCEWGCLAPPGSISGLPRPSPVGGQRP

SEQ ID NO: 785566 - protein, 134 aa, Homo sapiens
EGKGSRQLASSVPICFPERGEEISEDAMPEWLTLQENRRTKAGLYCRNLGSLQPPCQILLPQPAECLGLQAPAATPDWFLYFLVETGFRGVGWAWSQLLTSSDLPASASRGAGIADGSLAYSVLNVAQVGVQWR

SEQ ID NO: 785567 - protein, 84 aa, Homo sapiens
MRNNQWEVEEIPGPCLVLLQSCFVTGDRARRHLLSWRAVMFRLLLINRFEILKYTKLPAWKVTVIAMDMIGFGGIKPSQFAVST

SEQ ID NO: 785568 - protein, 141 aa, Homo sapiens
MLGFLFPKSGGPAGELGQWAGGKPPKAEEEAARHPGRKARGWNGEQRKPPVAKKDGSPAEERRNHAAPKASGLAATHRLMSRITVLKAQTPPKPCPDATLRASEGLTTAAEKSRASSTTGKDNSVPTLATSQWKARAPLWN

SEQ ID NO: 785569 - protein, 67 aa, Homo sapiens
PRYEPPAHLHHHSSANQCLAFSWAAFQLDSLRAPRVGGFSPHLMGREAGTCPGHTASEGAAGIQIHV

SEQ ID NO: 785570 - protein, 126 aa, Homo sapiens
TQEFACANLCTGMPWVLEHPSTAGRMALGLHTVGLLGPNRTSSCGRLPWPRSHLVPQCPKVQFSFVLFLEQCPFPAGEGTALIWDHKIMHYDSLTRLLLETPPGPVSTTAISSTRGCARFSEPSRR

SEQ ID NO: 785571 - protein, 94 aa, Homo sapiens
EEGGSAGQEEYLGQENYACVREALREWLWKLSTVALNPRGIDHPAHAEGIKLQIEGEGVESQSIKNKNFQKVPDQKGTPKRLQAEAETAKGEPC

SEQ ID NO: 785572 - protein, 75 aa, Homo sapiens
KKHCPNQYQIYSESFKQHDITGRALLRLTDKKLERMGIAQENLRQHILQQVLQLKVREEVRNLQLLTQASSEGSP

SEQ ID NO: 785573 - protein, 68 aa, Homo sapiens
TGPAGDRYHFGPENLPILAEKVLEIRSACVEDSPLTHRFRPEPLPTRPGTRGRFLGITPRPNRKHNHS

SEQ ID NO: 785574 - protein, 74 aa, Homo sapiens
KHSSDLELRKEELGIQLDEKWLGDPGAGLRWGCWSLQGRRIPLPQHQLQSQGGQGGQRSSRHGFKPPCLQTSPA

SEQ ID NO: 785575 - protein, 154 aa, Homo sapiens
PPPIPIPSSAASLPEKPRGAEFGATSDPGWDLRVGFEAGTCQGPPAPQNAISSRELLRLSGGAKHWHPGSRQRVARARPSHIPLTHPVCAGREGGLVQPPPPATRTNSGKEQDGAEGARGGATEQITRRSRRAAPWAGAWLGGRMGDAHQAAPL

SEQ ID NO: 785576 - protein, 112 aa, Homo sapiens
MSLLMAGACLSLILVSVGSIPVPGTVALEMEGIEGEQILKHSLHLSLLPSHPPVFQPEAFALRPRLWPTYHRYPSSTGKGNLKRKRGTRDEDTPRKDHVKTWREDSQLQAKE

SEQ ID NO: 785577 - protein, 111 aa, Homo sapiens
  misc_feature (15)..(15): Xaa can be any naturally occurring amino acid
RASLMPPPDPRGNPXLMDATSYMCRISLSVFQFLGDQRQELVAFHRLATVYYSLHMYEMAEDCYLKTLSLCPPWLQSPKEALYYAKVYYRLGRLTFCQLKGSCRLAQGRPN

SEQ ID NO: 785578 - protein, 154 aa, Homo sapiens
LQISLEGYEKALEFATLAARLSTVTGDQRQELVAFHRLATVYYSLHMYEMAEDCYLKTLSLCPPWLQSPKEALYYAKVYYRLGRLTFCQLKDAHDATEYFLLALAAAVLLGDEELQDTIRSRLDNICQSPLWHSRPSGCSSERARWLSGGGLAL

SEQ ID NO: 785579 - protein, 150 aa, Homo sapiens
MSEQMMQSVGCRISLSVFQFLGDQRQELVAFHRLATVYYSLHMYEMAEDCYLKTLSLCPPWLQSPKEALYYAKVYYRLGRLTFCQLKDAHDATEYFLLALAAAVLLGDEELQDTIRSRLDNICQSPLWHSRPSGCSSERARWLSGGGLAL

SEQ ID NO: 785580 - protein, 150 aa, Homo sapiens; identical to SEQ ID NO: 785579

SEQ ID NO: 785581 - protein, 95 aa, Homo sapiens
RPAASQHSHLPRASGSPAHEQLTPPSTAFQAHLDSPSQTFPEQLSPNPTKTYFAQEGCSFLYEKLPPSPSSPGNGDCTLLALAQLRGPLSVDVPL

SEQ ID NO: 785582 - protein, 137 aa, Homo sapiens
REAFPGDSKSMVRELIDKVRTVFVETLDELGWMDEESKKKAQEKAMSIREQIGHPDYILEEMNRRLDEEYSNLNFSEDLYFENSLQNLKVGAQRSLRKLREKVDPNLWIIGAAVVNAFYSPNRNQIVFPAGILQPPF

SEQ ID NO: 785583 - protein, 171 aa, Homo sapiens
MRTYWLHSVWVLGFFLSLFSLQGLPVRSVDFNRGTDNITVRQGDTAILRCVVEDKNSKVAWLNRSGIIFAGHDKWSLDPRVELEKRHSLDYSLRIQKVDVYDEGSYTCSVQTQHEPKTSQVYLIVQVPQRSPIFSSDGHCELRPQRDLVCMANGVLNLNHWRHLTHGSARG

SEQ ID NO: 785584 - protein, 126 aa, Homo sapiens
MLWYGLLGYLRLPCKQLWPDWIPGRGQQTKECSVGSASSDLQDHPAEIRSNSSPRAKVSYGRKLNLWKWPSMATLYYRCSCTKPSGYHMSWVAAPPLCLSSGCCISETCRPAITQCSPTRMEDLCF

SEQ ID NO: 785585 - protein, 100 aa, Homo sapiens
PARCCEVSINLSAVPVPRAVTCGAPFPALERPAEDAEKQRESSPADCTRGLPKSDPSTTGCAEREDPSLYPQPGPTPGSLLLRVYRDEGQSVKLQILDPQ

SEQ ID NO: 785586 - protein, 160 aa, Homo sapiens [sequence omitted]

SEQ ID NO: 785587 - protein, 109 aa, Homo sapiens
SDGLGTRALERRGCGGRLSRAAAAPWARDPCREERADAGGSASGRLEAQHPGGAGARERQNCSNLLSLPHPQRPNPGRVSATLAATPCRALPARLLRRRGLRHCRPRAV

SEQ ID NO: 785588 - protein, 120 aa, Homo sapiens
SAQPHQVIPTLYAEVEGTSSGGGLRNHMADMPQCGASWKHSWLSRPAAGTVHLAPGTAVYGFSSRWQFEFDLQGSKRKLNLFKRKTTLQKLPVFQGTTFDDVLLLLVTGNKRIQNLRDTA

SEQ ID NO: 785589 - protein, 103 aa, Homo sapiens
MTQLRENIQWLIVTCGRRSELHGFAFMFLFVSLQPSFPPSPRCPPRVPLLQPGESDPCFLNFSEAYLHLCFCSTLLSPLYTNYSPVLSKLFPSARLTSSTISF

SEQ ID NO: 785590 - protein, 134 aa, Homo sapiens
QRAGFFIKEKESPPPPLHVDLNETNLINTRKKVCKWASICRLSTCVTQVIKVILVVNPCDSVPGSPPRRTPDSDPQILSVRGSSGLRTPPRARAGTHAHTLTRLLAHRQCLSFPPGTPGQPGWMNKLQLAAALR

SEQ ID NO: 785591 - protein, 224 aa, Homo sapiens
MALSKSMHARNRYKDKPPDFAYLASKYPDFKQHVQINLNGRVSLNFKDPEAVRALTCTLLREDFGLSIDIPLERLIPTVPLRLNYIHWVEDLIGHQDSDKSTLRRGIDIGTGASCIYPLLGATLNGWYFLATEVDDMCFNYAKKNVEQNNLSDLIKVVKVPQKTLLMDALKEESEIIYDFCMCNPPFFANQLEAKGVNSRNPRRPPPSSVNTGDSLEPGRWRLQ

SEQ ID NO: 785592 - protein, 113 aa, Homo sapiens
MALSKSMHARNRYKDKPPDFAYLASKYPDFKQHVQINLNGRVSLNFKDPEAVRALTCTLLREDFGLSIDIPLERLIPTVPLRLNYIHWVEDLIGHQDSDKSTLRRGIDIGISF

SEQ ID NO: 785593 - protein, 504 aa, Homo sapiens
MALSKSMHARNRYKDKPPDFAYLASKYPDFKQHVQINLNGRVSLNFKDPEAVRALTCTLLREDFGLSIDIPLERLIPTVPLRLNYIHWVEDLIGHQDSDKSTLRRGIDIGTGASCIYPLLGATLNGWYFLATEVDDMCFNYAKKNVEQNNLSDLIKVVKVPQKTLLMDALKEESEIIYDFCMCNPPFFANQLEAKGVNSRNPRRPPPSSVNTGGITEIMAEGGELEFVKRIIHDSLQLKKRLRWYSCMLGKKCSLAPLKEELRIQGVPKVTYTEFCQGRTMRWALAWSFYDDVTVPSPPSKRRKLEKPRKPITFVVLASVMKELSLKASPLRSETAEGIVVVTTWIEKILTDLKVQHKRVPCGKEEVSLFLTAIENSWIHLRRKKRERVRQLREVPRAPEDVIQALEEKKPTPKESGNRQELARGPQERTPCGPALREGEAAAVEGPCPSQESLSQEENPEPTEDERSEEKGGVEVLESCQGSSNGAQDQEASEQFGSPVAERG

SEQ ID NO: 785594 - protein, 143 aa, Homo sapiens
MALSKSMHARNRYKDKPPDFAYLASKYPDFKQHVQINLNGRVSLNFKDPEAVRALTCTLLREDFGLSIDIPLERLIPTVPLRLNYIHWVEDLIGHQDSDKSTLRRGIDIGTQGRACPVALEPGYPRAKMARGHLASTPYLEQP

SEQ ID NO: 785595 - protein, 107 aa, Homo sapiens
QETTQSPRRGTLTPCEVHELHPIHQTRRAHGRSGKPTPLANQHPSTVCSKFQNPCSCLQHSAHTILQMSALPEAGRLQRSAHTILQTSALPEVGGVSSLLTRKSFAL

SEQ ID NO: 785596 - protein, 141 aa, Homo sapiens
WGAWVRCLRPACIRSWLRLFTVCGPGPQFLPLYNGDNNIPASWELAGLQESKSLELGRQAWGPKEGPQLWIWTPLLEISLPEHPPSLRGHPIGPLPSGGPKLQPPPPPTALPALPDPDAPCSSFLCLDAVDIGDVPCMAGC

SEQ ID NO: 785597 - protein, 214 aa, Homo sapiens
MYVRVSFDTKPDLLLHLMTKEWQLELPKLLISVHGGLQNFELQPKLKQVFGKGLIKAAMTTGAWIFTGGVNTGVIRHVGDALKDHASKSRGKICTIGIAPWGIVENQEDLIGRDVVRPYQTMSNPMSKLTVLNSMHSHFILADNGTTGKYGAEVKLRRQLEKHISLQKINTSFHSYKTAHVDLQDKRQVKTALEQAEWQPGRGLFDHDNLMQST

SEQ ID NO: 785598 - protein, 230 aa, Homo sapiens
MYVRVSFDTKPDLLLHLMTKEWQLELPKLLISVHGGLQNFELQPKLKQVFGKGLIKAAMTTGAWIFTGGVNTGVIRHVGDALKDHASKSRGKICTIGIAPWGIVENQEDLIGRDVVRPYQTMSNPMSKLTVLNSMHSHFILADNGTTGKYGAEVKLRRQLEKHISLQKINTRIGQGVPVVALIVEGGPNVISIVLEYLRDTPPVPVVVCDGSGRASDILAFGHKYSEEGG

SEQ ID NO: 785599 - protein, 195 aa, Homo sapiens
MYVRVSFDTKPDLLLHLMTKEWQLELPKLLISVHGGLQNFELQPKLKQVFGKGLIKAAMTTGAWIFTGGVNTGVIRHVGDALKDHASKSRGKICTIGIAPWGIVENQEDLIGRDVVRPYQTMSNPMSKLTVLNSMHSHFILADNGTTGKYGAEVKLRRQLEKHISLQKINTRCLPFFSLDSRLFYSFWGSCQLDS

SEQ ID NO: 785600 - protein, 352 aa, Homo sapiens
RPAARSQRERSALGCFPAEGGELLMGKKWRDAAEMERGCSDREDNAESRRRSRSASRGRFAESWKRLSSKQGSTKRSGLPSQQTPAQKSWIERAFYKRECVHIIPSTKDPHRCCCGRLIGQHVGLTPSISVLQNEKNESRLSRNDIQSEKWSISKHTQLSPTDAFGTIEFQGGGHSNKAMYVRVSFDTKPDLLLHLMTKEWQLELPKLLISVHGGLQNFELQPKLKQVFGKGLIKAAMTTGAWIFTGGVNTGVIRHVGDALKDHASKSRGKICTIGIAPWGIVENQEDLIGRDVVRPYQTMSNPMSKLTVLNSMHSHFILADNGTTGKYGAEVKLRRQLEKHISLQKINTSK

SEQ ID NO: 785601 - protein, 123 aa, Homo sapiens
MYVRVSFDTKPDLLLHLMTKEWQLELPKLLISVHGGLQNFELQPKLKQVFGKGLIKAAMTTGAWIFTGGVNTGVIRHVGDALKDHASKSRGKICTIGIAPWGIVENQEDLIGRDVSPECCRFP

SEQ ID NO: 785602 - protein, 89 aa, Homo sapiens
SRRRSGEPAFPVRNAERGPRVCRALKEGKGGVGPERVVAWGASCWGDSEQMSLTELQDSPEGVMWIMYTARSLSLERLPAGFPPLDHHL

SEQ ID NO: 785603 - protein, 101 aa, Homo sapiens
SRRRSGEPAFPVRNAERGPRVCRALKEGKGGVGPERVVAWGASCWGDSEQMSLTELQDSPEGVMWIMYTARHTKRPTKRHAKTPADPHEEATLSVRYRARS

SEQ ID NO: 785604 - protein, 85 aa, Homo sapiens
RALGAPRRVCPARLGFPSPSSSPSVTTPPTSSALRARPVRAESDGLWLHASARAHLLPGTEAQLLGEAESFWSLTLGFHPEQPPK

SEQ ID NO: 785605 - protein, 52 aa, Homo sapiens
IRGLRFCFLVLSLLETPHGLPTMGYASKGVPWTEFSPMTGRKNTETREVRPV

SEQ ID NO: 785606 - protein, 111 aa, Homo sapiens
GLTLFSDSARLHPGEINSLVAHTKPVWWSLHTNAHEIWCHDSDRGTSLGRSIPSPPALCSVRKIYLGPQVLRLTSPRNISPISNLDPTENRTVQLIWQPLPEPLELWPKPL

SEQ ID NO: 785607 - protein, 111 aa, Homo sapiens
PTLPLPQVTTVLIFFTSMFYLLQYFKLVGILQQLFSCVYSLVQRNVCKIRPCCCSILMSSISCYEHIIIGLFVHFVGGGGISPQIGAIMNKAAMNIHLQIILWMYIFISFL

SEQ ID NO: 785608 - protein, 180 aa, Homo sapiens
RSSRIRVHPTPAASTMPPKFDPNEIKVVYLRCTGGEVGATSALAPKIGPLCLSPKKVGDDIAKANGDWKGLRITVKLTIQNRQAQIEVVPSASALIIKALKEPPRDRKKQKNIKHSGNITFDEIVNIARQMRHRSLARELSGTIKEILGTAQSVGCNVDGRHPHDIIDDINSGAVECPAS

SEQ ID NO: 785609 - protein, 112 aa, Homo sapiens
SHTLIYTLPLSPNSYSHTYTHTLIHTHSHNHTSTQSPTLTHSYTHSPTQSPLTHTHTHTHTLSHTITLPHTQSPLHSHILIHTLSHTLALHTLPTRTLIYTLIHSHTHMHSH

SEQ ID NO: 785610 - protein, 237 aa, Homo sapiens
AGDPGSPRRVQLGRFDRRRDLTPPGVGVPSPSPSAAPVIVAMDDTLFQLKFTAKQLEKLAKKAEKDSKAEQAKVKKALLQKNVECARVYAENAIRKKNEGVNWLRMASRVDAVASKVQTAVTMKGVTKNMAQVTKALDKALSTMDLQKVSSVMDRFEQQVQNLDVHTSVMEDSMSSATTLTTPQEQVDSLIMQIAEENGLEVLDQLSQLPEGASAVGESSVRSQEDQLSRRLAALRN

SEQ ID NO: 785611 - protein, 79 aa, Homo sapiens
DDGRNRARYLLECLLCGSKVIIIHECNNCHTCHNNPATIVLQSSNMLHPCKGLRPVPEIYDSHYYDSLSGIISESQMIS

SEQ ID NO: 785612 - protein, 675 aa, Homo sapiens
MPTVCSRSSAGTRKHAGEGASPARCLRSPCQVPNRPHCRLPHVAARGNPSSGHHAGEASPLWGLALVFYVEMNESHTPACARPSRQRRRPQALPPSRREGLAHSRLPRRFSSTLPSTLPGWFLPAADAWEPRERLPVPAGSLERSGEPAPETRPPPPSPLSPFLFVSPAPPPPPPPRPPPPPPPPHTTTTTTTTTTPPAGPRPRRPGSLPGWGGLSQGGSPPFMKGWSLPARGPLQGRLAGWLAVRAGLLAAPAAVHSPAEVHGSPPASLCPRPSVKLRPGLTAMALPTPSDSTLPAEARGRGRRRRLVWTPSQSEALRACFERNPYPGIATRERLAQAIGIPEPRVQIWFQNERSRQLRQHRRESRPWPGRRGPPEGRRKRTAVTGSQTALLLRAFEKDRFPGIAAREELARETGLPESRIQIWFQNRRARHPGQGGRAPAQAGGLCSAAPGGGHPAPSWVAFAHTGAWGTGLPAPHVPCAPGALPQGAFVSQAARAAPALQPSQAAPAEGISQPAPARGDFAYAAPAPPEPGRSPTLRLLGGLRTRAKAGRTGTRSATACRAPARWHSLGPLKRGRRAKGCLRHPRPRGVRGGAGAGVPRSPGRRGNPKPGQLHLPSPRPREPASARQGQMQGIPAPSQALQEPAPWSALPCGLLLDELLASPEFLQQAQPLL

SEQ ID NO: 785613 - protein, 356 aa, Homo sapiens
ACATSWPASATRTAWLAASAPGTNWLKQTFDEADKNGDGSLSIGEVLQLLHKLNVNLPRQRVKQMFREADTDDHQGTLGFEEFCAFYKMMSTRRDLYLLMLTYSNHKDHLDAASLQRFLQVEQKMAGVTLESCQDIIEQFEPCPENKSKGLLGIDGFTNYTRSPAGDIFNPEHHHVHQDMTQPLSHYFITSSHNTYLVGDQLMSQSRVDMYAWVLQAGCRCVEVDCWDGPDGEPIVHHGYTLTSKILFKDVIETINKYAFIKNEYPVILSIENHCSVIQQKKMAQYLTDILGDKLDLSSVSSEDATTLPSPQMLKGKILVKGKKLPANISEDAEEGEVSDEDSADEIDDDCKLLNG

SEQ ID NO: 785614 - protein, 75 aa, Homo sapiens
QLLSRVHHHLHSNSVQAMQLLSGVHHHLRSNSVRPMQLPSGVHHHLRSNSVQHVQLPSGVHHHLRSNSVRPMQLP

SEQ ID NO: 785615 - protein, 90 aa, Homo sapiens
MLSSVIKRSLGAWCVPGPDVGLGHVPVLTSSGLLGESRVRRTQRPGGLGPVWVALRLQKLSLPAESGRAGYTCPELAGSGPFGVPRVGTQ

SEQ ID NO: 785616 - protein, 137 aa, Homo sapiens
QFKSINQGKRTSVADSMLWLLEKYSQNLEDLIQEQTEELELKREKTERLLCQMIPPSVAEARKMGATVEPGYFDQVTIYFSDIVGFTIISALSEPIEAVGLLNDLYMLFDAVLGSHDLYKVRIPGGWHSIPPFTTVP

SEQ ID NO: 785617 - protein, 181 aa, Homo sapiens
MLLEPGRGCCALAILLAIVDIQSGGCINITSSASQEGTRLNLICTVWHKKEEAEGFVVFLCKDRSGDCSPETSLKQLRLKRDPGIDGVGEISSQLMFTISQVTPLHSGTYQCCARSQKSGIRLQGHFFSILFTETGNYTVTGLKQRQHLEFSHNEGTLSSGFLQEKVWVMLVTSLVALQAL

SEQ ID NO: 785618 - protein, 181 aa, Homo sapiens; identical to SEQ ID NO: 785617

SEQ ID NO: 785619 - protein, 181 aa, Homo sapiens; identical to SEQ ID NO: 785617

SEQ ID NO: 785620 - protein, 69 aa, Homo sapiens
MVKLTLGLVPRGTVMGSLLGKVLCLQLSLDDHVVAVCAGNKIFMLDIEVRLKFTWISRKGLADGASQVL

SEQ ID NO: 785621 - protein, 193 aa, Homo sapiens
MENPQDIFSSNGGCLSDIVIEKYLVESKESVSHVQLACSMQDCAFPLDGTELCIWNTKDPSHQLLILRGHHQPITAMAFGNKVNPLLICSASLDYVIMWNLDECREKVLQGLVPRGTVMGSLLGKVLCLQLSLDDHVVAVCAGNKIFMLDIEQRFSVTYIERPDVNNRHKVPPPTFLHTFSQTQAVRAELQGH

SEQ ID NO: 785622 - protein, 173 aa, Homo sapiens
MENPQDIFSSNGGCLSDIVIEKYLVESKESVSHVQLACSMQDCAFPLDGTELCIWNTKDPSHQLLILRGHHQPITAMAFGNKVNPLLICSASLDYVIMWNLDECREKVLQGLVPRGTVMGSLLGKVLCLQLSLDDHVVAVCAGNKIFMLDIEVRLKFTWISRKGLADGASQVL

SEQ ID NO: 785623 - protein, 66 aa, Homo sapiens
LLQQPHPLAQAGLAEHCRGQVQPPCSKAQLPDQTRSKAIRSSKDYFHSIFIDFYHSLGLYRALSLP

SEQ ID NO: 785624 - protein, 134 aa, Homo sapiens [sequence omitted]

SEQ ID NO: 785625 - protein, 151 aa, Homo sapiens
MGNLESAEGVPGEPPSVPLLLPPGKMPMPEPCELEERFALVLSSMNLPPDKARLLRQYDNEKKWDLICDQERFQVKNPPHTYIQKLQSFLDPSVTRKKFRRRVQESTKVLRELEISLRTNHIGWVREFLNDENKGLDVLVDYLSFAQCSVM

SEQ ID NO: 785626 - protein, 213 aa, Homo sapiens
MRFSQQREAKPFRSRIIHLPPFLFASSSHMGLIPSLKRWKSLWPVRSPVTSFFEEMEVTVACQVPRTYHVAIKPPELLHRGKGANLFDILFIALLSSWDGRGFSWSTKKCSCTAGDALPVQDNSLSLATALILVSFRFFLLTIFLCAVFFILIMVPTVIIFQSVELVVHPLAAAGEIDLPVKGGHDTADEKTYGAVMLDSQVKANKFIGHIGR

SEQ ID NO: 785627 - protein, 118 aa, Homo sapiens [sequence omitted]

SEQ ID NO: 785628 - protein, 163 aa, Homo sapiens
MDTPPLSDSESESDESLVTDRELQDAFSRGLLKPGLNVVLEGPKKAVNDVNGLKQCLAEFKRDLEWVERLDVTLGPVPEIGGSEAPAPQNKDQKAVDPEDDFQREMEFYRQAQGRRWLASLYPGFHQLKSPLTQADPMDYWAGKLGQILVLEIAEDSDRKLET

SEQ ID NO: 785629 - protein, 101 aa, Homo sapiens
ESQPCHRHCCTLPPRGSWTWLWQKKIPGRKAILGNTVKSKQCILPVSSVKMMKVGLWERGPPPPARALHVRPTAVSASGAWSLEAALHWIQVTHLYSWLFE

SEQ ID NO: 785630 - protein, 151 aa, Homo sapiens [sequence omitted]

SEQ ID NO: 785631 - protein, 353 aa, Homo sapiens
MVGDTLKLLSPLMTRYFFLLFYSTDSSDLNENQHPLDFDEMAFGKVKSGISFLIQTGVGILGNSFLLCFYNLILFTGHKLRPTDLILSQLALANSMVLFFKGIPQTMAAFGLKYLLNDTGCKFVFYYHRVGTRVSLSTICLLNGFQAIKLNPSICRWMEIKIRSPRFIDFCCLLCWAPHVLMNASVLLLVNGPLNSKNSSAKNNYGYCSYKASKRFSSLHAVLYFSPDFMSLGFMVWASGSMVFFLYRHKQQVQHNHSNRLSCRPSQEARATHTIMVLVSSFFVFYSVHSFLTIWTTVVANPGQWIVTNSVLVASCFPARSPFVLIMSDTHISQFCFACRTRKTLFPNLVVMP

SEQ ID NO: 785632 - protein, 160 aa, Homo sapiens
MEDEEIPFEQSFSIGMSQIRIPKGGPSTQKAYPCGTCGLVLKDILHLAEHQETHPGQKPYMCVLCGKQFCFSANLHQHQKQHSGEKPFRSDKSRPFLLNNCAVQSMEMSFVTGEACKDFLASSSIFEHHAPHNEWKPHSNTKCEEASHCGKRHYKCSECG

SEQ ID NO: 785633 - protein, 85 aa, Homo sapiens
QGTLMQGVGSQGLRQLCSCNSAGLSSHSCSQELALSRPVAFPGTQCKLLVDLPFWDLEDGGHLLTAPLGSAPVGKQCGSSNSTFS

SEQ ID NO: 785634 - protein, 97 aa, Homo sapiens
SLELLQGLRVSLSEVLSVVHAVLCRALLRPQGRAGWPARPAQKGRWGAFPGKAAAPPFTARRLPRRAERRLWAARAAGVESCWPSPREGDVGRAEQF

SEQ ID NO: 785635 - protein, 85 aa, Homo sapiens
DCELPSNQCKKGNQISHVTYAVHKLKTKHVLRESTAPLVLAKKILPKDPRKKKSLGFIAGYKLLATKCHWQVSYSLIEAALHWSK

SEQ ID NO: 785636 - protein, 850 aa, Homo sapiens
EGRWGREVGRPGGLRAGSGLRGAASRWTPARQRKASSPPPSKVNFAAPSAALPSPRRRRAAAVREEPSCVRASFPAPARGHCAMDATALERDAVQFARLAVQRDHEGRYSEAVFYYKEAAQALIYAEMAGSSLENIQEKITEYLERVQALHSAVQSKSADPLKSKHQLDLERAHFLVTQAFDEDEKENVEDAIELYTEAVDLCLKTSYETADKVLQNKLKQLARQALDRAEALSEPLTKPVGKISSTSVKPKPPPVRAHFPLGANPFLERPQSFISPQSCDAQGQRYTAEEIEVLRTTSKINGIEYVPFMNVDLRERFAYPMPFCDRWGKLPLSPKQKTTFSKWVRPEDLTNNPTMIYTVSSFSIKQTIVSDCSFVASLAISAAYERRFNKKLITGIIYPQNKDGEPEYNPCGKYMVKLHLNGVPRKVIIDDQLPVDHKGELLCSYSNNKSELWVSLIEKAYMKVMGGYDFPGSNSNIDLHALTGWIPERIAMHSDSQTFSKDNSFRMLYQRFHKGDVLITASTGMMTEAEGEKWGLVPTHAYAVLDIREFKGLRFIQLKNPWSHLRWKGRYSENDVKNWTPELQKYLNFDPRTAQKIDNGIFWISWDDLCQYYDVIYLSWNPGLFKESTCIHRDFANNREFITMVVYKTDGKKVYYPADPPPYIDGIRINSPHYLTKIKLTTPGTHTFTLVVSQYEKQNTIHYTVRVYSACSFTFSKIPSPYTLSKRINGKWSGQSAGGCGNFQETHKNNPIYQFHIEKTGPLLIELRGPRQYSVGFEVVTVSTLGDPGPHGFLRKSSGDYRCGFCYLELENIPSGIFNIIPSTFLPKQEGPFFLDFNSIIPIKITQLQ

SEQ ID NO: 785637 - protein, 896 aa, Homo sapiens
EGRWGREVGRPGGLRAGSGLRGAASRWTPARQRKASSPPPSKVNFAAPSAALPSPRRRRAAAVREEPSCVRASFPAPARGHCAMDATALERDAVQFARLAVQRDHEGRYSEAVFYYKEAAQALIYAEMAGSSLENIQEKITEYLERVQALHSAVQSKSADPLKSKHQLDLERAHFLVTQAFDEDEKENVEDAIELYTEAVDLCLKTSYETADKVLQNKLKQLARQALDRAEALSEPLTKPVGKISSTSVKPKPPPVRAHFPLGANPFLERPQSFISPQSCDAQGQRYTAEEIEVLRTTSKINGIEYVPFMNVDLRERFAYPMPFCDRWGKLPLSPKQKTTFSKWVRPEDLTNNPTMIYTVSSFSIKQTIVSDCSFVASLAISAAYERRFNKKLITGIIYPQNKDGEPEYNPCGKYMVKLHLNGVPRKVIIDDQLPVDHKGELLCSYSNNKSELWVSLIEKAYMKVMGGYDFPGSNSNIDLHALTGWIPERIAMHSDSQTFSKDNSFRMLYQRFHKGDVLITASTGMMTEAEGEKWGLVPTHAYAVLDIREFKGLRFIQLKNPWSHLRWKGRYSENDVKNWTPELQKYLNFDPRTAQKIDNGIFWISWDDLCQYYDVIYLSWNPGLFKESTCIHSTWDAKQGPVKDAYSLANNPQYKLEVQCPQGGAAVWVLLSRHITDKDDFANNREFITMVVYKTDGKKVYYPADPPPYIDGIRINSPHYLTKIKLTTPGTHTFTLVVSQYEKQNTIHYTVRVYSACSFTFSKIPSPYTLSKRINGKWSGQSAGGCGNFQETHKNNPIYQFHIEKTGPLLIELRGPRQYSVGFEVVTVSTLGDPGPHGFLRKSSGDYRCGFCYLELENIPSGIFNIIPSTFLPKQEGPFFLDFNSIIPIKITQLQ

SEQ ID NO: 785638 - protein, 617 aa, Homo sapiens
NEGPCSKILIQCKANFENKLIVLKEKLISDSKRQANELISFKNQSQERLNKKKTDYEKELLEKSRKLALTVKGKELSEEELHEKFNQLWKKWVCDVSTTLPQVTEPDIDLDSENILWEYFKNKTNVVGLLTNSAEKFQINYDKHIKVNKKYNHIPMTLTVFEKEFINMTTDYIVSRFNKIINNMWKQQCGYNPNYFHEILKTIEEEVKSASTQKRYTFTNTFIIDLCVCLFQRARENFKEMHRAFKRANDPVNYLESKKDDFFTSFKISCQGATSIKTFVDILWYKLTPAVSTTIWEDMTFKIAGDMRATCPAFNGNRTNLEKHILFSLAEEENFDNYWEYLHNSKSFFRSYIKNHIKRYCSDNGGEKMKTFFEKSLIDIKNTILSAIHESTSVAKDKSSTASEWLDLFCDCLGCNLIFPRRDLISIEHQEIKHTEFLKEAMSAALDLTMKKIEQNYSSKPIEAMVSKIEKMLSEHLCGCWKQCPSCGAICTNTIPTHEGDHSVPFHRPQAVNGEEWYETDDFVIDCCTSLVASDCLLVLRDGRNFPFKNYRQAGGDYAMWSITPDTSIQLYWKWFVSHFRSNLEEKYQKKFAGKGKIPNAWAKITKQDVLEDLKKQ

SEQ ID NO: 785639 - protein, 76 aa, Homo sapiens
TENALGNHTEGKQPTPKGHSLHDPMHTTPLKYKITKIENRLAVCVGLEKADMTDLHGDGAVLMFCVLAVSVPRSWC

SEQ ID NO: 785640 - protein, 75 aa, Homo sapiens
LSRGSEGDSRTPEIHAHREKAMWGYSKKVVICKPRREASGETNLQTPRSWTYSLQNCEKINICCLNYPVYGILLW

SEQ ID NO: 785641 - protein, 99 aa, Homo sapiens
KERIEREQQQVVLSMDVGKGEGRGHRPLVFAAFTMGQSRESWLWGEGNVDGFGICLVFHYWNAKHVGVVSYCSRSLPRSDGKNSKNCNLKHKWIKLRQV

SEQ ID NO: 785642 - protein, 139 aa, Homo sapiens
LLRGRKDGCNIGRHEPRQVPRAYLSSLLIVSLLNCEIYNCASHVLGQWMVLFFLVFYLPFWSPRSKKDTNKACILKIPIFNLLSGNFEKSHYYRIISKKSPSFRFCFWLCRSRSLRQWEGLGVTSMAVRRSDCAACDFL

SEQ ID NO: 785643 - protein, 50 aa, Homo sapiens
MLGVLAFSSKALKDTRTLAVSWYRTWSVKVLIPNPVNFPGINLLFVRGTG

SEQ ID NO: 785644 - protein, 103 aa, Homo sapiens
EIAGREVGCQDGEEEGSQEQDELHHRDTKEEEPFESSSEEEFGGEDHQSLNSIVDVEDLGKIMDHVKKEKRDKEQQEEKSGWFRNMGRNEDGERRAMITPAYS

SEQ ID NO: 785645 - protein, 244 aa, Homo sapiens
LYRSPCPISISYEMSDSQDPTTSPVVTTQVELGGCSRQGGGNGFLRFRQHQEVQAFLSLLEDSFVQEFLSKDPCFQISDKYLLAMVLVYFQRAHLKLSEYTHSSLFLALYLANDMEEDLEGPKCEIFPWALGKDWCLRVGKFLHQRDKLWARMGFRAVVSRQCCEEVMAKEPFHWAWTRDRRPHHGGVQRVCPQVPVRLPRGPGLSPPHCSPCGLPQHCSSHLLKPVSSKCPSLTSECHRPPSQ

SEQ ID NO: 785646 - protein, 112 aa, Homo sapiens
QASLDSKLSLKSCPNLFSVLPCTAHICCNPFYAHLLPSDKPSSNPTSTPALPASPSPPANSCTHSQHWFMSFHLSFYIDTNRSLLKINAIIGYIVLYSSFFSYVLSFHITSG

SEQ ID NO: 785647 - protein, 217 aa, Homo sapiens
KKERRKEKKKEKKREGSAGGGGAGSRLQAEMLQMDLIDATGDTPGAEDDEEDDDEERAARRPGAGPPKAESGQEPASRGQGQSQGQSQGPGSGDTYRPKRPTTLNLFPQVQLSQDTLNNNSLGKKYSWQDRVSRSSSPLKTGEQTPPHEPICLSDELPPQSSPAPTTDRGTSTNSPTLLVDEHAQLELVSLRPCFGDYSDESDSAIVYDNCVSVSSP

SEQ ID NO: 785648 - protein, 108 aa, Homo sapiens
METWAVHPGPGARALAGCTQLLPRGTPSSPAPGLPPQRRKGSKGTAGEEPWDSSRAQTPREETRAPGTGRGGGQGQGEGIEFSETLAGLKEDGKSVKSPCAARGGLGY

SEQ ID NO: 785649 - protein, 277 aa, Homo sapiens [sequence omitted]

SEQ ID NO: 785650 - protein, 575 aa, Homo sapiens
MTSKKLVNSVAGCADDALAGLVACNPNLQLLQGHRVALRSDLDSLKGRVALLSGGGSGHEPAHAGFIGKGMLTGVIAGAVFTSPAVGSILAAIRAVAQAGTVGTLLIVKNYTGDRLNFGLAREQARAEGIPVEMVVIGDDSAFTVLKKAGRRGLCGTVLIHKVAGALAEAGVGLEEIAKQVNVVTKAMGTLGVSLSSCSVPGSKPTFELSADEVELGLGIHGEAGVRRIKMATADEIVKLMLDHMTNTTNASHVPVQPGSSVVMMVNNLGGLSFLELGIIADATVRSLEGRGVKIARALVGTFMSALEMPGISLTLLLVDEPLLKLIDAETTAAAWPNVAAVSITGRKRSRVAPAEPQEAPDSTAAGGSASKRMAPVLERVCSTLLGLEEHLNALDRAAGDGDCGTTHSRAARAIQEWLKEGPPPASPAQLLSKLSVLLLEKMGGSSGALYGLFLTAAAQPLKAKTSLPAWSAAMDAGLEAMQKYGKAAPGDRTMLGSLWAAGQELQAWKSPGADLLQVLTKAVKSAEAAAEATKNMEAGAGRASYISSARLEQPDPGAVAAAAILRAILEVLQS

SEQ ID NO: 785651 - protein, 204 aa, Homo sapiens
MTSKKLVNSVAGCADDALAGLVACNPNLQLLQGHRVALRSDLDSLKGRVALLSGGGSGHEPAHAGFIGKGMLTGVIAGAVFTSPAVGSILAAIRAVAQAGTVGTLLIVKNYTGDRLNFGLAREQARAEGIPVEMVVIGDDSAFTVLKKAGRRGLCGTVLIHKVAGALAEAGVGLEEIAKQVNVVTKAMDPRGSWCAPDKDGNRR

SEQ ID NO: 785652 - protein, 339 aa, Homo sapiens
MTSKKLVNSVAGCADDALAGLVACNPNLQLLQGHRVALRSDLDSLKGRVALLSGGGSGHEPAHAGFIGKGMLTGVIAGAVFTSPAVGSILAAIRAVAQAGTVGTLLIVKNYTGDRLNFGLAREQARAEGIPVEMVVIGDDSAFTVLKKAGRRGLCGTVLIHKVAGALAEAGVGLEEIAKQVNVVTKAMGTLGVSLSSCSVPGSKPTFELSADEVELGLGIHGEAGVRRIKMATADEIVKLMLDHMTNTTNASHVPVQPGSSVVMMVNNLGGLSFLELGIIADATVRSLEGRGVKIARALVGTFMSALEMPGISLTLLLVDEPLLKLMESQTRSGSSRVP

SEQ ID NO: 785653 - protein, 185 aa, Homo sapiens [sequence omitted]

SEQ ID NO: 785654 - protein, 258 aa, Homo sapiens
TGTSPTTSSTGTPSPSASSHLLSPSCSPPTFHLAPNTFNVGCRESQLCNLNLSDYPPCARSNMAALQSYPGLSDSGYNRLQSGTTSATQPSETFMPQRTPSLISGIPTPPSLPGNSKMEAYGGQLGSFPTSQFQYVMQAGNAASSSSSPHMFGGSHMQQSSYNAFSLHNPYNLYGYNFPTSPRLAASPEKLSASQSTLLCSSPSNGAFGERQYLPSGMEHSMHMISPSPNNQQATNTCDGRQYGAVPGSSSQMSVHMV

SEQ ID NO: 785655 - protein, 106 aa, Homo sapiens
MQAPRVQRKEMEVQGRQVTWQPSLGKALLDPAVPVPHQPHMPKSHVPLGLPCWLLSHGRWFGDELLRGKQLLIPQKFCRSSVHFGFYLKCDLNSLLYLILPVPQTE

SEQ ID NO: 785656 - protein, 78 aa, Homo sapiens
GAPWSAGQAHGQAIALPSVYSGQNKPRIPKVQPVVTQLVVTSVFMLRPWEEQEQRGQNVESRIQNGAKGGSGVEAGWG

SEQ ID NO: 785657 - protein, 107 aa, Homo sapiens
MTGSLPSRRFQLKCQFPEWPFLISPYKATLLPAVILHRRTLFILLEALFTLCKSFIELAYLFLPLEPESCAGEIIHCFLSIESPVLTIVHWKRLINIHDISDCMHNK

SEQ ID NO: 785658 - protein, 103 aa, Homo sapiens
MEAHVLAYPHDALLRTLGVLASWVGSLSREPDRAREAPELRRRVIHYYERSVPVHCGVSTFCISPCEPSSDFANASSLMSTFFSKRRQAAHSCVQNAFRMRLS

SEQ ID NO: 785659 - protein, 104 aa, Homo sapiens
NASPPLDCTWHGQEHARCTHLSPQYVALCLEHRPCSVTISGMDVESAPMNGDSEQSPISFQFCFRRVSSGNRVFVWDLTFLGKRGEKPHTQTWPASVEMMSGHA

SEQ ID NO: 785660 - protein, 102 aa, Homo sapiens
FFIPQFTKTYRGVYVSFIHNSATGGTNLIIKRIIVPGKWIPGALAICFPGKSIWLSGKSHLPSAEGEGKSKLRKGNIFLLQNHQVLPVPFTLSRSFFRLYTN

SEQ ID NO: 785661 - protein, 54 aa, Homo sapiens
ERDVLQRELEELKKKFEGMRSRNKLLSSEMKTLKSQMGTLVEKGRHDDELIDAL

SEQ ID NO: 785662 - protein, 116 aa, Homo sapiens
MTRISLARARRSTSRSPPCTSIDENNPTLLNPIKRLAAGSLYAGLLITNNISPASPFQTTIRALYLKLTALTVAESSPINCPEDSMMSMRKLVLSHLFEGKSKSPFIELNLQTESS

SEQ ID NO: 785663 - protein, 268 aa, Homo sapiens
MENWTGRPWLYLLLLLSLPQLCLDQEVLSGHSLQTPTEEGQGPEGVWGPWVQWASCSQPCGVGVQRRSRTCQLPTVQLHPSLPLPPRPPRHPEALLPRGQGPRPQTSPETLPLYRTQSRGRGGPLRGPASHLGREETQEIRAARRSRLRDPIKPGMFGYGRVPFALPLHRNRRHPRSPPRSELSLISSRGEEPIPSPTPRAEPFSANGSPQTELPPTELSVHTPSPQAEPLSPETAQTEVAPRTRPAPYGITPEPRPLAQSPPHPRTP

SEQ ID NO: 785664 - protein, 120 aa, Homo sapiens [sequence omitted]

SEQ ID NO: 785665 - protein, 151 aa, Homo sapiens
MWPPWPISICWNSINWCVGTSVVQWKLMFVQMTLRSFYTGVSDPVEKGRVFAVSWEHVQWQDVNLQQENKPKILSFPIYNKNSESGEGQIFWADRAQRSTLTGHVHLSKETRALVFQSFTDVDFVVQDSVPLGIALFVLCPEPIPAPQKSE

SEQ ID NO: 785666 - protein, 114 aa, Homo sapiens
MICTMACSFYLFPSIRSEPLKSYMHSSWYTSFIETIALLISNSRNLTLECSSITFSSLLMKPLHSQCCTQHCMMQKMVLENSNAFCSLFSFYSVPSCNKFSLFLKQIELHHHLE

SEQ ID NO: 785667 - protein, 250 aa, Homo sapiens
ALPQAAAMAGQEDPVQREIHQDWANREYIEIITSSIKKIADFLNSFDMSVSFKTVQHYTRNGQPFERRIEYMEARVTKGETLTYNSAVLLLEVALHNTGHMGKGPSSLQLLPFSLKEQQGLILVFFFQKVWPWGLCHLGCGWYVGTKFRGTVETTLGILPFPVTFLYIYCVNVISRHSQPKSLGLFVKVLLNSIFLSLSLKISLKFSCAFEWFCEQSWSLPHLVVESAGQSWSRHSCLECGAEMCGYHSS

SEQ ID NO: 785668 - protein, 36 aa, Homo sapiens
LWASGTNPIAFVSSLKMVQSASGTPGAEPWPLHGNG

SEQ ID NO: 785669 - protein, 108 aa, Homo sapiens
RTQTEITRAGRVSLPLSCLVLHVGTHVRSAAACSRAVSGGVVSGHGPPWVTAAPLQSHLPGAGFSGLLWCATFLIGVIGLNTPKDRKGLKGQPLLPVNHHPGTASSAC

SEQ ID NO: 785670 - protein, 119 aa, Homo sapiens [sequence omitted]

SEQ ID NO: 785671 - protein, 112 aa, Homo sapiens
TQQAEKAAAGRTATLPCKSPPGVQLGSSRSSWAMLLGSLWGRCHPGCCALFLILALLLDAVGLVLLLLGILAPLSSWDFFIYTGALILALSLLLWIIWYSLNIEVSPEKLDL

SEQ ID NO: 785672 - protein, 114 aa, Homo sapiens
GRYGTYRGPVTQHVHRGLSRGSGEGGQRAGGVRPDPIHDPDSYPILSPAPLGPFPLRPGSAGSTSSKFVAALRSRACMGWQSWRACVSPPVWHGHVRCAEGLHLLHQVQKATSC

SEQ ID NO: 785673 - protein, 114 aa, Homo sapiens; identical to SEQ ID NO: 785672

SEQ ID NO: 785674 - protein, 114 aa, Homo sapiens; identical to SEQ ID NO: 785672

SEQ ID NO: 785675 - protein, 131 aa, Homo sapiens
GRYGTYRGPVTQHVHRGLSRGSGEGGQRAGGVRPDPIHDPDSYPILSPAPLGPFPLRPGSAGSTSSKFVAALRSRACMGWQSWRACVSPPVWHGHVRCAEGLHLLHQVQKVRMGQGARSFDRQELPGTGLW

SEQ ID NO: 785676 - protein, 196 aa, Homo sapiens
GRYGTYRGPVTQHVHRGLSRGSGEGGQRAGGVRPDPIHDPDSYPILSPAPLGPFPLRPGSAGSTSSKFVAALRSRACMGWQSWRACVSPPVWHGHVRCAEGLHLLHQVQKVQFLQDCALTRPLRGSLCSGPPRPSVVGCPSLSEKGQQGAPNPHVSAGRGRLGHVMLNKSREVESPVSSRPRCGMPTVPPGSLKTL

SEQ ID NO: 785677 - protein, 193 aa, Homo sapiens
RSPSPDHVVKVAEYNKVKLSIFIARLYTTVTRDSSTGFADCRTQRHACTSCLLRNLNTVEKTVYKRDVPCQPCKGQRENYPSPVTKLQEARSQEGKPLSLQNVASTSLMAETAHCTLKPALPTASEINCCNSGTHDAYHSGSSMEPAGSQPFLGPMNSLKRGTEIFLLFVKSLTFPLFFMYTLNCNSSSQIKH

SEQ ID NO: 785678 - protein, 119 aa, Homo sapiens
MVSIGSFLSHPTQTEARSQEGKPLSLQNVASTSLMAETAHCTLKPALPTASEINCCNSGTHDAYHSGSSMEPAGSQPFLGPMNSLKRGTEIFLLFVKSLTFPLFFMYTLNCNSSSQIKH

SEQ ID NO: 785679 - protein, 103 aa, Homo sapiens
PSYHEAPSEEGDRPSPLPGVPTFRFCLSRQQTCPQELCVAFLGCSPAFQKTRVGCLQESPQACVEVVTVPNHPLHRREAHAFGFYFLSICVHTSLFKDKLNLC

SEQ ID NO: 785680 - protein, 120 aa, Homo sapiens
IISWLLGTEGALILSAITQPGIIPTARAELHLSLDGLENICIVSQECRPAQQAMNQVAAPFFTMLGHFLPSYFLHRRRLMFSPENGCWGSQPRSIMPRTAVCQSMKSALESTWLLDQERS

SEQ ID NO: 785681 - protein, 242 aa, Homo sapiens
QHLRQPSHCLVAVADWNPGVLCLLCRPPPPLPGFFPWKPAELTSRVCRFMTSSGGIRREVTLEGLTTALSSQQPQPSNVPLPGPTSPLQRHPVEGPPAGMGSFLAAEPFCSLCEDRGKKCVFLALGSQHCWSLLPAGRGARLEEPSTTEKQRPGVPAPVQVPSHTRCVASGTALPLSGPQFSHYAKRPPSLRYLPTMTVSEFRVSDSGPELQDHQQNGGRERKAVKASWRWGHETQTIRLSD

SEQ ID NO: 785682 - protein, 57 aa, Homo sapiens
MNRHSTTSGNLNTVFGYVDEETVSQGISASYVGSGKLVGNRLVRHTQTSLFSSANTW

SEQ ID NO: 785683 - protein, 108 aa, Homo sapiens
MPTKTTRGGWASLQESWAGLVDSVPLLKPPSSLSIWHGKPICTILFFLWKAHYMILFSAINTNLIEVIRKFLQVTGLQANAADNKIAIRHHQSQTFTVFFLHGNQKTS

SEQ ID NO: 785684 - protein, 123 aa, Homo sapiens
GLSLMECTICNEIVHPGCLKMGKAEGVINAEIPNCWECPRCTQEGRTSKDSGEGPGRRRADNGEEGASLGSGWKLTEEPPLPPPPPRRKGPLPAGPPPEDVPGPPKRKEREAGNEPPTPRKKV

SEQ ID NO: 785685 - protein, 160 aa, Homo sapiens
LWGSSLHFHHHKAGLSCHQFPPGQLQKPSSCSCFHSCSSTIHSARRSQNQNQSSSCHSLDLWLPFALKLKVKIIIMATKSCVVWATSCARLPFIVYIPVKLAFKISAHWVFLPQALAHTCFSLCTCDFLSSPLSKANSDSSFRLHLNDYFLLEDSPNFHN

SEQ ID NO: 785686 - protein, 117 aa, Homo sapiens
SQPILLPLGLYTFQPSNIFRSPILMHITTILPSLLAFVFLFPSLNLLRPGTVVHTCNPSTLECQGGRIACAQKFEASLGNKARPHLYKKIKLPSHLVHLWSQLLGSLRLKDFLSPRG

SEQ ID NO: 785687 - protein, 110 aa, Homo sapiens
TGPLDNSSAPAPPFRLVPPPARPLALKANLIFVSFLSGSFIQVTSIHQMPTPTPPPRTPIWCLSSGESRLLPLLWRGLAKCLQSSLSSTSELPFSSRHRHNSPAHRYHCH

SEQ ID NO: 785688 - protein, 105 aa, Homo sapiens
FKLNYLKLFSLLPPLPDQTCLYYAAHVLESSVPILLAAPAKTSSLSSHPVSNPSASPVNSTLEIYPVPNYTSTSPWLIPWSEPPATSASIWIIAPASPGLLASEF

SEQ ID NO: 785689 - protein, 119 aa, Homo sapiens
HSGQPDFLLSRRCDFRMSGRGKGGKGLGKGGAKRHRKVLRDNIQGITKPAIRRLARRGGVKRISGLIYEETRGVLKVFLENVIRDAVTYTEHAKRKTVTAMDVVYALKRQGRTLYGFGG

SEQ ID NO: 785690 - protein, 119 aa, Homo sapiens; identical to SEQ ID NO: 785689

SEQ ID NO: 785691 - protein, 119 aa, Homo sapiens; identical to SEQ ID NO: 785689

SEQ ID NO: 785692 - protein, 79 aa, Homo sapiens
MQLLRLRIQWHSWEIPPRPCTHLFLSPSFMKAFATALLEKIVRPLRLGVSDIEREIPESVAKNILPNPSAAFYTQLPPS

SEQ ID NO: 785693 - protein, 80 aa, Homo sapiens
EEKVVAIVAGAARPCGVVKEAWFWNRQDITESTEPRVLLVDTSCNTGVGVALEPASASPCPPWSRVLLGPGPRPGPHTSV

SEQ ID NO: 785694 - protein, 67 aa, Homo sapiens
PSHERQYKRRTLDSVNSDPSEIECLSRNYQRHQNSCSAALFILAQSENNPNTHQRVNGSTNCDKFIE

SEQ ID NO: 785695 - protein, 91 aa, Homo sapiens
PWIRARSFPGQRLGAFGPIPPLVPSSPPRLDTVAWHTEAAAEGLRLRNSHPEPAAAMAANLALGPPRVGCPWALAAGFFEPCFLCPAPPSP

SEQ ID NO: 785696 - protein, 142 aa, Homo sapiens
MCLGPAPSWPPTPLVQILHLPPTRGIDIKASPHLAQESETQTAPYTNVVNPSLDLSSTSPESGLWVPAQMPRMHTDGTWRLLKGTGIPGFPESPGRFKWHQMNWKRMKVLLPKVMKFSEDVSVLSGGQTATRGNEPVFSEHP

SEQ ID NO: 785697 - protein, 101 aa, Homo sapiens
NLPHPTLPPRESRLDAARGRHYSPLLRMGSKLGRDAAVGEQQSAFHSLGQGLGGREREVGERTRFQRLSARPRHKGPRGMGAAGRQGLRGVTVAPPPTPGS

SEQ ID NO: 785698 - protein, 68 aa, Homo sapiens
GFTLRKGAALGHHPRVHGHSAAWFENSKYRDSESNVAHICRSSVWVLKSSKARNLEAEDHTCYDMISG

SEQ ID NO: 785699 - protein, 125 aa, Homo sapiens
MTSREASSPCPGQACPGSTPCGQLEQRRPRAAPGFLSKLSCSWGGGRTSAGSSPALGLPGKVGCGRWAGQTPDSWLPHPGLGVVLSLLSAPQPTEIRSLWPGARGSAAPLPSPWPSRSPRQKHPL

SEQ ID NO: 785700 - protein, 86 aa, Homo sapiens
PGILRGGPDRAGGGERKPTGAGPPLTRRLRLPPPGLWAQRAQMPGRTPPPAAGTPIAALEPLGRRNWGLHRHLLLPSPRSLPHLLI

SEQ ID NO: 785701 - protein, 121 aa, Homo sapiens
MDSGPLVAGPSSPPSLSTFGSCSLQCSEPLGTPAAGASAPPTTLLSRLPTPMCFPDCPLVTFRSSLQGATQTPPPASSCRQSSLCLLHAYLFIIKYTKGPIVSLHMFSTQMGKQGGWAVCF

SEQ ID NO: 785702 - protein, 106 aa, Homo sapiens
MQGKGTEGHSPAPLPVISLCFVCSNRSSHKTQFSCISSSSGEHTNKWVFFFSLQIGISDEQGPNPQISRLCKCRFQYQTPTQVQKGTCPYPFGAKFILLNSLKVWT

SEQ ID NO: 785703 - protein, 83 aa, Homo sapiens
KEKIKEKKKKKDKKKGKENKRKKENKRKNVKEKSLVHVLPQPELTPSTGPFTQMYAFSMMFFKEVFDNIAAQESPALFPVRFS

SEQ ID NO: 785704 - protein, 73 aa, Homo sapiens
TGSSWQRLRQLAGIEGLRCLASPVAFVWDARDGGTQITVLSKRATEKHCLFTKLTFYQLSTYNHSIFKCHRVL

SEQ ID NO: 785705 - protein, 77 aa, Homo sapiens
QPSERLRLADGPHGCAGRLEVWHGGRWGTITHSTMIPDPTTTPQPFTTMQPTTMPHPTTTPHPTTTPHPTTTPHPTT

SEQ ID NO: 785706 - protein, 115 aa, Homo sapiens
AHMILEAERSYDLLSVLEAQKPVVWSQSKPVGLRTREAPSLSLKTLRTRNVRVQAQENMVSQLKERESKFASDEDHPHWRWWSSSLGLLIQTLNSPRSIHRHTQKEGSTSYVDIP

SEQ ID NO: 785707 - protein, 69 aa, Homo sapiens
RKIRESCAEPNLYPSSLLLTLDSKAHKAADIVLASKSGLTKCGRVKLRGVCVCVKDPVSLSQAGSLTQL

SEQ ID NO: 785708 - protein, 134 aa, Homo sapiens
MCIQALQREVAEEDLVQVDRAVDALDRWEMFTGQLPATRQDPPSSRDSVGLRKVLGDKFSSLRRKLSARKLARAESAPRPWDGEESYVQQGLPYVSFPKDAGQHCPVAEATTDLPGIKRKGLPGWWLRPVIPSL

SEQ ID NO: 785709 - protein, 112 aa, Homo sapiens
KGSVSNQRTERKAVISHHFRKGLGPAESREEHEEGQSNTLWLFQAFRSFLTPWEEERCVWSRGQVSKGNGGCLEDCSRIVIHSLENIIVFLCILHYGRCVGYRNSSPYHQKK

SEQ ID NO: 785710 - protein, 77 aa, Homo sapiens
MGAAEGHSDPGQEPVPQCSTAKGGDCVTCVCRPTSQTGRRTWVRRHEAGTSQEKLLHPKMPETLRTASLLWKFQGCA

SEQ ID NO: 785711 - protein, 224 aa, Homo sapiens
MNIEVGNISYTGAIISWSSSEPCLEDYYHIMYRPNWNSIFSGYLRYSFHHEEKVPRTISSVVLEHLAPSTLYFLCISCKKAAFPYRHYCTMFHTLDKSPLAPGSSLVDPQISLWVLMAILLACFTAVLAFICLQFWCVRCHEPRWSYRAGHMEEANGLVRWPEEAPDLGQREEDLQGLPLVEMPRKNSRDGAELDPEANQDAPDAGALQRGGGDPPAILPHCGE

SEQ ID NO: 785712 - protein, 224 aa, Homo sapiens; identical to SEQ ID NO: 785711

SEQ ID NO: 785713 - protein, 49 aa, Homo sapiens
GTVLAETTLLIQTSSFLFPFLPFCHYYIITELLRYIINHKILGMDIKKY

SEQ ID NO: 785714 - protein, 108 aa, Homo sapiens [sequence omitted]

SEQ ID NO: 785715 - protein, 153 aa, Homo sapiens
MLSSRWWPSSWGILGLGPRSPPRGSQLCALYDFTYTGADGSRCLWLKGIGSYCFERANSDWWLARRLEAPSTLEPSSSQQLYDRGIHPFQSQIRHPRQWSGLLGEVFMVLERLKAPREDREWKAPHSRKVEGDEVTKFELPRTGNLGILQKPH

SEQ ID NO: 785716 - protein, 104 aa, Homo sapiens
VCRLHRGGRAKLFSFAAGRWVAQGKFSSLSCCLPGNGLGAVAGGTVGVKPALRFAWELGEACDCRLSPTSLTTCRDSHNPPRDRQQHNNSGRFQYSTDSTRPAI

SEQ ID NO: 785717 - protein, 81 aa, Homo sapiens
RIRYHIYHHLLLEFSDVRKMTTVAQRNGCFCCPDSEEGHVYALLEANLPPKGLAVCFPRGWSIQGLFWSSRMGLSFSLSSI

SEQ ID NO: 785718 - protein, 133 aa, Homo sapiens
RRAQCSAPRGWAAWGFWGPGGSLASTRSPPSWKCCPTRRASTCSHWAEHRGRWTPARRPARVGEERLRCCLTGGRQPGAPRRRLSLAGPGLQAEKFLPGRGSPPGPWADAPGDGAREDASASAGFRPQAFRAA

SEQ ID NO: 785719 - protein, 35 aa, Homo sapiens
MSGITFHAPRPAPSWEPLGSLRPRLSEAGPSPETQ

SEQ ID NO: 785720 - protein, 82 aa, Homo sapiens
PTKTGDKGRSCLRESSLVVDVPILATSSSSMPVPLLCWLSCLQGGVEIQNHVAPGRVGPGAGLPVWRAGSTGYSPRDLEPAW

SEQ ID NO: 785721 - protein, 240 aa, Homo sapiens
  misc_feature (99)..(99): Xaa can be any naturally occurring amino acid
  misc_feature (190)..(190): Xaa can be any naturally occurring amino acid
PARLNAPRSHRHPLEWPTGDLHYGLSQEVQQKIEKQYDADLEQILIQWITTQCRKECRGQALKPCDCSRTFAESMAFNEVMCDGVSYCMMLYLIVDLVXPAGRQCPPATQTRSKAIRAMGPYNGEHVTTESSRDSLAQHAVMRLYDAFNYPRDYQFQNLCDLVGKDETHGSSVQAVRLMNSGVGWQLARXCCGSFSGDPNWFPKKSKENPRNFSDNQLQEGKNVIGLQMGGISGRHDWLL

SEQ ID NO: 785722 - protein, 88 aa, Homo sapiens
SAGGKRVFASGSVGVRSVCRGSALLPPNFLLTGPHCGNNKINKRSKNNIKSQGPGVLTGTGWVQTHTGIPECVPQQDTPALKEWTERS

SEQ ID NO: 785723 - protein, 179 aa, Homo sapiens
SAGGKRVFASGSVGVRSVCRGSALLPPNFLLLQDKFEHLKMIQQEEIRKLEEEKKQLEGEIIDFYKMKAASEALQTQLSTDTKKDKHPLLPPAPYSDGAENVLCEPVTSGPVDVVVLAYLSGTGPHCGNNKINKRSKNNIKSQGPGVLTGTGWVQTHTGIPECVPQQDTPALKEWTERS

SEQ ID NO: 785724 - protein, 420 aa, Homo sapiens
MPLQVSDYSWQQTKTAVFLSLPLKGVCVRDTDVFCTENYLKVNFPPFLFEAFLYAPIDDESSKAKIGNDTIVFTLYKKEAAMWETLSVTGVDKEMMQRIREKSILQAQERAKEATEAKAAAKREDQKYALSVMMKIEEEERKKIEDMKENERIKATKALEAWKEYQRKAEEQKKIQREEKLCQKEKQIKEGRKKIKYKSLTRNLASRNLAPKGRNSENIFTEKLKEDSIPAPRSVGSIKINFTPRVFPTALRESQVAEEEEWLHKQAEARRAMNTDIAELCDLKEEEKNPEWLKDKGNKLFATENYLAAINAYNLAIRLNNKMPLLYLNRAACHLKLKNLHKAIEDSSKALELLMPPVTDNANARMKAHVRRGTAFCQLELYVEGLQDYEAALKIDPSNKIVQIDAEKIRNVIQGTELKS

SEQ ID NO: 785725 - protein, 355 aa, Homo sapiens
MPLQVSDYSWQQTKTAVFLSLPLKGVCVRDTDVFCTENYLKVNFPPFLFEAFLYAPIDDESSKAKIGNDTIVFTLYKKEAAMWETLSVTGVDKEMMQRIREKSILQAQERAKEATEAKAAAKREDQKYALSVMMKIEEEERKKIEDMKENERIKATKALEAWKEYQRKAEEQKKIQREEKLCQKEKQIKEGRKKIKYKSLTRNLASRNLAPKGRNSENIFTEKLKEDSIPAPRSVGSIKINFTPRVFPTALRESQVAEEEEWLHKQAEARRAMNTDIAELCDLKEEEKNPEWLKDKGNKLFATENYLAAINAYNLAIRLNNKMPLLYLNRAACHLKLKNLHKAIEDSSKTMLMQE

SEQ ID NO: 785726 - protein, 146 aa, Homo sapiens
MPLQVSDYSWQQTKTAVFLSLPLKGVCVRDTDVFCTENYLKVNFPPFLFEAFLYAPIDDESSKAKIGNDTIVFTLYKKEAAMWETLSVTGVDKEMMQRIREKSILQAQERAKEATEAKAAAKREDQKYALSVMMKGEIQKIYLLRS

SEQ ID NO: 785727 - protein, 376 aa, Homo sapiens [sequence omitted]

SEQ ID NO: 785728 - protein, 326 aa, Homo sapiens
MMQRIREKSILQAQERAKEATEAKAAAKREDQKYALSVMMKIEEEERKKIEDMKENERIKATKALEAWKEYQRKAEEQKKIQREEKLCQKEKQIKEGRKKIKYKSLTRNLASRNLAPKGRNSENIFTEKLKEDSIPAPRSVGSIKINFTPRVFPTALRESQVAEEEEWLHKQAEARRAMNTDIAELCDLKEEEKNPEWLKDKGNKLFATENYLAAINAYNLAIRLNNKMPLLYLNRAACHLKLKNLHKAIEDSSKALELLMPPVTDNANARMKAHVRRGTAFCQLELYVEGLQDYEAALKIDPSNKIVQIDAEKIRNVIQGTELKS

SEQ ID NO: 785729 - protein, 381 aa, Homo sapiens
MPLQVSDYSWQQTKTAVFLSLPLKGVCVRDTDVFCTENYLKVNFPPFLFEAFLYAPIDDESSKAKIGNDTIVFTLYKKEAAMWETLSVTGVDKEMMQRIREKSILQAQERAKEATEAKAAAKREDQKYALSVMMKIEEEERKKIEDMKENERIKATKALEAWKEYQRKAEEQKKIQREEKLCQKEKQIKEGRKKIKYKSLTRNLASRNLAPKGRNSENIFTEKLKEDSIPAPRSVGSIKINFTPRVFPTALRESQVAEEEEWLHKQAEARRAMNTDIAELCDLKEEEKNPEWLKDKGNKLFATENYLAAINAYNLAIRLNNKMPLLYLNRAACHLKLKNLHKAIEDSSKEFCSLEGIECQASEPKLSHHIPSDLHVYIQMA

SEQ ID NO: 785730 - protein, 271 aa, Homo sapiens
MPASQSRARARDRNNVLNRAEFLSLNQPPKGGPEPRSSGRKASGPSAQPPPAGDGARERRQSQQLPEEDCMQLNPSFKGIAFNSLLAIDICMSKRLGVCAGRAASWASARSMVKLIGITGHGIPWIGGTILCLVKSSTLAGQEVLMNLLLALLLDIMTVAGVQKLIKRRGPYEMSPSLLDYLTMDIYAFPAGHASRAAMVSKFFLSHLVLAVPLRVLLVLWALCVGLSRVMIGRHHVTDVLSGFVIGYLQFRLVELVWMPSSTCQMLISAW

SEQ ID NO: 785731 - protein, 182 aa, Homo sapiens
MPASQSRARARDRNNVLNRAEFLSLNQPPKGGPEPRSSGRKASGPSAQPPPAGDGARERRQSQQLPEEDCMQLNPSFKGIAFNSLLAIDICMSKRLGVCAGRAASWASARSMVKLIGITGHGIPWIGGTILCLVKSSTLAGQEVLMNLLLGECACRPPLTVRPLGRQPGLPNPTLAGTCTAL

SEQ ID NO: 785732 - protein, 40 aa, Homo sapiens
MEHPPATHDVIPHLPLPHSPLQFKPTSIIVLLAHTTLLYA

SEQ ID NO: 785733 - protein, 339 aa, Homo sapiens
PYKCNICGKSFSQSSNLATHQTVHSGNKPYKCDECGKTFKRSSSLTTHQIIHTGEKPYTCDVCDKVFSQRSQLARHQRSHTGEKPYKCNECGKVFSQTSHLVGHRRIHTGEKPYKCDKCGKAFKQGSLLTRHKIIHTREKRYQCGECGKVFSENSCLVRHLRIHTGEQPYKCNVCGKVFNYSGNLSIHKRIHTGEKPFQCNECGTVFRNYSCLARHLRIHTGQKPYKCNVCGKVFNDSGNLSNHKRIHTGEKPFQCNECGKVFSYYSCLARHRKIHTGEKPYKCNDCGKAYTQRSSLTKHLIIHTGEKPYNCNEFGGAFIQSSKLARYHRNPTGEKPHK

SEQ ID NO: 785734 - protein, 94 aa, Homo sapiens
MEEFLEPQECYQTAETSWCPSSLPLLQQLIIQAQVADAKQEEVLFSLPVTYLELIYSASQPSGQHGCASITASWMTTSHIDRDLQTITTDRLVY

SEQ ID NO: 785735 - protein, 125 aa, Homo sapiens [sequence omitted]

SEQ ID NO: 785736 - protein, 109 aa, Homo sapiens
SSICQVRMKKTHIPTQNGEQKNFDQNQVLFSCPSTFIYFQVFKYNLCENGPYIYISLQLWPKLQTYIFNLVSSHRHLHLKLSIPQTKLFIPLFTIPPQYCSSLCLPPSP

SEQ ID NO: 785737 - protein, 110 aa, Homo sapiens
EGIWCGLGLYSEGLSSSLPQSFVRSLFQWFLRASGSYAYVLGLQKTLLPRPPYFPEVPLKLHQMFVEPEKIRAGKDLRVLAVQPGKLGSREWERLAQDHKLLGGKAESST

SEQ ID NO: 785738 - protein, 39 aa, Homo sapiens
MWSIRSDAEIKGDGVALLPGDAEQVAGGGDLTLKETDTE

SEQ ID NO: 785739 - protein, 39 aa, Homo sapiens
SENKRFRKAMRITLTQGDICTAGCAVSSPNPSRRMEHSP

SEQ ID NO: 785740 - protein, 123 aa, Homo sapiens
SKDPPGTGVGNCEVLLACVMVLSCPLSSLLVCSGLPEVLLTTFTPGLIHTAASVLRPGAGLLPHLCRRLLISSATLLESHQQCTLLALQEGQGDGPRPVRGASHPPCLPLRASRVPAWGVCVE

SEQ ID NO: 785741 - protein, 123 aa, Homo sapiens [sequence omitted]

SEQ ID NO: 785742 - protein, 124 aa, Homo sapiens
IVLGIQNPISPFFNCPRKHHASLLYAGPVQTTGAQMPGKPAFHAPSTIVLLGELTQLLGEHQSMRESDTPVPLDFSCLIFIFMNIKKIHLLLEFFILHAHMLSDTSLLLFHLDLHCNLSFLFIF

SEQ ID NO: 785743 - protein, 69 aa, Homo sapiens
RKVPAAARMRPRAGAGRSTLPWLPATGQACRLYLSTCEFFPCIYFSLPRLLPALLCKVVSTSTSRVPDT

SEQ ID NO: 785744 - protein, 192 aa, Homo sapiens
NAPRSHRHPLEWPTGDLHYGLSQEVQQKIEKQYDADLEQILIQWITTQCRKDVGRSQPGRENFQNWLKDGTVLCELNNALYPKGQVPVKKIQASTMAFKQMEKISQVSPWPKARGLKARLNGANFKQPKLDIFQTVDLWEGKNMACVQRTLRNLGGLAVAWDDGLFSGDPNWFPKKSKENPRNFSDNQLQEG

SEQ ID NO: 785745 - protein, 44 aa, Homo sapiens
MCALVPSPKQAQLRQGQIQATEDAGPEKANTPTEPLITGPMSAA

SEQ ID NO: 785746 - protein, 69 aa, Homo sapiens
HDPTQKDGDGRVRARKEQHFQVTSPHSGLPFSRVCCDSTPCLQEPRGIRPSELTDDTMTKTFIWDFMAC

SEQ ID NO: 785747 - protein, 113 aa, Homo sapiens
MADPEELQVSSPPPPPPSSPSSSDASAASSPGGPVSLGWPVPSRSSGPTVDQLEEVELQIGDAAFSLTKLLEATSAVSAQVEELAFKCTENARFLKTWRDLLKEGYDSLKPDD

SEQ ID NO: 785748 - protein, 113 aa, Homo sapiens; identical to SEQ ID NO: 785747

SEQ ID NO: 785749 - protein, 113 aa, Homo sapiens; identical to SEQ ID NO: 785747

SEQ ID NO: 785750 - protein, 119 aa, Homo sapiens
GTPSPSRGAVKQPQRGQRGPRIPQHDARAVKGSRRRGDAHGFLGGVVFSTSALRDRLEARAGAVELPKAAFSLTKLLEATSAVSAQVEELAFKCTENARFLKTWRDLLKEGYDSLKPDD

SEQ ID NO: 785751 - protein, 65 aa, Homo sapiens
ISVPWDQPSYQHHCTPLSYTTQHASAFQASLLISPSGLISTWREEREAEQTFLEEPSPLTLPCPV

SEQ ID NO: 785752 - protein, 147 aa, Homo sapiens
KGEEEDGYIEDCYVPQRSIYDTMRINEQIDQGSKLNQTSKSTMEKMEGSTISSNGTLGAASNVFESRAPEGKKLDERIIFDALKLSSDVQKSAPVPPRRRPNAERKDNVNRRSWKSFMPPNFPEFAERIEASLSEVSEAGASNPSLQ

SEQ ID NO: 785753 - protein, 130 aa, Homo sapiens
HIRTGTQEPGAEQSISARKRTKAEAAPGPRPILTPPRLLLQAAGGVQLDPGHNRNAPSTPTSPTAVLPTQRKPASRGSHHPQEASPPCRAGPLPMAGAPSCLPRGTGRGEACGVTTSVTCSPSSMLRVSF

SEQ ID NO: 785754 - protein, 136 aa, Homo sapiens
PTAGSTFGRPGGEAQSSTPRQLKCVCGKGTLGAAGRPPPAEQTRAPGQTGMEVRVQLLPDALGAAQEGEGWGAGCSLAAAAHSCSPGSSGQPLKLPDPPTQAAALCTAEPRPGGAVPPAPAPRSQTAPLRVAAFPG

SEQ ID NO: 785755 - protein, 101 aa, Homo sapiens
HKSPVIPHNKVRKHILTGTWLLLQDVLGQQGLAFTSMVLLIRKLGMNCLIWGEHIHRKRWRESRLVHKLEGVNSLKEGGRRLFVPIKMIQWQVLFMLLHFF

SEQ ID NO: 785756 - protein, 152 aa, Homo sapiens
FPEAQKARKLGANVYTLGVADYNLDQITAIADSPGHVFAVENGFKALRSTIDALTSKVCLDVTSVEPSSECVGEPYHVVIHGNGFQNLKKRDEVICRFIFNESTIIGEYSIEVSLNKGKTFFKSNVSITSTTCTVKEPPPVQKPAKNHRGTE

SEQ ID NO: 785757 - protein, 45 aa, Homo sapiens
MVVSAYWEWTENHVANCCETGSICDLVGWLLSPFIWDQDSDDRCT

SEQ ID NO: 785758 - protein, 181 aa, Homo sapiens [sequence omitted]

SEQ ID NO: 785759 - protein, 181 aa, Homo sapiens [sequence omitted]

SEQ ID NO: 785760 - protein, 141 aa, Homo sapiens
LRPPTQTEPNYSYFLPYILITIQTGLFTIFLYLSLYPSFSLPVWLAHSFNLSSGGFFCLFVCLFVLRWSLALWLECSGVISANCNLYLPGSSDSPVSASQVVGITGTHHHAWLVVFVFLVETGFHHVGQLVSNSSPQVIHL

SEQ ID NO: 785761 - protein, 116 aa, Homo sapiens [sequence omitted]

SEQ ID NO: 785762 - protein, 49 aa, Homo sapiens
MQVYSPGARGRTTQPKSVAGCAIQVCVSIFHDARTTMTLPNDAFLECIP

SEQ ID NO: 785763 - protein, 196 aa, Homo sapiens
MADIILWDYKNRELLARLSLHKGKIEALAFSPNDLYLVSLGGPDDGSVVVWSIAKRDAICGSPAAGLNVGNATNVIFSRCRDEMFMTAGNGTIRVWELDLPNRKIWPTECQTGQLKRIVMSIGVDDDDSFFYLGTTTGDILKMNPRIKLLTDVGPAKDKFSLGVSAIRCLKMGGLLVGSGAGLLVFCKSPGYKPIK

SEQ ID NO: 785764 - protein, 285 aa, Homo sapiens
MDNKISPEAQVAELELDAVIGFNGHVPTGLKCHPDQEHMIYPLGCTVLIQAINTKEQNFLQGHGNNVSCLAISRSGEYIASGQVTFMGFKADIILWDYKNRELLARLSLHKGKIEALAFSPNDLYLVSLGGPDDGSVVVWSIAKRDAICGSPAAGLNVGNATNVIFSRCRDEMFMTAGNGTIRVWELDLPNRKIWPTECQTGQLKRIVMSIGVDDDDSFFYLGTTTGDILKMNPRIKLLTDVGPAKDKFSLGVSAIRCLKMGGLLVGSGAGLLVFCKSPGYKPIK

SEQ ID NO: 785765 - protein, 203 aa, Homo sapiens
MDNKISPEAQVAELELDAVIGFNGHVPTGLKCHPDQEHMIYPLGCTVLIQAINTKEQNFLQGHGNNVSCLAISRSGEYIASGQVTFMGFKADIILWDYKNRELLARLSLHKGKIEALAFSPNDLYLVSLGGPDDGSVVVWSIAKRDAICGSPAAGLNVGNATNVIFSRCRDEMFMTAGKYVSAFGVFRTHKLLYFLAQKTWSF

SEQ ID NO: 785766 - protein, 85 aa, Homo sapiens
GPNSWMPCGDITISRRCNKTGATAQGQRNRFVGASGSAVTIEDSLLYFDSKTMRKAPEELRLQPGRRKSEVQGGMHPELVEEIPQ

SEQ ID NO: 785767 - protein, 106 aa, Homo sapiens
MRQAQPTPQYRFRKRDKVMFYGRKIMRKVTTLPNTLVENTALPRQRARKRTKVLSLAKRILRFKKEYPALQPKEPPPSLLEADLTEFDVKNSHLPSEVLYMLKNVR

SEQ ID NO: 785768 - protein, 123 aa, Homo sapiens
LALVGVLILFMFRRLRQFRQAQPTPQYRFRKRDKVMFYGRKIMRKVTTLPNTLVENTALPRQRARKRTKVLSLAKRILRFKKEYPALQPKEPPPSLLEADLTEFDVKNSHLPSEVLYMLKNVR

SEQ ID NO: 785769 - protein, 200 aa, Homo sapiens
QLPAHPCLSPSHTLGPWPLQSLSPSVTLPVPPLPMEGGRTAVWWGDRVGPRVWEGPALGAGLRGAPGPHDSLRPGLASLCRAVPLRAVASSHTFGDPASGDAGQRLSSERALTSERATWGQLTPVGPWARNKRLMRPSGPFPDPPCPALSGKQPQRRAGLVVTRSPAPPRASDLCLFCTFLGWDCGASARWGAVCRAVGV

SEQ ID NO: 785770 - protein, 125 aa, Homo sapiens
CKEVSVVGMEWTQEGREAAEMVRPDQRGLLYLVKRDVKGSGGDRRSPYALGKATHTHPFSRIAEPLISFVIFKSHFPFWPPLFLSVRYGSWTNMTFKLPSNSNHLWIWISLRSFLCNECSESCCL

SEQ ID NO: 785771 - protein, 116 aa, Homo sapiens
KEGWCVVCDVTHSDEKHRSLQKCSWRGPSYQRNDKNLPAQSLSVHNFLNLHSNVPYFLPLESILHTTARLCLSLLKTFLGFHSYSNKVLIMANKALQGLFSAYFFYFFPFHSVTMV

SEQ ID NO: 785772 - protein, 87 aa, Homo sapiens
HLPQIKVNRPLRTQPLSSDMVFMEVQGQQFDRCLQEAAGLHAEWASSLEGSVGKHCGRHILSDRALGTAWPAPSLWLCLLRAPRPFF

SEQ ID NO: 785773 - protein, 78 aa, Homo sapiens
HSQSLASILPFPLYSLLWFLRADFRVYCFSHAPTVPFPEPRAIRLKSHSSKVLYHLAIVAIPSRASYFPLLPLVSSCE

SEQ ID NO: 785774 - protein, 125 aa, Homo sapiens
MGDLSRTALWLGGRRDPSGSFRVRDGAAAEVGRACLGLPSECGSLVRARASPRPLLGPAVCPWRARSPRPGLPRPSPTCPWKRGGDWCALSLVAPAASRHPPLSASEQRIPPTSTCTCTRPLGNP

SEQ ID NO: 785775 - protein, 35 aa, Homo sapiens
SCLYVSYAEYHWAAFLEYVFPYTHLLASYLGLPQQ

SEQ ID NO: 785776 - protein, 106 aa, Homo sapiens
GKEPCDFPHLSELGGLCLRRALRREGRSHPHCDLSPPFLAGWLWSVGNEGVGKPGKQKVGAGGLLAGRQTFGANFPAQPAELLVLRYTRVSSVFLLDCVTLLSHCY

SEQ ID NO: 785777 - protein, 270 aa, Homo sapiens
MPKGKKAKGKKVAPAPAVVKKQEAKKVVNPLFEKRPKNFGIGQDIQPKRDLTRFVKWPRYIRLQRQRAILYKRLKVPPAINQFTQALDRQTATQLLKLAHKYRPETKQEKKQRLLARAEKKAAGKGDVPTKRPPVLRAGVNTVTTLVENKKAQLVVIAHDVDPIELVVFLPALCRKMGVPYCIIKGKARLGRLVHRKTCTTVAFTQVNSEDKGALAKLVEAIRTNYNDRYDEIRVTGVAMSWVLSLWLVSPSSKRQRLKNLPLNWVKCHC

SEQ ID NO: 785778 - protein, 278 aa, Homo sapiens
MPKGKKAKGKKVAPAPAVVKKQEAKKVVNPLFEKRPKNFGIGQDIQPKRDLTRFVKWPRYIRLQRQRAILYKRLKVPPAINQFTQALDRQTATQLLKLAHKYRPETKQEKKQRLLARAEKKAAGKGDVPTKRPPVLRAGVNTVTTLVENKKAQLVVIAHDVDPIELVVFLPALCRKMGVPYCIIKGKARLGRLVHRKTCTTVAFTQVNSEDKGALAKLVEAIRTNYNDRYDEIRVTGVAMSWVLSLWLVSPSSKRQRLKNLPLNWVKCTLLSFLYIKY

SEQ ID NO: 785779 - protein, 211 aa, Homo sapiens
RPTQASGGRAGPREGAGGGEVAGVGGTELARSQSGHPHLIFPSWLEAGEPRPPLPETSVFGSARPLAPLLGLQVSSLGSQDPPMGTALFSFCSGNSKNQDGGRGRVLSCPFIIMTVEFLAVPITPQHDACQNAPNLLPDAGAIAISGHRQLRAALSNGCPWDTSLRDAFVGKGFCGSITFGSAAHSVPKLDIHKGRYCRKGSDKPYRKASC

SEQ ID NO: 785780 - protein, 118 aa, Homo sapiens
MGAVAKDGHNTNSPFVFYLSLQKGVFLNSTLLWACYILSPRLLLLARLVSRWLSCWKKRKPKPASPHPLVRWACPTPSWVHIRPDKKEAKKLSVYHCASSCPPHPISLKWNGLISLFV

SEQ ID NO: 785781 - protein, 118 aa, Homo sapiens; identical to SEQ ID NO: 785780

SEQ ID NO: 785782 - protein, 121 aa, Homo sapiens
MILPEKLHMRRCAGMCVLLEKRPKGSAQRPENPREQGPLGQAGEGLGRDTTVRQQSLRGWRRRPPLSCSSCPFRWRRWMGPGAFGGARGAGEAAALEPPAWQPFGPQGNIGALANRIILSV

SEQ ID NO: 785783 - protein, 244 aa, Homo sapiens
MPERDSEPFSNPLAPDGHDVDDPHSFHQSKLTNEDFRKLLMTPRAAPTSAPPSKSRHHEMPREYNEDEDPAARRRKKKSYYAKLRQQEIERERELAEKYRDRAKERRDGVNKDYEETELISTTANYRAVGPTAEADKSAAEKRRQLIQESKFLGGDMEHTHLVKGLDFALLQKVRAEIASKEKEEEELMEKPQKETKKDEDPENKIEFKTRLGRNVYRMLFKSKAYERNELFLPGRMASVVDLD

SEQ ID NO: 785784 - protein, 106 aa, Homo sapiens
CSKIRRSEASFSERPELPVRKISIGETGSLKDQEGKSFNIVWLLATLEDQRYNFVFNLVYQSQHTSVLSCAPTNTTKFMVLARPRYEEDYYKCMGCDDNVVDVVVT

SEQ ID NO: 785785 - protein, 80 aa, Homo sapiens
VVEEAVITSPGSEWPPLPHHLHLPKSDQSDKCLSSFSLEDEVLSTFQPWHLYHRADVILFCIIMITPHIDNSSRLTKPSD

SEQ ID NO: 785786 - protein, 67 aa, Homo sapiens
CLYEHIQIIVEKLSCRRNQCKVSETDSNAKHGMTLAECKRVVDQGSPDIVVIKQVSGMGKNLPRREK

SEQ ID NO: 785787 - protein, 68 aa, Homo sapiens
LSLYFQQTACPGDRSELWSSMQPGCQAYSTGQVPSSCPGIVNVTHTRHNGLGNVERRGASVRCHETSG

SEQ ID NO: 785788 - protein, 68 aa, Homo sapiens; identical to SEQ ID NO: 785787

SEQ ID NO: 785789 - protein, 168 aa, Homo sapiens
LASQLEEIKLQIKKQKELENGEVEGEDAFLSSKGRHERTKFRGHGSEASVSKHTARELSPQHKRERLRNREFALNNENYSLSNRQVSSPSFTNRRAAKASHMGVSTDSGTQETKKTEDRFVPGSSQSEGKKSREQPSVLSRYPPAAQEHSKAWKGTSKPGTESGLKGK

SEQ ID NO: 785790 - protein, 118 aa, Homo sapiens
CIALGGLPQVFPQLSSLWIPSTVYHGDQNPLPWGCPSLSSWESKHAYCYWSSLIFPGCIDLAQCHRWGCVLYKPPQTHIHPIWGEKAVLSTFPLGFKESRKSDILYQVTGNKQKSETH

SEQ ID NO: 785791 - protein, 195 aa, Homo sapiens
AQSEGTPARGARGARPRRRRSGAQPPTRPVGTRTRRDPAPGKGCGDLGSDPEFIPSLLAPRRPDVLTQWSLRMGKPIVTCAHRRQPGHVPRVSAWHASVIHACEELSAWLDGCQIDSAKRDPSVNTLGASPEGLVDYCRNSQGGLHQRALPVEGHTCVRTFDHVARANSVSDERGVIGQRRGPLVRAQSLANVNI

SEQ ID NO: 785792 - protein, 484 aa, Homo sapiens
AQSEGTPARGARGARPRRRRSGAQPPTRPVGTRTRRDPAPGKGCGDLGSDPSSSPHTPAAPCHPGPRWEPYPAPRVSPALARIAGMAVTMLQDWCRWMGVNARRGLLILGIPEDCDDAEFQESLEAALRPMGHFTVLGKAFREEDNATAALVELDREVNYALVPREIPGTGGPWNVVFVPRCSGEEFLGLGRVFHFPEQEGQMVESVAGALGVGLRRVCWLRSIGQAVQPWVEAVRCQSLGVFSGRDQPAPGEESFEVWLDHTTEMLHVWQGVSERERRRRLLEGLRGTALQLVHALLAENPARTAQDCLAALAQVFGDNESQATIRVKCLTAQQQSGERLSAFVLRLEVLLQKAMEKEALARASADRVRLRQMLTRAHLTEPLDEALRKLRMAGRSPSFLEMLGLVRESEAWEASLARSVRAQTQEGAGARAGAQAVARASTKVEAVPGGPGREPEGLLQAGGQEAEELLQEGLKPVLEECDN

SEQ ID NO: 785793 - protein, 114 aa, Homo sapiens
VATAWSDLQCTEMGWEQETQKSRPWNQVEGRQPGHDPEQDTCSTSPFAMSKSSLRPPKKLMPCASCTAAEPDGFPWLCYSHSWKCCLTESSGHPSRMDVVSPPTLQMGKLRLES

SEQ ID NO: 785794 - protein, 129 aa, Homo sapiens
FRRQVGGASPEVLPGPRFSHSFPRIGDHVVSVQSKNHVSWAQAQVRIVVLEAVSGLQVPNCCEPGIAMGTERNFTARVQRGSRVAYAWYFSLQKVRGDSLFILSGRDVTYTPWPRGCWRSRCVPSTPWA

SEQ ID NO: 785795 - protein, 68 aa, Homo sapiens
CPEPGAPWNYASCKHSLGAGLCQSRQGASPGEVHASNSEQGQHPQTTAHSPTVHASLAMVGRGSSSLP

SEQ ID NO: 785796 - protein, 100 aa, Homo sapiens
VIQAEYPSYEKLGITTVLDFEIFALYLTQVEHPKSENPKSKMLQQAFPLSHVDAQKVSNFIAVHFFFFETKSHSVARAGVQRLGSPQPPPPGFKRFSFLS

SEQ ID NO: 785797 - protein, 50 aa, Homo sapiens
QHFKMPCQSTRIGTRSETQLDDHRDLIAQTPNGSIGLMETSAPICFPSES

SEQ ID NO: 785798 - protein, 78 aa, Homo sapiens
MPQRDGCTGWLPWWTVSGSGGDDRGFVCRGWLQVARVTEERGLLRKAAVVQPSLHGLMAFALQVCVGPTCSVPGAGCW

SEQ ID NO: 785799 - protein, 66 aa, Homo sapiens
ALLMQQEERAKQQGDHSLKEHELLEQQKRAAVLLEQERQQEIAKMGTPVPRPPQDMGQIGVRTPLG

SEQ ID NO: 785800 - protein, 106 aa, Homo sapiens
RSEWGGRVLSPLFALLCGHQDSLHPHQVPGAAVLPPFHRGKTGTEIKNHPDAPPQVSRGAGAALGAPQTHCISKPSSDAPLPFQAWRGVQHETLILQPWSPPHRES

SEQ ID NO: 785801 - protein, 564 aa, Homo sapiens
RAIAHWGSGRLGPAWGSCAAGLWVLAPPEPTGHLVIPGTSPLEPPCPWLDSHIFQCRFGKMLPLEKAFASPRSSPAPPDLPTPGSAAGVQQEEPETIPERTPADLEFSRLRFREFVYQEAAGPHQTLARLHELCRQWLMPEARSKEQMLELLVLEQFLGILPDKVRPWVVAQYPESCKKAASLVEGLADVLEDARMLLGSPAGSSSILSDGVYERHMDPLLLPGELASPSQALGAGEIPAPSETPWLSPDPLFLEQRRVREAKTEEDGPANTEQKLKSFPEDPQHLGEWGHLDPAEENLKSYRKLLLWGYQLSQPDAASRLDTEELRLVERDPQGSSLPEGGRRQESAGCACEEAAPAGVLPELPTEAPPGDALADPPSGTTEEEEEQPGKAPDPQDPQDAESDSATGSQRQSVIQQPAPDRGTAKLGTKRPHPEDGDGQSLEGVSSSGDSAGLEAGQGPGADEPGLSRGKPYACGECGEAFAWLSHLMEHHSSHGGRKRYACQGCWKTFHFSLALAEHQKTHEKEKSYALGGARGPQPSTREAQAGARAGGPPESVEGEAPPA

SEQ ID NO: 785802 - protein, 119 aa, Homo sapiens
SECFALKTGPDVLPVHNSVHVCVRAHTHTHTHKHTYTLFPSHTHIHTLSLSPLPPYTHTHTHTHTHTHIFTVLVSLCVSEQLYSHISLCVKELFPLEKDRSSSSFSVVSWSDSLFFTFS

SEQ ID NO: 785803 - protein, 194 aa, Homo sapiens
PQHHTIDSLEQGISSLMERLHVMETQKKQERKVRVKSPRTQVGSEYRESWPPNSKLPHSQSSPTVSSTCTKVLYFTDRSLTPFMVNIPKRLEEVTLQGFLTAAIDREGNHRYHFKALDPEFGTVKEEIFHDDDAIPGWARANIVALGAKEEHGRAMNAKVYRLQGLMEPGHSLAAITQDKRNSDTRITTKNVTS

SEQ ID NO: 785804 - protein, 127 aa, Homo sapiens
MGGLNTHTLPLSPSTGAAAQTSLGAPRPAWDCTVPGRVPGEGHKGLGARSRKSVGTGKAPVHPGRDMGQFEQGCGSPALALPGGEAPGPDIRGRRRGNMPRGGRGTRRPPGGAGRGAPGGRRRPLAS

SEQ ID NO: 785805 - protein, 77 aa, Homo sapiens
GKKLDDTENLHQHQKQHIGEKLERRGAREVSFVNSCKVHVSQEPFISYEVGKNFLPSLGLHQQEATHNVEKTNTETK

SEQ ID NO: 785806 - protein, 60 aa, Homo sapiens
MHPFGKLSHVCLSKCGCCGFSFHNGPKTQEQTLGHGDSRSEEWGSHCGCQESRCCLNMGP

SEQ ID NO: 785807 - protein, 97 aa, Homo sapiens
MQSSQLARENVSGGRFRSVFQEASSDLSYLGAKELSAGQKHPEGLWACGQSLLCSCERQDLLPGRQYNFQEMPASCPTCPATPQPWFKLLLEPGTVA

SEQ ID NO: 785808 - protein, 108 aa, Homo sapiens
MSPMLKELSVTSNWHATEVAVGGSVKVLTGQRQERDEVSRAAVAWGGCHNLGTLCGGPGHWFSEGQPRSRSLRVLRCDCRMLLSLGKQVGSLQPMEKSIPWRAIVEVG

SEQ ID NO: 785809 - protein, 100 aa, Homo sapiens
ATFPSIWIPQLWRARAVSRLWTRDGVHPEEGAGGVASRVSQQKLAFLNLNKKTKERWDFGACLIRAQPLPTGPHSTCRAASALTGHERACVVRRDEKAEA

SEQ ID NO: 785810 - protein, 74 aa, Homo sapiens
LNKFSRMWSHTEASTRKVPDARAKYSVYLQAGHRHSEKPWQELPATKQSPAGNASSRALPESLMGKDVQNICLS

SEQ ID NO: 785811 - protein, 171 aa, Homo sapiens
RQPGRRDEAWKSTRLPKDGASVLRVRDEDLFPPTAPGRRSAGPRPLRAAPRTMSVTDQAFVTLATDDIYCQGALVLGQSLRRHRLTRKLVVLITPQVSSLLRDMDEAGNHDSEQTIAGIENQTLHVLTHRWELNNENTWTQGGEHHTLEPVVGRGEGGGIALGDIPNVNDE

SEQ ID NO: 785812 - protein, 148 aa, Homo sapiens
RQPGRRDEAWKSTRLPKDGASVLRVRDEDLFPPTAPGRRSAGPRPLRAAPRTMSGSHSVTQAGVEWYNHSSLQPQTPRLKYPPTSASQVAVTTVTDQAFVTLATDDIYCQGALVLGQSLRRHRLTRKLVVLITPQVSSLLRVSLVAQA

SEQ ID NO: 785813 - protein, 115 aa, Homo sapiens
RQPGRRDEAWKSTRLPKDGASVLRVRDEDLFPPTAPGRRSAGPRPLRAAPRTMSVTDQAFVTLATDDIYCQGALVLGQSLRRHRLTRKLVVLITPQVSSLLSLSKRCKISSSHLD

SEQ ID NO: 785814 - protein, 105 aa, Homo sapiens
RQPGRRDEAWKSTRLPKDGASVLRVRDEDLFPPTAPGRRSAGPRPLRAAPRTMSVTDQAFVTLATDDIYCQGALVLGQSLRRHRLTRKLVVLITPQVSSLLRWIH

SEQ ID NO: 785815 - protein, 142 aa, Homo sapiens
RQPGRRDEAWKSTRLPKDGASVLRVRDEDLFPPTAPGRRSAGPRPLRAAPRTMSVTDQAFVTLATDDIYCQGALVLGQSLRRHRLTRKLVVLITPQVSSLLRICSLTLVSLHGFLKAICMFAAVSALSVYMYCVVFLFRLLV

SEQ ID NO: 785816 - protein, 55 aa, Homo sapiens
MLQSYIVISMTKNLPFPSEGNKLRLRAANSTWFEGSAEDTLTEAPQLKGRKPHKK

SEQ ID NO: 785817 - protein, 245 aa, Homo sapiens
ASAWNGGLIALRMALFSLFWNEHDYRLGHYGAEDHQTPRDGETSHRAQIQQQQSYVEDLRHQILAEEIRAAKELEFDQAWISQQIKENQQCLLREETWLASLQQQQQEDQVAEKELEASVALDAWLQTDPEIQPSPFVQSQKRVVHLQLLRRHTLRAAERNVRRKKVSFQLERIIKKQRLLEAQKRLEKLTTLCWLQDDSTQEPPYQVLSPDATVPRPPCRSKLTSCSSLSPQRSLQQSTCPSYT

SEQ ID NO: 785818 - protein, 251 aa, Homo sapiens
AGRGSLEWLDLDGDLAASRLGLSPLLWKERRALEEQCDEDHQTPRDGETSHRAQIQQQQSYVEDLRHQILAEEIRAAKELEFDQAWISQQIKENQQCLLREETWLASLQQQQQEDQVAEKELEASVALDAWLQTDPEIQPSPFVQSQKRVVHLQLLRRHTLRAAERNVRRKKVSFQLERIIKKQRLLEAQKRLEKLTTLCWLQDDSTQEPPYQVLSPDATVPRPPCRSKLTSCSSLSPQRSLQQSTCPSYT

SEQ ID NO: 785819 - protein, 51 aa, Homo sapiens
AIKEKTARCSLAMTEELLQDLAQYKTHKDKNVMMCARTLIQLFRTLNPQML

SEQ ID NO: 785820 - protein, 144 aa, Homo sapiens
MQVWDTAGQERFRTITQSYYRSAHAAIIAYDLTRRSTFESIPHWIHEIEKYGAANVVIMLIGNKCDLWEKRHVLFEDACTLAEKYGLLAVLETSAKESKNIEEVFVLMAKELIARNSLHLYGESALNGLPLDSSPVLMAQGPSE

SEQ ID NO: 785821 - protein, 61 aa, Homo sapiens
MGDGFRKYFRLESPRFDDKLDESSKLRYHHGDTNFVELENLPYYFLIVLAFHFAAPGPPLV

SEQ ID NO: 785822 - protein, 58 aa, Homo sapiens
RKDTYPFYSEHIARTSHLTLPSRRGTGKCGRAHANAVKNNYFQAVVVAHACNPSTLGG

SEQ ID NO: 785823 - protein, 133 aa, Homo sapiens
ISCRKLELPLMLGTAQRESLSLWLPGLGPQVTECDSLLEILKQSPVQTRTRPPPTYPARPTARKRNSPRGAGTHGTKRVRHLLTSPDMYGTSASTSLSLPEGSCTLGEHLRPQPCGTPLTFTLAPRPSHWFPF

SEQ ID NO: 785824 - protein, 63 aa, Homo sapiens
AVRCLAKNLLGAENRELKLVAPTLRSELTVAAAVLVLLVIVIISLIVLVVIWKQKSEDEFSGV

SEQ ID NO: 785825 - protein, 76 aa, Homo sapiens
MLQASFLWPQNEDKKGEMGHRDEGACSLQQCAHHGCAEAAGGRYWEEALPLCVLGAGHSLMGPLCSQLQKPIHVGS

SEQ ID NO: 785826 - protein, 111 aa, Homo sapiens
MAISFFLFLGQKTYLEPDIESSLSPFFHTSHLIHQKIMSTLSSTTSHHVHHYLRGPSPIISHLDNSNSLLTSLLLPLPLHSLFSKRWPKWPFKTLISVTHQLKASNDFSSE

SEQ ID NO: 785827 - protein, 286 aa, Homo sapiens
LLWLYICTLEAKMQEGIERDRRAQAPGNLEEFEVNDLNYEDKLQEDRFLYSNIAFNLAADAAQSKCLDQALALWKELLTKGQAPAVRCLQQTAASLQILAALYQLVAKPMQALEVLLLLRIVSERLKDHSKAAGSSCHITQLLLTLGCPSYAQLHLEEAASSLKHLDQTTDTYLLLSLTCDLLRSQLYWTHQKVTKGVSLLLSVLRDPALQKSSKAWYLLRVQVLQLVEAYLSLPSNNSHTPCGSSLCQRWQTPEIALIDSHKLLRSIIFLLMGSDILSTQESSVE

SEQ ID NO: 785828 - protein, 265 aa, Homo sapiens
MTPDYGGGWAPNRAQGDYEDKLQEDRFLYSNIAFNLAADAAQSKCLDQALALWKELLTKGQAPAVRCLQQTAASLQILAALYQLVAKPMQALEVLLLLRIVSERLKDHSKAAGSSCHITQLLLTLGCPSYAQLHLEEAASSLKHLDQTTDTYLLLSLTCDLLRSQLYWTHQKVTKGVSLLLSVLRDPALQKSSKAWYLLRVQVLQLVEAYLSLPSNNSHTPCGSSLCQRWQTPEIALIDSHKLLRSIIFLLMGSDILSTQESSVE

SEQ ID NO: 785829 - protein, 117 aa, Homo sapiens
ITHKNTPLKKVEVLSMEEEKIMEKLGGIFKYFKKMTALLFNNKRTSLGGEAPVRAIVDMTLALGVEVLHGFYLDICCNSSSACYRRNFCDATDLLPYLSLKPQGLQLFTKPTQHSFL

SEQ ID NO: 785830 - protein, 102 aa, Homo sapiens
RQSTSLTCCRGKATKYYAKVSYRPKQKLGYHQETTQECLQVFTNESFCFFLKVKGTTISEISAYIVDFSYPLNVKKDELTNSMTITASSFFYSQNLHSRASH

SEQ ID NO: 785831 - protein, 105 aa, Homo sapiens
MVSPPKRRKDGTSSSGLLHQLRNLIPKTMLSLSHSRTVLGLTGSTLVLYVYPTTDLPGLCHIPKTMWTEKVGKDGSLWSKQGAVTRRRTGCWAGKRNRHPPIHPV

SEQ ID NO: 785832 - protein, 116 aa, Homo sapiens
TENDDGIISTSKFAASFFLITKPLYQSDFNSQRKREISPCSNWVRVRKRRKNTRSHASAEEEPEGRGSEEMSQRAETSMGGHNSMDGAFRKKGMPSGDGKTEPPLVELTWRFVFFT

SEQ ID NO: 785833 - protein, 1120 aa, Homo sapiens
TLSSPRRPPPPTMDPPSPSRTSQTQPTATSPLTSYRWHTGGGGEKAAGGFRWGRFAGWGRALSHQEPMVSTQPAPRSIFRRVLSAPPKESRTSRLRLSKALWGRHKNPPPEPDPEPEQEAPELEPEPELEPPTPQIPEAPTPNVPVWDIGGFTLLDGKLVLLGGEEEGPRRPRVGSASSEGSIHVAMGNFRDPDRMPGKTEPETAGPNQVHNVRGLLKRLKEKKKARLEPRDGPPSALGSRESLATLSELDLGAERDVRIWPLHPSLLGEPHCFQVTWTGGSRCFSCRSAAERDRWIEDLRRQFQPTQVIALRKAGHGDPAHRPGPPLPLYPKPARSITRAPNTPAPPASLQRLQDSPSIYYQPREYQTRPFCPLPAPYAPKALPARQSRSLYSSTTLVCPGAPNSPGEPRKARRLPRNRLLDSRGSTSFPKGPAISLGTRRNRFEAPRFTCGAFFGAANKPKRFPPSHSHLQDNVEREETWLSVWVHEAKGLPRAAAGAPGVRAELWLDGALLARTAPRAGPGQLFWAERFHFEALPPARRLSLRLRGLGPGSAVLGRVALALEELDAPRAPAAGLERWFPLLGAPAGAALRARIRARRLRVLPSERYKELAEFLTFHYARLCGALEPALPAQAKEELAAAMVRVLRATGRAQALVTDLGTAELARCGGREALLFRENTLATKAIDEYMKLVAQDYLQETLGQVVRRLCASTEDCEVDPSKCPASELPEHQARLRNSCEEVFETIIHSYDWFPAELGIVFSSWREACKERGSEVLGPRLVCASLFLRLLCPAILAPSLFGLAPDHPAPGPARTLTLIAKVIQNLANRAPFGEKEAYMGFMNSFLEEHGPAMQCFLDQVAMVDVDAAPSGYQGSGDLALQLAVLHAQLCTIFAELDQTTRDTLEPLPTILRAIEEGQPVLVSVPMRLPLPPAQVHSSLSAGEKPGFLAPRDLPKHTPLISKSQSLRSVRRSESWARPRPDEERPLRRPRPVQRTQSVPVRRPARRRQSAGPWPRPKGSLSMGPAPRARPWTRDSASLPRKPSVPWQRQMDQPQDRNQALGTHRPVNKLAELQCEVAALREEQKVLSRLVESLSTQIRALTEQQEQLRGQLQDLDSRLRAG

SEQ ID NO: 785834 - protein, 140 aa, Homo sapiens
MDQPQDRNQALGTHRPVNKLAELQCEVAALREEQKVLSRLVESLSTQIRALTEQQEQLRGQLQDLDSRLRAGSSEFDSEHNLTSNEGHSLKNLEHRLNEMERTQAQLRDAVQSLQLSPRTRGSWSQPQPLKAPCLNGDTT

SEQ ID NO: 785835 - protein, 1181 aa, Homo sapiens
  misc_feature (1154)..(1154): Xaa can be any naturally occurring amino acid
TLSSPRRPPPPTMDPPSPSRTSQTQPTATSPLTSYRWHTGGGGEKAAGGFRWGRFAGWGRALSHQEPMVSTQPAPRSIFRRVLSAPPKESRTSRLRLSKALWGRHKNPPPEPDPEPEQEAPELEPEPELEPPTPQIPEAPTPNVPVWDIGGFTLLDGKLVLLGGEEEGPRRPRVGSASSEGSIHVAMGNFRDPDRMPGKTEPETAGPNQVHNVRGLLKRLKEKKKARLEPRDGPPSALGSRESLATLSELDLGAERDVRIWPLHPSLLGEPHCFQVTWTGGSRCFSCRSAAERDRWIEDLRRQFQPTQVIALRKAGHGDPAHRPGPPLPLYPKPARSITRAPNTPAPPASLQRLQDSPSIYYQPREYQTRPFCPLPAPYAPKALPARQSRSLYSSTTLVCPGAPNSPGEPRKARRLPRNRLLDSRGSTSFPKGPAISLGTRRNRFEAPRFTCGAFFGAANKPKRFPPSHSHLQDNVEREETWLSVWVHEAKGLPRAAAGAPGVRAELWLDGALLARTAPRAGPGQLFWAERFHFEALPPARRLSLRLRGLGPGSAVLGRVALALEELDAPRAPAAGLERWFPLLGAPAGAALRARIRARRLRVLPSERYKELAEFLTFHYARLCGALEPALPAQAKEELAAAMVRVLRATGRAQALVTDLGTAELARCGGREALLFRENTLATKAIDEYMKLVAQDYLQETLGQVVRRLCASTEDCEVDPSKCPASELPEHQARLRNSCEEVFETIIHSYDWFPAELGIVFSSWREACKERGSEVLGPRLVCASLFLRLLCPAILAPSLFGLAPDHPAPGPARTLTLIAKVIQNLANRAPFGEKEAYMGFMNSFLEEHGPAMQCFLDQVAMVDVDAAPSGYQGSGDLALQLAVLHAQLCTIFAELDQTTRDTLEPLPTILRAIEEGQPVLVSVPMRLPLPPAQVHSSLSAGEKPGFLAPRDLPKHTPLISKSQSLRSVRRSESWARPRPDEERPLRRPRPVQRTQSVPVRRPARRRQSAGPWPRPKGSLSMGPAPRARPWTRDSASLPRKPSVPWQRQMDQPQDRNQALGTHRPVNKLAELQCEVAALREEQKVLSRLVESLSTQIRALTEQQEQLRGQLQDLDSRLRAGSSEFDSELQPNTQLLGTLIATPRTTASNDHCVSXRALTLDERRLADPTTCIRSSTLEIPYR

SEQ ID NO: 785836 - protein, 1120 aa, Homo sapiens; identical to SEQ ID NO: 785833

SEQ ID NO: 785837 - protein, 1188 aa, Homo sapiens
TLSSPRRPPPPTMDPPSPSRTSQTQPTATSPLTSYRWHTGGGGEKAAGGFRWGRFAGWGRALSHQEPMVSTQPAPRSIFRRVLSAPPKESRTSRLRLSKALWGRHKNPPPEPDPEPEQEAPELEPEPELEPPTPQIPEAPTPNVPVWDIGGFTLLDGKLVLLGGEEEGPRRPRVGSASSEGSIHVAMGNFRDPDRMPGKTEPETAGPNQVHNVRGLLKRLKEKKKARLEPRDGPPSALGSRESLATLSELDLGAERDVRIWPLHPSLLGEPHCFQVTWTGGSRCFSCRSAAERDRWIEDLRRQFQPTQVIALRKAGHGDPAHRPGPPLPLYPKPARSITRAPNTPAPPASLQRLQDSPSIYYQPREYQTRPFCPLPAPYAPKALPARQSRSLYSSTTLVCPGAPNSPGEPRKARRLPRNRLLDSRGSTSFPKGPAISLGTRRNRFEAPRFTCGAFFGAANKPKRFPPSHSHLQDNVEREETWLSVWVHEAKGLPRAAAGAPGVRAELWLDGALLARTAPRAGPGQLFWAERFHFEALPPARRLSLRLRGLGPGSAVLGRVALALEELDAPRAPAAGLERWFPLLGAPAGAALRARIRARRLRVLPSERYKELAEFLTFHYARLCGALEPALPAQAKEELAAAMVRVLRATGRAQALVTDLGTAELARCGGREALLFRENTLATKAIDEYMKLVAQDYLQETLGQVVRRLCASTEDCEVDPSKCPASELPEHQARLRNSCEEVFETIIHSYDWFPAELGIVFSSWREACKERGSEVLGPRLVCASLFLRLLCPAILAPSLFGLAPDHPAPGPARTLTLIAKVIQNLANRAPFGEKEAYMGFMNSFLEEHGPAMQCFLDQVAMVDVDAAPSGYQGSGDLALQLAVLHAQLCTIFAELDQTTRDTLEPLPTILRAIEEGQPVLVSVPMRLPLPPAQVHSSLSAGEKPGFLAPRDLPKHTPLISKSQSLRSVRRSESWARPRPDEERPLRRPRPVQRTQSVPVRRPARRRQSAGPWPRPKGSLSMGPAPRARPWTRDSASLPRKPSVPWQRQMDQPQDRNQALGTHRPVNKLAELQCEVAALREEQKVLSRLVESLSTQIRALTEQQEQLRGQLQDLDSRLRAGSSEFDSEHNLTSNEGHSLKNLEHRLNEMERTQAQLRDAVQSLQLSPRTRGSWSQPQPLKAPCLNGDTT

SEQ ID NO: 785838 - protein, 1188 aa, Homo sapiens; identical to SEQ ID NO: 785837

SEQ ID NO: 785839 - protein, 80 aa, Homo sapiens
QSAGITDVSHRARPKMFIFCFYFPTCQSPVPEIFIFACPACIHFEGKLSTWPACPPGRSQLNLRGTPSSTVDFPFIGHGL

SEQ ID NO: 785840 - protein, 78 aa, Homo sapiens
CFLPTIRNSKEFRFILVSSASASGYEIHCFQPPFWPVQRGRHHFQIASGGAGNKLESSLVFTWLWFEGLMTVIETLYR

SEQ ID NO: 785841 - protein, 101 aa, Homo sapiens
TSPQSGSSFSCGLCSLRPCCPCVTHAPSCRDRRCCSTLLWLCPVVLLVSFPCVSQVSPISSLPGSYMPPGCYLCTRLHLPWSLMQPAQMRIEGVFVHNPGS

SEQ ID NO: 785842 - protein, 109 aa, Homo sapiens
PAPLCSHGINGSLRPLPCPGTQVGRSLGLRHWEQENGLDQAWLQTAILGLPVRHQPTVCSSPQALGRGPPVVRVPGLEQLHSHTGISVFEPHPCFQSHSEAAPPCCTAQ

SEQ ID NO: 785843 - protein, 101 aa, Homo sapiens
WDYRCPRPRLANFVFLVETFHHVGQTGLKPLTSGDPPTSVSQSAGITIMRHHAQLNFVFLVEMGFCHVGQAGLKLLASSNPSVPFTPNTILVTRTLCFVLY

SEQ ID NO: 785844 - protein, 111 aa, Homo sapiens
MVSTYISRLKPHSSRSLGPGGSRRHWGVGPKSQDHKESGWFAVGPEGSRCHFWGKCGGGARGDALCPAPVQQQHLAGTSPSPDRVCTPTSPARPLGKQEVRSGRPAQGGAA

SEQ ID NO: 785845 - protein, 104 aa, Homo sapiens
PHSTFSVSLFHLRAQCSLGFPFGVEAPSLTKGNEPYGRKPCVFPPSASHSTCGSLSQAASEFSDYPSYRQPQHPCFCFCFCFCFFFFLKQDLTLSPRLKCSGNK

SEQ ID NO: 785846 - protein, 110 aa, Homo sapiens
MTGQSMGKNYPLCPGSRMGKCLMIENYILLKYGFQCDGKYVCPRCWKSLQGEKLCVTAVEVYPSFRGFKTSLWSYESKISAAFSYGEEAWKQAIFQEKKKEWGVLSPVVS

SEQ ID NO: 785847 - protein, 45 aa, Homo sapiens
FLTSTWCESCYRKGFHFSSSSFFCSSFCFCLKALSSSSISLACIL

SEQ ID NO: 785848 - protein, 80 aa, Homo sapiens
KMVLSSGTTMYLGIADRMQKEITALAPSTMKIKIITPPERKYSVWIGGSILASLSTFQQMWISKQEYDESGPSIVHRKCF

SEQ ID NO: 785849 - protein, 80 aa, Homo sapiens; identical to SEQ ID NO: 785848

SEQ ID NO: 785850 - protein, 80 aa, Homo sapiens; identical to SEQ ID NO: 785848

SEQ ID NO: 785851 - protein, 80 aa, Homo sapiens; identical to SEQ ID NO: 785848

SEQ ID NO: 785852 - protein, 89 aa, Homo sapiens
CLPTVLKKVQLLYRSPSFPPPTSPDLFPQEILYSRTGHTKLSIPGTQPGFFYLLTSGKTILKIPYFWMLFLSFSPHLLGHFWASFRFQL

SEQ ID NO: 785853 - protein, 112 aa, Homo sapiens
LIHYSFISSFHLTISFHHLISSFHFIIHLIISSFISSFHIIILSHLSFHLISSHLIPSLHLISSRLGLVLTLIAEMGDYRPTLPHPACVCVCVLVETGDYRHTPPHPACVCV

SEQ ID NO: 785854 - protein, 242 aa, Homo sapiens
SERGSVESWSSRHRRRRGSPGTAAPGRRVRCSRSPTQGDSRPLVRPGQPGTDPPAQARLQPEGWEGIALAASRGGQAEAREQVRGTKSFADVPGVLRAPAAGTRRPGAREEPVDVLRAAWEPPPPPPQREEECTGRAAAGRAPPLLALLAALLLAARGAAAQETELSVSAELVPTSSWNISSELNKDSYLTLDEPMNNITTSLGQTAELHCKVSGNPPPTIRWFKNDAPVVQEPRRLSFRST

SEQ ID NO: 785855 - protein, 102 aa, Homo sapiens
MNNSNEFLTVLLAGSPASAHWQTRCLGRACFPFVDGRQLSRGLCYESTDSIHTGSAPVTSSPPTGPAFSYRHLRAEDFDRNLGGHKHSGLSKCVLFSNYHQF

SEQ ID NO: 785856 - protein, 64 aa, Homo sapiens
DASKAAFTASPSSCFLANRNKGSMVSSDAVKNESHVETTYLPLPSSQPGGLGPALHQFPAGNTD

SEQ ID NO: 785857 - protein, 134 aa, Homo sapiens
PADGRCPAVPAEGLWRHLQQVEQSRSQVQAIGEKVSLAQAKIEKIKGSKKAIKVFSSAKYPAPERLQEYGSIFTGAQDPGLQRRPRHRIQSKHRPLDERALQEKLKDFPVCVSTKPEPEDDAEEGLGGLPSNIS

SEQ ID NO: 785858 - protein, 286 aa, Homo sapiens
AALAARGGRGCRARAGGLLPATQSPAMSDPITLNVGGKLYTTSLATLTSFPDSMLGAMFSGKMPTKRDSQGNCFIDRDGKVFRYILNFLRTSHLDLPEDFQEMGLLRREADFYQVQPLIEALQEKEVELSKAEKNAMLNITLNQRVQTVHFTVREAPQIYSLSSSSMEVFNANIFSTSCLFLKLLGSKLFYCSNGNLSSITSHLQDPNHLTLDWVANVEGLPEEEYTKQNLKRLWVVPANKQINSFQVFVEEVLKIALSDGFCIDSSHPHALDFMNNKIIRLIRYR

SEQ ID NO: 785859 - protein, 285 aa, Homo sapiens
TAKRQHQEPRASSWQGLLPATQSPAMSDPITLNVGGKLYTTSLATLTSFPDSMLGAMFSGKMPTKRDSQGNCFIDRDGKVFRYILNFLRTSHLDLPEDFQEMGLLRREADFYQVQPLIEALQEKEVELSKAEKNAMLNITLNQRVQTVHFTVREAPQIYSLSSSSMEVFNANIFSTSCLFLKLLGSKLFYCSNGNLSSITSHLQDPNHLTLDWVANVEGLPEEEYTKQNLKRLWVVPANKQINSFQVFVEEVLKIALSDGFCIDSSHPHALDFMNNKIIRLIRYR

SEQ ID NO: 785860 - protein, 230 aa, Homo sapiens
GFGFVSHATAEKVDAAMNARPQKVDGRVVEPKRAVSREDSQRPGAHLTVKKIFVGGIKEDTEEHHLRDYFEQYGKNEVIEIMTEAVAKKRGFAFVTFDNHNSMDKTVIQKYHTVNGHNCEVRKALSDQEMARASSSQRGQSSSGNFGGGHGGGFSGNDNFGHGGNFSGHDGFGGSCGGDGYGGSGDGYNGFGNDGGYGGGGPGYSGGSRGYGSVGQGYGSQGSGYGGSGS

SEQ ID NO: 785861 - protein, 35 aa, Homo sapiens
TAQWCRDCPKNRNDSKVAKASKESTIVVKLFLRKE

SEQ ID NO: 785862 - protein, 101 aa, Homo sapiens
GKILLPSFLPRARGLQNSWALGKWLPPWDPNRKMEERDGPREGASPLIWFGSRRLSAQPRGSPFISSGSLQLYHQQWDLLPPEGWAEAVAAADVTGPLPGS

SEQ ID NO: 785863 - protein, 109 aa, Homo sapiens
LYLERKRSTPFGSKESLSMSVIRNPQQRLAGSLKGQGGRSAATTVRRASRKQADLPRTRHQLPEGLSSLPFPLEPPRLILGKFQELPGELQVQFKHNSQGIQVFLPTRR

SEQ ID NO: 785864 - protein, 68 aa, Homo sapiens
LLGSAASAPDSPPASSEPSCCSRSGRAGLSSSPVACTDLLSWASKEEQEGTNIWNLPSRHVFMLFKHL

SEQ ID NO: 785865 - protein, 159 aa, Homo sapiens
MSAAPGLLHQELSCPLCLQLFDAPVTAECGHSFCRACLGRVAGEPAADGTVLCPCCQAPTRPQALSTNLQLARLVEGLAQVPQGHCEEHLDPLSIYCEQDRALVCGVCASLGSHRGHRLLPAAEAHARLKTQLPQQKLQLQEACMRKEKSVAVLEHQLV

SEQ ID NO: 785866 - protein, 47 aa, Homo sapiens
SSSSTGYISSSYSSTDTFHPAPPLRTHFIQLLLYRDISSSSSSTDTF

SEQ ID NO: 785867 - protein, 123 aa, Homo sapiens
LKVEFCPYCSVWNAMARSQLTASSASWVQASLLPQPPYWWCYTAACMCAWLCVYTDFCSHICPCTSPCPHVCTHIHAADKRQLHYGRAWWLTPVIPALWEAEVGRSPESGVQGQPDQHGETLT

SEQ ID NO: 785868 - protein, 74 aa, Homo sapiens
PSTEGTSLTPQHLLAPAPASSPPQQGPPRHFSIFFTCIAVPAQPEPTGPPAPPGQGSTCCVQGQAPLDLPHDLH

SEQ ID NO: 785869 - protein, 106 aa, Homo sapiens
IVCVCVCVCVYVCVCVCVCVCVCVFEHFSSFLECVCVCVSLSISLHSWNEPWTVKLCGKRRLFGDPDMKKSTKWEIFSHLWQSLRILFRYRGFHTPVGGYLGGSKM

SEQ ID NO: 785870 - protein, 50 aa, Homo sapiens
QRDVAVEHELRQRLLVLVEDRVQQLQLGLEPSHGHFILTSGRWGAKVSPS

SEQ ID NO: 785871 - protein, 119 aa, Homo sapiens
  misc_feature (105)..(105): Xaa can be any naturally occurring amino acid
MESGRSPPTPATSASPPGPTLKARFRSLLETAWLNGLALPTWGHKFLKTRPALTLPTAAGQPEPSPVALVASAVCIAVTLHPSLLPAQLPRGHEWMLGLWLLPGXGSISDLCPFGVVAS

SEQ ID NO: 785872 - protein, 993 aa, Homo sapiens
PAERWVSVSSEEPRAPVPASVRAPERPLPGLRSARRAACRAYSGPRTCPAHLPAARSALRASLASLPATARGLRPCLRVRPAPQPGPGAALRRARAARSPARAGAAMMNRFRKWLYKPKRSDPQLLARFYYADEELNQVAAELDSLDGRKDPQRCTLLVSQFRSCQDNVLNIINQIMDECIPQDRAPRDFCVKFPEEIRHDNLAGQLWFGAECLAAGSIIMNRELESMAMRPLAKELTRSLEDVRGALRDQALRDLNTYTEKMREALRHFDVLFAEFELSYVSAMVPVKSPREYYVQQEVIVLFCETVERALDFGYLTQDMIDDYEPALMFSIPRLAIVCGLVVYADGPLNLDRKVEDMSELFRPFHTLLRKIRDLLQTLTEEELHTLERNLCISQDVEFPIRADVQGPAALAPALSAPLPPEGPLSAKAKDPDAELACSMQYDDQELEQLSRMVHRAGDEMSSLLSPPIACQSPAHRPGAEGSPGGEASPGRPRLRSGSDEEERVFFMDDVEGTAEALARPESPAGPFGWAGSTWADPQEKGQGGPGGAAGISLPASEKEEDLSNNNLEAEGTDGASLAGTSSCSCLDSRLHLDGWEVGADDAETAEMIAHRTGGMKLSATVIFNPKSPTSLDSAVATQEAASEPVAEGMDGGPHKLSTGATNCLLHSCVCCGSCGDSREDVVERLREKCSPGGVIGASYAAGLAKASDRAPERQEEAPPPSEDASNGREPKAPTSDKCLPHTSGSQVDTASGLQGEAGVAGQQEPEARELHAGSPPAHEAPQALSGSSSSTAGSCSSDKMGPEAAPAATHAAPQATREKIRSRFHGSHDLIHRLFVCISGVADQLQTNYASDLRSILKTLFEVMATKPETDDKEKLRKVTQTLRSAALEDCALCQETLSSSELAAKTRDGDFEDPPEWVPDEACGFCTACKAPFTVIRRKHHCRSCGKIFCSRCSSHSAPLPRYGQVKPVRVCTHCYMFHVTPFYSDKAGL

SEQ ID NO: 785873 - protein, 817 aa, Homo sapiens
MDECIPQDRAPRDFCVKFPEEIRHDNLAGQLWFGAECLAAGSIIMNRELESMAMRPLAKELTRSLEDVRGALRDQALRDLNTYTEKMREALRHFDVLFAEFELSYVSAMVPVKSPREYYVQQEVIVLFCETVERALDFGYLTQDMIDDYEPALMFSIPRLAIVCGLVVYADGPLNLDRKVEDMSELFRPFHTLLRKIRDLLQTLTEEELHTLERNLCISQDVEFPIRADVQGPAALAPALSAPLPPEGPLSAKAKDPDAELACSMQYDDQELEQLSRMVHRAGDEMSSLLSPPIACQSPAHRPGAEGSPGGEASPGRPRLRSGSDEEERVFFMDDVEGTAEALARPESPAGPFGWAGSTWADPQEKGQGGPGGAAGISLPASEKEEDLSNNNLEAEGTDGASLAGTSSCSCLDSRLHLDGWEVGADDAETAEMIAHRTGGMKLSATVIFNPKSPTSLDSAVATQEAASEPVAEGMDGGPHKLSTGATNCLLHSCVCCGSCGDSREDVVERLREKCSPGGVIGASYAAGLAKASDRAPERQEEAPPPSEDASNGREPKAPTSDKCLPHTSGSQVDTASGLQGEAGVAGQQEPEARELHAGSPPAHEAPQALSGSSSSTAGSCSSDKMGPEAAPAATHAAPQATREKIRSRFHGSHDLIHRLFVCISGVADQLQTNYASDLRSILKTLFEVMATKPETDDKEKLRKVTQTLRSAALEDCALCQETLSSSELAAKTRDGDFEDPPEWVPDEACGFCTACKAPFTVIRRKHHCRSCGKIFCSRCSSHSAPLPRYGQVKPVRVCTHCYMFHVTPFYSDKAGL

SEQ ID NO: 785874 - protein, 75 aa, Homo sapiens
HSDWRTFSCLLFQDNVLNIINQIMDECIPQDRAPRDFCVKFPEEIRHDNLAGQLWFGAEVAGGHPGSEVLMWGGV

SEQ ID NO: 785875 - protein, 120 aa, Homo sapiens
DGPPSPLVTQTLRSAALEDCALCQETLSSSELAAKTRDGDFEDPPEWVPDEACGFCTACKAPFTVIRRKHHCRSCGKIFCSRCSSHSAPLPRYGQVKPVRVCTHCYMFHVTPFYSDKAGL

SEQ ID NO: 785876 - protein, 55 aa, Homo sapiens
MIGHPAHSRCAEESSQGELGCSGRGDTQGLAEKPREVTTGGNLKNEDVPTSSRKQ

SEQ ID NO: 785877 - protein, 103 aa, Homo sapiens
VKLPLPVASHYIHKHSLSISYFPVSVLGLEDVRNNPRHGGVLDVGRNRKLNHKPHYNMVKAIIYIRKRCFHPSSAGVYSLYCQTVCVFPDGTNCILCLLFFFP

SEQ ID NO: 785878 - protein, 272 aa, Homo sapiens [sequence omitted]

SEQ ID NO: 785879 - protein, 78 aa, Homo sapiens
MRKEEQEVATLGAALDAVDCIQTPPSDAHHTRARAPPPPPLSDCIQRRNAGAVCSGCSVNAGPVSNRCLVNVGSVCSG

SEQ ID NO: 785880 - protein, 60 aa, Homo sapiens
MSFEGGHGGSRCRGAESGDAEPPPQPPPPPPPTPPPGEPAPVPAAPRYLPPLPASPETPE

SEQ ID NO: 785881 - protein, 128 aa, Homo sapiens
MRAGRNYLSPVATTACAKLYLRPKEARHANVNPNEDGESSSSSPTEENAATDNIAFMITETTVQVLSSGEVHDIVSQKGEDIQTVNIDARKEMTPRQEGTDNEDPVVCLDKKPVIIIFDEPMDIRSAY

SEQ ID NO: 785882 - protein, 139 aa, Homo sapiens
LGRCAFLSPPEAPPAATLSRWPNFHKALPSFPSPTDASPRPAPSSSLPLSTATAHGLQHATSAFWILTVLSLPLTSVVTSWTSLHMLQHLKLISLSSKHPLMFLSVNPLSSYMYCLWLTPIPHHVPAVALGTTFDASGP

SEQ ID NO: 785883 - protein, 207 aa, Homo sapiens
MDGASRRPRQSHSISSSSFGAGAVRARRRGEPRSLPRPGDDRAASSSCAEGLSSLCSDEPSSEIMTSSFLSSSEIHNTGLTILHGEKSHVLGSQPILAKEGKDHLDLLDMKKMEKPQGTSNNVSDSSVSLAAGVHCDRPSIPASFPEHPAFLSKKIGQVEEQIDKETKNPNGVSSREAKTALDADDRFTLLTAQKPPTEYSKVEGIY

SEQ ID NO: 785884 - protein, 143 aa, Homo sapiens
MTSSFLSSSEIHNTGLTILHGEKSHVLGSQPILAKEGKDHLDLLDMKKMEKPQGTSNNVSDSSVSLAAGVHCDRPSIPASFPEHPAFLSKKIGQVEEQIDKETKNPNGVSSREAKTALDADDRFTLLTAQKPPTEYSKVEGIY

SEQ ID NO: 785885 - protein, 30 aa, Homo sapiens
MSSLERGVPIKTGSWGLAAQRRSAQERNSS

SEQ ID NO: 785886 - protein, 125 aa, Homo sapiens
MALARCRLHSFFFFYRDEISLCCPGWSRTPGSSDPLASASQGAGITGMSHRSGPRLCSKHLTCISSSYTRNKPHFEVGSIIILILQMRKLRHRDVKWIALAHITEYMVEVELVFEFRATRSAVLY

SEQ ID NO: 785887 - protein, 102 aa, Homo sapiens
LHPPRFQSMLQIAWSPRQRLVTEAEPLQRAPTMAILHKNVGLGLVPELPQRVLTGVMPSGALGAGLALRLQDRGATSMQPQPGRAAGRRLQPMKHGLGLGKP

SEQ ID NO: 785888 - protein, 44 aa, Homo sapiens
MPFTSEGTNAGGGFSSGHKKECHATPMSKGRGSGNAGDVGTTGL

SEQ ID NO: 785889 - protein, 91 aa, Homo sapiens
MEVLQCDGCDFRAPSYEDLKAHIQDVHTAFLQPTDVAEDNVNELRCGSVNASNQTEVEFSSIKDEFAIAEDLSGQNATSLGTGGYYGHSPG

SEQ ID NO: 785890 - protein, 270 aa, Homo sapiens
QEGLSAEHVDAHPPLSLMEVVTFGDVAVHFSREEWQCLDPGQRALYREVMLENHSSVAVTAGFLVFKPELISRLEQGEEPWVLDLQGAEGTEAPRTSKTDSTIRTENEQACEDMDILKSESYGTVVRISPQDFPQNPGFGDVSDSEVWLDSHLGSPGLKVTGFTFQNNCLNEETVVPKTFTKDAPQGCKELGSSGLDCQPLESQGESAEGMSQRCEECGKGIRATSDIALHWEINTQKISRCQECQKKLSDCLQGKHTNNCHGEKPYECA

SEQ ID NO: 785891 - protein, 69 aa, Homo sapiens
AGTRVAKARFLAAIARLRASWWSSGRAGFLVFKPELISRLEQGEEPWVLDLQGAEGTEAPRTSKTVLLG

SEQ ID NO: 785892 - protein, 110 aa, Homo sapiens
MDANSPHGHPPTSCCLPKNVAPARVTSSDSSCHSSSGELLHQHCKNGVVSPTSTPQDPKYPFITVANPMTELYLPFSSLNPCECSLPGFSCTTMWEQLSRSSMNSTLPEP

SEQ ID NO: 785893 - protein, 92 aa, Homo sapiens
GKFPGHWGNVSERNGTTFAASHAFDKADLTPTDFCWQKAARAGWVPQCKTATHCKTSPARQKPQLLGHTPSSLAHEAGAPGSCVHARSMLYA

SEQ ID NO: 785894 - protein, 121 aa, Homo sapiens
MSGVRDHSGQHGETLSLLKIQKLARGSGVCLSSQLLGMLQQENHLNQGVGGCEPPRPASCRFNWRNCLIGPSNSTCPRLNSKSPLIPLPPQACSSESSASQECSGQNPWHPACLLLASCLS

SEQ ID NO: 785895 - protein, 114 aa, Homo sapiens
CHIMYILIFMSIICCCILNDKDLKSGNPTSNVPSVPVSGREGASWMHFTPVIRRAMASSSLACPGVIMLSAGCGSGCPSKACSFSFSKSAGAERGGEERLWLAVSGVWKHWHAG

SEQ ID NO: 785896 - protein, 37 aa, Homo sapiens
MAALSLCLRVVFPLFIWVLLSYLHKDTSRIGLGPTVN

SEQ ID NO: 785897 - protein, 127 aa, Homo sapiens
MRQELSPASRRFGRGSERLRSPRIILRVPNYRALGCQRVHSSSQEKGGTFVRGLISGPWGTKWVRLPGERQGGWRIAWCGEERRAMAGRHWSTDGKWQGHKLHHCRQLVEASPGSEANLCSTLQGKT

SEQ ID NO: 785898 - protein, 107 aa, Homo sapiens
GLGAPRTLSGRLAPPALGSERLSTRASSCGGCTGSSNSDGPPAPRSNFRWASATSPPPAPQPRAPARHPEGTGATSCYAASGPVNRPTAEECGSAPETGGQLRPRPG

SEQ ID NO: 785899 - protein, 264 aa, Homo sapiens
ASASRRRHRPVLGPRRSARLLFPALLEACKGRATCPDSPQDRKKRNLDMEKPYNKNEGNLENEGKPEDEVEPDDEGKSDEEEKPDAEGKTECEGKRKAEGEPGDEGQLEDKGSQEKQGKSEGEGKPQGEGKPASQAKPEGQPRAAEKRPAGDYVPRKAKRKTDRGTDDSPKDSQEDLQERHLSSEEMMRECGDVSRAQEELRKKQKMGGFHWMQRDVQDPFAPRGQRGVRGVTSLEACNHVNGIDFGGEPMFSQAGIKKVFLAP

SEQ ID NO: 785900 - protein, 248 aa, Homo sapiens
ASASRRRHRPVLGPRRSARLLFPALLEACKGRATCPDSPQDRKKRNLDMEKPYNKNEGNLENEGKPEDEVEPDDEGKSDEEEKPDAEGKTECEGKRKAEGEPGDEGQLEDKGSQEKQGKSEGEGKPQGEGKPASQAKPEGQPRAAEKRPAGDYVPRKAKRKTDRGTDDSPKDSQEDLQERHLSSEEMMRECGDVSRAQEELRKKQKMGGFHWMQRDVQDPFAPRGQRGVRGVRGGGRGQRGLHDIPYL

SEQ ID NO: 785901 - protein, 76 aa, Homo sapiens
IVPAPGASPSGSRPGPSPPFPGAEPAGIAALGSTTVTSVPNAVPSAVLWGAAVPGFPGAPAVCESFSCKCMAARNG

SEQ ID NO: 785902 - protein, 76 aa, Homo sapiens
MALLTTAPRCDIRGQILGWRCADKQVYMLVRQEDKTRAWRGQESGTGGLWDARDPRAAFRRRPVSPEPSLFTSGPA

SEQ ID NO: 785903 - protein, 102 aa, Homo sapiens
SGPQVECSGGGSSGSYKQAKPVFRVCASALQPCRGWTELLSVAAGAGRWLSGSGEHKLRFLMVTAVAVATAAVGRASPQGTCNCTTALPLVGMVVAVSGNSF

SEQ ID NO: 785904 - protein, 111 aa, Homo sapiens
PEHTAPPLKALHSAHCNWNTSVFSCGPAAHASSLTTSGALHLYSYPWAFAQAVPLTWTVLTPYLVWLALPHKTSTQMSSQRGFSRHRPAWHLVPAVPLWRPFCWTFSTAWR

SEQ ID NO: 785905 - protein, 65 aa, Homo sapiens
AGEILSPSSLDTSHLKQCVKCSGPPHTSSLASPWPSGALCTKSHMAAAEFRTLVPSSILYPANLL

SEQ ID NO: 785906 - protein, 41 aa, Homo sapiens
MGGWMNGWMGGGGYEWVDEWTDEWTNGWVGWWVDRWMSGWM

SEQ ID NO: 785907 - protein, 74 aa, Homo sapiens
MTTSQKHRDFVAEPMGEKPVGSLAGIGEVLGKKLEERGFDKAYVVLGQFLVLKKDEDLYREWLKDTCGASAKQS

SEQ ID NO: 785908 - protein, 107 aa, Homo sapiens
SPRLQCSGESSAHCNFHLPGSSDSPASASQVAGITGTCHHAWLIFVFLVVMGFRHVGQAGLELLTSRDPPTLASHSVRITGVSHGTRLYYHLCLDIKWATQAWYVQN

SEQ ID NO: 785909 - protein, 111 aa, Homo sapiens [sequence omitted]

SEQ ID NO: 785910 - protein, 86 aa, Homo sapiens
RRNSLGLIIALDYKREAKGELYWDDGVSKDAVTEKKYILYDFSVTSNHLQAKIINNNYMDTDNLMFTDITILGMDKQPANFIVLLN

SEQ ID NO: 785911 - protein, 112 aa, Homo sapiens
WSPKVSAHPAPEPPAPFLYMASFVARLLHRGLCMPGKAKLAQRATSHLCKGVPGTGGPITNLTCCQSQYISSSALELGPQCHLLFLRTLLHQPSGGSYSCCWNLAIWASLSG

SEQ ID NO: 785912 - protein, 102 aa, Homo sapiens [sequence omitted]

SEQ ID NO: 785913 - protein, 38 aa, Homo sapiens
MLGHGDSTCKGPVAGAQELSGDRARNRDLVRDTSPRPG

SEQ ID NO: 785914 - protein, 34 aa, Homo sapiens
PQPQSLVLNLIFTSILSAESRIWLCECLAGACPA

SEQ ID NO: 785915 - protein, 62 aa, Homo sapiens
RLYTIPLFIDRYERSDETQSKADTDPTISIVTLDVNGVNNPIKSRHRPNYINRNIRCEWSEQ

SEQ ID NO: 785916 - protein, 77 aa, Homo sapiens
MMLGTEGGEGFVVKVRGLPWSCSADEVQRFFSDCKIQNGAQGIRFIYTREGRPSGEAFVELESEDEVKLALKKDRET

SEQ ID NO: 785917 - protein, 48 aa, Homo sapiens
MLVPTAEVTCSTSGTAAALHGVGTCASTWSCLSITAGMPGCAQWPGPT

SEQ ID NO: 785918 - protein, 80 aa, Homo sapiens
SGRSSKNTQIESPCDPAVPLLDIYPKEVTAGPPTVTLHANIHNSIIHNSHKDGCHPSLLWQMTWRNTVWYIHTNGNLIHV

SEQ ID NO: 785919 - protein, 109 aa, Homo sapiens [sequence omitted]

SEQ ID NO: 785920 - protein, 158 aa, Homo sapiens
MTFEDIIVDFTQEEWALLDTSQRKLFQDVMLENISHLVSMANSSANQLCFPNGASREISTQRISLLQGREVGIKHQEIPFIQHIYQKGTSTISTMRSHTQEDPFLCNDLGEDFTQHIDDSKCDYLHENETLLLSKKLGENLQLTGYPLNQPQGNSHQM

SEQ ID NO: 785921 - protein, 176 aa, Homo sapiens
MDICREGVTKAAWMTAGDGGIYLPLPSPPACPRSSPAQVLSFPHSEGAELRHLDTQVQRCEDILQQLQAVVPQIDMEGDRNIWIVKPGAKSRGRGIMCMDHLEEMLKLVNGNPVVMKDGKWVVQKYIERPLLIFGTKFDLRQWFLVTDWNPLTVWFYRDSYIRFSTQPFSLKNLDK

SEQ ID NO: 785922 - protein, 309 aa, Homo sapiens
MQSLWEKACENLRNLNMETTRTRCWKDYVSLRIEAIRAEYQKMPAFLHEEEQHHLERLRKEGEDIFQQLNESKARMEHSRELLRGMYEDLKQMCHKADVELLQAFGDILHRYESLLLQVSEPVNPELSAGPITGLLDSLSGFRVDFTLQPERANSHIFLCGDLRSMNVGCDPQDDPDITGKSECFLVWGAQAFTSGKYYWEVHMGDSWNWAFGVCNNYWKEKRQNDKIDGEEGLFLLGCVKEDTHCSLFTTSPLVVQYVPRPTSTVGLFLDCEGRTVSFVDVDQSSLIYTIPNCSFSPPLRPIFCCSHF

SEQ ID NO: 785923 - protein, 112 aa, Homo sapiens
MSEEFTFLVVRWPESLKQTLLVLAEASVPVSTIPVRISLIAFVFFLEEFKVILPLSVCVLEKQSRKLKRTSVLAFWKGLNLKMKPDHVTSLLKALPRVSKVLRVKAHMFNMT

SEQ ID NO: 785924 - protein, 107 aa, Homo sapiens
LSWLLGGTGGETKEASWDHLERFSSFSRVFIYLFFPRHLCGLICPLVAICNTNCSQEGSKNVRAWSKADLNLSPAINNIRVAHACNPSTLGGRGGRIMRSEDRDHPG

SEQ ID NO: 785925 - protein, 144 aa, Homo sapiens
MGARRVSAPQPGSERAAGGARAARAPEMPSCEAPSARPGEIARRQRRRGGPGDDQGAPNKAALGGPEASASLGDRSAKLPVISHRWRWPMACTDGALVGARARLGIGGIGRRLWRTRKRRRWRYSLERNLSLHEAGASSSPEEL

SEQ ID NO: 785926 - protein, 144 aa, Homo sapiens; identical to SEQ ID NO: 785925

SEQ ID NO: 785927 - protein, 79 aa, Homo sapiens
QARQPASQAAKPAKPVKPDSQPRQACQPNQPGSQASQASQPAKPGMPAKPSSQLSQPASQASQATRPAKPAKPAKPANQ

SEQ ID NO: 785928 - protein, 70 aa, Homo sapiens
MGFRLLFAAEASTHVSRQSRQNRECGGSDLQLHHPELGSPKGPDRQTSIYWVQGHGQREHKHVTLLARGG

SEQ ID NO: 785929 - protein, 115 aa, Homo sapiens
GCEVVEDSGLQVGTVLVSLSLSDIPDAPRAWLGQLPSWAWFSQTQSQKPCCQHLVQPQAYTTSVPHQWGALCLVVPASLRPGVQRASLSHRCCSPRDPGQSTTQPPRLPAIHLLY

SEQ ID NO: 785930 - protein, 60 aa, Homo sapiens
SEGKVLGRSPCPSGNACGRGTRMLLTAATNAPCTVLDVGVAAAPVRFPIYTQLPPLVLLL

SEQ ID NO: 785931 - protein, 51 aa, Homo sapiens
PRQSQSSNTISNSPTLNLPLLLLAFLTSIPGSNPTELLSVPTAIYVRSLTN

SEQ ID NO: 785932 - protein, 36 aa, Homo sapiens
MRKPALLIPTNIIHHEERQKETFVVSSSKTKQKDSN

SEQ ID NO: 785933 - protein, 69 aa, Homo sapiens
WGFTSLAFLSSSWLLGQALTCTRPSAELSVSKISLHPYNLLERSYSVLSAILVRNFRTAVSSSRKRRLE

SEQ ID NO: 785934 - protein, 63 aa, Homo sapiens
MTASMTFLKYTSDQAWPLLPTAPWCLKDHRLKPKSLHLAFKALLTQAHLALPADSLTLLLLQP

SEQ ID NO: 785935 - protein, 220 aa, Homo sapiens
AIQIHRSTGLHLAQGSAMPILPANLLVETNAVGQDVSVLFRVTGALQFGELQKQGAGGVEGAEWWATQAFHQRDVEQGRVRYLSTDPQHHAYDTVENLALEVQVGQEILSNLSFPVTIQRATVWMLRLEPLHTQNTQQETLTTAHLEATLEEAGPSLPTFHYEVVQAPRKGNLQLQGTRLSDGQGFTQDDVQAGRVTYGAMARASEAVKDTFCFHVTAPP

SEQ ID NO: 785936 - protein, 126 aa, Homo sapiens
MLTTHSVFRTGLLSLGLCNVYAWTESLPMGCCTLVRFRCYSPPPLLALCSVVFGLAVLYCVEVAFLFVQLPTTIHVFVGAQKTTPLGMLSASNQRRWEGFRSSLGSKVFLWPSPALLSPAPLSPPE

SEQ ID NO: 785937 - protein, 84 aa, Homo sapiens
VFRGSPVLFLHFPALSGNIDFRCYKIAVEEFWLQNIQGIRIGDEMGPSLDLVLRRTHLVLDDLYNLSMIMPEVLKLSRKNNISH

SEQ ID NO: 785938 - protein, 407 aa, Homo sapiens
MKLDGLRVHRGQLGVCWGVWVSSGSRNRGQRHPVLRWGEGSALGSRGSGLGHGGVGSGRFLPEERSWAGRADGLGRIAGPVLISSIKLHFMEPAPRSCSNASATADHGPAAPARPEDMRRPAAVPLLLLLCFGSQRAKAATACGRPRMLNRMVGGQDTQEGEWPWQVSIQRNGSHFCGGSLIAEQWVLTAAHCFRNTSETSLYQVLLGARQLVQPGPHAMYARVRQVESNPLYQGTASSADVALVELEAPVPFTNYILPVCLPDPSVIFETGMNCWVTGWGSPSEEDLLPEPRILQKLAVPIIDTPKCNLLYSKDTEFGYQPKTIKNDMLCAGFEEGKKDACKGDSGGPLVCLVGQSWLQAGVISWGEGCARQNRPGVYIRVTAHHNWIHRIIPKLQFQPARLGGQK

SEQ ID NO: 785939 - protein, 188 aa, Homo sapiens
MYARVRQVESNPLYQGTASSADVALVELEAPVPFTNYILPVCLPDPSVIFETGMNCWVTGWGSPSEEDLLPEPRILQKLAVPIIDTPKCNLLYSKDTEFGYQPKTIKNDMLCAGFEEGKKDACKGDSGGPLVCLVGQSWLQAGVISWGEGCARQNRPGVYIRVTAHHNWIHRIIPKLQFQPARLGGQK

SEQ ID NO: 785940 - protein, 74 aa, Homo sapiens
VVSQQDMSSHRVFSIQWPAPQGHGCGPHYFCLVFCWAGAGVTVEGQGSGTLGWQGSGILLAGDTFQPARLGGQK

SEQ ID NO: 785941 - protein, 131 aa, Homo sapiens
MPALVLVAIAAALGGLLRPAEPGIPSASTCPAPSPWWGWERGNGPSILNRLKAPPSHIRGRESSHLLDLAWPRGRPSPDCQSLLDGLPDHEGTGQAAWAPHSPLPARRSMPALPSIGKDVWSHGNGLCSGA

SEQ ID NO: 785942 - protein, 101 aa, Homo sapiens
HHKLLLIVNILAKLFGTQPLHHVNNCKFLLPFTEVYSWFWFFVFCVSFGIFIIPKLSGFPENVVLPSAGSYDNDNLKMSPMTFRLLDYKHCLEILFNVSIC

SEQ ID NO: 785943 - protein, 65 aa, Homo sapiens
MSSNMASIAMVPASVQLSKAYAVPSEFVPLLYHRMVSLGDSLYFQVCIVQGIHKELYGIAFPSFS

SEQ ID NO: 785944 - protein, 83 aa, Homo sapiens
DLFYHKSLFTYPIYIIVQVQWKTNYTELRQTNQYLTTDHRVKDQVSSITDNNKTVLVPTNFPHNEVVTMELGLRTLHCIFLFL

SEQ ID NO: 785945 - protein, 129 aa, Homo sapiens
GVEGRKGRAEELGSPERKAASLPGGNTWRGTGVAQSPTRATPSGCLWLRTLMGAAPTVLLLLGESRAEQDSSRESGMRGVSHISAHSKGEAQSFYTPVMACRELGLPSRAGGAGLFVFETGSHSVTQAG

SEQ ID NO: 785946 - protein, 121 aa, Homo sapiens
TLELTVNRSTSDVSSNIMLPNFFRSYFLKKLNGHPRPSFLCAPPATTCPATWPDTYAKTSPVKANYYTQLTNNLTNGTSYPRDNSADPILESISTIGFTTSMLDQDIPMVQPLLKVRLFND

SEQ ID NO: 785947 - protein, 102 aa, Homo sapiens
MMLAIALVMTAAPALPITSFNPRHKPASSVGSHFRKETKAQRWQGKELSPGLASNSCFLTLTAASGPGSCSKSDTPHSFLSQSQAWCHNNSWPVGRLKTKGI

SEQ ID NO: 785948 - protein, 227 aa, Homo sapiens
MEKLFNENEGMPSNQGKIDNEEQPPHEGKPEVACILEDKKLENEGNTENTGKRVEEPLKDKEKPESAGKAKGEGKSERKGKSEMQGGSKTEGKPERGGRAEGEGEPDSEREPESEGEPESETRAAGKRPAEDDIPRKAKRKTNKGLAQYLKQYKEAIHDMNFSNEDMIREFDNMARVEDKRRKSKQKLGAFLWMQRNLQDPFYPRGPREFRGGCRAPRRDTEDIPYV

SEQ ID NO: 785949 - protein, 227 aa, Homo sapiens; identical to SEQ ID NO: 785948

SEQ ID NO: 785950 - protein, 161 aa, Homo sapiens [sequence omitted]

SEQ ID NO: 785951 - protein, 243 aa, Homo sapiens
MLLSLLGACAVVGPFHGPEWEPVQGLLSQNHSCRDPQCCGNLLVLCLFLVWQVRHCWHQVTRTRFSTRNVIKVPLQKRAVPSMRCETVFKLTPEFFSPGKSRGLDSQQCAQRQRWGYRRSLQESWAQNLLSPQHPCPGPPSGVHTHSEPIFCTTSISNTCLLPQNSSWKAWQVPWCLHDGQTRPALDMCQEMEQLLLHSQERLVSLEPVISVRSRPTSMTLTTSLPNLLSAERLQFCPQRAPA

SEQ ID NO: 785952 - protein, 152 aa, Homo sapiens
MWKQLWNWVTGRGWNSFENSEEDRKMWESLELPRVLLNGFAQNADSNLDNKIQVEVISDGDEEPVGNWGKGDSCYVLGKRLVAFCLCPRDLWNFELERDDLGYMVEEISKQKSIQKVTWELLKAFHFKRETENNNSENLPPDNGVEKKHPFF

SEQ ID NO: 785953 - protein, 217 aa, Homo sapiens
TACPCVLQPSAGPAEQQQRTLLTARQPPPPAVALLSRWSVRPAHVTMGKSRTKRFKRPQFSPTGDCQAEAAAAANGTGGEEDDGPAAELLEKLQHPSAEVRECACAGLARLVQQRPALPGLARRDAVRRLGPLLLDPSLAVRETAAGALRNLSACGGFEVCDDMVTKDIMTPLVALLKECSAGLDSNEMSLQEKTDQNRNSIENIANETVNVLWEYM

SEQ ID NO: 785954 - protein, 248 aa, Homo sapiens
SPNGSSSLSPERQANGDLPPVPSASDFQPLRYLDGVPSSFQFFLPLGSGGALHLPASSFLTPPKDKCLSPDLPLPKQLVCRWAKCNQLFELLQDLVDHVNDYHVKPEKDAGYCCHWEGCARHGRGFNARYKMLIHIRTHTNEKPHRCPTCSKSFSRLENLKIHNRSHTGEKPYVCPYEGCNKRYSNSSDRFKHTRTHYVDKPYYCKMPGCHKRYTDPSSLRKHIKAHGHFVSHEQQELLQLRPPPKPP

SEQ ID NO: 785955 - protein, 71 aa, Homo sapiens
AYSSLGQEEAFYLITERQMSMWRSTAFLFSFLLRVCVLCLQGQPAGGSWTCQGDRAAGKAWSRRLILVQHC

SEQ ID NO: 785956 - protein, 111 aa, Homo sapiens
MLGPGPQWELTQTGPEPSCPINLKPFLSRSTWVRSTCQVDLTKLAQGEYIAPEKIENIYNRSQPVLQIFVHGESLRSSLVGVVVPDTDVLPSFAAKLGVKGSFEDCAETKF

SEQ ID NO: 785957 - protein, 243 aa, Homo sapiens
PELKGRRGSGMRKNEFGLRRLIPYWKTGIVDIYRAGLRTRWELEDVREGDPDFSKEGEWSKMASKKLGADFHGTFSYLDDVPFKTGDKFKTPAKVGLPIGFSLPDCLQVVREVQYDFSLEKKTIEWAEEIKKIEEAEREAECKIAEAEAKVNSKSGPEGDSKMSFSKTHSTATMPPPINPILASLQHNSILTPTRVSSSATKQKVLRPAHIKADFNLADYECEEDPFDNLAVKTYDEKDELRH

SEQ ID NO: 785958 - protein, 88 aa, Homo sapiens
GTRGAHPTASGERNRGGGARSRGETLHRPGTAKHTSCELLKGRHMDTRTLKPRAWHSHREWGVEGELGTCGVDLVLPEAMRLGRKGGD

SEQ ID NO: 785959 - protein, 87 aa, Homo sapiens
PELKGRRGSGMRKNEFGLRRLIPYWKTGIVDIYRAGLRTRWELEDVREGDPDFSKEGEWWGVEGELGTCGVDLVLPEAMRLGRKGGD

SEQ ID NO: 785960 - protein, 55 aa, Homo sapiens
FCHSPPPPKSISGLERAYQPHRGFSQDPCATFPWPGSHVRSLPSCSLLMPLSPFV

SEQ ID NO: 785961 - protein, 123 aa, Homo sapiens
ARAGRWGTGGESRSNEMQTRTQRLAQLFAVRQGGGDEAESPASSRLGAAEEGAAPDKAGSFEGLRRLKLAPQPPIPQVGARGTRSPDPGHHGQPAEGLRGVSGPCRSCPASHTPGHTGPISTH

SEQ ID NO: 785962 - protein, 119 aa, Homo sapiens
MRCVTAANQVFFSEAVLTAANECVGVLLGSLDPSMTIHCDMVITYGLDQLENCQTCGTDYIISVLNLLMLMWALSPTVFALLSKNLMIVHSDLAVHFPTIQYAVLYTLYSHCTRYCIHK

SEQ ID NO: 785963 - protein, 38 aa, Homo sapiens
DPTISIVTLDVNGVNNPIKSRHRPNYINRTIRCEWSEQ

SEQ ID NO: 785964 - protein, 80 aa, Homo sapiens
RLEDTAMRRRLNKHEENLKTKKQEAAEAGSLPASAPASANPDSYTQVLVKEVEQRKLVHSHQGQLTHLAISTHTEHKYAL

SEQ ID NO: 785965 - protein, 425 aa, Homo sapiens
EINAFVVLSRGSQILSLNSTRFLTKLGHCSSACPSDSVSQTNIQNLKGLNSPVLIGKSKDPSCVAKVSEEGKPAIGTQKMELHVRWRSDTGKCVDASPLVVIPTFDKSSTTVYIGSHSHRMKAVDFYSGKVKWEQILGDRIESSACVSKCGNFIVVGCYNGLVYVLKSNSGEKYWMFTTEDAVKSSATMDPTTGLIYIGSHDQHAYALDIYRKKCVWKSKCGGTVFSSPCLNLIPHHLYFATLGGLLLAVNPATGNVIWKHSCGKPLFSSPQCCSQYICIGCVDGNLLCFTHFGEQVWQFSTSGPIFSSPCTSPSEQKIFFGSHDCFIYCCNMKGHLQWKFETTSRVYATPFAFHNYNGSNEMLLAAASTDGKVWILESQSGQLQSVYELPGEVFSSPVVLESMLIIGCRDNYVYCLDLLGGNQK

SEQ ID NO: 785966 - protein, 168 aa, Homo sapiens
EINAFVVLSRGSQILSLNSTRFLTKLGHCSSACPSDSVSQTNIQNLKGLNSPVLIGKSKDPSCVAKVSEEGKPAIGTQKMELHVRWRSDTGKCVDASPLVVIPTFDKSSTTVYIGSHSHRMKAVDFYSGKVKWEQILGDRIESSACVSKCGNFIVVGKFLNLRFVELN

SEQ ID NO: 785967 - protein, 250 aa, Homo sapiens [sequence omitted]

SEQ ID NO: 785968 - protein, 480 aa, Homo sapiens
MSKEAVTFKDVAVVFTEEELGLLDLAQRKLYRDVMLENFRNLLSVGHQPFHRDTFHFLREEKFWMMDIATQREGNSGGKIQPEMKTFPEAGPHEGWSCQQIWEEIASDLTRPQDSTIKSSQFFEQGDAHSQVEEGISIMHTGQKPSNCGKCKQSFSDMSIFDLPQQIRSAEKSHSCDECGKSFCYISALHIHQRVHLGEKLFKCDVCGKEFSQSLHLQTHQRVHTGEKPFKCEQCGRGFRCRSALTVHCKLHMGEKHYNCEACGRAFIHDFQLQKHQRIHTGEKPFKCEICGVSFRLRSSLNRHCVVHTGEKLYKSEKYGRGFIDRLDLHKHQMIHMGQKPYNCKECGKSFKWSSYLLVHQRVHTGEKPYKCDKCGKSYITKSGLDLHHRAHTGERPYNCDDCGKSFRQASSILNHKRLHCRKKPFKCEDCGKKLVYRSYRKDQQKNHSGENPSKCEDCGKRYKRRLNLDIILSLFLNDT

SEQ ID NO: 785969 - protein, 397 aa, Homo sapiens
MKTFPEAGPHEGWSCQQIWEEIASDLTRPQDSTIKSSQFFEQGDAHSQVEEGISIMHTGQKPSNCGKCKQSFSDMSIFDLPQQIRSAEKSHSCDECGKSFCYISALHIHQRVHLGEKLFKCDVCGKEFSQSLHLQTHQRVHTGEKPFKCEQCGRGFRCRSALTVHCKLHMGEKHYNCEACGRAFIHDFQLQKHQRIHTGEKPFKCEICGVSFRLRSSLNRHCVVHTGEKLYKSEKYGRGFIDRLDLHKHQMIHMGQKPYNCKECGKSFKWSSYLLVHQRVHTGEKPYKCDKCGKSYITKSGLDLHHRAHTGERPYNCDDCGKSFRQASSILNHKRLHCRKKPFKCEDCGKKLVYRSYRKDQQKNHSGENPSKCEDCGKRYKRRLNLDIILSLFLNDT

SEQ ID NO: 785970 - protein, 480 aa, Homo sapiens; identical to SEQ ID NO: 785968

SEQ ID NO: 785971 - protein, 76 aa, Homo sapiens
  misc_feature (1)..(1): Xaa can be any naturally occurring amino acid
XELFGGLFTQTRVKFGAVTRIGGPPLGDQSAPSSCSLLHEKDPPTTSGPQTDQPKKHLTNLNQHPKSENTESKVLQ

SEQ ID NO: 785972 - protein, 35 aa, Homo sapiens
MLVVDVEHLYLVSLWASWHFLHMWYLDSGHDHPER

SEQ ID NO: 785973 - protein, 123 aa, Homo sapiens
SLVTCPICHAPYVEEDLLIQCRHCERWMHAGCESLFTEDDVEQAADEGFDCVSCQPYVVKPVAPVAPPELVPMKVKEPEPQYFRFEGVWLTDTGMALLRNLTMSPSAQAAPTGEDGLASPGDG

SEQ ID NO: 785974 - protein, 72 aa, Homo sapiens
SLVTCPICHAPYVEEDLLIQCRHCERWMHAGCESLFTEDDVEQAADEGFDCVSCQPYVVKPVGEYQLLGRGR

SEQ ID NO: 785975 - protein, 115 aa, Homo sapiens
METNTIGNTHTPQISNSEDRDKTRETNLGTEMMCSQYGRESLAPWPTTVAHTSEMLPGTPSRSLRGTHHLTRNTHMWDLATDWVDLGRLTHSQTWSGQTVTPSAERHRQATVGHS

SEQ ID NO: 785976 - protein, 83 aa, Homo sapiens
AGAPRRGGGSELRRPEAARAEPRDARTNWPDEPPGDGDADQALQLPDGVRGGHPGRGALAARELAAMGKQASFSGSVEVIEMS

SEQ ID NO: 785977 - protein, 196 aa, Homo sapiens
MAGPDEDNLMTVYRDGGRVPGSHGGAPRALSSPGRAGRPGKEQGPSAQGCGQPVGAVCRTPGTKAAVSSLAPASSQGHPWLHSARELGHRDPTGFPGGCQGLRWGRGVSPLGSLHLPKPMCPACPNQSGPPRCWGGTETHEGPSPHSWTWVLWLLAKIATYTPSFPLSWDSWCEPGHQGGRDRPSSGGKVTVSRGF

SEQ ID NO: 785978 - protein, 108 aa, Homo sapiens
PPLAEDQADVSPEELDPRPWVLSAPLPAPGFILPAFRSVRMGLPGGYRVTLRNARLWQRKGWRLQPVARERILGLAYLSQEAGVWRGTEAQGPWGTQLICSRLLTMPG

SEQ ID NO: 785979 - protein, 102 aa, Homo sapiens
SLQPVLADHIPGDSSDAEEQLHKKQRLNLVSSSSDGTCVAARTRPVLSCKKRRLVRPNSIVPLSKKVHRNSTIRPGCDVNPSCALCGSGSIQHLRFGRYRLI

SEQ ID NO: 785980 - protein, 95 aa, Homo sapiens
LADPKEADGEAELEQEAEQEVVLGLLGNGLEVFPRCHRHDGAMGGLPQQRDAEQRVAKAGQPQDVGGTQEWRQLDQARKELDQERSQEPQFNSGK

SEQ ID NO: 785981 - protein, 88 aa, Homo sapiens
FTAYLSFHSPGQHRSREETPEGRPEKPSRAVGPGRCAASADGPQGQSPREPEQEMRVSALGQVLCTGSGWGPEAANPSSLTNRVGDSP

SEQ ID NO: 785982 - protein, 59 aa, Homo sapiens
KILHSKQFGNILIVSGDVNLAESDLAYTRAIMGSGEEDYTGKDVLILGGGDGGILCEIV

SEQ ID NO: 785983 - protein, 114 aa, Homo sapiens
RLAWAWRRRALDPPDVDRRDRCRTLTIDDAFIAAGERLRLQDPADDPALPRRFICSFPDCSANYMQSLEADAHLCKHTGERPFVCDYEGCGKAFIRDYHLSRHILTHTGEKPFV

SEQ ID NO: 785984 - protein, 127 aa, Homo sapiens
MYTYVCIYTYVCIHMCVYIRMYVYICVYIYVCMYTYVCIYTYVCIHICVYIRVYVYIYVYIYVCMYTYMCIYTCVCIHICVYIRVYVYIYVYIYVCMYTYVCIYTCVYIYTYIRIYVYIYTQLNQWD

SEQ ID NO: 785985 - protein, 126 aa, Homo sapiens
SKGSLEITESQSADAEPPPPPKPDLSRYTGLRTHLGLATNEDSSLLAKDSPPTPTMYKYRPGYSSSSTSAAMPHSSSAKMSRGDSLKEPTSIAESSRHLSYRSEPSIGTQRASVLLPLAECFHYDA

SEQ ID NO: 785986 - protein, 102 aa, Homo sapiens
AGSAGAALGVENPGCTVPLTIVHRPPRPVWGHVGWALTPGRAAGSTSARGSSMQRWARTGVSDRCGYFFEFSGTVKSSQPTPQSTWSPLLLPAAQCSGHCVS

SEQ ID NO: 785987 - protein, 136 aa, Homo sapiens
CSPSSRDAVGEAESQPPAHPPTCRSASISSLAAFFSDVLLLSLDSASSTSVCSLSSSEMTWSRSLMMSLYSLYTASRSSLYFSDSFAVFTCVVLSSVSSDCSSSISHCRSLFCAVALFSSWWIASNLAREVARCGK

SEQ ID NO: 785988 - protein, 130 aa, Homo sapiens
APAQSTVDATTAQCCLGMRAGEPPLSPAMPSPPGSRCLLTLSRFCLLLRNEVEVGIRKEEMQEGQASPLSYHAGSSFFCSRRFPHSGRMGGPKNEANCLSPSAPKSSQPLTCPGRAWAQPDQEGCLRFAP

SEQ ID NO: 785989 - protein, 109 aa, Homo sapiens
LLHSFYIIPQCSVLPPPKDKTKIDIVEVNDLKQTLAIETGYQDANAWMEWIKYSVHTLNKSNCYACAHSRPEAQIVPFPLRWSSRRPSMGCMVALFQDSTAWGNISCQA

SEQ ID NO: 785990 - protein, 45 aa, Homo sapiens
SEDGVTRLVPMTVIRPWGVDMESNSVLEAKNEVVCIVEIVPGDLA

SEQ ID NO: 785991 - protein, 132 aa, Homo sapiens
CRRTTQAGTGVMRLQAEEHQRLLVTPDTTKRQGRILPYRFQRKHDTANTLILNFWPPNCETIHFFFFFGDRVSLCHPGWECSDVTSAHCNLHLPGSSDSPASASRGAGITGTRHYAQLILVFLVEMGFHYVS

SEQ ID NO: 785992 - protein, 125 aa, Homo sapiens
RLRQENHLKLGSRGCSELRLCHCTPAWAAEQDSVSTTTTTKAATGRARCRKMINGEKSFSSELGDTVPSLTTPQSLKTIQHNTGSNEDVYSIGWGWERRQSLHQECDATHLQDGKCGEKNCRQKE

SEQ ID NO: 785993 - protein, 339 aa, Homo sapiens
AASDAPKNLTLLAETADARGRSGSSSRTNFTILPVGYSLEIATALTSQSGNLASESLHLPSSSSEFDERIAAFQTKSGTASEMGTERAMGLSEEWTVHSQEATTSAWSPSFLPALEMGELTTPSRKRNSSGPDLSWLHFYRTAASSPLLDLSSSSESTEKLNNSTGLQSSSVSQTKTMHVATVFTDGGPRTLRSLTVSLGPVSKTEGFPKDSRIATTSSSVLLSPSAVESRRNSKSNWESRDEEFIWNHPQKNEFWTYVFGVGKNDSPKLLENISLPAAPEVQNGSPMSQTETVSRSVAPMKRLEDSLHTGSDHTANFCDVTEAGSNPRGKLGGQPTTE

SEQ ID NO: 785994 - protein, 136 aa, Homo sapiens
SSNRRFLSLSFELRQSLTLSSRPDGVQWHDLGSLQPLPPGFKQFSCLSLLSSWDHRHACHHTQLISVFLVEMGSHHVGQAGLKLLTSCNPSASASKKCWDYRHEPPCPAHNCLFRKLTLLLHSTSGDKNYKEISRA

SEQ ID NO: 785995 - protein, 128 aa, Homo sapiens
LHGTGFPEKRRPCLPRLRHHPKVWNSQGSLSRASEIDWGWISLAQLAMQTFLESGLQGDKGELLAWLPAAAFLLSHPLGQESVSDKAAALTRGPSPVDSKAADPHPWRELSQRLRTHSEDTTVCSQVL

SEQ ID NO: 785996 - protein, 99 aa, Homo sapiens
TPFSLQSITVQPPDPSLKISPLNPSMAARLVWETALNLTPIALLGCLAINFLTAKTQCFGVWLSIACVQTDTVWFGHNVLVIFSTLFFALSHILTLYFP

SEQ ID NO: 785997 - protein, 185 aa, Homo sapiens [sequence omitted]

SEQ ID NO: 785998 - protein, 106 aa, Homo sapiens
TVPGRFTQSYIQPYHEDHGHTVTIAPVLILDLRFGGTQDNLLGIYFTFRGIWSSLRVAFLKMSSSGIRGEVLGAYKLRSAFFWEMEPEVNLGAGVSSSANQLHDFG

SEQ ID NO: 785999 - protein, 417 aa, Homo sapiens
KAGVLDTGGEWGDMSDSKEPRLQQLGLLEEEQLRGLGFRQTRGYKSLAGCLGHGPLVLQLLSFTLLAGLLVQVSKVPSSISQEQSRQDAIYQNLTQLKAAVGELSEKSKLQEIYQELTQLKAAVGELPEKSKLQEIYQELTRLKAAVGELPEKSKLQEIYQELTWLKAAVGELPEKSKMQEIYQELTRLKAAVGELPEKSKQQEIYQELTRLKAAVGELPEKSKQQEIYQELTRLKAAVGELPEKSKQQEIYQELTQLKAAVERLCHPCPWEWTFFQGNCYFMSNSQRNWHDSITACKEVGAQLVVIKSAEEQNFLQLQSSRSNRFTWMGLSDLNQEGTWQWVDGSPLLPSFKQYWNRGEPNNVGEEDCAEFSGNGWNDDKCNLAKFWICKKSAASCSRDEEQFLSPAPATPNPPPA

SEQ ID NO: 786000 - protein, 380 aa, Homo sapiens
MASACPGSDFTSIHSEEEQLRGLGFRQTRGYKSLAVSKVPSSISQEQSRQDAIYQNLTQLKAAVGELSEKSKLQEIYQELTQLKAAVGELPEKSKLQEIYQELTRLKAAVGELPEKSKLQEIYQELTWLKAAVGELPEKSKMQEIYQELTRLKAAVGELPEKSKQQEIYQELTRLKAAVGELPEKSKQQEIYQELTRLKAAVGELPEKSKQQEIYQELTQLKAAVERLCHPCPWEWTFFQGNCYFMSNSQRNWHDSITACKEVGAQLVVIKSAEEQNFLQLQSSRSNRFTWMGLSDLNQEGTWQWVDGSPLLPSFKQYWNRGEPNNVGEEDCAEFSGNGWNDDKCNLAKFWICKKSAASCSRDEEQFLSPAPATPNPPPA

SEQ ID NO: 786001 - protein, 334 aa, Homo sapiens
MASACPGSDFTSIHSEEEQLRGLGFRQTRGYKSLAVSKVPSSISQEQSRQDAIYQNLTQLKAAVGELSEKSKLQEIYQELTQLKAAVGELPEKSKLQEIYQELTRLKAAVGELPEKSKLQEIYQELTWLKAAVGELPEKSKMQEIYQELTRLKAAVGELPEKSKQQEIYQELTRLKAAVERLCHPCPWEWTFFQGNCYFMSNSQRNWHDSITACKEVGAQLVVIKSAEEQNFLQLQSSRSNRFTWMGLSDLNQEGTWQWVDGSPLLPSFKQYWNRGEPNNVGEEDCAEFSGNGWNDDKCNLAKFWICKKSAASCSRDEEQFLSPAPATPNPPPA

SEQ ID NO: 786002 - protein, 297 aa, Homo sapiens
MASACPGSDFTSIHSEEEQLRGLGFRQTRGYKSLAVSKVPSSISQEQSRQDAIYQNLTQLKAAVGELSEKSKLQEIYQELTQLKAAVGELPEKSKLQEIYQELTRLKAAVGELPEKSKLQEIYQELTWLKAAVGELPEKSKMQEIYQELTRLKAAVGELPEKSKQQEIYQELTRLKAAVGELPEKSKQQEIYQELTRLKAAVGELPEKSKQQEIYQELTQLKAAVERLCHPCPWEWTFFQGNCYFMSNSQRNWHDSITACKEVGAQLVVIKSAEEQLQAVLEQRRAQQRWGGRLRGI

SEQ ID NO: 786003 - protein, 404 aa, Homo sapiens
MASACPGSDFTSIHSEEEQLRGLGFRQTRGYKSLAGCLGHGPLVLQLLSFTLLAGLLVQVSKVPSSISQEQSRQDAIYQNLTQLKAAVGELSEKSKLQEIYQELTQLKAAVGELPEKSKLQEIYQELTRLKAAVGELPEKSKLQEIYQELTWLKAAVGELPEKSKMQEIYQELTRLKAAVGELPEKSKQQEIYQELTRLKAAVGELPEKSKQQEIYQELTRLKAAVGELPEKSKQQEIYQELTQLKAAVERLCHPCPWEWTFFQGNCYFMSNSQRNWHDSITACKEVGAQLVVIKSAEEQNFLQLQSSRSNRFTWMGLSDLNQEGTWQWVDGSPLLPSFKQYWNRGEPNNVGEEDCAEFSGNGWNDDKCNLAKFWICKKSAASCSRDEEQFLSPAPATPNPPPA

SEQ ID NO: 786004 - protein, 373 aa, Homo sapiens
KAGVLDTGGEWGDMSDSKEPRLQQLGLLVSKVPSSISQEQSRQDAIYQNLTQLKAAVGELSEKSKLQEIYQELTQLKAAVGELPEKSKLQEIYQELTRLKAAVGELPEKSKLQEIYQELTWLKAAVGELPEKSKMQEIYQELTRLKAAVGELPEKSKQQEIYQELTRLKAAVGELPEKSKQQEIYQELTRLKAAVGELPEKSKQQEIYQELTQLKAAVERLCHPCPWEWTFFQGNCYFMSNSQRNWHDSITACKEVGAQLVVIKSAEEQNFLQLQSSRSNRFTWMGLSDLNQEGTWQWVDGSPLLPSFKQYWNRGEPNNVGEEDCAEFSGNGWNDDKCNLAKFWICKKSAASCSRDEEQFLSPAPATPNPPPA

SEQ ID NO: 786005 - protein, 281 aa, Homo sapiens
KAGVLDTGGEWGDMSDSKEPRLQQLGLLVSKVPSSISQEQSRQDAIYQNLTQLKAAVGELSEKSKLQEIYQELTQLKAAVGELPEKSKLQEIYQELTRLKAAVGELPEKSKLQEIYQELTWLKAAVERLCHPCPWEWTFFQGNCYFMSNSQRNWHDSITACKEVGAQLVVIKSAEEQNFLQLQSSRSNRFTWMGLSDLNQEGTWQWVDGSPLLPSFKQYWNRGEPNNVGEEDCAEFSGNGWNDDKCNLAKFWICKKSAASCSRDEEQFLSPAPATPNPPPA

SEQ ID NO: 786006 - protein, 326 aa, Homo sapiens
KAGVLDTGGEWGDMSDSKEPRLQQLGLLEEEQLRGLGFRQTRGYKSLAGCLGHGPLVLQLLSFTLLAGLLVQVSKVPSSISQEQSRQDAIYQNLTQLKAAVGELSEKSKLQEIYQELTQLKAAVGELPEKSKLQEIYQELTRLKAAVGELPEKSKLQEIYQELTWLKAAVGELPEKSKMQEIYQELTRLKAAVGELPEKSKQQEIYQELTRLKAAVGELPEKSKQQEIYQELTRLKAAVGELPEKSKQQEIYQELTQLKAAVERLCHPCPWEWTFFQGNCYFMSNSQRNWHDSITACKEVGAQLVVIKSAEEQPEVTASPGWDFQI

SEQ ID NO: 786007 - protein, 393 aa, Homo sapiens
KAGVLDTGGEWGDMSDSKEPRLQQLGLLEEEQLRGLGFRQTRGYKSLAVSKVPSSISQEQSRQDAIYQNLTQLKAAVGELSEKSKLQEIYQELTQLKAAVGELPEKSKLQEIYQELTRLKAAVGELPEKSKLQEIYQELTWLKAAVGELPEKSKMQEIYQELTRLKAAVGELPEKSKQQEIYQELTRLKAAVGELPEKSKQQEIYQELTRLKAAVGELPEKSKQQEIYQELTQLKAAVERLCHPCPWEWTFFQGNCYFMSNSQRNWHDSITACKEVGAQLVVIKSAEEQNFLQLQSSRSNRFTWMGLSDLNQEGTWQWVDGSPLLPSFKQYWNRGEPNNVGEEDCAEFSGNGWNDDKCNLAKFWICKKSAASCSRDEEQFLSPAPATPNPPPA

SEQ ID NO: 786008 - protein, 325 aa, Homo sapiens
KAGVLDTGGEWGDMSDSKEPRLQQLGLLEEEQLRGLGFRQTRGYKSLAGCLGHGPLVLQLLSFTLLAGLLVQVSKVPSSISQEQSRQDAIYQNLTQLKAAVGELSEKSKLQEIYQELTQLKAAVGELPEKSKLQEIYQELTRLKAAVGELPEKSKLQEIYQELTWLKAAVERLCHPCPWEWTFFQGNCYFMSNSQRNWHDSITACKEVGAQLVVIKSAEEQNFLQLQSSRSNRFTWMGLSDLNQEGTWQWVDGSPLLPSFKQYWNRGEPNNVGEEDCAEFSGNGWNDDKCNLAKFWICKKSAASCSRDEEQFLSPAPATPNPPPA

SEQ ID NO: 786009 - protein, 88 aa, Homo sapiens
KAGVLDTGGEWGDMSDSKEPRLQQLGLLEEEQLRGLGFRQTRGYKSLAGCLGHGPLVLQLLSFTLLAGLLVQVSKVPSSISQEQSSQK

SEQ ID NO: 786010 - protein, 73 aa, Homo sapiens
GAWRAGYWGQRGAVWTVLVIGPGVTRKKSRVTWELKDHLPPKSGRPLKNKLLAYLEGFLPEEHSALWHFVLKL

SEQ ID NO: 786011 - protein, 157 aa, Homo sapiens
SCTEAFFLGLRVKCLPSVAAASIRCSSRPSRDSDRLQLHTDGILSFLKNNKPGDALCVLGLTLSDLYPHEAWSFTFSKFFQGTVTCHELCHLLGLGNCRWLRCLMQGALSLDEALRRPLDLCPICLRKLQHVLGFRLIERYQRLYTWTQAVVGTWPS

SEQ ID NO: 786012 - protein, 92 aa, Homo sapiens
MGEARFWLGEMPLAAKAPGGQAECWPRWAHRAEKGVGLQEEAPGPPEQSRVAVRAGTGDPSAPGCAKERVCGWRAAMRTTMRPRPGPGCTGG

SEQ ID NO: 786013 - protein, 62 aa, Homo sapiens
TTGATETSRTEVASSRRTSIPGPDHSTESPDISTEVIPSLPISLGITESSNMTIITRTGPPL

SEQ ID NO: 786014 - protein, 461 aa, Homo sapiens
MSSSHPEPGPWAPLSPRLQPLSQSSSSLLGEGREQRPELHKTASSTMWQAQLGEASTRPQAPEEEGNPPESMKPARASGPKARPSAGGHWRSSTVGNVSTMGGGDLCRLRAPSAAAMQRSHSDLVRSTQMRGHSGARKASLSCSALGSSPVHRAQLQPGGTSGQGGQALQAWKGTWLLRMRLLNSAWMLGASQLSVPPLDLGDTTAHSSSAQAEPKAAEQLATTTCHALPPAALLCGMREMREVGAGGCCHALPATGILAFPKLVASVSESGLQAQHGVKIHCRLSGGLPGHSHCCAHLWGPAGLVPEPGSRTKDVWTMTSANDLAPAEASPLSAQDAGVQAAPVAACKAVATSPSLEAPAALHVFPEVTLGSSLEEAPSPVRDVRWDAEGMTWEVYGAAVDPEVLGVAIQKHLEMQFEQLQRAPASEDSLSVEGRRGPLRAVMQSLRRPSCCGCSGAAPE

SEQ ID NO: 786015 - protein, 461 aa, Homo sapiens
MSSSHPEPGPWAPLSPRLQPLSQSSSSLLGEGREQRPELHKTASSTMWQAQLGEASTRPQAPEEEGNPPESMKPARASGPKARPSAGGHWRSSTVGNVSTMGGGDLCRLRAPSAAAMQRSHSDLVRSTQMRGHSGARKASLSCSALGSSPVHRAQLQPGGTSGQGGQALQAWKGTWLLRMRLLNSAWMLGASQLSVPPLDLGDTTAHSSSAQAEPKAAEQLANHHLPCSAPAALLCGMREMREVGAGGCCHALPATGILAFPKLVASVSESGLQAQHGVKIHCRLSGGLPGHSHCCAHLWGPAGLVPEPGSRTKDVWTMTSANDLAPAEASPLSAQDAGVQAAPVAACKAVATSPSLEAPAALHVFPEVTLGSSLEEAPSPVRDVRWDAEGMTWEVYGAAVDPEVLGVAIQKHLEMQFEQLQRAPASEDSLSVEGRRGPLRAVMQSLRRPSCCGCSGAAPE

SEQ ID NO: 786016 - protein, 133 aa, Homo sapiens [sequence omitted]

SEQ ID NO: 786017 - protein, 124 aa, Homo sapiens
MPSAWPGFPGISRPDPPLSPLFLCLSAPEEIAVYKNKPAFLVLLLFVIVPSLDWVQSAHLFCQGPVCRSQPKPVVLPGSLCSWKALSRTARGHFGCILSPPSPYVWEQKLALVRYVDVNLSSFL

SEQ ID NO: 786018 - protein, 132 aa, Homo sapiens
MAEPSYTGPAVPYSREIKQKYELTLQERTIKETGDIPNRLEDDTFTEVHIWKSPIGELCPERTMSKARRGGFDPRQADIGGDRNASQRQDGTLLALVLHRQTLKPKRRRELLPIEEARHMALVSPVEHPRRN

SEQ ID NO: 786019 - protein, 103 aa, Homo sapiens
LQVIIQAICSLSSDSIFSLSPKFHATHSISIQIGLPSWDGKKTTLNPTSSSNNHFTYLHPSLLDFTANSLRDFYIAISNFSPPIPAFLNPLQLSFHFHPPPLH

SEQ ID NO: 786020 - protein, 112 aa, Homo sapiens
MEAYEQVQKGPLKLKGVAELGVTKRKKKKKDKDKAKLLEAMGTSKKNEEEKRRGLDKRTPAQAAFEKMQEKRQMERILKKASKTHKQRVEDFNRHLDTLTEHYDIPKVSWTK

SEQ ID NO: 786021 - protein, 114 aa, Homo sapiens
PVQVYTVTPRCPPPTLGPHVLTKFENLYISPIHSVVIISDTLFGGGPSVLPRPSQDLGKSAQGYIRSACQVGSNSTSMQAWMRILFPSAPHSWLEPSVEIGRSNSTPTIPSQEY

SEQ ID NO: 786022 - protein, 114 aa, Homo sapiens; identical to SEQ ID NO: 786021

SEQ ID NO: 786023 - protein, 67 aa, Homo sapiens
ISAARTLWSKGPLFVGFFPPIRPSCSPAVQNQHAACSTCNSSREFNTLALSVQHNVFNWFCSNIKFL

SEQ ID NO: 786024 - protein, 102 aa, Homo sapiens
MGLPRRELLMGFCSDPNEVMLLALELRFRGCSGRCALSRYQELCLANVHKRLGWTLVYIYFLQHFSSIHPEVKDKTKALKTSNEDTLAGNGTFSASRALSRR

SEQ ID NO: 786025 - protein, 158 aa, Homo sapiens
GAIVAPAGCAGPRTLREARVRGHEFEANLVHMGEKKKKNKKKKHSGGPRPGPLEEGFRNPMRWGAAGPQRGKGTRGPKEGPTEGDTRGARGTRPGGVFSTNIKKTPGGGHTRRRLVWTPHSQRGGRCEGPHEGGGLLQQGGLHRQKPGIFKISPQGGG

SEQ ID NO: 786026 - protein, 101 aa, Homo sapiens [sequence omitted]

SEQ ID NO: 786027 - protein, 138 aa, Homo sapiens
GRKPRSSASMSTIYPTALPQKDRQNLSRQVMANSWGENSRLEEMRECLELMNGGAGWASACGHSHGCVCMGVCARVSLCGLCLWPVCMCPLLLRHPLPFPSGQLVSLPSESHSLSCSSPGHPSSQQPCLILFIHKSSC

SEQ ID NO: 786028 - protein, 188 aa, Homo sapiens
MTDLRTTLDRCSQNYHQDSEAAINRQINLELYASYVIPVPCHYYFDRDDVALKNFAKYLSLHQSHEEREHAGGNLMKLAEPTRWPNLTFSDLKNPRLCMHWESGLNAHGVCTNIWQKTVSQITNWKLHNWHLTNVAPMCGDFLRHINWNEPVEGHPRLGDPVTIAARWKRRIWLADILDKTPGNCYEA

SEQ ID NO: 786029 - protein, 120 aa, Homo sapiens
YRVTKQLSAERGTRVGCTTLTQNQVVLPVPEGGQSLQVWLSPGPFFFLGWSLALSPRLECSGAISAHCKLRLAGSCYSPASASPAAGTTGACCHAWLILVFLVETGFHRVSQDGLNLLTL

SEQ ID NO: 786030 - protein, 61 aa, Homo sapiens
PPTAWGMNASHAQHPALHRGSQAGPRLVAKSPFATEWCLQKQGEDVGHKVGPVPGVRTLPR

SEQ ID NO: 786031 - protein, 40 aa, Homo sapiens
ARLGNTEDPISAKTLKNEPRVMVRPVHLCGQGQRVAIVDR

SEQ ID NO: 786032 - protein, 137 aa, Homo sapiens
IQDIGVGKDFMSKTSKAMATKDKIDKWDLIKLKSFCTAKETTITVNRQPTTWEKIFATYSSDKGLISRIYNELKQIYKKKTNNPIKKWVRDMNRHFSKEDIYAAKKHMKKCSSSLAIRELQIKTIYEMISHCDVPHS

SEQ ID NO: 786033 - protein, 228 aa, Homo sapiens
RFLLQIKSGAEAKKLPGVGTKIAGKIDEFLATGKLRKLEKIRQDDTSSSINFLTRVSGIGPSAARKFVDEGIKTLEDLRKNEDKLNHHQRIGLKYFGDFEKRIPREEMLQMQDIVLNEVKKVDSEYIATVCGSFRRGAESSGDMDVLLTHPSFTSESTKQPKLLHQVVEQLQKVHFITDTLSKGETKFMGVCQLPSKNDEKEYPHRRIDIRLIPKDQYYCGVLYFTGE

SEQ ID NO: 786034 - protein, 213 aa, Homo sapiens
GSQLDSCPVKGHLNGTESLLDLIWDVMTILKLKNADLRKNEDKLNHHQRIGLKYFGDFEKRIPREEMLQMQDIVLNEVKKVDSEYIATVCGSFRRGAESSGDMDVLLTHPSFTSESTKQGVCQLPSKNDEKEYPHRRIDIRLIPKDQYYCGVLYFTGSDIFNKEYEGFHALEKGFHKSSEYTIRPLGESLELQEKPLASGVVDKDIFDYIPVG

SEQ ID NO: 786035 - protein, 68 aa, Homo sapiens
WRRWFLCSAVSSSQSGTCKEMGTEGGRHCSLLKTTDSNARDRGGQWLRQEMFQVERSKSDERQGKNAG

SEQ ID NO: 786036 - protein, 46 aa, Homo sapiens
LILPAAHDKNPVVIFFFHLFFFYPIFNVAANPSGSIFHTDTDSDSL

SEQ ID NO: 786037 - protein, 179 aa, Homo sapiens [sequence omitted]

SEQ ID NO: 786038 - protein, 82 aa, Homo sapiens
HEVLKAGAKPDRLGFITPYEGRRSYLVQLHVSFSVLPGHQALPGGGDCQCGRRFRDAEKDLIILSGVRANEHLRAEVVRSLE

SEQ ID NO: 786039 - protein, 105 aa, Homo sapiens
PLNSESGSYLILAWGTAEEFGLPELGRKTFFFFFGDGVSVARLKCSGVISAHGNLCLLGSSNSPASASRVAGITGAYHHKQLIFCILVETGFHHVVQDGLYLLTT

SEQ ID NO: 786040 - protein, 105 aa, Homo sapiens
MFHLKITQNEESIDFFLTSNFERRKLANTSFTVVSRIAFLIPPLLHILLGLCFLLSLIMTPSPPFPPFSEFSFMASQIHCPFASLLWFQLLSRPFCFIFFLCSHT

SEQ ID NO: 786041 - protein, 159 aa, Homo sapiens
MGEALHKKKRDDDPRCQNNAREGKKLAHQWGILLGRDTPFPRGGATMMGKKSPAENINGREAENPTPSGGWFDGRVPTHRAANERQAAETKQSAAPPKKRASGKNKFYTPAGPRARKKHHARNRPTARYPEPVTTSTLSAGAEPTTPQTDNCQHDGRHR

SEQ ID NO: 786042 - protein, 102 aa, Homo sapiens [sequence omitted]

SEQ ID NO: 786043 - protein, 63 aa, Homo sapiens
MVLNDHSSQVPHGGLSPSMPGLGPAILVSATAVDTAIWSPQRDGAGLPSRSCQGPRRRELLGK

SEQ ID NO: 786044 - protein, 135 aa, Homo sapiens
FVIYLLFVNKYSLLNLVLSLKLVCFFLKSIPTKAGFAASQKERFLCLPRDVREKETRLAWKTFRRAPGRSRSSFENMHRQANSILGRSLEEKVQTWLERHFLPKNKTKQNNNKKNHPITDNWLIQFGCVPTQISS

SEQ ID NO: 786045 - protein, 105 aa, Homo sapiens [sequence omitted]

SEQ ID NO: 786046 - protein, 114 aa, Homo sapiens
MSEELALGQTEEPGPQGLFSEEAQERLRKRGNNPPAGEEGETSHWQVQVQPLPEAAGWGRTSRSFPVDHLPGHIAPQKRLWEGLSGSWQLCPLALTWPLRVFLGPSLCPWPSSS

SEQ ID NO: 786047 - protein, 274 aa, Homo sapiens
VTLSRDAVIHGGGGGGRGRDKHGSGEVLNSVLLSCLSLGTFSPLGSVLDFAGCENLLTSESSVEPRLGLWSAYFLQSDCSCLRWSLSVPLWGTSALISALTAAVRAAGKWGAPSGGRVAVSLLISSVTFKLSLEATAAAGHVRRALGCWGKISSAGSRDRAGGRRGTAPRPRLGTWEGRAGALGPGARPSWDTREDGGGEEVGSAAGELGIMQMGKENLRPRPSAKSSLGICRYCGKLSVHLAGLVSVNQNLKRASRSLFPQWVKVIIACGLKA

SEQ ID NO: 786048 - protein, 244 aa, Homo sapiens
TSSPAAVRSQPTSGELRGARGTRLRPGRGEGARALLVGAVRRGFGSPGPGRGARGEPHSLCSALQERGGGQRSGPGAVAFDYRGRWRSGKVGSTLRDPHTSPGRHGPPSAEPRGLRRRRTSAACALRPQSKPHPVTSRSLVTPVPPGPAARWRRRGSLSKPDGRSSFSNWGWSPVTLPQITAAGERRDFPGLHRAPPGTHSLAGPAPFEHQLRLDLEEISLCSANEFFHRDQLRPGCSRCLVAD

SEQ ID NO: 786049 - protein, 172 aa, Homo sapiens
EGNGSGPFLPELLKHRPAERAPRSPRRRGSAGGAEDSVGGLGRSPRTCGTRPGAQTRTLQQVALPPLERVGSRRRRPGREGGKGRDRRAGRLPLPRRPRRPMRPLRAPSPGVLIASPCPRSRPLRCLWQPGSRARLTWVRGCRVTFHAGPTPVPPSQHTWVPERARWFRGGG

SEQ ID NO: 786050 - protein, 167 aa, Homo sapiens
APPVCSIPTCVLIPTCVLHPHLCAHPHLCAPSPPVCSIPTCVLHLPPVCSSPPVCSSKSEQDQAENEGEDSAVLMERLCKYIYAKDRTDRIRTCAILCHIYHHALHSRWYQARDLMLMSHLQDNIQHADPPVQILYNRTMVQLGICAFRQGLTKDAHNALLDIQSSG

SEQ ID NO: 786051 - protein, 230 aa, Homo sapiens
AGTARGTVDERVFWHTRVRTCASADLPLRVRGCILTLVERMDEEFTKIMQNTDPHSQEYVEHLKDEAQVCAIIERVQRYLEEKGTTEEVCRIYLLRILHTYYKFDYKAHQRQLTPPEGSSKSEQDQAENEGEDSAVLMERLCKYIYAKDRTDRIRTCAILCHIYHHALHSRWYQARDLMLMSHLQDNIQHADPPVQILYNRTMVQLGICAFRQGLTKDAHNALLDIQSSG

SEQ ID NO: 786052 - protein, 372 aa, Homo sapiens
YSRDERRWIEKQNRATRAQRKKEEMNRIRTLVDNAYSCDPRIKKFKEEEKAKKEAEKKAKAEAKRKEQEAKEKQRQAELEAARLAKEKEEEEVRQQALLAKKEKDIQKKAIKKERQKLRNSCKSDERRWIEKQNRATRAQRKKEEMNRIRTLVDNAYSCDPRIKKFKEEEKAKKEAEKKAKAEANGRTQKAKRKTKTAALAAARISKETEEEDSRQQALLGNSKGQTGYPKKALTNGKRQTLEESCTVIDERKWIGKAKQIHNEHRGEKGKSGSRTFVRKGYRIASKENNSRERKEKDSQEEKKNNQGREDGRENEDGLTAKITEQQGSTKMVRDAPIEREPRQWMGKGHNDTSDTEGREEHNTGGIILNKR

SEQ ID NO: 786053 - protein, 128 aa, Homo sapiens
YSRDERRWIEKQNRATRAQRKKEEMNRIRTLVDNAYSCDPRIKKFKEEEKAKKEAEKKAKAEAKRKEQEAKEKQRQAELEAARLAKEKEEEEVRQQALLAKKEKDIQKKAIKKERQKLRNSCKTWNHF

SEQ ID NO: 786054 - protein, 110 aa, Homo sapiens
MLMLRLPKERVSGKAIALIMVFDKQEEVCCSFFFLMPYFVQHTSNQSYPIDATPKYLWAWPVLRALPSFSYCTCLLPVLLVSCLDSPRPAATLLPKSSRKLTSGKAQFQT

SEQ ID NO: 786055 - protein, 71 aa, Homo sapiens
GRGFVEGRPGLGKLGRKGRHEDGVPRRESGAGRGSPFPGIGTGACLLENPSLLCGPPALAGDTEGSGVMDP

SEQ ID NO: 786056 - protein, 171 aa, Homo sapiens [sequence omitted]

SEQ ID NO: 786057 - protein, 137 aa, Homo sapiens
MRWHRSVIPQAGSLPSWSEPLTPRGHEHLDLQGQRGLRGQPPPLFRGQDFCPGAAGNGTLMPTTQPADFGPSLQYVLAAQGCPLREPWQDPLLHCWKLHPPVFTPLSLTSRFSEPGLQLQPLQRGAVRYVAVSHTLV

SEQ ID NO: 786058 - protein, 124 aa, Homo sapiens
KKTNKQTKKNKCNECDKVFSNSSNLVQHQRIHTGEKPYKCHECGKLFNRISLLARHQRIHTGEKPYKCNECGKAFRDCSGLTAHLLIHTGEKPYKCKECAKVFRHRLSLSNHQRFHTGEKPYRC

SEQ ID NO: 786059 - protein, 303 aa, Homo sapiens
CKHVEKPINNSLVSPLQKIYSSVKSHILNKYRNDFDDSPFLPQEQKAQIREKPCECNEHGKAFRVSSRLANNQVIHTADNPYKCNECDKVFSNSSNLVQHQRIHTGEKPYKCHECGKLFNRISLLARHQRIHTGEKPYKCHECGKVFTQNSHLANHHRIHTGEKPYKCNECGKVFNRNAHLARHQKIHSGEKPYKCKECGKAFSGGSGLTAHLVIHTGEKLYKCNKCGKVFNRNAHLTRHQRIHTGEKPYECKECGKVFRHKFCLTNHHRMHTGEQPYKCNECGRPRRVDHEVRRSRPSWLTR

SEQ ID NO: 786060 - protein, 233 aa, Homo sapiens
MRVRELLEEAVCPLAELKSYAGRSAALFRASRQQCLSLLKLRPQPPLHPGALSQGEGSFIYKPLTGSAAFLSDMPCPVRRNVERQSGHSGFAMLQLVLPSPKFLAALFDTVRGKPPIQASVMAGALPPMKSYHPRSTSDCCADSENFKRVDLSLLGSIGVPPVEQDHLAPWLQSPFQGSEQFCLAGVPGTTGVWKKNLLQLAQCLPKQPPSFVLETQGPSCTGTRGNLLVCGM

SEQ ID NO: 786061 - protein, 125 aa, Homo sapiens
MLLPPGSLSRPRTFSSQPLQTKLMTHNGLFRPIPYLTAVSADEPTASQQPPQAQLHHYNGLFRPSSCLPAFSLGPELSEVDLTRPSSCFFAASPGPAPASWWPLQAQPLPPVGLYSPNICLIADS

SEQ ID NO: 786062 - protein, 120 aa, Homo sapiens
GCRTLEEVTASLGWDLDSLDPGEEEAAEDEVVICPYDSNHHMPKSSLAKHMASCRLRKMGYTKEEEDEMYNPEFFYENVKIPSITLNKDSQFQIIKQARTAVGKDSDCYNQIIGVSIKRN

SEQ ID NO: 786063 - protein, 81 aa, Homo sapiens
TATMVRMNVLADALKTINNAEKRGKRQVLIRPCSKVIVRFLIVMMKHGYTGEFEIIDDHRAGKLCEPHRQAKQVWSDQLQI

SEQ ID NO: 786064 - protein, 246 aa, Homo sapiens
KEVPAVPETLKKKRRNFAELKIKRLRKKFAQKMLRKARRKLIYEKAKHYHKEYRQMYRTEIRMARMARKAGNFYVPAEPKLAFVFRIRGINGVSPKVRKMLQLLCLRRVFNGTFVKLNKASINMLRIVEPYTAWGCPNLKSVNELIYKRGYGKINKKQIALTDNALIARSLGKYGIICMEDLIHEIYTVGKHFKEANNFLWPFKLSSPRVGMKKKTTHLVEGGDAGNREDKINRLIRKMNQGVYHD

SEQ ID NO: 786065 - protein, 112 aa, Homo sapiens
LQSNTPHTHTCMPMTHACMPRHVHTRHAHMPHTHASHMHTCMPCTHKHTHIHTHHVHTCTPTYTHSVHKHTTYTHAHPHTHTHMHRCGLEPEARGKNRSENGTNRLGAVAHA

SEQ ID NO: 786066 - protein, 136 aa, Homo sapiens
VRVAVGRRPQFFTFWTPAQGCLSSLTTWQLTLAIVSDSRESKMEAAISMMTWSQSVISTTGNTGWPSSSPSSGMESSMPWPCQWDFCMCWERRKVSFEPCQDLVTVSTEQDFRVRVLHYEDRSRGASSRRQWLPLR

SEQ ID NO: 786067 - protein, 70 aa, Homo sapiens
PMLPLQVQVQVQVQVQVQVQVQVQVQVQVQVQLWQGLAPAACHLVALPALSQLLVGSGSLFSRTSVPIEP

SEQ ID NO: 786068 - protein, 385 aa, Homo sapiens
MGCGASRKVVPGPPALAWAKHEGQNQAGVGGAGPGPEAAAQAAQRIQVARFRAKFDPRVLARYDIKALIGTGSFSRVVRVEQKTTKKPFAIKVMETREREGREACVSELSVLRRVSHRYIVQLMEIFETEDQVYMVMELATGGELFDRLIAQGSFTERDAVRILQMVADGIRYLHALQITHRNLKPENLLYYHPGEESKILITDFGLAYSGKKSGDWTMKTLCGTPEYIAPEVLLRKPYTSAVDMWALGVITYALLSGFLPFDDESQTRLYRKILKGKYNYTGEPWPSISHLAKDFIDKLLILEAGHRMSAGQALDHPWVITMAAGSSMKNLQRAISRNLMQRASPHSQSPGSAQSSKSHYSHKSRHMWSKRNLRIVESPLSALL

SEQ ID NO: 786069 - protein, 78 aa, Homo sapiens
SKALVYKRRSLGMKYNTDPGVLKSLAVGLFPPGYRLTSCFPAFNVLDNVCLLTGDKRQVSRRVSLCPGEARFLPAGKR

SEQ ID NO: 786070 - protein, 107 aa, Homo sapiens
PFLPLTPQLCVVEVLPGVLCSRQVWSKRQGLSSQLLVWLFISPWEGKAAGLSLHSTPPLPAHPCVAESLLQAGTAERTFPQGPPGAWKLFSRCGRLRMLGPCRPNSS

SEQ ID NO: 786071 - protein, 78 aa, Homo sapiens
GEPRKRFPGSIERVRFRKKDSSRISNIRAKSSRTRTKRCSLNLPMKRPLLGRSVSGGSGGRTASVKETLQPPPPSFKH

SEQ ID NO: 786072 - protein, 44 aa, Homo sapiens
DHITPLLWLLSHSESSWELCPDPGLCAICPYRSLGLPLLPTYSQ

SEQ ID NO: 786073 - protein, 135 aa, Homo sapiens
YILPNNNVNNNNNNSRTYTKLSEYLPESSPRLMLPVPSLFPSTAILYLAPTLPVCSWDGLSRRPVLWLWFCLAPPGEESVEEIGAEALVVLTLSPPGSGLAVALFLSERPSSSWRPVLSCVATGLGSETSISVSL

SEQ ID NO: 786074 - protein, 226 aa, Homo sapiens
MLLRLVSNSWPQVILPPRPPKVLGLQAPRRARKRAEGTASSNVFSMFDQSQIQEFKESLALSPRLERNGMISAHCNLCLTGSSNSPASASQAFTIMDQNRDGFIDKEDLRDTFAALGRINVKNEELEAMVKEAPGPINFTVFLTMFGEKLKGTDPEETILHAFKVFDTEGKGFVKADVIKEKLMTQADRFSEEEVKQMFAAFPPDVCGNLDYRNLCYVITHGEEKD

SEQ ID NO: 786075 - protein, 304 aa, Homo sapiens
MSSTLPALLCVGLCLSQRISAQQQTLPKPFIWAEPHFMVPKEKQVTICCQGNYGAVEYQLHFEGSLFAVDRPKPPERINKVKFYIPDMNSRMAGQYSCIYRVGELWSEPSNLLDLVVTEMYDTPTLSVHPGPEVISGEKVTFYCRLDTATSMFLLLKEGRSSHVQRGYGKVQAEFPLGPVTTAHRGTYRCFGSYNNHAWSFPSEPVKLLVTGDIENTSLAPEDPTFPADTWGTYLLTTETGLQKDHALWDHTAQNLLRMGLAFLVLVALVWFLVEDWLSRKRTRERASRASTWEGRRRLNTQTL

SEQ ID NO: 786076 - protein, 287 aa, Homo sapiens
MSSTLPALLCVGLCLSQRISAQQQTLPKPFIWAEPHFMVPKEKQVTICCQGNYGAVEYQLHFEGSLFAVDRPKPPERINKVKFYIPDMNSRMAGQYSCIYRVGELWSEPSNLLDLVVTEMYDTPTLSVHPGPEVISGEKVTFYCRLDTATSMFLLLKEGRSSHVQRGYGKVQAEFPLGPVTTAHRGTYRCFGSYNNHAWSFPSEPVKLLVTGDIENTSLAPEDPTFPDHALWDHTAQNLLRMGLAFLVLVALVWFLVEDWLSRKRTRERASRASTWEGRRRLNTQTL

SEQ ID NO: 786077 - protein, 192 aa, Homo sapiens
MSSTLPALLCVGLCLSQRISAQQQMYDTPTLSVHPGPEVISGEKVTFYCRLDTATSMFLLLKEGRSSHVQRGYGKVQAEFPLGPVTTAHRGTYRCFGSYNNHAWSFPSEPVKLLVTGDIENTSLAPEDPTFPDHALWDHTAQNLLRMGLAFLVLVALVWFLVEDWLSRKRTRERASRASTWEGRRRLNTQTL

SEQ ID NO: 786078 - protein, 209 aa, Homo sapiens
MSSTLPALLCVGLCLSQRISAQQQMYDTPTLSVHPGPEVISGEKVTFYCRLDTATSMFLLLKEGRSSHVQRGYGKVQAEFPLGPVTTAHRGTYRCFGSYNNHAWSFPSEPVKLLVTGDIENTSLAPEDPTFPADTWGTYLLTTETGLQKDHALWDHTAQNLLRMGLAFLVLVALVWFLVEDWLSRKRTRERASRASTWEGRRRLNTQTL

SEQ ID NO: 786079 - protein, 304 aa, Homo sapiens; identical to SEQ ID NO: 786075

SEQ ID NO: 786080 - protein, 73 aa, Homo sapiens
TSLFAFWPEAESASHGSSYRMNQEAAPRISELPKATAVMYTHSEALFLYSHRLVEKLNHILCLIFDFVVTNSR

SEQ ID NO: 786081 - protein, 107 aa, Homo sapiens
MENTKQGGKRRAGKIAWGILQVQERGEGSSAEGGMAISFRTCLTIEPIGLADGVAVEHKRKGRSELHLGRSVTGSALHHSGKRWGKTGCSTEPQSWLVSVSSGMDAQ

SEQ ID NO: 786082 - protein, 179 aa, Homo sapiens
GPQRSALLQAWGGQPEALSELTQSPPGDDLAPQDLTGKSRDSASAAGAPSSQDLSPPDVKEEAGWVPERPGPAEEEEELEEGEGERAGVPGRSPRGRAHRRHPQERWRLEYLMELDGGRRGLVCGVCGGALASLKMSTIERHIRRRHPGSTRLGGPVQALIAREWSEKAAHLLALGPPR

SEQ ID NO: 786083 - protein, 134 aa, Homo sapiens
VGDCAGSWGWMHGGARGSGPGCSPTEPLSGSPQVMETRQVSRSPRVRLLLLLLLLLVVPWGVRTASGVALPPVGVLSLRPPGRAWADPATPRPRRSLALADDAAFRERARLLAALERRHWLNSYMHKLLVLDAP

SEQ ID NO: 786084 - protein, 260 aa, Homo sapiens
RLVINISGLRFETQLRTLSLFPDTLLGDPGRRVRFFDPLRNEYFFDRNRPSFDAILYYYQSGGRLRRPVNVPLDIFLEEIRFYQLGDEALAAFREDEGCLPEGGEDEKPLPSQPFQRQVWLLFEYPESSGPARGIAIVSVLVILISIVIFCLETLPQFRVDGRGGNNGGVSRVSPVSRGSQEEEEDEDDSYTFHHGITPGEMGTGGSSSLSTLGGSFFTDPFFLVETLCIVWFTFELLVRFSACPSKPAFFRNIMNIIDL

SEQ ID NO: 786085 - protein, 43 aa, Homo sapiens
ECGGQEEEEEGQRCRVGFQVAQLSSHHLPNAVRQMLFQALDIY

SEQ ID NO: 786086 - protein, 75 aa, Homo sapiens
RTSDGISVINLKGPGRSCCWQLVPLLLLNPAEVPVLLQEHWPAGCAEAHCCHQSHSSCWPLLSWNLHSPDPGSLP

SEQ ID NO: 786087 - protein, 102 aa, Homo sapiens
APMASDKWNDYRQINRQISLDSDWVSFVFICLTEPHLVSFVSRSLSYHFAHSRGTCFIKIRSSRSDLASFLGQSPLPVDVGYILLWGSQGNTAVQPILWRAS

SEQ ID NO: 786088 - protein, 110 aa, Homo sapiens
TIYKRKRFIGHTVPRGWGDLTITVDGERHISRGRQEERIKSHLTWMVAGKESLCRELPFLKPSHLVRLIHYHENSAERPTTIIQLPPTGFLPQHVGIVGVTTQDEIWVGT

SEQ ID NO: 786089 - protein, 87 aa, Homo sapiens
RCRLSPLSLTRKGNSLIPCASQVRQCLALLRLAHGALHPLSCTHCLALPSEMNPVPQMEMQKSPVFCVGHAGSCRPELFLFGHLGSS

SEQ ID NO: 786090 - protein, 126 aa, Homo sapiens
CAAWLYMVTRNTAANRTQVRVCVNAVNSSLHTRFQQSPRTRGQHTPGHVIVTSEAVPHPTTTVSFMPGPMKVNASSGVCVEPVRPRSTVVAAGAVASVLASVAMQGCLSFPFSECPSGVYAPSVPV

SEQ ID NO: 786091 - protein, 175 aa, Homo sapiens
MGDCGFQSYSHSLLPSLRRSSAVTCQPIRACVCLVHDLVISNDLLLCSSALHFSHPHCWLPRPMSPPGTAPPLKLLNQAPLYPQPSGPPAHSQSLVGHGFQTQRDTRPCFLPCYPFCLHFPPSPTEVPWSIIRALFCQHPQLSWPPDSWSHPAGSPPALEESQQPPAWSRSPPTS

SEQ ID NO: 786092 - protein, 143 aa, Homo sapiens
MDRGTRDEHLPSCPGCPAVASNTRCCPPAACLPGISLSRAGTVSSPSCLLHGMDSGALNRCSEINDSESRSQPENVLLRGPWNLPLVHLGFSLLNKTDSAACSSEKVLVEDSPQVPLPGSPTAPEGWPSDAWVAGLLDPSMDK

SEQ ID NO: 786093 - protein, 71 aa, Homo sapiens
LVTGYGKNAYQFKPTHAHTHTHRQHTRKWAGDLNTCLMNDDTPKASRPVKGTRYHQGSSNHEMPLHQDGSK

SEQ ID NO: 786094 - protein, 102 aa, Homo sapiens
TPLHVTDASSVSTGHATSLPVTSLSSASTGDTTPLPVTSPSSASSGHTTPLPVTDASSVPTGHATSLPVTDASSVSTGHATPLPVTDASSVSTGHATPLPVT

SEQ ID NO: 786095 - protein, 108 aa, Homo sapiens
MGVKQPGDIGSGRPDAQGRSQPPPCSHMLSFFHGRLRHHFTFQEHGADGRVTSPPKPSHDCPAWAQSLPWSSWGRSQPGHHPPLRPPPTAHFHPSQSGAIPVLGELGP

SEQ ID NO: 786096 - protein, 86 aa, Homo sapiens
LFQEVQRDAPHRKGSATVLPRCPPWVPSLKHRTSHTSSPAVPLILVPRLPSLQLHSFIQHSLGDFYIDTPRTEAWGKDDQEHVPSR

SEQ ID NO: 786097 - protein, 101 aa, Homo sapiens
NDKRNVHRFLHTCVHMPMCTHTHTQAVLSTWEGQFSNVASFTSLKRIPLSIIYIHSSHSPRRFVKVCQLRQEKALELTEVYVSASLKLQLYHLHCHFHTAV

SEQ ID NO: 786098 - protein, 119 aa, Homo sapiens
HLAHLTKKRMEWAEGRWCSRWRIGFTRPLPVAFDSAEGSPFWKHSFLQAPVATLPVFLLLLWPFFLSLLCWLFLLNLVLFPILSHYIFYLLSPILTASINIYKPRFHNSTVDKRLSSEL

SEQ ID NO: 786099 - protein, 202 aa, Homo sapiens
MNKREKLTYETNEQNSRTRSQTNQGQTRPENNKRTAQNKKQADNETATRHRRSAHDNKQNKYDKTRKTKIQRKRTEDIKVKQQKGGTKRWTDSKKYGHKRGQKGEEAETEEREKEQDKKRRKARQQNKPRRKRKHTKQNKRESDKKRAQKEKEQARRERGQEENSRETKKTPSATEGSTKEGRGRKREEKGENREIERGEER

SEQ ID NO: 786100 - protein, 211 aa, Homo sapiens
HCGRTFSHITGLTYHQRRHTGEMPYKCIECGQVFNSTSNLARHRRIHTGEKPYKCNECGKVFRHQSTLARHRSIHTGEKPYVCNECGKAFRVRSILVNHQKMHTGDKPYKCNECGKAFIERSKLVYHQRNHTGEKPYKCIECGKAFGRFSCLNKHQMIHSGEKPYKCNECGKSFISRSGLTKHQTKHTAESLKTKFNVEKPLDVLLTSGFK

SEQ ID NO: 786101 - protein, 952 aa, Homo sapiens
ESSINTPAVGAAHVIKRYTARAPDELTLEVGDIVSVIDMPPKVLSTWWRGKHGFQVGLFPGHCVELINQKVPQSVTNSVPKPVSKKHGKLITFLRTFMKSRPTKQKLKQRGILKERVFGCDLGEHLLNSGFEVPQVLQSCTAFIERYGIVDGIYRLSGVASNIQRLRHEFDSEHVPDLTKEPYVQDIHSVGSLCKLYFRELPNPLLTYQLYEKFSDAVSAATDEERLIKIHDVIQQLPPPHYRTLEFLMRHLSLLADYCSITNMHAKNLAIVWAPNLLRSKQIESACFSGTAAFMEVRIQSVVVEFILNHADFAAATLQRTHRTNRPLPPPPSQKTVYSSFARPDVTTEPFGPDNCLHFNMTPNCQYRPQSVPPHHNKLEQHQVYGARSEPPASMGLRYNTYVAPGRNASGHHSKPCSRVEYVSSLSSSVRNTCYPEDIPPYPTIRRVQSLHAPPSSMIRSVPISRTEVPPDDEPAYCPRPLYQYKPYQSSQARSDYHVTQLQPYFENGRVHYRYSPYSSSSSSYYSPDGALCDVDAYGTVQLRPLHRLPNRDFAFYNPRLQGKSLYSYAGLAPRPRANVTGYFSPNDHNVVSMPPAADVKHTYTSWDLEDMEKYRMQSIRRESRARQKVKGPVMSQYDNMTPAVQDDLGGIYVIHLRSKSDPGKTGLLSVAEGKESRHAAKAISPEGEDRFYRRHPEAEMDRAHHHGGHGSTQPEKPSLPQKQSSLRSRKLPDMGCSLPEHRAHQEASHRQFCESKNGPPYPQGAGQLDYGSKGIPDTSEPVSYHNSGVKYAASGQESLRLNHKEVRLSKEMERPWVRQPSAPEKHSRDCYKEEEHLTQSIVPPPKPERSHSLKLHHTQNVERDPSVLYQYQPHGKRQSSVTVVSQYDNLEDYHSLPQHQRGVFGGGGMGTYVPPGFPHPQSRTYATALGQGAFLPAELSLQHPETQIHAE

SEQ ID NO: 786102 - protein, 101 aa, Homo sapiens
MLLWGRYGIHSCMCPRVLPQLLLYLLTCAPPPTRGGAQRVQGSGICPCWRQHSWLVPAPMHSSSHPQRGQGTIWLRHHRLCFTLTLNSDSHIYSNVFDSCF

SEQ ID NO: 786103 - protein, 157 aa, Homo sapiens
MYVGEFENSWCFFQALSALTAATSALPPPARLQRDPRRKVEPKAAMKETPTRASLFQSGGPGGWRETRSREATPRPGAPTPRQQWRASPPGPSDADPAIRMLREVGHPHVPDSSGSARSRNPSGVGSGHTGVCRPRNRCSCGGDPKRDKAPRQYGLQ

SEQ ID NO: 786104 - protein, 77 aa, Homo sapiens
CEDRIGSIYHKSLRKGKETQITPSWWAWTLTFDKDGNSNQHTGGRKGTITNSFGGKKSSECGQVTQVVLTLAERLCR

SEQ ID NO: 786105 - protein, 74 aa, Homo sapiens
CPQLPQDPEASLWRACDLNPSTRLQISAVCPGLIKPGCPVGIGVTCLAELGTPWEEGGCCEKAVDPGCATFAGG

SEQ ID NO: 786106 - protein, 50 aa, Homo sapiens
MGVPMSEGAKVLELGPVPGLALVGDLEPYAGAPGQPWRHGMDSVSAAHRG

SEQ ID NO: 786107 - protein, 530 aa, Homo sapiens
SAEISAAKLRLPPRAVPRGSPEADHPHPTSSGFARGPPSSHPRQTPVGSPSLTPRPRVNCKGPAHSQFRGGCSHRPELPAPSRGPWGRRRPQRGGRGGGGRTRVSLENEDSEGGTFGRPPGGASHETVPLLCQTLNWALDGHHLLIPEHPRELHRIPISWAMSELKDCPLQFHDFKSVDHLKVCPRYTAVLARSEDDGIGIEELDTLQLELETLLSSASRRLRVLEAETQILTDWQDKKGDRRFLKLGRDHELGAPPKHGKPKKQKLEGKAGHGPGPGPGRPKSKNLQPKIQEYEFTDDPIDVPRIPKNDAPNRFWASVEPYCADITSEEVRTLEELLKPPEDEAEHYKIPPLGKHYSQRWAQEDLLEEQKDGARAAAVADKKKGLMGPLTELDTKDVDALLKKSEAQHEQPEDGCPFGALTQRLLQALVEENIISPMEDSPIPDMSGKESGADGASTSPRNQNKPFSVPHTKSLESRIKEELIAQGLLESEDRPAEDSEDEVLAELRKRQAELKALSAHKRTKKHDLLR

SEQ ID NO: 786108 - protein, 593 aa, Homo sapiens
SAEISAAKLRLPPRAVPRGSPEADHPHPTSSGFARGPPSSHPRQTPVGSPSLTPRPRVNCKGPAHSQFRGGCSHRPELPAPSRGPWGRRRPQRGGRGGGGRTRVSLENEDSEGGTFGRPPGGASHETVPLLCQTLNWALDGHHLLIPEHPRELHRIPISWAMSELKDCPLQFHDFKSVDHLKVCPRYTAVLARSEDDGIGIEELDTLQLELETLLSSASRRLRVLEAETQILTDWQDKKGDRRFLKLGRDHELGAPPKHGKPKKQKLEGKAGHGPGPGPGRPKSKNLQPKIQEYEFTDDPIDVPRIPKNDAPNRFWASVEPYCADITSEEVRTLEELLKPPEDEAEHYKIPPLGKHYSQRWAQEDLLEEQKDGARAAAVADKKKGLMGPLTELDTKDVDALLKKSEAQHEQPEDGCPFGALTQRLLQALVEENIISPMEDSPIPDMSGKESGADGASTSPRNQNKPFSVPHTKSLESRIKEELIAQGLLESEDRPAEDSEDEVLAELRKRQAELKALSAHKRTKKHDLLRLAKEEVSRQELRQRVRMADNEVMDAFRKIMAGPAEEADSTKKEKDQAWKTLKERESILKLLDG

SEQ ID NO: 786109 - protein, 562 aa, Homo sapiens
SAEISAAKLRLPPRAVPRGSPEADHPHPTSSGFARGPPSSHPRQTPVGSPSLTPRPRVNCKGPAHSQFRGGCSHRPELPAPSRGPWGRRRPQRGGRGGGGRTRVSLENEDSEGGTFGRPPGGASHETVPLLCQTLNWALDGHHLLIPEHPRELHRIPISWAMSELKDCPLQFHDFKSVDHLKVCPRYTAVLARSEDDGIGIEELDTLQLELETLLSSASRRLRVLEAETQILTDWQDKKGDRRFLKLGRDHELGAPPKHGKPKKQKLEGKAGHGPGPGPGRPKSKNLQPKIQEYEFTDDPIDVPRIPKNDAPNRFWASVEPYCADITSEEVRTLEELLKPPEDEAEHYKDPTPGEALLPALGPGGHVDALLKKSEAQHEQPEDGCPFGALTQRLLQALVEENIISPMEDSPIPDMSGKESGADGASTSPRNQNKPFSVPHTKSLESRIKEELIAQGLLESEDRPAEDSEDEVLAELRKRQAELKALSAHKRTKKHDLLRLAKEEVSRQELRQRVRMADNEVMDAFRKIMAGPAEEADSTKKEKDQAWKTLKERESILKLLDG

SEQ ID NO: 786110 - protein, 474 aa, Homo sapiens
SAEISAAKLRLPPRAVPRGSPEADHPHPTSSGFARGPPSSHPRQTPVGSPSLTPRPRVNCKGPAHSQFRGGCSHRPELPAPSRGPWGRRRPQRGGRGGGGRTRVSLENEDSEGGTFGRPPGGASHETVPLLCQTLNWALDWASSLNPQNIPGSSTGSPYPEAMSELKDCPLQFHDFKSVDHLKVCPRYTAVLARSEDDGIGIEELDTLQLELETLLSSASRRLRVLEAETQILTDWQDKKGDRRFLKLGRDHELGAPPKHGKPKKQKLEGKAGHGPGPGPGRPKSKNLQPKIQEYEFTDDPIDVPRIPKNDAPNRFWASVEPYCADITSEEVRTLEELLKPPEDEAEHYKIPPLGKHYSQRWAQEDLLEEQKDGARAAAVADKKKGLMGPLTELDTKDVDALLKKSEAQHEQPEDGCPFGALTQRLLQALVEENIISPMEDSPIPDMSGKESGADGASTSPRNQNKPFSWQRRR

SEQ ID NO: 786111 - protein, 91 aa, Homo sapiens
SVTHAHFQLEYPLYSPSERSVTHACFQLEFALSGFRSVTHARFQLEYPLYSPSERSVTHACFQLEFALSGFQSVTHACFQLEYSLYSPSEW

SEQ ID NO: 786112 - protein, 105 aa, Homo sapiens
NHEKYDNSLKIISNAFCTTNCLAPLANVIHDNFGIVEGLMTTVHAITATQKTVDGPAGINCRQCTSAFAAHCAKFLCATRLSWLGGIGESLWIKVNIPIIIFQVA

SEQ ID NO: 786113 - protein, 109 aa, Homo sapiens
MPLPYSLADSKTLSQNKTQTKQTTKENRSNGNLRTEKYNNLTEMAQEKNEDGEGRMNEFENITTEIIQSEQEPVGLLKKKGQLGSVAHACNPSTSRGQGGWVTRSRDRD

SEQ ID NO: 786114 - protein, 110 aa, Homo sapiens
NYHPDNCCSHKKVGSTCVENSNSEESYNVKQKNKSFSPSPYYYQFLLKFVPVLLHVFAVVSAFTKCKQCSIACLFNTLLEGLSDIKNITILLFSAILEYFTYWNLIKPPS

SEQ ID NO: 786115 - protein, 101 aa, Homo sapiens
FLNARFLLGGAYLKVPGRLTGPLHCPFLWHLQCTLQVTSCTVPCYFAPWHLTIGLFLPFRNSFWAGSIWMAQAWVLSMLSSWSVGNSHILSMPGAEIKSTH

SEQ ID NO: 786116 - protein, 95 aa, Homo sapiens
MCNWFINGWQWRLPDCKDANQFTLSRGGGEASDVAQPSGSSPSGLPVSVPAPTDVLSLCVCCVLLCSGQRGKPAAPFPRREPEPPNTLTPGSTLT

SEQ ID NO: 786117 - protein, 107 aa, Homo sapiens [sequence omitted]

SEQ ID NO: 786118 - protein, 386 aa, Homo sapiens [sequence omitted]

SEQ ID NO: 786119 - protein, 69 aa, Homo sapiens
TTEWQVFLTYVCDERRRQWQRPQGCRNKADVTVVGVTGQEILLKETDISNAREGRQLHRRLTEGLPYLM

SEQ ID NO: 786120 - protein, 73 aa, Homo sapiens
EENGPRPYHRQHVHVSAAELHRRREKSQQESTARLAPVRHKKRSLQRHSESRQKSNCEAGPSDIHEGKSGAVL

SEQ ID NO: 786121 - protein, 35 aa, Homo sapiens
MAIIKKITLRITYYFQLQLFRVVALGRRGTRARNC

SEQ ID NO: 786122 - protein, 117 aa, Homo sapiens
VAMRTTPHWDGEPGQVGGQGARLCPSSMTGHSNGLFASLPSCPSHGHLPFSVLFFCCLFYPPALFSPFFLLFRLSAIRFLSPCLFLSLRSPFHCISVYVSLLSSKIVFVCDFSWFLC

SEQ ID NO: 786123 - protein, 172 aa, Homo sapiens
MNPRPSNSQRKVGVKQGGLQTAQRGQGQKSEEIRWGCPKSQVTQPPGCCSHPPVGGALFFSIKVLSILRWSLTLSRRLEYSDAISAHCNLHLLDSSNSPASASQVAGTGAHTHWANRYTGTADQNSIRIVRKLGGAWEDGWGMGGRGTRAGERLWAKTPQKHPGATKADYDV

SEQ ID NO: 786124 - protein, 72 aa, Homo sapiens
TRTHKHAVTHRCIQTRNHSATLPPPTELPVSLEEQKAKQETPAHWMEGPGQEGQGQMEVGGAAGGWWGQPEG

SEQ ID NO: 786125 - protein, 82 aa, Homo sapiens
MAAWGSVGGQSLPRALQDDASGVLGPGHGAIRQTAPCLQQAALHLTSWVSTGHSHRTDIQKCTRTHTHMHARTHTLQVRHAI

SEQ ID NO: 786126 - protein, 68 aa, Homo sapiens
NLRSSSWDRGMRALNHEWHRSQKLVSLYKDSATTQLSDHRESSLMMGDAPSVFSCDLLHRSVPPRIWR

SEQ ID NO: 786127 - protein, 35 aa, Homo sapiens
MRKQRLSLQYRGDLKLGQVTAAPRLLTCRPFPLQR

SEQ ID NO: 786128 - protein, 39 aa, Homo sapiens
KFIISGHLRAPEFRPLSASRMQNSGRASKSVAPWVLRFG

SEQ ID NO: 786129 - protein, 38 aa, Homo sapiens
GQPVASRMDHTEVLQTLAPRRMDLLVCQKCFPAIRMQC

SEQ ID NO: 786130 - protein, 101 aa, Homo sapiens
IIRPIANWQRVISFSIYIRGYRETIWLSCIFDNSCPVKQITAPLEIIFSFSFQHSSLKIYFSISLYLCIPSLKEKEIIFLLLFQHSFTFTLNFKPSRTGLL

SEQ ID NO: 786131 - protein, 101 aa, Homo sapiens; identical to SEQ ID NO: 786130

SEQ ID NO: 786132 - protein, 118 aa, Homo sapiens [sequence omitted]

SEQ ID NO: 786133 - protein, 262 aa, Homo sapiens
CQPGWSGHHCNESCPVGYYGDGCQLPCTCQNGADCHSITGGCTCAPGFMGEVCAVSCAAGTYGPNCSSICSCNNGGTCSPVDGSCTCKEGWQGLDCTLPCPSGTWGLNCNESCTCANGAACSPIDGSCSCTPGWLGDTCELPCPDGTFGLNCSEHCDCSHADGCDPVTGHCCCLAGWTGIRCDSTCPPGRWGPNCSVSCSCENGGSCSPEDGSCECAPGFRGPLCQRICPPGFYGHGCAQPCPLCVHSSRPCHHISGICECL

SEQ ID NO: 786134 - protein, 50 aa, Homo sapiens
MAEDPRYHPSAQRLKGAQHPSSPSLQGLLFTVDVSSFCPEPSTVPVTNGE

SEQ ID NO: 786135 - protein, 91 aa, Homo sapiens
TPATSIRRAYPYLPSFIPKVTGSELTESFTTRCLTLRGSGSAPSRLRRRPIAETIVFSLSLWITAQRQGLPETLASPAAASHSCTCGMRVR

SEQ ID NO: 786136 - protein, 73 aa, Homo sapiens
CALLLFCFLPWNDSARRPSPDALFLTLDFQFPELPNLVSCCELQEKEKGSLGSTAEELMAVRDGAKIGTEVWL

SEQ ID NO: 786137 - protein, 189 aa, Homo sapiens
RIIPPGSGIIHQVNLEYLARVVFDQDGYYYPDSLVGTDSHTTMIDGLGILGWGVGGIEAEAVMLGQPISMVLPQVIGYRLMGKPHPLVTSTDIVLTITKHLRQVGVVGKFVEFFGPGVAQLSIADRATIANMCPEYGATAAFFPVDEVSITYLVQTGRDEEKLKYIKKYLQAVGMFRDFNDPSQDPDFT

SEQ ID NO: 786138 - protein, 87 aa, Homo sapiens
NPLPSLHLHLLCAWVHPVDTAGLRDRRLVGLLSDERINKQLPAATILQDRHLLRAGHVGPARALAAWKCSRCSPRGIRGWGAVPRKW

SEQ ID NO: 786139 - protein, 31 aa, Homo sapiens
MSEKTGEPAAENRDKEASVAGAQITLQTQTP

SEQ ID NO: 786140 - protein, 159 aa, Homo sapiens
RPPLGPPARAREAASRPSPGRRVPEGAGQLLRGQRAPGLGAEAQRPETNWADRGRLPASPGVHCPGSSSLPRSDSGFILSCRAPSGFQLSLLEFLQPPRIAGPRYMATHDPERPLPGTGSGDWLRLSSVPSVHGSRSCCSRFGEDHGLRAPVVEFGELS

SEQ ID NO: 786141 - protein, 123 aa, Homo sapiens
VRCDLLFLAFCHDCEASLAMWNCYYIREKSKQVITLLMDEPLLCKEREVACRTRQRTSHSILFSKRQLGSSNSLTACTSAPTPDISASEKKYKLPKFGRLHNKTHGSRSDFNFQVLLLKKYIS

SEQ ID NO: 786142 - protein, 217 aa, Homo sapiens
MAFRRQVKNFVKNYSDAEIKVREATSNDPWGPSSSLMLDISDLTFNTISLSEIMNMLWHRLNDHGKNWRHVYKSLTLMDYLIKNGSKKVIQHCREGFCNLQTLKDFQHIDEAGKDQGYYIREKSKQVITLLMDEPLLCKEREVACRTRQRTSHSILFSKRQLGSSNSLTACTSAPTPDISASEKKYKLPKFGRLHNKTHGSRSDFNFQVLLLKKYIS

SEQ ID NO: 786143 - protein, 67 aa, Homo sapiens
LSGRARCAVAVPPVASHLAWTAGRPHLQAGLGVAAALGLCPPLSTDAAMSTCMAHLPDLSTPVQRLP

SEQ ID NO: 786144 - protein, 550 aa, Homo sapiens
DRPFSGAGLHSPELPSPPRRLPVPKDVYSKQRNLYELNRLYKHIHPELRKNLEKDYISEVSEIVSSQMNSGSSVSADVQQARYVFENTNDSSQKDLNSEREYLEWDEILKGEVQSIRWIFENQPLDSINNGSPDEGDISRGIADQEIIAGGDVKYTTWMFETQPIDTLGAYSSDTVENAEKIPELARGDVCTARWMFETRPLDSMNKMHQSQEESAVTISKDITGGDVKTVRYMFETQHLDQLGQLHSVDEVHLLQLRSELKEIKGNVKRSIKCFETQPLYVIRDGSGQMLEIKTVHREDVEKGDVRTARWMFETQPLDTINKDITEIKVVRGISMEENVKGGVSKAKWLFETQPLEKIKESEEVIIEKEKIIGTDVSRKCWMFETQPLDILKEVPDADSLQREEIIGGDVQTTKHLFETLPIEALKDSPDIGKLQKITASEEEKGDVRHQKWIFETQPLEDIRKDKKEYTRTVKLEEVDRGDVKNYTHIFESNNLIKFDASHKIEVEGVTRGAVELNKSLFETTPLYAIQDPLGKYHQVKTVQQEEIVR

SEQ ID NO: 786145 - protein, 724 aa, Homo sapiens
AIHSSQVGTSRSSQEMARNEQEGSKVQKIDVHGTEMVSHLEKHTEEVNQASQFHQYVQETVIDTPEDEEIPKVSTKLLKEQFEKSAQEKILYSDKEMTTPAKQIKTESEYEETFKPSSVVSTSSTSCVSTSQRKETSTTRYSDHSVTSSTLAQINATSSGMTEEFPPPPPDVLQTSVDVTAFSQSPELPSPPRRLPVPKDVYSKQRNLYELNRLYKHIHPELRKNLEKDYISEVSEIVSSQMNSGSSVSADVQQARYVFENTNDSSQKDLNSEREYLEWDEILKGEVQSIRWIFENQPLDSINNGSPDEGDISRGIADQEIIAGGDVKYTTWMFETQPIDTLGAYSSDTVENAEKIPELARGDVCTARWMFETRPLDSMNKMHQSQEESAVTISKDITGGDVKTVRYMFETQHLDQLGQLHSVDEVHLLQLRSELKEIKGNVKRSIKCFETQPLYVIRDGSGQMLEIKTVHREDVEKGDVRTARWMFETQPLDTINKDITEIKVVRGISMEENVKGGVSKAKWLFETQPLEKIKESEEVIIEKEKIIGTDVSRKCWMFETQPLDILKEVPDADSLQREEIIGGDVQTTKHLFETLPIEALKDSPDIGKLQKITASEEEKGDVRHQKWIFETQPLEDIRKDKKEYTRTVKLEEVDRGDVKNYTHIFESNNLIKFDASHKIEVEGVTRGAVELNKSLFETTPLYAIQDPLGKYHQVKTVQQEEIVR

SEQ ID NO: 786146 - protein, 393 aa, Homo sapiens
DIQDGGWVMLIGKKNSPQEEVELKKLRHSLEDVCTARWMFETRPLDSMNKMHQSQEESAVTISKDITGGDVKTVRYMFETQHLDQLGQLHSVDEVHLLQLRSELKEIKGNVKRSIKCFETQPLYVIRDGSGQMLEIKTVHREDVEKGDVRTARWMFETQPLDTINKDITEIKVVRGISMEENVKGGVSKAKWLFETQPLEKIKESEEVIIEKEKIIGTDVSRKCWMFETQPLDILKEVPDADSLQREEIIGGDVQTTKHLFETLPIEALKDSPDIGKLQKITASEEEKGDVRHQKWIFETQPLEDIRKDKKEYTRTVKLEEVDRGDVKNYTHIFESNNLIKFDASHKIEVEGVTRGAVELNKSLFETTPLYAIQDPLGKYHQVKTVQQEEIVR

SEQ ID NO: 786147 - protein, 96 aa, Homo sapiens
WGSGPREGGFGGMKEKQAEFPGTTLLQTGDMFCTPHFVRQAGETSWWCGFSSPSGTSGLLRYEPCNAKRVGVFSHVERGSEQKRRSVSRASIFFRG

SEQ ID NO: 786148 - protein, 126 aa, Homo sapiens
MKQEEWVALKPAVLHGLVGDGELAQVVADHLRLDLHLVEGLAVVDAHHAAHHLGHDDHVPQVSLHHFRLLHGRHRRLGLAQALQQRVLLPPQAPVQPAPLVRTVQLYQLLVGHVQQLAARGPRRSR

SEQ ID NO: 786149 - protein, 80 aa, Homo sapiens
DGQQGDGCAVGSTGSSGASLDRGPRVAAFLFLHKQEYTNLQNEADLGLPSIDRQFYRVSISSSRCKLPGFEYWLHHLQAE

SEQ ID NO: 786150 - protein, 107 aa, Homo sapiens
RGSDSRNAALRVPDSGGCVRVASPRLDRRVPPTSPLWAERAECSIFLWNNGVMNWSPGAARRPLPPPSLLARAPAASLRGLPRGTQSREGPPSSLGDGEGVGASWGK

SEQ ID NO: 786151 - protein, 664 aa, Homo sapiens
  misc_feature (610)..(610): Xaa can be any naturally occurring amino acid
  misc_feature (626)..(626): Xaa can be any naturally occurring amino acid
  misc_feature (631)..(631): Xaa can be any naturally occurring amino acid
  misc_feature (648)..(648): Xaa can be any naturally occurring amino acid
  misc_feature (650)..(650): Xaa can be any naturally occurring amino acid
APARGAWRLLPAARESDSGGGPGGGSGGGGASMSWLFGIKGPKGEGAGPPPPLPPAQPGAEGGGDRGLGDRPAPKDKWSNFDPTGLERAAKAARELEHSRYAKDALNLAQMQEQTLQLEQQSKLKEYEAAVEQLKSEQIRAQAEERRKTLSEETRQHQARAQYQDKLARQRYEDQLKQQQLLNEENLRKQEESVQKQEAMRRATVEREMELRHKNEMLRVEAEARARAKAERENADIIREQIRLKAAEHRQTVLESIRTAGTLFGEGFRAFVTDWDKVTATVAGLTLLAVGVYSAKNATLVAGRFIEARLGKPSLVRETSRITVLEALRHPIQVSRRLLSRPQDALEGVVLSPSLEARVRDIAIATRNTKKNRSLYRNILMYGPPGTGKTLFAKKLALHSGMDYAIMTGGDVAPMGREGVTAMHKLFDWANTSRRGSLLFVDEADAFLRKRATEKISEDLRATLNAFLYRTGQHSNKFMLVLASNNQSSSTGPSMTASMRWSTSTCRAGGAGALVRLHFDNCVLKPATEGKQRLKLAQFDYGRKCSEVARLTEGMSGREIAQLAVSWQATAYASEDGVLTEAMMDTRVQDAVQQHQQKMCWLKAEDRSAXRGHVMPEDRTAGRVLXGHGVXSKDGVLTEAMMDACLQXFXQQHQQMMRWLKGER

SEQ ID NO: 786152 - protein, 662 aa, Homo sapiens
  misc_feature (608)..(608): Xaa can be any naturally occurring amino acid
  misc_feature (624)..(624): Xaa can be any naturally occurring amino acid
  misc_feature (629)..(629): Xaa can be any naturally occurring amino acid
  misc_feature (646)..(646): Xaa can be any naturally occurring amino acid
  misc_feature (648)..(648): Xaa can be any naturally occurring amino acid
HRLAARGGCSQPRASQTRVGVPPPLPPAQPGAEGGGDRGLGDRPAPKDKWSNFDPTGLERAAKAARELEHSRYAKDALNLAQMQEQTLQLEQQSKLKEYEAAVEQLKSEQIRAQAEERRKTLSEETRQHQARAQYQDKLARQRYEDQLKQQQLLNEENLRKQEESVQKQEAMRRATVEREMELRHKNEMLRVEAEARARAKAERENADIIREQIRLKAAEHRQTVLESIRTAGTLFGEGFRAFVTDWDKVTATVAGLTLLAVGVYSAKNATLVAGRFIEARLGKPSLVRETSRITVLEALRHPIQVSRRLLSRPQDALEGVVLSPSLEARVRDIAIATRNTKKNRSLYRNILMYGPPGTGKTLFAKKLALHSGMDYAIMTGGDVAPMGREGVTAMHKLFDWANTSRRGSLLFVDEADAFLRKRATEKISEDLRATLNAFLYRTGQHSNNPSHVSHGGSSPAGRTWVTPQARWGPKVHAGPGQQQPEQFDWAINDRIMRWSTSTCRAGGAGALVRLHFDNCVLKPATEGKQRLKLAQFDYGRKCSEVARLTEGMSGREIAQLAVSWQATAYASEDGVLTEAMMDTRVQDAVQQHQQKMCWLKAEDRSAXRGHVMPEDRTAGRVLXGHGVXSKDGVLTEAMMDACLQXFXQQHQQMMRWLKGER

SEQ ID NO: 786153 - protein, 635 aa, Homo sapiens
  misc_feature (581)..(581): Xaa can be any naturally occurring amino acid
  misc_feature (597)..(597): Xaa can be any naturally occurring amino acid
  misc_feature (602)..(602): Xaa can be any naturally occurring amino acid
  misc_feature (619)..(619): Xaa can be any naturally occurring amino acid
  misc_feature (621)..(621): Xaa can be any naturally occurring amino acid
HRLAARGGCSQPRASQTRVGVPPPLPPAQPGAEGGGDRGLGDRPAPKDKWSNFDPTGLERAAKAARELEHSRYAKDALNLAQMQEQTLQLEQQSKLKEYEAAVEQLKSEQIRAQAEERRKTLSEETRQHQARAQYQDKLARQRYEDQLKQQQLLNEENLRKQEESVQKQEAMRRATVEREMELRHKNEMLRVEAEARARAKAERENADIIREQIRLKAAEHRQTVLESIRTAGTLFGEGFRAFVTDWDKVTATVAGLTLLAVGVYSAKNATLVAGRFIEARLGKPSLVRETSRITVLEALRHPIQVSRRLLSRPQDALEGVVLSPSLEARVRDIAIATRNTKKNRSLYRNILMYGPPGTGKTLFAKKLALHSGMDYAIMTGGDVAPMGREGVTAMHKLFDWANTSRRGSCSLWMKRTPSFGSEPREDKRGPQGHTERLPVPHGPAQQQVHAGPGQQQPEQFDWAINDRIMRWSTSTCRAGGAGALVRLHFDNCVLKPATEGKQRLKLAQFDYGRKCSEVARLTEGMSGREIAQLAVSWQATAYASEDGVLTEAMMDTRVQDAVQQHQQKMCWLKAEDRSAXRGHVMPEDRTAGRVLXGHGVXSKDGVLTEAMMDACLQXFXQQHQQMMRWLKGER

SEQ ID NO: 786154 - protein, 114 aa, Homo sapiens
RNIPGLLVLCDNLVTLETLVYEARCDVTLTLKELQQMKDIEKLRLLMNSCSEDKYVTSAYQWMVPFLHRCEKQSPGVANELLKEYLVTLAKGDLKFPLKIFQHSKPDLQRNNYS

SEQ ID NO: 786155 - protein, 134 aa, Homo sapiens
EVCLRTEAGSDGSSSYPGPPIPLYPGVSFSSKHPFQSNKSGGRVSFFFFFWRHKKVLPLLLRPRGLGVASGATKKSLGALNGRKPSRPSLGASKGGIPLCALSKALPVGGISGAIWQGRCATPRCLGLTFPWYL

SEQ ID NO: 786156 - protein, 73 aa, Homo sapiens
EQEEEEEEAQEEEEEAQEEEEEEQEEEEEQRRRRRRQRRHCGSSTGCARRRSRLHCPEANKASSPSQGHTPNR

SEQ ID NO: 786157 - protein, 72 aa, Homo sapiens
PQPTRTPLDFILKTHLGTGKYAFSVPEQRIRNQITPPLSWTCHPYNKIKTRPGAVVHACNPSTLGGQGRWIT

SEQ ID NO: 786158 - protein, 160 aa, Homo sapiens
AKGGITAEEEGSLGCLQQPWAEEVPCKVTTMTPEEKIPTGVSPGLLARDYDLCPCPAIALWFCQQWVLQIISFLREPYSVLKLDSSSFESAWEKTPLDLQIYIVAKGPTNQIALSFPMVTLLRQPPPSQWSLFYDIPHMQKQEETGLLLSSTCKETQGVG

SEQ ID NO: 786159 - protein, 95 aa, Homo sapiens
ASDINSGNVLTPLSAGPWAQRRQGESRLRGCSRRTVLSPASSAGHCSLVLWTHVWVTGLPPRAKGKVSLLPTTSGIHFAVGYGKVQFWFSVIKVS

SEQ ID NO: 786160 - protein, 240 aa, Homo sapiens
AFPGLLPVNRMLCQSPPLRPRPRPGSLAKPLPSRRPQPAGSRRLAGQALWRGRELGAHGYRAWRRHCPASDGGPGALFHRRRPSRAGGLGVPAHPGAFPFLSPCWLLLLTFQLRGRHRNDKGKNSFSLKTVEQLDADGMFQTLNSSRIDMVAEIPGKFYKGTHLRKTIPHDVVWSTGSYSPQAGRGPGVPGHRYIEEFSNLVARTPGAYPIVLWYQGLSFKYVVDYDAAGHDVSAATMTL

SEQ ID NO: 786161 - protein, 46 aa, Homo sapiens
PDRKRDSLGRTVWFEMVAGSMHLHLAFLPKETVCFLKAAPVLATGY

SEQ ID NO: 786162 - protein, 74 aa, Homo sapiens
DNRGRHPAPGAWGCWNPPLSPSPSAQAPGSQGVGGDTRIHKRETEVCMKRADGWESGDLDLALTVPCRLLSLHL

SEQ ID NO: 786163 - protein, 230 aa, Homo sapiens
SLIPYVQVLAKATSRTTNFSLVTSGACPFPAWPLRHELPGLLECSSFTPTSGLPGPQRSLQQPHDPSRPQVTCDHPQPLGNRSASLLVDFMPLSSPRDSSLLEGGDYLPYFLPYHSGWNLPPVTCHPGHTSIWDYPIARVLFLFLETGSHSVQFTQAAVQWLDHSSLQPPTPELNQSSSLSLLGSWDHRHTSSGPAKKNFFFFEMGVSLLLPRVECNGAISAHRTFRHPG

SEQ ID NO: 786164 - protein, 154 aa, Homo sapiens
DHTDQPELSTELAWEIDRKALHQHRLQRTPIKLRCCALDPVTSAKETIGDIGLDLRTAQETKQAPKWYQLLSNKYTKFKSEIQISIALETDTKPPVDSFKAKGAPPRDGKVLEAGKFKIKALASGEGLRPTSSHIGRLKSKRGTLSTKPFYKGT

SEQ ID NO: 786165 - protein, 273 aa, Homo sapiens
DHTDQPELSTELAWEIDRKALHQHRLQRTPIKLRCCALDPVTSAKETIGDIGLDLRTAQETKQAPKWYQLLSNKYTKFKSEIQISIALETDTKPPVDSFKAKGAPPRDGKVPAILAGLDPRDIVAVLNEEGGYHQIGPAEYCTDSFIMSVTIAFATQLEQLIPCTMKLPERQPEFFFYYSLLGNDVTNEPFNDLINPNFEPERASVRIRSSVEILRVYLALQSKLQIHLCCGDQSLGSTEIPLTGLLKKGSTEINQHPVTVEGAFTLDPPNRA

SEQ ID NO: 786166 - protein, 136 aa, Homo sapiens
  misc_feature (19)..(19): Xaa can be any naturally occurring amino acid
SPLSSGNNAEYAGSSGNNXEYAGSSGNNAEYAGSSGNNAEYAGSSGNNAEYAGSSGNNAEYAGSSGNNAEYAGSSGNNAEYAGSSGNNAEYAGSSGNNAEYAGKQWYNAEYAGSSGNNAEYAGSSGNNAEYAGPKS

SEQ ID NO: 786167 - protein, 36 aa, Homo sapiens
MTNENALSGNEELTVKIKCDKVKNLLHVTDTGVGMT

SEQ ID NO: 786168 - protein, 96 aa, Homo sapiens
MLRVITVKTRTMTTIVHTTEESTKKNKKKPPKKTSRYERTDTGEITSYITEDDVVYRPGDCVYIESWRPNTLYFICSIQDFKLPFRYFSKSSLRLE

SEQ ID NO: 786169 - protein, 67 aa, Homo sapiens
VSHCTWPKVTFCSVGHLYAASSAVPVASPPTAAAPEQHVMGTVCRSGNSPTHTIQHESRPATRPKVQ

SEQ ID NO: 786170 - protein, 36 aa, Homo sapiens
MSMKRVKLCEVFEETYSEPNMSDQWLMTQPQEILRT

SEQ ID NO: 786171 - protein, 226 aa, Homo sapiens
RISVKVFFTCGWTKIRDVLIQKSQMTEPGPEVKKKTEEEDVECEDDLILACQPESSVKALDFDISETRTEVEVEELPPIDHGIPITDRRSTFQAHLAPVVCPKQVKMVLSKLYENKKIASATHNIYAYRIYCEDKQTFLQDCEDDGETAAGGRLLHLMEILNVKNVMVVVSRWYGGILLGPDRFKHINNCARNILVEKNYTNSPEESSKALGKNKKVRKDKKRNEH

SEQ ID NO: 786172 - protein, 27 aa, Homo sapiens
MSAMTTHKAIQTSKKNKQNYTKPTTSV

SEQ ID NO: 786173 - protein, 79 aa, Homo sapiens
DSQSSAERNGKSLHDLASLIIERNGKSGHEGDSPVYKIIGVELSMRQVGRDTNVLNIRVHFFPPSTPRFTLDGKHINQK

SEQ ID NO: 786174 - protein, 78 aa, Homo sapiens
SQINSLIGGSKVQVSNNMLEAKATSYPSRMAQVKLELSCVMLPVTAVMVLLRTGLNRRHFKKANAKMEIPKTAIVQFW

SEQ ID NO: 786175 - protein, 55 aa, Homo sapiens
RDCKHAKCETPRPPTPLFPELYAPHKSPEDFSGESGPNANNKRYQYWEFPNSPPR

SEQ ID NO: 786176 - protein, 37 aa, Homo sapiens
MAKVIPIGDVALDVCESAGTEDCDSCPEMEVPTLATA

SEQ ID NO: 786177 - protein, 123 aa, Homo sapiens
NILCVLSITLLKFPKYITSACVLIILDTCEREGDIDFGFRIPTTFGFRLPTTFGFKSRSSSDVCSWCIKDKYWKLYTKNKYVLIYHESHGWSWQEVTALSFFFIIQETQEQHMPWVGHRVRTQ

SEQ ID NO: 786178 - protein, 67 aa, Homo sapiens
TQLPRQPLTCAFRDSIPDTTCPNLCLSSLTPSHYLADPAPGSWTNLLFLECSKPLLLQAFALFAPSA

SEQ ID NO: 786179 - protein, 109 aa, Homo sapiens
RDLAAVRSSDLRSLCRIRSRQQELSAHGIQSGSRVTMGCGGGGGGRWSRERWSRERGADLEKSLERITGQVEEADEELPGCAADQGRSGGRVKATVGNRAIYEDVEGRS

SEQ ID NO: 786180 - protein, 103 aa, Homo sapiens
GGLPSFPACRVRVSGCPADAVLDLLAPQTVALLCLWPRGKEKVAISTLSAREPVGTENGLWPDITCNQSQAAFGFSLLETTLPGLLHEGGAATSLGTLRCRYV

SEQ ID NO: 786181 - protein, 157 aa, Homo sapiens
EEQWIEVRTWRICYTQSWEEGQSQYQSRKKAGWEGEPESGDLPGRRCPASRGLTVVSMNCIPAVGWDRATDTVSEHRGGKEQEGFQLCQLAAVWLWACYLTSLSLIYFIHKMEIKIILLSKAHCEYLDPQNNAWLVANGSWRKRKRKPKSAAEGFSY

SEQ ID NO: 786182 - protein, 40 aa, Homo sapiens
MEVQKGPPLAGSGVVCEENAISSSPPPRPPLLPRPPCTAF

SEQ ID NO: 786183 - protein, 106 aa, Homo sapiens
MSLALLPRLECSSLITAHCSLYFPGSNNTPTSASQVAGTIAVCHYTWLYFVFFVEMGFCHPAQAALEFLDSSNPLTSASQSAGIICGNHICPTPSDFLPHLQLGTV

SEQ ID NO: 786184 - protein, 67 aa, Homo sapiens
IHPHPSPGLNVRAQTDLQIHSAPASGQLLCRPPHPIFWSVKLMHNGRSNGQVVIAGQKVPFKTGIIR

SEQ ID NO: 786185 - protein, 63 aa, Homo sapiens
MRPGQHQEPEQDPGPLQGPRKGRDLPRFCRASWGHPQHLIVRRPLLQMGLLWNTRPPATAGGY

SEQ ID NO: 786186 - protein, 144 aa, Homo sapiens
PRVLEKPSARASISVLQAGTLMLRELNPPSRANDGAGAVPKSKKEDPGWRNREERGAPHRSRNSQVKMGLQLRRSVGLGKGTGQNLQEWPEATSAAAGWRGRCTVDASVTTCARRFRDPDPFVRMSQNPEHHGGRKRDGILGKL

SEQ ID NO: 786187 - protein, 355 aa, Homo sapiens
AGTLVMTEAVTLTEVKAKAREVAMKEAVTQTDAEAGKIVKKEAVTQTKAKAWALVAKTEAKREAMTQTKAETHILAEKETEINRVMVTQSETLAVPREVAKMGATNKTGIVDETKTRALEETVSVAKTQSEARPGATVDARGNPNGMSREVAGVDMKSCAQSQAVTKIQGDDMPGTGVEDMGNCKTMSRAESGADTRASAQPQIFAKTQTEAIPGAKIDAGGNTNAMCKVGAGADVRACIQPQTVAKKQAEVTSGARVDGRGNTNVISKAITGADMRAAAQPQAVASTHAEAMSDAKVKNRGNPNAMTKAGAKANLRANSQVEALPDARDKSRGNPNVMAKVGDGTDMLSCTQPQ

SEQ ID NO: 786188 - protein, 191 aa, Homo sapiens
MYYLVAFQHRAWFSLFLIVRMMCSGMSHCERGPDDGAWTERVNGAAHLRTLPALLCWEQGAGQPGRGWSSSKGREEWPSGDHREEPCHDRLKKLDYANKKGKTSVTHRKQCSWPCHRRRSKGGKLRRLPVNSWLRMHVICSDLKTQTRTEVSGPTCEMHSAERHPALAAGWEAGCRMIVRGKKFCRSYQAP

SEQ ID NO: 786189 - protein, 41 aa, Homo sapiens
SRQLRQQLRLPICPRGSAAASAPGPSACGRADLPALRFPRA

SEQ ID NO: 786190 - protein, 146 aa, Homo sapiens
QNMTQSTQGNAKPSREKVKPSKGTRERKRQSKQETSIQATNAKPSQERKAKPSRYRPAKPLKRVQHARASHYRPAKPLRACGVRVQAVTGRPNRYARAACACKPLQASQAAAGRVRAACACACGVLISGGVRARGTDTGRCMQRAC

SEQ ID NO: 786191 - protein, 269 aa, Homo sapiens
MPWILEDLTMGRPRPRAAKTWMFLLLLGGAWAGHSRAQEDKVLGGHECQPHSQPWQAALFQGQQLLCGGVLVGGNWVLTAAHCKKPKYTVRLGDHSLQNKDGPEQEIPVVQSIPHPCYNSSDVEDHNHDLMLLQLRDQASLGSKVKPISLADHCTQPGQKCTVSGWGTVTSPRENFPDTLNCAEVKIFPQKKCEDAYPGQITDGMVCAGSSKGADTCQGDSGGPLVCDGALQGITSWGSDPCGRSDKPGVYTNICRYLDWIKKIIGSKG

SEQ ID NO: 786192 - protein, 123 aa, Homo sapiens
ERKGVRSRQGWRQRAALSGNLTTSSPSENFPDTLNCAEVKIFPQKKCEDAYPGQITDGMVCAGSSKGADTCQGDSGGPLVCDGALQGITSWGSDPCGRSDKPGVYTNICRYLDWIKKIIGSKG

SEQ ID NO: 786193 - protein, 128 aa, Homo sapiens
MPWILEDLTMGRPRPRAAKTWMFLLLLGGAWAENFPDTLNCAEVKIFPQKKCEDAYPGQITDGMVCAGSSKGADTCQGDSGGPLVCDGALQGITSWGSDPCGRSDKPGVYTNICRYLDWIKKIIGSKG

SEQ ID NO: 786194 - protein, 260 aa, Homo sapiens
MGRPRPRAAKTWMFLLLLGGAWAGHSRAQEDKVLGGHECQPHSQPWQAALFQGQQLLCGGVLVGGNWVLTAAHCKKPKYTVRLGDHSLQNKDGPEQEIPVVQSIPHPCYNSSDVEDHNHDLMLLQLRDQASLGSKVKPISLADHCTQPGQKCTVSGWGTVTSPRENFPDTLNCAEVKIFPQKKCEDAYPGQITDGMVCAGSSKGADTCQGDSGGPLVCDGALQGITSWGSDPCGRSDKPGVYTNICRYLDWIKKIIGSKG

SEQ ID NO: 786195 - protein, 119 aa, Homo sapiens
MGRPRPRAAKTWMFLLLLGGAWAENFPDTLNCAEVKIFPQKKCEDAYPGQITDGMVCAGSSKGADTCQGDSGGPLVCDGALQGITSWGSDPCGRSDKPGVYTNICRYLDWIKKIIGSKG

SEQ ID NO: 786196 - protein, 314 aa, Homo sapiens
MPWILEDLTMGRPRPRAAKTWMFLLLLGGAWAACGSLDLLTKLYAENLPCVHLNPQWPSQPSHCPRGWRSNPLPPAAGHSRAQEDKVLGGHECQPHSQPWQAALFQGQQLLCGGVLVGGNWVLTAAHCKKPKYTVRLGDHSLQNKDGPEQEIPVVQSIPHPCYNSSDVEDHNHDLMLLQLRDQASLGSKVKPISLADHCTQPGQKCTVSGWGTVTSPRENFPDTLNCAEVKIFPQKKCEDAYPGQITDGMVCAGSSKGADTCQGDSGGPLVCDGALQGITSWGSDPCGRSDKPGVYTNICRYLDWIKKIIGSKG

SEQ ID NO: 786197 - protein, 121 aa, Homo sapiens
PASGRHSRPSLRSGREPPLGPPGPGARLPPGAWREALLRLFPIRAGARNQELQPGWRSSFLLPPGPANHLAAVLSGDGAGGLAPPASWVPSQTLAVNEGAGRSRPAPRPGLDWASEMFLQA

SEQ ID NO: 786198 - protein, 204 aa, Homo sapiens
TSVIRIFIPKTEEMQPTVEANQAAKEDTVVLKIGSVAMAPQADNPLGRSVLRKDIYHIRRHQERRAILTPVLTDFSVRITGAPAVIFTKVVSPENLHTEEILVCGHSLEVNITTNLDFFLSVAQVQLLHQLIVANMTGLEPSNKAAEISKQEQKKVDIFDGGMAETSSRYSGAQDSGIGSDSVKIRIVQIEQHSGASQHRIARP

SEQ ID NO: 786199 - protein, 102 aa, Homo sapiens
TSVIRIFIPKTEEMQPTVEANQAAKEDTVVLKIGSVAMAPQADNPLGRSVLRKDIYQRALNLGILRDPGSEIEDRQYQIDLQSINIGTAQWHQLKPEKESVS

SEQ ID NO: 786200 - protein, 132 aa, Homo sapiens
HIKSISYAGCLLQFFYFSMCAAEGYFLSVMSFDRFLTICRPLHYPTVMTHHLCVRLVAFCRAGGFLSILMPAVLMSRVPFCGPNITDHFFCNLGPLLALSCAPVPKTTLTCATVSSLIIFITFLYILGSHIL

SEQ ID NO: 786201 - protein, 82 aa, Homo sapiens
QIQKSEALIQGLSMAKSQVAAKLQETEQALQEQEVVLKAVTLERDQAVQALRMHGLPRPGAQMLLRQHEEEISKDFPSSEIQ

SEQ ID NO: 786202 - protein, 95 aa, Homo sapiens
EDPHTPRLHDIILIIGNTARAINDKHNVYNFNPLAFFTGAAYSKNKIIFNALQNVKILNIKNHLGPPTDLLKLGDIGAKHSHRIDDYTFLPKHYC

SEQ ID NO: 786203 - protein, 103 aa, Homo sapiens
KGNIDSKPRETWRWSIRRPPWGWATPAPRGLCSTFCGASPLPLPPGAGDLARAAGRGLVESTHAPVLCLVPHGPSAAPAAAGAPRRGSAFLSPLCTRRCPQHQ

SEQ ID NO: 786204 - protein, 67 aa, Homo sapiens
PPLLSTPQPQPLGPYKAGKGPPGRGEAAALQEFHTGPVLPLLLQEPPGEVRPSSRPCAPGDAHSTST

SEQ ID NO: 786205 - protein, 125 aa, Homo sapiens
LTCPSPQHRPQVHSQASETLITLFPLPRTSFPRLSLDLNPTQILTNASTSTSLRCSPPCLEGIHIEAPGNQVIFSRSLRSGGAKLQLKILACDSLCYYLPIFCFPLEMDRFVFSFRIISSDTFYR

SEQ ID NO: 786206 - protein, 128 aa, Homo sapiens
NRECISLDVYIITNTCVRPCYQPHLPPTSVDESIRPREGNTGMRWPLRTRLLKISSRQAPGPLANSCGLADNPRSLWSDSIYAALPRASSGLRSGPWSRSSRVCFLFALPPTAYPPEVRSSRPAWQTW

SEQ ID NO: 786207 - protein, 130 aa, Homo sapiens
PGGCAPGVGSRGTGARRAARGAWRVGERLVLLAQETLIAHRAPAATRSRPFHFLTLLNDSEVKTSTKRRVKGWSPPKANLRLNIADRLSLQKLQRRGCSSRLSPLCQAMNLNVRGVVCIESARARQEFKK

SEQ ID NO: 786208 - protein, 75 aa, Homo sapiens
LDTDANPHNAGRSKHSVATQGAGLSLCNKISLKNKGLHCFLARGFQCPGFGGDSRLLLKTEYKFVEIVTPVALGS

SEQ ID NO: 786209 - protein, 69 aa, Homo sapiens
RAAISSVTPEIKRIERTSSGPNSLMAHPQLSTWATLDTAVTSRFILAVLLRMKTSSAPCSFLDFARPDF

SEQ ID NO: 786210 - protein, 152 aa, Homo sapiens
MAQGCQGSVFCCLQQTTAHTRTHTRHTRTHTAHTRTHTTHTRTPWTTAWATTGVTATAGSPAWVHVPASFNACSLGTSSVPGLHWAQGHCGEQRQGPGQRGPWDSTWVAALPGTQLPYPSTCCGPSYRPSCLVKAQASGRPLCLSPLHVPSP

SEQ ID NO: 786211 - protein, 93 aa, Homo sapiens
KILKHPESPVSHSQLDIWLPCRNSWPLGQRADETDTRLHGDWAQGQVCLQYGCHFQKGMLISANMGLNRLSALKAVCGMRADEIQWLLANSMD

SEQ ID NO: 786212 - protein, 235 aa, Homo sapiens
ARGPRRPAQRERRGVPGLRDATDRSGAKRGRSRPRSGAAMSVQVAAPGSAGLGPERLSPEELVRQTRQVVQGLEALRAEHHGLAGHLAEALAGQGPAAGLEMLEEKQQVVSHSLEAIELGLGEAQVLLALSAHVGALEAEKQRLRSQARRLAQENVWLREELEETQRRLRASEESVAQLEEEKRHLEFLGQLRQYDPPAESQVPRAGRGGGCWALHRAPQSPRPSLESHSPQDPP

SEQ ID NO: 786213 - protein, 212 aa, Homo sapiens
SPHWSMWKKLDDTAYLHQHQKQHIGEKFYRKSVREASFVKKRKLRVSQEPFVFREFGKDVLPSSGLCQEEAAVEKTDSETMHGPPFQEGKTNYSCGKRTKAFSTKHSVIPHQKLFTEMDVMCAVMVENPLADMSASVIISEITLQKDLMIVESVGNLIVERAALFNIRESTLKKNHTNAKSVVRASVGVLISVFTRGSTGVRSPINVRNVVR

SEQ ID NO: 786214 - protein, 114 aa, Homo sapiens
SGDCFNKSSFHSYQSNHTGEKSYRCDSCGKGFSSSTGLIIHYRTHTGEKPYKCEECGKCFSQSSNFQCHQRVHTEEKPYKCEECGKGFGWSVNLRVHQRVHRGEKPYKCEECGK

SEQ ID NO: 786215 - protein, 102 aa, Homo sapiens
EDPASFAGWGRTSPSQLPRRWMLVWGDVGTSGKTHASPTCQPAWGQAFGVRTALSPNLLCFVFKLDLTSLVRLRQQTLDSSSYNRNLLTTYYVLFTLLALSH

SEQ ID NO: 786216 - protein, 248 aa, Homo sapiens
PQFDEDDLPPDLAEAVGVTTSTTTNTTTAATQVSVPLPSPKVQNVSSPHKSEGKGLLSPGAKSPSDRGGAFTLEPGDLLMDFTEATPLAEPASNPHCAHSRCSPPLSLPMKEETTGVCMYPPIKTRLIKTFPVDTMNPFPDTFTTGPQFTADFRDSKLQCCPGPTSPLIPAATLRPLTETVLHSADHLHHPETCFSGSQCRDTPAGTGEREDDEKTVDDRTVKFSPCHLEDGMVPSVRLLSSGFVCSL

SEQ ID NO: 786217 - protein, 57 aa, Homo sapiens
LSHPGLENLVDWTQEYHFPLKSVTDHSRRHGFNISTSLLGSRSCCDLYSIQATLPPK

SEQ ID NO: 786218 - protein, 66 aa, Homo sapiens
MVGMAGGGLLALLESGTCIKVARDWASGCRAVTAAKGSLTYGGEGQRIFCGQDIWGIWGVTLYYLK

SEQ ID NO: 786219 - protein, 69 aa, Homo sapiens
MPNHYSFCFCFCFCFRRSLALSPRLECSGAILAHGKLHLPGSRHSPASASPVAGTKGARHHARLIFLYF

SEQ ID NO: 786220 - protein, 68 aa, Homo sapiens
PMIRQEVLGRDKEVAKGRHDPPESTAHLCTHDAIGTYPAYVCSMSLTSQPGLINLKANISMSGRRAWR

SEQ ID NO: 786221 - protein, 122 aa, Homo sapiens
SIRGSPVVCHAEDTADLEAQKSLVYTTCLEELDLVPLTSHEDHDFFQHVEMHLRSEHPPLCGRDHLSFRSYYFPVTNVIDGDLCEQFNSMEPNKQRNVSEELDRTPPEVSKKLEDIRTRYAF

SEQ ID NO: 786222 - protein, 76 aa, Homo sapiens
VLSEVTGAVPSCEARRQRVVASVHQTQKMKNKNTKMVSVGEFFTGELEYSGGRLTFCFGSRDATVGKYFLPGVHCI

SEQ ID NO: 786223 - protein, 102 aa, Homo sapiens
CRFLKKFLLERGSERYSPQFGQKAVSHNQQNQLHGKSGELGSLGCGAGAANVLHGPWLPGHCLKICWGLWVTEEGTGPIGGPLSAHPGPLRTVQPRVSFAPA

SEQ ID NO: 786224 - protein, 159 aa, Homo sapiens
MVQLLWKTVRQLLKKLNINLACRPVVPPLRIYPRATKTRSIHMRLHRRPQQHPHEDDADVHSSIHTRLRRRPQQHPHEDDADVHSSIHTRLRRRPQQHPHETTQTSTAASTRGRRRRPQQHPHETTQTSIAASTRGRRRRPQQHRGRRRRPQQHPHETT

SEQ ID NO: 786225 - protein, 66 aa, Homo sapiens
HIPPATSWFRKSGPSGKALPLPATSMSCPSLGPTSSTEPFLVTSAHSKVPSLDSLALTCTLLSRHQ

SEQ ID NO: 786226 - protein, 112 aa, Homo sapiens
ASQPRSSDDHRGHSLLLSTTRRPQSGALQHLASLPQRQESPSLVPKHTDSPPCPPSASSHETSPLTSWSWLPASLWLSFFSCPARKLGGLKPLLANSLPAPWPPGPSSPAGS

SEQ ID NO: 786227 - protein, 101 aa, Homo sapiens
SYVLSKLCKSNLNGKRLYFNKCELSEFAYQIKPNEFWTCFKFQARGPNSLHFTWRLARLSNKVLSRRQEILEKSNNVMTMFITFTVKPGCTSAQHQTLVRP

SEQ ID NO: 786228 - protein, 67 aa, Homo sapiens
GSTSERSSNTGREVPLPASVPDHTAPPLAGGRALAVSRTVWKAQKESSFEILLVIDTLLATLAIFRA

SEQ ID NO: 786229 - protein, 101 aa, Homo sapiens
MTYKSVDFCTFLKNGNTRFLDLTLPIRLTTLVLGVTTPIERPQSPPLPAARLPVFTQHDISMALETFEFATPGQASILYGAFTCYSYCFQECPYTVCVCSK

SEQ ID NO: 786230 - protein, 109 aa, Homo sapiens
PGRIDRIIYVPLPDAATRREIFKLQFHSMPVSNEVDLDELILQTDAYSGAEIVAVCREAALLALEEDIQANLIMKRHFTQALSTVTPRIPESLRRFYEDYQEKSGLHTL

SEQ ID NO: 786231 - protein, 91 aa, Homo sapiens
DNNIRESDGKHSYHWLISSKEATGVGSNHCNWITSNYPLGGAAMLQEVGQACGTHPCKTINTPGRLKCEVVKLGVNKQNKLTDSCSCWLRS

SEQ ID NO: 786232 - protein, 46 aa, Homo sapiens
IPLPPQLLDNDYTRSTPILHTAPRGIIRKCKSDHVISWLSTLQHTK

SEQ ID NO: 786233 - protein, 152 aa, Homo sapiens
RSPRARIRLPVGPVGSASLSHLRIWQSLAFAALRCRHMPSGNITPPHLRMQPSGPLWASVPACAPWKEHTFPNYLAASGLLRASASPFAGWRITARPHRSQWLVSGPRSPHLLSRQEHPFSRPLPRWVATAEQAATAQWKEDKPLWALGRRR

SEQ ID NO: 786234 - protein, 206 aa, Homo sapiens
DYKYKEAYEKQKGHHIGAQSIEDDPKIMCAIHAGKIQSEREYKKEFQKWKTKFSSPVDMLSILLAKKCQTLVTDIDYRNYLHEWTCMPDQNDIIQAKKAYDLQSDSVYKADLEWLRGIGWMPEGSVEMNRVKVAQDLVNERLYRTRPEALSFTSIVDTPEVVLAKANSLQISEKLYQEAWNKDKSNITIPSDTPEMLQAHINALQI

SEQ ID NO: 786235 - protein, 50 aa, Homo sapiens
PLRPSSPPALEGRSVVCAPRYTSARFLAAMAWSRQNKTAIKTSQEVMTAS

SEQ ID NO: 786236 - protein, 35 aa, Homo sapiens
ITRLLLLRLGEQLSHLPTIMQQQSGNALILTQVSL

SEQ ID NO: 786237 - protein, 483 aa, Homo sapiens
RPRAQLRRAHLVPIPALAMTLAASSQRSQIIRSKFRSVLQLRIHRRNQEQNPVQAPISQQSSLAPWPALRHPGAPLSTQPCSSRPGLLPAGLSGSFTVSPVSDPDPWISASDPPLAPALPSGTAPFLFSPGVLLPEPEYCPPWRSPKKESPKISQRWRESKPRGNLTYHQYMPPEPRQGSRADPQAEGSALGPPGPSLWEGTDSQQPHPRMKPSPLTPCPPGVPSPSPPPHKLELQTLKLEELTVSELRQQLRLRGLPVSGTKSMLLERMRGGAPPRERPKPRREDSPAGAPWPRLKPKALAAARRQGSVKPSAASHRPPLPRAADTPGTAPAPTPTPAPAAAPALTPSSGPGSAALTLEEELQEAIRRAQLLPNRGIDDILEDQVEPDDPLPPIPLDFPGSFDVLSPSPDSEGLSSVFSSSLPSPTNSSSPSPRDPTDSLDWLEALSGGPPLGSGPPPPSIFSADLSDSSSSRLWDLLEDPW

SEQ ID NO: 786238 - protein, 250 aa, Homo sapiens
RPRAQLRRAHLVPIPALAMTLAASSQRSQIIRSKFRSVLQLRIHRRNQEQNPVQAPISQQSSLAPWPALRHPGAPLSTQPCSSRPGLLPAGLSGSFTVSPVSDPDPWISASDPPLAPALPSGTAPFLFSPGVLLPEPEYCPPWRSPKKESPKISQRWRESKPRGNLTYHQYMPPEPRQGSRADPQAEGSALGPPGPSLWEGTDSQQPHPRYDTHFCSPGTQKFRSQHPPPSNLESKIRGLGPPTLSSPRV

SEQ ID NO: 786239 - protein, 102 aa, Homo sapiens
TCFPPHLVWDQTSPICCSCTKALLNLLNSGILCQAARCRSNHSLCSGPNTPHQAALLPDAILTRVSLRYPDLVPLGSTHLVRMSPCSSPPNNYRTYGGKDER

SEQ ID NO: 786240 - protein, 219 aa, Homo sapiens
RGSRGSRHLLHGLGLQVLEGPWEDVGTPQKTRTNSVSLSKMQDAVLSWEHLLELKNNHCEQLTVNIKQMENMVGVLQKELCEAKETQLQLEHEKGQWEQERYSLRMTLKEEEKGRNADILPKKDSEQLKRKEKECGKEVETTTQTDSEITGHRIEDIRKEFGSGCAEAKRYPQQLSEEQNARILQDEILTSKHKEVEGAQKQMNSEISQSHGVNVRYRL

SEQ ID NO: 786241 - protein, 114 aa, Homo sapiens
MTLKEEEKGRNADILPKKDSEQLKRKEKECGKEVETTTQTDSEITGHRIEDIRKEFGSGCAEAKRYPQQLSEEQNARILQDEILTSKHKEVEGAQKQMNSEISQSHGVNVRYRL

SEQ ID NO: 786242 - protein, 102 aa, Homo sapiens
PVPQRHEVLPPHPMGQPSISYGFQFTNCRELRGQSFRYSECPARPSVWDNSVRPERFINLEKGIRSTATSNVPCAPCREHFIPGPGESTALKGLYPRHPGSH

SEQ ID NO: 786243 - protein, 48 aa, Homo sapiens
RKFKTSKMGHPSTATLLASSREGPTSNPSSETQSFSQHLPTTCTVLTG

SEQ ID NO: 786244 - protein, 109 aa, Homo sapiens
CSVAHASLSRALPRPGWDTLTLRTAVQEKLSMYSLMAGSGSCHCCSESGVEPQAALLLRPMPVFPILFPTHNCSLTFPTCFSQNKAYFLPSALTPTPHCLSWEEGFRES

SEQ ID NO: 786245 - protein, 41 aa, Homo sapiens
LSTLHLKFISLVAEERQNPSLISSALSLSPHHDVFPDQENN

SEQ ID NO: 786246 - protein, 38 aa, Homo sapiens
MGPGSVLHTGETGLANRTDGSLHSCGSSRAGQSERMRV

SEQ ID NO: 786247 - protein, 119 aa, Homo sapiens
MEVKACTILWKSKSARMCPKWTQVVPGTSRVPDQSTQSESLCLRLWGQKGQVDLVPEGNHVALTYVTSIEETCYLYCSGSPGSFAMLRPFLGPGQSAISSAHGNFMPQSTRSRTYQTSL

SEQ ID NO: 786248 - protein, 70 aa, Homo sapiens
DQDLPDAPGPPGERVVTFCDQFGKRLGGPATGQCGNPGFEFPPRRCFRTESPLNALPQVPWALVSPSVKQ

SEQ ID NO: 786249 - protein, 137 aa, Homo sapiens [sequence omitted]

SEQ ID NO: 786250 - protein, 416 aa, Homo sapiens [sequence omitted]

SEQ ID NO: 786251 - protein, 334 aa, Homo sapiens
LASSFISKWLKSFLKKLMISYLFSVLTKPPLTPQILCTKSENARLVVQIDNAKLAADDFRTKYQTELSLRQLVESDINGLRRILDELTLCKSDLEAQVESLKEELLCLKSNHEQEVNTLRCQLGDRLNVEVDAAPTVDLNRVLNETRSQYEALVETNRREVEQWFTTQTEELNKQVVSSSEQLQSYQAEIIELRRTVNALEIELQAQHNLRDSLENTLTESEARYSSQLSQVQSLITNVESQLAEIRSDLERQNQEYQVLLDVRARLECEINTYRSLLESEDCNLPSNPCATTNACSKPIGPCLSNPCTSCVPPAPCTPCAPRPRCGPCNSFVR

SEQ ID NO: 786252 - protein, 334 aa, Homo sapiens; identical to SEQ ID NO: 786251

SEQ ID NO: 786253 - protein, 32 aa, Homo sapiens
MPPWQRVESVRGVLPLLAHRGRLGAMKGVEQK

SEQ ID NO: 786254 - protein, 44 aa, Homo sapiens
LLVPVYAGLLVPVYAVPVTPKLQVWVCTALLPGHWASKLPMLGL

SEQ ID NO: 786255 - protein, 61 aa, Homo sapiens
LLGTGPSRAGGGSFLPLQPHAHSWSSSRFAQPRAWALNQGLILGSSESFCPERSLPRRLER

SEQ ID NO: 786256 - protein, 83 aa, Homo sapiens
DPAGSTLRPPQTVTYTCCLRLLMRTSESWTLHDLSYMVDTVLLMHSLLEKPSVSKWLHFSEPPLPFIKSEAIPPRSKGAAGTQ

SEQ ID NO: 786257 - protein, 226 aa, Homo sapiens
EDLDNNPKIQQALNIQQVLLEGVLCKVQEFCREHHWITGIYEFLQSWGPQKLEDMRGGPIKNYVTLVSRLNVWQARVSSMPIELLTKGGLLLLSCHDVQAEMESKLNSIRKDILAHVQNECWNLSQQLMTELTDFMHIFRTINSDIHAIAQCTQKLNEANEQYVELEERMEYVRALHELIRNHFSLFSAENEALDISVRRQFGESPIPPCPPPPQPHLLHCPLLAP

SEQ ID NO: 786258 - protein, 128 aa, Homo sapiens
MTELTDFMHIFRTINSDIHAIAQCTQKLNEANEQYVELEERMEYVRALHELIRNHFSLFSAENEALDISFSPAMAQEKTEGWLTEAARMSTTLELHSPVLQHCMRILGEFRSYLPLLTKLGSLHPQSL

SEQ ID NO: 786259 - protein, 127 aa, Homo sapiens
NPSASKIRQSSHRHGASSQQVQPAKARSLLAVLSQGPLQPWPQLAVPDRTVEFTLWSRGLKPAPISAPRCGQKGNESRSHAWLSMEPPMSGREGDSLQRSQARAALGAQDAADHAPSTADMRGRFHT

SEQ ID NO: 786260 - protein, 211 aa, Homo sapiens
GLHYFHSKIDPHFYCKQKLRTQDYNAAEDADRCVLLPVPLCGVDGGLCVARQGILRQNEQRWRWIFRSVIYEPYLAMFGQVPSDVDGKPDLAQMETAWRRHLLPEPTPRAAPETALQKHARETESNITEYQYDFAHCTFTGNESKPLCVELDEHNLPRFPEWITIPLVCIYMLSTNILLVNLLVAMFGYTVGTVQENNDQVWKFQRYFLVQ

SEQ ID NO: 786261 - protein, 41 aa, Homo sapiens
MGMKYLTCLRKREKFGVAAVEDFRESTATYEDGDESWAQIN

SEQ ID NO: 786262 - protein, 38 aa, Homo sapiens
YVCTVSSSGHSTKLRISFQLPPSAITGMLTFSTTRTFL

SEQ ID NO: 786263 - protein, 137 aa, Homo sapiens [sequence omitted]

SEQ ID NO: 786264 - protein, 148 aa, Homo sapiens
ARDWRPMNASINESVNKGKLRTLCVSPKECFNFRHRGHAVGMWTGMVLPVNYDLAQSSLSVMFANTVFKVPAASLQNCPLSCGHGHDDILFMNSCMIYLLSIYLWEHEICLFSPRVSDPWGAMGSCVQDQTFSGSICFPHQEGTSFHT

SEQ ID NO: 786265 - protein, 101 aa, Homo sapiens
GLAVLPRPVRAISCVSGPCVVGVLTYNSGSIHCNLDVGAAHWDPTQSSLLSQGVVFTQRHSADRKRALLSRHRLCPKTEELGRVWWLTPVIPALWEAKAGG

SEQ ID NO: 786266 - protein, 110 aa, Homo sapiens
YGLPSLKSLEVVSFRQAGSRGLIDIIRTRSLSLNLPSALLLCVGLTVRWDSSTWWCPDSLKFIPSWFKPRRKTNAPFQLFKQKSHKCISLDQIGSHATPEPLTVAVIVVH

SEQ ID NO: 786267 - protein, 141 aa, Homo sapiens
YFKLLNGETFLTKHCPLWPQCPSFGSPLAKHFQRSISSVLSPEPAQLPNHEFKYPTIQPHSPFPTHLFKCLLETQTTNSQILPTWPSLSASAPTGLTLFFFKFSLDSIMTTASFRITSSPLSLSEQQTNRTIYPQACAHTA

SEQ ID NO: 786268 - protein, 85 aa, Homo sapiens
FEQEGAVAGRRQPAQGDGEWPQSRRGPGVLGSGISMFGNHLVSAQRGPSGTAHYGADQSTHPGPEALEVANVMYSNDGGLFPDRC

SEQ ID NO: 786269 - protein, 175 aa, Homo sapiens
AWAPRGFPAGSLSPSSARPGPPWQARGARGGQRRRPPPGTERNPRPALPRPARVGLSQAPQHGDPRAGLHAAEPLQVRLWPTDTACSRQRMWEPRGNPPDLSTEVTAAMTFPREFHLCVFPSRYLFEHLLQGPSSTSIGMFQKSTAVLSPDSSLHLILSQALGPSEWCHSKSETR

SEQ ID NO: 786270 - protein, 114 aa, Homo sapiens
LNVAGAQDAVAMTIIIIHVSRTDLPNSSNSETAGRMESVTGKRFKGEHEREAKILLHSAQETGNSQFLRIWGRQSRLPVIQVSRSTEIPTNSDSSSTLDLEFQEIKVHPVLLLK

SEQ ID NO: 786271 - protein, 117 aa, Homo sapiens
SWSETGWWVTCVFGCSLPDHLSCSRDGAKKISLTEHNFTCLFSSQTRLLKLHYYPLSALLYACERQRNYLFFKLRCLTRGKHLPFGECGAAPHFMQSHLGFLELSPALSPPAGTKHT

SEQ ID NO: 786272 - protein, 717 aa, Homo sapiens
MHGAARAPATSVSADCCIPAGLRLGPVPGTFKLGKYLSDRREPGPKKKVLTIQTSAHQVRMVRGELVDESGGSPLEWIGLIRAARNSQEQTLEAIADLPGGQIFYRALRDVQPGEELTVWYSNSLAQWFDIPTTATPTHDEKGEERYICWYCWRTFRYPNSLKAHLRFHCVFSGGGGGAFLHHEHAARQGAVPAADGLGLSPKPPAPDFAAPSQAGTLRPHPLGPPPVQACGAREGIKREASSAPSATSPTPGKWGQPKKGKEQLDRALDMSGAARGQGHFLGIVGGSSAGVGSLAFYPGVRSAFKPAGLARAAAAAHGDPYREESSSKQGAGLALGRLLGGGRACGRPGSGENSAAGGAGHHHHHHAHHHHHPKCLLAGDPPPPPPPGLPCSGALRGFPLLSVPPEEASAFKHVERAPPAAAALPGARYAQLPPAPGLPLERCALPPLDPGGLKAYPGGECSHLPAVMPAFTVYNGELLYGSPATTAYYPLKLHFGGLLKYPESISYFSGPAAAALSPAELGSLASIDREIAMHNQQLSEMAAGKGRGRLDSGTLPPAVAAAGGTGGGGSGGSGAGKPKTGHLCLYCGKLYSRKYGLKIHMRTHTGYKPLKCKVCLRPFGDPSNLNKHIRLHAEGNTPYRCEFCGKVLVRRRDLERHVKSRHPGQSLLAKAGDGPGAEPGYPPEPGDPKSDDSDVDVCFTDDQSDPEVGGGGERDL

SEQ ID NO: 786273 - protein, 309 aa, Homo sapiens
MPMTQTTNQPPIANGVLEYLEKELRNLNLAQPLPPDLKGRFGHPCSMLSSLGSEVVERRIIHLPPLIRDLSSSRRTSDSLHQQWLTPIPSRPWDLREGRSHHHYPDFHQELQDRGPKSWALERRELDPSWSGRHRSSRLNGSPIHWSDRDSLSDVPSSSEARWRPSHPPFRSRCQERPRRPSPRESTQRHGRRRRHRSYSPPLPSGLSSWSSEEDKERQPQSWRAHRRGSHSPHWPEEKPPSYRSLDITPGKNSRKKGSVERRSEKDSLIVEGVWSFSHQAQHNFCGYFSAPVCHQHHLGFQLTWELQV

SEQ ID NO: 786274 - protein, 47 aa, Homo sapiens
QRPPCRGTGPEGRACSDLQCSGVSGSGFLAELCCCVTGLYVSTSLEG

SEQ ID NO: 786275 - protein, 71 aa, Homo sapiens
LSRKLTSRMGDENVRSFPPCLSPSRGFIMTLQEALLQGSAYLKPFSPAMLCALQFTKRFSPLLSFNFRKII

SEQ ID NO: 786276 - protein, 208 aa, Homo sapiens
WLVFSIRRQLWQNYNILSCTGVGIRFENYLGVELLGYVISVCLTLLEMAKLLSKVTVLHFQLQSMRVPNFPLSLQLSVGGSSQGNRQEKEIKGIQFGREEVKLSLFVDYNIVYLENTIVSAQNLLKLIGSFSSVSGNKISVQKSQAFLYTNNRQTESQTMSEPPFTIATKRIKYLGIQFTRDVKDFFRENYKPLLNEITEDTDKWKNI

SEQ ID NO: 786277 - protein, 51 aa, Homo sapiens
MSKAHPPELKKFMDKKLSLKLNGGRHVQGILRGFDPFMNLVIDECVEMATS

SEQ ID NO: 786278 - protein, 152 aa, Homo sapiens
GKFIALNAYKRKQERSKIDTLTSQLKELEKQEPTHSKASRRQEITKIRAELKEIDTKTLPKTNESRSWFFERINKIDRPLARLIKKKREKNQIDTIKNDKGDITTDPTTDAFTYQRPHLLIPSRFGLEFQHTPLAGTQRMVHNSRYLTMFLL

SEQ ID NO: 786279 - protein, 49 aa, Homo sapiens
MSTKIKLASKRGPNFVKELKTSPQEWLETHPGCGAGPAYDLIFVSATPL

SEQ ID NO: 786280 - protein, 142 aa, Homo sapiens
GSERWLQEGAGILSVGKDKVGRLHGEGEKDERRLIHITGTETSQVGTGSSLFLPYPRKPGLNGGCFCLPLRPSYRFPSRHCHLPWVTEARGSPLRKLGNARLLGKASQSQPVTAALSLGPSRGKRLGQESPEGSELALGQKA

SEQ ID NO: 786281 - protein, 35 aa, Homo sapiens
DSTGTHSLYTTYKDYELMFHVSTLLPYMPNNRQQV

SEQ ID NO: 786282 - protein, 77 aa, Homo sapiens
AAGEASGSLAPPEPAAARRLCPQASGARRLGPARQVPAWGTGAASVGGGLRTGRKLEKRCPLNLCVWLPRLALTPNG

SEQ ID NO: 786283 - protein, 77 aa, Homo sapiens; identical to SEQ ID NO: 786282

SEQ ID NO: 786284 - protein, 77 aa, Homo sapiens; identical to SEQ ID NO: 786282

SEQ ID NO: 786285 - protein, 77 aa, Homo sapiens; identical to SEQ ID NO: 786282

SEQ ID NO: 786286 - protein, 80 aa, Homo sapiens
MTRRGSPKKSAGDGRLDNQGARHRPTQTKSGHPPAGIKKRTKKKKTDTHTAHDRPHKKQTGRQKRGKQTELQDKPARLLT

SEQ ID NO: 786287 - protein, 105 aa, Homo sapiens
MEMLQGLLLLLTAEHGQGAHGAYNGKTSIRRNACQSPNSNGHTRDIAERNRQGNDTTKTQSNTDNESTKQDHETNRNHKHGKQRWQTKDGPLDEPPYPHGEKLNT

SEQ ID NO: 786288 - protein, 112 aa, Homo sapiens
QPLRQSEILSPKKKKKKATEANESAWEWSLWGIPVRVTQVMSLPKPWSLLPPAGLVNYHISVKCSNQFKLEVCLLKSDNKVVDNQAGTQGQLKVLGANLWWPYLMHEHHARR

SEQ ID NO: 786289 - protein, 193 aa, Homo sapiens
MSLPKPWSLLPPAGLVNYHISVKCSNQFKLEVCLLKSDNKVVDNQAGTQGQLKVLGANLWWPYLMHEHPAYLYSWEDGDCSHQSLGPLPACDLCDQLHLRSRQGGSVSQYDLCGLASTLGIRMQVDLERIHSLWAAQFENWCKTSQSHYSERVWSGNACRVSPGLVNYRISVKCSNQFKLEVVFEMQKTKPWR

SEQ ID NO: 786290 - protein, 84 aa, Homo sapiens
MRRNAQRPFMTQSRGAGCGQRPLHIHPQQTTACRPTRWATLHDTRDQSTTTPRRPRAPPNTRLHYSGPPRPPDTQLHQPTRPVA

SEQ ID NO: 786291 - protein, 135 aa, Homo sapiens
SLTTALKPARSGWWLLSSASMGLGGQRGQGAIRASPPPIHCASVLALGQGVGLGCGHRLPLSMVNGTPGYPECKQDQSPQPSWLCPGHLLLLALLSARIAGSPWKVPHMLLSPSCGMCHFLCLPLPNPYFFFWSA

SEQ ID NO: 786292 - protein, 110 aa, Homo sapiens
MFQLQTKALIKTLQPQEMNVQVPQEAGRLGWKRNESTRPSVNKFKILAPLGMDCQYSLPMKTMVDFHNFFSYNLRGCQWPTSVPLKSHVCFTRAKENDSLMRTRFALSEM

SEQ ID NO: 786293 - protein, 71 aa, Homo sapiens
TSNSINYYSINYYSINYYSINYYSINYYSINYYSINYYSINYYSINYYSINYYSINYGNLLDFQQHKLLVE

SEQ ID NO: 786294 - protein, 113 aa, Homo sapiens [sequence omitted]

SEQ ID NO: 786295 - protein, 72 aa, Homo sapiens
FLTVAVVLQIFKDALSWSSLLPPFLSEKTPPRDKCARRHGCLAFCTVWGNLCKFLYFCFSFPCEIKSKPKRP

SEQ ID NO: 786296 - protein, 89 aa, Homo sapiens
ALTLVSHLAEVWLAVSENVPFARTMLHSLMGRLQSRLSPRISATSKADIWRLAAVDPLMTLCTIHLLIQKLDENDKLPDFLPDLIYTLL

SEQ ID NO: 786297 - protein, 73 aa, Homo sapiens
VIRRVGVTTLLKESEGEARNDAPSMLPEISGCLDPQVAVDKSVELGSHGLKLLGSRDPPALQSLEIMGMSQHT

SEQ ID NO: 786298 - protein, 36 aa, Homo sapiens
QGKQYSIINLLGGIADVLPFSLTLASGEFGIIAPVC

SEQ ID NO: 786299 - protein, 81 aa, Homo sapiens
LQIYAAIKNDESCPCRDMDEMETIILSKLSQEQKTKHRIFSLIGGNGTMRSHGHSIPVLCGHVKNLNMNNEHEQYKKHNIE

SEQ ID NO: 786300 - protein, 361 aa, Homo sapiens
RGLLGVHARPAPPGPERSLPAARPRLVLSGTMMWGAGSPLAWLSAGSGNVNVSSVGPAEGPTGPAAPLPSPKAWDVVLCISGTLVSCENALVVAIIVGTPAFRAPMFLLVGSLAVADLLAGLGLVLHFAAVFCIGSAEMSLVLVGVLAMAFTASIGSLLAITVDRYLSLYNALTYYSETTVTRTYVMLALVWGGALGLGLLPVLAWNCLDGLTTCGVVYPLSKNHLVVLAIAFFMVFGIMLQLYAQICRIVCRHAQQIALQRHLLPASHYVATRKGIATLAVVLGAFAACWLPFTVYCLLGDAHSPPLYTYLTLLPATYNSMINPIIYAFRNQDVQKVLWAVCCCCSSSKIPFRSRSPSDV

SEQ ID NO: 786301 - protein, 76 aa, Homo sapiens
YPSTSPQVVSQTGVSRYSQESENSLRYKQFCGSLCRCKHHTSGVYWRVELKMIIVKQCQNLSETFASSKFEQLVCN

SEQ ID NO: 786302 - protein, 789 aa, Homo sapiens [sequence omitted]

SEQ ID NO: 786303 - protein, 104 aa, Homo sapiens
SPCVQQEEVDSTQEGRSHLIHPRTPEECSLQEAPGLIALGLNPCRSPRSSVSLPSLFIPLHPFLDLRTHSYHPPSLPLFSHFPSLLSHHLSSLCLLYSITPLQR

SEQ ID NO: 786304 - protein, 115 aa, Homo sapiens
CCVRYAMKRHKKALFVMFHRQCLASTHKPSLKLRAFVSNSKTPNDGAYLHRPLALCRGEGLGNPASHAHEDAPLILIDIESMLEDLSCVSDSTINSVCDLWCNPSFVAPHFSKSR

SEQ ID NO: 786305 - protein, 97 aa, Homo sapiens
LEDPISTTIQATLGSWYECITTLKRNQSFCPTVNLYKLWTVLREQTRVNASVEVATSTDAFTQDSRTSPQQANNVLGVVKYLPFCKVTFVVQLQSWC

SEQ ID NO: 786306 - protein, 163 aa, Homo sapiens
QEPAGDSESTGDWDHFEPLLSSLLRRMPELETLEIMKLVNCPETFASDMRCIMGESPAVEGYFVLAGMNSAGLSFGGGAGKYLAEWMVHGYPSENVWELDLKRFGALQSSRTFLRHRVMEVMPLMYDLKVPHWDFQTGRQLRTSPLYDRLDAQGARWMEKHGF

SEQ ID NO: 786307 - protein, 66 aa, Homo sapiens
GIDYNSINYYSINYYSINYYSINYYSINYDSINYYSINYYSINYYSINHGSPEGFHSLYCEYSIIY

SEQ ID NO: 786308 - protein, 102 aa, Homo sapiens
QWRHLGSPQPPPPGFKRFSCLSLLSSWDYRHVPQRLANFVFLVETGFLHVGQGGLELPTSDDPPTSASQSAGITGVSHHARRKVFKCLSNTLNFVIGLSTEN

SEQ ID NO: 786309 - protein, 38 aa, Homo sapiens
MVGMDAPNDPESRTSKQIKWQHRPPNSHATLKLETNSP

SEQ ID NO: 786310 - protein, 88 aa, Homo sapiens
HHHDPDLQPTFNVVVKSWWVDDGPRFQGKVAWSVSSLGTSEWESWAYRYVDLLQTVGTDQAAPDFCPDSPVLGALENKTLTRAKDDHD

SEQ ID NO: 786311 - protein, 123 aa, Homo sapiens
SSFPFVYLLLHVPKRNVNFHILKKTLEENLGNTIQHIGMGKDFMSKTPKAMATKAKIDKWDLIKLKSFCTAKETTITVNRQPTEWEKIFAIYSSDKGLISRIYNELQQKRKKQTTPSKSGQRT

SEQ ID NO: 786312 - protein, 115 aa, Homo sapiens
MDVDRREVGVQDYLQTLADVPRQAVGSFTEKIKHWIGCGKIKSSVLKVLSERDKWRCQVSNCMYQCETQKEGLPASFQLKKEYLFLKENFEVETCLHFLGYFSNKPTYFHNRVIR

SEQ ID NO: 786313 - protein, 56 aa, Homo sapiens
TKAARKSVPSTGGVKKPHRYRPGTVALREIRCYQKSTELLIRKLPFQRLVREIAQD

SEQ ID NO: 786314 - protein, 70 aa, Homo sapiens
AFSLHFLPKSTRNGHSWLPSGLLGRLNSLTELSDSLKNMLRGPDFMTKFIYPGSEKTPNRVFFFPALCEV

SEQ ID NO: 786315 - protein, 76 aa, Homo sapiens
PYKIPGPLQCMQAPRYSSGRRKPSQTFPVMKLLTTHLKPTEIPQYRHRCPKYNAPNMLRAPTYVSLDTTTKSIETF

SEQ ID NO: 786316 - protein, 90 aa, Homo sapiens
MRPASPAALRAASPMHTVLAAMCITPHDGTQALGRAQAFGGRADLLLPCLCLISPSETNDTARFPRMVPSLSVASADRGPPSWAAGIGAG

SEQ ID NO: 786317 - protein, 43 aa, Homo sapiens
MEPPTNHMHWLPRWLHSGDHVSVLSSFTHWFTTITLEFWTKEV

SEQ ID NO: 786318 - protein, 305 aa, Homo sapiens
RARKRGGAALGMAEPDLECEQIRLKCIPGTMPECEGVEKLNRIGEGTYGIVYRARDTQTDEIVALKKVRMDKEKDGIPISSLREITLLLRLRHPNIVELKEVVVGNHLESIFLVMGYCEQDLASLLENMPTPFSEAQVKCIVLQVLRGLQYLHRNFIIHRDLKVSNLLMTDKGCVKTADFGLARAYGVPVKPMTPKVVTLWYRAPELLLGTTTQTTSIDMWAVGCILAELLAHRPLLPGTSEIHQIDLIVQLLGTPSENIWPGITKAATGRPVQPPGSSLQQPEGTSPMGGGSRAFALAGTIWLM

SEQ ID NO: 786319 - protein, 294 aa, Homo sapiens
RARKRGGAALGMAEPDLECEQIRLKCIRKEGFFTVPPGTQDRARDTQTDEIVALKKVRMDKEKDGIPISSLREITLLLRLRHPNIVELKEVVVGNHLESIFLVMGYCEQDLASLLENMPTPFSEAQVKCIVLQVLRGLQYLHRNFIIHRDLKVSNLLMTDKGCVKTADFGLARAYGVPVKPMTPKVVTLWYRAPELLLGTTTQTTSIDMWAVGCILAELLAHRPLLPGTSEIHQIDLIVQLLGTPSENIWPGITKAATGRPVQPPGSSLQQPEGTSPMGGGSRAFALAGTIWLM

SEQ ID NO: 786320 - protein, 121 aa, Homo sapiens
LSTALALVGKPDILLLDEPSSGMDPCSKRYLWQTIMKEVREGCAAVLTSHSMEECEALCTRLAIMVNGSFRFTFHQLSKHHPLPARKTLFPHAPSRCLRPSSGLTDSVSQCPRPGEWNTLT

SEQ ID NO: 786321 - protein, 164 aa, Homo sapiens
LSTALALVGKPDILLLDEPSSGMDPCSKRYLWQTIMKEVREGCAAVLTSHSMEECEALCTRLAIMVNGSFKCLGSPQHIKNRFGDGYTVKVWLCKEANQHCTVSDHLKLYFPGIQFKGQHLNLLEYHVPKRWGCLADLFKVIENNKTFLNIKHYSINQTTLEQV

SEQ ID NO: 786322 - protein, 79 aa, Homo sapiens
AATGNALLQFQGGVHQVVDVGCILQVLREVLVDLHGLHSRLLRVAYRTTGWSSRLSSWPCQAGGDSSAIRRLRRDAMLI

SEQ ID NO: 786323 - protein, 49 aa, Homo sapiens
PQRRQQMAGGHPSLQKPLCSGPACPDLPPCPGRGPPGSRPPCEAHLLAT

SEQ ID NO: 786324 - protein, 236 aa, Homo sapiens
EWLKTHLKDSRLEVINQQDSNFITALELAVRFGKTLIIQEMDGVEPVLYPLLRRDLVAQGPRYVVQIGDKIIDYNEEFRLFLSTRNPNPFIPPDAASIVTEVNFTTTRSGLRGQLLALTIQHEKPDLEEQKTKLLQQEEDKKIQLAKLEESLLETLATSQGNILENKDLIESLNQTKASSALIQESLKESYKLQISLDQERDAYLPLAESASKMYFIISDLSKINNMYRFSLAAFL

SEQ ID NO: 786325 - protein, 221 aa, Homo sapiens
  misc_feature (176)..(176): Xaa can be any naturally occurring amino acid
  misc_feature (186)..(186): Xaa can be any naturally occurring amino acid
  misc_feature (194)..(194): Xaa can be any naturally occurring amino acid
  misc_feature (198)..(199): Xaa can be any naturally occurring amino acid
EWLKTHLKDSRLEVINQQDSNFITALELAVRFGKTLIIQEMDGVEPVLYPLLRRDLVAQGPRYVVQIGDKIIDYNEEFRLFLSTRNPNPFIPPDAASIVTEVNFTTTRSGLRGQLLALTIQHEKPDLEEQKTKLLQQEEDKKIQLAKLEESLLETLATSQGNILENKDLIESLIDXIMNGCYLPCXSARHVRHXLIVXXIHDPLVGCFLTFHESTTTRSEI

SEQ ID NO: 786326 - protein, 114 aa, Homo sapiens
AGVSHRTQPILNNFLAHSYIFLCQECSSSPSANLGCFYLSFRTQSKWHPQRSLALYSISWQLVFLFSSTYFSLQLCIYLCDYLSHALIPSALLLLRTRSDSCSSVAAPYLVTGT

SEQ ID NO: 786327 - protein, 327 aa, Homo sapiens
VELVASTKNTFQSQEKLIKEMDYLWKINQETRNNLNQETSKFCSLVDYVSLRKRIITIQYQKMHLFLNEEEQLHLQALEREAKELFQQLQDSQVRMTQHLERMKDMYRELWETCHMPDVELLQVRREVFARTDLAQMQKPQPVNPELTSWCITGVLDMLNNFRVDNALSTEMTPCYISLSEDVRYVIFGDDHLSAPTDPQGVDSFAVWGAQAFTSGKHYWEVDVTLSSNWILGVCRDSRTADTNIIIDSDERFFLISSKRSNHYSLSTNSPPLIQYVQRPLGRVGVFLDYDNGSVSFFDVSKGSLIYGFPPSSFSSPLRPFFCFGCT

SEQ ID NO: 786328 - protein, 53 aa, Homo sapiens
MGHRLKSGTPKDGGGRQGSEKSCFQWCAGCFVSQAHKRGTSFNRPFHDTVGEL

SEQ ID NO: 786329 - protein, 77 aa, Homo sapiens
PKLLPSMALPSPKRVMLVCTQSAGKGKSGGSCRGAFGTKPGMLPTSVHSPQAGVQHQIGASVTREKLGAKSGNFQEH

SEQ ID NO: 786330 - protein, 121 aa, Homo sapiens [sequence omitted]

SEQ ID NO: 786331 - protein, 84 aa, Homo sapiens
FLWEELTRCVLCAKDHSKQRLSKHEECLCTGQLHVPQDHLGCTISLSTAWHSGIPVCATRAWLVKSLSPTPPGAPRGKGFTLFI

SEQ ID NO: 786332 - protein, 106 aa, Homo sapiens
SQAFQGPWRPARAVDFSQEPLTHAHLQRPPGVKKTAFPPVSSRAGCIQEDSAAGEWFGFVSDHSKKSSRTTSARLAVQLSPLEPLGNTASVSSPQSSCVRLPDGGA

SEQ ID NO: 786333 - protein, 132 aa, Homo sapiens
MTKPQAESGEAARHPIFRPARRVFGIKMTTLQPRIKAPQELTVLQERSRPTSKKMAVCFHGSSLRSEATPRYSLEEEARNEEMATSPVMVASLNKLPFWHPSPYARGGGTVLYPAWALAPALSSLLLCLPCF

SEQ ID NO: 786334 - protein, 81 aa, Homo sapiens
LFEAVGQSSRSMSEGEVHQTGVNQKQDEGHRDELTAFTKPWQLVRNGPRDQAWRNSTEGVCVCVCVCMCICVCVYICKNQP

SEQ ID NO: 786335 - protein, 37 aa, Homo sapiens
SQPLQTKLMTLNGLFRPIPYVTAASADEATPHNSLHR

SEQ ID NO: 786336 - protein, 105 aa, Homo sapiens
WEAEHEPYLGSGLQECMYSWSSTAAWVGMLPSSRPGHSGESRPLGRASGNRTLRTLHGMSVMAGSLLLYAKRGPVLAVGQLSSWPVVCLRLLCLALSSSSVGRFS

SEQ ID NO: 786337 - protein, 135 aa, Homo sapiens
MKRVTGCILSNVNTPSMTPVIGQPQNETPQPIYQNSNVATKPTAAKILGKVGESLSRICCVRPPVERFTFVDENANLGTVMRYEEIGEWDCESAENGDIWSSLPSRQATWGAERLENPGTVLQQGLLSEEGSFPG

SEQ ID NO: 786338 - protein, 260 aa, Homo sapiens
HNETQKERQPLDHREGPICTMTETTKTHVILLACGSFNPITKGHIQMFERARDYLHKTGRFIVIGGIVSPVHDSYGKQGLVSSRHRLIMCQLAVQNSDWIRVDPWECYQDTWQTTCSVLEHHRDLMKRVTGCILSNVNTPSMTPVIGQPQNETPQPIYQNSNVATKPTAAKILGKVGESLSRICCVRPPVERFTFVDENANLGTVMRYEEIGEWDCESAENGDIWSSLPSRQATWGAERLENPGTVLQQGLLSEEGSFPG

SEQ ID NO: 786339 - protein, 235 aa, Homo sapiens
MEIQELEEIQACQGLWEVFVTLSERARDYLHKTGRFIVIGGIVSPVHDSYGKQGLVSSRHRLIMCQLAVQNSDWIRVDPWECYQDTWQTTCSVLEHHRDLMKRVTGCILSNVNTPSMTPVIGQPQNETPQPIYQNSNVATKPTAAKILGKVGESLSRICCVRPPVERFTFVDENANLGTVMRYEEIGEWDCESAENGDIWSSLPSRQATWGAERLENPGTVLQQGLLSEEGSFPG

SEQ ID NO: 786340 - protein, 188 aa, Homo sapiens
MRVLHQGKPGAGHSGCGSPHNKKGPGETRWVSENNLKRRIRERHMQGGPPQRGVPRGDGQILKINAPARGKKDRTKDDEDDARGQRRRKREGGEGGTRWRERSGEATSNDRKETAEDDRRTSRDGDRDGGGGRESAKREESRAGGERKGRAERRRRTGREAQEQGELRNRAEEQKSPEREGRRREKTA

SEQ ID NO: 786341 - protein, 35 aa, Homo sapiens
MSLPLSATTDLPRHHVPFQWGHRHNLSIKKNKYIL

SEQ ID NO: 786342 - protein, 66 aa, Homo sapiens
SPSILPILSFPEPVPLNACYKMPKTIHGHYGVHKYVTQILDTPFRRENLIPLSWSVAGLNYFASNE

SEQ ID NO: 786343 - protein, 65 aa, Homo sapiens
MALWTRFLSTETRILAEEDEQCTMIEQGEQCARESTQGMTLAYDQDHVEDTAHPVVQHGSGANSN

SEQ ID NO: 786344 - protein, 51 aa, Homo sapiens
MCSDSETSSAGSSREVGHQARLSWLQRKAPRNPAAEKMRLHGELDVNFNPQ

SEQ ID NO: 786345 - protein, 49 aa, Homo sapiens
QGTAYFLPDFLIPPVAKGPFPAAFAFSSSSFFCSSFCFCLKALSSSSIS

SEQ ID NO: 786346 - protein, 132 aa, Homo sapiens
DSLILPHTPPRHPAALKRLFFLSQPHAVAIPGSCGRRLLCAWVCPPGRLQPLVYKRCRWLKHKRVTSGSVFKSLFYPLHQLCLLGWTLENRFEPNGSLEKWRSSSGLSDYCNAALITKNLDLATQKKKKKRK

SEQ ID NO: 786347 - protein, 161 aa, Homo sapiens
PAALGAEEAVGEREERVPPWQCREFQLESASPLLHCHRQWSPCGKGQKEAEAQRGTMDLCVIDLPMATRSGGTLVLVGLGSEMTTVPLLHAAIREVDIKGVFRYCNTWPVAISMLASKSVNVKPLVTHRFPLEKALEAFETFKKGLGLKIMLKCDPSDQNL

SEQ ID NO: 786348 - protein, 122 aa, Homo sapiens [sequence omitted]

SEQ ID NO: 786349 - protein, 552 aa, Homo sapiens
SGILGGSVTLPLNISVDTEIENVIWIGPKNALAFARPKENVTIMVKSYLGRLDITKWSYSLCISNLTLNDAGSYKAQINQRNFEVTTEEEFTLFVYEQLQEPQVTMKSVKVSENFSCNITLMCSVKGAEKSVLYSWTPREPHASESNGGSILTVSRTPCDPDLPYICTAQNPVSQRSSLPVHVGQFCTDPGASRGGTTGETVVGVLGEPVTLPLALPACRDTEKVVWLFNTSIISKEREEAATADPLIKSRDPYKNRVWVSSQDCSLKISQLKIEDAGPYHAYVCSEASSVTSMTHVTLLIYRPERNTKLWIGLFLMVCLLCVGIFSWCIWKRKGRCSVPAFCSSQAEAPADTPGPMRSWTLPSDSPSVEDMRYLTRSLRRALDMTQPLRAKQTMIPSLHMSRKLSLWLERTPCMHKCSTYRERPQFLRRKRAQPQSTAPYGNLRWCHHHNRMILRFLKVLPMKISPERKSSCCLSPGTVGLESQLDLMGPGAHRQKHLRISFSASEMPGCGPSPSFSPLRTPKPINSSDTGSFLEPMGFRCLCPICHLAHL

SEQ ID NO: 786350 - protein, 642 aa, Homo sapiens
SGILGGSVTLPLNISVDTEIENVIWIGPKNALAFARPKENVTIMVKSYLGRLDITKWSYSLCISNLTLNDAGSYKAQINQRNFEVTTEEEFTLFVYEQLQEPQVTMKSVKVSENFSCNITLMCSVKGAEKSVLYSWTPREPHASESNGGSILTVSRTPCDPDLPYICTAQNPVSQRSSLPVHVGQFCTDPGASRGGTTGETVVGVLGEPVTLPLALPACRDTEKVVWLFNTSIISKEREEAATADPLIKSRDPYKNRVWVSSQDCSLKISQLKIEDAGPYHAYVCSEASSVTSMTHVTLLIYRRLRKPKITWSLRHSEDGICRISLTCSVEDGGNTVMYTWTPLQKEAVVSQGESHLNVSGEAVKITPYSHAHAATLSAGVPSSFLSENICSGPERNTKLWIGLFLMVCLLCVGIFSWCIWKRKGRCSVPAFCSSQAEAPADTPGPMRSWTLPSDSPSVEDMRYLTRSLRRALDMTQPLRAKQTMIPSLHMSRKLSLWLERTPCMHKCSTYRERPQFLRRKRAQPQSTAPYGNLRWCHHHNRMILRFLKVLPMKISPERKSSCCLSPGTVGLESQLDLMGPGAHRQKHLRISFSASEMPGCGPSPSFSPLRTPKPINSSDTGSFLEPMGFRCLCPICHLAHL

SEQ ID NO: 786351 - protein, 115 aa, Homo sapiens
MAPAPHPPRDRELFPTAAKMEKMQPAHGPAHMVLGALPACHLRATLDSSSTSLHVYCSHPGQPFVTLPLPAALALFLPTCHFTAQLELPLSWQVLPPVLSACLAFLAPLFPCIEP

SEQ ID NO: 786352 - protein, 162 aa, Homo sapiens
CVVSVAGPGAAVGRVAPRARGPGLLHCSALRQVAGIFLGGGHCCPFELCPFCTSSTPRPALTQVCGPPCAALRSAARGRWWCWSSVLASTLRLPLSEGCCSATGTGGRAASLGVSLPTWSRRTLSRDAPTLGLRTLGPLSRQARGTAGRSRRAQPNPKTAVI

SEQ ID NO: 786353 - protein, 686 aa, Homo sapiens
MQLGEQLLVSSVNLPGAHFYPLESARGGSGGSAGHLPSAAPSPQKLDLDKASKKFSGSLSCEAVSGEPAAASAGAPAAMLSDTDAGDAFASAAAVAKPGPPDGRKGSPCGEEELPSAAAAAAAAAAAAAATARYSMDSLSSVRYYLQSPGPQGSELAAPCSLFPYQAAAGAPHGPVYPAPNGARYPYGSMLPPGGFPAAACPPGRAQFGPGAGAGSGAGGINGGGGGPGTYQYSQGAPLYGPYPGAAAAGSCGGLGGLGVPSSGFRAHVYLCNRPLWLKFHRHQTEMIITKQGRRMFPFLSFNINGLNPTAHYNVFVEVVLADPNHWRFQGGKWVTCGKADNNMQGNKMYVHPESPNTGSHWMRQEISFGKLKLTNNKGANNNNTQMIVLQSLHKYQPRLHIVEVTEDGVEDLNEPSKTQTFTFSETQFIAVTAYQNTDITQLKIDHNPFAKGFRDNYDSSHQIVPGGRYGVQSFFPEPFVNTLPQARYYNGERTVPQTNGLLSPQQSEEVANPPQRWLVTPVQQPGTNKLDISSYESEYTSSTLLPYGIKSLPLQTSHALGYYPDPTFPAMAGWGGRGSYQRKMAAGLPWTSRTSPTVFSEDQLSKEKVKEEIGSSWIETPPSIKSLDSNDSGVYTSACKRRRLSPSNSSNENSPSIKCEDINAEEYSKDTSKGMGGYYAFYTTP

SEQ ID NO: 786354 - protein, 705 aa, Homo sapiens
MQLGEQLLVSSVNLPGAHFYPLESARGGSGGSAGHLPSAAPSPQKLDLDKASKKFSGSLSCEAVSGEPAAASAGAPAAMLSDTDAGDAFASAAAVAKPGPPDGRKGSPCGEEELPSAAAAAAAAAAAAAATARYSMDSLSSVRYYLQSPGPQGSELAAPCSLFPYQAAAGAPHGPVYPAPNGARYPYGSMLPPGGFPAAACPPGRAQFGPGAGAGSGAGGINGGGGGPGTYQYSQGAPLYGPYPGAAAAGSCGGLGGLGVPSSGFRAHVYLCNRPLWLKFHRHQTEMIITKQGRRMFPFLSFNINGLNPTAHYNVFVEVVLADPNHWRFQGGKWVTCGKADNNMQGNKMYVHPESPNTGSHWMRQEISFGKLKLTNNKGANNNNTQMIVLQSLHKYQPRLHIVEVTEDGVEDLNEPSKTQTFTFSETQFIAVTAYQNTDITQLKIDHNPFAKGFRDNYDSMYTASENDRLTPSPTDSPRSHQIVPGGRYGVQSFFPEPFVNTLPQARYYNGERTVPQTNGLLSPQQSEEVANPPQRWLVTPVQQPGTNKLDISSYESEYTSSTLLPYGIKSLPLQTSHALGYYPDPTFPAMAGWGGRGSYQRKMAAGLPWTSRTSPTVFSEDQLSKEKVKEEIGSSWIETPPSIKSLDSNDSGVYTSACKRRRLSPSNSSNENSPSIKCEDINAEEYSKDTSKGMGGYYAFYTTP

SEQ ID NO: 786355 - protein, 36 aa, Homo sapiens
MHEPPSLALAFLSLKGRAGQARRLRQAEAGEWREPG

SEQ ID NO: 786356 - protein, 81 aa, Homo sapiens
VTLQLLGSQLCLVVTIVVQTENIFIIAECSVGQCYPKVLVSLSSRPHGPRSMHVCLYPSMLRSSMCVALRSARGKGPCLPP

SEQ ID NO: 786357 - protein, 209 aa, Homo sapiens
MELVTFRDVAIEFSPEEWKCLDPAQQNLYRDVMLENYRNLVSLGFVISNPDLVTCLEQIKEPCNLKIHETAAKPPAICSPFSQDLSPVQGIEDSFHKLILKRYEKAVDTENLQLTNNGRKRVNDVSGAEQDVHYWSLPVLVNYPGANTISLVIHVLQFPSTFSNSNKHNDNDILDEKPFYTVQNCGQTRLTWSHLNFNHTANSMPGGRN

SEQ ID NO: 786358 - protein, 138 aa, Homo sapiens [sequence omitted]

SEQ ID NO: 786359 - protein, 355 aa, Homo sapiens
MGNLFMLWAALGICCAAFSASAWSVNNFLITGPKAYLTYTTSVALGAQSGIEECKFQFAWERWNCPENALQLSTHNRLRSATRETSFIHAISSAGVMYIITKNCSMGDFENCGCDGSNNGKTGGHGWIWGGCSDNVEFGERISKLFVDSLEKGKDARALMNLHNNRAGRLAVRATMKRTCKCHGISGSCSIQTCWLQLAEFREMGDYLKAKYDQALKIEMDKRQLRAGNSAEGHWVPAEAFLPSAEAELIFLEESPDYCTCNSSLGIYGTEGRECLQNSHNTSRWERRSCGRLCTECGLQVEERKTEVISSCNCKFQWCCTVKCDQCRHVVSKYYCARSPGSAQSLGRVWFGVYI

SEQ ID NO: 786360 - protein, 351 aa, Homo sapiens
MGNLFMLWAALGICCAAFSASAWSVNNFLITGPKAYLTYTTSVALGAQSGIEECKFQFAWERWNCPENALQLSTHNRLRSATRETSFIHAISSAGVMYIITKNCSMGDFENCGCDGSNNGKTGGHGWIWGGCSDNVEFGERISKLFVDSLEKGKDARALMNLHNNRAGRLAVRATMKRTCKCHGISGSCSIQTCWLQLAEFREMGDYLKAKYDQALKIEMDKRQLRAGNSAEGHWVPAEAFLPSAEAELIFLEESPDYCTCNSSLGIYGTEGRECLQNSHNTSRWERRSCGRLCTECGLQVEERKTEVISSCNCKFQWCCTVKCDQCRHVVSKYYCARSPGSAQSLGKGSA

SEQ ID NO: 786361 - protein, 104 aa, Homo sapiens
MCYRLLRVYRFLGTDMGGWLGHRWAIDFCPLSLSLFICKTGLVALGGLHVAPCKTSLVALAGLHVVLCLAHGRHSGNKGRGVHAALTTGGSQDCFPALLSLDEK

SEQ ID NO: 786362 - protein, 154 aa, Homo sapiens
LWDFGWLTHTSTQAIRSQNDPILRVKGGNSHRGFSQPLFPGKINPTEREAGPEALQRGPIYRERAQNQGWASQKNNSKIVAETATVMNAGGKQEAGRLGPVGFRLEDWGAAGKERSTEGTVEDNWTGMPQSNCGMLDWDLGEERATCRDASLIL

SEQ ID NO: 786363 - protein, 293 aa, Homo sapiens
PPAPKKKMDLEQIWQLLMTADRKDYEKICLKYGIVDYRGMLRRLQEMKKEQEDKMRQYINTISSLRHIRVTKDGNAKFDLELDLKDSQSKIYLYKDGEMIPYGFNNQTKHCLRRLGKRYEFQIQDLRPEDSGIYQVKVEDAVVFSTELEASAIPPRVVVPLAETHCEEQGDAVFECTLSSPCPSAAWHFRHRLLHPSDKYEVYVSPDGLTHRLVVRGARFSDMGPYSLGTGLYTSSAWLVVEAGKDKELQSTSADHKLQRQGAQASGAEESGSIESQGEKSRALRPEPSPAHT

SEQ ID NO: 786364 - protein, 487 aa, Homo sapiens
PPAPKKKMDLEQIWQLLMTADRKDYEKICLKYGIVDYRGMLRRLQEMKKEQEDKMRQYINTISSLRHIRVTKDGNAKFDLELDLKDSQSKIYLYKDGEMIPYGFNNQTKHCLRRLGKRYEFQIQDLRPEDSGIYQVKVEDAVVFSTELEASAIPPRVVVPLAETHCEEQGDAVFECTLSSPCPSAAWHFRHRLLHPSDKYEVYVSPDGLTHRLVVRGARFSDMGPYSLGTGLYTSSAWLVVEAGKDKELQSTSADHKLQRQGAQASGAEESGSIESQGEKSREQGPRGGSLEGAGPASGLQHIASPDRDGLGRHGYSLMGDKGTADSAWGPGQEGEGFPVAEGSRATLPRENQSHREGGWARSLAERPHLQGESSESGLGLPEKQQQDRGRDSNSDECWRKAGGWEAGSSRLQAGGLGSSREGKEHRGDSGRQLDRHAPEQLWDARLGPGRGKSDLQGCQSDPVGSWPRGKQIEISQDDSLAEMDRE

SEQ ID NO: 786365 - protein, 71 aa, Homo sapiens
GGHSSTQYLHQLKLALPTLDSRCGDAPGRRSSRCLWLSMWVCSLSFSHSQKLRWTNYEPVLHPKRWDGRIF

SEQ ID NO: 786366 - protein, 209 aa, Homo sapiens
MGEILNEIDSINKKSKFQETIDTLIEMLNVLESLSNRIQQAEERTSELEDKFFELTKSNKDKEERIRKIEQSLHEVWVHVKLPTLRIIGIPEEEEEPRSLENIFGRKIEENFPSLARDLGIQIQEAQRTPGKFIAQRSSPRHIVIRLPKVKMKERILRTVSQKRQETYKGKPIRLTADFSAEILQARRHWGPIFSLLKQNNYQPRICIQ

SEQ ID NO: 786367 - protein, 84 aa, Homo sapiens
TVPVQCSSRSSVEQPVLAWAVLLRGTLAMAEDIVVSRLGEAPGMEWVEARDAAQYPAVPRMAPRQRMIRPRCPQRPEDPGLARA

SEQ ID NO: 786368 - protein, 55 aa, Homo sapiens
PATTFQPHASQPPPSHVPPSHTPPTTTFQPRASQPPPPSHTPPSHAPPTTYNLPF

SEQ ID NO: 786369 - protein, 186 aa, Homo sapiens
MAPERHNDKYSCVNSILNSSELPQERADILCDVTLRVEQNRASLPIGLCWLAVSDYFCAMFTSELSEKGKPYVDIQGLTASTMEILLDFVYTETVHVTVENVQELLPAACLLQLKGVKQACCEFLESQLDPSNCLGIRGFGGTHNCVDLMQAAEVFSQKHFLKWYSDEEFILLSQGEVEKLIKCDE

SEQ ID NO: 786370 - protein, 82 aa, Homo sapiens
SPRFTGDSSHSDARSITEVRENMRAHSGLCKMGQSQSGGHGPGGGKKDDKTRKRNMNLLYQLQWGKRRRKQRDQMLPANCHW

SEQ ID NO: 786371 - protein, 240 aa, Homo sapiens
MSRSRHLGKIRKRLEDVKSQWVRPARADFSDNESARLATDALLDGGSEAYWRVLSQEGEVDFLSSVEAQYIQAQARSPRVPQTPWEGRKQALKGLDSSSLQSGTYFPVASEGSEPALLHSWASAEKPYLKEKSSATVYFQTVKHNNIRDLVRRCITRTSQNISIRSVEGEIYCAKSGRKFAGQIREKFIISDWRFVLSGSYRLHLALQDTLHRNILSKFTGQAVELFDEVFRHLYASANM

SEQ ID NO: 786372 - protein, 295 aa, Homo sapiens
MSRSRHLGKIRKRLEDVKSQWVRPARADFSDNESARLATDALLDGGSEAYWRVLSQEGEVDFLSSVEAQYIQAQARSPRVPQTPWEGRKQALKGLDSSSLQSGTYFPVASEGSEPALLHSWASAEKPYLKEKSSATVYFQTVKHNNIRDLVRRCITRTSQVLVILMDVFTDVEIFCDILEAANKRGVSCVLLDQGGVKLFQEMCDKVQISDSHLKNISIRSVEGEIYCAKSGRKFAGQIREKFIISDWRFVLSGSYRLHLALQDTLHRNILSKFTGQAVELFDEVFRHLYASANM

SEQ ID NO: 786373 - protein, 193 aa, Homo sapiens
MFELFNVPGFYIAVQEVLALEVSWTSQQVGEYMLMSIVIDKGDGVTLVLPVVEGYVIGSCINHILIVGDTVYFIQQLLREREVGIPLEQSLENTKAIKEKYCYICPDIVKEFAKYDVDPWKWIKQYTGINVINQEKFIIDVGYKRFLQPEIFFYPEFANPDFMESILNVVDEYKTVPLMRIVHCIRMLFFQGV

SEQ ID NO: 786374 - protein, 95 aa, Homo sapiens
ETAWPGAPRRVVALTLTIAIQGAGRVARPAPLGMRTHLCAVGWLGPEELPPVCSTERSKSLGQIPWSSCGSTVQGIEEGNTSSDHKTKLKNYKTI

SEQ ID NO: 786375 - protein, 81 aa, Homo sapiens
MEQVLCPNVEPSQAPARLRLSRWASTVQCRGLEQLQEIRVASPQDPEPPSPAFLMQGREGKELLGTRLTRVLCSDIQENAT

SEQ ID NO: 786376 - protein, 60 aa, Homo sapiens
MTTVGNRRQGYGQDGPGNPGNPRPSWHLAGDTKLRCWGNCLRGSPPLMNDSSAALVAPPP

SEQ ID NO: 786377 - protein, 32 aa, Homo sapiens
MAPCCRVLTWQQEEEPSRRRIAQEERMGSLDT

SEQ ID NO: 786378 - protein, 123 aa, Homo sapiens
MPPCLALSFFFFFFFDSKVLDGVWLQLADMRLPRPARPKATELTPLAVSGEQCSVSPDAEWERPISSRVLQAGVLVSWAGGWEQCPVVPEWEGPAVASTGCFCFLERVVFLPMRARDSTHGHT

SEQ ID NO: 786379 - protein, 66 aa, Homo sapiens
YHPHPPSARCPSECGLQRSGGRTCAAAAFQRVAQTGHPFPFPQPRNSEMDIIPPSRIMGIKLEVNF

SEQ ID NO: 786380 - protein, 97 aa, Homo sapiens
LLQLGLLNLIGKYSQHPDSGMSDSVKDKFSIAFSIVGMFASHAVGSLSVFFCAEITPTVIRCGGLGLVLASAGFGMLTAPIIELHNQKGYFLHHIIF

SEQ ID NO: 786381 - protein, 193 aa, Homo sapiens
MFELFNVPGFYIAVQEVLALEVSWTSQQVGEYMLMSIVIDKGDGVTLVLPVVEGYVIGSCINHILIVGDTVYFIQQLLREREVGIPLEQSLETTKAIKEKYCYICPDIVKEFAKYDVDPWKWIKQYTGINVINQEKFIIDVGYKRFLQPEIFFYPEFANPDFMESVLNVVDEYKTVPLMCIVHCIRMLFFQGV

SEQ ID NO: 786382 - protein, 72 aa, Homo sapiens
TAGGCAEFPLPGPAFLLSTCANRPLPPSVPRALQAPQGPNFHGSTTKLLLPQPCPLRACPNHPSRISARSPL

SEQ ID NO: 786383 - protein, 130 aa, Homo sapiens
AYLHNDVPGRLILMPPLILMLHGVHFTQSSLLYTPWYTLTSQLSCRRFVLCFYTAGTCLALVINFTHFSFLSSDLLILNSVKLLSSHWISPPLTAGWKLPPGRHPSSGWLTSFVFVLSCIIVLCCLLSKV

SEQ ID NO: 786384 - protein, 105 aa, Homo sapiens
SVPEHDDEILSGDFTPPGSSVELVQIFSMDVVPGIHEGAVIVVSPSAHVALAAPPAAGEAVAAPLAPLAPKRLHRGVVAVSRSAHVALAAPPVHPGRKKCRKGSM

SEQ ID NO: 786385 - protein, 156 aa, Homo sapiens
MNNETTTLISLKEAMKRVDHKLQALETQFKELDFTKDNLMQKFEHHSKALASQAAQDEMWTAVRALQLTSMELNILYSYVIEVLICLHTRVLEKLPDLVRGLPTLASVLRRKVKNKRVRVVWESILEECGPARRRHHSTLYPSLLHVVTRAETLYC

SEQ ID NO: 786386 - protein, 148 aa, Homo sapiens
MGLLFWEDGVDHKLQALETQFKELDFTKDNLMQKFEHHSKALASQAAQDEMWTAVRALQLTSMELNILYSYVIEVLICLHTRVLEKLPDLVRGLPTLASVLRRKVKNKRVRVVWESILEECGPARRRHHSTLYPSLLHVVTRAETLYC

SEQ ID NO: 786387 - protein, 117 aa, Homo sapiens
SRSLLLSESRCCGRYLGKSEDPPVAAMSRLMLRRTPTVTSNTHRTQPPTWGKIKKLSQMVEENLRKAGQPVTMSNLMIAMRAVITIAVSIPSASTDTENNYTYRAYLSILAGNNAWM

SEQ ID NO: 786388 - protein, 87 aa, Homo sapiens
GKYHWRQNQDVKIPLSVSAVVTSLAKEEALAATGSLSFHIWKTEAVTMALANPLSLSSEIRNEQRMPPRKWNELSQPPCSGAGVPSW

SEQ ID NO: 786389 - protein, 51 aa, Homo sapiens
MGIWTFIPTFSRGRICVLRNGTRAIQHRRKEEKMKEKRRKRKRKKEEEEEE

SEQ ID NO: 786390 - protein, 128 aa, Homo sapiens
MEHRTNTSGVGMASAQGEHDAAATCRLAAMGSLARRSQRRTPRSDPEAQKTLSGDRDLAAGSKVASVDPSGRQGPGLGTPQLQLGRATPCCAVPWNTSQETRSRERSDRNIQLSGLTWPILPEEGDLL

SEQ ID NO: 786391 - protein, 88 aa, Homo sapiens
ERPEVRDQGGMRRCSFWPTLRGTRTGGALWDQRGKGIWLRPQSQSRGADRGQRGSCRAMGAAAELSWGTFRSDTDDFTSPGEAQATSS

SEQ ID NO: 786392 - protein, 282 aa, Homo sapiens
RTEAGLTPDRGPPIIQRCLCCRAWTTLQGKTSQAQSPPPHPATPRRFNRRELWRSEGDRLTSRTRGTGGALKEKICLWVFIAQLLPALLPAALTRVIMPLEQRSQHCKPEEGLEARGEALGLVGAQAPATEEQQTASSSSTLVEVTLGEVPAADSPSPPHSPQGASSFSTTINYTLWRQSDEGSSNQEEEGPRMFPDLESEFQAAISRKMVELVHFLLLKYRAREPVTKAEMLESVLRNCQDFFPVIFSKASEYLQLVFGIEVVEVVPISHLYILVTCLGLS

SEQ ID NO: 786393 - protein, 185 aa, Homo sapiens
MPLEQRSQHCKPEEGLEARGEALGLVGAQAPATEEQQTASSSSTLVEVTLGEVPAADSPSPPHSPQGASSFSTTINYTLWRQSDEGSSNQEEEGPRMFPDLESEFQAAISRKMVELVHFLLLKYRAREPVTKAEMLESVLRNCQDFFPVIFSKASEYLQLVFGIEVVEVVPISHLYILVTCLGLS

SEQ ID NO: 786394 - protein, 69 aa, Homo sapiens
GEGVLKRLAAVRAQAGCLLQGGSAAPVGSQRADQATQGRCLIETGHYGPAEDMALGDSIRVALAWVPPG

SEQ ID NO: 786395 - protein, 145 aa, Homo sapiens
MPLHSSLGDGARLRLKNNNNNNKPPGYNYSFEKTNCYFPPNSCIKQLIRLGTVAHACNPKRLEVHPLSPSLPPPSNGVLGSPGWGQDEGTEEDKTYQDTTRPLTIPQTYIGSVLISVNPFKQMPYFTDREIDLYQGAVRLGLGGR

SEQ ID NO: 786396 - protein, 106 aa, Homo sapiens
GGRAPDDNSSSNNAAAATMALQADFDRAAEDVRKLKARPDDGELKELYGLYKQAIVGDINIACPGMLDLKGKAKWEAWNLKKGLSTEDATSAYISKAKELIEKYGI

SEQ ID NO: 786397 - protein, 106 aa, Homo sapiens; identical to SEQ ID NO: 786396

SEQ ID NO: 786398 - protein, 106 aa, Homo sapiens; identical to SEQ ID NO: 786396

SEQ ID NO: 786399 - protein, 299 aa, Homo sapiens
MTREQYILATQQNNLPRTENAQLYPVGIYGWRKRCLYFFVLLLLVTMIVNLAMTIWILKVMNFTVDGMGNLRVTKKGIRLEGISEFLLPLYVKEIHSRKDSPLVLQSDRNVTVNARNHMGQLTGQLTIGADAVEAQCKRFEVRASEDGRVLFSADEDEITIGAEKLKVTGTEGAVFGHSVETPHIRAEPSQDLRLESPTRSLIMEAPRGVQVSAAAGDFKATCRKELHLQSTEGEIFLNAETIKLGNLPTGSFSSSSPSSSSSRQTVYELCVCPNGKLYLSPAGVGSTCQSSSNICLWS

SEQ ID NO: 786400 - protein, 142 aa, Homo sapiens
MASGLVVNLADALREVLLVECDLDMAWERRAVPLWMGSFRSLSRRLWGACVTLGRLAEPEAPALGDAVGWRRRITPPSISPLPALSPGGGESPSWEGEAVCPAWLPPRSQAGRAPLAAPSPASRWRRSPLSAQRGPGRKTEG

SEQ ID NO: 786401 - protein, 105 aa, Homo sapiens
CCGMGSKGTRYQVVCVCGDLRSRGDTESCQPRQLRVCDIGTCVILDGKSCGRSAEAARATGVLCCASVSSNKGPWLATMKARASEMHILWCRGWLQTCLWQQIQM

SEQ ID NO: 786402 - protein, 64 aa, Homo sapiens
ISQGGGDSIQRGRERSGGFGPGHVLAWGCGSRMQGIVKGAGERGSEKRGPGWKEAEQGENGGEG

SEQ ID NO: 786403 - protein, 193 aa, Homo sapiens
MFELFNVPGFYIAVQEVLALEVSWTSQQVGEYMLMSIVIDKGDGVTLVLPVVEGYVIGSCINHILIVGDTVYFIQQLLREREVGIPLEQSLETTKVIKEKYCYICPDIVKEFAKYDVDPWKWMKQYTGINVINQEKFIINVGYKRFLQPEIFFYPEFANPDFMESILNVVDEYKTVPLMCIVHCIRMLFFQGV

SEQ ID NO: 786404 - protein, 107 aa, Homo sapiens
PSEIILHIYNHLIFDKPDKNKKRGKDSLFNKWCWENWLAICRKLKLDPFLTTYTKINSRWIKDLNVRPKTIKTLEENLGNTIQDIGMGKDFMTKTPKAMASKAKIDR

SEQ ID NO: 786405 - protein, 131 aa, Homo sapiens
MTQNPQEPYHRASELEGAGDRSGPNSLRQSMRGDSDTKGRKAQSLPRAHGGTKKLLLPLKKKRRSSLLEARQGHLQRASAEQLARGCFLHDHLPCTVDPWGGWFRGFPGKSQGQRQEMMTSLSEPFPQTYN

SEQ ID NO: 786406 - protein, 56 aa, Homo sapiens
MKCTALLPALLPPLPPPNLCLIPHSFLASDLWAPLCQALGHGDKQHAVVGSVRRGQ

SEQ ID NO: 786407 - protein, 144 aa, Homo sapiens
MCRVQTHGCHPLRSVTVRPDPSPAAPPPHPGPPRQLSQGAQACLAPQPSGNPARRPLQVGSGPQVAKQRQQQPRLTPCPSLWRPGTPAISTTWVRLSLSGSPARVPPGVLGHLRGSLMGQAGQSELRALSGWCPNLSTPHSFPP

SEQ ID NO: 786408 - protein, 51 aa, Homo sapiens
MQGQTVVPKDSYTISLIQRLRGREAARRTHENLLRLSALVRSPQTASIDCH

SEQ ID NO: 786409 - protein, 212 aa, Homo sapiens
QLKTQPAQSKEDNTVVDIGSSPERRADLEETDKVGILQHPDGTVLKQLQPPPRGPRELEFYNMVYAADCFDGVLLELRKYLPKYYGIWSPPTAPNDLYLKLEDVTHKFNKPCIMDVKIGQKSYDPFASSEKIQQQVSKYPLMEEIGFLVLGMRVYHVHSDSYETENQHYGRSLTKETIKDGVSRFFHNGYCLRKDAVAASIQKIEKILQWFE

SEQ ID NO: 786410 - protein, 241 aa, Homo sapiens
MATEPPSPLRVEAPGPPEMRTSPAIESTPEGTPQPAGGRLRFLNGCVPLSHQVAGHMYGKDKVGILQHPDGTVLKQLQPPPRGPRELEFYNMVYAADCFDGVLLELRKYLPKYYGIWSPPTAPNDLYLKLEDVTHKFNKPCIMDVKIGQKSYDPFASSEKIQQQVSKYPLMEEIGFLVLGMRVYHVHSDSYETENQHYGRSLTKETIKDGVSRFFHNGYCLRKDAVAASIQKIEKILQWFE

SEQ ID NO: 786411 - protein, 117 aa, Homo sapiens
VEVHSGSCRLSCPSSVTVSESQVVETGTQPALAQEKCSRQMTARQGTVHIPCHPSKELKRGFGFSFWLGLFQPQSAYIQSREIFSYLNCNPELKFSPLAFLEPRKIGNSYFHLWHGK

SEQ ID NO: 786412 - protein, 143 aa, Homo sapiens
KTLPRQQVFLGGPQAVCVGVEWEVAGSPRRLLWFILPTRLLDSVGGHIRTQPPACRMWSRCGQLLAPPACVAGSIRARTSLYLGALPPLAVRLSPCWPRARLSSQSLRVLFPRVVSSLGPCCDNSIGDVAESPLGPEKWPRLS

SEQ ID NO: 786413 - protein, 136 aa, Homo sapiens
MGDSRRDVLHEPAIALLSSPQTQSRLQIDAFIARRCWGSQWDITGYIHQQDFPTAVFIGFSNEFNICIPHPFTEWLQCVRKYSQSWGVRKGQRHIRYGMCSERTHHLSRTYSSLLEREEKLAFYGVLTMCQIWSET

SEQ ID NO: 786414 - protein, 136 aa, Homo sapiens; identical to SEQ ID NO: 786413

SEQ ID NO: 786415 - protein, 254 aa, Homo sapiens
MSKSESPKEPEQLRKLFIGGLSFETTDESLRSHFEQWGTLTDCVVMRDPNTKRSRGFGFVTYATVEEVDAAMNARPHKVDGRVVEPKRAVSREDSQRPGAHLTVKKIFVGGIKEDTEEHHLRDYFEQYGKIEVIEIMTDRGSGKKRGFAFVTFDDHDSVDKIVIQKYHTVNGHNCEVRKALSKQEMASASSSQRGRSGSGNFGGGRGGGFGGNDNFGRGGNFSGRGGFGGSRGGGGYGGRGDGYTGLGCGPWRG

SEQ ID NO: 786416 - protein, 291 aa, Homo sapiens
MSKSESPKEPEQLRKLFIGGLSFETTDESLRSHFEQWGTLTDCVVMRDPNTKRSRGFGFVTYATVEEVDAAMNARPHKVDGRVVEPKRAVSREDSQRPGAHLTVKKIFVGGIKEDTEEHHLRDYFEQYGKIEVIEIMTDRGSGKKRGFAFVTFDDHDSVDKIVIQKYHTVNGHNCEVRKALSKQEMASASSSQRGRSGSGNFGGGRGGGFGGNDNFGRGGNFSGRGGFGGSRGGGGYGGRGDGYNGSGNDGSNFGGGGSYNDFGHYNNQSSNFVPMKGGNCGGRSSGPMAV

SEQ ID NO: 786417 - protein, 60 aa, Homo sapiens
MVHRMDGGEEKNLEAPLMLQARVSQSSTRRIAIGKEKEDTKSKQGQRVMGERPPPRPFLH

SEQ ID NO: 786418 - protein, 151 aa, Homo sapiens
VHVEDRSPGVVDMVGIAVCTCRPVAWLCKAGGEWPQEEPNPDAENPGWLLPLLSHATVGEPLRALEPQSPPVSNGSDDSIWSPPHSGEKVRENEQGLLRDRMWDVREREESGATPRTLVCEERQEEGTAIPGPGRLERLGRPRAQFWTCFV

SEQ ID NO: 786419 - protein, 66 aa, Homo sapiens
MRLKYPSDTHIKSHIQQQNELKIFQALAKSTELNKLYKSHSWEQVDFLSYGNLVQANKNNNLLATE

SEQ ID NO: 786420 - protein, 103 aa, Homo sapiens
LSSPSHPIPPSSQLELTKGPVIYLQSPCPELYQPQRCGINWCGQVHCADASRDPGWYRWVWHILYLPAKQSIQLTSHSTPYITLVGYSPFLGLKFHSVILVNQ

SEQ ID NO: 786421 - protein, 102 aa, Homo sapiens
VMCVVYALCVLCVLCVCCVCAVCGVCGVCCAVCVLCVWCLCDVCVLYVYGACVVCFVWGMSVCVCLLVFFPLQESKAPRVKIMSDSPKSPKPGNSAWHRVDI

SEQ ID NO: 786422 - protein, 169 aa, Homo sapiens
MCEASRRGEEMPRFPYFRAVHAFVSRKLLQLKQQHQQTRIKIIVHFPGFHVGLLSALEIQEIIMLLQQYGFVSGFYSYRHVFTGMRILYGKESPCFFLTYLSVPSTVKTKLLRTLSFLGEITCSYLGPPQQNGVAWVDSSSSSPAPRCQAAGCCPPGSCGTSMFCLGVV

SEQ ID NO: 786423 - protein, 85 aa, Homo sapiens
LRARRVKGAHHMRQQGAASDVTSSTQASRNTDTFKGQWAREVSAIQAKSDNPQTQSRTGCFVSAEHMPACRRLPHWGAQELKPHL

SEQ ID NO: 786424 - protein, 165 aa, Homo sapiens
MEACLKEELPSPVELEESLRNGVLLAKLGHCFAPSVVPLKKIYDVEQLRYQATGLHFRHTDNINFWLSAIAHIGLPSTFFPETTDIYDKKNMPRVVYCIHALSLFLFRLGLAPQIHDLYGKVKFTAEELSNMASELAKYGLQLPAFSKIGGILANELSVDEAAGK

SEQ ID NO: 786425 - protein, 191 aa, Homo sapiens
YRVSSKGRRNMERRAAGPGWAAYERLTAEEMDEQRRQNVAYQYLCRLEEAKRWMEACLKEELPSPVELEESLRNGVLLAKLGHCFAPSVVPLKKIYDVEQLRYQATGLHFRHTDNINFWLSAIAHIGLPSTFFPETTDIYDKKNMPRVVYCIHALSLFLFRLGLAPQIHDLYGKVKFTAEELSKMASEAAG

SEQ ID NO: 786426 - protein, 33 aa, Homo sapiens
MISVSVQDEEGAKPDRCDDRRNPISSTGTPGKH

SEQ ID NO: 786427 - protein, 415 aa, Homo sapiens
MDFEDDYTHSACRNTYQGFNGMDRDYGPGSYGGMDRDYGHGSYGGQRSMDSYLNQSYGMDNHSGGGGGSSFSSPHMKPAPVGSRGRGTPAYPESTFGSRNYDAFGGPSTGRGRGRGHMGDFGSIHRPGIVVDYQNKSTNVTVAAARGIKRKMMQPFNKPSGTFIKKPKLAKPMEKISLSKSPTKTDPKNEEEEKRRIEARREKQRRRREKNSEKYGDGYRMAFTCSFCKFRTFEEKDIELHLESSSHQETLDHIQKQTKFDKVVMEFLHECMVNKFKKTSIRKQQTNNQTEVVKIIEKDVMEGVTVDDHMMKVETVHCSACSVYIPALHSSVQQHLKSPDHIKGKQAYKEQIKRESVLTATSILNNPIVKARYERFVKGENPFEIQDHSQDQQIEGDEEDEEKIDEPIEEEEDED

SEQ ID NO: 786428 - protein, 110 aa, Homo sapiens
MTVGPFPGLVPASWLTLEAQNFLKSAFCPTSVYCRTLQASLCLTVDPPDPDGVSLWHPQAKLLPFRSLYRPSSCLAVASLGQAHAPWRLFQAQLLPFAACPGPECPSLGI

SEQ ID NO: 786429 - protein, 107 aa, Homo sapiens
MELLHSESQVLKVYLSLLTHIWLYVPQDTSADFSAGCLGKHLLFNKSLTAIIIRVMAKVKALILLRYRSKENDEDEGNSGGTEEMGGRGKEVKKIIAHKAWQEFSDH

SEQ ID NO: 786430 - protein, 75 aa, Homo sapiens
RACCVALPLQLLLLLFLLLLFLLPIREEDRSCTLANNFARSFTLMLRYNGPPPTYTHWGTQVTFSSNLHQSQGPS

SEQ ID NO: 786431 - protein, 150 aa, Homo sapiens
MRSDGFISVWHFPCLHFSLLPPCKEGIYDKPTANIILNGQKLEAFPLKTGTRQGCPLSPLLFNIVLEVLARAIRQEKEIKGIQLGKEEVKLSLFADDMIVYLENPIVSAQNLLKLISNFSKVSGYKINVQKSQAFLYTNNRQTESQIMSE

SEQ ID NO: 786432 - protein, 48 aa, Homo sapiens
MPASWLPPSTHQLHSNDLQTLWGPVHPRPVLTLPTASPSNDDGVSPAA

SEQ ID NO: 786433 - protein, 75 aa, Homo sapiens
VLSRGAAELVGGLDLWGSEDSGSFHWAVAMLGCGGRPRAPVGLSETGGRCPVFTLLAAVRNMFTKALPSSGLEVI

SEQ ID NO: 786434 - protein, 138 aa, Homo sapiens
NIYGSQSGSVLLLQGRSNLGTGVVPAALGGAGVMALLCICLCLIFFLIVKARREQAAGRPEKMDDEDPIMGTITSGSRKKPWPDSPGDQASPPGDAPPLEEQKELHYASLSFSEMKSREPKDQEAPSTTEYSEIKTSK

SEQ ID NO: 786435 - protein, 135 aa, Homo sapiens
MSCESHCGWPEGATHSHFRLTGAFVPTPAFICVLFYVFSQSPELQALVTPDSSLLSPLSSPQHLYVCPRLHFPLFCLDQTTLTFLGLRATACSGRCLTAPANPLAPTPRPGFLNRSLSRSLSLASSLLNQEAGPC

SEQ ID NO: 786436 - protein, 135 aa, Homo sapiens; identical to SEQ ID NO: 786435

SEQ ID NO: 786437 - protein, 119 aa, Homo sapiens
MIKGLNHCHSLNSLTVGIPLRIYLQAPSLLTLYTVSPGNFIMAKITIYSKSMLKLIFLAEISLLRLKPLSPTSSLTPEFSGHLKTKFSISAHFCFLTFKPVPHSVLSVPRSGRNIIHLP

SEQ ID NO: 786438 - protein, 71 aa, Homo sapiens
TVSELLEVFAISTGYRRLIALDFDNIKTGLPQENPSVSFRVMQVKNHGVKLELNSDLKVYCNFSYGTAGFC

SEQ ID NO: 786439 - protein, 317 aa, Homo sapiens
CSNFWFKFPRTSSKLEHFVSILLKCFDSPWTTRALSETVVEESDPKPAFSKMNGSMDKKSSTVSEDVEATVPMLQRTKSRIEQGIVDRSETGVLDKKEGEQAKALFEKVKKFRTHVEEGDIVYRLYMRQTIIKVIKFILIICYTVYYVHNIKFDVDCTVDIESLTGYRTYRCAHPLDTLFKILGVLLHQPSHLLRPHLHVHTVVDATALPQEYSLSRAGGEQYSDLPKSRTSSLHAGLIDNRTGYSRRRRSCRRGGKLGRELTEVVAAAAPGQSRCRVRSKVRWVSVTTIPMRVGGAAIRLEVQRSSRPPPFSALLL

SEQ ID NO: 786440 - protein, 48 aa, Homo sapiens
MACTRDASICGEPRSRQCNSSLGDRVRLRIKQTKKQKDRQMALNIKYI

SEQ ID NO: 786441 - protein, 81 aa, Homo sapiens
RPSSPVPQSQSYIDTMPESEGTPGIIDSKRLVVPTTSPDPKKEKCLIQGCMTCLDTLWPPSPESLPSATSQSPHSHLLRCR

SEQ ID NO: 786442 - protein, 81 aa, Homo sapiens
RLGLPKCWDYRRVPPRPAHPLFPDHHTSLLMASWPPFRLPLLARLRPGDSFSNANDLYIPLFQTSMTPGHCKDRAQGVLTS

SEQ ID NO: 786443 - protein, 270 aa, Homo sapiens
MTCKPSAWTENRTENDLNRWSLSLSPRLQCNGTISAHYNLRLPGSSNSPASASQHCLSACDIDKAALPDHCLNCVIRNYLLGSDDEEITQTMLAMSTGATDTHKTSINQREMITDITTRLHRRIATRYGRNGTYHTVTNFHECFNICGCIPSALRKVGTMGRIEYSCWLRPYQSYDKRYSAKTSDPMTTMEHHSPKHRNDPGKGNFRTAHIHEPPADPVHIRREFNGGNNGWIGTHMINHWPHVIQRVTHNQDIIGEPTCDSNSGKHTAI

SEQ ID NO: 786444 - protein, 110 aa, Homo sapiens
HLATQQSCFLYWQLLEWCWAHPRHLGCLLNACQVSIGMVWSNYHAGLPVRNSGSGTREKRVQTLAPPLNQLCGTMGKTFSLSEPQFPHLQNRNCNINIEGCCVDRRWCRG

SEQ ID NO: 786445 - protein, 113 aa, Homo sapiens
YYPTTSYPHLLPSIKQFSCLSLLSSRDYRHEPPHLANFVFLVETGFLHVGQVGLQLLTSGDPPALASQTAGITGVSHRARPLWLTFNLSYYTLQLHNFDFVLLYNFYLFIDTL

SEQ ID NO: 786446 - protein, 104 aa, Homo sapiens
SPRLQTPMVHRTIACGGSRKEITEHWEWLEQNLLQTLSIFENENDITTFVRGKIQGIIAEYNKINDVKEDDDTEKFKEAIVKFHRLFGMPEEEKLVNYYSCSYW

SEQ ID NO: 786447 - protein, 88 aa, Homo sapiens
SPTPAPAICAVLIGADLAMQQGYTDPCGPRLPTDILFPKALAHSAEHLGTHNCSSRQMCEQVAHQNSSSGPLGAWVGRGRCGMEDRQR

SEQ ID NO: 786448 - protein, 66 aa, Homo sapiens
GRARRGLTAAGMQQGRCAGTRPGVGSGGPAVYGAECRPEMPSCPQKWLRPAGDRAGGWKLLHALCH

SEQ ID NO: 786449 - protein, 66 aa, Homo sapiens
VSHRAQLAQRNLNKGKGSLPCGSLGTVNPGRGNSNIKAFSPGLGGGLLHVELGRSGGNELEGGGVE

SEQ ID NO: 786450 - protein, 53 aa, Homo sapiens [sequence omitted]

SEQ ID NO: 786451 - protein, 285 aa, Homo sapiens
MDCLCIVTTKKYRYQDEDTPPLEHSPAHLPNQANSPPVIVNTDTLEAPGYVNGTEGEMEYEEITLERGNSGLGFSIAGGTDNPHIGDDPSIFITKIIPGGAAAQDGRLRVNDSILFVNEVDVREVTHSAAVEALKEAGSIVRLYVMRRKPPAEKVMEIKLIKGPKGLGFSIAGGVGNQHIPGDNSIYVTKIIEGGAAHKDGRLQIGDKILAVNSVGLEDVMHEDAVAALKNTYDVVYLKVAKPSNAYLSDSYAPPDITTSYSQQVDNEISHSSSLLSCGSSRNGH

SEQ ID NO: 786452 - protein, 296 aa, Homo sapiens
MDCLCIVTTKKYRYQDEDTPPLEHSPAHLPNQANSPPVIVNTDTLEAPGYVNGTEGEMEYEEITLERGNSGLGFSIAGGTDNPHIGDDPSIFITKIIPGGAAAQDGRLRVNDSILFVNEVDVREVTHSAAVEALKEAGSIVRLYVMRRKPPAEKVMEIKLIKGPKGLGFSIAGGVGNQHIPGDNSIYVTKIIEGGAAHKDGRLQIGDKILAVNSVGLEDVMHEDAVAALKNTYDVVYLKVAKPSNAYLSDSYAPPDITTCESPSNTKVPHDPSRLTHDMQSHDIPVAVPLQIFPMK

SEQ ID NO: 786453 - protein, 318 aa, Homo sapiens
MDCLCIVTTKKYRYQDEDTPPLEHSPAHLPNQVNAPELVHVAERNLSHLEAGHGVVGHAHLSPFKANSPPVIVNTDTLEAPGYVNGTEGEMEYEEITLERGNSGLGFSIAGGTDNPHIGDDPSIFITKIIPGGAAAQDGRLRVNDSILFVNEVDVREVTHSAAVEALKEAGSIVRLYVMRRKPPAEKVMEIKLIKGPKGLGFSIAGGVGNQHIPGDNSIYVTKIIEGGAAHKDGRLQIGDKILAVNSVGLEDVMHEDAVAALKNTYDVVYLKVAKPSNAYLSDSYAPPDITTSYSQQVDNEISHSSSLLSCGSSRNGH

SEQ ID NO: 786454 - protein, 164 aa, Homo sapiens
HGCAERCSEKTTIVRLENSKHWCDLQKSHTENTRRWKGGNEESAPGFHQIQRRGLPADRLLQKALWALRTHRDRGCGRALPLVSLTAPAPFTAVKSAGTSGNIGFWIRDTGEKGTPWLSPSLSLVCKRRVCSCGSSCDHKATNRRIKTNSQGWRVRTARPCPVT

SEQ ID NO: 786455 - protein, 158 aa, Homo sapiens
AHRKFSEPPSTSGRAREVCRKRTERSPCDRVASCSAPCWQSRSEAEMRSVTWLREHPGCLWMSGRGAERRQQWGASSAILGFSGQANFSPGWRPCTTPSAWWGPQLPRDWLRLCPWPWDGGQRFWAVAAAGGSSTWKTCLLSRPFLSGGAEPWLSLFP

SEQ ID NO: 786456 - protein, 70 aa, Homo sapiens
MKSRILTVPYIGFQTSKQVDSSSPVSNTSNSGDFLRIPGESPTINTESDLFLVTKSFIDSTGSYILWLGL

SEQ ID NO: 786457 - protein, 38 aa, Homo sapiens
MQFAWYWSESPRGWVILSKDHMVLAWYPQGSVPSSQYV

SEQ ID NO: 786458 - protein, 347 aa, Homo sapiens
MHRRRLALGLGFCLLAGTSLSVLWVYLENWLPVSYVPYYLPCPEIFNMKLHYKREKPLQPVVWSQYPQPKLLEHRPTQLLTLTPWLAPIVSEGTFNPELLQHIYQPLNLTIGVTVFAVGKYTHFIQSFLESAEEFFMRGYRVHYYIFTDNPAAVPGVPLGPHRLLSSIPIQGHSHWEETSMRRMETISQHIAKRAHREVDYLFCLDVDMVFRNPWGPETLGDLVAAIHPSYYAVPRQQFPYERRRVSTAFVADSEGDFYYGGAVFGGQVARVYEFTRGCHMAILADKANGIMAAWREESHLNRHFISNKPSKVLSPEYLWDDRKPQPPSLKLIRFSTLDKDISCLRS

SEQ ID NO: 786459 - protein, 189 aa, Homo sapiens
MHRRRLALGLGFCLLAGTSLSVLWVYLENWLPVSYVPYYLPCPEIFNMKLHYKREKPLQPVVWSQYPQPKLLEHRPTQLLTLTPWLAPIVSEGTFNPELLQHIYQPLNLTIGVTVFAVGKYTHFIQSFLESAEEFFMRGYRVHYYIFIACRPALSRLPVSQANSTGKGTWKGHCELQRAVHTVAHRISQ

SEQ ID NO: 786460 - protein, 150 aa, Homo sapiens [sequence omitted]

SEQ ID NO: 786461 - protein, 119 aa, Homo sapiens
MPHAQRLRTHTACSRVWVRARLLDPAHVLAGQGQPQGVRTDVVEILSLRGGLSLSFTCCRHHATPAWSPILTQPRWSHTVGVHTGTCPGSSTATVSVFRISGSSPSVNTNAPPLPSSST

SEQ ID NO: 786462 - protein, 65 aa, Homo sapiens
RRQKGREGYLLHMNLDPESSLELSARHVERFSGIAACSSVSLFGVIGSTGLPPPGSLDCLVITQH

SEQ ID NO: 786463 - protein, 125 aa, Homo sapiens
RVVSEPRPACGKLRRKAPRGACCTFMPGSHNCRPSPCVQRGSWTVEAGRETQSTPCPFYPPLFPLVQQISICGRVVGSQVMKSCKVWGRYKVSQGSWATTWGVTTWGGHLSTSSCFSLESKSSVP

SEQ ID NO: 786464 - protein, 443 aa, Homo sapiens
MAWPNVFQRGSLLSQFSHHHVVVFLLTFFSYSLLHASRKTFSNVKVSISEQWTPSAFNTSVELPVEIWSSNHLFPSAEKATLFLGTLDTIFLFSYAVGLFISGIVGDRLNLRWVLSFGMCSSALVVFVFGALTEWLRFYNKWLYCCLWIVNGLLQSTGWPCVVAVMGNWFGKAGRGVVFGLWSACASVGNILGACLASSVLQYGYEYAFLVTASVQFAGGIVIFFGLLVSPEEIGLSGIEAEENFEEDSHRPLINGGENEDEYEPNYSIQDDSSVAQVKAISFYQACCLPGVIPYSLAYACLKLVNYSFFFWLPFYLSNNFGWKEAEADKLSIWYDVGGIIVFSVSDPGQARMDVGFLLFHSHDKLYNCVYLAINSEGNILSRAKETGSHIEGVTGARETERTMSATSGPLGLRVCPNLGLSRSSSLILDCQASLNTASHLRC

SEQ ID NO: 786465 - protein, 132 aa, Homo sapiens
MAGGSPAAKRVVVYRNGDPFFPGSQLVVTQRRFPTMEAFLCEVTSAVQAPLAVRALYTPCHGHPVTNLADLKNRGQYVAAGFERFHKLHYLPHRGKDPGGKSCRLQGPPVTRHLCDGAIGRQLPAGAPSYIQ

SEQ ID NO: 786466 - protein, 103 aa, Homo sapiens
  misc_feature (103)..(103): Xaa can be any naturally occurring amino acid
MAGGSPAAKRVVVYRNGDPFFPGSQLVVTQRRFPTMEAFLCEVTSAVQAPLAVRALYTPCHGHPVTNLAEETVAGALICIQGFIHICPGEITLKHRCYPIPDX

SEQ ID NO: 786467 - protein, 152 aa, Homo sapiens
MDLPDESQWDETTCGLAVCQHPQCWATIRRIERGHPRILGSSCKTPLDAEDKLPVLTVVDILDSGFAAHHLPECTFTKAHSLLSQSSKFYSKFHGRPPKGLPDKSLINCTNRLPKFPVLNLNETQLPCPEDVRNMVVCGSQKNRDTCEVSII

SEQ ID NO: 786468 - protein, 147 aa, Homo sapiens
MDLPDESQWDETTCGLAVCQHPQCWATIRRIERGHPRILGSSCKTPLDAEDKLPVLTVVDILDSGFAAHHLPECTFTKAHSLLSQSSKFYSKFHGRPPKGLPDKSLINCTNRLPKFPVLNLNETQLPCPEDVRNMVVCGSQKKQRYM

SEQ ID NO: 786469 - protein, 41 aa, Homo sapiens
MAILGLLGKDMLPASPAPIYKVKWISGSLSIRLSYELSDLW

SEQ ID NO: 786470 - protein, 131 aa, Homo sapiens
MPTTSATTCTLINPYFQPSPLSLLLHICMQIFTGHFHLIVSTSISNSTSLEPNYFAPLPWPQIALLLYSQNQSLPELGTQIPNPEIWEKTQTLPPPSLLKCRYSREQWLTPVILPLWEANGGGSPEFRTLR

SEQ ID NO: 786471 - protein, 42 aa, Homo sapiens
GKECETKRKFECNLILEGTVVKKLFKEYNYWLGAVAYTCNPS

SEQ ID NO: 786472 - protein, 184 aa, Homo sapiens
MILTGPACRPPLCPDNKMASQVKWYCGTVNKKRKNQVDTSSVTHTEHLQDTDERQASHRRWQKDFDEIFQTGLVAYVDLDERAIDALREFNEEGALSVLQQFTESDLSHVQNKSAFYVEFEDLQAERETGEQVQESTKGPDEAEDQALLERTGYTLDVTTGQRKYGGPPPDSVYSGVQPGIGTE

SEQ ID NO: 786473 - protein, 52 aa, Homo sapiens
MVIFCTIGDLLHDEVIFCSDTVIFCTIGDLLHDEVIFCTDKVIFCTIGDLLH

SEQ ID NO: 786474 - protein, 126 aa, Homo sapiens
PADGYQRGSVLAAAPSSLTLVFAHTEAGTICRKKSQSRATLCCRAVMRLIRGSASAASSAATVSTCLHPAAVGHDVRLNGFVLPYGCQPNGKAAVIPAPIAYIKVAAVKKLVVGSWERAGGPPRGE

SEQ ID NO: 786475 - protein, 53 aa, Homo sapiens
MRSHGHGSHRPTPGSVCLRGTPSNISFGAVASGLRTLVLMLYSSYQGTVMNFQ

SEQ ID NO: 786476 - protein, 51 aa, Homo sapiens
MTRYSRDRRDTLTSEDVAGVKTTCPVTCHTQQPRPRQGDPLQSCPTKTPGY

SEQ ID NO: 786477 - protein, 78 aa, Homo sapiens
MVKYFLGQSMLRSSWDQVFAAFWQRYPNPYSKHVLTEDIVHREVTPDQKLLSRRLLTKTNRMPRWAERLFPANVAHSV

SEQ ID NO: 786478 - protein, 314 aa, Homo sapiens
MPLEQRSQHCKPEEGLEAQGEALGLVGAQAPATEEQETASSSSTLVEVTLREVPAAESPSPPHSPQGASTLPTTINYTLWSQSDEGSSNEEQEGPSTFPDLETSFQVALSRKMAELVHFLLLKYRAREPFTKAEMLGSVIRNFQDFFPVIFSKASEYLQLVFGIEVVEVVRIGHLYILVTCLGLSYDGLLGDNQIVPKTGLLIIVLAIIAKEGDCAPEEKIWEELSVLEASDGREDSVFAHPRKLLTQDLVQENYLEYRQVPGSDPACYEFLWGPRALVETSYVKVLHHLLKISGGPHISYPPLHEWAFREGEE

SEQ ID NO: 786479 - protein, 314 aa, Homo sapiens; identical to SEQ ID NO: 786478

SEQ ID NO: 786480 - protein, 138 aa, Homo sapiens
HSSTHPLIHLPTHSPSIYPPNNPPILLLTHHSILPFICRIIHLFIYPSTQSPIRPFYPSIHLSTHLSIYLLPIYLSVCPPNHPSSHPSTHPLIYPFSLPPIYLTIHPSIHPSIHPSIHPSIHVSTNPPGWRQGGDPNR

SEQ ID NO: 786481 - protein, 46 aa, Homo sapiens
MWPSGPGEVVLFVLHIDWEQVVRAEEWPRNLAEKVDAGSSATANLK

SEQ ID NO: 786482 - protein, 111 aa, Homo sapiens
RGLRMPLSSEVALITGMCHHTQLIFVFLVEMGFCHVSQAGLKLLTVGDLPTSASQSARITDVSHCAWPLFTLFLETGSGSVGQDGVQWHDIGLLQPLPPGLKANLPPQPPK

SEQ ID NO: 786483 - protein, 37 aa, Homo sapiens
MSQRPKTIKLLEENMGQNLHNIGFGDDFSDAAPKAQA

SEQ ID NO: 786484 - protein, 66 aa, Homo sapiens
PCHANVLLDNRKTDALGAESSQGEGQCLRSNSMDSSNTTQPEMVSLIQKLLAYCHDNSILPNLLGR

SEQ ID NO: 786485 - protein, 31 aa, Homo sapiens
MTPPPLPHFISYTITTRSTTLTTNTPPNHHL

SEQ ID NO: 786486 - protein, 69 aa, Homo sapiens
SLSVLKNLVYCVNTRAGFSTTNGKNISRDLGEITGTAVKRQSFSLDSSSDYELCEKVTSVPVTLDMGLP

SEQ ID NO: 786487 - protein, 102 aa, Homo sapiens
RDKGKFITALAVAKVSAFFSQFYEPQFSHGPRYKHALGCLGRKSEVRDPNIFIMGSEHACFLLQMKTVSPSYKAVSKLASCSKGRHYPCLPRIFSTQTYLKR

SEQ ID NO: 786488 - protein, 148 aa, Homo sapiens
SKESPPTGDSGKVDPVYETLRYGTSLALMNRSSFSSTSESPTRSLSERDELTEDGEGSIRSSEEGPGDSASPVFTAPAESEGPGPEEKSPGQQLPKATLRKDVGPMYSYVALYKFLPQENKDLALQPGDRIMLVDDSNEDWWKVTWQG

SEQ ID NO: 786489 - protein, 110 aa, Homo sapiens
MGRETVKVEDDIKFGKSFPFLRKAFWFSGQPDCYPLSSVHQILIQHLLWARYLFDGQEWKRKLKTPCTIILILLDSHEDNSAHLSIRQHAYGLKEWQVGNLLTLAIESQS

SEQ ID NO: 786490 - protein, 66 aa, Homo sapiens
ATSRERERGSLKPVGCGCGEPQAFLQSAPQSVPGFSLPSSASVPFSDKMAAALTGGLRASCLFPAQ

SEQ ID NO: 786491 - protein, 101 aa, Homo sapiens
TRFCDSQLKHGAPRPGMKSSPHDSHTCVTYPERNHILLHPHWNQDTEQETSELESLYQASLQASQAGCSGWGQQDTAWHPLSQTGKNATRGWGEGGGSYKS

SEQ ID NO: 786492 - protein, 121 aa, Homo sapiens
QAWPGSYSPSVPAVPLSFAGRQLRRGGSNHKPRCQGSHREWVPQAWFCSTRGHIQHNHRASDPRGPTGRSSVPKPRGKLSHPCTHSSRRAHQTSFQGQAKFPVQHRALKSTCHPLKVKANT

SEQ ID NO: 786493 - protein, 99 aa, Homo sapiens
VLSHPPPCAIFWSKRECFHCVQVWLKSIHCVQVWVKSIHRVQVWLKSIHRVQVWLKSIHRVQVWLKSIHRVQVWVKSIHRVQVWLKSIHCVQVWLKSIH

SEQ ID NO: 786494 - protein, 108 aa, Homo sapiens
PNDSLLQPPLLGSSNPLILASRVAGTTGVCQHTQLVFKFLVERSSCYVAQAGLKFLSLSDTPASASRSVRITGVNHHTWPYILFFDNCHSNEYEMVSHCIIDLHFSSD

SEQ ID NO: 786495 - protein, 54 aa, Homo sapiens
MPQKFETFQEPRTTMALKLQQKYSCWTQHWMSTSSFMSEFCFSGLSLSPKDRAQ

SEQ ID NO: 786496 - protein, 78 aa, Homo sapiens
LPASFIFTTVQKGAPLQASPLNFSCTWKDKPLLEAWQGFPFRASQCSAAVISRDPAGHGPHAAPSLNPTLFGLITLKV

SEQ ID NO: 786497 - protein, 55 aa, Homo sapiens
MSQITPLSTTKSHNSEHTTSNNQIRNLTDHTTSNNQIRNLTDHTTSNNKSQMSQI

SEQ ID NO: 786498 - protein, 100 aa, Homo sapiens
PFRSNISMISSVSTLGSKSKRSESIRALWVRVCPRNQHKLHHVLSAQFGCFVESCPLVGTTQIDICSIVDQQGSHVIAVTQHSWEMRSVVGMFNGKLSPK

SEQ ID NO: 786499 - protein, 100 aa, Homo sapiens
INEPKQITFSETDARQKFLCAPEELTGLSLQRWTTGQTLEPARNSSKCTGSGMGIWLYGTSRLKGTPGRDSFVTKPGVTHQKSATTKTRKCQQCRAGEVA

SEQ ID NO: 786500 - protein, 145 aa, Homo sapiens
MVSKDASVKEYIFKELQKYLPSHAVPDELVLIDSLPFTSHGKIDVSELNKIYLNYINLKSENKLSGKEDLWEKLQYLWKSTLNLPEDLLRVPDESLFLNSGGDSLKSIRLLSEIEKLVGTSVPGLLEIILSSSILEIYNHILQTV

SEQ ID NO: 786501 - protein, 797 aa, Homo sapiens
MASCRAWNLRVLVAVVCGLLTGIILGLGIWRIVIRIQRGKSTSSSSTPTEFCRNGGTWENGRCICTEEWKGLRCTIANFCENSTYMGFTFARIPVGRYGPSLQTCGKDTPNAGNPMAVRLCSLSLYGEIELQKVTIGNCNENLETLEKQVEDVTAPLNNISSEVQILTSDANKLTAENITSATRVVGQIFNTSRNASPEAKKVAIVTVSQLLDASEDAFQRVAATANDDALTTLIEQMETYSLSLGNQSVVEPNIAIQSANFSSENAVGPSNVRFSVQKGASSSLVSSSTFIHTNVDGLNPDAQTELQVLLNMTKNYTKTCGFVVYQNDKLFQSKTFTAKSDFSQKIISSKTDENEQDQSASVDMVFSPKYNQKEFQLYSYACVYWNLSAKDWDTYGCQKDKGTDGFLRCRCNHTTNFAVLMTFKKDYQYPKSLDILSNVGCALSVTGLALTVIFQIVTRKVRKTSVTWVLVNLCISMLIFNLLFVFGIENSNKNLQTSDGDINNIDFDNNDIPRTDTINIPNPMCTAIAALLHYFLLVTFTWNALSAAQLYYLLIRTMKPLPRHFILFISLIGWGVPAIVVAITVGVIYSQNGNNPQWELDYRQEKICWLAIPEPNGVIKSPLLWSFIVPVTIILISNVVMFITISIKVLWKNNQNLTSTKKVSSMKKIVSTLSVAVVFGITWILAYLMLVNDDSIRIVFSYIFCLFNTTQGLQIFILYTVRTKVFQSEASKVLMLLSSIGRRKSLPSVTRPRLRVKMYNFLRSLPTLHERFRLLETSPSTEEITLSESDNAKESI

SEQ ID NO: 786502 - protein, 103 aa, Homo sapiens
HLHRLQLPPPRLPLSLLKSLPCKMKLTYKMGSDADVQVLGTSLTSEPALLTGRDVSTEVGRSLTWSQGAPPLECGLGPVTLTGQDVTPALRLCGKDKELCSCN

SEQ ID NO: 786503 - protein, 939 aa, Homo sapiens
KLGTSAFSEVVTVNTLAFPITTPEPLVLVTPPRCLIANRTQQGVLLSWLPPANHSFPIDRYIMEFRVAERWELLDDGIPGTEGEFFAKDLSQDTWYEFRVLAVMQDLISEPSNIAGVSSTDIFPQPDLTEDGLARPVLAGIVATICFLAAAILFSTLAACFVNKQRKRKLKRKKDPPLSITHCRKSLESPLSSGKVSPESIRTLRAPSESSDDQGQPAAKRMLSPTREKELSLYKKTKRAISSKKYSVAKAEAEAEATTPIELISRGPDGRFVMDPAEMEPSLKSRRIEGFPFAEETDMYPEFRQSDEENEDPLVPTSVAALKSQLTPLSSSQESYLPPPAYSPRFQPRGLEGPGGLEGRLQATGQARPPAPRPFHHGQYYGYLSSSSPGEVEPPPFYVPEVGSPLSSVMSSPPLPTEGPFGHPTIPEENGENASNSTLPLTQTPTGGRSPEPWGRPEFPFGGLETPAMMFPHQLPPCDVPESLQPKAGLPRGLPPTSLQVPAAYPGILSLEAPKGWAGKSPGRGPVPAPPAAKWQDRPMQPLVSQGQLRHTSQGMGIPVLPYPEPAEPGAHGGPSTFGLDTRWYEPQPRPRPSPRQARRAEPSLHQVVLQPSRLSPLTQSPLSSRTGSPELAARARPRPGLLQQAEMSEITLQPPAAVSFSRKSTPSTGSPSQSSRSGSPSYRPAMGFTTLATGYPSPPPGPAPAGPGDSLDVFGQTPSPRRTGEELLRPETPPPTLPTSGKLRRDRPAPATSPPERALSKLQQLVFQLSGQCCRDKPLLSSIGKGAPRLGGRGRAGGRGFGRAIASWTGPDQGSKPCPSPPRVGGLLPLLDPHGFWVPHIEPRSAPPSCSFCPPPPVPMSGPSRAPCGSPHSSPASPACCQYTQGLPQKPWGPACTPKGPRTPEICFASLHPWGPLWGPSGIQEEPPRTLFSQQPQA

SEQ ID NO: 786504 - protein, 393 aa, Homo sapiens
MWWRVLSLLAWFPLQEASLTNHTETITVEEGQTLTLKCVTSLRKNSSLQWLTPSGFTIFLNEYPALKNSKYQLLHHSANQLSITVPNVTLQDEGVYKCLHYSDSVSTKEVKVIVLATPFKPILEASVIRKQNGEEHVVLMCSTMRSKPPPQITWLLGNSMEVSGGTLHEFETDGKKCNTTSTLIIHTYGKNSTVDCIIRHRGLQGRKLVAPFRFEDLVTDEETASDALERNSLSSQDPQQPTSTVSVTEDSSTSEIDKEEKEQTTQDPDLTTEANPQYLGLARKKSGILLLTLVSFLIFILFIIVQLFIMKLRKAHVIWKRENEVSEHTLESYRSRSNNEETSSEEKNGQSSHPMRCMNYITKLYSEAKTKRKENVQHSKLEEKHIQVPESIV

SEQ ID NO: 786505 - protein, 221 aa, Homo sapiens
HTVLGFLHNLYKQVAAKYILQSLLLSTMWVKLLSIVAEFCFSPFLVTDEETASDALERNSLSSQDPQQPTSTVSVTEDSSTSEIDKEEKEQTTQDPDLTTEANPQYLGLARKKSGILLLTLVSFLIFILFIIVQLFIMKLRKAHVIWKRENEVSEHTLESYRSRSNNEETSSEEKNGQSSHPMRCMNYITKLYSEAKTKRKENVQHSKLEEKHIQVPESIV

SEQ ID NO: 786506 - protein, 68 aa, Homo sapiens
RIQASNDVRGHGRGVEGLKHNLSHLLSVGLGVQGGLGQQHWVLLRGHAQLVVEGVVPDLLPFFSDQFI

SEQ ID NO: 786507 - protein, 116 aa, Homo sapiens
GPPTTIHTKCSLQDAVSKSRQGPNSGQPLLPADLNKGCAIVFYYYYYYYYYYYYYYYYFNHEGQVVAPRSSSYLSYFCFFPTFCFLPFLLSYKLGKRGGGGEAGKDNRRSGGLIPQ

SEQ ID NO: 786508 - protein, 130 aa, Homo sapiens
FLNGNPSMTTYLTLQHDLLTLPRIFLASVLPSCLECSKPTYYEFHCSTFMLSAYQIHLLFLYWKKFHASFKILFHCLPVKFSLTSILSLAPFYLVNYTILYQHKLYYNYILISFSLLSYEFLNSRFVRSS

SEQ ID NO: 786509 - protein, 327 aa, Homo sapiens
GHTPPKVTGSMMEDAIVSTSTPGSPETKNVDRDSTSPLTPELKEDSTALVMNSTTESNTVFSSVSLDAATEVSRAEVTYYDPTFMPASAQSTKSPDISPEASSSHSNSPPLTISTHKTIATQTGPSGVTSLGQLTLDTSTIATSAGTPSARTQDFVDSETTSVMNNDLNDVLKTSPFSAEEANSLSSQAPLLVTTSPSPVTSTLQEHSTSSLVSVTSVPTPTLAKITDMDTNLEPVTRSPQNLRNTLATSEATTDTHTMHPSINTAVANVGTTSSPNEFYFTVSPDSDPYKATSAVVITSTSGDSIVSTSMPRSSAMKKIESETTFS

SEQ ID NO: 786510 - protein, 85 aa, Homo sapiens
QSCSGVTRLAKSKVPEATSLDCPAGPTFKAAPQDPLAAVDWGPSAPGPFVAASTGAPVASQSQLGGQMVAGAMVTVGKEVLGICG

SEQ ID NO: 786511 - protein, 134 aa, Homo sapiens
MPPAPNDDLATLSELNDGSLLYEIQKRFGNNQIYTFIGDILLLVNPYKELPIYSSMVSQLYFSSSGKLCSSLPPHLFSCVERAFHQLFREQRPQCFILSGERGSGKSEASKQIIRHLTCRAGASRATLDSRFKH

SEQ ID NO: 786512 - protein, 40 aa, Homo sapiens
SHSVCTSSHTLSFFLLPSGAALSNMVAPSHMWLLKLIKFG

SEQ ID NO: 786513 - protein, 52 aa, Homo sapiens
PTPLWGRTSNPWLLTLAAKSREAAHNPSGSVSVGPAMEARGWESQGCPRHSR

SEQ ID NO: 786514 - protein, 84 aa, Homo sapiens
HSGKFSAMISSLLPLPSSLSGLHVCVPLPEVEAALGCLFYPTLSLCDSVSVSLDLAMGLEQQPLVLALKQQQQVVQQQHMHLQE

SEQ ID NO: 786515 - protein, 72 aa, Homo sapiens
SLFGNWRRQSRQAIFFQSASFSSSLSSLSTSSSSLSLSPLQARLAVLPRLVSNSWAEVILLSQPPKVLELQA

SEQ ID NO: 786516 - protein, 111 aa, Homo sapiens
MPLNLHNPPLAHTGRNLRPPDNQCLPKMELKLNPSQEDAGLHKAEFGNILMRKLSHERNFLLLPKLSRAQIRAVNPFSRNPNLWLTGAGTAPGSTHTYFILSRLHSGIRAR

SEQ ID NO: 786517 - protein, 104 aa, Homo sapiens
MPLNLHNPPLAHTGRNLRPPDNQCLPKMELKLNPSQEDAGLHKAEFGNILMRKLSHERNFLLLPKLSRAQIRAVNPFSRNPNLWLTGAGTAPGSTHTYFILSRP

SEQ ID NO: 786518 - protein, 57 aa, Homo sapiens
MHMLMCVVHSHEHAPMCVPVCVHLRASVNECVAVCKFQCVVVSVGVWNVHLCECGSV

SEQ ID NO: 786519 - protein, 110 aa, Homo sapiens
QVPPAHSESQVRCHFRDWLGPVDGPALAAPVWDLSWGPAPGVATTHECWCFCLWILSGMRRVDILTWELLIFNFSLIDTVVFSFISRSFPSIVRLTNGVGFLTFICSCSS

SEQ ID NO: 786520 - protein, 84 aa, Homo sapiens
GLTVMLEGKEEQVTSYVEGAGKERVCAGKLPFLKPSDLVRLIHHHENSMGKTCPHDSVISCWAPPTTSRNYGSYKVRFGWGPRA

SEQ ID NO: 786521 - protein, 119 aa, Homo sapiens
VLVHLGLLTKESGFKIAETAFSGGPLGELVQWSDLITSLYLLGHDIRISASLAELKEIMKKVVGNRSGCPTVGDRIVELIYIDIVGLAQFKKTLGPSWVHYQCMLRDLDSFATEPEFNH

SEQ ID NO: 786522 - protein, 90 aa, Homo sapiens
TMCQTLFWVLEDKALPLGSLHSSGKTVNKVQTNEKRRPCQIPASAINTTERLSKRAIGGGSFSSGAGEGLSEVSGAETQNTRSKLFEELR

SEQ ID NO: 786523 - protein, 61 aa, Homo sapiens
MRGSCSLWRLCSCLDAQEACGSLGFFATQEVKTSLSWEAWVCLADRASQMQGWHCHGKGTL

SEQ ID NO: 786524 - protein, 121 aa, Homo sapiens
  misc_feature (104)..(104): Xaa can be any naturally occurring amino acid
  misc_feature (110)..(110): Xaa can be any naturally occurring amino acid
SHQSTCVSRWVLWLLFRLLLGFISHQSTCVINTLADHRHRGTDFGGSPWLLIITVFLRSYKFAISLCTTYLWVINTLADHRHRGTDFGGSPWLLIITVFLRSYXICHLPXHNLPLCVFPEE

SEQ ID NO: 786525 - protein, 72 aa, Homo sapiens
TMKITRNELVLRDIQANRLTGDATKLMGANQLNLTPCLVWAHHLSLSQTNFTVKSYHIPCLNFWIRGGFTSS

SEQ ID NO: 786526 - protein, 55 aa, Homo sapiens
FYVLYSLCMPLLAAIGGRPLPLPILGLHCFGFPGQLPSVWASEDSQPEPNINNVP

SEQ ID NO: 786527 - protein, 68 aa, Homo sapiens
MSSSDYLLTGPDKVTHTPRLETAIRSRMGTHPAMTIATHKGDTRWMANHTSKGQRSQTQLITQYDRAT

SEQ ID NO: 786528 - protein, 154 aa, Homo sapiens
TEQHTHPRNGTHSHGTADSTTEQHTHSHRQHTHTHGTAHSPTRGRWVSCSFSSSRPFPGPWSSPSFEHRCLLERDLLVRTMSVPATTSFGLREAWNVLNAPWGSSLLRSQGSRVCCLSCRQMRSQGWGLCGGSPERTAAEVERVLPERRPGRGN

SEQ ID NO: 786529 - protein, 69 aa, Homo sapiens
KDSVLPKNTDLGRADHKAKGSHGDRCEVWELLQVTSKRRFIEDQGRGPQRTNCASDSFLLLFFLAEIDD

SEQ ID NO: 786530 - protein, 196 aa, Homo sapiens
GDLFHRLWHIMNEILDLRRQVLVGHLTHDRMKDVKRHITARLDWGNEQLGLDLVPRKEYAMVDPEDISITELYRLMEHRHRKKDTPVQASSHHLFVQMKSLMCSNLGEELEVIFSLFDSKENRPISERFFLRLNRNGLPKAPDKPERHCSLFVDLGSSELRKDIYITVHIIRIGRMGAGEKKNACSVQYRRPFGCA

SEQ ID NO: 786531 - protein, 83 aa, Homo sapiens
PHETPRRCIGNINPLSGSSSTLLLSELGCSFVLATTKVYANLHGFLPPSRHLSKKFPEGSADGAGSETPGSASFREPPTTQDS

SEQ ID NO: 786532 - protein, 102 aa, Homo sapiens
AEWQSVCDATSSFLPLFGFIFTRLLLGVFLVIQSLSVQSVVLGPAALASPERLLEIHNLRPHTALLNQNLHFNNTPRCLRSHYSLRSTDGIPKNFLNQSCMN

SEQ ID NO: 786533 - protein, 112 aa, Homo sapiens
MIYKSYITSHQQSPSLLPHNSFTFFFLLYIIPYHSPSAFFSSQSSLFCHSGRIYTSTVNTVSRLLPLMVLFLKCFYLKSQKFDSFSNSLLKRYPIRGFPQPPNLKQHICWAW

SEQ ID NO: 786534 - protein, 79 aa, Homo sapiens
AWAAACCGAAAAPRTLHRLLLKPDPQPSQHEGKHGVAAVLFPDGPQSSVQLSQSTFLLRIIGQTQWLMPVIPALWEAEA

SEQ ID NO: 786535 - protein, 76 aa, Homo sapiens
IYKIFGTIPLGSQALDACCPAMREHQRVTAYPKVPLTEQNIIPCNPKAGTQLGPRKTGIVLESLAVLRVLSSGCLA

SEQ ID NO: 786536 - protein, 245 aa, Homo sapiens
DKVFSRKSHLETHKIIYTGGKPYKCKVCDKAFTCNSYLAKHTIIHTGEKPYKCNECGKVFNRLSTLARHRRLHTGEKPYECEECEKVFSRKSHLERHKRIHTGEKPYKCKVCDKAFAYNSYLAKHSIIHTGEKPYKCNECGKVFNQQSTLARHHRLHTAEQPYKCEECDKVFRCKSHLERHRRIHTGEKPYKCKVCDKAFRSDSCLTEHQRVHTGEKPYMCNECGKVFSTKANLACHHKLHTAEK

SEQ ID NO: 786537 - protein, 66 aa, Homo sapiens
CQTDPTQPQAGRSQGQQKPPWPVHSAATLLPQANPLSGRELPDSLLPMHHCTQGTSSQNKDSVNWD

SEQ ID NO: 786538 - protein, 41 aa, Homo sapiens
GRGKEGRNDERKEGKKGEGQKEKKKREKEAKKASTKDSESP

SEQ ID NO: 786539 - protein, 115 aa, Homo sapiens
RLHSGPLWCFSCSALSSSPTGPQGPSKGLNAPPVDSSALQLSMILPTHSSTPRYLPFLHGHPYAASLHSPVKSLCTPGSKRNETGGTRRPQRLPCVRRGGCVDEEIIDGGGWILY

SEQ ID NO: 786540 - protein, 112 aa, Homo sapiens
TPLSHCVCRDGKIGPPKLDIRKEEKQIMIDIFHPSVFVNGDEQEVDYDPETTCYIRVYNAHERWLVVLRSRRSLWWEKRQQLPRNQPPKSHPKRAPWDTIQGCRWELYSLCQ

SEQ ID NO: 786541 - protein, 73 aa, Homo sapiens
ASGHLCKELDFLPLSASGNGRIISLFPQCTWPRGYCTKETFKDNPYTSAFRPQSRMQAVCSDRNDCPPKRGLR

SEQ ID NO: 786542 - protein, 344 aa, Homo sapiens
MATPYVPVPMPIGNSASSFTTNRNQRSSSFGSVSTSSNSSKGQLEDSNMGNFKQTSVPDQMDNTSSVCSSPLIRTKFTGTASSIEYSTRPRDTEEQNPETVNWEDRPSTPTILGYEVMEERAKFTVYKILVKKTPEESWVVFRRYTDFSRLNDKLKEMFPGFRLALPPKRWFKDNYNADFLEDRQLGLQAFLQNLVAHKDIANCLAVREFLCLDDPPGPFDSLEESRAFCETLEETNYRLQKELLEKQKEMESLKKLLSEKQLHIDTLENRIRTLSLEPEESLDVSETEGEQILKVESSALEVDQDVLDEESRADNKPCLSFSEPENAVSEIEVAEVAYDAEED

SEQ ID NO: 786543 - protein, 315 aa, Homo sapiens
MATPYVPVPMPIGNSASSFTTNRNQRSSSFGSVSTSSNSSKGQLEDSNMGNFKQTSVPDQMDNTSSVCSSPLIRTKFTGTASSIEYSTRPRDTEEQNPETVNWEDRPSTPTILGYEVMEERAKFTLKEMFPGFRLALPPKRWFKDNYNADFLEDRQLGLQAFLQNLVAHKDIANCLAVREFLCLDDPPGPFDSLEESRAFCETLEETNYRLQKELLEKQKEMESLKKLLSEKQLHIDTLENRIRTLSLEPEESLDVSETEGEQILKVESSALEVDQDVLDEESRADNKPCLSFSEPENAVSEIEVAEVAYDAEED

SEQ ID NO: 786544 - protein, 315 aa, Homo sapiens
MATPYVPVPMPIGNSASSFTTNRNQRSSSFGSVSTSSNSSKGQLEDSNMGTASSIEYSTRPRDTEEQNPETVNWEDRPSTPTILGYEVMEERAKFTVYKILVKKTPEESWVVFRRYTDFSRLNDKLKEMFPGFRLALPPKRWFKDNYNADFLEDRQLGLQAFLQNLVAHKDIANCLAVREFLCLDDPPGPFDSLEESRAFCETLEETNYRLQKELLEKQKEMESLKKLLSEKQLHIDTLENRIRTLSLEPEESLDVSETEGEQILKVESSALEVDQDVLDEESRADNKPCLSFSEPENAVSEIEVAEVAYDAEED

SEQ ID NO: 786545 - protein, 161 aa, Homo sapiens
MATPYVPVPMPIGNSASSFTTNRNQRSSSFGSVSTSSNSSKGQLEDSNMGNFKQTSVPDQMDNTSSVCSSPLIRTKFTGTASSIEYSTRPRDTEEQNPETVNWEDRPSTPTILGYEVMEERAKFTVYKILVKKTPEESWVVFRRYTDFSRLNDKIITMLTF

SEQ ID NO: 786546 - protein, 235 aa, Homo sapiens
MATPYVPVPMPIGNSASSFTTNRNQRSSSFGSVSTSSNSSKGQLEDSNMGNFKQTSVPDQMDNTSSVCSSPLIRTKFTGTASSIEYSTRPRDTEEQNPETVNWEDRPSTPTILGYEVMEERAKFTVYKILVKKTPEESWVVFRRYTDFSRLNDKLKEMFPGFRLALPPKRWFKDNYNADFLEDRQLGLQAFLQNLVAHKDIANCLAVREFLCLDDPPGPFDSLEESRVSAVLYST

SEQ ID NO: 786547 - protein, 344 aa, Homo sapiens; identical to SEQ ID NO: 786542

SEQ ID NO: 786548 - protein, 344 aa, Homo sapiens; identical to SEQ ID NO: 786542

SEQ ID NO: 786549 - protein, 315 aa, Homo sapiens; identical to SEQ ID NO: 786544

SEQ ID NO: 786550 - protein, 114 aa, Homo sapiens
MLPGPEEPSSNLKHYLIPRMAQTNSRQSTSAGNPACLSSPDFGMWNLKHFLFPLSCSRSFALLLLGALTMSVWPWRHGLQARCEAYKNESKHLCLPCKIQEMISPHSDTLIELH

SEQ ID NO: 786551 - protein, 36 aa, Homo sapiens
MPPFWFLRCPPVSPRGTVTPSACLAANVTPATRERS

SEQ ID NO: 786552 - protein, 55 aa, Homo sapiens
MTAFTEVKDCNIASFVKSLQPEVSSVIFSLKNIITSTGRRVGENRDLAISRLDEV

SEQ ID NO: 786553 - protein, 76 aa, Homo sapiens
LVFELEELRPLKTGYYPAGAGVSEWNTMELVWQLLGKTTKWIQQLLQEGPATVWVKECCQSDPYRNRKQKEESQLG

SEQ ID NO: 786554 - protein, 82 aa, Homo sapiens
RKETGYNMTTESLHACFPSISGVCSSRITWAQEFKTSLDNMVKLRLYKNLKVSWVWWCAPVVPATWEAEAGRSLEPRRSRLQ

SEQ ID NO: 786555 - protein, 117 aa, Homo sapiens
GASCWWVSKSGVCRVVALCGGSKSVFSFCTALVEVSQELCVCSRLLPGNSGRWGWEADPSPMVKHHLLDADLVTVSSYEIWLYNKVWHLFPLSVLLLFQPYETSPCPLAFWYGCEAP

SEQ ID NO: 786556 - protein, 141 aa, Homo sapiens
MDAGMPTGRSQLSSEVAACRTKTQGCHEEEPLGPPASSRTPWSFIMAHAQHTADNRFSSPWSPRASPSFCLGSLMPTHQLFQAPKGKLKKNLVPGPAAKPQDHTALEPCCQVRLGGPRRGSPPAWEAASPALAKHHLANCS

SEQ ID NO: 786557 - protein, 102 aa, Homo sapiens
WEAQSTSPEQKEDLGGGCWLTQLLLSPIRPIQKSASCSLMSLGQGLPTLRDLGAGGPHITETHMIVSSVTQGTLNPHSSYMWGNKYRGTEREESHSRSHNVG

SEQ ID NO: 786558 - protein, 119 aa, Homo sapiens
MNRPLPQLSDLLWSLALCLESEWPGHVLQAEGPQQGSLSPERWDRWAFWGLAHQNPQAGGLLVSAAAAALGDSVLGFCPHFTATTQEWRGRQEPQPHRGGRTLSQPCLAAAAGSQVSPM

SEQ ID NO: 786559 - protein, 77 aa, Homo sapiens
TGLPLRHESSSPEIPLGARHFLLGTESRDLDPAGRRRALHNTGPLSIRAYWKVVRPAKSCHLDIWDKEGPWRSGRRE

SEQ ID NO: 786560 - protein, 85 aa, Homo sapiens
QKKEQKLWYSSSMGIRNPAPVFLSTLKVASWSEMTTRELAIMSTFQAKNRRGQSDICPLPFNYSFLEVPYNAGQKLIMYVDIPTH

SEQ ID NO: 786561 - protein, 34 aa, Homo sapiens
MEFRIRPLPWHRYRKVDYFSHHATLRHRKRLSSR

SEQ ID NO: 786562 - protein, 270 aa, Homo sapiens; identical to SEQ ID NO: 754352

SEQ ID NO: 786563 - protein, 218 aa, Homo sapiens
SALPCLRLDVVNLPTSLRHKVNEHEQDGNELQTTPEFRAHVAKKLGALLDSFITISEAAKEPAKAKVQKVALEDDGFRLFFTSVPGGREKEESPQPRRKRQPSSSSSEDSDEEWRRCREAAVSASDILQESAIHSPGTVEKEAKKKRKLKKKAKKVASVDSAVAATTPTSMATVQKQKSGELNGDQVSLGTKKKKKAKKASETSPFPPAKSATAIPAN

SEQ ID NO: 786564 - protein, 87 aa, Homo sapiens
MTPREKALDTGQDAQRCPICPRGWPSAGMTSGEHTDRSPSYSTKHPPPPARTGLMSLCPQLLTAALTSAEGRGQTAHHHYPTSRGSA

SEQ ID NO: 786565 - protein, 70 aa, Homo sapiens
ISLEGWRWLSGRRGHTGSLDNPELFQEESTKKINRPVASRWTDNLSLSKERQEGALWGQGPSRQEGAKVR

SEQ ID NO: 786566 - protein, 68 aa, Homo sapiens
HHHRCIIATTSIIITYITVTSTVTAITSIIVVTSVTTTTTAITTSLSQQGHMSTETGAAAEGDSGEAV

SEQ ID NO: 786567 - protein, 182 aa, Homo sapiens
VLIVIFEISQAYLADNRAQRAKMTNTKGKRRGTRYMFSRPFRKHGVVPLATYMRIYKKGDIVDIKGMGTVQKGMPHKCYHGKTGRVYNVTQHAVGIVVNKQVKGKILAKRINVRIEHIKHSKSRDSFLKRVKENDQKKKEAKEKGTWVQLKRQPAPPREAHFVRTNGKEPELLEPIPYEFMA

SEQ ID NO: 786568 - protein, 265 aa, Homo sapiens
TPKKSKARILESITVSSLMATPQDPKGQGVGTGRSASKLRIAQVSPGPRDSPAFPDSPWRERVLAPILPDNFSTPTGSRTDSQSVRHSPIAPSSPSPQVLAQKYSLVAKQESVVRRASRRLAKKTAEEPAASGRIICHSYLERLLNVEVPQKVGSEQKEPPEEAEPVAAAEPEVPENQRKYLDGPHKLNPGSIAHLAHHKALNDLSASKTGETPSGRASTDGTEREPRQMGPMSSHRMQCQGRHAHITSHGRCVNWPRRQNLAGL

SEQ ID NO: 786569 - protein, 157 aa, Homo sapiens
TPKKSKARILESITVSSLMATPQDPKGQGVGTGRSASKLRIAQVSPGPRDSPAFPDSPWRERVLAPILPDNFSTPTGSRTDSQSVRHSPIAPSSPSPQVLAQKYSLVAKQESVVRRASRRLAKKTAEEPAASGRIICESGGLAVAGGPWCQAQMEAF

SEQ ID NO: 786570 - protein, 103 aa, Homo sapiens
GGYSGEWDSAPALKKFPVCKNNPRSCGIPDERELNLLAAVRESWALGDGRSSAEILAGWMVYAEITGGRIIRVSPSEPNVVQPALVGGGQTPGTPEASFRRGK

SEQ ID NO: 786571 - protein, 71 aa, Homo sapiens
DVLQAAGEWEPAAQPPEEEADADLAEGPPPWTPALPSSEVTVTDITANSITVTFREAQAAEGFFRDRSGKF

SEQ ID NO: 786572 - protein, 120 aa, Homo sapiens
GEKERGMACLYPSHVAAHQVLGEWEPVQGGKSSENDKWTMSDPGAEAPTCSRAASGVDKEQQGRLRPGVLGSTVSSHSLGHQNLSKDKTQCLWQQRARGIMCFRGGRRGCTPWKQYIVLQ

SEQ ID NO: 786573 - protein, 122 aa, Homo sapiens
LCAYRRLQALQPCSSQGEGSSPLHLESVLSILAPGTAGESLDRAGAERVRSPLEPTPGRFPAVAGGPTPGMGCQLPPPLSGQLVTPADIRRQARRVKKARERLAKALQADRLARRAEMLTGG

SEQ ID NO: 786574 - protein, 285 aa, Homo sapiens [sequence omitted]

SEQ ID NO: 786575 - protein, 138 aa, Homo sapiens
LSAMSISDKQPAVKADSTLTSVSATLPVALGWSLGPASLAATGLYGGQQHPKSLPALPLLLFHQLLLAHYCLFHLTPVLVLFLLPGRKGRNEHGNTLSGALTYSLKLDVSGLRSASDLKPFFRAEIACVLNPLDGQTL

SEQ ID NO: 786576 - protein, 93 aa, Homo sapiens
RSPPAGAQSALLKCGFAIQALHLPIVQMLLVAKLSVSSLSDFMCTQRICSVHSFMDTFASLYSKPKDYMVKVNSKSEPFSPFTSWQSEPFRWL

SEQ ID NO: 786577 - protein, 115 aa, Homo sapiens
SFSSSPSSFFLLSPSSSSLFRFLFSSYSSSSSSFLFFFSFSFSFSFSFSSFFFFFSFYILYLNFVFTHHFKVFCSMTAARDLNTLLHFMAIHSLFTRFPSNGTVMLLKPHLKDLI

SEQ ID NO: 786578 - protein, 38 aa, Homo sapiens
MVFCYGRLTRLMHRLYPPWDINSMKVWLDCQPGAVWPM

SEQ ID NO: 786579 - protein, 105 aa, Homo sapiens
LCLARLLCYAFVCITRMQFADSSCFMPRFIRLPFVQHPPSAWPLVDHSCHFTYSSDSSSDQAQYERWRHPLKPIRKHARLRLVDDKHRPRPGNPSGGRGIWTFLN

SEQ ID NO: 786580 - protein, 256 aa, Homo sapiens
MPLHKYPVWLWKRLQLREGICSRLPGHYLRSLEEERTPTPVHYRPHGAKFKINPKNGQRERVEDVPIPIYFPPESQRGLWGGEGWILGQIYANNDKLSKRLKKVWKPQLFEREFYSEILDKKFTVTVTMRTLDLIDEAYGLDFYILKTPKEDLCSKFGMDLKRGMLLRLARQDPQLHPEDPERRAAIYDKYKEFAIPEEEAEWVGLTLEEAIEKQRLLEEKDPVPLFKIYVAELIQQLQQQALSEPAVVQKRASGQ

SEQ ID NO: 786581 - protein, 287 aa, Homo sapiens
  misc_feature (188)..(188): Xaa can be any naturally occurring amino acid
  misc_feature (195)..(196): Xaa can be any naturally occurring amino acid
  misc_feature (199)..(199): Xaa can be any naturally occurring amino acid
  misc_feature (201)..(203): Xaa can be any naturally occurring amino acid
MPLHKYPVWLWKRLQLREWAFVFHTVSVAARELNVNTFERTYPPWGTGERGTSVERSPKLSPPVVSSLNYRPHGAKFKINPKNGQRERVEDVPIPIYFPPESQRGLWGGEGWILGQIYANNDKLSKRLKKVWKPQLFEREFYSEILDKKFTVTVTMRTLDLIDEAYGLDFYILKYFEYPEESTFFSIXGWTLSEXXFFXFXXXTPGFYPEDPERRAAIYDKYKEFAIPEEEAEWVGLTLEEAIEKQRLLEEKDPVPLFKIYVAELIQQLQQQALSEPAVVQKRASGQ

SEQ ID NO: 786582 - protein, 283 aa, Homo sapiens
MPLHKYPVWLWKRLQLREWAFVFHTVSVAARELNVNTFERTYPPWGTGERGTSVERSPKLSPPVVSSLNYRPHGAKFKINPKNGQRERVEDVPIPIYFPPESQRGLWGGEGWILGQIYANNDKLSKRLKKVWKPQLFEREFYSEILDKKFTVTVTMRTLDLIDEAYGLDFYILKTPKEDLCSKFGMDLKRGMLLRLARQDPQLHPEDPERRAAIYDKYKEFAIPEEEAEWVGLTLEEAIEKQRLLEEKDPVPLFKIYVAELIQQLQQQALSEPAVVQKRASGQ

SEQ ID NO: 786583 - protein, 252 aa, Homo sapiens
MCIFLIPLAGSEEANGGTPQSRISRETRLPPIHLHRMKSLIRSKAERPQGGRHTGISTLGKKAKAGSGLRKKQRRLPRSVRSTRDVQAAGKKEDAPQDLALAVCLSVFITFLVAFSLGAFTRPYVDRLWQKKCQSKSPGLDNAYSNEGFYDDMEAAGHTPHPETHLRQVFPHLSLYENQTPLWVTQPHPHATVILDSTLGRSRKDPGSSQSPGQCGDNTGAGSGNDGAVYSILQRHPHAGNRELMSAAQDHI

SEQ ID NO: 786584 - protein, 112 aa, Homo sapiens
MSLWLCFQCPLGVSKSNKKRINLCEEIPFDILEMAACKLLKHLNGDSLLLPRLECNGTISALHNLCLPDSSYSPASVSQGAGITGWCAMVRLLLTTLPPSGIQAILLPQPPE

SEQ ID NO: 786585 - protein, 144 aa, Homo sapiens
MEIHSCCPGWSAMAQFRLSTISASQIQAILLPLSPKELGLQMKAPLSSKKSTSQATAGVQWCDFCSLHFHLPGFKPFSCLSLRSSWDYRHVPPCPANFVFLVEAGIHHIGQAGLELLASSDLPASASQSAGNTGMKQPHPAWIN

SEQ ID NO: 786586 - protein, 118 aa, Homo sapiens
MHCATWGSHCPSLGLAFPIFDRTWLCLATPPPMGEFLGLPLSWLQLRCQSQPCPSQEQWARQGQSPPVPGGSTHGPGLFSALADGVRRGFSTPSTMTALDHCPAVTRGTCLPQNISCP

SEQ ID NO: 786587 - protein, 78 aa, Homo sapiens
VRNGYGFIHRNDAKEDVFVHQTAIKKKPRKFLRSVGDEETVEFDVVEGEKGAEAANVTGPGEVPVKGSCYAPNLRKFR

SEQ ID NO: 786588 - protein, 87 aa, Homo sapiens
VSMLPSLGNCFFHGSLQSTDQKIPLMRPHHQGLGCQLQSHADSQQPLSWSLPKKLGRVVIITVAACCLNPLSSLGEGEQSSLWLLAA

SEQ ID NO: 786589 - protein, 129 aa, Homo sapiens
  misc_feature (51)..(51): Xaa can be any naturally occurring amino acid
GPDDGEARTAAALGDRYRVTRPEPAAVPGIVGDMQWLALPTKEKHRKAEFXATGELCIAGRPASSPDASRAREQPGLCRAQLRGGPCGPGVFELRAELTPSMHIDWKKEDLGKWILCCQLLVSPSLLPS

SEQ ID NO: 786590 - protein, 45 aa, Homo sapiens
GPGEADWRKSRAWRGCKAANTRPGKAALRHGLGLQRPLAGAGPAE

SEQ ID NO: 786591 - protein, 60 aa, Homo sapiens
SLRAVGVILALPIFPESDRAAQSRQSHQAEERRCWQWSVPLVCPGVVEVSQCSLKKKEGV

SEQ ID NO: 786592 - protein, 43 aa, Homo sapiens
TLPANLSTRLGQTIPLPFAYWNQQQWRLGSLPSGDSTETGGCQ

SEQ ID NO: 786593 - protein, 106 aa, Homo sapiens
FPVCEKVNACIALSTVPVTNYALKKRESCPVVLKPATQEGFVFVVTFLSNFLSSYWISWCCFSGGGSALTGGHSSQLGSGAPQCGHRRGTVSCPWVQGLQSCFELK

SEQ ID NO: 786594 - protein, 204 aa, Homo sapiens
TCILDINKQVVGGRKVWISDQKSLDISAQSHDESGEGARASQAQMPRSPLEMAFRCRFLFHRSGWSPKFCSWRADSENMSWCFSSFCRRTPLRVLVMEGNPKTTGVRDRYSDAFSRNTLGTARKPLLAHSFAGISSHQACGCASWYRFASWSHGFCSPRREGKVWCSLREACSFAGRRGRRTGGPFGAEEAEESKLGAVPLLQP

SEQ ID NO: 786595 - protein, 76 aa, Homo sapiens
IAKCVTYHVVFSFRGQIQNAPLPSRELLEKFLFQVPKEHSVHSSVQLLQTDRAHGSRKQSQIFIFTYYGLLPCLRN

SEQ ID NO: 786596 - protein, 105 aa, Homo sapiens
HQPGLCPSLLLPLSTGLHHHYCPGPVHINHGETGHSWGQLLKRRTSAFGLHFLSLPLSSLSFSWNQRHTHVAPYFTFPDLHSPPIHKSRQTSAGCVVRKAAETEL

SEQ ID NO: 786597 - protein, 101 aa, Homo sapiens
MPVCLQETWLGVWGKTASALSARREGMRTSVHQQNQSTAISACLNRPHPKIKMQGEFTAHQLSDLEVQRIPGEASAWAQVGGPAQRGRYSASFFLTLYGGS

SEQ ID NO: 786598 - protein, 149 aa, Homo sapiens
FFFEIESHSVTQAGVQWYNLNSLQSPPPRLKQFSCLSLPSCWDYGRAPPCPTNFCIFDRVRVSPCWQAGLELLASSDPPALASQSAGITGVSHHTQPAPLLSLETIYCGLCQSGTAWISSSPIYLLRDPRYSFLCLFPQLHRNSTYRIG

SEQ ID NO: 786599 - protein, 91 aa, Homo sapiens
ANKDEKATLQRIYLRPPWVVGTQTIPSPVQLMSKKCLAFSFLVVLLPALRCFLLATCRPGCSQRLKGALLQISRALSLTCSLLSYVFLHKF

SEQ ID NO: 786600 - protein, 84 aa, Homo sapiens
DAVSKKLARQPKEKSSDNNKLALFLYPQFLIGYLGNVAGDSFLQHHFQGVYKLPLQIHCPHLPQVRETIWAECLLPLHSHAQVR

SEQ ID NO: 786601 - protein, 77 aa, Homo sapiens
WGKWAPPILQAGDGVASIFKQLLPSPCLFPKVISPERKKKAERSLTGERQLSVVAFSPLLSLTFPATAHIPNNMAQL

SEQ ID NO: 786602 - protein, 121 aa, Homo sapiens
REAPRPASSSRFQSHQRSILIQDHIVFFFFCSQISLCLSPLVTTMAGVLTCQGNSLGSREWDPQCSGGCWDLGARKESGSHDSLHSQCSVARTGHLGIALLNFADLETEKGLDLQTWTALD

SEQ ID NO: 786603 - protein, 121 aa, Homo sapiens
MGSVERPPLPRVPSTAPAPRPEVWMLVSQVNWRFFHGHRSKSAWYAWRPTAFLFLGTPGVSCCPFVLRKNSHTVFLLLPPQQLSTQKVGVKGLPHAPRRGRCCLLIQFQQYGPGVASDRTG

SEQ ID NO: 786604 - protein, 105 aa, Homo sapiens
MRVGRLESGRMWSVFQPVLAAEAGENNCVKRGLPQCRTGSHHVSTTSTCRSQASSCPEYHALAFYISGFYFYISSPEYSWNIAVPMTGCMIFPPLCTQFVYYCII

SEQ ID NO: 786605 - protein, 119 aa, Homo sapiens
HTIHMPTPMIPSPPFRHSPVLHSDIFRHTGTVSFTLLLVPTHVYMCVQMLMLCTRIHVCTHVCSRVHTLMHPQHTHVHMFHCTALYYILCASALMYTHVHVFYCTALYYILCTSSLMHS

SEQ ID NO: 786606 - protein, 92 aa, Homo sapiens
  misc_feature (52)..(52): Xaa can be any naturally occurring amino acid
QAVPSSPPGCTLLSSRVYPPLLNHPSSTSRLPPEPQRGPPTQQEPHLRCCSXLLAPCFLGGPTTPWNYTGYTGMRVMTCFLCTQHGTFVNVY

SEQ ID NO: 786607 - protein, 279 aa, Homo sapiens
LLCSKLETPPSGANPRGGHQCGSALSCDEGVPAAQGASSEKPHECTKCGKALCCRSDLRVHHGVHAGEKSSACSERGSGFREKLCPDKQGTHTKEKPARDSRSGKTIFRKTRLCVPGTVHAGAKPYKCWECEKTSHKSRLIEHLRSHTGEKPCGCRECGKAFFQKSHLILRQRTHTGEKPCDCAELRESCSQDSCLLTHRRTRGEETVRVLRLREDLPEGEPHPPPRDPHEGEAAWVKRPWDRHKVTSRGRRTSRRDIARETALNQNYDATLGRGPISG

SEQ ID NO: 786608 - protein, 123 aa, Homo sapiens
LLCSKLETPPSGANPRGGHQCGSALSCDEGVPAAQGASSEKPHECTKCGKALCCRSDLRVHHGVHAGEKSSACSERGSGFREKLCPDKQGTHTKEKPARDSRSGKTIFRKTRLCVPGTVHAGA

SEQ ID NO: 786609 - protein, 79 aa, Homo sapiens
LTAHSSHFSPESCSPSRDMAPSCWFAIVPHGHPGNSSGRPVCLKVHKVPYLQDRHTVYCCAYTVFVSVSACQRPSCHWR

SEQ ID NO: 786610 - protein, 143 aa, Homo sapiens
MRENHRSKGFSQSQALPLLMCPASMPTSILTDTLLPPDHIVSHILAFTNTGLCLECSFSIWVLKTQNGGENKQHLCPEELKRFLSLFGKLLCILQNPAQLSPPPESSPIALLWILLKHPPATLSYCDVRSWPVFLQGGLEKEA

SEQ ID NO: 786611 - protein, 72 aa, Homo sapiens
VCALCGVPALCVVHGVCALCEVPALCGVCGVCALCGVPALCGMRGVCALCEVPALCGVRGVCALCGVPALCG

SEQ ID NO: 786612 - protein, 262 aa, Homo sapiens
EDYNTCEGAFGALQKICEDSAEILDSDVLDRPLNIMIPKFLQFFKHSSPKIRSHAVACVNQFIISRTQALMLHIDSFIENLFALAGDEEPEVRKNVCRALVMLLEVRMDRLLPHMHNIVEYMLQRTQDQDENVALEACEIWLTLAEQPICKDVLVRHLPKLIPVLVNGMKYSDIDIILLKGDVEEDETIPDSEQDIRPRFHRSRTVAQQHDEDGIEEEDDDDDEIDDDDTISDWNLRKCSAAALDVLANVYRDELLPHILAL

SEQ ID NO: 786613 - protein, 86 aa, Homo sapiens
LVTELSAHNTVPLFSVYNKGQPRGELKRVRNNRQTDDPGARSGRRAGARSGSAPQVSGTSCLQLKGTVNREAPVNPQATVDPQATV

SEQ ID NO: 786614 - protein, 125 aa, Homo sapiens
MSQLVSFPSALSFPNTLSTAQPNTTTSKTFPFVGMKSGILNMDSKACYFPFLVLFSASSPIILQSMCNCPLCTLNSTICTFSNVVMSRTLHFPTLHMLLPLPALSIILLISIHTVGFSASSMNHS

SEQ ID NO: 786615 - protein, 191 aa, Homo sapiens [sequence omitted]

SEQ ID NO: 786616 - protein, 248 aa, Homo sapiens
MSGALDVLQMKEEDVLKFLAAGTHLGGTNLDFQMEQYIYKRKSDGIYIINLKRTWEKLLLAARAIVAIENPADVSVISSRNTGQRAVLKFAAATGATPIAGRFTPGTFTNQIQAAFREPRLLVVTDPRADHQPLTEASYVNLPTIALCNTDSPLRYVDIAIPCNNKGAHSVGLMWWMLAREVLRMRGTISREHPWEVMPDLYFYRDPEEIAQEEQAVLTRRDPGGFQVNGTGPLLVPGPRLGATGRVS

SEQ ID NO: 786617 - protein, 129 aa, Homo sapiens
MEPNHPFYSNISKDRRYADLTEDLLPSCESLKDTIARALTFWNEEIVPQIKEGKRVLIAAHGNSLRGIAKHLEGLSEEAIMELNLPTGIPIVYEWDKNLKPIKPMQFLGDEEMVRKAMEAVAAQGKAKK

SEQ ID NO: 786618 - protein, 68 aa, Homo sapiens
GPQGVQNGLWVQPCCPRNQAGSRGWEEARAWPSGGLTCEPHGERQHPDKVSLPWRPGPCRGDRCFSHA

SEQ ID NO: 786619 - protein, 370 aa, Homo sapiens
KKGCGYVQLTHCMNCACGMPKDKAIKKFLIQSRAWWLTSVIPAILEAKVRGMHETQEFENSLDNMGIFNQFQCSSEKVLPSDTLRSALAKTFQDEQRFQLGIMDDAAECFENLLMRIHFHIADETKEDICTAQHCISHQKFAMTLFEQCVCTSCGATSDPLPFIQMVHYISTTSLCNQAICMLERREKPSPSMFGELLQNASTMGDLRNCPSNCGERIRIRRVLMNAPQIITIGLVWDSDHSDLAEDVIHSLGTCLKLGDLFFRVTDDRAKQSELYLVGMICYYGKHYSTFFFQTKIRKWMYFDDAHVKEIGPKWKDVVTKCIKGHYQPLLLLYADPQGTPVSTQDLPPQAEFQSYSRTCYDSEDSGEQP

SEQ ID NO: 786620 - protein, 147 aa, Homo sapiens
KLSAMCRQCSTDYHDVYVSDLAEDVIHSLGTCLKLGDLFFRVTDDRAKQSELYLVGMICYYGKHYSTFFFQTKIRKWMYFDDAHVKEIGPKWKDVVTKCIKGHYQPLLLLYADPQGTPVSTQDLPPQAEFQSYSRTCYDSEDSGEQP

SEQ ID NO: 786621 - protein, 189 aa, Homo sapiens
MLERREKPSPSMFGELLQNASTMGDLRNCPSNCGERIRIRRVLMNAPQIITIGLVWDSDHSDLAEDVIHSLGTCLKLGDLFFRVTDDRAKQSELYLVGMICYYGKHYSTFFFQTKIRKWMYFDDAHVKEIGPKWKDVVTKCIKGHYQPLLLLYADPQGTPVSTQDLPPQAEFQSYSRTCYDSEDSGEQP

SEQ ID NO: 786622 - protein, 152 aa, Homo sapiens
RGVWSGQPIRRAVPPRGMTLGPMGRALHSVNAVGRGSEKRELSGSRARLMCAQGRGKERAKFLRRTAGMCGRNSLSTAPLIPTRLLRERLGPARGYPATPNSTAPRDPPPPITPSVGFQCLKKDALFKKARSFCSIFPSSVSLFAFSHLPKP

SEQ ID NO: 786623 - protein, 111 aa, Homo sapiens
CPGFEGLYPSHANGRFDCDFFRIHHPRLNQMFVVSSEQSRTIASSFWDLSLCTPAIKFLAPILLTHIGLAVNQNLRVFLISAPPEHFYPFLCFSANFASGQLRIDLGPLTF

SEQ ID NO: 786624 - protein, 160 aa, Homo sapiens
MPSIYKSVTINTSKEMMCFSDFPVPDHFPNYMHNSKLMDYFGMYATHFGLLNYIRFKTEVQSVRKHPDFSINGQWDVVVETEEKQETLVFDGVLVCSGHHTDPYLPLQSFPGIEKFEGCYFHSREYKSPEDFSGKRIIVIGIGNSGVDIAVELSRVAKQI

SEQ ID NO: 786625 - protein, 136 aa, Homo sapiens
CCVGQAGLELLTSSDQSTLASQSAGVTGMSYCARLAITSTRHLSGFQALSAGGALSRQQLSQERGLVRSPCLRCERLRLRTRIRHCRRLYWNVALNWTDILWMGRERRYCDPILQKWKVKPRGRRGGSAAELEPVD

SEQ ID NO: 786626 - protein, 115 aa, Homo sapiens
MEVLTVLPRLECSSMMIAHYSLKQSSCHTSRVAGTTGVCHHAWLIFLFYFILFFVEMESHYVAQAGLKLLASSDPPASVSQIVGMTGMSHCTWPKSFCLLVLFFEMDFHSSPRLQ

SEQ ID NO: 786627 - protein, 47 aa, Homo sapiens
MVLSTCPCCGQAALRTKVGKTPCHPLGIIPGNLGTPKNCCIMLCPKP

SEQ ID NO: 786628 - protein, 109 aa, Homo sapiens
WQPSVNLLVLPPVLFHSCRKLEKQTLLAVCCPGSRHSLHYSLAQSAAAGLGMASGGRWPLSPSPGKGQQQGDASWVCTEKSTVSLTPRSLTPRSLTLTSLTPPSLTPFS

SEQ ID NO: 786629 - protein, 37 aa, Homo sapiens
MGSLYEPNSNGEIKGSNPVFRAKNTGLSESIKAYLGR

SEQ ID NO: 786630 - protein, 37 aa, Homo sapiens
GKLVILKSGYQQDNCQHSDPKTLEQWRISTSTKNTFG

SEQ ID NO: 786631 - protein, 119 aa, Homo sapiens
  misc_feature (100)..(100): Xaa can be any naturally occurring amino acid
SLRVRSCRKKSARPAAGVGDTGIEDANAVRGSASQGPLTEPWAEDSPPDQPPPASARSSVGEGELQYASLSFQMSVILFYFLCILFFFLFVYFLGINSLXWAQTRVRRVLRPLCIVKET

SEQ ID NO: 786632 - protein, 72 aa, Homo sapiens
ACALWRPPGHSILEHPKSLMLAEEAQFAATEVKTKKILVSFGSTRTGREVDVCLVSLALRLGLVCLWPLCSL

SEQ ID NO: 786633 - protein, 69 aa, Homo sapiens
IRESNNCYFNVFPAQPHLEWLYSSDQVHQASVCLGSTPSSGSHHVSLGQGELMCVSVSSSVTWKCHVSA

SEQ ID NO: 786634 - protein, 67 aa, Homo sapiens
DLFNLPSDSLKDTTGYHCHFTEEETQALRSKFPQCDTVKGRKWCSNSGNTAPESILLPSALAFSLDG

SEQ ID NO: 786635 - protein, 116 aa, Homo sapiens
GRAFKQYQSALRESTQWSRWHFNKADSCLLACMSASLQPGESLLSLWESLLEAYWLQDEVSFSIFFFFFAKISLKLVNVRNESEALLRNMKGGVQARERTKRVEVLERWDKSMVEG

SEQ ID NO: 786636 - protein, 58 aa, Homo sapiens
RGGKRRQQWTGNPKMVKNRYSGSDSSGWKWKRLWLGTSKEVQMLLIRFPVWPRSGRLM

SEQ ID NO: 786637 - protein, 70 aa, Homo sapiens
YRLRLSPFWAVETPTPGSPASYGLLTAPLLLLFSSSSHECALASWSDLARMPSNAGPLNLGFRSLQTCKK

SEQ ID NO: 786638 - protein, 113 aa, Homo sapiens
IPPLRFHCHCPDPSSHHHLLPGSCNSLSHNWYSCLHLCSLESSLYTVARTIFWNKSDFILSLLKTLQWPLTVLGIKSKLFITTYKIFVLIYRFFFSTPAQDGVLLCCPGWSAV

SEQ ID NO: 786639 - protein, 71 aa, Homo sapiens
SWRRASGCWGVRDDGESGARPSRGDTAFQELSPGKLTDIFKEPSWTFCFLLLITGFGINNIQQPGHCGSCL

SEQ ID NO: 786640 - protein, 142 aa, Homo sapiens
SWRRASGCWGVRDDGESGARPSRGDTAFQELSPGKLTDIFKEPSWTFCFLLLITGFDGVSLLFSRLQYSGVISAHCNLHLPGSSDSPVLASRVAGITGTCPHSQLIFVFLVVTGFHHIGQAGLKLLTSGDPPRPPKVLGLQA

SEQ ID NO: 786641 - protein, 124 aa, Homo sapiens
EELDLSPSLEDDSCKNGWRAFATVAGEQEAGHLWDCATSLERESLLAGVPRHTGCCLQRATDSSGPEPVQGVAVQDLRGLSSVSLQKSRSESYLGIPVVWPFLLWCCELGRSWPHIHNRARAPV

SEQ ID NO: 786642 - protein, 107 aa, Homo sapiens
STWWPATWTYSLTGDVNSHHWAKVISAKFLHCKLTLFPFVVKKCLAERQRWLESLSRLQLSPKRFVSTDSDSILNFLVAVAFLRLCEILNVQGKSLCLRSPFLLCLS

SEQ ID NO: 786643 - protein, 121 aa, Homo sapiens [sequence omitted]

SEQ ID NO: 786644 - protein, 133 aa, Homo sapiens
FSPHHRSAKTQVFYCVFPQPRKLGLWKPKTQMNAPSSVARATKPSCLTWGKLKEIDSRTSQPSEPQVPALHTVPGTCMKKLRPSPAVCPASSLCLSAHPQAHGGWLPDSRLRQARGETENCWEISIIYIPETK

SEQ ID NO: 786645 - protein, 146 aa, Homo sapiens
TKAMMRVNGDDDSVAALSFLYDYYMGPKEKRILSSSTGGRNDQGKRYYHGMEYETDLTPLESPTHLMKFLTENVSGTPEYPDLLKKNNLMSLEGALPTPGKAAPLPAGPSKLEAGSVDSYLLPTTDMYDNGSLNSLFESIHGVPPT

SEQ ID NO: 786646 - protein, 38 aa, Homo sapiens
MPWLKCHPIQETLLSGTKWGPRCSEVSSEIFLKQLTKN

SEQ ID NO: 786647 - protein, 114 aa, Homo sapiens
MRSRPQQGTPHPLSCLSGDHTAHSLPTDGKSRCLSEASSGDGSLLLTPLELTQGRGPEPGETSPRDPLKSSLCFLRRGSGLPLKLPYSLRRRRLDPTPPQSFVLLKTCGFQTDE

SEQ ID NO: 786648 - protein, 34 aa, Homo sapiens
MVYHMGPWSRHRGESPPFWPGAITPGTIEKQSNT

SEQ ID NO: 786649 - protein, 48 aa, Homo sapiens
PTCEAMVCQGEFSGLDQREQSHAGKSESLWKAAKVTAGNKTVYSKSEG

SEQ ID NO: 786650 - protein, 416 aa, Homo sapiens
MVDHLLPVDENFSSPKCPVGYLGDRLVGRRAYHMLPSPVSEDDSDASSPCSCSSPDSQALCSCYGGGLGTESQDSILDFLLSQATLGSGGGSGSSIGASSGPVAWGPWRRAAAPVKGEHFCLPEFPLGDPDDVPRPFQPTLEEIEEFLEENMEPGVKEVPEGNSKDLDACSQLSAGPHKSHLHPGSSGRERCSPPPGGASAGGAQGPGGGPTPDGPIPVLLQIQPVPVKQESGTGPASPGQAPENVKVAQLLVNIQGQTFALVPQVVPSSNLNLPSKFVRIAPVPIAAKPVGSGPLGPGPAGLLMGQKFPKNPAAELIKMHKCTFPGCSKMYTKSSHLKAHLRRHTGEKPFACTWPGCGWRFSRSDELSRHRRSHSGVKPYQCPVCEKKFARSDHLSKHIKVHRFPRSSRSVRSVN

SEQ ID NO: 786651 - protein, 205 aa, Homo sapiens
AGQELEGMRSEPSKLPTCPGSCEEAKLRVLQFIRETEEIVSASNSSRFPLGESFLVAKGIRLRNEDLGLPPLFPPREAFAEQFLRGSDYAIRLAAQSTLSFYQRRRFSPDDSAGASALLRSGPYVPQCDAFGSWEPVQCHAGTGHCWCVDEKGGFIPGSLTARSLQIPQCPTTCEKSRTSGLLSSWKQARSQENPSPKDLFVPAC

SEQ ID NO: 786652 - protein, 57 aa, Homo sapiens
MLYRGRDSDWGSLSTWASVSPTVKSRHLPHRTRCGACDQMSSFLSSVSQLILGRCWH

SEQ ID NO: 786653 - protein, 32 aa, Homo sapiens
MSPSSISSPLLKTCWRSKHICFLSPGTNYKHI

SEQ ID NO: 786654 - protein, 45 aa, Homo sapiens
TVAYRKEVHTHPNVHTKCNKEVSSETQSTPKRLFSTLPPPEQAFR

SEQ ID NO: 786655 - protein, 1551 aa, Homo sapiens
MGFCLALAWTLLVGAWTPLGAQNPISWEVQRFDGWYNNLMEHRWGSKGSRLQRLVPASYADGVYQPLGEPHLPNPRDLSNTISRGPAGLASLRNRTVLGVFFGYHVLSDLVSVETPGCPAEFLNIRIPPGDPMFDPDQRGDVVLPFQRSRWDPETGRSPSNPRDPANQVTGWLDGSAIYGSSHSWSDALRSFSRGQLASGPDPAFPRDSQNPLLMWAAPDPATGQNGPRGLYAFGAERGNREPFLQALGLLWFRYHNLWAQRLARQHPDWEDEELFQHARKRVIATYQNIAVYEWLPSFLQKTLPEYTGYRPFLDPSISSEFVAASEQFLSTMVPPGVYMRNASCHFQGVINRNSSVSRALRVCNSYWSREHPSLQSAEDVDALLLGMASQIAEREDHVLVEDVRDFWPGPLKFSRTDHLASCLQRGRDLGLPSYTKARAALGLSPITRWQDINPALSRSNDTVLEATAALYNQDLSWLELLPGGLLESHRDPGPLFSTIVLEQFVRLRDGDRYWFENTRNGLFSKKEIEEIRNTTLQDVLVAVINIDPSALQPNVFVWHKGDPCPQPRQLSTEGLPACAPSVVRDYFEGSGFGFGVTIGTLCCFPLVSLLSAWIVARLRMRNFKRLQGQDRQSIVSEKLVGGMEALEWQGHKEPCRPVLVYLQPGQIRVVDGRLTVLRTIQLQPPQKVNFVLSSNRGRRTLLLKIPKEYDLVLLFNLEEERQALVENLRGALKESGLSIQEWELREQELMRAAVTREQRRHLLETFFRHLFSQVLDINQADAGTLPLDSSQKVREALTCELSRAEFAESLGLKPQDMFVESMFSLADKDGNGYLSFREFLDILVVFMKGSPEEKSRLMFRMYDFDGNGLISKDEFIRMLRSFIEISNNCLSKAQLAEVVESMFRESGFQDKEELTWEDFHFMLRDHNSELRFTQLCVKGVEVPEVIKDLCRRASYISQDMICPSPRVSARCSRSDIETELTPQRLQCPMDTDPPQEIRRRFGKKVTSFQPLLFTEAHREKFQRSCLHQTVQQFKRFIENYRRHIGCVAVFYAIAGGLFLERAYYYAFAAHHTGITDTTRVGIILSRGTAASISFMFSYILLTMCRNLITFLRETFLNRYVPFDAAVDFHRLIASTAIVLTVLHSVGHVVNVYLFSISPLSVLSCLFPGLFHDDGSEFPQKYYWWFFQTVPGLTGVVLLLILAIMYVFASHHFRRRSFRGFWLTHHLYILLYVLLIIHGSFALIQLPRFHIFFLVPAIIYGGDKLVSLSRKKVEISVVKAELLPSGVTHLRFQRPQGFEYKSGQWVRIACLALGTTEYHPFTLTSAPHEDTLSLHIRAAGPWTTRLREIYSAPTGDRCARYPKLYLDGPFGEGHQEWHKFEVSVLVGGGIGVTPFASILKDLVFKSSVSCQVFCKKIYFIWVTRTQRQFEWLADIIREVEENDHQDLVSVHIYITQLAEKFDLRTTMLYICERHFQKVLNRSLFTGLRSITHFGRPPFEPFFNSLQEVHPQVRKIGVFSCGPPGMTKNVEKACQLINRQDRTHFSHHYENF

SEQ ID NO: 786656 - protein, 1551 aa, Homo sapiens; identical to SEQ ID NO: 786655

SEQ ID NO: 786657 - protein, 553 aa, Homo sapiens
MSTARGQAWTALEWQGHKEPCRPVLVYLQPGQIRVVDGRLTVLRTIQLQPPQKVNFVLSSNRGRRTLLLKIPKEYDLVLLFNLEEERQALVENLRGALKESGLSIQEWELREQELMRAAVTREQRRHLLETFFRHLFSQVLDINQADAGTLPLDSSQKVREALTCELSRAEFAESLGLKPQDMFVESMFSLADKDGNGYLSFREFLDILVVFMKGSPEEKSRLMFRMYDFDGNGLISKDEFIRMLRSFIEISNNCLSKAQLAEVVESMFRESGFQDKEELTWEDFHFMLRDHNSELRFTQLCVKGVEVPEVIKDLCRRASYISQDMICPSPRVSARCSRSDIETELTPQRLQCPMDTDPPQEIRRRFGKKVTSFQPLLFTEAHREKFQRSCLHQTVQQFKRFIENYRRHIGCVAVFYAIAGGLFLERAYYYAFAAHHTGITDTTRVGIILSRGTAASISFMFSYILLTMCRNLITFLRETFLNRYVPFDAAVDFHRLIASTAIVLTGRAWVSLGGSPGPPAPADFPSYESPPLCWHLPLMSFSIRMELAWARV

SEQ ID NO: 786658 - protein, 726 aa, Homo sapiens
MVLEATAALYNQDLSWLELLPGGLLESHRDPGPLFSTIVLEQFVRLRDGDRYWFENTRNGLFSKKEIEEIRNTTLQDVLVAVINIDPSALQPNVFVWHKGDPCPQPRQLSTEGLPACAPSVVRDYFEGSGFGFGVTIGTLCCFPLVSLLSAWIVARLRMRNFKRLQGQDRQSIVSEKLVGGMEALEWQGHKEPCRPVLVYLQPGQIRVVDGRLTVLRTIQLQPPQKVNFVLSSNRGRRTLLLKIPKEYDLVLLFNLEEERQALVENLRGALKESGLSIQEWELREQELMRAAVTREQRRHLLETFFRHLFSQVLDINQADAGTLPLDSSQKVREALTCELSRAEFAESLGLKPQDMFVESMFSLADKDGNGYLSFREFLDILVVFMKGSPEEKSRLMFRMYDFDGNGLISKDEFIRMLRSFIEISNNCLSKAQLAEVVESMFRESGFQDKEELTWEDFHFMLRDHNSELRFTQLCVKGVEVPEVIKDLCRRASYISQDMICPSPRVSARCSRSDIETELTPQRLQCPMDTDPPQEIRRRFGKKVTSFQPLLFTEAHREKFQRSCLHQTVQQFKRFIENYRRHIGCVAVFYAIAGGLFLERAYYYAFAAHHTGITDTTRVGIILSRGTAASISFMFSYILLTMCRNLITFLRETFLNRYVPFDAAVDFHRLIASTAIVLTGRAWVSLGGSPGPPAPADFPSYESPPLCWHLPLMSFSIRMELAWARV

SEQ ID NO: 786659 - protein, 347 aa, Homo sapiens
MYVFASHHFRRRSFRGFWLTHHLYILLYVLLIIHGSFALIQLPRFHIFFLVPAIIYGGDKLVSLSRKKVEISVVKAELLPSGVTHLRFQRPQGFEYKSGQWVRIACLALGTTEYHPFTLTSAPHEDTLSLHIRAAGPWTTRLREIYSAPTGDRCARYPKLYLDGPFGEGHQEWHKFEVSVLVGGGIGVTPFASILKDLVFKSSVSCQVFCKKIYFIWVTRTQRQFEWLADIIREVEENDHQDLVSVHIYITQLAEKFDLRTTMLYICERHFQKVLNRSLFTGLRSITHFGRPPFEPFFNSLQEVHPQVRKIGVFSCGPPGMTKNVEKACQLINRQDRTHFSHHYENF

SEQ ID NO: 786660 - protein, 344 aa, Homo sapiens
MEGLRPELALYSAMGIARSEQSSFLHLLIIHGSFALIQLPRFHIFFLVPAIIYGGDKLVSLSRKKVEISVVKAELLPSGVTHLRFQRPQGFEYKSGQWVRIACLALGTTEYHPFTLTSAPHEDTLSLHIRAAGPWTTRLREIYSAPTGDRCARYPKLYLDGPFGEGHQEWHKFEVSVLVGGGIGVTPFASILKDLVFKSSVSCQVFCKKIYFIWVTRTQRQFEWLADIIREVEENDHQDLVSVHIYITQLAEKFDLRTTMLYICERHFQKVLNRSLFTGLRSITHFGRPPFEPFFNSLQEVHPQVRKIGVFSCGPPGMTKNVEKACQLINRQDRTHFSHHYENF

SEQ ID NO: 786661 - protein, 344 aa, Homo sapiens
CAYTIELRYLNHSSFIEISNNCLSKAQLAEVVESMFRESGFQDKEELTWEDFHFMLRDHNSELRFTQLCVKGVEVPEVIKDLCRRASYISQDMICPSPRVSARCSRSDIETELTPQRLQCPMDTDPPQEIRRRFGKKVTSFQPLLFTEAHREKFQRSCLHQTVQQFKRFIENYRRHIGCVAVFYAIAGGLFLERAYYYAFAAHHTGITDTTRVGIILSRGTAASISFMFSYILLTMCRNLITFLRETFLNRYVPFDAAVDFHRLIASTAIVLTVLHSVGHVVNVYLFSISPLSVLSCLFPGLFHDDGSEFPQKYYWWFFQTVPVPATQEAEAEESFEPGRQRLQ

SEQ ID NO: 786662 - protein, 163 aa, Homo sapiens
MKTVRGRPVVSGSRPGPTAPNQLSVLCTDPRLPAWAPSTDYAFAAHHTGITDTTRVGIILSRGTAASISFMFSYILLTMCRNLITFLRETFLNRYVPFDAAVDFHRLIASTAIVLTGRAWVSLGGSPGPPAPADFPSYESPPLCWHLPLMSFSIRMELAWARV

SEQ ID NO: 786663 - protein, 726 aa, Homo sapiens; identical to SEQ ID NO: 786658

SEQ ID NO: 786664 - protein, 726 aa, Homo sapiens; identical to SEQ ID NO: 786658

SEQ ID NO: 786665 - protein, 683 aa, Homo sapiens
CAYTIELRYLNHSSFIEISNNCLSKAQLAEVVESMFRESGFQDKEELTWEDFHFMLRDHNSELRFTQLCVKGVEVPEVIKDLCRRASYISQDMICPSPRVSARCSRSDIETELTPQRLQCPMDTDPPQEIRRRFGKKVTSFQPLLFTEAHREKFQRSCLHQTVQQFKRFIENYRRHIGCVAVFYAIAGGLFLERAYYYAFAAHHTGITDTTRVGIILSRGTAASISFMFSYILLTMCRNLITFLRETFLNRYVPFDAAVDFHRLIASTAIVLTVLHSVGHVVNVYLFSISPLSVLSCLFPGLFHDDGSEFPQKYYWWFFQTVPGLTGVVLLLILAIMYVFASHHFRRRSFRGFWLTHHLYILLYVLLIIHGSFALIQLPRFHIFFLVPAIIYGGDKLVSLSRKKVEISVVKAELLPSGVTHLRFQRPQGFEYKSGQWVRIACLALGTTEYHPFTLTSAPHEDTLSLHIRAAGPWTTRLREIYSAPTGDRCARYPKLYLDGPFGEGHQEWHKFEVSVLVGGGIGVTPFASILKDLVFKSSVSCQVFCKKIYFIWVTRTQRQFEWLADIIREVEENDHQDLVSVHIYITQLAEKFDLRTTMLYICERHFQKVLNRSLFTGLRSITHFGRPPFEPFFNSLQEVHPQVRKIGVFSCGPPGMTKNVEKACQLINRQDRTHFSHHYENF

SEQ ID NO: 786666 - protein, 373 aa, Homo sapiens
CAYTIELRYLNHSSFIEISNNCLSKAQLAEVVESMFRESGFQDKEELTWEDFHFMLRDHNSELRFTQLCVKGVEVPEVIKDLCRRASYISQDMICPSPRVSARCSRSDIETELTPQRLQCPMDTDPPQEIRRRFGKKVTSFQPLLFTEAHREKFQRSCLHQTVQQFKRFIENYRRHIGCVAVFYAIAGGLFLERAYYYAFAAHHTGITDTTRVGIILSRGTAASISFMFSYILLTMCRNLITFLRETFLNRYVPFDAAVDFHRLIASTAIVLTVLHSVGHVVNVYLFSISPLSVLSCLFPGLFHDDGSEFPQKYYWWFFQTVPGLTGVVLLLILAIMYVFASHHFRRRSFRGFWLTHHLYILLYVLVRAFGCE

SEQ ID NO: 786667 - protein, 482 aa, Homo sapiens
MVLEATAALYNQDLSWLELLPGGLLESHRDPGPLFSTIVLEQFVRLRDGDRYWFENTRNGLFSKKEIEEIRNTTLQDVLVAVINIDPSALQPNVFVWHKGDPCPQPRQLSTEGLPACAPSVVRDYFEGSGFGFGVTIGTLCCFPLVSLLSAWIVARLRMRNFKRLQGQDRQSIVSEKLVGGMEALEWQGHKEPCRPVLVYLQPGQIRVVDGRLTVLRTIQLQPPQKVNFVLSSNRGRRTLLLKIPKEYDLVLLFNLEEERQALVENLRGALKESGLSIQEWELREQELMRAAVTREQRRHLLETFFRHLFSQVLDINQADAGTLPLDSSQKVREALTCELSRAEFAESLGLKPQDMFVESMFSLADKDGNGYLSFREFLDILVVFMKGSPEEKSRLMFRMYDFDGNGLISKDEFIRMLRSFIEISNNCLSKAQLAEVVESMFRESGFQDKEELTWEDFHFMLRDHNSELRFTQLCVKGGAAW

SEQ ID NO: 786668 - protein, 108 aa, Homo sapiens
ALSPYFTPLTTLLCSGCPVMHYDKNESGSQAQWLKTGNLSNLGGPGGRVTWAQKFETSLGHIVRSHLYKNLKIKKMSLAWGLCLWSQLLGRPGWEDHLTLGGGGYSEP

SEQ ID NO: 786669 - protein, 58 aa, Homo sapiens
REQRSQMGLEVQAGDQPVPRPHRGVLHQWQNTDVWMVVYTHGIQNVPNPNRKHNPARV

SEQ ID NO: 786670 - protein, 103 aa, Homo sapiens
MEVPHQGGGSLSPAELPWTLFFPRWLGRGWLSWDSASDGCPQPTAGARRDLSPLPVMGSCRPFGALLERWLPDLQLFLEGQGCPLLVVCSGWPCLTALCLSGH

SEQ ID NO: 786671 - protein, 55 aa, Homo sapiens
HRVPDLRSHRAFLKPSMRVTALRNVLSTPNSGSNLRQCYPSSLRGTHSAGTAAPF

SEQ ID NO: 786672 - protein, 72 aa, Homo sapiens
VLVWFLGPHVIYCRNQAGNPKGTNQGLPKAWAFVAATDQRDLARAAGCPHVAATDHSVVICVRFSTCRPKVE

SEQ ID NO: 786673 - protein, 72 aa, Homo sapiens
RQNNPSELQFSGGLEELANSAISPLRTGRACELDNTKITSCLSSERNRLMKLQIKLHLALADPALCCQGPSS

SEQ ID NO: 786674 - protein, 71 aa, Homo sapiens
ENVGVTVMDGSVLFYDAVSHTWYGVAIATPYTDTQRHTVTNHRHKHTATHRHTQSHTQTLKSMEIHTLLSS

SEQ ID NO: 786675 - protein, 67 aa, Homo sapiens
MPGTQNSQIMSKKNKTGGFTDPDLKACYKATVIKMVQSRRRADVWTNGIKRQVKKQGMMSKAIQWGK

SEQ ID NO: 786676 - protein, 196 aa, Homo sapiens
MGGCFECQEAARGAQCPGLCHPRWLFGWSVFGERVEGSRVQGGLGLGLLTALWRCTEGHPAGEQPGGIGTCSHRGVFALPICFTVALDLCASWKIEAEPIPLGDLEIISGKGCLCPRLKMTCPCTLSAPGFPHRPLQPRGLTRGSTHGQVWPDLARVGSWASGSPNGGLLRVSGGSEGCTVPASAIPVVILLSVLI

SEQ ID NO: 786677 - protein, 178 aa, Homo sapiens
MGGCFECQEAARGAQCPGLCHPRWLFGWSVFGERVEGSRVQGGLGLGLLTALWRCTEGHPAGEQPGGIGTCSHRGVFALPICFTVALDLCASWKIEAEPIPLGDLEIISGKGCLCPRLKMTCPCTLSAPGFPTLWGGESVRVSAGFEAQLCCVKIERSPPDHMDRTHRLLGGPAAPVT

SEQ ID NO: 786678 - protein, 102 aa, Homo sapiens
GRNSGLYWEGVRKEREEDGDIRGRANEPCSATALAFNLCKFSEITLQKQCQAEDTVALEEMIMDISSTQLHTQKLQLPYTRSSRYGGSLPTPYHTDSSPYSP

SEQ ID NO: 786679 - protein, 80 aa, Homo sapiens
QSRHGQGFLWLSDDDGHLGEGTKMAGVGDTFIPPTAIDLVSTRSWARAKVISQTCLQILFSLWKDVDIARKLLYSPGSEW

SEQ ID NO: 786680 - protein, 393 aa, Homo sapiens
DPPANVFSVNPNQHTRSSACTYGYSAGLSLNGNDFRHVVLADGATIVAYPISNAISAATTFAPAPTGDGHTTQAPTTALQAAPSSHDATLGPSGGTSLSKTGALTLANSVVSTPGGPEGQWTSASASTSPDTAAAMTHTHQAESTEASGQTQTSEPASSGSRTTSAGTATPSSSGASGTTPSGSEGISTSGETTRFSSNPSRDSHTTQSTTELLSASASHGAIPVSTGMASSIVPGTFHPTLSEASTAGRPTGQSSPTSPSASPQETAAISRMAQTQRTRTSRGSDTISLASQATDTFSTVPPTPPSITSTGLTSPQTETHTLSPSGSGKTFTTALISNATPLPVTYASSASTGHTTPLHVTDASSVSTGHATPLPVTSPSSDFSPSDFGDRA

SEQ ID NO: 786681 - protein, 119 aa, Homo sapiens
PQTETHTLSPSGSGKTFTTALISNATPLPVTYASSASTGHTTPLHVTDASSVSTGHATPLPVTSPSSVSTGHTTPLPVTDTSSESTGHATPLPVTSFSSASTGDSTPLPVTDTSSASTG

SEQ ID NO: 786682 - protein, 458 aa, Homo sapiens
DTGTTGEALLSSPSYSVTQMIKTATSPSSSPMLDRHTSQQITTAPSTNHSTIHSTSTSPQESPAVSQRGHTQAPQTTQESQTTRSVSPMTDTKTVTTPGSSFTASGHSPSEIVPQDAPTISAATTFAPAPTGDGHTTQAPTTALQAAPSSHDATLGPSGGTSLSKTGALTLANSVVSTPGGPEGQWTSASASTSPDTAAAMTHTHQAESTEASGQTQTSEPASSGSRTTSAGTATPSSSGASGTTPSGSEGISTSGETTRFSSNPSRDSHTTQSTTELLSASASHGAIPVSTGMASSIVPGTFHPTLSEASTAGRPTGQSSPTSPSASPQETAAISRMAQTQRTRTSRGSDTISLASQATDTFSTVPPTPPSITSTGLTSPQTETHTLSPSGSGKTFTTALISNATPLPVTYASSASTGHTTPLHVTDASSVSTGHATPLPVTSPSSDFSPSDFGDRA

SEQ ID NO: 786683 - protein, 105 aa, Homo sapiens
MLEVFGLWEERSQAALWFEYVEILGLHSPAAVERGWQTAVKLMLLNEIELILMDKLVLSPEEHELPVFEYVYVCSSRIIVLWLVVPESSSLFRLHRIFSWPLTLR

SEQ ID NO: 786684 - protein, 157 aa, Homo sapiens
CAPYSVKGEVGQDPVSFDTIERWREGFSVAPSPLLPDPCLAGQGLENLPAGPPRSSLLAPRSSLSSLMPFPLAEPVRLPAQLPTDKILEGPFNISESWPISVMNFAQACAKRAANANAGFLKEYELLLQAIKDEAGSYAPLPGYEQDSPISWWALWL

SEQ ID NO: 786685 - protein, 46 aa, Homo sapiens
MRSLDPLLLRLVPHWPFKKSPRPQQQNVFDGRDCCPLWFSLFLMLM

SEQ ID NO: 786686 - protein, 39 aa, Homo sapiens
MTILYHCKFLPVREKPYDLGGKVSMTCIAMYSTRGRRQL

SEQ ID NO: 786687 - protein, 129 aa, Homo sapiens
MVCTVKSVRLSDSRDPSLPTVPHWLKGQNGAVLELQVRGHLLLLFVWIQPVAGCSGCIWVVGVGEPELRLLTELRLLTELRLLTELRLLTELRLLTELRLLTELRLLSPTVAAAPHCREPLRYLWTEKP

SEQ ID NO: 786688 - protein, 119 aa, Homo sapiens
ARIRECSDGMQLKRRSFKQQELTVCHDLRETERGTEIGRNRDIERSRDRKRETETERERETGRQRETKTDREIWESGHLSLFLLEPQATFLISPELRCLIWATFLTHDLLPLCEGDLKS

SEQ ID NO: 786689 - protein, 83 aa, Homo sapiens
ATLHLALLFQYIALCLQTGKTSFCLYQWDLPLPLEQILFSNSDTTKSKNAPSLIHLLSTELKPAFKGTLKRKLLKIENVDPPQ

SEQ ID NO: 786690 - protein, 88 aa, Homo sapiens
MGTGAQTPLSAAQNADTRKEEKYPKCPSFGFKKSTSLNKVRDASVQSSSIHNSKDMESTHVSISGRMDKENVVHAHHGILCSHKKEQN

SEQ ID NO: 786691 - protein, 691 aa, Homo sapiens
ALHARSRQTAAPASVPAPAGAREPRGQRRSGQRTISRALALCAPGQLSPGHPLSKMKKLQGAHLRKPVTPDLLMTPSDQGDVDLDVDFAAHRGNWTGKLDFLLSCIGYCVGLGNVWRFPYRAYTNGGGAFLVPYFLMLAICGIPLFFLELSLGQFSSLGPLAVWKISPLFKGAGAAMLLIVGLVAIYYNMIIAYVLFYLFASLTSDLPWEHCGNWWNTELCLEHRVSKDGNGALPLNLTCTVSPSEEYWSRYVLHIQGSQGIGSPGEIRWNLCLCLLLAWVIVFLCILKGVKSSGKVVYFTATFPYLILLMLLVRGVTLPGAWKGIQFYLTPQFHHLLSSKVWIEAALQIFYSLGVGFGGLLTFASYNTFHQNIYRDTFIVTLGNAITSILAGFAIFSVLGYMSQELGVPVDQVAKAGPGLAFVVYPQAMTMLPLSPFWSFLFFFMLLTLGLDSQFAFLETIVTAVTDEFPYYLRPKKAVFSGLICVAMYLMGLILTTDGGMYWLVLLDDYSASFGLMVVVITTCLAVTRVYGIQRFCRDIHMMLGFKPGLYFRACWLFLSPATLLALLVYSIVKYQPSEYGSYRFPPWAELLGILMGLLSCLMIPAGMLVAVLREEGSLWERLQQASRPAMDWGPSLEENRTGMYVATLAGSQSPKPLMVHMRKYGGITSFENTAIEVDREIAEEEESMM

SEQ ID NO: 786692 - protein, 71 aa, Homo sapiens
LKESLKEVQLERDEYAEHLKGERARWQQRMRKMSQEVCSLKKEKKHDKYRVETLERSLSKLKHQMGKMGLA

SEQ ID NO: 786693 - protein, 104 aa, Homo sapiens
LKESLKEVQLERDEYAEHLKGERARWQQRMRKMSQEVCSLKKEKKHDKYRVETLERSLSKLKHQMAEPLPPEPPAVPSEVELQHLRKELERVAGALQAQVEYNQ

SEQ ID NO: 786694 - protein, 67 aa, Homo sapiens
ACRFLGFGVLIGFWDLRFLARRVPRLPAGEVCLSSVLPGAVGVENLDPAWASEGPGNDWASSRSRLY

SEQ ID NO: 786695 - protein, 169 aa, Homo sapiens
RLKFFIVESFFRKAIKCKIRFDVENSSKYYEKEALLMDPVDGPILASLLVGPCALEYTKMKTADHFWTDPSADELVQRHRIHSSHVRQDSPTKRPALCIQKRHSSGSMDDRPSLSARDYVESLHQNSRATLLYGKNNVLVQPRDDMEAVPGYLSLHQTADVMTLKWTPN

SEQ ID NO: 786696 - protein, 269 aa, Homo sapiens
MEEAVTRKFVHEDSSHIISFCAAVEACVLHGLRRRAAGFLRSNKIAALFMKVGKNFPPAEDLSRKVQDLEQLIESARNQIQGLQENVRKLPKLPNLSPLAIKHLWIRTALFEKVLDKIVHYLVENSSKYYEKEALLMDPVDGPILASLLVGPCALEYTKMKTADHFWTDPSADELVQRHRIHSSHVRQDSPTKRPALCIQKRHSSGSMDDRPSLSARDYVESLHQNSRATLLYGKNNVLVQPRDDMEAVPGYLSLHQTADVMTLKWTPN

SEQ ID NO: 786697 - protein, 294 aa, Homo sapiens
MASAPAEAETRQRLLRTVKKEVKQIMEEAVTRKFVHEDSSHIISFCAAVEACVLHGLRRRAAGFLRSNKIAALFMKVGKNFPPAEDLSRKVQDLEQLIESARNQIQGLQENVRKLPKLPNLSPLAIKHLWIRTALFEKVLDKIVHYLVENSSKYYEKEALLMDPVDGPILASLLVGPCALEYTKMKTADHFWTDPSADELVQRHRIHSSHVRQDSPTKRPALCIQKRHSSGSMDDRPSLSARDYVESLHQNSRATLLYGKNNVLVQPRDDMEAVPGYLSLHQTADVMTLKWTPN

SEQ ID NO: 786698 - protein, 99 aa, Homo sapiens
NALTGYDWHPSRLAVYSFNNFCVCVPRWMSVWMGVWGVCMGCVHMCERMCAQVYECVDRCMCGMCAWSVCTCVSVCAPTWMSVWMGVCGLCMGCVHMCN

SEQ ID NO: 786699 - protein, 165 aa, Homo sapiens
GRSTRIPMQRTRSARPSGLASVASHIDVTLELLPQTGRRDRLSPHLPPYSPLYSRFDHLSPSAAPSHFGQSQAPIRLPPPPGAPSISLSPLPQNLCKGYERDPLPSRPPLRAVRSKKQKLVGGWLGLCPVPRWINCLFSHPLLVPDLLCPRGQTHCAVFCQSVAQ

SEQ ID NO: 786700 - protein, 71 aa, Homo sapiens
MPDVFILGNPTDYHLWAPFLDEEGPFPEGDIPQFPEGIQMFTSTHKKNFWPGAVVHTCNPSTLGGQGGRII

SEQ ID NO: 786701 - protein, 114 aa, Homo sapiens
MAAYKLAADPAWRAAWNLADPLQQLIRLRPEPGRPPRKVNAQAGKELHKMSAMRSDILLHLQSHEETRPDPPGTGLRMPLIQMWPTCLCGLGRLMNGTYGGSARFRQAKRWTPA

SEQ ID NO: 786702 - protein, 104 aa, Homo sapiens
GRRCWVHRTKGPRPNPSPSFRMTHLGWGPLPREGGQPSIPSPGATQPAPEGGGREKGHLGAKTSCRILRLSPHFQDIVSHQGHSSPHLLPQSPTHLPFTSLQSN

SEQ ID NO: 786703 - protein, 104 aa, Homo sapiens; identical to SEQ ID NO: 786702

SEQ ID NO: 786704 - protein, 216 aa, Homo sapiens
TPRFRRLVSQNELPGPGLNGPSSRNRRDGFCRKRRTGCSGPFQATQLWDGIIHSLQAQVEIKRRRHHLQTYKDCFTGSDAVDVVLSHLMQNTCLSSNDISCLKGVHLCQVLMNHKVFEPVGMKKLFKKEKELEFEDSNISLYRFLGNKSSYDCCKRQKDAENEFNETLRPGYEMISNPLAQEIGEERIEELIHTINGNPALCPNITVQKPFLRLSK

SEQ ID NO: 786705 - protein, 77 aa, Homo sapiens
CNFWNKHSCVCFSTQRSRQNGSLARRVQLEPRTLGQMPSGSRENTPPAGHWELSCRRICKEANSGPLRKQVMRPQRC

SEQ ID NO: 786706 - protein, 91 aa, Homo sapiens
DWPFYEILTPVKKPGPRSPHLGSHSVLGTVCTLCGIVYVGSISGNGSLYWPGITRISPNSFNNAKSEHNRWSHLIHTTDLEDASFIINPTT

SEQ ID NO: 786707 - protein, 38 aa, Homo sapiens
EECWGRSFSLQDTKAISELQTEVRYVTVIPRARVRITQ

SEQ ID NO: 786708 - protein, 43 aa, Homo sapiens
MDARPMTTRCQNCTLVRGDGPTACGYTPRPATQHSPPCNPSRA

SEQ ID NO: 786709 - protein, 66 aa, Homo sapiens
SSRYLLFSMEMFPLSFSDCSLLVYDDDTACLLPSRNLRMRYNSMKNHLLVCNKVFSQSVNQFSRAA

SEQ ID NO: 786710 - protein, 42 aa, Homo sapiens
MAVGAPVALVFLLFQGGSHHGHFPHCSTADSQHSPEFSREVL

SEQ ID NO: 786711 - protein, 113 aa, Homo sapiens
LYIHYLIYPIKKLANLDLNPILQMEKLICECFVSPVGQQNEPTYLCPTNSFLAPEESESLHLSFYLLIFHWLITPQAIFYPYVYIHPSPLFMPLFSISFFQMLPNHVKKRYLS

SEQ ID NO: 786712 - protein, 58 aa, Homo sapiens
AYPDKSLNSSLLQFLHNGHPYTAHLYNGDEIIGRGESEAVDHLRSGVRDQPGQHGKTL

SEQ ID NO: 786713 - protein, 76 aa, Homo sapiens
TIRIELVTPLQASREPLALGSLLQPHWGSWSSAHLGEATTANNNRPFLLPGTAQNPPKCTGFKEVMPFEGFCAVPG

SEQ ID NO: 786714 - protein, 40 aa, Homo sapiens
ARSQKKAPIVTAESSGKRPLASRKSSQLYELQRNAANGLA

SEQ ID NO: 786715 - protein, 71 aa, Homo sapiens
EVEVAVSRLVDATVLQPGQQSKTLPQKTKICCSSQYIIYFRHCNFYLLISSLSFFISSVSVKNFWNVWSTV

SEQ ID NO: 786716 - protein, 58 aa, Homo sapiens
HTHPLTCTHLLTLMHAHACSHTHTHPLTHMHMPAHTHSLTPALMHTPTHMHMPAHTLA

SEQ ID NO: 786717 - protein, 40 aa, Homo sapiens
CQQRRTLHNPGVGSTIPSGLHLHCTVTEIPASAQDTGTSE

SEQ ID NO: 786718 - protein, 48 aa, Homo sapiens
ICKGEVKISLFANDMIVYLENPKDSSKKLLDLINEFRKLSGYKINVHK

SEQ ID NO: 786719 - protein, 418 aa, Homo sapiens
MTLLPRLALREEEARRGPLRAPVQPGLGERSPQRHREPKQGRVSQRWHPAREPLAATGFLHGLGHLGRAAQSPRASCCILWPGTWGDPLRTLGRSQREVQTVCTGVSGDQAQKEQDGHLLAWRKILLPGKKTTPRGIGLGCRTLSQATAPFLLQNWGRKRAFRPGSENPSSGTSRPSRGRLEARSSGLDEAWEAQRLTGHGRFPSPRKEKSLQRGLAKAPVPKQRKGACLQTPPAGSLPRPPHPARGQSSPWLWQGHTACGWLQASSPERPLPLDSQPGPSVLQATRTWMPRFSETRVLGTYTLLGLLFLPTLSLPVSMATPPNSRFQAAMTSSLPFLPPRPWRYCCLGPGVGVGGLQGFPGPLPYPPGAPPTRDPRPVGHGCASPDSSLPVCPWGQRPSFSRPLGAALREPHSSPAD

SEQ ID NO: 786720 - protein, 388 aa, Homo sapiens
MTLLPRLALREEEARRGPLRAPVQPGLGERSPQRHREPKQGRVSQRWHPAREPLAATGFLHGLGHLGRAAQSPRASCCILWPGTWGDPLRTLGRSQREVQTVCTGVSGDQAQKEQDGHLLAWRKILLPGKKTTPRGIGLGCRTLSQATAPFLLQNWGRKRAFRPGSENPSSGTSRPSRGRLEARSSGLDEAWEAQRLTGHGRFPSPRKEKSLQRGLAKAPVPKQRKGACLQTPPAGSLPRPPHPARGQSSPWLWQGHTACGWLQASSPERPLPLDSQPGPSVLQATRTWMPRFSETRVLGTYTLLGLLFLPTLSLPVSMATPPNSRFQAAMTSSLPFLPPRPWRDPRPVGHGCASPDSSLPVCPWGQRPSFSRPLGAALREPHSSPAD

SEQ ID NO: 786721 - protein, 102 aa, Homo sapiens
LHPLFPPGHSSVMRSMGIRFWRWGRVALGAGGNVRIPAEKTESICDNCNSQHSNYTMFTGLCRVTLLISEKYIYCIRNTGAIPDLHSSLSLILNIIARYKVL

SEQ ID NO: 786722 - protein, 123 aa, Homo sapiens
MGNTQASTGSPLKCILSHWDQFDPQTLKKRRLIFFCTMAWAQYSLSDEEKWPPEGSTNYNTILQLDLFCKREGKWSEIPYVQAFFSLKNQGHQATDGLTNGTFTIPELDINTPIGTLYLAQGL

SEQ ID NO: 786723 - protein, 116 aa, Homo sapiens
RSYGDSAFSFPYMPGSEVSGSHGDSAFSLWYMPGSEVAGSYGDSAFSFRDLPGSAVARSYSDSAFSLLRNCWTVFHSGCVIFHFQQQRVMVLISPHPHQHLLLPFIAFIFHCGHPS

SEQ ID NO: 786724 - protein, 70 aa, Homo sapiens
TLLMLKVFVIPCLIVIKHCHLASILWDQSILKDVKSNSVSAEPTVSAMSCRKETPLNFLILHKPISAADS

SEQ ID NO: 786725 - protein, 34 aa, Homo sapiens
MGSISHPSAVTPMGGECGLGRMKWEDDDEVPIAC

SEQ ID NO: 786726 - protein, 66 aa, Homo sapiens
TGKIVTVHWRNMTNTILNQMMKVNITSDIMQASYTPRYDATRRAPELVVFLLKICNHSQITREATD

SEQ ID NO: 786727 - protein, 120 aa, Homo sapiens
MTTHHTQILPMTRNSSTPKAATLFTFAQLLRIRQFFPILMKIYLSKGLILALPYPFELFRKGSRTAETTICRPLPMYSVSFSLLWHLTLTAMQEVETVISIWLIMGSTELREIKVIWLGY

SEQ ID NO: 786728 - protein, 98 aa, Homo sapiens
KKTNGDGEYGASPLNLLDIGQVRWLKPAITAPCEAEAEVGGLIGPRSLRLAVSYDHATALQPGQQSKTPSHYTYVDKGKREMGSMVRDETEKVNWAQF

SEQ ID NO: 786729 - protein, 98 aa, Homo sapiens; identical to SEQ ID NO: 786728

SEQ ID NO: 786730 - protein, 98 aa, Homo sapiens
DFPGRRFLETLTPGTCEEDESLSLVGQAFSACAVLTVRSPTAIFPGVCARGVHQQQLAALAEVLDSERQMVGAGRAGDGDGPILLVGSIWSTDSPPSH

SEQ ID NO: 786731 - protein, 105 aa, Homo sapiens
MSFFFPFLLETGSCSGAQAEVHWCNHNLLQPSTPQEILLLQPPKALGLQIEPPLLASTCLGPFLLILTAVSIPDWFPLIDFPHPYGLCLSAFVRTWTFFIVYQPL

SEQ ID NO: 786732 - protein, 361 aa, Homo sapiens
MNESRWTEWRILNMSSGIVNVSERHSCPLGFGHYSVVDVCIFETVVIVLLTFLIIAGNLTVIFVFHCAPLLHHYTTSYFIQTMAYADLFVGVSCLVPTLSLLHYSTGVHESLTCQVFGYIISVLKSVSMACLACISVDRYLAITKPLSYNQLVTPCRLRICIILIWIYSCLIFLPSFFGWGKPGYHGDIFEWCATSWLTSAYFTGFIVCLLYAPAAFVVCFTYFHIFKICRQHTKEINDRRARFPSHEVDSSRETGHSPDRRYAMVLFRITSVFYMLWLPYIIYFLLESSRVLDNPTLSFLTTWLAISNSFCNCVIYSLSNSVFRLGLRRLSETMCTSCMCVKDQEAQEPKPRKRANSCSI

SEQ ID NO: 786733 - protein, 107 aa, Homo sapiens
FGGDARKAIFLKGLDVDTSLVSNNCCPLFPDFLGEAFMSPKLRSKSLLSYLTLSLKANLDSSLQNAHFLGQFFTGKSARVQVPFKPCWLGILLTWHKILLLHYDSLG

SEQ ID NO: 786734 - protein, 33 aa, Homo sapiens
MQEMHLEIDSQKQLQQAASQDGPKPPPPRTCLT

SEQ ID NO: 786735 - protein, 124 aa, Homo sapiens
APGHSPTHPPLPGKGQQHNVYALSLSWPWPVQSLWCHHRVPRNSPIPKAGRPRNGHDNELTTWESQGQEGEPTMSPKATLGTSGMPCNYLLTDTHHRLSARSDLATPDKTPRTPDIGSVVLAQV

SEQ ID NO: 786736 - protein, 123 aa, Homo sapiens
RERNTRERKLRTIKTLAAFTMENLYTLLPLDSESKLRGVEWTGFQAQNVAVPDSLFLSSLILKPYNTYKSLRSPLKGIFWVSLYFSPPPNSDSPDVCHRAFQAGIQLLRCASWHFGDTHFGNT

SEQ ID NO: 786737 - protein, 285 aa, Homo sapiens
KSQPLLHEWELQPFRIDNHKPLRPKVELKEKYVTLGIDGKGLDPSVSILIKGEVQKRSPEPVFQTFYDELNVPVPEIPGKTKNLFLQLAKHVAQSLQVTSCHVCGGTVTGDQWPWEARELVPTDPVPDEFLAPKNHPDNFWVLKVSIIGQYCIAREGKGFTHPVGRLSCLGQKLYNGTTKTVTWWSSNYTERNPFSKFPKLQTVWAHPEFHWDWTAPARLYWICGHRAYAKLPDQWTGSCVIGTIKSSFFLLPIKTGKLLGFPVYASREKRSIAIGDWKDDKWPP

SEQ ID NO: 786738 - protein, 125 aa, Homo sapiens
TINMSYLGVSRAILEGAGQAVESECAVLAAQPHRDFIITPGGCLKCKIIIHVPGGKDVRKTVTSVLEECEQRKYTSVSLPAIGTGNLPEHWTDMNHQLFCMVQLEPGQSEYNTIKDKFTRTCSSY

SEQ ID NO: 786739 - protein, 91 aa, Homo sapiens
DLFQSHSPMSLPYRKGVIHLPLYFGLSGIEFYKQAHNRGSSRFQLLIRWREDEDRWCSHSSFDLHPGPSAESERSPVATLLTVINCKIFRL

SEQ ID NO: 786740 - protein, 94 aa, Homo sapiens
GSRAVRATSAKFHFNTDRLVMVTQSTLGEFLGYVCRVASGWEKGKGDHIGATGVLSVNFKGYRLSLNSARSKANALSKLSDGKEVENKVFDNTR

SEQ ID NO: 786741 - protein, 33 aa, Homo sapiens
VVYVIYGMIGIIGGTQALLEAEPRGLRNSHWIQ

SEQ ID NO: 786742 - protein, 140 aa, Homo sapiens [sequence omitted]

SEQ ID NO: 786743 - protein, 61 aa, Homo sapiens
MEELSLGKGRLEGATQQVSVGWSSNPGSKSPEAAGATHWPTVRGHTVVPKDVSKAGVRQAG

SEQ ID NO: 786744 - protein, 305 aa, Homo sapiens
MIPRGLSGRSRCAARSTVWLTMWSPRCTLWPPAPTHCAPASHMTGEEKAFETIERDEQCIHPQEAALSIQFISLVCWEAIPNARIELQKWELVTSTKTVSLQQGDQVRLQRLRVAAGTCLMQEEEEVMSWGRILIMDVTEVVPEPSQPLTKNKFRVLYEKEQKGPVTALCTARPPGVGHQPEDFPVKPAGQRADGHGLHGRQAALHPPDDQRQELHPGSRPHEEHLAAVTRRRARRWASSWDAKTLEVYSVDFMVDNTQLGFLVSDHDCSLMVYMYLPEAKESFGGMCLLRWADFHVGAHMNAFY

SEQ ID NO: 786745 - protein, 155 aa, Homo sapiens
MSSSFVPAVRRSSVSFAKHPTTDMAAYQQEEQMQLPRADAIRSRLIDTFSLIEHLQGLSQAVPRHTIRELLDPSRQKKLVLGDQHQLVRFSIKPQRIEQISHAQRLLSRLHVRCSQRPPLSLWAGWVLECPLFKNFIIFLVFLNTIILMVEIGEN

SEQ ID NO: 786746 - protein, 102 aa, Homo sapiens
MSSSMPPPGRIRSRFPKETTIHGEWVTRHADNRCRGRRGPDLRGENLPQTRLQWVLRTGLRGRQGAAVLRGFCPKAGPIPTRKLTAGPPAGPEGSLGEGQWY

SEQ ID NO: 786747 - protein, 80 aa, Homo sapiens
YSSFLNSMTHRDMDCTPTLADNTCVYALRFHQLEDKLGQEYSKDVLTCWFSLSFETRRYLLICITDPQRHCVRGKPRRII

SEQ ID NO: 786748 - protein, 70 aa, Homo sapiens
KHFSDLKRCFLSSIILGQDRKARTGSGHAHWFLMEEHVCDTLWVLSSFRTSVSYKFAHPWAHFTSTEPQP

SEQ ID NO: 786749 - protein, 118 aa, Homo sapiens
FQVKDRILKNVRLPHEHADFHSASADEIDDDSKCDFFWYCGMRSVHNWKTSTTQRPSIFQMTNTQCCPSTVGSESLTGPEEPACRTTTAWHAWAASQKDTHAALKVTNTPPFPNRLPR

SEQ ID NO: 786750 - protein, 165 aa, Homo sapiens
LQVLRQILELSVTTNTPVPQMQLHTIFTELHVQVCNKAPAQHQYSSQNLMEMVHCFVALARSYPKELMKFFFSQMETNKEAVRVGTLNLIRAIVSADEPRMSIRAIYLAIRVVKNTISDTRSKVRMAILHIIGQLALCGYQERIKGWGLKYLSVQLTLSTYKLVS

SEQ ID NO: 786751 - protein, 67 aa, Homo sapiens
NAQCMSGLREAPILLPAAAISLIQGSNLSAYTASYCTNITFRVSRDMEELESNSSQLWGYQTNHHSR

SEQ ID NO: 786752 - protein, 119 aa, Homo sapiens
MRQQGASSGCGAAQPGLPLKAMPSLPLPPHLTPFSFQFRSADRVQAPACHLLCHRSPCGLSPQLWKWMMVSTSPTRAAFTCQGWDIGKAPPAYGPPILALPNTPRNSLSKSALLLPPPF

SEQ ID NO: 786753 - protein, 224 aa, Homo sapiens
YLLPVLTVLQTGACYKSLPSRNGPLAVIVCPGWKKAQFIFELLGEYSMSSRPLHPVLLTIGLHKEEAKNTKLPRGCDVIVTTPYSLLRLLACQSLLFLRLCHLILDEVEVLFLEANEQMFAILDNFKKNIEVEERESAPHQIVAVGVHWNKHIEHLIKEFMNDPYIVITAMEEAALYGNVQQVVHLCLECEKTSSLLQALDFIPSQAQKTLIFTCSVAETEIVC

SEQ ID NO: 786754 - protein, 74 aa, Homo sapiens
VREQKGWGNINSDSSHAEPEIGKRREGAHCRVPVSSSWGLVTPHCTHSSRKKSRAVMRNDSRRRKCQSPMNNRW

SEQ ID NO: 786755 - protein, 61 aa, Homo sapiens
WWGSPFPSNTRDSGNTRSATPFAKGCKSDVSEAGRAAERESWGRVGSVHFAGSAGGQEPAI

SEQ ID NO: 786756 - protein, 48 aa, Homo sapiens
MPNDEKKCDLKSEEQLIHPGINVKEGSKCYCMFFMQDIRRIYTIILQV

SEQ ID NO: 786757 - protein, 139 aa, Homo sapiens [sequence omitted]

SEQ ID NO: 786758 - protein, 80 aa, Homo sapiens
PQTAPVLWTHSHGWLHICTLGSPTRFTYSDNKEIHFVKNVTYKCHSKPVTGMLTLWKFTKLDIDVSTFCMYVTLKQKFTE

SEQ ID NO: 786759 - protein, 111 aa, Homo sapiens
PASSHMELAVLERTTLSCFQDSAWPVPIPSIFQVLHLDFTFPGRPSLILPHPSWGVRHTVLTTTETLSPPHWAVNAGRAETLPQSQGEAQEVVKRPGAVAQACNPSTLGGR

SEQ ID NO: 786760 - protein, 46 aa, Homo sapiens
SGTIKINDRNLSKALWSLTKGGSKQLWHKCAKRWIEEDVSSVSVRQ

SEQ ID NO: 786761 - protein, 127 aa, Homo sapiens
PTSAYRAAGTTGVHHHAWLLFIKKFFVEMGSHCVAQADLELLGSRHLPALASQSVRITAVSHHTGPKYQILNRIGNCVIEDLVITLPYVLLSNSSQVVCLFPSVSLTSYTVGFSRGSMTRQHHHSGG

SEQ ID NO: 786762 - protein, 104 aa, Homo sapiens
VTFPAFSLMLDMRLFLTCWFVGANRATVCVSFLAPVNFPVEDRFISQPNSSRALLPPTWAFRGRLLPAISEHRSGLVGLKGLPVYWGRGLMTMASGCVAIESSL

SEQ ID NO: 786763 - protein, 686 aa, Homo sapiens
MGNILTCRVHPSVSLEFDQQQGSVCPSESEIYEAGAGDRMAGAPMAAAVQPAEVTVEVGEDLHMHHVRDREMPEALEFNLSANPEASTIFQRNSQTDALEFNPSANPEASTIFQRNSQTDVVEIRRSNCTNHVSTVRFSQQYSLCSTIFLDDSTAIQHYLTMTIISVTLEIPHHITQRDADRSLSIPDEQLHSFAVSTVHIMKKRNGGGSLNNYSSSIPSTPSTSQEDPQFSVPPTANTPTPVCKRSMRWSNLFTSEKGSDPDKERKAPENHADTIGSGRAIPIKQGMLLKRSGKWLKTWKKKYVTLCSNGVLTYYSSLGDYMKNIHKKEIDLQTSTIKVPGKWPSLATSACTPISSSKSNGLSKDMDTGLGDSICFSPSISSTTSPKLNPPPSPHANKKKHLKKKSTNNFMIVSATGQTWHFEATTYEERDAWVQAIQSQILASLQSCESSKSKSQLTSQSKAMALQSIQNMRGNAHCVDCETQNPKWASLNLGVLMCIECSGIHRSLGTRLSRVRSLELDDWPVELRKVMSSIGNDLANSIWEGSSQGQTKPSEKSTREEKERWIRSKYEEKLFLAPLPCTELSLGQQLLRATADEDLQTAILLLAHGSREEVNETCGEGDGCTALHLACRKGNVVLAQLLIWYGVDVMARDAHGNTALTYARQASSQECINVLLQYGCPDECV

SEQ ID NO: 786764 - protein, 663 aa, Homo sapiens
MGNILTCRVHPSVSLEFDQQQGSVCPSESEIYEAGAGDRMAGAPMAAAVQPAEVTVEVGEDLHMHHVRDREMPEALEFNPSANPEASTIFQRNSQTDVVEIRRSNCTNHVSTVRFSQQYSLCSTIFLDDSTAIQHYLTMTIISVTLEIPHHITQRDADRSLSIPDEQLHSFAVSTVHIMKKRNGGGSLNNYSSSIPSTPSTSQEDPQFSVPPTANTPTPVCKRSMRWSNLFTSEKGSDPDKERKAPENHADTIGSGRAIPIKQGMLLKRSGKWLKTWKKKYVTLCSNGVLTYYSSLGDYMKNIHKKEIDLQTSTIKVPGKWPSLATSACTPISSSKSNGLSKDMDTGLGDSICFSPSISSTTSPKLNPPPSPHANKKKHLKKKSTNNFMIVSATGQTWHFEATTYEERDAWVQAIQSQILASLQSCESSKSKSQLTSQSKAMALQSIQNMRGNAHCVDCETQNPKWASLNLGVLMCIECSGIHRSLGTRLSRVRSLELDDWPVELRKVMSSIGNDLANSIWEGSSQGQTKPSEKSTREEKERWIRSKYEEKLFLAPLPCTELSLGQQLLRATADEDLQTAILLLAHGSREEVNETCGEGDGCTALHLACRKGNVVLAQLLIWYGVDVMARDAHGNTALTYARQASSQECINVLLQYGCPDECV

SEQ ID NO: 786765 - protein, 203 aa, Homo sapiens
QRYDEKRQAGSCLCSLMGAPSRSLETQASPSVPSEEELYLPGCERGGQHTQLQHQGLLRITVPGLSLGKVPPNCSLLSQRHPAPHCHHLRTTPVPPPRLLWLALAMFLQDPHRHTQGPGEELSPANDQPHEVGSDLILGRPSAPRPWWLPEPMATALTWELRAPSLQDFRCVHHLCKSPLSGPSGLLPPRPPSLAQGQPLAGR

SEQ ID NO: 786766 - protein, 86 aa, Homo sapiens
TSYPTGESGNIKAGLEHLPPAEQAEARLQLVLEAAAVLLISIIQVKQPWRDSFLKGDFTLEGATWPGAVAYTCNPSTLGGRDKRIT

SEQ ID NO: 786767 - protein, 74 aa, Homo sapiens
NDVRKAKRPKLKGSSSYSSQSIFNPDKFIRRAECSQRKAVPRSAIFTRRAKAQVQGGVHCLSNQPPDFRGAQDC

SEQ ID NO: 786768 - protein, 142 aa, Homo sapiens
MISLNSGNNVEVLMSGNVRCYNIVVEAMKAFPMSERIQEVSCCLLHRLTLGNFFNILVLNEVHEFVVKAVQQYPENAALQISALSCLALLTETIFLNQDLEEKNENQENDDEGEEDKLFWLEACYKALTWHRKNKHVQVGLS

SEQ ID NO: 786769 - protein, 106 aa, Homo sapiens
MAAIPPDSWQPPNVYLETSMGIIVLELYWKHAPKTCKNFAELARRGYYNGTKFHRIIKDFMIQGGDPTGTGRGGASIYGKQFEDELHPDLKFTGAGNSRNGQWRGR

SEQ ID NO: 786770 - protein, 119 aa, Homo sapiens
DTHRYTDTQTHTHTYTGTHTDTHRLTHRHTQIHRYRQTHTHRHTHTGTHTDTHTDTHTDTDIHTHRCTHGHTHRYTHRHIHRHKQTHTDTDTHKHTDAHAHIDTNRCTYGHTHTQTQTD

SEQ ID NO: 786771 - protein, 113 aa, Homo sapiens
RGRWVPQHCQPPVPRSNSRRASAASRQHRAEDLQPAMPEPPPRGGLPRTARASPTGATPCSAEPGPINHPRAEECGGTARDWRVAPPADLVLDPLGEPSWAPQSGGDLENFYI

SEQ ID NO: 786772 - protein, 120 aa, Homo sapiens
MLKINKELKEDVEKLKKKFISKMKIFIKRCKIQKKIFEVEMHNRNEKSTEGIKGRFEDAEERISEPEERTMKMIKSEKQEEDCRKVSRARGPMGHHQAKQHIHCESSKRRQENSKRPPLI

SEQ ID NO: 786773 - protein, 117 aa, Homo sapiens
TFDIWKHVSILHIQNGSKINKDRENTWNGIQAVFQIYNCISDTWHNHTKRGKRTNPDNLSTVLGPVSYILLVGFFFSSYMSVEILKPYLFLLQNSTKLSKCIDGVESQGTHRREMQI

SEQ ID NO: 786774 - protein, 98 aa, Homo sapiens
LGQPGAGRGGHDDRMSTGLRGVKGICLDHANVWEGRAASGSGEQPGCGLQTRPQQPAWGARPEGPWLSGSLSSLCGLLRGCQGKEVPWGMSGRQSLKC

SEQ ID NO: 786775 - protein, 84 aa, Homo sapiens
MELTGAGDKWEPCPFQAGAGAPQVPLQPFIPRLQAWASHSTERAGAPPSCEEVAPAQVMAADLSLPVLFGGWEQAGALPFQVQL

SEQ ID NO: 786776 - protein, 107 aa, Homo sapiens
MLQGGGHGPSYPYGKHLDWIFRSGTVFLSTRLAFSTELSREGQGWVSKCRGGLRRVRQAELGTRPPKVSVFHSSRCLFTFNDTFPLSFLPWITSGKGFKELCHILTP

SEQ ID NO: 786777 - protein, 69 aa, Homo sapiens
FLLLPLPASAASCFCRFLLLPLPASAASCFCCFLLLPLPASSLPQALCSSFLVNVSSRSSPPESRFFPA

SEQ ID NO: 786778 - protein, 36 aa, Homo sapiens
MAGSWGRKQAEIKFLCWGPMRVKGEDSKKEHGAHGR

SEQ ID NO: 786779 - protein, 578 aa, Homo sapiens
MAFMEKPPAGKVLLDDTVPLTAAIEASQSLQSHTEYIIRVQRGISVENSWQIVRRYSDFDLLNNSLQIAGLSLPLPPKKLIGNMDREFIAERQKGLQNYLNVITTNHILSNCELVKKFLDPNNYSANYTEIALQQVSMFFRSEPKWEVVEPLKDIGWRIRKKYFLMKIKNQPKERLVLSWADLGPDKYLSDKDFQCLIKLLPSCLHPYIYRVTFATANESSALLIRMFNEKGTLKDLIYKAKPKDPFLKKYCNPKKIQGLELQQIKTYGRQILEVLKFLHDKGFPYGHLHASNVMLDGDTCRLLDLENSLLGLPSFYRSYFSQFRKINTLESVDVHCFGHLLYEMTYGRPPDSVPVDSFPPAPSMAVVAVLESTLSCEACKNGMPTISRLLQMPLFSDVLLTTSEKPQFKIPTKLKEALRIAKECIEKRLIEEQKQIHQHRRLTRAQSHHGSEEERKKRKILARKKSKRSALENSEEHSAKYSNSNNSAGSGASSPLTSPSSPTPPSTSGRACIIFTSSTSTTTSSSLASCEHRGTCPALVSGCEWHEPRGLAQLHPEFPKRNFEESQTCDHSAPKIG

SEQ ID NO: 786780 - protein, 518 aa, Homo sapiens
AARVDSGGGGTGRAAGVGASGSYLASLGGGGRASRDGLHGEAASRQGAAGRHGAADSSHRGEPEPAVPHEIALQQVSMFFRSEPKWEVVEPLKDIGWRIRKKYFLMKIKNQPKERLVLSWADLGPDKYLSDKDFQCLIKLLPSCLHPYIYRVTFATANESSALLIRMFNEKGTLKDLIYKAKPKDPFLKKYCNPKKIQGLELQQIKTYGRQILEVLKFLHDKGFPYGHLHASNVMLDGDTCRLLDLENSLLGLPSFYRSYFSQFRKINTLESVDVHCFGHLLYEMTYGRPPDSVPVDSFPPAPSMAVVAVLESTLSCEACKNGMPTISRLLQMPLFSDVLLTTSEKPQFKIPTKLKEALRIAKECIEKRLIEEQKQIHQHRRLTRAQSHHGSEEERKKRKILARKKSKRSALENSEEHSAKYSNSNNSAGSGASSPLTSPSSPTPPSTSGRACIIFTSSTSTTTSSSLASCEHRGTCPALVSGCEWHEPRGLAQLHPEFPKRNFEESQTCDHSAPKIG

SEQ ID NO: 786781 - protein, 578 aa, Homo sapiens; identical to SEQ ID NO: 786779

SEQ ID NO: 786782 - protein, 561 aa, Homo sapiens
MAFMEKPPAGKVLLDDTVPLTAAIEASQSLQSHTIVRRYSDFDLLNNSLQIAGLSLPLPPKKLIGNMDREFIAERQKGLQNYLNVITTNHILSNCELVKKFLDPNNYSANYTEIALQQVSMFFRSEPKWEVVEPLKDIGWRIRKKYFLMKIKNQPKERLVLSWADLGPDKYLSDKDFQCLIKLLPSCLHPYIYRVTFATANESSALLIRMFNEKGTLKDLIYKAKPKDPFLKKYCNPKKIQGLELQQIKTYGRQILEVLKFLHDKGFPYGHLHASNVMLDGDTCRLLDLENSLLGLPSFYRSYFSQFRKINTLESVDVHCFGHLLYEMTYGRPPDSVPVDSFPPAPSMAVVAVLESTLSCEACKNGMPTISRLLQMPLFSDVLLTTSEKPQFKIPTKLKEALRIAKECIEKRLIEEQKQIHQHRRLTRAQSHHGSEEERKKRKILARKKSKRSALENSEEHSAKYSNSNNSAGSGASSPLTSPSSPTPPSTSGRACIIFTSSTSTTTSSSLASCEHRGTCPALVSGCEWHEPRGLAQLHPEFPKRNFEESQTCDHSAPKIG

SEQ ID NO: 786783 - protein, 628 aa, Homo sapiens
MAPAGPWRLSVMLRVLGGGCGLGRGLGSLPVVSDQRLSAGRASRDREETATKRGGSEQQDETAALQPRYHGRDHQETNLEAPLQEYIIRVQRGISVENSWQIVRRYSDFDLLNNSLQIAGLSLPLPPKKLIGNMDREFIAERQKGLQNYLNVITTNHILSNCELVKKFLDPNNYSANYTEIALQQVSMFFRSEPKWEVVEPLKDIGWRIRKKYFLMKIKNQPKERLVLSWADLGPDKYLSDKDFQCLIKLLPSCLHPYIYRVTFATANESSALLIRMFNEKGTLKDLIYKAKPKDPFLKKYCNPKKIQGLELQQIKTYGRQILEVLKFLHDKGFPYGHLHASNVMLDGDTCRLLDLENSLLGLPSFYRSYFSQFRKINTLESVDVHCFGHLLYEMTYGRPPDSVPVDSFPPAPSMAVVAVLESTLSCEACKNGMPTISRLLQMPLFSDVLLTTSEKPQFKIPTKLKEALRIAKECIEKRLIEEQKQIHQHRRLTRAQSHHGSEEERKKRKILARKKSKRSALENSEEHSAKYSNSNNSAGSGASSPLTSPSSPTPPSTSGRSCTTFTSSTSTTTSSSLASCEHRGTCPALVSGCEWHEPRGLAQLHPEFPKRNFEESQTCDHSAPKIG

SEQ ID NO: 786784 - protein, 60 aa, Homo sapiens
PLDPIPLSAVDSIFDTLIIFRLTYPLSCLFLINVNFILEDEFHTHHLTSIGETVRINTCF

SEQ ID NO: 786785 - protein, 78 aa, Homo sapiens
QQISAHGRSSSNVNGGPELDRCISPEGVNGNRCSESSTLLEKYKIGKVIGDGNFAVVKECIDRSTGKEFALKIIDKAK

SEQ ID NO: 786786 - protein, 83 aa, Homo sapiens
SSKKKMPVSKYSYFHVSEGQDIHLTIIYLLCNIGCKLGAGNQMVNKVDMSLLLEISQSKVNRQVQYHTSAIDRKRKDSIQRMH

SEQ ID NO: 786787 - protein, 118 aa, Homo sapiens
MLARMVLMSGPRDPPASASQSANESFEEGCLFLAALRFFLSASEVAYSTYGLHLQSGLILFKMRQVDAELHQPPVISTQCVLEEETLHWACDQRKLNQCWRHILTVEWAAHRRCSNLL

SEQ ID NO: 786788 - protein, 137 aa, Homo sapiens
SGQKVRFLLLLPTAQQFSKHQCFSDYPYQFPFCRRQGLPTLPRLASCGPLALASHVAYATTPSSGLADLNRPYPEVCPQQFLLIHSPVFTFWEINMTAQISSTNLHFYPKLYSRGTRHTQCLAQGVAYINVSHTNRN

SEQ ID NO: 786789 - protein, 110 aa, Homo sapiens [sequence omitted]

SEQ ID NO: 786790 - protein, 105 aa, Homo sapiens
CTLPSPPSGLDFFDIQRGRSLSCSCDTGNFIVGSSLGMKAHPGLAPRCLMPSPAVLLLMASTAPNETLRGTSLLHLLSPSPFPSVAWLHLQLDLIENGNILSVGG

SEQ ID NO: 786791 - protein, 69 aa, Homo sapiens
RIPMAGEEPHHKGAPPNGQEAYENMFNLISQQGIQIRTTPGWLKVQRLTISRAGGDAEQLELSYALRKG

SEQ ID NO: 786792 - protein, 117 aa, Homo sapiens
MNYHKFSSLKQHPFNIPRFYRSEVQAVSPGLCSESHKANIKVSANWVLIWGIWEIFCFQFFTVVDRILFLVASGLTSTFCHCQLGVGVGLGLSRLLIFLLMGFPPPSKPQKEHQILT

SEQ ID NO: 786793 - protein, 307 aa, Homo sapiens
GGAGGSSVPGALNQRAAEFEKPAARGSAAAVPSAEVRGGWGAERAGWGGSWSLASRLGPVSTANMSRPVRNRKVVDYSQFQESDDADEDYGRDSGPPTKKIRSSPREAKNKRRSGKNSQEDSEDSEDKDVKTKKDDSHSAEDSEDEKEDHKNVRQQRQAASKAASKQREMLMEDVGSEEEQEEEDEAPFQEKDSGSDEDFLMEDDDDSDYGSSKKKNKKMVKKSKPERKEKKMPKPRLKATVTPSPVKGKGKVGRPTASKASKEKTPSPKEEDEEPESPPEKKTSTSPPPEKSGDEGSEDEAPSGED

SEQ ID NO: 786794 - protein, 84 aa, Homo sapiens
NNPLWHNLPSNKPADVPEPKIKVYKEKKANEFEVKGVDFSNYKEVSYKKLILVLEGNHLEGNYCSCYLISILGDEAVTSQLEMN

SEQ ID NO: 786795 - protein, 172 aa, Homo sapiens
QTAFRLSRLPSDSPFSILSLLSSESEQYQWDGNLKPQAKSAHLAGLLLRSPTHYSSCRWPLLLDPSNEALIWLDPLPLEENRSFAPALTEGRGKGLMRNQKRESKTDMKEEDDESEESNEAEDQTKEQKAEERPHEKSKRESKTDMKEEDDEVRENESEAVWRSALDSIMST

SEQ ID NO: 786796 - protein, 98 aa, Homo sapiens
MAACTFGELRLDLVPALCFSVLQGDVLAASEEEKAPIQSPKGVEAAKELYTHLCDVVDKVDGDSVPMEILKQEVRNTLLNGAAIFFPNRQTRRNHLFT

SEQ ID NO: 786797 - protein, 133 aa, Homo sapiens
VPERVSVDGEEASFDDDFILLAKARRKQCFSLRLLFWYSLSKLPPELFINTGILAEKDSPTSKSGKGEQETHRWLGNRSRSQEVCSQEIFLCQCPRVVSSLGRTHQHTNGRKGSPQRPKLLCWGRGFEGSSPG

SEQ ID NO: 786798 - protein, 640 aa, Homo sapiens
MELEVPDEAESAEAGAVPSEAAWAAESGAAAGLAQKKAAPTEVLSMTAQPGPGHGKKLGHRGVDASGETTYKKTTSSTLKGAIQLGIGYTVGHLSSKPERDVLMQDFYVVESIFFPSEGSNLTPAHHFQDFRFKTYAPVAFRYFRELFGIRPDDYLYSLCNEPLIELSNPGASGSLFYVTSDDEFIIKTVMHKEAEFLQKLLPGYYMNLNQNPRTLLPKFYGLYCVQSGGKNIRVVVMNNILPRVVKMHLKFDLKGSTYKRRASKKEKEKSFPTYKDLDFMQDMPEGLLLDADTFSALVKTLQRDCLVLESFKIMDYSLLLGVHNIDQHERERQAQGAQSTSDEKRPVGQKALYSTAMESIQGGAARGEAIESDDTMGGIPAVNGRGERLLLHIGIIDILQSYRFIKKLEHTWKALVHDGDTVSVHRPSFYAERFFKFMSNTVFRKNSSLKSSPSKKGRGGALLAVKPLGPTAAFSASQIPSEREEAQYDLRGARSYPTLEDEGRPDLLPCTPPSFEEATTASIATTLSSTSLSIPERSPSETSEQPRYRRRTQSSGQDGRPQEEPPAEEDLQQITVQVEPACSVEIVVPKEEDAGVEASPAGASAAVEVETASQASDEEGAPASQASDEEDAPATDIYF

SEQ ID NO: 786799 - protein, 640 aa, Homo sapiens; identical to SEQ ID NO: 786798

SEQ ID NO: 786800 - protein, 287 aa, Homo sapiens
MELEVPDEAESAEAGAVPSEAAWAAESGAAAGLAQKKAAPTEVLSMTAQPGPGHGKKLGHRGVDASGETTYKKTTSSTLKGAIQLGIGYTVGHLSSKPERDVLMQDFYVVESIFFPSEGSNLTPAHHFQDFRFKTYAPVAFRYFRELFGIRPDDYLYSLCNEPLIELSNPGASGSLFYVTSDDEFIIKTVMHKEAEFLQKLLPGYYMNLNQNPRTLLPKFYGLYCVQSGGKNIRVVVMNNILPRVVKMHLKFDLKGSTYKRRASKKEKEKSFPTQSHFYGQTDSETK

SEQ ID NO: 786801 - protein, 883 aa, Homo sapiens
MELEVPDEAESAEAGAVPSEAAWAAESGAAAGLAQKKAAPTEVLSMTAQPGPGHGKKLGHRGVDASGETTYKKTTSSTLKGAIQLGIGYTVGHLSSKPERDVLMQDFYVVESIFFPSEGSNLTPAHHFQDFRFKTYAPVAFRYFRELFGIRPDDYLYSLCNEPLIELSNPGASGSLFYVTSDDEFIIKTVMHKEAEFLQKLLPGYYMNLNQNPRTLLPKFYGLYCVQSGGKNIRVVVMNNILPRVVKMHLKFDLKGSTYKRRASKKEKEKSFPTYKDLDFMQDMPEGLLLDADTFSALVKTLQRDCLVLESFKIMDYSLLLGVHNIDQHERERQAQGAQSTSDEKRPVGQKALYSTAMESIQGGAARGEAIESDDTMGGIPAVNGRGERLLLHIGIIDILQSYRFIKKLEHTWKALVHDGDTVSVHRPSFYAERFFKFMSNTVFRKNSSLKSSPSKKGRGGALLAVKPLGPTAAFSASQIPSEREEAQYDLRGARSYPTLEDEGRPDLLPCTPPSFEEATTASIATTLSSTSLSIPERSPSETSEQPRYRRRTQSSGQDGRPQEEPPAEEDLQQITVQVEPACSVEIVVPKEEDAGVEASPAGASAAVEVETASQASDEEGAPASQASDEEDAPATDIYFPTDERSWVYSPLHYSAQAPPASDGESTHNFYAAPDPEPSSTSAPAAPEGAAHPAEAQSSGDARLAAPPDLVLPLHGCRRPGPSPTSLPGPRHPGRQPAPVRPTLPSGQSHLSPYLAQRRKHVCAVLGKEQKRHKQTNQREKSPCPLHSLVLCCACLCPEEEARLFAVASGDLSPGGPIGLQRGRLGSRATLPPSTWEADPPALSLGLGASVQDIWPEHRLWGQPSPCQALRPLSSYVPAAVGP

SEQ ID NO: 786802 - protein, 230 aa, Homo sapiens
SGGSLDAAAAAGWNGAARGLQAISGRGREEAAAPEGAAHPAEAQSSGDARLAAPPDLVLPLHGCRRPGPSPTSLPGPRHPGRQPAPVRPTLPSGQSHLSPYLAQRRKHVCAVLGKEQKRHKQTNQREKSPCPLHSLVLCCACLCPEEEARLFAVASGDLSPGGPIGLQRGRLGSRATLPPSTWEADPPALSLGLGASVQDIWPEHRLWGQPSPCQALRPLSSYVPAAVGP

SEQ ID NO: 786803 - protein, 411 aa, Homo sapiens
MELEVPDEAESAEAGAVPSEAAWAAESGAAAGLAQKKAAPTEVLSMTAQPGPGHGKKLGHRGVDASGETTYKKTTSSTLKGAIQLGIGYTVGHLSSKPERDVLMQDFYVVESIFFPSEGSNLTPAHHFQDFRFKTYAPVAFRYFRELFGIRPDDYLYSLCNEPLIELSNPGASGSLFYVTSDDEFIIKTVMHKEAEFLQKLLPGYYMNLNQNPRTLLPKFYGLYCVQSGGKNIRVVVMNNILPRVVKMHLKFDLKGSTYKRRASKKEKEKSFPTYKDLDFMQDMPEGLLLDADTFSALVKTLQRDCLVLESFKIMDYSLLLGVHNIDQHERERQAQGAQSTSDEKRPVGQKALYSTAMESIQGGAARGEAIESDDTVFAGLAGEQVSVPACGVSRACRAPAQRVWVPVASG

SEQ ID NO: 786804 - protein, 50 aa, Homo sapiens
FQGDRRTRRRIFFLVVLRVYVYVCAGVEGVYGGEVCKGFWRAGACVGVVW

SEQ ID NO: 786805 - protein, 42 aa, Homo sapiens
MKIKSLKLYLLSLPIKEAEIIDFFLGATLKNEFKIMPVKMET

SEQ ID NO: 786806 - protein, 73 aa, Homo sapiens
QAVEGPRLPACQINISASAAVKGGQPPVRQTLDLGIHTVNRHIILQKASSSGQLLSLWGPQRWNSAFSLKSWL

SEQ ID NO: 786807 - protein, 97 aa, Homo sapiens
KVTFPKPEIKRTSNSSTVVGKVPKYWSNTFKIHRQHYFQSRILYSTKLQIKCLGRKTFSDVHRFKIFTSCESSVIPSVSLMYSTEMEYIKKYEDVRS

SEQ ID NO: 786808 - protein, 97 aa, Homo sapiens; identical to SEQ ID NO: 786807

SEQ ID NO: 786809 - protein, 274 aa, Homo sapiens
IAKCLAQAGLQSDTECTSAVDLWSLGIILLEMFSGMNLKHTVRSQEWKAKSSAIIDHIFASKAVVNAAIPAYHLRDLIKSMLHDDPSRRIPAEMALCSPFFSIPFAPHIEDLVMLPTPVLRLLNVLDDDYLENEEEYEDVVEDVKEECQKYGPVVSLLVPKENPGRGQVFVEYANAGDSKAAQKLLTGGCLCEVVWLHSTAECYRGGSGQLAYQYLDGSFLLSFLGIPFDAGYPSLRGFTYYSRALPAGVHLAGGPAQGDTGPGGGPLPFVGLA

SEQ ID NO: 786810 - protein, 67 aa, Homo sapiens
CMSSPTISKPGELGRWSLPSTFKAAFSGHREQPGTGAGSTVGSGSGFPKGRMPPTGLCELATPWPLE

SEQ ID NO: 786811 - protein, 111 aa, Homo sapiens
PQCALREKAALGDLTPPPPPPPQQQQQQLTAFLQQLQALKPPRGGDQNLLPTMSRSLSVPDSGRLWDVHTSASSQSGGEASLWDIPINSSTQGPILEQLQLQHKFQERREV

SEQ ID NO: 786812 - protein, 153 aa, Homo sapiens
MHGLFDVEISLTVQENAGSISCSMRHAHLSREVESRVQIGDTFFEPISWHLATKVLGILCCGLFFGIVGLKIFFSKFQCKREREAWAGALFMVPAGTGSEMLPHPAASLLLVLASRGPGPKKENPGGTGLEKKARTGRIERRPETRRYQRLRG

SEQ ID NO: 786813 - protein, 89 aa, Homo sapiens
CGTAGSSLTFPEHPGHCSFEALNLVPSKVLYQSFQPWYPWHLGLDSSLWKDGHVPCRMFGHNPDFRYQWHKNVCKRCQISLRGMRWGKL

SEQ ID NO: 786814 - protein, 37 aa, Homo sapiens
ADLDQLTTQLPDPPHCMSPRSVDIAGTVSWSPVDVKG

SEQ ID NO: 786815 - protein, 164 aa, Homo sapiens [sequence omitted]

SEQ ID NO: 786816 - protein, 42 aa, Homo sapiens
MLALASLIPLKAPRYSPPREKAWQVLQHADEALPVRQRLCGE

SEQ ID NO: 786817 - protein, 110 aa, Homo sapiens
SLGCILQPREAESLAELQVKNSLGVSKGAPERDDVILEALSLERDSHHLCSWLEGCTVCMRVCVYVAGTCKAYLISPSISPAAPRLLPRTTPHQQAGGRGNRSERAGPLQ

SEQ ID NO: 786818 - protein, 68 aa, Homo sapiens
LLTTQESGRSGLLNYWWLEVSPGGSSYSMRTAAHYGSRHFFRELIFSQHAAHCLVVLYRFPRRMAAEL

SEQ ID NO: 786819 - protein, 70 aa, Homo sapiens
EQLHYYKKIYRLSGFKKASFLPSQLPLEFCKHYLNLFSPKVSLRSCSLPSHSLIHTSENHDREEHDLVKG

SEQ ID NO: 786820 - protein, 74 aa, Homo sapiens
PSHLSSYLQDFTYWAYNSEGTNLPLILGNLFLHNAVSVQRQKNARRGCGCRSGGGGAIGEQKASCQEKGIGIYN

SEQ ID NO: 786821 - protein, 102 aa, Homo sapiens
MTINSVCQSNSERSAKDEAEACGKSVLPKTDPRHFAGTESAKTKRGLCPSWHHLNSSCPRASHTRLAVFMYHLDRCILSNFLQITSFGVKSALHTGLLIFAL

SEQ ID NO: 786822 - protein, 52 aa, Homo sapiens
ESSSVPDSLSIQKKKARYGGACYLEVEATVIRDHANALHFSLGKGSETLSPK

SEQ ID NO: 786823 - protein, 104 aa, Homo sapiens
MDNIWIYMNSWTIINSLFYIKAEGQMLIPSPLQDSKFLPLNHAGHNCYCQWSSHIYVRCVNQDDVCSGNISTVEDETRRCCSLDVAAHTNSCLTTLGLEAAIPS

SEQ ID NO: 786824 - protein, 142 aa, Homo sapiens
MGPHRLWMCLSACCPAVHAMPGIGPLAQTPVLWRADLHRSGCVAAGAHCGIHFHRLETAPEQHSSLLQGPPVACSPLVSISAHVYLMMQMTTETWAQCGVWMLIGFAMYFGYGIPHSLENNQQPPASSSQTPHENIPSPLLN

SEQ ID NO: 786825 - protein, 77 aa, Homo sapiens
LQHIWHAEEYGRRLAARLKIAFIITFLMKLTHNHCTDGHLSTVGREEQAKCNLQAPLQSPLLLFCMHHILSSITLTC

SEQ ID NO: 786826 - protein, 104 aa, Homo sapiens
TFCSIYRFPRAAQLLIMCIILSITNTSDRAPSAQFDGQEFEAGLVPSIVNPVSTEHTTIGQALWLMPVIPALWEAEAGRSRGQEIETILANMVKLCLYKNTKIS

SEQ ID NO: 786827 - protein, 108 aa, Homo sapiens
MHTCQNSTGSATLRLRFLPFMILGRGAQIRRQEKRKMGLGACPSEDPRESWPWQAPVLSEDGCCINVDSGHGQPFTGQMSRKAQPGHHSGTPSTRHQVNSRALIPCSV

SEQ ID NO: 786828 - protein, 57 aa, Homo sapiens
NFQHAYCILHVLYGHHLLPASARIDLGETWDDRSISKEGGLGGTGRNQEEVRGLQVV

SEQ ID NO: 786829 - protein, 97 aa, Homo sapiens
EGCIKILSFHIGVSFEDVAVPLSQEEWDCLIPAQRGLYKDVMMGTYGNLLSLVGEWLSKLWYIHTMGYDSTIKRNCPDFTTMQYMHVRNLHLYPLNI

SEQ ID NO: 786830 - protein, 109 aa, Homo sapiens
SNYVLQTPGLSTALVKKRHMGQWAQLHRVHAPGDTAGRVALGWCGGAWPSLTLPGLRSPGLLRTDSRAPHPADFCPVLPPGKLPTSSLIAQLDKDPTASSISLLDSKKP

SEQ ID NO: 786831 - protein, 106 aa, Homo sapiens
WGAQTNSNNLSTVSGLKQLKNIGMPSLPTICTWVKEKLGKTSSLQLLCLLKRNKNITMHQKPPLGCFTGRRATYDVHRVLVRFLGVTSSRGLTSSFSWSLAFTILL

SEQ ID NO: 786832 - protein, 102 aa, Homo sapiens
TTPRHPLQEYPDVFFTSFRSQQLPEVYSNVFFSSFRSLPKCQLHLLQVHANVISVRPSLSLLLLQPFLVPFTALFSLLFIVCLPHLNVGSLRAENCLWLMHS

SEQ ID NO: 786833 - protein, 120 aa, Homo sapiens
MPQFPVAFGIMFTYFTLAHKVLHSQASACLFSIICFFPTCTLHFSQVGSHAAPWMGHDALCLRVFLYRLPCEKPSPSAHMVTGSVLEGPLCALALSSFPPGATLHLSCLGLKRAVFFYQP

SEQ ID NO: 786834 - protein, 102 aa, Homo sapiens
SSRMLSYLRLQRTSKVGILSPLYDMGCELRARGSNSQQLVGVCLMIRHHCLRGENREEIKIQLWMEMACCPPCILLQVHCLPKGMSAVPEKSHSVILVKTYE

SEQ ID NO: 786835 - protein, 89 aa, Homo sapiens
SVCSRPQQGRKHPKAEQILMRHKSHTHGLGIILGSVGSLWRVLGKVVTESSLSVLRKTPLGAVGRMVLRRATLGLQDQWNDVKSRNSEA

SEQ ID NO: 786836 - protein, 80 aa, Homo sapiens
PQQIPLYILRSRRPQHGCTVCIHSVDTCVLHNSSFPGLLWPTCEPTFGLPCGLGCEPTFGLPCGLGCEPTSLSVPCCVAV

SEQ ID NO: 786837 - protein, 72 aa, Homo sapiens
SRDFPLPFSGWAVGEARGSPDDRSGPGRDPAESAPFLICCRESRGQGGENGGSFRIRPPRRERMLLIGKAPH

SEQ ID NO: 786838 - protein, 76 aa, Homo sapiens
YSEPVLVNAELRGDGGGNRRAAYFPRLRPVSTGQWVNMTKNRPRTVMQVGLAQRSLVRKGLPWAENYIKSQERSVG

SEQ ID NO: 786839 - protein, 148 aa, Homo sapiens
NWKSHPLLMGMKDDATLASSLAKLQMLSMYLSYEPALPLPGSYPRALRTTCVCTHSRCFSLLELPQAGTMDGVLQQEMYFLTYLQAGSPRARCLQGWFLPRPLSLPCRWPPVLCVLSQSSLCLCLCYNLPFIKGHQSLWIRAHSNSLI

SEQ ID NO: 786840 - protein, 44 aa, Homo sapiens
IPDTLQKWVQWGLWTNQKLLAEGTFSSSNPRLRGLQDSLHPPVM

SEQ ID NO: 786841 - protein, 124 aa, Homo sapiens
VWSQPFCECSGPAGCTGFEKWTPPSPATSQKPSAMRAGRSRRSPSCRDDNRAQRRWLPASCPLPRSGVTQRDSWPEPQAPAQGATAGRPGFIRDAFVPHQVQRRKLARPSLSLKQAPPQPKRSG

SEQ ID NO: 786842 - protein, 41 aa, Homo sapiens
SHSPGAPNACGVLPGTTVDDGVHQDLQRVLACEQVYDLEGM

SEQ ID NO: 786843 - protein, 139 aa, Homo sapiens
LNQSSHLSLLGSCDYRHVPPCPANFYSFGRDGVVLCCQRWSPTPGLSDPPTSAFQNAGIIDVTVPSHVSLQYTFSLLTAPRSHAPASLSSRSFLVSGWLCLLSSVPRYVFPQGSALGILHSLRSLLGRPHSVPGFKTPS

SEQ ID NO: 786844 - protein, 152 aa, Homo sapiens
SICPFDLELKDEDDEDDCFILEKAARGKRPIFECFWNGRLIPYTSVEDFDWCTPPKKRGLAPIECYNRISGALFTNDKFQVSTNKLTFMDLELKLKDKNTLFTRILNGQEQRMKIDREFALWLKDCHEKYDKQIKFTLFKGVITRPDLPSKK

SEQ ID NO: 786845 - protein, 80 aa, Homo sapiens
TTVAMNSVGEACTDMKREYDQCFNRWFAEKFLKGDSSGDPCTDLFKRYQQCVQKAIKEKEIPIEGLEFMGHGKEKPENSS

SEQ ID NO: 786846 - protein, 80 aa, Homo sapiens; identical to SEQ ID NO: 786845

SEQ ID NO: 786847 - protein, 91 aa, Homo sapiens
TTVAMNSVGEACTDMKREYDQCFNRWFAEKFLKGDSSGDPCTDLFKRYQQCVQVSPPASVPRPCILGAVSHHTHRILRGLGLDWKGGEKSQ

SEQ ID NO: 786848 - protein, 113 aa, Homo sapiens
HSHPHMHTHTHAVTHMHTHTHAHPYTCTATHVHTPTHAATHMHTHSHTQCLPCLSPLAFVTQIAGQAQHPRIRDPVCLSLLGPLHSLPAFTSPGRHNLSTPLSLSSQTLFSLL

SEQ ID NO: 786849 - protein, 100 aa, Homo sapiens
PTLSSQSQEYPVIANMPLRGQVTLTTATTWWLHSTDLHSTVQHSTDLQEQGQPLQGLETEGLLKLVLGDLPSPGPAQQSAAEVLPGSRPPAQSSSLSRLD

SEQ ID NO: 786850 - protein, 112 aa, Homo sapiens
YIYCLTVSTSLESKHLLAGFPASGLTRLGWRCQLGYVSSWRLWGRSPSKFTQVIHRVHSQGDAGLSSGLCAVSHRLPLATRGHSQSFPHGPPSVAAYFIEPARSTSRMGLTV

SEQ ID NO: 786851 - protein, 79 aa, Homo sapiens
QRFMQRVKEKEATFKEAEKELQDKFEHLKMIQQEEIRKLEEEKKQLEGEIIDFYKMKAASEALQTQLSTDTKKDKHRKK

SEQ ID NO: 786852 - protein, 102 aa, Homo sapiens
SLATEQDSISKKRKRKMKIITSRHIVIRLLNKDTLIKVTRKKTKRKKKTHDIERNKDKNDSRCVVRNYSRQKTVELKKKVGQSRILYPTQISFKNEGEINTF

SEQ ID NO: 786853 - protein, 77 aa, Homo sapiens
RSPGEESGGVYQLGASTDFAHYPSSSVQYTPCTDVQPTLTTAKAVRGGQVSECVEAIGSLHGRRRHHQKGSWKEFYI

SEQ ID NO: 786854 - protein, 229 aa, Homo sapiens
MYLGIQSQRRKEHQRRFYWAMMYEYADVNMLRLLETFLESAPQLVLQLYIMLQKNSAETLPCVSSVTSLMSLAWVLASYHKLLRDSRDDKKSMSYRGAIIQVFWRLFTISSRVISFALFASIFQLYFGIFVVVHWCAMAFWIIHGGTDFCMSKWEEILFNMVVGIVYIFCWFNVKEGRTRYRMFAYYTIVLTENAALTFLWYFYRDPETTDSYAVPALCCVFISFVAGI

SEQ ID NO: 786855 - protein, 44 aa, Homo sapiens
FHHSSRPDSNRRNPQKNHGAAVDAPLLISSGSRTPGHSFQNTDV

SEQ ID NO: 786856 - protein, 69 aa, Homo sapiens
RSGCRSARSLCVGTAEGIRCVTQGKCAHLSEPPRPSLAKWWSRYPAVRQAGMRGVAGGKLDWSSHSAAG

SEQ ID NO: 786857 - protein, 69 aa, Homo sapiens; identical to SEQ ID NO: 786856

SEQ ID NO: 786858 - protein, 192 aa, Homo sapiens
MGSLGSKNPQTKQAQVLLLGLDSAGKSTLLYKLKLAKDITTIPTIGFNVEMIELERNLSLTVWDVGGQEKMRTVWGCYCENTDGLVYVVDSTDKQRLEESQRQFEHILKNEHIKNVPVVLLANKQDMPGALTAEDITRMFKVKKLCSDRNWYVQPCCALTGEGLAQGFRKLTGFVKSHMKSRGDTLAFFKQN

SEQ ID NO: 786859 - protein, 78 aa, Homo sapiens
QKSSLIAHQKTHRRQKSCESTNVESLLSEFTNLRKYREKSLLASSESPETFSYLTYSVYIKNSEGEKLCKYEKYFAQK

SEQ ID NO: 786860 - protein, 225 aa, Homo sapiens
TFFFSVRNPEGQIKLYSKGADTILFEKLHPSNEVLLSLTSDHLSEFAGEGLRTLAIAYRDLDDKYFKEWHKMLEDANAATEERDERIAGLYEEIERDLMLLGATAVEDKLQEGVIETVTSLSLANIKIWVLTGDKQETAINIGYACNMLTDDMNDVFVIAGNNAVEVREELRKAKQNLFGQNRNFSNGHVVCEKKQQLELESSCRRNHNRRVCLNHKWPQCWLMP

SEQ ID NO: 786861 - protein, 100 aa, Homo sapiens
TFFFSVRNPEGQIKLYSKGADTILFEKLHPSNEVLLSLTSDHLSEFAGEGLRTLAIAYRDLDDKYFKEWHKMLEDANAATEERDERIAGLYEEIERDLMV

SEQ ID NO: 786862 - protein, 111 aa, Homo sapiens
SSTRSRSTYHRLVTVSWFENRRLVNPRVGISGRGGAGPGPLAPSLGLTRRHRNGVSLQDPHRRRDSPNLRSLASNLLDTNLTALKTSERDVGGFLMFLFLEFFFFGWVRTV

SEQ ID NO: 786863 - protein, 70 aa, Homo sapiens
PSLSFTVLLCPSLSSTVHHCPPLSIAVLRCPSLSSAVHHCPLLSITVLRCPSLSSTVHRCPPLSSTVIRC

SEQ ID NO: 786864 - protein, 110 aa, Homo sapiens
MAVPRCMLPKWLLPKWLLPKWLYLNGCYLNGCYLNGCYLNGCYLNGCMAVRGWGVWVEKNVKVYSLVTLITFTVLYNYHHHFENFFITTDRNSLSSNFPTPPKAPQKKKR

SEQ ID NO: 786865 - protein, 35 aa, Homo sapiens
SQHFTQQDYAPHDIQISVAKPEKMDGKMTKILLVP

SEQ ID NO: 786866 - protein, 66 aa, Homo sapiens
QTPTHSSRPNLTHFPYETFTEAPKFNRSHYFCSRNVTAFYVYFYATISKLHYINHNPCFLSSPGHE

SEQ ID NO: 786867 - protein, 132 aa, Homo sapiens
LILFSFPRNVYMEVIIDPRTVFVPANEENQSALGKNCLHAEGIQQLPKKPLPFVSRGFLVSLRLTQDNNCPSPTWACLPCQCYLGGVEETQACFRKADRYTGDKGHVIQPPAIHLESGCLASTIYGHRNART

SEQ ID NO: 786868 - protein, 74 aa, Homo sapiens
RKEIAHPHLYQGHQMKASISSPVIICKELCIAALTDTTYAVSWCPHSFRVMADCQPTIPPSCSLLICSLISPRK

SEQ ID NO: 786869 - protein, 101 aa, Homo sapiens
HGGPPLTGGHHIDAELSADTLIGIAHYSPEFLGSSDSPASASLVAGITGAYHHAQLIFVFLVEKGFHHVGQAGLELLTSSDPPASASQNAEITGVSLASEF

SEQ ID NO: 786870 - protein, 285 aa, Homo sapiens
MEETIKDPPTSAVLLDHCHFSQVIFNSVEKFYIPGGDVTCHYTFTQHFIPRRKDWIGIFRVGWKTTREYYTFMWVTLPIDLNNKSAKQQEVQFKAYYLPKDDEYYQFCYVDEDGVVRGASIPFQFRPENEEDILVVTTQGEVEEIEQHNKELCKENQELKDSCISLQEAELRHAAELQKKQEELETLQSINKKLELKVKEQKDYWGDRAVQLKEQNQKNVLKKNEKMGIRVDSVSGPVSTQENELGKLVQGDQDTTEQRSSEKRKTEESRSRRWSNEANETLHGN

SEQ ID NO: 786871 - protein, 135 aa, Homo sapiens
SRILKMPLSLCDQASQGCAATPARTLQGPFLKQLRSLSNMGNTGSHLLPRSSGESLSPRNSSQTSEPPGPGLEPLPKSHFLHNCPGVACLTRSPAHCLLVRRSLESKAQVHGPAMESAPVPCAVTVQLSNLEWRL

SEQ ID NO: 786872 - protein, 69 aa, Homo sapiens
RAQACTLGRHCSVIQEPPLSTAGSEQSERETALPGATQQASHRVGRGRSGPHRMSSSLGPQSSSACPSQ

SEQ ID NO: 786873 - protein, 47 aa, Homo sapiens
KDSSCPAGKKDLIFGFNFFKERRKGQRGLFNLSHDNSQSASKSFMYS

SEQ ID NO: 786874 - protein, 135 aa, Homo sapiens
NHPTHTLRSQNYKKTRMPTLTIPIQYSGGSLSQKNQGRKRNERHLKMKKEVKPSVFTDYMIIYLANPKDSTKRLLEVIKDFSKVSGYKINGQKSVAFLYTNYIIAEKQIKNAIPFTIDTHTHTHTHTHTHTQRNA

SEQ ID NO: 786875 - protein, 117 aa, Homo sapiens
TAGWGGAPGLAETFPPPAGSGRRRPSCRNISSQAAMVSRSCRCRCSTASSSCWARSSRGGCGGGLPPSPSPAFPRSTPAASRSPSILLGVVRFLKTVLSQVYISTRVTKQCKIIFTA

SEQ ID NO: 786876 - protein, 83 aa, Homo sapiens
RILLCTILSLHWLFPCTLIYLHGSNYNPYAENSQSPAVSQLSFLSFATSSPLNISTWMSLRNCKLNWLKGDIQSLPNLLFLWP

SEQ ID NO: 786877 - protein, 312 aa, Homo sapiens
KSWPWGKSNGVRRWGRPYLGTSRKLRVGRSPRPLCRGCRRPKRLLCDLDQAPCPLMPQFPLLSTEGLSRTWRAPSSSHSGTPCTCPQGRVLAGLHVAAVPHSGTLCVETAGKVPLEQVSQPPGPGCLGWVIPGNRPVNRFGRRAVFVASLVLTTGPWGPSEGPGLASFPYPCLVLRLLPRGATIGKGPLLGPCIWARLELCDPPHRLAFSMGAGLFSVVGTLLLPGLAALVQDWRLLQGLGALMSGLLLLFWGFPALFPESPCWLLATGQVARARKILWRFAEASGVGPGDSSLEENSLATELTMLSARSPQ

SEQ ID NO: 786878 - protein, 135 aa, Homo sapiens
MELFQSSPRPPLQPVCVCPGLELCDPPHRLAFSMGAGLFSVVGTLLLPGLAALVQDWRLLQGLGALMSGLLLLFWGFPALFPESPCWLLATGQVARARKILWRFAEASGVGPGDSSLEENSLATELTMLSARSPQ

SEQ ID NO: 786879 - protein, 51 aa, Homo sapiens
GVYERIPVIFYTHTCIYTCTYSYTHTCIYTCTYPHTCTCIYTCTSNHTCIY

SEQ ID NO: 786880 - protein, 41 aa, Homo sapiens
GSGIKIVWLLISNTGCREGAVTFKVCSENCYQLRYPAKLSV

SEQ ID NO: 786881 - protein, 94 aa, Homo sapiens
TSHPASSPALLSRLSRNQRSSILYPRGVKKQSPNNTKRQICYFSSHDSQASGSKGTEWSTPRLVQGASGFSPRSGSLKCTSSINDECSWHLEME

SEQ ID NO: 786882 - protein, 119 aa, Homo sapiens
CSEPVVASLYSSLSDRASLSLNQKYLRRKKKEEEEEEEEEEEEEEEEKKEGRKEGRKERKKERKKERKKKKERQRKKGKGGKERGREEGRKGRKERKIKIEDPMLILLNSSKHLKRNLY

SEQ ID NO: 786883 - protein, 77 aa, Homo sapiens
SSNFFIRQQEKRVQAKEELPNTYKPIRCCENSTHYHENSMKESARMIPSPPTRYLPQHVEIIIPGDIWVGPQNQTIS

SEQ ID NO: 786884 - protein, 131 aa, Homo sapiens
MASAGLQLLAFILALSGVSGVLTATLLPNWKVNVDVDSNIITAIVQLHGLWMDCTWYSTGMFSCALKHSILSLPIHVQAARATMVLACVLSALGICTSTVGMKCTRLGGDRETKSHASFAGGVCFMSAGIS

SEQ ID NO: 786885 - protein, 131 aa, Homo sapiens; identical to SEQ ID NO: 786884

SEQ ID NO: 786886 - protein, 226 aa, Homo sapiens
MEALEVDDISPALEVTEEFFSTLDSNLEKAVQQAEVYGIQEVPELVGHEVLSNITDNGAMRNVTSLGKGGMIWDHCKSRLLETKAQNVFPAKEQFMVQRGTTPDNLSWMEQKEASTFNFFNICQRRRDRPRSVNDLLDETSTFKPGHARSRSDITQVDWRVVLKTTPLQQQQQQQPLLQGPHVTRPSFLLPSPNKIEDAQGNTEHKQTFPNILKKGYLEIRKDHDS

SEQ ID NO: 786887 - protein, 69 aa, Homo sapiens
RPDGCSGPSTAADTPVLWWSVMSKSPAPLLRAVRRTKPAPTLPSSVAGAIPLRRVGLLFWVGESGAGGP

SEQ ID NO: 786888 - protein, 142 aa, Homo sapiens [sequence omitted]

SEQ ID NO: 786889 - protein, 74 aa, Homo sapiens
NLDGGAQTDHQRESQKDNSMPRSPWVTGTSAHTEVREGTHLVVSGIGLANYFTLGAGRVTDVQIQSTQVLTKAE

SEQ ID NO: 786890 - protein, 40 aa, Homo sapiens
TTAHTCMSVAGRLQKDMSSHFMPQNTTPPSTKLWPMPPSS

SEQ ID NO: 786891 - protein, 34 aa, Homo sapiens
CGMRGRRFGGTEMELGLQPGGRVPLYPQSQPHVN

SEQ ID NO: 786892 - protein, 96 aa, Homo sapiens
RTAERWVFPSYLRGTTYIVTELLDLEIPLSQGHILVNLLEGETCPGYRGIIIRVMCQYLAPSCASGLFRDAVASHSYMKMSHKTKQSSSHEAIVNL

SEQ ID NO: 786893 - protein, 124 aa, Homo sapiens
LPVPSSSHREGLRPGRLQSLRLPLRQAAENQRGIGPGTVSTSFLLLILPSAPPTKLPKISHSHPKSPGPPTSNQRPSGQNPAIVTALSRSVPCPPEHMSTARPFTALRSAPRLQVPAGPAVAAG

SEQ ID NO: 786894 - protein, 86 aa, Homo sapiens
LPSPGNKLKEVMPYALEGKEVMAPPISVPTTPSSFNPKPKAGTEGTQLRRGITWNYKVHYKVTQAQGCSAFSPTLTPRSSTGPCGW

SEQ ID NO: 786895 - protein, 117 aa, Homo sapiens
TPITDSPKKVYFNYREHPGRGSCAAPSLLTGKNSASIKGRSVVSTCFPAHTSQGHPVSWLYWVERCSAASVTSSEWPVSWTKKLSRTTLQGGDIGPELTPPGGKSNSLVLYRCLCRK

SEQ ID NO: 786896 - protein, 150 aa, Homo sapiens
GKTIPVLLREAGAVRLREITAVPPRGAVTVSLKGAFTVPLRGAIASLSEKTSQSSPQREAITVPQREAIAVPLREDIAVPPRGAIALPQREAIAVPLREDIAVPLRGAIVVPLREDITVPLREAIAVPLGGALAVPQRKAITVPLREAIT

SEQ ID NO: 786897 - protein, 127 aa, Homo sapiens
CHPDTIRSITNASGTHAELVVVGARPSFCVVSAVPRSLLEYSCPSLRLPSQCLLPPLPSAPCLGVLGTTGAPRGLNSGPFLEGTPMLKDTGLDRDISSLIGSGMGKRDMGMTTQRTGCLLGQAGMFP

SEQ ID NO: 786898 - protein, 130 aa, Homo sapiens
NGTLKGSNPSCQTSGLLSQWMHSTSSHEGHKQHRSQTLPIIRGKNALSNPKLLQMLDNTMTSNSNEIDIVHHVDTEANIATEVCLTILDLLSLFTQTHQRQLQQCDCQNSLMKRVFDTYMLFFQVNQSAT

SEQ ID NO: 786899 - protein, 147 aa, Homo sapiens
MGTQEDIHFKNQCRGPLLPSPTLIPSGGGGSAEQLLKVQELFCSSSAKQRCHRARLSEKAYSARCTSPSAGAEPPEEEGAGSRSPYPGAGPRRPPSPALQSRDLVSPVYGGTFRTDQKPPRLSADLRRVFSGGPAGLHSSPPWELLA

SEQ ID NO: 786900 - protein, 219 aa, Homo sapiens
RPYLPQEVCEYPDGTKSLKLGDFGLATVVEGPLYTVCGTPTYVAPEIIAETGYGLKVDIWAAGVITYILLCGFPPFRSENNLQEDLFDQILAGKLEFPAPYWDNITDSAKELISQMLQVNVEARCTAGQILSHPWVSDDASQENNMQAEVTGKLKQHFNNALPKQNSTTTGVSVIMNTALDKEGQIFCSKHCQDSGRPGMEPISPVPPSVEEILCLGKQ

SEQ ID NO: 786901 - protein, 95 aa, Homo sapiens
PVGSRNHYSPVRLLLEAWRYFSSSVSEARACSVVLSARGSWDPSLGPGNVLSLLFPPQNTALDKEGQIFCSKHCQDSGRPGMEPISPVPPSVEEI

SEQ ID NO: 786902 - protein, 102 aa, Homo sapiens
TIYAPIHLTAYLSIHLTAYLSIHLPACPCTYLPVCLFIYPVHPSIHPPTYLPACLPTHRKFIYMSVCPSIHSSIHLPTGPFTCLSCHASICLSFNPSSCSVY

SEQ ID NO: 786903 - protein, 111 aa, Homo sapiens
PPISSRQCHFHLPFSQSPGTQDTLTLLSYSNFQFSISPSKSLLGSYLSIPTPRSWLKPFSIHNRRTLTVYVVSIPPISLHPVIIHTNLQQQYHPNHVDHSTTRYGSLLLLG

SEQ ID NO: 786904 - protein, 111 aa, Homo sapiens; identical to SEQ ID NO: 786903

SEQ ID NO: 786905 - protein, 105 aa, Homo sapiens
TGRRMPMALPKGLRIENLFLPLSSSLQRVWLRELSLNPLNTALIIRKQNREGWGVTALMKRQEEARDTGILCCLTLVLRVTVFYNQLWPVACAHTLLLTTTSMTW

SEQ ID NO: 786906 - protein, 73 aa, Homo sapiens
DKDTGSLLGEHGGVISLRSHPHSFPGLGLGPDSEELLNQPCHLWFLCPIFLPGGGNLHGNLHTALRNTPRLQT

SEQ ID NO: 786907 - protein, 90 aa, Homo sapiens
EAADAVAEIESTALQCCDDTVRLRFKKKHVSWMRRLTPVILALWEAKVRWITCGQAGLKLLASSDLPASASQSAGILGVNHRTHRVFFFF

SEQ ID NO: 786908 - protein, 128 aa, Homo sapiens
MHMLAHLLHPMPPLSPAFPLEYISTVAFEAGLLECTPELRIHRVSLYRQAGVVQWQDLGSLQSPPPGFKPFSCLSLPSSWDYSYTPPHPANFCIFSRDGVSPCCPGWSRSPDLMICPPWPPKVLGLQA

SEQ ID NO: 786909 - protein, 74 aa, Homo sapiens
GYKRVLALSVETDYTFPLAEKVKAFLADPSAFVAAAPVAAATTAAPAAAAAPAKVEAKEESEESDEDMGFGLFD

SEQ ID NO: 786910 - protein, 162 aa, Homo sapiens
CPSPFVCPSPFVCPSPFVCPSPFVCPSPFVCPSPFGLAGSFPPAQNMHHHPYHFCFCFLKRQGLALLPRLECNDTIMAQCSLDLLGSSNLPTSASKVVGITGAYHHAQLILFSTVVHQVIQRSHYVAQADLELMDSSESTCLSLPRCWDCRCEPPCLPGRVF

SEQ ID NO: 786911 - protein, 133 aa, Homo sapiens
YECLGTPKGTCLYNNTQYKVCNPESDQPDVCYDPSDPPMITVFEIRLRTGPFLGDTSKVIARTEERGVPKHVTLKFDTCATINSNQQGIRCGSLDWEKSYTAENKYICHESYSCTNVCQYWSCVIWATWKKDE

SEQ ID NO: 786912 - protein, 67 aa, Homo sapiens
MSSPALTILSRHWLSLYLLSLSATGLPCSGVSALLAASRFSPLSLCRPVSFAQSLLVSLLLLPSLHL

SEQ ID NO: 786913 - protein, 111 aa, Homo sapiens
DDPVNPVHWNIIQPYNGGGILTHAPTGMNLDNITLGEISQIPNDKYCKIPLIRGSYSSQIQRQSRMMVVRGWGQQGRMESYCLMGIEFKFEKIKTFWRWMVLMVAQECEYH

SEQ ID NO: 786914 - protein, 33 aa, Homo sapiens
MDILGGGGSIVHATQLARVMCYSFLYERPGYHV

SEQ ID NO: 786915 - protein, 114 aa, Homo sapiens
LGHLDAAADATSSMHFICSASREGDLWGETERLREERWEERAGQGHTVAQFTPRTAHPALPHVGLMPPLETHPVPPHTHTEVSSCLPHTLRPCLQAARSKPPGMQPLFFYVLEQ

SEQ ID NO: 786916 - protein, 233 aa, Homo sapiens
RRAAAFCIRDPLPPLLCCPLLCHVGSSAICSALCFRGCLCGCLPHTGAPANPMRQPLCKAPGQPRGPQRPGGCTPIPPAVGPLVLHARVSHTAAHPLPQGAPAACPAPPGACDRTVPAGGSHVPTCSQRGASVPRHGTAPQKMRALAEQAQTPEGKPLSGGGLTHVTSESVLAETVMGLSLSVQMRTHKELTSCLDIKPRNSQPRAGSLGCGVWSQSRNISQATAQDTAGWGS

SEQ ID NO: 786917 - protein, 47 aa, Homo sapiens
TDTGIEKKTKLYFQSAPKLLWSPLHLDSSSFLILSEHTANLNFSPYS

SEQ ID NO: 786918 - protein, 170 aa, Homo sapiens
DGGPSHFWASATAAAGAQRSEPEIPDLPDQLVPQTKCHLELLQLYGRPPGTKAEEAPASSHCQLTLSSSNTVSEDGPEAVSSGHTQCEKTADTAPGQTLGPRGGSPRSQSSRPRRHKFPLLPRRRGEPLMLPPPLELGYWVTAEDLDREKEAAFQRINSALQVEDKAISD

SEQ ID NO: 786919 - protein, 102 aa, Homo sapiens
QIGTAPVYSSQHERRRRRVISAFPSELPTGRLIETFQSNEHQSEVKLLKQDKKKWVGSWNENIHQQLKAQTSKGIFPHPLPLWNITAFGETTCNRHHSRHRS

SEQ ID NO: 786920 - protein, 115 aa, Homo sapiens
KLLLESCRQRALFQLSMEILGAAPSLRRSLPSFPALGAGPSRPGGSKAQAFRQQQQATGWAQARGPWQEKFLAVPPLHSEASEGGTIQDSFLPGEVPLQLPSVHAMDISSTEVQC

SEQ ID NO: 786921 - protein, 39 aa, Homo sapiens
RERCITKNIGDFSLAGSSFPKRWRCSPEIALRLAGDTGS

SEQ ID NO: 786922 - protein, 118 aa, Homo sapiens
ELSNMTQLKELDISNNAIREIPRNIGELRNLVSLHAYNNQISYLPPSLLSLNDLQQLNLSGNNLTALPSAIYNIFSLKEINFDDNPLLRPPVEICKGKQLYTIARYLQRADERDALFH

SEQ ID NO: 786923 - protein, 111 aa, Homo sapiens [sequence omitted]

SEQ ID NO: 786924 - protein, 69 aa, Homo sapiens
AGGGRKGPVGRPRGRWRRNKTPAGGCRSDGAWGLKTRWEGHPSPTRGTWGLEAIDLPDCCEWDRRAAWR

SEQ ID NO: 786925 - protein, 110 aa, Homo sapiens
ELDTKAPGFDPIRCLVVKGSDSCPGSSLALDVPHLASHGAKGAPALKPPCVSVCSMCTPAGDLGPGMPSAGRTPSITFKCNLCHVEGKNTFLDSFPRLHLLQPVSDFKQP

SEQ ID NO: 786926 - protein, 83 aa, Homo sapiens
EEEKEDEEKEEEEEDEEEEEEKEEEDEEEEEKEDDEEEEKEDDKEEDKEEKEEEKEENSEKLQKLRTPRERGSDAERTASSLL

SEQ ID NO: 786927 - protein, 37 aa, Homo sapiens
MLSDIALLLPVLGVPLQCRRCSHLMQVSSAVALGELE

SEQ ID NO: 786928 - protein, 105 aa, Homo sapiens
KNLLLENGAARWTTFSGTNGMCSLLGSGLTSSCTVVGVRTEGHITSPGSRRRCLRTQLNMHGLVPRQGRPQLARCPRHCRVLVLDWLHTETPGQQNIFFPHPQAL

SEQ ID NO: 786929 - protein, 265 aa, Homo sapiens
KGPKFKMPEMNIKAPKISMPDIDLNLKGPKVKGDMDVSLPKVEGDMKVPDVDIKGPKVDINAPDVDVQGPDWHLKMPKIKMPKISMPGFKGEGPEVDVNLPKADLDVSGPKVDVDVPDVNIEGPDAKLKGPKFKMPEMNIKAPKISMPDLDLNLKGPKMKGEVDVSLANVEGDLKGPALDIKGPKIDVDAPDIDIHGPDAKLKGPKLKMPDMHVNMPKISMPEIDLNLKGSKLKGDVDVSGPKLEGDIKAPSLDIKGPEVDVSGP

SEQ ID NO: 786930 - protein, 103 aa, Homo sapiens
MGKAKGEVGLVGDDRELSLEHANYEICIKYPSEGTHQEVDIRGKGSGKSCGQKNTFRSHQYYQCYKKYESGYSCLLPVSEDRKEKWSLSHTTIRISKECGKTC

SEQ ID NO: 786931 - protein, 38 aa, Homo sapiens
MTSSRKSNWENSALRDGAALRYLDYNLRWDVSEAFVLA

SEQ ID NO: 786932 - protein, 136 aa, Homo sapiens
MNCADCCVETVSPGGLYALQAPGLPLPLSPAESLTTQWNVVQICGINVCITSVHLWNGAVSPSFWARAAKPQNHHALSGFSTEPRMFLCQVLGWDGSCRILLELPNNPTRAASVVPIFQEGSKAQRSGVAYSRPRS

SEQ ID NO: 786933 - protein, 123 aa, Homo sapiens
IALVLSDAFRFFYFLDTESHCVGQARGQRCNHSSLRPSDPPASASQVAGTPSTHHHAQLIFVFLVETGVHHTGRGGLKILTPKGPPAIGLPKRGDYRCEPPCPAFLFIFNKFSSILYILYTLG

SEQ ID NO: 786934 - protein, 87 aa, Homo sapiens
LGDLEDPYCFPNTITSSSSSNIKHCHHPTVSPVHYKTCEQEMMGIRRRALAQPGIQEGLLEEVELSQVSKDECELVKRKAFWVEGTS

SEQ ID NO: 786935 - protein, 52 aa, Homo sapiens
LTDLPLGQKQEAERFSHGGCKIEEFWRPDVWILSVLGVLFSLTIPPLGLIKG

SEQ ID NO: 786936 - protein, 33 aa, Homo sapiens
MGLSRGSREDSMSLPFPASRGHLHPLAHGPFLH

SEQ ID NO: 786937 - protein, 164 aa, Homo sapiens
MQIIRHSEQTLKTALISKNPVLVSQYEKLDAGEQRLMNEAFQPASDLFGPITFILHQIGSPPTLRLPKTLNSSSVILTERHPLQTNAAFIYSPIGSLGNTRIISEEYIKWLKAYCQAYLYGLTVKLLDLVPVSATRCSFRVNNNSQTKPTSSCRRHLEVLKKVS

SEQ ID NO: 786938 - protein, 155 aa, Homo sapiens
TSSVSTLIQTAILIVQYLQRGLSLDRAFSEACWEVYVCSQHSPANRKLVQALLEKHVSSLRAHETWGDSILGMGLWPDSVPSALFATEDSHLSTVRRDGQILVYCLNRMSMKTSSWTRSQPFTLQDLEKIMQSPSPENLKFNAVEVNTYWIDEPD

SEQ ID NO: 786939 - protein, 103 aa, Homo sapiens
QFGKRHKPVGLGDQVTHFRGVPCMKLTCKHLEQLWPGQTRLWMMEFAFAGCVNLCVFQLVGREYRATNRHTHLAGIIFPSQPQPARHLYYYYFFRSPLRWLIR

SEQ ID NO: 786940 - protein, 112 aa, Homo sapiens [sequence omitted]

SEQ ID NO: 786941 - protein, 121 aa, Homo sapiens
MSTLQPVRLSKMHIRLRLCLKLLQEVSTVLRVEYSLVRLAEQAPTDGNSGSSSPQSLLSVPPTLSSSVLSSFFFRLTPSTIAGTQGGTSPPQQDLFISFTSETFLEFVSSYFHCHFPNSSS

SEQ ID NO: 786942 - protein, 34 aa, Homo sapiens
MSPTVRDVHGQVIALSCKHPTGTYTELDGAASST

SEQ ID NO: 786943 - protein, 137 aa, Homo sapiens
MASGEARKASEAGGLLPREGCLQRVGFWGQEGLPGRGTAWPLLAACLQLRLPAFPGAPLCGPQRPVPQGLSPPCHLQGLPPGVVGTGAPMGTSLALSVLSVDSSAKSRQRGEEQAGQLCPTVSPRVPSSLCPEIGLG

SEQ ID NO: 786944 - protein, 86 aa, Homo sapiens
HSILSNQTSKSSDNRETPRNHSLPKCSSHLEITIPKDLKLKEAEKTDGSKMAHQCPVPSPPLTCAYTATIVLGCVPAVVGLLCCGV

SEQ ID NO: 786945 - protein, 89 aa, Homo sapiens
RIRRHQQACLREKKKGLNVIGASDQSPLQSPSNLRDNPFRTTQTRRRDDKELDTAIRENDVKPDHETPATEIVQLKETEPQNVDFSKEV

SEQ ID NO: 786946 - protein, 36 aa, Homo sapiens
MIVGPGLGSVLGERAEFDIRFGGWANWRCWDKGDDS

SEQ ID NO: 786947 - protein, 841 aa, Homo sapiens
GTLVTKVAPVSAPPKVSSGPRLPAPQIVAVKAPNTTTIQFPANLQLPPGTVLIKSNSGPLMLVSPQQTVTRAETTSNITSRPAVPANPQTVKICTVPNSSSQLIKKVAVTPVKKLAQIGTTVVTTVPKPSSVQSVAVPTSVVTVTPGKPLNTVTTLKPSSLGASSTPSNEPNLKAENSAAVQINLSPTMLENVKKCKNFLAMLIKLACSGSQSPEMGQNVKKLVEQLLDAKIEAEEFTRKLYVELKSSPQPHLVPFLKKSVVALRQLLPNSQSFIQQCVQQTSSDMVIATCTTTVTTSPVVTTTVSSSQSEKSIIVSGATAPRTVSVQTLNPLAGPVGAKAGVVTLHSVGPTAATGGTTAGTGLLQTSKPLVTSVANTVTTVSLQPEKPVVSGTAVTLSLPAVTFGETSGAAICLPSVKPVVSSAGTTSDKPVIGTPVQIKLAQPGPVLSQPAGIPQAVQVKQLFSLFQVVQQPSGGNEKQVTTISHSSTLTIQKCGQKTMPVNTIIPTSQFPPASILKQITLPGNKILSLQASPTQKNRIKENVTSCFRSTFICVYENVHHRSFFLSCSVISWLDEVHLLVNSSGKAHRDEDDINDVTSMAGVNLNEENACILATNSELVGTLIQSCKDEPFLFIGALQKRILDIGKKHDITELNSDAVNLISQATQERLRGLLEKLTAIAQHRMTTYKASENYILCSDTRSQLKFLEKLDQLEKQRKDLEEREMLLKAAKSRSNKEDPEQLRLKQKAKELQQLELAQIQHRDANLTALAAIGPRKKRPLESGIEGLKDNLLASGTSSLTATKQLHRPRITRICLRDLIFCMEQEREMKYSRALYLALLK

SEQ ID NO: 786948 - protein, 801 aa, Homo sapiens
GTLVTKVAPVSAPPKVSSGPRLPAPQIVAVKAPNTTTIQFPANLQLPPGTVLIKSNSGPLMLVSPQQTVTRAETTSNITSRPAVPANPQTVKICTVPNSSSQLIKKVAVTPVKKLAQIGTTVVTTVPKPSSVQSVAVPTSVVTVTPGKPLNTVTTLKPSSLGASSTPSNEPNLKAENSAAVQINLSPTMLENVKKCKNFLAMLIKLACSGSQSPEMGQNVKKLVEQLLDAKIEAEEFTRKLYVELKSSPQPHLVPFLKKSVVALRQLLPNSQSFIQQCVQQTSSDMVIATCTTTVTTSPVVTTTVSSSQSEKSIIVSGATAPRTVSVQTLNPLAGPVGAKAGVVTLHSVGPTAATGGTTAGTGLLQTSKPLVTSVANTVTTVSLQPEKPVVSGTAVTLSLPAVTFGETSGAAICLPSVKPVVSSAGTTSDKPVIGTPVQIKLAQPGPVLSQPAGIPQAVQVKQLFSLFQVVQQPSGGNEKQVTTISHSSTLTIQKCGQKTMPVNTIIPTSQFPPASILKQITLPGNKILSLQASPTQKNRIKENVTSCFRDEDDINDVTSMAGVNLNEENACILATNSELVGTLIQSCKDEPFLFIGALQKRILDIGKKHDITELNSDAVNLISQATQERLRGLLEKLTAIAQHRMTTYKASENYILCSDTRSQLKFLEKLDQLEKQRKDLEEREMLLKAAKSRSNKEDPEQLRLKQKAKELQQLELAQIQHRDANLTALAAIGPRKKRPLESGIEGLKDNLLASGTSSLTATKQLHRPRITRICLRDLIFCMEQEREMKYSRALYLALLK

SEQ ID NO: 786949 - protein, 72 aa, Homo sapiens
VIRYTMRSAVVQLMARCSLKLLGSGDPPTLACPEYLEIIGECHHAQLIFKFFCRGTGVLPCCPGQCQTSGLK

SEQ ID NO: 786950 - protein, 161 aa, Homo sapiens [sequence omitted]

SEQ ID NO: 786951 - protein, 85 aa, Homo sapiens
GVEQGLAHFFLKADCEYFRSCKLPTGGSLHNHSLPVRPKAAVTTQTGAESRRNDTDGRCVPVKLYHSLPVRPKAAVTTQMGAVFQ

SEQ ID NO: 786952 - protein, 103 aa, Homo sapiens
NGMVIRISTSKSFCILPRDDASKLQERVGCLVHLKSKTSRQIWGNNMTITIIYIKENSLRDDYRFLELGSGEVLFIEMSLRRPGTLAHVCNPSILGGRGRWVT

SEQ ID NO: 786953 - protein, 116 aa, Homo sapiens
TGQHTAPHGTAHTPMEQHTHSHEQHTHSHEQHTHSHGTAHTPTERHTHPRNSTHTPTEQHTHPRNGTHSHGTAHSPTEQHTLPRNSTHTPTEQHTHPRNGTHSHGTADSPTEQHTH

SEQ ID NO: 786954 - protein, 271 aa, Homo sapiens
PSKDIRSRWVTCARRLMPAMFQDPGTALAAPMARRDLWPGRPFGRVDHSGLSALCPPVLRLRTPPLPPSKRAASNLALYGHVRVLGGGRGPGGPYATAPPPTPRLPTWAWLSGCSEGPAASWAVWALRPYWASPYHGQRPGLAFSLICLASPIPTPACPLATRPGRLWRPLSCHVSWLGLKLTGGWPRSAMAVGGRARLFVETPQRPPPSPSSSSAAALGLRISSPGFAWQRPWRHWGAGIKLLSKGRGLCGLGGGGEEVLPDCADFPSVD

SEQ ID NO: 786955 - protein, 126 aa, Homo sapiens
KLLMWDNFAYQYTSIYFICFNSCEISHCMKRLKSVLLLWIFGMMNHWNKTERAIKAFDSLAGQSERFITEDSNAKRGGELSESTCCNESPESHHPKRQETTWPKGQRPPGLPAVPDANLSSHPVCG

SEQ ID NO: 786956 - protein, 72 aa, Homo sapiens
IKCIQCASIVLRLWIPDEEDPVLIFKDHAVLWKRQAHTKLQHKSQARWLMPVIPALWEAKGGRAGGGGGGGG

SEQ ID NO: 786957 - protein, 121 aa, Homo sapiens
MVSLETGSTGQPPCSDCISTAGPAPGPHLGPAWCLTMLSPVFPKTPRSCSRLPQEGLCQLPEKQKSDHNLEIDALTSWSLHPAGAVLPSPCTASVHLLSALILIIFDIHLHVVIIAAQIVK

SEQ ID NO: 786958 - protein, 114 aa, Homo sapiens
FSLSPSFLPSECWEHNVAYEAQGINIVPIRCSLNSTVESILIGCRVIVYKTHCIKADNICESSDFLFGSSVNIIIVSCRYFYSRINRLSSTSIYKDLNMAEEAKMGAFCVPPVK

SEQ ID NO: 786959 - protein, 40 aa, Homo sapiens
TEEAAGMGHHTGNGLRKNSQDAREKFLRVHNQPIVQVQTL

SEQ ID NO: 786960 - protein, 118 aa, Homo sapiens
PDGSRALLRVDLRELSFSDWLISRGTVSSGPSCCSTGRWSFLFMAELFHCGERLHFLDSLIHRHSRCFRILVIVNGAAVNMACKWDFQTLLFYVCFWFLVFLFIFVFVFDGVSLCRPG

SEQ ID NO: 786961 - protein, 93 aa, Homo sapiens
HIVCMCLRMCMSICVPVCMCVCVNAGVYQRMNAPVSTCICVHVLTRVFVCICMHVSVYVRARPPAGSVVRAFRGGVRLSGDLSHSTAVPSHSQ

SEQ ID NO: 786962 - protein, 54 aa, Homo sapiens
LQIQGSSIRGLCPNAMSPQAQVQRKPAKRFPGFLFSFLRSVSGFLSTFRFHVVL

SEQ ID NO: 786963 - protein, 246 aa, Homo sapiens
MSQQRPARKLPSLLLDPTEETVRRRCRDPINVEGLLPLKQYRTYFYERVHCTNYCAPLRTSSSHVTETSLLDCYSAWFTLNSETFTGLLVRSAPGGILDLNKVATKLGVRKRRVYDITNVLDGIDLVEKKSKNHIRWIGSDLSNFGAVPQQKKLQEELADLPAMEDALDELIKDCAQQLFELTDDKENERLAYVTYQDIHSIQAFHEQIVIAVKAPAETRLDVPAPREDSITVHIRSTNGPIDVYL

SEQ ID NO: 786964 - protein, 217 aa, Homo sapiens
MSQQRPARRVTQSPPGPDGGDGSPSVPRPHQRGGPAEALKVKRPRFDVSLVYLTRKFMDLVRSAPGGILDLNKVATKLGVRKRRVYDITNVLDGIDLVEKKSKNHIRWIGSDLSNFGAVPQQKKLQEELADLPAMEDALDELIKDCAQQLFELTDDKENERLAYVTYQDIHSIQAFHEQIVIAVKAPAETRLDVPAPREDSITVHIRSTNGPIDVYL

SEQ ID NO: 786965 - protein, 213 aa, Homo sapiens
RGEQDARPGSMSQQRPARRVTQSPPGPDGGDPINVEGLLPSKIRINLEDNVQYVSMKRSAPGGILDLNKVATKLGVRKRRVYDITNVLDGIDLVEKKSKNHIRWIGSDLSNFGAVPQQKKLQEELADLPAMEDALDELIKDCAQQLFELTDDKENERLAYVTYQDIHSIQAFHEQIVIAVKAPAETRLDVPAPREDSITVHIRSTNGPIDVYL

SEQ ID NO: 786966 - protein, 207 aa, Homo sapiens
MRQRFSIKAHSRLPYLVISDGYMVTTLRFLDSLSPSVHMRSLLLDSTQRLEKIYQSVILSKPKGKGLNLRSLNSLRSSLLEHQGNESSADFTVPKFLQAEETINENAADFQDFEAEETNEGRHFPDNLCPFWNKRDDVLCSSMKEGRLEFASMFDTIHAKDDSEETDRTITELHSIQKSLLAAWTIGISKTVTEKNLMLNYIVVCIT

SEQ ID NO: 786967 - protein, 111 aa, Homo sapiens
SSPELALLHHATVLGRYKNQQFHKTFYSPTLTISSVSLNREETKQKASVLYFLLDVAVTHPLLCETTYVVTRMATPRALTQGKRKSYDEWVLGSRRAPNLCFCRNQCIHKH

SEQ ID NO: 786968 - protein, 35 aa, Homo sapiens
DHQAEVVFNTFLHCEINVEYSYSTFATGKLIFLFV

SEQ ID NO: 786969 - protein, 343 aa, Homo sapiens
  misc_feature (278)..(278): Xaa can be any naturally occurring amino acid
  misc_feature (301)..(301): Xaa can be any naturally occurring amino acid
  misc_feature (317)..(317): Xaa can be any naturally occurring amino acid
  misc_feature (328)..(328): Xaa can be any naturally occurring amino acid
  misc_feature (332)..(332): Xaa can be any naturally occurring amino acid
  misc_feature (337)..(337): Xaa can be any naturally occurring amino acid
PVTKEGRASIVPLAVASGLCGYLSVNSCMGRVRRIYPQLLLALLIQVDYHIGLEPAWLLWLLTKDTKKGAQPSPFVPVRWVVKVVKTLLLRMGCSYETTFLEDQGGWELMEQVESHHRGVALLARAMVQYSCQELCRILYLLIPLLERGDEKHRITATAFFVELLQMEQVRRIPEEYSLGRMAEGLSHHDPIMKVLSIRGLVILGRRSEKTAKVKALLASMVKGLKNMDGMLVVEGGPQGSRAVFKGRDQKLMDSAVYVEMLQILLPHFNDAREVVRXFCINLYGKVVQKLRAPRTEAMEXQLVSTFGAPTADHAGXQLPGKPKVCEXPGYXGSYFXGWELPN

SEQ ID NO: 786970 - protein, 360 aa, Homo sapiens
  misc_feature (295)..(295): Xaa can be any naturally occurring amino acid
  misc_feature (318)..(318): Xaa can be any naturally occurring amino acid
  misc_feature (334)..(334): Xaa can be any naturally occurring amino acid
  misc_feature (345)..(345): Xaa can be any naturally occurring amino acid
  misc_feature (349)..(349): Xaa can be any naturally occurring amino acid
  misc_feature (354)..(354): Xaa can be any naturally occurring amino acid
PVTKEGRASIVPLAVASGLCGYLSVNSCMGRVRRIYPQLLLALLIQVDYHIGLEPAWLLWLLTKDTKKGAQPSPFVPVRWVVKVVKTLLLRMGCSYETTFLEDQGGWELMEQVESHHRGVALLARSPWGWIPEGTTPLPTPRAMVQYSCQELCRILYLLIPLLERGDEKHRITATAFFVELLQMEQVRRIPEEYSLGRMAEGLSHHDPIMKVLSIRGLVILGRRSEKTAKVKALLASMVKGLKNMDGMLVVEGGPQGSRAVFKGRDQKLMDSAVYVEMLQILLPHFNDAREVVRXFCINLYGKVVQKLRAPRTYAMEXQLVSTFGAPTADHAGXQLPGKPKVCEXPGYXGSYFXGWELPN

SEQ ID NO: 786971 - protein, 61 aa, Homo sapiens
RWRPACLSSWGGLPPPLRTLRGISVTPNGYHFQRPPTLKRRLTLAPCLDGGAPEPGVTIPP

SEQ ID NO: 786972 - protein, 246 aa, Homo sapiens
YFSTGFPCLQVKDLIQTTEAMMFIEEVCLSLLRHPVFWKIQLTQMSLQLLCVSEVSLKITGECSSSIHLLEHSVELLKEDFPVELVIIGIALLLLQTPASQQKPILNLALKLLSVTEDQKIPKSSLLLVMPILQILSSTALEDCISVDEEGPSRQQLALNLLEMIQQECYRDDHQKLSYKLVCPVTSMYGTIFTAWRILEVMTDSSAASDWLASVESLLPITAVIPAPAFLLLAHLLVEDKGQNLH

SEQ ID NO: 786973 - protein, 103 aa, Homo sapiens [sequence omitted]

SEQ ID NO: 786974 - protein, 108 aa, Homo sapiens
MRQRTFLLSVFQKSNTGHGLFLGRQPSFSVRSMPGTPALAICQPHNPGPPMGTPTEDPSGCSFPCLFLSPQSFLVLSWAISRLPSLFLLSGLCPQKPQTSSPCTQSKG

SEQ ID NO: 786975 - protein, 141 aa, Homo sapiens
MQETSLALRTSDQLREHSGLCLWIWVFNNREETARRQRISELQMLASAIRQTPAALPTCKNFKASKRNIQQPLWDFASSDENLATGPRNACSLGFLLSHAPPVRALTGSLTARLSSPLPELLELKPKAPHRLLPRSPRLGG

SEQ ID NO: 786976 - protein, 105 aa, Homo sapiens [sequence omitted]

SEQ ID NO: 786977 - protein, 150 aa, Homo sapiens
LCTDLVQCLSLTSGTFGGLLRAHPYTSVTPHTSTPAPLPTATPIPVDQLGPGARREVTLPLGPGENGGLDLPVTVSCTLFYSLREVVGGALAPSDSEDPFLDECPSDVLPEQEGVCLPLSRHTVDMLQCLRFPGLAPHTHGPPHTRPHPR

SEQ ID NO: 786978 - protein, 44 aa, Homo sapiens
MGNIAGALESPRFTRLPRPSHSDAIYLPNCSSDAFITLLDWSTV

SEQ ID NO: 786979 - protein, 106 aa, Homo sapiens
EQAALGIANLIVMSMVENGLSEQEAQKKIWMFDKYGLLVKGRKAKIDSYQEPFTHSAPESIPDTFEDAVNILKPSTIIGVAGAGRLFTPDVIRAMASINERPVILH

SEQ ID NO: 786980 - protein, 133 aa, Homo sapiens
RIELRYQIHLSIPPNNIFKFHVVKLICSFVLFMEHSIPWMFTPVQMWVSTIPGRQASPAISEDCSTFPIVTTPTRGSHTPVLHHCSYVFPRRSHNGVLQCVAGSSEICRTPLRLIRMRASAFVFSLFFLFFLE

SEQ ID NO: 786981 - protein, 34 aa, Homo sapiens
AQPVEEGEEEPKLAPGGVREGCLEEAALSLKDKC

SEQ ID NO: 786982 - protein, 121 aa, Homo sapiens
MLPICNQTRNTHHHQQETQCSNFMRKHGFLLHLLRSGYLCIATLGDVFGNNPVIGFRWQILCSPDFYVNSTLHRVSTTPSHTTVLSHLGVYLIEPVSEELCPEAGRPSWQLAHFYKTTLVD

SEQ ID NO: 786983 - protein, 474 aa, Homo sapiens
MTTFKEAVTFKDVAVFFTEEELGLLDPAQRKLYQDVMLENFTNLLSVGHQPFHPFHFLREEKFWMMETATQREGNSGGKTIAEAGPHEDCPCQQIWEQTASDLTQSQDSIINNSHFFEQGDVPSQVEAGLSIIHTGQKPSQNGKCKQSFSDVAIFDPPQQFHSGEKSHTCNECGKSFCYISALRIHQRVHLREKLSKCDMRGKEFSQSSCLQTRERVHTGEKPFKCEQCGKGFRCRAILQVHCKLHTGEKPYICEKCGRAFIHDFQLQKHQIIHTGEKPFKCEICGKSFCLRSSLNRHCMVHTAEKLYKSEECGKGFTDSLDLHKHQIIHTGQKPYNCKECGKSFRWSSYLLIHQRIHSGEKPYRCEECGKGYISKSGLNLHQRVHTGERPYNCKECGKSFSRASSILNHKKLHCRKKPFKCEDCGKRLVHRSFCKDQQGDHNGENSSKCEDCGKRYKRRLNLDIILSLFLNDM

SEQ ID NO: 786984 - protein, 104 aa, Homo sapiens
MIDDPSKGKEALAESGGLVGAGNGVFFPSTEAFWDGGAVLASRGLELAGSSVPCCERFQDFDLAQPASLHPTCATAFSQCDVECYSMSLYFPLLFLVMGTLEPS

SEQ ID NO: 786985 - protein, 100 aa, Homo sapiens
GSLLHLRAALPFTFVQTGAAHLCAGGGFFFQSTTPGGISFPFQGLARAKYSDDTKYTAGLPAADLIPTTLKTRKVWVIYSGEQPLYVNDVLKFDQSQLLG

SEQ ID NO: 786986 - protein, 110 aa, Homo sapiens
WDTGLGTEIQFCSRLTGGLGQATCLFICAAKETVSTSPVTLQRLHSHSLTSEAAYQKTEGSAKTREREPWWRKPRKPQTAGGGQGPRDSQGTDVHSVGKPQVSVISTPGQ

SEQ ID NO: 786987 - protein, 119 aa, Homo sapiens
RPSTQSGRTGLGGGQAQAQPVGKGEACGAQRRGQGSELPRHLPFCAIPRVGGGNLGPLLLPTTGIPVAPEPRHSVPRTGSTALFNLQTALGQEVDTVVNFSEEKWKPIHPPELPPGVRT

SEQ ID NO: 786988 - protein, 130 aa, Homo sapiens
PSSSTALQCPGSRQSPPGVLRFHNQLWHVLTGRAFTNTYLFYGAYRVGPESSSVYSIRLAYLLSPLACLLLCFCGTLRRMVKGLPQKTLLGQGYQAPLSAKVFSSWDFCIRVQEAATIKKHEISNEFKVC

SEQ ID NO: 786989 - protein, 70 aa, Homo sapiens
SLSHVSCPCSISLYSCPPTPLHPCTCLSTALSLSVSHSVFLYISCTRVHTDGQGPAHFWLLSHNPTSTHH

SEQ ID NO: 786990 - protein, 209 aa, Homo sapiens [sequence omitted]

SEQ ID NO: 786991 - protein, 209 aa, Homo sapiens [sequence omitted]

SEQ ID NO: 786992 - protein, 31 aa, Homo sapiens
MGWLSLTLEVAQHLIVVQDSGTLNINLVKAD

SEQ ID NO: 786993 - protein, 53 aa, Homo sapiens
MQAKLEEQLLPDLSSWALAPSSCLVADWPYSHSILVHSDSATNFHSMVHSFHS

SEQ ID NO: 786994 - protein, 106 aa, Homo sapiens
MLSRHSAKWETSSGFCSMGSRSLQSPMSLEDHKVARALGELCCGIVKLPSGAGRPRGKAWSSLPLHLVLSPGPAVCHPAVCQHRCGTGRGRILPVMVECHCQGSKK

SEQ ID NO: 786995 - protein, 84 aa, Homo sapiens
TCTGGQSCKDKGRRQPSPSQGERPQEKPTPPTPSSWTSSFQNWGNEFLLLKPQSAILSYSSPCEPAHPSSPSLSLTPLSTVGHK

SEQ ID NO: 786996 - protein, 39 aa, Homo sapiens
TEIMSRNSIKAPGQVCEGGVIDTQDLEINCVGLAEAMPT

SEQ ID NO: 786997 - protein, 114 aa, Homo sapiens
THLSRPQGSDESCFLLLPCFLPKRIRGSLQKFIKYNRIKIDQRENNTGTHGTMNQEGRTQKCSLAGAPQSSKVDCKQDSELRISQNKEGNLPVLRLTKSTRLKPTLAGCSGSCL

SEQ ID NO: 786998 - protein, 101 aa, Homo sapiens
PFPLAASGHTDSLHLLIDSGERADITDVMDAYGQTPLMLAIMNGHVDCVHLLLEKGSTADAADLRGRTALHRGAVTGCEDCLAALLDHDAFVLCRDFKGRT

SEQ ID NO: 786999 - protein, 267 aa, Homo sapiens
MSFPRGSQTQKIKHPIGTRKGPLEVPPPTEKDWPKDDEQDHVLVDPDEELDSLPQPYRMINKLVNLLFDQSWEIIEERNALREAESSQIQPTVYPPLGEIQLNKMPNCMAVSQDYVFIGGAKGFSIYNLYSAKQIYAWEKLKVDVTSIWATDLGNEILIAPVDEMGIIRLFYFYKEGLYLVKAINEVDDTSKQTTCIKMEISQGGDFAAFLLQGAGDIWLDVYKLPKETWLKKLEHPQLFASSSPLASAFQSAGIIVVSHCALPSLF

SEQ ID NO: 787000 - protein, 155 aa, Homo sapiens
MSFPRGSQTQKIKHPIGTRKGPLEVPPPTEKDWPKDDEQDHVLVDPDEELDSLPQPYRMINKLVNLLFDQSWEIIEERNALREAESSQIQPTVYPPLGEIQLNKMPNCMAVSQDYVFIGGAKGFSIYNLYSAKQIYAWEKLKVDVTSMLGHRFRE

SEQ ID NO: 787001 - protein, 135 aa, Homo sapiens
  misc_feature (1)..(1): Xaa can be any naturally occurring amino acid
  misc_feature (6)..(6): Xaa can be any naturally occurring amino acid
XELPPXFVGFEKPRAPEVVDKGYGLLPMKDEVYDMNEAGQRCWQLIFYGQQHQQRREVASVPTAGLLSLWSLWMTAMPLPPAPWPTCIHLQLQTAPSTLMAISGPKALSSVTTGAQPGSFYFLHRSPSTTGGKEP

SEQ ID NO: 787002 - protein, 58 aa, Homo sapiens
IPGYLSCFFPTAQQECPPFPDQVMPPSLETPVYSLSEAVSPLDCFKANTAVLAAPSGA

SEQ ID NO: 787003 - protein, 423 aa, Homo sapiens
RRSWRGGTTERATMGDRRPQDRPRSQGMDSKPWYCDKPPSKYFAKRKHRRLRFPPVDTQNWVFVTEGMDDFRYACQSPEDTLVCRRDEFLLPKISLRGPQADRKSRKKKLLKKAALFSELSPVQPARKAFVEEVEAQLMTKHPLAMYPNLGKDMPPDLLLQVLKQLDPERKLEDAWARCEAREKTTEVPTESGKYPCGESCPRPPETPVSRLRPQLPKTPVSSRRPEPPKTRVSSLRPEPPKTRVSSLHPEPPETRASHLRVDPPETGVSHLCPEPPKTLVSSVHPEPPDTGASHLCPEPPETRVSHLHPEPPETGVSHLRPEPSKTQVSSLCPDLPRLECPISAWTSQHSSGVQFPTQVLKLDSEKKLEDARARCEGQEMTTEELTKPGKYHFWESCPRPFESRMPHLRLVLPITRRMASLC

SEQ ID NO: 787004 - protein, 105 aa, Homo sapiens
WRQLKCPLTVGWVSKQRCADIVEYYAAMRMNWQFCKQSTAESHKYNVKQTKQDAEEYILHASMYIMFKIRQNQPLMLGVRIMLISGVNRRQYQWGFQGLEKIVSG

SEQ ID NO: 787005 - protein, 69 aa, Homo sapiens
ACIGPRTDTLLRVSLSCLGTNSESGQGHRRPSPLDGNPGCFLHLNMKSSSRRPVVCLLVTKKPTVSYDP

SEQ ID NO: 787006 - protein, 93 aa, Homo sapiens
SSLGQPRKGLPQCSGGLKGSSSAAKVGALAEEVPRASGALRTASTLSPLNSMGLPVAVVSAKAKTFLSYTGRKQQCWDLNPGMSRSRICALNQ

SEQ ID NO: 787007 - protein, 120 aa, Homo sapiens
VTHMHTQCTCSQTHTHMLTHMLVQCTHTPDCTHTHPLAHSHPHLPSHTVTFSHTHTMHQLTLTHMLTHSFTNMPPHTGTHTTHPLTCLHPPTCSNPHCICLHIHNPLTHTWSHPLMLTPH

SEQ ID NO: 787008 - protein, 283 aa, Homo sapiens
LPSTWREPDYSDAENGHDYGSSETPKMTRGVLSRTSSIQPSFRHRSDDPVGSLWGENDYPEGIEMASMEMANSYGHSLPGAPGSGYVNPAYVGESGPVHAYGNPPLSECDWHKSPQGQKLIASLIPMTSRDRIKAIRNQPRTMEEKRNLRKIVDKEKSKQTHRILQLNCCIQCLNSISRAYRRSKNSLSEILNSISLWQKTLKIIGGKFGTSVLSYFNFLRWLLKFNIFSFILNFSFIIIPQFTVAKKNTLQFTGLEFFTGVGYFRDTVMYYGFYTNSTIQHG

SEQ ID NO: 787009 - protein, 270 aa, Homo sapiens
MLSDDHVNEIIIQVENVSSGVQSHPSSNQIFQEKVLLDSSINMVLSISDIDVIDSQTVSKRNDQKGNQVLRFSTSLNESMSQTLHSLECMGIDTPGSSHETVQGQKLIASLIPMTSRDRIKAIRNQPRTMEEKRNLRKIVDKEKSKQTHRILQLNCCIQCLNSISRAYRRSKNSLSEILNSISLWQKTLKIIGGKFGTSVLSYFNFLRWLLKFNIFSFILNFSFIIIPQFTVAKKNTLQFTGLEFFTGVGYFRDTVMYYGFYTNSTIQHG

SEQ ID NO: 787010 - protein, 157 aa, Homo sapiens
MTSRDRIKAIRNQPRTMEEKRNLRKIVDKEKSKQTHRILQLNCCIQCLNSISRAYRRSKNSLSEILNSISLWQKTLKIIGGKFGTSVLSYFNFLRWLLKFNIFSFILNFSFIIIPQFTVAKKNTLQFTGLEFFTGVGYFRDTVMYYGFYTNSTIQHG

SEQ ID NO: 787011 - protein, 75 aa, Homo sapiens
CIKILDLHVNLKTTEIPEKNIQENLCELGLGKDSLDTTKAIKAKKSSPSPSHSHHGPRSPSSSLSTVSLYAQNRS

SEQ ID NO: 787012 - protein, 71 aa, Homo sapiens
ELLTKAFPLEENHIKCNSPDFNSLTMLSLWLEAVLGCHDLSMKVEQLEAVCQLCFSQWIPLKRIRAPSLHS

SEQ ID NO: 787013 - protein, 68 aa, Homo sapiens
LKGVSPGSPAGGERHTISNLAMQNVDLLYGMETFEKLNLLSNFPTEMATKCPPFLYALTSRRNLKVFH

SEQ ID NO: 787014 - protein, 71 aa, Homo sapiens
KVKGQHRPELTALDWKLWQLGSVLGDFVDPTVPPTEYLQRTGTCVTEGPGSTDLNNHDTLCIGLPGPNPRD

SEQ ID NO: 787015 - protein, 206 aa, Homo sapiens
MSLPESPHSPATLDYALEDPHQGQRSREKSKATEVMADMFDGRLEPIVFPPPRLPEEGVAPQDPADGGHTFHILVDAGRSHGAIKAGQEVTPPPAEGLEAASASLTTDGSLKNGFPGEETHGLGGEKALETCGAGRSESEVIAEGKAEDVKPEECAMFSAPVDEKPGGEEMDVAEENRAIDEVNREAGPGPGPGPLNVGLHLNPLE

SEQ ID NO: 787016 - protein, 66 aa, Homo sapiens
NEHVLVVPQVGVSCHVDQESRGPASLRRPSLRTGPTPTTKTEMPLFLSFWAGTAASSAPLPPVSTT

SEQ ID NO: 787017 - protein, 62 aa, Homo sapiens
IGLEFSPLHQQTTPGVQPFPTDIPGKGRDGLQVIKYLHHILLAIAHQLLTAPGPGSQVKHLA

SEQ ID NO: 787018 - protein, 112 aa, Homo sapiens
MLCPLLSRAGMASSRKKYSSTSTCPRGVGKRRVAQRGAHSCWWEVFGAQAPKSTSGARNPCWCHEPLTVGRGWGGVLTRHDLLGGGWLFILEMHRALLCPPGWSTVAPSWIT

SEQ ID NO: 787019 - protein, 71 aa, Homo sapiens
QRVLWDLHFSCKIHIQPESSSIAIILILALSWTVHSGRGLSHRIPQHAQHSEQQTRELGEAHLYPETSIGL

SEQ ID NO: 787020 - protein, 190 aa, Homo sapiens
ASLEGSTCCWLSRWRMPPTASSAPSAARPSAPAPRQVRSSSLEGVEVPCGVGEGSLRQEVRTQEPPKDGGQARETETGSLHPGCSASPCALPCGFPSWEPRACLHGGRGAQGLRPKCSRFPVPCSRDRAKSPPPALDHTEEHKEALCLVRDPCILVVLVRVHPGATLMTLCGMYMCAHYAKAVWGGAQQR

SEQ ID NO: 787021 - protein, 105 aa, Homo sapiens
SGGGEMVKERWAQKRVGPRWRCHWLLADPHAGSSPPNPMGMLLCSADIWVLPQGPDRVGIWVDLSQVVLLGLSKLLVLILGSQLWQHLQVRVLLGEAAWAVQKVT

SEQ ID NO: 787022 - protein, 120 aa, Homo sapiens
VSNVKDAPKTAVAIRSYRRRRPQHGALFHHDTQSLLFQRQPSEHLFSNTWQGQRKTIVYSFSNRFLINLLCDGSSYMDPLGLISSAVSTQQDLLAGPDHKADTLQLLRAGGNSQMCKWRR

SEQ ID NO: 787023 - protein, 138 aa, Homo sapiens
SSSGQQQCGTPSQKYNKRKENRLYWLTVLHGIQKCSTRIFSWCGLRKLTIMVKAKAKKVNHTARVGATERSGGGPRLLNNQISCELIEQELTYHQGDGAKPFMRDPPHDPVTSRQAPPPTLGVPFQHEIWRGQTSKPY

SEQ ID NO: 787024 - protein, 169 aa, Homo sapiens
SSSGQQQCGTPSQKYNKRKENRLYWLTVLHGIQKCSTRIFSWCGLRKLTIMVKAKAKKVNHTARVGATERSGGGPRLLNNQISCELIEQELTYHQGDGAKPFMRDPPHDPVTSRQAPPPTLGVPFQHVMFAATHIRRISRVIDLEYRTPGRDYCLARLWPMLAGPYNNY

SEQ ID NO: 787025 - protein, 82 aa, Homo sapiens
HNSTTQAHNSTTQAHNSTTQAHNSAAQLPTAPHSSQQHHAAPNSTTQAHNSAAQSQRRHTSSQRHHAAHNGTTEAHNSQLRA

SEQ ID NO: 787026 - protein, 104 aa, Homo sapiens
SFCNMEYASYSGRAEHMRWQSFPRGACGFRGSTGTRWTEARDRFLVRRSSEKAAGYVQADLLPRRGFLEQVWGIACPPQGSKVKEYGCNKLFYSCIPSMLWATR

SEQ ID NO: 787027 - protein, 115 aa, Homo sapiens
CTYAHMHICQCIHVYAHMYIHMCMGTNACIYMNTCIHTHKHMHKCTHAFTHVHTCACMYIHLYPHAHIYIHICRDGHTYIHMHTNTQNMHAPHSTHIHIPNTYHIHLHTPHTYIH

SEQ ID NO: 787028 - protein, 140 aa, Homo sapiens
YAYLLESTMNEYIEQRKPCDTMKVGGNLDSKGYGIATPKGSALRNPVNLAVLKLNEQGLLDKLKNKWWYDKGECGSGGGDSKDKTSALSLSNVAGVFYILIGGLGLAMLVALIEFCYKSRSESKRMKGFCLIPQRLVQPI

SEQ ID NO: 787029 - protein, 116 aa, Homo sapiens
DTRPPGAEEFHPPAGALAPDSKAVRTACASQQGSPATVASLESLEEVLTGGPPGHREPEPGLLPQKGQRGRCSCLQVRWQGPPPFPAGQPPPVPPGPVSLLRPEVAWSGEQPCTQA

SEQ ID NO: 787030 - protein, 95 aa, Homo sapiens
DDESRGSLQHRREVAPMCPGRFRIATGGCGRAQFGPDDFGRSSFTSDCRTLNSEDSCCAINPASLFPPPSFLRESPYSPRHLSGKCNHVTPSNVG

SEQ ID NO: 787031 - protein, 33 aa, Homo sapiens
MQQGGLRGEELRPPANNHMYLAATAAIAKCHSL

SEQ ID NO: 787032 - protein, 32 aa, Homo sapiens
HRKQKLTELKGEIDNLTIVDGDFNTTTFNNGY

SEQ ID NO: 787033 - protein, 93 aa, Homo sapiens
VEKASVPLPPDKSTSFPTMVLNHSKMTAMTDTELRIWMSTKCIEIQEKIETQSKESSKMIQELKDEIVILRKNQTEFLELLSLLQEFHNTIQV

SEQ ID NO: 787034 - protein, 327 aa, Homo sapiens
LRGRGACYKHTFYGIESHRCMETTPSLACANKCVFCWWHHNNPVGTEWWWKMDQPEMILKEAIENHQNMIKQFERNLEPVTQLYVSVDASTKDSLKKIDRPLFKDFWQQFLDSLKALAVKMESHSVAQAGVQRPNLSSLQPLPPEFKVILLPEPPEELGLQQQRTVYRLTLVKAWNVDELQAYAQLVSLGNPDFIEVKGVTYCRESSASSLTMAHVPWHEEVVQFVRELVDLIPEYEIACEHEHSNCLLIAHRKFKIGGEWWTWIDYNRFQELIQEYEDSGGSKTFSAKDYMARTPHWALFGANERSFDPKDTRHQRKNKSKAISGC

SEQ ID NO: 787035 - protein, 286 aa, Homo sapiens
LRGRGACYKHTFYGIESHRCMETTPSLACANKCVFCWWHHNNPVGTEWWWKMDQPEMILKEAIENHQNMIKQFERNLEPVTQLYVSVDASTKDSLKKIDRPLFKDFWQQFLDSLKALAVKQQRTVYRLTLVKAWNVDELQAYAQLVSLGNPDFIEVKGVTYCRESSASSLTMAHVPWHEEVVQFVRELVDLIPEYEIACEHEHSNCLLIAHRKFKIGGEWWTWIDYNRFQELIQEYEDSGGSKTFSAKDYMARTPHWALFGANERSFDPKDTRHQRKNKSKAISGC

SEQ ID NO: 787036 - protein, 67 aa, Homo sapiens
QMAPGTIKCNRVGMDGVHAGSQKSRQVLIRTWNDAATVRTDVGHHLIGPSDQIPTLSIPPQLPPRLP

SEQ ID NO: 787037 - protein, 111 aa, Homo sapiens
CRIKLSPLNMFTHCHLLGKRDRRSSAFRKSGCKGPEGRESGLVIVVGIGKSRTDVLVISLWGRADVRCVEGTAVLLGRSSVQRLGDLGPGVAQHSVGLLESCCWHLPTLGS

SEQ ID NO: 787038 - protein, 49 aa, Homo sapiens
FCRKQRTCPRDRAAAPPQGSTFGRAKFCFHIGMPVGPLPPGHATKATLA

SEQ ID NO: 787039 - protein, 39 aa, Homo sapiens
MGSGETKPNYSTAPLGAYHMILLKEFTGHTDRLATSVLI

SEQ ID NO: 787040 - protein, 74 aa, Homo sapiens
AEILPLHSSLRDERNSIPFPQQKKKRKAYICLTGNIRPRPGAGDSERIKQIFHVMEDRLAKLVTSWVTRVKLHL

SEQ ID NO: 787041 - protein, 68 aa, Homo sapiens
CRWQPTGDREPTQNPDLTRNGAPGTWWAGLAVTGAGGEGHSHPKARPGFQSFLRDLFMVPEGSFLVLR

SEQ ID NO: 787042 - protein, 118 aa, Homo sapiens
QKQHAERMSRDGGSTMTLSVPASPQPSHHTGEGGGPSDPAGLCTLGVPRLTLFLQSSEAGTGPRWGKGRKTSACPAPWALPWMLYTTGQRSRLSFEKHLETGSHPVTQTGLKLMASKD

SEQ ID NO: 787043 - protein, 150 aa, Homo sapiens [sequence omitted]

SEQ ID NO: 787044 - protein, 114 aa, Homo sapiens
AAGQRGSSLLRWGGCRAEGLLTSQTGRLPGRGSPHFSDRAAGQGRSSPPRRGLGRAEALLTSQTGRRGRGAPHISDDGRPGRDAPHFLDVMAAGKRCSSLPRCDGGREEVLLTS

SEQ ID NO: 787045 - protein, 101 aa, Homo sapiens
GKSGGYKKSDGVKDPQRATNTTIEDEDTKVRKQEIIKVTEQLIGAISNGDFESYTKMCDPGMTAFEPEALGNLVEGLDLSIVGNENFGKQMIHPKAHNRLQ

SEQ ID NO: 787046 - protein, 35 aa, Homo sapiens
MLSTFYQAQDSSSHSKEVPGSERQQGQRGVCPGTE

SEQ ID NO: 787047 - protein, 145 aa, Homo sapiens
PRDAACRELHRCGWALSSRQPGTPKSSSPGGCVPGGLKHGLQRETGAQRRARTQHRRHSDGDEQGSLGNETLLPLTLLPRNRLTTSNLGLRWAFWGWGVSSGVTATEELCPLSAGEALDSQGLVSSCQRLGGSTRWGSHHVKEGR

SEQ ID NO: 787048 - protein, 87 aa, Homo sapiens
LADPHFKSIPSLKITHTAKSPLKFWVGGAHESSGASQWNLRCRVKGSTCRVTQTRKAQIGELGCRTYPAQNPNYRTQKVQCAALLNS

SEQ ID NO: 787049 - protein, 292 aa, Homo sapiens
MKLLVQCSGQRTLRSLGLRPKLPWTAVEHGLNLTWKTAQQHDAWHIPSSSAIMTVTHAQLVPQGSPLLKTLPHQLGSFGVKDEVPTAATAPSCAHCSLALSISRHTDLLAVSGHTGTFALPVRLSRTSCPETGDWWSFLTQRINPQKSPTMWILPTPLIFLIQAFLMLTKHSPKPKEKSNVQTHNPSTNLHMICLFKCATHLHTTVQEVKASGGRDRSLVPGAPWNQAASWEQLHCTTPACSIDTPVSAAQNTVEASTVFCSGVSQLLVVSEVYMIADIIDCFTIPLWFRTD

SEQ ID NO: 787050 - protein, 129 aa, Homo sapiens
MVVVVVGRRLMSTKLPEGASSRLHLTLRRSRSRCLLNKRSVVNHVIEHHGMALIPGRIKVSSPGMARFPKAELDLRGARLCHFASCRKTHAIQKIISSGVMEKWWWVQPFLPEDSVVSRSLGDGFDTEG

SEQ ID NO: 787051 - protein, 136 aa, Homo sapiens
KHPYNSFKDSTGSSGFLGECKAGTEPGENSVAPLVLRATPRPALVAARWFGALAVSTEGLPGSGRCCCWRQAFPAGHLDLIGIPGATGERCLPVLSGAPAGNSRTSGLLITTVQGSELELALSSSQEPSIKCLGIL

SEQ ID NO: 787052 - protein, 76 aa, Homo sapiens
LWNPSGWKTPSNYKSLGYFLLPFKSSDACSSMPICFCLRGFIQIKLEEKSRSPNYNYLSKNPLNYLGNPDKFGVQR

SEQ ID NO: 787053 - protein, 90 aa, Homo sapiens
VSQESLPLQEASACKQWAVVWVVVPSPMVNLLDADLLIVSSYEIWLYNRMWHLLSLSVLLLLLPYEISHCRLAFWYGYEGPDQCGPHQWT

SEQ ID NO: 787054 - protein, 78 aa, Homo sapiens
PLQSVDFPAAHCPPKSGTRAREMEDFRGIAEESFPSFLTNSPLFGNSGILENVTLSSNLGLPVAVSTLARDRSSTDNR

SEQ ID NO: 787055 - protein, 116 aa, Homo sapiens
VPYYDTCATSNTWAQTILPPWPLEQLSSQLIFRSHHVQLIFVFLVETGFHHVVQAGLELLTSGDPPASASQSAGITGVSRCEQLHSAGWLVSLNIMTSSSIHVVADNRISFFFMDK

SEQ ID NO: 787056 - protein, 136 aa, Homo sapiens
PIHTVHLTPQAESCSLPTSLHPLWPQRVASCLSDIIDQLQPGQTNFSAIQWAATVFFQRGLNPSLKTGSLFQVCHSLGTLPWPQAIIKFSYISYSFSFFFFFLTVLLYRPATVQWCDWLTVAMTSQGSGDSPTSAS

SEQ ID NO: 787057 - protein, 69 aa, Homo sapiens
SAKERRRAKETGSLALGTHNPAMNREPQAGQLAVGIPMKNGLSRQSRQGFLTECMSGKENLVIVLRFLT

SEQ ID NO: 787058 - protein, 76 aa, Homo sapiens
SASHSGVSTAAFSIMLKGIQGCGELLQFIYLQVTSLPSMSHFFEGNLGFSQHKAPSFSSTETCLYLCLFQHSKKST

SEQ ID NO: 787059 - protein, 106 aa, Homo sapiens
SHVPHPPERTTVTQYSTCALLTALCLLLPVLQETAQSRRMVTSHPEDSPALARKHGASQPAGLGFPRTQTVTPAFTFQTPTAAEPALLSAWLGRAPETETITDMAG

SEQ ID NO: 787060 - protein, 118 aa, Homo sapiens
ILFIRSTVGGHLGFPIFFFTIMNICVQVFVWTNVFIFLITHLRVELVSHKITVFSFLRKCQIIFPSGCTILHSHQQWMRLPVSPHFCACEVAVSSWCLPFLKDSKVCRYRHSLAIFLR

SEQ ID NO: 787061 - protein, 66 aa, Homo sapiens
MVVLAAHTWAPGGCWRLRLQLCRENRQGAGGAWSRRLTEAGSRLPPLPPLQCWGRAGGPIRRNCAA

SEQ ID NO: 787062 - protein, 72 aa, Homo sapiens
VRAPVEMGEKAEAPPLSGLFRASSSASLDMRSLRGSHSLWPGHELLNGCQLRVCMSALFWAEPGVHTQSPLL

SEQ ID NO: 787063 - protein, 45 aa, Homo sapiens
MIHVAPGESMILMTRGEKQAGASEELALHTQVLTAVNPGFEHQGV

SEQ ID NO: 787064 - protein, 204 aa, Homo sapiens
SIHTGEQPYKCDECEKVFSRKSSLETHKIGHTGEKPYKCKVCDKAFACHSYLAKHTRIHSGEKPYKCNECSKTFSHRSYLVCHHRVHSGEKPYKCNECSKTFSRRSSLHCHRRLHSGEKPYKCNECGNTFRHCSSLIYHRRLHTGEKSYKCTICDKAFVRNSLLSRHTRIHTAEKPYKCNECGKAFNQQSHLSRHHRIHTGEKP

SEQ ID NO: 787065 - protein, 73 aa, Homo sapiens
ASLLRDNRDLVIVATTNKETKSSNTSGMKVWLTPSRLPRPAEVLAKNDENLVSISSMIESFVEVWLATILKIP

SEQ ID NO: 787066 - protein, 49 aa, Homo sapiens
MRRRTRRIGTPSSGVLASEHAIYMLRRDLRKQAKEQSRSGHRVGGWLSA

SEQ ID NO: 787067 - protein, 117 aa, Homo sapiens [sequence omitted]

SEQ ID NO: 787068 - protein, 118 aa, Homo sapiens
MSYSCRKPLSPRGLGMKGDEGPQQRGSHLWAVPEKPTDHQGQAASAGEAAKPREGEGDGDREEGQEPALPSAHPPGSHQHFPVRSLLTRDPGQCHFPRPALSTPPEKQQRHSGSGEWV

SEQ ID NO: 787069 - protein, 104 aa, Homo sapiens
VSSSGETFFAPPRPALERGGGGHGNISPAISRADAQHPGARRASAQPGVHLRVPRGLSSPLLLSHTRTLSFTHTHTRIHTLSHTHRTLGASTLLAAVVRWCNSS

SEQ ID NO: 787070 - protein, 103 aa, Homo sapiens
VSSSGETFFAPPRPALERGGGGHGNISPAISRADAQHPGARRASAQPGVHLRVPRGLSSPLLLSHTRTLSFTHTHTRIHTLSHTQPTRPQPTRNPRAHNPRAH

SEQ ID NO: 787071 - protein, 103 aa, Homo sapiens
QPVPWRPGQWGLIYGARQWGHDQWNLVSEALVSKNLVSEALVSKVLVSGVLDTVGLAARAWLVGPGHGVLISESVVREDLISSILSSRMGWTVGQPVCTFCGK

SEQ ID NO: 787072 - protein, 76 aa, Homo sapiens
GGGYWGQQQKESYGRCQILQGWGLAERAFPGQTIPEAPSVANPALQGPLVQQVGQTQKNTTRLSAATISHGHKTCL

SEQ ID NO: 787073 - protein, 89 aa, Homo sapiens
ILKVNAASSTQAAWKGRGTRVGFPCDGQETGGPPTALPGKADVSPKGTGGSWSAVRRRAHPGPGFALIAAVSRQLLGELADDPAPQQEL

SEQ ID NO: 787074 - protein, 32 aa, Homo sapiens
MLVHSPLANCLSALHCQLPLAWAIALTSPLLF

SEQ ID NO: 787075 - protein, 113 aa, Homo sapiens
IDLEDPEMLPYQGSGRGGTPSSASVTGAVDGPGAPWKPLWAQEDCAPPQGLWDSQGPRPQVLFPGSLARVCPDKDFRPRPEYPFLSLTGLTPLATLPGPLVLGHLPRPSQASS

SEQ ID NO: 787076 - protein, 102 aa, Homo sapiens
RTWRWRVALRVARSMCAGAPFTRPCHPPRPARRGPGRWGVGAVRTLRAGPPLLSVRKFTEKHEWMATENDIGTLGVSSFAQETLGDIVYCSLPEVGTKEQTR

SEQ ID NO: 787077 - protein, 152 aa, Homo sapiens
MCTPGWVMTAPALGYNFALKWVPGAGRGQGVRVGTSKPAGTGGASWTPESAGMPGSRAVAGWPQLHLGAWGSCPADLVGGRAPAHSWPVLAPWSAAALATPPPLQLVSPQWLLQMGHHVLTNSNMYIEMQKFYNGESNLEQSWWKRRAWGSS

SEQ ID NO: 787078 - protein, 123 aa, Homo sapiens
MYRFSFLLLPPHPVVLLVFCARTGAGSPALNRALQPSCQLQSTSGLQLVFFPASAHTRMEYYPLIMACLSSSSPSAPGQRLSSRHHSAPACSFAVPTVLSACLTLSVGGHCPSRECGNQLHFI

SEQ ID NO: 787079 - protein, 63 aa, Homo sapiens
MGYEKGKRKTKERERFETVVVVSNVKLLQKFSKSEIGFSSCKSSSFNWCSRSPLDCSVMRNYW

SEQ ID NO: 787080 - protein, 175 aa, Homo sapiens
GRSYENLLGREVREPRGVSPEGRRPPVVVNLSTSPRRYAALSLSETSLTEKGRAGEGLGRNWYVTPEITITDNDLRATERPSARAWELPGGRTRPPPHAAPDGPTSGRQRSLEQLDELITDLVIDSRPTAGQASEPAADCLGPQLRRLLDSRPAGSGAPALAPPRSPPASAGSAE

SEQ ID NO: 787081 - protein, 55 aa, Homo sapiens
LASPLPFFEVSHLWLSGKGMFSSFFLGFQEPLKSFAIPPRFALADSCHGRHKCVS

SEQ ID NO: 787082 - protein, 236 aa, Homo sapiens
MHGILGACGRLRLEPATPLTPLLCAERDECRAHPCRNGGSCRNLPGAYVCRCPAGFVGVHCETEVDACDSSPCQHGGRCESGGGAYLCVCPESFFGYHCETVSDPCFSSPCGGRGYCLASNGSHSCTCKVGYTGEDCAKELFPPTALKMERVEESGVSISWNPPNGPAARQMLDGYAVTYVSSDGSYRRTDFVDRTRSSHQLQALAAGRAYNISVFSVKRNSNNKNDISRPAVLLA

SEQ ID NO: 787083 - protein, 70 aa, Homo sapiens
TWYRVGVCAQGQDSISHVRAAQHKVSQPKGVKTVSIIGIVLGVKSRMLGSKQGEKEVPMVKQAGRLSTEY

SEQ ID NO: 787084 - protein, 34 aa, Homo sapiens
SSHNALCACPQVLVQFLVVTSFSQKKRSRNLKMK

SEQ ID NO: 787085 - protein, 105 aa, Homo sapiens
TATSASWFKRFSCLSLLSSWNYRHAPPCPANFAFLVETGFHHVGQAGLELPTSGRLPASASQSAGITGVSHHTWLISLFLCIPLQLILVMISYGRLEVALIFALC

SEQ ID NO: 787086 - protein, 46 aa, Homo sapiens
APTQSSPEVYPSREKGLTEKGKNNFTSNLMRLKKFLSPLIQFLFHK

SEQ ID NO: 787087 - protein, 78 aa, Homo sapiens
QAPPAPAKSIPVKKETKAPAAEKLEPKAEQAPTVKRTETEKKPPPIKDSKSLTAEPQKAVLPTKLEKSPKPESTCPLC

SEQ ID NO: 787088 - protein, 178 aa, Homo sapiens
LSKGSLFAFAFCLWNHSTSVADARTREEAEACSPPRVWERLGLDWGPLPSGLLMGERQSSLGSCTAEGMPRPETARAASTLCATLLVLRCDCYIKHHIKKITKAVPGLSPRILLPANSARPLYLQWSDTEIAFTPNFHRLILLSRFKPAESRGPGSVLGSGSPGPDPGRRFRGPPGRP

SEQ ID NO: 787089 - protein, 226 aa, Homo sapiens
PQVADQPQVGDQPQVGECKATSQAQAEGHNFPLLLGDPRAGGQVMGLLVSSSQPRMAHSLSACTGTQKASCGHCFPLFLRPLASFLIFKENSPLLIGDQLRRSLAAQRAQQSMRVLGTPFPGRRLPPGKFSNCLAASEGPVVGPPNAIAEEEGKGSRFTNSQTHVTTQTKQQTRWPLQSFRQLGRLAPAVLGFWGPCPALSLPTPGLRTTKEVRKGISNFQVAQEK

SEQ ID NO: 787090 - protein, 226 aa, Homo sapiens; identical to SEQ ID NO: 787089

SEQ ID NO: 787091 - protein, 77 aa, Homo sapiens
PFSHLPLILIVSSFPHPSVVNSHILLPLQPCQTQPWVTPTVHLLSPYAQAAHGQNCTPTLGLLHSVGPTQGLWLFLS

SEQ ID NO: 787092 - protein, 96 aa, Homo sapiens
RSSGRHADCCAHWGWAHQEVGSAETRALTTGARFGFLRPLPAGPRPYRAWWVLPHLLLSPQRGCSFAQGLWGGPGHPEREVAGPSTHAGGPDVLGV

SEQ ID NO: 787093 - protein, 221 aa, Homo sapiens [sequence omitted]

SEQ ID NO: 787094 - protein, 109 aa, Homo sapiens
LCNKNLLKAARGSAHHQTWCIDAGAGLVGASCSCTEAPLPQFCIGVEMCTAAPAVARKQLCRGRMWWAQAQGTGAASQPSLHLPCSSRAPGTWSGWCQMTRTSWTPRTP

SEQ ID NO: 787095 - protein, 44 aa, Homo sapiens
EKEGERLVSCALRVENVISRDGGALSAERGPDRDPLPLTHPRRP

SEQ ID NO: 787096 - protein, 119 aa, Homo sapiens
MEGGRRKEERNEGRKEGKERERKKEKKERERKKKRLNITNHQRNANQNHNDISPQSELLLSKRQGIAGCWQGYGGRGTLIHCWWQCKLVQSLQRTVWKFLKKLRTELPYEPAIRLLGIY

SEQ ID NO: 787097 - protein, 98 aa, Homo sapiens
GRNWALGLKTKSKAPLDTWRYRICSNTLSSPPSLFPLLASSLPVSFSQACTCFLHILHLPRASCHVPVRRLSLQQHALLDLLPVHLHARHPKMQPQMQ

SEQ ID NO: 787098 - protein, 77 aa, Homo sapiens
MLVFFTDFSSQLLLLIVEGFKLRIHEQDVLWFQVCMGQLILMQKSKGVAELVGHVPDMWKGVRLEVILLQELKGVLA

SEQ ID NO: 787099 - protein, 170 aa, Homo sapiens
PQAPMGPAPGIPPWGARVPTPQAGAFPPGTYGTSPGHSSLGGEGAHSSGWCIPPGTYGTSPGPSSLGTRGTHTSSWCLPPGTYGTSPGHSSLGGRGAHSSGRCLPPRRLQDKPWALLPRDQAPTPGRPPSPEGAQRPLRCPSPGPFLRPNFDPVSLKMQETSQGPRGGSK

SEQ ID NO: 787100 - protein, 127 aa, Homo sapiens [sequence omitted]

SEQ ID NO: 787101 - protein, 101 aa, Homo sapiens
EVRPNHTTVMDNCLLQERGGVLQEKVPEIVSVLRSKLQEAQEEHVLPNDQHSVYLLATQQLRSRGVQPPGQPLALGQVPSSDSRLRGPSGMMLPLLPSALG

SEQ ID NO: 787102 - protein, 124 aa, Homo sapiens
ILGAHCCTSQSCWPLEALELANSLLPLCFPPVLASGHDVKCSFVTVTNSCGWQAGVFRHQGVYHTHWAPFSGSALALPLLSTLDSSFLGPSPHAWLQPPSMTPTSTSPGPVSLPSSRSVSPNAS

SEQ ID NO: 787103 - protein, 102 aa, Homo sapiens
GGCGVDSISLLFPASMAAAFLALALYPSGLCRGSCVACSDPDLLEGPCDYIGPTCVIQNPCKTPISKSFTSSHAHSGFAPWSHMLSGSRNESVGISGGHCSA

SEQ ID NO: 787104 - protein, 145 aa, Homo sapiens
MKFVKKKYPENFNFNLLYADFWLESGVRTVSPVVQMRLLVPGKFPQPANPFIFFFFFSRQSLALSLRLECSGIDHSSLQPSHSGAQRISPCLSLPELAGTTGSVPPVLSQFKKLFRDVVSLGSPGVFLISRAQAILLPGPPKVRG

SEQ ID NO: 787105 - protein, 100 aa, Homo sapiens
KTTLRSIEDQPSAFNPFHVYKAFSENMLDQSAITKWNWNWAKLLPNYLRLDKMTFSVLLKNRWEMKKDETLEEEEKAILEHLKQICTPQNSSASDNIEEQ

SEQ ID NO: 787106 - protein, 103 aa, Homo sapiens
NIVFDSIFMRQVLALPLRLKCSSMTTAHCSLKLPGPSNPPASETGYRYVARAGELLGSSNPPSLASRVAGITGMHHHAQLIFVFLVETGFHHIGQDGLDLLTS

SEQ ID NO: 787107 - protein, 115 aa, Homo sapiens
MFVSQAELPCVKRILQFFLSLYCKPQHNSKCCRTLRNTSISRKQHWNKHACKSRVPPAKHLTNPACSLLAKGALPSTTCPFVARWSRNPFSPFSNCYTRPCENITDLQEWWGMPL

SEQ ID NO: 787108 - protein, 113 aa, Homo sapiens
MWCRKVAGSPFPVSLGEVRLAKSVVSCPQVRRRLPTSDVGILALLLLLRLPVVEVVEVGDDDGHRQGNGEDPSDGTQRAHDLSPHSHGVHVPVTLPWSCVTTAHQNPCRDAGK

SEQ ID NO: 787109 - protein, 123 aa, Homo sapiens
IFPFHPDPSGARGRSPGCGSRAGPAALLRQDCRVSVTVSRILRGTDVSSGPTRPVGSADTDFPEKVLLPFPALVGKLGREKESHRPGPVGTTEAAPGPGATSEWGKEAGGRAAEPRPSRARGR

SEQ ID NO: 787110 - protein, 146 aa, Homo sapiens
RRSLVLLPRLECNGVISAHCNLCLPGSSDSPASASPVAGTTGACHHVRLIFLFLVEMGFHHVGQAGFESDHSSYCLTLNFLFAEKVEVERMGRSENHAQTTGCHISGLVVKIQPLTSPIVLSINSRHCIKKHYEIPFSVLFHSDYQ

SEQ ID NO: 787111 - protein, 124 aa, Homo sapiens [sequence omitted]

SEQ ID NO: 787112 - protein, 147 aa, Homo sapiens
DLEDYLITHPLAVDSGPLRDLIEFPPDDIEVVYSPRDCRTLVSAVPEESEMDPHVRDCIRSYTEDWAIVIRKYHKLGTGFNPNTLDKQKERQKGLPKQVFESDEAPDGNSYQDDQDDLKRRSMSIDDTPRGSWACSIFDLKNSLPDA

SEQ ID NO: 787113 - protein, 87 aa, Homo sapiens
TRTDMRRHAHTQTHTHSDTLIHPYITHRRAHTLMHTYTHTKTGIHRHPEYIAHTLTDTHRYTGTHTVHTDMHTHSQICTSHRHVQTY

SEQ ID NO: 787114 - protein, 140 aa, Homo sapiens
TRAPWRRGLGLQGRGPEPPGGGASGSLGAGPQAVWGRSLRPAGGGASCLRAGPRAFWGWGLKLQGRGLEPPGDGAICWGGGSRTAEEDRSAFASSRRPAAQAGTCHLYACFPVDKSRDITLIISSSVHNIHICNPLVKQL

SEQ ID NO: 787115 - protein, 43 aa, Homo sapiens
MTLRRVVMTLGCVVMTLRCVVMASLRCVVMTLGCVVMTLGCVV

SEQ ID NO: 787116 - protein, 82 aa, Homo sapiens
LVDLCINSYSHFTATHFPAVIGDRGEMEFESSEHPSGYPILLFHSSCTPEKLGSLSGGGGKVTIHLPPGVGKESDSTKKSDR

SEQ ID NO: 787117 - protein, 110 aa, Homo sapiens [sequence omitted]

SEQ ID NO: 787118 - protein, 168 aa, Homo sapiens
DGDDGDGADGADAAPAHSERSPRERLREQEAEKTGACAAARTTAPEHRVQARLTADCRSESNPRRPAGGIPASSSLKPKPESHTLHAPAGLDPRLGGPEISTFCKDALLIQKKKEINTKVESEKRKMQVKGPSSTSLPWDPRLQVARRGRCWDRGPAQDRLPLAPPGG

SEQ ID NO: 787119 - protein, 260 aa, Homo sapiens
MNKDYQKFWSSPSDPVHFEVDTSHEKVESMSESDTMNVSNLSQGVMLSHSPICMETTGTTCDLPQNEIKNFERENEYESTLCEDAYGTLDNLLNDCSSFKRNTEFGEIPEMSVSYEKEVTAEGVERPEIVSTWSSAGISWRSEACRENCEMPDWEQSAESLQPVQEDMALNEVLQKLKHTNRKQEVRIQELQCSNLYLEKRVKELQMKITKQQVFIDVINKLKENVEELIEDKYKIILEKNDTKKTLQNLEEVLANTQKH

SEQ ID NO: 787120 - protein, 395 aa, Homo sapiens
MNKDYQKFWSSPSDPVHFEVDTSHEKVESMSESDTMNVSNLSQGVMLSHSPICMETTGTTCDLPQNEIKNFERENEYESTLCEDAYGTLDNLLNDNNIENYSTNALIQPVDTISISSLRQFETVCKFHWVEAFDDEMTEKPEFQSQVYNYAKDNNIKQDSFKEENPMETSVSANTDQLGNEYFRQPPPRSPPLIHCSGEMLKFTEKSLAKSIAKESALNPSQPPSFLCKTAVPSKEIQNYGEIPEMSVSYEKEVTAEGVERPEIVSTWSSAGISWRSEACRENCEMPDWEQSAESLQPVQEDMALNEVLQKLKHTNRKQEVRIQELQCSNLYLEKRVKELQMKITKQQVFIDVINKLKENVEELIEDKYKIILEKNDTKKTLQNLEEVLANTQKH

SEQ ID NO: 787121 - protein, 395 aa, Homo sapiens; identical to SEQ ID NO: 787120

SEQ ID NO: 787122 - protein, 134 aa, Homo sapiens
MGLAPRPLTPQVPDLCTSQQPLEWIPGYVYKALEHTVGLRSTGISAKTQNANRTLHHYLQLDSDRRRHCMFKGTRSCFQPRSDVLHSALCELAGGETTAGERTGLFVPSMASEASLSPASRAPDPNFLLKTDAA

SEQ ID NO: 787123 - protein, 109 aa, Homo sapiens
PQAWSANHLIHSSLRLFIELGKIFSSGPRIRLMLTRSCLEGLSTIYCIQLHTINNNVAAFLKIHVGNVRKCKENFISYFILHLQSPHHLQKEYNDHFLCLFIFEQSSQH

SEQ ID NO: 787124 - protein, 47 aa, Homo sapiens
QKGLIATICAGPTALMAHEISFGSKVTTLPLAKDKMMNGSHYTYSEN

SEQ ID NO: 787125 - protein, 143 aa, Homo sapiens
MAPSTAQLLKLSMILLIIATFTPPVNLLDTPPRTRCILNSLLLFISLVRSDETALPSSLGHSLEQSSNLLACFPAFTAPLLEIILCTGAKGSLKTWIPAGHGGSRLQSQHFGRPRRADLLRSGVRDQPGQYGETLSLLKIQKN

SEQ ID NO: 787126 - protein, 72 aa, Homo sapiens
HLTAAEHLEPLEDPRTLPGLRQRSHISVCVSPFGEVTHSAIFSNLENTEMLSSNFGMLSTFCSSCSASPGLL

SEQ ID NO: 787127 - protein, 133 aa, Homo sapiens
MARRFLTVTTTLGGPASFTVIRRVTSCHRGVAPGSHWVSMGQEARSNSRATCHPHDLYRVVSLDRGFCCVFSSNLEGICLEYWIHSPMIPNTATRPTQAAGPSGACSQKKGGVHRCSHCIKARACICEFYTVR

SEQ ID NO: 787128 - protein, 70 aa, Homo sapiens
LPQVLLAGTSGANCASHITLEEEIARMLELDSEWKICKSTECQGGSAGLGAPKEVYPELKLGGCMLGAKM

SEQ ID NO: 787129 - protein, 37 aa, Homo sapiens
PFALCCVYYMYWLLADPFLQVKHCVKAYEKQLLFKKK

SEQ ID NO: 787130 - protein, 75 aa, Homo sapiens
VRAEDPTAEGTMATYKVEAYTKTGYMLGHKISLGYMSVKTAILQKMFSDHNEIQLETKISRIPKYLDIQHFDNNT

SEQ ID NO: 787131 - protein, 100 aa, Homo sapiens
MPCVLKGSSIWRLGVGTHHPCKDGIRLKLLGPDFRNELQQNARTLLEHLPFPPQLKSFPDSSVSLGFIHFPPALLFPSCFWAVSLAITRFSLTPGPLHMP

SEQ ID NO: 787132 - protein, 30 aa, Homo sapiens
MVRGDSPRVGASRNRISAPVYSGYTGPVHL

SEQ ID NO: 787133 - protein, 88 aa, Homo sapiens
PGLKDKGEKSHDHMNHQKKGGGRDRAEEDMNSGTLSTLLIDVTGGMFLWTFKVMDHSPVAIQLSTAGALVGLESSILVQASVCSQWAY

SEQ ID NO: 787134 - protein, 133 aa, Homo sapiens [sequence omitted]

SEQ ID NO: 787135 - protein, 96 aa, Homo sapiens
LFKTLVRSIFYRGETTLACIRYKLTSEDKYDILPPDNYYLVTEDDRETVYFTLAGLEKLRVRSQVMQDYLMTDGEVRGVDTGGNSLVGQNISTTKY

SEQ ID NO: 787136 - protein, 390 aa, Homo sapiens
MLSRKGIIPEEYVLTRLAEDPAEPRYRARQRRARFVSKKGNCNVAHKNIREQGRFLQDVFTTLVDLKWPHTLLIFTMSFLCSWLLFAMAWWLIAFAHGDLAPSEGTAEPCVTSIHSFSSAFLFSIEVQVTIGFGGRMVTEECPLAILILIVQNIVGLMINAIMLGCIFMKTAQAHRRAETLIFSKHAVIALRHGRLCFMLRVGDLRKSMIISATIHMQVVRKTTSPEGEVVPLHQVDIPMENGVGGNSIFLVAPLIIYHVIDANSPLYDLAPSDLHHHQDLEIIVILEGVVETTGITTQARTSYLADEILWGQRFVPIVAEEDGRYSVDYSKFGNTVKVPTPLCTARQLDEDHSLLEALTLASARGPLRKRSVPMAKAKPKFSISPDSLS

SEQ ID NO: 787137 - protein, 106 aa, Homo sapiens
RETLPAFHGKFSGHTSRRGAGAKPVLSMQRGSAGRPQHPPSALGPQSSSVILLGSPTRDFICRFKYNIPILETHRGPGILQPLGTRQRGATCTYVSHLPGSLLSAG

SEQ ID NO: 787138 - protein, 36 aa, Homo sapiens
LDDESETLSLKTNKQTNNQQKENQCVEPISICVKNK

SEQ ID NO: 787139 - protein, 88 aa, Homo sapiens
SPPGLTQRSATLLLPSIFTSWSNPEISHPPPTRVSSPPGLTQMISQPSSYPSIFTSWSNPEMISQPSSYPSIFTSWSNPEIISQPPLT

SEQ ID NO: 787140 - protein, 107 aa, Homo sapiens
MGPSCGVRALGGDTLGFIPQGLGLLQWRLGRDEVGPKGLEAGAETFSKADAASPDHLDVTGAPAAPDACAAEAGQGQDPLKSSSASCLSLNRGALAARAAGLLSASR

SEQ ID NO: 787141 - protein, 107 aa, Homo sapiens; identical to SEQ ID NO: 787140

SEQ ID NO: 787142 - protein, 106 aa, Homo sapiens
MHSNHHLRLLPPFLTYMKSAWTPLSPFLPSLLPPFLLNRIRALNSIWTVSYIGHQDVISLFVSGNCSLDPSVLSETSPKPTRRKPSSVLSGFCFQYMLPFLWSAQS

SEQ ID NO: 787143 - protein, 91 aa, Homo sapiens
ACPIPRTPETQNTGDIEAKSRVFGHFGRSTRAESAGGLQRPKVHLLLTVCSSLLPPPALHRLKSRRPLYRRQLQLLRRKSLAFPFLAPLHT

SEQ ID NO: 787144 - protein, 223 aa, Homo sapiens
MHPSTLPLLLACANEHIPLPPSLKALWLAPPIEILWLVVQEHINLSGTAGVNVNYFSQHGKQFGDFSKNLKQNCHSAQQSHYLLSTQRNTNVSAIKTHARIMFITALFTVAKTWNQPKCPSTVDWMKKMCHIYTMEYYAAIKKNEIMSFAATWMEPEAIIPSRVTQKQRNKYCMFSLTSGSQILSEDGHTERNNRHEFLPERGGWEDGDDQITTNHVACFLPE

SEQ ID NO: 787145 - protein, 124 aa, Homo sapiens
PFTQTSRTQGRCSSAHWQGCHPHPHPQPPNRTRTAQEKKVAASLMGPSMAPTEHRQLDSAVGGQTYVLGQVELSPDTRGCFILRGSSAEHQQLDPTVGGQAYALGQVELSPDTRGCCILRKSLS

SEQ ID NO: 787146 - protein, 137 aa, Homo sapiens
FSTEIPHPGKPMRLATLRDCTLHRCGIVQSHVPLSQNRPVLGLMLCYCHLQFLVIFQQGVLRFFALGLAKHGAHPDDLSPYILDLTTVLLCKLAFCLLPGGAHCLEGPLQSGSIFPVHILSHHSHLRPSSFLASGLW

SEQ ID NO: 787147 - protein, 200 aa, Homo sapiens
WPIKESLKAMIAWEWTIEKAREGEEEKTEKKKTRKISQSAQTYDPREGYNPQPPDLSAVTLSRELQAMAEQLAENYHNTWGRKKKQELEAKGGGTHPLLVPYDTLTAKEKARDREKAQELLKFLQMNGYAVTRGLKDMELDSSSIEKRFAFGFLQQLLRWMDISQEFIAHLEAVVSKWRVAKSPHDQEIKFFAKILLPLI

SEQ ID NO: 787148 - protein, 54 aa, Homo sapiens
SVFVMPPGSLQATSGRAIVSPLWEPSLSHGAWHRAMIWNSHDNTPTAAQRTQIP

SEQ ID NO: 787149 - protein, 114 aa, Homo sapiens
ACRRGFSGQLVFGLWLDGNSSASCHIGSLQLGIKPNNLAFSHPKRKVEFCCIYSISPSLFIHSLKLLCFFKMWVGYNFSSQQLESLKSCRTPLHIPSSKTRFLVPSSIIPISEA

SEQ ID NO: 787150 - protein, 160 aa, Homo sapiens
HAPPQLSDYFLFPFPSLGRDAAATLPWPPTTCLHERLGPLPGPPRPSAVPRGPGRGDSRSPNPLKWGPEERGGALSGDRERAERSWHRAPPFHVAEPRGYDLGGRREGGRLGWRRGGAKVGAGTMGTAPRAANPRTSRRLAGGRARPLLPVPRSPRTGRP

SEQ ID NO: 787151 - protein, 60 aa, Homo sapiens
SNTSLCLRRQTDTHVTHSFSERPQSASEKPPSQQAGSRFPEALHSAQGTLIHAFRLVNIH

SEQ ID NO: 787152 - protein, 119 aa, Homo sapiens
QLRQERLRADKDLKCCVVVIEEQMFGFPILFILLFSNPHHGPIRGHYSVSSALPGTSHAFLSFNLSALSQMRKLRSRQVESLVLCDRAGKVLYDRDLTQRPSPVVTFWMYFVAVLPWTT

SEQ ID NO: 787153 - protein, 127 aa, Homo sapiens
GACCVSRGFLWDGSPPPIFHTALRGSFLRCTSVCVPSVKILNEYSCVPHLTQAFHDLTHTHCDSLLLGPHSQAPWVLARPYAQQVPHQAKCLLLSMLLHLQGALGQKFSFKTARTETHTQTKRETIN

SEQ ID NO: 787154 - protein, 70 aa, Homo sapiens
RRSAMWIDGLTFSTFSYSERVPSASAGFLSHVDYLLLSGKQVGWWPFDVMPASLLEMWVFLEPKAEKAEW

SEQ ID NO: 787155 - protein, 75 aa, Homo sapiens
QYGHQEAPRIHPASTFHGFCQLVNCFCTHKPASPCSGSLHRTRRLLDPSPNLPGSTVLILILSLSHTTKTTTSPI

SEQ ID NO: 787156 - protein, 94 aa, Homo sapiens
AKNLFVLGKCLITLSSSHTRLGSLSEDVRGGTGFKNKNRIMVSASENLLPPRYNGCFQRGPAAVCCVPRSGHEDSTCAVSMYSHTSCMHGRHTL

SEQ ID NO: 787157 - protein, 104 aa, Homo sapiens
MSNRQIPVKTVLCLWSSGRLRPEDNCTFFSCVKIHNQLISSVSNIACPNFDASICIPGSITFMPNGCCKTCTPRNETRVPCSTVPVTTEVSYAGCTKTVLMNHC

SEQ ID NO: 787158 - protein, 110 aa, Homo sapiens
MLALCGCPQMHSFDHKDPEKWAFYTRCLLHTAGEKPGLNSFIWLQSPQSSSTSCCHLRHSKRCHHLPDKQGTESPIHTDAKWQKKYTRKILYADQFGQKQQTMLSANNPA

SEQ ID NO: 787159 - protein, 109 aa, Homo sapiens
MTPAWSIFHPRSLSPPVRPNFIAAKGPKKAACLPRGDPEPGSRHLHVLTPATARPSQALGPWVLSCDGTIAPSIPQHQTPVKSDSPSEVRFSWPFLGPAFRLPLGSPAS

SEQ ID NO: 787160 - protein, 225 aa, Homo sapiens
VIMPGPAPGRGGSGVGLRGLSSLQAPQPSRVPWPMAAYSYRPGPGAGPGPAAGAALPDQSFLWNVFQRVDKDRSGVISDTELQQALSNGTWTPFNPVTVRSIISMFDRENKAGVNFSEFTGVWKYITDWQNVFRTYDRDNSGMIDKNELKQALSGFGYRLSDQFHDILIRKFDRQGRGQIAFDDFIQGCIVLQRLTDIFRRYDTDQDGWIQVSYEQYLSMVFSIV

SEQ ID NO: 787161 - protein, 80 aa, Homo sapiens
MFDRENKAGVNFSEFTGVWKYITDWQNVFRTYDRDNSGMIDKNELKQALSGFGELTHSGLCSVFHFGTLEPLKFFKPCWT

SEQ ID NO: 787162 - protein, 225 aa, Homo sapiens; identical to SEQ ID NO: 787160

SEQ ID NO: 787163 - protein, 158 aa, Homo sapiens
MVDKDRSGVISDTELQQALSNGTWTPFNPVTVRSIISMFDRENKAGVNFSEFTGVWKYITDWQNVFRTYDRDNSGMIDKNELKQALSGFGYRLSDQFHDILIRKFDRQGRGQIAFDDFIQGCIVLQRLTDIFRRYDTDQDGWIQVSYEQYLSMVFSIV

SEQ ID NO: 787164 - protein, 143 aa, Homo sapiens
LLLLFSGTWTPFNPVTVRSIISMFDRENKAGVNFSEFTGVWKYITDWQNVFRTYDRDNSGMIDKNELKQALSGFGYRLSDQFHDILIRKFDRQGRGQIAFDDFIQGCIVLQRLTDIFRRYDTDQDGWIQVSYEQYLSMVFSIV

SEQ ID NO: 787165 - protein, 822 aa, Homo sapiens
VIMPGPAPGRGGSGVGLRGLSSLQAPQPSRVPWPMAAYSYRPGPGAGPGPAAGAALPDQSFLWNVFQRVDKDRSGVISDTELQQALSNGTWTPFNPVTVRSIICQRTMIPPGECTYAGRKRRRPLQKQRPAVGAEKSNPSKRHRDRLNAELDHLASLLPFPPDIISKLDKLSVLRLSVSYLRVKSFFQVVQEQSSRQPAAGAPSPGDSCPLAGSAVLEGRLLLESLNGFALVVSAEGTIFYASATIVDYLGFHQTDVMHQNIYDYIHVDDRQDFCRQLHWAMDPPQVVFGQPPPLETGDDAILGRLLRAQEWGTGTPTEYSAFLTRCFICRVRCLLDSTSGFLARGSQAWQLRLCCPEPLMTMQFQGKLKFLFGQKKKAPSGAMLPPRLSLFCIAAPVLLPSAAEMKMRSALLRAKPRADTAATADAKVKATTSLCESELHGKPNYSAGRSSRESGVLVLREQTDAGRWAQVPARAPCLCLRGGPDLVLDPKGGSGDREEEQHRMLSRASGVTGRRETPGPTKPLPWTAGKHSEDGARPRLQPSKNDPPSLRPMPRGSCLPCPCVQGTFRNSPISHPPSPSPSAYSSRTSRPMRDVGEDQVHPPLCHFPQRSLQHQLPQPGAQRFATRGYPMEDMKLQGVPMPPGDLCGPTLLLDVSIKMEKDSGCEGAADGCVPSQVWLGASDRSHPATFPTRMHLKTEPDSRQQVYISHLGHGVRGAQPHGRATAGRSRELTPFHPAHCACLEPTDGLPQSEPPHQLCARGRGEQSCTCRAAEAAPVVKREPLDSPQWATHSQGMVPGMLPKSALATLVPPQASGCTFLP

SEQ ID NO: 787166 - protein, 239 aa, Homo sapiens
VIMPGPAPGRGGSGVGLRGLSSLQAPQPSRVPWPMAAYSYRPGPGAGPGPAAGAALPDQSFLWNVFQRVDKDRSGVISDTELQQALSNGTWTPFNPVTVRSIISMFDRENKAGVNFSEFTGVWKYITDWQNVFRTYDRDNSGMIDKNELKQALSGFGYRLSDQFHDILIRKFDRQGRGQIAFDDFIQGCIVLQTLAPSPRPECGGANTAHCSLDPQAQAILTPRTPKVLGSQARVTMLA

SEQ ID NO: 787167 - protein, 246 aa, Homo sapiens
VIMPGPAPGRGGSGVGLRGLSSLQAPQPSRVPWPMAAYSYRPGPGAGPGPAAGAALPDQSFLWNVFQRVDKDRSGVISDTELQQALSNGTWTPFNPVTVRSIICQRTMIPPGECTYAGRKRRRPLQKQRPAVGAEKSNPSKRHRDRLNAELDHLASLLPFPPDIISKLDKLSVLRLSVSYLRVKSFFQGQGLAVADAEDVDDHTGERRPMSFRRPRALDTQALRRTQFGLHLLMVNIAGLIATDRL

SEQ ID NO: 787168 - protein, 233 aa, Homo sapiens
VIMPGPAPGRGGSGVGLRGLSSLQAPQPSRVPWPMAAYSYRPGPGAGPGPAAGAALPDQSFLWNVFQRVDKDRSGVISDTELQQALSNGTWTPFNPVTVRSIISMFDRENKAGVNFSEFTGVWKYITDWQNVFRTYDRDNSGMIDKNELKQALSGFGYRLSDQFHDILIRKFDRQGRGQIAFDDFIQGCIVLQVTEWLHVGLWWWWEGLACQRDAPDLQSKELGMCRISFWSL

SEQ ID NO: 787169 - protein, 241 aa, Homo sapiens
VIMPGPAPGRGGSGVGLRGLSSLQAPQPSRVPWPMAAYSYRPGPGAGPGPAAGAALPDQSFLWNVFQRVDKDRSGVISDTELQQALSNGTWTPFNPVTVRSIICQRTMIPPGECTYAGRKRRRPLQKQRPAVGAEKSNPSKRHRDRLNAELDHLASLLPFPPDIISKLDKLSVLRLSVSYLRVKSFFQVKRQRREIHGRNCQKKRNQNLKCLTRVLLGSVPLLLCCMPRTGVGSGRCRRCG

SEQ ID NO: 787170 - protein, 193 aa, Homo sapiens
VIMPGPAPGRGGSGVGLRGLSSLQAPQPSRVPWPMAAYSYRPGPGAGPGPAAGAALPDQSFLWNVFQRVDKDRSGVISDTELQQALSNGTWTPFNPVTVRSIICKYRQTDQLGLLCIRPAWVPACVSFVCGSVSLCSLLEFHLDERRPFHPSPSVSVPFHISPCMFALFLILFIFNVRCNLSFQFLILKMTYI

SEQ ID NO: 787171 - protein, 200 aa, Homo sapiens
LAAPRPARSWLPRWLPPQDAGLPPRRPEPGSRAGGFSGGGRDPPDTEGRPRRDPAPVAPRPRTMIPPGECTYAGRKRRRPLQKQRPAVGAEKSNPSKRHRDRLNAELDHLASLLPFPPDIISKLDKLSVLRLSVSYLRVKSFFQVKRQRREIHGRNCQKKRNQNLKDRGWQWQMPKMWMTTRANEGPCRSGGPEHWTPRP

SEQ ID NO: 787172 - protein, 115 aa, Homo sapiens
MPRGPCWGRHPRLSTPVAFEGHALLLGLLSSPLRRPSPASLLTSQPLPLCPDTTPSAARSLLVLNSCVAGFCPPPSLLYAQDRGWQWQMPKMWMTTRANEGPCRSGGPEHWTPRP

SEQ ID NO: 787173 - protein, 226 aa, Homo sapiens
TTRPRTRGSTHASGGVGLRGLSSLQAPQPSRVPWPMAAYSYRPGPGAGPGPAAGAALPDQSFLWNVFQRVDKDRSGVISDTELQQALSNGTWTPFNPVTVRSIISMFDRENKAGVNFSEFTGVWKYITDWQNVFRTYDRDNSGMIDKNELKQALSGFGYRLSDQFHDILIRKFDRQGRGQIAFDDFIQGCIVLQRLTDIFRRYDTDQDGWIQVSYEQYLSMVFSIV

SEQ ID NO: 787174 - protein, 197 aa, Homo sapiens
GDNARPCPRQRRKRSRPERSLVAAGAALPDQSFLWNVFQRVDKDRSGVISDTELQQALSNGTWTPFNPVTVRSIISMFDRENKAGVNFSEFTGVWKYITDWQNVFRTYDRDNSGMIDKNELKQALSGFGYRLSDQFHDILIRKFDRQGRGQIAFDDFIQGCIVLQRLTDIFRRYDTDQDGWIQVSYEQYLSMVFSIV

SEQ ID NO: 787175 - protein, 231 aa, Homo sapiens
ADSRNLSSGCKVSRSLEAPQATSQCLCGRGAITLYRPGPVVPGLVPVPELRGRIPGPDHSVWNQLFHEGQSKDRSVSDIMTLEHSANALLQSGYVDFPFNPVDCQVLIISMFDRENKAGVNFSEFTGVWKYITDWQNVFRTYDRDNSGMIDKNELKQALSGFGYRLSDQFHDILIRKFDRQGRGQIAFDDFIQGCIVLQRLTDIFRRYDTDQDGWIQVSYEQYLSMVFSIV

SEQ ID NO: 787176 - protein, 157 aa, Homo sapiens
MRPRTRGSTHASGGVGLRGLSSLQAPQPSRVPWPMAAYSYRPGPGAGPGPAAGAALPDQSFLWNVFQRVDKDRSGVISDTELQQALSNGYRLSDQFHDILIRKFDRQGRGQIAFDDFIQGCIVLQRLTDIFRRYDTDQDGWIQVSYEQYLSMVFSIV

SEQ ID NO: 787177 - protein, 676 aa, Homo sapiens
ATHPHRRTYAGTAEQPKYTRWFFLWFRRWKVETIARNVAYPPQRLKDKEGKGQTLARRCSGWSVRALTGRGAAPPGRPLWRPAGAGQEALADPAASSSATPTPRFSHGADAVCRHGTGEAVALQVPPRSRCGAGGCLTDVMHQNIYDYIHVDDRQDFCRQLHWAMDPPQEMMLILGRLLRAQEWGTGTPTEYSAFLTRCFICRVRCLLDSTSGFLTMQFQGKLKFLFGQKKKAPSGAMLPPRLSLFCIAAPVLLPSAAEMKMRSALLRAKPRADTAATADAKVKATTSLCESELHGKPNYSAGRSSRESGVLVLREQTDAGRWAQVPARAPCLCLRGGPDLVLDPKGGSGDREEEQHRMLSRASGVTGRRETPGPTKPLPWTAGKHSEDGARPRLQPSKNDPPSLRPMPRGSCLPCPCVQGTFRNSPISHPPSPSPSAYSSRTSRPMRDVGEDQVHPPLCHFPQRSLQHQLPQPGAQRFATRGYPMEDMKLQGVPMPPGDLCGPTLLLDVSIKMEKDSGCEGAADGCVPSQVWLGASDRSHPATFPTRMHLKTEPDSRQQVYISHLGHGVRGAQPHGRATAGRSRELTPFHPAHCACLEPTDGLPQSEPPHQLCARGRGEQSCTCRAAEAAPVVKREPLDSPQWATHSQGMVPGMLPKSALATLVPPQASGCTFLP

SEQ ID NO: 787178 - protein, 244 aa, Homo sapiens
VIMPGPAPGRGGSGVGLRGLSSLQAPQPSRVPWPMAAYSYRPGPGAGPGPAAGAALPDQSFLWNVFQRVDKDRSGVISDTELQQALSNGTWTPFNPVTVRSIICRGQMIPPGECTYAGRKRRRPLQKQRPAVGAEKSNPSKRHRDRLNAELDHLASLLPFPPDIISKLDKLSVLRLSVSYLRVKSFFQVKRQRREIHGRNCQKKRNQNLKDRGWQWQMPKMWMTTRANEGPCRSGGPEHWTPRP

SEQ ID NO: 787179 - protein, 67 aa, Homo sapiens
HHRHKYRCRRPATPQARPRPSCSQRKLLVQDFPGLNLLIYRLGTNPGVCALGGAHTGNPGSGQIPSP

SEQ ID NO: 787180 - protein, 111 aa, Homo sapiens
PPPVVSCCIVFYCWPSGFPDAPLLLGWFIRFERHAVISSRSQEAANRLVLAPTGLPPCSMSVCARINVYVCMPVNMCACVCACTCGPASPSPTVRARASESPRPVACHRSG

SEQ ID NO: 787181 - protein, 160 aa, Homo sapiens
MEAPPCHLAPAPSVTPLWPGAACCLPVTSQPVGISTARAGSVHLLRHPHPRHTVPSVSSHWAESCHVAAQLQGSPGRVRGPCPADLAACDNAISGPVVTLALLTLPIRLGNGLDSGICEPEVTNVKQHLIHVLAKWAFVKKNNKVWSELNVTIFGQIYVI

SEQ ID NO: 787182 - protein, 102 aa, Homo sapiens
ACYRQDAQLVGGSSCAAALTLGRAGLPSVAGSLGLSSGKAAAQLPCHWVYYLHLSPSGACASVSCAVAHVCSCLSHIGSCHASLELQPWHCWVPGQYIICCR

SEQ ID NO: 787183 - protein, 135 aa, Homo sapiens
CNSTQAQPQLCSACEQGEARQQEHALPSLQGRGLPGPPRVQGCPGLQLQLGGCNCDWEGRASTWSAWKWVGLLPVPGSCWLLRACSLLPCLPCCFWHLCSSCFRQAAAAISRAFIVLSYVPSIPNLMRIFIMKGC

SEQ ID NO: 787184 - protein, 107 aa, Homo sapiens
CGTIVSHHVIVPCRSCRLSCNVGHFWMFHSQAVYDINRLDSTDFCKMPRGELGLFLFSNCLLQSDGKLTTNSCGEKKRRSRPKNRVYSPRERRPAFQCYFICFYNWM

SEQ ID NO: 787185 - protein, 145 aa, Homo sapiens
EARSRQESCTAKEGVVPEYSVHWGLRWEERVWARTSLGGALFALPGRRDHTLWSLGHHQRFVRMEVMSPGWHLWLSLCSRMEEGRIRTLGGAKHPTGGVLLEPPGRARRGVGSLNSVAVGPKGQGMIHEWSAKRERQRERWGDYL

SEQ ID NO: 787186 - protein, 64 aa, Homo sapiens
HRSQALRVGVLCRFSPNNSNPIIVSLAAQRWSLDSAPCHCHRRPRQTEPPPLGTSLVPMKQKGE

SEQ ID NO: 787187 - protein, 135 aa, Homo sapiens
PPPANKGQRGGVDTMSEGAYQRLWESSHATLQELLDQEQLLLEPAPDRERQSFQYRLASLYLHYLGLLRRFDTVYDQMVQPQKRRLLRRLLDGVAGRVLELKDELVRADLCENHCLDRVLQDFKLTPVRVRSREA

SEQ ID NO: 787188 - protein, 143 aa, Homo sapiens
ASMATSRICSHSSQRNYLKTSIGHIPPLLKIFSCRQRPKCSPWPRKPFPILFPLPSTPALSPLHSHSFSHTDLLPLARTHVKHAATSGPLNAPPCARTPFLQNPQGLLHSDMTSSTRPTEYPLHPSPSPDHFLLIFLHRTSQV

SEQ ID NO: 787189 - protein, 154 aa, Homo sapiens
GGTNCETPRATCLDQCSGHGTFLPDTGLCSCDPSWTGHDCSIEICAADCGGHGVCVGGTCRCEDGWMGAACDQRACHPRCAEHGTCRDGKCECSPGWNGEHCTIEGCPGLCNGNGRCTLDLNGWHCVCQLGWRGAGCDTSMETACGDSKDNDGG

SEQ ID NO: 787190 - protein, 137 aa, Homo sapiens
MQFHSFDRSVVVPVKKPPPGSLAVTTVGATTAGSGLPTGSTSNIFAATGATPKSMINTTGAVDSGSSSSSSSSSFVNGATSKNLPAVQTVAPMPEDSAENMSITAKLERALEKVAPLLREIFVDFAPFLSKDEGTEL

SEQ ID NO: 787191 - protein, 103 aa, Homo sapiens
MGNILTCRVHPSVSLEFDQQQGSVCPSESEIYEAGAEDRMAGAPMAAAVQPAEVTVEVGEDLHMHHVRDREMPEALEFNLSANPEASTIFQRNSQTDGETTVS

SEQ ID NO: 787192 - protein, 93 aa, Homo sapiens
MGNILTCRVHPSVSLEFDQQQGSVCPSESEIYEAGAEDRMAGAPMAAAVQPAEVTVEVGEDLHMHHVRDREMPEGKEVIGAIYPRFAFGCCCP

SEQ ID NO: 787193 - protein, 135 aa, Homo sapiens
DGAKAGCPVSHLREASWGQVLTEAGRGGPAGGRKEGSMGQGGWGYPGPAWSFILSLNLGLSGDLKMVPHKLTASCLELRGAPPTGTFHPSEPAATGGPRAERLSPGAPFPEGLCPVCVERGQLPDTIHKYCMEHT

SEQ ID NO: 787194 - protein, 67 aa, Homo sapiens
VNTTLLFCPFQGSDEPSPADGGRDSILSPAIYTLYVHSCLYCRVAKGNCRVCRWPGRAAQSPPRTQV

SEQ ID NO: 787195 - protein, 122 aa, Homo sapiens
MGQACSLHRQPHPVSTQGQAPARAKAPALSQRCCCPWPGMGTWASVSGKLRKFLDIQFRSYIHAFSVLRGQLGVTHFIRTNSGKLRIKLTCKSVVYCSSVSNHVYLDAILYLRSYSKTNSRN

SEQ ID NO: 787196 - protein, 118 aa, Homo sapiens
VGLGAGAITHCPHIAWLQMLIDQTSTLEAPTSILQVGGAGGRDGKCMPLLGARWHQCGHSGSLQGTVSWLAWIRGGAEQMQVRQQTACSVDKSFCRPLRNDSSLIPRWGICLPLAGLG

SEQ ID NO: 787197 - protein, 87 aa, Homo sapiens
IVGDFGIVVVPRDAADTDRIMNHSSILRKYKNNIMVVKDDINHPMSVVSSTKSRLALQHGDGHVVDYLSQPVIDYILKSQLYINASG

SEQ ID NO: 787198 - protein, 90 aa, Homo sapiens
AGGHSSYSETQTHPLAAGDCGNFLLPPTGTSISPPIPSPSAFTCRRRRCRCVLLLSLQTEQMIRLLGYNVIWVQAEPLVEALGKRHSISS

SEQ ID NO: 787199 - protein, 72 aa, Homo sapiens
PRSTVFCQTHLLPRHRPSHCGSRICARPSFVKEDKIRAHVTGAAVTLSLCVLSDEGSGASPASCWEKKGGSK

SEQ ID NO: 787200 - protein, 115 aa, Homo sapiens
ILADEEVRLHIACLMASKGQSWDLNQVLEAPTIALKGSALLSRGHLSLVAQQSGCDISYKACQEERLPIPDSEAAAPMSPPQTHCASLKHSLPFIYLQVTNSEFQWLILLRDRGL

SEQ ID NO: 787201 - protein, 163 aa, Homo sapiens
MDKIYEGQVEVTGDEYNVESTDGQPGTLTCYLDAGLARTTTGNKVFGTLKGAVDGGLSSLTVPNDSLVMILKARNLMQKYTGSTSRARMLQYMCYLMEEDEDAYKKQLSQYIKNSVTSDMMEEMYKKGHATIRKNPVYEKKPKKEVKKKRWNRPKMSLAWKKG

SEQ ID NO: 787202 - protein, 128 aa, Homo sapiens
SSPELYYLIARFLQSGPCNKSAQVLVQELEEHQLIPRRLDWEGKEHRRSFEDLVAANAHIPPDYLLKICERIGPLLDKEIPQSVPGVQTLLGVGRQSLLRDAKDCKSTLWNGSAFAALHRGRPPELPV

SEQ ID NO: 787203 - protein, 110 aa, Homo sapiens
  misc_feature (110)..(110): Xaa can be any naturally occurring amino acid
LRVIRAACALLNSGGGVIQMEMANRDERPTEMGLDLEESLRKLIQYPYLQAFFETKQHGRCFYIFVKSWSGDPFLKDGSFNSRICSLSSSLYCRSGTSVLHMNSRQALYX

SEQ ID NO: 787204 - protein, 108 aa, Homo sapiens
MEMANRDERPTEMGLDLEESLRKLIQYPYLQAFFETKQHGRCFYIFVKSWSGDPFLKDGSFNSRICSLSSSLYCRSGTSVLHMNSRQAFDFLKTKERQSKYNLINEGS

SEQ ID NO: 787205 - protein, 104 aa, Homo sapiens
MGYVVKSRTEQVDWQGCLSRAGRELALGQQASSDRAQIPVPTIEVLILPCDRYHFLSKVPSDFFLERGWGRIVGSRDVLAGIAIISFSLVSWIQIHLLLPPSLT

SEQ ID NO: 787206 - protein, 81 aa, Homo sapiens
PGTVPAAQSPGNSACSSVGAWYSTYSSDTRKQCLQLSRSLVQNRPQQFQLSGTWSTQKDLISAVEIFGPELNTALILPNKR

SEQ ID NO: 787207 - protein, 78 aa, Homo sapiens
  misc_feature (5)..(5): Xaa can be any naturally occurring amino acid
  misc_feature (39)..(40): Xaa can be any naturally occurring amino acid
DYGGXVVFCIFFGIIYGMVGALQFEVLMAIVGTHKFFQXXIGLVLLMEAVAVLVGPFGRGPAVTQAGGQWHHHSSLQP

SEQ ID NO: 787208 - protein, 104 aa, Homo sapiens
GVLSDVTDGVLSDGTDGVVTDGVLTDVTDGVLTDVTDGVLTDVTDGVLTDGVPTDVTDGILTDVTDGVLSDETDGLLSDVTDGVLTDGVPTDVTDDVFTDTIFL

SEQ ID NO: 787209 - protein, 70 aa, Homo sapiens
EEHRGRGWRRKTGDAVSGVPGEGRMDRRDGSEVGHEASRKKLQRTRTRVPEPGVGGFRNRREVGNGKGVW

SEQ ID NO: 787210 - protein, 110 aa, Homo sapiens
MGQAGAGYSRSQAWRMWGTRAGTKCRGINLASGGQGPMPQRPSSVSTPHVRGARPQLHSDLLVDSSQIFDEGGRLYYCYYTVCTDRETEFQRGQATAPKAQANKYSSEQR

SEQ ID NO: 787211 - protein, 86 aa, Homo sapiens
GLDTLKLLWVPDCPAGCDAGPACSGMLSSPSPAIPNLNIQQIAINGEPAIWKDFFKCREPGSPPLSPLSSLCPFMVFVPSLLAVPQ

SEQ ID NO: 787212 - protein, 104 aa, Homo sapiens
LHCLDDSFTGSSAYIPCRTWWALFSTKPWCVRVWHCSRCLCQHLLSGGSGLQRGLFHLLVQKSKKSSTFKFYRRHKMPAPAQRKLLPRRHLSEKSHHISIPSPD

SEQ ID NO: 787213 - protein, 189 aa, Homo sapiens
MPVMKGLLAPQNTFLDTIATRFDGTHSNFILANAQVAKGFPIVYCSDGFCELAGFARTEVMQKSCSCKFLFGVETNEQLMLQIEKSLEEKTEFKGEIMFYKKNGSPFWCLLDIVPIKNDKGDVVLFLASFKDITDTKVKITPEDTTEDKVKGRSRAGTHFDSARRRSRAVLYHISGHLQRREKNKLKIN

SEQ ID NO: 787214 - protein, 113 aa, Homo sapiens
MPVMKGLLAPQNTFLDTIATRFDGTHSNFILANAQVAKGFPIVYCSDGFCELAGFARTEVMQKSCSCKFLFGVETNEQLMLQIEKSLEEKTEFKGEIMFYKKNGVCFLSCSLE

SEQ ID NO: 787215 - protein, 80 aa, Homo sapiens
KISRLDAELVKYKDQIKMRGGPTKNMITQKALRVLKQKRMYEQQQDNRTQESFNMKQVNYTIQSLKDTKNTVDAMKLGAK

SEQ ID NO: 787216 - protein, 43 aa, Homo sapiens
SRSISKSRSRSRSRSKGRSRSRSKGRKSRSKSKSKPKSDRGSH

SEQ ID NO: 787217 - protein, 132 aa, Homo sapiens
VHNPWCLLWHTAGPGGWAGRAVCRSFSCCITSHGSCSILTLALQQGCAAPAHALISQRDAIKLSPSSPGCVTTSHHPGARSHRQLSGFCQHGPSLLTMLSSALGSSRRFCSVACAGAGVFTGAAEQVPTLPL

SEQ ID NO: 787218 - protein, 137 aa, Homo sapiens
MQNLNDSLVSYLDKARALEEANADLEVKIHDWYQWQRPAEIKDYSPYFKTIEDAEEQEHNGMVSADDTHGLSLWEHLKGVRLQILVHLGRTQEGREVQTYVWPWGTCHPLEPVWSLPAHPQLEFWAFSPAHRWDLVN

SEQ ID NO: 787219 - protein, 50 aa, Homo sapiens
EELWQEDPYEYICMKFDVFEDFISPTTAAQTLLFTACSKRKEVLQKTIGF

SEQ ID NO: 787220 - protein, 66 aa, Homo sapiens
SARYRQTLNYVQNTPNSEIIFNFFVEMGSPHVAGWSQTPRLKQSSCCSLPNCKDYRHEPQRSVLML

SEQ ID NO: 787221 - protein, 117 aa, Homo sapiens
MLEAILQAFPFFIALAAKDNYMVSYQQNVNSPSAHEYILAQRKTGEKYVKRTCNTSLHIHGRGRPGASFSYKIGKIAPKPAGLLRLTLFRMALNKHLAQEMPIISHLFPFMSQSQMW

SEQ ID NO: 787222 - protein, 108 aa, Homo sapiens [sequence omitted]

SEQ ID NO: 787223 - protein, 73 aa, Homo sapiens
SANRLPKEKGIKILGEQTNELFTCSACMKSRKILIPRNCILIRLKQNKKASKQVELYFLIEIYTAILKDKPEI

SEQ ID NO: 787224 - protein, 91 aa, Homo sapiens
QSQAQGMMGNSEGEMWAPWDPTLCPPQSSSPSTPSPVQQAQLRLRSSPQELERQALAKHVRAEALSSTLRLAQDEALRAKNLLLTDKMKPE

SEQ ID NO: 787225 - protein, 592 aa, Homo sapiens
MASVVVKTIWQSKEIHEAGDTPTGVESCSQLVPEAPRRVTSRAKGIPKKKKAVSFHGVEPQMSHQPMHWCLNLKRSSACTNVSLLNLAAMEPTDSTGTDSTVEDLSGQLTLAGPPASPTLPWDPDDADITEILSGVNSGLVRAKDSITSLKEKTNRVNQHVQSLQSECSVLSENLERRRQEAEELEGYCIQLKENCWKVTRSVEDAEIKTNVLKQNSALLEEKLRYLQQQLQDETPRRQEAELQEPEEKQEPEEKQEPEEKQKPEAGLSWNSLGPAATSQGCPGPPGSPDKPSRPHGLVPAGWGMGPRAGEGPYVSEQELQKLFTGIEELRREVSSLTARWHQEEGAVQEALRLLGGLGGRVDGFLGQWERAQREQAQTARDLQELRGRADELCTMVERSAVSVASLRSELEGLGPLKPILEEFGRQFQNSRRGPDLSMNLDRSHQGNCARCASQGSQLSTESLQQLLDRALTSLVDEVKQRGLTPACPSCQRLHKKILELERQALAKHVRAEALSSTLRLAQDEALRAKNLLLTDKMKPEEKMATLDHLHLKMCSLHDHLSNLPLEGSTGTMGGGSSAGTPPKQGGSAPEQ

SEQ ID NO: 787226 - protein, 541 aa, Homo sapiens
MASVVVKTIWQSKEIHEAGDTPTGVESCSQLVPEAPRRVTSRAKGIPKKKKAVSFHGVEPQMSHQPMHWCLNLKRSSACTNVSLLNLAAMEPTDSTGTDSTVEDLSGQLTLAGPPASPTLPWDPDDADITEILSGVNSGLVRAKDSITSLKEKTNRVNQHVQSLQSECSVLSENLERRRQEAEELEGYCIQLKENCWKVTRSVEDAEIKTNVLKQNSALLEEKLRYLQQQLQDETPRRQEAELQEPEEKQEPEEKQEPEEKQKPEAGLSWNSLGPAATSQGCPGPPGSPDKPSRPHGLVPAGWGMGPRAGEGPYVSEQELQKLFTGIEELRREVSSLTARWHQEEGAVQEALRLLGGLGGRVDGFLGQWERAQREQAQTARDLQELRGRADELCTMVERSAVSVASLRSELEGLGPLKPILEEFGRQFQNSRRGPDLSMNLDRSHQGNCARCASQGSQLSTESLQQLLDRALTSLVDEVKQRGLTPACPSCQRLHKKILELERQALAKHVRAEALSSTLRLAQDEALRAKNLLLTDKMKPE

SEQ ID NO: 787227 - protein, 138 aa, Homo sapiens
KIHYFSVSLDIFCYNRESCVDRLMASVVAISVSLDCCNKLQQTGWINTTEMYFLTVLESRSLHQGASRAMFLLRTLRENLSSPHPGVVAPSGPWCSLACSFITPISDSFVTCVSSMSWPVSTQARSVSAVQKPRQLSM

SEQ ID NO: 787228 - protein, 140 aa, Homo sapiens
LSLTLSPRLDFSGTISAHCKLHLLGSSDSPASASRVTGITGACHHAWLIFVFLVETRFYRVGQAGLELLTSGDPPTLASQRAGIAGVSHRVWPYTSLLKPALPFPYAIEALGRGGGGNGTGIHHLILVPSLTCLLFINAY

SEQ ID NO: 787229 - protein, 92 aa, Homo sapiens
IDILQEKEYVVDKPNGEISLKAWTYSSTTTTWKWLRSSWKPDSEASEVISILVALKTTDIHELGRVCNIKRYGLRRGPRGTWTLFHGAESEK

SEQ ID NO: 787230 - protein, 118 aa, Homo sapiens
LGTLQQTTAEALDFPVFFSQYFPSIMKEITGFSLLHSPHSTAKSCSFYFLNMPNPNTYMIFNYTQISWPFMVQSCFWHKTEGVAWPCLPLQPHLLTPPREGFISKALFTCGAGSLLGR

SEQ ID NO: 787231 - protein, 76 aa, Homo sapiens
PVCPGSVCALQGEKQELFGTLVMGNGAPLTAAPQTGSSLQASAQNPCAMPQETQCSPPAHATVGRENYYEALCLLI

SEQ ID NO: 787232 - protein, 81 aa, Homo sapiens
PGCTSCERAGQAVGRRGKRLLTPWLQQGEAAAASAEERRWERRAQAWNLPKAGLELLTSGDPPTMASQSARITGVSHRTWL

SEQ ID NO: 787233 - protein, 81 aa, Homo sapiens
TFSRHSTFSPVPYFPPGIAVSHLVALWVIRPPDTAVLVFRQLSFHLIMAQNTTVVRYYFLIVEPPVTETMESENKDKDGLP

SEQ ID NO: 787234 - protein, 32 aa, Homo sapiens
HHHITKGSCTTVPFTQCAMSSPQENNYSTLNG

SEQ ID NO: 787235 - protein, 70 aa, Homo sapiens
MRGRGPHNPKIKMPPESFPGGKRCSPKHSFLPSFNKRVQGHGSSNPSPIPLPLQNVKAQTTSVTSNTAFL

SEQ ID NO: 787236 - protein, 105 aa, Homo sapiens
RRWPLLLTALTFLDDWGQGLPGYFRVSSRASPVMHLWIGLVNVAVAREWTTDMSTAGATWWLVLGCWFLELLRGPVGPFEVGSQPLPFRFPQGCVRNRRTCSLVY

SEQ ID NO: 787237 - protein, 103 aa, Homo sapiens
MAESSAYASRRMDASNIAFICASSYEHRARPILRSHFSTQKPETSVIILLSCEYSNERFIGLCRSHEAKYHSEGPLVNYKTYIIRIPYIGTDLVAMNAEEATQ

SEQ ID NO: 787238 - protein, 67 aa, Homo sapiens
INPLIKLINRSFIDLPNPIQHLRYDETSAHSLGLPDPPNHHRAIPSHALLTRRLNRLFINRATSLET

SEQ ID NO: 787239 - protein, 52 aa, Homo sapiens
LPGEPGSTRLSKEGGTRPRPDTEQVKLPVLGDGGTAPASNACSSARDIRRDP

SEQ ID NO: 787240 - protein, 76 aa, Homo sapiens
WAGKSDRVLCRRDQHGRTCSGCGHREVTPSPRDSGSHTGWSEAEQWKDRWVGSGDHGNSRRDPSPWFMGRTRTPLS

SEQ ID NO: 787241 - protein, 113 aa, Homo sapiens
SLCEAEDRYRTELAQMQSLINNVEEQLSEIRADLERQNQEYQVLLDVKARLQNEIATYRNLLESEDCKYVPCCLCQHRVQKQITSLGNDLKGALEARWGWHCRSHLWRQTCYH

SEQ ID NO: 787242 - protein, 75 aa, Homo sapiens
SLCEAEDRYRTELAQMQSLINNVEEQLSEIRADLERQNQEYQVLLDVKARLQNEIATYRNLLESEDCKNGRWTRT

SEQ ID NO: 787243 - protein, 46 aa, Homo sapiens
MQPQARSTKDCWQPPEARRRHRRTLPERLQRERGLADSWIVDFQPP

SEQ ID NO: 787244 - protein, 104 aa, Homo sapiens
MGVGSPHSAPIATLTASAGALSSQHLHSSLFPDLAGTQCNVKAGVRAHPAPACPHIHTVHTITHTHPHTCIQFIPSHTPAHIHTVHTITHTPAHMHTVHTVSHT

SEQ ID NO: 787245 - protein, 94 aa, Homo sapiens
IRSQGFVDCGWGGLRGLESRRSLSSGIFYMKECPPHVLKLLCRTVGSQWSPVPCQLAQACPLVSDDPSLKVSLSFDGHLCLGGYTALVKPRQPC

SEQ ID NO: 787246 - protein, 180 aa, Homo sapiens
MHARPQSCELADLEKPLSALSARLPGASVIGKVRKALQEEFSAGCWVRSKGELLPHLLLGVCGGRHKDHLCLCLPLLLARSVFSLTRNTELDNLCLGLSIRKIRLETPPLLIFPLYGSRIFVFWSSHMDLAVLIPPTLLSKKQDSLFGSPQGYGTVGPTPGTCGWLRHRFGPGTLCWNGL

SEQ ID NO: 787247 - protein, 113 aa, Homo sapiens
QVCLLYQMGGCSASTPVGRMRGCHDFQGGVRTCLPGLCREGFGVEIGRPRNRGVSGASAGGQAQMRMEAAQCHSVCTGNGGSQGQGSAWCQLCDPGHAAEPLWAPVPLFVQRE

SEQ ID NO: 787248 - protein, 118 aa, Homo sapiens
QASAGLYVDRLIVLCMVSEGTATKFSVWGASAALEGVRLKPTRKFAYLGRLAHEVGWKYQAVTATLEEKRKEKAKIHYRKKKMIRIIFFFRLPAVGPGGAAARVVFQQGPPGGAAASA

SEQ ID NO: 787249 - protein, 83 aa, Homo sapiens
ECSEPFHPPITFVPRPHLPQFFLKLSSSEIQNCRPQNHSFSQSGSLHSRKVAPCNLAEQESGSMGLLWSCRLKRAPAAEADPS

SEQ ID NO: 787250 - protein, 79 aa, Homo sapiens
KRQPQHLAEEAFLWNERKYGSKGSPCIPISSPLTTHLLPLGPPPNTLSLQTSVCSKVATRILKLPLYNKTKLLQLVATI

SEQ ID NO: 787251 - protein, 39 aa, Homo sapiens
MQGAEDRLLSKEEREEATEMEKGPGQVSGEMVRAWRGGA

SEQ ID NO: 787252 - protein, 158 aa, Homo sapiens
GRSDGFERSLQEAESVFEESLHLEQKGDCAAALALCNEAISKLRLALHGASCSTHSRALVDKKLQISIRKARSLQDRMQQQQSPQQPSQPSACLPTQAGTLSQPTSEQPIPLQVLLSQEAQLESGMDTEFGASSFFHSPASCHESHSSLSPESSAPQH

SEQ ID NO: 787253 - protein, 429 aa, Homo sapiens
METQFRRGGLGCSPASIKRKKKREDSGDFGLQVSTMFSEDDFQSTERAPYGPQLQWSQDLPRVQVFREQANLEDRSPRRTQRITGGEQVLWGPITQIFPTVRPADLTRVIMPLEQRSQHCKPEEGLQAQEEDLGLVGAQALQAEEQEAAFFSSTLNVGTLEELPAAESPSPPQSPQEESFSPTAMDAIFGSLSDEGSGSQEKEGPSTSPDLIDPESFSQDILHDKIIDLVHLLLRKYRVKGLITKAEMLGSVIKNYEDYFPEIFREASVCMQLLFGIDVKEVDPTSHSYVLVTSLNLSYDGIQCNEQSMPKSGLLIIVLGVIFMEGNCIPEEVMWEVLSIMGVYAGREHFLFGEPKRLLTQNWVQEKYLVYRQVPGTDPACYEFLWGPRAHAETSKMKVLEYIANANGRDPTSYPSLYEDALREEGEGV

SEQ ID NO: 787254 - protein, 200 aa, Homo sapiens
ICSLFYTMESLRELHIFDNDLNGISERILSKALEHSSCKLRTLKLSYVSTASGFEDLLKALARNRSLTYLSINCTSISLNMFSLLHDILHEPTCQISHLSLMKCDLRASECEEIASLLISGGSLRKLTLSSNPLRSDGMNILCDALLHPNCTLISLVLVFCCLTENCCSALGRVLLFSPTLRQLDLCVNRLKNYGVLHVT

SEQ ID NO: 787255 - protein, 189 aa, Homo sapiens
LYCLDYCCHLRTLKLSVQRIFQNKEPLIRPTARLSYVSTASGFEDLLKALARNRSLTYLSINCTSISLNMFSLLHDILHEPTCQISHLSLMKCDLRASECEEIASLLISGGSLRKLTLSSNPLRSDGMNILCDALLHPNCTLISLVLVFCCLTENCCSALGRVLLFSPTLRQLDLCVNRLKNYGVLHVT

SEQ ID NO: 787256 - protein, 176 aa, Homo sapiens
MPTLLTQVTTGMPTLFTRVPIGMATLLTQVPIGMPTLLTRVPIGMATLLTQVPTGMPTLLTQVTIGMPTLLTKVPIGMPTLLTQVPIGMPTWLTQVPIAMPMLLAQVPTAMPTLLTQVTTGMPTLLTQVPIAMPTLLTQVTTGMPTMLTEVSLLECPHCSLKSLLECPHCSIKSIM

SEQ ID NO: 787257 - protein, 97 aa, Homo sapiens
IELGPPYRWPMKDGKVGALAACRSPARLRKLRIMAEGKQAVCRCLEKEEESEGEVLCTFKRPDLRRTHYHQNSKGDIRSHDPIISHQAPPTLGIIIR

SEQ ID NO: 787258 - protein, 209 aa, Homo sapiens
MGSVSNQQFAGGCAKAAEEAPEEAPEDAARAADEPQLLHGAGICKWFNVRMGFGFLSMTARAGVALDPPVDVFVHQSKLHMEGFRSLKEGEAVEFTFKKSAKGLESIRVTGPGGVFCIGSERRPKGKSMQKRRSKGDRCYNCGGLDHHAKECKLPPQPKKCHFCQSISHMVASCPLKAQQGPSAQGKPTYFREEEEEIHSPTLLPEAQN

SEQ ID NO: 787259 - protein, 115 aa, Homo sapiens
GLGTRLGVGLESIRVTGPGGVFCIGSERRPKGKSMQKRRSKGDRCYNCGGLDHHAKECKLPPQPKKCHFCQSISHMVASCPLKAQQGPSAQGKPTYFREEEEEIHSPTLLPEAQN

SEQ ID NO: 787260 - protein, 197 aa, Homo sapiens
  misc_feature (172)..(172): Xaa can be any naturally occurring amino acid
  misc_feature (183)..(183): Xaa can be any naturally occurring amino acid
  misc_feature (188)..(188): Xaa can be any naturally occurring amino acid
MGSVSNQQFAGGCAKAAEEAPEEAPEDAARAADEPQLLHGAGICKWFNVRMGFGFLSMTARAGVALDPPVDVFVHQSKLHMEGFRSLKEGEAVEFTFKKSAKGLESIRVTGPGGVFCIGSERRPKGKSMQKRRSKGDRCYNCGGLDHHAKECKLPPQPKKCHFCQSISHMVXPPLFRLEKGPXPRGPXLAPTGEKAH

SEQ ID NO: 787261 - protein, 209 aa, Homo sapiens; identical to SEQ ID NO: 787258

SEQ ID NO: 787262 - protein, 91 aa, Homo sapiens
RRIYCGLGLLQMIESIGGLLGPPLSGYLRDVTGNYTASFVVAGAFLLSGSGILLTLPHFFCFSTTTSGPQDLVTEALDTKVPLPKEGLEED

SEQ ID NO: 787263 - protein, 77 aa, Homo sapiens
ERCAGSVACRNTHNLCGPGKEQGTVHEKCHRLNRNGTSSALFSSWIGNEGAINLEVRKMNLESLNPALTGRQLRECQ

SEQ ID NO: 787264 - protein, 281 aa, Homo sapiens
GAGAGRSPAARQVAPPGGPSSLARTHSRRHPDHAPPPGRPSCSRPLCAGSSCLATPEPARAPSIAEPGPGIPVAAIKPVILPGGGGCTGARTENPPLSPTRGDCRVPVPAAQISLRWRSGREARPGGPQAGRAGDPKADQAMHLQPAWAPKLQPPSVCRQQPPGNSRARPHSPHLGTRARCPCGCGEARRSALQQLHGGGNRPSAPSRVAVEDPWLEVSSSGRGGPGRGQGLAGSQARGTRDPEAAQAMLHHLGAQLQAPGNFQAGWRAQPRRTGARCRRD

SEQ ID NO: 787265 - protein, 113 aa, Homo sapiens
YWHLLDRSQGGQDGNKHPTESWAQWRAPVIPATQEAKARGLCEAVVSYDCICKQLLHSGLGNIVRPCLLNKRKHPTVHRPPPTRSQNVCHATACQGWETRAKGAHFCIWFLQG

SEQ ID NO: 787266 - protein, 106 aa, Homo sapiens
MFQGRETLSTGSFQGDAFPWKPDWTPGLQRRWRGWASPKEILGNFQDFQEPRGLERSHTRPAPGRPGQRDWRGLSWRPSAIARRRPRAPGPWAPSLRGTHPGAASQ

SEQ ID NO: 787267 - protein, 228 aa, Homo sapiens
QYFKNHNVTTIIRLNKRIHDAKRFTDAGFDHHDLFFADGSTPTDAIVKRFLDICENAEGAIAVHCKAGLGRTGTLIACYIMKHYRMTAAETIAWVRICRPGLVIGPPQQFLVMKQTSLWLEGDYFRQKLKGQENGQHRAAFSKLLSGVDDISINGVENQDQQEPKPYGDDDEINGVTQGDRSRALKRQRQSKTNDILLPSPLAVLTFTLCSVVIWWIVCDYILPILLS

SEQ ID NO: 787268 - protein, 33 aa, Homo sapiens
MVGSKESEDPKPRPQKEEERTVNMELGQQGPGC

SEQ ID NO: 787269 - protein, 104 aa, Homo sapiens
DIDEHVDTHHTHLYICTMPSHIHICAYTHIHIYHTLTHITHNTCIHAHIHTHITPCLHTYYTLAYTTHTYTQHVHTRCTHIVPYFPFNWPQYEPSLFIHSANVP

SEQ ID NO: 787270 - protein, 67 aa, Homo sapiens
GIATDSLIYRYTQTQILISDTISSRKVAKLPNSASSSGTSLAVPDFRKFLMMNPWLLASFFPHHSPG

SEQ ID NO: 787271 - protein, 38 aa, Homo sapiens
MSISSEQQQEQDTRENLRMLLQGTFPEHLFSNVLVLGM

SEQ ID NO: 787272 - protein, 67 aa, Homo sapiens
TILRVPTWPLFTGLRQSDVTSLTFAGLAVARCRILKGSHHQLSCEADSHHQETPKWGELGSWLTQVL

SEQ ID NO: 787273 - protein, 160 aa, Homo sapiens
MCLKRQGSGCMRSRLSEEDEYGRDKEDFPVIEERLPSQGLWFWSSSSRVVFPVSGSTLNIGRTSEWWPKVPRLPALPKLPFNQLGEEGEGAEAVGFSVVIQGEPMFYNNIRGTSLCLGPVSYLRTMAQLPVGRGKRNPCESLRLNFSPTQQDGSSELKSS

SEQ ID NO: 787274 - protein, 257 aa, Homo sapiens
MYMLYMCDLHIYARAGISAYLHAVHFSVTVPRKGGSLILCFLLLLTWAFAHSDVQLCNSKPAVLQLLCFPYSLNKAGLQISVEFCEHAGLRKVRRRALVERLLELAVCRGSGRVAERVASGFQRCLVDLPAEGPQTLCLPRVHGPSLSLSLSQFWARAPHGSGPAGTVFSQDAPSPRPGSSMTPHADSNRGFEPLPAGVPRMVQAEARALLVAPCGPRRSVSFLALQRGVKHKAPVQAAQSSDGPLLKDLLRRPRRS

SEQ ID NO: 787275 - protein, 121 aa, Homo sapiens
DAAKFVIQAPGCLALAAPHSPALPLPHCSRPHQPLGPRSLGCWEGGLRGLHWEAQLQASPHILALSGWWGDKERASLGLRMKEDFSPSGLTLRWALPGAGDRCPLHPLHGHRNTTFHLQPC

SEQ ID NO: 787276 - protein, 116 aa, Homo sapiens
RYGGGRKGWNTASFSGWGVSPSHGRKEQSHIKQSRAEALSRNPLPQSHPQPWAQIVGPGLSSAGHSHPGARRACVGVSSPGWGALRADTKSSAPSYLLHHSVGRHYPLPITARRLS

SEQ ID NO: 787277 - protein, 79 aa, Homo sapiens
MGALEDPLSPHWDGIRKVWQRRKCSVKNGILTIYMPHALAELPVACWPLCMTLNASQKEMLNCSNAPKASFSEEPSVLL

SEQ ID NO: 787278 - protein, 124 aa, Homo sapiens
ELTEMCTSPVTFQDSRQVSTENRRAKTLSHSEFSQEKPSPATDELILQTYMETTYHACESAPTTNSQVHGCEFRIMERLSKREHERNTFKMTKIRRAQWLMPLIPALWEAEAGGFLELRSSRPA

SEQ ID NO: 787279 - protein, 104 aa, Homo sapiens [sequence omitted]

SEQ ID NO: 787280 - protein, 36 aa, Homo sapiens
MTAQRGGCNTSLSPETQSFAPYKNLSFMTSQHLVLA

SEQ ID NO: 787281 - protein, 110 aa, Homo sapiens
WGQGLTLSPRLECSGVIITHCSLDLLGSKDPPASAQEFETSLGDTVRPCQEKKRKKKRKEKRERKKRRKEGRKKGRKEKQNKKKGKKEKKEGKEGRKERERERKEGKERK

SEQ ID NO: 787282 - protein, 129 aa, Homo sapiens
WTQELALPPAVPTPAHLQPRWPPATQLSLHLAMLTPTQAAGALFCGLGQPPHSFQGSSSGPQPNVASPRDTSPNHSSKVDPSPLQVTSPCFVCSMARRGNVFSCLPLVSLCVNINPVTERSLSARTGTQ

SEQ ID NO: 787283 - protein, 74 aa, Homo sapiens
LDSAATPNPGPGKNHPRLRGSCQSGGHSPTPPAQGFFPAALIMKSTCTQVVSGNFLMKVSATVVCRWLSSDCSC

SEQ ID NO: 787284 - protein, 250 aa, Homo sapiens
RLSRELLDEKGPEVLQDSLDRCYSTPSGCLELCDSCQPYRSAFYVLEQQHVGLAVDMDEIEKYQEVEEDQDPSCPRLSRELLDEKEPEVLQDSLDRCYSTPSGYLELPDLGQPYSSAVYSLEEQYLGLALDVDKIEKKGKGKKRRGRRSKKERRRGRKEGEEDQNPPCPRLNGVLMEVEEREVLQDSLDRCYSTPSMYFELPDSFQHYRSVFYSFEEQHISFALYVDNRFFTLTVTSLHLVFQMGVIFPQ

SEQ ID NO: 787285 - protein, 121 aa, Homo sapiens
FIVSMVVTIWYVFPVAHTVCPFPCLVLPSGALVRQECGFISCKANMWIYIWVLYSMASTPRVITFKNAIQISIKHLQPRERLMALESLFIGLFCVFLRYGLCLSSRQKWSGLVIIHCSHEL

SEQ ID NO: 787286 - protein, 147 aa, Homo sapiens
DGVPFSVHVARSYTVLTKSLNLDHFTKEGMNLSILQAQFKKQRQKSTPANLYGVLIIDLACQGPSEWSWGGCGRGVKSQPSGGGHPRSPLSTIRALADPRACQEKQMGHGKSEGPLGCPDCPRSPHFCIFVHFVQVALNVVPSSWEL

SEQ ID NO: 787287 - protein, 102 aa, Homo sapiens
FCLFDSIAETLKAFYISLSVSLISRGCDCFLFILSISQKMFPFISCIMFLISLTWTSPFSGASLISLIIGLLNSFSGNSEILSGKDTLFNKWCWDNCKPHAK

SEQ ID NO: 787288 - protein, 48 aa, Homo sapiens
YKKLISPATYAKQFYLCPLLGAGRIFNSILCARAKAAALHNSRGRHSN

SEQ ID NO: 787289 - protein, 113 aa, Homo sapiens
MILWPGFKKPTYQSELKNIERICLLLKDRKKVEYSQAMFMGNTREDPRMALKASPCFHECHSRNYMSHLVCHMYFQNNTHPLLCVYLIELLFLPTRKSLTKIAMLKTSTEFVK

SEQ ID NO: 787290 - protein, 119 aa, Homo sapiens
RLSLALSPRLECSGTISAHCNLRLPDSSDSPASASRVPGIIGACRNSWLIFVLLVETGFHHVGQAGLELLTSSDPSTSASQSGGITEVSHSALPLSYLILDKNPCNWIHQHTCLSFAIL

SEQ ID NO: 787291 - protein, 386 aa, Homo sapiens
VERHKIILKCIWKAIPKKKSRGIALPDVENRTATAQRYTAPGRQPVLLQRGGDKAGSSSLPSRGHPMAPGHGAAAVLMARGNVGTGFPHPTVLCVSPEPGDFTHLTSLVFSAMPSVQTRLERCVGVPRVTQLPGGQAEVKKLVLVGAKAPDVGSSATRPAQAGGVRGEALGPAVLKSGLSRLSGRSVEGVCWWPGGGGRLTTCHFPAVPRPRRGSSPRSGPSCRTPHPHGPWFPLSVPPQMGSQHNFPRGLLFLSPHTALLGSGACSTPRTGGLGFREAGAWSCVQLGAWRLQIRAWNIHASPSPAAAASHLEQGGASPRKASGSRGVSENAGRSALTMAADATAPASVPRPLSSLVKSVLGKERSKTDVGLALWGQGTGRNPTWG

SEQ ID NO: 787292 - protein, 103 aa, Homo sapiens
SVPLESMCRNVNLPSAAVEFCGEPPEYSLLAVVILLEVNHVYLHSLTSLLGDSVSLGTLPKPTSRGKSESWAAVTPCRHGQPPRRHVRVAGALEHLDLACFHA

SEQ ID NO: 787293 - protein, 103 aa, Homo sapiens
FSHQDSLACFSLYAGRTGPSCLSPAVRPVGQVEPTGTLPGEQRASPGCRPGNPCFGQALSHTCLGSREGWFPEKMKPLARQPWLSGLECMGNGKSGPNPQCFS

SEQ ID NO: 787294 - protein, 143 aa, Homo sapiens
GVVPLLEKSCLRIQVWGAGEDVQFSSKRARQERVQDKPEGQDKPRVHRGLSWGGREGQKTPHLLCLRLQLGQGPQQPVVRRTLEGMAWGRGAAHSTQRGLHVPRGLHICAHACVLSGKLCSPAKITILWREDVAYCQEQILLD

SEQ ID NO: 787295 - protein, 138 aa, Homo sapiens
NSWLAGPGQWLDKVCWSLGHRKNLCLRGFIENYHFLCHYLLFIILCDLLVFDSLCIFDSFVILPFDLALVFTLISSVSSTPQCRLPAPLPGLPQCPHLHPCLQSCSLLLPDSPPSMSTCFGTLPFPSCSELLLCISSA

SEQ ID NO: 787296 - protein, 49 aa, Homo sapiens
SNTTFTTSSTTITTTTSVTSTTSTTSNTTFTTSSTTITTTTSVTSTTST

SEQ ID NO: 787297 - protein, 55 aa, Homo sapiens
MCRNLITFLRETFLNRYVPFDAAVDFHRWIAMAAVVLAILHSAATQSMSTSSQSA

SEQ ID NO: 787298 - protein, 101 aa, Homo sapiens
LQSFLPGCEACSECWNSSTWPLFFVLREQKGNVQSNLWCRPSMAENSSTPISGLAMKECRLLHKKSIFQTYLSETCVQIPALSIMRMALNKHSFAELFPWL

SEQ ID NO: 787299 - protein, 48 aa, Homo sapiens
CSPGGSRNPISYGVHFKEKGSLAEPAVRGELHVTKFLLPRHCPGGNGV

SEQ ID NO: 787300 - protein, 185 aa, Homo sapiens
MQDPRHPQGLPLSPGLPKRQRQDRTIYNWKQQEVLENHFKEEQYPDYDTRQELAEMLNLREYQVQVWFKNRRAKRSRERWFQKQLQQLQKHPQQQHPQQQHPQQQLQQQQPQQQPQQQQPQQQPQQQQPQQQQPTSSPSSSSSSSSSSPSSSNSSSSSSSSSPSSSSSSSSSSPSSSSSSPSSSS

SEQ ID NO: 787301 - protein, 185 aa, Homo sapiens; identical to SEQ ID NO: 787300

SEQ ID NO: 787302 - protein, 185 aa, Homo sapiens
MQDPRHPQGLPLSPGLPKRQRQDRTIYNWKQQEVLENHFKEEQYPDYDTRQELAEMLNLREYQVQVWFKNRRAKRSRERWFQKQLQQLQKHPQQQHPQQQHPQQQLQQQQPQQQPSSSSPSSSHSSSSPSSSSSTSSPSSSSSSSSSSPSSSNSSSSSSSSSPSSSSSSSSSSPSSSSSSPSSSS

SEQ ID NO: 787303 - protein, 129 aa, Homo sapiens
LPILIFKVCLLLFSSSLLLFKLLLTLDQVSIKASFLLDSSYYNSCVSEPLCPLCTLGAFIYTDVCVPQSSKDYTDVEPRLRTAMLVGLFSIKQSRNLQQCFWFLVYLFNCKKPLKRYLVTKNTNNNKIK

SEQ ID NO: 787304 - protein, 34 aa, Homo sapiens
RRGPPSFRPQNDSSTDSLYCTPGKAADIQCQPVK

SEQ ID NO: 787305 - protein, 64 aa, Homo sapiens
RYHSGRVRHVNEEAREMLQFQLPSDCNITGHPACPPAWWVILAWILHNGDHTFHLILSEFSRPL

SEQ ID NO: 787306 - protein, 117 aa, Homo sapiens
STHIHIWHRPNNSHCIIRGFYSPLSRNLSSLFAGQKDPISLRCGSSEYALPISVYTYVQGIKGRHGLFQNALKNCLNLSPSLNLPISLTGTIIFTTITETPEGLWVVLFCSLTYPST

SEQ ID NO: 787307 - protein, 122 aa, Homo sapiens
KNEFHPPSCAASLLNVSCLAQHLLPIRAVLGLGLLDEGIKRGLSAEVPPIYGWRSLWGGAVLHTSGCWGVSLGSTHQRPGAATSVMKSRNVSIHNQVFLQGGRAKFSPLVNHCDRQTTDRER

SEQ ID NO: 787308 - protein, 40 aa, Homo sapiens
KTFARNSVLVIHKAVHTAEKPYKCNECGKVFKQRATLAGH

SEQ ID NO: 787309 - protein, 114 aa, Homo sapiens
HSLPQRVLSALLAHGFIVTVTSKKAAGQIMLDSDVATNSAHTPTSTITLFCNFKPLWLRSVPLWAHLSVHVWSYQMAQHRVTIPNRPQSISKEGGLTSTLKLADGRQPRHTNTN

SEQ ID NO: 787310 - protein, 129 aa, Homo sapiens
TVFHRTGPWCQKGWGPLGYIITCICQNSWNCTPKRVNFTVYKLCLNHSGLEKQNRPGILAHACNPSTLGGQSRRNTRSGVRDQPGQHGETPSLLKLQKISWAWWHARVVSAAWGAEAGELLEPGRQRLQ

SEQ ID NO: 787311 - protein, 80 aa, Homo sapiens
MFTRESHYNTDYFGGYDISELNIQLDETQPKARGSRPLCYTCSNWHSCELHVELWEERDPLEAYLELCRKKRSHQHKKGL

SEQ ID NO: 787312 - protein, 111 aa, Homo sapiens
RQGLALSLRLECNGMTMAHHSLNLPDSNDPPTVASQVARTTGACYHTKLISFLKKVFVEMESPYVAQAGLELLGSSDPPALASQTAGIIGVSHCTQPHAVIAINCFSQMLI

SEQ ID NO: 787313 - protein, 232 aa, Homo sapiens
MEPPGDWGPPPWRSTPKTDVLRLVLYLTFLGAPCYAPALPSCKEDEYPVGSECCPKCSPGYRVKEACGELTGTVCEPCPPGTYIAHLNGLSKCLQCQMCDPAMGLRASRNCSRTENAVCGCSPGHFCIVQDGDHCAACRAYATSSPGQRVQKGGTESQDTLCQNCPPGTFSPNGTLEECQHQTKCSWLVTKAGAGTSSSHWVWWFLSGSLVIVIVCSTVGLIICVNKKKAKG

SEQ ID NO: 787314 - protein, 232 aa, Homo sapiens; identical to SEQ ID NO: 787313

SEQ ID NO: 787315 - protein, 203 aa, Homo sapiens
MEPPGDWGPPPWRSTPKTDVLRLVLYLTFLGAPCYAPALPSCKEDEYPVGSECCPKCSPGYRVKEACGELTGTVCEPCPPGTYIAHLNGLSKCLQCQMCDPAMGLRASRNCSRTENAVCGCSPGHFCIVQDGDHCAACRAYATSSPGQRVQKGGTESQDTLCQNCPPGTFSPNGTLEECQHQTKCSWLVTNARSWDKQSHWYG

SEQ ID NO: 787316 - protein, 141 aa, Homo sapiens
FGRTPSNADPGPLTDLRLQSFLGGAGVPQRSLGWSRDGCPREGAVGPSILLCPPRPLAPAQSCPSPALTIFVPTLALPLPSVLVCHWSPVLWGLCTAGCLPLLSPLPLPSCLLCPVSPCFSSPPSFSPPPHSRAWKSQTDL

SEQ ID NO: 787317 - protein, 69 aa, Homo sapiens
DSTDISSSRGTSPGSVMWPYNKPALCYGVCTHVSALDKSVFLPLLQCFSGNDVTLGLKEKKQTPLVGDY

SEQ ID NO: 787318 - protein, 137 aa, Homo sapiens
TPVKMYILYPRGGESPTSREKCFLPFIVNTLAWIDLATLQSESHKAFKKVRHRMGVFTSPGTCLGLWPDQRWGSDRTERGPGARSIPRRGRRVICCLRYLAKDQPCPVSFPLGTGSTCSLPETPWGLWPLSGLLQRP

SEQ ID NO: 787319 - protein, 32 aa, Homo sapiens
SATHRLTEELSDAGPFLPPLIEFCNTENPVHS

SEQ ID NO: 787320 - protein, 583 aa, Homo sapiens
LPDWRLVFLVKNFPVGQRVLVDSSFGQPTTQGEARREEATRQGELPLVKEVLLVALGSRQSRPYLLVHVDQELLIYEAFPHDSQLRPGNLKVRFKKVPHNINFREKKPKPSKKKAEGGGAEEGAGARGRVARFRYFEDIYGYSGVFICGPSPHWLLVTGRGALRLHPMAIDGPVDSFAPFHNVNCPRGFLYFNRQGELRISVLPAYLSYDAPWPVRKIPLRCTAHYVAYHVESKVYAVATSTNTPCARIPRMTGEEKEFETIERDERYIHPQQEAFSIQLISPVSWEAIPNARIELQEWEHVTCMKTVSLRSEETVSGLKGYVAAGTCLMQGEEVTCRGRILIMDVIEVVPEPGQPLTKNKFKVLYEKEQKGPVTALCHCNGHLVSAIGQKIFLWSLRASELTGMAFIDTQLYIHQMISVKNFILAADVMKSISLLRYQEESKTLSLVSRDAKPLEVYSVDFMVDNAQLGFLVSDRDRNLMVYMYLPEAKESFGGMRLLRRADFHVGAHVNTFWRTPCRGATEGLSKKSVVWENKHITWFATLDGGIGLLLPMQEKTYRRVLMLQNALTNHAATTTLVLTFLP

SEQ ID NO: 787321 - protein, 449 aa, Homo sapiens
  misc_feature (413)..(413): Xaa can be any naturally occurring amino acid
PPPRNSPVPLTTEPPPQGELRISVLPAYLSYDAPWPVRKIPLRCTAHYVAYHVESKVYAVATSTNTPCARIPRMTGEEKEFETIERDERYIHPQQEAFSIQLISPVSWEAIPNARIELQEWEHVTCMKTVSLRSEETVSGLKGYVAAGTCLMQGEEVTCRGRILIMDVIEVVPEPGQPLTKNKFKVLYEKEQKGPVTALCHCNGHLVSAIGQKIFLWSLRASELTGMAFIDTQLYIHQMISVKNFILAADVMKSISLLRYQEESKTLSLVSRDAKPLEVYSVDFMVDNAQLGFLVSDRDRNLMVYMYLPEAKESFGGMRLLRRADFHVGAHVNTFWRTPCRGATEGLSKKSVVWENKHITWFATLDGGIGLLLPMQEKTYRRVLMLQNALTNHAATTSRAQPPAFGMLDVGPXTFRMRVAVLDGSCHRYCTEHHERRYKNGQQIIWNVK

SEQ ID NO: 787322 - protein, 627 aa, Homo sapiens
  misc_feature (591)..(591): Xaa can be any naturally occurring amino acid
LPDWRLVFLVKNFPVGQRVLVDSSFGQPTTQGEARREEATRQGELPLVKEVLLVALGSRQSRPYLLVHVDQELLIYEAFPHDSQLRPGNLKVRFKKVPHNINFREKKPKPSKKKAEGGGAEEGAGARGRVARFRYFEDIYGYSGVFICGPSPHWLLVTGRGALRLHPMAIDGPVDSFAPFHNVNCPRGFLYFNRQGELRISVLPAYLSYDAPWPVRKIPLRCTAHYVAYHVESKVYAVATSTNTPCARIPRMTGEEKEFETIERDERYIHPQQEAFSIQLISPVSWEAIPNARIELQEWEHVTCMKTVSLRSEETVSGLKGYVAAGTCLMQGEEVTCRGRILIMDVIEVVPEPGQPLTKNKFKVLYEKEQKGPVTALCHCNGHLVSAIGQKIFLWSLRASELTGMAFIDTQLYIHQMISVKNFILAADVMKSISLLRYQEESKTLSLVSRDAKPLEVYSVDFMVDNAQLGFLVSDRDRNLMVYMYLPEAKESFGGMRLLRRADFHVGAHVNTFWRTPCRGATEGLSKKSVVWENKHITWFATLDGGIGLLLPMQEKTYRRVLMLQNALTNHAATTSRAQPPAFGMLDVGPXTFRMRVAVLDGSCHRSCTEHHERRYKNGQQIIWNVK

SEQ ID NO: 787323 - protein, 505 aa, Homo sapiens
  misc_feature (469)..(469): Xaa can be any naturally occurring amino acid
PAPAASPALASPHAHLIYGYSGVFICGPSPHWLLVTGRGALRLHPMAIDGPVDSFAPFHNVNCPRGFLYFNRQGELRISVLPAYLSYDAPWPVRKIPLRCTAHYVAYHVESKVYAVATSTNTPCARIPRMTGEEKEFETIERDERYIHPQQEAFSIQLISPVSWEAIPNARIELQEWEHVTCMKTVSLRSEETVSGLKGYVAAGTCLMQGEEVTCRGRILIMDVIEVVPEPGQPLTKNKFKVLYEKEQKGPVTALCHCNGHLVSAIGQKIFLWSLRASELTGMAFIDTQLYIHQMISVKNFILAADVMKSISLLRYQEESKTLSLVSRDAKPLEVYSVDFMVDNAQLGFLVSDRDRNLMVYMYLPEAKESFGGMRLLRRADFHVGAHVNTFWRTPCRGATEGLSKKSVVWENKHITWFATLDGGIGLLLPMQEKTYRRVLMLQNALTNHAATTSRAQPPAFGMLDVGPXTFRMRVAVLDGSCHRYCTEHHERRYKNGQQIIWNVK

SEQ ID NO: 787324 - protein, 129 aa, Homo sapiens
  misc_feature (3)..(3): Xaa can be any naturally occurring amino acid
GRXAAAPAGREACVAMGSPAAPEGALGYVREFTRHSSDVLGNLNELRLRGILTDVTLLVGGQPLRAHKAVLIACSGFFYSIFRGRAGVGVDVLSLPGGPEARGFAPLLDFMYTSRLRLSPATAPAVLAA

SEQ ID NO: 787325 - protein, 206 aa, Homo sapiens
  misc_feature (3)..(3): Xaa can be any naturally occurring amino acid
GRXAAAPAGREACVAMGSPAAPEGALGYVREFTRHSSDVLGNLNELRLRGILTDVTLLVGGQPLRAHKAVLIACRFEGGAWGGAKWERGGTTGPLRGNPKPSLSEAGGGASQNWGRGDSEEAGLFQGAGLPEAAHVSLGSPAPKGLICSLSSGFFYSIFRGRAGVGVDVLSLPGGPEARGFAPLLDFMYTSRLRLSPATAPAVLAA

SEQ ID NO: 787326 - protein, 178 aa, Homo sapiens
RERGCRRGQNEQEELGGRLRVPGLGAGSPGSSCTSEGKGKQRREGVLGLPGSRALSTASTGLCRYGFPRRPGGSAGLRPEFTRHSSDVLGNLNELRLRGILTDVTLLVGGQPLRAHKAVLIACSGFFYSIFRGRAGVGVDVLSLPGGPEARGFAPLLDFMYTSRLRLSPATAPAVLAA

SEQ ID NO: 787327 - protein, 68 aa, Homo sapiens
  misc_feature (1)..(1): Xaa can be any naturally occurring amino acid
XAAFLKAIGYLIPLMDAEYANYYTREVMLILIREFQSPDEEMKKIVLKVVKQCWAIMLSPNTPHTSIR

SEQ ID NO: 787328 - protein, 101 aa, Homo sapiens
IMVGRSAQFFLFLLNSMIIDLLLAHFFPFLFSSPTNLRSGCCLRRSRRSIPSLAASPPFAGLFGVFSGWCLHFFLSGSQFAFTVPVLPHQLPGLLLSESHR

SEQ ID NO: 787329 - protein, 135 aa, Homo sapiens
HKRLRKSKINVAIRFSQFSALRAELLLRWWVLPAAIVAPGPGCIAHLPQPCSVPVHEMEVAFSSQLCVQRPGAPGRAESIRTGGSAHSRQAPWALGGRPQGSPYLLAHQPGSTYCPVGQVRLFPQLPLWEEGPSK

SEQ ID NO: 787330 - protein, 109 aa, Homo sapiens
EISETVEKVILPPRPVLNDVSAALQKLCGEVWLSYPAGRELGPGEVNPEFPEAVQPVCSPLNPPGVISPWATMDTIVPDRKDFYSSNVVPDKTHEVGSYLAAQMSPSDQ

SEQ ID NO: 787331 - protein, 174 aa, Homo sapiens
MTVVCRALGLGRVLVGVASGLRGWPHSGLAVPVGHHTSKDMVRPAAALEVRMPLRRHSSHEGQPRALIRHENGGGGGGCGVGASSVAPQRGAAAGRRVTGEGGTEATGSSFPVPQPSPEAGAASLFCLPGTVSCYCICSFSEPPRQSLLTAEVHPGQALPSNAVATPQALPFAA

SEQ ID NO: 787332 - protein, 66 aa, Homo sapiens
KLLHSVRARFVRFVPLEWNPSGKIGMRVEVYGCSYKSDVADFDGRSSLLYRFNQKLMSTLKDVISL

SEQ ID NO: 787333 - protein, 116 aa, Homo sapiens
RAAGIRHEQLSVHLPTHVLVPTHTAHCFPASHPTTICIHLHTHTDTPHPPPKLTYVPSHMCPPMHKPPPPPTPAPSNPSPHQLTHCHPCLTHAHSHKPLPYVPPQHKHTNLPSTQT

SEQ ID NO: 787334 - protein, 255 aa, Homo sapiens
VSRCNRRGATARSSLAGSRVARVRCLLSSRMIGQKTLYSFFSPSPARKRHAPSPEPAVQGTGVAGVPEESGDAAAIPAKKAPAGQEEPGTPPSSPLSAEQLDRIQRNKAAALLRLAARNVPVGFGESWKKHLSGEFGKPYFIKLMGFVAEERKHYTVYPPPHQVFTWTQMCDIKDVKVVILGQDPYHGPNQAHGLCFSVQRPVPPPPSLENIYKELSTDIEDLFILAMEIIWVGQARCLLLNAVLTVRAHQANSH

SEQ ID NO: 787335 - protein, 254 aa, Homo sapiens
RQLLTATATARSSLAGSRVARVRCLLSSRMIGQKTLYSFFSPSPARKRHAPSPEPAVQGTGVAGVPEESGDAAAIPAKKAPAGQEEPGTPPSSPLSAEQLDRIQRNKAAALLRLAARNVPVGFGESWKKHLSGEFGKPYFIKLMGFVAEERKHYTVYPPPHQVFTWTQMCDIKDVKVVILGQDPYHGPNQAHGLCFSVQRPVPPPPSLENIYKELSTDIEDLFILAMEIIWVGQARCLLLNAVLTVRAHQANSH

SEQ ID NO: 787336 - protein, 104 aa, Homo sapiens
MLPHQVETFPKSSVLFLHPHVSKGFGLCQAAWYRQSMLNSGRNGRHVGSRQNFPSLPRRLPAWAYCTAGSGHCSGCCWLQEGPENVQPLLMLRWQSSSRKSLLH

SEQ ID NO: 787337 - protein, 213 aa, Homo sapiens
PFMRVLPNHLPETLPPNTITLGISISTYEFWRRGPMVLLGITLVATLCVGSNLTIAHCLSLEPEALPGFILQNLCGGSHTPMVYAFCTSLEMAPHVPCQGLSSVLCGGQTTMSCAAPGHTGAWVTRAKLWLKTEKKNSLFSSGSGRYSPMLSSRRLLSFQIYILIFLEFVIFLHGTKGKGQDSSLALFPKDMSIAWHHLLKRWFFSLLHCSGT

SEQ ID NO: 787338 - protein, 125 aa, Homo sapiens [sequence omitted]

SEQ ID NO: 787339 - protein, 36 aa, Homo sapiens
MEFNTLLGEFLKSGSGHSCGEESDRPRRFLAGKCFR

SEQ ID NO: 787340 - protein, 60 aa, Homo sapiens
QCGGQGQRRKPGLLSQKRRGKRVLQSRKNRIKTQHDRREALNLHQREGPWAVSQLGYCGG

SEQ ID NO: 787341 - protein, 185 aa, Homo sapiens
MRTLYIQQLKSKKKEKEMADQTCIEEFVIHALAFCESLYDPYRNWRHRISGRILSTVEKSRQKYKPASLTVEFVPFFYQCFQESEHLKESLKCCLLHLFGAIVAGGQRNALQAISPATMEVLMRVLADCDSWEDGDPEEVGRKAELTLKCLTEVVHILLSSNSDQRQVETSTILENYFKLLNSDH

SEQ ID NO: 787342 - protein, 218 aa, Homo sapiens
MVLMFQIRYISQTQGLPAEYLLSAGTKTTRFFNRDPNLGYPLWRLKTPEEHELETGIKSKEARKYIFNCLDDMAQVNMSTDLEGTDMLAEKADRREYIDLLKKMLTIDADKRITPLKTLNHQFVTMTHLLDFPHSNHVKSCFQNMEICKRRVHMYDTVSQIKSPFTTHVAPNTSTNLTMSFSNQLNTVHNQASVLASSSTAAGATLSLANSDVSLLNY

SEQ ID NO: 787343 - protein, 141 aa, Homo sapiens
MSTDLEGTDMLAEKADRREYIDLLKKMLTIDADKRITPLKTLNHQFVTMTHLLDFPHSNHVKSCFQNMEICKRRVHMYDTVSQIKSPFTTHVAPNTSTNLTMSFSNQLNTVHNQASVLASSSTAAGATLSLANSDVSLLNY

SEQ ID NO: 787344 - protein, 124 aa, Homo sapiens
WETGDIQGNEALVLPHHCAGGGVGTEVGLAGRGLQHRGRAWKGKPGARAAPRRELMETWRGGGRRVEEEPVELRPRLNTLPREECSTQRDGACRGPGSETTWLLGVTAGNSRMSLSGFWFLHLV

SEQ ID NO: 787345 - protein, 45 aa, Homo sapiens
MWLVDPGACARSVLSSFGLCLEQKQELACAVLRSLHGSESQRTQE

SEQ ID NO: 787346 - protein, 310 aa, Homo sapiens
  misc_feature (206)..(206): Xaa can be any naturally occurring amino acid
  misc_feature (223)..(223): Xaa can be any naturally occurring amino acid
RRLVLSRPPSPPTYCPQELRRRSGEHRGEEMGGRRGPNRTSYCRNPLCEPGSSGGSSGSHTSSASVTSVRSRTRSSSGTGLSSPPLATQTVVPLQHCKIPELPVQASILFELQLFFCQLIALFVHYINIYKTVWWYPPSHPPSHTSLNFHLIDFNLLMVTTIVLGRASLGAIVKEASQRGKVSLFRSILLGPTRFTELTVNRLEEXRTHNHRHRTHADPNPQXRRQPTGMNIPTLQLKSDLRKTSLLNHMAATGAPGGGQRPGKEPGTTSRHGGRRGSKHTRQLEGPDAKPTQGPQPDTQPQPQRGGAPK

SEQ ID NO: 787347 - protein, 230 aa, Homo sapiens
  misc_feature (229)..(229): Xaa can be any naturally occurring amino acid
RRLVLSRPPSPPTYCPQELRRRSGEHRGEEMGGRRGPNRTSYCRNPLCEPGSSGGSSGSHTSSASVTSVRSRTRSSSGTGLSSPPLATQTVVPLQHCKIPELPVQASILFELQLFFCQLIALFVHYINIYKTVWWYPPSHPPSHTSLVGRTNRSRSRRATSARQASPTTGPPLGPREAGSGLAKSLGPPPDTAGDVEASTQDSWMARTPSPPKARSPTHSPNRREGEPXR

SEQ ID NO: 787348 - protein, 225 aa, Homo sapiens
RRLVLSRPPSPPTYCPQELRRRSGEHRGEEMGGRRGPNRTSYCRNPLCEPGSSGGSSGSHTSSASVTSVRSRTRSSSGTGLSSPPLATQTVVPLQHCKIPELPVQASILFELQLFFCQLIALFVHYINIYKTVWWYPPSHPPSHTSLNFHLIDFNLLMVTTIVLGRASLGAIVKEASQRGKVSLFRSILLVLTRYTELTVNRLESVPDPSCTSSGPTSFLNLLFL

SEQ ID NO: 787349 - protein, 122 aa, Homo sapiens
LWVHAVGHLKADLKQNIELRQRETRAGNGTDIPMLSRGAPITCSELVTCKCPAQDQSSQLWALKSSESGGGTCCRAAASSGRWENSKQDRQKPGKDVQWRPVPRQALGGGVGTGKLGVQVWS

SEQ ID NO: 787350 - protein, 115 aa, Homo sapiens
GLPLPPLPLPLSSEGLRSPAPPAASPCSGTASSDLGRGPEPQMFLSSHIWSRRIMIPAASQGCWEDEVSLLCDAQNRATVIMPFWLLVLLLPLHLLERQDPCLDLVVRIHRVSDP

SEQ ID NO: 787351 - protein, 48 aa, Homo sapiens
RNYRCEYHEEVPYGGDHILTQLPFHLLHIQLLRKALDLKHCGSDSPAF

SEQ ID NO: 787352 - protein, 129 aa, Homo sapiens
EIQFSKAEKPTVLASDSRWRSGSKDITQQVRGHGQGRHDKHGVLDVTISLILTAGREVSIVSILSLGQRKSIVYPSLYLSYHHLKNAVVVSRAPSAGHRGLYTCSFLNYALSSLFPHLSPLSGGLMAKD

SEQ ID NO: 787353 - protein, 69 aa, Homo sapiens
SGHSTCTRFLLLHTRALCIPHPGVPLLFWRILFQAVPETLQHSILALFLPATSLLKLYCFWQLFRLFVV

SEQ ID NO: 787354 - protein, 32 aa, Homo sapiens
MKKCKVDLRLSWALLTAVMTFMQFAVNIIKVS

SEQ ID NO: 787355 - protein, 136 aa, Homo sapiens
LDASGVTRSPGLPPFPPVEELGLLRNMMDIAGLGKGVALMETTSPLRHPEGVQEGVRIALHTRDHLSYPSSHPEGVQGGVCIALHTPPWVSSCGQGVHSTLECGERRLPGPSCSMAESELVLERTHLWVVHRLQTT

SEQ ID NO: 787356 - protein, 45 aa, Homo sapiens
SAPAGITRDRWNNSGNAEWLKEPGHAPMAQPPSSTAEDLPISSLL

SEQ ID NO: 787357 - protein, 381 aa, Homo sapiens
LQRLQEQLTKDTESMTGSPLQHLLQAKQSQVLVVVNLKEVLQRLQEQLTKDTESMTGSPLQNQTACIGVLFPSAEVALLMHPAPGAVDADSAGSDSTSLVDSELSPSEDRELKSDASSDQGPASPEKVLEESSIENQDVSQERPHSNGELQDSGPLAQQLAGKGHEAVESLQAKKLSRTQASSSPAALKPPAGRETAVNGQGELIPLKNIEGELSSAIHMTKDATKEALHATMDLTKEAVSLTKDAFSLGRDRMTSTMHKMLSLPPAKEPMAKTDEGVAAPVSGGAARLRFFSMKRTVSQQSFDGVSLDSSGPEDRISVDSDGSDSFVMLLESESGPESVPPGSLSNVSDNAGVQGSPLVNNYGQGSPAANSSVSPSGEDL

SEQ ID NO: 787358 - protein, 85 aa, Homo sapiens [sequence omitted]

SEQ ID NO: 787359 - protein, 108 aa, Homo sapiens
MCVCVLNFPGMAGQTPGIYHRQQNRFTMMYACCKGRDRILLYHPAGVQWHHCSLLQPQTPGSRDPSASASWLTRTIGLQELVSKAGFSIGAGCQSRSPMACGLQCSSI

SEQ ID NO: 787360 - protein, 323 aa, Homo sapiens
  misc_feature (78)..(78): Xaa can be any naturally occurring amino acid
  misc_feature (82)..(82): Xaa can be any naturally occurring amino acid
  misc_feature (106)..(106): Xaa can be any naturally occurring amino acid
  misc_feature (115)..(115): Xaa can be any naturally occurring amino acid
QRVPGLRQQRGRRRAEAEVTKAAAAAAVSLTVAETKAAAADGERPGPGPLLVGCGRAAVGPARLPPPAAPPPAPPPGXRRGXGPARTQTAAAAAAGGVGGGWRRHXRPGLWGGMXSRDCPFEVRGSNGAFYKGFVKDVHENSVTIFFENNWQSERQIPFGDVRLPPPADYNKEITEGDEVEVYSRANEQEPCGWWLARVRMMKGDFYVIEYAACDATYNSSSISSVLKDPDSNPYSLLDTSEPEPPVDSEPGEPPPASARRRRPADATDEDRTVMDGGLESDGPNMTENGLEDESRPQRRNRSRRRVNRGNRTDGSISGDRSQ

SEQ ID NO: 787361 - protein, 252 aa, Homo sapiens
  misc_feature (78)..(78): Xaa can be any naturally occurring amino acid
  misc_feature (82)..(82): Xaa can be any naturally occurring amino acid
  misc_feature (106)..(106): Xaa can be any naturally occurring amino acid
  misc_feature (115)..(115): Xaa can be any naturally occurring amino acid
QRVPGLRQQRGRRRAEAEVTKAAAAAAVSLTVAETKAAAADGERPGPGPLLVGCGRAAVGPARLPPPAAPPPAPPPGXRRGXGPARTQTAAAAAAGGVGGGWRRHXRPGLWGGMXSRDCPFEVRGSNGAFYKGFVKDVHENSVTIFFENNWQSERQIPFGDVRLPPPADYNKEITEGDEVEVYSRANEQEPCGWWLARVRMMKGDFYVIEYAACDATYNEIVTLERLRPVNPNPLATKGSFFKVTMAVPEDL

SEQ ID NO: 787362 - protein, 68 aa, Homo sapiens
TTLQTTRMWLSLAVPMLPPAAFRASTTTRPIWMIATLVVELSLSILLMGLWEPPCMSCFLGFLDFNIP

SEQ ID NO: 787363 - protein, 130 aa, Homo sapiens
MFTTWPFTEKYLPVPAVEGYIASSFQSNLLPGNVNSLLVLVICYLWEPILSLLADDENSVIYHNTNLGIKLSIRHFCKISIYFRSRTKVKPSVNESCLLVQAKWDIWQQSPGVLGALLLTASSSHWAARC

SEQ ID NO: 787364 - protein, 83 aa, Homo sapiens
ESCHWTRNVTGTSRYLPFCHFPDQNQTHSQKTQRIRIWQRSRSGKNCMGPWGPSQALPGASGVLTLSTLPLSMVLPTSDFSID

SEQ ID NO: 787365 - protein, 49 aa, Homo sapiens
IPLLRKRRFQLGRSMNLRARKNRSQIVLFQKRRFQFFCSMSGRAWVSPE

SEQ ID NO: 787366 - protein, 121 aa, Homo sapiens
IFLFCCHEPPCCAALRVSRNQLPRKNDFYSYEPPSENPSPETGESVYLQLKSGAHLCSVCGCLGPKTCSRCHKAYYCSKEHQTLDWRLGHKQACAQPDHLDLTTPDHNFLFPEFEIVIETR

SEQ ID NO: 787367 - protein, 166 aa, Homo sapiens [sequence omitted]

SEQ ID NO: 787368 - protein, 57 aa, Homo sapiens
MRERCWLQQGLMFLQIWMWLESVRRVWVTGVRASREWDGVEAHAEGQGVTRDPVPAT

SEQ ID NO: 787369 - protein, 69 aa, Homo sapiens
QIIQTLDLEEIDEIEEAYTALRHMQRDSNPTVSCLTTQTFHILEAKKKLLLAKPPTSCFCRRRPQRHYF

SEQ ID NO: 787370 - protein, 115 aa, Homo sapiens
FLIMVGSFPDNECGQSLWSSKTRTSPSSLLSHSIGQSKSQGQAQSQCGRILPNSIDTQRCEKSGTSNHSDGARIQTPETSLLEVLLHSHLPSKSLISIYVKFHLAWHCERARSCC

SEQ ID NO: 787371 - protein, 106 aa, Homo sapiens
AHSKEKGPESKLPVAPFTVEYKGVRHEFLVAPPHPSSVPVGPWSEPLHINLYPLLCICYGMEFSTWTCLGNPPLQVPLSAQSISCCGASGRFSGDPSLTVCLKQTG

SEQ ID NO: 787372 - protein, 43 aa, Homo sapiens
HSPSLLLKTDSGFPNKVICKPCHGPTEEINSDSRLDKVVHACN

SEQ ID NO: 787373 - protein, 162 aa, Homo sapiens
MSCLAGWRAASSSDSLALAPLTASSSGCSASVMAASREALWPLRHSVSAWSPLMFQFISEVSVFVCCTSSQCLPASACSFSYLIWYMLSASARLRLAISYCALTSAMMLSVSMERLLSMDSTTDVAEIWDCSSRIFSSYSRLRKLISSVSPSRPDSSSNLFM

SEQ ID NO: 787374 - protein, 162 aa, Homo sapiens; identical to SEQ ID NO: 787373

SEQ ID NO: 787375 - protein, 81 aa, Homo sapiens
MGRRKKGTSGTPEKAGALQPETGYNETRLVSRERPGTRCRNMGACMDYSSRYPPIRPPRGGASHANTGDELQQHVTENKQP

SEQ ID NO: 787376 - protein, 112 aa, Homo sapiens
GGAAAEPAARRPISSVRTGSRGSRPSRGRARGAGSPPAVPRSSAGPEPAPPAAGRLAARAARPGKRGRGLHGQRPRPAAEPSRSRAALGARIYTALLWDTPPLDLKDSPRQH

SEQ ID NO: 787377 - protein, 112 aa, Homo sapiens; identical to SEQ ID NO: 787376

SEQ ID NO: 787378 - protein, 112 aa, Homo sapiens; identical to SEQ ID NO: 787376

SEQ ID NO: 787379 - protein, 117 aa, Homo sapiens
LSEMALVNSMYQYSLIAFLEVFRLSLKKSLPDSILMKRLRNIMDTLTFSIYNHGCTGLFERHKLLFSFNMTIKIEQAEGRVPQEELDFFLKGNISLEKSKRKKPCAWLSDQGWEDII

SEQ ID NO: 787380 - protein, 142 aa, Homo sapiens
LTPHAADSRICPFPQILCQKMAHMKIAIDWILMSQPNIPVRLVPKSKPKFPAIIIPGKTHCFDISYCRLFDLPLYVSVGKICTVSKSCNFSCPSLYYHWHLSSSVWLRFNYDRDTFAFSLLLRSPRAWLALAPPEGTDVLSS

SEQ ID NO: 787381 - protein, 66 aa, Homo sapiens
MPVPLSTLVLNEGGALAEGFPTLLAFVGLLASVGLAVLNEVGALAEGLPALIAFVWFLPSVDPLVS

SEQ ID NO: 787382 - protein, 110 aa, Homo sapiens
SGFATPHIWNSPTVSFVKTVPIFQGLDSNAISLFSFFLKRSLALLPRLECSGAILAHCNLNLLGSSDPPTSVSSVACSTTPGCFLYFLVEVEFHHVAQAGLEPLSSRALI

SEQ ID NO: 787383 - protein, 113 aa, Homo sapiens
MTLICPPRGIQLDSNRRLQYATRNPSQGGLCRPRIPGLTSPPRLLLWSPKGMGWGLGALNAPHDTMAPFSSRISMPDPLRVKGSGITLGGFHMHPWAKPTCPCRGSLHSWIGY

SEQ ID NO: 787384 - protein, 253 aa, Homo sapiens
SHVGDEGRYQCVAFSPAGQQARDFQLRVHAPPTIWGSNETGEVAVMEDHLVQLLCEARGVPTPNITWFKDGALLPTSTKVVYTRGGRQLQLGRAQSSDAGVYTCKASNAVGAAEKATRLDVYVPPTIEGAGGRPYVVKAVAGRPVALECVARGHPSPTLSWHHEGLPVAESNESRLETDGSVLRLESPGEASSGLYSCVASSPAGEAVLQYSVEVQVPPQLLVAEGLGQVTTIVGQPLELPCQASGSPVPTIQ

SEQ ID NO: 787385 - protein, 132 aa, Homo sapiens
YPLSAQYTLTTNHTTLHSEAQVIEVVKSACGPFPNPLEEGISFDIYSTFIEPPTILDTEMKRLDQEQGPEESQPETDTSDMDPLVGFTIEDVKSVLDQVTDDILIGIQTEINEKLQIQEEAFNARIEKLKKA

SEQ ID NO: 787386 - protein, 312 aa, Homo sapiens
RGAASLGRDCGDVAGDDSLGADPGRPTPAGTTPESERDTEFQEHEKILSPDFLSVAQITDLLMEDIDGVQEKLRIFLNFKNLETCLKDAILLDYYVSGFLWARGMDFSIIQYSKFMTLLAMSLQNLKTLHMSLEESIKWLGEVMAEIGPTHSQKSEDWNIFDVKQANAIIDYLKISLFQHYKLYEFMFYSAREEIVIGTEQVIEVVKSACGPFPNPLEEGISFDIYSTFIEPPTILDTEMKRLDQEQGPEESQPETDTSDMDPLVGFTIEDVKSVLDQVTDDILIGIQTEINEKLQIQEEAFNARIEKLKKA

SEQ ID NO: 787387 - protein, 236 aa, Homo sapiens
EGQRLSAEIAAMSQGTTPWGPTPAGRPRREPRPNRRKLRIFLNFKNLETCLKDAILLDYYVSGFLWARGMDFSIIQYSKFMTLLAMSLQNLKTLHMSLEESIKWLGEVMAEIGPTHSQKSEDWNIFDVKQANAIIDYLKISLFQHYKLYEFMFYSAREEIVIGTERLDQEQGPEESQPETDTSDMDPLVGFTIEDVKSVLDQVTDDILIGIQTEINEKLQIQEEAFNARIEKLKKA

SEQ ID NO: 787388 - protein, 80 aa, Homo sapiens
EGQRLSAEIAAMSQGTTPWGPTPAGRPRREPRPNRSRPFPFPVPVPVPETSERSFPVRGVCGQAKSGLRRGAARLAPAEN

SEQ ID NO: 787389 - protein, 221 aa, Homo sapiens
TRGSVSRPRLRRCRRGRLPGGRPRQADPGGNHARIGALHMSLEESIKWLGEVMAEIGPTHSQKSEDWNIFDVKQANAIIDYLKISLFQHYKLYEFMFYSAREEIVIGTEQVIEVVKSACGPFPNPLEEGISFDIYSTFIEPPTILDTEMKRLDQEQGPEESQPETDTSDMDPLVGFTIEDVKSVLDQVTDDILIGIQTEINEKLQIQEEAFNARIEKLKKA

SEQ ID NO: 787390 - protein, 177 aa, Homo sapiens
MRWGHHLPRASWGSGFRRALQRPDDRIPFLIHWSWPLQGERPFGPPRAFIRHHGSSVDSAPPPGRHGRLFPSASATEAIHAVHLSGTWLSGSAWLPGRSASLANFALDTVHVDPCDPAAEVPPDELTSPIRCELGTGCIMAPRGLVVPLIGSLFYTSLTRIALLAGPGCRHAVLFGP

SEQ ID NO: 787391 - protein, 83 aa, Homo sapiens
GAQPVRGLTLTVCLTLLSVPRCHWPGYHWTLGFHCLRLQMNLVCAQCLSLWSCLLTAGGGIHVFLLDLTLPVPGMMQPVHQRK

SEQ ID NO: 787392 - protein, 129 aa, Homo sapiens
EASGLRDSESSGQACVAGEERRTPVPHPQPLFLSTSASPGRGSDVGGGRREGPRPGCGGDGCYGGFSGNQVKAARRWGQGGFHYENWKQTQPLPASADISTPTFHGISHALGCFQGFTCSHSLNFPPAM

SEQ ID NO: 787393 - protein, 125 aa, Homo sapiens
SVCRWLHLSPNIKFNYCSTLACFFFQQTQNDFISLWNSGFLFEFIKSWVKNVWDANDAAVAKDYDVFFSLGSGLVRTMSCLGFALDLDIRISCVTLSKFITSLSFTVFICKIKEVGEEIFNYFLS

SEQ ID NO: 787394 - protein, 203 aa, Homo sapiens
PFAGGGERGEHAMKASGTLREYKVVGRCLPTPKCHTPPLYRMRIFGRYYHYVLLLERARLLALSYVVLLRSTDEERLPCETETSCAWQGAGGKDESSSPLRVKNFGILLRYDSRSGTHNMYREYRDLTTAGAVTQCYRDMGARHRARAHSIQIMKVEEIAASKCRRPAVKQFHDSKIKFPLPHRVLRRQHKPRFTTKRPNTFF

SEQ ID NO: 787395 - protein, 188 aa, Homo sapiens
PFAGGGERGEHAMKASGTLREYKVVGRCLPTPKCHTPPLYRMRIFAPNHVVAKSRFWYFVSQLKKMKKSSGEIVYCGQVFEKSPLRVKNFGILLRYDSRSGTHNMYREYRDLTTAGAVTQCYRDMGARHRARAHSIQIMKVEEIAASKCRRPAVKQFHDSKIKFPLPHRVLRRQHKPRFTTKRPNTFF

SEQ ID NO: 787396 - protein, 188 aa, Homo sapiens; identical to SEQ ID NO: 787395

SEQ ID NO: 787397 - protein, 176 aa, Homo sapiens
MKASGTLREYKVVGRCLPTPKCHTPPLYRMRIFAPNHVVAKSRFWYFVSQLKKMKKSSGEIVYCGQVFEKSPLRVKNFGILLRYDSRSGTHNMYREYRDLTTAGAVTQCYRDMGARHRARAHSIQIMKVEEIAASKCRRPAVKQFHDSKIKFPLPHRVLRRQHKPRFTTKRPNTFF

SEQ ID NO: 787398 - protein, 240 aa, Homo sapiens
AQDPRGEDAPPSPRPSHTDHRAPESQQHQLRGIMPLLPHPGPVPCCPCSPQTQADRDSPSDHRTHSPPQKIPGDAPRLCVSLMAVTANLQEPGGAHGKHPQLPERSFGQGHTGARLSFLVAGGWALPVRFCHTRSRFKGSKKCKQVKCPSRDEQNTARPGHTMEQDSAMNRNQALTPATAQMPLEESTLSKRHTDTDTACNPICVNVQDRPIQRQEGDTWVPVTGDYGDWGKWLKGTHKS

SEQ ID NO: 787399 - protein, 167 aa, Homo sapiens
SAEAEPGRRRRRRLRRGDLIGAPRGAPRSLDAALKLAGLRKSAREAREPLGSVSAGRRARTERMAVPRRTRVGGTVGRRGGSPAGDRAEPPTSSKGAGLEVGFREGEGRSVGWTTLAARTAFRATEPGTAAGPGPGPGPGPALALARLPPLFPSRCGGCGWSLGFAD

SEQ ID NO: 787400 - protein, 214 aa, Homo sapiens
MPKGKKAKGTKVAPAPAVVKKQEAKKVVNPVWKRPKNFGTGQDIQPKRDLTRFVKRPRYIRLQRQRAILYKRLKVPPAINQFTQALDRQTATQLLKLAHKYRPESRQEKKQRLLAWAKKKAAGRGDVPTKRPPVLRTGVNTVTTLVENKKAQLVVIAHNADPIKLAVFLPALCRKMGVPYCITKGKARLGRLVHRKTCTTVAFTQVNSEDKGTL

SEQ ID NO: 787401 - protein, 150 aa, Homo sapiens
KPDASPGTRPSPDLSPPATSQTQKMTTPFLPFLPTQTLHLSLTPLFLSSLTFIPSENPMALPSRHGQNPASRAKPRQAAFALPDGHGCTFPGLPAPGVATISPHPSSFLNLSQITSFFCQNPPKTLSLLSAQPGAPGAHRRGTALASPSA

SEQ ID NO: 787402 - protein, 33 aa, Homo sapiens
KGGSQERRLEKEPDGRRAEERGRQWALRRCCPR

SEQ ID NO: 787403 - protein, 142 aa, Homo sapiens
PLCWDECRGSCPTCPEDRLEQYEGPGFCGPLAPGTGGPFTTCHAHVPPESFFKGCVLDVCMGGGDRDILCKALASYVAACQAAGVVIEDWRAQVGCEITCPENSHYEVCGPPCPASCPSPAPLTTPAVCEGPCVEGCQCDAG

SEQ ID NO: 787404 - protein, 47 aa, Homo sapiens
NTHSTEFIQRKAKDLHASARMNLVNIVRMKEAITKAYSQYKLEMVAN

SEQ ID NO: 787405 - protein, 103 aa, Homo sapiens
MCLFLVSLWGVYSLGFPAVSHHLPVCPCPPLCHSASPRVPLCVTLPLLVSPSVSPCLSLRSFGLCISESLVSVSPCSFSQHDIWGGGRWKATLFRPLSFQLTA

SEQ ID NO: 787406 - protein, 73 aa, Homo sapiens
GAVNSQHGVPGAMCPASLILLVFSLVIVTGTRWTYRHPLWYTRAVRGFVSEDAAVLGCWKWNCWVRENVRVVK

SEQ ID NO: 787407 - protein, 86 aa, Homo sapiens
MPEKRPFERLPADVSPINCSLCLKPDLLDFTFEGKLEAAALGAGRRIIQHCAAIVLDIDIHHSYICTQKADCKKYMHTGIYLIRMT

SEQ ID NO: 787408 - protein, 107 aa, Homo sapiens
PTSGLFKCKSDPPPLKNSSLLLIAFRIKTQLNPVISSVVPVTHIDLSFLPWAIHLPDTRLLHMFLLFIPAISRHCFGAGDMTVNKAGKHSCHSRAHFLVVAFWLECS

SEQ ID NO: 787409 - protein, 283 aa, Homo sapiens
GGGGAGGPGGPGMGNRGGFRGGFGSGIRGRGRGRGRGRGRGRGARGGKAEDKEWMPVTKLGRLVKDMKIKSLEEIYLFSLPIKESEIIDFFLGASLKDEVLKIMPVQKQTRAGQRTRFKAFVAIGDYNGHVGLGVKCSKEVATAIRGAIILAKLSIVPVRRGYWGNKIGKPHTVPCKVTGRCGSVLVRLIPAHRGTGIVSAPVPKKLLMMAGIDDCYTSVRGCTATLGNFAKATFDAISKTYSYLTPNLWKETVFTKVPYQESLGTCQEPTESRARTQSIVVQ

SEQ ID NO: 787410 - protein, 106 aa, Homo sapiens
MGYSVGPGSEQVLTASPRYRSSTWDPRFLGQVPGKGLCGWEDVGSRLWHPTSWKHSGHSSAVTDLSSTLGACHSSHWGRLSLSPMKSSLGAPCSGLCRVRGRAYPP

SEQ ID NO: 787411 - protein, 52 aa, Homo sapiens
ICTNPARYPRYLLSSLHRILILLIHVSFCDIQALTVPFCLPMPMCLPFRQAK

SEQ ID NO: 787412 - protein, 125 aa, Homo sapiens
AEMLDDLMEKRKKKLDSVIEFSIPDSLLIRRITGRLIHPKSGRSYHEEFNPPKEPMKDDITGEPLIRRSDDNENALKIRLQAYDTQTTPLIEYFRKREIHSAIDASQTPDVVFASTLAAFSKATS

SEQ ID NO: 787413 - protein, 77 aa, Homo sapiens
AEMLDDLMEKRKKKLDSVIEFSIPDSLLIRRITGRLIRRFESKSCSVAHTGVQWCNLGSPQPPSPGFKQFSCLSPHE

SEQ ID NO: 787414 - protein, 118 aa, Homo sapiens
MVTPAGCLGGRNQGPREIPGTAFPCSSRAGQTGQAVSGAQVSSWRERQPFGGSRGPLHILGTDGNVDTTGKLGLVPTPPRIQKETKQGALCGMKPPFLPEALLTVWWLPFVAVSLCLF

SEQ ID NO: 787415 - protein, 119 aa, Homo sapiens
GTTPRSRRSRRELEIKCLIKVLELDLEGSGEPWKMLDKGVTVSYVFEMTVEACLEGVNKSQETREGACGAGLEMVREGSCLDERSSGTVSGYTQVSSELVCSESCLQDENGKELSDEDI

SEQ ID NO: 787416 - protein, 73 aa, Homo sapiens
GTQNADLGELTLSVEATPVPPKPGRKQLQQAADGSSRQDTPSSFGQFTPQSSQGTPYTSRGSTPYSQDSAYSS

SEQ ID NO: 787417 - protein, 112 aa, Homo sapiens [sequence omitted]

SEQ ID NO: 787418 - protein, 118 aa, Homo sapiens
CSSGCHAPMAHSGHEDFRVIPVVSFLDLTVGWGCNETPVAGSGLHSLPGVMGHCLAEWLWAGPFPSQPAGSYARSSLLAPPGPCFPRYRGGADPSPLKQTRLWRPHWAHFSEGQCGWV

SEQ ID NO: 787419 - protein, 352 aa, Homo sapiens
RERGQQEPGTRERDPDKATRFRMEELRLTSTTFALTGDSAHNQAMVHWSGHNSSVILILTKLYDYNLGSITESSLWRSTDYGTTYEKLNDKVGLKTILSYLYVCPTNKRKIMLLTDPEIESSLLISSDEGATYQKYRLNFYIQSLLFHPKQEDWILAYSQDQKLYSSAEFGRRWQLIQEGVVPNRFYWSVMGSNKEPDLVHLEARTVDGHSHYLTCRMQNCTEANRNQPFPGYIDPDSLIVQDPYVFVSDNQEGGTILSVYRRNDWLTEGSENAVPRHCVYKTDATPGAQRVPKQWTRKRKQQPLLVNHGGHLNPGLEKLHKGVGNQRPKEEKRRVHKSPGHKHNAAGAHEH

SEQ ID NO: 787420 - protein, 104 aa, Homo sapiens
VTPHPKSSETWKSDYRPPGNSETSQSGIKIHQFLRELTNWDKNGPTVQRPHNLFSDHQTAQRPRTTDTMLESPKITYAGTQARKLLRGSHPGHRFLFRDVIYWT

SEQ ID NO: 787421 - protein, 145 aa, Homo sapiens
PPQSIKLVDVWGFSATLEWTPPQDTGNTALLGYTVQKADTKSGLWFTVLEHYHRTSCIVSDLIIGNSYAFRVFAENQCGLSETAPITTDLAHIQKAGKGGTGIMSWEDLRIGRAQWLTPLIPALWEAKAGGSPEVRSSRPAWTTW

SEQ ID NO: 787422 - protein, 104 aa, Homo sapiens
MYSLKKEYTVQREDKLRARAGSMWRPLSLQDHFSVFFSPVSRKSLRAVDQVTVSVLGTTATQDDTQKKKVPFWSKENVLRNASGSVPLTSYWPGLGRCPFVTRC

SEQ ID NO: 787423 - protein, 109 aa, Homo sapiens
NISFELLHGQIHLLTQCLGNCFPLFRPVLSSGCIFEPHGGALESPRKHSDQLHQNVWGRKQGASTFSSSPGNFCLQPGLTDPWFRQHFQAGAVSVCVVVAQRANLVGIE

SEQ ID NO: 787424 - protein, 207 aa, Homo sapiens
QSRCSREAHPPSVPQWDSPSPPVPLDLQGLLSTPSSPCTVDGKKLRAQGALAAAGTCRTFPTWPCRCVDEPGRPAGPCWQVSLLATSGGFEVESGQLQVSLLRGGATYGASRVGSLPCQPSCHQTSTGLPVVASGPGLGPTMGGDSDDLSNQPRARSSPETDDGPSGGSRTCAGSPRRCVAGLALRPDRGCHHPCLQFTPGSSLESL

SEQ ID NO: 787425 - protein, 36 aa, Homo sapiens
RHKQRQEEGGQGAKDGSSERAVTRAGLESPELVLSK

SEQ ID NO: 787426 - protein, 148 aa, Homo sapiens
IFFSKLSKNYVVNFLLAYLLGRFNIVIFILGTEEEFGGLVSANLILLRNRLLDILLKLIYTSKEKTSINLQACEELVKTLGFDRIMMFMEEHLHSTTVTAAMRILVVLLSNQSILIKFKEGLSGGGWLEQTDSVLTNKIGTVLGMGLF

SEQ ID NO: 787427 - protein, 67 aa, Homo sapiens
MTHSGNKALKRDTRGPGFEAEKKGGKCSESATSQASSAHTLVQATILEAQATATASPLVSMLLPLRP

SEQ ID NO: 787428 - protein, 82 aa, Homo sapiens
LVRPDYGMRLRQQRGRCVVGDCLFQMLRCLYHWHRPVLNRRWSRLCLLKQYLFTMKLQSPEFQSLFTEGLKSLTGINAFHEN

SEQ ID NO: 787429 - protein, 109 aa, Homo sapiens
ATQHIQTIDPAQPPGPWPHLLPPPMPGGCCLHEAGLFLLRVAAAPSAAPEDSSAGIKGGLPRLPAPRMLSRQLRGGADFIPARLSLRAARGGQAGARGAGRDGGGRQRP

SEQ ID NO: 787430 - protein, 115 aa, Homo sapiens
VSRLFNGLLGCPGKIPRALGLAMCTSGRQPEWFPCPLVVWGPENMRTHCTVHRICRPIVSQEGHRPLVIFPNVACPPCRITTVTCGPGWFSQDIHLDREFREILHPPRPEEGPGI

SEQ ID NO: 787431 - protein, 107 aa, Homo sapiens
FRARGSGNSMGHVERHKLTSAHRTKQPGGHRPHIQLLGVPSLPSLTLHPHPDPPLLPGSPRLAQLSPGLGKSLFCTLAAMFAKHQTFKYHVPFFFHICIPHVLLFAC

SEQ ID NO: 787432 - protein, 74 aa, Homo sapiens
HTYWPDLPPPPNQKLYESRTMTCHSLKEWAGGRQHRIKEEAQEEKNPQGPPALTGKGKSSLLSSPATGTWNLIL

SEQ ID NO: 787433 - protein, 147 aa, Homo sapiens
QAFAMHCTVDIYEDPLRHARKSTGGKAPRKQLATKAARKSAPATGGVKKPHRYRPGTVALREIRRYQKSTELLIRKLPFQRLVREIAQDFKTDLRFQSSAVMALQEACEAYLVGLFEDTNLCAIHAKRVTIMPKDIQLARRIRGERA

SEQ ID NO: 787434 - protein, 136 aa, Homo sapiens; identical to SEQ ID NO: 741065

SEQ ID NO: 787435 - protein, 136 aa, Homo sapiens; identical to SEQ ID NO: 741065

SEQ ID NO: 787436 - protein, 111 aa, Homo sapiens
KSYSYALSVACEMVLYCPLSIIIPLLYLHYCSHRSMGLKSVCTLESAGELLTITSAQISPQNKRESLGVRPGISIFKSFPGDSDVPPRARATVKAAQGVLSQQRRHQSYRC

SEQ ID NO: 787437 - protein, 79 aa, Homo sapiens
ILNEINPPPPPFLSAEREPEEMNPLTKVKLINELNEREVQLGVADKVSWHSEYKDSAWIFLGGLPYELTEGDIICVFSQ

SEQ ID NO: 787438 - protein, 322 aa, Homo sapiens
MNPLTKVKLINELNEREVQLGVADKVSWHSEYKDSAWIFLGGLPYELTEGDIICVFSQYGEIVNINLVRDKKTGKSKGFCFLCYEDQRSTILAVDNFNGIKIKGRTIRVDHVSNYRAPKDSEEIDDVTRQLQEKGCGARTPSPSLSESSEDEKPTKKHKKDKKEKKKKKKEKEKADREVQAEQPSSSSPRRKTVKEKDDTGPKKHSSKNSERAQKSEPREGQKLPKSRTAYSGGAEDLERELKKEKPKHEHKSSSRREAREEKTRIRDRGRSSDAHSSWYNGRSEGRSYRSRSRSRDKSHRHKRARRSRERESSNPSDRWRH

SEQ ID NO: 787439 - protein, 322 aa, Homo sapiens; identical to SEQ ID NO: 787438

SEQ ID NO: 787440 - protein, 67 aa, Homo sapiens
SRTIVQRHMEFHTSSIMRRTGSTDVNLEFFNMCNYATIQNANNAATFTLVIRSLMAAQKSYEKEESG

SEQ ID NO: 787441 - protein, 74 aa, Homo sapiens
PSLSLKHLLLRGGGFVPLFPGLGHHSGPMFGEPVTLRAAFGRSSCCSQARFKRGFQVQPSRCSLQGASRPVPMT

SEQ ID NO: 787442 - protein, 403 aa, Homo sapiens
GASGCARSGPAVAAEMEEGGRDKAPVQPQQSPAAAPGGTDEKPSGKERRDAGDKDKEQELSEEDKQLQDELEMLVERLGEKDTSLYRPALEELRRQIRSSTTSMTSVPKPLKFLRPHYGKLKEIYENMAPGENKRFAADIISVLAMTMSGERECLKYRLVGSQEELASWGHEYVRHLAGEVAKEWQELDDAEKVQREPLLTLVKEIVPYNMAHNAEHEACDLLMEIEQVDMLEKDIDENAYAKVCLYLTSCVNYVPEPENSAYCVVPGVCPERYSRFPGALRLAWSSWLEWAESYLLEGSGLTRNQRAYRIGRKRGPRSRRRKCRRIEARRETFQGVRKTKMWRHPGRANEEPRGGANNQNNAKKRRSRAHSQQERNTLRDESMRTKEQERTHTHGVSRRQSN

SEQ ID NO: 787443 - protein, 394 aa, Homo sapiens
GASGCARSGPAVAAEMEEGGRDKAPVQPQQSPAAAPGGTDEKPSGKERRDAGDKDKEQELSEEDKQLQDELEMLVERLGEKDTSLYRPALEELRRQIRSSTTSMTSVPKPLKFLRPHYGKLKEIYENMAPGENKRFAADIISVLAMTMSGERECLKYRLVGSQEELASWGHEYVRHLAGEVAKEWQELDDAEKVQREPLLTLVKEIVPYNMAHNAEHEACDLLMEIEQVDMLEKDIDENAYAKVCLYLTSCVNYVPEPENSAYCVVPGVCPKLSRFLKPEIGIDAKDWVAKNLHTGELGQQTEGNTTSTQRLVQRQEKNSRHNRAGANSAKNDKATHPRPGARKSHSQRLTPKESGSGHETPNTPTGQTRSRTNVNNQRLPEPLGLRSSAKRKD

SEQ ID NO: 787444 - protein, 66 aa, Homo sapiens
SGIKAGKPFAQNHTAVARVGIQMQDCPWPYRLLDVPTVALPSQEPLLPGETPLHILMTMTIPRVKH

SEQ ID NO: 787445 - protein, 105 aa, Homo sapiens
MPDNRVQCCSYFIAPSGHGLKPLDIEFMKRLHEKVSITPLIAKADTLTPEECQQFKKQRQGLAVLPNWPQTPELKVIFPRHAPPISRHYRHTPLPLFYFEQFFNF

SEQ ID NO: 787446 - protein, 114 aa, Homo sapiens; identical to SEQ ID NO: 758493

SEQ ID NO: 787447 - protein, 289 aa, Homo sapiens
MRLPVARKPLSERLGRDTKKHLVVPGDTITTDTGFMRGHGTYMGEEKLIASVAGSVERVNKLICVKALKTRYIGEVGDIVVGRITEVQQKRWKVETNSRLDSVLLLSSMNLPGGELRRRSAEDELAMRGFLQEGDLISAEVQAVFSDGAVSLHTRSLKYGKLGQGVLVQVSPSLVKRQKTHFHDLPCGASVILGNNGFIWIYPTPEHKEEEAGGFIANLEPVSLADREVISRLRNCIISLVTQRMMLYDTSILYCYEASLPHQIKDILKPEIMEEIVMETRQRLLEQEG

SEQ ID NO: 787448 - protein, 181 aa, Homo sapiens
MDNGLVIVTGCPMFIGLVMLTALETFTFISAEVQAVFSDGAVSLHTRSLKYGKLGQGVLVQVSPSLVKRQKTHFHDLPCGASVILGNNGFIWIYPTPEHKEEEAGGFIANLEPVSLADREVISRLRNCIISLVTQRMMLYDTSILYCYEASLPHQIKDILKPEIMEEIVMETRQRLLEQEG

SEQ ID NO: 787449 - protein, 107 aa, Homo sapiens
PTTHRCLSKRYTCVTSKVSTQFKTGPCLPQFPSIEEGALGGLGTCPQLGRVYPGSLIPLALSVQAFWELRARVSRWNPGRGQGAGAEEPAQKRRRQGLHARAARGTG

SEQ ID NO: 787450 - protein, 87 aa, Homo sapiens
MVRMVSVLLSLLLLLGPAVLQETRDGHYSLTYLYTGLSRSGKGTHRLQGTVFLNGHAFFHYNLRGPTVPSKTETTELLGWRLAAAAG

SEQ ID NO: 787451 - protein, 220 aa, Homo sapiens
MVRMVSVLLSLLLLLGPAVLQETRDGHYSLTYLYTGLSRSGKGTHRLQGTVFLNGHAFFHYNSEDRKAEPLGPWRHAEGVEDWEKQSQVQKAREDIFMETLNNIMEYYNDGERMCGRFLRWWLLAEESWHSTPVGRLLFPVLLGFRLVLLAASGPGVYGDEQSEFVCHTQQPGCKAACFDAFHPLSPLRFWVFQVILVAVPSVLYMGFTLYHVIWHWEES

SEQ ID NO: 787452 - protein, 177 aa, Homo sapiens
RSDSPFQAEGDMLVSESCQDNNVNIKSKFMNLSQKGTPKEGPGILQPFESYGTPSQGSKNMDYSQDSKSPGKGNGASPSNSNYSYSVLKESDAENQVPCNTNNIGNLGEEEPKFHAHEENRGHSEVNFDSSTVVKEPGLKDNMNAERKSKVGNTYILKASLEPENIKSTPGVANNGS

SEQ ID NO: 787453 - protein, 67 aa, Homo sapiens
LVVIKKVDSRRDYLTSNPGCIIYELYDLAASPSSSLDIVYFVKWANARTTLRTCSAELQSVQVVPCP

SEQ ID NO: 787454 - protein, 141 aa, Homo sapiens
WPVASGDDPKPPEEGWGFVLAAVSPLCSPQCHHPRPHCPAGAQERSPWRGTVPRKANLPTAIPTQQQGLQRLPPGASAELHVLGFSSILPYCRLSSSSCPRGQAQGPHSGRIRQVRPLLGSTLEDEMLLPVSSPPSPLEFC

SEQ ID NO: 787455 - protein, 100 aa, Homo sapiens
RGRFMHKSPSPQCPDEKGIPRVGFGGTGSRIAPSGPGSTVFMACLLRCVLCRPGGSTQRLGPSPSEEQQSLCTYKGQSEEAPGIPVPSLPRGVLCPLHAE

SEQ ID NO: 787456 - protein, 245 aa, Homo sapiens
MTTYPNSVCLSVEMSLVARVRPTPGREAYPGDVFYLHSRLLERAAKMNDAFGGGSLTALPVIETQAGDVSAYIPTNVISITDGQIFLETELFYKGIRPAINVGLSVSRVGSAAQTRAMKQVAGTMKLELAQYREVAAFAQFGSDLDAATQQLLSRGVRLTELLKQGQYSPMAIEEQVAVIYAGVRGYLDKLEPSKITKFENAFLSHVVSQHQALLGTIRADGKISEQSDAKLKEIVTNFLAGFEA

SEQ ID NO: 787457 - protein, 244 aa, Homo sapiens
MPKGKKAKGKKVAPAPAVVKKQEAKKVVNPLFEKRPKNFGIGQDIQPKRDLTRFVKWPRYIRLQRQRAILYKRLKVPPAINQFTQALDRQTATQLLKLAHKYRPETKQEKKQRLLARAEKKAAGKGDVPTKRPPVLRAGVNTVTTLVENKKAQLVVIAHDVDPIELVVFLPALCRKMGVPYCIIKGKARLGRLVHRKTCTTVAFTQVNSEDKGALAKLVEAIRTNYNDRYDEIRRHWGGNVLGS

SEQ ID NO: 787458 - protein, 46 aa, Homo sapiens
MPLEPHPALLMPSICTNTDEKLAPPQSSLVLLVAGWLDPCMDCPWT

SEQ ID NO: 787459 - protein, 73 aa, Homo sapiens
MVSERLIHKQNGDLLQAAKCDSKEQGRLLRDAPSGIGSIFLSASELEDGSEEMGQDALSSSPRELLSNSEQLN

SEQ ID NO: 787460 - protein, 125 aa, Homo sapiens
VNVPKTRRTFCKKCGKHQPHKVTQYKKGKDSLYAQGKRRYDRKQSGYGGQTKPIFRKKAKTTKKIVLRLECVEPNCRSKRMLAIKRCKHFELEGRKEGRVGGREGGREEGRKEKEKEREKGRKKG

SEQ ID NO: 787461 - protein, 160 aa, Homo sapiens
MLHFNRCHHLKKITQKCFSSIHVKTDKHAQRFLSRTFALAELRKSWYSTHSLVGDKNIILMGPPGAGKTTVGRIIGQKLGCCVIDVDDDILEKTWNMSVSEKLQDVGNEQFLEEEGKAVLNFSASGSVISLTGSNPMHDASMWHLKKNGIIVYLDVPLLD

SEQ ID NO: 787462 - protein, 160 aa, Homo sapiens; identical to SEQ ID NO: 787461

SEQ ID NO: 787463 - protein, 187 aa, Homo sapiens
MASCYVRLKENLNHNQVESQWLPQLTIIHLLVMFVFPRGNQVSPTFNQIILLCTSVKPQMSMGTILTNANIDVVDVRPLIQTKDGENYATVVGYSAFLHCEFFASPEAVVSWQKVEEVKPLEGRRYHIYENGTLQINRTTEEDAGSYSCWVENAIGKTAVTANLDIRNATKLRVSPKNPRIPKLHML

SEQ ID NO: 787464 - protein, 73 aa, Homo sapiens
SQPNASGLQGARPSPQVGDEDTLGCHPCSSRHFLSTHCCQQDLFLLSPLQAHTTLNPAALSGKNTGLEHKCPN

SEQ ID NO: 787465 - protein, 112 aa, Homo sapiens
RPLWSRGLRPGRLVRAYTRVQSIALPPGVVNSYNGLGARRPHPRSANPLEAVQKPLAAGPTRRGGGWDPAGAGAAWLHGLYSVYTAGGRGGRLRFLRYQSRRFGHLRAPAAG

SEQ ID NO: 787466 - protein, 231 aa, Homo sapiens
GRRTAACPTAPRGRRAAAGPAQPCQPSHRRAPGARAHQCAGPAVRLCPAARARHDALLLLGPRQQDRRAAFAPRSLRAHRMPVQTDARMQGRATPAPVAADDAAASLTSHPLGPPLEPAPRVPLCFFAFLSSCRSSLSPQFMSSCAHLPDLCDLALPWPEAASLRAFYWARLFPEPQRLLPKFTAERARGGGATGRRQRRPLGLLSQVGALALRVPRPTAVQSMARRAGQD

SEQ ID NO: 787467 - protein, 199 aa, Homo sapiens
RPPHRRLPHRTTGPPRRRRASSALPAQPPPRPRHRRAAFAPRSLRAHRMPVQTDARMQGRATPAPVAADDAAASLTSHPLGPPLEPAPRVPLCFFAFLSSCRSSLSPQFMSSCAHLPDLCDLALPWPEAASLRAFYWARLFPEPQRLLPKFTAERARGGGATGRRQRRPLGLLSQVGALALRVPRPTAVQSMARRAGQD

SEQ ID NO: 787468 - protein, 136 aa, Homo sapiens
RKYPITLRGVRRLSEPDVTATSIPPTPLLLLPSLQATSPLRPPLGLGPREGTHSTGGFARVGPRQHFLVQINRWPSLWKHRPAFPGEVTRARPLKVCRRPALAGSSPRTGPRRPGEGEPVPDQRPFRGWALTPPSG

SEQ ID NO: 787469 - protein, 120 aa, Homo sapiens
SPHRERGRFLRRLPCLLGAREETSLLEAETSKEFPNRKTSGCRPQDVAGRAAASSRERAFLSCLHRSTFICFKNVKRPGAVPHTPVTPARWEAEAGGLPETRSWRAVWATEGDPPSRQIK

SEQ ID NO: 787470 - protein, 167 aa, Homo sapiens
TLYPPDILDAMLKEKKLAQDQNGALMIPIQDLEDMPAPQYPYIPPMTEFFFDGTSDITIFPPPISVEPVEVDFGACPGPEAPNPVPLCLMNHTKGKIMVVWTRRSDCPFWVTPESCDVPPLKSMAMRLHFQPPHPNCLYTVELEAFAIYKVCARNEREECGVSARSL

SEQ ID NO: 787471 - protein, 1032 aa, Homo sapiens
RVGSGGATLNALLVAAEHLSARAGFTVVTSDVLHSAWILILHMGRDFPFDDCGRAFTCLPVENPEAPVEALVCNLDCLLDIMTYRLGPGSPPGVWVCSTDMLLSVPANPGISWDSFRGARVIALPGSPAYAQNHGVYLTDPQGLVLDIYYQGTEAEIQRCVRPDGRVPLVSGVVFFSVETAERLLATHVSPPLDACTYLGLDSGARPVQLSLFFDILHCMAENVTREDFLVGRPPELGQGDADVAGYLQSARAQLWRELRDQPLTMAYVSSGSYSYMTSSASEFLLSLTLPGAPGAQIVHSQVEEQQLLAAGSSVVSCLLEGPVQLGPGSVLQHCHLQGPIHIGAGCLVTGLDTAHSKALHGRELRDLVLQGHHTRLHGSPGHAFTLVGRLDSWERQGAGTYLNVPWSEFFKRTGVRAWDLWDPETLPAEYCLPSARLFPVLHPSRELGPQDLLWMLDHQEDGGEALRAWRASWRLSWEQLQPCLDRAATLASRRDLFFRQALHKARHVLEARQDLSLRPLIWAAVREGCPGPLLATLDQVAAGAGDPGVAARALACVADVLGCMAEGRGGLRSGPAANPEWMRPFSYLECGDLAAGVEALAQERDKWLSRPALLVRAARHYEGAGQILIRQAVMSAQHFVSTEQVELPGPGQWVVAECPARVDFSGGWSDTPPLAYELGGAVLGLAVRVDGRRPIGARARRIPEPELWLAVGPRQDEMTVKIVCRCLADLRDYCQPHAPGPLLKAAFICAGIVHVHSELQLSEQLLRTFGGGFELHTWSELPHGSGLGTSSILAGTALAALQRAAGRVVGTEALIHAVLHLEQVLTTGGGWQDQVGGLMPGIKVGRSRAQLPLKVEVEEVTVPEGFVQKLNDHLLLVYTGKTRLARNLLQDVLRSWYARLPAVVQNAHSLVRQTEECAEGFRQGSLPLLGQCLTSYWEQKKLMAPGCEPLTVRRMMDVLAPHVHGQSLAGAGGGGFLYLLTKEPQQKEALEAVLAKTEGLGNYSIHLVEVDTQGLSLKLLGTEASTCCPFP

SEQ ID NO: 787472 - protein, 875 aa, Homo sapiens
RVGSGGATLNALLVAAEHLSARAGFTVVTSDVLHSAWILILHMGRDFPFDDCGRAFTCLPVENPEAPVEALVCNLDCLLDIMTYRLGPGSPPGVWVCSTDMLLSVPANPGISWDSFRGARVIALPGSPAYAQNHGVYLTDPQGLVLDIYYQGTEAEIQRCVRPDGRVPLVSGVVFFSVETAERLLATHVSPPLDACTYLGLDSGARPVQLSLFFDILHCMAENVTREDFLVGRPPELGQGDADVAGYLQSARAQLWRELRDQPLTMAYVSSGSYSYMTSSASEFLLSLTLPGAPGAQIVHSQVEEQQLLAAGSSVVSCLLEGPVQLGPGSVLQHCHLQGPIHIGAGCLVTGLDTAHSKALHGRELRDLVLQGHHTRLHGSPGHAFTLVGRLDSWERQGAGTYLNVPWSEFFKRTGVRAWDLWDPETLPAEYCLPSARLFPVLHPSRELGPQDLLWMLDHQEDGGEALRAWRASWRLSWEQLQPCLDRAATLASRRDLFFRQALHKARHVLEARQDLSLRPLIWAAVREGCPGPLLATLDQVAAGAGDPGVAARALACVADVLGCMAEGRGGLRSGPAANPEWMRPFSYLECGDLAAGVEALAQERDKWLSRPALLVRAARHYEGAGQILIRQAVMSAQHFVSTEQVELPGPGQWVVAECPARVDFSGGWSDTPPLAYELGGAVLGLAVRVDGRRPIGARARRIPEPELWLAVGPRQDEMTVKIVCRCLADLRDYCQPHAPGPLLKAAFICAGIVHVHSELQLSEQLLRTFGGGFELHTWSELPHGSGLGTSSILAGTALAALQRAAGRVVGTEALIHAVLHLEQVLTTVETGVPVLAGWSRSPDLVIRRWLPKVLRFQAVAPGQTVCALMLLDRG

SEQ ID NO: 787473 - protein, 94 aa, Homo sapiens
GWLLPAILGQASAGGHWLSLKPAGGGKGRRDVTLVHNSCLRLHFPGKERLFDPMGHSLLQLLPGNRGAAGGGLWLICSGGSEGSGGGLLLLRVG

SEQ ID NO: 787474 - protein, 465 aa, Homo sapiens
MGGAVVDEGPTGVKAPDGGWGWAVLFGCFVITGFSYAFPKAVSVFFKELIQEFGIGYSDTAWISSILLAMLYGTGPLCSVCVNRFGCRPVMLVGGLFASLGMVAASFCRSIIQVYLTTGVITGLGLALNFQPSLIMLNRYFSKRRPMANGLAAAGSPVFLCALSPLGQLLQDRYGWRGGFLILGGLLLNCCVCAALMRPLVVTAQPGSGPPRPSRRLLDLSVFRDRGFVLYAVAASVMVLGLFVPPVFVVSYAKDLGVPDTKAAFLLTILGFIDIFARPAAGFVAGLGKVRPYSVYLFSFSMFFNGLADLAGSTAGDYGGLVVFCIFFGISYGMVGALQFEVLMAIVGTHKFSSAIGLVLLMEAVAVLVGPPSGGKLLDATHVYMYVFILAGAEVLTSSLILLLGNFFCIRKKPKEPQPEVAAAEEEKLHKPPADSGVDLREVEHFLKAEPEKNGEVVHTPETSV

SEQ ID NO: 787475 - protein, 465 aa, Homo sapiens; identical to SEQ ID NO: 787474

SEQ ID NO: 787476 - protein, 465 aa, Homo sapiens; identical to SEQ ID NO: 787474

SEQ ID NO: 787477 - protein, 465 aa, Homo sapiens; identical to SEQ ID NO: 787474

SEQ ID NO: 787478 - protein, 511 aa, Homo sapiens
GSSGRARPCPTSRQRRPRAAPLARKSRRPHRDRRGSGGEAEPTLLAMGGAVVDEGPTGVKAPDGGWGWAVLFGCFVITGFSYAFPKAVSVFFKELIQEFGIGYSDTAWISSILLAMLYGTGPLCSVCVNRFGCRPVMLVGGLFASLGMVAASFCRSIIQVYLTTGVITGLGLALNFQPSLIMLNRYFSKRRPMANGLAAAGSPVFLCALSPLGQLLQDRYGWRGGFLILGGLLLNCCVCAALMRPLVVTAQPGSGPPRPSRRLLDLSVFRDRGFVLYAVAASVMVLGLFVPPVFVVSYAKDLGVPDTKAAFLLTILGFIDIFARPAAGFVAGLGKVRPYSVYLFSFSMFFNGLADLAGSTAGDYGGLVVFCIFFGISYGMVGALQFEVLMAIVGTHKFSSAIGLVLLMEAVAVLVGPPSGGKLLDATHVYMYVFILAGAEVLTSSLILLLGNFFCIRKKPKEPQPEVAAAEEEKLHKPPADSGVDLREVEHFLKAEPEKNGEVVHTPETSV

SEQ ID NO: 787479 - protein, 630 aa, Homo sapiens
MGGAVVDEGPTGVKAPDGGWGWAVLFGCFVITGFSYAFPKAVSVFFKELIQEFGIGYSDTAWISSILLAMLYGTGEGGLTPGPLSGLCWRILLGACSWAQQQGLPPAPQGTLEGSPWGQDPAGQQHALHGANPGRARSPSWPLSKRVGCIYKTVSEDRLLRAVPEKVAVPELQGPKGPSRRRSRVIMACARGACPRGAPGARGGRGGVGRGGRLQAVSSVGGGGRAGCRPGPSQLLPSPGPLCSVCVNRFGCRPVMLVGGLFASLGMVAASFCRSIIQVYLTTGVITGLGLALNFQPSLIMLNRYFSKRRPMANGLAAAGSPVFLCALSPLGQLLQDRYGWRGGFLILGGLLLNCCVCAALMRPLVVTAQPGSGPPRPSRRLLDLSVFRDRGFVLYAVAASVMVLGLFVPPVFVVSYAKDLGVPDTKAAFLLTILGFIDIFARPAAGFVAGLGKVRPYSVYLFSFSMFFNGLADLAGSTAGDYGGLVVFCIFFGISYGMVGALQFEVLMAIVGTHKFSSAIGLVLLMEAVAVLVGPPSGGKLLDATHVYMYVFILAGAEVLTSSLILLLGNFFCIRKKPKEPQPEVAAAEEEKLHKPPADSGVDLREVEHFLKAEPEKNGEVVHTPETSV

SEQ ID NO: 787480 - protein, 409 aa, Homo sapiens
KAELRKTGRWFTPRKQVSEWLGGAARQGGGTEAGNACYLFYKLDGMVAASFCRSIIQVYLTTGVITGLGLALNFQPSLIMLNRYFSKRRPMANGLAAAGSPVFLCALSPLGQLLQDRYGWRGGFLILGGLLLNCCVCAALMRPLVVTAQPGSGPPRPSRRLLDLSVFRDRGFVLYAVAASVMVLGLFVPPVFVVSYAKDLGVPDTKAAFLLTILGFIDIFARPAAGFVAGLGKVRPYSVYLFSFSMFFNGLADLAGSTAGDYGGLVVFCIFFGISYGMVGALQFEVLMAIVGTHKFSSAIGLVLLMEAVAVLVGPPSGGKLLDATHVYMYVFILAGAEVLTSSLILLLGNFFCIRKKPKEPQPEVAAAEEEKLHKPPADSGVDLREVEHFLKAEPEKNGEVVHTPETSV

SEQ ID NO: 787481 - protein, 363 aa, Homo sapiens [sequence omitted]

SEQ ID NO: 787482 - protein, 164 aa, Homo sapiens
MFFNGLADLAGSTAGDYGGLVVFCIFFGISYGMVGALQFEVLMAIVGTHKFSSAIGLVLLMEAVAVLVGPPSGGKLLDATHVYMYVFILAGAEVLTSSLILLLGNFFCIRKKPKEPQPEVAAAEEEKLHKPPADSGVDLREVEHFLKAEPEKNGEVVHTPETSV

SEQ ID NO: 787483 - protein, 210 aa, Homo sapiens
MRVSGFGAALGGSHHIPFPPGLGLALNFQPSLIMLNRYFSKRRPMANGLAAAGSPVFLCALSPLGQLLQDRYGWRGGFLILGGLLEVLMAIVGTHKFSSAIGLVLLMEAVAVLVGPPSGGKLLDATHVYMYVFILAGAEVLTSSLILLLGNFFCIRKKPKEPQPEVAAAEEEKLHKPPADSGVDLREVEHFLKAEPEKNGEVVHTPETSV

SEQ ID NO: 787484 - protein, 139 aa, Homo sapiens
GSSGRARPCPTSRQRRPRAAPLARKSRRPHRDRRGSGGEAEPTLLAMGGAVVDEGPTGVKAPDGGWGWAVLFGCFVITGFSYAFPKAVSVFFKAKLHKAIAIFSLLSLGSPEEEGGCPQLKHMEGREHLPAPQAQRQTG

SEQ ID NO: 787485 - protein, 97 aa, Homo sapiens
GAPLSLSKLLDATHVYMYVFILAGAEVLTSSLILLLGNFFCIRKKPKEPQPEVAAAEEEKLHKPPADSGVDLREVEHFLKAEPEKNGEVVHTPETSV

SEQ ID NO: 787486 - protein, 465 aa, Homo sapiens; identical to SEQ ID NO: 787474

SEQ ID NO: 787487 - protein, 465 aa, Homo sapiens; identical to SEQ ID NO: 787474

SEQ ID NO: 787488 - protein, 465 aa, Homo sapiens; identical to SEQ ID NO: 787474

SEQ ID NO: 787489 - protein, 486 aa, Homo sapiens
MGGAVVDEGPTGVKAPDGGWGWAVLFGCFVITGFSYAFPKAVSVFFKELIQEFGIGYSDTAWISSILLAMLYGTGPLCSVCVNRFGCRPVMLVGGLFASLGMVAASFCRSIIQVYLTTGVITGLGLALNFQPSLIMLNRYFSKRRPMANGLAAAGSPVFLCALSPLGQLLQDRYGWRGGFLILGGLLLNCCVCAALMRPLVVTAQPGSGPPRPSRRLLDLSVFRDRGFVLYAVAASVMVLGLFVPPVFVVSYAKDLGVPDTKAAFLLTILGFIDIFARPAAGFVAGLGKVRPYSVYLFSFSMFFNGLADLAGSTAGDYGGLVVFCIFFGISYGMVGALQFEVLMAIVGTHKFSSAIGLVLLMEAVAVLVGPPSGGERCAPRQFPTPALPVRRPLCEGGDAHPSAATRSVGLRAGGGALCWTNPDSAGASGSPLGVGCSVRHSVSRQAGWLGAGPGGGAAPPGSAWAPRGSSRQPNSRLLHFGASPF

SEQ ID NO: 787490 - protein, 364 aa, Homo sapiens
MVAASFCRSIIQVYLTTGVITGLGLALNFQPSLIMLNRYFSKRRPMANGLAAAGSPVFLCALSPLGQLLQDRYGWRGGFLILGGLLLNCCVCAALMRPLVVTAQPGSGPPRPSRRLLDLSVFRDRGFVLYAVAASVMVLGLFVPPVFVVSYAKDLGVPDTKAAFLLTILGFIDIFARPAAGFVAGLGKVRPYSVYLFSFSMFFNGLADLAGSTAGDYGGLVVFCIFFGISYGMVGALQFEVLMAIVGTHKFSSAIGLVLLMEAVAVLVGPPSGGKLLDATHVYMYVFILAGAEVLTSSLILLLGNFFCIRKKPKEPQPEVAAAEEEKLHKPPADSGVDLREVEHFLKAEPEKNGEVVHTPETSV

SEQ ID NO: 787491 - protein, 432 aa, Homo sapiens
MGGAVVDEGPTGVKAPDGGWGWAVLFGCFVITGFSYAFPKAVSVFFKELIQEFGIGYSDTAWISSILLAMLYGTGPLCSVCVNRFGCRPVMLVGGLFASLGMVAASFCRSIIQVYLTTGVITGLGLALNFQPSLIMLNRYFSKRRPMANGLAAAGSPVFLCALSPLGQLLQDRYGWRGGFLILGGLLLNCCVCAALMRPLVVTAQPGSGPPRPSRRLLDLSVFRDRGFVLYAVAASVMVLGLFVPPVFVVSYAKDLGVPDTKAAFLLTILGFIDIFARPAAGFVAGLGKVRPYSVYLFSFSMFFNGLADLAGSTAGDYGGLVVFCIFFGISYGMVGALQFEVLMAIVGTHKFSSAIGLVLLMEAVAVLVGPPSGGKLLDATHVYMYVFILAGAEEVQKPATLAIYFTNWTGSGRATAGLQLPAQRIVARSVF

SEQ ID NO: 787492 - protein, 164 aa, Homo sapiens; identical to SEQ ID NO: 787482

SEQ ID NO: 787493 - protein, 122 aa, Homo sapiens
MAIVGTHKFSSAIGLVLLMEAVAVLVGPPSGGKLLDATHVYMYVFILAGAEVLTSSLILLLGNFFCIRKKPKEPQPEVAAAEEEKLHKPPADSGVDLREVEHFLKAEPEKNGEVVHTPETSV

SEQ ID NO: 787494 - protein, 272 aa, Homo sapiens
MGGAVVDEGPTGVKAPDGGWGWAVLFGCFVITGFSYAFPKPVLPWAHMGPVPTPLECLGDSSFHPWKMEINLRVGGVLGPRRFPRSMWFCCVACVLTRTSADGLAVPTVALSSQLSLQRHSIRSRGRRCMEGAAGQVPGGRCARVASEMCQGAPTWWLDGAEVEQATLFTAVFKKQDPPAFPFSPLCLAGSVRGVVSAQGSVFAPCPPSSPAQRLGLSWTPNTHLPSWPAVACVAGSPVRGRRALSRCVVGAGDAVRCLAAACTGEIPFQLS

SEQ ID NO: 787495 - protein, 39 aa, Homo sapiens
GTLCIAVMKNVPSIVVKHGSHSTSAGSEQAPRPRLATHA

SEQ ID NO: 787496 - protein, 106 aa, Homo sapiens
  misc_feature (102)..(102): Xaa can be any naturally occurring amino acid
MGAWVPVMAQCPAQHTRQRWLPPRSPRSSPPPAGQLPQSPRDRCLPPSDCTGGCLVPGMGLDHVFPPSSALLQVGGSPPLGCPSSGSMSLEMQRCSELEPRXEPPL

SEQ ID NO: 787497 - protein, 106 aa, Homo sapiens
DTEAPKEGETSSRSGLVEWEEHGAGGREAWAHIPALPPGLGQPWASPFFPMGWASHGFRLRPELQGYLAGYGTEQGRMQTFRGLELVLAVILKHVNNVYKENVGGL

SEQ ID NO: 787498 - protein, 67 aa, Homo sapiens
ERTAARGHWGAGKRVSPNTQKVTREKWFLIGIVRNRPRLKTIIPELIKGYNVNKEKNTRLRVRKAQM

SEQ ID NO: 787499 - protein, 109 aa, Homo sapiens
MVLYESLGEKYRENRRNATNAGQNLGTTLLVSAEKPRGGSGAWLELRGECGRDGELPPINQSTDCPIFIVVPTQMSFESNLRILDARLFSRSASREIRGDYCTFGSGSA

SEQ ID NO: 787500 - protein, 116 aa, Homo sapiens [sequence omitted]

SEQ ID NO: 787501 - protein, 116 aa, Homo sapiens
MQLSPASTRCSWFGCWRPSRTNLIPSDSRIERQDTYPFPSHSLQPMLNAFRFFRVSENVIMRLLVIAGHACPSACHYQSCFLLAFSFFSPPSSLFLMDTPASSPACSLSLCPPAWS

SEQ ID NO: 787502 - protein, 90 aa, Homo sapiens
ELTLEDPQSLGDLVTPVIPELWEAEVGRLFELRSSRPACEIRRDPVSLCMLVPAGGAPGRCSLGCLLQGFCEGAGQGSSSWETWNSWQLL

SEQ ID NO: 787503 - protein, 251 aa, Homo sapiens
HEERVFKHVNDRQQTLSEYQDTGNTGDSSLKGYMNNGGISVIRQNTRAGSICQELESTDRCKTIGVGISNNGKNDLKEVGYQEMKGNQKNANGINKLYEQKKYVGTDNCKKEEYSKSRHVYLGRDQENMGHFNKCKHLPDLGHSDHLKKAEKCVKSKASKGNECSGNECSLKDILTSNRHMTQKSIIKEDIHPAPSTNSKDKLSGKIEEQINSTKYCKVNEDIKPKKTEAISAKKGTAKSKDEKYSKIIPE

SEQ ID NO: 787504 - protein, 102 aa, Homo sapiens [sequence omitted]

SEQ ID NO: 787505 - protein, 42 aa, Homo sapiens
EKVPTQAFTAIQNVVIIHPTHHHHTGATILIRIVKFKAILST

SEQ ID NO: 787506 - protein, 64 aa, Homo sapiens
RCVPRPPTMMTAEREAPGGGSLGRGRKQGGLQDSFPVPLVPRADDASRVIGSSLFQPPLTRLLA

SEQ ID NO: 787507 - protein, 81 aa, Homo sapiens
SSCKPSSTSKACEELFKEHQCLGSTDIPIHIQGGAPFSAVSPQRLVLRGSQDGSHMVRPRMPFPDSAGLANFHLFSKLFLD

SEQ ID NO: 787508 - protein, 437 aa, Homo sapiens
PAPSPAMKKLWVKKRFQKTGHSRRAFGRLTHVFRSCRKQSYDSETAEDDISDVQGTQRLELRDDGAFSTPTGGSDTLVGTSLDTPPTSVTGTSEEQVSWWGSGQTVLEQEAGSGGGTRRLPGSPSSVPQSGLRREEPDLQPQLASEAPRRPAQPPPSKSALLPPPSPRVGKRSPPGPPAQPAATPTSPHRRTQEPVLPEDTTTEEKRGKKSKSSGPSLAGTAESRPQTPLSEASGRLSALGRSPRLVRAGSRILDKLQFFEERRRSLERSDSPPAPLRPWVPLRKARSLEQPKSERGAPWGTPGASQEELRAPGSVAERRRLFQQKAASLDERTRQRSPASDLELRFAQELGRIRRSTSREELVRSHESLRATLQRAPSPREPGEPPLFSRPSTPKTSRAVSPAAAQPPSPSSAEKPGDEPGRPRSRGPAGRTEPGE

SEQ ID NO: 787509 - protein, 602 aa, Homo sapiens
MMQTDKGLVCKEGSKHNANIVIEGGPDSYWEAQVCGWTGHKQVCVCVCACVCVASGSTSKCQGYQNHWGSWNNKPKYGGPQCWAHPRYLPPHPLPQDTSGDWVPHAPSVLTALHALPHKRSDNSLSLSLSCCSYGSEVFRSCRKQSYDSETAEDDISDVQGTQRLELRDDGAFSTPTGGSDTLVGTSLDTPPTSVTGTSEEQVSWWGSGQTVLEQEAGSGGGTRRLPGSPRQAQATGAGPRHLGVEPLVRASRANLVGASWGSEDSLSVASDLYGSAFSLYRGRALSIHVSVPQSGLRREEPDLQPQLASEAPRRPAQPPPSKSALLPPPSPRVGKRSPPGPPAQPAATPTSPHRRTQEPVLPEDTTTEEKRGKKSKSSGPSLAGTAESRPQTPLSEASGRLSALGRSPRLVRAGSRILDKLQFFEERRRSLERSDSPPAPLRPWVPLRKARSLEQPKSERGAPWGTPGASQEELRAPGSVAERRRLFQQKAASLDERTRQRSPASDLELRFAQELGRIRRSTSREELVRSHESLRATLQRAPSPREPGEPPLFSRPSTPKTSRAVSPAAAQPPSPSSAEKPGDEPGRPRSRGPAGRTEPGE

SEQ ID NO: 787510 - protein, 1712 aa, Homo sapiens
MASGSRWRPTPPPLLLLLLLALAARADGLEFGGGPGQWARYARWAGAASSGELSFSLRTNATRALLLYLDDGGDCDFLELLLVDGRLRLRFTLSCAEPATLQLDTPVADDRWHMVLLTRDARRTALAVDGEARAAEVRSKRREMQVASDLFVGGIPPDVRLSALTLSTVKYEPPFRGLLANLKLGERPPALLGSQGLRGATADPLCAPARNPCANGGLCTVLAPGEVGCDCSHTGFGGKFCSEEEHPMEGPAHLTLNSEVGSLLFSEGGAGRGGAGDVHQPTKGKEEFVATFKGNEFFCYDLSHNPIQSSTDEITLAFRTLQRNGLMLHTGKSADYVNLSLKSGAVWLVINLGSGAFEALVEPVNGKFNDNAWHDVRVTRNLRQHAGIGHAMVNKLHYLVTISVDGILTTTGYTQEDYTMLGSDDFFYIGGSPNTADLPGSPVSNNFMGCLKDVVYKNNDFKLELSRLAKEGDPKMKLQGDLSFRCEDVAALDPVTFESPEAFVALPRWSAKRTGSISLDFRTTEPNGLLLFSQGRRAGGGAGSHSSAQRADYFAMELLDGHLYLLLDMGSGGIKLRASSRKVNDGEWCHVDFQRDGRKGSISVNSRSTPFLATGDSEILDLESELYLGGLPEGGRVDLPLPPEVWTAALRAGYVGCVRDLFIDGRSRDLRGLAEAQGAVGVAPFCSRETLKQCASAPCRNGGVCREGWNRFICDCIGTGFLGRVCEREATVLSYDGSMYMKIMLPNAMHTEAEDVSLRFMSQRAYGLMMATTSRESADTLRLELDGGQMKLTVNLDCLRVGCAPSKGPETLFAGHKLNDNEWHTVRVVRRGKSLQLSVDNVTVEGQMAGAHMRLEFHNIETGIMTERRFISVVPSNFIGHLSGLVFNGQPYMDQCKDGDITYCELNARFGLRAIVADPVTFKSRSSYLALATLQAYASMHLFFQFKTTAPDGLLLFNSGNGNDFIVIELVKGYIHYVFDLGNGPSLMKGNSDKPVNDNQWHNVVVSRDPGNVHTLKIDSRTVTQHSNGARNLDLKGELYIGGLSKNMFSNLPKLVASRDGFQGCLASVDLNGRLPDLIADALHRIGQVERGCDGPSTTCTEESCANQGVCLQQWDGFTCDCTMTSYGGPVCNDPGTTYIFGKGGALITYTWPPNDRPSTRMDRLAVGFSTHQRSAVLVRVDSASGLGDYLQLHIDQGTVGVIFNVGTDDITIDEPNAIVSDGKYHVVRFTRSGGNATLQVDSWPVNERYPAGNFDNERLAIARQRIPYRLGRVVDEWLLDKGRQLTIFNSQAAIKIGGRDQGRPFQGQVSGLYYNGLKVLALAAESDPNVRTEGHLRLVGEGPSVLLSAETTATTLLADMATTIMETTTTMATTTTRRGRSPTLRDSTTQNTDDLLVASAECPSDDEDLEECEPSTGGELILPIITEDSLDPPPVATRSPFVPPPPTFYPFLTGVGATQDTLPPPAARRPPSGGPCQAERDDSDCEEPIEASGFASGEVFDSSLPPTDDEDFYTTFPLVTDRTTLLSPRKPAPRPNLRTDGATGAPGVLFAPSAPAPNLPAGKMNHRDPLQPLLENPPLGPGAPTSFEPRRPPPLRPGVTSAPGFPHLPTANPTGPGERGPPGAVEVIRESSSTTGMVVGIVAAAALCILILLYAMYKYRNRDEGSYQVDQSRNYISNSAQSNGAVVKEKAPAAPKTPSKAKKNKDKEYYV

SEQ ID NO: 787511 - protein, 1705 aa, Homo sapiens
MASGSRWRPTPPPLLLLLLLALAARADGLEFGGGPGQWARYARWAGAASSGELSFSLRTNATRALLLYLDDGGDCDFLELLLVDGRLRLRFTLSCAEPATLQLDTPVADDRWHMVLLTRDARRTALAVDGEARAAEVRSKRREMQVASDLFVGGIPPDVRLSALTLSTVKYEPPFRGLLANLKLGERPPALLGSQGLRGATADPLCAPARNPCANGGLCTVLAPGEVGCDCSHTGFGGKFCSEEEHPMEGPAHLTLNSEVGSLLFSEGGAGRGGAGDVHQPTKGKEEFVATFKGNEFFCYDLSHNPIQSSTDEITLAFRTLQRNGLMLHTGKSADYVNLSLKSGAVWLVINLGSGAFEALVEPVNGKFNDNAWHDVRVTRNLRQHAGIGHAMVTISVDGILTTTGYTQEDYTMLGSDDFFYIGGSPNTADLPGSPVSNNFMGCLKDVVYKNNDFKLELSRLAKEGDPKMKLQGDLSFRCEDVAALDPVTFESPEAFVALPRWSAKRTGSISLDFRTTEPNGLLLFSQGRRAGGGAGSHSSAQRADYFAMELLDGHLYLLLDMGSGGIKLRASSRKVNDGEWCHVDFQRDGRKGSISVNSRSTPFLATGDSEILDLESELYLGGLPEGGRVDLPLPPEVWTAALRAGYVGCVRDLFIDGRSRDLRGLAEAQGAVGVAPFCSRETLKQCASAPCRNGGVCREGWNRFICDCIGTGFLGRVCEREATVLSYDGSMYMKIMLPNAMHTEAEDVSLRFMSQRAYGLMMATTSRESADTLRLELDGGQMKLTVNLDCLRVGCAPSKGPETLFAGHKLNDNEWHTVRVVRRGKSLQLSVDNVTVEGQMAGAHMRLEFHNIETGIMTERRFISVVPSNFIGHLSGLVFNGQPYMDQCKDGDITYCELNARFGLRAIVADPVTFKSRSSYLALATLQAYASMHLFFQFKTTAPDGLLLFNSGNGNDFIVIELVKGYIHYVFDLGNGPSLMKGNSDKPVNDNQWHNVVVSRDPGNVHTLKIDSRTVTQHSNGARNLDLKGELYIGGLSKNMFSNLPKLVASRDGFQGCLASVDLNGRLPDLIADALHRIGQVERGCDGPSTTCTEESCANQGVCLQQWDGFTCDCTMTSYGGPVCNDPGTTYIFGKGGALITYTWPPNDRPSTRMDRLAVGFSTHQRSAVLVRVDSASGLGDYLQLHIDQGTVGVIFNVGTDDITIDEPNAIVSDGKYHVVRFTRSGGNATLQVDSWPVNERYPAGNFDNERLAIARQRIPYRLGRVVDEWLLDKGRQLTIFNSQAAIKIGGRDQGRPFQGQVSGLYYNGLKVLALAAESDPNVRTEGHLRLVGEGPSVLLSAETTATTLLADMATTIMETTTTMATTTTRRGRSPTLRDSTTQNTDDLLVASAECPSDDEDLEECEPSTGGELILPIITEDSLDPPPVATRSPFVPPPPTFYPFLTGVGATQDTLPPPAARRPPSGGPCQAERDDSDCEEPIEASGFASGEVFDSSLPPTDDEDFYTTFPLVTDRTTLLSPRKPAPRPNLRTDGATGAPGVLFAPSAPAPNLPAGKMNHRDPLQPLLENPPLGPGAPTSFEPRRPPPLRPGVTSAPGFPHLPTANPTGPGERGPPGAVEVIRESSSTTGMVVGIVAAAALCILILLYAMYKYRNRDEGSYQVDQSRNYISNSAQSNGAVVKEKAPAAPKTPSKAKKNKDKEYYV

SEQ ID NO: 787512 - protein, 830 aa, Homo sapiens
MRLEFHNIETGIMTERRFISVVPSNFIGHLSGLVFNGQPYMDQCKDGDITYCELNARFGLRAIVADPVTFKSRSSYLALATLQAYASMHLFFQFKTTAPDGLLLFNSGNGNDFIVIELVKGYIHYVFDLGNGPSLMKGNSDKPVNDNQWHNVVVSRDPGNVHTLKIDSRTVTQHSNGARNLDLKGELYIGGLSKNMFSNLPKLVASRDGFQGCLASVDLNGRLPDLIADALHRIGQVERGCDGPSTTCTEESCANQGVCLQQWDGFTCDCTMTSYGGPVCNDPGTTYIFGKGGALITYTWPPNDRPSTRMDRLAVGFSTHQRSAVLVRVDSASGLGDYLQLHIDQGTVGVIFNVGTDDITIDEPNAIVSDGKYHVVRFTRSGGNATLQVDSWPVNERYPAGRQLTIFNSQAAIKIGGRDQGRPFQGQVSGLYYNGLKVLALAAESDPNVRTEGHLRLVGEGPSVLLSAETTATTLLADMATTIMETTTTMATTTTRRGRSPTLRDSTTQNTDDLLVASAECPSDDEDLEECEPSTGGELILPIITEDSLDPPPVATRSPFVPPPPTFYPFLTGVGATQDTLPPPAARRPPSGGPCQAERDDSDCEEPIEASGFASGEVFDSSLPPTDDEDFYTTFPLVTDRTTLLSPRKPAPRPNLRTDGATGAPGVLFAPSAPAPNLPAGKMNHRDPLQPLLENPPLGPGAPTSFEPRRPPPLRPGVTSAPGFPHLPTANPTGPGERGPPGAVEVIRESSSTTGMVVGIVAAAALCILILLYAMYKYRNRDEGSYQVDQSRNYISNSAQSNGAVVKEKAPAAPKTPSKAKKNKDKEYYV

SEQ ID NO: 787513 - protein, 840 aa, Homo sapiens
MASGSRWRPTPPPLLLLLLLALAARADGLEFGGGPGQWARYARWAGAASSGELSFSLRTNATRALLLYLDDGGDCDFLELLLVDGRLRLRFTLSCAEPATLQLDTPVADDRWHMVLLTRDARRTALAVDGEARAAEVRSKRREMQVASDLFVGGIPPDVRLSALTLSTVKYEPPFRGLLANLKLGERPPALLGSQGLRGATADPLCAPARNPCANGGLCTVLAPGEVGCDCSHTGFGGKFCSEEEHPMEGPAHLTLNSEVGSLLFSEGGAGRGGAGDVHQPTKGKEEFVATFKGNEFFCYDLSHNPIQSSTDEITLAFRTLQRNGLMLHTGKSADYVNLSLKSGAVWLVINLGSGAFEALVEPVNGKFNDNAWHDVRVTRNLRQHAGIGHAMVTISVDGILTTTGYTQEDYTMLGSDDFFYIGGSPNTADLPGSPVSNNFMGCLKDVVYKNNDFKLELSRLAKEGDPKMKLQGDLSFRCEDVAALDPVTFESPEAFVALPRWSAKRTGSISLDFRTTEPNGLLLFSQGRRAGGGAGSHSSAQRADYFAMELLDGHLYLLLDMGSGGIKLRASSRKVNDGEWCHVDFQRDGRKGSISVNSRSTPFLATGDSEILDLESELYLGGLPEGGRVDLPLPPEVWTAALRAGYVGCVRDLFIDGRSRDLRGLAEAQGAVGVAPFCSRETLKQCASAPCRNGGVCREGWNRFICDCIGTGFLGRVCEREATVLSYDGSMYMKIMLPNAMHTEAEDVSLRFMSQRAYGLMMATTSRESADTLRLELDGGQMKLTVNLGNHPALCFLTPHLALSLTHTCLCLEKLVVAPARGALSRVWRWGGASLGQRP

SEQ ID NO: 787514 - protein, 1675 aa, Homo sapiens
MASGSRWRPTPPPLLLLLLLALAARADGLEFGGGPGQWARYARWAGAASSGELSFSLRTNATRALLLYLDDGGDCDFLELLLVDGRLRLRFTLSCAEPATLQLDTPVADDRWHMVLLTRDARRTALAVDGEARAAEVRSKRREMQVASDLFVGGIPPDVRLSALTLSTVKYEPPFRGLLANLKLGERPPALLGSQGLRGATADPLCAPARNPCANGGLCTVLAPGEVGCDCSHTGFGGKFCSEEEHPMEGPAHLTLNSEVGSLLFSEGGAGRGGAGDVHQPTKGKEEFVATFKGNEFFCYDLSHNPIQSSTDEITLAFRTLQRNGLMLHTGKSADYVNLSLKSGAVWLVINLGSGAFEALVEPVNGKFNDNAWHDVRVTRNLRQHAGIGHAMVTISVDGILTTTGYTQEDYTMLGSDDFFYIGGSPNTADLPGSPVSNNFMGCLKDVVYKNNDFKLELSRLAKEGDPKMKLQGDLSFRCEDVAALDPVTFESPEAFVALPRWSAKRTGSISLDFRTTEPNGLLLFSQGRRAGGGAGSHSSAQRADYFAMELLDGHLYLLLDMGSGGIKLRASSRKVNDGEWCHVDFQRDGRKGSISVNSRSTPFLATGDSEILDLESELYLGGLPEGGRVDLPLPPEVWTAALRAGYVGCVRDLFIDGRSRDLRGLAEAQGAVGVAPFCSRETLKQCASAPCRNGGVCREGWNRFICDCIGTGFLGRVCEREATVLSYDGSMYMKIMLPNAMHTEAEDVSLRFMSQRAYGLMMATTSRESADTLRLELDGGQMKLTVNLDCLRVGCAPSKGPETLFAGHKLNDNEWHTVRVVRRGKSLQLSVDNVTVEGQMAGAHMRLEFHNIETGIMTERRFISVVPSNFIGHLSGLVFNGQPYMDQCKDGDITYCELNARFGLRAIVADPVTFKSRSSYLALATLQAYASMHLFFQFKTTAPDGLLLFNSGNGNDFIVIELVKGYIHYVFDLGNGPSLMKGNSDKPVNDNQWHNVVVSRDPGNVHTLKIDSRTVTQHSNGARNLDLKGELYIGGLSKNMFSNLPKLVASRDGFQGCLASVDLNGRLPDLIADALHRIGQVERGCDGPSTTCTEESCANQGVCLQQWDGFTCDCTMTSYGGPVCNDPGTTYIFGKGGALITYTWPPNDRPSTRMDRLAVGFSTHQRSAVLVRVDSASGLGDYLQLHIDQGTVGVIFNVGTDDITIDEPNAIVSDGKYHVVRFTRSGGNATLQVDSWPVNERYPAGRQLTIFNSQAAIKIGGRDQGRPFQGQVSGLYYNGLKVLALAAESDPNVRTEGHLRLVGEGPSVLLSAETTATTLLADMATTIMETTTTMATTTTRRGRSPTLRDSTTQNTDDLLVASAECPSDDEDLEECEPSTGGELILPIITEDSLDPPPVATRSPFVPPPPTFYPFLTGVGATQDTLPPPAARRPPSGGPCQAERDDSDCEEPIEASGFASGEVFDSSLPPTDDEDFYTTFPLVTDRTTLLSPRKPAPRPNLRTDGATGAPGVLFAPSAPAPNLPAGKMNHRDPLQPLLENPPLGPGAPTSFEPRRPPPLRPGVTSAPGFPHLPTANPTGPGERGPPGAVEVIRESSSTTGMVVGIVAAAALCILILLYAMYKYRNRDEGSYQVDQSRNYISNSAQSNGAVVKEKAPAAPKTPSKAKKNKDKEYYV

SEQ ID NO: 787515 - protein, 925 aa, Homo sapiens
ETCDFLQERLMTVHHVQATSATPYAMELVWVADEAHCQARLPARRRAPSKGPETLFAGHKLNDNEWHTVRVVRRGKSLQLSVDNVTVEGQMAGAHMRLEFHNIETGIMTERRFISVVPSNFIGHLSGLVFNGQPYMDQCKDGDITYCELNARFGLRAIVADPVTFKSRSSYLALATLQAYASMHLFFQFKTTAPDGLLLFNSGNGNDFIVIELVKGYIHYVFDLGNGPSLMKGNSDKPVNDNQWHNVVVSRDPGNVHTLKIDSRTVTQHSNGARNLDLKGELYIGGLSKNMFSNLPKLVASRDGFQGCLASVDLNGRLPDLIADALHRIGQVERGCDGPSTTCTEESCANQGVCLQQWDGFTCDCTMTSYGGPVCNDPGTTYIFGKGGALITYTWPPNDRPSTRMDRLAVGFSTHQRSAVLVRVDSASGLGDYLQLHIDQGTVGVIFNVGTDDITIDEPNAIVSDGKYHVVRFTRSGGNATLQVDSWPVNERYPAGRQLTIFNSQAAIKIGGRDQGRPFQGQVSGLYYNGLKVLALAAESDPNVRTEGHLRLVGEGPSVLLSAETTATTLLADMATTIMETTTTMATTTTRRGRSPTLRDSTTQNTDDLLVASAECPSDDEDLEECEPSTGGELILPIITEDSLDPPPVATRSPFVPPPPTFYPFLTGVGATQDTLPPPAARRPPSGGPCQAERDDSDCEEPIEASGFASGEVFDSSLPPTDDEDFYTTFPLVTDRTTLLSPRKPAPRPNLRTDGATGAPGVLFAPSAPAPNLPAGKMNHRDPLQPLLENPPLGPGAPTSFEPRRPPPLRPGVTSAPGFPHLPTANPTGPGERGPPGAVEVIRESSSTTGMVVGIVAAAALCILILLYAMYKYRNRDEGSYQVDQSRNYISNSAQSNGAVVKEKAPAAPKTPSKAKKNKDKEYYV

SEQ ID NO: 787516 - protein, 117 aa, Homo sapiens [sequence omitted]

SEQ ID NO: 787517 - protein, 66 aa, Homo sapiens
EYQVTPEPPGKAVTTPDINSNLITQEQVLVLATSEQTSGQSKQIWPGAVAYACNPSTLGGRDGQIT

SEQ ID NO: 787518 - protein, 105 aa, Homo sapiens
LNLLFLLSQKRVAEFHMELEWLPAKDIQTNVYTKNPVSLEQYLMEGSYNKVFLAKGNILAKSYTVFIDILLDTIRDEMAGCIKKAYEKIPFTEATRSSSSTHPKR

SEQ ID NO: 787519 - protein, 129 aa, Homo sapiens
LQSAGPVLGTGDSAVNKTKSLPSWSLLLRGLDYSQFCELPCCFVPLLECACPQLIFLDSVCWNFRTQRRCSDPTSITTLLFMSSLCCVLQASSSPGPGLTRLCVSSTYSSAQRITDASKCLLNEKHTSM

SEQ ID NO: 787520 - protein, 642 aa, Homo sapiens
APAATSAPTPTPAASPAPADGSKPQESVALPRRYQEGQVSASWGNLIAMVLRSHPFPRQDRPQGSVPRAVPGSPVGPSTSTHSEDRHGPSSSVGTVIGTGTGGLVEAGGQPQPRSSETNGSPSPDPPPGLRGEGTREKSLDPLPQAAMPRGPAQPPAQRPPGPAASSSARRSQPVPQLRKRSRCEIAPSSEQEVRPAASGDPQGEAPGEGGSPAGRSGALTEKQEEARKLMVFLQRPGGWGVVEGPRKPSSRALEPATAAALRRRLDLGSCLDVLAFAQQHGEPGLAQETYALMSDNLLRVLGDPCLYRRLSAADRERILSLRTGRGRAVLGVLVLPSLYQGGRSGLPRGPRGEEPPAAAPVSLPLPAHLHVFNPRENTWRPLTQVPEEAPLRGCGLCTMHNYLFLAGGIRGSGAKAVCSNEVFCYNPLTNIWSQVRPMQQARAQLKLVALDGLLYAIGGECLYSMECYDPRTDAWTPRAPLPAGTFPVAHEAVACRGDIYVTGGHLFYRLLRYSPVKDAWDECPYSASHRRSSDIVALGGFLYRFDLLRGVGAAVMRYNTVTGSWSRAASLPLPAPAPLHCTTLGNTIYCLNPQVTATFTVSGGTAQFQAKELQPFPLGSTGVLSPFILTLPPEDRLQTSL

SEQ ID NO: 787521 - protein, 37 aa, Homo sapiens
MPNLSSSKPSSQNSWKEAHCQRATYYSQSWGRRGREF

SEQ ID NO: 787522 - protein, 87 aa, Homo sapiens
WQFRHNPMANRNHSLFKALSVWAATPQHPAQCTLSRKRSELSAQRTFQKPSASAEHTTFKIFRKAQSGICKYGKKSLVKAQLDPEHV

SEQ ID NO: 787523 - protein, 42 aa, Homo sapiens
MVWRRFTAPQRAPPDIIQSTKHRAWAKANVTSGFLIDVGILE

SEQ ID NO: 787524 - protein, 104 aa, Homo sapiens
PARRFLAEQGRELGRRRAQAGARSAPASLAPPGGAPRSHRPQIASRAPARREPCAHPQLCCRRGRGSRVRVRVCLSLAASWGQQRKGGRRERQPRRTAAREAEA

SEQ ID NO: 787525 - protein, 65 aa, Homo sapiens
ALFAKSLLCRAPTQGKIQGSLHFREWSPRLGTDQLCVSFGLLAPLLVSIASWTHRDFIFSSFLAP

SEQ ID NO: 787526 - protein, 310 aa, Homo sapiens
MAQLQTRFYTDNKKYAVDDVPFSIPAASEIADLSNIINKLLKDKNEFHKHVEFDFLIKGQFLRMPLDKHMEMENISSEEVVEIEYVEKYTAPQPEQCMFHDDWISSIKGAEEWILTGSYDKTSRIWSLEGKSIMTIVGHTDVVKDVAWVKKDSLSCLLLSASMDQTILLWEWNVERNKVKALHCCRGHAGSVDSIAVDGSGTKFCSGSWDKMLKIWSTVPTDEEDEMEESTNRPRKKQKTEQLGLTRTPIVTLSGHMEAVSSVLWSDAEEICSASWDHTIRVWDVESGSLKSTLTGNKSVIIVFPNSPLS

SEQ ID NO: 787527 - protein, 204 aa, Homo sapiens
MVVSGAEILTGSYDKTSRIWSLEGKSIMTIVGHTDVVKDVAWVKKDSLSCLLLSASMDQTILLWEWNVERNKVKALHCCRGHAGSVDSIAVDGSGTKFCSGSWDKMLKIWSTVPTDEEDEMEESTNRPRKKQKTEQLGLTRTPIVTLSGHMEAVSSVLWSDAEEICSASWDHTIRVWDVESGSLKSTLTGNKSVIIVFPNSPLS

SEQ ID NO: 787528 - protein, 35 aa, Homo sapiens
TCNPHPSNTKLLPTPNCTNWIFFATVFSHMFFPPH

SEQ ID NO: 787529 - protein, 84 aa, Homo sapiens
RLPGWARGLFQPVLQLGLGHTAAGSQMKPAGARPQPMNQRCPKEHLGQQRDFPMEEGRPRGHVGWTSLGPSAKADLLLQVPLSS

SEQ ID NO: 787530 - protein, 200 aa, Homo sapiens
AWAATVMAAAAPNAGGSAPETAGSAEAPLQYSLLLQYLVGDKRQPRLLEPGSLGGIPSPAKSEEQKMIEKAMESCAFKAALACVGGFVLGGAFGVFTAGIDTNVGFDPKDPYRTPTAKEVLKDMGQRGMSYAKNFAIVGAMFSCTECLIESYRGTSDWKNSVISGCITGGAIGFRAGLKAGAIGCGGFAAFSAAIDYYLR

SEQ ID NO: 787531 - protein, 200 aa, Homo sapiens; identical to SEQ ID NO: 787530

SEQ ID NO: 787532 - protein, 145 aa, Homo sapiens
MDGAILLILAIKRNPKSRMEELDISNVLVSEQFMKTLDGVYAVHPQLDVVFKAVQGLSPKKTIFLLTNPMKLIQSYADQHKITIVDFFKSLNPTGTMKMSVDEFQKVMIEQNKVPLNQYQVREVIKKLDEKTGMVNFSFLNTMKP

SEQ ID NO: 787533 - protein, 113 aa, Homo sapiens
QLPSSSGKISSGNSFPPQQAGSPLKRPFPAAAPAVAAAAPAPAPAPAAAPALAAAAVAAAAGGAAPSHSQKPSVPLIKASRRRPAAGRPTRFVKIAPAIQVRTGSTGLKATNV

SEQ ID NO: 787534 - protein, 102 aa, Homo sapiens
GIPQVLDPPQELFISWAHLSILIVLNISQIQFCYEILNGAAPCSVLKWLAFHYEDKPRSSGHWSDKLASHHSVLPCSHLPPSLLLEPSEFCTVRLFLQSSHG

SEQ ID NO: 787535 - protein, 41 aa, Homo sapiens
MWAGEAACRWNQQYLEKEFLKVVEHREESGKIPGTVVAGGL

SEQ ID NO: 787536 - protein, 163 aa, Homo sapiens
MLIGTKKDFEDLYTPVNGSIVIVRAGKITFAEKVANAESLNAIGVLIYMDQTKFPIVNAELSFFGHAHLGTGDPYTPGFPSFNHTQFPPSRSSGLPNIPVQTISRAAAEKLFGNMEGDCPSDWKTDSTCRMVTSESKNVKLTVSNVLKEITKFLTSLELLKAL

SEQ ID NO: 787537 - protein, 318 aa, Homo sapiens
QSERQGSMSRSPLNPSQLRSVGSQDALAPLPPPAPQNPSTHSWDPLCGSLPWGLSCLLALQHVLVMASLLCVSHLLLLCSLSPGGLSYSPSQLLASSFFSCGMSTILQTWMGSRLPLVQAPSLEFLIPALVLTSQKLPRAIQTPGNSSLMLHLCRGPSCHGLGHWNTSLQEVSGAVVVSGLLQGMMGLLGSPGHVFPHCGPLVLAPSLVVAGLSAHREVAQFCFTHWGLALLTWAPASFMCAPGGELQRHQLTLLSLSSGSFSATVCPNQGHHGFGLLHPMLDPSSGSLSGDSELGLESPQVLDLHHIHSVERVPGYQ

SEQ ID NO: 787538 - protein, 100 aa, Homo sapiens
MGGLGEGRTAGPIRFSSDWNRDIFYIWNPRLFLDSSGLLEFHTVFCCPPRSLPIPSMGVSFSGITPRSYDILPTPTSFPILRSSRSLLLPSASQVILAPP

SEQ ID NO: 787539 - protein, 77 aa, Homo sapiens
MGLLGSPGHVFPHCGPLVLAPSLVVAGLSAHREVAQFCFTHWGLALLYVSPERRGMVPSGGVCSVLAPLSTPHLSFP

SEQ ID NO: 787540 - protein, 328 aa, Homo sapiens
QSERQGSMSRSPLNPSQLRSVGSQDALAPLPPPAPQNPSTHSWDPLCGSLPWGLSCLLALQHVLVMASLLCVSHLLLLCSLSPGGLSYSPSQLLASSFFSCGMSTILQTWMGSRLPLVQAPSLEFLIPALVLTSQKLPRAIQTPGNSSLMLHLCRGPSCHGLGHWNTSLQEVSGAVVVSGLLQGMMGLLGSPGHVFPHCGPLVLAPSLVVAGLSAHREVAQFCFTHWGLALLVILLMVVCSQHLGSCQFHVCPWRRASTSSTHTPLPVFRLLFGNCLPQPRPPWIRAASPHAGPQQWLPYVGYSELGLESPQVLDLHHIHSVERVPGY

SEQ ID NO: 787541 - protein, 130 aa, Homo sapiens
VILLMVVCSQHLGSCQFHVCPWRRASTSSTHTPLPVFRLLSVCVGLGRAVEVRRAGPGVLTPSPTFWLLSTPARLAQKVLGEEFFSQSRPSGADPSGLCVDCFCLCGIQCYPPGTVCPHQGTMDLAASPR

SEQ ID NO: 787542 - protein, 111 aa, Homo sapiens
KKKKNLWAVACLSLPSSRGRQGRSASWFWKKPRTSYRLRLSCWFSYNAASLQSCLIFQGAEIAKLVSILTYEMKGELGRKGEGGNLIITVRCMRGNFMQAGGQNFFHLYWE

SEQ ID NO: 787543 - protein, 31 aa, Homo sapiens
MHHLKENVGPMEHAPPLHKEAVDKLRMDQDS

SEQ ID NO: 787544 - protein, 76 aa, Homo sapiens
QRMLSVDLAGSPSKNGIQPAFNAYGWAIVSQTFYAQYFHKGTHAERGEDLPVSFYACMRHSQWMWAMLEDVHRKII

SEQ ID NO: 787545 - protein, 108 aa, Homo sapiens
KVQLLPSGHLCMEPPTAVPQNRSEVTFRGAGHMYAGACCPHPLALLLFLFLRWSLALSPRLERSGVISAHRKLRLPGSRHSPASASQVAGATGTRHHTRLIFFVFLVE

SEQ ID NO: 787546 - protein, 98 aa, Homo sapiens
MVHKEQHENTSNEELQTRTVETPHTRTHTTKRTVFTHLGSEETVEREVRDPERRDRLKQGRGCGELRSRHCTPAWATRVKILLKTNKHTSTLKFHTFS

SEQ ID NO: 787547 - protein, 110 aa, Homo sapiens
MVHSALNSDRLAVSNYQAETSLEPRPPLPPSAVPGPPTRRSGPRGCLPASWGFCPFSYRLPPSCCYVSRLESDYPSSKVVGGGPGSGRPHHQLPAGTSRRRAARKMAWAA

SEQ ID NO: 787548 - protein, 104 aa, Homo sapiens
MLLQQGQGPCQPPTRHTRESPACEGATPRAGIRMKTRLHSEHGARDRTQRGRPAREAFTLQTARSTYTPTGLHDSPQVPCHLRHLPPRPLSVTPSAVHLQKAWN

SEQ ID NO: 787549 - protein, 97 aa, Homo sapiens
PGLVGKWEGACHWRALGWGLSSESLPAPRSSRRRQLGTTHAHLVSLTPPLGVPTSEPRHTVKPVFRRAQLSPPHPGSSVPPAETSPPASKQEGLRLD

SEQ ID NO: 787550 - protein, 143 aa, Homo sapiens
LSVVTIIICFTCSCCCLYKTCRRPRPVVTTTTSTTVVHAPYPQPPSVPPSYPGPSYQGYHNFLVEDGKELLGAHHAITQFYPDDEVTAIIASFSITSVQRSDNGSYICKMKINNEEIVSDPIYIEVQGLPHFTKQQQQYGSGD

SEQ ID NO: 787551 - protein, 163 aa, Homo sapiens
PPSLALVGPWSAAPQLQPQSRGALRPLPGPGILQTPINRWQSRGWLEIFRDSKSGRRSRESSRERKVTRHISRKSTVSREMKDSQVGRGAAKEEAPQTESGGEQKGFGARADRAVWYRDSKRGQPMTRRSRGRTTARGGLGSGGAKEWGQRCVTGKREFNREC

SEQ ID NO: 787552 - protein, 162 aa, Homo sapiens
KPPAEPAPLLLNVTDQILPGATPSAEGKRKRNKSVSNMEKASIEPPEEEEEERPVVNGNGVVVTPESSEHEDKSAGASGEMPSQPYPAPVYSQPEELKEQMDDTKPTKPEDNEEPDPLPDNWEMAYTEKGEVYFIDHNTKTTSWLDPRLAKKAKPPEECKEN

SEQ ID NO: 787553 - protein, 138 aa, Homo sapiens
MFSCLSSLQVHPLLLKAFCFQPLRGSSSPSSAPPQGSVSRFGALFHYHKFHQLFPALKSSILILALCFYPHPLFQKPWPVSPWVPLSVTLVSIPEPVCFLPAVTHCQPHPGGPPCHCQPASLYVTNSAHSPPASSITQ

SEQ ID NO: 787554 - protein, 106 aa, Homo sapiens
LCPNLAAAHYSDRKLPTVFCQTHYSGSHNGLRPRLESSGFPGCADGLETWPRGRDQHSLVSCISTKCCDTRNGPQNVSGQHSFVFASHFSVAVKYCGKAKVQTHVH

SEQ ID NO: 787555 - protein, 420 aa, Homo sapiens
LTSAGEYYGLSCAGCCFSAPGSGQGGKRRVNMELSAVGERVFAAEALLKRRIRKGRMEYLVKWKGWSQKYSTWEPEENILDARLLAAFEEREREMELYGPKKRGPKPKTFLLKAQAKAKAKTYEFRSDSARGIRIPYPGRSPQDLASTSRAREGLRNMGLSPPASSTSTSSTCRAEAPRDRDRDRDRDRERDRERERERERERERERERERGTSRVDDKPSSPGDSSKKRGPKPRKELPDPSQRPLGEPSAGLGEYLKGRKLDDTPSGAGKFPAGHSVIQLARRQDSDLVQCGVTSPSSAEATGKLAVDTFPARVIKHRAAFLEAKGQGALDPNGTRVRHGSGPPSSVGGLYRDMGAQGGRPSLIARIPVARILGDPEEESWSPSLTNLEKVVVTDVTSNFLTVTIKESNTDQGFFKEKR

SEQ ID NO: 787556 - protein, 364 aa, Homo sapiens [sequence omitted]

SEQ ID NO: 787557 - protein, 420 aa, Homo sapiens; identical to SEQ ID NO: 787555

SEQ ID NO: 787558 - protein, 396 aa, Homo sapiens
HWTRRRPPASRAGVSRRMSAAHVGKSGGQEGRMEYLVKWKGWSQKYSTWEPEENILDARLLAAFEEREREMELYGPKKRGPKPKTFLLKAQAKAKAKTYEFRSDSARGIRIPYPGRSPQDLASTSRAREGLRNMGLSPPASSTSTSSTCRAEAPRDRDRDRDRDRERDRERERERERERERERERERGTSRVDDKPSSPGDSSKKRGPKPRKELPDPSQRPLGEPSAGLGEYLKGRKLDDTPSGAGKFPAGHSVIQLARRQDSDLVQCGVTSPSSAEATGKLAVDTFPARVIKHRAAFLEAKGQGALDPNGTRVRHGSGPPSSVGGLYRDMGAQGGRPSLIARIPVARILGDPEEESWSPSLTNLEKVVVTDVTSNFLTVTIKESNTDQGFFKEKR

SEQ ID NO: 787559 - protein, 126 aa, Homo sapiens
TSPPPSPHLEAHSTLSIPLPAASSPLRLIILRTAAGVTSQKHRSHLLLPCSTLSQDFLFSPKVQTSHWDFQDLSSSLPVPLLTPDPAFLGPSLSQTGQALPGVGFMIKSNGAGSAYWANGLAFAVG

SEQ ID NO: 787560 - protein, 126 aa, Homo sapiens; identical to SEQ ID NO: 787559

SEQ ID NO: 787561 - protein, 120 aa, Homo sapiens
FPEHCIPNIYRKFPLLPYLLGISIWMSVISHSTCLKLDSYFPFLNLFLKSFLLSADGNSNFHLLIPQKLVSSSTSLSLLDLISSPSMSLIPSTIKIYSESDHFHPLHCCHPYLFRHLIPP

SEQ ID NO: 787562 - protein, 103 aa, Homo sapiens
HLTFLVLQSKRTSSASHFLTVADSPCSLLAWPDFRGPLCRLRCGVHFNRDLALVLSPSNLFGYSHSTPHSVFYSSFLPFLSSTFFLPIASLPPFPSSLPFELH

SEQ ID NO: 787563 - protein, 102 aa, Homo sapiens
IQMALKQVIVEHASYRCVLSENFQQLGFRASLLSEFLIQTPLERRGEGGKEGTTHQGTWYCSMCSNTWSSGGRWRFTGHMNMMRVSRIAATSPGAGLQVGAA

SEQ ID NO: 787564 - protein, 134 aa, Homo sapiens [sequence omitted]

SEQ ID NO: 787565 - protein, 118 aa, Homo sapiens
QSKTVSKKLKKLKKNKSKEGLLRLSWLDLLGDLVLPALCLTYSQQINCLFLVGQIKLFKRLQVPSSTESMGKHILPYILLETNTVGPPTADHYAYDGCICTDPCTHFFSCHYSVNNTV

SEQ ID NO: 787566 - protein, 115 aa, Homo sapiens
MFSGPSTAHGHSMDIPYYFGPDSFVEPGINAHIWSFLSPSLQISGLFKSLRGTLLEAHSMDTLVNINGVLLGHHLVDGIMAILLTILLCRRPSCLNVLGSRHLSYKSPDLAGHNG

SEQ ID NO: 787567 - protein, 111 aa, Homo sapiens
ASEDAVQGIAKEDAAQGIANEDAAQGIANEDAAQGIAKEDAAHGIANELYTTSLTRTPYKPSLTSTLYTTSLMRALYKTSPMRALYTTLLMAPTRHANVDAVHDIANEDSV

SEQ ID NO: 787568 - protein, 77 aa, Homo sapiens
DKEYAGRLVLENTRGKYVGIEDESAVVGVLVGSVPLVAIDLMVREAESGGLLEARSSRLQCTIIMPMNSHCNPAWAT

SEQ ID NO: 787569 - protein, 218 aa, Homo sapiens
MSGALDVLQMKEEDVLKFLAAGTHLGGTNLDFQMEQYIYKRKSDGIYIINLKRTWEKLLLAARAIVAIENPADVSVISSRNTGQRAVLKFAAATGATPIAGRFTPGTFTNQIQAAFREPRLLVVTDPRADHQPLTEASYVNLPTIALCNTDSPLRYVDIAIPCNNKGAHSVGLMWWMLAREVLRMRGTISREHPWEVMPDLYFYRDPEEIEQRRAGCC

SEQ ID NO: 787570 - protein, 511 aa, Homo sapiens
RVRCILAPVARLGPALRRGAAHIFTSGSPLSGTMATDSWALAVDEQEAAVKSMTNLQIKEEKVKADTNGIIKTSTTAEKTDEEEKEDRAAQSLLNKLIRSNLVDNTNQVEVLQRDPNSPLYSVKSFEELRLKPQLLQGVYAMGFNRPSKIQENALPMMLAEPPQNLIAQSQSGTGKTAAFVLAMLSRVEPSDRYPQCLCLSPTYELALQTGKVIEQMGKFYPELKLAYAVRGNKLERGQKISEQIVIGTPGTVLDWCSKLKFIDPKKIKVFVLDEADVMIATQGHQDQSIRIQRMLPRNCQMLLFSATFEDSVWKLPRKWSQTQMLSNWKREEETLDTIKQYYVLCSSRDEKFQALCNLYGAITIAQAMIFCHTRKTASWLAAELSKEGHQVALLSGEMMVEQRAAVIERFREGKEKVVVTTNVCARGIDVEQVSVVINFDLPVDKDGNPDNETYLHRIGRTGRFGKRGLAVNMVDSKHSMNILNRIQEHFNKKIERLDTDDLDEIEKIAN

SEQ ID NO: 787571 - protein, 475 aa, Homo sapiens
LVGRKAFCIYKQPAAPLSEGTRRGGAARPEEAAEEGPPAAPGSLRHSGPLGPHACPTALPEPQVTSAMSSQVVGIEPLYIKAEPASPDSPKGSSETETEPPVALAPGPAPTRCLPGHKEEEDGEGAGPGEQGGGKLVLSSLPKRLCLVCGDVASGYHYGVASCEACKAFFKRTIPGSIEYSCPASNECEITKRRRKACQACRFTKCLRVGMLKEGVRLDRVRGGRQKYKRRPEVDPLPFPGPFPAGPLAVAGGPRKTAAPVNALVSHLLVVEPEKLYAMPDPAGPDGHLPAVATLCDLFDREIVVTISWAKSIPGFSSLSLSDQMSVLQSVWMEVLVLGVAQRSMPLQDELAFAEDLVLDEEGARAAGLGELGAALLKLVRAAAGPAAGARGVCATKGLALANSDSVHIPKFRSCDAAVRNMHEALVEDEPPGGPEGVLRGGGRPLVAHRRPRRRGSGANHRENEEGPDQRSRSS

SEQ ID NO: 787572 - protein, 265 aa, Homo sapiens
MLKEGVRLDRVRGGRQKYKRRPEVDPLPFPGPFPAGPLAVAGGPRKTAAPVNALVSHLLVVEPEKLYAMPDPAGPDGHLPAVATLCDLFDREIVVTISWAKSIPGFSSLSLSDQMSVLQSVWMEVLVLGVAQRSMPLQDELAFAEDLVLDEEGARAAGLGELGAALLKLVRAAAGPAAGARGVCATKGLALANSDSVHIPKFRSCDAAVRNMHEALVEDEPPGGPEGVLRGGGRPLVAHRRPRRRGSGANHRENEEGPDQRSRSS

SEQ ID NO: 787573 - protein, 487 aa, Homo sapiens
GGLPRAGRGRRSNFRQLPKGVRRLGAGRGAPGGGGLCDSGSIRVDLQAGPEEAPSGGPAVCLGPACWGRRAAACQVTSAMSSQVVGIEPLYIKAEPASPDSPKGSSETETEPPVALAPGPAPTRCLPGHKEEEDGEGAGPGEQGGGKLVLSSLPKRLCLVCGDVASGYHYGVASCEACKAFFKKDHPGSIEYSCPASNECEITKRRRKACQACRFTKCLRVGMLKEGVRLDRVRGGRQKYKRRPEVDPLPFPGPFPAGPLAVAGGPRKTAAPVNALVSHLLVVEPEKLYAMPDPAGPDGHLPAVATLCDLFDREIVVTISWAKSIPGFSSLSLSDQMSVLQSVWMEVLVLGVAQRSMPLQDELAFAEDLVLDEEGARAAGLGELGAALLKLVRAAAGPAAGARGVCATKGLALANSDSVHIPKFRSCDAAVRNMHEALVEDEPPGGPEGVLRGGGRPLVAHRRPRRRGSGANHRENEEGPDQRSRSS

SEQ ID NO: 787574 - protein, 363 aa, Homo sapiens
LVGRKAFCIYKQPAAPLSEGTRRGGAARPEEAAEEGPARGPRLTPALRAARPPCLPDRAAGAPGSIEYSCPASNECEITKRRRKACQACRFTKCLRVGMLKEGVRLDRVRGGRQKYKRRPEVDPLPFPGPFPAGPLAVAGGPRKTAAPVNALVSHLLVVEPEKLYAMPDPAGPDGHLPAVATLCDLFDREIVVTISWAKSIPGFSSLSLSDQMSVLQSVWMEVLVLGVAQRSMPLQDELAFAEDLVLDEEGARAAGLGELGAALLKLVRAAAGPAAGARGVCATKGLALANSDSVHIPKFRSCDAAVRNMHEALVEDEPPGGPEGVLRGGGRPLVAHRRPRRRGSGANHRENEEGPDQRSRSS

SEQ ID NO: 787575 - protein, 97 aa, Homo sapiens
ALWEAKTGLPQGQDHKVRRSRPSELTQQHRRRHTYNTGGDTQHRQRHTTQTKIYNTAEDTHITQVKTHNTDEDTQHRRRHNTDEDTHINTGEDTQHR

SEQ ID NO: 787576 - protein, 60 aa, Homo sapiens
KEAGRVGPAPRRKFVRAGTLGQAEGDPSLPREKRVVSGAGGGQHGVWAQGWGGGGGAEVG

SEQ ID NO: 787577 - protein, 104 aa, Homo sapiens
MGMGPTLCRSHPDLPYLFVRRVSECIRLGSHHCLRCARPLVFPGLTVSPPDSACLGLFPPSLALSYPITRLWPLTSGPKGRCCHRNACGVAPSPREGLSYCTTG

SEQ ID NO: 787578 - protein, 71 aa, Homo sapiens
ESYNRETAIQDTGLPRHQPHQSQSAGNTGMSHHAQPFLVSLMMAIPPSQARIMEIIVSTDYFLLQEKLKNA

SEQ ID NO: 787579 - protein, 50 aa, Homo sapiens
MNTGNSFESSNWWGPITFHVTKLGKRETEKYNRSQKYKEQGGYCVDTRRV

SEQ ID NO: 787580 - protein, 84 aa, Homo sapiens
MPAEVVSTMKPNWRDESSRYELFISIIENLLFPPLVFPARIDDHKTQARNVLVCREQSRRHLFCCCGSRPDSGMKALDMKGTEL

SEQ ID NO: 787581 - protein, 282 aa, Homo sapiens
SPAQSERGPGARSPGAAMVEAAPPGPGPLRRTFLVPEIKSLDQYDFSRAKAAASLAWVLRAAFGGAEHVPPELWEPFYTDQYAQEHVKPPVTRLLLSAELYCRAWRQALPQLETPPNPSALLALLARRGTVPALPERPVREADLRHQPILMGAHLAVIDALMAAFAFEWTKTLPGPLALTSLEHKLLFWVDTTVRRLQEKTEQEAAQRASPAAPADGAAPAQPSCPTRWYWKLVPIRYRKDRVVARRAPCFPTVTSLQDLASGAALAATIHCYCPQLLRLEG

SEQ ID NO: 787582 - protein, 78 aa, Homo sapiens
CDVGRLHVGVCMWVSVPSSVSCLHVGVCTLTCLVSAQACVGVPAGLFGGRPVILEVTHVFCGCLLLAPHSVEMGLHWP

SEQ ID NO: 787583 - protein, 42 aa, Homo sapiens
ACLSVIRRIGQPPSPHHSNSHNASGVCPDLLVTTAATLIKTT

SEQ ID NO: 787584 - protein, 137 aa, Homo sapiens
AVDDLLMCLPYVDLYSLCDDSLMCLLLDDPTLCDDPRPPRALPGRPEAAQGPSRGDPRPSRALPGDPRPSRALPGDPRPSRILDSKDPLTSVLGEISFCLRVCSARGSRPGDDGSACLGRGHLFFPRRDLPSHSPIS

SEQ ID NO: 787585 - protein, 76 aa, Homo sapiens
GRPEAAQGLPGRPEAAQSPPRETRGRPGPSPGDPRPPRALPGETRGRPGPSRETRGRPGPSRETRGRPESWIPKIR

SEQ ID NO: 787586 - protein, 67 aa, Homo sapiens
TEQVMHTAGERGWERKISRLDPQLPPLGPKDCPTWHPHPQQSLATASPNNHSQSTEELTDTTDTDYS

SEQ ID NO: 787587 - protein, 76 aa, Homo sapiens
MCVFGVVVAAVAAAAAAAVAAAAAAAAAATAITTEVFKGSSESFVLRSPDPSKPHNSCFFSLFSLFFSLPDDCSQE

SEQ ID NO: 787588 - protein, 138 aa, Homo sapiens
LLEFGKTLCVRSAWSRSCHFHVARRHLPVLGGRCPELWHGGDWSPQGCCFHSVWDPQFLIELNRRIAFAFLRGILSCSLGLVEFRTPWATRWTMFPPETPRGRVGVARASMQEWDLEAWWHGVLGRLLGRVRAVEPPH

SEQ ID NO: 787589 - protein, 40 aa, Homo sapiens
LHPGSEPAELCEHTDPIQAGQSQKKGQLYFQTAAENPKYP

SEQ ID NO: 787590 - protein, 71 aa, Homo sapiens
TRDVQTKMSTPTPYKKMNWRLHTLTHMHIYTDEMFGQRQISRGHFCFFLNTGLLGGILFFPAIKKGPKVHV

SEQ ID NO: 787591 - protein, 117 aa, Homo sapiens
TGLVQVEWWKTNQRGMSIPVPWPQGLQQGSWAGKQSLCDSILASVLSLVSPARRKSLSRLYFLGILRKMMATGDASSSQGLTSPPAGLKCCHLKRSSGHFSKFRRSPRSSSGVMTLG

SEQ ID NO: 787592 - protein, 57 aa, Homo sapiens
EFEATTSDIAVGGGDRHLKHSKDWSAGSEIQKCRLQRRVERSWSVPMRGERGRWAET

SEQ ID NO: 787593 - protein, 1331 aa, Homo sapiens
  misc_feature (5)..(5): Xaa can be any naturally occurring amino acid
QRLSXIACRLRGKGTQVPADVMAQLWLSCFLLPALVVSVAANVAPKFLANMTSVILPEDLPVGAQAFWLVAEDQDNDPLTYGMSGPNAYFFAVTPKTGEVKLASALDYETLYTFKVTISVSDPYIQVQREMLVIVEDRNDNAPVFQNTAFSTSINETLPVGSVVFSVLAVDKDMGSAGMVVYSIEKVIPSTGDSEHLFRILANGSIVLNGSLSYNNKSAFYQLELKACDLGGMYHNTFTIQCSLPVFLSISVVDQPDLDPQFVREFYSASVAEDAAKGTSVLTVEAVDGDKGINDPVIYSISYSTRPGWFDIGADGVIRVNGSLDREQLLEADEEVQLQVTATETHLNIYGQEAKVSIWVTVRVMDVNDHKPEFYNCSLPACTFTPEEAQVNFTGYVDEHASPRIPIDDLTMVVYDPDKGSNGTFLLSLGGPDAEAFSVSPERAAGSASVQVLVRVSALVDYERQTAMAVQVVATDSVSQNFSVAMVTIHLRDINDHRPTFPQSLYVLTVPEHSATGSVVTDSIHATDPDTGAWGQITYSLLPGNGADLFQVDPVSGTVTVRNGELLDRESQAVYYLTLQATDGGNLSSSTTLQIHLLDINDNAPVVSGSYNIFVQEEEGNVSVTIQAHDNDEPGTNNSRLLFNLLPGPYSHNFSLDPDTGLLRNLGPLDREAIDPALEGRIVLTVLVSDCGEPVLGTKVNVTITVEDINDNLPIFNQSSYNFTVKEEDPGVLVGVVKAWDADQTEANNRISFSLSGSGANYFMIRGLVLGAGWAEGYLRLPPDVSLDYETQPVFNLTVSAENPDPQGGETIVDVCVNVKDVNDNPPTLDVASLRGIRVAENGSQHGQVAVVVASDVDTSAQLEIQLVNILCTKAGVDVGSLCWGWFSVAANGSVYINQSKAIDYEACDLVTLVVRACDLATDPGFQAYSNNGSLLITIEDVNDNAPYFLPENKTFVIIPELVLPNREVASVRARDDDSGNNGVILFSILRVDFISKDGATIPFQGVFSIFTSSEADVFAGSIQPVTSLDSTLQGTYQVTVQARDRPSLGPFLEATTTLNLFTVDQSYRSRLQFSTPKEEVGANRQAINAALTQATRTTVYIVDIQDIDSAARARPHSYLDAYFVFPNGSALTLDELSVMIRNDQDSLMQLLQLGLVVLGSQESQESDLSKQLISVIIGLGVALLLVLVIMTMAFVCVRKSYNRKLQAMKAAKEARKTAAGVMPSAPAIPGTNMYNTERANPMLNLPNKDLGLEYLSPSNDLDSVSVNSLDDNSVDVDKNSQEIKEHRPPHTPPEPDPEPLSVVLLGRQAGASGQLEGPSYTNAGLDTTDL

SEQ ID NO: 787594 - protein, 206 aa, Homo sapiens
  misc_feature (5)..(5): Xaa can be any naturally occurring amino acid
QRLSXIACRLRGKGTQVPADVMAQLWLSCFLLPALVVSVAANVAPKFLANMTSVILPEDLPVGAQAFWLVAEDQDNDPLTYGMSGPNAYFFAVTPKTGEVKLASALDYETLYTFKVTISVSDPYIQVQREMLVIVEDRNDNAPVFQNTAFSTSINEVTPALMWLWGRGHPKVLLRVGRARDSQWGIQSWEKPLLAGAASRTKARGM

SEQ ID NO: 787595 - protein, 104 aa, Homo sapiens [sequence omitted]

SEQ ID NO: 787596 - protein, 173 aa, Homo sapiens
FILDSLDVTLYWLWVLPPLENGEFSSHRQFSTWQSSLILRWLGARLSNDFLFALSPGCGSLILKDLESLLGVTGSLDILLPTSSWLSLSLRCCPGPGQLGSPCSLPAVPLCRAQALQWCFSLDSAVDLRVVRPHISWFSLCGFFLRRAFPHILVALAGRDPSPCSAGRCAVCG

SEQ ID NO: 787597 - protein, 164 aa, Homo sapiens
LGAGDEGLGTRGIGMRPEESDSELLEDEEDEVPPEPQIIVGICAMTKKSKSKPMTQILERLCRFDYLTVVILGEDVILNEPVENWPSCHCLISFHSKGFPLDKAVAYSKLRNPFLINDLAMQYYIQDRYNFLLTSEMGGFGIMRVRGTHCERGRVKPTCLIFVP

SEQ ID NO: 787598 - protein, 124 aa, Homo sapiens
THGEIEECCGHSNGRAVLWLRLLPQFWVSLRVTWLGDLNPPGPGAGVCLCHPAGAGPLSHCAAVVWPPAVTVPASRTPSPSRFDIRRGAASRALGEGHSYGPERLLCCASKCSPKGRDNGLTHL

SEQ ID NO: 787599 - protein, 43 aa, Homo sapiens
RTQLTSPTAVLTYFITVWHNYQHVNSKKVLHLIPVPGIGIGCI

SEQ ID NO: 787600 - protein, 328 aa, Homo sapiens
RETREAWNNVTVWGSRYVVGQTPVYVPYEIRVQAENDFGKGPEPESVIGYSGEDLPSAPRRFRVRQPNLETINLEWDHPEHPNGIMIGYTLKYVAFNGTKVGKQIVENFSPNQTKFTVQRTDPVSRYRFTLSARTQVGSGEAVTEESPAPPNEATPTAAYTNNQADIATQGWFIGLMCAIALLVLILLIVCFIKRSRGGKYPVRDTQKDVPLGPEDPKEEDGSFDYDVMRTTSPAGQSDISGRHHPSSQESDDSLVDYGAGLGEGVQSTDTHGSLPSGQLTRCQKRTTDVHPAGPSEQLRKPHVTSPTVYLPSLAYGAHPGPATTFAC

SEQ ID NO: 787601 - protein, 145 aa, Homo sapiens
FIWLTLCILCCLQILVSSPGIYFWLNSRGMKEVPYPHLHHSYPSNLNSFPHITPISFLSEDFLDKTRISHLPTTRTVLQPFTFPLAPLSNFSELQPSPPTPILPSLILSHASERPAVQKSRAAKIAGACGQAKAVHRHQLLSVFS

SEQ ID NO: 787602 - protein, 83 aa, Homo sapiens
GTHQRMKPEAPLPSARLYLPSTCTSPVWPCQRDRLPPAKTVPGSLGPDSMAFLSRSRGSVVQAPFTTLSTGSYSFEEPRGGWW

SEQ ID NO: 787603 - protein, 178 aa, Homo sapiens
MSTPPLAASGMAPGPFAGPQAQQAAREVNTASLCRIGQETVQDIVYRTMEIFQLLRNMQLPNGVTYHTGTYQDRLTKLQDNLRQLSVLFRKLRLVYDKCNENCGGMDPIPVEQLIPYVEEDGSKNDDRAGPPRFASEERREIAEVNKKLKQKNQQLKQIMDQLRNLIWDINAMLAMRN

SEQ ID NO: 787604 - protein, 153 aa, Homo sapiens
MSTPPLAASGMAPGPFAGPQAQQAAREVNTASLCRIGQETVQDIVYRTMEIFQLLRNMQLPNGVTYHTGTYQDRLTKLQDNLRQLSVLFRKLRLVYDKCNENCGGMDPIPVEQLIPYVEEDGSKNDDRAGPPRFASEERREIAEVNKVLGEAF

SEQ ID NO: 787605 - protein, 198 aa, Homo sapiens
EISRRRRKGPGRNETGHECWSEATGLLVLSSYCEFFPLPQDIAEIMSLSDTPLNVLLIRDMQDIVYRTMEIFQLLRNMQLPNGVTYHTGTYQDRLTKLQDNLRQLSVLFRKLRLVYDKCNENCGGMDPIPVEQLIPYVEEDGSKNDDRAGPPRFASEERREIAEVNKKLKQKNQQLKQIMDQLRNLIWDINAMLAMRN

SEQ ID NO: 787606 - protein, 141 aa, Homo sapiens
MSTPPLAASGMAPGPFAGPQAQQAAREVNTASLCRIGQETVQDIVYRTMEIFQLLRNMQLPNGVTYHTGTYQDRLTKLQDNLRQLSVLFRKLRLVYDKCNENCGGMDPIPVEVIFCDRGRMNIRCELVSRQLLIFFLSLLF

SEQ ID NO: 787607 - protein, 105 aa, Homo sapiens
DQRTPPFCDYGAVPKPVRKADDMVCSCSPPVDCPVSDLGSWSVSPAWLKKERGRTCEANSERFICLNSSWWKSMESRIFTRTYSKPLHLASCIHVAPSRSQFFLS

SEQ ID NO: 787608 - protein, 48 aa, Homo sapiens
MIFTLFTINVSTDMRHHRVRLVFQDSPVHGGRKLRSEQGVQVILDPVH

SEQ ID NO: 787609 - protein, 113 aa, Homo sapiens
MAWTLACVCVLGSILVLDSGMCVRAGECLDGDVVSLLHFWHSVTTQENQIENLESVLQWIETGLQSLRKKSKQNTQEFRENIFLPKNNFSFMLFLIWVNTPMEKIDRLVKSSI

SEQ ID NO: 787610 - protein, 211 aa, Homo sapiens
FSVNPVYITYTQPTGPSCTPSPSPRVIPNPTTVFKITVGRATTENLLNLVDQEERSAAPEPIQPISVIPGSGGEKGSHKYQRSSSSGSDDYAYTQALLLHQRARMERLAKQLKLEKEELERLKSEVNGMEHDLMQRRLRRVSCTTAIPTPEEMTRLRSMNRQLQINVDCTLKEVDLLQSREVYYSRSSLKLSFTQLTRLEMVFIFCGKYTD

SEQ ID NO: 787611 - protein, 122 aa, Homo sapiens
MGESISFSDEGAAQRRRGASQRCTARWHHSQDRDLGILEPFPALALGQPWAPKALPPYWLPGEFLKKQPSSPPQPLHSSHLPPHGPQTPCEAPPPDLFPATARDEFPLSCPGWTLLGAQQSS

SEQ ID NO: 787612 - protein, 229 aa, Homo sapiens
MLRDPVSRYLSEWKHVQRGATWKTSLHMSDGRSPTPDELPTCYPGDDWSGVSLREFMDCTYNLANNRQVRMLADLSLVGCYNLTFMNESERNTILLQSAKNNLKNMAFFGLTEFQRKTQFLFERTFNLKFISPFTQFNITRASNVEINEGARQRIEDLNFLDMQLYEYAKDLFQQRYHHTKQLEHQRDRQKRREERRLQREHRDHQWPKEDGAAEGTVTEDYNSQVVRW

SEQ ID NO: 787613 - protein, 237 aa, Homo sapiens
SRNFYYITMLRDPVSRYLSEWKHVQRGATWKTSLHMSDGRSPTPDELPTCYPGDDWSGVSLREFMDCTYNLANNRQVRMLADLSLVGCYNLTFMNESERNTILLQSAKNNLKNMAFFGLTEFQRKTQFLFERTFNLKFISPFTQFNITRASNVEINEGARQRIEDLNFLDMQLYEYAKDLFQQRYHHTKQLEHQRDRQKRREERRLQREHRDHQWPKEDGAAEGTVTEDYNSQVVRW

SEQ ID NO: 787614 - protein, 1280 aa, Homo sapiens
MDLEGDRNGGAKKKNFFKLNNKSEKDKKEKKPTVSVFSMFRYSNWLDKLYMVVGTLAAIIHGAGLPLMMLVFGEMTDIFANAGNLEDLMSNITNRSDINDTGFFMNLEEDMTRYAYYYSGIGAGVLVAAYIQVSFWCLAAGRQIHKIRKQFFHAIMRQEIGWFDVHDVGELNTRLTDDVSKINEGIGDKIGMFFQSMATFFTGFIVGFTRGWKLTLVILAISPVLGLSAAVWAKILSSFTDKELLAYAKAGAVAEEVLAAIRTVIAFGGQKKELERYNKNLEEAKRIGIKKAITANISIGAAFLLIYASYALAFWYGTTLVLSGEYSIGQVLTVFFSVLIGAFSVGQASPSIEAFANARGAAYEIFKIIDNKPSIDSYSKSGHKPDNIKGNLEFRNVHFSYPSRKEVKILKGLNLKVQSGQTVALVGNSGCGKSTTVQLMQRLYDPTEGMVSVDGQDIRTINVRFLREIIGVVSQEPVLFATTIAENIRYGRENVTMDEIEKAVKEANAYDFIMKLPHKFDTLVGERGAQLSGGQKQRIAIARALVRNPKILLLDEATSALDTESEAVVQVALDKARKGRTTIVIAHRLSTVRNADVIAGFDDGVIVEKGNHDELMKEKGIYFKLVTMQTAGNEVELENAADESKSEIDALEMSSNDSRSSLIRKRSTRRSVRGSQAQDRKLSTKEALDESIPPVSFWRIMKLNLTEWPYFVVGVFCAIINGGLQPAFAIIFSKIIGVFTRIDDPETKRQNSNLFSLLFLALGIISFITFFLQGFTFGKAGEILTKRLRYMVFRSMLRQDVSWFDDPKNTTGALTTRLANDAAQVKGAIGSRLAVITQNIANLGTGIIISFIYGWQLTLLLLAIVPIIAIAGVVEMKMLSGQALKDKKELEGAGKIATEAIENFRTVVSLTQEQKFEHMYAQSLQVPYRNSLRKAHIFGITFSFTQAMMYFSYAGCFRFGAYLVAHKLMSFEDVLLVFSAVVFGAMAVGQVSSFAPDYAKAKISAAHIIMIIEKTPLIDSYSTEGLMPNTLEGNVTFGEVVFNYPTRPDIPVLQGLSLEVKKGQTLALVGSSGCGKSTVVQLLERFYDPLAGKVLLDGKEIKRLNVQWLRAHLGIVSQEPILFDCSIAENIAYGDNSRVVSQEEIVRAAKEANIHAFIESLPNKYSTKVGDKGTQLSGGQKQRIAIARALVRQPHILLLDEATSALDTESEKVVQEALDKAREGRTCIVIAHRLSTIQNADLIVVFQNGRVKEHGTHQQLLAQKGIYFSMVSVQAGTKRQ

SEQ ID NO: 787615 - protein, 362 aa, Homo sapiens
MYAQSLQVPYRNSLRKAHIFGITFSFTQAMMYFSYAGCFRFGAYLVAHKLMSFEDVLLVFSAVVFGAMAVGQVSSFAPDYAKAKISAAHIIMIIEKTPLIDSYSTEGLMPNTLEGNVTFGEVVFNYPTRPDIPVLQGLSLEVKKGQTLALVGSSGCGKSTVVQLLERFYDPLAGKVLLDGKEIKRLNVQWLRAHLGIVSQEPILFDCSIAENIAYGDNSRVVSQEEIVRAAKEANIHAFIESLPNKYSTKVGDKGTQLSGGQKQRIAIARALVRQPHILLLDEATSALDTESEKVVQEALDKAREGRTCIVIAHRLSTIQNADLIVVFQNGRVKEHGTHQQLLAQKGIYFSMVSVQAGTKRQ

SEQ ID NO: 787616 - protein, 295 aa, Homo sapiens
MAVGQVSSFAPDYAKAKISAAHIIMIIEKTPLIDSYSTEGLMPNTLEGNVTFGEVVFNYPTRPDIPVLQGLSLEVKKGQTLALVGSSGCGKSTVVQLLERFYDPLAGKVLLDGKEIKRLNVQWLRAHLGIVSQEPILFDCSIAENIAYGDNSRVVSQEEIVRAAKEANIHAFIESLPNKYSTKVGDKGTQLSGGQKQRIAIARALVRQPHILLLDEATSALDTESEKVVQEALDKAREGRTCIVIAHRLSTIQNADLIVVFQNGRVKEHGTHQQLLAQKGIYFSMVSVQAGTKRQ

SEQ ID NO: 787617 - protein, 107 aa, Homo sapiens
PPQAVSGLRSGGGALAVESWQRRPAAAGRVEKMISNPEKCRPDGGPEWALGEETKFCCVAHDGLKLLSSRDAPTSTSQGAEISGMSHWVSPCYHILRPCRNQDLLKE

SEQ ID NO: 787618 - protein, 216 aa, Homo sapiens
MNNPQTTANTRRRQKEKTDTEEANTPDEKQQQTHQTRPQRHTQQKQGEKHRRRQHTEKKNRRTQKQKRKERGRKRGRERKTNREEKVRAEEGRNRQNGRTERREGRQKAGQRRREEGDGRGGRSSEGERERAGQGSREEREEERESEQLEQKEERTGERVEDRERVVERATRRRRGGADEEGERKEGERRGRRGRRRTERERTRAKSERREGNEGR

SEQ ID NO: 787619 - protein, 185 aa, Homo sapiens
MEHVVQACHRFIQASYEPLGISLRPLEAEPPTPPTAPPPGSPRRSEGHPDPPTESRSCSQGPPSPASPDPKACNWKKYKYIVLNSQASQAGSLVGERSSGQPCPQARLPSGDEASSSSSSSSSSSSEEGPIPGPQSRLSPTAATVQFKCGAPASTPYLLTSQAQDTSGSPSERARPLPGKSPSFL

SEQ ID NO: 787620 - protein, 95 aa, Homo sapiens
ARRGQWEEDAAAEVPADTPKPSGQVSMHWSCSWRGRRGGCCPILPTPTTPARPCRGIVDRLTKEHSTEFLTRPPPNHPGHQRQGESEKPSQPRGA

SEQ ID NO: 787621 - protein, 83 aa, Homo sapiens
AQTSCTTSLLRGDASAGPATWGTTLDTIILERHCTLTSQGVDDFLNAKATFKIFDFSDAFVLSKVGFSGILIQKVECSLRSSV

SEQ ID NO: 787622 - protein, 98 aa, Homo sapiens
MGAGRAQWLTSIISALWEAKAGGSPEVRCSGPTWPTWQNPVSTKNTKISQAWWFMSVIPAAWRLRQKNRLNPGGIGCSESRLRHCPPAWATEQDSVSQ

SEQ ID NO: 787623 - protein, 41 aa, Homo sapiens
VQLRIRWSDEGKGRDRNEYWPWGLVDCVGGAQRAAARITGK

SEQ ID NO: 787624 - protein, 561 aa, Homo sapiens
MAIATSTQLARALYDNTAESPQELSFRRGDVLRVLQREGAGGLDGWCLCSLHGQQGIVPANRVKLLPAGPAPKPSLSPASPAQPGSPYPAPDHSNEDQEVYVVPPPARPCPTSGPPAGPCPPSPDLIYKIPRASGTQLAAPRDALEVYDVPPTALRVPSSGPYDCPASFSHPLTRVAPQPPGEDDAPYDVPLTPKPPAELEPDLEWEGGREPGPPIYAAPSNLKRASALLNLYEAPEELLADGEGGGTDEGIYDVPLLGPEAPPSPEPPGALASHDQDTLAQLLARSPPPPHRPRLPSAESLSRRPLPALPVPEAPSPSPVPSPAPGRKGSIQDRPLPPPPPRLPGYGGPKVEGDPEGREMEDDPAGHHNEYEGIPMAEEYDYVHLKGMDKAQGSRPPDQACTGDPELPERGMPAPQEALSPGEPLVVSTGDLQLLYFYAGQCQSHYSALQAAVAALMSSTQANQPPRLFVPHSKRVVVAAHRLVFVGDTLGRLAASAPLRAQVRAAGTALGQALRATVLAVKGAALGYPSSPAIQEMVQCVTELAGQALQFTTLLTSLAP

SEQ ID NO: 787625 - protein, 468 aa, Homo sapiens
MAIATSVYVVPPPARPCPTSGPPAGPCPPSPDLIYKIPRASGTQLAAPRDALEVYDVPPTALRVPSSGPYDCPASFSHPLTRVAPQPPGEDDAPYDVPLTPKPPAELEPDLEWEGGREPGPPIYAAPSNLKRASALLNLYEAPEELLADGEGGGTDEGIYDVPLLGPEAPPSPEPPGALASHDQDTLAQLLARSPPPPHRPRLPSAESLSRRPLPALPVPEAPSPSPVPSPAPGRKGSIQDRPLPPPPPRLPGYGGPKVEGDPEGREMEDDPAGHHNEYEGIPMAEEYDYVHLKGMDKAQGSRPPDQACTGDPELPERGMPAPQEALSPGEPLVVSTGDLQLLYFYAGQCQSHYSALQAAVAALMSSTQANQPPRLFVPHSKRVVVAAHRLVFVGDTLGRLAASAPLRAQVRAAGTALGQALRATVLAVKGAALGYPSSPAIQEMVQCVTELAGQALQFTTLLTSLAP

SEQ ID NO: 787626 - protein, 468 aa, Homo sapiens; identical to SEQ ID NO: 787625

SEQ ID NO: 787627 - protein, 764 aa, Homo sapiens
GALSECARENRRTAGGASVWAEAATPATQPHGHALGGLWLQATWGKRLSSRSPFLPAGSPQTPALGAPLCSAAGGWRRLAPKLARPAQPPRRLLPALEALLSGLERRRAQPSARLLTRPGPGREFSDPASPGRPRGLGRAAPGAWPSRWRPGGRGDSTQRAPLDAVPQRRPGPPRSSSCLASLPLIWEVLWVFFLLLQPWRRPRLRRHRTQLARALYDNTAESPQELSFRRGDVLRVLQREGAGGLDGWCLCSLHGQQGIVPANRVKLLPAGPAPKPSLSPASPAQPGSPYPAPDHSNEDQEVYVVPPPARPCPTSGPPAGPCPPSPDLIYKIPRASGTQLAAPRDALEVYDVPPTALRVPSSGPYDCPASFSHPLTRVAPQPPGEDDAPYDVPLTPKPPAELEPDLEWEGGREPGPPIYAAPSNLKRASALLNLYEAPEELLADGEGGGTDEGIYDVPLLGPEAPPSPEPPGALASHDQDTLAQLLARSPPPPHRPRLPSAESLSRRPLPALPVPEAPSPSPVPSPAPGRKGSIQDRPLPPPPPRLPGYGGPKVEGDPEGREMEDDPAGHHNEYEGIPMAEEYDYVHLKGMDKAQGSRPPDQACTGDPELPERGMPAPQEALSPGEPLVVSTGDLQLLYFYAGQCQSHYSALQAAVAALMSSTQANQPPRLFVPHSKRVVVAAHRLVFVGDTLGRLAASAPLRAQVRAAGTALGQALRATVLAVKGAALGYPSSPAIQEMVQCVTELAGQALQFTTLLTSLAP

SEQ ID NO: 787628 - protein, 683 aa, Homo sapiens
GALSECARENRRTAGGASVWAEAATPATQPHGHALGGLWLQATWGKRLSSRSPFLPAGSPQTPALGAPLCSAAGGWRRLAPKLARPAQPPRRLLPALEALLSGLERRRAQPSARLLTRPGPGREFSDPASPGRPRGLGRAAPGAWPSRWRPGGRGDSTQRAPLDAVPQRRPGPPRSSSCLAEPASHLGSFVGFLSPPPTLAEATTQAPQLGARGRGPWCGAATAEVSKTEPCPTSGPPAGPCPPSPDLIYKIPRASGTQLAAPRDALEVYDVPPTALRVPSSGPYDCPASFSHPLTRVAPQPPGEDDAPYDVPLTPKPPAELEPDLEWEGGREPGPPIYAAPSNLKRASALLNLYEAPEELLADGEGGGTDEGIYDVPLLGPEAPPSPEPPGALASHDQDTLAQLLARSPPPPHRPRLPSAESLSRRPLPALPVPEAPSPSPVPSPAPGRKGSIQDRPLPPPPPRLPGYGGPKVEGDPEGREMEDDPAGHHNEYEGIPMAEEYDYVHLKGMDKAQGSRPPDQACTGDPELPERGMPAPQEALSPGEPLVVSTGDLQLLYFYAGQCQSHYSALQAAVAALMSSTQANQPPRLFVPHSKRVVVAAHRLVFVGDTLGRLAASAPLRAQVRAAGTALGQALRATVLAVKGAALGYPSSPAIQEMVQCVTELAGQALQFTTLLTSLAP

SEQ ID NO: 787629 - protein, 468 aa, Homo sapiens; identical to SEQ ID NO: 787625

SEQ ID NO: 787630 - protein, 468 aa, Homo sapiens; identical to SEQ ID NO: 787625

SEQ ID NO: 787631 - protein, 160 aa, Homo sapiens [sequence omitted]

SEQ ID NO: 787632 - protein, 392 aa, Homo sapiens
MAIATSVYVVPPPARPCPTSGPPAGPCPPSPDLIYKIPRASGTQLAAPRDALEVYDVPPTALRVPSSGPYDCPASFSHPLTRVAPQPPGEDDAPYDVPLTPKPPAELEPDLEWEGGREPGPPIYAAPSNLKRASALLNLYEAPEELLADGEGGGTDEGIYDVPLLGPEAPPSPEPPGALASHDQDTLAQLLARSPPPPHRPRLPSAESLSRRPLPALPVPEAPSPSPVPSPAPGRKGSIQDRPLPPPPPRLPGYGGPKVEGDPEGREMEDDPAGHHNEYEGIPMAEEYDYVHLKGMDKAQGSRPPDQACTGDPELPERGMPAPQEALSPGEPLVVSTGDLQLLYFYAGQCQSHYSALQVQHWARHCGPLCWLSRELPWATHPALPSKRWCSV

SEQ ID NO: 787633 - protein, 468 aa, Homo sapiens; identical to SEQ ID NO: 787625

SEQ ID NO: 787634 - protein, 81 aa, Homo sapiens
RDHRVLRKGWPESDPYLALAVGGARTITCMLGMTSYGLSSGFLGRWLGKDSIQWFCFVMSELGKKGVYKSVRKRKIEEEMG

SEQ ID NO: 787635 - protein, 308 aa, Homo sapiens
MWRAGEKAWEEDGLGGEGGRHLRLQPAGATVPGPAAEAAAQLSRRQGRGVEKPPHLAALILARGGSKGIPLKNIKHLAGVPLIGWVLRAALDSGAFQSVWVSTDHDEIENVAKQFGAQVHRRSSEVSKDSSTSLDAIIEFLNYHNEVDIVGNIQATSPCLHPTDLQKVAEMIREEGYDSVFSVVRRHQFRWSEIQKGVREVTEPLNLNPAKRPRRQDWDGELYENGSFYFAKRHLIEMGYLQGGKMAYYEMRAEHSVDIDGGYWMGLLQKQRVLRYGYLAREVTKLTLGLQIDGLFTKGPLCFRRPRI

SEQ ID NO: 787636 - protein, 348 aa, Homo sapiens
  misc_feature (16)..(16): Xaa can be any naturally occurring amino acid
AIGTFNPVDFKKARLXTEPSDRICDSVDGGRLRCEGLAPGCGEAGEKAWEEDGLGGEGGRHLRLQPAGATVPGPAAEAAAQLSRRQGRGVEKPPHLAALILARGGSKGIPLKNIKHLAGVPLIGWVLRAALDSGAFQSVWVSTDHDEIENVAKQFGAQVHRRSSEVSKDSSTSLDAIIEFLNYHNEVDIVGNIQATSPCLHPTDLQKVAEMIREEGYDSVFSVVRRHQFRWSEIQKGVREVTEPLNLNPAKRPRRQDWDGELYENGSFYFAKRHLIEMGYLQGGKMAYYEMRAEHSVDIDGGYWMGLLQKQRVLRYGYLAREVTKLTLGLQIDGLFTKGPLCFRRPRI

SEQ ID NO: 787637 - protein, 97 aa, Homo sapiens
SIMCAQEVAAVSSWAQIMERLQGKEDAQDFEGLLKALQGLGLCPEELNAVWAVLAAILQLGNICFSSSEVGFPVGRGHLGCWVCRIRAVVMTPNAGV

SEQ ID NO: 787638 - protein, 66 aa, Homo sapiens
MPNSVLWAVDLFGRVYTLSTAGQYWEMCKDSQLEFKRVSATTQCCWGIACDNQVYVYVCASDVPIR

SEQ ID NO: 787639 - protein, 66 aa, Homo sapiens; identical to SEQ ID NO: 787638

SEQ ID NO: 787640 - protein, 36 aa, Homo sapiens
TAVPCTLHTYSMYFHSNPIGSTVMMPPLQIRKLGPG

SEQ ID NO: 787641 - protein, 235 aa, Homo sapiens
METNREELYDLLETLRRLSVTSKVKFIVFNPSFVYMDRYASSLGAPLHNSCISALFLLFFSAFLVADSLINVWITLTVVSVEFGVIGFMTLWKVELDCISVLCLIYGINYTIDNCAPMLSTFVLGKDFTRTKWVKNALEVHGVAILQSYLCYIVGLIPLAAVPSNLTCTLFRCLFLIAFVTFFHCFAILPVILTFLPPSKKKRKEKKNPENREEIECVEMVDIDSTRVVDQITTV

SEQ ID NO: 787642 - protein, 122 aa, Homo sapiens
MVRSSAPGEALKELPIIAEGRGGAGITWQEQEQERETSHELTEQEVTHHKGYGTKPFMRDLLRDPVPPTRPHLQHWGLNFNWRFEGDRHPNHVRCRHIKMINTRSGAVAHTCNPSTLGGRVR

SEQ ID NO: 787643 - protein, 141 aa, Homo sapiens
ASRTLLLASRVLTPKRHYCAGRMCACVCGVCVCCVCVGAWYTWCMYGVCMVCTCGVCGVCVRMWCVCVVCKWCVCGVGCVYTCVYMWHVCGACVCGMLPNLDVEMHPQFATSEESHPGRIGVQTDLMVTGRVGGEREAALR

SEQ ID NO: 787644 - protein, 119 aa, Homo sapiens
GQDKSQSRERAGLMPRKSQASAEAEAVSEHVQGRAGARDRTEPGHSQDRVGQGNSMAGSVLGQGRAGQGDGSGRAGTGQCRAMSCRGQDTSKSTSGPGLWQDKDQGQDQGQVCARASSR

SEQ ID NO: 787645 - protein, 80 aa, Homo sapiens
APLPGDGSLRLGEVGALCDRASESGLRPCPGQDSYQDGLRRPGFAEGPPAGRNPRRKKPQTDRRGGSAGSQPQACADGVR

SEQ ID NO: 787646 - protein, 104 aa, Homo sapiens
SAGITGVSHRTQPCLEYFCNGKMKWEKSLFLALRLTLKPQINIAAMADRRVCGEKRGLRPHKRDQRSFDRGRKPVHQMVWSTWAAVGKALSPRSTEQLIRMQGL

SEQ ID NO: 787647 - protein, 73 aa, Homo sapiens
NMEFVNKKVQRRKLPGGDLMSSRDTIGSPKECATESLILVLFLSADMNKRKISADGQATSSKHCLVEYMEPLG

SEQ ID NO: 787648 - protein, 287 aa, Homo sapiens
HSPSPPDQQPIYFREFRFTSEVPIWLDYHGKHVTMDQVGTFAGLLIGLAQLNCSELKLKRLCCRHGLLGVDKVLGYALNEWLQDIRKNQLPGLLGGVGPMHSVVQLFQGFRDLLWLPIEQYRKDGRLMRGLQRGAASFGSSTASAALELSNRLVQAIQATAETVYDILSPAAPVSRSLQDKRSARRLRRGQQPADLREGVAKAYDTVREGILDTAQTICDVASRGHEQKGLTGAVGGVIRQLPPTVVKPLILATEATSSLLGGMRNQIVPDAHKDHALKWRSDSAQD

SEQ ID NO: 787649 - protein, 122 aa, Homo sapiens
ENKGRKHELRWGAGAKAGPQSVHRCLQKPAAVFGHLRSLGARHQPLLLSLALDRTEVDTWGLLENHLEHVELKSESLIFCCVGSRASLDRTYSGACSQVGEWKYLLSPHTRELEMRQPILPA

SEQ ID NO: 787650 - protein, 85 aa, Homo sapiens
MPVAHILGSSRDPFKILIPTLGSRTRFLKLSTIGISDRITFHCEGLSCALRMFSSIPGLHTTRCQYSSHPQVEKAKNVSRYCQIS

SEQ ID NO: 787651 - protein, 74 aa, Homo sapiens
GRRAERKESGEKCRLRSSPYNSSKRASRRYYHNDTVQIKAKIKIIWPIQQATLPRTQMAAFLRPSARASSPPIS

SEQ ID NO: 787652 - protein, 104 aa, Homo sapiens
MSFEDLLSGVHCLPLSFEGGSRGLGTIPASPQHPLTPGVWVRVALTQEPCPTWMLISLCHSVISTTSCSNSLRERSLPSRAERTSSSSVCSRLKRRSCRLYCFR

SEQ ID NO: 787653 - protein, 237 aa, Homo sapiens
  misc_feature (234)..(234): Xaa can be any naturally occurring amino acid
MGDHSKKKPGTAMCVGCGSQIHDQFILRVSPDLEWHAACLKCAECSQYLDETCTCFVRDGKTYCKRDYVRLFGIKCAKCQVGFSSSDLVMRARDSVYHIECFRCSVCSRQLLPGDEFSLREHELLCRADHGLLLERAAARQPAQPRPASRRPRPASARRWVGPAARVRPHVHKQTEKTTRVRTVLNEKQLHTLRTCYAANPRADALMKEQLVEMTGLSPRVIRVWFQNKRCKDXKKS

SEQ ID NO: 787654 - protein, 97 aa, Homo sapiens
GRDMGDPSGLVSLSSVTLSTTCGQMASYPLTLVRTRMQAQDTVEGSNPTMRGVLQRILAQQGWLGLYRGMTPTLLKVLPAGGISYVVYEAMKKTLGI

SEQ ID NO: 787655 - protein, 88 aa, Homo sapiens
ALCSSGLKSVVCEQKTAAVGSRSSLRACCYCSLLESDPKYPTSCSLTLKLTPIYAQKSMHHSYSTTKILPGKTLVGHRSLNVVAEYSS

SEQ ID NO: 787656 - protein, 203 aa, Homo sapiens
ALNPVEVALVTWQSVKEMVFEGGPRPWILEPSRFFLELNAEKTEKIGIAQVWLPSKRKQNQYIYRIQCLDLGEQVLTFRIGNHPGVLNPSPAVEVLQVRFICAHPASMSVTPVYKVPAGAQPCPLPQHNKWLIPVSRLRDTVLELAVFDQHRRKFDNFSSLMLEWKSSNETLAHFEDYKSVEMVAKDDGSGQTRLHGIVKIYK

SEQ ID NO: 787657 - protein, 54 aa, Homo sapiens
AANNDKDDEGKYSSWRWGLKGQQPAPAHRMRYQHCPLPGPLGLPDPGLQCACPP

SEQ ID NO: 787658 - protein, 95 aa, Homo sapiens
MPLILPDTLFSSLASPGGLLSAVGAGPPPARPSLPLTYAPRTPAVAINTPSAGVCDSRPAATFSAQTDGWHTWLPALGDNRLLLPGTPHPSAVQT

SEQ ID NO: 787659 - protein, 186 aa, Homo sapiens
GGLAWRAAALAHPLPRKGSGPRRRLPMARLRDCLPRLMLTLRSLLFWSLVYCYCGLCASIHLLKLLWSLGKGPAQTFRRPAREHPPACLSDPSLGTHCYVRIKDSGLRFHYVAAGERGKPLMLLLHGFPEFWYSWRYQLREFKSEYRVVALDLRGYGETDAPIHRQNYKLDCLITDIKGYFRFFRV

SEQ ID NO: 787660 - protein, 34 aa, Homo sapiens
MGLAREEGTSAGGNQCRDGTNTPERLARLLERAL

SEQ ID NO: 787661 - protein, 71 aa, Homo sapiens
DTGIGVCLIRAPMPPPVTESCRREGAVAYVTVRHLVWTLFYPCLLCKVPSTMKLGYASSCQNGCRICLGAM

SEQ ID NO: 787662 - protein, 89 aa, Homo sapiens
MLPLTLEAHPWSYSWAGLTFASGPVCLCFQEPERCPGKLPGHLQALAARERQSSGRAQSSEHHVILTYNSGHPEPQSSEHHVILTYNSG

SEQ ID NO: 787663 - protein, 346 aa, Homo sapiens [sequence omitted]

SEQ ID NO: 787664 - protein, 113 aa, Homo sapiens
AGVNELMQVLCPCLASQVWYREDVSHSNPEGSSWSLLDTPGEVVQISCGPHDLLWATLWEGQALVREGINRSNPKGSSWSIVEPPGSENGVMHISVGVSVVWAVTKDWKVRWG

SEQ ID NO: 787665 - protein, 1123 aa, Homo sapiens
QCCWGIACDNQVYVYVCASDVPIRRREEAYENQRWNPMGGFCEKLLLSDRWGWSDVSGLQHRPLDRVALPSPHWEWESDWYVDENFGGEPTEKGGWTYAIDFPATYTKDKKWNSCVRRRKWIRYRRYKSRDIWAKIPSKDDPKELPDPFNDLSVGGWEITEEPVGRLSVWAVSLQGKVWYREDVSHSNPEGSSWSLLDTPGEVVQISCGPHDLLWATLWEGQALVREGINRSNPKGSSWSIVEPPGSENGVMHISVGVSVVWAVTKDWKVWFRRGVNSHNPCGTSWIEMVGEMTMVNVGMNDQVWGIGCEDRAVYFRQGVTPSELSGKTWKAIIAARECDRSHSGSSSSLLSAGCFFGDEVRGSGESAPSDTDASSEVERPGPGQILPAEPLDDSKNATGNSASGLGAGRTAEDTVEDACPAEGSREARPNTHPGPAPTPAELPWTNIDLKEAKKVPSHSAAGFPETTSLSSLGLLPLGLEEPYGVDDHPLWAWVSGGGCVVEACAMPRWFTVQAGLSSSVHMLSLSITPAQTAAWRKQIFQQLTERTKRELENFRHYEQAVEQSVWVKTGALQWWCDWKPHKWVDVRLALEQFTGHDGVRDSILFIYYVVHEEKKYIHIFLNEVVALVPVLNETKHSFALYTPERTRQRWPVRLAAATEQDMNDWLALLSLSCCESRKVQGRPSPQAIWSITCKGDIFVSEPSPDLEAHEHPLPCDQMFWRQMGGHLRMVEANSRGVVWGIGYDHTAWVYTGGYGGGCFQGLASSTSNIYTQSDVKCVHIYENQRWNPVTGYTSRGLPTDRYMWSDASGLQECTKAGTKPPSLQWAWVSDWFVDFSVPGGTDQEGWQYASDFPASYHGSKTMKDFVRRRCWARKCKLVTSGPWLEVPPIALRDVSIIPESPGAEGSGHSIALWAVSDKGDVLCRLGVSELNPAGSSWLHVGTDQPFASISIGACYQVWAVARDGSAFYRGSVYPSQPAGDCWYHIPSPPRQRLKQVSAGQTSVYALDENGNLWYRQGITPSYPQGSSWEHVSNNVCRVSVGPLDQVWVIANKVQGSHSLSRGTVCHRTGVQPHEPKGHGWDYGIGGGWDHISVRANATRAPRSSSQEQEPSAPPEAHGPVCC

SEQ ID NO: 787666 - protein, 1123 aa, Homo sapiens; identical to SEQ ID NO: 787665

SEQ ID NO: 787667 - protein, 996 aa, Homo sapiens
AVPGEVYDIPSKDDPKELPDPFNDLSVGGWEITEEPVGRLSVWAVSLQGKVWYREDVSHSNPEGSSWSLLDTPGEVVQISCGPHDLLWATLWEGQALVREGINRSNPKGSSWSIVEPPGSENGVMHISVGVSVVWAVTKDWKVWFRRGVNSHNPCGTSWIEMVGEMTMVNVGMNDQVWGIGCEDRAVYFRQGVTPSELSGKTWKAIIAARECDRSHSGSSSSLLSAGCFFGDEVRGSGESAPSDTDASSEVERPGPGQILPAEPLDDSKNATGNSASGLGAGRTAEDTVEDACPAEGSREARPNTHPGPAPTPAELPWTNIDLKEAKKVPSHSAAGFPETTSLSSLGLLPLGLEEPYGVDDHPLWAWVSGGGCVVEACAMPRWFTVQAGLSSSVHMLSLSITPAQTAAWRKQIFQQLTERTKRELENFRHYEQAVEQSVWVKTGALQWWCDWKPHKWVDVRLALEQFTGHDGVRDSILFIYYVVHEEKKYIHIFLNEVVALVPVLNETKHSFALYTPERTRQRWPVRLAAATEQDMNDWLALLSLSCCESRKVQGRPSPQAIWSITCKGDIFVSEPSPDLEAHEHPLPCDQMFWRQMGGHLRMVEANSRGVVWGIGYDHTAWVYTGGYGGGCFQGLASSTSNIYTQSDVKCVHIYENQRWNPVTGYTSRGLPTDRYMWSDASGLQECTKAGTKPPSLQWAWVSDWFVDFSVPGGTDQEGWQYASDFPASYHGSKTMKDFVRRRCWARKCKLVTSGPWLEVPPIALRDVSIIPESPGAEGSGHSIALWAVSDKGDVLCRLGVSELNPAGSSWLHVGTDQPFASISIGACYQVWAVARDGSAFYRGSVYPSQPAGDCWYHIPSPPRQRLKQVSAGQTSVYALDENGNLWYRQGITPSYPQGSSWEHVSNNVCRVSVGPLDQVWVIANKVQGSHSLSRGTVCHRTGVQPHEPKGHGWDYGIGGGWDHISVRANATRAPRSSSQEQEPSAPPEAHGPVCC

SEQ ID NO: 787668 - protein, 1145 aa, Homo sapiens
AVPGEVYDIPSKDDPKELPDPFNDLSVGGWEITEEPVGRLSVWAVSLQGKVWYREDVSHSNPEGSSWSLLDTPGEVVQISCGPHDLLWATLWEGQALVREGINRSNPKGSSWSIVEPPGSENGVMHISVGVSVVWAVTKDWKVWFRRGVNSHNPCGTSWIEMVGEMTMVNVGMNDQVWGIGCEDRAVYFRQGVTPSELSGKTWKAIIAARECDRSHSGSSSSLLSAGCFFGDEVRGSGESAPSDTDASSEVERPGPGQILPAEPLDDSKNATGNSASGLGAGRTAEDTVEDACPAEGSREARPNTHPGPAPTPAELPWTNIDLKEAKKVPSHSAAGFPETTSLSSLGLLPLGLEEPYGVDDHPLWAWVSGGGCVVEACAMPRWFTVQAGKGSCRAWGHPHGQVPWGCGVWEEAGAGGSGRPAVLPGRLTVLSSSEPGIALLCGLQRPARGCQDLEARWPVPLPLSAAPPLCQRWWLLSRLNYWGRATHPTGQRVEGGLTESVAFELERADLVEGSAVASCPAAGRTVPRPWGSLCPTGLSSSVHMLSLSITPAQTAAWRKQIFQQLTERTKRELENFRHYEQAVEQSVWVKTGALQWWCDWKPHKWVDVRLALEQFTGHDGVRDSILFIYYVVHEEKKYIHIFLNEVVALVPVLNETKHSFALYTPERTRQRWPVRLAAATEQDMNDWLALLSLSCCESRKVQGRPSPQAIWSITCKGDIFVSEPSPDLEAHEHPLPCDQMFWRQMGGHLRMVEANSRGVVWGIGYDHTAWVYTGGYGGGCFQGLASSTSNIYTQSDVKCVHIYENQRWNPVTGYTSRGLPTDRYMWSDASGLQECTKAGTKPPSLQWAWVSDWFVDFSVPGGTDQEGWQYASDFPASYHGSKTMKDFVRRRCWARKCKLVTSGPWLEVPPIALRDVSIIPESPGAEGSGHSIALWAVSDKGDVLCRLGVSELNPAGSSWLHVGTDQPFASISIGACYQVWAVARDGSAFYRGSVYPSQPAGDCWYHIPSPPRQRLKQVSAGQTSVYALDENGNLWYRQGITPSYPQGSSWEHVSNNVCRVSVGPLDQVWVIANKVQGSHSLSRGTVCHRTGVQPHEPKGHGWDYGIGGGWDHISVRANATRAPRSSSQEQEPSAPPEAHGPVCC

SEQ ID NO: 787669 - protein, 1145 aa, Homo sapiens; identical to SEQ ID NO: 787668

SEQ ID NO: 787670 - protein, 204 aa, Homo sapiens
MPLHSSLGDRDSISKKKKKKSEGRRQQIGNNTGVDGMSSSLRGPGYQTGGWERMRGCPMAGGSVRVCSHHHQPPFGPFPRCAGDRGFLDVKSCCRRVQTAGFCGEQYYCVCRQWPWDPQPVLYMEQGAQSPSILWREAGPARPGEAEGVGQVAPTPSRNLSAAFYYLCAPFGSLLPPPGHFAREVIRAQPQALLGWRGDDFTTT

SEQ ID NO: 787671 - protein, 114 aa, Homo sapiens
MKVPFLHPCLPPAIHPSQVSCLPWASVTTFWALCQLLATWCGQLRPSPRLYYSLKLQRPGGCSLTLWDGLLSSQGVPGSRARGQAYHIQDAYRQECPAPALPGSQYSSMHRGRW

SEQ ID NO: 787672 - protein, 37 aa, Homo sapiens
PFPISTKSHSFDFPGVFWLCLLLSFCSIPTLAQALIS

SEQ ID NO: 787673 - protein, 118 aa, Homo sapiens
MLPKLEGFSRVKLIFKYGLHLTGTPFMRLQAYHFKSREVASMNCQVFKSRMAQEFSDPSFARQGLEPHCSLSLRTQQNLSYQGLTLGISSLMLALRCAVAQLTVGTRHLVNQSKDIIS

SEQ ID NO: 787674 - protein, 155 aa, Homo sapiens
AQNGEGQAVGSTGKGNLWLVKKHYSERTSGKEWANRNRSSHSRLQVSGCFWLEGGVSPGTHPCLSGHLTASCCFHKELPKMVIYKEKRFKWLTVPQAIRKHGWGGLRKLTVMTEGEAGMSHMVEQEEELTYSKLFKTEHLSLFCSLSGRTLLPPP

SEQ ID NO: 787675 - protein, 43 aa, Homo sapiens
RAHVPGLPASHRARRCSSNGAPGPPAAPLLCIGRSLPAPSFGF

SEQ ID NO: 787676 - protein, 431 aa, Homo sapiens
SARSSLSVELGDCSCGEISVHCLPWVLFILDLKVESSMFCPLKLILLPVLLDYSLGLNDLNVSPPELTVHVGDSALMGCVFQSTEDKCIFKIDWTLSPGEHAKDEYVLYYYSNLSVPIGRFQNRVHLMGDILCNDGSLLLQDVQEADQGTYICEIRLKGESQVFKKAVVLHVLPEEPKELMVHVGGLIQMGCVFQSTEVKHVTKVEWIFSGRRAKEEIVFRYYHKLRMSVEYSQSWGHFQNRVNLVGDIFRNDGSIMLQGVRESDGGNYTCSIHLGNLVFKKTIVLHVSPEEPRTLVTPAALRPLVLGGNQLVIIVGIVCATILLLPVLILIVKKTCGNKSSVNSTVLVKNTKKTNPEIKEKPCHFERCEGEKHIYSPIIVREVIEEEEPSEKSEATYMTMHPVWPSLRSDRNNSLEKKSGGGMPKTQQAF

SEQ ID NO: 787677 - protein, 410 aa, Homo sapiens
SARSSLSVELGDCSCGEISVHCLPWVLFILDYSLGLNDLNVSPPELTVHVGDSALMGCVFQSTEDKCIFKIDWTLSPGEHAKDEYVLYYYSNLSVPIGRFQNRVHLMGDILCNDGSLLLQDVQEADQGTYICEIRLKGESQVFKKAVVLHVLPEEPKELMVHVGGLIQMGCVFQSTEVKHVTKVEWIFSGRRAKEEIVFRYYHKLRMSVEYSQSWGHFQNRVNLVGDIFRNDGSIMLQGVRESDGGNYTCSIHLGNLVFKKTIVLHVSPEEPRTLVTPAALRPLVLGGNQLVIIVGIVCATILLLPVLILIVKKTCGNKSSVNSTVLVKNTKKTNPEIKEKPCHFERCEGEKHIYSPIIVREVIEEEEPSEKSEATYMTMHPVWPSLRSDRNNSLEKKSGGGMPKTQQAF

SEQ ID NO: 787678 - protein, 204 aa, Homo sapiens
MSVEYSQSWGHFQNRVNLVGDIFRNDGSIMLQGVRESDGGNYTCSIHLGNLVFKKTIVLHVSPEEPRTLVTPAALRPLVLGGNQLVIIVGIVCATILLLPVLILIVKKTCGNKSSVNSTVLVKNTKKTNPEIKEKPCHFERCEGEKHIYSPIIVREVIEEEEPSEKSEATYMTMHPVWPSLRSDRNNSLEKKSGGGMPKTQQAF

SEQ ID NO: 787679 - protein, 381 aa, Homo sapiens
SARSSLSVELGDCSCGEISVHCLPWVLFILDLKVESSMFCPLKLILLPVLLDYSLGLNDLNVSPPELTVHVGDSALMGCVFQSTEDKCIFKIDWTLSPGEHAKDEYVLYYYSNLSVPIGRFQNRVHLMGDILCNDGSLLLQDVQEADQGTYICEIRLKGESQVFKKAVVLHVLPEEPKELMVHVGGLIQMGCVFQSTEVKHVTKVEWIFSGRRAKEEIVFRYYHKLRMSVEYSQSWGHFQNRVNLVGDIFRNDGSIMLQGVRESDGGNYTCSIHLGNLVFKKTIVLHVSPEEPRTLVTPAALRPLVLGGNQLVIIVGIVCATILLLPVLILIVKKTCGNKSSVNSTVLVKNTKKTNPEIKEKPCHFERCEGEVNTRFSLKH

SEQ ID NO: 787680 - protein, 229 aa, Homo sapiens
SARSSLSVELGDCSCGEISVHCLPWVLFILDLKVESSMFCPLKLILLPVLLDYSLGLNDLNVSPPELTVHVGDSALMGCVFQSTEDKCIFKIDWTLSPGEHAKDEYVLYYYSNLSVPIGRFQNRVHLMGDILCNDGSLLLQDVQEADQGTYICEIRLKGESQVFKKAVVLHVLPEEPKELMVHVGGLIQMGCVFQSTEVKHVTKVEWIFSGRRAKVTRRKHHCVREGSG

SEQ ID NO: 787681 - protein, 128 aa, Homo sapiens
CPHKNLHMNIYREALFTTAKIWKQPRCLSVGKWINCGKSSFLKRKSRILKKRRKTGSPCGLGPKMGNESPIWKSVSECPSGVHFPWETVQSRPLESTLTLLISESHLRSSQETMRRNCSRVCPMCSLR

SEQ ID NO: 787682 - protein, 34 aa, Homo sapiens
HADRAQLFSVHRRNPFNKGGLLCFLLEGQLIVQG

SEQ ID NO: 787683 - protein, 110 aa, Homo sapiens
MKALGARVGECPGCQSPQRMLPESSRVLLPRCAEGEQPGVQRGKGRMRKAFPALQTPLALPSSAPASPGAGKPSHTGSWLPLRLLKRQHWRWEPWTACKEAVQHLVITEL

SEQ ID NO: 787684 - protein, 113 aa, Homo sapiens
LEQLIVGRGGWAIVPDGGHLAEAVRRQEVARVHDVRTGVNLRREDGDVGEVLKIGGVLVQSLKLQPQLQLGHGPGARGARGPPGSAAPAGPSLWGRRKCGVRTGQVAKAGWPD

SEQ ID NO: 787685 - protein, 138 aa, Homo sapiens
LRPQAELHVHPHQGALHRGPGLARPCSAPHGQLLTALWAHRGSSRRSWSLGGRQLRAASLSLPRPPRVSAKACLRFSPFDCQTFRFSLSKPEKFLTLFFFASWKHKLFEIRFLHQHILFSWPLRGRSPWASHLLGRPS

SEQ ID NO: 787686 - protein, 72 aa, Homo sapiens
ASQGSADTFIPRLSHNGEHLLGTHLEPLNRHVSILVLDPNNLVFTPHCTDEEQGMDVEKLKLLKRLTAVFIF

SEQ ID NO: 787687 - protein, 61 aa, Homo sapiens
LLPPQLIFLSLFANHFPAMLTPLWPLDRERDDGDHMGFICSMSSTQHRAPTELRQGPSLTT

SEQ ID NO: 787688 - protein, 67 aa, Homo sapiens
EFARTNSNEDVSPCAIYENDCAVKAPGGLDEECFHLLLHSSSLALILATYTVSTKELLPSSSSLLHT

SEQ ID NO: 787689 - protein, 125 aa, Homo sapiens
GGRDTRMGTSQLVQASAPPSSSSLAGSSSGLLRCCAAPSLALGPPVPEMKEELLPWTVPVQAGGRWPQDTRHPRHRDTRSPGSASEVQQPQSPCSEASDGRAGPACGTHHGRSNRQALGRQQHSL

SEQ ID NO: 787690 - protein, 116 aa, Homo sapiens [sequence omitted]

SEQ ID NO: 787691 - protein, 83 aa, Homo sapiens
SPMCSAPVYRPASHRMPTVTTCQPWQTTWGPPSDLLVGLCTLVPVLLLAWGPPPALCLNGSVEPSELTYQLLQKVVPDPASRP

SEQ ID NO: 787692 - protein, 148 aa, Homo sapiens
GAPAYISMGPLEFSGIYQHTGLREEFSKDRGPGCMVTKPTQREGMLEWARVPVPQQATPGNRPTPRPEDEQRAPTGTSTSHSSPMCPGKPSPGVPALLRVESGCLWLFFLLWKFPRSRDRLYSEPHEDPLNRLWLLDEGLTLHPTPSV

SEQ ID NO: 787693 - protein, 136 aa, Homo sapiens
AYISLCSSLLMLILLMLILLMLILLMPILLMLILLMLILLMLIPPYAIPPYAHPSLCSSLLMLIPPYAHPSLCSSLLMLIPPCNGCSLGPASPQFVGQARRWGSETRMSCVPEMLCRTTLETVLLQGSKTVWLNTG

SEQ ID NO: 787694 - protein, 53 aa, Homo sapiens
MPTISSTEKRDMQSFSTPFITFKFLSVSSRYLLLIFCDFPGHEKGSEVDSGAL

SEQ ID NO: 787695 - protein, 222 aa, Homo sapiens
RVHLLSSGKVPASCLPARRPISAFRPSCGLRPTPARAPHGCRRGQACGAGLRRVGAGPLSFLLQVYAPLPGRPDAFHRCIFLFCCREQPCCAGLRVFRNQLPRKNDFYSYEPPSENPPPETGESVCLQLKSGAHLCRVCGCLGPKTCSRCHKAYYCSKEHQTLDWRLGHKQACAQPDHLDHIIPDHNFLFPEFEIVIETEDEIMPEVVEKEDYSEIIGSMGI

SEQ ID NO: 787696 - protein, 383 aa, Homo sapiens
SVSTSCPPERCPPLAFRPGARFPPSDPAVGCAPRQPAPRMAAAGARPVELGFAESAPAWRLRSEQFPSKVGGRPAWLGAAGLPGPQALACELCGRPLSFLLQVYAPLPGRPDAFHRCIFLFCCREQPCCAGLRVFRNQLPRKNDFYSYEPPSENPPPETGESVCLQLKSGAHLCRVCGCLGPKTCSRCHKAYYCSKEHQTLDWRLGHKQACAQPDHLDHIIPDHNFLFPEFEIVIETEDEIMPEVVEKEDYSEIIGSMGEALEEELDSMAKHESREDKIFQKFKTQIALEPEQILRYGRGIAPIWISGENIPQEKDIPDCPCGAKRILEFQVMPQLLNYLKADRLGKSIDWGILAVFTCAESCSLGTGYTEEFVWKQDVTDTP

SEQ ID NO: 787697 - protein, 238 aa, Homo sapiens
SVSTSCPPERCPPLAFRPGARFPPSDPAVGCAPRQPAPRMAAAGARPVELGFAESAPAWRLRSEQFPLSFLLQVYAPLPGRPDAFHRCIFLFCCREQPCCAGLRVFRNQLPRKNDFYSYEPPSENPPPETGESVCLQLKSGAHLCRVCGCLGPKTCSRCHKAYYCSKEHQTLDWRLGHKQACAQPDHLDHIIPDHNFLFPEFEIVIETEDEIMPEVVEKEDYSEIIGSMGKQFQDFIH

SEQ ID NO: 787698 - protein, 77 aa, Homo sapiens
GSPGLQAAPGHILVLSRLQPLRAEVSRSRLLRVEYSYVKTTKLVFKGTKAKRRDGKKVSRSELKPLPLRTLSRSLGS

SEQ ID NO: 787699 - protein, 120 aa, Homo sapiens
SVSTSCPPERCPPLAFRPGARFPPSDPAVGCAPRQPAPRMAAAGARPVELGFAESAPAWRLRSEQFPSKVGGRQHSLSAGALLSSIFLALSQSFSGRLNFTIHPTRVLPTYRKLLMRLVV

SEQ ID NO: 787700 - protein, 354 aa, Homo sapiens
SVSTSCPPERCPPLAFRPGARFPPSDPAVGCAPRQPAPRMAAAGARPVELGFAESAPAWRLRSEQFPLSFLLQVYAPLPGRPDAFHRCIFLFCCREQPCCAGLRVFRNQLPRKNDFYSYEPPSENPPPETGESVCLQLKSGAHLCRVCGCLGPKTCSRCHKAYYCSKEHQTLDWRLGHKQACAQPDHLDHIIPDHNFLFPEFEIVIETEDEIMPEVVEKEDYSEIIGSMGEALEEELDSMAKHESREDKIFQKFKTQIALEPEQILRYGRGIAPIWISGENIPQEKDIPDCPCGAKRILEFQVMPQLLNYLKADRLGKSIDWGILAVFTCAESCSLGTGYTEEFVWKQDVTDTP

SEQ ID NO: 787701 - protein, 354 aa, Homo sapiens; identical to SEQ ID NO: 787700

SEQ ID NO: 787702 - protein, 308 aa, Homo sapiens
SVSTSCPPERCPPLAFRPGARFPPSDPAVGCAPRQPAPRMAAAGARPVELGFAESAPAWRLRSEQFPLSFLLQVYAPLPGRPDAFHRCIFLFCCREQPCCAGLRVFRNQLPRKNDFYSYEPPSENPPPETGESVCLQLKSGAHLCRVCGCLGPKTCSRCHKAYYCSKEHQTLDWRLGHKQACAQPDHLDHIIPDHNFLFPEFEIVIETEDEIMPEVVEKEDYSEIIGSMGEALEEELDSMAKHESREDKIFQKFKTQIALEPEQILRYGRGIAPIWISGENIPQEKDIPDCPCGAKRILEFQFSDTVY

SEQ ID NO: 787703 - protein, 303 aa, Homo sapiens
SVSTSCPPERCPPLAFRPGARFPPSDPAVGCAPRQPAPRMAAAGARPVELGFAESAPAWRLRSEQFPLSFLLQVYAPLPGRPDAFHRCIFLFCCREQPCCAGLRVFRNQLPRKNDFYSYEPPSENPPPETGESVCLQLKSGAHLCRVCGCLGPKTCSRCHKAYYCSKEHQTLDWRLGHKQACAQPDHLDHIIPDHNFLFPEFEIVIETEDEIMPEVVEKEDYSEIIGSMGEALEEELDSMAKHESREDKIFQKFKTQIALEPEQILRYGRGIAPIWISGENIPQEKDIPDCPCGAKRILEFQV

SEQ ID NO: 787704 - protein, 312 aa, Homo sapiens
RVHLLSSGKVPASCLPARRPISAFRPSCGLRPTPARAPHGCRRGQACGAGLRRVGAGVATAQRAVPALLPAAGVCAAAWPPGRLPPLHLPLLLPRAAVLCRPARVCGCLGPKTCSRCHKAYYCSKEHQTLDWRLGHKQACAQPDHLDHIIPDHNFLFPEFEIVIETEDEIMPEVVEKEDYSEIIGSMGEALEEELDSMAKHESREDKIFQKFKTQIALEPEQILRYGRGIAPIWISGENIPQEKDIPDCPCGAKRILEFQVMPQLLNYLKADRLGKSIDWGILAVFTCAESCSLGTGYTEEFVWKQDVTDTP

SEQ ID NO: 787705 - protein, 231 aa, Homo sapiens
SVSTSCPPERCPPLAFRPGARFPPSDPAVGCAPRQPAPRMAAAGARPVELGFAESAPAWRLRSEQFPLSFLLQVYAPLPGRPDAFHRCIFLFCCREQPCCAGLRVFRNQLPRKNDFYSYEPPSENPPPETGESVCLQLKSGAHLCRVCGCLGPKTCSRCHKAYYCSKEHQTLDWRLGHKQACAQPDHLDHIIPDHNFLFPEFEIVIETEDEIMPEVVEKEDYSEIIGSMDS

SEQ ID NO: 787706 - protein, 341 aa, Homo sapiens
RVHLLSSGKVPASCLPARRPISAFRPSCGLRPTPARAPHGCRRGQACGAGLRRVGAGVATAQRAVPQQGGRAAGMAGRGRAAGAPGPGLRAVRPPALLPAAGVCAAAWPPGRLPPLHLPLLLPRAAVLCRPARVCGCLGPKTCSRCHKAYYCSKEHQTLDWRLGHKQACAQPDHLDHIIPDHNFLFPEFEIVIETEDEIMPEVVEKEDYSEIIGSMGEALEEELDSMAKHESREDKIFQKFKTQIALEPEQILRYGRGIAPIWISGENIPQEKDIPDCPCGAKRILEFQVMPQLLNYLKADRLGKSIDWGILAVFTCAESCSLGTGYTEEFVWKQDVTDTP

SEQ ID NO: 787707 - protein, 231 aa, Homo sapiens
SVSTSCPPERCPPLAFRPGARFPPSDPAVGCAPRQPAPRMAAAGARPVELGFAESAPAWRLRSEQFPLSFLLQVYAPLPGRPDAFHRCIFLFCCREQPCCAGLRVFRNQLPRKNDFYSYEPPSENPPPETGESVCLQLKSGAHLCRVCGCLGPKTCSRCHKAYYCSKEHQTLDWRLGHKQACAQPDHLDHIIPDHNFLFPEFEIVIETEDEIMPEVVEKEDYSEIIGSMGI

SEQ ID NO: 787708 - protein, 138 aa, Homo sapiens
SVSTSCPPERCPPLAFRPGARFPPSDPAVGCAPRQPAPRMAAAGARPVELGFAESAPAWRLRSEQFPSKVGGRPAWLGAAGLPGPQALACELCGRPLSFLLQVYAPLPGRPDAFHRCIFLFCCREQPCCAGLRGFVAV

SEQ ID NO: 787709 - protein, 168 aa, Homo sapiens
SVSTSCPPERCPPLAFRPGARFPPSDPAVGCAPRQPAPRMAAAGARPVELGFAESAPAWRLRSEQFPLSFLLQVYAPLPGRPDAFHRCIFLFCCREQPCCAGLRGEPPNGVGTGPCLRRVRGVNSGSDQGDGGKHRCRPSLRAPSPRCPRSTFSRALPGCAHFCYISF

SEQ ID NO: 787710 - protein, 138 aa, Homo sapiens; identical to SEQ ID NO: 787708

SEQ ID NO: 787711 - protein, 231 aa, Homo sapiens; identical to SEQ ID NO: 787707

SEQ ID NO: 787712 - protein, 260 aa, Homo sapiens
SVSTSCPPERCPPLAFRPGARFPPSDPAVGCAPRQPAPRMAAAGARPVELGFAESAPAWRLRSEQFPSKVGGRPAWLGAAGLPGPQALACELCGRPLSFLLQVYAPLPGRPDAFHRCIFLFCCREQPCCAGLRVFRNQLPRKNDFYSYEPPSENPPPETGESVCLQLKSGAHLCRVCGCLGPKTCSRCHKAYYCSKEHQTLDWRLGHKQACAQPDHLDHIIPDHNFLFPEFEIVIETEDEIMPEVVEKEDYSEIIGSMGI

SEQ ID NO: 787713 - protein, 168 aa, Homo sapiens; identical to SEQ ID NO: 787709

SEQ ID NO: 787714 - protein, 138 aa, Homo sapiens; identical to SEQ ID NO: 787708

SEQ ID NO: 787715 - protein, 431 aa, Homo sapiens
MTRDRKQYQHCNAQYHRTTKQKREARRGENTDKRRSKTTRDEKPYMRDRNSTKKHTGESAAEKTRHNTRSENTKQKEEHTREKPNRPKRYWYERKKAKNTNTKKEEKRNAASGAYTKENKNEANTTRRSTTDDTKETHNTTKQNTGTTTDSRQIEQENTGAEAEKNQDAKRSDEEKDTAKSRKTERGDRGADEEGERAGEEGGRGEEEEERGREKEGEEREKRGRQHEETREGEREQDAKREREKGEAERKRSESRRRGEEKGREEGGASRNSASRKTGETLREGARRHKAEEGDESDQEQDDEARGRGTARDTKTTTTDRGPRETDEEEREGGTKRQGRRQTREQHRAKETEAANEDERAEQATDEDERTARAQRRKGERGNRPERKAEHNRQADTSAQRTQHNRSRSKEEGRRSKREGKHEEGENRQQE

SEQ ID NO: 787716 - protein, 102 aa, Homo sapiens
RGSRVVLVSGVCWRKGTETEDVRCEQCARWYLLSMCLLAVMKCKSIHRLSESEPGGDQAGDRGDRQSLWHTPVLLQIHLTFPCHSKINFRNTESNLTHLVLK

SEQ ID NO: 787717 - protein, 249 aa, Homo sapiens
  misc_feature (193)..(193): Xaa can be any naturally occurring amino acid
MGARANIGRQKFGGDNSFPQGGGILNSPSRDFGVFGAPKKTTRGVEHWDKINPAKIQKTCWWLHTRGKNNKQASIMLGTHLMPPPRGGSLTGAKKNHRGPQKRLGGPYTLARSRSVSTTLAKTTKELSGAGKRNSFPYKTQGPSARGPFLIFVAVPPSLGGQGHSGVRKTPVGRTRRLQLASGFGGSRRPPVXMSLLLGPEFRVPSGGNTFPRSQREMPLFDNFAVVGASWAHRVSARAGKTPPLCFWF

SEQ ID NO: 787718 - protein, 122 aa, Homo sapiens
SFLRKNCCYFFRNPPPTLLHPEKWCEEFNHFISQCLIKDFERRPSVTHLLDHPFIKGVHGKVLFLQKQLAKVLQDQKHQNPVAKTRHERMHTRRPYHVEDAEKYCLEDDLVNLEVLDEVLNI

SEQ ID NO: 787719 - protein, 75 aa, Homo sapiens
GTRSPPRVLRLNSFSSLISRRRRLLANAGQPPACVLWVSPSVSSHCLRLGPNTAVHFLESLLHSCCRSYESRGKL

SEQ ID NO: 787720 - protein, 154 aa, Homo sapiens
KDDDVEHIMVRRPGALAETTLLIFPATVFYIHAVEAMKVVGNYRVNTANSSTDTSGEHLTCLRSQLFVAYRNGRVDEAVSLGFLDCWIGGDLTNFKGCYLTNQLPIQIFTAIFDMNTDVIILSQFMYYRLKNQKKKISEEDLRKELHFCCLHWP

SEQ ID NO: 787721 - protein, 75 aa, Homo sapiens; identical to SEQ ID NO: 787719

SEQ ID NO: 787722 - protein, 105 aa, Homo sapiens
MKVVGNYRVNTANSSTDTSGEHLTCLRSQLFVAYRNGRVDEAVSLGFLDCWIGGDLTNFKGCYLTNQLPIQIFQPQLFKDSITREKVRLSLWGVLCPVYIPYSFR

SEQ ID NO: 787723 - protein, 118 aa, Homo sapiens
MKVVGNYRVNTANSSTDTSGEHLTCLRSQLFVAYRNGRVDEAVSLGFLDCWIGGDLTNFKGCYLTNQLPIQIFTAIFDMNTDVIILSQFMYYRLKNQKKKISEEDLRKELHFCCLHWP

SEQ ID NO: 787724 - protein, 108 aa, Homo sapiens
KDDDVEHIMVRRPGALAETTLLIFPATVFYIHAVEAMKVVGNYRVNTANSSTDTSGEHLTCLRSQLFVAYRNGRVDEAVSLGFLDCWIGGDLTNFKGCYLTNQLPIQF

SEQ ID NO: 787725 - protein, 136 aa, Homo sapiens
MKVVGNYRVNTANSSTDTSGEHLTCLRSQLFVAYRNGRVDEAVSLGFLDCWIGGDLTNFKGCYLTNQLPIQIFTAIFDMNTDVIILSQFMYYRLKNQKKKIYSNLSYSKTPSPERKSDCHFGESSALYISHILSDK

SEQ ID NO: 787726 - protein, 89 aa, Homo sapiens
RTKLSIQHYEMTIPTASQNQAQYPVSPSVTFQHLHLELTITPEPTMEAEHSIMLRMTTAPPKHPEVTLPPSDHVQAQHTNLRPQCNLWI

SEQ ID NO: 787727 - protein, 149 aa, Homo sapiens
VTCFMASARRTTDTRPQPPRGIAPRLAPLPALSPAALSPAALSPASTPHLANLAAPSFPKTATTTPGFVDTRKSFCPAPLPPATDGSISAPPSVCSDPDCEGHRCENGVYDPQQDDGDESADEDSCSEHSSSTSTSTNQKEGKYCDCCY

SEQ ID NO: 787728 - protein, 54 aa, Homo sapiens
RDTLPEHWSYGVCRDGRVFFINDQLRCTTWLHPRTGEPVNSGHMIRSGGRRAGG

SEQ ID NO: 787729 - protein, 88 aa, Homo sapiens
TPSLRCSGLNMPLTYLYISDFLLSKSGHLSLAVTLNEPPPPPFPSGIEHALPLTQSTTVLTRQDGGCVQRRSRLEVGSGTAQLSYVIF

SEQ ID NO: 787730 - protein, 33 aa, Homo sapiens
MPEHRGALDTVFPNQDSIEHKCSEGMSEDAAGC

SEQ ID NO: 787731 - protein, 116 aa, Homo sapiens
LEGRVTWNLCKSQAIRELHGTGEIVNVYDHEISEYVYQFHLWKTLFQAPVAKGNSNIMTSVSTQLSLVLMSLLLVLPVVEAVEAGDAIALLLGVVLSITGICACLGVYARKRNGQM

SEQ ID NO: 787732 - protein, 200 aa, Homo sapiens [sequence omitted]

SEQ ID NO: 787733 - protein, 114 aa, Homo sapiens [sequence omitted]

SEQ ID NO: 787734 - protein, 110 aa, Homo sapiens
FSNTCFLLWGRDDNRVACDYHSPLQYPWQAPLSTDKIPSCQAQTTASESMTQCTRRPLSTYLFCYVKGSLSSLSKGEPTAIQVGNQTSLEARRQNPTSIIKEHQNLIDRP

SEQ ID NO: 787735 - protein, 179 aa, Homo sapiens
FFLFFRTAQAPGAKNNRGSGERRVPAARISGPKRGWRRRGRPMQRIARRRRQPGCCGRQLKNGSRKLLLTMNEGIRFTRQGPPAKLGFPAGFSNHICISPPLNPPRTVPTAHWAATSLLQSQSWSRAATCWFPLAAVHHGYRGDRDPICIGLLDWLAEEQFLGGGAKNFLLSHGRPRLA

SEQ ID NO: 787736 - protein, 129 aa, Homo sapiens
MVRGISAPVISSNPATTEVQRKKPSVAFKKPIFTHPMPSPEAVIQTRCPAHAPSSSFTVMALGPPKVSPKRGVPKTSPRQTLGTPQRDIGLQTPRISPSTHEPLEMTSSKSVSPGRKGQLNDSASTPPK

SEQ ID NO: 787737 - protein, 539 aa, Homo sapiens
RGPQGQGHGRMALNLQLSDTDDNETFDELHIESSDEKSPSDVSLAADTDKSVENLDVLVGFGKSLCGSPEEEEKQVPIPSETRPKTFSFIKQQRVVKRTSSEECVTVIFDAEDGEPIEFSSHQTGVVTVTRNEISINSTPAGPKAEHTELLPQGIACLQPRAAARDYTFFKRSEEDTEKNIPKDNVDNVPRVSTESFSSRTVTQNPQQQKLVKPTHNISCQSNSRSSAPMGIYQKQNLTKIPPRGKSSPQKSKLMEPEATTLLPSSGLVTLEKSPALAPGKLSRFMKTESSGPLFELRSDPHIPKHSAQLPHSSRMPSRRDWVQCPKSQTPGSRSRPAIESSDSGEPPTRDEHCGSGPEAGVKSPSPPPPPGRSVSLLARPSYDYSPAPSSTKSETRVPSETARTPFKSPLLKGISAPVISSNPATTEVQRKKPSVAFKKPIFTHPMPSPEAVIQTRCPAHAPSSSFTVMALGPPKVSPKRGVPKTSPRQTLGTPQRDIGLQTPRISPSTHEPLEMTSSKSVSPGRKGQLNDSASTPPK

SEQ ID NO: 787738 - protein, 116 aa, Homo sapiens
WPLPACHGFSKCAMVKRTPDHLLLEPVTSWLHHKENLPLTCLESPRAGRGVSSQCPPNPTPMSWKQMRGCRTGKPPGEERMLLRQEQVLRALPAGLGSSNPQVHSPGTAHMASGGP

SEQ ID NO: 787739 - protein, 115 aa, Homo sapiens
DWVQVMLIGSGDADWVQVMLADWVRVMLADWVQMMLADWVQVMLIDWVQVMLADWVQMMLADWVWVMLADWVQVMLADWVQVMLIAWVQVMLADHVDLVQEVLGTVNQLVLVEAY

SEQ ID NO: 787740 - protein, 220 aa, Homo sapiens
RLAGAGKMAAAAAAAAATNGTGGSSVMEVDAAVVPSVMACGVTGSVSVALHPLVILNISDHWIRMRSQEGRPVQVIGALIGKQEGRNIEVMNSFELLSHTVEEKIIIDKEYYYTKEEQFKQVFKELEFLGWYTTGGPPDPSDIHVHKQVCEIIESPLFLKLNPMTKHTDLPVSVFESVIDIINGEATMLFAELTYTLATEEAERIGVDHVARMTATGSGE

SEQ ID NO: 787741 - protein, 102 aa, Homo sapiens [sequence omitted]

SEQ ID NO: 787742 - protein, 82 aa, Homo sapiens
MEAICHVCCVRRGCCVVRALCVPHVLCVVLRCVLCVPQVLCVVHALCVVCVLHAVCALRVVHVLCVLCVVHALCVVCVPRVL

SEQ ID NO: 787743 - protein, 116 aa, Homo sapiens
LTLSRKSAESPSINQEKNNAELQNANLLPPALLPNSKPTHRVLKAQRCLPAVLLHFVEEKLAAATANPDVNSTLTSWGPYPQKFHRTTHQLHSLHLLLLCKPSLGFFLHCFKTNLR

SEQ ID NO: 787744 - protein, 69 aa, Homo sapiens
VEGNSYEQNEQSLPNNLRDALRELDDSEVMAKYIDPKYIDIFVACEESELEEFEHSISDLEYNWYLHTV

SEQ ID NO: 787745 - protein, 968 aa, Homo sapiens
MKFFVFKSFLSDCYRSLLDNSQLPAPRSRLPAPGARRGAVPQTTRSRGGWVWGRGSQCRRIGPQSAVLLSPEAAWMEPPLPVGAQPLATVEGMEMKGPLREPCALTLAQRNGQYELIIQLHEKEQHVQDIIPINSHFRCVQEAEETLLIDIASNSGCKIRVQGDWIRERRFEIPDEEHCLKFLSAVLAAQKAQSQLLVPEQKDSSSWYQKLDTKDKPSVFSGLLGFEDNFSSMNLDKKINSQNQPTGIHREPPPPPFSVNKMLPREKEASNKEQPKVTNTMRKLFVPNTQSGQREGLIKHILAKREKEYVNIQTFRFFVGTWNVNGQSPDSGLEPWLNCDPNPPDIYCIGFQELDLSTEAFFYFESVKEQEWSMAVERGLHSKAKYKKVQLVRLVGMMLLIFARKDQCRYIRDIATETVGTGIMGKMGNKGGVAVRFVFHNTTFCIVNSHLAAHVEDFERRNQDYKDICARMSFVVPNQTLPQLNIMKHEVVIWLGDLNYRLCMPDANEVKSLINKKDLQRLLKFDQLNIQRTQKKAFVDFNEGEIKFIPTYKYDSKTDRWDSSGKCRVPAWCDRILWRGTNVNQLNYRSHMELKTSDHKPVSALFHIGVKVVDERRYRKVFEDSVRIMDRMENDFLPSLELSRREFVFENVKFRQLQKEKFQISNNGQVPCHFSFIPKLNDSQYCKPWLRAEPFEGYLEPNETVDISLDVYVSKDSVTILNSGEDKIEDILVLHLDRGKDYFLTISGNYLPSCFGTSLEALCRMKRPIREVPVTKLIDLEKSLLQMVPLDEGASERPLQVPKEIWLLVDHLFKYACHQEDLFQTPGMQEELQQIIDCLDTSIPETIPGSNHSVAEALLIFLEALPEPVICYELYQRCLDSAYDPRICRQVISQLPRCHRNVFRYLMAFLRELLKFSEYNSVNANMIATLFTSLLLRPPPNLMARQTPSDRQRAIQFLLGFLLGSEED

SEQ ID NO: 787746 - protein, 715 aa, Homo sapiens
MLPREKEASNKEQPKVTNTMRKLFVPNTQSGQREGLIKHILAKREKEYVNIQTFRFFVGTWNVNGQSPDSGLEPWLNCDPNPPDIYCIGFQELDLSTEAFFYFESVKEQEWSMAVERGLHSKAKYKKVQLVRLVGMMLLIFARKDQCRYIRDIATETVGTGIMGKMGNKGGVAVRFVFHNTTFCIVNSHLAAHVEDFERRNQDYKDICARMSFVVPNQTLPQLNIMKHEVVIWLGDLNYRLCMPDANEVKSLINKKDLQRLLKFDQLNIQRTQKKAFVDFNEGEIKFIPTYKYDSKTDRWDSSGKCRVPAWCDRILWRGTNVNQLNYRSHMELKTSDHKPVSALFHIGVKVVDERRYRKVFEDSVRIMDRMENDFLPSLELSRREFVFENVKFRQLQKEKFQISNNGQVPCHFSFIPKLNDSQYCKPWLRAEPFEGYLEPNETVDISLDVYVSKDSVTILNSGEDKIEDILVLHLDRGKDYFLTISGNYLPSCFGTSLEALCRMKRPIREVPVTKLIDLEEDSFLEKEKSLLQMVPLDEGASERPLQVPKEIWLLVDHLFKYACHQEDLFQTPGMQEELQQIIDCLDTSIPETIPGSNHSVAEALLIFLEALPEPVICYELYQRCLDSAYDPRICRQVISQLPRCHRNVFRYLMAFLRELLKFSEYNSVNANMIATLFTSLLLRPPPNLMARQTPSDRQRAIQFLLGFLLGSEED

SEQ ID NO: 787747 - protein, 968 aa, Homo sapiens; identical to SEQ ID NO: 787745

SEQ ID NO: 787748 - protein, 976 aa, Homo sapiens
MKFFVFKSFLSDCYRSLLDNSQLPAPRSRLPAPGARRGAVPQTTRSRGGWVWGRGSQCRRIGPQSAVLLSPEAAWMEPPLPVGAQPLATVEGMEMKGPLREPCALTLAQRNGQYELIIQLHEKEQHVQDIIPINSHFRCVQEAEETLLIDIASNSGCKIRVQGDWIRERRFEIPDEEHCLKFLSAVLAAQKAQSQLLVPEQKDSSSWYQKLDTKDKPSVFSGLLGFEDNFSSMNLDKKINSQNQPTGIHREPPPPPFSVNKMLPREKEASNKEQPKVTNTMRKLFVPNTQSGQREGLIKHILAKREKEYVNIQTFRFFVGTWNVNGQSPDSGLEPWLNCDPNPPDIYCIGFQELDLSTEAFFYFESVKEQEWSMAVERGLHSKAKYKKVQLVRLVGMMLLIFARKDQCRYIRDIATETVGTGIMGKMGNKGGVAVRFVFHNTTFCIVNSHLAAHVEDFERRNQDYKDICARMSFVVPNQTLPQLNIMKHEVVIWLGDLNYRLCMPDANEVKSLINKKDLQRLLKFDQLNIQRTQKKAFVDFNEGEIKFIPTYKYDSKTDRWDSSGKCRVPAWCDRILWRGTNVNQLNYRSHMELKTSDHKPVSALFHIGVKVVDERRYRKVFEDSVRIMDRMENDFLPSLELSRREFVFENVKFRQLQKEKFQISNNGQVPCHFSFIPKLNDSQYCKPWLRAEPFEGYLEPNETVDISLDVYVSKDSVTILNSGEDKIEDILVLHLDRGKDYFLTISGNYLPSCFGTSLEALCRMKRPIREVPVTKLIDLEEDSFLEKEKSLLQMVPLDEGASERPLQVPKEIWLLVDHLFKYACHQEDLFQTPGMQEELQQIIDCLDTSIPETIPGSNHSVAEALLIFLEALPEPVICYELYQRCLDSAYDPRICRQVISQLPRCHRNVFRYLMAFLRELLKFSEYNSVNANMIATLFTSLLLRPPPNLMARQTPSDRQRAIQFLLGFLLGSEED

SEQ ID NO: 787749 - protein, 735 aa, Homo sapiens
MKFFVFKSFLSDCYRSLLDNSQLPAPRSRLPAPGARRGAVPQTTRSRGGWVWGRGSQCRRIGPQSAVLLSPEAAWMEPPLPVGAQPLATVEGMEMKGPLREPCALTLAQRNGQYELIIQLHEKEQHVQDIIPINSHFRCVQEAEETLLIDIASNSGCKIRVQGDWIRERRFEIPDEEHCLKFLSAVLAAQKAQSQLLVPEQKDSSSWYQKLDTKDKPSVFSGLLGFEDNFSSMNLDKKINSQNQPTGIHREPPPPPFSVNKMLPREKEASNKEQPKVTNTMRKLFVPNTQSGQREGLIKHILAKREKEYVNIQTFRFFVGTWNVNGQSPDSGLEPWLNCDPNPPDIYCIGFQELDLSTEAFFYFESVKEQEWSMAVERGLHSKAKYKKVQLVRLVGMMLLIFARKDQCRYIRDIATETVGTGIMGKMGNKGGVAVRFVFHNTTFCIVNSHLAAHVEDFERRNQDYKDICARMSFVVPNQTLPQLNIMKHEVVIWLGDLNYRLCMPDANEVKSLINKKDLQRLLKFDQLNIQRTQKKAFVDFNEGEIKFIPTYKYDSKTDRWDSSGKCRVPAWCDRILWRGTNVNQLNYRSHMELKTSDHKPVSALFHIGVKVVDERRYRKVFEDSVRIMDRMENDFLPSLELSRREFVFENVKFRQLQKEKFQISNNGQVPCHFSFIPKLNDSQYCKPWLRAEPFEGYLEPNETVDISLDVYVSKELCTCCLREEMVQIHVVTLH

SEQ ID NO: 787750 - protein, 976 aa, Homo sapiens; identical to SEQ ID NO: 787748

SEQ ID NO: 787751 - protein, 222 aa, Homo sapiens
PRAESARGWVWGRGSQCRRIGPQSAVLLSPEAAWMEPPLPVGAQPLATVEGMEMKGPLREPCALTLAQRNGQYELIIQLHEKEQHVQDIIPINSHFRCVQEAEETLLIDIASNTCYSVPSGLSAWERRRLRLLLFSDILEADDLGLQVFQNDLKSHATGRVYCRISSSVYSKKEERFLIPPLPYPTQKNTFRLILPSQSYHILVFLCFLFIRQKDLYLHSFT

SEQ ID NO: 787752 - protein, 949 aa, Homo sapiens
MKFFVFKSFLSDCYRSLLDNSQLPAPRSRLPAPGARRGAVPQTTRSRGGWVWGRGSQCRRIGPQSAVLLSPEAAWMEPPLPVGAQPLATVEGMEMKGPLREPCALTLAQRNGQYELIIQLHEKEQHVQDIIPINSHFRCVQEAEETLLIDIASNSGCKIRVQGDWIRERRFEIPDEEHCLKFLSAVLAAQKAQSQLLVPEQKDSSSWYQKLDTKDKPSVFSGLLGFEDNFSSMNLDKKINSQNQPTGIHREPPPPPFSVNKMLPREKEASNKEQPKVTNTMRKLFVPNTQSGQREGLIKHILAKREKEYVNIQTFRFFVGTWNVNGQSPDSGLEPWLNCDPNPPDIYCIGFQELDLSTEAFFYFESVKEQEWSMAVERGLHSKAKYKKVQLVRLVGMMLLIFARKDQCRYIRDIATETVGTGIMGKMGNKGGVAVRFVFHNTTFCIVNSHLAAHVEDFERRNQDYKDICARMSFVVPNQTLPQLNIMKHEVVIWLGDLNYRLCMPDANEVKSLINKKDLQRLLKFDQLNIQRTQKKAFVDFNEGEIKFIPTYKYDSKTDRWDSSGKCRVPAWCDRILWRGTNVNQLNYRSHMELKTSDHKPVSALFHIGVKVVDERRYRKVFEDSVRIMDRMENDFLPSLELSRREFVFENVKFRQLQKEKFQISNNGQVPCHFSFIPKLNDSQYCKPWLRAEPFEGYLEPNETVDISLDVYVSKDSVTILNSGEDKIEDILVLHLDRGKDYFLTISGNYLPSCFGTSLEALCRMKRPIREVPVTKLIDLEEDSFLEKEKSLLQMVPLDEGASERPLQVPKEIWLLVDHLFKYACHQEDLFQTPGMQEELQQIIDCLDTSIPETIPGSNHSVAEALLIFLEALPEPVICYELYQRCLDSAYDPRICRQVISQLPRCHRNVFRYLMAFLRELLKFSEYNSVNANMIVLSSLSPPCPLGDP

SEQ ID NO: 787753 - protein, 490 aa, Homo sapiens
MKFFVFKSFLSDCYRSLLDNSQLPAPRSRLPAPGARRGAVPQTTRSRGGWVWGRGSQCRRIGPQSAVLLSPEAAWMEPPLPVGAQPLATVEGMEMKGPLREPCALTLAQRNGQYELIIQLHEKEQHVQDIIPINSHFRCVQEAEETLLIDIASNSGCKIRVQGDWIRERRFEIPDEEHCLKFLSAVLAAQKAQSQLLVPEQKDSSSWYQKLDTKDKPSVFSGLLGFEDNFSSMNLDKKINSQNQPTGIHREPPPPPFSVNKMLPREKEASNKEQPKVTNTMRKLFVPNTQSGQREGLIKHILAKREKEYVNIQTFRFFVGTWNVNGQSPDSGLEPWLNCDPNPPDIYCIGFQELDLSTEAFFYFESVKEQEWSMAVERGLHSKAKYKKVQLVRLVGMMLLIFARKDQCRYIRDIATETVGTGIMGKMGNKGGVAVRFVFHNTTFCIVNSHLAAHVEDFERRNQDYKDICARMSFVVPNQTLPQLNIMKHE

SEQ ID NO: 787754 - protein, 977 aa, Homo sapiens
MAQFYYKRNVNAPYRDRIPLRIVRAESELSPSEKAYLNAVEKGDYASVKKSLEEAEIYFKININCIDPLGRTALLIAIENENLELIELLLSFNVYVGDALLHAIRKEVVGAVELLLNHKKPSGEKQVPPILLDKQFSEFTPDITPIILAAHTNNYEIIKLLVQKGVSVPRPHEVRCNCVECVSSSDVDSLRHSRSRLNIYKALASPSLIALSSEDPFLTAFQLSWELQELSKVENEFKSEYEELSRQCKQFAKDLLDQTRSSRELEIILNYRDDNSLIEEQSGNDLARLKLAIKYRQKEFVAQPNCQQLLASRWYDEFPGWRRRHWAVKMVTCFIIGLLFPVFSVCYLIAPKSPLGLFIRKPFIKFICHTASYLTFLFLLLLASQHIDRSDLNRQGPPPTIVEWMILPWVLGFIWGEIKQMWDGGLQDYIHDWWNLMDFVMNSLYLATISLKIVAFVKYSALNPRESWDMWHPTLVAEALFAIANIFSSLRLISLFTANSHLGPLQISLGRMLLDILKFLFIYCLVLLAFANGLNQLYFYYEETKGLTCKGIRCEKQNNAFSTLFETLQSLFWSIFGLINLYVTNVKAQHEFTEFVGATMFGTYNVISLVVLLNMLIAMMNNSYQLIADHADIEWKFARTKLWMSYFEEGGTLPTPFNVIPSPKSLWYLIKWIWTHLCKKKMRRKPESFGTIGRRAADNLRRHHQYQEVMRNLVKRYVAAMIRDAKTEEGLTEENFKELKQDISSFRFEVLGLLRGSKLSTIQSANASKESSNSADSDEKSDSEGNSKDKKKNFSLFDLTTLIHPRSAAIASERHNISNGSALVVQEPPREKQRKVNFVTDIKNFGLFHRRSKQNAAEQNANQIFSVSEEVARQQAAGPLERNIQLESRGLASRGDLSIPGLSEQCVLVDHRERNTDTLGLQVGKRVCPFKSEKVVVEDTVPIIPKEKHAKEEDSSIDYDLNLPDTVTHEDYVTTRL

SEQ ID NO: 787755 - protein, 740 aa, Homo sapiens
MAQFYYKRNVNAPYRDRIPLRIVRAESELSPSEKAYLNAVEKGDYASVKKSLEEAEIYFKININCIDPLGRTALLIAIENENLELIELLLSFNVYVGDALLHAIRKEVVGAVELLLNHKKPSGEKQVPPILLDKQFSEFTPDITPIILAAHTNNYEIIKLLVQKGVSVPRPHEVRCNCVECVSSSDVDSLRHSRSRLNIYKALASPSLIALSSEDPFLTAFQLSWELQELSKVENEFKSEYEELSRQCKQFAKDLLDQTRSSRELEIILNYRDDNSLIEEQSGNDLARLKLAIKYRQKEFVAQPNCQQLLASRWYDEFPGWRRRHWAVKMVTCFIIGLLFPVFSVCYLIAPKSPLGLFIRKPFIKFICHTASYLTFLFLLLLASQHIDRSDLNRQGPPPTIVEWMILPWVLGFIWGEIKQMWDGGLQDYIHDWWNLMDFVMNSLYLATISLKIVAFVKYSALNPRESWDMWHPTLVAEALFAIANIFSSLRLISLFTANSHLGPLQISLGRMLLDILKFLFIYCLVLLAFANGLNQLYFYYEETKGLTCKGIRCEKQNNAFSTLFETLQSLFWSIFGLINLYVTNVKAQHEFTEFVGATMFGTYNVISLVVLLNMLIAMMNNSYQLIADHADIEWKFARTKLWMSYFEEGGTLPTPFNVIPSPKSLWYLIKWIWTHLCKKKMRRKPESFGTIGRRAADNLRRHHQYQEVMRNLVKRYVAAMIRDAKTEEGSCSSTGCRTT

SEQ ID NO: 787756 - protein, 730 aa, Homo sapiens
MAQFYYKRNVNAPYRDRIPLRIVRAESELSPSEKAYLNAVEKGDYASVKKSLEEAEIYFKININCIDPLGRTALLIAIENENLELIELLLSFNVYVGDALLHAIRKEVVGAVELLLNHKKPSGEKQVPPILLDKQFSEFTPDITPIILAAHTNNYEIIKLLVQKGVSVPRPHEVRCNCVECVSSSDVDSLRHSRSRLNIYKALASPSLIALSSEDPFLTAFQLSWELQELSKVENEFKSEYEELSRQCKQFAKDLLDQTRSSRELEIILNYRDDNSLIEEQSGNDLARLKLAIKYRQKEFVAQPNCQQLLASRWYDEFPGWRRRHWAVKMVTCFIIGLLFPVFSVCYLIAPKSPLGLFIRKPFIKFICHTASYLTFLFLLLLASQHIDRSDLNRQGPPPTIVEWMILPWVLGFIWGEIKQMWDGGLQDYIHDWWNLMDFVMNSLYLATISLKIVAFVKYSALNPRESWDMWHPTLVAEALFAIANIFSSLRLISLFTANSHLGPLQISLGRMLLDILKFLFIYCLVLLAFANGLNQLYFYYEETKGLTCKGIRCEKQNNAFSTLFETLQSLFWSIFGLINLYVTNVKAQHEFTEFVGATMFGTYNVISLVVLLNMLIAMMNNSYQLIARRAADNLRRHHQYQEVMRNLVKRYVAAMIRDAKTEEGLTEENFKELKQDISSFRFEVLGLLRGSKLSTIQSANASKESSNSADSDEKSDSEGSCSSTGCRTT

SEQ ID NO: 787757 - protein, 430 aa, Homo sapiens
MAQFYYKRNVNAPYRDRIPLRIVRAESELSPSEKAYLNAVEKGDYASVKKSLEEAEIYFKININCIDPLGRTALLIAIENENLELIELLLSFNVYVGDALLHAIRKEVVGAVELLLNHKKPSGEKQVPPILLDKQFSEFTPDITPIILAAHTNNYEIIKLLVQKGVSVPRPHEVRCNCVECVSSSDVDSLRHSRSRLNIYKALASPSLIALSSEDPFLTAFQLSWELQELSKVENEFKSEYEELSRQCKQFAKDLLDQTRSSRELEIILNYRDDNSLIEEQSGNDLARLKLAIKYRQKEFVAQPNCQQLLASRWYDEFPGWRRRHWAVKMVTCFIIGLLFPVFSVCYLIAPKSPLGLFIRKPFIKFICHTASYLTFLFLLLLASQHIDRSDLNRQGPPPTIVEWMILPWVLGKCVTIENIIKTCYCHGIS

SEQ ID NO: 787758 - protein, 977 aa, Homo sapiens; identical to SEQ ID NO: 787754

SEQ ID NO: 787759 - protein, 795 aa, Homo sapiens
MAQFYYKRNVNAPYRDRIPLRIVRAESELSPSEKAYLNAVEKGDYASVKKSLEEAEIYFKININCIDPLGRTALLIAIENENLELIELLLSFNVYVGDALLHAIRKEVVGAVELLLNHKKPSGEKQVPPILLDKQFSEFTPDITPIILAAHTNNYEIIKLLVQKGVSVPRPHEVRCNCVECVSSSDVDSLRHSRSRLNIYKALASPSLIALSSEDPFLTAFQLSWELQELSKVENEFKSEYEELSRQCKQFAKDLLDQTRSSRELEIILNYRDDNSLIEEQSGNDLARLKLAIKYRQKEFVAQPNCQQLLASRWYDEFPGWRRRHWAVKMVTCFIIGLLFPVFSVCYLIAPKSPLGLFIRKPFIKFICHTASYLTFLFLLLLASQHIDRSDLNRQGPPPTIVEWMILPWVLGFIWGEIKQMWDGGLQDYIHDWWNLMDFVMNSLYLATISLKIVAFVKYSALNPRESWDMWHPTLVAEALFAIANIFSSLRLISLFTANSHLGPLQISLGRMLLDILKFLFIYCLVLLAFANGLNQLYFYYEETKGLTCKGIRCEKQNNAFSTLFETLQSLFWSIFGLINLYVTNVKAQHEFTEFVGATMFGTYNVISLVVLLNMLIAMMNNSYQLIADHADIEWKFARTKLWMSYFEEGGTLPTPFNVIPSPKSLWYLIKWIWTHLCKKKMRRKPESFGTIGRRAADNLRRHHQYQEVMRNLVKRYVAAMIRDAKTEEGLTEENFKELKQDISSFRFEVLGLLRGSKLSTIQSANASKESSNSADSDEKSDSEGSCSSTGCRTT

SEQ ID NO: 787760 - protein, 90 aa, Homo sapiens
PRLPWLRFQSILTPPSSVPAAWAPASIVFLGMLQNSAATKGIPLEFAGRALTPHGTRAVSPRIPSLQPEDCNFAGKEDVASGLRSTGATP

SEQ ID NO: 787761 - protein, 112 aa, Homo sapiens
NKIIMVRRPKQSTADYGMRTSGPVESGLSADSLQLLCSYAAIKNSAELLMVGPQGMRPATGQDLLCRPCLSHDPPGPLHPPRGLSGSSSLLISPRLQDVSLQLVHPTPEESF

SEQ ID NO: 787762 - protein, 87 aa, Homo sapiens
HSRVSPPRTPNVGHQDLAFEPSMSPVVSTSGVLPVTLNFDILVRLVLDELLGSFFDNLGLHKESEVGPDAKEEMAPLSFFLFYHSLP

SEQ ID NO: 787763 - protein, 214 aa, Homo sapiens
MASADKNGGSVSSVSSSRLQSRKPPNLSITIPPPEKETQAPGEQDSMLPEGFQNRRLKKSQPRTWAAHTTACPPSFLPKRKNPAYLKSVSLQEPRSRWQESSEKRPGFRRQASLSQSIRKGAAQWFGVSGDWEGQRQQWQRRSLHHCSMRYGRLKASCQRDLELPSQEAPSFQGTESPKPCKMPKIVDPLARGRAFRHPEEMDRPHAPHPPLTP

SEQ ID NO: 787764 - protein, 185 aa, Homo sapiens
MASADKNGGSVSSVSSSRLQSRKPPNLSITIPPPEKETQAPGEQDSMLPERKNPAYLKSVSLQEPRSRWQESSEKRPGFRRQASLSQSIRKGAAQWFGVSGDWEGQRQQWQRRSLHHCSMRYGRLKASCQRDLELPSQEAPSFQGTESPKPCKMPKIVDPLARGRAFRHPEEMDRPHAPHPPLTP

SEQ ID NO: 787765 - protein, 120 aa, Homo sapiens
MASADKNGGSVSSVSSSRLQSRKPPNLSITIPPPEKETQAPGEQDSMLPEGFQNRRLKKSQPRTWAAHTTACPPSFLPKRKNPAYLKSVSLQEPRSRWQESSEKRPGFRRQASLSQSIRK

SEQ ID NO: 787766 - protein, 42 aa, Homo sapiens
LALCIGKERQVAGVSSPVLFDIIYCCFCSFLVWLLLWFGCVP

SEQ ID NO: 787767 - protein, 151 aa, Homo sapiens
HSLSRARTLTLGAYVCVGPPASPQAPPQTPSPAQKPPPRAGPSSHTCWDPGGQPSALPHNPASLPHLFLLPPPSLPRFLHFSLHALPLPGSLSLLLSFFLSGSGWFSVRRPAGPGGFAQASKYSALDSCPAHKRSAPCSGAISHRPAAANP

SEQ ID NO: 787768 - protein, 126 aa, Homo sapiens
VIIMFIPMRIIVMLDHENDAVMINNSPIRLMWGGSCPCEYGVSEGFTSSRMWNSSQALEYDDGLGSQRGSSCEYLCLVPLLSDGFGLLWVSSLSVYPFLHPFLGISSLDDFLFYSQAVVSIHAICK

SEQ ID NO: 787769 - protein, 253 aa, Homo sapiens
PAFRKPAPGAMGAQVRLPPGEPCREGYVLSLVCPNSSQAWCEITNVSQLLASPVLYTDLNYSINNLSISANVENKYSLYVGLVLAVSSSIFIGSSFILKKKGLLQLASKGFTRAGQGGHSYLKEMALVGRIAVNAILSSYFLNEHLNIHGKIGCILSILGSTVMVIHAPQEEEVTSLHEMEMKLRDPGFISFAVIITVISLVLILIVAPKKGQTNILVYISICSLIGAFSVSSVKGLGIAIKELIEWKPVYKH

SEQ ID NO: 787770 - protein, 133 aa, Homo sapiens
VNGITFISVARPKICPKSCLFTPISNQVTITGFCFQHDCIFLFSPNSPIWEFSTSCLECLHNGYSLPSQKLHTLHVATALKSLLLKSFMVASPLNSIMSRFLHEASDKLAPTFPTLLFYFPFPNLMTIYMQLL

SEQ ID NO: 787771 - protein, 94 aa, Homo sapiens
QSSVLQERLQGLGKWPRIQSQTSGAVNSDSTFFQVNHLVKLLDVPLRFFLPIPELGSIRCQKVGRLINKDVEMPAWSLVLELLSSLGWMVPPAL

SEQ ID NO: 787772 - protein, 343 aa, Homo sapiens
SRGSQDVSVNWRLAAVVAVESAEGGGGDEEVCMLGGTVRVDNFYVVLDPKLLSDTEYLLLLLIITLIVWGLGNGQWRMNFRGIAPVLRKYLNLLRSLRVCGGINTGATEIERSLKTLERSAEKLHLIFQKIHRPLSMTPERSASPNFLEGQVAFSHPRLSNNRSVMPLDVRGCTRATLTGSACAYPTPAGAGNPLNPIRDGDRGLQLFPMNEEFPVSAGHKLALIKSLPFVHTARRYYRLDGLVRPAPNSALPEPHAATQPPPSLHYSLHLFEGMKAFQRQYDQAMVRLFHAWLNMDRMLRSSMRLCLPSFDKLYLLECIRRLIEVMKDWVLDAASTSLYVRQ

SEQ ID NO: 787773 - protein, 212 aa, Homo sapiens
MLTSYATPERSASPNFLEGQVAFSHPRLSNNRSVMPLDVRGCTRATLTGSACAYPTPAGAGNPLNPIRDGDRGLQLFPMNEEFPVSAGHKLALIKSLPFVHTARRYYRLDGLVRPAPNSALPEPHAATQPPPSLHYSLHLFEGMKAFKRQYDQAMVRLFHAWLNMDRMLRSSMRLCLPSFDKLYLLECIRRLIEVMKDWVLDAASTSLYVRQ

SEQ ID NO: 787774 - protein, 272 aa, Homo sapiens
MYLGSREVLECSRCCGPWWYTSNGYRLMQLPTEWQSRSGFGLSPIFRGGCLPWGKLVAGRENELPRTPELTEHEEFRQGQVAFSHPRLSNNRSVMPLDVRGCTRATLTGSACAYPTPAGAGNPLNPIRDGDRGLQLFPMNEEFPVSAGHKLALIKSLPFVHTARRYYRLDGLVRPAPNSALPEPHAATQPPPSLHYSLHLFEGMKAFKRQYDQAMVRLFHAWLNMDRMLRSSMRLCLPSFDKLYLLECIRRLIEVMKDWVLDAASTSLYVRQ

SEQ ID NO: 787775 - protein, 212 aa, Homo sapiens
MLTSYATPERSASPNFLEGQVAFSHPRLSNNRSVMPLDVRGCTRATLTGSACAYPTPAGAGNPLNPIRDGDRGLQLFPMNEEFPVSAGHKLALIKSLPFVHTARRYYRLDGLVRPAPNSALPEPHAATQPPPSLHYSLHLFEGMKAFQRQYDQAMVRLFHAWLNMDRMLRSSMRLCLPSFDKLYLLECIRRLIEVMKDWVLDAASTSLYVRQ

SEQ ID NO: 787776 - protein, 178 aa, Homo sapiens
MPLDVRGCTRATLTGSACAYPTPAGAGNPLNPIRDGDRGLQLFPMNEEFPVSAGHKLALIKSLPFVHTARRYYRLDGLVRPAPNSALPEPHAATQPPPSLHYSLHLFEGMKAFKRQYDQAMVRLFHAWLNMDRMLRSSMRLCLPSFDKLYLLECIRRLIEDDKDWVLDAASTSLYVRQ

SEQ ID NO: 787777 - protein, 175 aa, Homo sapiens
MPRHEGLGPRRAPGISCSTHGHTGNPLNPIRDGDRGLQLFPMNEEFPVSAGHKLALIKSLPFVHTARRYYRLDGLVRPAPNSALPEPHAATQPPPSLHYSLHLFEGMKAFKRQYDQAMVRLFHAWLNMDRMLRSSMRLCLPSFDKLYLLECIRRLIEDDKDWVLDAASTSLYVRQ

SEQ ID NO: 787778 - protein, 178 aa, Homo sapiens
MPLDVRGCTRATLTGSACAYPTPAGAGNPLNPIRDGDRGLQLFPMNEEFPVSAGHKLALIKSLPFVHTARRYYRLDGLVRPAPNSALPEPHAATQPPPSLHYSLHLFEGMKAFKRQYDQAMVRLFHAWLNMDRMLRSSMRLCLPSFDKLYLLECIRRLIEVMKDWVLDAASTSLYVRQ

SEQ ID NO: 787779 - protein, 273 aa, Homo sapiens
MSGSLRGSLCGPSRGARVAHRVARWCGSGCGAWLWFIVWLLVPALGGAICLVNSDNERDSGMLTSYATPERSASPNFLEGQVAFSHPRLSNNRSVMPLDVRGCTRATLTGSACAYPTPAGAGNPLNPIRDGDRGLQLFPMNEEFPVSAGHKLALIKSLPFVHTARRYYRLDGLVRPAPNSALPEPHAATQPPPSLHYSLHLFEGMKAFKRQYDQAMVRLFHAWLNMDRMLRSSMRLCLPSFDKLYLLECIRRLIEVMKDWVLDAASTSLYVRQ

SEQ ID NO: 787780 - protein, 178 aa, Homo sapiens; identical to SEQ ID NO: 787778

SEQ ID NO: 787781 - protein, 125 aa, Homo sapiens [sequence omitted]

SEQ ID NO: 787782 - protein, 70 aa, Homo sapiens
ILLCCHSQTDNPKCQSPCGANRILIRCWWEWKMVQLLGKIGWQYLSKLNKHLPCDPAIPPPDRYTTEMHP

SEQ ID NO: 787783 - protein, 69 aa, Homo sapiens
MGFWKWVGGPGRASPSPLGEGLCAEGCPQRPGYQEHCSRQGAFLPDLAERKEDLVSFSTQPSGPYRAAP

SEQ ID NO: 787784 - protein, 119 aa, Homo sapiens
TRPPTRPGPKPPSMRRHDSGRRGAGRYHLGPSSSLSPNLQHPGLPSWRAAARLLQREAEGSVDQERLLFTYRWCRAKQPEGPGLPAPAPPRVGSASVHRAGVRTHPRYFSGLCFPSPQM

SEQ ID NO: 787785 - protein, 130 aa, Homo sapiens
TSDFIAAGWTAPSRRRSPFSPSQLSVWKTGEAGAPRHCPQDRPPGTARKRPWPVRWPFPALDRLWRGCRRRLGLGVLEGSLGCGGARRPPGDLGREAPGLSLALQTHGLGSNASSTTSWLCGLGHVSYPL

SEQ ID NO: 787786 - protein, 105 aa, Homo sapiens [sequence omitted]

SEQ ID NO: 787787 - protein, 37 aa, Homo sapiens
GDHAGKGVLVLFRAATENRAPNQLCSLVPSLLWASDS

SEQ ID NO: 787788 - protein, 477 aa, Homo sapiens
MLPPGSNGTAYPGQFALYQQLAQGNAVGGSAGAPPLGPSQVVTACLLTLLIIWTLLGNVLVCAAIVRSRHLRANMTNVFIVSLAVSDLFVALLVMPWKAVAEVAGYWPFGAFCDVWVAFDIMCSTASILNLCVISVDRYWAISRPFRYKRKMTQRMALVMVGLAWTLSILISFIPVQLNWHRDQAASWGGLDLPNNLANWTPWEEDFWEPDVNAENCDSSLNRTYAISSSLISFYIPVAIMIVTYTRIYRIAQVQIRRISSLERAAEHAQSCRSSAACAPDTSLRASIKKETKVLKTLSVIMGVFVCCWLPFFILNCMVPFCSGHPEGPPAGFPCVSETTFDVFVWFGWANSSLNPVIYAFNADFQKVFAQLLGCSHFCSRTPVETVNISNELISYNQDIVFHKEIAAAYIHMMPNAVTPGNREVDNDEEEGPFDRMFQIYQTSPDGDPVAESVWELDCEGEISLDKITPFTPNGFH

SEQ ID NO: 787789 - protein, 186 aa, Homo sapiens
ASAAGPRGRGLEGSLGMLRAEKALWFLLPHTSPSPPLFPGTSEVAGKWEGRRACRPCRLGSRSSGVGGVRVRTEARGRDGRGRGKGGRHWGGLGCGAGDSPFPSERRGGPLPRGTPTQPFPTSRTKGLGSTVGVGERRWREAGRQAVGAGEGASPRFLSRPNDGKLPPANASLRPLLNPGGFGFVT

SEQ ID NO: 787790 - protein, 79 aa, Homo sapiens
MMLVAVWEALLGLHVPWSQQGLEAGRSPTLLGTAAATQVAAADLGISALSGAWEGSRAPAGSGCLLPMSGLSLLLVPAL

SEQ ID NO: 787791 - protein, 123 aa, Homo sapiens [sequence omitted]

SEQ ID NO: 787792 - protein, 362 aa, Homo sapiens
LTGALKSSPPLHYLSSWQRITIASRSMPDGPCFRDKCHPLYRADPKELIKMVTRHVTRHEHEAWPEDLISLTKQLHCYNERLLDFTQAQILQGLRKGVDVQRFTADDQYKRETILGLAETLEESVYSIAISLAQRYSVSRWEVFMTHLEFLFTDSGLSTLEIENRAQDLHLFETLKTDPEAFHQHMVKYIYPTIGGFDHERLQYYFTLLENCGCADLGNCAIKPETHIRLLKKFKVVASGLNYKKLTDENMSPLEALEPVLSSQNILSISKLVPKIPEKDGQMLSPSSLYTIWLQKLFWTGDPHLIKQVPGSSPEWLHAYDVCMKYFDRLHPGDLITVVDAVTFSPKAVTKLSGGKARKRDD

SEQ ID NO: 787793 - protein, 110 aa, Homo sapiens
MDDEAETRDLIMGFNCSLQVDKIFLGEVNWMSFCASQQLQVLSLASLGSSALRGLWHDGSSQQGLQRSPLGEIYRAQCAWSPGFLQDCYCIPIEWWFALHRALTWDSYLL

SEQ ID NO: 787794 - protein, 91 aa, Homo sapiens
IEKEEKGKEPGEKSAAMPSRPSSSEDSLMSRASCSPAPGLGVLLEKGEKQSLLPHRIDDHNDHRYLSLRPSLVAFDCHHPLNWAQLQPSCH

SEQ ID NO: 787795 - protein, 463 aa, Homo sapiens
GTRTRRLFQKKETAMAAEASKTGPSRSSYQRMGRKSQPWGAAEIQCTRCGRRVSRSSGHHCELQCGHAFCELCLLMTEECTTIICPDCEVATAVNTRQRYYPMAGYIKEDSIMEKLQPKTIKNCSQDFKKTADQLTTGLERSASTDKTLLNSSAVMLDTNTAEEIDEALNTAHHSFEQLSIAGKALEHMQKQTIEERERVIEVVEKQFDQLLAFFDSRKKNLCEEFARTTDDYLSNLIKAKSYIEEKKNNLNAAMNIARALQLSPSLRTYCDLNQIIRTLQLTSDSELAQVSSPQLRNPPRLSVNCSEIICMFNNMGKIEFRDSTKCYPQENEIRQNVQKKYNNKKELSCYDTYPPLEKKKVDMSVLTSEAPPPPLQPETNDVHLEAKNFQPQKDVATASPKTIAVLPQMGSSPDVIIEEIIEDNVETCGTDDLGETPRYPKKPLQKNSSVPFGSKADTVTTV

SEQ ID NO: 787796 - protein, 667 aa, Homo sapiens
GTRTRRLFQKKETAMAAEASKTGPSRSSYQRMGRKSQPWGAAEIQCTRCGRRVSRSSGHHCELQCGHAFCELCLLMTEECTTIICPDCEVATAVNTRQRYYPMAGYIKEDSIMEKLQPKTIKNCSQDFKKTADQLTTGLERSASTDKTLLNSSAVMLDTNTAEEIDEALNTAHHSFEQLSIAGKALEHMQKQTIEERERVIEVVEKQFDQLLAFFDSRKKNLCEEFARTTDDYLSNLIKAKSYIEEKKNNLNAAMNIARALQLSPSLRTYCDLNQIIRTLQLTSDSELAQVSSPQLRNPPRLSVNCSEIICMFNNMGKIEFRDSTKCYPQENEIRQNVQKKYNNKKELSCYDTYPPLEKKKVDMSVLTSEAPPPPLQPETNDVHLEAKNFQPQKDVATASPKTIAVLPQMGSSPDVIIEEIIEDNVESSAELVFVSHVIDPCHFYIRKYSQIKDAKVLEKKVNEFCNRSSHLDPSDILELGARIFVSSIKNGMWCRGTITELIPIEGRNTRKPCSPTRLFVHEVALIQIFMVDFGNSEVLIVTGVVDTHVRPEHSAKQHIALNDLCLVLRKSEPYTEGLLKDIQPLAQPCSLKDIVPQNSNEGWEEEAKVEFLKMVNNKAVSMKVFREEDGVLIVDLQKPPPNKISSDMPVSLRDALVFMELAKDLI

SEQ ID NO: 787797 - protein, 657 aa, Homo sapiens
GLALGGCSRRKRQRWRQRLRRLGLLGLPTSEWGGRVSPGVPLKSSAPGHHCELQCGHAFCELCLLMTEECTTIICPDCEVATAVNTRQRYYPMAGYIKEDSIMEKLQPKTIKNCSQDFKKTADQLTTGLERSASTDKTLLNSSAVMLDTNTAEEIDEALNTAHHSFEQLSIAGKALEHMQKQTIEERERVIEVVEKQFDQLLAFFDSRKKNLCEEFARTTDDYLSNLIKAKSYIEEKKNNLNAAMNIARALQLSPSLRTYCDLNQIIRTLQLTSDSELAQVSSPQLRNPPRLSVNCSEIICMFNNMGKIEFRDSTKCYPQENEIRQNVQKKYNNKKELSCYDTYPPLEKKKVDMSVLTSEAPPPPLQPETNDVHLEAKNFQPQKDVATASPKTIAVLPQMGSSPDVIIEEIIEDNVESSAELVFVSHVIDPCHFYIRKYSQIKDAKVLEKKVNEFCNRSSHLDPSDILELGARIFVSSIKNGMWCRGTITELIPIEGRNTRKPCSPTRLFVHEVALIQIFMVDFGNSEVLIVTGVVDTHVRPEHSAKQHIALNDLCLVLRKSEPYTEGLLKDIQPLAQPCSLKDIVPQNSNEGWEEEAKVEFLKMVNNKAVSMKVFREEDGVLIVDLQKPPPNKISSDMPVSLRDALVFMELAKDLI

SEQ ID NO: 787798 - protein, 76 aa, Homo sapiens
LRERKRHGRASAARLAGRSRALHQRCSRLVAGGSYEDLRFKTRLSRELAWYPLANHFSEASVSSSVNVNIPSFFFA

SEQ ID NO: 787799 - protein, 70 aa, Homo sapiens
DSSEGGEVHVPKSPDGPETMKMLYREVTKSLHVSRGFVELEKGLVNALALSQQGFPEGVFSTRMTRQTPA

SEQ ID NO: 787800 - protein, 83 aa, Homo sapiens
RRGPKRLHSAHTCEAGRADINIGHGFRQGECQGLHGLHCKGLQGGQKEVQHPGKTSLKRGSQPSPRCPPRFPRSWGLGRLGSL

SEQ ID NO: 787801 - protein, 73 aa, Homo sapiens
MDGKLQKTDILIYEVPQIPEQAVEPASPRGPPLSFCKLHFLGFCKLHFLGFCKLHFLGFCKLHFLSFCKLHFL

SEQ ID NO: 787802 - protein, 105 aa, Homo sapiens
MDTEGQEKLSHGHPSTSRLYPCLPNPPPAPLRVKQSYPHSSTNCSQACLWPAAKPSESPFASLGLSFLICKMKGRAWRVPGALCSSSIRTEEAAGLSGGGNFPDH

SEQ ID NO: 787803 - protein, 53 aa, Homo sapiens
LEVVPPAEANASQHPEANEGQHPWDQSPKSSRIRMQEASIYQRFYSEKADGRS

SEQ ID NO: 787804 - protein, 40 aa, Homo sapiens
CRHLMEDSMGMYVDMSPLRPQNYLFGCELKADKDYHFKVD

SEQ ID NO: 787805 - protein, 157 aa, Homo sapiens
MEKTQQAEGNIEVEKTQQAEGDIEVEKTQQAEGDIEVEKTQQAEGDIEVEKTQQAEGDIEVEKTQQTEGDIEVEKTQQAEGDIEVEKTQQAEGDIEVEKTQQAEGDIEVEKTQQSGGRHRGAEASRRHRREDEKGSSPLTFCLFASIFIVRFFTVIL

SEQ ID NO: 787806 - protein, 130 aa, Homo sapiens
LGNRETPVSTKNTKICWGWWQCTFSPRYSLDIEVEKTQQTEGDIEVEKTQQAEGDIEVEKTQQAEGDIEVEKTQQAEGDIEVEKTQQSGGRHRGAEASRRHRREDEKGSSPLTFCLFASIFIVRFFTVIL

SEQ ID NO: 787807 - protein, 243 aa, Homo sapiens
MAGARAAAAAASAGSSASSGNQPPQELGLGELLEEFSRTQYRAKDGSGTGGSKVERIEKRCLELFGRDYCFSVIPNTNGDICGHYPRHIVFLEYESSEKEKDTWDEYRNRGFGGPQTEKNPQTHNKQTKGHLKGAKRKDSFHTERQDGPVQRTVMSGPVILFKGKHICRSATLAGWGELYGRSGYNYFFSGGADDAWADVEDVTEEDCALEVVNTHLIDKVRGYDIKLLRYLGQNKYTLVTLM

SEQ ID NO: 787808 - protein, 219 aa, Homo sapiens
MAGARAAAAAASAGSSASSGNQPPQELGLGELLEEFSRTQYRAKDGSGTGGSKVERIEKRCLELFGRDYCFSVIPNTNGDICGHYPRHIVFLEYESSEKEKDTFESTVHGDAKLQELIHLQQDGPVQRTVMSGPVILFKGKHICRSATLAGWGELYGRSGYNYFFSGGADDAWADVEDVTEEDCALEVVNTHLIDKVRGYDIKLLRYLGQNKYTLVTLM

SEQ ID NO: 787809 - protein, 103 aa, Homo sapiens
SAVEAIQAISAHWNFHFPDSSNSQASASRVAGITGTRHHDWLIFLFLVETEFCHVGQPNLELPTSGDPPALASQSARITGMSHHAQPIHFHQYFKAVDLALSI

SEQ ID NO: 787810 - protein, 33 aa, Homo sapiens
MTDLDYTGKMNSHEDTGKDEDDNSYGNKGEQTK

SEQ ID NO: 787811 - protein, 83 aa, Homo sapiens
ERFGAGPRGIQPGTGGDPRTLRKLPPISLSSEPLAQHRPETPASKMKAIFCLWTEYPTKDLILKAMEHVYPHGSSGQTGGETV

SEQ ID NO: 787812 - protein, 110 aa, Homo sapiens
LFRLVSGMEQGLELRSLWLEIGIYSFLTLEPTYPSVTCQTPHLTHSHLQQSFLNSIKHQNSLHCFLKHDRRPFPSLRLLDSMDQGCGLRMCISNKTLGKSPAAAPCWTML

SEQ ID NO: 787813 - protein, 85 aa, Homo sapiens
DGSGDGSGDDSDDNGDDGGDDGDGGDDGDGDDGGSDGGDGNGSGNGGDDGDDNGDDGGDDDVMVVMMVMVMMVAVMVVMAMVVAM

SEQ ID NO: 787814 - protein, 66 aa, Homo sapiens
TDDDQTPLAPALEGLWAAGDAHQALWHLALSGPCSGLLALSIKASALGKGCRILENPLFQSDLNHT

SEQ ID NO: 787815 - protein, 148 aa, Homo sapiens [sequence omitted]

SEQ ID NO: 787816 - protein, 451 aa, Homo sapiens
SQDEWGLLDEAQRLLYLEVMLENFALVASLGCGHGTEDEETPSDQNVSVGVSQSKAGSSTQKTQSCEMCVPVLKDILHLADLPGQKPYLVGECTNHHQHQKHHSAKKSLKRDMDRASYVKCCLFCMSLKPFRKWEVGKDLPAMLRLLRSLVFPGGKKPGTITECGEDIRSQKSHYKSGECGKASRHKHTPVYHPRVYTGKKLYECSKCGKAFRGKYSLVQHQRVHTGERPWECNECGKFFSQTSHLNDHRRIHTGERPYECSECGKLFRQNSSLVDHQKIHTGARPYECSQCGKSFSQKATLVKHQRVHTGERPYKCGECGNSFSQSAILNQHRRIHTGAKPYECGQCGKSFSQKATLIKHQRVHTGERPYKCGDCGKSFSQSSILIQHRRIHTGARPYECGQCGKSFSQKSGLIQHQVVHTGERPYECNKCGNSFSQCSSLIHHQKCHNT

SEQ ID NO: 787817 - protein, 107 aa, Homo sapiens
MDFVLDSFLRLFSGFSVLLSLGYLSSFLWVRSLFSGCTVIFCSLVTLSIKVPSFKDITTFNICNDCGEFMNEHLYSQSFGCSSTLFRYCMSTGSVVTSKVSLYSALQ

SEQ ID NO: 787818 - protein, 167 aa, Homo sapiens
MGTASSAHVLHSTLPVSSEPSTATSPMVPASSMGDALASISIPGSETTDIEGEPTSSLTAGRKENSTLQEMNSTTESNIILSNVSVGAITEATKMEVPSFDATFIPTPAQSTKFPDIFSVASSRLSNSPPMTISTHMTTTQTGSSGATSKIPLALDTSTLETSAGTP

SEQ ID NO: 787819 - protein, 88 aa, Homo sapiens
QSSPLCHRPCAHNPAFHAASFVLKTSPRGGLQSVAAGRKARGPAGGSWEELVHTHLVLVRKENCKSQKVNCSTHEGIDESVQESWTSF

SEQ ID NO: 787820 - protein, 63 aa, Homo sapiens
LFLLLECHVGVDQGFPSLSHLSSTCFRKNTLEFRSESIFTSESVFALSSFFPPMLPKHKMVYF

SEQ ID NO: 787821 - protein, 88 aa, Homo sapiens
SGTCPAAPRSPALRDCKAEPLGSRYHPLQPATNICAVGQEEKWRPICHVPKYLKVINSAAKVCSILTLPIILAKLWRSYDQMSAKHQK

SEQ ID NO: 787822 - protein, 66 aa, Homo sapiens
  misc_feature (25)..(25): Xaa can be any naturally occurring amino acid
MCQVEFELAHTALKQLKGTVCDQEXTAGVQLLQTAHPERLQHPCPFSLRCESQGQVGGMECEQRDV

SEQ ID NO: 787823 - protein, 238 aa, Homo sapiens
MTLRLMNSLAKRILDVEDRKSLWGQADLDSNTSQFCLLCLSLSLLICEEEVARMKMPALWFVVRTDTANVEGPAAHRPVALRADHSCLDGRELFLCVASGTLGRKATVRLLRRTLHKGVSSQGRGMERVAEAYGKGSQGSARECHHPSWGMQGKVPGGSFPGKPKKRPTKTESTFGYLWYPEAAMPTTTTLEEEDLLRIDSLISSSFMAPALGNQHGGEIMKLEYNHLQTSQPPPVDT

SEQ ID NO: 787824 - protein, 57 aa, Homo sapiens
MAEAPGPSGESRGHSATQLPAEKTVGGPSRGCSSSVLRVSQLVLQAISTHKGLTLAA

SEQ ID NO: 787825 - protein, 102 aa, Homo sapiens
TELPLPVDAFQHHMNVHLKESVKYLKYLYLLFVYFSKWVFIFNEIIFNFSKNTLKISIDNAYLTFFWLSPFFSFQGVLLLRNHFYGCGDNCFPASFNSRSFC

SEQ ID NO: 787826 - protein, 74 aa, Homo sapiens
TAVQLVAEVDSYRILKLLPLNGFGTFVKNHLTMHARFYFWALYSTSLVYMSLFMLLPYGFDYHSFIDKTDNWTS

SEQ ID NO: 787827 - protein, 127 aa, Homo sapiens [sequence omitted]

SEQ ID NO: 787828 - protein, 109 aa, Homo sapiens
MSSSLIHFQRLYLLKCSSYLLMDELKHPYVLSSCCLTTRKGVANADPKYKHILASNDHLFSTEVVNLWMLWPNVALLEALRKAQKPRTDEMAAPHQDLFFFLDFFFLCL

SEQ ID NO: 787829 - protein, 101 aa, Homo sapiens
DSSGTLAIKLPESAAAEAAAASKEADDAQCKDGFSEQPVGQDNVFHQMSLDLEEVSPVYPVVVFLLINIKGGEKVCIGVSAENKSSKHTKWNLLIALLLTQ

SEQ ID NO: 787830 - protein, 47 aa, Homo sapiens
RRKKWLAVLAKKELRYEISFSNYALTTRKTSVTKCVFFLHSPSNSTA

SEQ ID NO: 787831 - protein, 78 aa, Homo sapiens
KSTIIFATDTPLHLHFNSYMMRKYRFPYPAAMKERESKLGGPLIFHECQVEHPNLENIQEIMSKEYNLNSLVLKTFKK

SEQ ID NO: 787832 - protein, 118 aa, Homo sapiens
MAALEGVGRTAKVDSASNAVKTALCLMESGACYGKQSQLLRGCLEGCPAPGLVLTSDGGGSTCSLVIQLRPDGARVRAGCSNNLLDEQGCNNLLGEGHLHMTCGHASPIFHGGWGYKL

SEQ ID NO: 787833 - protein, 53 aa, Homo sapiens
MEEEEEKKEEEEEEEKEEEEEKEEEAEEEKAEEEEEEEEGAEEEAEEEEEDPA

SEQ ID NO: 787834 - protein, 102 aa, Homo sapiens
WDYRHTPPCLANFCIFCRCSLAMHVAQAGLELLASSDPHSSDSQSAGITGMSHGTGPTTFETYIIIYLPSTDVETGTERLSNLSNVPQPVQGWAKFEHRAVP

SEQ ID NO: 787835 - protein, 121 aa, Homo sapiens
SALLSQGSKAATLPHDTLDPHFKPSSPISLPNSLDSQLITLCRSTADHQLCLLQKCKDTLSTRDLALATTHEDPWQSIRADPWGLASFLNSSHPLTLLLLVSTTLISKLTRGLGFGSDHLA

SEQ ID NO: 787836 - protein, 190 aa, Homo sapiens
VWTAERISSDVIELQAVHKEIRITEMLPVEVIEDTKEKRTIIHQAIKSLFPGLETKTEDREGKKYIVAYHAAGKKALANPRKHSWPKSRGSYCHFVLYKENKDTMDAINVLSKYLRVKPNIFSYMGTKDKRAITVQEIAVLKITAQRLAHLNKCLMNFKLGNFSYQKNPLKLGELQGNHFTVCSQKYNRN

SEQ ID NO: 787837 - protein, 54 aa, Homo sapiens
QTLCDNNPSCRQKQRSHEAQHASFQVNWRQCVPQQRQRLLIVGADCMHVGYGAG

SEQ ID NO: 787838 - protein, 32 aa, Homo sapiens
MLESVVQNGCHWAKIKVSLLQYEEPPQRGGFP

SEQ ID NO: 787839 - protein, 91 aa, Homo sapiens
LAPGSSSCSGGASGEDSQVATAALPAPVGALSPRGMGLKCSGIAVRLSWDLSPCPHWQVEECWYADPGCPFAMHSPMGREWCWYISRYTPQ

SEQ ID NO: 787840 - protein, 70 aa, Homo sapiens
VSDIQPGSDPTKPDATLVVKNHQLIVTRGSQKDYRKDVSIGTKVVCWFVHNNGEGLIDGVHTDYIVPNLF

SEQ ID NO: 787841 - protein, 113 aa, Homo sapiens
MFKRKLSRNYCFRERSSRTGHWQPLWGTGDEAAWGCREDTFPSWSLMMVRVSSQGHCHQGKVSPQHAWQPGHSPASGTVRQHSSGTSGKEQRLERESMADLSVNPLRATLWSF

SEQ ID NO: 787842 - protein, 80 aa, Homo sapiens
SFLADYFCEQLGLSVLWEHPGKQCGYDLELLTSSSHSVVESCSLWMLILLYFRFSTGVGPISSGHLRKPSGKESQVKASS

SEQ ID NO: 787843 - protein, 80 aa, Homo sapiens; identical to SEQ ID NO: 787842

SEQ ID NO: 787844 - protein, 80 aa, Homo sapiens; identical to SEQ ID NO: 787842

SEQ ID NO: 787845 - protein, 252 aa, Homo sapiens
AKHQMADDAGAAGGPGGPGGPGMGNRGGFRGGFGSGIRGRGRGRGRGRGRGRGARGGKAEDKEWMPVTKLGRLVKDMKIKSLEEIYLFSLPIKESEIIDFFLGASLKDEVLKIMPVQKQTRAGQRTRFKAFVAIGDYNGHVGLGVKCSKEVATAIRGAIILAKLSIVPVRRGYWGNKIGKPHTVPCKVTGRCGSVLVRLIPAPRGTGIVSAPVPKKLLMMAGIDDCYTSAGAALHPGQLRKAPLMPFLRLQY

SEQ ID NO: 787846 - protein, 232 aa, Homo sapiens
RAFGDLESLRSLHLDGNRLVELGTGSLRGPVNLQHLILSGNQLGRIAPGAFDDFLESLEDLDLSYNNLRQVPWAGIGAMPALHTLNLDHNLIDALPPGAFAQLGQLSRLDLTSNRLATLAPDPLFSRGRDAEASPAPLVLTLAGTLHCNCELLWLRRLARPDDLETCASPPGLAGRYFWAVPEGEFSCEPPLIARHTQRLWVLEGQRATLRCRALGDPAPTMHWVGPDDRLV

SEQ ID NO: 787847 - protein, 50 aa, Homo sapiens
NTRSSFLLPQHEKQKDKQHIRVPILISATEGQEGACNSFQKELIQLQRNN

SEQ ID NO: 787848 - protein, 159 aa, Homo sapiens
MRLLERMRKDWFMVGIVLAIAGAKLEPSIGVNGGPLKPEITVSYIAVATIFFNSGLSLKTEELTSALVHLKLHLFIQIFTLAFFPATIWLFLQLLSITPINEWLLKGLQTVGCMPPPVSSAVILTKAVGGNEAAAIFNSAFGSFLVSKHSLTCLLQLLL

SEQ ID NO: 787849 - protein, 218 aa, Homo sapiens
MRLLERMRKDWFMVGIVLAIAGAKLEPSIGVNGGPLKPEITVSYIAVATIFFNSGLSLKTEELTSALVHLKLHLFIQIFTLAFFPATIWLFLQLLSITPINEWLLKGLQTVGCMPPPVSSAVILTKAVGGNEADKYHPLFYFFQGIVITPLLLLLFLGSSSSVPFTSIFSQLFMTVVVPLIIGQIVRRYIKDWLERKKPPFGAISSSVLLMIIYTTFC

SEQ ID NO: 787850 - protein, 148 aa, Homo sapiens
MRLLERMRKDWFMVGIVLAIAGAKLEPSIGVNGGPLKPEITVSYIAVATIFFNSGLSLKTEELTSALVHLKLHLFIQIFTLAFFPATIWLFLQLLSITPINEWLLKGLQTVGCMPPPVSSAVILTKAVGGNEQLQYFNSAFGSFWASL

SEQ ID NO: 787851 - protein, 169 aa, Homo sapiens
MRLLERMRKDWFMVGIVLAIAGAKLEPSIGVNGGPLKPEITVSYIAVATIFFNSGLSLKTEELTSALVHLKLHLFIQIFTLAFFPATIWLFLQLLSITPINEWLLKGLQTVGCMPPPVSSAVILTKAVGGNEDPPCLVSFLELSWEEISLKQQSSQMSGSERVPEARLW

SEQ ID NO: 787852 - protein, 237 aa, Homo sapiens
  misc_feature (1)..(1): Xaa can be any naturally occurring amino acid
  misc_feature (27)..(27): Xaa can be any naturally occurring amino acid
  misc_feature (37)..(37): Xaa can be any naturally occurring amino acid
  misc_feature (41)..(41): Xaa can be any naturally occurring amino acid
  misc_feature (48)..(49): Xaa can be any naturally occurring amino acid
  misc_feature (52)..(52): Xaa can be any naturally occurring amino acid
XDLGIVHPDLKPEICCTTAWMKTPKSXLRLWPLPRWXTRAXALHRLWXXGIXAPEVLAQKPYTKLWMLVHRCHRLHLALRYPPFYDENDAKLFDQILKAEGPGLTLLTGTTSLTSAKDFIRHLMEKDPEKRFTCEQALQHPWIAGDTALDKNIHQSVSEQIKKNFAKSKWKQAFNATAVVRHMRKLQLGTSQEGQGQTASHGELLTPVAGGPAAGCCCRDCCVEPGTELSPTLPHQL

SEQ ID NO: 787853 - protein, 44 aa, Homo sapiens
GPQGSPFMLGGGFFHTSQTQLSGFLTQKNFHAEGSENSALHFLR

SEQ ID NO: 787854 - protein, 66 aa, Homo sapiens
SGEKEVKRARAPGKRPGSDQGFCQNRKVEEPTTRGVLLIRKRHSRGRSGKVRMGDSGSLRQGSEST

SEQ ID NO: 787855 - protein, 148 aa, Homo sapiens
QRIFTTSYDPYQRADSINFISRLLPAQLFPRELHSPEFEFQATIQNSKYPQRGNSEVNRSHLQRVTKDALAMTQEISHCLDSSLQSQPVGLPRAMRRKWARKESIIATHRCACECYKGNDREHLGEVLRTRSQSSMLEQVLVLPGTNF

SEQ ID NO: 787856 - protein, 35 aa, Homo sapiens
GVAPGRGGVAPSPSPGQWAGGEKWRGRRIIPSQGG

SEQ ID NO: 787857 - protein, 107 aa, Homo sapiens
TEQDDLFGRSFSKKKMKIINIRMHFILTVTKIQGHETFSLETICKFLFENVIFIDFISKTLQKNAKYQKILQENGNYPNPTTQTLLVFTFFPHCLTSILSTIVRAPR

SEQ ID NO: 787858 - protein, 72 aa, Homo sapiens
QILILRTGVELKYLSPELVFQGLNYESNSSFKALIIFRLLLQLLHNLCVQPLLSGWHLLISTSELAEVAPDV

SEQ ID NO: 787859 - protein, 135 aa, Homo sapiens
MRGAGRSRAWWAAGWQGTWSAAAGPRGGGAAAAAAPASPSSDRLVGFSLAGSALAGCSPGTSAARARPASSLASSYIRRPRLREPPGLRSPPRGPSSTLSQGSCSPSEQPRSILRPPGPRHRPCCSQSQAATPRP

SEQ ID NO: 787860 - protein, 114 aa, Homo sapiens
MRGAGRSRAWWAAGWQGTWSAAAGPRGGGAAAAAAPASPSSDRLVGFSLAGSALAGCSPGTSAARARPASSLASSYIRRPRLREPPGLRSPPRGPSSTLSQGSAASPRQRPRGR

SEQ ID NO: 787861 - protein, 68 aa, Homo sapiens
PGLRFPPPWAPRPPVVSKSPPPVAHGLTGVAVSRLPSIISSRDNGRGWGGATGKDGGCRAGATATWDV

SEQ ID NO: 787862 - protein, 38 aa, Homo sapiens
MASGVGHDETPAPEGPACTSSTSLDAVNPLCSSSRYRE

SEQ ID NO: 787863 - protein, 74 aa, Homo sapiens
EVKGLGRVKLSQGGGFATSPGRTQEEAVKATPFLCPLAQVAGPSVPLQVGKQLSFPAQNLGQPGSSLDPAWTLM

SEQ ID NO: 787864 - protein, 122 aa, Homo sapiens
ASFPALQDSLIQRFPSGAPEPGPLPHTWDSPAGLVCFQGGRRKGVASPFWQESRSLGEKRAQANTTDSPTRKYEIADLCQQRLISTSWIPGSGLSYCLLESHEETVEAEVRGQRSGQAQSHS

SEQ ID NO: 787865 - protein, 99 aa, Homo sapiens
QPFDIFVLRAEDGCISTKELGKVKKETVKEKASRKERTKEVVEEEENGAEEEEAETAEAEQAGRSRGKKKHAEDASRRLMKGPRVKRAAEGPRGGSDEK

SEQ ID NO: 787866 - protein, 111 aa, Homo sapiens
LRSCTRLPSWSFDSWPTVRRARAVRRPTIRRRISASFSIWPTPTMLGTDLHMYDTKMYADGLSPELTVAFTGSTLDNLGPIARPPWRRRPIRTSALSTFDGSRRAYHGDHG

SEQ ID NO: 787867 - protein, 154 aa, Homo sapiens
APSLSSDIAIIGTSLFIGTPDRSTEIGKLLSSYLQKTSDVEDHSVHLLKTANRWEQVPLIKEKLSQGVTLVVDRYAFSGVAFTGADEYRSLFIGIKTNPVSPSPAPAGGRAPAALVTLDNLGPIARPPWRRRPIRTSALSTFDGSRRAYHGDHG

SEQ ID NO: 787868 - protein, 111 aa, Homo sapiens; identical to SEQ ID NO: 787866

SEQ ID NO: 787869 - protein, 67 aa, Homo sapiens
MAPQPSSIATIVLNLRGSEARIRLSVVLESLDNLGPIARPPWRRRPIRTSALSTFDGSRRAYHGDHG

SEQ ID NO: 787870 - protein, 41 aa, Homo sapiens
MMTEDYLRVRSSKKTGPCEGRSKVDELRYASNSVAEYNGGS

SEQ ID NO: 787871 - protein, 106 aa, Homo sapiens
HPGALLQKQIVNIDRITKYMSRVHGMHPKETTRQLSLAVKDGLIVETLTVGCKGSKAGIEQEGYWLPEVRLGAHPRRTSRRGSLRNGYHIQGRQQARKLPTPDPGR

SEQ ID NO: 787872 - protein, 179 aa, Homo sapiens
EARGCVLSIAWPWRDSSDATARMQLSHQGKAGSPAGPWVVSFDFPGEGSEWERDQTWASQASTERSVKSRSLGPKREPCLVLPMPPSWKSPRRIHVWPCLWGKGVGEMFPADHPPLHLGGDTAEKNRLCSRAPCLVPGGALLGIITITSFSPPPPPPSPTALDCWDTREYDRAVARAMA

SEQ ID NO: 787873 - protein, 118 aa, Homo sapiens
LLAEGWWPPLGVGGLCAPHLHCTVPSSLASNSTTETGAPDTEACMLVHRQAGAVPSGRQGQIPHQVRSALSLTPCPSSHPGQVQASCILPLLPLLPGLGSTRVGGRLVGWPSPLSCSF

SEQ ID NO: 787874 - protein, 260 aa, Homo sapiens
  misc_feature (237)..(237): Xaa can be any naturally occurring amino acid
  misc_feature (239)..(239): Xaa can be any naturally occurring amino acid
  misc_feature (249)..(249): Xaa can be any naturally occurring amino acid
LKRKVAEQEERQGMKVQALARENEVLKVQLKKYVGAVQMLKREGQTAEVPNLWSVDGEVTVAEQKPGEIAEELASSYERKLIEVAEMHGELIEFNERLHRALVAKEALVSQMRQELIDLRGPVPGDLSQTSEDQSLSDFEISNRALINVWIPSVFLRGKAANAFHVYQVYIRIKDDEWNIYRRYTEFRSLHHKLQNKYPQVRAYNFPPKKAIGNKDAKFVEERRKQLQNYLRSVMNXVXQMVPRVAASXQKETLIQLMPF

SEQ ID NO: 787875 - protein, 139 aa, Homo sapiens
MSPAVVPNLWSVDGEVTVAEQKPGEIAEELASSYERKLIEVAEMHGELIEFNERLHRALVAKEALVSQMRQELIDLRGPVPGDLSQTSEDQSLSDFEISNRALINVWIPSVFLRGKAANAFHVYQLFKNVKIILSLWAV

SEQ ID NO: 787876 - protein, 217 aa, Homo sapiens
  misc_feature (194)..(194): Xaa can be any naturally occurring amino acid
  misc_feature (196)..(196): Xaa can be any naturally occurring amino acid
  misc_feature (206)..(206): Xaa can be any naturally occurring amino acid
MSPAVVPNLWSVDGEVTVAEQKPGEIAEELASSYERKLIEVAEMHGELIEFNERLHRALVAKEALVSQMRQELIDLRGPVPGDLSQTSEDQSLSDFEISNRALINVWIPSVFLRGKAANAFHVYQVYIRIKDDEWNIYRRYTEFRSLHHKLQNKYPQVRAYNFPPKKAIGNKDAKFVEERRKQLQNYLRSVMNXVXQMVPRVAASXQKETLIQLMPF

SEQ ID NO: 787877 - protein, 62 aa, Homo sapiens
MKAAPSSPSPPATSSAAQASLDHARLYTDVFCPTHASRHRGETLEGEGTADEGNEKSFAHKE

SEQ ID NO: 787878 - protein, 1289 aa, Homo sapiens
AEAFPAMWNYDCDDPLVSALPQASFSSSSELSSSHGPGFARLNRRDGAGGWSPLVSNKYQWLQIDLGERMEVTAVATQGGYGSSNWVTSYLLMFSDSGWNWKQYRQEDSIWGFSGNANADSVVYYRLQPSIKARFLRFIPLEWNPKGRIGMRIEVFGCAYRSEVVDLDGKSSLLYRFDQKSLSPIKDIISLKFKTMQSDGILLHREGPNGDHITLQLRRARLFLLINSGEAKLPSTSTLVNLTLGSLLDDQHWHSVLIQRLGKQVNFTVDEHRHHFHARGEFNLMNLDYEISFGGIPAPGKSVSFPHRNFHGCLENLYYNGVDIIDLAKQQKPQIIAMGNVSFSCSQPQSMPVTFLSSRSYLALPDFSGEEEVSATFQFRTWNKAGLLLFSELQLISGGILLFLSDGKLKSNLYQPGKLPSDITAGVELNDGQWHSVSLSAKKNHLSVAVDGQMASAAPLLGPEQIYSGGTYYFGGCPDKSFGSKCKSPLGGFQGCMRLISISGKVVDLISVQQGSLGNFSDLQIDSCGISDRCLPNYCEHGGECSQSWSTFHCNCTNTGYRGATCHNSIYEQSCEAYKHRGNTSGFYYIDSDGSGPLEPFLLYCNMTETAWTIIQHNGSDLTRVRNTNPENPYAGFFEYVASMEQLQATINRAEHCEQEFTYYCKKSRLVNKQDGTPLSWWVGRTNETQTYWGGSSPDLQKCTCGLEGNCIDSQYYCNCDADRNEWTNDTGLLAYKEHLPVTKIVITDTGRLHSEAAYKLGPLLCRGDRSFWNSASFDTEASYLHFPTFHGELSADVSFFFKTTASSGVFLENLGIADFIRIELRSPTVVTFSFDVGNGPFEISVQSPTHFNDNQWHHVRVERNMKEASLQVDQLTPKTQPAPADGHVLLQLNSQLFVGGTATRQRGFLGCIRSLQLNGMTLDLEERAQVTPEVQPGCRGHCSSYGKLCRNGGKCRERPIGFFCDCTFSAYTGPFCSNEISAYFGSGSSVIYNFQENYLLSKNSSSHAASFHGDMKLSREMIKFSFRTTRTPSLLLFVSSFYKEYLSVIIAKNGSLQIRYKLNKYQEPDVVNFDFKNMADGQLHHIMINREEGVVFIEIDDNRRRQVHLSSGTEFSAVKSLVLGRILEHSDVDQETALAGAQGFTGCLSAVQLSHVAPLKAALHPSHPDPVTVTGHVTESSCMAQPGTDATSRERTHSFADHSGTIDDREPLANAIKSDSAVIGGLIAVVIFILLCITAIAVRIYQQKRLYKRSEAKRSENVDSAEAVLKSELNIQNAVNENQKEYFF

SEQ ID NO: 787879 - protein, 182 aa, Homo sapiens
AEAFPAMWNYDCDDPLVSALPQASFSSSSELSSSHGPGFARLNRRDGAGGWSPLVSNKYQWLQIDLGERMEVTAVATQGGYGSSNWVTSYLLMFSDSGWNWKQYRQEDSIWGFSGNANADSVVYYRLQPSIKARFLRFIPLEWNPKGRIGMRIEVFGCAYRAVILFADLEKKCYRSKLRGWE

SEQ ID NO: 787880 - protein, 904 aa, Homo sapiens
AEAFPAMWNYDCDDPLVSALPQASFSSSSELSSSHGPGFARLNRRDGAGGWSPLVSNKYQWLQIDLGERMEVTAVATQGGYGSSNWVTSYLLMFSDSGWNWKQYRQEDSIWGFSGNANADSVVYYRLQPSIKARFLRFIPLEWNPKGRIGMRIEVFGCAYRSEVVDLDGKSSLLYRFDQKSLSPIKDIISLKFKTMQSDGILLHREGPNGDHITLQLRRARLFLLINSGEAKLPSTSTLVNLTLGSLLDDQHWHSVLIQRLGKQVNFTVDEHRHHFHARGEFNLMNLDYEISFGGIPAPGKSVSFPHRNFHGCLENLYYNGVDIIDLAKQQKPQIIAMGNVSFSCSQPQSMPVTFLSSRSYLALPDFSGEEEVSATFQFRTWNKAGLLLFSELQLISGGILLFLSDGKLKSNLYQPGKLPSDITAGVELNDGQWHSVSLSAKKNHLSVAVDGQMASAAPLLGPEQIYSGGTYYFGGCPDKSFGSKCKSPLGGFQGCMRLISISGKVVDLISVQQGSLGNFSDLQIDSCGISDRCLPNYCEHGGECSQSWSTFHCNCTNTGYRGATCHNSIYEQSCEAYKHRGNTSGFYYIDSDGSGPLEPFLLYCNMTETAWTIIQHNGSDLTRVRNTNPENPYAGFFEYVASMEQLQATINRAEHCEQEFTYYCKKSRLVNKQDGTPLSWWVGRTNETQTYWGGSSPDLQKCTCGLEGNCIDSQYYCNCDADRNEWTNDTGLLAYKEHLPVTKIVITDTGRLHSEAAYKLGPLLCRGDRSFWNSASFDTEASYLHFPTFHGELSADVSFFFKTTASSGVFLENLGIADFIRIELRSPTVVTFSFDVGNGPFEISVQSPTHFNDNQWHHVRVERNMKEASLQVDQLTPKTQPAPADGHVLLQLNSQLFVGKFSF

SEQ ID NO: 787881 - protein, 156 aa, Homo sapiens
TGTAKGFATVLAEAVTSLDLPVAIINLKEYDPDDHLIEEVGKNVDKWLWMLGAHRVMSRGEGDCDVVKSKHGSIEADFRAWKTKFISQLQALQKGERKKSCGGHCKKGKCESHQHGSEEREEGSHEQDELHHRDTEEEEPFESSSEEELVVRTIRA

SEQ ID NO: 787882 - protein, 234 aa, Homo sapiens
MANETQKVGAIHFPFPFTPYSIQEDFMAELYRVLEAGKIGIFESPTGTGKSLSLICGALSWLRDFEQKKREEEVQVLAPAFLWVIPHTATRHRGGGDPGMGDSPFVRSPRLSCFAPCCLLRAAQCDWRWWVGERCQSLFLCWMMGQVNALSAVSYSTPASPVFGPSLALPGHVIPPDNILPLVICSGVSNQPLEFTFQKRDLPQMVIPASSLHHSLASGSQRVTWGTGRSGPNL

SEQ ID NO: 787883 - protein, 249 aa, Homo sapiens
GGCSGSLSLRGPASFKFSGVCPDSRGLAFSVAILPAKKEDFMAELYRVLEAGKIGIFESPTGTGKSLSLICGALSWLRDFEQKKREEEVQVLAPAFLWVIPHTATRHRGGGDPGMGDSPFVRSPRLSCFAPCCLLRAAQCDWRWWVGERCQSLFLCWMMGQVNALSAVSYSTPASPVFGPSLALPGHVIPPDNILPLVICSGVSNQPLEFTFQKRDLPQMVIPASSLHHSLASGSQRVTWGTGRSGPNL

SEQ ID NO: 787884 - protein, 35 aa, Homo sapiens
MHNSGRAWAKELDDKLPAVPRGRRHEPFWRRKADV

SEQ ID NO: 787885 - protein, 79 aa, Homo sapiens
MHPEPCTLELDGMGCRGRKGAAEAGRGYAGWKGAAETGRGQQRQEGGCRLRSQAEGAGGNKSMGREASWRQGHPGSPGQ

SEQ ID NO: 787886 - protein, 62 aa, Homo sapiens
MSSISLSLLYEEKERVLDPELFQESLHWLHSQSGKANCVQSIALTSASSALPPRFTNSFFVP

SEQ ID NO: 787887 - protein, 71 aa, Homo sapiens
MVGFWQKTLNDPFKRRQRDGWRPGKAGKGSPNKEEIRGLVEPLEYRLRSQETGQLIFIWVALESCLTYLCL

SEQ ID NO: 787888 - protein, 68 aa, Homo sapiens
LLVVPLSSNLISVLSYLANDMEEDDEAPKQNIFYFLYEETRSHIPLLSELWFQLCRYMNPRVYEELLS

SEQ ID NO: 787889 - protein, 463 aa, Homo sapiens
MHSASSMLGAVKMEGHEPSDWSSYYAEPEGYSSVSNMNAGLGMNGMNTYMSMSAAAMGSGSGNMSAGSMNMSSYVGAGMSPSLAGMSPGAGAMAGMGGSAGAAGVAGMGPHLSPSLSPLGGQAAGAMGGLAPYANMNSMSPMYGQAGLSRARDPKTYRRSYTHAKPPYSYISLITMAIQQSPNKMLTLSEIYQWIMDLFPFYRQNQQRWQNSIRHSLSFNDCFLKVPRSPDKPGKGSFWTLHPDSGNMFENGCYLRRQKRFKCEKQLALKEAAGAAGSGKKAAAGAQASQAQLGEAAGPASETPAGTESPHSSASPCQEHKRGGLGELKGTPAAALSPPEPAPSPGQQQQAAAHLLGPPHHPGLPPEAHLKPEHHYAFNHPFSINNLMSSEQQHHHSHHHHQPHKMDLKAYEQVMHYPGYGSPMPGSLAMGPVTNKTGLDASPLAADTSYYQGVYSRPIMNSS

SEQ ID NO: 787890 - protein, 457 aa, Homo sapiens
MLGAVKMEGHEPSDWSSYYAEPEGYSSVSNMNAGLGMNGMNTYMSMSAAAMGSGSGNMSAGSMNMSSYVGAGMSPSLAGMSPGAGAMAGMGGSAGAAGVAGMGPHLSPSLSPLGGQAAGAMGGLAPYANMNSMSPMYGQAGLSRARDPKTYRRSYTHAKPPYSYISLITMAIQQSPNKMLTLSEIYQWIMDLFPFYRQNQQRWQNSIRHSLSFNDCFLKVPRSPDKPGKGSFWTLHPDSGNMFENGCYLRRQKRFKCEKQLALKEAAGAAGSGKKAAAGAQASQAQLGEAAGPASETPAGTESPHSSASPCQEHKRGGLGELKGTPAAALSPPEPAPSPGQQQQAAAHLLGPPHHPGLPPEAHLKPEHHYAFNHPFSINNLMSSEQQHHHSHHHHQPHKMDLKAYEQVMHYPGYGSPMPGSLAMGPVTNKTGLDASPLAADTSYYQGVYSRPIMNSS

SEQ ID NO: 787891 - protein, 354 aa, Homo sapiens
MHSASSMLGAVKMEGHEPSDWSSYYAEPEGYSSVSNMNAGLGMNGMNTYMSMSAAAMGSGSGNMSAGSMNMSSYVGAGMSPSLAGMSPGAGAMAGMGGSAGAAGVAGMGPHLSPSLSPLGGQAAGAMGGLAPYANMNSMSPMYGQAGLSRARDPKTYRRSYTHAKPPYSYISLITMAIQQSPNKMLTLSEIYQWIMDLFPFYRQNQQRWQNSIRHSLSFNDCFLKVPRSPDKPGKGSFWTLHPDSGNMFENGCYLRRQKRFKCEKQLALKEAAGAAGSGKKAAAGAQASQAQLGEAAGPASEIGDEWLMRAPGRDSEGGDKAAAGRPKGPGKGGTRHTGARKETHPNLGPPTYL

SEQ ID NO: 787892 - protein, 343 aa, Homo sapiens
PLGCESARDWSSYYAEPEGYSSVSNMNAGLGMNGMNTYMSMSAAAMGSGSGNMSAGSMNMSSYVGAGMSPSLAGMSPGAGAMAGMGGSAGAAGVAGMGPHLSPSLSPLGGQAAGAMGGLAPYANMNSMSPMYGQAGLSRARDPKTYRRSYTHAKPPYSYISLITMAIQQSPNKMLTLSEIYQWIMDLFPFYRQNQQRWQNSIRHSLSFNDCFLKVPRSPDKPGKGSFWTLHPDSGNMFENGCYLRRQKRFKCEKQLALKEAAGAAGSGKKAAAGAQASQAQLGEAAGPASEIGDEWLMRAPGRDSEGGDKAAAGRPKGPGKGGTRHTGARKETHPNLGPPTYL

SEQ ID NO: 787893 - protein, 32 aa, Homo sapiens
MPPFRGHLAGEARHGHTVSTRNEQGSVIAIPR

SEQ ID NO: 787894 - protein, 241 aa, Homo sapiens
MCSQLWFLTDRRIREDYPQVQILRALRQRCSEQDVRFRAVLMDQIAVTIVGGHLGFSWNEPGPKIYLWRREMKSWPPAKPEGPHHFPGCGACTGTHTLSAVNSDITVLRHLEKLGCRLVNRPQSILNCINKFWTFQELAGHGVPMPDTFSYGGHEDFSKMIDEAEPLGYPVVVKSTRGHRGKAVFLARDKHHLSDICHLIRHDVPYLFQKYVKESHGKDIRVVVVGGQVIGSMLRCSTDGR

SEQ ID NO: 787895 - protein, 142 aa, Homo sapiens
MQFKMQMMEADYVWEMLSNSDPSFLSSELYVKSTYSESTPELEGIYHLRGLNLLFFKQELGCGGACPRQEGKTRSLMLSGAKQKQQPATKSISRWIHLHNHRPLPIPHARCSTRACPCEISEHTEASISFPLSCVLSTELTH

SEQ ID NO: 787896 - protein, 195 aa, Homo sapiens
PESQRQRTVLNVTDEYDLLDDGGDAVFSQLTEKDVNCLEPWLIKEMDACLSDIWLHKDIDAFAQVFHLILTENVSVDYRHSETSATALMVAAGRGFASQVEQLISMGANVHSKASNGWMALDWAKHFGQTEIVDLLESYSATLEFGNLDESSLVQTNGSDLSAEDRELLKAYHHSFDDEKVDLDLIMHLLYNICH

SEQ ID NO: 787897 - protein, 122 aa, Homo sapiens
LTRPVGSTISNLLPSSHNCKTPKPELNMLLCSLHPPIFQPNSTSISEEQQTLIVTAISYWPQHNFQIGNFPPVYLHHIKTCGNVKTQASFQSDKCRLPRDPNRNLFRTFFFLSDKIKQLIDH

SEQ ID NO: 787898 - protein, 30 aa, Homo sapiens
MAQHTALSLACRALACPKSWRPRDKHSPAA

SEQ ID NO: 787899 - protein, 60 aa, Homo sapiens
RQPGNTIGQCHALTCSDSPTRQIVRVPMKICSPAPTPASAPLRTSLLVGLFYKLPSQLIL

SEQ ID NO: 787900 - protein, 147 aa, Homo sapiens
MAALTVMAAAPAGMKGITQPSAFIPTAESNSFQPQVKTLPSPIDAKQQLQRKIQKKQQEQKLQSPLPGESAAKKSESATSNGVTNLPNGNPSILSPQPIGIVVAAVPSPIPVQRTRQLVTSPSPMSSSDGKVLPLNVQVVTQHMQSV

SEQ ID NO: 787901 - protein, 204 aa, Homo sapiens
LEGAEPSGQLQNIDEEVISSACRLVCEWAQKVLSQPFDTVLELARFLVKSHYIGTKSMAALTVMAAAPAGMKGITQPSAFIPTAESNSFQPQVKTLPSPIDAKQQLQRKIQKKQQEQKLQSPLPGESAAKKSESATSNGVTNLPNGNPSILSPQPIGIVVAAVPSPIPVQRTRQLVTSPSPMSSSDGKVLPLNVQVVTQHMQSV

SEQ ID NO: 787902 - protein, 69 aa, Homo sapiens
SPHRAPESDPCAVHGTVHHTRGSRARPPHAHSAVHHRMWLLSLRRSVVARTATMSLQAARYPSPGLEPV

SEQ ID NO: 787903 - protein, 169 aa, Homo sapiens
SAWVVWPVGSRRPGGSSLGVCEGLGNVGIGVGPAGVFIPSPSGAASLLGWIQTSAPQPRTTASQALIVHPQEGARRASRRWLSRLSPSALIEKCSHSSTQGRRRKPARGWGKHVCLSKAGLPGRVTRLTLLPGCRWWWHGPPVSCLGSGLCSDLPLAVSAPSLRSLAAS

SEQ ID NO: 787904 - protein, 106 aa, Homo sapiens
MRSLAVQLLLPRRCLWSLRCLCNPVQSDFHAFMWSPGLPARRVNPRRDTRSHVGRLGTGPPCTCVEFCWSPSLTLSPRLEHNGVISAICNLCSRVQATLLPHHTPN

SEQ ID NO: 787905 - protein, 106 aa, Homo sapiens; identical to SEQ ID NO: 787904

SEQ ID NO: 787906 - protein, 52 aa, Homo sapiens
GVDFFFLALTPCGGTEFKVPSWKQKQGPTPDMKPAGTLILDFPFSRPGRKDI

SEQ ID NO: 787907 - protein, 158 aa, Homo sapiens
  misc_feature (34)..(34): Xaa can be any naturally occurring amino acid
KYTIKPPRDLCSRFEQEQEVKKQQEIRAQEKKRXREEEERLMEAEKAKPDALHGLRVHSWVLVLSGKREVPENFFIDPFTGHSYSTQDEHFLGIESLWNHKNYWINMQDCWNCCKVPREGELGGCGRHSAGDRNRGKQWQPDLGESETPGHEGFEPSP

SEQ ID NO: 787908 - protein, 94 aa, Homo sapiens
MVSKSSRTSAGRPWATRARASPNTSSVCPRHTRCSSWRRRAAGYLSWARRSQASTSRPSSPSLSCAWLHCASSASSRQPKPSVWLEPASSSSTA

SEQ ID NO: 787909 - protein, 59 aa, Homo sapiens
RKFLNIFIVLKNECNGVGIRKANIRCPLLWFCFLNGDKRSHSVCKNSFLLGCSGYFIPD

SEQ ID NO: 787910 - protein, 136 aa, Homo sapiens
SKPNTKLEEIIKIRAEINKFETKKYKRSMKQRVGVLNQMKSEKRETRFKEIVSDMKKETLNQHHRTSKDHYRLPRATAHRLENLEEMDEFLYTHNLPRPDGFTAEFYQTPNNYIYTSVKFNELDQQRSTEMSEKQC

SEQ ID NO: 787911 - protein, 71 aa, Homo sapiens
LVMEKRKCHPYKMNLHSEPQEVLHVGSAYNPSTMLFTASPASSTVPGVIQTSTVTQLASLLLKTSPTSTIL

SEQ ID NO: 787912 - protein, 75 aa, Homo sapiens
ERENAQSRGGRGLGGGSSGGGRIEHTVLEATVGLGIIDHQSNGSLFRTALEEEQDNEICTPAAGWGGQCGGGGGQ

SEQ ID NO: 787913 - protein, 68 aa, Homo sapiens
EAEVAVSRDRAIALQPGQQSETPSQKTTTTKYVMRKLIELQGEIDEFTVCSWRSSTLYRKWTDPAGCS

SEQ ID NO: 787914 - protein, 126 aa, Homo sapiens
NRDVQGEETNDLWSLIYKCKQYLTNPQVLNYQTCFNLLMQTVPNKPTGPKLTREETVMLCGLCIQTFRKYCRQSWGFRGQSIFGEPRTHQRASLVFSNLHCISEVYKGKGQESSVPVRQLLFSSGF

SEQ ID NO: 787915 - protein, 31 aa, Homo sapiens
MSSELLQEYTVLAPNRYGAGVPTLEIRTSVV

SEQ ID NO: 787916 - protein, 132 aa, Homo sapiens
EQTTEFGIHKPHLGKSSSLDKQLPGPSGGEEEKPMGNGSPSPPPGTSLDNPVPSPSPSEIFPVTHSFPSSAHSDTHHTSTAESQKKATAEGSAGRVENFGKRKPLLQAWVSPSETHPVSAQPGAGTGSAKHR

SEQ ID NO: 787917 - protein, 35 aa, Homo sapiens
MSKGKPQTTKNISYSAPHRMQCEIDTRGTSTLAVF

SEQ ID NO: 787918 - protein, 90 aa, Homo sapiens
APVPTQDEDPLLSFPHPGPPPSVFPHSQTAVPSTPRWACWAAGPEFLGSPSLPPSLLRDPGAPCGKCPGDGAVECQPGVLSCTLCPRIQE

SEQ ID NO: 787919 - protein, 113 aa, Homo sapiens
CSFHCYTIPLRSIATNQILLQAPDYTVAKLYNLLECSIPFSWVTSLSGACCNYSPATDLQERRITGQILRKTVPCWATTQREANYRFFRQTEIKFLWEGLERLLLRERQQSSI

SEQ ID NO: 787920 - protein, 47 aa, Homo sapiens
TVGRDRSPERGETVQREGEFGVILQMSTKAREALLCVRHCVKVVGTV

SEQ ID NO: 787921 - protein, 105 aa, Homo sapiens
PPPSLPQIMALKEKTSCFSNSRDTTAGGAVAGLGTFSTQEAGYGKSLPCISCNTKEDGCLGLPCLLAIKEMATAKQCEVTAPESFLHQRLRTGAVQSYSILSPQP

SEQ ID NO: 787922 - protein, 144 aa, Homo sapiens
MASLACSLLQEAARCQPRPNAPASDHPSPELAACQGGTPPRPRGNLNPGPEQHRPPSLQSICGHGGPGERVGDSYSGCLGPPEVGAGVLQQLGENLQAAGPLPPLQGRRQVFALKVLQVGVGEGPAEGSWEAAPELDKLSEYQA

SEQ ID NO: 787923 - protein, 81 aa, Homo sapiens
MMMEVVIVKTKMGICREQEREIRLLLCLPQTGEDIRELHFDKTTVLVTNCFAEMSLICTFAPALCPSNLTNLELKKPVLYE

SEQ ID NO: 787924 - protein, 41 aa, Homo sapiens
MFKYMALYSMIQYVGVLLLYWETNSLSNYQFLFQDLAITTL

SEQ ID NO: 787925 - protein, 80 aa, Homo sapiens
MRSLLIRVPPGARDPQREESSKTSPRAFARTNPVPAPAPERLRNSGHSESAGRLPRLHTAGRASGGCDRSAPSVPRTPRP

SEQ ID NO: 787926 - protein, 105 aa, Homo sapiens
MPGRIDECRGGARNRPGRTSECRGGARNRPGRTSECRGGARNRPGRTGECRGGARNMPRRTGECRGGARNIAGRGPREGPPVFPSPVQVSRPTAAQAHREEKFLS

SEQ ID NO: 787927 - protein, 154 aa, Homo sapiens
CQRRVRGARRLRTRAAPVPLTSARAGASRAIRRSGRADFQPLSESKFFFRRCLPSDSPSCASSLLHPLQPSVPRPLGVPTSSLPPPPGFLRRRGGGIGEKLGKPGGGDGGGDEGSASCLLESPGVMCSSRPGLGLGALCWPDPRAPAAARGQVQ

SEQ ID NO: 787928 - protein, 215 aa, Homo sapiens
MCNTPTYCDLGKAAKDVFNKGYGFGMVKIDLKTKSCSGVMEFSTSGHAYTDTGKASGNLETKYKVCNYGLTFTQKWNTDNTLGTEISWENKLAEGLKLTLDTIFVPNTGKKSGKLKASYKRDCFSVGSNVDIDFSGPTIYGWAVLAFEGWLAGYQMSFDTAKSKLSQNNFALGYKAADFQLHTHVNDGTEFGGSIYQKVNEKIETSIKPCLDSWE

SEQ ID NO: 787929 - protein, 73 aa, Homo sapiens
LMRGRQELQGQSRDQRNMIAGSEGERRGRHERSNVDLLKELGKAGKQMSLGASRENQLGQHLGFILMRPGSDF

SEQ ID NO: 787930 - protein, 860 aa, Homo sapiens
VSQVHVSAMLPTEVPQSHPGPSALLLLQLLLPPTSAFFPNIWSLLAAPGSITHQDLTEEAALNVTLQLFLEQPPPGRPPLRLEDFLGRTLLADDLFAAYFGPGSSRRFRAALGEVSRANAAQDFLPTSRNDPDLHFDAERLGQGRARLVGALRETVVAARALDHTLARQRLGAALHALQDFYSHSNWVELGEQQPHPHLLWPRQELQNLAQVADPTCSDCEELSCPRNWLGFTLLTSGYFGTHPPKPPGKCSHGGHFDRSSSQPPRGGINKDSTSPGFSPHHMLHLQAAKLALLASIQAFSLLRSRLGDRDFSRLLDITPASSLSFVLDTTGSMGEEINAAKIQARHLVEQRRGSPMEPVHYVLVPFHDPGFGPVFTTSDPDSFWQQLNEIHALGGGDEPEMCLSALQLALLHTPPLSDIFVFTDASPKDAFLTNQVESLTQERRCRVTFLVTEDTSRVQGRARREILSPLRFEPYKAVALASGGEVIFTKDQHIRDVAAIVGESMAALVTLPLDPPVVVPGQPLVFSVDGLLQKITVRIHGDISSFWIKNPAGVSQGQEEGGGPLGHTRRFGQFWMVTMDDPPQTGTWEIQVTAEDTPGVRVQAQTSLDFLFHFGIPMEDGPHPGLYPLTQPVAGLQTQLLVEVTGLGSRANPGDPQPHFSHVILRGVPEGAELGQVPLEPVGPPERGLLAASLSPTLLSTPRPFSLELIGQDAAGRRLHRAAPQPSTVVPVLLELSGPSGFLAPGSKVPLSLRIASFSGPQDLDLRTFVNPSFSLTSNLSRAHLELNESAWGRLWLEVPDSAAPDSVVMVTVTAGGREANPVPPTHAFLRLLVSAPAPQVRNYYFPSQGPAHHPYRLI

SEQ ID NO: 787931 - protein, 136 aa, Homo sapiens
VSQVHVSAMLPTEVPQSHPGPSALLLLQLLLPPTSAFFPNIWSLLAAPGSITHQDLTEEAALNVTLQLFLEQPPPGRPPLRLEDFLTCTRYGYIRHNHIINWMFGSWDTSLVVHTKYDYLRTNNSAAKLQKREKFK

SEQ ID NO: 787932 - protein, 387 aa, Homo sapiens
VSQVHVSAMLPTEVPQSHPGPSALLLLQLLLPPTSAFFPNIWSLLAAPGSITHQDLTEEAALNVTLQLFLEQPPPGRPPLRLEDFLGRTLLADDLFAAYFGPGSSRRFRAALGEVSRANAAQDFLPTSRNDPDLHFDAERLGQGRARLVGALRETVVAARALDHTLARQRLGAALHALQDFYSHSNWVELGEQQPHPHLLWPRQELQNLAQVADPTCSDCEELSCPRNWLGFTLLTSGYFGTHPPKPPGKCSHGGHFDRSSSQPPRGGINKDSTSPGFSPHHMLHLQAAKLALLASIQAFSLLRSRLGDRDFSRLLDITPASSLSFVLDTTGSMGEEINAAKIQARHLVEQRRGSPMEPVHYVLVPFHDPETEFHRVNQDGLHLLTS

SEQ ID NO: 787933 - protein, 886 aa, Homo sapiens
VSQVHVSAMLPTEVPQSHPGPSALLLLQLLLPPTSAFFPNIWSLLAAPGSITHQDLTEEAALNVTLQLFLEQPPPGRPPLRLEDFLGRTLLADDLFAAYFGPGSSRRFRAALGEVSRANAAQDFLPTSRNDPDLHFDAERLGQGRARLVGALRETVVAARALDHTLARQRLGAALHALQDFYSHSNWVELGEQQPHPHLLWPRQELQNLAQVADPTCSDCEELSCPRNWLGFTLLTSGYFGTHPPKPPGKCSHGGHFDRSSSQPPRGGINKDSTSPGFSPHHMLHLQAAKLALLASIQAFSLLRSRLGDRDFSRLLDITPASSLSFVLDTTGSMGEEINAAKIQARHLVEQRRGSPMEPVHYVLVPFHDPGFGPVFTTSDPDSFWQQLNEIHALGGGDEPEMCLSALQLALLHTPPLSDIFVFTDASPKDAFLTNQVESLTQERRCRVTFLVTEDTSRVQGRARREILSPLRFEPYKAVALASGGEVIFTKDQHIRDVAAIVGESMAALVTLPLDPPVVVPGQPLVFSVDGLLQKITVRIHGDISSFWIKNPAGVSQGQEEGGGPLGHTRRFGQFWMVTMDDPPQTGTWEIQVTAEDTPGVRVQAQTSLDFLFHFGIPMEDGPHPGLYPLTQPVAGLQTQLLVEVTGLGSRANPGDPQPHFSHVILRGVPEGAELGQVPLEPVGPPERGLLAASLSPTLLSTPRPFSLELIGQDAAGRRLHRAAPQPSTVVPVLLEVRRQGKVRLGLERVRAAPSLKNPSLQLSGPSGFLAPGSKVPLSLRIASFSGPQDLDLRTFVNPSFSLTSNLSRAHLELNESAWGRLWLEVPDSAAPDSVVMVTVTAGGREANPVPPTHAFLRLLVSAPAPQVRNYYFPSQGPAHHPYRLI

SEQ ID NO: 787934 - protein, 74 aa, Homo sapiens
YEDPSSKPIVKQNSPSLDCHPLIGGFDDRVSIIKPLGKKTVEEGEEKEQERISTPEGFDEVIDNPFVVNHLLLL

SEQ ID NO: 787935 - protein, 129 aa, Homo sapiens
GGLVGWTGVGVGVGAGAGAGTEVRAGAAGRAIRVQRSNRLLSLSLSTSPAKGSVEGPPEAPAPRSFRSRSCRRFSRSLARSCRLHNLYKLWQDSLKKKKERKRKKHCHYHWAFAPALCLKFSDPGSLHV

SEQ ID NO: 787936 - protein, 128 aa, Homo sapiens
VVLYIIEYYTAIKMRLHVPIVLIENGLQDVSLITKDKVQNIVCNICCHLRDQKRVHICICLGMLSHIPRSIHKKLSTMVVLREGSWEVGRRAYPSCIPFRNLHGLSYVNHLPIQETYKNFKGRRQRKD

SEQ ID NO: 787937 - protein, 57 aa, Homo sapiens
KDGNALISAMRNYSSAVQKFSQTLQSFQFDFIGDTLTDDEINIAESFKEFAELLNEV

SEQ ID NO: 787938 - protein, 60 aa, Homo sapiens
MQITRSASQVAGTTDYSSAVQKFSQTLQSFQFDFIGDTLTDDEINIAESFKEFAELLNEV

SEQ ID NO: 787939 - protein, 30 aa, Homo sapiens
MKCLLLAGALSKGDKAAVILFPPSMGRCNL

SEQ ID NO: 787940 - protein, 102 aa, Homo sapiens
MDTRQHRARSHSNTRTLVQGVCTLTVPSASHTHTHAMRTDILIHTHTSHSHTYYMPPHTCLTLTICTHRHAHPHTPIPTLGAHTLTGTHKAAQSTLARTRVW

SEQ ID NO: 787941 - protein, 78 aa, Homo sapiens
PTSKRKRVKFTTFTAVSSDDEYPTRNSIVMSSEDDIKWVCQDLDPGDCKELHNYMERLHENVYSQTHTDIGSHSPFSL

SEQ ID NO: 787942 - protein, 237 aa, Homo sapiens
DELYIVDNNGEMPLFDITGQDFENKLRVPLLEILKYPYLLLHERVNELCVEALCRMEQANCSFQVFDKHPGIYLFLVHPNEMVRRWAILTARNLGKVDRDDYYDLQEVLLCLFKVIELGLLESPDIYTSSVLEKGKLILLPSHMYDTTNYKSYWLGICMLLTILEEQAMDSLLLGSDKQNDFMQSILHTMEREADDDSVDPFWPALHCFMVILDRLGSKVWGQLMDPIVAFQTIINN

SEQ ID NO: 787943 - protein, 213 aa, Homo sapiens
DELYIVDNNGEMPLFDITGQDFENKLRVPLLEILKYPYLLLHERVNELCVEALCRMEQANCSFQVFDKHPGIYLFLVHPNEMVRRWAILTARNLGKVDRDDYYDLQEVLLCLFKVIELGLLESPDIYTSSVLEKGKLILLPSHMYDTTNYKSYWLGICMLLTILEEQAMDSLLLGSDKQNDFMQSILHTMEREADGNKLYLLNVVEYSDDDAL

SEQ ID NO: 787944 - protein, 76 aa, Homo sapiens
LIVSSPKIFYFQAWKLVLHILFYNFLYQYISQSLEVHCKLLFFSFSLFSFLPSFLPSLSLSFFLSLGLQARATMPG

SEQ ID NO: 787945 - protein, 70 aa, Homo sapiens
YRSHILLPSAPLLSVQTDEFGANVYAYVTIASINTSKNIPSPKELPHALLQSTLTLMPLISITTIWFYLF

SEQ ID NO: 787946 - protein, 145 aa, Homo sapiens
GQQKTSQHSTSSSGGTKASVSRTACMNTRSTIRWLLAMTSGNGERPSRPRAVSTWRPSSGSAWVPTSTRGTAPGSHGRRRRLLGGLTARNEASLHTPGSTAEPSPWRMSRSWSVTRCSAPAASTTSSNAGAAFASISSRSRSSAH

SEQ ID NO: 787947 - protein, 124 aa, Homo sapiens [sequence omitted]

SEQ ID NO: 787948 - protein, 519 aa, Homo sapiens
MAEDEPSGALLKPLVFRVDETTPAVVQSVLLERGWNKFDKQEQNAEDWNLYWRTSSFRMTEHNSVKPWQQLNHHPGTTKLTRKDCLAKHLKHMRRMYGTSLYQFIPLTFVMPNDYTKFVAEYFQERQMLGTKHSYWICKPAELSRGRGILIFSDFKDFIFDDMYIVQKYISNPLLIGRYKCDLRIYVCVTGFKPLTIYVYQEGLVRFATEKFDLSNLQNNYAHLTNSSINKSGASYEKIKEVIGHGCKWTLSRFFSYLRSWDVDDLLLWKKIHRMVILTILAIAPSVPFAANCFELFGFDILINDNLKPWLLEVNYSPALTLDCSTDVLVKRKLVHDIIDLIYLNGLRNEGGEASNATHGNSNIDAAKSDRGGLDAPDCLPYDSLSFTSRMYNEDDSVVEKAVSVRPEAAPASQLEGEMSGQDFHLSTREMPQSKPKLRSRHTPHKTLMPYASLFQSHSCKTKTSPCVLSDRGKAPDPQAGNFVLVFPFNEATLGASRNGLNVKRIIQELQKLMNKQHS

SEQ ID NO: 787949 - protein, 617 aa, Homo sapiens
ASAHFSWRCSCCTETHRGHPRNQRPMRGRDLCSSTQSQALGSLRTTTPAFTLNIPSEANHTEQPPAGLGARLQEAGVSIPPRRGRPTPTLEKKKKPHLMAEDEPSGALLKPLVFRVDETTPAVVQSVLLERGWNKFDKQEQNAEDWNLYWRTSSFRMTEHNSVKPWQQLNHHPGTTKLTRKDCLAKHLKHMRRMYGTSLYQFIPLTFVMPNDYTKFVAEYFQERQMLGTKHSYWICKPAELSRGRGILIFSDFKDFIFDDMYIVQKYISNPLLIGRYKCDLRIYVCVTGFKPLTIYVYQEGLVRFATEKFDLSNLQNNYAHLTNSSINKSGASYEKIKEVIGHGCKWTLSRFFSYLRSWDVDDLLLWKKIHRMVILTILAIAPSVPFAANCFELFGFDILINDNLKPWLLEVNYSPALTLDCSTDVLVKRKLVHDIIDLIYLNGLRNEGGEASNATHGNSNIDAAKSDRGGLDAPDCLPYDSLSFTSRMYNEDDSVVEKAVSVRPEAAPASQLEGEMSGQDFHLSTREMPQSKPKLRSRHTPHKTLMPYASLFQSHSCKTKTSPCVLSDRGKAPDPQAGNFVLVFPFNEATLGASRNGLNVKRIIQELQKLMNKQHS

SEQ ID NO: 787950 - protein, 105 aa, Homo sapiens
VFVPSGRIKEIVKKHSQFIGYPITLFVEKERDKEVSDDEAEEKEDKEEEKDKEEKESEDKPEIEDVGSDGSKMAYLPSDSGPAWDLTFKANSASLLSLSIPDHQV

SEQ ID NO: 787951 - protein, 74 aa, Homo sapiens
LPLPTTGNGILYSTPRQHSVDDLTLRMRESQVSAVVSILEVDLGVLQVCVNVQRFTDRRMTFIKTWDLWDHHCL

SEQ ID NO: 787952 - protein, 51 aa, Homo sapiens
KALSTVTNTLSATLSVTSEPHSESWVCIPKSACTIRMVKDLLYFTSVKGYD

SEQ ID NO: 787953 - protein, 114 aa, Homo sapiens
MLLPPGSLSRPRTFSSQPLQTKLMTHNGLFRPIPYVTAASADEATASQQPPQAQLHRYNGLFRPSSCLPAFSPGPELSQDDLSQAQLLHHGGPSRPSLSAPVRSNRETQESPEE

SEQ ID NO: 787954 - protein, 125 aa, Homo sapiens
MLLPPGSLSRPRTFSSQPLQTKLMTHNGLFRPIPYVTAASADEATASQQPPQAQLHRYNGLFRPSSCLPAFSPGPELSQVDLTRPSSCFLDDLSQAQVLHHGGPSRPSLSAPVRSNRETQESPEE

SEQ ID NO: 787955 - protein, 125 aa, Homo sapiens
MLLPPGSLSRPRTFSSQPLQTKLMTHNGLFRPIPYVTAASADEATASQQPPQAQLHRYNGLFRPSSCLPAFSPGPELSQVDLTRPSSCFLADLSQAPGPASWWTLQAQPLPPVRSNRETQESPEE

SEQ ID NO: 787956 - protein, 114 aa, Homo sapiens; identical to SEQ ID NO: 787953

SEQ ID NO: 787957 - protein, 114 aa, Homo sapiens
MLLPPGSLSRPRTFSSQPLQTKLMTHNGLFRPIPYVTAASADEATASQQPPQAQLHRYNGLFRPSSCLPAFSPGPELSQADLSQAPGPASWWTLQAQPLPPVRSNRETQESPEE

SEQ ID NO: 787958 - protein, 111 aa, Homo sapiens
MTLCGCCWVQSWSSWKMLSLHSMIQCSWMATSCTFHILVAMPKPTSKTRPPLEVVKAAKGVAVGALLLQMEPQLGTRRARAQSLQPSHFSHTSFLLAKPTQPLNKEAESMG

SEQ ID NO: 787959 - protein, 111 aa, Homo sapiens; identical to SEQ ID NO: 787958

SEQ ID NO: 787960 - protein, 104 aa, Homo sapiens
QTGRCSQLISHPMSRNPPWGPWISRSQWLPHLLKLKRRETKKQEAPRPIRGCLPDVPLPLHDLCGWVHCLGSENHSRHQTQGPHPPMGGTNFISKMIQFPSNVQ

SEQ ID NO: 787961 - protein, 309 aa, Homo sapiens
GYVGEDCGQRQCLNACSGRGQCEEGLCVCEEGYQGPDCSAVAPPEDLRVAGISDRSIELEWDGPMAVTEYVISYQPTALGGLQLQQRVPGDWSGVTITELEPGLTYNISVYAVISNILSLPITAKVATHLSTPQGLQFKTITETTVEVQWEPFSFSFDGWEISFIPKNNEGGVIAQVPSDVTSFNQTGLKPGEEYIVNVVALKEQARSPPTSASASTVIDGPTQILVRDVSDTVAFVEWIPPRAKVDFILLKYGLVGGEGGRTTFRLQPPLSQYSVQALRPGSRYEVSVSAKPRDQRERFRHRTPFPTG

SEQ ID NO: 787962 - protein, 212 aa, Homo sapiens
MEVLRRSSVFAAEIMDAFDRSPTDKELVAQAKALGREYVHARLLRAGLSWSAPERAAPVPGRLAEVCAVLLRLGDELEMIRPSVYRNVARQLHISLQSEPVVTDAFLAVAGHIFSAGITWGKVVSLYAVAAGLAVDCVRQAQPAMVHALVDCLGEFVRKTLATWLRRRGGWTDVLKCVVSTDPGLRSHWLVAALCSFGRFLKAAFFVLLPER

SEQ ID NO: 787963 - protein, 212 aa, Homo sapiens; identical to SEQ ID NO: 787962

SEQ ID NO: 787964 - protein, 109 aa, Homo sapiens
MEVLRRSSVFAAEIMDAFDRSPTDKELVAQAKALGREYVHARLLRAGLSWSAPERAAPVPGRLAEVCAVLLRLGECALVGSPAAPPPLLGRSLPPRPRWGSGPGAPTPC

SEQ ID NO: 787965 - protein, 217 aa, Homo sapiens
FAITSINANPIIHLQYKGHASGPRTRLQTLERTSTNEEDNPIFKWTPGNTQAAGAGSRSPLLCLAGAAPAWSPSPGASRELARSSLSGEARKASPRLRPQGCLSLRRPSPKPSLSPAGSRALPTSLPRPPTPRQEPPKSAGSPVDLALPARAWTGRAPGRGARPRGSEWKGRGRRRRRADPEARTPPRRPRHAAGEASRGARWCPCMRWPRGWPWTV

SEQ ID NO: 787966 - protein, 212 aa, Homo sapiens; identical to SEQ ID NO: 787962

SEQ ID NO: 787967 - protein, 91 aa, Homo sapiens
SAYCHRDGALTADPHAPQQGTAASMVLHAHNRMLCSQEKAMRRIYILLWREKNRVQNNEDNMQAFFFGLRQSLPLSPRLDCSGLIMAHCSF

SEQ ID NO: 787968 - protein, 72 aa, Homo sapiens
NMIRIELVPRLQLGISYYLIILITLPMFSHFPHSLQSLQPDLTAIILMSHLNYLSSLTFDLIISNVLAIFSI

SEQ ID NO: 787969 - protein, 84 aa, Homo sapiens
GEGVAPLLAGSRGHTRATLFQPQKARLSSLDPPRASGTLGPTHPCLGGREEAAPLCEVFLTLLPHLVSRKGGNMTCWELSGPEL

SEQ ID NO: 787970 - protein, 126 aa, Homo sapiens
AARLKHKRHPRKIQEPSPLKQEANTFLDDIAKQERTARKRPGVYELVSVIEPSRRKNHSDRVLSLSLPNTERRTIINGWRQLRRSNAKKQLHAQEKTLPLLLRDRSVHTSIAEKHSKVYPSPKHVL

SEQ ID NO: 787971 - protein, 69 aa, Homo sapiens
KSPDSSLNKMKLYNLSDRQIKITIIKMLRKLKRIMHEQNENSNKQIENIRKYQTEIMRLKNTITKVKNN

SEQ ID NO: 787972 - protein, 251 aa, Homo sapiens
VASMRLAYQELQIDRKKEEKKLQNLEGKKREQAERLGMGLVSRSSVSHSVLSEMQVIEQETPVSAKSSRSQLDLFDDVGTFASGPPKYKDNPFSLGESFGSRWDTDAAWGMDRVEEKEPEVTISSIRPISERATNRREVESRSSGLESSEARQKFAGAKAISSDMFFGREVDAEYEARSRLQQLSGSSAISSSDLFGDMDGAHGAGSVSLGNVLPTADIAQFKQGVKSVAGKMAVLANGVMNSLQDRYGSY

SEQ ID NO: 787973 - protein, 183 aa, Homo sapiens
MTTASTSQVRQNYHQDSEAAINRQINLELYASYVYLSMSYYFDHDDVALKNFAKYFLHQSHEEREHAEELMKLQNQRGGRIFLQDIKKPDCDDWESGLNAMECALHLEKNVNQSLLELHKLATDKNDPHLCDFIETHYLNEQVKAIKELGDHVTNLRKMGAPESGLAEYLFDKHTLGDSDNES

SEQ ID NO: 787974 - protein, 103 aa, Homo sapiens
MREPGGAVLATRYRKFWYPKTTPLYSPRLGRAASQDRLIPEPPPLPPRHRCPSSWTCIGMGLQSRKGGLGAGPPHSVGASLEGFLLATQLHDLASGRPDPGPA

SEQ ID NO: 787975 - protein, 164 aa, Homo sapiens
GTRSCFCFFETEFHSVAQAGVQCCDLGSLQPPPPGFKRFFCLSLPSDWDYRHAPPGPGNFFAFLVETGLHHVGQAGLELLTSSDPPASASHSAGITGVSHHAQPRPLRMFVEWVGECAEAWSPVQSHSFLMKLTYKLERERQKVKTTGDKCQIVINAIQKNKAK

SEQ ID NO: 787976 - protein, 108 aa, Homo sapiens
SLTQGPPAPPPPTQQSPASSLTQGPPAPPPPTQQSPVSRAAPFVDVLQASLTSLCFRHCFSQTGGLWQPCTKHVCGHHVSNSRCPLHISVSRFNNAHDVPSFLIAIIS

SEQ ID NO: 787977 - protein, 46 aa, Homo sapiens
VRISALEKKPQLRPNNKKKEQAGQGEWVVLGEPASFRRGRNSSRIN

SEQ ID NO: 787978 - protein, 112 aa, Homo sapiens
MYPPTETHNLTDTYSLTYSPFVSSRRFLWTAFESQNARLSLSARLARPHIGHEGEAVMVLGNIHVCFYALATQITSAAGPFINITYLPKSFCLCTSKKFQQKGDKPNTIIHL

SEQ ID NO: 787979 - protein, 118 aa, Homo sapiens
VDGWRSGRGSPGESKVPEDRGTPVAQLLNLGAPELSRAHRLPRELGQLLAPPDLCDPTSSGCPDLCDPTSRGSPDLCDPTSSGSPDLCAPTSSGSPDLCAPTSSGSPDLCAPTSSGSP

SEQ ID NO: 787980 - protein, 85 aa, Homo sapiens
CRYQHIWALSPWSAVLILTISAPREQAKNKNTYHPCPALENLIVGENDGFQLHPCPYKGHELIVFYGCVVFHGVYVPHFLNPVYH

SEQ ID NO: 787981 - protein, 642 aa, Homo sapiens
QAQAEAFARQIYGPECTFKASHGWFWRWQKRHGISSQRFYGEAGPPAPSPAPGPPVKEEPALPSGAGPLPDRAPAPPPPAEGGYGDEQIYSASVTGLYWKLLPEQAAPPGAGDPGAGGCGRRWRGDRVTVLLAANLTGSHKLKPLVIGRLPDPPSLRHHNQDKFPASYRYSPDAWLSRPLLRGWFFEEFVPGVKRYLRRSCLQQKAVLLVAHPPCPSPAASMPALDSEDAPVRCRPEPLGPPEELQTPDGAVRVLFLSKGSSRAHIPAPLEQGVVAAFKQLYKRELLRLAVSCASGSPLDFMRSFMLKDMLYLAGLSWDLVQAGSIERCWLLGLRAAFEPRPGEDSAGQPAQAEEAAEHSRVLSDLTHLAALAYKCLAPEEVAEWLHLDDDGGPPEGCREEVGPALPPAAPPAPASLPSAIGGGEDEEEATDYGGTSVPTAGEAVRGLETALRWLENQDPREVGPLRLVQLRSLISMARRLGGIGHTPAGPMTVCDQASPVTFLLLHLEGGDIHTVSHLSSPPPGVAHRMGTGGSRNPNPAWLGGALLVRGRPASLAPWGHSWKRGLAHAPLRAGTCTGHTRHSACWNRWLCSCSGPRAAGPPPLHQSHALDEGRNSCLLSSPGAMWPRSHSTIISVAKHTT

SEQ ID NO: 787982 - protein, 495 aa, Homo sapiens
QAQAEAFARQIYGPECTFKASHGWFWRWQKRHGISSQRFYGEAGPPAPSPAPGPPVKEEPALPSGAGPLPDRAPAPPPPAEGGYGDEQIYSASVTGLYWKLLPEQAAPPGAGDPGAGGCGRRWRGDRVTVLLAANLTGSHKLKPLVIGRLPDPPSLRHHNQDKFPASYRYSPDAWLSRPLLRGWFFEEFVPGVKRYLRRSCLQQKAVLLVAHPPCPSPAASMPALDSEDAPVRCRPEPLGPPEELQTPDGAVRVLFLSKGSSRAHIPAPLEQGVVAAFKQLYKRELLRLAVSCASGSPLDFMRSFMLKDMLYLAGLSWDLVQAGSIERCWLLGLRAAFEPRPGEDSAGQPAQAEEAAEHSRVLSDLTHLAALAYKCLAPEEVAEWLHLDDDGGPPEGCREEVGPALPPAAPPAPASLPSAIGGGEDEEEATDYGGTSVPTAGEAVRGLETALRWLENQDPREVGPLRLVQLRSLISMARRLGGIGHTPAGPYDGV

SEQ ID NO: 787983 - protein, 41 aa, Homo sapiens
IPVSISVLGPACSHFPLILAPLPAHLSSSVPSSPLSPSPSA

SEQ ID NO: 787984 - protein, 123 aa, Homo sapiens
MRIVSFLLSKCHHPSSACSVWGISWSFWQHLRGDTITLIFVGTSPTGSVGFSPCVWRRDCRNKDTRQRHKRKDSWARGTTTTKMRGPVVAPNVWLHCYLLDTKQKGQGKECESSPMIGKVTWV

SEQ ID NO: 787985 - protein, 113 aa, Homo sapiens
MELSGPATASPLPVRDAVNPGVASPAGPGQVSTLEGPQTKGTSVLQTLKGNSEPSGLPRLPTATWPQLLPTDMRCGPFREKLLEEVAPSQSRGAQLGGRMGSPGGWTICQPRQ

SEQ ID NO: 787986 - protein, 112 aa, Homo sapiens
MSRLHANFSSCPLSAGTTSTDCCRLYFLSGLQDDFIFDQGTYPTLRYESFHAQSGIKLIPMRASHIQGCTKHYRPHRNRDPIWEFSVPHGMKALDMKLLVFVFHFYVLKGQF

SEQ ID NO: 787987 - protein, 141 aa, Homo sapiens [sequence omitted]

SEQ ID NO: 787988 - protein, 125 aa, Homo sapiens
MAVVARLAGHPLLEASQKSPCAIHAEPRWSFSRPKVCATLLLPHPEELQARPTSFRGGELLGLTARPITSPIDHNHLQLVVTVGEEAGHHATEAVTREAGLLSLLRHPQVLQQAALPPVVGLRDR

SEQ ID NO: 787989 - protein, 104 aa, Homo sapiens
MPGPAAPQVSPPQSPLSLNLHWGGPRGLSCGTGSSCLRSSRAWKMRSSGMQASYSKPCCDCVGQRNQETESSRKPEAEKRRIRKAHNRWQNRGLVRDMPRDGRS

SEQ ID NO: 787990 - protein, 45 aa, Homo sapiens
AGITGVSHRAQLLITLITRIIISSTSITVVEASIATSTTSAAAAM

SEQ ID NO: 787991 - protein, 98 aa, Homo sapiens
KANNGTVLLPAQPEPPLSERPQLPPAEDFKMIFAWVGLWVQGSVTNHCAQVGALACLLRSKLFPATGSSYGDLKDPRGVVGTARGPCRDLHRGRFLDV

SEQ ID NO: 787992 - protein, 118 aa, Homo sapiens
NFSNTHQCFFYRKIKDTHSVSLNFYPFKTQIQASPTFRRYALFYSAPKAPAAQQQLHKRINQGITVGFLKCIYFNLLWIALYSFTQLLLFANCIILYWSPHINLGIYVGRKQDSHGIT

SEQ ID NO: 787993 - protein, 270 aa, Homo sapiens
VLIFVLRKRIKLTVELFQITNKAISSAPFLLFQPLWTFAILIFFWVLWVAVLLSLGTAGAAQVMEGGQVEYKPLSGIRYMWSYHLIGLIWTSEFILACQQMTIAGAVVTCYFNRSKNDPPDHPILSSLSILFFYHQGTVVKGSFLISVVRIPRIIVMYMQNALKEQQHGALSRYLFRCCYCCFWCLDKYLLHLNQNAYTTTAINGTDFCTSAKDAFKILSKNSSHFTSINCFGDFIIFLGKVLVVCFTVFGGLMAFNYNRAFQVWAVPLL

SEQ ID NO: 787994 - protein, 107 aa, Homo sapiens
FTNLSPVVTSPSDHRQEMSSAGKNSSHYIGSIQIIQDNCSHVKVFNSISPAMSLLSCKLTYSWSRDISGRSLFWLPCKPNSLQSDHMTLSFIMGNINYRTEHWMHCH

SEQ ID NO: 787995 - protein, 79 aa, Homo sapiens
PKNKPGENIGRYGRVLIRTRGERSQASPSPRKELHSLFYRLRLLQPLNALPGGGEVPLSENCFFYLIIITHPCLVASMV

SEQ ID NO: 787996 - protein, 72 aa, Homo sapiens
QEIWDYGKRPNLRLIGVPENDRENGTKLENTLQDIIQENFPNLAKQANIQIQEIQRMPQRYSSRRATPYLCF

SEQ ID NO: 787997 - protein, 144 aa, Homo sapiens
WHRPASPCPSPGPGHTLPPKPPSPRGTTASPKGRVRRKEEAKESPSAAGPEDKSQSKRRASNEKESAAPASPAPSPAPSPTPAPPQKEQPPAETPTDAAVLTSPPAPAPPVTPSKPMAGTTDREEATRLLAEKRRQAREQPERE

SEQ ID NO: 787998 - protein, 68 aa, Homo sapiens
LGFEARSTELCNSFPTKYTHKHTHTQAHTHTNTHTHLNSMPKPPPPPSIVSHFTPSIWDPLSSPTTAW

SEQ ID NO: 787999 - protein, 171 aa, Homo sapiens
LEEKHVGFSLDVGEIEKKGKGKKRRGRRSKKKRRRGRKEGEEDQNPPCPRLSRELLAEKEPEVLQDSLDRWYSTPSVYLGLTDPCQPCRSAFYVLEQQRVGLAVDMDEIEKYQEVEEDQDPSCPRLSRELLAEKEPEVLQDSLDRWYSTPSGYLELPDLGQPYRSAVYSLE

SEQ ID NO: 788000 - protein, 88 aa, Homo sapiens
SLTGARAARRSNPNVSGKPVFHCGNVIEDPITVTIGNLQCKRNALLGGSFCSQLCRSEVWVPRHLIFLLCFLRAKWKREGTNTHFARG

SEQ ID NO: 788001 - protein, 105 aa, Homo sapiens
AGLGRVVVAVEDQLLSPCVFGGRGTSERRVSCHSALVWKLRCCEVSREVGGVWQIVSESWEMVYDALSIILHLSVVNFIVILATSYFGFVNKKIFPGRAQWLMFV

SEQ ID NO: 788002 - protein, 110 aa, Homo sapiens
STNSAQFFHIVHSFSTSSSMLVIFYFIDSSHPNRYEVILVRFHAADKDIPKTGQFTKERRLLDSQFHMAGEVSQSWWKVKITSHMAADKSLCKKTPIFETVRYCDTYSLS

SEQ ID NO: 788003 - protein, 151 aa, Homo sapiens [sequence omitted]

SEQ ID NO: 788004 - protein, 100 aa, Homo sapiens
LFCIRRVGDSDYSDGEEDFYYTEIKLNTDSVADGLSSLAPVSPSQSLASPPTFPIPDSSRTETPCAKTETKLMTPLSRSAPTTLYLVHTDHAYQVTCRGL

SEQ ID NO: 788005 - protein, 111 aa, Homo sapiens
ARQDAGWVPAGALAGRGLRADAAARRAAPFGRLLRVGAFGGRRALVGGGGGAGAGSSGVPEAPGVAGAGARRGRRVAWRCLFAARASLRPLRGTAREAGGPVRLAPGRGPP

SEQ ID NO: 788006 - protein, 368 aa, Homo sapiens
RGKMLDGSPLARWLAAAFGLTLLLAALRPSAAYFGLTGSEPLTILPLTLEPEAAAQAHYKACDRLKLERKQRRMCRRDPGVAETLVEAVSMSALECQFQFRFERWNCTLEGRYRASLLKRGFKETAFLYAISSAGLTHALAKACSAGRMERCTCDEAPDLENREAWQWGGCGDNLKYSSKFVKEFLGRRSSKDLRARVDFHNNLVGVKVIKAGVETTCKCHGVSGSCTVRTCWRQLAPFHEVGKHLKHKYETALKVGSTTNEAAGEAGAISPPRGRASGAGGSDPLPRTPELVHLDDSPSFCLAGRFSPGTAGRRCHREKNCESICCGRGHNTQSRVVTRPCQCQVRWCCYVECRQCTQREEVYTCKG

SEQ ID NO: 788007 - protein, 92 aa, Homo sapiens
LCKLGELREEYESLRKLREEKLQEEKPSEDQIHKLLPEDTETGKRKMDEQKKRDEPLVLKTNLERCPARLSDSENEEPSRGQMTQTHRSAFV

SEQ ID NO: 788008 - protein, 116 aa, Homo sapiens
MEPRPLTSKDVILLEGHGFVYMCEIFKHTEKQIDWHNELQVSIIQFQQPLAFCLSCFIWPTSPYTHSIPVDPLWVCSRFPDRVASLAFSPLSSLVGTLISHLLYQQSPRGEINLFQ

SEQ ID NO: 788009 - protein, 105 aa, Homo sapiens [sequence omitted]

SEQ ID NO: 788010 - protein, 59 aa, Homo sapiens
MSAPKLLVLSLPPFPLWSTPYHAPQCGILESHFASPVPSRLHQASVEGRAPAFALSLGV

SEQ ID NO: 788011 - protein, 33 aa, Homo sapiens
MQLQASKGPGLPAATRNRGEARTGSSLDPVNSS

SEQ ID NO: 788012 - protein, 144 aa, Homo sapiens
PRRRRRESSSQEEEVIDGFAIASFSTLEALEKDMALKPHERKEKWERRLIKKPRESETCPPAEPSENRRPLEAGSPGQDLEPACDGARKVPLQPSKQMKVTVSKGGDRDSDDDSVLEATSSRDPLSDSSAHAVSGRGYSVSLPA

SEQ ID NO: 788013 - protein, 128 aa, Homo sapiens
GDSCADLALKQYEIVTLLWTSHYAFGSQAPLPWTPLHPKLQVIQLHPSEQSSAVTSSKDLPSRLSSRRAPTLLFAPLSLEVLLSFVEVKRGGVALNFSKLQGHVLFYPRSECVGHHSMPLTDHQLQNI

SEQ ID NO: 788014 - protein, 177 aa, Homo sapiens
PPPPLPLPPGIGTYPLHPLLFALSPGRSHPPTAPSPDNTIRLSERPNPRLAPRMLPKPEGSRSTFLAGRLWQGEGGGRRGVLERREGVAAALTLQPCLQLVGCRRGQPAPACTRSGKSCRENTVWPGEAQTLLLLSLLKGTETFPALLRRSPSADSTAAPTALPASRPSLLGSWTSL

SEQ ID NO: 788015 - protein, 144 aa, Homo sapiens
VYVPFLIVGSIFIAFIILGSVVAIYCCTCLRPKEPSQQPIRFSLRSYQTETLPMILTSTSPRAPSRQSSTATSSSSTGGSIRRFSFARAEPGCLVPSPPPPYTTSHSIHLAQPSGFLVSPQYFAYPLQQEPPLPGKSCPDFSSS

SEQ ID NO: 788016 - protein, 106 aa, Homo sapiens
DPATKSLTPSTAEGPQAPAPTVLPPATLIGGGTLQVGECPYRLSHSCRHPGHTPLRLQLHGLGKVLLESACISSRSSNACSSLPGLLPPFLTPDPIKELTYREALY

SEQ ID NO: 788017 - protein, 146 aa, Homo sapiens
GNPDSDRSGEPQERPAPRSSRPAAPTSPAAPGGLTKAVAARVAFSIQAFASSSPPSLPKAKMAGPGENLGSGGPSPAILTPPARRGCGLPADDVAAAAPERIFGPGPRRHPSSLLLPSRPEELMPLSPPPPLLKPRLMDARECRIA

SEQ ID NO: 788018 - protein, 116 aa, Homo sapiens
TKIHGCSSSSAVCPEDRKTSYTHIQKVSRLYLWVPHPTNAIIFHPSWLNLQVQNPWIQKPDCISFFSETESCSVAQVGVQWCDLSSPPPPPPRFKRFSCLSLPSSWDYRCTPPMPG

SEQ ID NO: 788019 - protein, 80 aa, Homo sapiens
GLHKVTDDTNVTRLQLETEMEALKEELLFMKKNQEKEVKGLQALIASSELTMEVNAPKSQDLSNIMADLPAQYDELAQKN

SEQ ID NO: 788020 - protein, 103 aa, Homo sapiens
STPSPRAPCCLWSLTARTYNNSLFAEESDTFPRPALTPRSPQKKASSPRNLLATSPNYAWFYSLFSPLIFFSIIHPWWPGTLQESKFKNRIKLRFCSSTENKT

SEQ ID NO: 788021 - protein, 92 aa, Homo sapiens
LRKVSMDNRLMELFPANKQSVEHFTKYFTEAGLKELSEYVRNQQTIGARKELQKELQEQMSRGDPFKDIILYVKEEMKKNNIPEPVVIGIVW

SEQ ID NO: 788022 - protein, 91 aa, Homo sapiens
MPLLVSSVTTELPSSTKSTTLAHPVGATGLSLKELSEYVRNQQTIGARKELQKELQEQMSRGDPFKDIILYVKEEMKKNNIPEPVVIGIVW

SEQ ID NO: 788023 - protein, 102 aa, Homo sapiens
MNWTQAPNYRADTRLCLHQAIPGFLQLQDSLPASRCSYSHSSFVSCLMQNLYSFLFQSLLHILCDKARSWKSSSELYTQLCHKCAMTLNKSHDLSGPGFSHL

SEQ ID NO: 788024 - protein, 414 aa, Homo sapiens
MKAQTALSFFLILITSLSGSQGIFPLAFFIYVPMNEQIVIGRLDEDIILPSSFERGSEVVIHWKYQDSYKVHSYYKGSDHLESQDPRYANRTSLFYNEIQNGNASLFFRRVSLLDEGIYTCYVGTAIQVITNKVVLKVGVFLTPVMKYEKRNTNSFLICSVLSVYPRPIITWKMDNTPISENNMEETGSLDSFSINSPLNITGSNSSYECTIENSLLKQTWTGRWTMKDGLHKMQSEHVSLSCQPVNDYFSPNQDFKVTWSRMKSGTFSVLAYYLSSSQNTIINESRFSWNKELINQSDFSMNLMDLNLSDSGEYLCNISSDEYTLLTIHTVHVEPSQETASHNKGLWILVPSAILAAFLLIWSVKCCRAQLEARRSRHPADGAQQERCCVPPGERCPSAPDNGEENVPLSGKV

SEQ ID NO: 788025 - protein, 425 aa, Homo sapiens
MKAQTALSFFLILITSLSGSQGIFPLAFFIYVPMNEQIVIGRLDEDIILPSSFERGSEVVIHWKYQDSYKVHSYYKGSDHLESQDPRYANRTSLFYNEIQNGNASLFFRRVSLLDEGIYTCYVGTAIQVITNKVVLKVGVFLTPVMKYEKRNTNSFLICSVLSVYPRPIITWKMDNTPISENNMEETGSLDSFSINSPLNITGSNSSYECTIENSLLKQTWTGRWTMKDGLHKMQSEHVSLSCQPVNDYFSPNQDFKVTWSRMKSGTFSVLAYYLSSSQNTIINESRFSWNKELINQSDFSMNLMDLNLSDSGEYLCNISSDEYTLLTIHTVHVEPSQETASHNKGLWILVPSAILAAFLLIWSVKCCRAQLEARRSRHPADGAQQERCCVPPGERCPSAPDNGEENVVRHYFLYQTIYSIKMLL

SEQ ID NO: 788026 - protein, 414 aa, Homo sapiens; identical to SEQ ID NO: 788024

SEQ ID NO: 788027 - protein, 392 aa, Homo sapiens
MNEQIVIGRLDEDIILPSSFERGSEVVIHWKYQDSYKVHSYYKGSDHLESQDPRYANRTSLFYNEIQNGNASLFFRRVSLLDEGIYTCYVGTAIQVITNKVVLKVGVFLTPVMKYEKRNTNSFLICSVLSVYPRPIITWKMDNTPISENNMEETGSLDSFSINSPLNITGSNSSYECTIENSLLKQTWTGRWTMKDGLHKMQSEHVSLSCQPVNDYFSPNQDFKVTWSRMKSGTFSVLAYYLSSSQNTIINESRFSWNKELINQSDFSMNLMDLNLSDSGEYLCNISSDEYTLLTIHTVHVEPSQETASHNKGLWILVPSAILAAFLLIWSVKCCRAQLEARRSRHPADGAQQERCCVPPGERCPSAPDNGEENVVRHYFLYQTIYSIKMLL

SEQ ID NO: 788028 - protein, 98 aa, Homo sapiens
GSIPAQLPLSQDRCCTAVSSSCREGAACPAQPQGEGVCVQKGLGNQGGHEAVGISVTEASCITVDFSGGRIGLFYKSAFLVNELSLLLTAYCPCSEYS

SEQ ID NO: 788029 - protein, 48 aa, Homo sapiens
MGLERDGDGAVLFQLEQPGRLWQLSGDLNKVSEEPGAVAHTCNPSTLG

SEQ ID NO: 788030 - protein, 130 aa, Homo sapiens
MSSQDGSTSSTEGLQTMLFDYNIDEEKRNQFLAGVTLCVEFEHCPHVCLDYKDPCNPSSRHHHHHHHYFGLFVFETDLALWPMLECSGIITAHRILRLLGLGDPATSASQVAGTTDTSYHAWLIFWFLFL

SEQ ID NO: 788031 - protein, 128 aa, Homo sapiens
QLLRSFGTKNGLKPGKEGSNPPWGQKEKRVPKKKKKKKLGLSSVRNASFPLETGDHLFCSDGTCMSDLQKAGKRSFVERVPLAFDSRFLKEKDYEELLLQEIKIASRNRSGLPLLHWMIMPDGHHHCC

SEQ ID NO: 788032 - protein, 110 aa, Homo sapiens [sequence omitted]

SEQ ID NO: 788033 - protein, 106 aa, Homo sapiens
HGFAHLPASGSDFISGWDRCVSVFIDPLHQKYLYISVSLHPKVKALATSEVPIASVFPKPCHFLPFLWVRNLAFVFHISFSQDIGRHLVNNTNKTVLSPRSSRSLL

SEQ ID NO: 788034 - protein, 180 aa, Homo sapiens
DEHFIFQVSSKTITQRVLKFSVYHVDRQRKHQLLGQVLFPLKNETLVGDCRRVIWRDLEAESLEPPSEFGDLQFCLSYNDYLSRLTVVVLRAKGLRLQEDRGIVSVFVKVSLMNHNKFVKCKKTSAVLGSINPVYNETFSFKADATELDTASLSLTVVQNMEGDKQATTVELFLFHLTSG

SEQ ID NO: 788035 - protein, 180 aa, Homo sapiens; identical to SEQ ID NO: 788034

SEQ ID NO: 788036 - protein, 257 aa, Homo sapiens
MGDSRRRSLGNQPSSEAAGRSEREQDGDPRGLQSSVYESRRVTDPERQDLDNAELGPEDPEEELPPEEVAGEEFPETLDPKEALSELERVLDKDLEEDIPEISRLSISQKLPSTTMTKARKRRRRRRLMELAEPKINWQVLKDRKGRCGKGYAWISPCKMSLHFCLCWPSVYWTERFLEDTTLTITVPAVSRRVEELSRPKRFYLEYYNNNRTTPVWPIPRSSLEYRASSRLKELAAPKIRDNFWSMPMSEVGAPCP

SEQ ID NO: 788037 - protein, 251 aa, Homo sapiens
EQWSCGWSRPSWCQSPPSETPRGKGEAGGQGECRQKALEQDPRFSGLPNASGRESSSNFNVEFSQSRLSISQKLPSTTMTKARKRRRRRRLMELAEPKINWQVLKDRCPRYPGQPKWQSPARGSSSCQSRRPQPPSWKSGTPCQNPSHMCQTITASFTWPGPKLQSDKCVPDRDPRWEVLDVTKKVVASPRIISLAKPKVRKGLNEGYDRLSLASMSLPPPKASPEKCDQPRLASKNSAPSKHLRHPNLCM

SEQ ID NO: 788038 - protein, 139 aa, Homo sapiens
GEKPYKCNVCGKDFAYSSVLHTHQRVHTGEKPYKCEVCGKCFSYSSYFHLHQRDHIREKPYKCDECGKGFSRNSDLNVHLRVHTRERPYKCKACGKGFSRNSYLLAHQRVHIDETQYTHCERGKDLLTHQRLHEQRETL

SEQ ID NO: 788039 - protein, 173 aa, Homo sapiens
LRTRSHHLSLRTRYTMLRIRYTMLRLRTRYTMLRLRTRYTMLRLRTRYTMLRLRTRYTMLRLRTRYTMLRLRIRYTMLRLRTRYTMLRLRITYTMLRLRTRYTMLRLRTRYTMLRLRTRYTMLRLRTRYTMLRLRIRYTMLRLRTRYTMLRLRIRYTMLRLRIRYISFLSSGQ

SEQ ID NO: 788040 - protein, 372 aa, Homo sapiens
GKAKSIVDKEGVPRFYIRILADLEDYLNELWEDKEGKKKMNKNNAKALSTLRQKIRKYNRDFESHITSYKQNPEQSADEDAEKNEEDSEGSSDEDEDEDGVSAATFLKKKSEAPSGESRKFLKKMDDEDEDSEDSEDDEDWDTGSTSSDSDSEEEEGKQTALASRFLKKAPTTDEDKKAAEKKREDKAKKKHDRKSKRLDEEEEDNEGGEWERVRGGVPLVKEKPKMFAKGTEITHAVVIKKLNEILQARGKKGTDRAAQIELLQLLVQIAAENNLGEGVIVKIKFNIIASLYDYNPNLGTLNWKARQQRRTRPQDRKHGLRSKQPAGESPEKGRERTTRKNKRKQRKRRQPSEHDDEEKRKRKTRKTYTQD

SEQ ID NO: 788041 - protein, 82 aa, Homo sapiens
LAAEGLAHRTEKATEGAIHAVEEVVKEVVGHAKETGEKAIAEAIKKAQESGDKKMKEITETVTNTVTNAITHAAESLDKLGQ

SEQ ID NO: 788042 - protein, 126 aa, Homo sapiens
SPPKTPCLTLAVPTDLYMEEDTGRFALQQAQKASSRFAQLESKGLNTSRCLNGSGRRGRAPSTPMASPDSSLLPTPSEGQGKTCQDKMAVLGDGEMTANVPREHGIRSTPERADPQPEKEAMFIHL

SEQ ID NO: 788043 - protein, 64 aa, Homo sapiens
MSQPPIGGAAPATAAASPAAAATEARLHPEGSSRKQQRAQSPARPRDSSLRQTIAATRSPVGAG

SEQ ID NO: 788044 - protein, 181 aa, Homo sapiens
ALELQQREEVVTEQRDKPNVWVLLSSRLSLARGGDLKGARKVAKGTARAKAQRRVEKRAGAGAGVAAVGGPGLRARHSKPLLSDGPGQGSARPHPGPSVGDLSPQHPSCRGPGRSTVSRGDSGWEEPVGSDRKGLGQGSEGFSVSQTVHSGVSHWGQDSLPASVPCHLCVHPISPTSLSNL

SEQ ID NO: 788045 - protein, 110 aa, Homo sapiens
TVLQSLSEAGIIIAILPKGKLSLRKVKQFAQGHSARLSGKSKAFPPERTPTIRHVDLLGYKSRKSPRCSISQKTRSGRAQWLMPVIPALWDAKAGGSLEVRRSRPVWPTW

SEQ ID NO: 788046 - protein, 79 aa, Homo sapiens
STAPSPIDHPTAEECGRTARDWQAAPPAAPVRDPLGEASWAPESADLIYLPMYLMNGLSRDWQKEKNKMQRNETESTTV

SEQ ID NO: 788047 - protein, 47 aa, Homo sapiens
ALLGASGPRVGGRGAAPGELAGGRRAEASRPGGNSPLCPQPSRLRSL

SEQ ID NO: 788048 - protein, 223 aa, Homo sapiens
GGLGRTEEGKRFFVASLCFLFYFIYFIFRFSVLISPREGDLGIHPMSSRELPWPRSESSWDATGSESAPQVSPPAPPNLSDSYSNYSVSCWKRGKGYGETRWYMGHWGEGKASLLLLVIRECCVRLLSFAGARGSDQHLPGIGVATGAKPGRLWKQRFTDRKEKLFFVFITHRRLPHARVLGGAVRFQCVSLNSSTKFVLGAGEGPGSATRGPLELPVGTARA

SEQ ID NO: 788049 - protein, 40 aa, Homo sapiens
MGISASKSIKGYVLVRFYDYAKVEGGALTESPSAAQTSYQ

SEQ ID NO: 788050 - protein, 132 aa, Homo sapiens
SNEKSDTNSPSFHSSPNVSLGYSWLCFQGKGGPRLGDIRRGQRVQFPLPWKFQPFLTSPSILWAPAPGNAFGPLVPDTQDPQLPSDSYTLTCGHSQSHGHSHTASDSDTLTHIHTLTQSHTHTAPTRAHSTA

SEQ ID NO: 788051 - protein, 83 aa, Homo sapiens
NCFGTFVKNQLTTNKLYNKQPIQLKTRAEDLSRHFSKEDIQVANKHEKMHNVSNHKRNANQNHNETSSHTHWEATIKTTTTTK

SEQ ID NO: 788052 - protein, 116 aa, Homo sapiens
MPAIVPDKMQKAINRLSRLLKPGGMMLLRDYGRYDMAQLRFKKGQCLSGNFYVRGDGTRVYFFTQEELDTLFTTAGLEKVQNLVDRRLQVNRGKQLTMYRVWIQCKYCKPLLSSTS

SEQ ID NO: 788053 - protein, 79 aa, Homo sapiens
MGGGSQTCRRYWKAGGGPVIPVTWEAEDGHGLPIEDFLVRDSQGRGGRRGWGPQDCMRQAGGGEAEPGAAGFSPPDQRH

SEQ ID NO: 788054 - protein, 109 aa, Homo sapiens
FCQGTLPTTDTESRRECGVSNVPSTLTNNPQIIPLDPMWRRQDQPTGRVCLWAHSLSCYFWPGHGVFYWWIILFPVGEETTANRATEEYFFLDMESCSVTQAGVQWCDL

SEQ ID NO: 788055 - protein, 118 aa, Homo sapiens
LQSEVPRWAICKLGKERRRKWLKSKSKCLKTREGHSASLSLRLKEMELMSKGRRNRSKRLSWEEEKKPEDSASKLIPPSSICFVPAALAANWMVPTHIEDGSSSPVHHSHVNLLWQHN

SEQ ID NO: 788056 - protein, 76 aa, Homo sapiens
AYPLISNHTQPNPLCLAGQHPPCPRTRGAPFSSFAATLLYTENPILFVLSSLSLQMLSFEAQLVYGQTTLITPDLI

SEQ ID NO: 788057 - protein, 108 aa, Homo sapiens
SQTKQKSTSFPEKITAASKTTYKTTGTPEESEKTEDSRTTVASDKLLTKTTKNIQETISANELTQSLAEPTEHGGRTANENNTPSPAEPTENRERTANENTTLSPAEP

SEQ ID NO: 788058 - protein, 136 aa, Homo sapiens [sequence omitted]

SEQ ID NO: 788059 - protein, 127 aa, Homo sapiens
MKEHETNKSRGFAFVTFESPADAKDAARDMNGKSLDGKAIKVEQATKPSFESGRRGLPPPPRSRGPPKGLRGGRGRSGGTRRPPSWRRHMDDSGYSMNFNMSSSRGPLPVKRRPPPRSGGPPPKSSA

SEQ ID NO: 788060 - protein, 35 aa, Homo sapiens
FTSAAAGGGAHARAVPSEGGGANSNARTLALGCCA

SEQ ID NO: 788061 - protein, 339 aa, Homo sapiens
MDLHMMNCELLATCSALGYLEGDTYHKEPDCLESVKDLIRYLRHEDETRDVRQQLGAAQILQSDLLPILTQHHQDKPLFDAVIRLMVNLTQPALLCYGNLPKEPSFRHHFLQVLTYLQAYKEAFASEKAFGVLSETLYELLQLGWEERQEEDNLLIERILLLVRNILHVPADLDQEKKIDDDASAHDQLLWAIHLSGLDDLLLFLASSSAEEQWSLHVLEIVSLMFRDQNPEQLAGVGQGRLAQERSADFAELEVLRQREMAEKKTRALQRGNRHSRFGGSYIVQGLKSIGERDLIFHKALNYETTVPIGKQEKGAKVAGAEAAIRRCLMESLKIVYRN

SEQ ID NO: 788062 - protein, 118 aa, Homo sapiens [sequence omitted]

SEQ ID NO: 788063 - protein, 109 aa, Homo sapiens [sequence omitted]

SEQ ID NO: 788064 - protein, 72 aa, Homo sapiens
SHLALPCLSFFFCKVGGMNRLGWPSAHCAWHPADGEEEQEMRGGAHSGTSSWGWGEGSSLLNSGATCSSAAS

SEQ ID NO: 788065 - protein, 52 aa, Homo sapiens
MGSEPHGPTRPPSLWVSVSVSTYPVSKTGALTAPTPPGGLTAASCSPCPSTG

SEQ ID NO: 788066 - protein, 89 aa, Homo sapiens
RRCDFTLMPSLKCSGCYVSSLQPQPPGLRRSSCLSLLSSWDHRCMPPHLANFLNILQRRGLTLLSRLVLNSRTQVIHLPQPPKMLGLQV

SEQ ID NO: 788067 - protein, 162 aa, Homo sapiens
MCAASFIPPPLTHLTTVWGAPAVGQAGSRVHQQQKQKCPVLLGRHNQQQENSEGGVGHAADMGLGETQAGEGAASSGGSFGARKAWLRGDLGQGHNREVKPLTRSCWRASGMDRVRPTGPSCPPSVPALGRGDDWGARFGWVTARAGQKVLQTKPRITVQGH

SEQ ID NO: 788068 - protein, 47 aa, Homo sapiens
MEILHVIPTAIQAVEHQEVVAVEEADLIEGEAEADTRNKQNFRPKSQ

SEQ ID NO: 788069 - protein, 241 aa, Homo sapiens
YLVMNEHLCGTEPRNFAAAVDPGPHRQGRLIVLVRDAKNLVPMDPNGLSDPYVKLKLIPDPKSESKQKTKTIKCSLNPEWNETFRFQLKESDKDRRLSVEIWDWDLTSRNDFMGSLSFGISELQKASVDGCVLPLTEPGGKASTSMCLLPPEGSEANEELRQKFERDKISQGTKVPDRKRATKHCLQDFGPTTGNRDRMKLTDFTFLMVLAERQLWHRSMLQNETGTDDSMLSTILQHDVA

SEQ ID NO: 788070 - protein, 106 aa, Homo sapiens
KGQVTVTQPYPLAARSLALRVADEMDLTLGHEVGYSIPQEDCTGPNTLLRWGPLQALPEYNSPYSVESNPFLWHLTIPALPNEFLQPGGSTSSRSGAIAVELQLLF

SEQ ID NO: 788071 - protein, 277 aa, Homo sapiens
LTGSCTLWEAQRRGCCSRWGAREGTLRDCPREWLPTHAPHPTFHSRHDDREVRNGCGDKSVEAARLHLVTLFENDRHFSHLSSLEREMTFRTEMGLYYSYFKTIIEAPSFLEGLWMIMNDRLTEYPLIINAIKRFHLYPEVIIASWYCTFMGIMNLFGLETKTCWNVTRIEPLNEVQSCERIGRSCLLLCWCNLYFKWTNDGIVLHVWSIPEWDSTGRSYYSTVILFQPWRGTRVMWTPALREKFSYPSLYFRCVFHLDLKTLAWIEGPHGPGFQGG

SEQ ID NO: 788072 - protein, 208 aa, Homo sapiens
MRKQGVSSKRLQSSGRSQSKGRRGASLAREPEVEEEVEKSVLGGGKLPRGAWRSSPGRIQSLKERKGLELEVVAKTFLLGPFQFVRNSLAQLREKVQELQARRFSSRTTLGIAVFVAILHWLHLVTLFENDRHFSHLSSLEREMTFRTEMGLYYSYFKTIIEAPSFLEGLWMIMNDRLTEYPLIINAIKRFHLYPEVSHNLRQIIFVE

SEQ ID NO: 788073 - protein, 333 aa, Homo sapiens
MRKQGVSSKRLQSSGRSQSKGRRGASLAREPEVEEEVEKSVLGGGKLPRGAWRSSPGRIQSLKERKGLELEVVAKTFLLGPFQFVRNSLAQLREKVQELQARRFSSRTTLGIAVFVAILHWLHLVTLFENDRHFSHLSSLEREMTFRTEMGLYYSYFKTIIEAPSFLEGLWMIMNDRLTEYPLIINAIKRFHLYPEVIIASWYCTFMGIMNLFGLETKTCWNVTRIEPLNEVQSCERIGRSCLLLCWCNLYFKWTNDGIVLHVWSIPEWDSTGRSYYSTVILFQPWRGTRVMWTPALREKFSYPSLYFRCVFHLDLKTLAWIEGPHGPGFQGG

SEQ ID NO: 788074 - protein, 78 aa, Homo sapiens
  misc_feature (23)..(23): Xaa can be any naturally occurring amino acid
LSFPSSLEVLQRCASPFDQANLXLKLPDGYEFKFPNRLNLEAINYMAADGDFKIKCVAFDLKSASPWPPIKAAAFAPF

SEQ ID NO: 788075 - protein, 33 aa, Homo sapiens
AYFKKKKLRKPRHQEGEIFDTEKEKYEITEQRK

SEQ ID NO: 788076 - protein, 268 aa, Homo sapiens
CPGRAPVPPPPAPRLADVGCWPEGSYVAEVCAAAARPGPVPASARTLAGLAMADRGCPLEAAPLPAEVRESLAELELELSEGDITQKGYEKKRAKLLARYIPLIQGIDPSLQAENRIPGPSQTTAAAPKQQKSRPTASRDERFRSDVHTEAVQAALAKYKERKMPMPSKRRSVLVHSSVETYTPPDTSSASEDEGSLRRPGRLTSTPLQSHSSVEPWLDRVIQGSSTSSSASSTSSHPGGRPTTAPSAAATPGAAATTALAGLEAHTH

SEQ ID NO: 788077 - protein, 62 aa, Homo sapiens
WKTALTSLKDLAMVKRERRDSRAVKDKELLPGGALAPAGVSKELGIRQEDEGARGRGTGSHR

SEQ ID NO: 788078 - protein, 85 aa, Homo sapiens
HRAVLEMKVNHKGYNYTFSHLCVLRNQDKKCVLDDIISVLEDLRQAAVSNKTTARVQVRYPNTKLKVCSFCMLLPIKEAALHFLP

SEQ ID NO: 788079 - protein, 115 aa, Homo sapiens
DPGVSKTAYFIICYACGREWRPRQLEERPCEKRLYSPRKRPTGRPRRSRSHSGNERFKHQSGSFSRSKSKSRSRSKSQPKKEMKAKSRCRPASHTKTRGISKNRFQSTLQVWLKI

SEQ ID NO: 788080 - protein, 127 aa, Homo sapiens
RKEPSRLRGGAGSVAGGPTRVAAKIRVTLRTDVKNVRDPGSAPLRFPEPRPEQPRPCANPGLPWKRRNPNPVEFEAALPGSMQMPPPFGKSWFPSSLHGILLLKAYLVIETSQKLEEAQVHSGPHLF

SEQ ID NO: 788081 - protein, 148 aa, Homo sapiens
HYVLWMGCGFTGHPHLLPLLFPIPSQVGLVFLHCRQNSSLCCALMSGSPSSWAVPWVCLCHAQPSHPDATLIPKSGWARDPSTFPCAPVHFMGKSNLFKLSPPQVPRGGHSKVPVAPVLCQPPHRLNQWPSPGHYHKASWPRCQHLPF

SEQ ID NO: 788082 - protein, 166 aa, Homo sapiens
TEEYTAEIMFESFNVPGLYIAVQAVLALAASWTSRQVGERTLTGTVIDSGDGVTHVIPVAEGYVNGSCIKHIPIAGRDITYFIQQLLRDREVGIPPEQSLETAKAVKERYSYVCPDLVKEFNKYDTDGSKWIKQYTGINAISKKEFSIDVGYERFWDLKSFFIQSC

SEQ ID NO: 788083 - protein, 46 aa, Homo sapiens
MNTWHELHSLNFVADTPVVLTESWLEWRLLSCALDRPFWLTWFKPG

SEQ ID NO: 788084 - protein, 121 aa, Homo sapiens
LPSTCIFVFYFHNSTGVLENVAWTIVYIFSGNQDQRLCARGPDGVRTPGGRKSGDKGCGQEPHRSCTRRSQGRLPCPTERRPRLPEEDKWQERKPRSFLSQSGGWCVSPPPSGRLSILRGI

SEQ ID NO: 788085 - protein, 104 aa, Homo sapiens
TYTCLFFCAPQVWRSTAVRSLYHRVVSPQVPVNLGNGHYPLEDVYRGDFFGKSLGLLLTWELLSSLSCWRLTWPFISSIQTSLHGGGVSSSPVAKPGSVDWHIH

SEQ ID NO: 788086 - protein, 156 aa, Homo sapiens
MEELIVELRLFLELLDHEYLTSTVREKKAVITNILLRIQSSKGFDVKDHAQKQETANSLPAPPQMPLPEIPQPWLPPDSGPPPLPTSSLPEGYYEEAVPLSPGKAPEYITSNYDSDAMSSSYESYDERGGGWEGEENPAPVALRGGLHGPVKDAKS

SEQ ID NO: 788087 - protein, 108 aa, Homo sapiens
MLRSRRPLTACQPLLRCPCRRSLSPGCLLTVGLHHCQHSSLPEGYYEEAVPLSPGKAPEYITSNYDSDAMSSSYESYDERGGGWEGEENPAPVALRGGLHGPVKDAKS

SEQ ID NO: 788088 - protein, 104 aa, Homo sapiens
MPKRKAEGDAKGDKAKVKDEPQRRSARLSAKPAPPKPEPKPKKAPAKEGREGTQREHTREKLMLARRGITLQKMEMPKQTRHRKLKVLEMPSEVCAFLITVYFW

SEQ ID NO: 788089 - protein, 138 aa, Homo sapiens
GGRGEIEPLVYRLKSHRRRVAVMPRSSTYDPVFRRRRYHAHSMMKAETVDANGRVKHEVTGPNLQEERSALVVCYDLLLLKPRALSLEKAPGNRRERRYPKGTHTGKADAGKEGNNPAENGDAKTDQAQKAEGAGDAK

SEQ ID NO: 788090 - protein, 104 aa, Homo sapiens; identical to SEQ ID NO: 788088

SEQ ID NO: 788091 - protein, 104 aa, Homo sapiens; identical to SEQ ID NO: 788088

SEQ ID NO: 788092 - protein, 104 aa, Homo sapiens; identical to SEQ ID NO: 788088

SEQ ID NO: 788093 - protein, 104 aa, Homo sapiens; identical to SEQ ID NO: 788088

SEQ ID NO: 788094 - protein, 104 aa, Homo sapiens; identical to SEQ ID NO: 788088

SEQ ID NO: 788095 - protein, 186 aa, Homo sapiens
  misc_feature (59)..(59): Xaa can be any naturally occurring amino acid
PALLGLAAPAPCPLPHREGPFPPLPAGGQFKPERAGRRRSGLAGGGKRCRQKTAAVRGXLVRYGPAPRPRSPRTRRALSPPTSSPGCARLPLPPSTAAIATALGSASGGGLFAPSAAVAPACRGGAGSAALPGCAPVQPSLLGVGEPELLRALRSYTNVGLTHLCPRKVVWTTALIFIFSTLKFGK

SEQ ID NO: 788096 - protein, 105 aa, Homo sapiens
MPKRKKAEGDAKGDKAKVKDEPQRRSARLSAKPAPPKPEPKPKKAPAKEGREGTQREHTREKLMLARRGITLQKMEMPKQTRHRKLKVLEMPSEVCAFLITVYFW

SEQ ID NO: 788097 - protein, 174 aa, Homo sapiens
PLSSGSPPPPRAPSPIARAPSLPSLRAGNSNPKGREGGARGWRAGESAAAKKPPPRPRSPRTRRALSPPTSSPGCARLPLPPSTAAIATALGSASGGGLFAPSAAVAPACRGGAGSAALPGCAPVQPSLLGVGEPELLRALRSYTNVGLTHLCPRKVVWTTALIFIFSTLKFGK

SEQ ID NO: 788098 - protein, 104 aa, Homo sapiens; identical to SEQ ID NO: 788088

SEQ ID NO: 788099 - protein, 105 aa, Homo sapiens; identical to SEQ ID NO: 788096

SEQ ID NO: 788100 - protein, 102 aa, Homo sapiens
MPKRKATMPKHEKAETVDANGRVKHEVTGPNLQEERSALVVCYDLLLLKPRALSLEKAPGNSTWENKVPNTGYDRGTMLNCCVKDGGTKRRVTKECETALKS

SEQ ID NO: 788101 - protein, 104 aa, Homo sapiens; identical to SEQ ID NO: 788088

SEQ ID NO: 788102 - protein, 104 aa, Homo sapiens; identical to SEQ ID NO: 788088

SEQ ID NO: 788103 - protein, 104 aa, Homo sapiens; identical to SEQ ID NO: 788088

SEQ ID NO: 788104 - protein, 104 aa, Homo sapiens; identical to SEQ ID NO: 788088

SEQ ID NO: 788105 - protein, 151 aa, Homo sapiens
  misc_feature (7)..(8): Xaa can be any naturally occurring amino acid
FFDRSSXXPMLREDDRKGENDPRTDQSPRAAASRVQHLRPAAVAAATMPKRKAEGDAKGDKAKVKDEPQRRSARLSAKPAPPKPEPKPKKAPAKEGREGTQREHTREKLMLARRGITLQKMEMPKQTRHRKLKVLEMPSEVCAFLITVYFW

SEQ ID NO: 788106 - protein, 104 aa, Homo sapiens; identical to SEQ ID NO: 788088

SEQ ID NO: 788107 - protein, 104 aa, Homo sapiens; identical to SEQ ID NO: 788088

SEQ ID NO: 788108 - protein, 174 aa, Homo sapiens; identical to SEQ ID NO: 788097

SEQ ID NO: 788109 - protein, 174 aa, Homo sapiens; identical to SEQ ID NO: 788097

SEQ ID NO: 788110 - protein, 122 aa, Homo sapiens
MPKRKAEGDAKGDKAKVKDEPQRRSARLSAKPAPPKPEPKPKKAPAKEGREGTQREHTREKLMLAEGKGIPVELVEPPLFVATCCGTKKACGGGHYEHTPTHLVSLVVPHFSLSNLFKGIRR

SEQ ID NO: 788111 - protein, 105 aa, Homo sapiens; identical to SEQ ID NO: 788096

SEQ ID NO: 788112 - protein, 67 aa, Homo sapiens
ALCMPTAPTNFANYRVVATLAFEFPKQVFYLPSMGTPMESEEAFINKQSKRHLYPRCGMESIKTARV

SEQ ID NO: 788113 - protein, 103 aa, Homo sapiens
ARVLTGWSPEIGILGGSTTRKKPQEQESSGRLLGRQCEIPNSGQDLRRVNEAPLPIFTSPATAPVPAAAALPSFILLLFFFNSRSLILSPSLDCSGGISAHCK

SEQ ID NO: 788114 - protein, 104 aa, Homo sapiens
MSGTSQTRNPAHRRPGISTWNMLRQQVRSIPFCSNNKFSGQYDAFCGRIVRKDFEAVNKICSIKRITSNANAQRLPRNLFEDSAYVPDTGLAVQLEAKTRWKMS

SEQ ID NO: 788115 - protein, 346 aa, Homo sapiens
MTATLAAAADIATMVSGSSGLAAARLLSRSFLLPQNGIRHCSYTASRQHLYVDKNTKIICQGFTGKQGTFHSQQALEYGTKLVGGTTPGKGGQTHLGLPVFNTVKEAKEQTGATASVIYVPPPFAAAAINEAIEAEIPLVVCITEGIPQQDMVRVKHKLLRQEKTRLIGPNCPGVINPGECKIGIMPGHIHKKGRIGIVSRSGTLTYEAVHQTTQVGLGQSLCVGIGGDPFNGTDFIDCLEIFLNDSATEGIILIGEIGGNAEENAAEFLKQHNSGPNSKPVVSFIAGLTAPPGRRMGHAGAIIAGGKGGAKEKISALQSAGVVVSMSPAQLGTTIYKEFEKRKML

SEQ ID NO: 788116 - protein, 333 aa, Homo sapiens [sequence omitted]

SEQ ID NO: 788117 - protein, 333 aa, Homo sapiens
MTATLAAAADIATMVSGSSGLAAARLLSRSFLLPQNGIRHCSYTASRQHLYVDKNTKIICQGFTGKQGTFHSQQALEYGTKLVGGTTPGKGGQTHLGLPVFNTVKEAKEQTGATASVIYVPPPFAAAAINEAIEAEIPLVVCITEGIPQQDMVRVKHKLLRQEKTRLIGPNCPGVINPGECKIGIMPGHIHKKGRIVHQTTQVGLGQSLCVGIGGDPFNGTDFIDCLEIFLNDSATEGIILIGEIGGNAEENAAEFLKQHNSGPNSKPVVSFIAGLTAPPGRRMGHAGAIIAGGKGGAKEKISALQSAGVVVSMSPAQLGTTIYKEFEKRKML

SEQ ID NO: 788118 - protein, 308 aa, Homo sapiens
MTATLAAAADIATMVSGSSGLAAARLLSRSFLLPQNGIRHCSYTASRQHLYVDKNTKIICQGFTGKQGTFHSQQALEYGTKLVGGTTPGKGGQTHLGLPVFNTVKEAKEQTGATASVIYVPPPFAAAAINEAIEAEIPLVVCITEGIPQQDMVRVKHKLLRQEKTRLIGPNCPGVINPGECKIGIMPGHIHKKGRIGIVSRSGTLTYEAVHQTTQVGLGQSLCVGHGGDHFKDQIYCCLESFDESAQRLFDCEWCMPKMFHLDTISQFSVGLSGRPGKVAGIGEGKTPRGVFADTVDSNPGISSSGLN

SEQ ID NO: 788119 - protein, 121 aa, Homo sapiens
QWYQRRVPITAGDCLEIFLNDSATEGIILIGEIGGNAEENAAEFLKQHNSGPNSKPVVSFIAGLTAPPGRRMGHAGAIIAGGKGGAKEKISALQSAGVVVSMSPAQLGTTIYKEFEKRKML

SEQ ID NO: 788120 - protein, 213 aa, Homo sapiens
MTATLAAAADIATMVSGSSGLAAARLLSRSFLLPQNGIRHCSYTASRQHLYVDKNTKIICQGFTGKQGTFHSQQALEYGTKLVGGTTPGKGGQTHLGLPVFNTVKEAKEQTGATASVIYVPPPFAAAAINEAIEAEIPLVVCITEGIPQQDMVRVKHKLLRQEKTRLIGPNCPGVINPGECAHWASCLGPLFSQKKREGLGALLSPILGDPRF

SEQ ID NO: 788121 - protein, 346 aa, Homo sapiens; identical to SEQ ID NO: 788115

SEQ ID NO: 788122 - protein, 235 aa, Homo sapiens
MTATLAAAADIATMVSGSSGLAAARLLSRSFLLPQNGIRHCSYTASRQHLYVDKNTKIICQGFTGKQGTFHSQQALEYGTKLVGGTTPGKGGQTHLGLPVFNTVKEAKEQTGATASVIYVPPPFAAAAINEAIEAEIPLVVCITEGIPQQDMVRVKHKLLRQEKTRLIGPNCPGVINPGECKIGIMPGHIHKKGRIGIVSRSGTLTYEAVHQTTQVGLGQSLCVGFCHRRHHIDW

SEQ ID NO: 788123 - protein, 149 aa, Homo sapiens
MRSLSILTRGPLCTLRCSEKKEINPSLSIGGDPFNGTDFIDCLEIFLNDSATEGIILIGEIGGNAEENAAEFLKQHNSGPNSKPVVSFIAGLTAPPGRRMGHAGAIIAGGKGGAKEKISALQSAGVVVSMSPAQLGTTIYKEFEKRKML

SEQ ID NO: 788124 - protein, 229 aa, Homo sapiens
MTATLAAAADIATMVSGSSGLAAARLLSRSFLLPQNGIRHCSYTASRQHLYVDKNTKIICQGFTGKQGTFHSQQALEYGTKLVGGTTPGKGGQTHLGLPVFNTVKEAKEQTGATASVIYVPPPFAAAAINEAIEAEIPLVVCITEGIPQQDMVRVKHKLLRQEKTRLIGPNCPGVINPGECKIGIMPGHIHKKGRIGIVSRSGTLTYEAVHQTTQVGLGQSLCVVRDFC

SEQ ID NO: 788125 - protein, 163 aa, Homo sapiens
MTATLAAAADIATMVSGSSGLAAARLLSRSFLLPQNGIRHCSYTASRQHLYVDKNTKIICQGFTGKQGTFHSQQALEYGTKLVGGTTPGKGGQTHLGLPVFNTVKEAKEQTGATASVIYVPPPFAAAAINEAIEAEIPLVVCITEGIPQQDMVRVKHKLLRQD

SEQ ID NO: 788126 - protein, 68 aa, Homo sapiens
  misc_feature (1)..(1): Xaa can be any naturally occurring amino acid
XLDALRSRDPEAKQSGSPGAEVEVRDVSGTGKLPLYTLSVGSSHHTSIIHFNQAAANASFSFRLNLLH

SEQ ID NO: 788127 - protein, 41 aa, Homo sapiens
KDLKGSQDLDLKPCLENHHPRAVSPSCQVRKWPGVAEAPSP

SEQ ID NO: 788128 - protein, 44 aa, Homo sapiens
CWDDRGELPHPALEGILALDFHHSPKESIYHDSHAPSEKNQDIR

SEQ ID NO: 788129 - protein, 35 aa, Homo sapiens
SFPVPAPSTPFIRYEVSCYHPRRPLSTQPVHQGTE

SEQ ID NO: 788130 - protein, 75 aa, Homo sapiens
KRKKSLLKKVDVTSRLTPRFAKSGKNLSIWCTSFASPPPPTPEKQHKAPCLPPRRLRRRKPDPSLTFSKHQRREQ

SEQ ID NO: 788131 - protein, 30 aa, Homo sapiens
MFCPLQHLKEPNTNSLYQNTPISPKHTQFY

SEQ ID NO: 788132 - protein, 96 aa, Homo sapiens
PCAPACFCPFPWALGMCVLKPGPQRWSVRRTRSFIASLGPLSYHTEDGAQAPCRGHGHYEGGEPATLVLPVPPTALPDLLGTSPRASSHALVAFTY

SEQ ID NO: 788133 - protein, 105 aa, Homo sapiens
LSYPNGIPCEGFGCGKAENLIEKKDILISWLILSSHTSFKWILKSPCNYRWSPSQSRNVKCLQDAPYRHTLQEAVKEAQFQLLENFEKQYHSQFFCGLPQSFNSC

SEQ ID NO: 788134 - protein, 102 aa, Homo sapiens
SLLWALVTGECHSLAALPAPPSTGVKVGSNSGIRDTLRQGNPLLPVPGGEEGSVPLRLPSRAGTLSLPVLFSKPPCGKSPSALREGRASPGAGARERGQGSQ

SEQ ID NO: 788135 - protein, 93 aa, Homo sapiens
SVIATIASHSAILSVTASELHVHAVAAEEGPSAQWGLQAAWCGGWLRRLAPGTAAGALSQCSQLEKSAQVACEALICPEQFSTFQVAALRLQV

SEQ ID NO: 788136 - protein, 98 aa, Homo sapiens
QNHVMHPVGGHLGTQDMHPDPSSPTHFKESAALPVVMKTFRWPQPLGSGLYLGIHVALGVGFAEVGQSRWVLECAGATRVSICLGEASCLGLKDLFDF

SEQ ID NO: 788137 - protein, 90 aa, Homo sapiens
MSTGVLYGVTKWGSFRDENKICKTTRKDSETSSNHLEEVYRLSIPNSKNLKCFKIQNFLSVYMMPQVEYSTPDIMRQVAVKTQVHNTVLS

SEQ ID NO: 788138 - protein, 80 aa, Homo sapiens
SHSISMATAMVIEQGFLISKQVHISVRDVYTCGISITTYVRECKHKYAYHLENATVGLGIGYKKQLGCGAQGHSLVISAP

SEQ ID NO: 788139 - protein, 70 aa, Homo sapiens
ETEIVTLIDRRHAPRVMENVTHAISGNSTEGALYTISGVIAEKAQKKFGTAGACAKGVYTVRKKCVVGQL

SEQ ID NO: 788140 - protein, 231 aa, Homo sapiens
RVKMYPVEDFEASFQFMQECAQYFLEVKDKDIKHALAGLFVEILIPVAAAVKNEVNVPCLKNFVEMLYQTTFELSSRKKHSLALYPLITCLLCVSQKQFFLNNWHIFLQNCLSHLKNKDPKMSRVALESLYRLLWVYVIRIKCESNTVTQSLFPCSRLMSIVSALFPKGSRSVVPRDTPLNIFVKIIQFIAQERLDFAMKEIIFDLLSVGKSTKTFTINPERMNIVSESSL

SEQ ID NO: 788141 - protein, 133 aa, Homo sapiens
HTDGSLGCASPAFATALKNLYMSEVEINLEDLLGVLASAHILQFSGLFQRCVDVMIARLKPSTIKKFYEAGCKYKEEQLTTGCEKWLEMNLVPLGGTQIHLHKIPQDLLHKVLKSPSFPENCCFLDRDIGRSL

SEQ ID NO: 788142 - protein, 103 aa, Homo sapiens
SQESYYCIKTKEFISLDENQRSYNGRQAVYLLQIINREFTTGEAAEILQYSDNKSLHKVVSHLCLFLQLCAGRSLAQPSSLLSATSGQLLGVEYLVLGNCLCN

SEQ ID NO: 788143 - protein, 102 aa, Homo sapiens
MGWGQLTCRTDHMVPLSQRDSPGIDPVQEAASTFGMPFLQNTQTSETSHSVGQIPQYPVCSIILLSTSRFRALLSISPATTAQGRWNSPRAKDVGFSVRELG

SEQ ID NO: 788144 - protein, 101 aa, Homo sapiens
MDSFNRGGEARTLREKAAAQAGWRTVVGSAGSLGEHGNHFIALGWCDSLPGMFLTVDLILHKEMVPLFQVGATVSAQVTFGMAVTVPQLHEHTDNARTTII

SEQ ID NO: 788145 - protein, 174 aa, Homo sapiens
VSQLSGFSAGFPGTKMVMASDFYLRYYVGHKGKFGHEFLESEFQLDGKLRYANSSNYKNDVMIRKEAYVHKSLMEELKRIIDDNEITKEDDGLWPPPDRAGRQELEIVIGDEHISFFFFFLRRSLALLPKLECNGAISAHRILCLPGSSDSPASASQVAGITGTSHHTRLILYF

SEQ ID NO: 788146 - protein, 116 aa, Homo sapiens
HQRGLQWFIKMAACPLALSSWRSGVYVPSLGVGWACAGFHPWSEHAVEAQAPQEVPVLVALSTASTELSFSVYPAWVPDVGKFPAGKPSAPANEFFPAEAQTSGSRDKPSSCPVST

SEQ ID NO: 788147 - protein, 218 aa, Homo sapiens
VGGGDTRWEVALSLGSKGRRRWRQLRARRRGVRAPWLCPCCLSLWVFTESLPSSVFTSAACRSSWFSSEAGGEPIRPVPRAYSGDSSWRGRAASLRTPALPWVQGVPPAAPPPLPSSPQADSSPLTPNKSHNADSGPQGPAQRSPASSSYISRPSPSPTPVGASNAPQPCSSPACSVPPQVSPGSLTCFRFCSDCAASVRPSVTILCIVGNPCSLSLH

SEQ ID NO: 788148 - protein, 91 aa, Homo sapiens
GHQGVHLEIIVGLVREPNAHVEDVGGETGHCVQQHLGLQVCHQVEDEEGLALFAALQHALEILFFPLNWDLPVELMALPLTLGQRLGSFFM

SEQ ID NO: 788149 - protein, 272 aa, Homo sapiens
MDGPVAEHAKQEPFHVVTPLLESWALSQVAGMPVFLKCENVQPSGSFKIRGIGHFCQEMAKKGCRHLVCSSGGNAGIAAAYAARKLGIPATIVLPESTSLQVVQRLQGEGAEVQLTGKVWDEANLRAQELAKRDGWENVPPFDHPLIWKGHASLVQELKAVLRTPPGALVLAVGGGGLLAGVVAGLLEVGWQHVPIIAMETHGAHCFNAAITDGKLVTLPDITSVAKSLGARRWPLGPWSACRCARFTLKLVEDTEGCERCDRVLDEKRIDG

SEQ ID NO: 788150 - protein, 272 aa, Homo sapiens; identical to SEQ ID NO: 788149

SEQ ID NO: 788151 - protein, 107 aa, Homo sapiens
MPRRLQPRGAGTKGPPAPAPAASGAARNSHSAASRDPPASAKPLLRWDEVPDDFVECFILSGYRRLPCTAQECLASVLKPTNETLNFWTHFIPLLLFLSKFCRLFFL

SEQ ID NO: 788152 - protein, 138 aa, Homo sapiens [sequence omitted]

SEQ ID NO: 788153 - protein, 186 aa, Homo sapiens
MTTIPRKGSSHLPGSLHTCKLKLQEDRRQQEKSVIAQPIFVFEKGEQTFKRPAEDTLYEAAEPECNGFPRKRVRSSSFTFHITDSQSQGVRKNNVFMTSALVQSSVDIKSAEQGPVKHSKHVIRPAILQLPQARSCAKVRKTFGHKALESCKTKEKTNNKISEGNSYLLSENLSRARISVQLSTNQ

SEQ ID NO: 788154 - protein, 109 aa, Homo sapiens [sequence omitted]

SEQ ID NO: 788155 - protein, 78 aa, Homo sapiens
CMQSACNQFAETIFRHWTGIIIILCKIRNQRVIVCVRHDCEKPNSICIEINKKQLRKPYCNAPYSITDSISATHYSIS

SEQ ID NO: 788156 - protein, 45 aa, Homo sapiens
WNGILLHTGNDAMAVDEMGHWGVYLSGGAVINKYLTLGHLYTTEM

SEQ ID NO: 788157 - protein, 228 aa, Homo sapiens
LPKAEAWAMAGAPPPVIVAALQLISDCCASNQRDSLGVGPSEPGVGYSLVVRRFLSRSEKRNIRVGVTRFSSITKAPKLGPMELAIIITVPVCLLSIAAMLTVWACQGRQCSYRKKKRPNVEEPLSECNLVNAGKTLKDLIYDVTASGSGSGLPLLVQRTIARTIVLQEIVGKGRFGEVWHGRWCGEDVAVKIFSSRDERSWFREAEIYQTVMLRHENILGFIAADNK

SEQ ID NO: 788158 - protein, 117 aa, Homo sapiens
ERQMNSPLQEYYVDYKPTNSETMDISVNGSGPCTYTISGSRECEMPHHMKPLPYYSYDQPVIGYCQAHQPLHVTKGYETVSPEQDESPGLELGRDHSFIATIARSAAPAIYLERIAN

SEQ ID NO: 788159 - protein, 107 aa, Homo sapiens
MQSARARAIPAGWGRGTLSSPVQGGGTVVAVKAPPKWHNHPQRPHPPPLPSRGTFVVVGNTDCGETVRIQILALPSTHSITLGKSLNPSLWLSLLICKVDLLINCYK

SEQ ID NO: 788160 - protein, 115 aa, Homo sapiens
CDTESNIILFPPGSWEQYPWGCPLSAICVVISPPPPWNIIKNHVTRGCTLPTMLGVIAFSSSMNIRNKITGWMHTQCYIGSNVILHPLEIIFGSISPAGCAPAAILNVISCSLPP

SEQ ID NO: 788161 - protein, 130 aa, Homo sapiens
RFCGQESGAAQLGHRPLTGCSQGVSRGRTVILRPSRESVCFQARSRGFGHDSVPRGCWTEVTLIFFPRRPLHSSHLCSCFIEASKRDCGKIAVIVLIPEMIPSLGWVFRVEVTSPVRTKWRVWIPGGKDH

SEQ ID NO: 788162 - protein, 74 aa, Homo sapiens
MGQGPYGDSCYGCSVEHVCPTECGVSGGEPEGKLTHAVQTGGEMALRLISGHGGCGGSRDDTAVWLHFTACHAP

SEQ ID NO: 788163 - protein, 107 aa, Homo sapiens [sequence omitted]

SEQ ID NO: 788164 - protein, 77 aa, Homo sapiens
  misc_feature (9)..(9): Xaa can be any naturally occurring amino acid
LGGGGGVFXPPPFFLKKRAQRGPLGQQNSTPGRLLWASGLAGSSRKGDAVDVCVDGAVFLESVDQIGGGIEVQESKG

SEQ ID NO: 788165 - protein, 115 aa, Homo sapiens
SCLFLQPQTSSPIEVARRAGAVHTLLQKAPGVSDPYRAVVKKPGRWCAVHVQIAWQIYRHQQKIKEMQLDPHKLEVGAKLDLFGRPPAPGVFAGFHYPQDLARPLFPSTGETGVG

SEQ ID NO: 788166 - protein, 843 aa, Homo sapiens
SAQSRRGGHARPRPELRLSRARGERGRLDGPGPPGARAPRPRPCSPAPAPGLVATAWGAGEASVGSEKLFAPGTDKGPALEKSEAKAGPVPKVSGLERSRELSAESFLPTASPAPHAAPCPGPPPGSRANPLVKKEPPAPHRHTPQPPPPQPRGLLPTHVPASLGAFAGHSQAAANGLHGLSRSSSAPLGLGKHVSLSPHGPGPHLSTSHLALRSQAQHQLHAAMFAAPPTLPPPPALPASSLVLPGHPADHELLRQELNTRFLVQSAERPGASLGPGALLRAEFHQHQHTHQHTHQHTHQHQHTFAPFPAGLPPTPPAAPPPFDKYAPKLDSPYFRHSSVSFFPSFPPAIPGLPTLLPHPGPFGSLQGAFQPKVSDPYRAVVKKPGRWCAVHVQIAWQIYRHQQKIKEMQLDPHKLEVGAKLDLFGRPPAPGVFAGFHYPQDLARPLFPSTGAAHPASNPFGPSAHPGSFLPTGPLTDPFSRPSTFGGLGSLSSHAFGGLGSHALAPGGSIFAPKEGSSVHGLPSPHEAWNRLHRAPPSFPAPPPWPKSVDAERVSALTNHDREPDNGKEEQERDLLEKTRLLSRASPATPAGHPVSGLLLRAQSELGRSGAPAEREAEPRVKESRSPAKEEAAKMPARASPPHSKAAPGDVKVKEERGEDEASEPPAGGLHPAPLQLGLGRERLGAPGFAWEPFRGLELPRRAFPAAAPAPGSAALLEPPERPYRDREPHGYSPERLRGELERARAPHLPPAAPALDGALLPSLGALHFPRLSPAALHNGLLARTPPAAAALGAPPPLVTAAGPPTPPGPPRSRTTPLGGLGPGEARDYSPSRNPPEVEAR

SEQ ID NO: 788167 - protein, 500 aa, Homo sapiens
SCLFLQPQTSSPIEVARRAGAVHTLLQKAPGVSDPYRAVVKKPGRWCAVHVQIAWQIYRHQQKIKEMQLDPHKLEVGAKLDLFGRPPAPGVFAGFHYPQDLARPLFPSTGAAHPASNPFGPSAHPGSFLPTGPLTDPFSRPSTFGGLGSLSSHAFGGLGSHALAPGGSIFAPKEGSSVHGLPSPHEAWNRLHRAPPSFPAPPPWPKSVDAERVSALTNHDREPDNGKEEQERDLLEKTRLLSRASPATPAGHPVSGLLLRAQSELGRSGAPAEREAEPRVKESRSPAKEEAAKMPARASPPHSKAAPGDVKVKEERGEDEASEPPAGGLHPAPLQLGLGRERLGAPGFAWEPFRGLELPRRAFPAAAPAPGSAALLEPPERPYRDREPHGYSPERLRGELERARAPHLPPAAPALDGALLPSLGALHFPRLSPAALHNGLLARTPPAAAALGAPPPLVTAAGPPTPPGPPRSRTTPLGGLGPGEARDYSPSRNPPEVEAR

SEQ ID NO: 788168 - protein, 433 aa, Homo sapiens
SSVQGELQLRASCCFRWVFAASSAHTSSGTLLPLSGENPSPAGAAHPASNPFGPSAHPGSFLPTGPLTDPFSRPSTFGGLGSLSSHAFGGLGSHALAPGGSIFAPKEGSSVHGLPSPHEAWNRLHRAPPSFPAPPPWPKSVDAERVSALTNHDREPDNGKEEQERDLLEKTRLLSRASPATPAGHPVSGLLLRAQSELGRSGAPAEREAEPRVKESRSPAKEEAAKMPARASPPHSKAAPGDVKVKEERGEDEASEPPAGGLHPAPLQLGLGRERLGAPGFAWEPFRGLELPRRAFPAAAPAPGSAALLEPPERPYRDREPHGYSPERLRGELERARAPHLPPAAPALDGALLPSLGALHFPRLSPAALHNGLLARTPPAAAALGAPPPLVTAAGPPTPPGPPRSRTTPLGGLGPGEARDYSPSRNPPEVEAR

SEQ ID NO: 788169 - protein, 843 aa, Homo sapiens; identical to SEQ ID NO: 788166

SEQ ID NO: 788170 - protein, 843 aa, Homo sapiens; identical to SEQ ID NO: 788166

SEQ ID NO: 788171 - protein, 73 aa, Homo sapiens
  misc_feature (8)..(8): Xaa can be any naturally occurring amino acid
TAAFKAPXEVEAGHRNTAAGAATPALPHTHTHTHKITAVCFLPPEASASPRCGRRLPGPWPGLLSVWVLPSPT

SEQ ID NO: 788172 - protein, 891 aa, Homo sapiens
SAQSRRGGHARPRPELRLSRARGERGRLDGPGPPGARAPRPRPCSPAPAPGLVATAWGAGEASVGSEKLFAPGTDKGPALEKSEAKAGPVPKVSGLERSRELSAESFLPTASPAPHAAPCPGPPPGSRANPLVKKEPPAPHRHTPQPPPPQPRGLLPTHVPASLGAFAGHSQAAANGLHGLSRSSSAPLGLGKHVSLSPHGPGPHLSTSHLALRSQAQHQLHAAMFAAPPTLPPPPALPASSLVLPGHPADHELLRQELNTRFLVQSAERPGASLGPGALLRAEFHQHQHTHQHTHQHTHQHQHTFAPFPAGLPPTPPAAPPPFDKYAPKLDSPYFRHSSVSFFPSFPPAIPGLPTLLPHPGPFGSLQGAFQPKVSDPYRAVVKVSTCWEGPWQGRTLVPPGRPRGARDSRSLQKTWVGVAPAPLSASILSQKPGRWCAVHVQIAWQIYRHQQKIKEMQLDPHKLEVGAKLDLFGRPPAPGVFAGFHYPQDLARPLFPSTGAAHPASNPFGPSAHPGSFLPTGPLTDPFSRPSTFGGLGSLSSHAFGGLGSHALAPGGSIFAPKEGSSVHGLPSPHEAWNRLHRAPPSFPAPPPWPKSVDAERVSALTNHDREPDNGKEEQERDLLEKTRLLSRASPATPAGHPVSGLLLRAQSELGRSGAPAEREAEPRVKESRSPAKEEAAKMPARASPPHSKAAPGDVKVKEERGEDEASEPPAGGLHPAPLQLGLGRERLGAPGFAWEPFRGLELPRRAFPAAAPAPGSAALLEPPERPYRDREPHGYSPERLRGELERARAPHLPPAAPALDGALLPSLGALHFPRLSPAALHNGLLARTPPAAAALGAPPPLVTAAGPPTPPGPPRSRTTPLGGLGPGEARDYSPSRNPPEVEAR

SEQ ID NO: 788173 - protein, 843 aa, Homo sapiens; identical to SEQ ID NO: 788166

SEQ ID NO: 788174 - protein, 843 aa, Homo sapiens; identical to SEQ ID NO: 788166

SEQ ID NO: 788175 - protein, 79 aa, Homo sapiens
EAIAGACSRSWESICASIPAEMQRRAVWVLWYQPTRTGPAGTGSGRSVILLAGDTCRQPTGWEEGQTVVAKHQHAGGLF

SEQ ID NO: 788176 - protein, 96 aa, Homo sapiens
MCGPDRYLTLRAEIQASLAAFLPHPSVLLVPRWELAEMSPGWALTLLFCSLGGLAPDHSSLQQPLDPESTPHSSARPERPAATDAGGGYRVEAALV

SEQ ID NO: 788177 - protein, 214 aa, Homo sapiens
ANRLKILGQSCASLFTWMESFKEGIGMLVCTGEPQDKHKFPKHQKEQLRCLQALSWLTSSDLLAAIISSMAELQDVIGKADPNSRICGHLLIGAAKNSFAKLMDKISLVMECIPLHSSRSITYVEKDSLVQRLAHGLHKVNTLALKYGLRGHVPITKSTASLQKQILGFTQRLHAAEVERRSLRLEVTEFKRSVNEMKKELDKAQGLQMQLNEF

SEQ ID NO: 788178 - protein, 143 aa, Homo sapiens
FLFVHIYGLHEKLCYMFIMHSDQVRAFRVSHCTPGQPQGSPWASGSLSGVSSQGILLSKGSLAYTEGVQSRTHSIDLTWELIRNPDSQANPRPTELESLGERPGIWVLTNAAGDSDARWRTTGWTKAAGLEVSPFDPQSLTIL

SEQ ID NO: 788179 - protein, 139 aa, Homo sapiens
PWCWRGWRAGRRGLRRPRRPWRGRRRFRVWGARVPALGARRIFRLGRPWAWCCRLGRRHPAISPLPGSGREPRQPRARPPRTPGANSLLRASCSFPKPEVATPPPLRAAVRSNHVPTPAGPCKRCDVGLRRPRLLIMGT

SEQ ID NO: 788180 - protein, 118 aa, Homo sapiens
WPASLLIITINYQHWSSGCGKCKTVLLGHHLKPGLLGEIPCGSLHLFNSFHSCFLTPFVVLRQQRCPLAGNPEDEVGTLGLSLVKCHLLSPPPFLALSTHMGMFNDILLFPSFRPWEQ

SEQ ID NO: 788181 - protein, 105 aa, Homo sapiens
MYLVISTSKNFAIGVTNVFWLPGMFPPLLGSQMFGMRKTVCPRCQQPAHTCWATLPPTKGLDQWCAPQQRTLKAKVICSCRYHVKGPVRGPAVEFVEDNIQNILG

SEQ ID NO: 788182 - protein, 128 aa, Homo sapiens
SYHVVQAGLQLLTSGDPPTSASQSAGITGMSHWAPHGAVVNGVGKGGEQGSAGEGQRQREDAATRGGKRSWLVGNQFLEEANVCVCLFLFSDRETGFCFVTQGRVQCRKHSSLQPQIPRLKGSSCLSL

SEQ ID NO: 788183 - protein, 85 aa, Homo sapiens
TKGTCYLDQVEVSYCSGYCPSSTHVMPEEPYLQSQCDCCSYRLDPESPVRILNLRCLGGHTEPVVLPVIHSCQCSSCQGGDFSKR

SEQ ID NO: 788184 - protein, 318 aa, Homo sapiens [sequence omitted]

SEQ ID NO: 788185 - protein, 118 aa, Homo sapiens
AAMSTASIKSAVVPMKVQQGWGFQLLAGLFLECCLDEYSLNIVCYTMRFCVHFSIISMRLKKARMNLSCVSPVCVYVSLCVGRHSLRQRLWTECVSLNSVCRRPNPQGMVLGGEAFGP

SEQ ID NO: 788186 - protein, 209 aa, Homo sapiens
KKIVVRMCCRPALNMLFAPPGALYAEVPVPSSLMPDTDQGFLLGRAVSTALVAPVPAPDNTVFEVRLERRASSEQALWLLLPARCCLALGLQPEARLVLEVQFQIDPMTFRLWHQAVDTLPEEQLVVPDLPTCALPRPWSVPPLRRGNRKQELAVALIAGWGPGDGRRVPPLLIYGPFGTGKTYTLAMASLEVIRRPETKVLICTHTNR

SEQ ID NO: 788187 - protein, 66 aa, Homo sapiens
PAVLHPLLFCLTLAIWISSSYLWLRLHPSPLTTSLLSQAGVCLPASRIPRCAHHHLCSGPDRREKA

SEQ ID NO: 788188 - protein, 118 aa, Homo sapiens
RPAVFCCLSGARTFPRSSQQPAGLCSTVTMCDRKAVIKNADMSEEMQQDSVECATQALEKYNIEKDIAAHIKKEFDKKYNPTWHCKKNRNFGSYVTHETKHFIYFYLGQVAILLFKSG

SEQ ID NO: 788189 - protein, 190 aa, Homo sapiens
MEPEAAAGARKARGRGCHCPGDAPWRPPPPRGPESPAPWRPWIQTPGDAELTRTGRPLEPRADQHTFGSKGAFGFQHPVRVYLPMSKRQEYLRSSGEQVLASFPVQATIDFYDDESTESASEAEEPEEGPPPLHLLPQEVGGRQENGPGGKGRDQGINQGQRSSGGGDHWGEGPLPQGVSSRGGKCSSSK

SEQ ID NO: 788190 - protein, 183 aa, Homo sapiens
KARGRGDHRGTEKPGLLTSHIRQGKPSSPAPWRPWIQTPGDAELTRTGRPLEPRADQHTFGSKGAFGFQHPVRVYLPMSKRQEYLRSSGEQVLASFPVQATIDFYDDESTESASEAEEPEEGPPPLHLLPQEVGGRQENGPGGKGRDQGINQGQRSSGGGDHWGEGPLPQGVSSRGGKCSSSK

SEQ ID NO: 788191 - protein, 106 aa, Homo sapiens
MSKRQEYLRSSGEQVLASFPVQATIDFYDDESTESASEAEEPEEGPPPLHLLPQEVGGRQENGPGGKGRDQGINQGQRSSGGGDHWGEGPLPQGVSSRGGKCSSSK

SEQ ID NO: 788192 - protein, 106 aa, Homo sapiens; identical to SEQ ID NO: 788191

SEQ ID NO: 788193 - protein, 64 aa, Homo sapiens
MQSKRKCKSVVHQLSVTLEDLYDAATRKQALQNNVLCDRCEDRGGEKKKEQYSAVIIAKVLECK

SEQ ID NO: 788194 - protein, 65 aa, Homo sapiens
LSPRCKLGWGREDPGSRAVPSESDYMGCVLGQAQKHGHEVTQGLEGQWAARVGLERLSGELAGEL

SEQ ID NO: 788195 - protein, 68 aa, Homo sapiens
RVDLDATQPAIEKLGPPSQGQGHTSAITTHKQRSMYELGQDTRNYLMIAPEEAAAGAQPSLFPATPKL

SEQ ID NO: 788196 - protein, 91 aa, Homo sapiens
IRTGKRKKKAWKRMVTKVCFVGDGFIRKPPKYERLIRPMGLHFKKAHVTHPELKATFCLPILGVKKNPSFPLYTTLGVITKGTVIEVNVSK

SEQ ID NO: 788197 - protein, 125 aa, Homo sapiens
MLTANITCLSDILCTSSHQLQEAETKRLAPVTELEIGQDKVQSEDCQIQNWNFFFFFFFLRWSLALSPRLECSGMISAHCNLHLLGSSDSLGTTGARHHAWLILVFLVETGFHHVGQDSLKLLTS

SEQ ID NO: 788198 - protein, 315 aa, Homo sapiens
AKEKEQSPTAEKDEDEENDASLANSSTTTLEDKGPGHATFGREATKFEEEEKPDKAWEARPPRESSDVPPMKRNNWIFIDEEQAFGVRGQARGRGRGFREFTFRGRPAGGNGSGLCGGGVLGARSIYCSSQRSGRGRGLREFARPEDCPRAKPRRRVASETHSEGSEYEELPKRRRQRGSENGNEGSLLEREESTLKKGDCRDSWRSNKGCSEDHSGLDAKSRGPRAFGRALPPRLSNCGYGRRTFVSKESPHWQSKSPGSSWQEYGPSDTCGSRRPTDRDYVPDSYRHPDAFGGRGFEDSRAEDKRSFFQDEHV

SEQ ID NO: 788199 - protein, 108 aa, Homo sapiens
MQKIGKKKSGAFAVKISENVEGTLVLGDGQRLEEFGELRRIWEIRESLKLPCDSLNDCDQNADSNMDSEIHAEEVSDANEELIGNQSKGHAWYALAKNLAAFCFCPWD

SEQ ID NO: 788200 - protein, 113 aa, Homo sapiens
KQRFPLLNKIIQVLKVLPTSTACCEKGRNALQRVRKNHRSRLTLEQLSDLLTIAVNGPPITNFDAKRALDSWFEEKSGNSYALSAEVLSRMSALEQKPALQTMDHGTEFYPDI

SEQ ID NO: 788201 - protein, 113 aa, Homo sapiens; identical to SEQ ID NO: 788200

SEQ ID NO: 788202 - protein, 113 aa, Homo sapiens; identical to SEQ ID NO: 788200

SEQ ID NO: 788203 - protein, 106 aa, Homo sapiens
TLEIPPEISGTTATAFIDTVLCGIIGLHMMLSYLFCAKFISVFFSIVGFTWLQFIRNSHTNGGGTETTWVHLDIIIRYPNIPGQACKTFSIIINTKPKRLSLYVNF

SEQ ID NO: 788204 - protein, 90 aa, Homo sapiens
LVGGGCGAAVSASRPCGLLGMRQHSYTFQGGFSCSVSGKEEEMLQLPQYFCLRQSQGSGISKELGIEGLSWPHPALHLTSKAGCFLLLAE

SEQ ID NO: 788205 - protein, 160 aa, Homo sapiens
MCPPSPLIHRTSSFSPNLLPVPEMDLLSDISEEDPFGEADQITLDSLEHLSTGEISEQGDSEVAMPDLVLDSAIAPSQPDCPSPIHGKTLKAADDSDSEFGYFSFSFSKCFPSGFPSLLDEDGYLAFPSLPKVWVSFLPAGVQHYVPITSPSFIPSLILI

SEQ ID NO: 788206 - protein, 108 aa, Homo sapiens
RVRTQAHSRLSPLLCPAQRSHHTWQCGYGVRSENSSSGPGVVYNCTTRAGLFCLPLLQHEPLGKRVLLTSALSSLSSALKMEEEPGISRTPWQNFLHLVTAWATCYSE

SEQ ID NO: 788207 - protein, 124 aa, Homo sapiens
GGSLVEQERLGILLRLRGQTPTPALSAQHRHPRLSRLPLLFPSPSVDEGACRSRLGHGPPRPRTQRGPGAVAHTCNPGTLGGPGGWITRSGVQDQPGQDGVSTKNSKISWAWWLGACNPSYSGG

SEQ ID NO: 788208 - protein, 40 aa, Homo sapiens
MSLRRSQGHSHFCPTGFKFNDSYDPLRFSHSLEQLTELKK

SEQ ID NO: 788209 - protein, 155 aa, Homo sapiens
MLCCLEISCVRYLKSSLSSSKFHRSVGNSRKKFLFSLFPAYLMPVSNTGAQCLQCLCIVRVTLLHFPTNSSSASETTSAWTLLSISLLTFGSKPFNKSRGSSKLSHIFLSSSEPSKLFQPLPVTHFQSCFHIFGYLYSSTPLYWYQLIVLVCSHT

SEQ ID NO: 788210 - protein, 135 aa, Homo sapiens
MSVYSGKVLLQTTPPHVIGQLDKLIREVSTLDGVLEVRNEHFWTLGFGSLAGSVHVRIRRDANEQMVLAHVTNRLYTLVSTLTVQIFKDDWIRPALLSGPVAANVLNFSDHHVIPMPLLKGTDDLNPVTSTPLED

SEQ ID NO: 788211 - protein, 216 aa, Homo sapiens
MSVYSGKVLLQTTPPHVIGQLDKLIREVSTLDGVLEVRNEHFWTLGFGSLAGSVHVRIRRDANEQMVLAHVTNRLYTLVSTLTVQIFKDDWIRPALLSGPVAANVLNFSDHHVIPMPLLKGTDDLNPVTSTPAKPSSPPPEFSFNTPGKNVNPVILLNTQTRPYGFGLNHGHTPYSSMLNQGLGVPGIGATQGLRTGFTNIPSRYGTNNRIGQPRP

SEQ ID NO: 788212 - protein, 216 aa, Homo sapiens; identical to SEQ ID NO: 788211

SEQ ID NO: 788213 - protein, 602 aa, Homo sapiens [sequence omitted]

SEQ ID NO: 788214 - protein, 241 aa, Homo sapiens
MLLPLLLSSLLGVLSFTPRPQDHNTDLTCHVDFSRKGVSVQRTVRLRVAYAPRDLVISISRDNTPALEPQPQGNVPYLEAQKGQFLRLLCAADSQPPATLSWVLQNRVLSSSHPWGPRPLGLELPGVKAGDSGRYTCRAENRLGSQQRALDLSVQYPTREPEKDGIPKGQDQDKHPVNKPKRETGTAIQRHPKGHGKGAQKTHVGREVTWRVDNNQSEAPPKPRLEDRKAPERRNQGYHRT

SEQ ID NO: 788215 - protein, 697 aa, Homo sapiens
MLLPLLLSSLLGGSQAMDGRFWIRVQESVMVPEGLCISVPCSFSYPRQDWTGSTPAYGYWFKAVTETTKGAPVATNHQSREVEMSTRGRFQLTGDPAKGNCSLVIRDAQMQDESQYFFRVERGSYVRYNFMNDGFFLKVTALTQKPDVYIPETLEPGQPVTVICVFNWAFEECPPPSFSWTGAALSSQGTKPTTSHFSVLSFTPRPQDHNTDLTCHVDFSRKGVSVQRTVRLRVAYAPRDLVISISRDNTPALEPQPQGNVPYLEAQKGQFLRLLCAADSQPPATLSWVLQNRVLSSSHPWGPRPLGLELPGVKAGDSGRYTCRAENRLGSQQRALDLSVQYPPENLRVMVSQANRTVLENLGNGTSLPVLEGQSLCLVCVTHSSPPARLSWTQRGQVLSPSQPSDPGVLELPRVQVEHEGEFTCHARHPLGSQHVSLSLSVHYSPKLLGPSCSWEAEGLHCSCSSQASPAPSLRWWLGEELLEGNSSQDSFEVTPSSAGPWANSSLSLHGGLSSGLRLRCEAWNVHGAQSGSILQLPDKKGLISTAFSNGAFLGIGITALLFLCLALIIMKILPKRRTQTETPRPRFSRHSTILDYINVVPTAGPLAQKRNQKATPNSPRTPLPPGAPSPESKKNQKKQYQLPSFPEPKSSTQAPESQESQEELHYATLNFPGVRPRPEARMPKGTQADYAEVKFQ

SEQ ID NO: 788216 - protein, 112 aa, Homo sapiens
LGRDPGDSLWAEQRGLSGTPAAQESPTTVSVPALTQKPDVYIPETLEPGQPVTVICVFNWAFEECPPPSFSWTGAALSSQGTKPTTSHFSVLSFTPRPQDHNTDLTCHVDFS

SEQ ID NO: 788217 - protein, 111 aa, Homo sapiens
VVNVAVCHREVQQGTNRWVHFLSMKILPKRRTQTETPRPRFSRHSTILDYINVVPTAGPLVSVWAMLPLFLFSKADIPLSDFCTPCLSDIKVGKAPIVLNSNPAWHLLAMR

SEQ ID NO: 788218 - protein, 106 aa, Homo sapiens
RDTACFSPKELARTVGRVWGKWCDAGLAWDPVRGGNGSKSLMFLAPLGKLKPAFSVVYWPRTEVSPFPLRIAGWARGCSSAVSKNRLSGERAGLSQPRAGSELQEI

SEQ ID NO: 788219 - protein, 288 aa, Homo sapiens
MEPPDQCSQYMTSLLSPAVDDEKELQDMNAMVLSLTEEVKEEEEDAQPEPEQGTAAGEKLKSAGAQGGEEKDGGGEEKDGGGAGVPGHLWEGDLEGTSGSDGNVEDSDQSEKEPGQQYSRPQGAVGGLEPGNAQQPNVHAFTPLQLQELERIFQREQFPSEFLRRRLARSMNVTELAVQIWFENRRAKWRRHQRALMARNMLPFMAVGQPVMVTAAEAITAPLFISGMRDDYFWDHSHSSSLCFPMPPFPPPSLPLPLMLLPPMPPAGQAEFGPFPFVIVPSFTFPNV

SEQ ID NO: 788220 - protein, 69 aa, Homo sapiens
MVLSLTEEVKEEEEDAQPEPEQGTAAGEKLKSAGAQGGEEKDGGGEEKDGGGAGVPGHLWEGDLEGTSG

SEQ ID NO: 788221 - protein, 87 aa, Homo sapiens
TCPRRRIPNYPLPLMTNAVMIRLSSEGGGGINSLQRGTWMKITSNLLTILRDHSISVTEPNKQVARIQQVLHTHELKMAVYRLSKRW

SEQ ID NO: 788222 - protein, 101 aa, Homo sapiens
GPHAQFGPHAQFMASALFTWAKGQDPVSKSKKKKSLSSAFNSEQKNSSSQEQSASTQLLIYLSQEYGKPQSMVFRHKGRNHQVVEHVKEPRALLSLTRIPT

SEQ ID NO: 788223 - protein, 96 aa, Homo sapiens
MSHSRRAAPTQDQCHTPGFPTSRETSGSIWQARICGSLQALDTWRTHIPRKSPAPTQASQICLLLPESPWRNPTPRGFLKPLINWDAILYFKEKRN

SEQ ID NO: 788224 - protein, 728 aa, Homo sapiens
LIFHKGLHNLRNYSSDLGKQPKKVPKRRQAARELSIQRRSALNVRLFLRDFCSEFLENCYNRLMGSVKDHLLREKAQQHDETYYMWALAFFMAFNRAASFRPGLVSETLSVRTFHFIEQNLTNYYEMMLTDRKEAASWARRMHLALKAYQELLATVNEMDLSPDEAVRESSRIIKNNIFYVMEYRELFLALFRKFDERCQPRSFLRDLVETTHLFLKMLERFCRSRGNLVVQNKQKKRRKKKKKVLDQAIVSGNVPSSPEEVEAVWPALAEQLQCCAQNSELSMDSVVPFDAASEVPVEEQRAEAMVRIQDCLLAGQAPQALTLLRSAREVWPEGDVFGSQDISPEEEIQLLKQILSAPLPRQQGPEERGAEEEEEEEEEEEEELQVVQVSEKEFNFLDYLKRFACSTVVRAYVLLLRSYQQNSAHTNHCIVKMLHRLAHDLKMEALLFQLSVFCLFNRLLSDPAAGAYKELVTFAKYILGKFFALAAVNQKAFVELLFWKNTAVVREMTEGYGSLDDRSSSRRAPTWSPEEEAHLQELYLANKDVEGQDVVEAILAHLNTVPRTRKQIIHHLVQMGLADSVKDFQRKGTHIVLWTGDQELELQRLFEEFRDSDDVLGHIMKNITAKRSRARIVDKLLALGLVAERRELYKKRQKKLASSILPMGGVPEDLPEDCKEELLEKGKRKGANKRRCFLRNLDAQKVFPLVKLPIEKSPCPSGNWQPREQTR

SEQ ID NO: 788225 - protein, 430 aa, Homo sapiens
ARYEAGCYSAEAEVCSEVWPEGDVFGSQDISPEEEIQLLKQILSAPLPRQQGPEERGAEEEEEEEEEEEEELQVVQVSEKEFNFLDYLKRFACSTVVRAYVLLLRSYQQNSAHTNHCIVKMLHRLAHDLKMEALLFQLSVFCLFNRLLSDPAAGAYKELVTFAKYILGKFFALAAVNQKAFVELLFWKNTAVVREMTEGYGSLDDRSSSRRAPTWSPEEEAHLQELYLANKDVEGQDVVEAILAHLNTVPRTRKQIIHHLVQMGLADSVKDFQRKGTHIVLWTGDQELELQRLFEEFRDSDDVLGHIMKNITAKRSRARIVDKLLALGLVAERRELYKKRQKKLASSILPNGAESLKDFCQEDLEEEENLPEEDSEEEEEGGSEAEQVQGSLVLSNENLGQSLHQEGFSIPLLWLQNCLIRAADDRQEDG

SEQ ID NO: 788226 - protein, 743 aa, Homo sapiens
LIFHKGLHNLRNYSSDLGKQPKKVPKRRQAARELSIQRRSALNVRLFLRDFCSEFLENCYNRLMGSVKDHLLREKAQQHDETYYMWALAFFMAFNRAASFRPGLVSETLSVRTFHFIEQNLTNYYEMMLTDRKEAASWARRMHLALKAYQELLATVNEMDLSPDEAVRESSRIIKNNIFYVMEYRELFLALFRKFDERCQPRSFLRDLVETTHLFLKMLERFCRSRGNLVVQNKQKKRRKKKKKVLDQAIVSGNVPSSPEEVEAVWPALAEQLQCCAQNSELSMDSVVPFDAASEVPVEEQRAEAMVRIQDCLLAGQAPQALTLLRSAREVWPEGDVFGSQDISPEEEIQLLKQILSAPLPRQQGPEERGAEEEEEEEEEEEEELQVVQVSEKEFNFLDYLKRFACSTVVRAYVLLLRSYQQNSAHTNHCIVKMLHRLAHDLKMEALLFQLSVFCLFNRLLSDPAAGAYKELVTFAKYILGKFFALAAVNQKAFVELLFWKNTAVVREMTEGYGSLDDRSSSRRAPTWSPEEEAHLQELYLANKDVEGQDVVEAILAHLNTVPRTRKQIIHHLVQMGLADSVKDFQRKGTHIVLWTGDQELELQRLFEEFRDSDDVLGHIMKNITAKRSRARIVDKLLALGLVAERRELYKKRQKKLASSILPNGAESLKDFCQEDLEEEENLPEEDSEEEEEGGSEAEQVQGSLVLSNENLGQSLHQEGFSIPLLWLQNCLIRAADDRQEDG

SEQ ID NO: 788227 - protein, 723 aa, Homo sapiens
  misc_feature (114)..(114): Xaa can be any naturally occurring amino acid
  misc_feature (133)..(133): Xaa can be any naturally occurring amino acid
  misc_feature (150)..(150): Xaa can be any naturally occurring amino acid
  misc_feature (215)..(215): Xaa can be any naturally occurring amino acid
  misc_feature (224)..(224): Xaa can be any naturally occurring amino acid
  misc_feature (232)..(233): Xaa can be any naturally occurring amino acid
  misc_feature (235)..(235): Xaa can be any naturally occurring amino acid
MFSETVINRIFTSGLAGRLGGRKGRVEGWVAHQNGDELAKQTMLLFLYPLKPISQGFKLTPGVCFTSGLAGKLGGRKGKVEGWVAHQNGDEPGKTTMLLFCIPLKPKQFNDAFXVCFLIGSQISFSIKNWGYXPKETKSQLTAGGTEAMXFFPPFLDSNLTFVGYKHFLQHSELTRVPYKLPSPGGQSYFLRQAQSSNSPNYHYKQSFREETYTXLQKLQVRDXQNHVTASXXSXSVPKSFTKWDSLSFFFFFFLRRSLALSPRLQCSGGISAHCNIHLLGSSDSPASASRVAGTTGACHYTWLIFVFLVEMGFHHIGQAGLELLTLDPPASASQSAGITGVSHHDQPSTLLIYKGTRRTNYLINLKVRGIIFSDAPTRLLTSLKGYQLKTRVSEAECKNMVKCETALLEAGFVKGCWPPKESMPKLSGLPGPVVTQANLMHRQQYLLGTAANVPQFTFFLYLKISNVSFLGDIPSDTETQLLRMVKSPLQNSRNSTEDDSRVLSHFSKLGRCPDGGKAEPLTCTAPYPGSLCSLEEIGSIQQDSEEMTATSTEQYELPTSTGQSDLFHSLEETEEPFALFNHHSIISSLPIAAGVNCPTSVLCFVKMRVIFCNADGTRMKLYYQLQRQPTLISLKAKIHSTVISPGISCNSKSALDIREYENHTVVAKITLWLLNPFCELKKVNVAEAKLFFFFFFKDEDADSNKGIKKVLDENEKYVKDNM

SEQ ID NO: 788228 - protein, 103 aa, Homo sapiens
FLAFDRSSKGPAALGRPEFASVLDASCEKLHGPGGETDMWPQQEEEAVLRAGRGFLGSLPGLGSWAEDFLSWHADPAGQVGKHGAPCLASLHQLEGTTQTLLE

SEQ ID NO: 788229 - protein, 83 aa, Homo sapiens
  misc_feature (10)..(10): Xaa can be any naturally occurring amino acid
EEVKCHILPXGPSVSRSPESYSETFKGPSERTLRTTVMDKPSEAFPCDSHCTLIHWLSAQGQLQQGTQPELREIQVWAVDQRC

SEQ ID NO: 788230 - protein, 259 aa, Homo sapiens
GLDSKEAGGQSSQEERIEREEEGKEERTEKEEVGEEEESTRGEGEREKEEEVEEEEEKVEKETEKEAEQEKEEDSLGAGTHPDAAIPSGERTCGSEGSRSVLDLVNYFLSPEKLTAENRYYCESCASLQDAEKVVELSQGPCYLILTLLRFSFDLRTMRRRKILDDVSIPLLLRLPLAGGRGQAYDLCSVVVHSGVSSESGHYYCYAREGAARPAPSLGTADRPEPENQWYLFNDTRVSFSSFESVSNVTSFFPKDTAY

SEQ ID NO: 788231 - protein, 603 aa, Homo sapiens
LSHRPGPTVAPQSKEGKKGPRLPEKETLLSLPAKDTPPGVPEKSLGGSSLTETEAAPSLTLPSVDYIPQDSPTPSVRQIRNELEARLSSAAEKEAKPSIGSLPPKPRLEGGRICENGADDDKLSKPVAKNLPPQSTTLLPTTSLQPKAMLGPAIPPKATPEPAIPPKATLWPATPPKATLGPATPLKATSGPTTPLKATSGPAIASTATTLPTTTSQLMAEKDSGPAGQPEKPASQEVSTPSQARGEGSPSEATRLPTQGARSSAAFPPKTSPGGGEVPCLYKPHCHQSSLSREVAVVMPTLARGGAAGPGEPVEVKEPPGLPAKPPASAQPTDELLRHPVTGEVVERGSPMALLLAARQRAQKGRSVGAALGRSSLPGSLRDHSHQAEASSDSIFHSQGTPNSFTVVPKLPKEAEKDSPLTTEIPNKWGPRLGRDAEGTELSRRHNWTKPEPQAPVAWERVAPSNLPQGHPLPKSFSSPPSPSNKREEEEEEFNFEVIPPPPEFSNDPEPPAPALQYLGRQSSPPRNNYSDLRQLPNAGPGAPPALGFSRFPAGARYAGAGGLERFSGGGRSLIKKRLYVGEPHRGPGLPHGGTGRSLSSPN

SEQ ID NO: 788232 - protein, 553 aa, Homo sapiens
EKQQLLLTLLLQRIRSIQNVPESSGAVETVPAFQEITSMKERCNKLLQKVQKNKELVQTEIQERHSFTKEIIALKNFFQQTTTSFQNMAFQDHPEKSEQFEELQSILKKGKLTFENIMEKLRIKYSEMYTIVPAEIESQVEECRKALEDIDEKISNEVLKSSPSYAMRRKIEEINNGLHNVEKMLQQKSKNIEKAQEIQKKMWDELDLWHSKLNELDSEVQDIVEQDPGQAQEWMDNLMIPFQQYQQVSQRAECRTSQLNKATVKMEEYSDLLKSTEAWIENTSHLLANPADYDSLRTLSHHASTVQMALEDSEQKHNLLHSIFMDLEDLSIIFETDELTQSIQELSNQVTALQQKIMESLPQIQRMADDVVAIESEVKSMEKRVSKIKTILLSKEIFDFSPEEHLKHGEVILENIRPMKKTIAEIVSYQVELRLPQTGMKPLPVFQRTNQLLQDIKLLENVTQEQNELLKVVIKQTNEWDEEIENLKQILNNYSAQFSLEHMSPDQADKLPQLQGEIERMEKQILSLNQRKEDLLVDLKATVLNLHQHLKQE

SEQ ID NO: 788233 - protein, 216 aa, Homo sapiens
IVIRYVDYEVPSQLQNHMMKHKDIRPYICSECGMEFVQPHHLKQHSLTHKGVKEHKCGICGREFTLLANMKRHVLIHTNIRAYQCHLCYKSFVQKQTLKAHMIVHSDVKPFKCKLCGKEFNRMHNLMGHMHLHSDSKPFKCLYCPSKFTLKGNLTRHMKVKHGVMERGLHSQGLGRGRIALAQTAGVLRSLEQEEPFDLSQKRRAKVPVFQSDGES

SEQ ID NO: 788234 - protein, 60 aa, Homo sapiens
WRRGPGWGAWRRRPGSRLFQTTQHPAGGQGLDGATHACPRPSPGSDSQPPPIEGAPELSL

SEQ ID NO: 788235 - protein, 75 aa, Homo sapiens
QSVIKAQLSSPLVAEYLSGAHWRGAGDLTVPIKTATAIFCASRTGVIIRAVHTVGTKSSHFSIWHSSSLDRHGQQ

SEQ ID NO: 788236 - protein, 83 aa, Homo sapiens
LSHKDLLPDSLTCIGYKLGSHAGGSLGRGMLSVYWSTYDEAELVLRDEPCAGLKRSMPTLIIPHISGRLIYDSRTVAMEVGIR

SEQ ID NO: 788237 - protein, 114 aa, Homo sapiens
MATPLDNCLRPFPDPMVKVTAETKKISEVSSYVSANNKKNSFWGSGLLYPVALLRCQDCWAGHQTHVLKRVSHYVAQAGLKFLASSNLPTSASQSAGTTGTCHHAQPQVFIPIP

SEQ ID NO: 788238 - protein, 108 aa, Homo sapiens
LALFLLLFGDLHCQNYQFQVNFVGEFPPPPSSGSPRSNVPPATFPLWPPAELICLSHRSWCLPLHRSLNAATLAGSRWKLVEGPCQVTAMLSLSRHGPGSFRHIQILH

SEQ ID NO: 788239 - protein, 74 aa, Homo sapiens
VSSLSLTHISHRQRRQSICLRNASTQLPSSLAALPDSKDSRLRRKQKEGGWVQRLMPEIPALWEAEVGESTSRT

SEQ ID NO: 788240 - protein, 118 aa, Homo sapiens
QQLYRLTSYSISVLLHLLYHSLSLHVSSESFGSKLKILWTLIKRFILQCVFPKNKDTFLCTHTIWIKIRTLSMDTVPYSNPQSIIPVLSVVPIISFIAIFFIVQNHALHLVIMSLGFF

SEQ ID NO: 788241 - protein, 88 aa, Homo sapiens
GAFYHFEFCFGNPVIGGVCGNHQYLETAWEIHSFIHPVQTGHTHLQATARDAGGAESWSVCSGGEAGAELNDPTVDLQMAKGAVREID

SEQ ID NO: 788242 - protein, 67 aa, Homo sapiens
MGCPHCLQFTLHCPLPLAYPGQRLQAPVSKDVAGFMSRYCLKRHLSTASFTLATPTSTQQSPCCSPK

SEQ ID NO: 788243 - protein, 125 aa, Homo sapiens
MSSFSRNSGSISQGPEKPQPTNRTSALQYVHPPSWLLGAARTLRICLCRAGRGNKPDSGLTEAQGGVQEAASGLPMQPQPQGGPEQPPFRSFPPALPPSCLREFWNPKQRCPAQGRPAWGSDLWG

SEQ ID NO: 788244 - protein, 796 aa, Homo sapiens
MEGLTLSDAEQKYYSDLFSYCDIESTKKVVVNGRVLELFRAAQLPNDVVLQIMELCGATRLGYFGRSQFYIALKLVAVAQSGFPLRVESINTVKDLPLPRFVASKNEQESRHAASYSSDSENQGSYSGVIPPPPGRGQVKKGSVSHDTVQPRTSADAQEPASPVVSPQQSPPTSPHTWRKHSRHPSGGNSERPLAGPGPFWSPFGEAQSGSSAGDAVWSGHSPPPPQENWVSFADTPPTSTLLTMHPASVQDQTTVRTVASATTAIEIRRQSSSYDDPWKITDEQRQYYVNQFKTIQPDLNGFIPGSAAKEFFTKSKLPILELSHIWELSDFDKDGALTLDEFCAAFHLVVARKNGYDLPEKLPESLMPKLIDLEDSADVGDQPGEVGYSGSPAEAPPSKSPSMPSLNQTWPELNQSSEQWETFSERSSSSQTLTQFDSNIAPADPDTAIVHPVPIRMTPSKIHMQEMELKRTGSDHTNPTSPLLVKPSDLLEENKINSSVKFASGNTVADGYSSSDSFTSDPEQIGSNVTRQRSHSGTSPDNTAPPPPPPRPQPSHSRSSSLDMNRTFTVTTGQQQAGVVAHPPAVPPRPQPSQAPGPAVHRPVDADGLITHTSTSPQQIPEQPNFADFSQFEVFAASNVNDEQDDEAEKHPEVLPAEKASDPASSLRVAKTDSKTEEKTAASAPANVSKGTTPLAPPPKPVRRRLKSEDELRPEVDEHTQKTGVLAAVLASQPSIPRSVGKDKKAIQASIRRNKETNTVLARLNSELQQQLKDVLEERISLEVQLEQLRPFSHL

SEQ ID NO: 788245 - protein, 552 aa, Homo sapiens
MHPASVQDQTTVRTVASATTAIEIRRQSSSYDDPWKITDEQRQYYVNQFKTIQPDLNGFIPGSAAKEFFTKSKLPILELSHIWELSDFDKDGALTLDEFCAAFHLVVARKNGYDLPEKLPESLMPKLIDLEDSADVGDQPGEVGYSGSPAEAPPSKSPSMPSLNQTWPELNQSSEQWETFSERSSSSQTLTQFDSNIAPADPDTAIVHPVPIRMTPSKIHMQEMELKRTGSDHTNPTSPLLVKPSDLLEENKINSSVKFASGNTVADGYSSSDSFTSDPEQIGSNVTRQRSHSGTSPDNTAPPPPPPRPQPSHSRSSSLDMNRTFTVTTGQQQAGVVAHPPAVPPRPQPSQAPGPAVHRPVDADGLITHTSTSPQQIPEQPNFADFSQFEVFAASNVNDEQDDEAEKHPEVLPAEKASDPASSLRVAKTDSKTEEKTAASAPANVSKGTTPLAPPPKPVRRRLKSEDELRPEVDEHTQKTGVLAAVLASQPSIPRSVGKDKKAIQASIRRNKETNTVLARLNSELQQQLKDVLEERISLEVQLEQLRPFSHL

SEQ ID NO: 788246 - protein, 769 aa, Homo sapiens
MEGLTLSDAEQKYYSDLFSYCDIESTKKVVVNGRVLELFRAAQLPNDVVLQIMELCGATRLGYFGRSQFYIALKLVAVAQSGFPLRVESINTVKDLPLPRFVASKNEQESRHAASYSSDSENQGSYSGVIPPPPGRGQVKKGSVSHDTVQPRTSADAQEPASPVVSPQQSPPTSPHTWRKHSRHPSGGNSERPLAGPGPFWSPFGEAQSGSSAGDAVWSGHSPPPPQENWVSFADTPPTSTLLTMHPASVQDQTTVRTVASATTAIEIRRQSSSYDDPWKITDEQRQYYVNQFKTIQPDLNGFIPGSAAKEFFTKSKLPILELSHIWELSDFDKDGALTLDEFCAAFHLVVARKNGYDLPEKLPESLMPKLIDLEDSADVGDQPGEVGYSGSPAEAPPSKSPSMPSLNQTWPELNQSSEDTAIVHPVPIRMTPSKIHMQEMELKRTGSDHTNPTSPLLVKPSDLLEENKINSSVKFASGNTVADGYSSSDSFTSDPEQIGSNVTRQRSHSGTSPDNTAPPPPPPRPQPSHSRSSSLDMNRTFTVTTGQQQAGVVAHPPAVPPRPQPSQAPGPAVHRPVDADGLITHTSTSPQQIPEQPNFADFSQFEVFAASNVNDEQDDEAEKHPEVLPAEKASDPASSLRVAKTDSKTEEKTAASAPANVSKGTTPLAPPPKPVRRRLKSEDELRPEVDEHTQKTGVLAAVLASQPSIPRSVGKDKKAIQASIRRNKETNTVLARLNSELQQQLKDVLEERISLEVQLEQLRPFSHL

SEQ ID NO: 788247 - protein, 796 aa, Homo sapiens; identical to SEQ ID NO: 788244

SEQ ID NO: 788248 - protein, 393 aa, Homo sapiens
MPSLNQTWPELNQSSEQWETFSERSSSSQTLTQFDSNIAPADPDTAIVHPVPIRMTPSKIHMQEMELKRTGSDHTNPTSPLLVKPSDLLEENKINSSVKFASGNTVADGYSSSDSFTSDPEQIGSNVTRQRSHSGTSPDNTAPPPPPPRPQPSHSRSSSLDMNRTFTVTTGQQQAGVVAHPPAVPPRPQPSQAPGPAVHRPVDADGLITHTSTSPQQIPEQPNFADFSQFEVFAASNVNDEQDDEAEKHPEVLPAEKASDPASSLRVAKTDSKTEEKTAASAPANVSKGTTPLAPPPKPVRRRLKSEDELRPEVDEHTQKTGVLAAVLASQPSIPRSVGKDKKAIQASIRRNKETNTVLARLNSELQQQLKDVLEERISLEVQLEQLRPFSHL

SEQ ID NO: 788249 - protein, 773 aa, Homo sapiens
MEGLTLSDAEQKYYSDLFSYCDIESTKKVVVNGRVLELFRAAQLPNDVVLQIMELCGATRLGYFGRSQFYIALKLVAVAQSGFPLRVESINTVKDLPLPRFVASKNEQESRHAASYSSDSENQGSYSGVIPPPPGRGQVKKGSVSHDTVQPRTSADAQEPASPVVSPQQSPPTSPHTWRKHSRHPSGGNSERPLAGPGPFWSPFGEAQSGSSAGDAVWSGHSPPPPQENWVSFADTPPTSTLLTMHPASVQDQTTVRTVASATTAIEIRRQSSSYDDPWKITDEQRQYYVNQFKTIQPDLNGFIPGSAAKEFFTKSKLPILELSHIWELSDFDKDGALTLDEFCAAFHLVVARKNGYDLPEKLPESLMPKLIDLEDSADVGDQPGEVGYSGSPAEAPPSKSPSMPSLNQTWPELNQSSEQWETFSERSSSSQTLTQFDSNIAPADPDTAIVHPVPIRMTPSKIHMQEMELKRTGSDHTNPTSPLLVKPSDLLEENKINSSVKFASGNTVADGYSSSDSFTSDPEQIGSNVTRQRSHSGTSPDNTAPPPPPPRPQPSHSRSSSLDMNRTFTVTTGQQQAGVVAHPPAVPPRPQPSQAPGPAVHRPVDADGLITHTSTSPQQIPEQPNFADFSQFEVFAASNVNDEQDDEAEKHPEVLPAEKASDPASSLRVAKTDSKTEEKTAASAPANVSKGTTPLAPPPKPVRRRLKSEDELRPEVDEHTQKTGVLAAVLASQPSIPRMFLRREFPWKFNWNNFDHSLTYKPIAVNCEHTCF

SEQ ID NO: 788250 - protein, 780 aa, Homo sapiens
MEGLTLSDAEQKYYSDLFSYCDIESTKKVVVNGRVLELFRAAQLPNDVVLQIMELCGATRLGYFGRSQFYIALKLVAVAQSGFPLRVESINTVKDLPLPRFVASKNEQESRHAASYSSDSENQGSYSGVIPPPPGRGQVKKGSVSHDTVQPRTSADAQEPASPVVSPQQSPPTSPHTWRKHSRHPSGGNSERPLAGPGPFWSPFGEAQSGSSAGDAVWSGHSPPPPQENWVSFADTPPTSTLLTMHPASVQDQTTVRTVASATTAIEIRRQSSSYDDPWKITDEQRQYYVNQFKTIQPDLNGFIPGSAAKEFFTKSKLPILELSHIWELSDFDKDGALTLDEFCAAFHLVVARKNGYDLPEKLPESLMPKLIDLEDSADVGDQPGEVGYSGSPAEAPPSKSPSMPSLNQTWPELNQSSEQWETFSERSSSSQTLTQFDSNIAPADPDTAIVHPVPIRMTPSKIHMQEMELKRTGSDHTNPTSPLLVKPSDLLEENKINSSVKFASGNTVADGYSSSDSFTSDPEQIGSNVTRQRSHSGTSPDNTAPPPPPPRPQPSHSRSSSLDMNRTFTVTTGQQQAGVVAHPPAVPPRPQPSQAPGPAVHRPVDADGLITHTSTSPQQIPEQPNFADFSQFEVFAASNVNDEQDDEAEKHPEVLPAEKASDPASSLRVAKTDSKTEEKTAASAPANVSKGTTPLAPPPKPVRRRLKSEDELRPEVDEHTQKSVGKDKKAIQASIRRNKETNTVLARLNSELQQQLKDVLEERISLEVQLEQLRPFSHL

SEQ ID NO: 788251 - protein, 579 aa, Homo sapiens
MEGLTLSDAEQKYYSDLFSYCDIESTKKVVVNGRVLELFRAAQLPNDVVLQIMELCGATRLGYFGRSQFYIALKLVAVAQSGFPLRVESINTVKDLPLPRFVASKNEQESRHAASYSSDSENQGSYSGVIPPPPGRGQVKKGSVSHDTVQPRTSADAQEPASPVVSPQQSPPTSPHTWRKHSRHPSGGNSERPLAGPGPFWSPFGEAQSGSSAGDAVWSGHSPPPPQENWVSFADTPPTSTLLTMHPASVQDQTTVRTVASATTAIEIRRQSSSYDDPWKITDEQRQYYVNQFKTIQPDLNGFIPGSAAKEFFTKSKLPILELSHIWELSDFDKDGALTLDEFCAAFHLVVARKNGYDLPEKLPESLMPKLIDLEDSADVGDQPGEVGYSGSPAEAPPSKSPSMPSLNQTWPELNQSSEQWETFSERSSSSQTLTQFDSNIAPADPDTAIVHPVPIRMTPSKIHMQEMELKRTGSDHTNPTSPLLVKPSDLLEDELRPEVDEHTQKTGVLAAVLASQPSIPRSVGKDKKAIQASIRRNKETNTVLARLNSELQQQLKDVLEERISLEVQLEQLRPFSHL

SEQ ID NO: 788252 - protein, 455 aa, Homo sapiens
MEGLTLSDAEQKYYSDLFSYCDIESTKKVVVNGRVLELFRAAQLPNDVVLQIMELCGATRLGYFGRSQFYIALKLVAVAQSGFPLRVESINTVKDLPLPRFVASKNEQESRHAASYSSDSENQGSYSGVIPPPPGRGQVKKGSVSHDTVQPRTSADAQEPASPVVSPQQSPPTSPHTWRKHSRHPSGGNSERPLAGPGPFWSPFGEAQSGSSAGDAVWSGHSPPPPQENWVSFADTPPTSTLLTMHPASVQDQTTVRTVASATTAIEIRRQSSSYDDPWKITDEQRQYYVNQFKTIQPDLNGFIPGSAAKEFFTKSKLPILELSHIWELSDFDKDGALTLDEFCAAFHLVVARKNGYDLPEKLPESLMPKLIDLEDSADVGDQPGEVGYSGSPAEAPPSKSPSMPSLNQTWPELNQSSEQWETFSERSSSSQTLTQFDSNIAPADPVSQSLSLLV

SEQ ID NO: 788253 - protein, 80 aa, Homo sapiens
VPYEVTADNNSSSRQKKYTYAKTTVVKHICSKGTTPLAPPPKPVRRRLKSEDELRPEVDEHTQKTGVLAAVLASQPSIPR

SEQ ID NO: 788254 - protein, 830 aa, Homo sapiens
MEGLTLSDAEQKYYSDLFSYCDIESTKKVVVNGRVLELFRAAQLPNDVVLQIMELCGATRLGYFGRSQFYIALKLVAVAQSGFPLRVESINTVKDLPLPRFVASKNEQESRHAASYSSDSENQGSYSGVIPPPPGRGQVKKGSVSHDTVQPRTSADAQEPASPVVSPQQSPPTSPHTWRKHSRHPSGGNSERPLAGPGPFWSPFGEAQSGSSAGDAVWSGHSPPPPQENWVSFADTPPTSTLLTMHPASVQDQTTVRTVASATTAIEIRRQSSSYDDPWKITDEQRQYYVNQFKTIQPDLNGFIPGSAAKEFFTKSKLPILELSHIWELSDFDKDGALTLDEFCAAFHLVVARKNGYDLPEKLPESLMPKLIDLEDSAALMLLMMSGAEQNPQEGGRVDTVFQQEARLEHCINVGDQPGEVGYSGSPAEAPPSKSPSMPSLNQTWPELNQSSEQWETFSERSSSSQTLTQFDSNIAPADPDTAIVHPVPIRMTPSKIHMQEMELKRTGSDHTNPTSPLLVKPSDLLEENKINSSVKFASGNTVADGYSSSDSFTSDPEQIGSNVTRQRSHSGTSPDNTAPPPPPPRPQPSHSRSSSLDMNRTFTVTTGQQQAGVVAHPPAVPPRPQPSQAPGPAVHRPVDADGLITHTSTSPQQIPEQPNFADFSQFEVFAASNVNDEQDDEAEKHPEVLPAEKASDPASSLRVAKTDSKTEEKTAASAPANVSKGTTPLAPPPKPVRRRLKSEDELRPEVDEHTQKTGVLAAVLASQPSIPRSVGKDKKAIQASIRRNKETNTVLARLNSELQQQLKDVLEERISLEVQLEQLRPFSHL

SEQ ID NO: 788255 - protein, 796 aa, Homo sapiens; identical to SEQ ID NO: 788244

SEQ ID NO: 788256 - protein, 232 aa, Homo sapiens [sequence omitted]

SEQ ID NO: 788257 - protein, 550 aa, Homo sapiens
MEGLTLSDAEQKYYSDLFSYCDIESTKKVVVNGRVLELFRAAQLPNDVVLQIMELCGATRLGYFGRSQFYIALKLVAVAQSGFPLRVESINTVKDLPLPRFVASKNEQESRHAASYSSDSENQGSYSGVIPPPPGRGQVKKGSVSHDTVQPRTSADAQEPASPVVSPQQSPPTSPHTWRKHSRHPSGGNSERPLAGPGPFWSPFGEAQSGSSAGDAVWSGHSPPPPQENWVSFADTPPTSTLLTMHPASVQDQTTVRTVASATTAIEIRRQSSSYDDPWKITDEQRQYYVNQFKTIQPDLNGFIPGSAAKEFFTKSKLPILELSHIWELSDFDKDGALTLDEFCAAFHLVVARKNGYDLPEKLPESLMPKLIDLEDSADVGDQPGEVGYSGSPAEAPPSKSPSMPSLNQTWPELNQSSEQWETFSERSSSSQTLTQFDSNIAPADPDTAIVHPVPIRMTPSKIHMQEMELKRTGSDHTNPTSPLLVKPSDLLEENKINSSVKFASGNTVADGYSSSDSFTSDPEQIGSNVTRQRSVFLSMKSMLNYLAAF

SEQ ID NO: 788258 - protein, 576 aa, Homo sapiens
MEGLTLSDAEQKYYSDLFSYCDIESTKKVVVNGRVLELFRAAQLPNDVVLQIMELCGATRLGYFGRSQFYIALKLVAVAQSGFPLRVESINTVKDLPLPRFVASKNEQESRHAASYSSDSENQGSYSGVIPPPPGRGQVKKGSVSHDTVQPRTSADAQEPASPVVSPQQSPPTSPHTWRKHSRHPSGGNSERPLAGPGPFWSPFGEAQSGSSAGDAVWSGHSPPPPQENWVSFADTPPTSTLLTMHPASVQDQTTVRTVASATTAIEIRRQSSSYDDPWKITDEQRQYYVNQFKTIQPDLNGFIPGSAAKEFFTKSKLPILELSHIWELSDFDKDGALTLDEFCAAFHLVVARKNGYDLPEKLPESLMPKLIDLEDSADVGDQPGEVGYSGSPAEAPPSKSPSMPSLNQTWPELNQSSEQWETFSERSSSSQTLTQFDSNIAPADPDTAIVHPVPIRMTPSKIHMQEMELKRTGSDHTNPTSPLLVKPSDLLEENKINSSVKFASGNTVADGYSSSDSFTSDPEQIGSNVTRQRSHSGTSPDNTAPPPPPPRPQPSHSRSSSLDMNRTFTVTTGRG

SEQ ID NO: 788259 - protein, 37 aa, Homo sapiens
YGRQAPGGKQLPGVSQLATKQQSQDSGPGANTRPGPY

SEQ ID NO: 788260 - protein, 39 aa, Homo sapiens
MQSNTLRRSRAAWPRLVLWGSILRTVSQKMGLGARKKKM

SEQ ID NO: 788261 - protein, 103 aa, Homo sapiens
RALLVRMPVQSAHLGVGLFPGCRPPCAFTSLTLPLLKLGSSREVDKLLSLIIFSQAFKGNHYPGEQGHCGFCFREVLRGSKLQLCDSEQVTQPLWARVSSPST

SEQ ID NO: 788262 - protein, 110 aa, Homo sapiens
EWVAVFSTNHAGLGHLKAFSSAWLVLYRGVGSRCGESIGTIELAMRTDFTKREISHTPISASKVIYFKSFICILVCQLHSILLFKPSRVCNRKVLLQPDIHKPNWSFSLV

SEQ ID NO: 788263 - protein, 898 aa, Homo sapiens
QPVAARRRRRRRRRRRRRLPPASPPSSSVSSSLSPSAVVMACRWSTKESPRWRSALLLLFLAGVYGNGALAEHSENVHISGVSTACGETPEQIRAPSGIITSPGWPSEYPAKINCSWFIRANPGEIITISFQDFDIQGSRRCNLDWLTIETYKNIESYRACGSTIPPPYISSQDHIWIRFHSDDNISRKGFRLAYFSGKSEEPNCACDQFRCGNGKCIPEAWKCNNMDECGDSSDEEICAKEANPPTAAAFQPCAYNQFQCLSRFTKVYTCLPESLKCDGNIDCLDLGDEIDCDVPTCGQWLKYFYGTFNSPNYPDFYPPGSNCTWLIDTGDHRKVILRFTDFKLDGTGYGDYVKIYDGLEENPHKLLRVLTAFDSHAPLTVVSSSGQIRVHFCADKVNAARGFNATYQVDGFCLPWEIPCGGNWGCYTEQQRCDGYWHCPNGRDETNCTMCQKEEFPCSRNGVCYPRSDRCNYQNHCPNGSDEKNCFFCQPGNFHCKNNRCVFESWVCDSQDDCGDGSDEENCPVIVPTRVITAAVIGSLICGLLLVIALGCTCKLYSLRMFERRSFETQLSRVEAELLRREAPPSYGQLIAQGLIPPVEDFPVCSPNQASVLENLRLAVRSQLGFTSVRLPMAGRSSNIWNRIFNFARSRHSGSLALVSADGDEVVPSQSTSREPERNHTHRSLFSVESDDTDTENERRDMAGASGGVAAPLPQKVPPTTAVEATVGACASSSTQSTRGGHADNGRDVTSVEPPSVSPARHQLTSALSRMTQGLRWVRFTLGRSSSLSQNQSPLRQLDNGVSGREDDDDVEMLIPISDGSSDFDVNDCSRPLLDLASDQGQGLRQPYNATNPGVRPSNRDGPCERCGIVHTAQIPDTCLEVTLKNETSDDEALLLC

SEQ ID NO: 788264 - protein, 879 aa, Homo sapiens
QPVAARRRRRRRRRRRRRLPPASPPSSSVSSSLSPSAVVMACRWSTKESPRWRSALLLLFLAGVYACGETPEQIRAPSGIITSPGWPSEYPAKINCSWFIRANPGEIITISFQDFDIQGSRRCNLDWLTIETYKNIESYRACGSTIPPPYISSQDHIWIRFHSDDNISRKGFRLAYFSGKSEEPNCACDQFRCGNGKCIPEAWKCNNMDECGDSSDEEICAKEANPPTAAAFQPCAYNQFQCLSRFTKVYTCLPESLKCDGNIDCLDLGDEIDCDVPTCGQWLKYFYGTFNSPNYPDFYPPGSNCTWLIDTGDHRKVILRFTDFKLDGTGYGDYVKIYDGLEENPHKLLRVLTAFDSHAPLTVVSSSGQIRVHFCADKVNAARGFNATYQVDGFCLPWEIPCGGNWGCYTEQQRCDGYWHCPNGRDETNCTMCQKEEFPCSRNGVCYPRSDRCNYQNHCPNGSDEKNCFFCQPGNFHCKNNRCVFESWVCDSQDDCGDGSDEENCPVIVPTRVITAAVIGSLICGLLLVIALGCTCKLYSLRMFERRSFETQLSRVEAELLRREAPPSYGQLIAQGLIPPVEDFPVCSPNQASVLENLRLAVRSQLGFTSVRLPMAGRSSNIWNRIFNFARSRHSGSLALVSADGDEVVPSQSTSREPERNHTHRSLFSVESDDTDTENERRDMAGASGGVAAPLPQKVPPTTAVEATVGACASSSTQSTRGGHADNGRDVTSVEPPSVSPARHQLTSALSRMTQGLRWVRFTLGRSSSLSQNQSPLRQLDNGVSGREDDDDVEMLIPISDGSSDFDVNDCSRPLLDLASDQGQGLRQPYNATNPGVRPSNRDGPCERCGIVHTAQIPDTCLEVTLKNETSDDEALLLC

SEQ ID NO: 788265 - protein, 831 aa, Homo sapiens
VLAAGKSSIEALADLMSACGETPEQIRAPSGIITSPGWPSEYPAKINCSWFIRANPGEIITISFQDFDIQGSRRCNLDWLTIETYKNIESYRACGSTIPPPYISSQDHIWIRFHSDDNISRKGFRLAYFSGKSEEPNCACDQFRCGNGKCIPEAWKCNNMDECGDSSDEEICAKEANPPTAAAFQPCAYNQFQCLSRFTKVYTCLPESLKCDGNIDCLDLGDEIDCDVPTCGQWLKYFYGTFNSPNYPDFYPPGSNCTWLIDTGDHRKVILRFTDFKLDGTGYGDYVKIYDGLEENPHKLLRVLTAFDSHAPLTVVSSSGQIRVHFCADKVNAARGFNATYQVDGFCLPWEIPCGGNWGCYTEQQRCDGYWHCPNGRDETNCTMCQKEEFPCSRNGVCYPRSDRCNYQNHCPNGSDEKNCFFCQPGNFHCKNNRCVFESWVCDSQDDCGDGSDEENCPVIVPTRVITAAVIGSLICGLLLVIALGCTCKLYSLRMFERRSFETQLSRVEAELLRREAPPSYGQLIAQGLIPPVEDFPVCSPNQASVLENLRLAVRSQLGFTSVRLPMAGRSSNIWNRIFNFARSRHSGSLALVSADGDEVVPSQSTSREPERNHTHRSLFSVESDDTDTENERRDMAGASGGVAAPLPQKVPPTTAVEATVGACASSSTQSTRGGHADNGRDVTSVEPPSVSPARHQLTSALSRMTQGLRWVRFTLGRSSSLSQNQSPLRQLDNGVSGREDDDDVEMLIPISDGSSDFDVNDCSRPLLDLASDQGQGLRQPYNATNPGVRPSNRDGPCERCGIVHTAQIPDTCLEVTLKNETSDDEALLLC

SEQ ID NO: 788266 - protein, 101 aa, Homo sapiens
MGGEAGWGGRLQRGEGCTISKEFGSRGPAFLRRAPPASWLPSPRPICTPGPGCAARGVSGPVEPAPRCAARRLTVRTGGRCGGATIPCPTPPGVWRRTWRP

SEQ ID NO: 788267 - protein, 86 aa, Homo sapiens
QTPQSGEGEEKKKEKEEEKKGGGGEEERRRKKEKKKERRRTKKKKERKKKKEEGEEEGEGEEERKDDREDNINIFKYHVISKRTGF

SEQ ID NO: 788268 - protein, 79 aa, Homo sapiens
IRLCESNFDRGQTTSLENKNSKTTTHRNHENKNITICQNPFVWIEQVYTNKLKNEKKFILQTVKVPLLKNGSIFIFNYL

SEQ ID NO: 788269 - protein, 143 aa, Homo sapiens
RLHGMGSVTREKMEHGRDSMARGQRGSHRLPEEQWGERFPCLPLGSAEKEQWPWRLCFMLPAAFVAGTSYGHREKLLFPKHYANSTVTTRNTSPVKTPPAPPATKMQTNPRCSCVLISLQPTVLDWDTRFGKSVCFVSALPLL

SEQ ID NO: 788270 - protein, 121 aa, Homo sapiens
QPSLFLISFLLEGSFFFPELFSGRHWELSHPPTPVQDIFYSSAKRISLNNDFDPIPPLWEIPWELPTACGLSPSPHTGQIPFGLACAPLRHTSCLEQCCVSRNVAASAHIHTPPRILGSLF

SEQ ID NO: 788271 - protein, 126 aa, Homo sapiens
QANRILPISTLHLSFINYSASYTIKVYHNHHPIILFHPQHQSCWLAQSCWLATYLKQPPWTCPFISYFIPTPYNNSVSALRGGGQLTVTHPLRMQSQVCQLQDRLSDPTQQNTGEQFRMTLCSWRP

SEQ ID NO: 788272 - protein, 101 aa, Homo sapiens
YCLAIQQLYDTHKNPQGLVCAVSLAAPTATGPRPILLEVLLALPMWRFFPTHLGGLDLLHKAADVFPTGSCQLSQGPMHWHWGLAERGEQDGPAYLRQPNL

SEQ ID NO: 788273 - protein, 69 aa, Homo sapiens
ACVEARGVGDCGHVLEGASETSGKPFLPTRSLPLCLTIFHRERCHKEEMEFSGKSGGLGDKRSGFAPWL

SEQ ID NO: 788274 - protein, 102 aa, Homo sapiens
SASQSAGITGVSHCARPKRKEILIHAAAWVNFDDIMLSETRLSQKDKYYMMPLTSVTFSSQIQRQEVESWLLEKGENWELLFSGYSIPIWENKVLEFGCTTV

SEQ ID NO: 788275 - protein, 102 aa, Homo sapiens; identical to SEQ ID NO: 788274

SEQ ID NO: 788276 - protein, 73 aa, Homo sapiens
DHVYSFLVIPYNYKFKEMQKDEYLVHFNINTKNCYITKNLGRVQWLLPVIPAIGITGLSHLAQPALRLLQPMV

SEQ ID NO: 788277 - protein, 71 aa, Homo sapiens
MTAPTSGNILHAQCWAQNKRGSHLADGETDPISSVTNTLEAGVVPSVLGWPVLQPGDTVGIQPPPPPQGWS

SEQ ID NO: 788278 - protein, 273 aa, Homo sapiens
NNVPHLGNIIGCVLSADVFARYSRLRQWNTLYLCGTDEYGTATETKALEEGLTPQEICDKYHIIHADIYRWFNISFDIFGRTTTPQQTKITQDIFQQLLKRGLCCKILWSNCDVSTVLRFLADRFVEGVCPFCGYEEARGDQCDKCGKLINAVELKKPQCKVCRSCPVVQSSQHLFLDLPKLEKRLGGTWSGRTLPGSDLYHPNAQVLIDPVLGSSRMWPSKANAWINPETFKWGNPCVNPFRQVLDRTGYFLMVLVDAIMAYLAHPTAISRN

SEQ ID NO: 788279 - protein, 84 aa, Homo sapiens
MEDSSYDNHLEGDDPEREVGHISREETRYKEKRRDEVSLVEYSWGRISHLQESLHLPFLPILVATCIYSFPSSHPSLCPAFSIH

SEQ ID NO: 788280 - protein, 67 aa, Homo sapiens
SHCNWRPSGGRDQEEDAAQSPGPSIHRPLEMAWSPVASGLQGPSEVLIKPGRHTMLVKAGFVDAGLN

SEQ ID NO: 788281 - protein, 98 aa, Homo sapiens
AWPPSLYAHQTILCSGAQGVGLGAWDPWLLSASSQQWLATASKGQGPISSRSHSPVGLCSITPPWALLPMLLEVPFLDWHLLRHNHQGLNQLISKVPR

SEQ ID NO: 788282 - protein, 48 aa, Homo sapiens
PRQQGGEWGNKITTKSLGVSHSPSPGTLSETLQSPRNSLREAGRRPAI

SEQ ID NO: 788283 - protein, 130 aa, Homo sapiens
IFLLSVVSHSLPKSVCSVYFLFLFLLPSLFVFFPFFPISFLSVCLLFSPIPNLYFSHNSILFPKGGKVHYKDSYKKREIPQRENQERVSTVYKFMLQRLAYFLEVSLRGCTSLYPNFKWDMFVKYVCQTF

SEQ ID NO: 788284 - protein, 50 aa, Homo sapiens
MEGLLCYAKELWQYPAGGRSCRRFVNKEMTTDLYFRKTGCWQCGQWAEAG

SEQ ID NO: 788285 - protein, 119 aa, Homo sapiens
MHAQMNNYHSGALSVPGTVRRVSFIFHLPQWGNSQPLKSEIPSDPAIPLLAIYPKEYKLFRHEDTCTRMFIAALLTIAKTWNQPKCPSMIDWIKKMWYIHTMEYYTAMKRNEILSFAGT

SEQ ID NO: 788286 - protein, 736 aa, Homo sapiens
MPKGRQKVPHLDAPLGLPTCLWLELAGLFLLVPWVMGLAGTGGPDGQGTGGPSWAVHLESLEGDGEEETLEQQADALAQAAGLVNAGRIGELQGHYLFVQPAGHRPALEVEAIRQQVEAVLAGHEAVRWHSEQRLLRRAKRSVHFNDPKYPQQWHLNNRRSPGRDINVTGVWERNVTGRGVTVVVVDDGVEHTIQDIAPNYSPEGSYDLNSNDPDPMPHPDVENGNHHGTRCAGEIAAVPNNSFCAVGVAYGSRIAGIRVLDGPLTDSMEAVAFNKHYQINDIYSCSWGPDDDGKTVDGPHQLGKAALQHGVIAGRQGFGSIFVVASGNGGQHNDNCNYDGYANSIYTVTIGAVDEEGRMPFYAEECASMLAVTFSGGDKMLRSIVTTDWDLQKGTGCTEGHTGTSAAAPLAAGMIALMLQVRPCLTWRDVQHIIVFTATRYEDRRAEWVTNEAGFSHSHQHGFGLLNAWRLVNAAKIWTSVPYLASYVSPVLKENKAIPQSPRSLEVLWNLSRMDLEMSGLKTLEHVAVTVSITHPRRGSLELKLFCPSGMMSLIGAPRSMDYGSVWSAVDIRDRQRLLESAMSGKYLHDDFALPCPPGLKIPEEDGYTITPNTLKTLVLVGCFTVFWTVYYMLEVYLSQRNVASNQVCRSGPCHWPHRSRKAKEEGTELESVPLCSSKDPDEVETESRGPPTTSDLLAPDLLEQGDWSLSQNKSALDCPHQHLDVPHGKEEQIC

SEQ ID NO: 788287 - protein, 601 aa, Homo sapiens
MPKGRQKVPHLDAPLGLPTCLWLELAGLFLLVPWVMGLAGTGGPDGQGTGGPSWAVHLESLEGDGEEETLEQQADALAQAAGLVNAGRIGELQGHYLFVQPAGHRPALEVEAIRQQVEAVLAGHEAVRWHSEQRLLRRAKRSVHFNDPKYPQQWHLNNRRSPGRDINVTGVWERNVTGRGVTVVVVDDGVEHTIQDIAPNYSPEGSYDLNSNDPDPMPHPDVENGNHHGTRCAGEIAAVPNNSFCAVGVAYGSRIAGIRVLDGPLTDSMEAVAFNKHYQINDIYSCSWGPDDDGKTVDGPHQLGKAALQHGVIAGRQGFGSIFVVASGNGGQHNDNCNYDGYANSIYTVTIGAVDEEGRMPFYAEECASMLAVTFSGGDKMLRSIVTTDWDLQKGTGCTEGHTGTSAAAPLAAGMIALMLQVRPCLTWRDVQHIIVFTATRYEDRRAEWVTNEAGFSHSHQHGFGLLNAWRLVNAAKIWTSVPYLASYVSPVLKENKAIPQSPRSLEVLWNLSRMDLEMSGLKTLEHVAVTVSITHPRRGSLELKLFCPSGMMSLIGAPSRDWIRRFNDGLLHCAMWGKEPRNYRCNKDVGISIQADLARS

SEQ ID NO: 788288 - protein, 118 aa, Homo sapiens
YLPKNGAYMCLLIDSNTLVGVVGSEEILSNSQYYKKFSWTPFGVKENHYNVLVLWEGQEECVSLQAGVEHRFMDLAEHWLLWGNQKLQTSTVVAAEGHYPKWTNARTENQILHVLAYK

SEQ ID NO: 788289 - protein, 103 aa, Homo sapiens
MRRRRPGCPASRHGSVHHRPPRCLCPSLPFKGKRYLFIFLPWTLEISGENSALATKCSGSRMLPSFLPFHMEFIQSTKASHGTDIRGARSPGSGKHKPVLRGP

SEQ ID NO: 788290 - protein, 102 aa, Homo sapiens
GPTHRHGFPWQSPGTGRHGSPHTQHSETFLFPGKIEAFWPHCGPSQGHRGAAHKSDQSKRPRSLAVSGQWLPLCVSQNGCRGSCTLWADWSSGCLADLSRGL

SEQ ID NO: 788291 - protein, 68 aa, Homo sapiens
ITIQRATVTKTAWYWYQNRDIDRWNRTEPSEIMPHIYDYLIFHKPEKNKQWGKDSLFNKWCWENWLAI

SEQ ID NO: 788292 - protein, 108 aa, Homo sapiens
ILQHAAGLHLHNRSMLDHLLLQFAVQVWKHLHFLILRVMLDFSKNPRNSKITQVTVSLQSSPLLSSLFFSFLDRVSLCHPCWSTVAQSGLTATSTSQVQVILLPQPPE

SEQ ID NO: 788293 - protein, 133 aa, Homo sapiens
MQLAYIFTIGACLTTCFFSLLFSMAKYFRNNFINPHIYSGGITKLIFCWDFTVTHEKAVKLKQKNLSTEIRENLSELRQENSKLTFNQLLTRFSAYMVAWVVSTGVAIACCAAVYYLAEYNLEVTNTRVQGRE

SEQ ID NO: 788294 - protein, 63 aa, Homo sapiens
YFKNYLSFYSSYMSYLAKNSRKKEDKRAQSPNLTRSAQFPPMLSTLSILMELTIHLHIRVSFK

SEQ ID NO: 788295 - protein, 112 aa, Homo sapiens
MTPILLCFSIVLQHIEESKEILEITHPQSTHFPLSFSSLLFFLSLSLSFFLTGSHSVTLAKVQWYRRLGGRNTECHQRKSLFWKELLNQDLKKQKEPTTQGWFGIEFQADGT

SEQ ID NO: 788296 - protein, 122 aa, Homo sapiens
VWALCPPPSPAVRPRVPFAFNPSRADCLRLLRIAPTWLAERQKSAVAVRGKLFANRRPHPAETPQAGSQKSQSSPNPGSASLSQWDSSGSQFAHLCRRCEEFLHNREKKVWKQPKIILIRNN

SEQ ID NO: 788297 - protein, 107 aa, Homo sapiens
MVLPQGLLTFRDVAIEFSQEEWKCLDPAQRTLYRDVMLENYRNLVSLAWSFSLLLPRLAVQLAQSRLTTTSASRVQAILPPQPQKLLELQVFSSKCDIKELPPKKGE

SEQ ID NO: 788298 - protein, 114 aa, Homo sapiens
GFAPRRHPAQAPPTTSRGPPRPGFCPARADSRKSGSGSRGVTVTPRRINFQRLMLHEKATKKTKEKETRMALPQGCGYRILFGGVEMPEPCTEGFIQGRDVAELQEPGVCGIDF

SEQ ID NO: 788299 - protein, 234 aa, Homo sapiens
EISEVDCKDALEMICNLESEGDEKSALVLCTAFLSRQLQQGDMYCAWELTLFWSKLQQRVEPSIQVYLERCRQLSLLTKTVYHIFFLIKVINSERWGLTILPRFISNSWAQVILRALAFQKWWDYRYEPPHMTFAAAFLTGIVCTMTEGAGLATCIELCVKALRLESTENTEVKISICKTISCLLPDDLEVKRACQLSEFLIEPTVDAYYAVEMLYNQPDQKYDEENLPIPNSL

SEQ ID NO: 788300 - protein, 294 aa, Homo sapiens
  misc_feature (291)..(291): Xaa can be any naturally occurring amino acid
DQLVLIFAGKILKDQDTLSQHGIHDGLTVHLVIKTQNRPQDHSAQQTNTAGSNVTTSSTPNSNSTSGSATSNPFGLGGLGGLAGLSSLGLNTTNFSELQSQMQRQLLSNPEMMVQIMENPFVQSMLSNPDLMRQLIMANPQMQQLIQRNPEISHMLNNPDIMRQTLELARNPAMMQEMMRNQDRALSNLESIPGGYNALRRMYTDIQEPMLSAAQEQFGGNPFASLVSNTSSGEGSQPSRTENRDPLPNPWAPQTFPESHQPPAALQHCGWHYMVVLAVALLGRVLRGPNXVLE

SEQ ID NO: 788301 - protein, 127 aa, Homo sapiens
MLLFCEPVPERKVGSLFGSGPSFYYNHFGKKGKRAAVLHSVFLLLLLTQSELRLTMIPSFDLEHITIRGLQFKVQHHSRQNNGLAKDVHVLILRICEQVRLHDVLTALCFPRTHMLKPNPQCVCIWR

SEQ ID NO: 788302 - protein, 102 aa, Homo sapiens
REAALRDICQVGMGGVELQGHHVSHGSPMVALSCLSVILSVLCGPPVTPFRLSFQFSTVPASPLPLSRLSVFSPCSQVLRWPLVLCPLPKTLCRESVKTQRK

SEQ ID NO: 788303 - protein, 170 aa, Homo sapiens
GVMACGPLDPLGRGANGEVVPQCARIRAGWAVRARRRGAQSPRDPQAPGTLGNAPNRPGSEGRGQDSAARLAFDCVRPCSPPTLRPFSPDPRLLSLPPSSGGERILAPREKSMGFVFSFLLFGGLGRGGNPCGRKAPGLGALAATCLIGAPSSHSGKAGSVWFLFFFLSL

SEQ ID NO: 788304 - protein, 107 aa, Homo sapiens
MGKLRPSSFKQQELGNGAECRCPFQIGCSMGQWDMPVVTHVTHSPTCLAPAGSEAGHPDEQDAMCPFNIMWPHTHTYERNQPDTRDGLLYNSVFWFLICICLVISDV

SEQ ID NO: 788305 - protein, 97 aa, Homo sapiens
GSEEPQNSHGPLAHHSCCMEKQPDCLPCGSLSLLLLTGQGLLTWAPSTSTLPPPDYFSQWRLCVSLGWNSQKHLTGSLPLLLQQYQPLLPSGGGTKT

SEQ ID NO: 788306 - protein, 74 aa, Homo sapiens
TKSASPAVYLILANGNSILPVAQAKNLESSLTYPFLLYPTIPSLGKSCGHQLQNLQQTQPLFLVSIPTTLFQTT

SEQ ID NO: 788307 - protein, 123 aa, Homo sapiens
CQILNQLSWSSQVGSGRICINQHFNRRQGAGRAAGTRKGGEALHTDWAGGLLLTSALEVSLDGCLGVHQGSRKKSGKDVPDRSCVAQASLVHSGWLVHWMHEGGKWTAAESFKAWWDMACQEY

SEQ ID NO: 788308 - protein, 78 aa, Homo sapiens
MEKWSQELAETMILGRPLENHTHSKELMMSGAPLESLPMRTLRPPPSMTIAAQRLSRRGTATPHLLASKGLPTHLRVH

SEQ ID NO: 788309 - protein, 68 aa, Homo sapiens
LGVPQRAPHASLKAAGNAAIDQWVLGSSHPRADSLLHGPRSVSHACRCICMGTWGPRSLPTAEFKDAG

SEQ ID NO: 788310 - protein, 59 aa, Homo sapiens
MPPSAFFLFCSEYHPKTKGEHPVQSTSDIVKKLGGMWNNTAADEKQPHEKKAVKLKEKY

SEQ ID NO: 788311 - protein, 115 aa, Homo sapiens [sequence omitted]

SEQ ID NO: 788312 - protein, 81 aa, Homo sapiens
ALWTHPQHSGRGGLLSPGPRSTLGPELSASLLAEPGERKPGPRCRSALSLHPPQHESLSCRPARPFFPLLLSNEAKWVHVA

SEQ ID NO: 788313 - protein, 111 aa, Homo sapiens
YTYTIYTYTICTYIHCTYTFCTCILCTYTICTYIHCTYTLCTYTICTYIHCTYTLCTYTICTYIHCTYTFCTYIICTYIHCTSTFCTYIHCTYILCTYTICTYTICTYIHC

SEQ ID NO: 788314 - protein, 270 aa, Homo sapiens
MDWKTLQALLSGVNKYSTAFGRIWLSVVFVFRVLVYVVAAERVWGDEQKDFDCNTKQPGCTNVCYDNYFPISNIRLWALQLIFVTCPSLLVILHVAYREERERRHRQKHGDQCAKLYDNAGKKHGGLWWTYLFSLIFKLIIEFLFLYLLHTLWHGFNMPRLVQCANVAPCPNIVDCYIARPTEKKIFTYFMVGASAVCIVLTICELCYLICHRVLRGLHKDKPRGGCSPSSSASRASTCRCHHKLVEAGEVDPDPGNNKLQASAPNLTPI

SEQ ID NO: 788315 - protein, 270 aa, Homo sapiens; identical to SEQ ID NO: 788314

SEQ ID NO: 788316 - protein, 270 aa, Homo sapiens; identical to SEQ ID NO: 788314

SEQ ID NO: 788317 - protein, 224 aa, Homo sapiens
SFSSSGDLYTTSSQLTLPATQCLAGKSVTCHVKHYTNPSQDVTVPCPVPSTPPTPSPSTPPTPSLLMLPPPDCHVHRRGPRGPALLFSLIFKLIIEFLFLYLLHTLWHGFNMPRLVQCANVAPCPNIVDCYIARPTEKKIFTYFMVGASAVCIVLTICELCYLICHRVLRGLHKDKPRGGCSPSSSASRASTCRCHHKLVEAGEVDPDPGNNKLQASAPNLTPI

SEQ ID NO: 788318 - protein, 270 aa, Homo sapiens; identical to SEQ ID NO: 788314

SEQ ID NO: 788319 - protein, 139 aa, Homo sapiens
MDWKTLQALLSGVNKYSTAFGRIWLSVVFVFRVLVYVVAAERVWGDEQKDFDCNTKQPGCTNVCYDNYFPISNIRLWALQLIFVTCPSLLVILHVGLSLRQWCSHLPPHNCAQAGASLSDPAPRDLGGCADRTSSRQFP

SEQ ID NO: 788320 - protein, 160 aa, Homo sapiens [sequence omitted]

SEQ ID NO: 788321 - protein, 160 aa, Homo sapiens [sequence omitted]

SEQ ID NO: 788322 - protein, 320 aa, Homo sapiens
PGPDGPRRRGRKPTKAKRDGPPRPRGRPRIRPLEVPTTAGPASASTPTDGAKKPRGRGRGRGRKAEEAGGTRLEPLKPLKIKLSVPKAGEGLGTSSGDAISGTDHNSLDSSLTREKIEAKIKEVEEKQPEMKSGFMASFLDFLKSGKRHPPLYQAGLTPPLSPPKSVPPSVPARGLQPQPPATPAVPHPPPSGAFGLGGALEAAESEGLGLGCPSPCKRLDEELKRNLETLPSFSSDEEDSVAKNRDLQESISSAISALDDPPLAGPKDTSTPDGPPLAPAAAVPGPPPLPGLPSANSNGTPGELWAGGLGVELKGYYDH

SEQ ID NO: 788323 - protein, 375 aa, Homo sapiens
PGPDGPRRRGRKPTKAKRDGPPRPRGRPRIRPLEVPTTAGPASASTPTDGAKKPRGRGRGRGRKAEEAGGTRLEPLKPLKIKLSVPKAGEGLGTSSGDAISGTDHNSLDSSLTREKIEAKIKEVEEKQPEMKSGFMASFLDFLKSGKRHPPLYQAGLTPPLSPPKSVPPSVPARGLQPQPPATPAVPHPPPSGAFGLGGALEAAESEGLGLGCPSPCKRLDEELKRNLETLPSFSSDEEDSVAKNRDLQESISSAISALDDPPLAGPKDTSTPDGPPLAPAAAVPGPPPLPGLPSAKPGQWLTPEPPAAGGERRAQQLHVLTSESLVSSEVTRDRPIPHNAGEPPDSHKARKANPARTRAAAAKKGGRNREQRKQ

SEQ ID NO: 788324 - protein, 103 aa, Homo sapiens
MSPAPGYRASAHIPWGQVDGTQGHGGGLLTGSRARVWEEGGRCRNLTGLSLTGPRALASLRSSSGQCFSSTLSLGGCVAWGSGLWWRPVCRKAPLPTKRQLPI

SEQ ID NO: 788325 - protein, 76 aa, Homo sapiens
KKMKPEQAWNMLCTTVAGQRLKAKAKPKWLLRPKSCPGQLPHPNLESKIPSCRSGPGPHLVSSSIKGSECRALGVA

SEQ ID NO: 788326 - protein, 94 aa, Homo sapiens
AAAKCALRLRLRGGSTRGGALETSTGFNTAPDEVSSGKGAGFTSLGSPGISQQATTKVFSAHLNRDKTVMKIFAKSPVIRIHVYKERQLLICHL

SEQ ID NO: 788327 - protein, 68 aa, Homo sapiens
QSLFSNCPLSKTHYMTMLATDRGTFPRGFFCELRKQGNSPVIAKIVWLLGSCGYHLGQYFCDLLCTPL

SEQ ID NO: 788328 - protein, 147 aa, Homo sapiens
FFAYQLSTYIKVSQMILVLGISFHSSLATLSCLKLIIIIIKYLWKDYGIHRSVDSGLGTVVHACNPSTLGGRGRRITRSGVRDQPGQYGETPSLLKIQKISWAWWHVPVIPAEGRQENCLNPGGRGCSELKLSHCTPAWATEGDSVS

SEQ ID NO: 788329 - protein, 77 aa, Homo sapiens
RHLNQTQAERIDRVGGGVNSPAPRSHCPARERAAETPRAGQGPGTRVGVDSRAGVVGATLAVQGQSLHAAPPPPPLG

SEQ ID NO: 788330 - protein, 108 aa, Homo sapiens
MTDESQKVWRCWQKTQDSWIRDKRFITHSTANSGPIRMSRQALCEYPSCRNKGQKLEPGSVYCIRDKHYLCCPFCFMISPAMMSEHLSKRHLSQKQLSSHDRLCDILK

SEQ ID NO: 788331 - protein, 265 aa, Homo sapiens
TASNAAGERAHITLGCAADVEAVQTGLDLLEILRQEKGGQRGEEVGELSWGKALFLGAMGGVGCSQRRWMQSAALDAVGGRWMQSAALDAVSGVDAVSGVGCSQRRWMQSAALDAVDCIQPQVQILVVVANIQTRTLKAEVEKGPCEQQLNMGQSVLRDGRAPFRRDGRWPPLPSADRKGVGFRSPNPEWRRWAPRGVQCGNATDPGEAGGSPGETSRFRRRPVSSRWPLKIRGRGCKSRAGPYPYPQQVSKVNSLWHVWTLGTV

SEQ ID NO: 788332 - protein, 114 aa, Homo sapiens
MGQSVLRDGRAPFRRDGRWPPLPSADRKGVGFRSPNPEWRRWAPRGVQCGNATDPGEAGGSPGETSRFRRRPVSSRWPLKIRGRGCKSRAGPYPYPQQVSKVNSLWHVWTLGTV

SEQ ID NO: 788333 - protein, 177 aa, Homo sapiens
MHQRRRCKIVYVLIDDFRLQRRHDAEKLGHFLEHVLGSGMVTDGTMATDQRKVKMLWALRGRITEALSRDGYVYKYDLSLPVERLYDIVTEMRARLGPHAKHVVGYGHLGDGMGERRSEGTGDGLRCPRPIERESGSDPRIRSGGDGRREASSAVTRPIPEKPAGAPGRRRGSGGVR

SEQ ID NO: 788334 - protein, 58 aa, Homo sapiens
GNATDPGEAGGSPGESSLFFVKGRAPWNGFAPREGPVPWKASRFRRRPVSSRWPLKIR

SEQ ID NO: 788335 - protein, 135 aa, Homo sapiens
DTGWFQTHLSDSDIGIGSAHKVTMRSVLGAQSIPGDVSGGLLEFMSFQPLAPVLLIDLPFGIIGTWGHLGTIPVPRHYRVDVALVKNCCSDIYSLAFSKGEKAGIGGVRTGSERRIRGLWAVDANRLRRGSGGVR

SEQ ID NO: 788336 - protein, 114 aa, Homo sapiens; identical to SEQ ID NO: 788332

SEQ ID NO: 788337 - protein, 146 aa, Homo sapiens
LSPIHSSLLWPTRSCVIWPCCSSLYFLSFLELLHSNFNIPQTHQAHCYLRVFILPVSVTKNILLMAHTFISLRSLIKSYFLRADFPHYPTIRNSPQKNHYYLFTLYSLALLFFIILIIVWHYVIYLFIVFSPISFYFCIRSTLNSA

SEQ ID NO: 788338 - protein, 43 aa, Homo sapiens
GRGCCWSPSLTESNRKLIKTHSKLRPVSNEYFYAVFYRNFTSK

SEQ ID NO: 788339 - protein, 563 aa, Homo sapiens
PISGGTCGIGEVLGLVPSLGQSPPKASLSHTAVRACGPRGLSWRLQGGAAFCNPPGPQVTLLLSLDPQLYQEIQERGLNTSQESDDDILDESSSPEGTQKVDATIVVKSYRPAQVTWSQLPEVVELGILDQLSTEERKRQEAMFEILTSEFSYQHSLSILVEEFLQSKELRATVTQMEHHHLFSNILDVLGASQRFFEDLEQRHKAQVLVEDISDILEEHAEKYFHPYIAYCSNEVYQQRTLQKLISSNAAFREALREIERRPACGGLPMLSFLILPMQRVTRLPLLMDTLCLKTQGHSERYKAASRALKAISKLVRQCNEGAHRMERMEQMYTLHTQLDFSKVKSLPLISASRWLLKRGELFLVEETGLFRKIASRPTCYLFLFNDVLVVTKKKSEESYMVQDYAQMNHIQVEKIEPSELPLPGGGNRSSSVPHPFQVTLLRNSEGRQEQLLLSSDSASDRARWIVALTHSERQWQGLSSKGDLPQVEITKAFFAKQADEVTLQQADVVLVLQQEDGWLYGERLRDGETGWFPEDFARFITSRVAVEGNVRRMERLRVETDV

SEQ ID NO: 788340 - protein, 709 aa, Homo sapiens
MAQRHSDSSLEEKLLGHRFHSELRLDAGGNPASGLPMVRGSPRVRDDAAFQPQVPAPPQPRPPGHEEPWPIVLSTESPAALKLGTQQLIPKSLAVASKAKTPARHQSFGAAVLSREAARRDPKLLPAPSFSLDDMDVDKDPGGMLRRNLRNQSYRAAMKGLGKPGGQGDAIQLSPKLQALAEEPSQPHTRSPAKNKKTLGRKRGHKGSFKDDPQLYQEIQERGLNTSQESDDDILDESSSPEGTQKVDATIVVKSYRPAQVTWSQLPEVVELGILDQLSTEERKRQEAMFEILTSEFSYQHSLSILVEEFLQSKELRATVTQMEHHHLFSNILDVLGASQRFFEDLEQRHKAQVLVEDISDILEEHAEKYFHPYIAYCSNEVYQQRTLQKLISSNAAFREALREIERRPACGGLPMLSFLILPMQRVTRLPLLMDTLCLKTQGHSERYKAASRALKAISKLVRQCNEGAHRMERMEQMYTLHTQLDFSKVKSLPLISASRWLLKRGELFLVEETGLFRKIASRPTCYLFLFNDVLVVTKKKSEESYMVQDYAQMNHIQVEKIEPSELPLPGGGNRSSSVPHPFQVTLLRNSEGRQEQLLLSSDSASDRARWIVALTHSERQWQGLSSKGDLPQVEITKAFFAKQADEVTLQQADVVLVLQQEDGWLYGERLRDGETGWFPEDFARFITSRVAVEGNVRRMERLRVETDV

SEQ ID NO: 788341 - protein, 745 aa, Homo sapiens
AKRLQDRTGPGAGSCTASAPPLRPSAPRRRTPQPPSMAQRHSDSSLEEKLLGHRFHSELRLDAGGNPASGLPMVRGSPRVRDDAAFQPQVPAPPQPRPPGHEEPWPIVLSTESPAALKLGTQQLIPKSLAVASKAKTPARHQSFGAAVLSREAARRDPKLLPAPSFSLDDMDVDKDPGGMLRRNLRNQSYRAAMKGLGKPGGQGDAIQLSPKLQALAEEPSQPHTRSPAKNKKTLGRKRGHKGSFKDDPQLYQEIQERGLNTSQESDDDILDESSSPEGTQKVDATIVVKSYRPAQVTWSQLPEVVELGILDQLSTEERKRQEAMFEILTSEFSYQHSLSILVEEFLQSKELRATVTQMEHHHLFSNILDVLGASQRFFEDLEQRHKAQVLVEDISDILEEHAEKYFHPYIAYCSNEVYQQRTLQKLISSNAAFREALREIERRPACGGLPMLSFLILPMQRVTRLPLLMDTLCLKTQGHSERYKAASRALKAISKLVRQCNEGAHRMERMEQMYTLHTQLDFSKVKSLPLISASRWLLKRGELFLVEETGLFRKIASRPTCYLFLFNDVLVVTKKKSEESYMVQDYAQMNHIQVEKIEPSELPLPGGGNRSSSVPHPFQVTLLRNSEGRQEQLLLSSDSASDRARWIVALTHSERQWQGLSSKGDLPQVEITKAFFAKQADEVTLQQADVVLVLQQEDGWLYGERLRDGETGWFPEDFARFITSRVAVEGNVRRMERLRVETDV

SEQ ID NO: 788342 - protein, 440 aa, Homo sapiens
MAQRHSDSSLEEKLLGHRFHSELRLDAGGNPASGLPMVRGSPRVRDDAAFQPQVPAPPQPRPPGHEEPWPIVLSTESPAALKLGTQQLIPKSLAVASKAKTPARHQSFGAAVLSREAARRDPKLLPAPSFSLDDMDVDKDPGGMLRRNLRNQSYRAAMKGLGKPGGQGDAIQLSPKLQALAEEPSQPHTRSPAKNKKTLGRKRGHKGSFKDDPQLYQEIQERGLNTSQESDDDILDESSSPEGTQKVDATIVVKSYRPAQVTWSQLPEVVELGILDQLSTEERKRQEAMFEILTSEFSYQHSLSILVEEFLQSKELRATVTQMEHHHLFSNILDVLGASQRFFEDLEQRHKAQVLVEDISDILEEHAEKYFHPYIAYCSNEVYQQRTLQKLIADTRLREAWENESGACGACMVPRTPGGDLVPLRTLLNGPRQGPPAPHG

SEQ ID NO: 788343 - protein, 709 aa, Homo sapiens; identical to SEQ ID NO: 788340

SEQ ID NO: 788344 - protein, 206 aa, Homo sapiens
MQCFSFIKTMMILFNLLIFLCGAALLAVGIWVSIDGASFLKIFGPLSSSAMQFVNVGYFLIAAGVVVFALGFLGCYGAKTESKCALVTFFFILLLIFIAEVAAAVVALVYTTMAEHFLTLLVVPAIKKDYGSQEDFTQVWNTTMKGLKCCGFTNYTDFEDSPYFKENSAFPPFCCNDNVTNTGNETAPSKKLTDQKSRGLLQSAFV

SEQ ID NO: 788345 - protein, 158 aa, Homo sapiens
MQCFSFIKTMMILFNLLIFLCGAALLAVGIWVSIDGASFLKIFGPLSSSAMQFVNVGYFLIAAGVVVFALGFLGCYGAKTESKCALVTFFFILLLIFIAEVAAAVVALVYTTMAEHFLTLLVVPAIKKDYGSQEDFTQVWNTTMKGGCFNQLLYDIRN

SEQ ID NO: 788346 - protein, 275 aa, Homo sapiens
MQCFSFIKTMMILFNLLIFLCGAALLAVGIWVSIDGASFLKIFGPLSSSAMQFVNVGYFLIAAGVVVFALGFLGCYGAKTESKCALVTVCETQLHRLMTKSPLALDTRPWDSQTLLWTPLGSGFCLTFPGGGIRARRAEGLSLPKTRPLFPTQFFFILLLIFIAEVAAAVVALVYTTMAEHFLTLLVVPAIKKDYGSQEDFTQVWNTTMKGLKCCGFTNYTDFEDSPYFKENSAFPPFCCNDNVTNTGNETAPSKKLTTKKVEGCFNQLLYDIRN

SEQ ID NO: 788347 - protein, 95 aa, Homo sapiens
  misc_feature (79)..(79): Xaa can be any naturally occurring amino acid
MQCFSFIKTMMILFNLLIFLCGAALLAVGIWVSIDGASFLKIFGPLSSSAMQFVNVGCHDCVHVSVLQSTISEISRASXVDDVEGTSKCINLLQC

SEQ ID NO: 788348 - protein, 206 aa, Homo sapiens; identical to SEQ ID NO: 788344

SEQ ID NO: 788349 - protein, 206 aa, Homo sapiens; identical to SEQ ID NO: 788344

SEQ ID NO: 788350 - protein, 206 aa, Homo sapiens; identical to SEQ ID NO: 788344

SEQ ID NO: 788351 - protein, 67 aa, Homo sapiens
EEEGLLPNSFHEPNNSDIKTWQRHNEKENYRSISLMSIDGRILNKGLSVVAHPCNPSTLRRRHKRIS

SEQ ID NO: 788352 - protein, 131 aa, Homo sapiens
PGWRPFNLHQILGLKGFFCVCVCFFVFFLNGVLLLSSRLECNGAISAQCNLRLLGSSDPPASASQSAGITGLSHRIWPAVKLSKSIFSFLLSFLVSQRQEYAPPLEVPLIVQSSTENLIICLSDQKQNKCP

SEQ ID NO: 788353 - protein, 106 aa, Homo sapiens
TSARYRMTPRGKGATDLSGTDNGKGSEQIRLPDEKEEWKPKEKQRARGTTLWNSPTSSRRVPGPSSQGGNHDGRRYGGGIKKQPLKHQVGWAQWRKRQIVMNGEHL

SEQ ID NO: 788354 - protein, 186 aa, Homo sapiens
LTLDLFMLGYFQLPEMGLSREDRKFRHLLCYEMFHRLDSHPWERIRLFHRVVLEEVEAGRRGWSDGFEDLRHRFFGNGLEAGPAPEEQAKKKEEKGKEQERTEEAAPVQKGDPPKGQREALAPVPQPPPPPAAPPRISDSPGSEAPAEDPLELVSEMGEFSNEDICRYIDRSFSFWKEKEAELFDI

SEQ ID NO: 788355 - protein, 71 aa, Homo sapiens
LTLDNRLDSQGVLSTPYFPSYYSPQTHCSWHLTVPSLDYGLALWFDAYALRRQKYDLPCTQGQWTIQNRRV

SEQ ID NO: 788356 - protein, 122 aa, Homo sapiens
NAVVFHISHVHPPVYFKLYVAYNTSYSVNAMELYCLGNNDKEKSLYMFSIDTTTRDPLSKQKQKLQRFDYRDPMGPLGLLGCIRVSVDPLYLQAVLSTVSAYIFHIYFLGGQFWASSNSQAN

SEQ ID NO: 788357 - protein, 67 aa, Homo sapiens
PLHPLSHSISEHLDLIDNTCPLRKTLLQRGSLVLWERQFRDSVEPQTSMQISALPSKRFITSSSFPL

SEQ ID NO: 788358 - protein, 36 aa, Homo sapiens
MSFMDTGEKCPRKRQQQVLSLSELRILHLPSSRLSK

SEQ ID NO: 788359 - protein, 73 aa, Homo sapiens
MSLGRRSARHGTLRRGTAGCARDEAGPGQGRLPWEGTLCHGSGDCVGDESAPWTVLRVLPRAQCPRGMLCAAG

SEQ ID NO: 788360 - protein, 101 aa, Homo sapiens
NLNPHFHHPTDLFPSLSELKSLEDPVSQMPSIFLALPLPFLGEITYPHQLKECQMKFSVSLPKLWQPVSPHELRANPHMALYNFLFAKLIFLVYKMICQMY

SEQ ID NO: 788361 - protein, 93 aa, Homo sapiens
LRGLPGFALTLSGMDGGRTAVRGACAERGSLPRYDPGNRIDGRVTCGHVTHEFGSAEASLQASACKKKKRKDKKRKREEDEETQFDMLESGEQ

SEQ ID NO: 788362 - protein, 58 aa, Homo sapiens
VDLEDSPYGKKVGEFRKETELGFEDRVGFTTFKVENVVKSWDETGVFNTHCRLEYGTI

SEQ ID NO: 788363 - protein, 69 aa, Homo sapiens
RPAPPPHRTHLSQLKAPLPEQKRRSLLTVPLLTFRAQKCGPGSPLVARGGATDSWLVSEEFRLSDSTAP

SEQ ID NO: 788364 - protein, 814 aa, Homo sapiens
MASDIPGSVTLPVAPMAATGQVRMAGAMPARGGKRRSGMDFDDEDGEGPSKFSRENHSEIERRKRNKMTQYITELSDMVPTCSALARKPDKLTILRMAVSHMKSMRGTGNKSTDGAYKPSFLTEQELKHLILEAADGFLFVVAAETGRVIYVSDSVTPVLNQPQSEWFGSTLYEQVHPDDVEKLREQLCTSENSMTGRILDLKTGTVKKEGQQSSMRMCMGSRRSFICRMRCGNAPLDHLPLNRITTMRKRFRNGLGPVKEGEAQYAVVHCTGYIKAWPPAGMTIPEEDADVGQGSKYCLVAIGRLQVTSSPVCMDMNGMSVPTEFLSRHNSDGIITFVDPRCISVIGYQPQDLLGKDILEFCHPEDQSHLRESFQQVVKLKGQVLSVMYRFRTKNREWMLIRTSSFTFQNPYSDEIEYIICTNTNVKQLQQQQAELEVHQRDGLSSYDLSQVPVPNLPAGVHEAGKSVEKADAIFSQERDPRFAEMFAGISASEKKMMSSASAAGTQQIYSQGSPFPSGHSGKAFSSSVVHVPGVNDIQSSSSTGQNMSQISRQLNQSQVAWTGSRPPFPGQQIPSQSSKTQSSPFGIGTSHTYPADPSSYSPLSSPATSSPSGNAYSSLANRTPGFAESGQSSGQFQGRPSEVWSQWQSQHHGQQSGEQHSHQQPSQTEVFQDMLPMPGDPTQGTGNYNIEDFADLGMFPPFLSSCGQSEAPAVQCHPYCDVDAHVNEAHPRPACPAAGPPPEAISPAVCPQAHHRSTLPCSRGCSATDQGPWQTLGDQLYLLYFICVCSGGEPSGSLSLVVNNLLIDNLYP

SEQ ID NO: 788365 - protein, 64 aa, Homo sapiens
MLASWLFLNQLVVLPISGPLPGCSFLEILAILSKLVFPTPPLYTPYSMYSLPFSDRLRVQRVPS

SEQ ID NO: 788366 - protein, 140 aa, Homo sapiens
LPAFGSHERNRHVKDKVVQTNCKNWAVTKTGAKNHGSSVPGHKIPSDRDLVSQGASQLTSLEINFSTSIKNACQKYQAQSMFLCDPREHLVIKQKDGTVEMRGKDKKQQPRKAHRAHRGRLIASKQKQIPIQTCKFNSKY

SEQ ID NO: 788367 - protein, 121 aa, Homo sapiens
LPLPAAERLGWDQEILGDGGGRWAEQERVGRAWESGNLKWRLKQWLGQAQWLTSVIPALWEAEAGGSPEIRSLRQAWSTWWKPVSTKNTKISWVWWHAPVIPTTWEAEAGESLEPGKQRLQ

SEQ ID NO: 788368 - protein, 103 aa, Homo sapiens
  misc_feature (1)..(1): Xaa can be any naturally occurring amino acid
XAVLELEKRIEESSETCEKKSDIVLLVGQKQALEELKLSVQQLRCTEAKFSAQKELLEQKVQENGGKEPPPVVNYEEDARSVTSMVDIEECTFAKVHSFYIYP

SEQ ID NO: 788369 - protein, 238 aa, Homo sapiens
VDVRPKTSRSRSADRKDGYVWSGKKLSWSKKSESYSDAETVNGIEKTEVSLRNQERKHSCSSIELDLDHSCGHRFLGRSLKQKLQDAVGQCFPIKNCSSRHSSGLPSKRKIHISELMLDKCPFPPRSDLAFRWHFIKRHTAPINSKSDEWVSTDLSQTELRDGQLKRRNMEENINCFSHTNVQPCVITTDNALCREGPMTGSVMNLVSNNSIEDSDMDSDDEILTLCTSSRKRNKPKW

SEQ ID NO: 788370 - protein, 112 aa, Homo sapiens
IHSSSQSKTLWFILGSSPYRITCIWFIRTCHCFAFKIDLEMHCPHLQLIALSQSPSYLLPGLLSLPPNCSPRPCHHFPHPEAPPGCPHYESWAFVHLTHACVLVPTRLLSVE

SEQ ID NO: 788371 - protein, 98 aa, Homo sapiens
GEKKAKGWELEGGEEYDDIVTFCQETSLLLSASGQGGSNHMPFQASKLLYPISHRVHGRVMYDAALPCRLDLLVSQSHSPCKKERESCFGTKLQSGEN

SEQ ID NO: 788372 - protein, 65 aa, Homo sapiens
HIAKSILSQKSKAGGITLPDFKLYYKATVTKTAWYWYQNRDIDQWNSIKKLITIVGGDVEKLEHA

SEQ ID NO: 788373 - protein, 92 aa, Homo sapiens
GLGEGLGGSGGLCSTKEQSPVPKPWAGCWGGEEKQDPSCRCPCPWAHLSRGDRHGERGELCFVSQPLSLCQTHTVVLGSRFSLLSSIKTQNG

SEQ ID NO: 788374 - protein, 432 aa, Homo sapiens
LNKKIDHELHRLQALLKHLLSYNRDSDQLTKWLESSQHTLNYWKEQSLNVSQDLDTIRSNINNFFEFSKEVDEKSSLKTAVISIGNQLLHLKETDTATLRASLAQFEQKWTMLITQLPDIQEKLHQLQMEKLPSRKAITEMISWMNNVEHQTSDEDSVHSPSSASQVKHLLQKHKEFRMEMDYKQWIVDFVNQSLLQLSTCDVESKRYERTEFAEHLGEMNRQWHRVHGMLNRKIQHLEQLLESITESENKIQILNNWMEAQEERLKTLQKPESVISVQKLLLDCQDIENQLAIKSKALDELKQSYLTLESGAVPLLEDTASRIDELFQKRSSVLTQVNQLKTSMQSVLQEWKIYDQLYDEVNMMTIRFWYCMEHSKPVVLSLETLRCQVENLQSLQDEAESSEGSWEKLQEVIGKLKGLCPSVAEIIEEKC

SEQ ID NO: 788375 - protein, 335 aa, Homo sapiens
LNKKIDHELHRLQALLKHLLSYNRDSDQLTKWLESSQHTLNYWKEQSLNVSQDLDTIRSNINNFFEFSKEVDEKSSLKTAVISIGNQLLHLKETDTATLRASLAQFEQKWTMLITQLPDIQEKLHQLQMEKLPSRKAITEMISWMNNVEHQTSDEDSVHSPSSASQVKHLLQKHKEFRMEMDYKQWIVDFVNQSLLQLSTCDVESKRYERTEFAEHLGEMNRQWHRVHGMLNRKIQHLEQLLESITESENKIQILNNWMEAQEERLKTLQKPESVISVQKLLLDCQDIEKGLVYGMELITDPSILFLDEPTTGLDSSTAMLSFAPEKMSKRDDII

SEQ ID NO: 788376 - protein, 104 aa, Homo sapiens
SCALEQEPSRETLFPPVAAEEKAAGCRTEGGLGWAGMGAWLVFPWWPYDWLRAGQRHGRLEAQKAQDSYLGWMWGGILASLGTSLKWTGRLGGSGVCPLTKNTG

SEQ ID NO: 788377 - protein, 104 aa, Homo sapiens; identical to SEQ ID NO: 788376

SEQ ID NO: 788378 - protein, 71 aa, Homo sapiens
HNDGSTQACGESLTNPASFYFPAQRAERANSATGSWHQRSPLYPARCFFSLFVSSDILSFFSLPFPYVISP

SEQ ID NO: 788379 - protein, 73 aa, Homo sapiens
RRVASWEWQMAPRSDWLELRGVEETGQEELEMFWVSSLRLSLRFLLKFLISLLHDVLCGVCFCLLPRPPLSCF

SEQ ID NO: 788380 - protein, 101 aa, Homo sapiens
EAWRVSCIPSHTVRCVLGHQFTKFPCPDPRHQRSTSLCASQQRQLPRPQPMFPGIWALRLGDWERKPAALRAQNDPQPNLVHLPFPKSMGKLCFSWWCLLG

SEQ ID NO: 788381 - protein, 201 aa, Homo sapiens
GRSMAEPLLRKTFSRLRGREKLPRKKSDAKERGHPAQRPEPSPPEPEPQAPEGSQAGAEGPSSPEASRSPARGAYLQSLEPSSRRWVLGGAKPAEDTSLGPGVPGTGEPAGEIWYNPIPEEDPRPPAPEPPGPQPGSAESEGLAPQGKNKLPIPFPKVSTSSTSLPFRVAPASHSLLPEEHQPHTPSLQGSTSLTSPPRQM

SEQ ID NO: 788382 - protein, 134 aa, Homo sapiens
GRSMAEPLLRKTFSRLRGREKLPRKKSDAKERGPGVPGTGEPAGEIWYNPIPEEDPRPPAPEPPGPQPGSAESEGLAPQGKNKLPIPFPKVSTSSTSLPFRVAPASHSLLPEEHQPHTPSLQGSTSLTSPPRQM

SEQ ID NO: 788383 - protein, 67 aa, Homo sapiens
LDLYNICAWMMVVLYERKRLYAKCRTIHLTSGKHFQYKCSYTGCASFLHLTVSFHLLMTLEKRITIP

SEQ ID NO: 788384 - protein, 130 aa, Homo sapiens
SSITHTHTHTHTHTHTHAHIWYLHHGMLQRCNELTYLKCLWPGLGAHACSLSTLEGRWIAWAQEFETKLGNWLIFVSFVETTFRLVAQDCLQLLSSSKVPASASQSLGITGVIPTATVQQMHSYHLSCLT

SEQ ID NO: 788385 - protein, 231 aa, Homo sapiens
NNLTAENKILNSELENGKQNQERLEIEMESYRCRLAAAVRDCDQSQTARDLKLDFQRTRQEWVRLHDKMKVDMSGLQAKNEILSEKLSNAESKINSLQIQLHNTRDALGRESLILERVQRDLSQTQCQKKETEQMYQIEQSKLKKYIAKQESVEERLSQLQSENTLLRQQLDDAHKKANSQEKTSSTIQDQFHSAAKNLQAESEKQILSLQEKNKELMDEYNHLKERMDQC

SEQ ID NO: 788386 - protein, 106 aa, Homo sapiens
MYFLTQFFKNHANYENFTEGDNNKKTHIEHSKKRSMPWVEPQPGMDIHGCVSLHDCMWPCVWVLGGPTALRGRTHRCASLMTACGLVHKTDSLYFPGTFSHFQELL

SEQ ID NO: 788387 - protein, 69 aa, Homo sapiens
RWPNGNSFLCQNLASATQDSGCSVHRVGVCSSTCQPVKTDSIKTLPAARGAPAVTEMSCPGLLAANFER

SEQ ID NO: 788388 - protein, 141 aa, Homo sapiens
MEANMQTREVTQAFWGRGTERREKTELTAVLNKNCDYMWYSQNGLVSFQTHQVAILLAWTEDPHWRTVSAAYTDDTGHCPGLHPKESKPQTFSLRENPDFAFPVQGLMEPCVSKCQFLSNKLGRIPLTAAERGSSGLLSKW

SEQ ID NO: 788389 - protein, 81 aa, Homo sapiens
DEHGCIDYKSSYACVEWLRTSQSPQSPCLSLCEFCIYPKVSLGFLVSATFPSRLFSCNKRRDEMYKRRDEMSQDGLDLLTL

SEQ ID NO: 788390 - protein, 115 aa, Homo sapiens
ESRVVQVRPRFPGQPPEAAWGCSPNPTCSHHSVYFPLLRQDTNNKELALQAPNPPALPYPTGFWFHHFLCSQTITGQLCCLLYNVPFFNIYHCCCSQHQMFTLCLLLCTHSPPSR

SEQ ID NO: 788391 - protein, 89 aa, Homo sapiens
GYWLRSLETGASADLHARVIPKMPLDGSREELFPDLSALRAATQHYTKNSDPWYSGVFEINPVWALCRPYLTYCPRSPDEEGTMIILTL

SEQ ID NO: 788392 - protein, 180 aa, Homo sapiens
SVPGLSTCKSRVGPQGRTREGVGVPRGSAHCPRASGGPRNARQGDGAPQAPPPTPGFSFSIRHHCFVWAPDGHYGSLVPCCHGFWLGGEHVGVLGKKSNEKGKSGLTRVCTAVFKEFLRGHYTGDIKTVRIYVWPLCGRLAERQQSLQVAEEGKNSNAGERACPASFINHLGPNGSREGH

SEQ ID NO: 788393 - protein, 99 aa, Homo sapiens
MATGVPGCCLLTWDGGVWQQGRPRAPKAVKLLHLKAWGEKAGGGEERPRKPWGAPLGQCAAGSLPSLGLAQASLGLTCNLSGPRVPSNEPGALTQAHPN

SEQ ID NO: 788394 - protein, 163 aa, Homo sapiens
HLSVPHPQDCAAAEKCCINVCGLHSCVAARFPGSPAAPTTAASCEGFVCPQQGSDCDIWDGQPVCRCRDRCEKEPSFTCASDGLTYYNRCYMDAEACLRGLHLHIVPCKHVLSWPPSSPGPPETTARPTPGAAPVPPALYSSPSPQAVQVGGTASLHCDVSGR

SEQ ID NO: 788395 - protein, 109 aa, Homo sapiens
ATSVCALYWITLSSSYYFENILPLTSIFSSSCLISLQLFTAKLLKSCLHTNSTSSPPILSSTYSNFYHPHHSFLVKSLSRSPTTFMPSNPIHICSDLDLLLISQTVNTF

SEQ ID NO: 788396 - protein, 267 aa, Homo sapiens
VTLACQVSAQPAAQATWSKDGAPLESSSRVLISATLKNFQLLTILVVVAEDLGVYTCSVSNALGTVTTTGVLRKAERPSSSPCPDIGEVYADGVLLVWKPVESYGPVTYIVQCSLEGGSWTTLASDIFDCCYLTSKLSRGGTYTFRTACVSKAGMGPYSSPSEQVLLGGPSHLASEEESQGRSAQPLPSTKTFAFQTQIQRGRFSVVRQCWEKASGRALAAKIIPYHPKDKTAVLREYEALKGLRHPHLAQLHAAYLSPRHLVLILE

SEQ ID NO: 788397 - protein, 201 aa, Homo sapiens
MINQIKFEDEPDLKDLFITVDDLNSHAYYNRNFHYVLGITYYTTSRGRICTPAELLKLQEQHIKDFSLWLGQGTNLANDSYDARHPEFYFPTQYGQKTQACISYTRETGLGNRPVIYRNLHRLQLEGNHPSSVNVAYERSLPQALYPEKTPGQKSMDNRELPNCPEHSYIFMRRTSVRSLGQQMETIVSDNRYAYESTLLS

SEQ ID NO: 788398 - protein, 52 aa, Homo sapiens
PASPSRAPISVHGSIIYPGAPARKLGVSLTVSVTTTPYFQKVLQLYPNNKAA

SEQ ID NO: 788399 - protein, 128 aa, Homo sapiens
GKEKCHQMPFKASSEISNLSDLLYIRALKHMGVPGINSISNPRKLYSSHRGFLLQMVVVPSQSGLAGWLKKCGLLTGLESAFLVWFGSLFMIESLPLPLQLCWPSLVIAHSSAVCITFLCVFAFTGWV

SEQ ID NO: 788400 - protein, 135 aa, Homo sapiens
LLGCVCVGSGGLLGCVWVGRVAGLCVWKEQTWVYNGCRTYVGEQGWTTLPPKTEGAGIPKKASLNYQLPVPAKWQKAYLETAACSEPTVSLLNAQSPWREPCHKPRSRTHCHAGFLPHHSGKQTATLKKEQGQVW

SEQ ID NO: 788401 - protein, 108 aa, Homo sapiens
PTDSYSSFLAPAASRNANNFSLGFGGGAELRRSARPTAFAAAGSPGAGGCGPQIQAEAAICTCGHSVAPGARRGTRSERDAPSHHLRIKPNNLESSCCVCHTPPVFFP

SEQ ID NO: 788402 - protein, 1135 aa, Homo sapiens
MLENYRNLVFLGIAAFKPDLIIFLEEGKESWNMKRHEMVEESPVICSHFAQDLWPEQGIEDSFQKVILRRYEKCGHENLHLKIGYTNVDECKVHKEGYNKLNQSLTTTQSKVFQRGKYANVFHKCSNSNRHKIRHTGKKHLQCKEYVRSFCMLSHLSQHKRIYTRENSYKCEEGGKAFNWSSTLTYYKSAHTGEKPYRCKECGKAFSKFSILTKHKVIHTGEKSYKCEECGKAFNQSAILTKHKIIHTGEKPNKCEECGKAFSKVSTLTTHKAIHAGEKPYKCKECGKAFSKVSTLITHKAIHAGEKPYKCKECGKAFSKFSILTKHKVIHTGEKPYKCEECGKAYKWPSTLSYHKKIHTGEKPYKCEECGKGFSMFSILTKHEVIHTGEKPYKCEECGKAFNWSSNLMEHKKIHTGETPYKCEECGKGFSWSSTLSYHKKIHTVEKPYKCEECGKAFNQSAILIKHKRIHTGEKPYKCEECGKTFSKVSTLTTHKAIHAGEKPYKCKECGKTFIKVSTLTTHKAIHAGEKPYKCKECGKAFSKFSILTKHKVIHTGEKPYKCEECGKAFNWSSNLMEHKRIHTGEKPYKCEECGKSFSTFSVLTKHKVIHTGEKPYKCEECGKAYKWSSTLSYHKKIHTVEKPYKCEECGKAFNRSAILIKHKRIHTDEKPYKCEECGKTFSKVSTLTTHKAIHAGEKPYKCKECGKAFSKFSILTKHKVIHTGEKPYKCEECGKAYKWPSTLSYHKKIHTGEKPYKCEECGKGFSMFLILTKHEVIHTGEKPYKCEECGKAFSWLSVFSKHKKTHAGEKFYKCEACGKAYNTFSILTKHKVIHTGEKPYKCEECGKAFNWSSNLMEHKKIHTGETPYKCEECDKAFSWPSSLTEHKATHAGEKPYKCEECGKAFSWPSRLTEHKATHAGEEPYKCEECGKAFNWSSNLMEHKRIHTGEKPYKCEECGKSFSTFSILTKHKVIHTGEKPYKCEECGKAYKWSSTLSYHKKIHTVEKPYKCEECGKGFVMFSILAKHKVIHTGEKLYKCEECGKAYKWPSTLRYHKKIHTGEKPYKCEECGKAFSTFSILTKHKVIHTGEKPYKCEECGKAFSWLSVFSKHKKIHTGVPNPPTHKKIHAGEKLYK

SEQ ID NO: 788403 - protein, 606 aa, Homo sapiens
TSFVQIVQCGKAFSKFSILTKHKVIHTGEKPYKCEECGKAFNWSSNLMEHKRIHTGEKPYKCEECGKSFSTFSVLTKHKVIHTGEKPYKCEECGKAYKWSSTLSYHKKIHTVEKPYKCEECGKAFNRSAILIKHKRIHTDEKPYKCEECGKTFSKVSTLTTHKAIHAGEKPYKCKECGKAFSKFSILTKHKVIHTGEKPYKCEECGKAYKWPSTLSYHKKIHTGEKPYKCEECGKGFSMFLILTKHEVIHTGEKPYKCEECGKAFSWLSVFSKHKKTHAGEKFYKCEACGKAYNTFSILTKHKVIHTGEKPYKCEECGKAFNWSSNLMEHKKIHTGETPYKCEECDKAFSWPSSLTEHKATHAGEKPYKCEECGKAFSWPSRLTEHKATHAGEEPYKCEECGKAFNWSSNLMEHKRIHTGEKPYKCEECGKSFSTFSILTKHKVIHTGEKPYKCEECGKAYKWSSTLSYHKKIHTVEKPYKCEECGKGFVMFSILAKHKVIHTGEKLYKCEECGKAYKWPSTLRYHKKIHTGEKPYKCEECGKAFSTFSILTKHKVIHTGEKPYKCEECGKAFSWLSVFSKHKKIHTGVPNPPTHKKIHAGEKLYK

SEQ ID NO: 788404 - protein, 492 aa, Homo sapiens
MLENYRNLVFLGIAAFKPDLIIFLEEGKESWNMKRHEMVEESPVICSHFAQDLWPEQGIEDSFQKVILRRYEKCGHENLHLKIGYTNVDECKVHKEGYNKLNQSLTTTQSKVFQRGKYANVFHKCSNSNRHKIRHTGKKHLQCKEYVRSFCMLSHLSQHKRIYTRENSYKCEEGGKAFNWSSTLTYYKSAHTGEKPYRCKECGKAFSKFSILTKHKVIHTGEKSYKCEECGKAFNQSAILTKHKIIHTGEKPNKCEECGKAFSKVSTLTTHKAIHAGEKPYKCKECGKAFSKVSTLITHKAIHAGEKPYKCKECGKAFSKFSILTKHKVIHTGEKPYKCEECGKAYKWPSTLSYHKKIHTGEKPYKCEECGKGFSMFSILTKHEVIHTGEKPYKCEECGKAFNWSSNLMEHKKIHTGETPYKCEECGKGFSMFSILTKHKVIHNGEKPYKCEECDKATHAGEKPYKCEECGKAFNWSSNLMEHKRIHTGEKP

SEQ ID NO: 788405 - protein, 123 aa, Homo sapiens
RRRGENDPGTDQSPRAAASRVQHLHPATVTATTMPKRKAEGDAKGGKAKVKDEPQRRSARLSAKPAPPKPEPKPKKTPAKKAEKVPKGKKGKADAGKEGNSPAESGDAKTDQAQKAEGAGEAK

SEQ ID NO: 788406 - protein, 198 aa, Homo sapiens
PAGPNGTGPQEETTLAMALQASKGQLPTLTPTDTFQTVETLTCLSLERNRLTDYYEPLLKNNSTAYSTRGNRIEISYENLQVTNITRKGSMLPVSCKLPNMGTSQSYLSSSMPAGCVLPVGGNFEILLHYYLLNYAKKCHQSEETMVSMIIANALLGIPKVLYKSKTGKYSFPHTYIRAVHALQTNQPLVSSQTGLES

SEQ ID NO: 788407 - protein, 232 aa, Homo sapiens
KNSGESYQAPDPGNGSIQRPYQDTVAENKDALEKTQTYLKVHSNLVIPDVELETYIPYSTPTLTPTDTFQTVETLTCLSLERNRLTDYYEPLLKNNSTAYSTRGNRIEISYENLQVTNITRKGSMLPVSCKLPNMGTSQSYLSSSMPAGCVLPVGGNFEILLHYYLLNYAKKCHQSEETMVSMIIANALLGIPKVLYKSKTGKYSFPHTYIRAVHALQTNQPLVSSQTGLES

SEQ ID NO: 788408 - protein, 116 aa, Homo sapiens
MYSGLKYLLAGACVSWKCTRSPTPKLTPLARRDLDVLFLDKGNGTPFSATGYSCWDPVAASPYWNCPPMPSQATGPGPIETLSPFLESDSLTGALAPLLPATWPGAPQSAPPDLFL

SEQ ID NO: 788409 - protein, 165 aa, Homo sapiens
IRKAWPPALPTPWRGQGHLGVFCGQMPHGSHWRGHCRSYGRFRPPDVVSTGPGSRCCRDRGGFLQVLELGARATSPAICQPLPPLCLPSCPKFCLQQSPAFGPRTALDKLHPQWPQHLSLTHCCGAAASSRNTQRTESPVALSWARLLHERPLVRLHILHPLSGR

SEQ ID NO: 788410 - protein, 167 aa, Homo sapiens
MAAPAPRPRRVPSPPARVPGERWSGVGPVCLPPAPSPNPGLLVKGRGRARARKGGGSERQRGPAERVPTVTPRSSSQGAPAPKLLARRAQSRFPDQSRGRRSQWRALSDLSPHSPPCPSEFLSVEGSGALARGKGKQFVAWDLGPLAAPSAPPAPRRPCGPVAPARR

SEQ ID NO: 788411 - protein, 499 aa, Homo sapiens
IWLGLGFRGSAVLGVCWQLRSPPSRAARMMNRTTPDQELAPASEPVWERPWSMEEIRRSSQSWSLAADAGLLQFLQEFSQQTISRTHEIKKQVDGLIRETKATDCRLHNVFNDFLMLSNTQFIENRVYDEEGSVGSDRGSIVDTEEEKEEEESDEDFAHHSDNEQNRHTTQMSDEEEDDDGCDLFADSEKEEEDIEDIEENTRPKRSRPTSFADELAARIKGDAVGRVDEEPTTLPSGEAKPRKTLKEKKERRTPSDDEEDNLFTPPKLTDEDFSPFGSGGGLFSGGKGLFDDEDEESDLFTEAPQDRQAGASVKEESSSSKPGKKIPAGAVSVFLGDTDVFGAASVPSMKEPQKPEQPTPRKSPYGPPPTGLFFFSAPHSKPSKTRKVQSTADIFGDEEGDLFKEKAVASPEATVSQTDENKARAEQQGYLILQQKSQALIRNKRLKKAYFQMRRTLRICFLLKVRVNLKGASLLPGKLPTSVSWFDDEDEEDNLLGV

SEQ ID NO: 788412 - protein, 346 aa, Homo sapiens
IWLGLGFRGSAVLGVCWQLRSPPSRAARMMNRTTPDQELAPASEPVWERPWSMEEIRRSSQSWSLAADAGLLQFLQEFSQQTISRTHEIKKQVDGLIRETKATDCRLHNVFNDFLMLSNTQFIENRVYDEEGSVGSDRGSIVDTEEEKEEEESDEDFAHHSDNEQNRHTTQMSDEEEDDDGCDLFADSEKEEEDIEDIEENTRPKRSRPTSFADELAARIKGDAVGRVDEEPTTLPSGEAKPRKTLKEKKERRTPSDDEEDNLFTPPKLTDEDFSPFGSGGGLFSGGKGLFDDEDEEVSPRHPATLPAASCVRGPQGRYRLCLFSGGKTVSQLEVASIFIFWDILN

SEQ ID NO: 788413 - protein, 299 aa, Homo sapiens
  misc_feature (260)..(260): Xaa can be any naturally occurring amino acid
  misc_feature (286)..(287): Xaa can be any naturally occurring amino acid
  misc_feature (294)..(294): Xaa can be any naturally occurring amino acid
IWLGLGFRGSAVLGVCWQLRSPPSRAARMMNRTTPDQELAPASEPVWERPWSMEEIRRSSQSWSLAADAGLLQFLQEFSQQTISRTHEIKKQVDGLIRETKATDCRLHNVFNDFLMLSNTQFIENRVYDEEGSVGSDRGSIVDTEEEKEEEESDEDFAHHSDNEQNRHTTQMSDEEEDDDGCDLFADSEKEEEDIEDIEENTRPKRSRPTSFADELAARIKGDAVGRVDEEPTTLPSGEAKPRKTLKEKKERRTPSDVKXDNFIRTPPKLDPTKELFRHFGFLEGXXWFNGGAXGASFG

SEQ ID NO: 788414 - protein, 509 aa, Homo sapiens
IWLGLGFRGSAVLGVCWQLRSPPSRAARMMNRTTPDQELAPASEPVWERPWSMEEIRRSSQSWSLAADAGLLQFLQEFSQQTISRTHEIKKQVDGLIRETKATDCRLHNVFNDFLMLSNTQFIENRVYDEEGSVGSDRGSIVDTEEEKEEEESDEDFAHHSDNEQNRHTTQMSDEEEDDDGCDLFADSEKEEEDIEDIEENTRPKRSRPTSFADELAARIKGDAVGRVDEEPTTLPSGEAKPRKTLKEKKERRTPSDDEEDNLFTPPKLTDEDFSPFGSGGGLFSGGKGLFDDEDEESDLFTEAPQDRQAGASVKEESSSSKPGKKIPAGAVSVFLGDTDVFGAASVPSMKEPQKPEQPTPRKSPYGPPPTGLFDDDDGDDDDDFFSAPHSKPSKTGKVQSTADIFGDEEGDLFKEKAVASPEATVSQTDENKARAEQQGYLILQQKSQALIRNKRLKKAYFQMRRTLRICFLLKVQSNLKGASLLPGKLPTSVSWFDDEDEEDNLLGV

SEQ ID NO: 788415 - protein, 105 aa, Homo sapiens
IVIQVFILVVKIIYFLHDIHPNIVPNGHIIFQTFWEISRQIHEFMTWTQVECPFEKDKKIQSYLLTAPIYSEEALFVASFESEGPENHMEKDSWKTLRTTLLNRA

SEQ ID NO: 788416 - protein, 84 aa, Homo sapiens
RATPGLPQLVTLSCVVVVVVVGFISLTIFYLLIGTFRTYTFNIITNTLGFTSTILFVLFISSILSFSPFLPLFDLVLFLFFPLS

SEQ ID NO: 788417 - protein, 79 aa, Homo sapiens
YTLRVLAILTPARAAAFTEVATWSPSLHRTTCCPLCASSSMPLCCPVPNNFQNDLLALIKQLSQFGNPESAPSFTYHTK

SEQ ID NO: 788418 - protein, 46 aa, Homo sapiens
YFSNTNDYNDRSYHLLRTFYVPDPKLKLHLIFFSYDFMQFKEERIM

SEQ ID NO: 788419 - protein, 155 aa, Homo sapiens
RSPRHRRICSPKGKQWCPLQPASHEPETCYKRYRGRRKREGRDREREREKERERERQLTRCPSGGAGEGSPSLPTRPGCLYTSPEGGKRSMRKGQVPRKGQGPGRRDRERQKQRERENPAQAQRGASVGIWRVEMPVAAPGLFWSMEHQSSPPPT

SEQ ID NO: 788420 - protein, 92 aa, Homo sapiens
STEDPGLLCPAYGHPGSDSPPGPGPPEALNCVLVTVSPLHGARTDLGLGWGTEIPTSSSRGEAGLPASRGHLCRAVSSLYHCSPAEGGISFP

SEQ ID NO: 788421 - protein, 81 aa, Homo sapiens
FGNCGEFSCHNSLVVVKSNYMFQMMKSTVMKSWHSSQGDRCIKPHGFSELPLTLELSTEMSMVISPRLTSSHLDLMHEARF

SEQ ID NO: 788422 - protein, 151 aa, Homo sapiens
DIISGLSCGNVFFNVGGGIWWAVFGSWGWIPQEWLGVHPTVMGSQEIWLMKSLGPRSSSLLPHSPCDMPAPSTMIGSFLRPHQKPSRCWCYAGIACRTMSQIKLFFFSRWGSHHVGQAGLKQFSHLSLPKYWDCRVSHHTQPNKTFFFNYK

SEQ ID NO: 788423 - protein, 271 aa, Homo sapiens
EKQKLLEEKEKMLEDLRREQEATELLAAKYKAMESKLLIGGRNIMDHTNEQQKMLELKRQEIAEQKRREREMQQEMMLRDEETMELRGTYTSLQQEVEVKTKKLKKLYAKLQAVKAEIQDQHDEYIRVRQDLEEAQNEQTRELKLKYLIIENFIPPEEKNKIMNRLFLDCEEEQWKFQPLVPAGVSSSQMKKRPTSAVGYKRPISQYARVAMAMGSHPRYRAENIMFLELDVSPPAVFEMEFSHDQEQDPRALHIGEAHAIGQLSGKTFHV

SEQ ID NO: 788424 - protein, 101 aa, Homo sapiens
LPGGTSAASLSVVTTKIIQFQHGQEAECSPAAPRVPRTGLGTLQAPNIWRRQGSHPLPGRTECPSVQPLCLPPPAGHHRNHSILGQTDKRLISMAGLWRGQ

SEQ ID NO: 788425 - protein, 109 aa, Homo sapiens [sequence omitted]

SEQ ID NO: 788426 - protein, 151 aa, Homo sapiens
GKLPGGWTLAGALDTGLWSHSEELGFCPGEHGKPVEGSLPGTDMTCFRFGCDVLIQRKAPKMVSVSESTALFLPFFCFSSFLGYCIPFKILVTTGHSPLPEEKPHPDTHSILPIISGARVTQGELFWSSPSSPSCRDAHWAQSGDIFTELP

SEQ ID NO: 788427 - protein, 158 aa, Homo sapiens
GLSLSTDAQPSGQAHGRAAPSPQPRSGHPTASLPSRSLPRTGARETDKELGPSLSAGHGQAQGRKVPGRHLGTRVGARRKSWEANSQSWGWRAGRGGESGQSQPSEPPASWGSGWEACLALQRKANRPPRSARIAEAPLEKLLPLLHQTLRRASFPPG

SEQ ID NO: 788428 - protein, 566 aa, Homo sapiens
MEILRHKDIIDDLVKSGHKIMTACSEEEKQSMKKKLDKVLKNYDTICQINSERYLQLERAQSLVNQFWETYEELGPWLTETQSIISQLPAPALEYDTLRQQQEEHRQLRELIAEHKPHIDKMNKTGHSTEMSPGEGFSIQEKYVAADTLYSQIKEDVKKRAVALDEAISQSTQFHDKIDQILESLERIVERLRQPPSISAEVEKIKEQISENKNVSVDMEKLQPLYETLKQRGEEMIARSGGTDKDISAKAVQDKLDQMVFIWENIHTLVEEREAKLLDVMELAEKFWCDHMSLIVTIKDTQDFIRDLEDPGIDPSVVKQQQEAAETIREEIDGLQEELDIVINLGSELIAACGEPDKPIVKKSIDELNSAWDSLNKAWKDRIDQLEEAMQAAVQYQDGLQAVFDWVDIAGGKLASMSPIGTDLETVKQQIEELKQFKSEAYQQQIEMERLNHQAELLLKKVTEESDKHTVQDPLMELKLIWDSLEERIINRQHKLEGALLALGQFQHALDELLAWLTHTEGLLSEQKPVGGDPKAIEIELAKHHVLQNDVLAHQSTVEAVNKAGN

SEQ ID NO: 788429 - protein, 156 aa, Homo sapiens
GRSTRIPPGLLRSGGTDKDISAKAVQDKLDQMVFIWENIHTLVEEREAKLLDVMELAEKFWCDHMSLIVTIKDTQDFIRDLEDPGIDPSVVKQQQEAAETIREEIDGLQEELDIVINLGSELIAACGEPDKPIVKKSIDELNSAWDSYTVQCLVII

SEQ ID NO: 788430 - protein, 339 aa, Homo sapiens
GRSTRIPPGLLRSGGTDKDISAKAVQDKLDQMVFIWENIHTLVEEREAKLLDVMELAEKFWCDHMSLIVTIKDTQDFIRDLEDPGIDPSVVKQQQEAAETIREEIDGLQEELDIVINLGSELIAACGEPDKPIVKKSIDELNSAWDSLNKAWKDRIDQLEEAMQAAVQYQDGLQAVFDWVDIAGGKLASMSPIGTDLETVKQQIEELKQFKSEAYQQQIEMERLNHQAELLLKKVTEESDKHTVQDPLMELKLIWDSLEERIINRQHKLEGALLALGQFQHALDELLAWLTHTEGLLSEQKPVGGDPKAIEIELAKHHVLQNDVLAHQSTVEAVNKAGN

SEQ ID NO: 788431 - protein, 73 aa, Homo sapiens
MIFGCKLKGSTTVTLSPASKDPDVCWPEEHLLNLLIRGKVWRKGVEVFAMNYFHYSESLVDVHLPEIKLSSTV

SEQ ID NO: 788432 - protein, 101 aa, Homo sapiens
GNTCNLRPSTVDSKQPHGGASSSPCSPGHLPGAGSERHGPQPLEGQCLLSTHLQNPGKQAISQMSLPFSVKINVKGHVWWHMPVVPATQEAKAGGSLKPRW

SEQ ID NO: 788433 - protein, 245 aa, Homo sapiens
MGRWLCFSESYQASEKDKFTEGRDRQRKMLAKRKPPAMGQDPPATSEQKQWKSRTNGAENKTLTLAEYHEQEEIFKLRLGHLKKEEAEIQAELERLERVRNLRIGELKRIHNEDNSQFKDHPMLNDRYLLLHLLDRGGFSKVYKAFELIEQRYVAVKIHQLNKNWRDEKKENYHKHACREYWIHKELDHPRIIKLYDYFSLDTDSFCTVLEYCEGNDLNFYLKRHKLMSEKEAWSIIMQTVNALK

SEQ ID NO: 788434 - protein, 94 aa, Homo sapiens
APYICNECGKSFSHWSKLTRHQRTHTGERPNACADCGKTFSQSSHLVQHRRIHTGEKPYACLECGKRFSWSSNLMQHQRIHTGEKPYTCPDCGR

SEQ ID NO: 788435 - protein, 335 aa, Homo sapiens
MSKRKAPQETLNGGITDMLTELANFEKNVSQAIHKYNAYRKAASVIAKYPHKIKSGAEAKKLPGVGTKIAEKIDEFLATGKLRKLEKIRQDDTSSSINFLTRVSGIGPSAARKFVDEGIKTLEDLRKNEDKLNHHQRIGLKYFGDFEKRIPREEMLQMQDIVLNEVKKVDSEYIATVCGSFRRGAESSGDMDVLLTHPSFTSESTKQPKLLHQVVEQLQKVHFITDTLSKGETKFMGVCQLPSKNDEKEYPHRRIDIRLIPKDQYYCGVLYFTGSDIFNKNMRAHALEKGFTINEYTIRPLGVTGVAGEPLPVDSEKDIFDYIQWKYREPKDRSE

SEQ ID NO: 788436 - protein, 181 aa, Homo sapiens
MLQMQDIVLNEVKKVDSEYIATVCGSFRRGAESSGDMDVLLTHPSFTSESTKQPKLLHQVVEQLQKVHFITDTLSKGETKFMGVCQLPSKNDEKEYPHRRIDIRLIPKDQYYCGVLYFTGSDIFNKNMRAHALEKGFTINEYTIRPLGVTGVAGEPLPVDSEKDIFDYIQWKYREPKDRSE

SEQ ID NO: 788437 - protein, 181 aa, Homo sapiens; identical to SEQ ID NO: 788436

SEQ ID NO: 788438 - protein, 306 aa, Homo sapiens
MSKRKAPQETLNGGITDMLTELANFEKNVSQAIHKYNAYRKAASVIAKYPHKIKSGAEAKKLPGVGTKIAEKIDEFLATGKLRKLEKIRQDDTSSSINFLTRVSGIGPSAARKFVDEGIKTLEDLRKNEDKLNHHQRIGLKYFGDFEKRIPREEMLQMQDIVLNEVKKVDSEYIATVCGSFRRGAESSGDMDVLLTHPSFTSESTKQGVCQLPSKNDEKEYPHRRIDIRLIPKDQYYCGVLYFTGSDIFNKNMRAHALEKGFTINEYTIRPLGVTGVAGEPLPVDSEKDIFDYIQWKYREPKDRSE

SEQ ID NO: 788439 - protein, 132 aa, Homo sapiens
MILQPKLLHQVVEQLQKVHFITDTLSKGETKFMGVCQLPSKNDEKEYPHRRIDIRLIPKDQYYCGVLYFTGSDIFNKNMRAHALEKGFTINEYTIRPLGVTGVAGEPLPVDSEKDIFDYIQWKYREPKDRSE

SEQ ID NO: 788440 - protein, 290 aa, Homo sapiens
MSKRKAPQETLNGGITDMLTELANFEKNVSQAIHKYNAYRKAASVIAKYPHKIKSGAEAKKLPGVGTKIAEKIDEFLATGKLRKLEKIRQDDTSSSINFLTRVSGIGPSAARKFVDEGIKTLEDLRKNEDKLNHHQRIGLKYFGDFEKRIPREEMLQMQDIVLNEVKKVDSEYIATVCGSFRRGAESSGDMDVLLTHPSFTSESTKQPKLLHQVVEQLQKVHFITDTLSKGETKFMELQENPCQWIVKKTSLITSSGNTGNPRTGANEACILPGRHNPIGVLIYFLTFAM

SEQ ID NO: 788441 - protein, 109 aa, Homo sapiens
QGFSLKKHLINMSTLFIFYTDLRKNEDKLNHHQRIGLKYFGDFEKRIPREEMLQMQDIVLNEVKKVDSEYIATVCGSFRRGAESSGDMDVLLTHPSFTSESTKQVPQSL

SEQ ID NO: 788442 - protein, 370 aa, Homo sapiens
MSKRKAPQETLNGGITDMLTELANFEKNVSQAIHKYNAYRKAASVIAKYPHKIKSGAEAKKLPGVGTKIAEKIDEFLATGKLRKLEKIRQDDTSSSINFLTRVSGIGPSAARKFVDEGIKTLEGSQLDSCPVKGHLNGTESLLDLIWDVMTILKLKNADLRKNEDKLNHHQRIGLKYFGDFEKRIPREEMLQMQDIVLNEVKKVDSEYIATVCGSFRRGAESSGDMDVLLTHPSFTSESTKQPKLLHQVVEQLQKVHFITDTLSKGETKFMGVCQLPSKNDEKEYPHRRIDIRLIPKDQYYCGVLYFTGSDIFNKNMRAHALEKGFTINEYTIRPLGVTGVAGEPLPVDSEKDIFDYIQWKYREPKDRSE

SEQ ID NO: 788443 - protein, 181 aa, Homo sapiens; identical to SEQ ID NO: 788436

SEQ ID NO: 788444 - protein, 307 aa, Homo sapiens
MSKRKAPQETLNGGITDMLTELANFEKNVSQAIHKYNAYRKAASVIAKYPHKIKSGAEAKKLPGVGTKIAEKIDEFLATGKLRKLEKIRQDDTSSSINFLTRVSGIGPSAARKFVDEGIKTLEDLRKNEDKLNHHQRIGLKYFGDFEKRIPREEMLQMQDIVLNEVKKVDSEYIATVCGSFRRGAESSGDMDVLLTHPSFTSESTKQPKLLHQVVEQLQKVHFITDTLSKGETKFMGVCQLPSKNDEKEYPHRRIDIRLIPKDQYYCGVLYFTGSDIFNKNMRAHALEKDIFDYIQWKYREPKDRSE

SEQ ID NO: 788445 - protein, 114 aa, Homo sapiens
GLAALSAAELQGQGHSGPRHERPQPGVSVSDRRRPEPRPGRMLFPREVRKYRGGAAAAGSDPGDPVTRSFLTSSSRTGCRYLSWLASHVIVSKLSCKIRRSSESHLLNCRQHTV

SEQ ID NO: 788446 - protein, 249 aa, Homo sapiens
IVEVKVLDVQKRRVPNKHYVYIIRVTWSSGSTEAIYRRYSKFFDLQMQMLDKFPMEGGQKDPKQRIIPFLPGKILFRRSHIRDVAVKRLIPIDEYCKALIQLPPYISQCDEVLQFFETRPEDLNPPKEEHIGKKKSGGDQTSVDPMVLEQYVVVANYQKQESSEISLSVGQVVDIIEKNESGWWFVSTAEEQGWVPATCLEGQDGVQDEFSLQPEEEEKYTVIYPYTARDQDEMNLERGAVVEVIQKNL

SEQ ID NO: 788447 - protein, 186 aa, Homo sapiens
ERAQSLRLRTIRSSSISYSQESGAAADDIKPCPRCAAYIIKMNDGSCNHMTCAVCGCEFCWLCMKEISDLHYLSPSGCTFWGKKPWSRKKKILWQLGTLVGAPVGIALIAGIAIPAMIIGIPVYVGRKIHNRYEGKDVSKHKRNLAIAGGVTLSVIVSPVVAAVTVGIGVPIMLAYVYGVVPISLC

SEQ ID NO: 788448 - protein, 81 aa, Homo sapiens
WFPQVKWTVRVHPCPCFSLYPAASSTQPSLSYATHGREQIVESTQRDKAIQAEWVVGLWRGPPKTSGWRVRRLSPESLILM

SEQ ID NO: 788449 - protein, 68 aa, Homo sapiens
RSLNNIPLLGRESRYFHENVRGMRRVEYAAVINYPNTTWLNPTLCGSCIHTAACYAAHNEADCFHLHS

SEQ ID NO: 788450 - protein, 155 aa, Homo sapiens
LLCDGSSGPCGAVATETLAAVRRSGWGCALLEAGGSQERVGAPPLLNWQAGAPPSQAQLQPSSHDCKPGHLCTLRGPASPPAPTGSVVPGPTTWRLSTPRAHSNLGSKLRLNPGTVGTRPGLCKLKAVLTCQPPATSAPSRLWALTSTRGRLRWV

SEQ ID NO: 788451 - protein, 82 aa, Homo sapiens
LLWPGLKAPGSGRPSPSPASLLAPLRCMRGPHASWALSICIGVSPPLGGPLPSAQLRTVGLRDSERGDMRRPHCADEEHWVG

SEQ ID NO: 788452 - protein, 125 aa, Homo sapiens
HNSPPAGDNAPYPTSGDLGSDRRPHTYSPSLSDRQSWDLNTPGETPSSRPLRCTAGLPHMPESGWPQGTARRCPQIPKCGLSPSPSSLQPPSPHLCNGALPGSQVMKRGETRQCPLNTSDSTFEW

SEQ ID NO: 788453 - protein, 37 aa, Homo sapiens
MMKPQAETGEAARDPSLRPARTVLVGVSLTKSRAAVR

SEQ ID NO: 788454 - protein, 133 aa, Homo sapiens
LISVMSGRGKQGGKARAKAKSRSSRAGLQFPVGRVHRLLRKGNYAERVGAGAPVYMAAVLEYLTAEILELAGNAARDNKKTRIIPRHLQLAIRNDEELNKLLGKVTIAQGGVLPNIQAVLLPKKTESHKAKSK

SEQ ID NO: 788455 - protein, 67 aa, Homo sapiens
LEGPLRSSGKGHSRRSLAPGGPPSCMGSGGAGFALISHVPAKNGDSSIKGKGEKVTGEAPQSLCHSV

SEQ ID NO: 788456 - protein, 48 aa, Homo sapiens
MSTNESVSTRTRIILSALLAFIGDDPTDLFPSMWDLKSSKGNKFVLVQ

SEQ ID NO: 788457 - protein, 115 aa, Homo sapiens
PRCNFLRSSRIRVHPTPAASTMPPKFDPNEIKVVYLRCTGGEVGATSALAPKIGPLGLSPKKVGDDIAKATGDWKGLRITVKLTIQNRQAQIEVVPSASALIIKALKEPPRHRKK

SEQ ID NO: 788458 - protein, 77 aa, Homo sapiens
MWKPIHIRHISGSRELKSSRNPSNGSRIVDPTPLTDCHREDGVCLWYRPEPPRRPKQTCNLGIQKARGRKHTHRHWL

SEQ ID NO: 788459 - protein, 283 aa, Homo sapiens
MAELQLDPAMAGLGGGGGSGVGDGGGPVRGPPSPRPAGPTPRGHGRPAAAVAQRLEPGPGPPERAGGGGAARWVRLNVGGTYFVTTRQTLGREPKSFLCRLCCQEDPELDSDKDETGAYLIDRDPTYFGPILNYLRHGKLIITKELAEEGVLEEAEFYNIASLVRLVKERIRDNENRTSQGPVKHVYRVLQCQEEELTQMVSTMSDGWKFEQLISIGSSYNYGNEDQAEFLCVVSRELNNSTNGIVIEPSEKAKILQERGSADVTLRPRKLQTFRRAVSRAPL

SEQ ID NO: 788460 - protein, 391 aa, Homo sapiens
AVSLPRNGPARLRAGSSGGGGGPRWRNCSWTRRWRGWEGAPGPGPPERAGGGGAARWVRLNVGGTYFVTTRQTLGREPKSFLCRLCCQEDPELDSDKDETGAYLIDRDPTYFGPILNYLRHGKLIITKELAEEGVLEEAEFYNIASLVRLVKERIRDNENRTSQGPVKHVYRVLQCQEEELTQMVSTMSDGWKFEQLISIGSSYNYGNEDQAEFLCVVSRELNNSTNGIVIEPSEKAKILQERGSADVTLRPRKLQTFRRAVSRALCEVKPYSCPVTEPLKAQLILAPCEEVFWCKTKGTPSPPAGLRRQCDFWLQNTFSETCFHLLSQYVEQIFTTAAGLGSQSEPFGDLGDEGGRPSSLEMACTLRTLEPRGLFPCRAMVSPYVCHNGR

SEQ ID NO: 788461 - protein, 202 aa, Homo sapiens
APPLCELPGSARSSPDRYSMEAVDMNTEDGFAFEEESDFNGNAHPSDTSELFEVKAQASRMQRLLGPSETSSLRNSQSENSSLNNMPLRGGLSVHTCSSASQSEASSMVNFPAYSVRSESSSAFQFSDIIDQLEQLSYPPTTAEDSSSTESDSWDSETEAPLDISLFFSNPFAHTSGERVPFDLQNNLKNLTPGEQIDKNPS

SEQ ID NO: 788462 - protein, 68 aa, Homo sapiens
RVVCGLALPWLNREAKVGSQPLGEQLCRPWRQLLVLRARAAGGAALCPSSLAAPSRGSRPLEAALLPG

SEQ ID NO: 788463 - protein, 101 aa, Homo sapiens
SRQASPRAHPEQPAAAWKGLALAPRCRGALPACLLLGLPGLPPTDHENSSSMGRESDQSDNSHPLTAQHCSLLPRYSYQTRSALLLLGGQKRPPNPVQDSR

SEQ ID NO: 788464 - protein, 35 aa, Homo sapiens
MCLRDLSRDLLLRKSEVHSKVRSVTSPEAQLIQVL

SEQ ID NO: 788465 - protein, 115 aa, Homo sapiens
MKYHVSIVPSVHSLACLYVTISDSAVWWSLHTDAHEIWCLDSEQGTSLGRSIPHPPALCSVRKIHLRPQVLRPTSPRNISPISNPVSGLILLSSPTSLTVPQPLSPFHSSISPFS

SEQ ID NO: 788466 - protein, 102 aa, Homo sapiens
KDSRGVRLKKETSQQILAIKCALNSISEIWPKCCGHPSRKPVIISGLPKTENYEDADEVVKLWKRTITKQYVHGQVQWRAPVVPTTWEAELYSNASQTFSNT

SEQ ID NO: 788467 - protein, 152 aa, Homo sapiens [sequence omitted]

SEQ ID NO: 788468 - protein, 40 aa, Homo sapiens
MEETENKFQILNLPHVFEGSQGFPDFTFKILTLRAGHGGS

SEQ ID NO: 788469 - protein, 182 aa, Homo sapiens
ALEDPRSLGKSVLITAVLLLLSLPVLAAGITILLTDRNLNTTFFDPCHNPIPNAPLRLIRPNHSSPTSPISPSPSCWHHYTTNRPQPQHHLLRPRRRRRPHSIATTILIFRSPEVIFLSNRVRNNLAYCNYYSGTKTTGYKGRAGARQPGAHRDNERAHHTSPQESTTTTSSPGTEKQQRAK

SEQ ID NO: 788470 - protein, 85 aa, Homo sapiens
LCTRDAGLGHVAPWKLEDAPGLTLQGVRALGMEGRGTRQEGEPQGGESPGRAGCGGFAQPPWALHGSARTLLRTHSRPAPYRGVE

SEQ ID NO: 788471 - protein, 85 aa, Homo sapiens; identical to SEQ ID NO: 788470

SEQ ID NO: 788472 - protein, 105 aa, Homo sapiens [sequence omitted]

SEQ ID NO: 788473 - protein, 107 aa, Homo sapiens
SWPASAAGSPGSRSRLSLHTSLQAEGVGSGLGQPRKGLPQCSGGLKGSSSATKVGAQAEEAVRASQGCEDCQHAVTSHYDFIPSLLHRCLEIEVRHPKSENLKSSKI

SEQ ID NO: 788474 - protein, 114 aa, Homo sapiens
NIQWICLHNRLDCQNGDEIVQQNLCLQQNFIPCCINNSQVSQGRNWWEVTGSWRRFSPCSSCDSEGVLMRADGFKCGISSLFLTHSCLLSCKTCLCFSSAFCHDCVLRPPQSLG

SEQ ID NO: 788475 - protein, 251 aa, Homo sapiens
LLLSPAKPKNQAEAQKVTFSQDPTTVALCISKEGRPPARISWLSSLDWEAKETQVSGTLAGTVTVTSRFTLVPSGRADGVTVTCKVEHESFEEPALIPVTLSVRYPPEVSISGYDDNWYLGRTDATLSCDVRSNPEPTGYDWSTTSGTFPTSAVAQGSQLVIHAVDSLFNTTFVCTVTNAVGMGRAEQVIFVRETPRARPRCGPRCVGGRGGGHMWCCWYMAGGSWPYPAEVTKEEEQPWGQKKTQWPRGI

SEQ ID NO: 788476 - protein, 108 aa, Homo sapiens
GGARGEGAGRVLFSPPWPCWPWQKGPAQCCWPGNLAKDRRPSSEAGWPFGEQWLRCPPRHSDRHLQSLFSALPKASSVSRDTVLGYRDRAPCGIVLSGVCASHPVWDC

SEQ ID NO: 788477 - protein, 309 aa, Homo sapiens
MEQLLGIKLGCLFALLALTLGCGLTPICFKWFQIDAARGHHRRVLRLLGCISAGVFLGAGFMHMTAEALEEIESQIQKFMVQNRSASERNSSGDADSAHMEYPYGELIISLGFFLVFFLESLALQCCPGAAGGSTVQDEEWGGAHIFELHSHGHLPSPSKGPLRALVLLLSLSFHSVFEGLAVGLQPTVAATVQLCLAVLAHKGLVVFGVGMRLVHLGTSSRWAVFSILLLALMSPLGLAVGLAVTGGDSEGGRGLAQAVLEGVAAGTFLYVTFLEILPRELASPEAPLAKWSCVAAGFAFMAFIALWA

SEQ ID NO: 788478 - protein, 106 aa, Homo sapiens
GVVPALPSRCPGASEVCWRLRPGPARGALSAELATLSPTSLCRGRGPGLLQLPWIRWKDVENGGSSISPSTHPHLLGHPPPPKSIIASGPLDLLFHSLPDMECPRL

SEQ ID NO: 788479 - protein, 86 aa, Homo sapiens
AGSTHTPRVQGSAAQGGRHTQNAHNAGKRDLGSQDADGTKPRPPLSPKCGFQMVIQGSSWFRALFTGLPGQLQGRGVVPVGERPWE

SEQ ID NO: 788480 - protein, 134 aa, Homo sapiens
ISLLGIYPEVLRVGLNRYFHIHIHNSQKVETTQFSIHRCKDFFKMCFVYTMGYYSALKEKGAGARWLMPVIPTLWEAKAGGSQGQEIETILANTVKPCLKIQKISRAWWRVLVEPATWEAEAGDWHEPGRRSLQ

SEQ ID NO: 788481 - protein, 117 aa, Homo sapiens
QYLPLLPIILFWISNMLSLLFLCTLHPSLSLPSLRLTLTPIRLSKLPGLYCRKASQTAPITSIKPKFHPHLLVILLFTILNYSYMPCSCLHCRFTLFLQAITADISWCYPQTATLNS

SEQ ID NO: 788482 - protein, 110 aa, Homo sapiens [sequence omitted]

SEQ ID NO: 788483 - protein, 135 aa, Homo sapiens
MIPSDIEPDGSYSQDISEGRQLLIKAVNRVWTELIHSKKQVLEELFKVTLPVNERGHVDIATARPLIEEAALKCWQNHLAHEKKCISRGEALAPTTQSKLSRVSSGFGLSKLTGSRRNRKESGLNKHSLSTQVLF

SEQ ID NO: 788484 - protein, 109 aa, Homo sapiens
KKLKANQTPIAMDCCASRSCSVPTGPATTICSSDKSCRCGVCLPSTCPHTVWLLEPICCDNCPPPCHIPQPCVPTCFLLNSCQPTPGLETLNLTTFTQPCCEPCLPRGC

SEQ ID NO: 788485 - protein, 148 aa, Homo sapiens
PASTSQSVGIIGVSTAPSRLCSFKRSSSFLPFITCPPWPFMAPLLPWTKQRCDWCSQHLSTDTIFLSGPEVLDYRAGLPATCHENLTRTSGTLLNLLTPPLRPALDNSYILEKGNETGLKPLPTVQKAQAPFPRQKEPDSSAHVPLFI

SEQ ID NO: 788486 - protein, 70 aa, Homo sapiens
QQPRVHSVCLCVYVCVHFLQFCHMYSLASLSLQSESSAVPSPTIPVFAFIATSILFSSLALATTHIVQLS

SEQ ID NO: 788487 - protein, 540 aa, Homo sapiens
MTTSLQDGQSAASRAAARDSPLAAQVCGAAQGRGDAHDLAPAPWLHARALLPLPDGTRGCAADRRKKKDLDVPEMPSIPNPFPELCCSPITSVLSADLFPKANSRKKQVIKVYSEDETSRALDVPSDITARDVCQLLILKNHYIDDHSWTLFEHLPHIGVERTIEDHELVIEVLSNWGIEEENKLYFRKNYAKYEFFKNPMYFFPEHMVSFATETNGEISPTQILQMFLSSSTYPEIHGFLHAKEQGKKSWKKIYFFLRRSGLYFSTKGTSKEPRHLQFFSEFGNSDIYVSLAGKKKHGAPTNYGFCFKPNKAGGPRDLKMLCAEEEQSRTCWVTAIRLLKYGMQLYQNYMHPYQGRSGCSSQSISPMRSISENSLVAMDFSGQKSRVIENPTEALSVAVEEGLAWRKKGCLRLGTHGSPTASSQSSATNMAIHRSQPWFHHKISRDEAQRLIIQQGLVDGVFLVRDSQSNPKTFVLSMSHGQKIKHFQIIPVEDDGEMFHTLDDGHTRFTDLIQLVEFYQLNKGVLPCKLKHYCARIAL

SEQ ID NO: 788488 - protein, 225 aa, Homo sapiens [sequence omitted]

SEQ ID NO: 788489 - protein, 67 aa, Homo sapiens
TLHYAGLIIVVKRTHLEDNVEDDGEMFHTLDDGHTRFTDLIQLVEFYQLNKGVLPCKLKHYCARIAL

SEQ ID NO: 788490 - protein, 66 aa, Homo sapiens
TCQDLPATNSPPITVSHTVEDDGEMFHTLDDGHTRFTDLIQLVEFYQLNKGVLPCKLKHYCARIAL

SEQ ID NO: 788491 - protein, 453 aa, Homo sapiens
MSLSARRVTLPAITPIILQKRVIKVYSEDETSRALDVPSDITARDVCQLLILKNHYIDDHSWTLFEHLPHIGVERTIEDHELVIEVLSNWGIEEENKLYFRKNYAKYEFFKNPMYFFPEHMVSFATETNGEISPTQILQMFLSSSTYPEIHGFLHAKEQGKKSWKKIYFFLRRSGLYFSTKGTSKEPRHLQFFSEFGNSDIYVSLAGKKKHGAPTNYGFCFKPNKAGGPRDLKMLCAEEEQSRTCWVTAIRLLKYGMQLYQNYMHPYQGRSGCSSQSISPMRSISENSLVAMDFSGQKSRVIENPTEALSVAVEEGLAWRKKGCLRLGTHGSPTASSQSSATNMAIHRSQPWFHHKISRDEAQRLIIQQGLVDGVFLVRDSQSNPKTFVLSMSHGQKIKHFQIIPVEDDGEMFHTLDDGHTRFTDLIQLVEFYQLNKGVLPCKLKHYCARIAL

SEQ ID NO: 788492 - protein, 440 aa, Homo sapiens
  misc_feature (8)..(8): Xaa can be any naturally occurring amino acid
MELRKGFXVIKVYSEDETSRALDVPSDITARDVCQLLILKNHYIDDHSWTLFEHLPHIGVERTIEDHELVIEVLSNWGIEEENKLYFRKNYAKYEFFKNPMYFFPEHMVSFATETNGEISPTQILQMFLSSSTYPEIHGFLHAKEQGKKSWKKIYFFLRRSGLYFSTKGTSKEPRHLQFFSEFGNSDIYVSLAGKKKHGAPTNYGFCFKPNKAGGPRDLKMLCAEEEQSRTCWVTAIRLLKYGMQLYQNYMHPYQGRSGCSSQSISPMRSISENSLVAMDFSGQKSRVIENPTEALSVAVEEGLAWRKKGCLRLGTHGSPTASSQSSATNMAIHRSQPWFHHKISRDEAQRLIIQQGLVDGVFLVRDSQSNPKTFVLSMSHGQKIKHFQIIPVEDDGEMFHTLDDGHTRFTDLIQLVEFYQLNKGVLPCKLKHYCARIAL

SEQ ID NO: 788493 - protein, 453 aa, Homo sapiens; identical to SEQ ID NO: 788491

SEQ ID NO: 788494 - protein, 488 aa, Homo sapiens
MTTSLQDGQSAASRAAARDSPLAAQVCGAAQGRGDAHDLAPAPWLHARALLPLPDGTRGCAADRRKKKDLDVPEMPSIPNPFPELMLFSNYICVVSRPISQSKFKEKTERTIEDHELVIEVLSNWGIEEENKLYFRKNYAKYEFFKNPMYFFPEHMVSFATETNGEISPTQILQMFLSSSTYPEIHGFLHAKEQGKKSWKKIYFFLRRSGLYFSTKGTSKEPRHLQFFSEFGNSDIYVSLAGKKKHGAPTNYGFCFKPNKAGGPRDLKMLCAEEEQSRTCWVTAIRLLKYGMQLYQNYMHPYQGRSGCSSQSISPMRSISENSLVAMDFSGQKSRVIENPTEALSVAVEEGLAWRKKGCLRLGTHGSPTASSQSSATNMAIHRSQPWFHHKISRDEAQRLIIQQGLVDGVFLVRDSQSNPKTFVLSMSHGQKIKHFQIIPVEDDGEMFHTLDDGHTRFTDLIQLVEFYQLNKGVLPCKLKHYCARIAL

SEQ ID NO: 788495 - protein, 374 aa, Homo sapiens
MSLSARRVTLPAITPIILQKRVIKVYSEDETSRALDVPSDITARDVCQLLILKNHYIDDHSWTLFEHLPHIGVERTIEDHELVIEVLSNWGIEEENKLYFRKNYAKYEFFKNPMYFFPEHMVSFATETNGEISPTQILQMFLSSSTYPEIHGFLHAKEQGKKSWKKIYFFLRRSGLYFSTKGTSKEPRHLQFFSEFGNSDIYVSLAGKKKHGAPTNYGFCFKPNKAGGPRDLKMLCAEEEQSRTCWVTAIRLLKYGMQLYQNYMHPYQGRSGCSSQSISPMRSISENSLVAMDFSGQKSRVIENPTEALSVAVEEGLAWRKKGCLRLGTHGSPTASSQSSATNMAIHRSQPWFHHKISRDEAQRLIIQQGLVDG

SEQ ID NO: 788496 - protein, 303 aa, Homo sapiens
MRWPQPQSQPNTATLNGAQRARTGHDNCATRGRCIPLSPRLTDYFYYGYLTLHEVTLYTRLAHATLTHTSRTASYAPYLSILLAHLAVAHAATTSPTQTQHLQPHACYLNGLPASTPTKHSGTHLPDIIIQKITLHSNMGALHVEADNLAALKFNSSQKNEAIARVPSYPVTPTTAIAPFVHHGSAPLKTFQSTHTNAFHNNYWRIPPPESGVRPTSYTQQHATSHFLKRALSIPDISRPPLVHTSPLATTSSDPRQYALRQPILPTIDSQCALDMLAEHPMIDVDSPSTRVSLHNVNIEFAR

SEQ ID NO: 788497 - protein, 33 aa, Homo sapiens
YKINIPRNVGKKRKMKYYCILVDILELLQDFVR

SEQ ID NO: 788498 - protein, 84 aa, Homo sapiens
VSHSYFRLFLFVFYAVCLCSNTVDMFTDIAAGPLTAWGRRWAPWWVGLEGGLGVSEDADGEDASVRESPQGRDQHLGQSLENFL

SEQ ID NO: 788499 - protein, 84 aa, Homo sapiens
SPSTQRISLHHVFQLEVASAILDCFFYLFSASFSDVKLKPETMGVHQIFGSYEGTWMELETLMLSKLMQEQKTKNHIFSLISGS

SEQ ID NO: 788500 - protein, 67 aa, Homo sapiens
HRNRKHIIHKRLSPIYYSHRYLPDKRLQHSNNSSHPNRDLSVGMMWQTGLETLGKWARLRYSHRDRH

SEQ ID NO: 788501 - protein, 67 aa, Homo sapiens; identical to SEQ ID NO: 788500

SEQ ID NO: 788502 - protein, 394 aa, Homo sapiens
MIGRNLREDGGKAAKEVKLLLLGAGESGKSTIVKQMEIIHEDGYSEDECKQNKEVVYSKAKQSIIAIKRAMGRLEIDFGEAARADDARQLFVLAGSAEEGVMTPELAGVIKRLWRDGGVQACFSRSREYQLNDSASYYLNDLDRISQSNYIPTQQDVLRTRVKTTGIVETHFTFKDLYFKMFDVGGQRSERKKWIHCFEGVTAIIFCVALSDYDLVLAEDEEMNRMHESMKLFDSICNNKWFTETSIILFLNKKDLFEEKIKRSPLTICYPEYTGTNTYEEAAAYIQCQFEDLNRRKDTKEIYTHFTWCHRHEACGQNAKKTAWYKKNSPLNKTNVTKGNRWRLHTCSSTGRLGKSDHKKSTETKTQTHDRVGRRRAQTRPNAGPGNAEAGRNN

SEQ ID NO: 788503 - protein, 255 aa, Homo sapiens
QEAHNGPAVEAQEEEEEQDHGVGRTGTVNSVGSNQSIPSMSISASSQSSSVNSLPDVSDDKSELDMMEGDHTVMSNSSVIHLKPEEENYREEGDPRTRASDPQSPPQVSRHKSHYRNREHFATIRTASLVTRQMQEHEQDSELREQMSGYKRMRRQHQKQLMTLENKLKAEMDEHRLRLDKDLETQRNNFAAEMEKLIKKHQAAMEKEAKVMSNEEKKFQQHIQAQQKKELNSFLESQKREYKLRKEQLKEVLMS

SEQ ID NO: 788504 - protein, 162 aa, Homo sapiens
MALARPRPRLGDLIEISRFGYAHWAIYVGDGYVVHLAPASEIAGAGAASVLSALTNKAIVKKELLSVVAGGDNYRVNNKHDDRYTPLPSNKIVKRAEELVGQELPYSLTSDNCEHFVNHLRYGVSRSDQVTGAVTTVGVAAGLLAAASLVGILLARSKRERQ

SEQ ID NO: 788505 - protein, 129 aa, Homo sapiens [sequence omitted]

SEQ ID NO: 788506 - protein, 128 aa, Homo sapiens
DIKEKLYYVTLDFEQEMATAASSSSLEKSYELSDGQVITIGNELSCCPEALFQPSFLSMESCDIHKTTFNSIMKCDMDIRKDLYTNTVLFGGNNMYPGIANRVQKIVTLVWMGSSILALLSTFQQMWV

SEQ ID NO: 788507 - protein, 72 aa, Homo sapiens
  misc_feature (3)..(3): Xaa can be any naturally occurring amino acid
  misc_feature (9)..(10): Xaa can be any naturally occurring amino acid
  misc_feature (20)..(21): Xaa can be any naturally occurring amino acid
  misc_feature (23)..(23): Xaa can be any naturally occurring amino acid
IPXSHDLKXXARLNLPKCWXXRXEPPALPFQPYRCRQFLTLPSQAVSTALTTYLNIFDNSLYNSLIKVLLFE

SEQ ID NO: 788508 - protein, 70 aa, Homo sapiens
PIRPIERGMTHAYWALSDNEGTCQTQDVQGNKKRKSDITPITIKDFPEGSDIDKLGGKLSLEMKGTVHKS

SEQ ID NO: 788509 - protein, 111 aa, Homo sapiens
KGTVPGCARRLNLCFSLPKHVIVAKSNRAAALDLCFSLPKHLSVGKSNRAVLLPAFLLPGSFLLSQNRTKGNGWLYNETFHSQRRAGDRRLPLISTAKRPPSLRLLSTDPL

SEQ ID NO: 788510 - protein, 137 aa, Homo sapiens
LVFSPTLPDKLLPQGLCTSCLFLLLGELFPQISALTHSLTSFKFPLKSHHLNEANSDNSRNLASPPSPLSPSFSALFFPFSTAPIISRNTYICLLIAFTVCLPLREVKIFVLFSDVYQMPRIMLAFGRHSINTFLYV

SEQ ID NO: 788511 - protein, 137 aa, Homo sapiens; identical to SEQ ID NO: 788510

SEQ ID NO: 788512 - protein, 43 aa, Homo sapiens
MLDHLWVSITSASSLFLTKLHLFLRMTHHRENSKLDENLGGYR

SEQ ID NO: 788513 - protein, 267 aa, Homo sapiens
PRSRKPSKAGTAPSPRVDAGLSLKLAEVKAVVAERGWRHSLWVPSGEGSAALAPHRTSEHKSSLVPLDAREHEWIVKLASGSWIQVWTLFWEDPQLALHKDFLTGYTALHWIAKHGDLRALQDLVSGAKKAGIVLDVNVRSSCGYTPLHLAAIHGHQGVIKLLVQRLASRVNVRDSSGKKPWQYLTSNTSGEIWQLLGAPRGKPIFPVYPLVGSSSPTRKAKSKEISRSVTRKTSFAALLKSQHNKWKLANQYEKFHSPREREEYSD

SEQ ID NO: 788514 - protein, 76 aa, Homo sapiens
MKFRENPAAGMRRKTEHLIIRKENGKRLLSLVGKPRLCSRLLFQRDFYNRGAAEATLPSATAHEPSSRLSSTLKCF

SEQ ID NO: 788515 - protein, 85 aa, Homo sapiens
NPASRLLIPRKTLNQWDHVLQMVTEKITLRSGAVHRLYTLEGKLVESGAELENGQFYVAVGRDKFKKLPYSELLFDKSTMRRPFG

SEQ ID NO: 788516 - protein, 104 aa, Homo sapiens
MLSLLLLCTLHPSLSLPSLRLTLTPIRLNKLPGLHCHKASQTAPITSVKPKFHPHLLVILPFTVLNYSYMPCSSLHCRFTLFLQDITADISWCYPQTGHSKLLK

SEQ ID NO: 788517 - protein, 77 aa, Homo sapiens
NIDGAPPRCQALLQPLGNQPWKHTDPALPAPVFWWSGGEENQQEPAQESDGGSAERNKLGGEGELQRLHGCDGWSGS

SEQ ID NO: 788518 - protein, 44 aa, Homo sapiens
IFSLSLNKVVGIGPKGFIKATHRGPRNTSMVSGMWFFEDLAEYR

SEQ ID NO: 788519 - protein, 125 aa, Homo sapiens
KSCQPVTTDTQCRHLQSIGKRLAFCQNLTQIHTESTMKPWILLLVMFISGVVMLLPVLGSFWNKDPFLDMIRETEQCWVQPPYKYCEKRCTKIMTCVRPNHTCCWTYCGNICLDNEEPLKSMLNP

SEQ ID NO: 788520 - protein, 105 aa, Homo sapiens
NPPTLTSQSAGIMPLSHHAQLFTSPSKMRLQDSRCGGCCKGSSLCHTAIAMVKLSKEAKQRLQQLFNGGQFAIHLGFIPLVIYLGFKRGADPGMSEPTVLSLLWG

SEQ ID NO: 788521 - protein, 325 aa, Homo sapiens
QLAQQLLHYHAIQASTQEEALAGWEPMGVIGLILPPTFSFLEMMWRICPALAVGCTVVALVPPASPAPLLLAQLAGELGPFPGILNVLSGPASLVPILASQPGIRKVAFCGAPEEGRALRRSLAGECAELGLALGTESLLLLTDTADVDSAVEGVVDAAWSDRGPGGLRLLIQESVWDEAMRRLQERMGRLRSGRGLDGAVDMGARGAAACDLVQRFVREAQSQGAQVFQAGDVPSERPFYPPTLVSNLPPASPCAQVEVPWPVVVASPFRTAKEALLVANGTPRGGSASVWSERLGQALELGYGLQVGTVWINAHGLRDPSVPT

SEQ ID NO: 788522 - protein, 113 aa, Homo sapiens
MAEQEQLRPVAPSEIDIEGLGHQDAQHRTEAPLVLHLVTWNCCAGPHRHSLQPSLAPTHHSSVGCPFAEGLPSDTPPRLLVLQPCCGQFAMRRLQWPRLLETVRCSWERKDTL

SEQ ID NO: 788523 - protein, 34 aa, Homo sapiens
MVRGAGPGPSLSALSHPTGASGMAAAEGPGYLVS

SEQ ID NO: 788524 - protein, 33 aa, Homo sapiens
MSQSLGGLQSMKENTSVLSQAEVICILINKLTE

SEQ ID NO: 788525 - protein, 83 aa, Homo sapiens
LYILEQAMTSQKDFSKVSPATEDSVDWTGRVGGQVEKALVCKWGAALGAQPVPCALTSGMAWMDGSTSGPPGWTGTGCSSPWR

SEQ ID NO: 788526 - protein, 121 aa, Homo sapiens
QHCCKHVSPPTIGRFLSYLRIEQMYNRVLYRDIQFPGAGRRQWPSSISTARGFPLLLIHLSTDLLWVSGWGTVRSFSSHKAIFQTITWGETLDNTPLSRAEVPAAFRNALCPWFIETREWR

SEQ ID NO: 788527 - protein, 129 aa, Homo sapiens
RPEVTGPFFMDSGHIWSIFVSWPLGRMWARPPGAVAWGDQRSPEGLAERPRGIHTPIPVAELIPRSALCFLVNQMFTALLLSLLQAAGWGRRVPVCSSLQREASSPPQGQPGWQATASRRQCACHGTRG

SEQ ID NO: 788528 - protein, 117 aa, Homo sapiens
DVSAKAVDILSSRHQCLYVISHPESRRSEEDQPVPTSCNLVFKVFPTQPLDPSSLSLIYQLALNSFFTCLSPHQTESSMRAEASHLCIPVYTQVSWQSICCTELKNKNLAWCGGSRP

SEQ ID NO: 788529 - protein, 59 aa, Homo sapiens
LGKRAMWKVNVCQMLSANSQLYKWRQQDQKRSQPELQNPCRAKISSTGLHHWNKHKVLN

SEQ ID NO: 788530 - protein, 45 aa, Homo sapiens
LELINEFSRVSGYKINVHKSVALLYTNSSNQGENQIKNSLLFTIV

SEQ ID NO: 788531 - protein, 124 aa, Homo sapiens
EEPQAVDVSGGTLVEQRPEELLRPSGICRLPTFGRLLVANVLQVMAPESNWAQIAVSSNAVEPGPTPTFTSWISELQDGSAHRTLSWPRLGLASVDSMFWASLLLSAGACACAGRPLIDIKATG

SEQ ID NO: 788532 - protein, 265 aa, Homo sapiens
APSRPRAPAQAMMSFGGADALLGAPFAPLHGGGSLHYALARKGGAGGTRSAAGSSSGFHSWTRTSVSSVSASPSRFRGAGAASSTDSLDTLSNGPEGCMVAVATSRSEKEQLQALNDRFAGYIDKVRQLEAHNRSLEGEAAALRQQQAGRSAMGELYEREVREMRGAVLRLGAARGQLRLEQEHLLEDIAHVRQRLDDEARQREEAEAAARALARFAQEAEAARVDLQKKAQALQEECGYLRRHHQEEVGELLGQIQGSGAAQAQ

SEQ ID NO: 788533 - protein, 102 aa, Homo sapiens
RLWLPPGPRTPASSGQTERGDTLHPVAGKRGLGLCPSGTEQSHHPMQALSPQAKLGLGKAACPGGLRDWGTMWELGWKPSCFPPSQTPVWAPGARGEGRSHG

SEQ ID NO: 788534 - protein, 105 aa, Homo sapiens
PQRAKVWNQKDCGLNPKYYCILPLWPYASSLTSLRGKCLISNMKIVILTPLCYKFNTGTVLQHSIHGCSFCLCFVVIVSNIRYKAGQEDLKLHTYLCQAEQTVWV

SEQ ID NO: 788535 - protein, 70 aa, Homo sapiens
RSPPDAQVKTDLEILKYAVLLEKCGATGTTSSFRQEPMRPSKPSTEASVSSLWWLQTPRCKRAFCTPTAV

SEQ ID NO: 788536 - protein, 74 aa, Homo sapiens
ILSTSTASVTTYVLTTLKSSSLAQFSLRDSLLYIPSPAEHLPSDVPLVGQTQQSKLTSSSLVFPVSVRSIITSQ

SEQ ID NO: 788537 - protein, 43 aa, Homo sapiens
MLSSGSSLATLPEIAAADTCKQEAPPAGAGSAHFSGPAGPPAA

SEQ ID NO: 788538 - protein, 118 aa, Homo sapiens
MIVLATGDNWDGFRTIMVKERVMGVMTSAVILMTTSMTGLREHLGKLGRLLNSNCWVDLGTLAEGGQVMGHVSVSLSHSGPSSKPHVCDLCFFSIPFSGNHLSTPGKSLRFPFHFPGL

SEQ ID NO: 788539 - protein, 110 aa, Homo sapiens
MILNTSTPLRPIFPCSTLEGKPPPKKHTELATPKHWKGAIVFRSPRKGHRWRHPPAPAPPPSAPRPQLLSSSAHLEQSFPRPSDPDPSSPGPAAGREEPRPRGYLARASC

SEQ ID NO: 788540 - protein, 45 aa, Homo sapiens
MHERLQNISNNQTSSLCDHGGRRWRQGHAVILSGQRGKDALQPQK

SEQ ID NO: 788541 - protein, 48 aa, Homo sapiens
SACACMCMWVQLYACLCACMSHIVCVSVCVHACSALCLCACKSHIVCV

SEQ ID NO: 788542 - protein, 107 aa, Homo sapiens
LLPSLRGQFSLEEKSLSLKIMQYLCPACSESEQAGNPHVTLFYSSQSRQPCRIWPYHLCDISSPTPPSPLHCRHTGILTLLHPHQAHSSLRAFVLIICPTDVHLTPP

SEQ ID NO: 788543 - protein, 78 aa, Homo sapiens
VENREFVGNNKVCAQPLKKMCQSLSKPQEPVSCECHHLGLPCWPVSSGFGHWEATTGGLDLVTGKQQQGKASGFLFPG

SEQ ID NO: 788544 - protein, 85 aa, Homo sapiens
  misc_feature (49)..(49): Xaa can be any naturally occurring amino acid
EPAPNYSSRSARRSERASVPSVPSEPGAGRTVVCHAQPLVRDQARVGEXGSGRAGLGLGLPEGVLARISFFHTLTLRPALGIVVY

SEQ ID NO: 788545 - protein, 77 aa, Homo sapiens
KAANRTPPKSPGDPSKDRAAKRLSLESEGAGEGAAASPELSALEEAFRRFAVHGDARATGREMHGKNWSKLCKDCQV

SEQ ID NO: 788546 - protein, 84 aa, Homo sapiens
RGRDEKGAGAVGGTPGGGNYQGCEGLTWDGILPPGLRKKILRWRPADWAGRWRARSRPPDRLPPVFPDAWAPAPALSPFPPNWH

SEQ ID NO: 788547 - protein, 126 aa, Homo sapiens
RPSAMIINKALYDICLRTLKLPTPTYSDLNHLVSAAMSGVTICLHFPGQLNADLQKLAANMVLFPHLHFMYGFPLLTSWDNQQYWALMVREPTWQFFDAKNMMAACNLCHGCYVMVAAMFRGHMSM

SEQ ID NO: 788548 - protein, 73 aa, Homo sapiens
MEGEEEDFQGWRIVLFLKDEQFIKGWGKASWQSPRCPPKVSVTAQQPATFNAASSPASLPGEAHVGMKPPLEE

SEQ ID NO: 788549 - protein, 71 aa, Homo sapiens
RGSSLTNPGVDKTDSGHHATRRAYQDAETADGVRGKQCGIPASGLPVRCSGGEETNVKGDGYISSRLFSEK

SEQ ID NO: 788550 - protein, 92 aa, Homo sapiens
RGRRKRRRWQCLPWDGLPCTRAFVSKSQGTVSSSACRREEPEPRVRATRGNLGRVDFSRNIFCQRPWRKSYCWRLLVSSDDNIPNSARSVQS

SEQ ID NO: 788551 - protein, 114 aa, Homo sapiens
SGCAHSDPALSKPFSYPPLARSSVHGGPPSPHLTRQLPAMLRPLCPALWMASLWNAIRLMKEGGLRGNRKERCAAQAPLASSRLRACSMAISNKRPPHCPTGPQHCMKLQVHPS

SEQ ID NO: 788552 - protein, 82 aa, Homo sapiens
  misc_feature (13)..(13): Xaa can be any naturally occurring amino acid
MMLATGVGPITGXDRGGTKANHDADSRRKQICMHKDHSVSLMEEASVREVGTGGHLGPHITPLHHSDCSGLGRVVAVELKSR

SEQ ID NO: 788553 - protein, 179 aa, Homo sapiens
MKQDASRNAAYTVDCEDYVHVVEFNPFENGDSGNLIAYGGNNYVVIGTCTFQEEEADVEGIQYKTLRTFHHGVRVDGIAWSPETRLDSLPPVIKFCTSAADMKIRLFTSDLQDKNEYKVLEGHTDFINGLVFDPKEGQEIASVSDDHTCRIWNLEGVQTAHFVLHSPGMSVCWHPEETF

SEQ ID NO: 788554 - protein, 79 aa, Homo sapiens
MAHKQIYYSDKYFDEHYEYRHVMLPRELSKQVPKTHLMSEEEWRRLGVQQSLGWVHYMIHEPEPHILLFRRPLPKDQQK

SEQ ID NO: 788555 - protein, 79 aa, Homo sapiens; identical to SEQ ID NO: 788554

SEQ ID NO: 788556 - protein, 79 aa, Homo sapiens; identical to SEQ ID NO: 788554

SEQ ID NO: 788557 - protein, 123 aa, Homo sapiens
  misc_feature (28)..(29): Xaa can be any naturally occurring amino acid
  misc_feature (31)..(31): Xaa can be any naturally occurring amino acid
MAHKQIYYSDKYFDEHYEYRMLCYPGEXXPXIKRLPKTHLMSEEEWRRLGVQQSLGWVHYMIQRHVMLPRELSKQVPKTHLMSEEEWRRLGVQQSLGWVHYMIHEPEPHILLFRRPLPKDQQK

SEQ ID NO: 788558 - protein, 79 aa, Homo sapiens; identical to SEQ ID NO: 788554

SEQ ID NO: 788559 - protein, 131 aa, Homo sapiens
MWYLPFCDQLLSRSLMPPRFIDVRIGLCRNISRIISVLCKGRVLCIHSSTHRHLRCFCFLASVNNALRNAGISPTTFGLTSLISSKQAILEAYRGVGPLTSLGRVGGSLTSLGPSCWLGRRGPQVPASTQH

SEQ ID NO: 788560 - protein, 189 aa, Homo sapiens
MAQKRFPILHLWIGSAVSSRDEHGACAVLAVHLKTLLGERACAAPGWCRANESDLFMSYFPRGLKYQEGGVESAFHKTSTGAPAAIKKLYQVKGKKNIRATERALNWDSFNTGDLFILELGPEHLRLVWWKVPTILERNKAEDLALASRTVSDRARPVEIVTDGEALWKITGWAQPVLRGHRETPERKP

SEQ ID NO: 788561 - protein, 233 aa, Homo sapiens
MDLLPPKPKYNPLRNESLSSLEEGASGSTPPEELPSPSASSLGPILPPLPGDDSPTTLCSFFPRMSNLRLANPAGGRPGSKGEPGRAADDGEGIVGAAMPDSGPLPLLQDMNKLSGGGGRRTRVEGGQLGGEEWTRHGSFVNKPTRGLAASQRQSHGTRGFLLGSVHGLCGRPPVNGVLEFSHRAHVPRRPPSCCLRLSGEEGGQGKAVCGDSLGENSTGEGTQRHTSLGRQS

SEQ ID NO: 788562 - protein, 105 aa, Homo sapiens
MRVLWVLWHQLISRGQNYVMPLEFTIVCESPVYLGLRLDYLHDPMFLPLSSAHPLHRCLLWLLHLAGMSPPACSHSSLLSSTDFLTIAGNVHTFTKVLGCLRGHY

SEQ ID NO: 788563 - protein, 112 aa, Homo sapiens
LHPGFAQGILPIFGHLENAYAAGLLPRAALDVRLPEPRFSNIGSHACLAGVYCPLPRPGCEHRTPSPQPMGSMCPVLRAYQCRTSRHAVSCQLRTWGGGRPGIWRSLSFQSS

SEQ ID NO: 788564 - protein, 70 aa, Homo sapiens
GHSSVSQNRNSAPIAHNSASLPQFHRNDPFVTQQLIYSDKVSSPSFSQIKSNASHTNGQELQLTEESPYL

SEQ ID NO: 788565 - protein, 144 aa, Homo sapiens
VAPRSKRRCVLERKQPYSGDEWCSGPDSEEDDKPIGATHSECLSMPGCCEPVMFLGDGLERTEPGKEVRTGSPGFFSPILPLRLCPSLHCNCLASAFQVLSDPLSLGTLGGAEWSGLLLGHVTCTSTCEFLAYAATYWLVEGGR

SEQ ID NO: 788566 - protein, 39 aa, Homo sapiens
MALKNSQLTFQPNVHVPKTTSASQSISQKSAFAKVSNPQ

SEQ ID NO: 788567 - protein, 88 aa, Homo sapiens
KTSFRARERNIPDGILCEGSESRRATGVTDQACSPALCTHLVLAHHESRHRPAVMITLLLNSTLAEEPPHFITTPPSSGPGETFPPAA

SEQ ID NO: 788568 - protein, 101 aa, Homo sapiens
RSGRLEVGGWQNIREAFLKRPLSCEAQNEIGYSRQRGRDVCTSVMFCSQGLGGGPSSPSPDRPRDFTLFWWLMANQARSPEFFALTQCFSNFNVLMNCLPV

SEQ ID NO: 788569 - protein, 33 aa, Homo sapiens
GRVQFGIAKAAPEGGRAGRGRHILVRNPAGGRG

SEQ ID NO: 788570 - protein, 348 aa, Homo sapiens
MGQCYYNETIGFFYNNSGKELSSHWRPKDVVVVALGLTVSVLVLLTNLLVIAAIASNRRFHQPIYYLLGNLAAADLFAGVAYLFLMFHTGPRTARLSLEGWFLRQGLLDTSLTASVATLLAIAVERHRSVMAVQLHSRLPRGRVVMLIVGVWVAALGLGLLPAHSWHCLCALDRCSRMAPLLSRSYLAVWALSSLLVFLLMVAVYTRIFFYVRRRVQRMAEHVSCHPRYRETTLSLVKTVVIILGAFVVCWTPGQVVLLLDGLGCESCNVLAVEKYFLLLAEANSLVNAAVYSCRDAEMRRTFRRLLCCACLRQSTRESVHYTSSAQGGASTRIMLPENGHPLMDSTL

SEQ ID NO: 788571 - protein, 348 aa, Homo sapiens; identical to SEQ ID NO: 788570

SEQ ID NO: 788572 - protein, 351 aa, Homo sapiens
MVIMGQCYYNETIGFFYNNSGKELSSHWRPKDVVVVALGLTVSVLVLLTNLLVIAAIASNRRFHQPIYYLLGNLAAADLFAGVAYLFLMFHTGPRTARLSLEGWFLRQGLLDTSLTASVATLLAIAVERHRSVMAVQLHSRLPRGRVVMLIVGVWVAALGLGLLPAHSWHCLCALDRCSRMAPLLSRSYLAVWALSSLLVFLLMVAVYTRIFFYVRRRVQRMAEHVSCHPRYRETTLSLVKTVVIILGAFVVCWTPGQVVLLLDGLGCESCNVLAVEKYFLLLAEANSLVNAAVYSCRDAEMRRTFRRLLCCACLRQSTRESVHYTSSAQGGASTRIMLPENGHPLMDSTL

SEQ ID NO: 788573 - protein, 373 aa, Homo sapiens
ARYPPGVAYLFLMFHTGLLCPQMVIMGQCYYNETIGFFYNNSGKELSSHWRPKDVVVVALGLTVSVLVLLTNLLVIAAIASNRRFHQPIYYLLGNLAAADLFAGVAYLFLMFHTGPRTARLSLEGWFLRQGLLDTSLTASVATLLAIAVERHRSVMAVQLHSRLPRGRVVMLIVGVWVAALGLGLLPAHSWHCLCALDRCSRMAPLLSRSYLAVWALSSLLVFLLMVAVYTRIFFYVRRRVQRMAEHVSCHPRYRETTLSLVKTVVIILGAFVVCWTPGQVVLLLDGLGCESCNVLAVEKYFLLLAEANSLVNAAVYSCRDAEMRRTFRRLLCCACLRQSTRESVHYTSSAQGGASTRIMLPENGHPLMDSTL

SEQ ID NO: 788574 - protein, 116 aa, Homo sapiens
GDHSNPKLRAVGAGPLTACPAHFRLCPTGAFVVCWTPGQVVLLLDGLGCESCNVLAVEKYFLLLAEANSLVNAAVYSCRDAEMRRTFRRLLCCACLRQSTRESVHYTSSAQGGAST

SEQ ID NO: 788575 - protein, 333 aa, Homo sapiens
MGQCYYNETIGFFYNNSGKELSSHWRPKDVVVVALGLTVSVLVLLTNLLVIAAIASNRRFHQPIYYLLGNLAAADLFAGVAYLFLMFHTGPRTARLSLEGWFLRQGLLDTSLTASVATLLAIAVERHRSVMAVQLHSRLPRGRVVMLIVGVWVAALGLGLLPAHSWHCLCALDRCSRMAPLLSRSYLAVWALSSLLVFLLMVAVYTRIFFYVRRRVQRMAEHVSCHPRYRETTLSLVKTVVIILGAFVVCWTPGQVVLLLDGLGCESCNVLAVEKYFLLLAEANSLVNAAVYSCRDVRVLRWGEIRALSGHATRYDWVMRTDCGHPIYLSLIL

SEQ ID NO: 788576 - protein, 98 aa, Homo sapiens
MTHSVQMNSMGSVLGMAISPSRMPQPPNMMGAHTNNMMAQAPAQSQFLPQNQFTVIQRGDECGHGAAASTRKDSNPAEQQQPYSFPAYHSSPCCFSSL

SEQ ID NO: 788577 - protein, 113 aa, Homo sapiens
MFLSSGERRAPFTWEFLSPVFRERRKIRVPSLHLLFSSCLSLSLLIRISHMSLSQLQWSLEYAIFPSIWERKVNMEHCLGCGGQQTLGQNLIVGAPVGGECYDPMASLVIYSS

SEQ ID NO: 788578 - protein, 102 aa, Homo sapiens
SGSPPWRRKPGDLTPTLLCFSQEVTHLILTYSLLIRISHMSLSQLQWSLEYAIFPSIWERKVNMEHCLGCGGQQTLGQNLIVGAPVGGECYDPMASLVIYSS

SEQ ID NO: 788579 - protein, 54 aa, Homo sapiens
MVKPSSWVSEERGLVPALRVDVGALPSHRLFLGQRRTDLRQAGVGQVTATDKVA

SEQ ID NO: 788580 - protein, 131 aa, Homo sapiens
LQLKPREAKCRMSKFQAVGTACASSEVATGWHMERRAEGLVQQEGGRRENRSLEGEGGDGPQRLLAGRDADSAQGQQSTPRNTQALHAGAGFSFFLTQSLALLPRLECNGQILAHCSLRLLGSSDSPASAS

SEQ ID NO: 788581 - protein, 104 aa, Homo sapiens
MRSPTHSDLVKPDWDSGPEGKDHPCIANIWMGRKLLSLIDFFRLSLSDQNIVKDMKLTLETQNYFHSLGKSCHQIPITFWREWKHDRILGFKELKIRPGSMAHA

SEQ ID NO: 788582 - protein, 149 aa, Homo sapiens
INGPWLRPSDSPPSVSKHQTHNHRHRPQHSCLLQESCRFGETGWVPEGLREETAGLSPGGLEGITGPIFGVGLTEPQGHLAGRCHPLVQDRGGDGGSGVGGEFIPGLRLRTPTFQGFLSPLSCPGQDLCSLTVPTGSKRLVRAIVLASA

SEQ ID NO: 788583 - protein, 176 aa, Homo sapiens
GGLPRPPGYQPIPFSQSGNPVMSTVAFLASVVDPRVASAAAKSALEEFSKMKEEVPTALVEAHVRKVEEAAKVTGKADPAFGSGKQGMQEPPLMSLSDEESGNDEARVEGQATDEKKEPKEPREGGGAIEEEAKEKTSEAPKKDEEKGKEGDSEKESEKSDGDPIVDPKEDEGAMY

SEQ ID NO: 788584 - protein, 203 aa, Homo sapiens
GGLPRPPGYQPIPFSQSGNPVMSTVAFLASVVDPRVASAAAKSALEEFSKMKEEVPTALVEAHVRKVEEAAKVTGKADPAFGSGKQGMQEPPLMSLSDEESGNDEARVEGQATDEKKEPKEPREGGGAIEEEAKEKTSEAPKKDEEKGKEGDSEKESEKSDGDPIVDPEKEKEPKEGQEEVLKEVVESEGERKTKVERDIGEG

SEQ ID NO: 788585 - protein, 155 aa, Homo sapiens
QYGDPPIYVMENGASQKFHCTQLCDEWRIQYLKGYINEMLKGGKLVPQSFGNLLYQQSDACCRALAKSHANGYGDRGTHCLLPLCPHHWCSTNAPPEEAELTQDYQFWSFIRESSGSSSLFCFEGFHTLLFSGSTIITFFSLSLFGLRWDLRIRK

SEQ ID NO: 788586 - protein, 114 aa, Homo sapiens
MILQAANTALTCTQSASPAPIQPASPAPNQNHLHPISQQHLHPASITCTQSISITCTQSASITSTWKLPQLPFSTKPNNRPPLLLWHPLHATNQCLHCPELPPNTHPVHELTVL

SEQ ID NO: 788587 - protein, 118 aa, Homo sapiens
MGPQSSALHAQCPGLKAHVCRAQGKGALRTKLGPGEPAPVLGVAHCFLSRNAQDNQLLAIFPAQAPQPESHHHHTVDPGQASGLFWASPSPPGSAGANAHLWAVSHHRPRASSVPGTQ

SEQ ID NO: 788588 - protein, 83 aa, Homo sapiens
PSREPTRRSASLEPPGCSNPGRRPGRFRGLLKQARGRAGEGHSAVLLAPESPNAQVSNVTSAIHRSNRSGFPRPCSVILPDKP

SEQ ID NO: 788589 - protein, 109 aa, Homo sapiens
GWAAARARPAMQGGNSGVRKREEEGDGAGAVAAPPAIDFPAEGPDPEYDESDVPAEIQVSKRTPYNSQPSLLQLQSNSCWFLELEHLSHVHEPNPLRSRKVFKRTLPRR

SEQ ID NO: 788590 - protein, 110 aa, Homo sapiens
LSPVWVPLGRGRAGRGGGAGPLLGSQAPAPGTIETPSRTPLPGRPGLLAGGEGEGLGRVPLSGGRSVPARRRPRRLGCPPPSRYDAAAVPQGRGKSRGPASYPSQCPRLI

SEQ ID NO: 788591 - protein, 70 aa, Homo sapiens
HCPAPAPVVVPGLLSATKKPCAVNGHGVLSQSSSQPTGERGVSMNELEEHSGTKGPGTVAHTSNHSPLGG

SEQ ID NO: 788592 - protein, 111 aa, Homo sapiens
MDSHFQWRCWLWHILTPPLGTPPSVPCLAHFSLRAIFVVATSRKPSLILIPKACVGIRPTPSLCQLGSPGFLYAPPPGWVLGKYSQPPALSLACSCHSVSSLMRGSLLWED

SEQ ID NO: 788593 - protein, 124 aa, Homo sapiens
SFLHFLCMARSSGLQRLCIWGAATDEPVNQSHTRSVDAAWGALSARTGWENGGRWGQGEPVNFPERPPSQTQLRVLGFETWSSTQELSLTGRQRLHSEPSTEGRPAGRGGLDSPSTERSDVRWP

SEQ ID NO: 788594 - protein, 113 aa, Homo sapiens
MLARPLPAIRSTAAPERAATPRSPQELVRAPRGAEAREHAQRFLGNVVGCRIRTTNPGTHRAAAPTVRALSGESESRLSVTWGKLSKPNSIFTRGFLFGNMIAVSLVCAPGAL

SEQ ID NO: 788595 - protein, 114 aa, Homo sapiens
PDSLQNLHPPSYPLMQARQMSTLHRKQRQIRPFSLVSELPVVPVTHQGVIKQKMLQPPGGLFSLRPGPCKLTLPRLGDEKSPKMQEPGCPGDKLLIPEMSQNLKQCLGLPHQPK

SEQ ID NO: 788596 - protein, 72 aa, Homo sapiens
MGLVSPSGHFIDTSPEYQGLEVTLDPASCSHLVSLLKIPVTGSPHFHSLDISQSSSWKHLNECSMDKEYQRL

SEQ ID NO: 788597 - protein, 109 aa, Homo sapiens
FKNRFLLCCLDQSHLLALSDPPASAFQNVRIMGMSYCAQPSVLVYSMTDQAGGNPVALIASKHHYPLLLSQEHCALRKDIASAKSRMRCQAADCKGACKRWQGSVVKSS

SEQ ID NO: 788598 - protein, 142 aa, Homo sapiens
MCLRTHSQSAATVRRHSTLLTPGSPASQARHSGGPGMDGLSDIYSLAKIQAGNAAPLEGRSRDPLSVRAFPQGLWNRSRSQSQLCLPQLCDLQPRRPSAGYPDVRGGAHRPCKEALVRSTCDAALNQCRPERREGGPGCGNS

SEQ ID NO: 788599 - protein, 291 aa, Homo sapiens
ATYVENLRLLRACFEETKKEEIKEVPFETLAQWNLEHATLNEAGNFLVEVSNDVVGSSISKELRRLNKRWRKLVSKTQLEMNLPLMIKKQDQPTFDNSGNILSKEEKATVEFSTDMSVELPENYNQNIKAGEKHEKENEEFTGQLKVAKDVEKLIGQVEIWEAEAKSVLDQDDVDTSMEESLKHLIAKGSMFDELMARSEDMLQMDIQNISSQESFQHVLTTGLQAKIQEAKEKVQINVVKLIAALKNLTDVSPDLDIRLKMEESQKELESYMMRAQQLLGQRESPGELIS

SEQ ID NO: 788600 - protein, 104 aa, Homo sapiens
ATYVENLRLLRACFEETKKEEIKEVPFETLAQWNLEHATLNEAGNFLVEVSNDVVGSSISKELRRLNKRWRKLVSKTQLVSSFDWLQLYLDMIHVPHNLLIVSS

SEQ ID NO: 788601 - protein, 106 aa, Homo sapiens
NYEVTWYTSWSPCPECAGEVAEFLARHSNVNLTIFTARLYYFWDTDYQEGLRSLSQEGASVEIMGYKDFKYCWENFVYNDDEPFKPWKGLKYNFLFLDSKLQEILE

SEQ ID NO: 788602 - protein, 79 aa, Homo sapiens
MIELGTTTSIDEVGVVNSEREYRAVTSMLSPVSRRVIFHQDKRRMEAKSDPSGLCHLTGIHPCCEQFTTQFCTLQMLKS

SEQ ID NO: 788603 - protein, 71 aa, Homo sapiens
IRRLEHKACDLPRDDLKLEMSVSATQIETAKSEKNKDMRMTGTKTKPRVPVWGWRGEQNSSPPPVNAFAQS

SEQ ID NO: 788604 - protein, 138 aa, Homo sapiens
NQQVRCPAVAVHRSALEGEVHAAVHAQPPPFPHSTLGAHQTCTGELGKEADDACRGGSCGDLSTESPSEANRPQRHPPGTAIPTAVHLVLGPRTPRHLAPNPFISKSLTILTIQPDIHNCSGVSVDACVQYYPGIRKK

SEQ ID NO: 788605 - protein, 751 aa, Homo sapiens
MLKRKQSSRVEAQPVTDFGPDESLSDNADILWINKPWVHSLLRICAIISVISVCMNTPMTFEHYPPLQYVTFTLDTLLMFLYTAEMIAKMHIRGIVKGDSSYVKDRWCVFDGFMVFCLWVSLVLQVFEIADIVDQMSPWGMLRIPRPLIMIRAFRIYFRFELPRTRITNILKRSGEQIWSVSIFLLFFLLLYGILGVQMFGTFTYHCVVNDTKPGNVTWNSLAIPDTHCSPELEEGYQCPPGFKCMDLEDLGLSRNCIFTVYEAASQEGWVFLMYRAIDSFPRWRSYFYFITLIFFLAWLVKNVFIAVIIETFAEIRVQFQQMWGSRSSTTSTATTQMFHEDAAGGWQLVAVDVNKPQGRAPACLQKMMRSSVFHMFILSMVTVDVIVAASNYYKGENFRRQYDEFYLAEVAFTVLFDLEALLKIWCLGFTGYISSSLHKFELLLVIGTTLHVYPDLYHSQFTYFQVLRVVRLIKISPALEDFVYKIFGPGKKLGSLVVFTASLLIVMSAISLQMFCFVEELDRFTTFPRAFMSMFQILTQEGWVDVMDQTLNAVGHMWAPVVAIYFILYHLFATLILLSLFVAVILDNLELDEDLKKLKQLKQSEANADTKEKLPLRLRIFEKFPNRPQMVKISKLPSDFTVPKIRESFMKQFIDRQQQDTCCLLRSLPTTSSSSCDHSKRSAIEDNKYIDQKVRSAVSNNQASKKHLCLRKEPQSSLGSWNPISQENNENKMISFVKDIMKPNIFYSMH

SEQ ID NO: 788606 - protein, 801 aa, Homo sapiens
MLKRKQSSRVEAQPVTDFGPDESLSDNADILWINKPWVHSLLRICAIISVISVCMNTPMTFEHYPPLQYVTFTLDTLLMFLYTAEMIAKMHIRGIVKGDSSYVKDRWCVFDGFMVFCLWVSLVLQVFEIADIVDQMSPWGMLRIPRPLIMIRAFRIYFRFELPRTRITNILKRSGEQIWSVSIFLLFFLLLYGILGVQMFGTFTYHCVVNDTKPGNVTWNSLAIPDTHCSPELEEGYQCPPGFKCMDLEDLGLSRRELGYSGFNEIGTSIFTVYEAASQEGWVFLMYRAIDSFPRWRSYFYFITLIFFLAWLVKNVFIAVIIETFAEIRVQFQQMWGSRSSTTSTATTQMFHEDAAGGWQLVAVDVNKPQGRAPACLQKMMRSSVFHMFILSMVTVDVIVAASNYYKGENFRRQYDEFYLAEVAFTVLFDLEALLKIWCLGFTGYISSSLHKFELLLVIGTTLHVYPDLYHSQFTYFQVLRVVRLIKISPALEDFVYKIFGPGKKLGSLVVFTASLLIVMSAISLQMFCFVEELDRFTTFPRAFMSMFQILTQEGWVDVMDQTLNAVGHMWAPVVAIYFILYHLFATLILLSLFVAVILDNLELDEDLKKLKQLKQSEANADTKEKLPLRLRIFEKFPNRPQMVKISKLPSDFTVPKIRESFMKQFIDRQQQDTCCLLRSLPTTSSSSCDHSKRSAIEDNKYIDQKLRKSVFSIRARNLLEKETAVTKILSKRPLPTSSPISIRCCLYLGRSHCHSSGVRMYRLFPHPCSGTLRKKTWRQRRKEPGTPCYCVYKQLVVFKG

SEQ ID NO: 788607 - protein, 801 aa, Homo sapiens; identical to SEQ ID NO: 788606

SEQ ID NO: 788608 - protein, 786 aa, Homo sapiens
MLKRKQSSRVEAQPVTDFGPDESLSDNADILWINKPWVHSLLRICAIISVISVCMNTPMTFEHYPPLQYVTFTLDTLLMFLYTAEMIAKMHIRGIVKGDSSYVKDRWCVFDGFMVFCLWVSLVLQVFEIADIVDQMSPWGMLRIPRPLIMIRAFRIYFRFELPRTRITNILKRSGEQIWSVSIFLLFFLLLYGILGVQMFGTFTYHCVVNDTKPGNVTWNSLAIPDTHCSPELEEGYQCPPGFKCMDLEDLGLSRRELGYSGFNEIGTSIFTVYEAASQEGWVFLMYRAIDSFPRWRSYFYFITLIFFLAWLVKNVFIAVIIETFAEIRVQFQQMWGSRSSTTSTATTQMFHEDAAGGWQLVAVDVNKPQGRAPACLQKMMRSSVFHMFILSMVTVDVIVAASNYYKGENFRRQYDEFYLAEVAFTVLFDLEALLKIWCLGFTGYISSSLHKFELLLVIGTTLHVYPDLYHSQFTYFQVLRVVRLIKISPALEDFVYKIFGPGKKLGSLVVFTASLLIVMSAISLQMFCFVEELDRFTTFPRAFMSMFQILTQEGWVDVMDQTLNAVGHMWAPVVAIYFILYHLFATLILLSLFVAVILDNLELDEDLKKLKQLKQSEANADTKEKLPLRLRIFEKFPNRPQMVKISKLPSDFTVPKIRESFMKQFIDRQQQDTCCLLRSLPTTSSSSCDHSKRSAIEDNKYIDQKLRKSVFSIRARNLLEKETAVTKILRACTRQRMLSGSFEGQPAKERSILSVQHHIRQERRSLRHGSNSQRISRGKSLETLT

SEQ ID NO: 788609 - protein, 90 aa, Homo sapiens
AFKILFVRFIEFLRTQERHQQRAMIVIARCTVTSIHTALTLPFQSHGVYRSVLLTASCLFHNAYCKTSSTQNAPTQLLVELQPDDGSTRN

SEQ ID NO: 788610 - protein, 436 aa, Homo sapiens
AERLTPTKALSEGSRPSSRCARRQGPSRGARAHGHLHPALSTPSSRAQHILAGTGRGVAWPQERTLALLLTPRAGSSRREDSHPTPSPVGNVVSETVWDPRAHGRLPGTRARRCLIGLPRVGPGETRTAGAASRHFARPEMFGSSRYLGSSEQPRANSLGPSDRTLVLCSLVEGEDKVNPSEPHGLRMEEKWLLKGKLRNQRNQNKLLSPNKKQRKNHTSKLQELALLLPIALKTGTKKLTKKEILVHVLQYIQYLQRNIDAAKALFKCHITTGEGGLAGLGQKPAWGPARRRRHSTPSSSPSSQKSCLQGACQKPRKKKLTQASESQTRTPKPRRSLALNKPEKLVAPSPDQKGSGTGGTTTPPRCPDSCGHPRPASSSPPGDRKGGQSQLTLLDLAEDTIHCDISSCWCQGSVQDDAPFPALLAQEDVARIHFL

SEQ ID NO: 788611 - protein, 177 aa, Homo sapiens [sequence omitted]

SEQ ID NO: 788612 - protein, 223 aa, Homo sapiens
AHTDRSPRMCTEGAFPHRSACSLPLTHVHTHIHVCVPVLWGSVPRGMKLQCVSLWLLGTILILCSVDNHGLRRCLISTDMHHIEESFQEIKRAIQAKDTFPNVTILSTLETLQIIKPLDVCCVTKNLLAFYVDRVFKDHQEPNPKILRKISSIANSFLYMQKTLRQCQEQRQCHCRQEATNATRVIHDNYDQLEVHAAAIKSLGELDVFLAWINKNHEVMSSA

SEQ ID NO: 788613 - protein, 81 aa, Homo sapiens
GSNKKYRALRLDVGEFSWGSECCTRKTRIIDVVYNASNNELVRTKTLVKNCIVLIDSTPCRQWTPEEEEILAFFFLSSYFF

SEQ ID NO: 788614 - protein, 156 aa, Homo sapiens
HAATTLLILHRYRLNEGFLLGLDPLLAKLLSMQQARETAVQQYKKLEEEIQTLRVYYSLHKSLSQEENLKDQFNYTLSTYEEALKNRENIVSITQQQNEELATQLQQALTERANMELQLQHAREASQVANEKVQKLERLVDVLRKKVGTGTMRTVI

SEQ ID NO: 788615 - protein, 130 aa, Homo sapiens
MENWSKDITHSYLEQETTGINKSTQPDEQLTMNSEKSMHRKSTELVNEITCENTEWPGQRSTNFQIISSYPDDESVYCTTEKYNVMEHRHNDMHYECMTPCQVTSDSDKEKTIAFLLKELDILRTSNKKV

SEQ ID NO: 788616 - protein, 130 aa, Homo sapiens; identical to SEQ ID NO: 788615

SEQ ID NO: 788617 - protein, 261 aa, Homo sapiens
MSRLQLAIEERDEAIARAKHMEMSLKVLENINPEENDMTLQELLNRINNADTGIAIQKNGAIIVDRIYKTKECKMRITAEEMSALIEERDAALSKCKRLEQELHHVKEQNQTSANNMRHLTAENNQERALKAKLLSMQQARETAVQQYKKLEEEIQTLRVYYSLHKSLSQEENLKDQFNYTLSTYEEALKNRENIVSITQQQNEELATQLQQALTERANMELQLQHAREASQVANEKVQKLERLVDVLRKKVGTGTMRTVI

SEQ ID NO: 788618 - protein, 155 aa, Homo sapiens
MSRLQLAIEERDEAIARAKHMEMSLKVLENINPEENDMTLQELLNRINNADTGIAIQKNGAIIVDRIYKTKECKMRITAEEMSALIEERDAALSKVNEGFLLGLDPLLAKLLSMQQARETAVQQYKKLEEEIQTLRVYYRFVCEKEKKDFVLGYV

SEQ ID NO: 788619 - protein, 141 aa, Homo sapiens
MSRLQLAIEERDEAIARAKHMEMSLKVLENINPEENDMTLQELLNRINNADTGIAIQKNGAIIVDRIYKTKECKMRITAEEMSALIEERDAALSKCKRLEQELHHVKEQNQTSANNMRHLTAENNQERALKVNLRSFLQAN

SEQ ID NO: 788620 - protein, 254 aa, Homo sapiens
RGGGAMPGQRIASLAYSLLPYGAGIPAPLTRPRLPRRPPRLPPPRSLRLFRIQVRRPFKGSSCRLRGPGTLVPDSGDPDGFRADPRGQGGRLWRYPEADSGEDCRPELAEFEKLSDQVKISEEALRADGFGDNPFYHCLVAEILPAPGKLLGPCVVGYGIYYFIYSTWKGRTIYLEDIYVMPEYRGQGIGSKIIKKVAEVALDKGCSQFRLAVLDWNQRAMDLYKALGAQDLTEAEGWHFFCFQGEATRKLAGK

SEQ ID NO: 788621 - protein, 220 aa, Homo sapiens
RGGGAMPGQRIASLAYSLLPYGAGIPAPLTRPRLPRRPPRLPPPRSLRLFRIQVRRPFKGSSCRLRGPGTLVPDSGDPDGFRADPRGQGGRLWRYPEADSGEDCRPELAEFEKLSDQVKISEEALRADGFGDNPFYHCLVAEILPAPGKLLGQGIGSKIIKKVAEVALDKGCSQFRLAVLDWNQRAMDLYKALGAQDLTEAEGWHFFCFQGEATRKLAGK

SEQ ID NO: 788622 - protein, 254 aa, Homo sapiens; identical to SEQ ID NO: 788620

SEQ ID NO: 788623 - protein, 144 aa, Homo sapiens
EGVGLCPDRGSPRWPTLSSRTAPESQLHLPGRGYPAVPPDSRHPALSGSSGSKSVGPLRGLVAVCEALGLWSQTAGIRMASVRIREAKEGDCGDILRLIRVKTAGRAGNPGVRVARPERGRRRRGQGEGLALGTCSGSSGALLL

SEQ ID NO: 788624 - protein, 224 aa, Homo sapiens
RGGGAMPGQRIASLAYSLLPYGAGIPAPLTRPRLPRRPPRLPPPRSLRLFRIQVRRPFKGSSCRLRGPGTLVPDSGDPDGFRADPRGQGGRLWRYPEADSGEDCRPELAEFEKLSDQVKISEEALRADGFGDNPFYHCLVAEILPAPGKLLGPCVVGYGIYYFIYSTWKGRTIYLEDIYVMPEYRGTGQKLRLGWEQSTPQTPLLSPVPRAQPVSFSDPLQLKQ

SEQ ID NO: 788625 - protein, 224 aa, Homo sapiens; identical to SEQ ID NO: 788624

SEQ ID NO: 788626 - protein, 144 aa, Homo sapiens; identical to SEQ ID NO: 788623

SEQ ID NO: 788627 - protein, 144 aa, Homo sapiens; identical to SEQ ID NO: 788623

SEQ ID NO: 788628 - protein, 144 aa, Homo sapiens; identical to SEQ ID NO: 788623

SEQ ID NO: 788629 - protein, 144 aa, Homo sapiens; identical to SEQ ID NO: 788623

SEQ ID NO: 788630 - protein, 144 aa, Homo sapiens; identical to SEQ ID NO: 788623

SEQ ID NO: 788631 - protein, 199 aa, Homo sapiens
RGGGAMPGQRIASLAYSLLPYGAGIPAPLTRPRLPRRPPRLPPPRSLRLFRIQVRRPFKGSSCRLRGPGTLVPDSGDPDGFRADPRGQGGRLWRYPEADSGEDCRPELAEFEKLSDQVKISEEALRADGFGDNPFYHCLVAEILPAPGKLLGPCVVGYGIYYFIYSTWKGRTIYLEDIYVMPEYRGQGIGSKIIKKVAE

SEQ ID NO: 788632 - protein, 180 aa, Homo sapiens
EGVGLCPDRGSPRWPTLSSRTAPESQLHLPGRGYPAVPPDSRHPALSGSSGSKSVGPLRGLVAVCEALGLWSQTAGIRMASVRIREAKEGDCGDILRLIRVKTAGRPESRWLWRQSFLSLFGSRDSSSAREATGALRGGLWDILFHLQYMEGTHHLSGGYLCDAGISGSRDWFQNNQKGG

SEQ ID NO: 788633 - protein, 120 aa, Homo sapiens
KYPILSMDYFLKKTPISEEALRADGFGDNPFYHCLVAEILPAPGKLLGPCVVGYGIYYFIYSTWKGRTIYLEDIYVMPEYRGTGQKLRLGWEQSTPQTPLLSPVPRAQPVSFSDPLQLKQ

SEQ ID NO: 788634 - protein, 165 aa, Homo sapiens
RGGGAMPGQRIASLAYSLLPYGAGIPAPLTRPRLPRRPPRLPPPRSLRLFRIQVRRPFKGSSCRLRGPGTLVPDSGDPDGFRADPRGQGGRLWRYPEADSGEDCRPELAEFEKLSDQVKISEEALRADGFGDNPFYHCLVAEILPAPGKLLGQGIGSKIIKKVAE

SEQ ID NO: 788635 - protein, 213 aa, Homo sapiens
RGGGAMPGQRIASLAYSLLPYGAGIPAPLTRPRLPRRPPRLPPPRSLRLFRIQVRRPFKGSSCRLRGPGTLVPDSGDPDGFRADPRGQGGRLWRYPEADSGEDCRPELAEFEKLSDQVKISEEALRADGFGDNPFYHCLVAEILPAPGKLLGPCVVGYGIYYFIYSTWKGRTIYLEDIYVMPEYRGQGIGSKIIKKVAESWTGTRGPWTCTRP

SEQ ID NO: 788636 - protein, 224 aa, Homo sapiens; identical to SEQ ID NO: 788624

SEQ ID NO: 788637 - protein, 103 aa, Homo sapiens
MVLDPLISSEHLPSSPSVTCIYRFTKKSLSSPLCHLQILSVPSSTTYCGSSQPECSTFYFQLTTISQALATASPLDYCVVPRLVVFRFATYTPFFTQQSEDHL

SEQ ID NO: 788638 - protein, 147 aa, Homo sapiens
PALMEHTLHIDPHATPTTKPCSLLQGQGGRGGSTLTGGTCKVVLVQAPSSGLGQMRPVHAEASLARGLHCLCSFLFLCSVERRSLWPHTSRCPCTSSWATQQNSRALSMAFGWGPCQSSMSPEAPGAFSHLGIVRGDFFLIKSLPWS

SEQ ID NO: 788639 - protein, 69 aa, Homo sapiens
GTLELKVDSSGPCSLACRVKDLGLGLSLLRPQGAGQHGWWECGGDTQHIHMLPECHVGSGWFLHSNSAS

SEQ ID NO: 788640 - protein, 198 aa, Homo sapiens
FCERCEQSFAEPTLLALHQCSETHIQPVQGLSSPPCSVELPPSNPTLPGPLQGQSPPVSPLSCPVCRQEFAQPQALKSHFKIHRGTPDTFSCPESGCVFSAEDRKGLQHHLRQTHRAVPVPCSFRGCPLLFGSQQGMELHRQAHYPFHCSHCSFIGSNVKLFRQHQRSHGAGTQGELSAVQGLPSQELLPGMRPRAKQ

SEQ ID NO: 788641 - protein, 100 aa, Homo sapiens
WSYSRMADPLKVYPPLKGSFPENLRHLKNDHRGRFWRFRVGGTGGAPWTLEQDRPRLQCQPTPHITSVCLDRRFNPSLRIPICKMGITRPTMAQNERRPN

SEQ ID NO: 788642 - protein, 66 aa, Homo sapiens
TESSLSPIPQHVFHVPDPSDDLTLLFLTTVLYPWSTLPLLQVVAVTCPTWCHCGTFFLTSVCGMDD

SEQ ID NO: 788643 - protein, 183 aa, Homo sapiens
LISVQKKELPETLMTDGARLQELTEKLNQLKIIACLSLITNNMVGAITGGLPELASRLTRISAVLLEGMNKETFNLKEVLNSIGIQTCVEVNKTLMERGLPTLNAEIQANLIGQFSSIEEEDNPIWSLIDKRIKLYMRRLLCLPSPQKCMPPMPGGLAVIQQELEALGSQYANIVNLNKQVYG

SEQ ID NO: 788644 - protein, 101 aa, Homo sapiens
SSGTMRSWAFNCCRSDLAHSSGSNCQFQDARCRASPAWASPAEGPEKGPQALGRGWSESMGLGGRKDLGQGNRWSYRAEPDQQRAFPETLRPSLLLPQRLW

SEQ ID NO: 788645 - protein, 101 aa, Homo sapiens
EPLYINTCFLSVFDLLKVKLLVSITTTPGNSQRNTFGQNFPLKSLLFVHIYVSVNKSKYIYHLIVCLELRQPWRFTAKTVPLYMMAYHLGKETAALPRTQN

SEQ ID NO: 788646 - protein, 150 aa, Homo sapiens [sequence omitted]

SEQ ID NO: 788647 - protein, 123 aa, Homo sapiens
MVELLVCRAPDGINSRRDCPRKSPADFSPKLSSGSPAVTVGKHLGVFLGSIRSSSPKGSTANSTLYLPQLSQELAPVAIWVSLDASFRDVTQMATRSYLLLLVCQDCSQVNGSFSFSPDSTTD

SEQ ID NO: 788648 - protein, 90 aa, Homo sapiens
QSTEVKMWAEERSTCSSHLLVVGTYYSSIAIAYVAYRADLPLDFHVMGNVVYAILTPVLNPVIYKLRNKDVKAAITKIACPQEPKNARKP

SEQ ID NO: 788649 - protein, 113 aa, Homo sapiens
MAKPYEFNWQKEVPSFLQEGTVFDRYEEESFVFEPNCLFKVDEFGFFLTWRSEGKEGQVLECSLINSIRSGAIPKDPKILAALEAVGKSENDLEGRIVCVCSGTDLVNISFTY

SEQ ID NO: 788650 - protein, 113 aa, Homo sapiens; identical to SEQ ID NO: 788649

SEQ ID NO: 788651 - protein, 84 aa, Homo sapiens
GRQASRPATPAATQRRCVPAAWWSFVEARQAWARRSSGRAGSRLREADAAVSHRDGGNHFDQHDEGQFTLSQQKQGTLWGAGGQ

SEQ ID NO: 788652 - protein, 87 aa, Homo sapiens
GRQASRPATPAATQRRCVPAAWWSFVEARQAWARRSSGRAGSRLREADAAVSHRDGGNHFDQHDEGHLETEQASLDKPTESIRWIIA

SEQ ID NO: 788653 - protein, 169 aa, Homo sapiens
MREIVHLQAGQCGNQIGAKFWEVISDEHGIDPTGTYHGDSDLQLERINVYYNEATGGKYVPRAVLVDLEPGTMDSVRSGPFGQIFRRKLRFGQSGAGNNWAKGHYTERRELVDSVLDVVTKEGEECDCWTGSRLNQPGGRRSEVPPHRTAETNGPHLRGASNVKQGQTP

SEQ ID NO: 788654 - protein, 142 aa, Homo sapiens
MREYKLVVLGSGGVGKSALEQFTAMRDLYMKNGQGFALVYSITAQSTFNDLQDLREQILRVKDTDDVPMILGGNKCDLEDERVVGKEQGQNLARQWNNCAFLESSAKSKINVNEIFYDLVRQINRKTPVPGKARKKSSCQLL

SEQ ID NO: 788655 - protein, 184 aa, Homo sapiens
MREYKLVVLGSGGVGKSALTVQFVQGIFVEKYDPTIEDSYRKQVEVDAQQCMLEILDTAGTEQFTAMRDLYMKNGQGFALVYSITAQSTFNDLQDLREQILRVKDTDDVPMILGGNKCDLEDERVVGKEQGQNLARQWNNCAFLESSAKSKINVNEIFYDLVRQINRKTPVPGKARKKSSCQLL

SEQ ID NO: 788656 - protein, 74 aa, Homo sapiens
IPTLLGLPRCIHHMKYPIICRLIHFPNSSNINNFHDLRSLRFKAKSPNNRRTLHKPGVTIWMRPTLPHIRRTRI

SEQ ID NO: 788657 - protein, 136 aa, Homo sapiens
PPGCRNWHEGCVIETGSCSATQAGVQLKQDIPLTPSWVLRLRCLTYLAHGSQLLAGGGARVNEAGTGVLEATNSSHPGLLRSTLYGRVRGGEQMLEPERALLVAGRSELHAGPAAVSRGCPRPLKTHSLSYNLSWL

SEQ ID NO: 788658 - protein, 136 aa, Homo sapiens; identical to SEQ ID NO: 788657

SEQ ID NO: 788659 - protein, 33 aa, Homo sapiens
MESTWKLAGPEWALDVWGRGPNCPLLASSPGAP

SEQ ID NO: 788660 - protein, 161 aa, Homo sapiens
MEEFDLVKTLHKTSSSVGSDENSLHSLGLNLNTDRSSPHLSTNGVSSFSGKTRPSVIQGTVEVLTSLMQELQNSGKTDSELWKNCEHIQEEIKNLVKLQTSSASLASCEGNSSNKQVSSESQMGFYSLSSERNESVIHYPESTEPEIQQEMSTSQPDCNVD

SEQ ID NO: 788661 - protein, 191 aa, Homo sapiens
MEEFDLVKTLHKTSSSVGSDENSLHSLGLNLNTDRSSPHLSTNGVSSFSGKTRPSVIQGTVEVLTSLMQELQNSGKTDSELWKNCETRWLQLFNLVEKQCQEQIVAQQEQFHNQIQHIQEEIKNLVKLQTSSASLASCEGNSSNKQVSSESQMGFYSLSSERNESVIHYPESTEPEIQQEMSTSQPDCNVD

SEQ ID NO: 788662 - protein, 124 aa, Homo sapiens
MQELQNSGKTDSELWKNCETRWLQLFNLVEKQCQEQIVAQQEQFHNQIQHIQEEIKNLVKLQTSSASLASCEGNSSNKQVSSESQMGFYSLSSERNESVIHYPESTEPEIQQEMSTSQPDCNVD

SEQ ID NO: 788663 - protein, 86 aa, Homo sapiens
GTHLVGVTCCFGPSVPSRSRRRPQSPEPSPAQARPPHPRPAPGRPTGGRDRVLLGSFRSFNIYSTKNTKSALYKLMEGYSYANIEH

SEQ ID NO: 788664 - protein, 104 aa, Homo sapiens
ARARPRAVPGSPEGAVRGRRSGAGGVTRGRGAHRDRGSQPGPTVSSDASEISLRVCFFGASPEPDSGTGLSACCSLSFNIYSTKNTKSALYKLMEGYSYANIEH

SEQ ID NO: 788665 - protein, 117 aa, Homo sapiens
MNAVGMNAEGLFFQVVGSLLAQDVSKNVIWQCPAISLYHAPSTGIGGGVAPAIQDCFLNHSSASFSNMKVKPEWTNGQIAGKEEEERKKEEVEEEEKEKEEQGRRKMKNKKRKGFNV

SEQ ID NO: 788666 - protein, 160 aa, Homo sapiens
MTNTKGKRRGTRYMFSRPFRKHGVVPLATYMRIYKKGDIVDIKGMGTVQKGMPHKCYHGKTGRVYNVTQHAVGIVVNKQIKGKILAKRINVRIEHIKHSKSRDSFLKRVKENDQKKKEAKEKGTWVQLKRQPAPPREAHFVRTNGKEPELLESIPYEFMA

SEQ ID NO: 788667 - protein, 160 aa, Homo sapiens
MSAISRALPEKRAVPAKGVASQTCQTTNPLGTSTHPWSRLWGTLCSMSKWSPGPLPSSVACASWTRSSRSVMKMAAQLRSALPSAGLRDAQLPRAGHPNNSIPFSSASPQAAWERKLPSSSSAHTKCPAGIFFPVTVAPGRHTWPDTAESQARSCWHCFH

SEQ ID NO: 788668 - protein, 160 aa, Homo sapiens
  misc_feature (4)..(4): Xaa can be any naturally occurring amino acid
QCLXGMAFPARARLTPCTPALKKEDFQGKDGNLCLHVPNPPSGISFPSVVDHPMPEERASKYENYFSASERLSLKRELSWYRGRRPRTAFTQNQIEVLENVFRVNCYPGIDIREDLAQKLNLEEDRIQIWFQNRRAKLKRSHRESQFLMAKKNFNTNLLE

SEQ ID NO: 788669 - protein, 185 aa, Homo sapiens
MSPSLQEGAQLGENKPSTCSFSIERILGLDQKKDCVPLMKPHRPWADTCSSSGKDGNLCLHVPNPPSGISFPSVVDHPMPEERASKYENYFSASERLSLKRELSWYRGRRPRTAFTQNQIEVLENVFRVNCYPGIDIREDLAQKLNLEEDRIQIWFQNRRAKLKRSHRESQFLMAKKNFNTNLLE

SEQ ID NO: 788670 - protein, 185 aa, Homo sapiens; identical to SEQ ID NO: 788669

SEQ ID NO: 788671 - protein, 30 aa, Homo sapiens
MPSWPLGARPARSKTHAHVGVVDGEERGVA

SEQ ID NO: 788672 - protein, 162 aa, Homo sapiens
SKGRGEEGEPDRYYPDSSLDVMGLLEECMLTSACCRSLASVLTTNKTLERLNLLQNHLGNDGVAKLLESLISPDCVLKVVGLPLTGLNTQTQQLLMTVKERKPSLIFLSETWSLKEGREIGVTPASQPGSIIPNSNLDYMFFKFPRMSAAMRTSNTASRQPL

SEQ ID NO: 788673 - protein, 157 aa, Homo sapiens
MQLLCGGLRHPNCMLVNIGLEECMLTSACCRSLASVLTTNKTLERLNLLQNHLGNDGVAKLLESLISPDCVLKVVGLPLTGLNTQTQQLLMTVKERKPSLIFLSETWSLKEGREIGVTPASQPGSIIPNSNLDYMFFKFPRMSAAMRTSNTASRQPL

SEQ ID NO: 788674 - protein, 144 aa, Homo sapiens
KTIRDGSTGPDTVVMNPVSYLYPKRSAQGLTALDSQMITRMDRGGRMRTDPTSQMAFPGSFTGSLSNRESTRTSMSVYPDPQYKHLPTGPHSISYTYLAEPILWASPIWFPAWCTLPPSLGPLSIINPLISFTSPSIIPTAMLE

SEQ ID NO: 788675 - protein, 103 aa, Homo sapiens
MHQYDKAGPCHKFPFITFPGSALVKFNEITSCLLFVYPDPQYKHLPTGPHSISYTYLAEPILWASPIWFPAWCTLPPSLGPLSIINPLISFTSPSIIPTAMLE

SEQ ID NO: 788676 - protein, 119 aa, Homo sapiens
HFYLFVHLLHTHAVPGPGLLSGDAAASMTQCLSQELSHILRQHPPPPSLEPWLLMKILHHLLLLQSCLSRHHLPWDPAELLQGIRKCPRLGSWCPRFEGTLGKILGLSFPTCHGRGQPG

SEQ ID NO: 788677 - protein, 74 aa, Homo sapiens
MHSCGLFILMAVLRSAGIDHTSSICQVIPCMVLTLFLPLSITSGILPYQQILCMLFPKWKHNILITIPLGTLRL

SEQ ID NO: 788678 - protein, 105 aa, Homo sapiens
TETTVTVTTEPENRSLTIKLPKRKPEKKVEWTSDTVDNERMRRRSSKCCSIYEKSRAFGESSTESDEEEEEGCGHTHCVRGHRKGWRPATLGPTPTTPPRPPDPS

SEQ ID NO: 788679 - protein, 85 aa, Homo sapiens
PLRLTRNIHSVGLLRLTHCTCRAGSLSLTRRTRRAGSLSLTRRTRRTCRIRHAGPLRLTHRTRCAGSLCLTRRTRLMGVGSSCAC

SEQ ID NO: 788680 - protein, 75 aa, Homo sapiens
GDQPMGTASREQPLKASLDPGTRVSLVFEGRGEGERSPELARDNRAPGGGGEDCACLTLQPLLGPLGKRPSSETN

SEQ ID NO: 788681 - protein, 106 aa, Homo sapiens
ANRPGPLLQWVPESAQTLGFESLSPKGKGQTLPESWGPPCLNASSKSCHLSREGDWPTALGVRQFSFIFETEFRSCCPDWSAVARSQLTTTSASWVQVIHLPQPLE

SEQ ID NO: 788682 - protein, 344 aa, Homo sapiens
RRCAGKPVFWFAMARTKQTARKSTGGKAPRKQLATKAARKSAPATGGVKKPHRYRPGTVALREIRRYQKSTELLIRKLPFQRLVREIAQDFKTDLRFQSSAVMALQEASEAYLVGLFEDTNLCAIHAKRVTIMPKDIQLARRIRGERAEEVAVRPEVPSYPKGSFQSHPHQHLEEAVPLALRAPPALERGRHFRLGSQQNGVGSPCCGAVLSFADFGQLAYPHWPGCGRFPGRRLAGFGGPAPPARDRGPAWRGGRGRRDGASGTRPGVTRGTLRARGPERGWPLRKWSATRPCFAPKPASPGAAIRLGREMTTSASPGFCGQTWGELRWGCRSVPAPPPLAQW

SEQ ID NO: 788683 - protein, 104 aa, Homo sapiens [sequence omitted]

SEQ ID NO: 788684 - protein, 196 aa, Homo sapiens
MEASRRFPEAEALSPEQAAHYLRYVKEAKEATKNGDLEEAFKLFNLAKDIFPNEKVLSRIQKIQEALEELAEQGDDEFTDVCNSGLLLYRELHNQLFEHQKEGIAFLYSLYRDGRKGGILADDMGLGKTVQIIAFLSGMFDASLVNHVLLIMPTNLINTWVKEFIKWTPGMRVKTFHGPSKDERTRNLNRIQQRNG

SEQ ID NO: 788685 - protein, 267 aa, Homo sapiens
KFKLQTLSSKLQAPSSKLQTPAGVTGTQSEGHGGIPKVSGSRGLEPRAGCSLPKGLAVSPRLEFSGLIIVHCSLELLELKQSSCPSLPSSWDLRYVKEAKEATKNGDLEEAFKLFNLAKDIFPNEKVLSRIQKIQEALEELAEQGDDEFTDVCNSGLLLYRELHNQLFEHQKEGIAFLYSLYRDGRKGGILADDMGLGKTVQIIAFLSGMFDASLVNHVLLIMPTNLINTWVKEFIKWTPGMRVKTFHGPSKDERTRNLNRIQQRNG

SEQ ID NO: 788686 - protein, 133 aa, Homo sapiens
SLQRWEKDEELGQLSTISPVLYANINFPNLKQDYPDWSSRCKQIMKLWRKVPAADKAPYLQKAKDNRAAHRINKVQKQAESQINKQTKVGDIARKTDRPALHLRIPPQPGALGSPPPAAAPLLILTNKFYFLS

SEQ ID NO: 788687 - protein, 147 aa, Homo sapiens
DPSGYLLIPLVSTKILIFIWLWSTDAVPIVISLSSHMASRSSGSWVTLSLLGPPGNLFMAAGSPTCLDTPGNQVAFPTREGPGSGFLLLSSTLLRNTAQDASAFGFLEFIWGFSHPLMGLTPLLPLHSLLPPTMRVSCRLGVNEGRI

SEQ ID NO: 788688 - protein, 34 aa, Homo sapiens
KKKKTILNVGNDVKQLELPHTANGKASLTISYKV

SEQ ID NO: 788689 - protein, 109 aa, Homo sapiens
PNRYNSARISKKHRSVMIWESRAECKLDFALHLEKNVNQSLLELHKLATDKNDPHLCDFIETHYLNEQVKAIKELGDHVTNMHEMGAPESGVAEYLFDKHTLGDSDNES

SEQ ID NO: 788690 - protein, 103 aa, Homo sapiens [sequence omitted]

SEQ ID NO: 788691 - protein, 102 aa, Homo sapiens
TSWIRPLPSILLAPTLIPPGPHLDQGNHLLSGPHASKFLQATRVITSKEKSYHGTCLHKMLQGLPAAIEDPSLKLDIVTLCDLVLLSPPLASHFMLQQSPAV

SEQ ID NO: 788692 - protein, 106 aa, Homo sapiens
MHVWAPGAAGPEPLTVPGSLLLQRQGRLPESLLACWLHQRFLFFQFSSPLFLAPFSASRTPASSKTHSIIPQNSWKRTADPSPCWSPSPEHSLGHTCGATVSVGLT

SEQ ID NO: 788693 - protein, 199 aa, Homo sapiens
MHYCTLSTQKKLPACADNNFDFIKITAKVIHTYRTLYTYGYNRGVTNFQFSIVSVHSTLCNNLRIRYAGHTEQITDRLHVPLEAESCPKLNTSHGALRGTSRSARTIHTTTTPNSLKKGKASNPIKQTPTQPHTKQPHNKAPLPKTTPEHADNNVNPKRGTRQRHDNSRNKDKTPTQPREHLEHYDTTTQTRNNNTESN

SEQ ID NO: 788694 - protein, 124 aa, Homo sapiens
MQTIFELTLQASDQGFNLLSVILNLHVMVDDHCKNARTLCQELQPSGALFDAAPLTMQPSYPITKVDTSWGIKADCPIMCFRPANVALQTRDVHELDACRVTVGNRDATCQGLLVTVVNGESSR

SEQ ID NO: 788695 - protein, 42 aa, Homo sapiens
DGGERIGGLCARAPGGSRDDARLDAPPRLKALPVSLIRRERV

SEQ ID NO: 788696 - protein, 83 aa, Homo sapiens
PALGSLQSPQLPRAACPGAPALFQPGERLGGEHGTAREAEAGALGARYLRTGEAAPIPRAGTQGKARTGRPAEGRAPLISHAS

SEQ ID NO: 788697 - protein, 95 aa, Homo sapiens
MARELSQEALLDFLCQAGGRVTNAALLSHFKSFLRDPDASPSQHQHRRELFKGFVNSVAAVRQDPDGTKYVVLKRRYRDLLGEEGLQRPREPPAA

SEQ ID NO: 788698 - protein, 48 aa, Homo sapiens
WKINFRKKVIHCEQGRLAASWSGDPGPTGPLTLGESLPKLGVRYHSTP

SEQ ID NO: 788699 - protein, 237 aa, Homo sapiens
MRNIKYKPVDYQQLRALTEAKKLASASAKLKIRKAMLTSKLSKEQTLIKQHKQVWWQEYQRLNEVRCKMESEIKSLLNEENIGNECLCDLTNFEQELSEQQCTYLKNVINPIQQLRADLKYRQHHTLQHSHPHIEFNSVKVLEEVDFVKKQLKTVFERLRLEQQRIENDLSDWSIKILDHSLEEKTNPLSELPIELESLECPYPDLKSSILSEFYKFTQKYQKKLQDFNLQLEDIYR

SEQ ID NO: 788700 - protein, 503 aa, Homo sapiens
MRNIKYKPVDYQQLRALTEAKKLASASAKLKIRKAMLTSKLSKEQTLIKQHKQVWWQEYQRLNEVRCKMESEIKSLLNEENIGNECLCDLTNFEQELSEQQCTYLKNVINPIQQLRADLKYRQHHTLQHSHPHIEFNSVKVLEEVDFVKKQLKTVFERLRLEQQRIENDLSDWSIKILDHSLEEKTNPLSELPIELESLECPYPDLKSSILSEFYKFTQKYQKKLQDFNLQLEDIYRNCQLSEEDHWIYQAILDQYPGDLFGRRTLYLDMLQRYFPHKSRHDLVEHEKYCDQYRFAIEQQNILISNWNKNRKDFIQKAVLTLTEACATHEMESMLAKDKKKQQELCADLKAKVRQWRAHQEEVARLEMEISARRREKEEEKEKLWKKKELLQRAEKKKKIKKYWAKKKQKWQEMEMRDLQRLEELKKLIAEQSLKDRERVKYRQELLAKAFDRQHTRKWPFKKLMKTKKRARRLEALKEHRLPVLPQLILSGHDVQIHWPSQG

SEQ ID NO: 788701 - protein, 102 aa, Homo sapiens
RSFFMHLFRANKAKKQKASKALVEGVHYYVVDHPPSLRCFGKFLIFAISLAMLPCLVLNSWAQAILPLWPLKVLRLQVSLSAQPTGSFLKPMLSNCFPEKLF

SEQ ID NO: 788702 - protein, 69 aa, Homo sapiens
GAGSGLGHPRKGLPQCSGGLKGSSSAARVGAEAKEAPRAREGCQHTHLSPSTQEAEAGESLEPGRRRLQ

SEQ ID NO: 788703 - protein, 107 aa, Homo sapiens
SRESPTFPLVVNVSPSQFIKWTVTLSSELLRAPADTLSGRLASALRPGPRLLSRPLAPARDPAWCSHRPAGSPRTAEAARSSRAPPAAAIARGRELKRNYLKIVLTL

SEQ ID NO: 788704 - protein, 120 aa, Homo sapiens
LQWWPGEWVGCLPISLPPHRRTPSVEEEREDEYTGSLRSQLLFTMEPPQFRPHNHCRRRSKSLGLLPLPSARKAVTHRSRGCLHPEVTQSDPFACLMPVIPELWDAEAGGRFEARDLRLH

SEQ ID NO: 788705 - protein, 119 aa, Homo sapiens
MKEDHMSILDTYCMNVFALSDLGTWVPWDRGSAEQRKPTCATEKAAQATGTGQECSQECPLNLNLISRHHLPPLNQHLLDSQPSVSMIPAIPDARRLATLGSSSRCVLNLQKASFPNDQ

SEQ ID NO: 788706 - protein, 530 aa, Homo sapiens
MISAPDVVAFTKEEEYEEEPYNEPALPEEYSVPLFPFASQGANPWSKLSGAKFSRDFILISEFSEQVGPQPLLTIPNDTKVFGTFDLNYFSLRIMSVDYQASFVGHPPGSAYPKLNFVEDSKVVLGDSKEGAFAYVHHLTLYDLEARGFVRPFCMAYISADQHKIMQQFQELSAEFSRASECLKTGNRKAFAGELEKKLKDLDYTRTVLHTETEIQKKANDKGFYSSQAIEKANELASVEKSIIEHQDLLKQIRSYPHRKLKGHDLCPGEMEHIQDQASQASTTSNPDESADTDLYTCRPAYTPKLIKAKSTKCFDKKLKTLEELCDTEYFTQTLAQLSHIEHMFRGDLCYLLTSQIDRALLKQQHITNFLFEDFVEVDDRMVEKQESIPSKPSQDRPPSSSLEECPIPKVLISVGSYKSSVESVLIKMEQELGDEEYKEVEVTELSSFDPQENLDYLDMDMKGSISSGESIEVLGTEKSTSVLSKSDSQASLTVPLSPQVVRSKAVSHRTISEDSIEVLSTCPSEALIP

SEQ ID NO: 788707 - protein, 174 aa, Homo sapiens [sequence omitted]

SEQ ID NO: 788708 - protein, 150 aa, Homo sapiens
GTTMNTDSLFVVLHQDSAKTLVTVFLGVFFTPRIPPQSAFLQFFLHTEHQRSFQRVLSPGLKPSCGPHSSRSVRLLGSFLWGSCCHPLTYPATAASGPLNMPCVSFTQGKLLTLYPKDREPLQCELCSEIMCYPSTPHSSQLLTSSSSST

SEQ ID NO: 788709 - protein, 89 aa, Homo sapiens
ELTRGSQHITLILSGMAVDASHCHWDYSLHFSFMRVNSLKTELHIYYYGAVNSANLVSFIRGSSSSNAPPAQMLYSLPSLITSCFSFTH

SEQ ID NO: 788710 - protein, 100 aa, Homo sapiens
CSLGLRLRYPGAQVTAAATQEPRSSPLSHPCVQTSRISATSAPARQPPQEPGTRSLAVRRRGPSWEFGPKREGKEAGRRIGSAEEPAGWRAKKFIFWMPM

SEQ ID NO: 788711 - protein, 108 aa, Homo sapiens
CSLGLRLRYPGAQVTAAATQEPRSSPLSHPCVQTSRISATSAPARQPPQEPGTRSLAVRRRGPSWEFGPKREGKEAGRRIGSAEEPAGWRWALKWAWRRRGRWRCEYK

SEQ ID NO: 788712 - protein, 72 aa, Homo sapiens
YQILVTNAQFPAEIRNLEPVTQLYVSVDASTKDSLKKIDRPLFKDFWQSGRSIFFRLTLVKAVDRGFRGSLN

SEQ ID NO: 788713 - protein, 121 aa, Homo sapiens
MRSTRERRPQERRRQGSVRQGRTGGSRFAIIPGSRLCFVGPSHCILAHTGEFWPWENWSQHAAKLSHGRQRIPTHCRSKPCWKKQNSSPSVELRGDWSRAPADTKIQVAQVSHRKWRSICT

SEQ ID NO: 788714 - protein, 121 aa, Homo sapiens; identical to SEQ ID NO: 788713

SEQ ID NO: 788715 - protein, 80 aa, Homo sapiens
GRLEWVAIWAVARAGSTAYQDIPGGWALHQPQQHRCVTAQRARGQVWRGEHVHSDSGSCPQHPYFPALVYSRCAHLPSQC

SEQ ID NO: 788716 - protein, 199 aa, Homo sapiens
MENDFDELREEGFRRSNYSELQKEIQTKGKEVEKFEKNLDECITRITNTEKCLKELMELKAKARELREEYRSLRSQCDQLEERVSVMEDEMNEIEREKGNVQEEHTAIHRNRHNRLPRNLGDLCCHTDQIHRLTGVLQVTRSIGTQWTTTLADYFQENFPIQRRALSISDQNRQMPPQASDTTAAQLHYAPFGPTSSLE

SEQ ID NO: 788717 - protein, 72 aa, Homo sapiens
TLPHFSEIKYEDYQIGSLRIKKAEQGIELKYAWVPFTFPPLYFEEKRMEVNKQGIQEKYLNVEFTLCIDLGG

SEQ ID NO: 788718 - protein, 104 aa, Homo sapiens [sequence omitted]

SEQ ID NO: 788719 - protein, 38 aa, Homo sapiens
MRPRCWSPFPPTPRGPGILAFCHSSDSFLGDFTTSRIQ

SEQ ID NO: 788720 - protein, 144 aa, Homo sapiens
TDFWARFTSLNESITTKINKVSPSTDFISNPDNKTISPFFEPIDTKLSHMPVPPGLNSSKQLLNKTKGYNSRNHTSANEDEVSVTSKTWLVSVALCTSVIFLGCCIVILASGCCGKQQGQYKPGQRKSGSLQIKNRNHMKENSS

SEQ ID NO: 788721 - protein, 86 aa, Homo sapiens
ASFPNEDVRKCECKLCICKEESGRANGKVGLARIWRTLNAMPGGFEQEGRVVRFLPSRCPSTVEKISWSKRHCRGEIVRGQVEPSW

SEQ ID NO: 788722 - protein, 84 aa, Homo sapiens
IEGALKSKVPKTGIIHNVPLIAPLHSGDTSNRGSRLGSEGATPRPGHGAPLGLLEARKEGAKPPRAARAICRAPAGLRPAGGEG

SEQ ID NO: 788723 - protein, 67 aa, Homo sapiens
PGTGNVPGTPATEIPHILDWREKGYVTPVKDAEIYKLMLNTHVIGSGLRLRSEPQSDTLCGVSGNNR

SEQ ID NO: 788724 - protein, 111 aa, Homo sapiens
PIEDMTENKIFPYFEVGILFLSVFSRIGAFQQCRGSWNWLSCVLAVGGQDICSEGRQVCKGFIVKMFFIWLQNIHYVIKLAKGKQECMVSSGYFMEYLIEINVILDGYTSK

SEQ ID NO: 788725 - protein, 105 aa, Homo sapiens
MAHGSLRLLSLSKFSCLSLPSSWDYRCAPPRLANFCIFSRDGVSPCWPDCLEILTSGDPPTLASKSAGIKGVSHHARPILNFFGNCQNVFQNGYTIPFCISTTNV

SEQ ID NO: 788726 - protein, 46 aa, Homo sapiens
VHEMILGDLQMFLELLLLVTAWHSPEDNLFSPMPASVGLSTPAPPI

SEQ ID NO: 788727 - protein, 130 aa, Homo sapiens
MAAGVLPQNEQPYSTLVNNSECVANMKVYFYNFGWKDYGVASLTTILDMVKVMTFALQEGKVAIHCHAGLGRTGVLIACYLVFATRMTADQAIIFVRAKRPNSIQTRGQLLCVREFTQFLTPLRNIFSCC

SEQ ID NO: 788728 - protein, 306 aa, Homo sapiens
MQVQDATRRPSAVRFLSSFLQGRRHSTSDPVLRLQQARRGSGLGSGSATKLLSSSSLQVMVAVSSVSHAEGNPTFPERKRNLERPTPKYTKVGERLRHVIPGHMACSMACGGRACKYENPARWSEQEQAIKGVYSSWVTDNILAMARPSSELLEKYHIIDQFLSHGIKTIINLQRPGEHASCGNPLEQESGFTYLPEAFMEAGIYFYNFGWKDYGVASLTTILDMVKVMTFALQEGKVAIHCHAGLGRTGVLIACYLVFATRMTADQAIIFVRAKRPNSIQTRGQLLCVREFTQFLTPLRNIFSCC

SEQ ID NO: 788729 - protein, 254 aa, Homo sapiens
MAAGVLPQNEQPYSTLVNNSECVANMKGNLERPTPKYTKVGERLRHVIPGHMACSMACGGRACKYENPARWSEQEQAIKGVYSSWVTDNILAMARPSSELLEKYHIIDQFLSHGIKTIINLQRPGEHASCGNPLEQESGFTYLPEAFMEAGIYFYNFGWKDYGVASLTTILDMVKVMTFALQEGKVAIHCHAGLGRTGVLIACYLVFATRMTADQAIIFVRAKRPNSIQTRGQLLCVREFTQFLTPLRNIFSCC

SEQ ID NO: 788730 - protein, 123 aa, Homo sapiens
PEATQPKPGGWPSQKGRASTARGRRSLELVDRAADRGADARRGRPLGTAGGAVSVAMTDQTYCDRLVQDTPFLTGHGRLSEQQVDRIILQLNRYYPQILTNKEAERLSSGTPRHPCVCGSVTS

SEQ ID NO: 788731 - protein, 123 aa, Homo sapiens; identical to SEQ ID NO: 788730

SEQ ID NO: 788732 - protein, 115 aa, Homo sapiens
PEATQPKPGGWPSQKGRASTARGRRSLELVDRAGGRPLGTAGGAVSVAMTDQTYCDRLVQDTPFLTGHGRLSEQQVDRIILQLNRYYPQILTNKEAERLSSGTPRHPCVCGSVTS

SEQ ID NO: 788733 - protein, 123 aa, Homo sapiens; identical to SEQ ID NO: 788730

SEQ ID NO: 788734 - protein, 108 aa, Homo sapiens
PEATQPKPGGWPSQKGRASTARGRRSLELVDRAADRGADARRGRPLGTAGGAVSVAMTDQTYCDRLVQDTPFLTGHGRLSEQQVDRIILQLNRYYPQILTNKEAERLR

SEQ ID NO: 788735 - protein, 275 aa, Homo sapiens
PEATQPKPGGWPSQKGRASTARGRRSLELVDRAADRGADARRGRPLGTAGGAVSVAMTDQTYCDRLVQDTPFLTGHGRLSEQQVDRIILQLNRYYPQILTNKEAERLRCHVQGYPEGWGISWNNEVGPQQNRSQHGPCYWLQFRNPKASLRVRLCDLLSHLQRSGERDCQEFYRALYIHAQPLHSRLPSRHALQNSDCTELDSGSQSGELSNRGPMSFLAGLGLAVGLALLLYCYPPDPKGLPGTRRVLGFSPVIIDRHVSRYLLAFLADDLGGL

SEQ ID NO: 788736 - protein, 123 aa, Homo sapiens; identical to SEQ ID NO: 788730

SEQ ID NO: 788737 - protein, 144 aa, Homo sapiens
MIFPGTPLYPQFRNPKASLRVRLCDLLSHLQRSGERDCQEFYRALYIHAQPLHSRLPSRHALQNSDCTELDSGSQSGELSNRGPMSFLAGLGLAVGLALLLYCYPPDPKGLPGTRRVLGFSPVIIDRHVSRYLLAFLADDLGGL

SEQ ID NO: 788738 - protein, 194 aa, Homo sapiens
ERVSHTLPTLPTSVALAPPLSHLFLDRCHVQGYPEGWGISWNNEVGPQQNRSQHGPCYWLQFRNPKASLRVRLCDLLSHLQRSGERDCQEFYRALYIHAQPLHSRLPSRHALQNSDCTELDSGSQSGELSNRGPMSFLAGLGLAVGLALLLYCYPPDPKGLPGTRRVLGFSPVIIDRHVSRYLLAFLADDLGGL

SEQ ID NO: 788739 - protein, 123 aa, Homo sapiens; identical to SEQ ID NO: 788730

SEQ ID NO: 788740 - protein, 117 aa, Homo sapiens
LAPPLSHLFLDRCHVQGYPEGWGISWNNEVGPQQNRSQHGPCYWLRCFFRFEGGTVILKVRSSNPNLLLLQLKSNACSLLKSLESLRRLYKKKHIFLPHRHHSSCHPSACHFHTAMV

SEQ ID NO: 788741 - protein, 208 aa, Homo sapiens
STARGRRSLELVDRAADRGADARRGRPLGTAGGAVSVAMTGGHGVGWAAGMRAPWMGGPARGSGCLASRLQAAPGQRGPSDLGPSAVGGARVHPREVVGVPGLLPGGAVPAEAVPGMMGGGQVRGPKRAGATRQLQGGAAQPRSGLSHCQCVCVPWWGIWSERVGGGRNDTGENSQRSCCDSGHGNNAPSLQPPQRGRGTGDAFLGGM

SEQ ID NO: 788742 - protein, 277 aa, Homo sapiens
MATSWFAPLGPVGATRDLLPLAGLSPPFEVFRVALRPRPGRPTALFQLEDEQFPSIPALVHSYMTGRRPLSQATGAVVSRPVTWQGPLRRSFSEDTLMDGPARIEPLRARKWSNSQPADLAHMGRSREDPAGMESAPGTPSPAYPPWPVPGAPSWEHRPSPAIGRLPGHRPPGSDQRSAGQHGSLIWPGAAHSSPWTPLEVGTAGETLALHLCRHQTLALAGALAVLGCSGPLEERAAALRGLVELALALRPGAAGDLPGLAAVMGALLMPQVRGEQ

SEQ ID NO: 788743 - protein, 133 aa, Homo sapiens
SGLREWRGRRAGVAAGSFGFKALGVRARMRVWGGLGLGRVVKMPWAAELRGFWAVGRARPFRRRRSWASFQAGVEAPASGAFSLDLGPARLPRRGPKERLPCWTASTSSLALPLSKEAFKALGLQSTDPGPYK

SEQ ID NO: 788744 - protein, 142 aa, Homo sapiens
MVDEFQEITEGLAHGESGRSRRDFALLLVGSLWRSLSHWGSPEPWKAEVTRVIICSVLPGMGGTSSWESSSLVAYTGCLRALGPQALEPCLREAAKCSEQDSARCWLILHRASLWRLQRTDRPRHWSLRPVTQHCRLGVVEW

SEQ ID NO: 788745 - protein, 37 aa, Homo sapiens
EVKISNKFYNPVLISDTSFKDEFLFEGLFQFHEASMG

SEQ ID NO: 788746 - protein, 92 aa, Homo sapiens
NGDELHEHYVKHYSAGKRKGAIKTHNNGDELQEHYAEPLSKRYKRPGAVAHACNPRTLGGQSGWITRSGVRDQRGQCGETLSLLKIQKISRA

SEQ ID NO: 788747 - protein, 83 aa, Homo sapiens
IHGGSPSGACQGSERGDLDWAEHGVRRTRAERPPGASSGLAADCMWGEKRKPQDSAQGYGVEMEVEMAQQATQRRNLQGGSWV

SEQ ID NO: 788748 - protein, 107 aa, Homo sapiens
MGRSCVPSACLYGHVCHLASWPRDSPLIWEAAGSFQTDCCLMSWQGREALGGSGLAKLPDSFHPLTPTCYFVAAKRGICLSNNPTAGEMEDLGAMDQSPAVLPCFVQ

SEQ ID NO: 788749 - protein, 123 aa, Homo sapiens [sequence omitted]

SEQ ID NO: 788750 - protein, 72 aa, Homo sapiens
AKCCRGEPAEGAGRGCPARRPRVGAELSRGCWVRLVLAIGWTRAHRGLVSHCGLKKCRVGGIQSEGLEHNFM

SEQ ID NO: 788751 - protein, 142 aa, Homo sapiens
SFQALLCRAKELLCARLTELEGVATFRLMEAGERMEPGSLEPGTLPRCGWWWPQTSRRAAGSGSFFCRAGGLGEGRGNATCWRLEPVPPWLTSLWLVAARLAVVGGDVGDCSSATVVEMCWAFAVLGTCSHLLSSLESTALE

SEQ ID NO: 788752 - protein, 118 aa, Homo sapiens
TGKISSSPRNSTTSDNDQPPDYSFSKRISFLFGELMTTPILQPTEALSPEDGASTALIAVVITVVFLTLLSVVILIFFYLYKNKGSYVTYEPTEGEPSAIVQMESDLAKGSEKEEYFI

SEQ ID NO: 788753 - protein, 47 aa, Homo sapiens
SDEMVVELIEKNLETPLCKNGFLLDGFPRTVRQAEMLDDLMEKRKEK

SEQ ID NO: 788754 - protein, 278 aa, Homo sapiens
IGRKVDSHQHQKMQFKPDGVTVGTVLGLTALAATIAVVVGGDLIHIGCSKTKSKSALITFYLYVITLMKLMGAAGLAGIRIYRTDEKSLDESKNPPRKLDSDLLVGTASGSWLISWGSILAILCAEDHPHYTWYNLPYSIVVIVEKYIQNLFIFESIHREPKKLSEDIQTLRMVTVCNGNTMPLASSCLKSGGVAGDVAPWGRDMPPAANGNVCLRESCDKEEKHEESSWGGNPSPVHLPRFLQGNAKRKVLRNIAAFLFLCNTLLWIPPAFGCRPEY

SEQ ID NO: 788755 - protein, 164 aa, Homo sapiens
MLTDPDLPQEFERMSSKRPASPYGEADGEVAMVTSRQKVEEEESDGLPAFHLPLHVSFPNKPHSEEFQPVSLLTQETCGHRTPTSQHNTMEVDGNKVMSSFAPHNSSTSPQKAEEGGRQSGESLSSTALGTPERRKGSLADVVDTLKQRKMEELIKNEPEGSSH

SEQ ID NO: 788756 - protein, 129 aa, Homo sapiens
MLTDPDLPQEFERMSSKRPASPYGEADGEVAMVTSRQKVEEEESDGLPAFHLPLHEVDGNKVMSSFAPHNSSTSPQKAEEGGRQSGESLSSTALGTPERRKGSLADVVDTLKQRKMEELIKNEPEGSSH

SEQ ID NO: 788757 - protein, 189 aa, Homo sapiens
SQAFLFCPNVSIRGLCLVVCVCAAWLHGPHPRLWSRPGLWAQQTARLLPLVCEASVSMLKVASVFSMVASAPVIMFPFQRGERREGWWAVILWVALCPPLLRLPRGLCRRPHPLCIAGPQLQGEQESHLLAECVATQKNSGDRERRSGFGGSPALLTLPAALCPQQELPRGHPSAVHPPPTASSAPTLP

SEQ ID NO: 788758 - protein, 79 aa, Homo sapiens
LVLVFPFTEAETEAWRWRITYPESLLGLESRPVGCETEVPPALLLQGCGIPPRGVAGACWDLHPLLSATLGLAKPWRAP

SEQ ID NO: 788759 - protein, 36 aa, Homo sapiens
LNAVWLDYQKPCCFHSVALLTEAFLPPRPHPTPLKA

SEQ ID NO: 788760 - protein, 115 aa, Homo sapiens
MEAVNHYQVHHFFFMAGVQWHDHGFLQPRPPGLKESSHLSLLHSWDYRCVPPPEAIYFFFFLESWSLTVLPGLICISCPQVILLPWPSKVLGLYVLTTAPGIIFDADANLMKYKK

SEQ ID NO: 788761 - protein, 744 aa, Homo sapiens
ARAHLRVGPAAYRVPGVLVARVAGPAGPGLRAHGSRGWRRSRANSVSPWTKMTDGKLSTSTNGVAFMGILDGRPGNPLQNLQHVNLKAPRLLSAPEYGPKLKLRALEDRHSLQSVDSGIPTLEIGNPEPVPCSAVHVRRKQSDSDLIPERAFQSACALPSCAPPAPSSTEREQSVRKSSTFPRTGYDSVKLYSPTSKALTRSDDVSVCSVSSLGTELSTTLSVSNEDILDLVVTSSSSAIVTLENDDDPQFTNVTLSSIKETRGLHQQDCVHEAEEGSKLKILGPFSNFFARNLLARKQSARLDKHNDLGWKLFGKAPLRENAQKDSKRIQKEYEDKAGRPSKPPSPKQNVRKNLDFEPLSTTALILEDRPANLPAKPAEEAQKHRQQYEEMVVQAKKRELKEAQRRKKQLEERCRVEESIGNAVLTWNNEILPNWETMWCSRKVRDLWWQGIPPSVRGKVWSLAIGNELNITHELFDICLARAKERWRSLSTGGSEVENEDAGFSAADREASLELIKLDISRTFPNLCIFQQGGPYHDMLHSILGAYTCYRPDVGYVQGMSFIAAVLILNLDTADAFIAFSNLLNKPCQMAFFRVDHGLMLTYFAAFEVFFEENLPKLFAHFKKNNLTPDIYLIDWIFTLYSKSLPLDLACRIWDVFCRDGEEFLFRTALGILKLFEDILTKMDFIHMAQFLTRLPEDLPAEELFASIATIQMQSRNKKWAQVLTALQKDSREMEKGSPSLRH

SEQ ID NO: 788762 - protein, 441 aa, Homo sapiens
IISSTRRRGRVGAGHGCLRARASKDPAYMEYEDKAGRPSKPPSPKQNVRKNLDFEPLSTTALILEDRPANLPAKPAEEAQKHRQQYEEMVVQAKKRELKEAQRRKKQLEERCRVEESIGNAVLTWNNEILPNWETMWCSRKVRDLWWQGIPPSVRGKVWSLAIGNELNITHELFDICLARAKERWRSLSTGGSEVENEDAGFSAADREASLELIKLDISRTFPNLCIFQQGGPYHDMLHSILGAYTCYRPDVGYVQGMSFIAAVLILNLDTADAFIAFSNLLNKPCQMAFFRVDHGLMLTYFAAFEVFFEENLPKLFAHFKKNNLTPDIYLIDWIFTLYSKSLPLDLACRIWDVFCRDGEEFLFRTALGILKLFEDILTKMDFIHMAQFLTRLPEDLPAEELFASIATIQMQSRNKKWAQVLTALQKDSREMEKGSPSLRH

SEQ ID NO: 788763 - protein, 629 aa, Homo sapiens
  misc_feature (606)..(606): Xaa can be any naturally occurring amino acid
  misc_feature (609)..(609): Xaa can be any naturally occurring amino acid
ARAHLRVGPAAYRVPGVLVARVAGPAGPGLRAHGSRGWRRSRANSVSPWTKMTDGKLSTSTNGVAFMGILDGRPGNPLQNLQHVNLKAPRLLSAPEYGPKLKLRALEDRHSLQSVDSGIPTLEIGNPEPVPCSAVHVRRKQSDSDLIPERAFQSACALPSCAPPAPSSTEREQSVRKSSTFPRTGYDSVKLYSPTSKALTRSDDVSVCSVSSLGTELSTTLSVSNEDILDLVVTSSSSAIVTLENDDDPQFTNVTLSSIKETRGLHQQDCVHEAEEGSKLKILGPFSNFFARNLLARKQSARLDKHNDLGWKLFGKAPLRENAQKDSKRIQKEYEDKAGRPSKPPSPKQNVRKNLDFEPLSTTALILEDRPANLPAKPAEEAQKHRQQYEEMVVQAKKRELKEAQRRKKQLEERCRVEESIGNAVLTWNNEILPNWETMWCSRKVRDLWWQGIPPSVRGKVWSLAIGNELNITHELFDICLARAKERWRSLSTGGSEVENEDAGFSAADREASLELIKLDISRTFPNLCIFQQGGPYHDMLHSILGAYTCYRPDVGYVQGMSFIAAVLILNLDTADAFIAFSNLLNKPCQMQRLGNVLEMSSLISXRLXSLSAAEKPASFVLHFRGSCA

SEQ ID NO: 788764 - protein, 82 aa, Homo sapiens
CRDGEEFLFRTALGILKLFEDILTKMDFIHMAQFLTRLPEDLPAEELFASIATIQMQSRNKKWAQVSGLCVLGFPQRSRQVA

SEQ ID NO: 788765 - protein, 205 aa, Homo sapiens [sequence omitted]

SEQ ID NO: 788766 - protein, 479 aa, Homo sapiens
ARAHLRVGPAAYRVPGVLVARVAGPAGPGLRAHGSRGWRRSRANSVSPWTKMTDGKLSTSTNGVAFMGILDGRPGNPLQNLQHVNLKAPRLLSAPEYGPKLKLRALEDRHSLQSVDSGIPTLEIGNPEPVPCSAVHVRRKQSDSDLIPERAFQSACALPSCAPPAPSSTEREQSVRKSSTFPRTGYDSVKLYSPTSKALTRSDDVSVCSVSSLGTELSTTLSVSNEDILDLVVTSSSSAIVTLENDDDPQFTNVTLSSIKETRGLHQQDCVHEAEEGSKLKILGPFSNFFARNLLARKQSARLDKHNDLGWKLFGKAPLRENAQKDSKRIQKEYEDKAGRPSKPPSPKQNVRKNLDFEPLSTTALILEDRPANLPAKPAEEAQKHRQQYEEMVVQAKKRELKEAQRRKKQLEERCRVEESIGNAVLTWNNEILPNWETMWCSRKVRDLWWQGIPPSVRGKVWSLAIGNELNITHGEWPA

SEQ ID NO: 788767 - protein, 108 aa, Homo sapiens
MAVISEKLGDFTSCVKAIYQDLYWVSVQQVHSPLTWEQLTQLARFWRPLCAQVQTFYFIATQVGYVFPAKNWLVSATLPGPGDPALDREAHPLPGQEITEPVSGSDEA

SEQ ID NO: 788768 - protein, 102 aa, Homo sapiens
MSMPSHFSLPNLSGVTVHPDCLILPLLNLLQFGFCPSHFVESFLETSLSERTSAVRSDSLLIFHYFQLAQDRTQPCWVTISSRPSSLPFRPAPSPTHASGHS

SEQ ID NO: 788769 - protein, 102 aa, Homo sapiens
MSPGADTCHRDDHRGPEELEVLTAWPRQGSCQPGLESCRGMCYVSCTCHLKCSSQHVKKKANLLHGPQCVQNTILSVVALSHGWWLLCGAWVMSGGQPRRDL

SEQ ID NO: 788770 - protein, 50 aa, Homo sapiens
LPAHIHVNQHVFLGAVVLFLAPCALILVSYIRIAAAILRIPSPTRRRKAC

SEQ ID NO: 788771 - protein, 37 aa, Homo sapiens
MYFTILHLHVVVNFVIIPTSKRSSSKPAPSVSEWLSL

SEQ ID NO: 788772 - protein, 78 aa, Homo sapiens
ENFRGTIRPPASKAGQEIRDRNMLWKLHSPGKTGGLCGHQIVTLRTWFLTSHKMPQGRSFRTPQDEGGSYSPVFLWSH

SEQ ID NO: 788773 - protein, 30 aa, Homo sapiens
MPFPLLGLSCVSLSSHFRYSLLQEACPDSF

SEQ ID NO: 788774 - protein, 270 aa, Homo sapiens
VSVSSASTRPQFLITVPVLTVINYRPHNMRPEDRMFHIRAVILRALSLAFLLSLRGAGAIKADHVSTYAAFVQTHRPTGEFMFEFDEDEQFYVDLDKKETVWHLEEFGRAFSFEAQGGLANIAILNNNLNTLIQRSNHTQAANDPPEVTVFPKEPVELGQPNTLICHIDRFFPPVLNVTWLCNGEPVTEGVAESLFLPRTDYSFHKFHYLTFVPSAEDVYDCRVEHWGLDQPLLKHWEAQAIQMPEQRELGFVPWALCWAWGIILGPPLL

SEQ ID NO: 788775 - protein, 282 aa, Homo sapiens
VSVSSASTRPQFLITVPVLTVINYRPHNMRPEDRMFHIRAVILRALSLAFLLSLRGAGAIKADHVSTYAAFVQTHRPTGEFMFEFDEDEQFYVDLDKKETVWHLEEFGRAFSFEAQGGLANIAILNNNLNTLIQRSNHTQAANDPPEVTVFPKEPVELGQPNTLICHIDRFFPPVLNVTWLCNGEPVTEGVAESLFLPRTDYSFHKFHYLTFVPSAEDVYDCRVEHWGLVQAGLQTGRPEAITCLRPGRGLPGPDGRSATRAHQAGGRTRQSAGREPTQADR

SEQ ID NO: 788776 - protein, 304 aa, Homo sapiens
RKSINRNSVRSRMPAKSSKMYGTLRKGSVCADPKPQQVKKIFEALKRGLKEYLCVQQAELDHLSGRHKDTRRNSRLAFYYDLDKQTRCVERHIRKMEFHISKVDELYEDYCIQCRLRDGASSMQRAFARCPPSRAARESLQELGRSLHECAEDMWLIEGALEVHLGEFHIRMKGLVGYARLCPGDHYEVLMRLGRQRWKLKGRIESDDSQTWDEEEKAFIPTLHENLDIKVTELRGLGSLAVGAVTCDIADFFTTRPQVIVVDITELGTIKLQLEVQWNPFDTESFLVSPSHTGKCSMDTGRVS

SEQ ID NO: 788777 - protein, 247 aa, Homo sapiens
MEALTLWLLPWICQCVSVRADSIIHIGAIFEENAAKDDRVFQLAVSDLSLNDDILQSEKITYSIKVIEANNPFQAVQEACDLMTQGILALVTSTGCASANALQSLTDAMHIPHLFVQRNPGGSPRTACHLNPSPDGEAYTLASRPPVRLNDVMLRLVTELRWQKFVMFYDSEYDIRGLQSFLDQASRLGLDVSLQKVDKNISHVFTSLFTTMKTEELNRYRDTLRRAILLLSPQGAHSFINEVGHGG

SEQ ID NO: 788778 - protein, 104 aa, Homo sapiens
MPAPGEVASERPLTRKKRWLLPAIAPTLPSSPGCCHSLVRYDAACSPLTAFPAANQPRESPNQSHHSCEVSSHPPEREILSSSSSPVMMMRYSGRHPFCGNPTR

SEQ ID NO: 788779 - protein, 230 aa, Homo sapiens
MTKTSTCIYHFLVLSWYTFLNYYISQEGKDEVKPKILANGARWKYMTLLNLLLQTIFYGVTCLDDVLKRTKGGKDIKFLTAFRDLLFTTLAFPVSTFVFLAFWILFLYNRDLIYPKVLDTVIPVWLNHAMHTFIFPITLAEVVLRPHSYPSKKTGLTLLAAASIAYISRILWLYFETGTWVYPVFAKLSLLGLAAFFSLSYVFIASIYLLGEKLNHWKWGDMRQPRKKRK

SEQ ID NO: 788780 - protein, 104 aa, Homo sapiens; identical to SEQ ID NO: 788778

SEQ ID NO: 788781 - protein, 230 aa, Homo sapiens; identical to SEQ ID NO: 788779

SEQ ID NO: 788782 - protein, 255 aa, Homo sapiens
MTKTSTCIYHFLVLSWYTFLNYYISQEGKDEVKPKILANGARWKYMTLLNLLLQTIFYGVTCLDDVLKRTKGGKDIKFLTAFRDLLFTTLAFPVSTFVFLAFWILFLYNRDLIYPKVLDTVIPVWLNHAMHTFIFPITLAEVVLRPHSYPSKKTGLTLLAAASIAYISRILWLYFETGTWVYPVFAKLSLLGLAAFFSLSYVFIASIYLLGEKLNHWKWVSVQILQRWRLESVGICFQWPDWKSPAKHQLVKNIR

SEQ ID NO: 788783 - protein, 309 aa, Homo sapiens
MRKMQLSGNGLEEQAAQHLDELLLAHTDLKSLDLSYNQLNDQADLCMGLQGFLIFHSFGGGTGSGFVSLLMKRLSVDYGKKSKLEFAICPAPQVSMAMTEPYNSILTTYTTLEHSDCAFIVDSKATYDMSAQPGHRVSHVHQPQSSGQIVSSITASLCFDGALNVYLTEFQTNLVPYPHIHLPLATYALVISAKKAYHEQLSVAKIASARFEPANQMVKCDPHHGKYMACCMLYRGDVVLKDVSAAVATIKSKHTNQFVDWCPIGFKVGLGDVESLCHQEAGDLQNNAAPEGPHPLWRQPLFTSARLQG

SEQ ID NO: 788784 - protein, 309 aa, Homo sapiens; identical to SEQ ID NO: 788783

SEQ ID NO: 788785 - protein, 153 aa, Homo sapiens
MHLPFCVSWEIRHLLCEIPPLLKLACADTSRYELIIYVTGVTFLLLPISAIVASYTLVLFTVLRMPSNEGRKKALVTCSSHLIVVGMFYGAATFMYVLPSSFHSPKQDNIISVFYTIVTPALNPLIYSLRNKEVMRALRRVLGKYILLAHSTL

SEQ ID NO: 788786 - protein, 183 aa, Homo sapiens
MTRHLHEAFSRHHKLAASSPPLLLRPPPSSHSGTSLGHLDATLPLTSHIQPHQEILSAPTWTSSQDPATSHLPWVAPGLSHHGLLLGLLQSSPPLSHASTLAPGSPHVPCVNQVRATGETWPGIGRPGSNLCFVTSLLFDLRPVSHTLGISIKWELVGDGKLIILLTLSLPPSMASTLMQGSS

SEQ ID NO: 788787 - protein, 181 aa, Homo sapiens
MTRHLHEAFSRHHKLAASSPPLLLRPPPSSHSGTSLGHLDATLPLTSHIQPHQEILSAPTWTSSQDPATSHLPWVAPGLSHHGLLLGLLQSSPPLSHASTLAPGSPHVPCVNQVRATGETWPGIGRPGSNLCFVTSLLFDLRPVSHTLGISIKWELVGDGKLIILLTLSLPPSMADITNQL

SEQ ID NO: 788788 - protein, 136 aa, Homo sapiens
RVELLSIIDYKRISLPEDKSTPFMEPPHCSSCLGTIFSCRQVKICAGFSGLDRTVSLKLIDSDYYYYYYYYYFETESFSVAQAGVKWCNLGLLQAPPPGFTPFPCLSLLSSWDYRCPPPRPANFFCIFSRDGVSPC

SEQ ID NO: 788789 - protein, 38 aa, Homo sapiens
HCHAIGLSLLLGRKYYFELHPVLCKGCWPKDFQEHSVA

SEQ ID NO: 788790 - protein, 30 aa, Homo sapiens
MSIYRTKDAGDNHVVGATAASPCYSTPEVP

SEQ ID NO: 788791 - protein, 91 aa, Homo sapiens
SPGTDGHRPTPRDRLKILRIHEQALQLSPKPYSFLWELPAKKAAHGNLKPCCKPWPHQWCKSSPYQDLSRGNLSCKSNWRLRQLTCLRSLS

SEQ ID NO: 788792 - protein, 129 aa, Homo sapiens
VTRVPSLARVGVGGATPHGSSPPSRRDPSGGASRWATGTRGESDKLEARAACKTFGPPAATLRERPPFLRPRVGPIPVCPDPCAPGLGGAAASRLPGALQPSLSRTRRSPVRAAPPRQAGGPGGRAGAD

SEQ ID NO: 788793 - protein, 109 aa, Homo sapiens
GSVFPLPSCPTPNLLSFNPIQMPLLHMVEGECGESGCPGEYFSQPQHSGACLLRACSAQEGWPLQIREGTLLARPRDHALTARLPQLQLPDFLMWNSCSPGAMRIRAHS

SEQ ID NO: 788794 - protein, 68 aa, Homo sapiens
  misc_feature (45)..(45): Xaa can be any naturally occurring amino acid
  misc_feature (50)..(50): Xaa can be any naturally occurring amino acid
  misc_feature (57)..(57): Xaa can be any naturally occurring amino acid
  misc_feature (63)..(65): Xaa can be any naturally occurring amino acid
  misc_feature (67)..(68): Xaa can be any naturally occurring amino acid
MQDPKAWELRYLRPQESSSFPCQKPRSQPLTSRVSRPHSPATSGXSGDIXMGVPSSXFGIMGXXXFXX

SEQ ID NO: 788795 - protein, 68 aa, Homo sapiens; identical to SEQ ID NO: 788794
  misc_feature (45)..(45): Xaa can be any naturally occurring amino acid
  misc_feature (50)..(50): Xaa can be any naturally occurring amino acid
  misc_feature (57)..(57): Xaa can be any naturally occurring amino acid
  misc_feature (63)..(65): Xaa can be any naturally occurring amino acid
  misc_feature (67)..(68): Xaa can be any naturally occurring amino acid

SEQ ID NO: 788796 - protein, 55 aa, Homo sapiens
THSMSPWDNASITYTGLSLGAAFSSPKTGLGLGPGAQAWDPGAEMMGLVGAIRGR

SEQ ID NO: 788797 - protein, 227 aa, Homo sapiens
CTPSENTPTESLARLVAMVFQWFHSTAYMMDDEVGSLVEKLKPQFVTKWLKTVCDVRFDVMVMCLLPKPMEFARVGGYWDKSCSTVTQLKEGLNRILCLIPYNVINQSVWECIMPEWLEAIRTEVPDNQLKEFREVLSKMFDIELCPLPFSMEEMFGFISCRFTGYPSSVQEQALLWLHVLSELDIMVPLQLLISMFSDGVNSVKELANQRKSRVSELAGNLASRRV

SEQ ID NO: 788798 - protein, 68 aa, Homo sapiens
FKLLTMYGDMHRYNQTTKRDLKTHRGGPSVETSRGRLENTGLEHRSWCGHSHRTLEEARNRFSPPAPE

SEQ ID NO: 788799 - protein, 75 aa, Homo sapiens
GISLASLDIILVGVVSGPQLEPSYCFGLSALVRSMLIKPERSCDLHRLSEESCRIRHEVVEPCVSGLAGKAVSAG

SEQ ID NO: 788800 - protein, 141 aa, Homo sapiens
GAGGGCSRAEGTETLLRALHSRESKPRASGLLGARGVRRAQCAVRIQDTLWVITALCVSETPSTYRLFFQERTPAGFTGSLGGPFLQPSALRSGHLACFCFTVPRSLCLGSEGVGSMFSEHLDVPGTRQVQNSTLRVVPPF

SEQ ID NO: 788801 - protein, 113 aa, Homo sapiens [sequence omitted]

SEQ ID NO: 788802 - protein, 204 aa, Homo sapiens
PGASLKHEVLKIMPVQKLTRAGQRTRFKAFVAIGDYSSHVDLGVKCSKEVVTAILGAIILAKLSIVPVRRGYWGNKIGKPHSVPCKVTDGSVLVRLIPVSRGTGIVSAPVLKKLVMMAGIDDCYTSARGCTATLGNLAKATTFDAISKTYSYLTPDLWKETVFTKSPYQEFTDHLVKTHTRVYVQRTQAPAVATTWGFYTRKVK

SEQ ID NO: 788803 - protein, 45 aa, Homo sapiens
KNQKPKRVFFTFTCTLSVETCRPDLGVLSHTLWFSPLHLLIFTLS

SEQ ID NO: 788804 - protein, 111 aa, Homo sapiens
GEHKPIHIFSTLLLQPAFEKHIKTVYNQGILIECLPLKTLRSKAKQPYSTNIIVISPKGINMAFISKSKFKNNKRKYLQMRRKQCNNSGNMKKCGCYDIPKQAHQLGSNGS

SEQ ID NO: 788805 - protein, 77 aa, Homo sapiens
GGDLRRRQLGEIQLTVRYVCLRRCLSVLINGCRNLTPCTSSGADPYVRVYLLPERKWACRKKTSVKRKTLEPLFDET

SEQ ID NO: 788806 - protein, 106 aa, Homo sapiens
SFNIMFLIINSSAKRTKLEGHGIQLGGTLISPLFTRVTSQITEMGSAQSRQGGLQYPRIVWPAVSTNCVACSIHESTASLMSAPERQWERVRRSSFCPRNSSSLTS

SEQ ID NO: 788807 - protein, 54 aa, Homo sapiens
EVMGAVCEALRQDSPGNLLSLMGVRVSLSESKERRGRGVQGNSEKSIFTIKHGI

SEQ ID NO: 788808 - protein, 128 aa, Homo sapiens
MASDRGQGAGMGWAPRGPMQPSHCRLSWPGPRLPKTQLILAVNWKGLCFLDQQEKMLLELSFPEVMGLATNRCGPRGKISSYTLSPCDASGGSGRDGERGSVPSRVTGRGGGTRIYVCDGFCTSEPHP

SEQ ID NO: 788809 - protein, 573 aa, Homo sapiens
MKYLLNFIGQGPATYGPFCAERLRRTYANGVRAEPPTWLELQAVKSKKHIPIQVILATGESLTVPVDSASTSREMCMHIAHKQGLSDHLGFSLQVAVYDKFWSLGSGRDHMMDAIARCEQMAQERGESQRQSPWRIYFRKEFFTPWHDSREDPVSTELIYRQVLRGVWSGEYSFEKEEELVELLARHCYVQLGASAESKAVQELLPSCIPHKLYRTKPPDRWASLVTAACAKAPYTQKQVTPLAVREQVVDAARLQWPLLFSRLFEVITLSGPRLPKTQLILAVNWKGLCFLDQQEKMLLELSFPEVMGLATNREAQGGQRLLLSTMHEEYEFVSPSSVAIAELVALFLEGLKERSIFAMALQDRKATDDTTLLAFKKGDLLVLTKKQGLLASENWTLGQNDRTGKTGLVPMACLYTIPTVTKPSAQLLSLLAMSPEKRKLAAQEGQFTEPRPEEPPKEKLHTLEEFSYEFFRAPEKDMVSMAVLPLARARGHLWAYSCEPLRQPLLKRVHANVDLWDIACQIFVAILRYMGDYPSRQAWPTLELTDQIFTLALQHPALQDEVYCQILKQLTH

SEQ ID NO: 788810 - protein, 103 aa, Homo sapiens
LDEMGHPRPATHSTAVPQGPGDGAGGGRTKPLPTLGAGGSRTTPLPTPSWRETVPVSPVLAWARRGTEAQSFGRGSRLFSHCQTHRQGHFNGPFARPGLLSSL

SEQ ID NO: 788811 - protein, 164 aa, Homo sapiens
KYSSSQPEPRTGLSLWDTSPSYIDKLVQGISFSQPTCPDHMLLNSQLLGTPGSSQNPWQRLVKRMTRFFTKLDADKSYQCLKETCEKLGYQWKKSCMNQVTISTTDRRNNKLIFKVNLLEMDDKILVDFRLSKGDGLEFKRHFLKIKGKLIDIVSSQKVWLPAT

SEQ ID NO: 788812 - protein, 191 aa, Homo sapiens
TGGQLLLDGKPLPQYEHRYLHRQVAAVGQEPQVFGRSLQENIAYGLTQKPTMEEITAAAVKSGAHSFISGLPQGYDTEVDEAGSQLSGGQRQAVALARALIRKPCVLILDDATSALDANSQLQVEQLLYESPERYSRSVLLITQHLSLVEQADHILFLEGGAIREGGTHQQLMEKKGCYWAMVQAPADAPE

SEQ ID NO: 788813 - protein, 101 aa, Homo sapiens
GHLSFPVGLGCVPLLPQPSPLSPPGRSASLLGVNGCFPWGVEPTSPRGRAEEQGTVPMDTGRAGPALPCPFPGPVLRVAVNVFPRSSWRVLGPKRGECCAG

SEQ ID NO: 788814 - protein, 114 aa, Homo sapiens
DSDGQTWGIAVGWQDGKKVWELRQILKAEPTEPACGFVWGRVQRKEGHGRALWGKLLYCFQVENPDGKALKARVRSLAFVLGSQAPSVSEKLAQGSSGVVNGARQKEMGPGRAR

SEQ ID NO: 788815 - protein, 187 aa, Homo sapiens
MGKEKTHINIVVIGHVDSGKSTTTGHLIYKCGGIDKRTIEKFEKEAAEMGKGSFKYAWVLDKLKAERERGITIDISLWKFETSKYYVTIIDAPGHRDFIKNMITGTSQADCAVLIVAAGVGEFEAGISKNGQTREHALLAYTLGVKQLIVGVNKMDSTEPPYSQKRYEEIVKEVSTYIKKIGYNPTQ

SEQ ID NO: 788816 - protein, 141 aa, Homo sapiens
MELESTIFRDEDKLFIWGRLWGELCSKQPPGAQGRGLPGWLGHFWVPCPWFCIIHTNHSMLLCSFTRRLGAQKGQGSPHSPVSPASPSSAQGTRQGLRVLEVGGCGQTAWKEFGLLIAFPSAHPGDVCSWENGRGIPNSHS

SEQ ID NO: 788817 - protein, 141 aa, Homo sapiens; identical to SEQ ID NO: 788816

SEQ ID NO: 788818 - protein, 184 aa, Homo sapiens
QLHDGASSLRIGVRHHNPIIQSAYGVETLIGFHQDPPLMFSEEYQKSLLEQYHLGLDQKRRKYVVGELIWNFADFMTNQSPTRVLGNKKGIFTRQRQPKSAAFLLRERYWKIANETRYPHSVAKSQCLENSLFTVSKTDTTCVSLPPRARATSTAAEQVPPGLFTADQNVSGLGFVVIYSSREH

SEQ ID NO: 788819 - protein, 87 aa, Homo sapiens
QLHDGAPSLRIGVRHHNPIIQSAYGVETLIGFHQDPPLMFSEEYQKSLLEQYHLGLDQKRRKYVVGELIWNFADFMTNQFLQAGNPR

SEQ ID NO: 788820 - protein, 81 aa, Homo sapiens
MSYTYSKQGELYSDIDNKVTKLHPELPESCERLLLEEYHTSVQIRYKYYWRVNLLEVSPGYSVSGEKHKNYLMRMTNFLSR

SEQ ID NO: 788821 - protein, 107 aa, Homo sapiens
PTVTVIIQPVKFHPVSLALPSSTLLKLSPYPMDYTNCLFYCRTGFSFVLHLLAHLGTVSAYLLHLQSANTQLTPHPRRPRDRNPIPPRPHPGASQCLFSFVQSHPKY

SEQ ID NO: 788822 - protein, 101 aa, Homo sapiens
GDGVVFSLAVLSLFSVGSAGNGVVFSLAVLSLFSVGSAGDSVVFSLASGVLSPCSVGSAGDDVVFSLANGVLCPFSVGSAGDDVVFSLAVLSLFSVGSAGN

SEQ ID NO: 788823 - protein, 47 aa, Homo sapiens
AELRTILKIRCLQGICSCSVALSTARYLQLLLVSLHQTLEHAASLEE

SEQ ID NO: 788824 - protein, 66 aa, Homo sapiens
PDSLTILRCVRLTSKRWQDFWWFTLYEVLHVLTSLTSYLWICDNQRLSPRPGPGAPSFLIYISGNV

SEQ ID NO: 788825 - protein, 190 aa, Homo sapiens
MDLPALLPAPTARGGQHGGGPGPLRRAPAPLGASPARRRLLLVRGPEDGGPGARPGEASGPSPPPAEDDSDGDSFLVLLEVPHGGAAAEAAGSQEAEPGSRVNLASRPEQGPSGPAAPPGPGVAPAGAVTISSQDLLVRLDRGVLALSAPPGPATAGAAAPRRAPQASGPSTPGYRCPEPQCALAFAKKH

SEQ ID NO: 788826 - protein, 134 aa, Homo sapiens
MLPTSVGAFSGSSCICHPILQRVPRAWAPCKLLVQSRFPGWGPKSCHGPAHAAQAATWRPYRLPRDWGHAHPGPPEGQVVRRTQVTPADAGPLTWAGAGQLTWAGAGPQAGGAGPHLSCSNPRPTRPTLPGSTA

SEQ ID NO: 788827 - protein, 69 aa, Homo sapiens
QRHLCLKHPMKALQSPGQVLPKVGERRHTGASSPGCRCLPGGSCSPALTGDQDNISCTSAFSSTKQSQD

SEQ ID NO: 788828 - protein, 57 aa, Homo sapiens
MKRGYTVWSPWEVGECACPHRASAHKYNNSCLHVLMLSEQWRSSPAGAVSGVCLLSE

SEQ ID NO: 788829 - protein, 155 aa, Homo sapiens
MPLGGRASLTPQKLWLGTAKPGSLTQALNSPLTWEHAWTGVPGGTPDCLTDTFRVKRPHLRRSASNGHVPGTPVYREKEDMYDEIIELKKSLHVQKSDVDLMRTKLRRLEEENSRKDRQIEQLLDPSRGTDFVRTLAEKRPDASWVSMVCAGQSL

SEQ ID NO: 788830 - protein, 148 aa, Homo sapiens
SISVAVPCGLPCLRVITCLQETFADVPEEAWPRISIGGLTRITKMGYNLVINGLKQRILKLEQQCKEKDGTISKLQTDMKTTNLEEMRIAMETYYEEVHRLQTLLASSETTGKKYDGRLQAVFCVLPSRCGSSSENVWLSRGCGIYCP

SEQ ID NO: 788831 - protein, 155 aa, Homo sapiens; identical to SEQ ID NO: 788829

SEQ ID NO: 788832 - protein, 104 aa, Homo sapiens
MPLGGRASLTPQKLWLGTAKPGSLTQALNSPLTWEHAWTGVPGGTPDCLTDTFRVKRPHLRRSASNGHVPGTPVYREKEDMYDEIIELKKRWGFTVLARLVSNS

SEQ ID NO: 788833 - protein, 269 aa, Homo sapiens
MLRCADTQVTILGRLHSQVPRNRRQGTQGHAGAARRPGGGRVVRKTWARAFIMRRRGRGEAQELPAPTPSSRHCEQDWPPDSSEEGLPRPRSPCSDGRRDAAARVLQAQWKVYKHKKKKAVLDEAAVVLQAAFRGHLTRTKLLASKAHGSEPPSVPGLPDQSSPVPRVPSPIAQATGSPVQEEAIVIIQSALRAHLARARHSATGKRTTTAASTRRRSASATHGDASSPPFLAALPGNFIHLDSGTRAAGLLRSQPKEWPPPRKPGCCR

SEQ ID NO: 788834 - protein, 1112 aa, Homo sapiens
RSAAWLPWQRGRGPAPGKAPRLRAARAARGFPDPDARASNPEGRPGSAATMFLGTGEPALDTKAKRKAFHKPPPTSPKSPYLSKPRKVASWRSLRTAGSMPLGGRASLTPQKLWLGTAKPGSLTQALNSPLTWEHAWTGVPGGTPDCLTDTFRVKRPHLRRSASNGHVPGTPVYREKEDMYDEIIELKKSLHVQKSDVDLMRTKLRRLEEENSRKDRQIEQLLDPSRGTDFVRTLAEKRPDASWVINGLKQRILKLEQQCKEKDGTISKLQTDMKTTNLEEMRIAMETYYEEVHRLQTLLASSETTGKKPLGEKKTGAKRQKKMGSALLSLSRSVQELTEENQSLKEDLDRVLSTSPTISKTQGYVEWSKPRLLRRIVELEKKLSVMESSKSHAAEPVRSHPPACLASSSALHRQPRGDRNKDHERLRGAVRDLKEERTALQEQLLQRDLEVKQLLQAKADLEKELECAREGEEERREREEVLREEIQTLTSKLQELQEMKKEEKEDCPEVPHKAQELPAPTPSSRHCEQDWPPDSSEEGLPRPRSPCSDGRRDAAARVLQAQWKVYKHKKKKAVLDEAAVVLQAAFRGHLTRTKLLASKAHGSEPPSVPGLPDQSSPVPRVPSPIAQATGSPVQEEAIVIIQSALRAHLARARHSATGKRTTTAASTRRRSASATHGDASSPPFLAALPDPSPSGPQAVAPLPGDDVNSDDSDDIVIAPSLPMKNFQFRSPSLSPRCDGSAAEDIGTTTGKIIYRVEEKNDDTYLTPQHLRRVSLCFCLWKETQMPLLYSLGRASGSHPPHLQLQLGWWIFSANRHICRELAYAREPCSDTFSDSTLPPAHDLDREELLSATSADTMPPLPGDTLNNQDLLHLSPAGQADTPRCALGRCETGFPHPHSKTGLSQASEELKTPRSPNDLTPCPTRSHRPFPSPLLSPGALPSRAALPRKEFGWILSLWRPRFFKIPNYNHKSSITLASENSRVMSVPKLVAGALACVGPPGEEEERRVRRQARRSKGQHRLVVGRVASGVWDSPRHPMCAASALPSSMAGLGWAGLGWACGACGASSCRGLGGSSWGKRTVSSAHLLLVCEISPCWGVKRKSLRPGQAFRGI

SEQ ID NO: 788835 - protein, 36 aa, Homo sapiens
MSLSTLGSLLGPQQAGPPDPSCISLVTGNGEGLCRG

SEQ ID NO: 788836 - protein, 67 aa, Homo sapiens
ATVTEEWACETEFGPLKHDGIWEKASCFCRWAMEARWLRLPPVLDVNEEASGPNCSTATLQPEKDSP

SEQ ID NO: 788837 - protein, 75 aa, Homo sapiens
AAVTLISHLKKLSLRNTQDHRPSEVALLESSYSCCTSPASLDSLADSSAGATQRTQLPLPWDKPAKSKAKIPSYS

SEQ ID NO: 788838 - protein, 127 aa, Homo sapiens
APWERGQRGITLQPARLSGDCCTPWARCDQQIQDMPVPQNDPQLAWGCISGLQQERSMCTPLPVAAQSTTLPSLSGRQVEINLKRYPTPYPEDLKNMVKSVQNLVGKPSHGVRVENSNPTANTEQTV

SEQ ID NO: 788839 - protein, 155 aa, Homo sapiens
PGWRNLGGESPSLPQGSLFHSGTASSSQNGHEEGATGDREDGPGVALEGPLQEVLELLRPTDSTQPQLRELEYQVLGFRDRLKVWPPRPGRWPCFADGMMTGSRGLWGHAAWADILASPLRDLGGPCLSGPWFPHLASGDNNSPHGAQEDFKSSQ

SEQ ID NO: 788840 - protein, 60 aa, Homo sapiens
VGNGAEDIRGTEPGYGISKGRQRQHLGKHPILVPRGGPLSDSWLPGGAREVFVEIMNADG

SEQ ID NO: 788841 - protein, 163 aa, Homo sapiens
GSPKPWQLPHGVEPADAQKARTEVREPPSRLQKMYGNAWMSRQKFAARAGPSWRTSASVVQKGHVGLEPPHRVPTGTLPSGAMRKRSPFSRPQNGRSTGSLHRAPGKATDTQCQSVKGARREAVHCNVCQLTPFYIQVIGYGYWFICPVIGYASHKMRKSGLP

SEQ ID NO: 788842 - protein, 118 aa, Homo sapiens
CRAPSDATSSRHPPDASFPAALNFLQRTRPSSVLSEDLLMQRAVAKHPALLPSQMSSSPLRPGSGVVLVASGVSCSVLLTHLLVLLLLPPLPGWARAASGQEPRLYSLMFPELTQCLA

SEQ ID NO: 788843 - protein, 265 aa, Homo sapiens
  misc_feature (256)..(256): Xaa can be any naturally occurring amino acid
RRRAGEDERRRRTESEVPERGQSAAARVCSKEQAFKHIAILTLSCQGTQAYEEVCYTKQCLVKTTRKKGKDRKKKLKYYRKPERSIRSFANDDRHVMVKHSTIYPSPEELEAVQNMVSTVECALKHVSDWLDETNKGTKTEGETEVKKDEAGENYSKDQGGRTLCGVMRIGLVAKGLLIKDDMDLELVLMCKDKPTETLLNTVKDNLPIQIQTTHRQRTLLQWNNVYMRHPIYHSDIPKQPTLTLKVILTSPLIRXELEKKDGEN

SEQ ID NO: 788844 - protein, 123 aa, Homo sapiens [sequence omitted]

SEQ ID NO: 788845 - protein, 123 aa, Homo sapiens
MRGLQEKAVVRAQALLYCVWTHRVLGGHPGSRLPRDSQAGYANARMFPWSPSPLSSQSQVSAGVQTASTRKPWVCVGEASKDTSLFQGCLGTSSPAPSETLMWCGLGCSAGSSSGSSSRQRPQ

SEQ ID NO: 788846 - protein, 126 aa, Homo sapiens [sequence omitted]

SEQ ID NO: 788847 - protein, 532 aa, Homo sapiens
  misc_feature (28)..(29): Xaa can be any naturally occurring amino acid
ARPGVRRARERAPSRRAGRSGQARGCVXXPPARPGPAMAPARGRLPPALWVVTAAAAAATCVSAARGEVNLLDTSTIHGDWGWLTYPAHGWDSINEVDESFQPIHTYQVCNVMSPNQNNWLRTSWVPRDGARRVYAEIKFTLRDCNSMPGVLGTCKETFNLYYLESDRDLGASTQESQFLKIDTIAADESFTGADLGVRRLKLNTEVRSVGPLSKRGFYLAFQDIGACLAILSLRIYYKKCPAMVRNLAAFSEAVTGADSSSLVEVRGQCVRHSEERDTPKMYCSAEGEWLVPIGKCVCSAGYEERRDACVACELGFYKSAPGDQLCARCPPHSHSAAPAAQACHCDLSYYRAALDPPSSACTRPPSAPVNLISSVNGTSVTLEWAPPLDPGGRSDITYNAVCRRCPWALSRCEACGSGTRFVPQQTSLVQASLLVANLLAHMNYSFWIEAVNGVSDLSPEPRRAAVVNITTNQAGRRRNSVPQRPGPPASPAPDPSRDQSSAGDVLWAFRQVPLWPCAPHQDPELEALHCL

SEQ ID NO: 788848 - protein, 366 aa, Homo sapiens
  misc_feature (28)..(29): Xaa can be any naturally occurring amino acid
  misc_feature (352)..(352): Xaa can be any naturally occurring amino acid
ARPGVRRARERAPSRRAGRSGQARGCVXXPPARPGPAMAPARGRLPPALWVVTAAAAAATCVSAARGEVNLLDTSTIHGDWGWLTYPAHGWDSINEVDESFQPIHTYQVCNVMSPNQNNWLRTSWVPRDGARRVYAEIKFTLRDCNSMPGVLGTCKETFNLYYLESDRDLGASTQESQFLKIDTIAADESFTGADLGVRRLKLNTEVRSVGPLSKRGFYLAFQDIGACLAILSLRIYYKKCPAMVRNLAAFSEAVTGADSSSLVEVRGQCVRHSEERDTPKMYCSAEGEWLVPIGKCVCSAGYEERRDACVACELGFYKSAPGDQLCARCPPHSHSAAPAAQACHCDLSYYXSLTASQLTGTSDSN

SEQ ID NO: 788849 - protein, 343 aa, Homo sapiens
LYWSGILGSAQYPGSGAAGSRFGFVAPVPGPGRSLRPPQPGAAAGGVGTLWTHPSGPRRRSASGPGSQSRRPRRPMESQCDYSMYFPAVPLPPRAELAGDPGRYRALPRRNHLYLGETVRFLLVLRCRGGAGSGTGGGPGLGSRGAWAELATALAALASVSAGGGMPGGGGAGDQDSEPPGGGDPGGGGLFRGCSPLLTHGPGPATSGGATTLPVEEPIVSTDEVIFPLTVSLDRLPPGTPKAKIVVTVWKREIEAPEVRDQGYLRLLQTRSPGETFRGEQSAFKAQVSTLLTLLPPPVLRCRQFTVAGKHLTVLKVLNSSSQEEISIWDIRILPNFNASYLP

SEQ ID NO: 788850 - protein, 388 aa, Homo sapiens
RSGGGLQLAGWSRERYGATLGVPQRSRSLRPPQPGAAAGGVGTLWTHPSGPRRRSASGPGSQSRRPRRPMESQCDYSMYFPAVPLPPRAELAGDPGRYRALPRRNHLYLGETVRFLLVLRCRGGAGSGTGGGPGLGSRGAWAELATALAALASVSAGGGMPGGGGAGDQDSEPPGGGDPGGGGLFRGCSPLLTHGPGPATSGGATTVRSFGGPGTGRRGGYAGGLRQEADELTGLKGKRLQAASDLLLTSTPLFQTQLPVEEPIVSTDEVIFPLTVSLDRLPPGTPKAKIVVTVWKREIEAPEVRDQGYLRLLQTRSPGETFRGEQSAFKAQVSTLLTLLPPPVLRCRQFTVAGKHLTVLKVLNSSSQEEISIWDIRILPNFNASYLP

SEQ ID NO: 788851 - protein, 394 aa, Homo sapiens
LYWSGILGSAQYPGSGAAGSRFGFVAPVPGPGRSLRPPQPGAAAGGVGTLWTHPSGPRRRSASGPGSQSRRPRRPMESQCDYSMYFPAVPLPPRAELAGDPGRYRALPRRNHLYLGETVRFLLVLRCRGGAGSGTGGGPGLGSRGAWAELATALAALASVSAGGGMPGGGGAGDQDSEPPGGGDPGGGGLFRGCSPLLTHGPGPATSGGATTVRSFGGPGTGRRGRISWGPEAGGKMNCRTKRERLQAASDLLLTSTPLFQTQLPVEEPIVSTDEVIFPLTVSLDRLPPGTPKAKIVVTVWKREIEAPEVRDQGYLRLLQTRSPGETFRGEQSAFKAQVSTLLTLLPPPVLRCRQFTVAGKHLTVLKVLNSSSQEEISIWDIRILPNFNASYLP

SEQ ID NO: 788852 - protein, 78 aa, Homo sapiens [sequence omitted]

SEQ ID NO: 788853 - protein, 122 aa, Homo sapiens
MSDLWPIHHFILLISRIPYETRGENTHSRSHNKIGRPPQGATTRPHASHECTKENLRANKHSGAAHPQSLHPLTRRTQTHTTLTRPPQAICQGNHMTPLHRASRHSAPPHPTTPDTHPSHHT

SEQ ID NO: 788854 - protein, 116 aa, Homo sapiens [sequence omitted]

SEQ ID NO: 788855 - protein, 136 aa, Homo sapiens
TFPKFRSLRPRLSGTEDSGTIFGSVGPHQAPLDFRLWCHREAVTGLRARELWGAHLLLFLGVLHYLLFTPEISCLINVVQFYGCLMWEGESRTEDSVRAGDQSPPNIPAEAPFHLSSARTGFYCWQPGAPPEPRDK

SEQ ID NO: 788856 - protein, 110 aa, Homo sapiens
RNRGNEINKHGLPHITADLPLSLLSAQISKTEGNTEPLFGTISWKYQPPRLIISDHYIMEGAGICLHGNNYIYWRVTSLSCACCFRQHYHMWLIGCLIHPHGVTHSIVTD

SEQ ID NO: 788857 - protein, 50 aa, Homo sapiens
PLKETRDNMKRRADETKQSQDYQANIRHSCLLLIPYESSHPPIEVGKQEF

SEQ ID NO: 788858 - protein, 105 aa, Homo sapiens
IFQQGFDLKLLDKTEPDRAEGLQGNPPPPQRKYLLKKRIEVQKFQKPWWCCFGRGIETQREAGELPRPQSLSGSSLLISLRMYLGGAYYAPGTVQRPRQTPSVPL

SEQ ID NO: 788859 - protein, 97 aa, Homo sapiens
MFVMFVPYGTKEAFGRLSIVLRSEDETALGGLLSSGGIQLIVVECSSSHRFIVRPYTLCGARARSVFTLDSLGILSWFLIHSFCLLVGKSGSCYHPV

SEQ ID NO: 788860 - protein, 77 aa, Homo sapiens
LSHQVTPGEPTPPPHPFNSSKHQVTVPGANSSIASCSTITSALNLDPSVISRGWGRQQRRKGGSSEDSTRGGEAAAG

SEQ ID NO: 788861 - protein, 146 aa, Homo sapiens
VSQTTFATIMSVKVACHKAILIHLIVFQDSQLNLLSLVLILLGSGVRLLLPFLSTTTKSQHKMKSRLLLNIVVRQSTSIFQLLASKDQSLLIRRNSFLILDLGLYIFYRIRGFNLEGDGLPRKGFHENLHFGGGSTETGADSGRGE

SEQ ID NO: 788862 - protein, 111 aa, Homo sapiens
LVHSGVLEPLVNLLTAPDVKIVLIILDVISCILQAAEKRSEKENLCLLIEELGGIDRIEALQLHENRQIGQSALNIIEKHFGEEEDESQTLLSQVIDQDYEFIDYECLAKK

SEQ ID NO: 788863 - protein, 96 aa, Homo sapiens
MDVISIDKTGENVRLIYDTKGHSAVHHITSEEAKYKLCKVRKIFVGTKGIPHLVIHDVHTIHYPDPLIKVSNRFRLVWRLARLLILSSSTLVTCVW

SEQ ID NO: 788864 - protein, 96 aa, Homo sapiens; identical to SEQ ID NO: 788863

SEQ ID NO: 788865 - protein, 663 aa, Homo sapiens
MFLKAGRGNKVPPVRVYGPDCVVLMEPPLSKRNPPALRLADLATAQVQPLQNMTGFPALAGPPAHSQLRAAVAHLRLRDLGADPGVATTPLGPEHMAQASTLGLSPPSQAFPAHPEAPAAAARAAALVAHPGAGSYPCGGGSSGAQPSAPPPPAPPLPPTPSPPPPPPPPPPPALSGYTTTNSGGGGSSGKGHSRDFVLRRDLSATAPAAAMHGAPLGGEQRSGTGSPQHPAPPPHSAGMFISASGTYAGPDGSGGPALFPALHDTPGAPGGHPHPLNGQMRLGLAAAAAAAAAELYGRAEPPFAPRSGDAHYGAVAAAAAAALHGYGAVNLNLNLAAAAAAAAAGPGPHLQHHAPPPAPPPPPAPAQHPHQHHPHLPGAAGAFLRYMRQPIKQELICKWIDPDELAGLPPPPPPPPPPPPPPPAGGAKPCSKTFGTMHELVNHVTVEHVGGPEQSSHVCFWEDCPREGKPFKAKYKLINHIRVHTGEKPFPCPFPGCGKVFARSENLKIHKRTHTGEKPFKCEFDGCDRKFANSSDRKKHSHVHTSDKPYYCKIRGCDKSYTHPSSLRKHMKIHCKSPPPSPGPLGYSSVGTPVGAPLSPVLDPARSHSSTLSPQVTNLNEWYVCQASGAPSHLHTPSSNGTTSETEDEEIYGNPEVVRTIH

SEQ ID NO: 788866 - protein, 349 aa, Homo sapiens
MNRKARRCLGHLFLSLGMVYLRIGGFSSVVALGASIICNKIPGLAPRQRAICQSRPDAIIVIGEGSQMGLDECQFQFRNGRWNCSALGERTVFGKELKVGSREAAFTYAIIAAGVAHAITAACTQGNLSDCGCDKEKQGQYHRDEGWKWGGCSADIRYGIGFAKVFVDAREIKQNARTLMNLHNNEAGRKILEENMKLECKCHGVSGSCTTKTCWTTLPQFRELGYVLKDKYNEAVHVEPVRASRNKRPTFLKIKKPLSYRKPMDTDLVYIEKSPNYCEEDPVTGSVGTQGRACNKTAPQASGCDLMCCGRGYNTHQYARVWQCNCKFHWCCYVKCNTCSERTEMYTCK

SEQ ID NO: 788867 - protein, 349 aa, Homo sapiens; identical to SEQ ID NO: 788866

SEQ ID NO: 788868 - protein, 282 aa, Homo sapiens
MGLDECQFQFRNGRWNCSALGERTVFGKELKVGSREAAFTYAIIAAGVAHAITAACTQGNLSDCGCDKEKQGQYHRDEGWKWGGCSADIRYGIGFAKVFVDAREIKQNARTLMNLHNNEAGRKILEENMKLECKCHGVSGSCTTKTCWTTLPQFRELGYVLKDKYNEAVHVEPVRASRNKRPTFLKIKKPLSYRKPMDTDLVYIEKSPNYCEEDPVTGSVGTQGRACNKTAPQASGCDLMCCGRGYNTHQYARVWQCNCKFHWCCYVKCNTCSERTEMYTCK

SEQ ID NO: 788869 - protein, 39 aa, Homo sapiens
MSGCYSTAPSPVNPAREGPALVPTGDAASKQGDQGVPKM

SEQ ID NO: 788870 - protein, 659 aa, Homo sapiens
MAAAVLMDRVQSCVTFEDVFVYFSREEWELLEEAQRFLYRDVMLENFALVATLGFWCEAEHEAPSEQSVSVEGVSQVRTAESGLFQKAHPCEMCDPLLKDILHLAEHQGSHLTQKLCTRGLCRRRFSFSANFYQHQKQHNGENCFRGDDGGASFVKSCTVHMLGRSFTCREEGMDLPDSSGLFQHQTTYNRVSPCRRTECMESFPHSSSLRQHQGDYDGQMLFSCGDEGKAFLDTFTLLDSQMTHAEVRPFRCLPCGNVFKEKSALINHRKIHSGEISHVCKECGKAFIHLHHLKMHQKFHTGKRHYTCSECGKAFSRKDTLAQHQRVHTGERPYDCSECGKAYSRSSHLVQHQRIHTGERPYKCNECGKAFSRKDTLVQHQRFHTGERPYECSECGKFFSQSSHLIEHWRIHTGARPYECIECGKFFSHNSSLIKHRRVHTGASSYVCSKCGKAFGCKDTLVQHQIIHTGARPYECSECGKAFSRKDTLVQHQKIHTGERPYECGECGKFFSHSSNLIVHQRIHTGAKPYECNECGKCFSHNSSLILHQRVHTGARPYVCSECGKAYISSSHLVQHKKVHTGARPYECSECGKFFSRNSGLILHQRVHTGEKPYVCSECGKAYSRSSHLVRHQKAHTGERAHECNSFGGPLAASLKLV

SEQ ID NO: 788871 - protein, 69 aa, Homo sapiens
KSKELRYKELGGPDLSQGASWLQPPCTWQERPRRHSQLLLEVVTLKPVPTVDVNGPESPPRHPIPPGLC

SEQ ID NO: 788872 - protein, 212 aa, Homo sapiens
MEISMPPPQIYVEKTLAIIKPDIVDKEEEIQDIILRSGFTIVQRRKLRLSPEQCSNFYVEKYGKMFFPNLTAYMSSGPLVAMILARHKAISYWLELLGPNNSLVAKETHPDSLRAIYGTDDLRNALHGSNDFAAAEREIRFMFPEVIVEPIPIGQAAKDYLNLHIMPTLLEGLTELCKQKPADPLIWLADWLLKNNPNKPKLCHHPIVEEPY

SEQ ID NO: 788873 - protein, 148 aa, Homo sapiens
MEISMPPPQIYVEKTLAIIKPDIVDKEEEIQDIILRSGFTIVQRRKLRLSPEQCSNFYVEKYGKMFFPNLTAYMSSGPLVAMILARHKAISYWLELLGPNNSLVAKETHPDSLRAIYGTDDLRNALHGSNDFAAAEREIRFMFPEEKL

SEQ ID NO: 788874 - protein, 212 aa, Homo sapiens; identical to SEQ ID NO: 788872

SEQ ID NO: 788875 - protein, 194 aa, Homo sapiens
MEISMPPPQIYVEKTLAIIKPDIVDKEEEIQDIILRSGFTIVQRRKLRLSPEQCSNFYVEKYGMILARHKAISYWLELLGPNNSLVAKETHPDSLRAIYGTDDLRNALHGSNDFAAAEREIRFMFPEVIVEPIPIGQAAKDYLNLHIMPTLLEGLTELCKQKPADPLIWLADWLLKNNPNKPKLCHHPIVEEPY

SEQ ID NO: 788876 - protein, 50 aa, Homo sapiens
IVPSQEVLSVGDDILARCKGCVGVGQVKTRGEKCSGQRKEPLEGMGNPEL

SEQ ID NO: 788877 - protein, 107 aa, Homo sapiens
RQRGKGSPRLSNCMLSGVSLPFLSWDLWAHVHTYLSHLFFEMESRSVAQAGVQWHDLSSLQPPPPGFKRFSCISLPSSWDYRCAPPHPANFCIFSRDGVSPCCPGCS

SEQ ID NO: 788878 - protein, 107 aa, Homo sapiens
ERACCFCAHGCDVVCLKPWLRFHREAPTSHMRRTLDLWFALWKAGKPLWNPRELHAILFYFTDVPHLCFLQPPQQSSHSFPISFPCMAFGPFPHECSAYERGSGRDN

SEQ ID NO: 788879 - protein, 158 aa, Homo sapiens
MEYQLLDIKGNEQIEKYSWREACDTGSSRMDRKHGKYILNVEHSENQPVKEYCRNDWSMWKVFLACLLACVIMTAIGVLIICLVNNKGSANSSIVIQLSTNDGECVTVKPGTPSPACPPTMTTTSTVPASTATESTTSTATAATTSTEPITVAPTDHL

SEQ ID NO: 788880 - protein, 165 aa, Homo sapiens
SSSSSSSSSSSSSSSSSSSSSSSQAKKPDPPLPPAFGAPPPPLFDAAFPTPQWGIVDLSGHQHLFGNLKRGGPASGPGVTPGLGAPAGAPGPLPAPSQTPPGPPAAAACDPTKDDKGYFRRLKYLMERRFPCGVCQKSFKQSSHLVQHMLVHSGERPYECGVCGR

SEQ ID NO: 788881 - protein, 83 aa, Homo sapiens
RTVLLCCVAPSVAPQGGVLTAALPTDAPSSFRNQAGPTTIPLSNQLPTLTGVCLCAAFRRRLSELRFPRRSMGTGLPVPTHWW

SEQ ID NO: 788882 - protein, 195 aa, Homo sapiens
MPPPGKVPRKENLWLQCEWGSCSFVCSTMEKFFEHVTQHLQQHLHGSGEEEEEEEEDDPLEEEFSCLWQECGFCSLDSSADLIRHVYFHCYHTKLKQWGLQALQSQADLGPCILDFQSRNVIPDIPDHFLCLWEHCENSFDNPEWFYRHVEAHSLCCEYEAVGKDNPVVLCGWKGCTCTFKDRSKLREHLRSHTQ

SEQ ID NO: 788883 - protein, 107 aa, Homo sapiens
MGRAGRALLSGREPRHSSELGPLNFKPSQAGEPGPWTDPGGQGPHLLDGCPGRPVSAGGLLRGDPWLLSGTGGSPLFHWCLGRNARFCHLLPTLEHVDWVLSSQYWM

SEQ ID NO: 788884 - protein, 142 aa, Homo sapiens
FKLPQADWLKKNNFGGAMVWAIDLDDFTGTFCNQGKFPLITTLKDALGLQSTSCKAPAQPIAPIAEANITCGVSHSRSSGGRSGRSSGGSPRGSGFCADRASGLYPDPTDKNASYSCVNGKTFTQHCQPGGVFDTFCSCCSW

SEQ ID NO: 788885 - protein, 103 aa, Homo sapiens
SDLGQPRKSPLTGTDKKYPLMKQRGFYSDILSPGTLDQLGEVCRGPRMSQNLLRQADLDKFTPRVGSFEVPEDFQERMEQQCIGSTTRLLAQTDFPLQAYEPK

SEQ ID NO: 788886 - protein, 123 aa, Homo sapiens
GGGWLGVKETGRGPRTQSCPASRAPGDTAGSTRGTAQTHLSPCLSPRPSFTWLGLGFFISNVRVNRTPQRTGVGQTGKCGCCIGKAGVDQGLGCMNLTTPLGLLFRGLEAKSHRGLGSRALSS

SEQ ID NO: 788887 - protein, 77 aa, Homo sapiens
TITVKWWRREETNMEILDSEDDLGKLYSVVGEAWASESGKLHGNTGVDTHFMALDKKYANLFSHLSNGDNYPCLVEL

SEQ ID NO: 788888 - protein, 45 aa, Homo sapiens
EPCGMSSAHVAAVPLSSAQGNASGQAGADTIRLTPLPGPQGQLSP

SEQ ID NO: 788889 - protein, 129 aa, Homo sapiens
  misc_feature (9)..(9): Xaa can be any naturally occurring amino acid
  misc_feature (120)..(120): Xaa can be any naturally occurring amino acid
DSRGSPVPXPTHVPPRGAPGHPVSILANMLRKSPGICLLLASKKATLRASGDGRELERGHTDFCNSASITSVTSASPLDSAQPLGSKIAVPFHRQAMRLGPCPAGHAEDHRPPGPWPCLXCGKMTLRKA

SEQ ID NO: 788890 - protein, 103 aa, Homo sapiens
GTHRRTIGGSMVWRATRGPFSGAKDIQMCSWFSLRLWRARGKEATEQTFFFFFFFFFFETEFCSCRPGWSAMMRSLLTATSASQVQAILLPQLGLQACTTTPG

SEQ ID NO: 788891 - protein, 526 aa, Homo sapiens
MLQEESDLSLIIAQIVQKLKGSNLYSQLERQAWASLQRPEIKLESLKEDIKEFFKISGWEKKLQNAVYSELSVFPLPSHPAAPPEHLKEPLVYMRKAQGSWEKRILKSLNSMCTELSIPLARKRPVGEQKELLNKWNEMGTDEPDLSLFRPVYAPKDFLEVLINLRNPNYENGDSLSFRTHLGLIQVPLKVKDIPELKECFVELGLNIGQLGIDDSTQVPPELFENEHVRIGQKVLAEQDSAAAQQYIRQGSPTALRAELWALILNISSQPEDVLYYEQLKTNVIQHDLLVDSLIYKDVKLTASNDDYYFVFEDYLYQVLLCFSRDTSVLSHFAFNSASPPKSYIRGKLGLEEYAVFYPPNGVIPFHGFSMYVAPLCFLYHEPSKLYQIFREMYVRFFFRLHSISSHPSGIVSLCLLFETLLQTYLPQLFYHLREIGAQPLRISFKWMVRAFSGYLATDQLLLLWDRILGYNSLEILAVLAAAVFAFRAVNLMEVTSLAAAEAVLADLSTLKVMPLLQIFLFATVT

SEQ ID NO: 788892 - protein, 495 aa, Homo sapiens
MKASLQRPEIKLESLKEDIKEFFKISGWEKKLQNAVYSELSVFPLPSHPAAPPEHLKEPLVYMRKAQGSWEKRILKSLNSMCTELSIPLARKRPVGEQKELLNKWNEMGTDEPDLSLFRPVYAPKDFLEVLINLRNPNYENGDSLSFRTHLGLIQVPLKVKDIPELKECFVELGLNIGQLGIDDSTQVPPELFENEHVRIGQKVLAEQDSAAAQQYIRQGSPTALRAELWALILNISSQPEDVLYYEQLKTNVIQHDLLVDSLIYKDVKLTASNDDYYFVFEDYLYQVLLCFSRDTSVLSHFAFNSASPPKSYIRGKLGLEEYAVFYPPNGVIPFHGFSMYVAPLCFLYHEPSKLYQIFREMYVRFFFRLHSISSHPSGIVSLCLLFETLLQTYLPQLFYHLREIGAQPLRISFKWMVRAFSGYLATDQLLLLWDRILGYNSLEILAVLAAAVFAFRAVNLMEVTSLAAAEAVLADLSTLKVMPLLQIFLFATVT

SEQ ID NO: 788893 - protein, 246 aa, Homo sapiens
  misc_feature (217)..(217): Xaa can be any naturally occurring amino acid
  misc_feature (228)..(228): Xaa can be any naturally occurring amino acid
  misc_feature (235)..(235): Xaa can be any naturally occurring amino acid
  misc_feature (239)..(239): Xaa can be any naturally occurring amino acid
MLQEESDLSLIIAQIVQKLKGSNLYSQLERQAWASLQRPEIKLESLKEDIKEFFKISGWEKKLQNAVYSELSVFPLPSHPAAPPEHLKEPLVYMRKAQGSWEKRILKSLNSMCTELSIPLARKRPVGEQKELLNKWNEMGTDEPDLSLFRPVYAPKDFLEVLINLRNPNYENGDSLSFRTHLGLIQVPLKVKDIPELKRMPLWELGLKIIRDKLGYXNEFLHKVALLXNFFEKLXNVTXFGAKKRF

SEQ ID NO: 788894 - protein, 461 aa, Homo sapiens
MLQEESDLSLIIAQIVQKLKGSNLYSQLERQAWGSWEKRILKSLNSMCTELSIPLARKRPVGEQKELLNKWNEMGTDEPDLSLFRPVYAPKDFLEVLINLRNPNYENGDSLSFRTHLGLIQVPLKVKDIPELKECFVELGLNIGQLGIDDSTQVPPELFENEHVRIGQKVLAEQDSAAAQQYIRQGSPTALRAELWALILNISSQPEDVLYYEQLKTNVIQHDLLVDSLIYKDVKLTASNDDYYFVFEDYLYQVLLCFSRDTSVLSHFAFNSASPPKSYIRGKLGLEEYAVFYPPNGVIPFHGFSMYVAPLCFLYHEPSKLYQIFREMYVRFFFRLHSISSHPSGIVSLCLLFETLLQTYLPQLFYHLREIGAQPLRISFKWMVRAFSGYLATDQLLLLWDRILGYNSLEILAVLAAAVFAFRAVNLMEVTSLAAAEAVLADLSTLKVMPLLQIFLFATVT

SEQ ID NO: 788895 - protein, 381 aa, Homo sapiens
MVPAAMYGSPKDFLEVLINLRNPNYENGDSLSFRTHLGLIQVPLKVKDIPELKECFVELGLNIGQLGIDDSTQVPPELFENEHVRIGQKVLAEQDSAAAQQYIRQGSPTALRAELWALILNISSQPEDVLYYEQLKTNVIQHDLLVDSLIYKDVKLTASNDDYYFVFEDYLYQVLLCFSRDTSVLSHFAFNSASPPKSYIRGKLGLEEYAVFYPPNGVIPFHGFSMYVAPLCFLYHEPSKLYQIFREMYVRFFFRLHSISSHPSGIVSLCLLFETLLQTYLPQLFYHLREIGAQPLRISFKWMVRAFSGYLATDQLLLLWDRILGYNSLEILAVLAAAVFAFRAVNLMEVTSLAAAEAVLADLSTLKVMPLLQIFLFATVT

SEQ ID NO: 788896 - protein, 433 aa, Homo sapiens [sequence omitted]

SEQ ID NO: 788897 - protein, 85 aa, Homo sapiens
ELSEEERSLGSCLCPPPLFLNLGEAESPCQLQGGKETPSLEMDRGFREAAWGRPAGSGPGVGTQAPCSYTSEQSRVPSSTIGIIA

SEQ ID NO: 788898 - protein, 317 aa, Homo sapiens
RVGSGEFGVEMAALAPLPPLPAQFKSIQHHLRTAQEHDKRDPVVAYYCRLYAMQTGMKIDSKTPECRKFLSKLMDQLEALKKQLGDNEAITQEIVGCAHLENYALKMFLYADNEDRAGRFHKNMIKSFYTASLLIDVITVFGELTDENVKHRKYARWKATYIHNCLKNGETPQAGPVGIEEDNDIEENEDAGAASLPTQPTQPSSSSTYDPSNMPSGNYTGIQIPPGAHAPANTPAEVPHSTGVASNTIQPTPQTIPAIDPALFNTISQGDVRLTPEDFARAQKYCKYAGSALQYEDVSTAVQNLQKALKLLTTGRE

SEQ ID NO: 788899 - protein, 128 aa, Homo sapiens
  misc_feature (124)..(124): Xaa can be any naturally occurring amino acid
RVGSGEFGVEMAALAPLPPLPAQFKSIQHHLRTAQEHDKRDPVVAYYCRLYAMQTGMKIDSKTPECRKFLSKLMDQLEALKKQLGDNEAITQEIVGCAHLENYALKMFLYADNEDRAGRFHKNXSSPL

SEQ ID NO: 788900 - protein, 114 aa, Homo sapiens
MAVRGSIEQETMRPKFKSQSFLTPKSSFFPVILLKCRFQMKTDLILNITYKKKGTTGYTQSMVPASASGEGLRKLTIILEGEEEASASHGKRGSKREGDSAAHFKKKPYLTRQN

SEQ ID NO: 788901 - protein, 501 aa, Homo sapiens
MNCRSERERLQAASDLLLTSSPLSQPQLPVEEPIVSTDEVIFPLTVSLDRLPPGTPKAKIVVTVWKREIEAPEVRDQGYLRLLQTRSPGETFRGEQSAFKAQVSTLLTLLPPPVLRCRQFTVAGKHLTVLKVLNSSSQEEISIWDIRILPNFNASYLPVMPDGSVLLVDNVCHQSGEVSMGSFCRLPGTSGCFPCPLNALEEHNFLFQLRGGEQPPPGAKEGLEVPLIAVVQWSTPKLPFTQSIYTHYRLPSVRLDRPCFVMTASCKSPVRTYERFTVTYTLLNNLQDFLAVRLVWTPEHAQAEGFENQMRLCWRRPCGNEERCSVCWSLFLPPGKQLCEEERRAMQAALDSVVCHTPLNNLGFSRKGSALTFSVAFQALRTGLFELSQHMKLKLQFTASVSHPPPEARPLSRKSSPSSPAVRDLVERHQASLGRSQSFSHQQPSRSHLMRSGSVMERRAITPPVASPVGRPLYLPPDKAVLSLDKIAKRECKVLVVEPVK

SEQ ID NO: 788902 - protein, 514 aa, Homo sapiens
PVIRLSTPDPALPGLGSGSLPRCRDRAGLSGRPSRAQHPELPVEEPIVSTDEVIFPLTVSLDRLPPGTPKAKIVVTVWKREIEAPEVRDQGYLRLLQTRSPGETFRGEQSAFKAQVSTLLTLLPPPVLRCRQFTVAGKHLTVLKVLNSSSQEEISIWDIRILPNFNASYLPVMPDGSVLLVDNVCHQSGEVSMGSFCRLPGTSGCFPCPLNALEEHNFLFQLRGGEQPPPGAKEGLEVPLIAVVQWSTPKLPFTQSIYTHYRLPSVRLDRPCFVMTASCKSPVRTYERFTVTYTLLNNLQDFLAVRLVWPQSMHRLSGFENQMRLCWRRPCGNEERCSVCWSLFLPPGKQLCEEERRAMQAALDSVVCHTPLNNLGFSRKGSALTFSVAFQALRTGLFELSQHMKLKLQFTASVSHPPPEARPLSRKSSPSSPAVRDLVERHQASLGRSQSFSHQQPSRSHLMRSGSVMERRAITPPVASPVGRPLYLPPDKAVLSLDKIAKRECKVLVVEPVK

SEQ ID NO: 788903 - protein, 541 aa, Homo sapiens
PVIRLSTPDPALPGLGSGSLPRCRDRAGLSGRPSRAQHPELPVEEPIVSTDEVIFPLTVSLDRLPPGTPKAKIVVTVWKREIEAPEVRDQGYLRLLQTRSPGETFRGEQSAFKAQVSTLLTLLPPPVLRCRQFTVAGKHLTVLKGKQGCRLQPPGATRELIGMQFLWAGWWVLNSSSQEEISIWDIRILPNFNASYLPVMPDGSVLLVDNVCHQSGEVSMGSFCRLPGTSGCFPCPLNALEEHNFLFQLRGGEQPPPGAKEGLEVPLIAVVQWSTPKLPFTQSIYTHYRLPSVRLDRPCFVMTASCKSPVRTYERFTVTYTLLNNLQDFLAVRLVWPQSMHRLSGFENQMRLCWRRPCGNEERCSVCWSLFLPPGKQLCEEERRAMQAALDSVVCHTPLNNLGFSRKGSALTFSVAFQALRTGLFELSQHMKLKLQFTASVSHPPPEARPLSRKSSPSSPAVRDLVERHQASLGRSQSFSHQQPSRSHLMRSGSVMERRAITPPVASPVGRPLYLPPDKAVLSLDKIAKRECKVLVVEPVK

SEQ ID NO: 788904 - protein, 192 aa, Homo sapiens
MRLCWRRPCGNEERCSVCWSLFLPPGKQLCEEERRAMQAALDSVVCHTPLNNLGFSRKGSALTFSVAFQALRTGLFELSQHMKLKLQFTASVSHPPPEARPLSRKSSPSSPAVRDLVERHQASLGRSQSFSHQQPSRSHLMRSGSVMERRAITPPVASPVGRPLYLPPDKAVLSLDKIAKRECKVLVVEPVK

SEQ ID NO: 788905 - protein, 309 aa, Homo sapiens
MNCRSERERLQAASDLLLTSSPLSQPQLPVEEPIVSTDEVIFPLTVSLDRLPPGTPKAKIVVTVWKREIEAPEVRDQGYLRLLQTRSPGETFRGEQSAFKAQVSTLLTLLPPPVLRCRQFTVAGKHLTVLKVLNSSSQEEISIWDIRILPNFNASYLPVMPDGSVLLVDNVCHQSGEVSMGSFCRLPGTSGCFPCPLNALEEHNFLFQLRGGEQPPPGAKEGLEVPLIAVVQWSTPKLPFTQSIYTHYRLPSVRLDRPCFVMTASCKSPVRTYERFTVTYTLLNNLQDFLAVRLVWTPEHAQAGRSAAR

SEQ ID NO: 788906 - protein, 457 aa, Homo sapiens
HGPGPATSGGATTLPVEEPIVSTDEVIFPLTVSLDRLPPGTPKAKIVVTVWKREIEAPEVRDQGYLRLLQTRSPGETFRGEQSAFKAQVSTLLTLLPPPVLRCRQFTVAGKHLTVLKVLNSSSQEEISIWDIRILPNFNASYLPVMPDGSVLLVDNVCHQSGEVSMGSFCRLPGTSGCFPCPLNALEEHNFLFQLRGGEQPPPGAKEGLEVPLIAVVQWSTPKLPFTQSIYTHYRLPSVRLDRPCFVMTASCKSPVRTYERFTVTYTLLNNLQDFLAVRLVWTPEHAQAAGKQLCEEERRAMQAALDSVVCHTPLNNLGFSRKGSALTFSVAFQALRTGLFELSQHMKLKLQFTASVSHPPPEARPLSRKSSPSSPAVRDLVERHQASLGRSQSFSHQQPSRSHLMRSGSVMERRAITPPVASPVGRPLYLPPDKAVLSLDKIAKRECKVLVVEPVK

SEQ ID NO: 788907 - protein, 487 aa, Homo sapiens
HGPGPATSGGATTLPVEEPIVSTDEVIFPLTVSLDRLPPGTPKAKIVVTVWKREIEAPEVRDQGYLRLLQTRSPGETFRGEQSAFKAQVSTLLTLLPPPVLRCRQFTVAGKHLTVLKVLNSSSQEEISIWDIRILPNFNASYLPVMPDGSVLLVDNVCHQSGEVSMGSFCRLPGTSGCFPCPLNALEEHNFLFQLRGGEQPPPGAKEGLEVPLIAVVQWSTPKLPFTQSIYTHYRLPSVRLDRPCFVMTASCKSPVRTYERFTVTYTLLNNLQDFLAVRLVWTPEHAQAEGFENQMRLCWRRPCGNEERCSVCWSLFLPPGKQLCEEERRAMQAALDSVVCHTPLNNLGFSRKGSALTFSVAFQALRTGLFELSQHMKLKLQFTASVSHPPPEARPLSRKSSPSSPAVRDLVERHQASLGRSQSFSHQQPSRSHLMRSGSVMERRAITPPVASPVGRPLYLPPDKAVLSLDKIAKRECKVLVVEPVK

SEQ ID NO: 788908 - protein, 548 aa, Homo sapiens
PVIRLSTPDPALPGLGSGSLPRCRDRAGLSGRPSRAQHPELPVEEPIVSTDEVIFPLTVSLDRLPPGTPKAKIVVTVWKREIEAPEVRDQGYLRLLQTRSPGETFRGEQSAFKAQVSTLLTLLPPPVLRCRQFTVAGKHLTVLKVLNSSSQEEISIWDIRILPNFNASYLPVMPDGSVLLVDNVWGGPGRGEAVKWWGWLQGLSSGMGRPCLVLFSELSHQSGEVSMGSFCRLPGTSGCFPCPLNALEEHNFLFQLRGGEQPPPGAKEGLEVPLIAVVQWSTPKLPFTQSIYTHYRLPSVRLDRPCFVMTASCKSPVRTYERFTVTYTLLNNLQDFLAVRLVWPQSMHRLSGFENQMRLCWRRPCGNEERCSVCWSLFLPPGKQLCEEERRAMQAALDSVVCHTPLNNLGFSRKGSALTFSVAFQALRTGLFELSQHMKLKLQFTASVSHPPPEARPLSRKSSPSSPAVRDLVERHQASLGRSQSFSHQQPSRSHLMRSGSVMERRAITPPVASPVGRPLYLPPDKAVLSLDKIAKRECKVLVVEPVK

SEQ ID NO: 788909 - protein, 309 aa, Homo sapiens; identical to SEQ ID NO: 788905

SEQ ID NO: 788910 - protein, 70 aa, Homo sapiens
AHKYFVHVLNTRTTNTISLRHRTSRTKLRGSRQVFDCLGFMPQAKDIPAESSDIDHMTPLHSAAYILTLP

SEQ ID NO: 788911 - protein, 114 aa, Homo sapiens
GDAGQSLPKVPSLSFLICNTGWYVTTLSGYCDSPIHEAVVGPGSTLGTFQMASEIWQRPLLAEAKCGSQEPHRSGSQTSQDAIPALPNSQPDLSQAFPFPGPPPSLLENGHSGP

SEQ ID NO: 788912 - protein, 114 aa, Homo sapiens
IPPRPRRPTRVPKGRCERRGRRPRRVLPSRTCRRPNLGTVGRRRQGPLPGRRRSRHLHGERYLLLRAHHVPQRGVEKRGSEKRRGPPGRAARRARPGHAGLPPTRPLRRRRERP

SEQ ID NO: 788913 - protein, 143 aa, Homo sapiens
KSKAGQPPTQERHRARGASPTQGSGAGKSEVTGDQSRPLVYWSSHGKVARLFLTWVSTPISPHWASPPGLGFQPPFTGTLEPVAALQQPGTELPLGGWCFHLFCLAALTFAVSRLWRVHGTEAWSEPQAQYPSHQKVVRRFSM

SEQ ID NO: 788914 - protein, 170 aa, Homo sapiens
MLGGVIRESYLKGHDQLVPVTLLAIAVILAFVMGAVFSGITVYCVCDHRRKDVAVVQRKEKELTHSRRGSMSSVTKLSGLFGDTQSKDPKPEAILTPLMHNGKLATPGNTAKMLIKADQHHLDLTALPSPESTPTLQQKRKPSRGSREWERNQNLINACTEGHAPHGGPL

SEQ ID NO: 788915 - protein, 69 aa, Homo sapiens
EFDKIQHHFMISKTFNKLGIEGNFLNLMKGICEKSTANIMLSGEILDSFLLSSGTRQQFLLLPHLVTLY

SEQ ID NO: 788916 - protein, 121 aa, Homo sapiens
RLGMARLWSLLIQQASLACILRVPKTEQKKGFLRPKPRTDPESGFQSWFTSYMALGKKPLHASDSSFVKRRLSELTCVERAQSCAKHLISAIRMFVTISELIRKMIWSMFLIVLKCTGLVI

SEQ ID NO: 788917 - protein, 97 aa, Homo sapiens
REKLAVARLQREVAQRTSEGAMHEKLIHEPGRGETLTVFKAEKRLQEVTRESLNATEFRCVLQQQFSRMEETVRNLLQSQGSPEQKKEETVNIMVYQ

SEQ ID NO: 788918 - protein, 106 aa, Homo sapiens
NVIQDVINIKLDCIILHAKFSKSSFVSHLQHISLKLATSLPSRRKTVTRQGWQGRGGGRQGPSRSAHPALWSQQVSSSWQEACPRLAGDSVRCSLWTGKGVWKGHT

SEQ ID NO: 788919 - protein, 113 aa, Homo sapiens
RALYAFPRPCRVWVVSVGAQDSQLKTAKSGIIMIIFIIIICIRQMTQPVSERARTGSQGIGFPSSPVRGQIWSSGKRRQGAGLAPCQASAPCQASAPCISASASAVLGEVGGT

SEQ ID NO: 788920 - protein, 92 aa, Homo sapiens
SHGMKVAELKEKIDRRFGKKLEDGFTFLKSGDAVIVDMVPGKPMCVESFLDYPPLGRFAVRDMRQIVAVGVIKAVDKKAAGAGKVIKFAQKA

SEQ ID NO: 788921 - protein, 69 aa, Homo sapiens
TWGRSGVCCLGDPACDLAVAGRSWRGGGCLPALMTGPAVTALSEGFSCVNLLDSREATRPSCVLCQGPE

SEQ ID NO: 788922 - protein, 117 aa, Homo sapiens
MRLCQPFPHHPCPATIIFTAHKAPLPHCHPHNRQAWLWTGSLLSLELPGCLQPPVQDQICNATAAPWPSCRPCTFRHLLASGPKSPTALIPLPSYPLSRAAVSICLPFLSYPLPPLQ

SEQ ID NO: 788923 - protein, 137 aa, Homo sapiens
LGGEQGYSSASVTRQSPVRSGMDNARTLGWEGLLLTGRERRRRYGDDSQGRALPTLMGLLGCASETGGQCHSHQCSYCQESLAVAGWPSCSTFFPCSSKHFLSQHQLYLLLLLTTHSSDSARFHRKRSYFGRLDGVR

SEQ ID NO: 788924 - protein, 105 aa, Homo sapiens
PPPRPPCTTLPRALSADHSELQGKARLRARDVVCVLICIESLCQRHTCLEAVSGLESNSRVFTLQVQGLLQLQAGQYASVFVDNGSGAVLTIQAGSSFSGLLLGT

SEQ ID NO: 788925 - protein, 140 aa, Homo sapiens
RVDKRTLVELHGFQAPAAQGAFLRGSGLSLASGRFTAPVSGIFQFSASLHVDHSELQGKARLRARDVVCVLICIESLCQRHTCLEAVSGLESNSRVFTLQVQGLLQLQAGQYASVFVDNGSGAVLTIQAGSSFSGLLLGT

SEQ ID NO: 788926 - protein, 67 aa, Homo sapiens
LLPCGAVFRCLEAVSGLESNSRVFTLQVQGLLQLQAGQYASVFVDNGSGAVLTIQAGSSFSGLLLGT

SEQ ID NO: 788927 - protein, 133 aa, Homo sapiens
NLMNVMFVGKPLAIVNPLLCIREFIQERNLMSVRNVAKPSARLPILLYIREFILEKGPMSVKNVEKPSGRVYILLIISEFIPESHQLFSPLPSHTTKSYRFNLVNASSIHLLFSSTCPIIIVQDATISSGFLQ

SEQ ID NO: 788928 - protein, 101 aa, Homo sapiens
SWRSFHINELVCLLDDLHQCCQGYMSVTSSFLEAKGEYGLNFFCHFSVRLLITNRNRHKEVMPPAAPLKQEVGKKRAIHSVLCLLPNSIWLRFVLPFFSCK

SEQ ID NO: 788929 - protein, 44 aa, Homo sapiens
QSFPRKLHDLALGYSEMLVKFWQPELFLLQAEIREIPFLLLAIL

SEQ ID NO: 788930 - protein, 191 aa, Homo sapiens
ASECISKDDSAFKEIPDLKTIIIKGTTPNNSLYIQNNSLSDFQNIPVQDSLGSSNNPLYLTSSLENMTVDNLNASKETEVGNVSLVEQSAKNHTFKNDNLQFSQCESPSLTELFQEHKENNISQCFTLSDLCNQSSASFTDLSLGSFPLSQLANRCQSSPGISELTGSLSSLAFHKASPTRDLENLSLSEL

SEQ ID NO: 788931 - protein, 311 aa, Homo sapiens
MDLKLKDCEFWYSLHGQVPGLLDWDMRNELFLPCTTDQCSLAEQILAKYRVGVMKPPEMPQKRRPSPDGDGPPCEPNLWMWVDPNILCPLGSQEAPKPSGKEDLTNISPFPQPPQKDEGSNCSEDKVVESLPSSSSEQSPLQKQGIHSPSDFELTEEEAEEPDDNSLQSPEMKCYQSQKLWQINNQEKSWQRPPLNCSHLIALALRNNPHCGLSVQEIYNFTRQHFPFFWTAPDGWKSTIHYNLCFLDSFEKVPDSLKDEDNARPRSCLWKLTKEGHRRFWEETRVLAFAQRERIQECMSQPELLTSLFDL

SEQ ID NO: 788932 - protein, 157 aa, Homo sapiens
MKQRLMISISISICVSISISISISICVSISISISISICVSISISISICVSISISISISICVSISISISICVSISISISISICVSISISISICVSISISISISICVSISISISISISICVSISISISICVSISISICVSISISISICVSISISICVSI

SEQ ID NO: 788933 - protein, 93 aa, Homo sapiens
YVQARLIHPKLRPRGNPWGLSFAPSLRGEVPWAEAGRFWKRAEGRLGMNPGIPGTGVWSTRGVGSRTPRYMGEERVWKIALGGVGQGVGARVP

SEQ ID NO: 788934 - protein, 119 aa, Homo sapiens
CVSTLGVLQCTDWQTAWLLSRALTVMHLCVFRAMVTASLSLPQASVFLQASALRLSCQAWLLSSPWLSGVKAHLVLLVWFTCVKSKTLHAYSHISQKTPACCFSERGSQCEPCGRSFLV

SEQ ID NO: 788935 - protein, 67 aa, Homo sapiens
NNKESQNCLENTLSVLIPSHSLFHSPASELFLYSFNRLQCFFFSLQTFFIANYPGCLLRLSFLDFYY

SEQ ID NO: 788936 - protein, 204 aa, Homo sapiens
MCRSPKVFPLSLCSTQPDGNVVIACLVQGFFPQEPLSVTWSESGQGVTARNFPPSQDASGDLYTTSSQLTLPATQCLAGKSVTCHVKHYTNPSQDDDCALPSSLNSTYPISLNSTYPTHVPLPTHVPLPTHVPLPKNKVCLLDVQPHTVKHLRTLEFKPYVIFIKPPSIERLRETRKNAKIISSRDDQGAAKPFTKERIFKKMD

SEQ ID NO: 788937 - protein, 133 aa, Homo sapiens
  misc_feature (83)..(84): Xaa can be any naturally occurring amino acid
  misc_feature (87)..(87): Xaa can be any naturally occurring amino acid
  misc_feature (89)..(89): Xaa can be any naturally occurring amino acid
  misc_feature (99)..(99): Xaa can be any naturally occurring amino acid
  misc_feature (106)..(106): Xaa can be any naturally occurring amino acid
  misc_feature (111)..(111): Xaa can be any naturally occurring amino acid
TQRRRRRERQQPGPRGTPARHGQQERQARARGHSLPPGHCERLCAPQRGVRTRGQRGHGRDKGQQTPGLGGCAQGPARGILPXXVPXTXPLPGRPEREXERAPSYXSGDAXAGERAFCLLRCATAAGAWGGPC

SEQ ID NO: 788938 - protein, 311 aa, Homo sapiens
MLFHGISGGHIQGIMEEMERRSKTEARLAKGAQLNGRDAGMPPLSPEKPALCAGCGGKISDRYYLLAVDKQWHLRCLKCCECKLALESELTCFAKDGSIYCKEDYYRRFSVQRCARCHLGISASEMVMRARDSVYHLSCFTCSTCNKTLTTGDHFGMKDSLVYCRAHFETLLQGEYPPQLSYTELAAKSGGLALPYFNGTGTVQKGRPRKRKSPALGVDIVNYNSGCNENEADHLDRDQQPYPPSQKTKRMRTSFKHHQLRTMKSYFAINHNPDAKDLKQLAQKTGLTKRVLQGEQILGHYSQTSRRLKIP

SEQ ID NO: 788939 - protein, 378 aa, Homo sapiens
MLFHGISGGHIQGIMEEMERRSKTEARLAKGAQLNGRDAGMPPLSPEKPALCAGCGGKISDRYYLLAVDKQWHLRCLKCCECKLALESELTCFAKDGSIYCKEDYYRRFSVQRCARCHLGISASEMVMRARDSVYHLSCFTCSTCNKTLTTGDHFGMKDSLVYCRAHFETLLQGEYPPQLSYTELAAKSGGLALPYFNGTGTVQKGRPRKRKSPALGVDIVNYNSGCNENEADHLDRDQQPYPPSQKTKRMRTSFKHHQLRTMKSYFAINHNPDAKDLKQLAQKTGLTKRVLQVWFQNARAKFRRNLLRQENGGVDKADGTSLPAPPSADSGALTPPGTATTLTDLTNPTITVVTSVTSNMDSHESGSPSQTTLTNLF

SEQ ID NO: 788940 - protein, 469 aa, Homo sapiens
KQPGNAENSTSFSFFVFKTIFFLHQILFSSPRCSCFPLVTRSLRAVRFAFYASFSLRPNCLFSAHLLQGAAEASPQLFPVLFASPRPPKQTDFHSICFFSSFLSLFPSILERLCAPTGQPSLVPCLLHSDELKAPGVCIMEIVGCRAEDNSCPFRPPAMLFHGISGGHIQGIMEEMERRSKTEARLAKGAQLNGRDAGMPPLSPEKPALCAGCGGKISDRYYLLAVDKQWHLRCLKCCECKLALESELTCFAKDGSIYCKEDYYRRFSVQRCARCHLGISASEMVMRARDSVYHLSCFTCSTCNKTLTTGDHFGMKDSLVYCRAHFETLLQGEYPPQLSYTELAAKSGGLALPYFNGTGTVQKGRPRKRKSPALGVDIVNYNSGCNENEADHLDRDQQPYPPSQKTKRMRTSFKHHQLRTMKSYFAINHNPDAKDLKQLAQKTGLTKRVLQGEQILGHYSQTSRRLKIP

SEQ ID NO: 788941 - protein, 157 aa, Homo sapiens
PHVLYPQGSPNPPEIPGGVRAGLSFLLCLSAVSGSQARCLRCAKESFQLNSETPGAWGFGQETSAPRLGGHLHTLIPKPPSRTGIQTKIAKRNNKTKCKVLRESAAESVPGHGYCFAALTGTLGRSASLSFPQPIPCAESVLTLTTRLCYTPTAQWL

SEQ ID NO: 788942 - protein, 123 aa, Homo sapiens
INTTSPPAKGSAPQSQVPCDGDHCVPFPETFHGSVHLQVLPHCQVGPQRILLRAVPQEAQGFPSTAPFQNHLCKISSFLDSIPNVTYMYMHVSRTSEMPFSSHTQVLSAQMQISNHLTLGKRW

SEQ ID NO: 788943 - protein, 69 aa, Homo sapiens
IPLSMNVSTFLAYDQPTISYCGVHHELLSHKSFETNAQEDTMETHLETELDLSTITTAGRISDHKQQLA

SEQ ID NO: 788944 - protein, 83 aa, Homo sapiens
QSYLTLFIQKHNPLSEIMVKTKVTFQLFDRAPPPRPFNSRGLTGREKVPPTAPPPASTAGTGQDIVGPMKVIFLSLFVFPLPE

SEQ ID NO: 788945 - protein, 89 aa, Homo sapiens
TFSSFHDFALHLLLAAGRAKGPCIALTFKGSGFPVRDVQAPYLGMHSLVGSSASSPAQPQPCQPRRAAPCSSKASPGPCTFATLHLWCI

SEQ ID NO: 788946 - protein, 64 aa, Homo sapiens
MNIVHTRRVFSPCPFPYTSLLLEPPVSIVLIFMFLCTQGLAPLISENMQYLFFFFNTSRLLIEM

SEQ ID NO: 788947 - protein, 112 aa, Homo sapiens
SLLPRWGHRASWRLIRDGTCGGFPCCQQEWALDSSRCFKIKRKGAIMQPNRRRGSCLQNEAFSVIGPQPQSTVRPPHRPPQGCSRDASVIGCFAVPALGLFKLQDFQFQLRL

SEQ ID NO: 788948 - protein, 446 aa, Homo sapiens
CVGFFLLQGAWPLMGGQDKPFLSARPSTVVPRGGHVALQCHYRRGFNNFMLYKEDRSHVPIFHGRIFQESFIMGPVTPAHAGTYRCRGSRPHSLTGWSTPSNPLVIMVTGNHRKPSLLAHPGPLLKSGETVILQCWSDVMFEHFFLHREGISEDPSRLVGQIHDGVSKANFSIGPLMPVLAGTYRCYGSVPHSPYQLSAPSDPLDIVITGLYEKPSLSAQPGPTVQAGENVTLSCSSWSSYDIYHLSREGEAHERRLRAVPKVNRTFQADFPLGPATHGGTYRCFGSFRALPCVWSNSSDPLLVSVTGNPSSSWPSPTEPSSKSGICRHLHVLIGTSVVIFLFILLLFFLLYRWCSNKKNAAVMDQEPAGDRTVNRQDSDEQDPQEVMYAQLDHCVFIQRKISRPSQRPKTPLTDTSVYTELPNAEPRSKVVSCPRAPQSGLEGVF

SEQ ID NO: 788949 - protein, 84 aa, Homo sapiens
KRAGEEATIKLSWPILFEDSFLFWLRIKPRSCRRGKESGRFLGRRESPKNCLDRRSRGTHDLQPARPGGSKRPPSSFLSQLGWE

SEQ ID NO: 788950 - protein, 409 aa, Homo sapiens
RCSSQDSILDTQQSIPMVKRPHNCNSHGEDATQNSELIKTQRMFVGKKIYECNQCSKTFSQSSSLLKHQRIHTGEKPYKCNVCGKHFIERSSLTVHQRIHTGEKPYKCNECGKAFSQSMNLTVHQRTHTGEKPYQCKECGKAFHKNSSLIQHERIHTGEKPYKCNECGKAFTQSMNLTVHQRTHTGEKPYECNECGKAFSQSMHLIVHQRSHTGEKPYECSQCGKAFSKSSTLTLHQRNHTGEKPYKCNKCGKSFSQSTYLIEHQRLHSGVKPFECNECGKAFSKNSSLTQHRRIHTGEKPYECMVCGKHFTGRSSLTVHQVIHTGEKPYECNECGKAFSQSAYLIEHQRIHTGEKPYECDQCGKAFIKNSSLTVHQRTHTGEKPYQCNECGKAFSRSTNLTRHQRTHT

SEQ ID NO: 788951 - protein, 409 aa, Homo sapiens; identical to SEQ ID NO: 788950

SEQ ID NO: 788952 - protein, 106 aa, Homo sapiens
  misc_feature (97)..(98): Xaa can be any naturally occurring amino acid
  misc_feature (106)..(106): Xaa can be any naturally occurring amino acid
MVENRYTDGSVEPSGTKKEDLNDKKKKNEDETPAPVYRAKSILETWVWVKQPDTRETEAGESLEPGMQRLQLAEIAPLHSSLGDENETVSHKTNITXXVMCFFKTX

SEQ ID NO: 788953 - protein, 108 aa, Homo sapiens
MVENRYTDGSVEPSGTKKEDLNDKKKKNEDETPAPVYRAKSILETWVWVKQPGNLSFGTLESLIYAPFLNNLDGLFVFFGNNFKKCNLKNLNIVVKYTYRKTCHFKKK

SEQ ID NO: 788954 - protein, 106 aa, Homo sapiens
YCTDWHTHVCTHTRALFPIHDQTHTHLLTHTWSPPHTFFLSLSCASTHTLAFSLTPSANMPLSGPRLKCLVCSVSNLIVRVSSYSTCFKHQVAILFLTHQAVGLSC

SEQ ID NO: 788955 - protein, 104 aa, Homo sapiens
LEGVFNQDLVVHKLSGLSALTYRDLKRHKIPRTATRDGGAPPPRPCAAVCAWVRVRVPPPWRRRACACRFQVLDLYSTRSLGAGGSVHAFLPGPGATPRRRYVH

SEQ ID NO: 788956 - protein, 103 aa, Homo sapiens
MESMKLQKCDESLSIYTEVSLFPLCMWMDMHACAQTHTHTHTHTPYFSYSILRRASYIEPLPFPLNISTLLTVRIPAHPSRLISEYHLTKKAFPDSCLGRTCT

SEQ ID NO: 788957 - protein, 261 aa, Homo sapiens
MQLVILRVTIFLPWCFAVPVPPAADHKGWDFVEGYFHQFFLTKKESPLLTQETQTQLLQQFHRNGTDLLDMQMHALLHQPHCGVPDGSDTSISPGRCKWNKHTLTYRIINYPHDMKPSAVKDSIYNAVSIWSNVTPLIFQQVQNGDADIKVSFWQWAHEDGWPFDGPGGILGHAFLPNSGNPGVVHFDKNEHWSASDTGYNLFLVATHEIGHSLGLQHSGNQSSIMYPTYWYHDPRTFQLSADDIQRIQHLYGEKCSSDIP

SEQ ID NO: 788958 - protein, 117 aa, Homo sapiens
HILLLASLIPGRKPEMPKGKKAKGKKVAPAAAVAKKQEARKVVNPVLEKRPKNLGIGQHTQPKRDLTLLCQMAPLYQVAEAKSDPLNMAESASCNEPVHPGLGPPKSYSTVIHKLAH

SEQ ID NO: 788959 - protein, 190 aa, Homo sapiens
SYSPSCLTHPREEARVILPKPLHLQKLVKKIENWLFFTSVLYRKDSPDRVSLLSPRLECNGVISAHCNLRLSGSRESPASASGELGLQMPKGKKAKGKKVAPAAAVAKKQEARKVVNPVLEKRPKNLGIGQHTQPKRDLTLLCQMAPLYQVAEAKSDPLNMAESASCNEPVHPGLGPPKSYSTVIHKLAH

SEQ ID NO: 788960 - protein, 521 aa, Homo sapiens
MACSLQKLFAVEEEFEDEDFLSAVEDAENRFTGSLPVNAGRLRPVSSRPQETVQAQSSRLLLLHPTAPSEALGLPDLDLCLPASSTPSADSRPSCIGAAPLRPVSTSSSWIGNQRRVTVTEVLREPARPQSSALHPLLTFESQQQQVGGFEGPEQDEFDKVLASMELEEPGMELECGVSSEAIPILPAQQREGSVLAKKARVVDLSGSCQKGPVPAIHKAGIMSAQDESLDPVIQCRTPRPPLRPGAVGHLPVPTALTVPTQQLHWEVCPQRSPVQALQPLQAARGTIQSSPQNRFPCQPFQSPSSWLSGKAHLPRPRTPNSSCSTPSRTSSGLFPRIPLQPQAPVSSIGSPVGTPKGPQGALQTPIVTNHLVQLVTAASRTPQQPTHPSTRAKTRRFPGPAGILPHQAALKQLPRNKVPNMAVMIKSLTRSTMDASVVFKDPTGEMQGTVHRLLLETCQNELKPGSVLLLKQIGVFSPSLRNHYLNVTPNNLVHIYSPDSGDGSFLKPSQPFPKMTWMDS

SEQ ID NO: 788961 - protein, 137 aa, Homo sapiens
MACSLQKLFAVEEEFEDEDFLSAVEDAENRFTGSLPVNAGRLRPVSSRPQETVQAQSSRLLLLHPTAPSEALGLPDLDLCLPASSTPSADSRPSCIGAAPLRPVSTSNCLNSSHSATPLGSLSATLPCSSTSASPSC

SEQ ID NO: 788962 - protein, 646 aa, Homo sapiens [sequence omitted]

SEQ ID NO: 788963 - protein, 646 aa, Homo sapiens [sequence omitted]

SEQ ID NO: 788964 - protein, 411 aa, Homo sapiens
MACSLQKLFAVEEEFEDEDFLSAVEDAENRFTGSLPVNAGRLRPVSSRPQETVQAQSSRLLLLHPTAPSEALGLPDLDLCLPASSTPSADSRPSCIGAAPLRPVSTSSSWIGNQRRVTVTEVLREPARPQSSALHPLLTFESQQQQVGGFEGPEQDEFDKVLASMELEEPGMELECGVSSEAIPILPAQQREGSVLAKKARVVDLSGSCQKGPVPAIHKAGIMSAQDESLDPVIQCRTPRPPLRPGAVGHLPVPTALTVPTQQLHWEVCPQRSPVQALQPLQAARGTIQSSPQNRFPCQPFQSPSSWLSGKAHLPRPRTPNSSCSTPSRTSSGLFPRIPLQPQAPVSSIGSPVGTPKGPQGALQTPIVTNHLVQLVTAASRTPQQPTHPSTRAKTRRFPGPAGILPHQGEV

SEQ ID NO: 788965 - protein, 454 aa, Homo sapiens
MELEEPGMELECGVSSEAIPILPAQQREGSVLAKKARVVDLSGSCQKGPVPAIHKAGIMSAQDESLDPVIQCRTPRPPLRPGAVGHLPVPTALTVPTQQLHWEVCPQRSPVQALQPLQAARGTIQSSPQNRFPCQPFQSPSSWLSGKAHLPRPRTPNSSCSTPSRTSSGLFPRIPLQPQAPVSSIGSPVGTPKGPQGALQTPIVTNHLVQLVTAASRTPQQPTHPSTRAKTRRFPGPAGILPHQIVASSQASVEEDFGRGPWLTMKSTLGLDERDPSCFLCTYSIVMVLRKAALKQLPRNKVPNMAVMIKSLTRSTMDASVVFKDPTGEMQGTVHRLLLETCQNELKPGSVLLLKQIGVFSPSLRNHYLNVTPNNLVHIYSPDSGDGSFLKPSQPFPKDSGSFQHDVAAKPEEGFRTAQNLEAEASPEEELPEADDLDGLLSELPEDFFCGTSS

SEQ ID NO: 788966 - protein, 599 aa, Homo sapiens [sequence omitted]

SEQ ID NO: 788967 - protein, 501 aa, Homo sapiens
MACSLQKLFAVEEEFEDEDFLSAVEDAENRFTGSLPVNAGRLRPVSSRPQETVQAQSSRLLLLHPTAPSEALGLPDLDLCLPASSTPSADSRPSCIGAAPLRPVSTSSSWIGNQRRVTVTEVLREPARPQSSALHPLLTFESQQQQVGGFEGPEQDEFDKVLASMELEEPGMELECGVSSEAIPILPAQQREGSVLAKKARVVDLSGSCQKGPVPAIHKAGIMSAQDESLDPVIQCRTPRPPLRPGAVGHLPVPTALTVPTQQLHWEVCPQRSPVQALQPLQAARGTIQSSPQNRFPCQPFQSPSSWLSGKAHLPRPRTPNSSCSTPSRTSSGLFPRIPLQPQAPVSSIGSPVGTPKGPQGALQTPIVTNHLVQLVTAASRTPQQPTHPSTRAKTRRFPGPAGILPHQQSGRSLEDIMVSAPQTPTHGALAKFQTEIVASSQASVEEDFGRGPWLTMKSTLGLDERDPSCFLCTYSIVMVLRKVRILGAETQRKDHFSPSL

SEQ ID NO: 788968 - protein, 279 aa, Homo sapiens
MACSLQKLFAVEEEFEDEDFLSAVEDAENRFTGSLPVNAGRLRPVSSRPQETVQAQSSRLLLLHPTAPSEALGLPDLDLCLPASSTPSADSRPSCIGAAPLRPVSTSSSWIGNQRRVTVTEVLREPARPQSSALHPLLTFESQQQQVGGFEGPEQDEFDKVLASMELEEPGMELECGVSSEAIPILPAQQREGSVLAKKARVVDLSGSCQKGPVPAIHKAGIMSAQDESLDPVIQCRTPRPPLRPGAVGHLPVPTALTVPTQQLHWEVCPQRSPGQLRR

SEQ ID NO: 788969 - protein, 70 aa, Homo sapiens
ESGGSLLWCLLLMGLEEKVILHNFSKKDEFSDGSKMAIFAPISSALRDLLKISPVKTFLLSYNLAAGAPG

SEQ ID NO: 788970 - protein, 627 aa, Homo sapiens
MIVFGGEDRSDLFLPDSQTNEERKQYDSVAFEDVAVNFTQEEWALLGPSQKSLYRDVMWETIRNLDCIGMKWEDTNIEDQHRNPRRSLRCHIIERFSESRQPDSTVNEKPPGVDPCKSSVCGEIMGCSFLNCYITFDAGHKPDECQEYGEKPHTHKQCGTAFNYHHSFQTQERPHTGKKRYDCKECGKTFSSSGNLRRHIIVQRGGGPYICKLCGKAFFWPSLFRMHERTHTGEKPYECKQCCKAFPIYSSYLRHERTHTGEKPYECKHCSKAFPDYSSYVRHERTHTGEKPYKCKRCGRAFSVSSSLRIHERTHTGEKPYECKQCGKAFHHLGSFQRHMIRHTGDGPHKCKICGKGFDCPSSLQSHERTHTGEKPYECKQCGKALSHHSSFRSHMIMHTGDGPHKCKVCGKAFIYPSVFQGHERTHTGEKPYECKECGKAFRISSSLRRHETTHTGEKPYKCKCGKAFIDFYSFQNHETTHTGEKPYECKECGKAFSCFTYLSQHRRTHMAEKPYECKTCKKAFSHFGNLKVHERIHTGEKPYECKECRKAFSWLTCLLRHERIHTGKKSYECQQCGKAFTRSRFLRGHEKTHTGEKMHECKECGKALSSLSSLHRHKRTHWRDTL

SEQ ID NO: 788971 - protein, 616 aa, Homo sapiens
SPGRSVAGTVTLSPMLAAGNLGENTGHRGSREMDSVAFEDVAVNFTQEEWALLGPSQKSLYRDVMWETIRNLDCIGMKWEDTNIEDQHRNPRRSLRCHIIERFSESRQPDSTVNEKPPGVDPCKFDAGHKPDECQEYGEKPHTHKQCGTAFNYHHSFQTQERPHTGKKRYDCKECGKTFSSSGNLRRHIIVQRGGGPYICKLCGKAFFWPSLFRMHERTHTGEKPYECKQCCKAFPIYSSYLRHERTHTGEKPYECKHCSKAFPDYSSYVRHERTHTGEKPYKCKRCGRAFSVSSSLRIHERTHTGEKPYECKQCGKAFHHLGSFQRHMIRHTGDGPHKCKICGKGFDCPSSLQSHERTHTGEKPYECKQCGKALSHHSSFRSHMIMHTGDGPHKCKVCGKAFIYPSVFQGHERTHTGEKPYECKECGKAFRISSSLRRHETTHTGEKPYKCKCGKAFIDFYSFQNHETTHTGEKPYECKECGKAFSCFTYLSQHRRTHMAEKPYECKTCKKAFSHFGNLKVHERIHTGEKPYECKECRKAFSWLTCLLRHERIHTGKKSYECQQCGKAFTRSRFLRGHEKTHTGEKMHECKECGKALSSLSSLHRHKRTHWRDTL

SEQ ID NO: 788972 - protein, 120 aa, Homo sapiens
EHAYEYVCACAQMHVHTTPNQPTSSLSKKVLKPCGRDRKEPYTGELVKCNPEKLGLAPLPSSAQLVEGKNQGAGCQAKAPGREVSWPETIRPSLLSVRVTCDGYHHQCLHPEAPALTKPY

SEQ ID NO: 788973 - protein, 89 aa, Homo sapiens
AILEARFVNIAERSPVDVSKIPLPRFKLKCIFCKKRRKRTAGCCVQCSHGRCPTAFHVSCAQAAGVMMQPDDWPFVVFITCFRHKIPNL

SEQ ID NO: 788974 - protein, 142 aa, Homo sapiens
RPLIPAPRVSLGPLCSSQPSTPYPSLGNQLPRCLAQAWAMTDGWAPGAARRAERVPSRRLRWVAAAAPGVCSARGRSERTAPSEQVPAARRAHTLASPQRPKVTTVPGGFALLEKCILTVEFRRRESVNSPYHVDSPVWSRI

SEQ ID NO: 788975 - protein, 84 aa, Homo sapiens
MGKDFMTTTPKAMARKAKIDKWDLSKLKSFCTAKETTIRVNRQPTEWEKIFAIYPSDKGLISRTYKELKQIYKKKSNNPIKKWA

SEQ ID NO: 788976 - protein, 76 aa, Homo sapiens
CSYSEDQGRCFHSSHTYLFFCGSPTWCGASAGPATAPPSSRCFLGFSDCWVRSVFSSTTKGTLFLQDTHTIKADEG

SEQ ID NO: 788977 - protein, 67 aa, Homo sapiens
ESIESIQHGMEGWERGHSYNLETGGLSSPEASADPACLALCCDLCLTMLAALELTGSRPAQLGHKTV

SEQ ID NO: 788978 - protein, 81 aa, Homo sapiens
LNGANLAFHQQTSAEGPLRAGSKPSAARTRETPARQLPVWAPRPAQEPDVGHEHLRHKAQVKWMLNILQKQGQCTRVSWPN

SEQ ID NO: 788979 - protein, 80 aa, Homo sapiens
VSLGSGDGWRAGTVPPGAVVRVFLNLHQGGARESTVSWRLLHGAVWNPQYWVSDYMCYPQFFLSCQGERGSGPGRAGYRA

SEQ ID NO: 788980 - protein, 122 aa, Homo sapiens
MFSATCSRVLAPHGPPHSPDREGTGQFRPRGRQTRGEIRTQEPSPGCAILCMGRYDLTAPSSATGYAHAEPRLCTRVSSCTPRAVQGHFVTQGKGGGHICKRARCGQARIAPRELELSCSPK

SEQ ID NO: 788981 - protein, 202 aa, Homo sapiens
MRGHPSLLLLYMALTTCLDTSPSEETDQEVFLGPPEAQSFLSSHTRIPRANHWDLELLTPGNLERECLEERCSWEEAREYFEDNTLTERFWESYIYNGKGGRGRVDVASLAVGLTGGILLIVLAGLGAFWYLRWRQHRGQQPCPQEAGLISPLSPLNPLGPPTPLPPPPPPPPGLPTYEQALAASGVHDAPPPPYTSLRRPH

SEQ ID NO: 788982 - protein, 135 aa, Homo sapiens
MSLGPEVFLGPPEAQSFLSSHTRIPRANHWDLELLTPGNLERECLEERCSWEEAREYFEDNTLTERFWESYIYNGKGGRGRVDVASLAVGLTGGILLIVLAGLGAFWYLRWRQHRGQQPCPQERAHSLLSPLTFW

SEQ ID NO: 788983 - protein, 202 aa, Homo sapiens; identical to SEQ ID NO: 788981

SEQ ID NO: 788984 - protein, 156 aa, Homo sapiens
VTRITPHPGNEVRYHQWEESLEKPQQVCWQRRLQGLQAYSSAGELSSTLDLANTLQKLVPSYTGGSLLEDLASGLEHSCPMPHLACSSDAVEIIPAEGVGISQLLCKQFLVTEEDIRKQEGKVKTVRERLAIALIADGLANEAEKVRDQEGCPEKR

SEQ ID NO: 788985 - protein, 121 aa, Homo sapiens
DSCFLHFLTVSPPHPIPSVLSALTPVIFGPDFLTAFCFPYFHSCLWLMTCFCSACELRMAFTFLKIVKKQKNKKTHKDYVRDSTCHPQTLKYRLFGPLRKKLSNSCFKYAKYLSINTPFGH

SEQ ID NO: 788986 - protein, 88 aa, Homo sapiens
RLAAHSLSLLTRLASPAFEDLERTIVWTRWAGGNLAAGHPEETEKPLVNRAPFLEPKQNFPKPERKRPVSPESPGAARDPGTECGLGL

SEQ ID NO: 788987 - protein, 32 aa, Homo sapiens
HLVKEEIQTANQYMKKCSLHSSLGDRARLCLK

SEQ ID NO: 788988 - protein, 118 aa, Homo sapiens
MSHVSGQLTPAHCREDKNSPLPHIEFIAFNDKMLWMLLIGLLQFYIYPNFLRLTQEQSKKRLPPPEKCANRAPLFSGHIPCSSQKSFLICISFLPPLFLLNLTEHETRENTYKYNYEN

SEQ ID NO: 788989 - protein, 75 aa, Homo sapiens
MVPLGYGIRKLQIQSVVEDHRVGTDLLEEEITKSSRSTCRVSISQLSHNDLKPECVYVRAVREALPPIKDWTPVS

SEQ ID NO: 788990 - protein, 118 aa, Homo sapiens
MPDQHRAPARWPLWLHTSLRNSSLHCSFPQAHGISPHHFASTWSHGQVLLSLPFQRAGVQFICSPPLHTTIADGALAGIQPGSPIPTSILPFWALPPALKSFRNEASQLNPPYSTIKP

SEQ ID NO: 788991 - protein, 153 aa, Homo sapiens
GASQDLPGGYCPLNQYLQGPYVDTHGLPLSTPQSCVRHVVLTGRLCRGLKAEAGTRAWRSQAPGHDGPSSSPSQPHLGLRPCSQGSLALSLVLTRFWKCGARVAGAAPDGKAPPTPQSRLGREHATVFSESYQPRARAPCTPEQHSWWEHRLM

SEQ ID NO: 788992 - protein, 67 aa, Homo sapiens
RYSHTVTQAKAKSPAVQRQEKVPQTKLNLSLLERVKGTPVYGEIRWGQRAIRYQAKQENLYLNSGTL

SEQ ID NO: 788993 - protein, 126 aa, Homo sapiens
TLPLETLVSPHEESTSLCPEEQLVIERLQGEKEQKEDSELSTGLMDSEMTPTIEGCVKDVSYQGGKSIKLSSETESSFSLSADISKADVSSSPTPSSDLPSHDMLRNYPSALSSSAGNIMPTTYIS

SEQ ID NO: 788994 - protein, 141 aa, Homo sapiens
ESDEEEGREELHFPESGLKEGTSHLRSRRTFLGVPETMSLRCLRGSQGKMSRGRLQGSGPEPSRLEPSMYRKEQELSQRCDEQERVQRLGEMALPRREEDQMLPRDQADNPWKVSVEFHSPAVPRVSRRYRMGVVAQTCNP

SEQ ID NO: 788995 - protein, 113 aa, Homo sapiens
PHCASTPRLGFFCFIQAPAPRYSGETRPGPRKKPSSSEGRTSDSTDPGIPREWDHQAAGGINPAAEALGEDEGGERGGDRVTQQPGGLCRQAPLAPFGPTRAGVPVPPSLPRT

SEQ ID NO: 788996 - protein, 77 aa, Homo sapiens
MGECALQATTVGPDQGTCLLSSIHTRSQFDSAQCLCPIAPVISQVEPGLNLLRPKSPLIGGREWVALPLQALWIIKK

SEQ ID NO: 788997 - protein, 312 aa, Homo sapiens
  misc_feature (6)..(6): Xaa can be any naturally occurring amino acid
MSLPGXTHLQRAQPIRWSHWILEHAVALTRDSERLLEVRKRINVLPLGSGAIAGNPLGVDRELLRAVLNFGAFTLYSMDATSERDFVAEFLFWASLCMTHLSRMAEDLILYCTKEFSFVQLSDAYSTGSSLMPQKKNPDSLELIRSKAGRVFGRCAGLLMTLKGLPSTYNKDLQEDKEAVFEVSDTMSAVLQVATGVISTLQIHQENMGQALSPDMLATDLAYYLVRKGMPFRQAHEASGKAVFMAETKGVALNQLSLQELQTISPLFSGDVICVWDYGHSVEQYGALGGTARSSVDWQIRQVRALLQAQQA

SEQ ID NO: 788998 - protein, 292 aa, Homo sapiens
  misc_feature (6)..(6): Xaa can be any naturally occurring amino acid
MSLPGXTHLQRAQPIRWSHWILEHAVALTRDSERLLEVRKRINVLPLGSGAIAGNPLGVDRELLRAVLNFGAFTLYSMDATSERDFVAEFLFWASLCMTHLSRMAEDLILYCTKEFSFVQLSDAYSTGSSLMPQKKNPDSLELIRSKAGRVFGREDKEAVFEVSDTMSAVLQVATGVISTLQIHQENMGQALSPDMLATDLAYYLVRKGMPFRQAHEASGKAVFMAETKGVALNQLSLQELQTISPLFSGDVICVWDYGHSVEQYGALGGTARSSVDWQIRQVRALLQAQQA

SEQ ID NO: 788999 - protein, 343 aa, Homo sapiens
APTPPRPQGAPRARRERRQRGRQAAGEEAMGARGALLLALLLARAGLRKPESQEAAPLSGPCGRRVITSRIVGGEDAELGRWPWQGSLRLWDSHVCGVSLLSHRWALTAAHCFETYSDLSDPSGWMVQFGQLTSMPSFWSLQAYYTRYFVSNIYLSPRYLGNSPYDIALVKLSAPVTYTKHIQPICLQASTFEFENRTDCWVTGWGYIKEDEALPSPHTLQEVQVAIINNSMCNHLFLKYSFRKDIFGDMVCAGNAQGGKDACFGDSGGPLACNKNGLWYQIGVVSWGVGCGRPNRPGVYTNISHHFEWIQKLMAQSGMSQPDPSWPLLFFPLLWALPLLGPV

SEQ ID NO: 789000 - protein, 227 aa, Homo sapiens
MGARGALLLALLLARAGLRKPESQEAAPLSGPCGRRVITSRIVGGEDAELGRWPWQGSLRLWDSHVCGVSLLSHRWALTAAHCFETYSDLSDPSGWMVQFGQLTSMPSFWSLQAYYTRYFVSNIYLSPRYLGNSPYDIALVKLSAPVTYTKHIQPICLQASTFEFENRTDCWVTGWGYIKEDEGSSGRHHKQLYVQPPLPQVQFPQGHLWRHGLCWQCPRREGCLLR

SEQ ID NO: 789001 - protein, 127 aa, Homo sapiens
APTPPRPQGAPRARRERRQRGRQAAGEEAMGARGALLLALLLARAGLRKPESQEAAPLSGPCGRRVITSRIVGGEDAELGRWPWQGSLRLWDSHVCGVSLLSHRWALTAAHCFETPTTPVTSYRISI

SEQ ID NO: 789002 - protein, 267 aa, Homo sapiens
HTREGTLGGQKRAFPDGVEGEKGRGRAWGAASRGSAVPLTIRGPCGRRVITSRIVGGEDAELGRWPWQGSLRLWDSHVCGVSLLSHRWALTAAHCFETYSDLSDPSGWMVQFGQLTSMPSFWSLQAYYTRYFVSNIYLSPRYLGNSPYDIALVKLSAPVTYTKHIQPICLQASTFEFENRTDCWVTGWGYIKEDEALPSPHTLQEVQVAIINNSMCNHLFLKYSFRKDIFGDMVCAGNAQGGKDACFVSVLATTPSPGKHPVSLCLI

SEQ ID NO: 789003 - protein, 344 aa, Homo sapiens
  misc_feature (337)..(337): Xaa can be any naturally occurring amino acid
APTPPRPQGAPRARRERRQRGRQAAGEEAMGARGALLLALLLARAGLRKPESQEAAPLSGPCGRRVITSRIVGGEDAELGRWPWQGSLRLWDSHVCGVSLLSHRWALTAAHCFETYSDLSDPSGWMVQFGQLTSMPSFWSLQAYYTRYFVSNIYLSPRYLGNSPYDIALVKLSAPVTYTKHIQPICLQASTFEFENRTDCWVTGWGYIKEDEGCCLSPSHYRPHSTAISPHPPGSSGRHHKQLYVQPPLPQVQFPQGHLWRHGLCWQCPRREGCLLRECPCHHSQPRKASCVPVPYLTLMPTPGGGDCCPTLQMQKRRLGCCQGEEEDVHPVYPAPXRALASWK

SEQ ID NO: 789004 - protein, 300 aa, Homo sapiens
MGARGALLLALLLARAGLRKPESQEAAPLSGPCGRRVITSRIVGGEDAELGRWPWQGSLRLWDSHVCGVSLLSHRWALTAAHCFETYSDLSDPSGWMVQFGQLTSMPSFWSLQAYYTRYFVSNIYLSPRYLGNSPYDIALVKLSAPVTYTKHIQPICLQASTFEFENRTDCWVTGWGYIKEDEALPSPHTLQEVQVAIINNSMCNHLFLKYSFRKDIFGDMGDSGGPLACNKNGLWYQIGVVSWGVGCGRPNRPGVYTNISHHFEWIQKLMAQSGMSQPDPSWPLLFFPLLWALPLLGPV

SEQ ID NO: 789005 - protein, 336 aa, Homo sapiens
APTPPRPQGAPRARRERRQRGRQAAGEEAMGARGALLLALLLARAGLRKPESQEAAPLSGPCGRRVITSRIVGGEDAELGRWPWQGSLRLWDSHVCGVSLLSHRWALTAAHCFETYSDLSDPSGWMVQFGQLTSMPSFWSLQAYYTRYFVSNIYLSPRYLGNSPYDIALVKLSAPVTYTKHIQPICLQASTFEFENRTDCWVTGWGYIKEDEGCCLSPSHYRPHSTAISPHPPGSSGRHHKQLYVQPPLPQVQFPQGHLWRHGLCWQCPRREGCLLRECPCHHSQPRKASCVPVPYLTLMPTPGGGDCCPTLQMQKRRLGCCQGEEEDVHPVYPAP

SEQ ID NO: 789006 - protein, 187 aa, Homo sapiens
MLVKNNHLSDKIIVLPGKTEDVSLPEAVDVIISEPMGYMLFNERMLESYLHSKKWLKSNGMMFPTFSDIHLAPFSDEQLYVEHFSRANFWYQQCFYGVNLSSLQGATVDEYFRQPIVDTFDVRILMAGTVKYTVNFMDAEEEDLHRWQSGLIHGLAFWFDVAFVGSLYVYPPPTFSQSALPHAIYYL

SEQ ID NO: 789007 - protein, 84 aa, Homo sapiens
PQPSSNPKPRPCPPCFDSVPFLSPAAEAALLPQNDTRLDPEAYGAPCARGSQPWQVSLFNGLSFHCAGVLVDQSWVLRFGRVPS

SEQ ID NO: 789008 - protein, 276 aa, Homo sapiens
MRAPHLHLSAASGARALAKLLPLLMAQLWAAEAALLPQNDTRLDPEAYGAPCARGSQPWQVSLFNGLSFHCAGVLVDQSWVLTAAHCGNKPLWARVGDDHLLLLQGEQLRRTTRSVVHPKYHQGSGPILPRRTDEHDLMLLKLARPVVPGPRVRALQLPYRCAQPGDQCQVAGWGTTAARRVKYNKGLTCSSITILSPKECEVFYPGVVTNNMICAGLDRGQDPCQSDSGGPLVCDETLQGILSWGVYPCGSAQHPAVYTQICKYMSWINKVIRSN

SEQ ID NO: 789009 - protein, 122 aa, Homo sapiens
VEGGRGLKVAGWGTTAARRVKYNKGLTCSSITILSPKECEVFYPGVVTNNMICAGLDRGQDPCQSDSGGPLVCDETLQGILSWGVYPCGSAQHPAVYTQICKYMSWINKVIRLQLIQMLCSC

SEQ ID NO: 789010 - protein, 75 aa, Homo sapiens
RLCLNLAEERQTTGRAEARLGPLPPSYRRLPDPGHESSAPPPLRRLWRPGSGEAAAAADGATLGLQMCWLLLPQN

SEQ ID NO: 789011 - protein, 276 aa, Homo sapiens; identical to SEQ ID NO: 789008

SEQ ID NO: 789012 - protein, 146 aa, Homo sapiens
MRAPHLHLSAASGARALAKLLPLLMAQLWAAEAALLPQNDTRLDPEAYGAPCARGSQPWQVSLFNGLSFHCAGVLVDQSWVLTAAHCGNKPLWARVGDDHLLLLQGEQLRRTTRSVVHPKYHQGSGPILPRRTDEHDLMLLKLARP

SEQ ID NO: 789013 - protein, 284 aa, Homo sapiens
MRAPHLHLSAASGARALAKLLPLLMAQLWAAEAALLPQNDTRLDPEAYGAPCARGSQPWQVSLFNGLSFHCAGVLVDQSWVLTAAHCGNKPLWARVGDDHLLLLQGEQLRRTTRSVVHPKYHQGSGPILPRRTDEHDLMLLKLARPVVPGPRVRALQLPYRCAQPGDQCQVAGWGTTAARRVKYNKGLTCSSITILSPKECEVFYPGVVTNNMICAGLDRGQDPCQSDSGGPLVCDETLQGILSWGVYPCGSAQHPAVYTQICKYMSWINKVIRLQLIQMLCSC

SEQ ID NO: 789014 - protein, 276 aa, Homo sapiens; identical to SEQ ID NO: 789008

SEQ ID NO: 789015 - protein, 276 aa, Homo sapiens; identical to SEQ ID NO: 789008

SEQ ID NO: 789016 - protein, 683 aa, Homo sapiens
MSSGTMKFNGYLRVRIGEAVGLQPTRWSLRHSLFKKGHQLLDPYLTVSVDQVRVGQTSTKQKTNKPTYNEEFCANVTDGGHLELAVFHETPLGYDHFVANCTLQFQELLGTTGASDTFEGWVDLEPEGKVFVVITLTGSFTEATLQRDRIFKHFTRKRQRAMRRRVHQINGHKFMATYLRQPTYCSHCREFIWGVFGKQGYQCQVCTCVVHKRCHHLIVTACTCQNNINKVDSKIAEQRFGINIPHKFSIHNYKVPTFCDHCGSLLWGIMRQGLQCKICKMNVHIRCQANVAPNCGVNAVELAKTLAGMGLQPGNISPTSKLVSRSTLRRQGKESSKEGNGIGVNSSNRLGIDNFEFIRVLGKGSFGKVMLARVKETGDLYAVKVLKKDVILQDDDVECTMTEKRILSLARNHPFLTQLFCCFQTPDRLFFVMEFVNGGDLMFHIQKSRRFDEARARFYAAEIISALMFLHDKGIIYRDLKLDNVLLDHEGHCKLADFGMCKEGICNGVTTATFCGTPDYIAPEILQEMLYGPAVDWWAMGVLLYEMLCGHAPFEAENEDDLFEAILNDEVVYPTWLHEDATGILKSFMTKNPTMRLGSLTQGGEHAILRHPFFKEIDWAQLNHRQIEPPFRPRIKSREDVSNFDPDFIKEEPVLTPIDEGHLPMINQDEFRNFSYVSPELQP

SEQ ID NO: 789017 - protein, 601 aa, Homo sapiens
  misc_feature (5)..(5): Xaa can be any naturally occurring amino acid
  misc_feature (10)..(11): Xaa can be any naturally occurring amino acid
  misc_feature (20)..(20): Xaa can be any naturally occurring amino acid
  misc_feature (26)..(26): Xaa can be any naturally occurring amino acid
RPRGXPTPAXXRVGAPRGAXPLRAAXPGTARGSGFPPAQVDLEPEGKVFVVITLTGSFTEATLQRDRIFKHFTRKRQRAMRRRVHQINGHKFMATYLRQPTYCSHCREFIWGVFGKQGYQCQVCTCVVHKRCHHLIVTACTCQNNINKVDSKIAEQRFGINIPHKFSIHNYKVPTFCDHCGSLLWGIMRQGLQCKICKMNVHIRCQANVAPNCGVNAVELAKTLAGMGLQPGNISPTSKLVSRSTLRRQGKESSKEGNGIGVNSSNRLGIDNFEFIRVLGKGSFGKVMLARVKETGDLYAVKVLKKDVILQDDDVECTMTEKRILSLARNHPFLTQLFCCFQTPDRLFFVMEFVNGGDLMFHIQKSRRFDEARARFYAAEIISALMFLHDKGIIYRDLKLDNVLLDHEGHCKLADFGMCKEGICNGVTTATFCGTPDYIAPEILQEMLYGPAVDWWAMGVLLYEMLCGHAPFEAENEDDLFEAILNDEVVYPTWLHEDATGILKSFMTKNPTMRLGSLTQGGEHAILRHPFFKEIDWAQLNHRQIEPPFRPRIKSREDVSNFDPDFIKEEPVLTPIDEGHLPMINQDEFRNFSYVSPELQP

SEQ ID NO: 789018 - protein, 508 aa, Homo sapiens
RIVITGHRWLLCQVVNRQSIREIVIISDKVCTCVVHKRCHHLIVTACTCQNNINKVDSKIAEQRFGINIPHKFSIHNYKVPTFCDHCGSLLWGIMRQGLQCKICKMNVHIRCQANVAPNCGVNAVELAKTLAGMGLQPGNISPTSKLVSRSTLRRQGKESSKEGNGIGVNSSNRLGIDNFEFIRVLGKGSFGKVMLARVKETGDLYAVKVLKKDVILQDDDVECTMTEKRILSLARNHPFLTQLFCCFQTPDRLFFVMEFVNGGDLMFHIQKSRRFDEARARFYAAEIISALMFLHDKGIIYRDLKLDNVLLDHEGHCKLADFGMCKEGICNGVTTATFCGTPDYIAPEILQEMLYGPAVDWWAMGVLLYEMLCGHAPFEAENEDDLFEAILNDEVVYPTWLHEDATGILKSFMTKNPTMRLGSLTQGGEHAILRHPFFKEIDWAQLNHRQIEPPFRPRIKSREDVSNFDPDFIKEEPVLTPIDEGHLPMINQDEFRNFSYVSPELQP

SEQ ID NO: 789019 - protein, 184 aa, Homo sapiens
MCKEGICNGVTTATFCGTPDYIAPEILQEMLYGPAVDWWAMGVLLYEMLCGHAPFEAENEDDLFEAILNDEVVYPTWLHEDATGILKSFMTKNPTMRLGSLTQGGEHAILRHPFFKEIDWAQLNHRQIEPPFRPRIKSREDVSNFDPDFIKEEPVLTPIDEGHLPMINQDEFRNFSYVSPELQP

SEQ ID NO: 789020 - protein, 683 aa, Homo sapiens; identical to SEQ ID NO: 789016

SEQ ID NO: 789021 - protein, 559 aa, Homo sapiens
  misc_feature (536)..(537): Xaa can be any naturally occurring amino acid
  misc_feature (548)..(548): Xaa can be any naturally occurring amino acid
  misc_feature (550)..(550): Xaa can be any naturally occurring amino acid
  misc_feature (559)..(559): Xaa can be any naturally occurring amino acid
MSSGTMKFNGYLRVRIGEAVGLQPTRWSLRHSLFKKGHQLLDPYLTVSVDQVRVGQTSTKQKTNKPTYNEEFCANVTDGGHLELAVFHETPLGYDHFVANCTLQFQELLGTTGASDTFEGWVDLEPEGKVFVVITLTGSFTEATLQRDRIFKHFTRKRQRAMRRRVHQINGHKFMATYLRQPTYCSHCREFIWGVFGKQGYQCQVCTCVVHKRCHHLIVTACTCQNNINKVDSKIAEQRFGINIPHKFSIHNYKVPTFCDHCGSLLWGIMRQGLQCKICKMNVHIRCQANVAPNCGVNAVELAKTLAGMGLQPGNISPTSKLVSRSTLRRQGKESSKEGNGIGVNSSNRLGIDNFEFIRVLGKGSFGKVMLARVKETGDLYAVKVLKKDVILQDDDVECTMTEKRILSLARNHPFLTQLFCCFQTPDRLFFVMEFVNGGDLMFHIQKSRRFDEARARFYAAEIISALMFLHDKGIIYRDLKLDNVLLDHEGHCKLADFGMCKEGICNGVTTATFCGTPDYIAPEILQGKCLYGACXXNWVGQWGRFAXNXKCPCWVHPX

SEQ ID NO: 789022 - protein, 493 aa, Homo sapiens
MSSGTMKFNGYLRVRIGEAVGLQPTRWSLRHSLFKKGHQLLDPYLTVSVDQVRVGQTSTKQKTNKPTYNEEFCANVTDGGHLELAVFHETPLGYDHFVANCTLQFQELLGTTGASDTFEGWVDLEPEGKVFVVITLTGSFTEATLQRDRIFKHFTRKRQRAMRRRVHQINGHKFMATYLRQPTYCSHCREFIWGVFGKQGYQCQVCTCVVHKRCHHLIVTACTCQNNINKVDSKIAEQRFGINIPHKFSIHNYKVPTFCDHCGSLLWGIMRQGLQCKICKMNVHIRCQANVAPNCGVNAVELAKTLAGMGLQPGNISPTSKLVSRSTLRRQGKESSKEGNGIGVNSSNRLGIDNFEFIRVLGKGSFGKVMLARVKETGDLYAVKVLKKDVILQDDDVECTMTEKRILSLARNHPFLTQLFCCFQTPDRLFFVMEFVNGGDLMFHIQKSRRFDEARARFYAAEIISALMFLHDKGIIYRDLKLDNVLLDQICGL

SEQ ID NO: 789023 - protein, 470 aa, Homo sapiens
MSSGTMKFNGYLRVRIGEAVGLQPTRWSLRHSLFKKGHQLLDPYLTVSVDQVRVGQTSTKQKTNKPTYNEEFCANVTDGGHLELAVFHETPLGYDHFVANCTLQFQELLGTTGASDTFEGWVDLEPEGKVFVVITLTGSFTEATLQRDRIFKHFTRKRQRAMRRRVHQINGHKFMATYLRQPTYCSHCREFIWGVFGKQGYQCQVCTCVVHKRCHHLIVTACTCQNNINKVDSKIAEQRFGINIPHKFSIHNYKVPTFCDHCGSLLWGIMRQGLQCKICKMNVHIRCQANVAPNCGVNAVELAKTLAGMGLQPGNISPTSKLVSRSTLRRQGKESSKEGNGIGVNSSNRLGIDNFEFIRVLGKGSFGKVMLARVKETGDLYAVKVLKKDVILQDDDVECTMTEKRILSLARNHPFLTQLFCCFQTPGFRSPMEKKTKCTDPSQPYTMILESCMWTRNAKGGSIRKRGLVL

SEQ ID NO: 789024 - protein, 478 aa, Homo sapiens
MSSGTMKFNGYLRVRIGEAVGLQPTRWSLRHSLFKKGHQLLDPYLTVSVDQVRVGQTSTKQKTNKPTYNEEFCANVTDGGHLELAVFHETPLGYDHFVANCTLQFQELLGTTGASDTFEGWVDLEPEGKVFVVITLTGSFTEATLQRDRIFKHFTRKRQRAMRRRVHQINGHKFMATYLRQPTYCSHCREFIWGVFGKQGYQCQVCTCVVHKRCHHLIVTACTCQNNINKVDSKIAEQRFGINIPHKFSIHNYKVPTFCDHCGSLLWGIMRQGLQCKICKMNVHIRCQANVAPNCGVNAVELAKTLAGMGLQPGNISPTSKLVSRSTLRRQGKESSKEGNGIGVNSSNRLGIDNFEFIRVLGKGSFGKVMLARVKETGDLYAVKVLKKDVILQDDDVECTMTEKRILSLARNHPFLTQLFCCFQTPDRLFFVMEFVNGGDLMFHIQKSRRFDEARARFYAAEIISALMFLHDKGIIYR

SEQ ID NO: 789025 - protein, 596 aa, Homo sapiens
MSSGTMKFNGYLRVRIGEAVGLQPTRWSLRHSLFKKGHQLLDPYLTVSVDQVRVGQTSTKQKTNKPTYNEEFCANVTDGGHLELAVFHETPLGYDHFVANCTLQFQELLGTTGASDTFEGWVDLEPEGKVFVVITLTGSFTEATLQRDRIFKHFTRKRQRAMRRRVHQINGHKFMATYLRQPTYCSHCREFIWGVFGKQGYQCQVCTCVVHKRCHHLIVTACTCQNNINKVDSKIAEQRFGINIPHKFSIHNYKVPTFCDHCGSLLWGIMRQGLQCKICKMNVHIRCQANVAPNCGVNAVELAKTLAGMGLQPGNISPTSKLVSRSTLRRQGKESSKEGNGIGVNSSNRLGIDNFEFIRVLGKGSFGKVMLARVKETGDLYAVKVLKKDVILQDDDVECTMTEKRILSLARNHPFLTQLFCCFQTPDRLFFVMEFVNGGDLMFHIQKSRRFDEARARFYAAEIISALMFLHDKGIIYRDLKLDNVLLDHEGHCKLADFGMCKEGICNGVTTATFCGTPDYIAPEILQEMLYGPAVDWWAMGVLLYEMLCGHAPFEAENEDDLFEAILNDEVVYPTWLHEDATGILKSVSLAYPASF

SEQ ID NO: 789026 - protein, 103 aa, Homo sapiens
ADQHLGRFGPALAHLRDPVLGRWDSAGPFLLACLPDKPESGPLGPPWGWTRPNRIPNDALGWEDGGTRRDEKETGHTLGSQPRPCPPGHIGTWAFSRVTARPA

SEQ ID NO: 789027 - protein, 102 aa, Homo sapiens
KKEGREKSQHVYYRMIRKWERKYPVQQNQLSNKPLSDGVTKAQRSSVSCSSGMRGRDQGKNTQVPSLCPHKFKISHKALVSSSKHGVISFYLLLNNLVATLT

SEQ ID NO: 789028 - protein, 130 aa, Homo sapiens [sequence omitted]

SEQ ID NO: 789029 - protein, 107 aa, Homo sapiens [sequence omitted]

SEQ ID NO: 789030 - protein, 117 aa, Homo sapiens
LFSSSRTFQNVFSRSAPCWPSYPKASPPPSPLRPKQAHRPQHCGRRRPNCCSSCGVAVEATRAGPDPDPDAPCPGGWEAPVGRPGARGAGESLRQLPGLGEVALSAGTPAQSQPDRG

SEQ ID NO: 789031 - protein, 141 aa, Homo sapiens
HPASTTGLSRHDESLTQGQTRTQRGDLGQGCLFSPYHTVDEINLKTAPWALTGPWILAHSTQSKLIPGKGHLLLPSSILVGWHPQSDISSEAIQSNIYLSRQGLTLSPRLECSGVITVHCNFCLLGLSDPSTSASQIVETT

SEQ ID NO: 789032 - protein, 145 aa, Homo sapiens
RDRGGPGVSSSQQRSCDPSAALMVPPPSVSFPVNEPEQLQSCPCPACPVAPLCFAHAVPLGCNTLPSLFARLTLTNPFKLCPSICCLQKALLKLLSPHLGTPTQCCRRALPSRSPGAGFCLCLAPLPICELSSQPRRVPNKCLLN

SEQ ID NO: 789033 - protein, 372 aa, Homo sapiens
MSKSESPKEPEQLRKLFIGELRFETTDESLRSHFEQWGTLTDCVVMRDPNTKRSRGFGFVTYATVEEVDAAMNARPHKVDGRVVEPKRAVSREDSQRPGAHLTVKKIFVGGIKEDTEEHHLRDYFEQYGKIEVIEIMTDRGSGKKRGFAFVTFDDHDSVDKIVIQKYHTVNGHNCEVRKALSKQEMASASSSQRGRSGSGNFGGGRGGGFGGNDNFGRGGNFSGRGGFGGSRGGGGYGGSGDGYNGFGNDGGYGGGGPGYSGGSRGYGSGGQGCGNQDSGYGRSGSYDSYNNGGRGGFGGGSGSNFGGGGSYNDFGNYNNQSSNFGPMKGGNFGADALAPRVMEANTLPNHETTGGYGGSSSSSSYGSGRRF

SEQ ID NO: 789034 - protein, 162 aa, Homo sapiens [sequence omitted]

SEQ ID NO: 789035 - protein, 83 aa, Homo sapiens
RSSPRRLLRHTLGEDSARCLSHNLLEISWSGISGCLVTPSEVLPFIPEHLWKQEAGSNGSERYSDLSISRKKKQRKKSPIRKA

SEQ ID NO: 789036 - protein, 80 aa, Homo sapiens
AGGGAWRSGHVGRAENAPGSSPGASCLSFPLGKWGFSGSRRTLMERMSRRRCTARSKTDTVLGPRAHVPGRRGSSINDQP

SEQ ID NO: 789037 - protein, 109 aa, Homo sapiens [sequence omitted]

SEQ ID NO: 789038 - protein, 168 aa, Homo sapiens
MFWRLSWGLLLGWRRFNLPRRLSWLLLLTGGKFRLYRRTWRLSWGLLLVCRRFHLFWRLSWGLLPSLRRFNLPRRLRRLSWLLLLTNGKFTLCRMTWRLGWGLLLGCRRFHLLWKLNWSLLLGLGRFFLIGRLRSYGNLHICRFNCNVGQVIMSLILTWRLNCHLMIW

SEQ ID NO: 789039 - protein, 93 aa, Homo sapiens
SRGPPVTCMYWGIRREDVGTPRKLGNELVAFEDVAVNFTQEEWALLDPSQKNLYRDVMQETFRNLASIGNKGEDQSIEDQYKNSSRNLRCTGS

SEQ ID NO: 789040 - protein, 431 aa, Homo sapiens
MSYPQFGYPYSSAPQFLMATNSLSTCCESGGRTLADSGPAASAQAPVYCPVYESRLLATARHELNSAAALGVYGGPYGGSQGYGNYVTYGSEASAFYSLNSFDSKDGSGSAHGGLAPAAAAYYPYEPALGQYPYDRYGTMDSGTRRKNATRETTSTLKAWLQEHRKNPYPTKGEKIMLAIITKMTLTQVSTWFANARRRLKKENKMTWPPRNKCADEKRPYAEGEEEEGGEEEAREEPLKSSKNAEPVGKEEKELELSDLDDFDPLEAEPPACELKPPFHSLDGGLERVPAAPDGPVKEASGALRMSLAAGGGAALDEDLERARSCLRSAAAGPEPLPGAEGGPQVCEAKLGFVPAGASAGLEAKPRIWSLAHTATAAAAAATSLSQTEFPSCMLKRQGPAAPAAVSSAPATSPSVALPHSGALDRHQDSR

SEQ ID NO: 789041 - protein, 322 aa, Homo sapiens
FFLRGLYIAIIFYYKDNILVTNEDQVPIVEIDDSHTSSITQDFLWFTKLSCMWEDIRWLRQSIPISSSSSTVLQTRQKMLAATAQLQNLLGTHNLGRVYYEPIKDRHGNILIVTIREVEMLYSFFNGKWMQISKLQSQRKSLSTPEEPTALDILLITIQDILSYHKRSHQRLFPGLYLGYLKLCSSVDQIKVLVTQKLPNILCHVKIRENNNISREEWEWIQKLSGSESMESVDHTSDCPMQLFFYELQMAVKALLQQINIPLHQARNFRLYTQEVLEMGHNVSFLLLSLPQTTSVQPQDRIILTTQTQGFLTSLFRCLNLV

SEQ ID NO: 789042 - protein, 103 aa, Homo sapiens
MGEPEGRWFSPGVGPLDCLGSPLIAPAKLRQLFLLPPVVACRHAGICRVLFLWRAPIHILSLSSCLCLLRCVPLHVQLLVCLPARILEVFIGTGWGRGEPGWS

SEQ ID NO: 789043 - protein, 102 aa, Homo sapiens [sequence omitted]

SEQ ID NO: 789044 - protein, 112 aa, Homo sapiens
GVQPSARSKLPYRWQQGRAAEAGPGALGPAPGALGAPCGQAGATSTRTHASWGSRVLAAAGIPGKAGTEKPGRHARPPSPGRTQQLRKDPAGRCARFPRGSGGKPSKGTLKI

SEQ ID NO: 789045 - protein, 202 aa, Homo sapiens
MEEPGATPQPYLGLVLEELGRVVAALPESMRPDENPYGFPSELVVCAAVIGFFVVLLFLWRSFRSVRSRLYVGREQKLGATLSGLIEEKCKLLEKFSLIQKEYEGYEVESSLEDASFEKAAAEEARSLEATCEKLSRSNSELEDEILCLEKDLKEEKSKHSQQDELMADISKSIQSLEDESKSLKSQIAEAKIICKTFKMSE

SEQ ID NO: 789046 - protein, 195 aa, Homo sapiens
ISCGLFQDGLIHTSLKPTEILYLTVAYDWFLFGHMLVDRLSKGEEIFFFCFNFLKHITSEEFSALKTQRRKSLPARDGGFTLEDICMLRRKDRGSTTSLGSDFSLVMESSPGATGSFTYEAVELVPAGAPTQAACCAALSDRETRLQEVRSAFLAAYSSTVGLRAVAPSPSGAIGGLLEQFARGVGLRSISSNAL

SEQ ID NO: 789047 - protein, 255 aa, Homo sapiens
ISCGLFQDGLIHTSLKPTEILYLTVAYDWFLFGHMLVDRLSKGEEIFFFCFNFLKHITSEEFSALKTQRRKSLPARDGGFTLEDICMLRRKDRGSTTSLGSDFSLVMESSPGATGSFTYEAVELVPAGAPTQAAWRKSHSSSPQSVLWNRPQPSEDRLPSQQGLAEARSSSSSSSNHSDNFFRMGEQSPGGPQTQLAALSDRETRLQEVRSAFLAAYSSTVGLRAVAPSPSGAIGGLLEQFARGVGLRSISSNAL

SEQ ID NO: 789048 - protein, 98 aa, Homo sapiens
DFPTKRPPVFRAGVITIATLVENKKAQLVVTGHDVDPIELVVFCLPPASAASSGKWVMIGRVWWLTPVIPALWEAEAGRSRGQEIKTILANMVKPRLY

SEQ ID NO: 789049 - protein, 131 aa, Homo sapiens
ASELPLKAGAQLGSTLEGNSRAATYSRSFNPAVPQPTHNGSKGWSSEKDLLLANHHSHFPVMLSGIRALISTYGMQDMVGGKGNYRQKPCESIKVTDRLDTRMRNKSSIIITENHQIAKDKKGIRHGGSSL

SEQ ID NO: 789050 - protein, 158 aa, Homo sapiens
LLFAKQEPCSHLNIFQANGILIFLRVLSPSRGRALAPLWPQDVNLCCLSQPRCSHSPSAMTLLGLVIGCPASPGLMRWPLQEDMWRRVSSPGGGSTWRKWFFSETLSYLHTMPVTMSSLYPPKTAEKKEGRNLDLSYDVTELASPGVFYLCPPCYETQ

SEQ ID NO: 789051 - protein, 121 aa, Homo sapiens [sequence omitted]

SEQ ID NO: 789052 - protein, 117 aa, Homo sapiens
QLESSSSDHFPNANGTPGLENSNFRYPIPGIPGVFMAVRALSACMYLARCPRPGMSTLSIVVVFLSLCTLLLMMSFSLSKSFTKLLLWFECVPQTSCIRKLRLGAVAHTRNHSTLGG

SEQ ID NO: 789053 - protein, 67 aa, Homo sapiens
LTGRTGGNPARAHLFSRMICRFYKWLQVPLRKAWDDFWGALAAVVQGPSQGNLASLSIMGLWMPAVT

SEQ ID NO: 789054 - protein, 125 aa, Homo sapiens
QYRHSWGARDPFFCQAASFCKPQGGRVPAVGQTSARPIRTPLSSGSNAAKEEAGGSVQRTVGVGSQGGIVEECGFPQAPLQAFTSSLCCKDVRMTDFGSHANQVPADLITHPLLFQDQEINFFCD

SEQ ID NO: 789055 - protein, 118 aa, Homo sapiens
  misc_feature (2)..(3): Xaa can be any naturally occurring amino acid
  misc_feature (5)..(5): Xaa can be any naturally occurring amino acid
  misc_feature (8)..(10): Xaa can be any naturally occurring amino acid
  misc_feature (12)..(12): Xaa can be any naturally occurring amino acid
  misc_feature (14)..(14): Xaa can be any naturally occurring amino acid
  misc_feature (17)..(17): Xaa can be any naturally occurring amino acid
  misc_feature (21)..(23): Xaa can be any naturally occurring amino acid
  misc_feature (26)..(26): Xaa can be any naturally occurring amino acid
  misc_feature (30)..(31): Xaa can be any naturally occurring amino acid
  misc_feature (36)..(37): Xaa can be any naturally occurring amino acid
  misc_feature (41)..(41): Xaa can be any naturally occurring amino acid
  misc_feature (45)..(45): Xaa can be any naturally occurring amino acid
  misc_feature (51)..(51): Xaa can be any naturally occurring amino acid
  misc_feature (59)..(59): Xaa can be any naturally occurring amino acid
  misc_feature (61)..(61): Xaa can be any naturally occurring amino acid
  misc_feature (65)..(67): Xaa can be any naturally occurring amino acid
  misc_feature (76)..(76): Xaa can be any naturally occurring amino acid
  misc_feature (81)..(82): Xaa can be any naturally occurring amino acid
  misc_feature (84)..(86): Xaa can be any naturally occurring amino acid
  misc_feature (89)..(90): Xaa can be any naturally occurring amino acid
  misc_feature (95)..(97): Xaa can be any naturally occurring amino acid
  misc_feature (101)..(101): Xaa can be any naturally occurring amino acid
MXXFXPLXXXHXGXGLXPGGXXXDGXPEGXXGGGCXXVGAXLLEXPGMNRXCRMAALRXVXGGSXXXEKKKKTPRXRAISXXCXXXALXXGVSRXXXLCCXLLSSQNLHTLFWWLGQI

SEQ ID NO: 789056 - protein, 111 aa, Homo sapiens
GLLTRTVLLLVVGTLRCWRVHVSLSRLATSLTPRTKWEPGLPHPLPVPSSAELSATDFCALYVSLGMKSPALDVRRDPVGWLRNICNFLLDTYLVPGTGKAVLHTLYIILP

SEQ ID NO: 789057 - protein, 119 aa, Homo sapiens
TTVFDSCNQSWVKKETAGTEQENCCGAWSPTPRLALFEELPTCAGLSSRGNTASADGAAVSPSTSQVPTPSPRPFSKGHSLPLLSFSTECKMSVLSEKSMTPVNWLCFCQRCKGLSFPS

SEQ ID NO: 789058 - protein, 135 aa, Homo sapiens
MLQGDHISVESRKTNFLNFSIYFCEKKKKARKYETECLISKILGFPVLLCYLYTQAKGEVFTGSKFQHLPTTWIPINFKHCVIRKNGQYCRHLSISIHILSTHTMLSFRYGTCKLEIIFRTFFLENILKLCSKNL

SEQ ID NO: 789059 - protein, 757 aa, Homo sapiens
MAGCIPEEKTYRRFLELFLGEFRGPCGGGEPEPEPEPEPEPEPEPESEPEPEPELVEAEAAEASVEEPGEEAATVAATEEGDQEQDPEPEEEAAVEGEEEEEGAATAAAAPGHSAVPPPPPQLPPLPPLPRPLSERITREEVEGESLDLCLQQLYKYNCPSFLAAALARATSDEVLQSDLSAHYIPKETDGTEGTVEIETVKLARSVFSKLHEICCSWVKDFPLRRRPQLYYETSIHAIKNMRRKMEDKHVCIPDFNMLFNLEDQEEQAYFAVFDGHGGVDAAIYASIHLHVNLVRQEMFPHDPAEALCRAFRVTDERFVQKAARESLRCGTTGVVTFIRGNMLHVAWVGDSQVMLVRKGQAVELMKPHKPDREDEKQRIEALGGCVVWFGAWRVNGSLSVSRAIGDAEHKPYICGDADSASTVLDGTEDYLILACDGFYDTVNPDEAVKVVSDHLKENNGDSSMVAHKLVASARDAGSSDNITVIVVFLRDMNKAVNVSEESDWTENSFQGGQEDGGDDKENHGECKRPWPQHQCSAPADLGYDGRVDSFTDRTSLSPGSQINVLEDPGYLDLTQIEASKPHSAQFLLPVEMFGPGAPKKANLINELMMEKKSVQSSLPEWSGAGEFPTAFNLGSTGEQIYRMQSLSPVCSGLENEQFKSPGNRVSRLSHLRHHYSKKWHRFRFNPKFYSFLSAQEPSHKIGTSLSSLTGSGKRNRIRSSLPWRQNSWKGYSENMRKLRKTHDIPCPDLPWSYKIE

SEQ ID NO: 789060 - protein, 156 aa, Homo sapiens [sequence omitted]

SEQ ID NO: 789061 - protein, 156 aa, Homo sapiens [sequence omitted]

SEQ ID NO: 789062 - protein, 301 aa, Homo sapiens
KKFQEIINRSSSEANQVVRPKTSSKWSAPGSAPQLTTAILEIKESILSLLIKLHHKLSGKQNSYYPPWLDDIEILIQPEIPKYSHGDGITAVERILLKAASQSRMNKRIIEEICRKVTPPVPPKKVTAAEKKTLDKEERRQKARERQQKLLAEFASRQKSFMETAMDVDSPENDIPMEITTAEPQVSEAVYDCVICGQSGPSSEDRPTGLVVLLQASQVRGVAGQCDPKSGHQEKTNYLGYVRVRRGYNTGIRKQPAEMAEGVVPALLKQPSHSDSGPKARSSPHRQLTTSRHHIHNSLPL

SEQ ID NO: 789063 - protein, 33 aa, Homo sapiens
MIAASRGCYGDAICYVYSYVYKAMSIKHTAFHT

SEQ ID NO: 789064 - protein, 82 aa, Homo sapiens
PGGDVLVGRAVAPGNTGWKWNRNEQGESRHHLGDSQGEESWIPGLSRKLLLCLIPNELKAGPSTPAGMCESRLVTTRRAGLN

SEQ ID NO: 789065 - protein, 131 aa, Homo sapiens
PALKSTTALKASNRRTPHTVCRRFAVSSVEHHTQYAGALQFPLWNTTHSMPALCSFLCGTPHTVCRRFAVSSVEHHTQYAGALQFPLWNTTHSMPALCSFLYETTLLSLTLTKNVSLQGRPSWPSQALSRG

SEQ ID NO: 789066 - protein, 67 aa, Homo sapiens
SHLCKGVPGTGGPITNLTCCQSQYISYSALELGPQCHLLFLRTLLHQPSGGSYSCCWNLAIWASLSG

SEQ ID NO: 789067 - protein, 67 aa, Homo sapiens; identical to SEQ ID NO: 789066

SEQ ID NO: 789068 - protein, 355 aa, Homo sapiens
  misc_feature (305)..(305): Xaa can be any naturally occurring amino acid
  misc_feature (308)..(308): Xaa can be any naturally occurring amino acid
  misc_feature (320)..(321): Xaa can be any naturally occurring amino acid
  misc_feature (327)..(327): Xaa can be any naturally occurring amino acid
  misc_feature (331)..(331): Xaa can be any naturally occurring amino acid
CLGLRWREQSPAHWSGVLADQVWTLTQTEEQLHCTVYRGDKSQASRPTPDELEAVRKYFQLDVTLAQLYHHWGSVDSHFQEVAQKFQGVRLLRQDPIECLFSFICSSNNNIARITGMVERLCQAFGPRLIQLDDVTYHGFPSLQALAGPEVEAHLRKLGLGYRARYVSASARAILEEQGGLAWLQQLRESSYEEAHKALCILPGVGTKVADCICLMALDKPQAVPVDVHMWHIAQRDYSWHPTTSQAEGTEPPEQQELGNFFRSLWGPYAGWGPAVLFSADLRQCSHAQEPPEKRRKGSKGPEGXMGXPGERNSPSTFPXXPHISLXFPSXSHVGEGPPFDYLKGQAPPNQAVSC

SEQ ID NO: 789069 - protein, 143 aa, Homo sapiens
GRLLPFKAGLARAVGGPEEVRGPSVMPPPPPRQGCSLRFRVATAAGPVQVRGARLPSFAAPERGLAQVRAVPGSPGSARGPGSTVAAWGWASSLNRSWELGSWRVQDENSVALLPRSCLWFRDQKGVLRTGGRNPGVAYWKAH

SEQ ID NO: 789070 - protein, 143 aa, Homo sapiens; identical to SEQ ID NO: 789069

SEQ ID NO: 789071 - protein, 338 aa, Homo sapiens
  misc_feature (280)..(280): Xaa can be any naturally occurring amino acid
  misc_feature (338)..(338): Xaa can be any naturally occurring amino acid
SALRLLFSAHSRRGLLAAEALSRGLVPSGSLPEQLLLQGGSGAGAVQLPGAENRRARHPPLPCKGHEKGSSWRSADMEEDLFQLRQLPVVKFRRTGESARSEDDTASGEHEVQIEGVHVGLEAVELDDGAAVPKEFANPTDDTFMVEDAVEAIGFGKFQWKLSVLTGLAWMADAMEMMILSILAPQLHCEWRLPSWQVALLTSVVFVGMMSSSTLWGNISDQYGRKTGLKISVLWTLYYGILSAFAPVYSWILVLRGLVGFGIGGVPQSVTLFAEFLPMXARAKCILLIEVFWAIGTVFEVVLAVFVMPSLGWRWLLISQLSAPLFAVLCFWLLKCKX

SEQ ID NO: 789072 - protein, 123 aa, Homo sapiens
MRTQSLLLLGALLAVGSQLPAVFGRKKGEKSGGCPPDDGPCLLSVPDQCVEDSQCPLTRKCCYRACFRQCVPRVSVKLGSCPEDQLRCLSPMNHLCHKDSDCSGKKRCCHSACGRDCRDPARG

SEQ ID NO: 789073 - protein, 187 aa, Homo sapiens
SKPEVVIIHDAVRPFVEEGVLLKVVTAAKEHGCSDYDLEFGTECLQLALKYCCTKAKLVEGSPDLWKVTYKRDLYAAESIIKERISQEICVVMDTEEDNKHVGHLLEEVLKSELNHVKVTSEALGHAGRHLQQIILDQCYNFVCVNVTTSDFQETQKLLSMLEESSLCILYPVVVVSVSEINADFSQ

SEQ ID NO: 789074 - protein, 255 aa, Homo sapiens
SKPEVVIIHDAVRPFVEEGVLLKVVTAAKEHGCSDYDLEFGTECLQLALKYCCTKAKLVEGSPDLWKVTYKRDLYAAESIIKERISQEICVVMDTEEDNKHVGHLLEEVLKSELNHVKVTSEALGHAGRHLQQIILDQCYNFVCVNVTTSDFQETQKLLSMLEESSLCILYPVVVVSVHFLDFKLVPPSQKMENLMQIREFAKEVKERNILLYGLLISYPQDDQKLQESLRQGAIIIASLIKERNSGLIGQLLIA

SEQ ID NO: 789075 - protein, 63 aa, Homo sapiens
MAEAWNGTRPPRKRGVQSAKCHFSLSSPTFKEERDDLTPGPTVIYQHNLKKTPKEAKEVRLEL

SEQ ID NO: 789076 - protein, 81 aa, Homo sapiens
NCPSTHPLKPDICLGVALATCLPDGPQTNRPLPSECATSRILILLASPRPLLESAPHHLFVATLPTASPLPAKPPAHGPPG

SEQ ID NO: 789077 - protein, 30 aa, Homo sapiens
MGVTLWLSMNSCDYSPTVGLNNQTADTTGA

SEQ ID NO: 789078 - protein, 250 aa, Homo sapiens
KRRSQALKASDHLSPGGPAGKGGAGDPQGAGADPGNQGHRCGRMGVTEAARLQAHTSHISLLSEGAKMHRWGSLPRNRGARRIATPGLGARASRSPERVKRTTCPVLQIEAFAGRDIGKKGGEGVQRKVGTAEFGISAETGKKINRSTSYMQSHGNCLGKRKWQRLGPLGQPGPVGCACEVSSSGAGPAAAVDRGGPCTSAPAAAPGNLSPDSRLLQNPLPAHLTANFASEGLEGVPGSCFPSCGTLPFP

SEQ ID NO: 789079 - protein, 122 aa, Homo sapiens
PAWSWWGSREEKVTQTLTPAEGAARQEEYRCAERPGSAIPASPVVSPAGPTCGPGLLPATQSSRIPLTILGSAAAPRGSPHASCLPLGSCQAQSPIPEGGPCFLLHALYPRALPGPVLSLQS

SEQ ID NO: 789080 - protein, 59 aa, Homo sapiens
MQTGGCEPKHRRMCPDDSSENIMKWRTFLPEERTVTQAGDVTHTLGSKGPKAGVPFTGP

SEQ ID NO: 789081 - protein, 273 aa, Homo sapiens
RKRRHSSSERYCQLMPGANYRAGAGAGAGARRPRGARDREEDGGGLEPAAVARDLLRGTSNMSFEELLELQSQVGTKTYKQLVAGNSPKKQASRPPIQNACVADKHRPLEMSAKIRVPFLRQVVPISKKVARDPRFDDLSGEYNPEVFDKTYQFLNDIRAKEKELVKKQLKKHLSGEEHEKLQQLLQRMEQQEMAQQERKQQQELHLALKQERRAQAQQGHRPYFLKKSEQRQLALAEKFKELKRSKKLENFLSRKRRRNAGKDRRHLPLSKE

SEQ ID NO: 789082 - protein, 267 aa, Homo sapiens
RKRRHSSSERYCQLMPGANYRAGAGAGAGARDREEDGGGLEPAAVARDLLRGTSNMSFEELLELQSQVGTKTYKQLVAGNSPKKQASRPPIQNACVADKHRPLEMSAKIRVPFLRQVVPISKKVARDPRFDDLSGEYNPEVFDKTYQFLNDIRAKEKELVKKQLKKHLSGEEHEKLQQLLQRMEQQEMAQQERKQQQELHLALKQERRAQAQQGHRPYFLKKSEQRQLALAEKFKELKRSKKLENFLSRKRRRNAGKDRRHLPLSKE

SEQ ID NO: 789083 - protein, 273 aa, Homo sapiens; identical to SEQ ID NO: 789081

SEQ ID NO: 789084 - protein, 273 aa, Homo sapiens; identical to SEQ ID NO: 789081

SEQ ID NO: 789085 - protein, 83 aa, Homo sapiens
LLLLLLLNSRPVDQGAETQQEIGELLESKEATKCRQGQETSPFEQRVIRNYPLLCHCPRETWICEDRFGHGWFPFKGKDHSCP

SEQ ID NO: 789086 - protein, 184 aa, Homo sapiens
RKRRHSSSERYCQLMPGANYRAGAGAGAGARRPRGARDREEDGGGLEPAAVARDLLRGTSNMSFEELLELQSQVGTKTYKQLVAGNSPKKQASRPPIQNACVADKHRPLEMSAKIRVPFLRQVVPISKKVARDPRFDDLSGEYNPEVFDKTYQFLNDIRAKEKEVYSLRLVYGEFCGVENEGTG

SEQ ID NO: 789087 - protein, 158 aa, Homo sapiens
MSSRKYQYRSKVWGKLGVGATYLGITSISAAIEDIRMNDSILGVNRKERLVKKQLKKHLSGEEHEKLQQLLQRMEQQEMAQQERKQQQELHLALKQERRAQAQQGHRPYFLKKSEQRQLALAEKFKELKRSKKLENFLSRKRRRNAGKDRRHLPLSKE

SEQ ID NO: 789088 - protein, 276 aa, Homo sapiens
RKRRHSSSERYCQLMPGANYRAGAGAGAGARRPRGARDREEDGGGLEPAAVARDLLRGTSNMSFEELLELQSQVGTKTYKQLVAGNSPKKQASRPPIQNACVADKHRPLEMSAKIRVPFLRQVVPISKKVARDPRFDDLSGEYNPEVFDKTYQFLNDIRAKEKELVKKQLKKHLSGEEHEKLQQLLQRMEQQEMAQQERKQQQELHLALKQERRAQAQQGHRPYFLKKSEQRQLALAEKFKELKRSKKLENFLSRKRRRNAGKDRRHLPLTNVILS

SEQ ID NO: 789089 - protein, 107 aa, Homo sapiens
RKRRHSSSERYCQLMPGANYRAGAGAGAGARRPRGARDREEDGGGLEPAAVARDLLRGTSNMSFEELLELQSQVGTKTYKQLVAGNSPKKQASRPPIQNACVADKHR

SEQ ID NO: 789090 - protein, 179 aa, Homo sapiens
LFPDEADQRQYEEWLFHTQQLLQMQLKVLEEQIGVHRKSRKALCAKQRTAKKAGREFPEADAEKLKLVTEQQSKIQKQLDQVRKQQKEHTNLMAEYRNKQQQQQQQQQQQQQQHSAVLALSPSQSPRLLTKLPGQLLPGHGLQPPQGPPGGQAGGLRLTPGGMALPGQPGGPFLNTALA

SEQ ID NO: 789091 - protein, 213 aa, Homo sapiens
LFPDEADQRQYEEWLFHTQQLLQMQLKVLEEQIGVHRKSRKALCAKQRTAKKAGREFPEADAEKLKLVTEQQSKIQKQLDQVGESKLQPSTQKAGKRVGMGGACPSLTSPTLPCEVRKQQKEHTNLMAEYRNKQQQQQQQQQQQQQQHSAVLALSPSQSPRLLTKLPGQLLPGHGLQPPQGPPGGQAGGLRLTPGGMALPGQPGGPFLNTALA

SEQ ID NO: 789092 - protein, 109 aa, Homo sapiens [sequence omitted]

SEQ ID NO: 789093 - protein, 77 aa, Homo sapiens
NRAGTNADIHPGLAAKAFYRPAQITLTALSLPIFPNPLSTPAKINNQITLCSPHMSYADFHISPTISSIWKALPKTC

SEQ ID NO: 789094 - protein, 134 aa, Homo sapiens
PSQAHHYHPSNSDIATEIMHNLLTRGSPPLTTHPPSSLPCPAPRKHAYHLHKTLPHLPFIYQIKSTHPGLAAKAFYRPAQITLTALSLPIFPNPLSTPAKINNQITLCSPHMSYADFHISPTISSIWKALPKTC

SEQ ID NO: 789095 - protein, 257 aa, Homo sapiens
MKQRKGQGSGGSRGRKKRGLSDISPSTSLPPLVEGQLRCFLKLTVNRVIWKIAKPPTCVLVRVRWWGETSDGTLFCPRDALQTEPKAVRTTTRYAIRCGPKQFTSYLTDMAVLVLEVITKLDGLPIGRVQINGLAQLSPTHQINGFFTIVSSTSKKLGELQVSLALEPLSETYDSYHPLPTTDMTENVLLSKQGFRENTEPSSTQFQVPSRPRDIHTIKIDGKELAANSSRSTTPRGKDHVCFAENTVKSRYELDDH

SEQ ID NO: 789096 - protein, 104 aa, Homo sapiens
CFILMMISYFQIFSTVLRIPSGQSRAKAFSTCSPQLIVIMLFLTTGLFAALGPIAKALSIQDLVIALTYTVLPPFLNPIIYSLRNKEIKTAMWRLFVKIYFLQK

SEQ ID NO: 789097 - protein, 147 aa, Homo sapiens
MLPMGKERPTAFAATATTAITATTAATATATTTTITTMAATATATSSLFSLLSSSSSSSSSSSLFSFRLLLPPLPPPLPPPLPPTFSSSSSSSSFFLLFLPLLLSPSSFSLPLFLPLRLPFLPSSPLPFPPSFFLSFSLLLLFLPLL

SEQ ID NO: 789098 - protein, 162 aa, Homo sapiens
GAGVLALLCPPHPLSVLSILGCFGVFYSPAALWSCHPELTSLPSAGCLQPLRETTAPPSAEAALGAAEGRRVDTNLASGRHQGLPQSGVDTGPILLSCSLQPRGPSAGASPWQLHPRPIRSQHLGPGMCLATRFPAILTKVRQPLAYSLRMTSKQLAFPWAA

SEQ ID NO: 789099 - protein, 98 aa, Homo sapiens
LSDSQVKSCYSVDLLDKGKIHVLRGTEPDGPRFHHTTQNCSCCCKWIPKPLLIDPPYIASVHLSFCTSCLLSQSFNANSTTACSWKLMIRNLEPSGFS

SEQ ID NO: 789100 - protein, 50 aa, Homo sapiens
MGRQMRLCLKKKKKKRKEIRNKSWKQQPTSHVGWAAAALVRLSNPIQAAL

SEQ ID NO: 789101 - protein, 90 aa, Homo sapiens
WRQGSAPGSYLRSGTGDESVRGVTRTLSHPPRSRRRAQAPRAQDQVACSCREAPFAPVGTGCGYLSVIPGTNERDEQDHLHRPPPSLTTL

SEQ ID NO: 789102 - protein, 120 aa, Homo sapiens
EVQDQPGQHKATPSLQKSFLTKITRACGMPPVLPATWEAKVEGLLEPSSSKLRWATITPLHSCLSSRVRPRLINKQTKNRINELLYSVTLKPNNLSYTLIIKHWSFGKYWLTELCTDSVC

SEQ ID NO: 789103 - protein, 203 aa, Homo sapiens
MNFNVWNIKEMLSIPSGSGNKKSSNWNNNQNDYSSLSDSQFLFGSQFCPENSETLSAPLDFGAHLRHSKQSQQNYLEGEPSIFTKYQTKPQLFGGDIKDGGLFPPPLSVGKSKGLLEQFEEKKKRAKDKCDSCRRLWKSLRTISVQEANLFWILWRLWPRHVSASCLRYQQRALVNDEHELSDPSLVSSGEVPHRVSDERMGI

SEQ ID NO: 789104 - protein, 139 aa, Homo sapiens
MNFNVWNIKEMLSIPSGSGNKKSSNWNNNQNDYSSLSDSQFLFGSQFCPENSETLSAPLDFGAHLRHSKQSQQNYLEGEPSIFTKYQTKPQLFGGDIKDGGLFPPPLSVGKSKGLLEQFEEKKKRAKDKCDRYVNLSNG

SEQ ID NO: 789105 - protein, 203 aa, Homo sapiens; identical to SEQ ID NO: 789103

SEQ ID NO: 789106 - protein, 116 aa, Homo sapiens
PWGNVLCDIATRPRRTRPCESTLYDTPSPPLRRYFVIFSPPNLRRYLVIFFPTPILKKILCNIVPPYLKKIFCNILPPLRMYFVKSVPSPQKIAPGRARWLTPVIPALWEAEAGRS

SEQ ID NO: 789107 - protein, 210 aa, Homo sapiens [sequence omitted]

SEQ ID NO: 789108 - protein, 175 aa, Homo sapiens
SASAQPQSVRRQLCRAQTGSGWGGPQVLNLVPGEPERTLEQEEKEKLVSEAPPPPGAMQSLRPEQTRGLLEPERTKTLLPRESRAWEKPPHPACTKDWEAVEVGASSHDSDEKDLSSQETGLSQEWSSVEEDDESEGSQGFVEWSKAPQQTTIVLVVCVLFLFLVLTGMPMMFHI

SEQ ID NO: 789109 - protein, 196 aa, Homo sapiens
MDCRAFHYNVSSHGCQLLPWTQHSPHTRLRHSGRCDLFQEKGTCPRSGMAWKRTSAVTLMATPEVLGATQQTLPCASRAAASNPAGRVCLVQWRGIPRRVDRTESGRECQRWDLQHPHQHPFEPGKFLDQGLDDNYCRNPDGSERPWCYTTDPQIEREFCDLPRCGRRRGPGLGGYLGTLGRGVAWPGRSEGLGVT

SEQ ID NO: 789110 - protein, 104 aa, Homo sapiens
LGYSTQLKPKAFFLGNNPGLSDGLSLGQAAGPTPSPWCCGNTEYKRQTEGLKSSQKREITYARLPVKLIAGYSIAAIQVRIQWNNTCKVLRENNSQPRVQDPAK

SEQ ID NO: 789111 - protein, 67 aa, Homo sapiens
CFAEYRYKCQIYSSSLCCCEHGELELERFWQESSGLAAPKSWICYCLAERPWMCPFNLAEPVSASVK

SEQ ID NO: 789112 - protein, 152 aa, Homo sapiens
QTSYPPALRVSSAGPLTRSHLGPHVPAVLKAHCPLRTRHFCPSAQTVFSAWSTSPSLALLGRASLSSKISKASSHPANSSEFLTGILWPPPPASSKPPWFGLSEHTGFVLSLRMLYSQGRDGDFFLPSCVPRAQQDKEASANMQSIRGTECG

SEQ ID NO: 789113 - protein, 43 aa, Homo sapiens
MMCDFTEDQTTEFKEAFQLFDRTGDGKILYNQCGDVMRPLGQN

SEQ ID NO: 789114 - protein, 101 aa, Homo sapiens
GLMGTHGSQARAPDGAPAGRRVPHLGTTLDRALVIATITKAQEAGPDETSVHGVPRLCVGSGLACFTPCCGRAGLTSSDRRLCLLARRPARLAMVTWRGRH

SEQ ID NO: 789115 - protein, 178 aa, Homo sapiens
MAGQRTCQRRSSRAGPGKMQEPPKSIEEFLKFQNWDYWPREIHFRDDDKWSCTLKKIKEDSSFVSIYTHLWENVPRIFEALLIMESKLKEYSLILQNHTSEIFKWKSMISETSSYRKLERYGEFLKKYHKKKKIMLSDEMETEKNIEGCSFTGFKANELTQLPRHLDAEQIYLLFKSP

SEQ ID NO: 789116 - protein, 107 aa, Homo sapiens
AGTTAGGGLDGKFRLSLSISGGVALLPRGSGEGQGRVRPGPASSLAAFHPVSSRFLLGQQNWEAVLETYCQGVVAVSCEEMLIPEKSLHFAHLKDILIFGRPTHIEA

SEQ ID NO: 789117 - protein, 107 aa, Homo sapiens; identical to SEQ ID NO: 789116

SEQ ID NO: 789118 - protein, 107 aa, Homo sapiens; identical to SEQ ID NO: 789116

SEQ ID NO: 789119 - protein, 84 aa, Homo sapiens
AGTTAGGGLDGKFRLSLSISGGVALLPRGSGEGQGRVRPGPASSLAAFHPVSSRFLLGQQNWEAVLETYCQGVVAFGRPTHIEA

SEQ ID NO: 789120 - protein, 103 aa, Homo sapiens
AGTTAGGGLDGKFRLSLSISGGVALLPRGSGEGQGRVRPGPASSLAAFHPVSSRFLLGQQNWEAVLETYCQGVVAVSCEEMLIPEKSLHFAHLKDILIEFQES

SEQ ID NO: 789121 - protein, 84 aa, Homo sapiens; identical to SEQ ID NO: 789119

SEQ ID NO: 789122 - protein, 107 aa, Homo sapiens
SKQSYCLLCFQYRCRIRLLPTTLAVTILSRPLSHITWIIAVTCQFLCSDLKPFDIGARILLPKLCESNQITALFKSLQWFPRPLKIKNLSSYYNLWDSTCSDSTLPL

SEQ ID NO: 789123 - protein, 87 aa, Homo sapiens
MEQQGVEYQHNSQLLPVPRPCFQECFLAGSFLIDREFVICILRKVVVVDALLSQILEIRDDYVPFLFGEFPSLYVPPCSRLSSSPLP

SEQ ID NO: 789124 - protein, 86 aa, Homo sapiens
NRHTLQNKTIILDLAACRPATGLQFNNCALSANPGPGPESGPTNETQSQASRNQLSIKQQITTRSCGVYNDETEKVQRDKAQFTIH

SEQ ID NO: 789125 - protein, 109 aa, Homo sapiens
MPIKRLSLLCLPSSVLASIPSDQPCIPTPASLLQEALPPQLSCTILTFHAGLQHMPLCGPSSTLWKSQQRTQAGQMPMRVFGEKYITRDETTINDGMYADLRNVRWSAG

SEQ ID NO: 789126 - protein, 149 aa, Homo sapiens
MPIKRLSLLCLPSSVLASIPSDQPCIPTPASLLQEALPPQLSCTILTFHAGLQHMPACAVGQRHGRLPWARLFQPSIQLARQGFPVVKGLAAALENKQTVIEQQPVLCEVFCRDRKVLREGDRLTCRSWLTPIERMAYSTCPGNRNRLR

SEQ ID NO: 789127 - protein, 70 aa, Homo sapiens
VGIPGQPRAPDSAPRGDMDRMASSMKQVPNPLPMCCRPAGSALGWRRRSARASSGLRVAVGLALPPAYPV

SEQ ID NO: 789128 - protein, 90 aa, Homo sapiens
VGIPGQPRAPDSAPRGDMDRMASSMKQVPNPLPMCCRPAGSALGWRRRSARASSGLSSCRGDTRRRRKEKSRSPVLNRVLQSPPRIPLSL

SEQ ID NO: 789129 - protein, 125 aa, Homo sapiens
STTQGEESDKVSSLGGSWAAGSASKIITSNPDSAKPQPGNYFSQGVPALRARSGLQRQVYTPCQQNPFPDLCTSQPILRHAAFDDRKPTASHDGPSDFQTSLILKPAQPSYSSYPISPRTDFIVF

SEQ ID NO: 789130 - protein, 91 aa, Homo sapiens
PQFNSQDSQPRCVSHIAIAYDMHLHGFLLLQQGISSSCLPIMKKKISATTCPDAEKLAASKTVVHLANFLFQAFYCKENWPPWIKNISTFA

SEQ ID NO: 789131 - protein, 141 aa, Homo sapiens
WCFLPCTSDLCGVDGLVLRVPLDPVSLDPVFYLLPGHFGLLMSQDQQVRREVTVLAGGIGRGHVCETQASRLVPRAPLYWPQGLSHAPGEPLRLARVIAAAGGGIRNGGRDVHQLWPRDPWQGGEAGESLEVALANAQGSE

SEQ ID NO: 789132 - protein, 57 aa, Homo sapiens
RARYPAFFLSFTLVAVSQNHATVLQPGNKSETQKEEEEEEEEKEKKKGRRRRRRRRR

SEQ ID NO: 789133 - protein, 329 aa, Homo sapiens
MMEGNGTENSCSRTRGWLQQDNDAKPWLWKFSNCFSRPEQTLPHSPQTKEYMENKKVAVELKDVPSPLHAGSKLFPAVPLPDIRSLQQPKIQLSSVPKVSCCAHCPNEPSTSPMRFGGGGGGSGGTSSLIHPGALLDSQSTRTITCQVGSGFAFQSASSLQNASARNNLAGIASDFPSMCLESNLSSCKHLPCCGKLHFQSCHGNVHKLHQFPSLQGCTSAGYFPCSDFTSGAPGHLEEHISQSELTPHLCTNSLHLNVVPPVCLKGSLYCEDCLNKPARNSIIDAAKVWPNIPPPNTQPAPLAVPLCNGCGTKGTGKETTLLLATSLG

SEQ ID NO: 789134 - protein, 106 aa, Homo sapiens
IFTCDTTTETATACMVFLCSLLPVHIGRGHVLSVGTLPLSSLFILSIFHMDTLEKSMSFVVVVVVVVVVVVGGGSLVSYCLFIESSVGVLRCFQVLICDKLSLCRV

SEQ ID NO: 789135 - protein, 67 aa, Homo sapiens
MSKNEHRKGRDGDKCARQREWQAQRPAGMGAPSPCEALPLLPVQDGGGGGQPSIKHWNSSGRDGALR

SEQ ID NO: 789136 - protein, 188 aa, Homo sapiens
TENGKRTPFANEKTTSSSAEPTEHAERTPLANENTTSSPAEPTENRERTANEKTTQFPAEPTENRESTANEKTTPFPAEPTENREWTANENTTLSPAEPTEHEEMTPLANEKTTLSPAEPTENGERTPFTNEKTTPSSAEPTEHGERTPLANEITTPSRAEPTEHGERIANEKATPSPAKPTEHGETT

SEQ ID NO: 789137 - protein, 276 aa, Homo sapiens
SAAPTADSHSSSDKSVPGAQLLSTDHKHPAETMGPPSAAPRGGHRPWQGLLITASLLTFWDPPTTVQFTIEALPSSAAEGKDVLLLACNISETIQAYYWHKGKTAEGSPLIAGYITDIQANIPGAAYSGREQVYPNGSLLFQNITLEDAGSYTLRTINASYDSDQATGQLHVHQNNVPGLPVGAVAGIVTGVLVGVALVAALVCFLLLSRTGRASIQRDLREQPPPASTPGHGPSHRSTFSAPLPSPRTATPIYEELLYSDANIYCQIDHKADVVS

SEQ ID NO: 789138 - protein, 45 aa, Homo sapiens
MCIQRVSYSSQYLVNPEKLPSEPILTVRYKNSHPERLQNVVPLWF

SEQ ID NO: 789139 - protein, 171 aa, Homo sapiens
MATGFMLPPTLSSELSMALPLIGHKTRVTCLSDLAFLAITWFPLRSSWPVEAEGCFYRQGIIDGLADEVISEGLAQCPKGRESALRGGLVFPSKFIQTAVKFKRSSSGLQPPFIWQQRSTTVKKSRYFKLWKRHRVTLKLDRASSYFQNLHSGPFVPFRGSFEEWVKATSS

SEQ ID NO: 789140 - protein, 286 aa, Homo sapiens
  misc_feature (16)..(17): Xaa can be any naturally occurring amino acid
  misc_feature (32)..(32): Xaa can be any naturally occurring amino acid
  misc_feature (37)..(37): Xaa can be any naturally occurring amino acid
  misc_feature (44)..(46): Xaa can be any naturally occurring amino acid
  misc_feature (48)..(49): Xaa can be any naturally occurring amino acid
  misc_feature (51)..(52): Xaa can be any naturally occurring amino acid
  misc_feature (65)..(65): Xaa can be any naturally occurring amino acid
  misc_feature (67)..(67): Xaa can be any naturally occurring amino acid
  misc_feature (71)..(71): Xaa can be any naturally occurring amino acid
  misc_feature (74)..(74): Xaa can be any naturally occurring amino acid
  misc_feature (81)..(83): Xaa can be any naturally occurring amino acid
  misc_feature (85)..(85): Xaa can be any naturally occurring amino acid
  misc_feature (92)..(95): Xaa can be any naturally occurring amino acid
  misc_feature (98)..(98): Xaa can be any naturally occurring amino acid
  misc_feature (101)..(102): Xaa can be any naturally occurring amino acid
  misc_feature (104)..(104): Xaa can be any naturally occurring amino acid
  misc_feature (106)..(108): Xaa can be any naturally occurring amino acid
  misc_feature (115)..(115): Xaa can be any naturally occurring amino acid
  misc_feature (121)..(121): Xaa can be any naturally occurring amino acid
  misc_feature (125)..(127): Xaa can be any naturally occurring amino acid
  misc_feature (131)..(131): Xaa can be any naturally occurring amino acid
  misc_feature (159)..(159): Xaa can be any naturally occurring amino acid
  misc_feature (167)..(167): Xaa can be any naturally occurring amino acid
  misc_feature (169)..(169): Xaa can be any naturally occurring amino acid
  misc_feature (174)..(174): Xaa can be any naturally occurring amino acid
  misc_feature (179)..(179): Xaa can be any naturally occurring amino acid
  misc_feature (184)..(185): Xaa can be any naturally occurring amino acid
GGGATSGPRRRRQRPXXIASRAGAGQGVGCSXSRRRXRPVHGGXXXLXXYXXKKMQAHELFRYFXMXKLVXFRXYVRTLPXXXLXGFGAFAXXXXFWXATXXKXLXXXCDLSMQXVEVAGXGGAXXXALLXSDEPLVIISNEMNVTTIKQKAFQKGNTXCQNKWPLXLXLSENXDQTLXNWRFXXNRVAELSECIGSALIQKGFKTAPDQFIGIFAQNRPEWVIIEQGCFAYSMVIVPLYDTLGNEAITYIVNKAELSLVFVDKPEKAKLLLEGVENKLIPGLKII

SEQ ID NO: 789141 - protein, 121 aa, Homo sapiens
LVRVPALRAAKSSGSVRSQTPKRPPHRRVARPPPGFLGSSTSDHSPCLPSSKEQALLVFPGSPVVRPTPGPFPMAACPAAQGSPPCTVLPAQSLWHAGPKAVGRVRGHCRPEPPFFHGVRP

SEQ ID NO: 789142 - protein, 113 aa, Homo sapiens
ILVVSPQLTQIWGCNSVQLTQRGSGSLELRSVVRLHSGHTLRPWQIWLPWNSGCQLFPVHTLDLCCFPLRAASIPPPIISYPQTHPSSPGQPPHPPPITLHLPLSQTTRVSHL

SEQ ID NO: 789143 - protein, 142 aa, Homo sapiens
PLTAPTLLCSLAHTGVWDLLPPTTIPCRKLVLPWKTVTICVMRAGVKCKSFLHPQIMQELWQLTKQTNRTETFRHSSPSLTMPILPRWAGMQGASHFGVALPTKYTTGLCVLGGLMHREMGWDTCTAQQRQRQARGQGPATP

SEQ ID NO: 789144 - protein, 134 aa, Homo sapiens
TCTDMNAYTCARRHSSTYSDHITLQGAFACTHTWAQSCTCQPPPTPAAKCLDRGQSSGMLHAGCVGWGGGTHVRVDLSSQLNRRVRPHLCMLRCWSSCHRASVSCTHPSLHTTGPVLISARTGADHTWYTAGTY

SEQ ID NO: 789145 - protein, 91 aa, Homo sapiens
GSQGWLDLGSILDEAGDEQSEACKRSSVLRSGINQHQPKVPEKSRWAQDAEHQAAPRQSHSETCIHPDNLAPPMFTHTVEASASGGTTDHL

SEQ ID NO: 789146 - protein, 292 aa, Homo sapiens
WLPESARYDVLSGNQEKAIATLKRIATENGAPMPLGKLIISRQEDRGKMRDLFTPHFRWTTLLLWFIWFSNAFSYYGLVLLTTELFQAGDVCGISSRKKAVEAKCSLACEYLSEEDYMDLLWTTLSEFPGVLVTLWIIDRLGRKKTMALCFVIFSFCSLLLFICVGRNVLTLLLFIARAFISGGFQAAYVYTPEVYPTATRALGLGTCSGMARVGALITPFIAQVMLESSVYLTLAVYSGCCLLAALASCFLPIETKGRGLQESSHREWGQEMVGRGMHGAGVTRSNSGSQE

SEQ ID NO: 789147 - protein, 83 aa, Homo sapiens
GGVWLRCFPRGLLCPPGDLPQVLTGLSRGPPVEPGPPLPGLGPSRTPHLWDWAWLVPMTELSGEATFSWLQESHGPGILGVHP

SEQ ID NO: 789148 - protein, 297 aa, Homo sapiens
MDCQENEYWDQWGRCVTCQRCGPGQELSKDCGYGEGGDAYCTACPPRRYKSSWGHHRCQSCITCAVINRVQKVNCTATSNAVCGDCLPRFYRKTRIGGLQDQECIPCTKQTPTSEVQCAFQLSLVEADAPTVPPQEATLVALVSSLLVVFTLAFLGLFFLYCKQFFNRHCQRGGLLQFEADKTAKEESLFPVPPSKETSAESQVSENIFQTQPLNPILEDDCSSTSGFPTQESFTMASCTSESHSHWVHSPIECTELDLQKFSSSASYTGAETLGGNTVESTGDRLELNVPFEVPSP

SEQ ID NO: 789149 - protein, 198 aa, Homo sapiens
MDCQENEYWDQWGRCVTCQRCGPGQELSKDCGYGEGGDAYCTACPPRRYKSSWGHHRCQSCITCAVINRVQKVNCTATSNAVCGDCLPRFYRKTRIGGLQDQECIPCTKQTPTSEVQCAFQLSLVEADAPTVPPQEATLVALVSSLLVVFTLAFLGLFFLYCKQFFNRHCQRGKGGCFMFHMNQEQGSYWQKRGMFWG

SEQ ID NO: 789150 - protein, 122 aa, Homo sapiens
RSLEELVSAAGQDCAEVDAILREISERCDEALQSRDPKRPRLLPEPANTDTRPGNLHGAFRGLRTDCSRSALNLSHSELEEGGSFSTRIRSHSTIRTLAFPQGNAFTIRTANGGYKFRWVPS

SEQ ID NO: 789151 - protein, 357 aa, Homo sapiens
MRRTGPEEEACGVWLDAAALKRRKVQTHLIKPGTKMLTLLPGERKANIYFTQRRAPSTGIHQRSIASFFTLQPGKTNGSDQKSVSSHTESQINKESKKNATQLDHLIPGLAHDCMASPLATSTTADIQEAGLSPQSLQTSGHHRMKTPFSTELSLLQPDTPDCAGDSHTPLAFSFTEDLESSCLLDRKEEKGDSARKWEWLHESKKNYQSMEKHTKLPGDKCCQPLGKTKLERKVSAKENRQAPVLLQTYRESWNGENIESVKQSRSPVSVFSWDNEKNDKDSWSQLFTEDSQGQRVIAHNTRAPFQDVTNNWNWDLGPFPNSPWAQCQEDGPTQNLKPDLLFTQDSEGNQVIRHQF

SEQ ID NO: 789152 - protein, 298 aa, Homo sapiens
MRRTGPEEEACGVWLDAAALKRRKVQTHLIKPGTKMLTLLPGERKANIYFTQRRAPSTGIHQRSIASFFTLQPGKTNGSDQKSVSSHTESQINKESKKNATQLDHLIPGLAHDCMASPLATSTTADIQEAGLSPQSLQTSGHHRMKTPFSTELSLLQPDTPDCAGDSHTPLAFSFTEDLESSCLLDRKEEKGDSARKWEWLHESKKNYQSMEKHTKLPGDKCCQPLGKTKLERKVSAKENRQAPVLFQDVTNNWNWDLGPFPNSPWAQCQEDGPTQNLKPDLLFTQDSEGNQVIRHQF

SEQ ID NO: 789153 - protein, 357 aa, Homo sapiens; identical to SEQ ID NO: 789151

SEQ ID NO: 789154 - protein, 93 aa, Homo sapiens
EAPGSLRRRPAGFVSSAAMRRTGPEEEACGVWLDAAALKRRKVQTHLIKPGTKMLTLLPGERKANIYFTQRRAPSTGIHQRSIASFFTLQPDV

SEQ ID NO: 789155 - protein, 121 aa, Homo sapiens
MGHLPTGIHGARRLLPLLWLFVLFKNATAFHVTVQDDNNIVVSLEASDVISPASVYVVKITGESKNYFFEFEEFNSTLPPPVIFKASYHGLYYIITLVVVNGNVVTKPSRSITVLTSKHHV

SEQ ID NO: 789156 - protein, 1216 aa, Homo sapiens
MGHLPTGIHGARRLLPLLWLFVLFKNATAFHVTVQDDNNIVVSLEASDVISPASVYVVKITGESKNYFFEFEEFNSTLPPPVIFKASYHGLYYIITLVVVNGNVVTKPSRSITVLTKPLPVTSVSIYDYKPSPETGVLFEIHYPEKYNVFTRVNISYWEGKDFRTMLYKDFFKGKTVFNHWLPGMCYSNITFQLVSEATFNKSTLVEYSGVSHEPKQHRTAPYPPQNISVRIVNLNKNNWEEQSGNFPEESFMRSQDTIGKEKLFHFTEETPEIPSGNISSGWPDFNSSDYETTSQPYWWDSASAAPESEDEFVSVLPMEYENNSTLSETEKSTSGSFSFFPVQMILTWLPPKPPTAFDGFHIHIEREENFTEYLMVDEEAHEFVAELKEPGKYKLSVTTFSSSGSCETRKSQSAKSLSFYISPSGEWIEELTEKPQHVSVHVLSSTTALMSWTSSQENYNSTIVSVVSLTCQKQKESQRLEKQYCTQVNSSKPIIENLVPGAQYQVVIYLRKGPLIGPPSDPVTFAIVPTGIKDLMLYPLGPTAVVLSWTRPYLGVFRKYVVEMFYFNPATMTSEWTTYYEIAATVSLTASVRIANLLPAWYYNFRVTMVTWGDPELSCCDSSTISFITAPVAPEITSVEYFNSLLYISWTYGDDTTDLSHSRMLHWMVVAEGKKKIKKSVTRNVMTAILSLPPGDIYNLSVTACTERGSNTSMLRLVKLEPAPPKSLFAVNKTQTSVTLLWVEEGVADFFEVFCQQVGSSQKTKLQEPVAVSSHVVTISSLLPATAYNCSVTSFSHDSPSVPTFIAVSTMVTEMNPNVVVISVLAILSTLLIGLLLVTLIILRKKHLQMARECGAGTFVNFASLERDGKLPYNWRRSIFAFLTLLPSCLWTDYLLAFYINPWSKNGLKKRKLTNPVQLDDFDAYIKDMAKDSDYKFSLQFEELKLIGLDIPHFAADLPLNRCKNRYTNILPYDFSRVRLVSMNEEEGADYINANYIPGYNSPQEYIATQGPLPETRNDFWKMVLQQKSQIIVMLTQCNEKRRVKCDHYWPFTEEPIAYGDITVEMISEEEQDDWACRHFRINYADEMQDVMHFNYTAWPDHGVPTANAAESILQFVHMVRQQATKSKGPMIIHCSAGVGRTGTFIALDRLLQHIRDHEFVDILGLVSEMRSYRMSMVQTEEQYIFIHQCVQLMWMKKKQQFCISDVIYENVSKS

SEQ ID NO: 789157 - protein, 377 aa, Homo sapiens
MVTEMNPNVVVISVLAILSTLLIGLLLVTLIILRKKHLQMARECGAGTFVNFASLERDGKLPYNWSKNGLKKRKLTNPVQLDDFDAYIKDMAKDSDYKFSLQFEELKLIGLDIPHFAADLPLNRCKNRYTNILPYDFSRVRLVSMNEEEGADYINANYIPGYNSPQEYIATQGPLPETRNDFWKMVLQQKSQIIVMLTQCNEKRRVKCDHYWPFTEEPIAYGDITVEMISEEEQDDWACRHFRINYADEMQDVMHFNYTAWPDHGVPTANAAESILQFVHMVRQQATKSKGPMIIHCSAGVGRTGTFIALDRLLQHIRDHEFVDILGLVSEMRSYRMSMVQTEEQYIFIHQCVQLMWMKKKQQFCISDVIYENVSKS

SEQ ID NO: 789158 - protein, 377 aa, Homo sapiens; identical to SEQ ID NO: 789157

SEQ ID NO: 789159 - protein, 1216 aa, Homo sapiens; identical to SEQ ID NO: 789156

SEQ ID NO: 789160 - protein, 1137 aa, Homo sapiens
MGHLPTGIHGARRLLPLLWLFVLFKNATAFHVTVQDDNNIVVSLEASDVISPASVYVVKITGESKNYFFEFEEFNSTLPPPVIFKASYHGLYYIITLVVVNGNVVTKPSRSITVLTKPLPVTSVSIYDYKPSPETGVLFEIHYPEKYNVFTRVNISYWEGKDFRTMLYKDFFKGKTVFNHWLPGMCYSNITFQLVSEATFNKSTLVEYSGVSHEPKQHRTAPYPPQNISVRIVNLNKNNWEEQSGNFPEESFMRSQDTIGKEKLFHFTEETPEIPSGNISSGWPDFNSSDYETTSQPYWWDSASAAPESEDEFVSVLPMEYENNSTLSETEKSTSGSFSFFPVQMILTWLPPKPPTAFDGFHIHIEREENFTEYLMVDEEAHEFVAELKEPGKYKLSVTTFSSSGSCETRKSQSAKSLSFYISPSGEWIEELTEKPQHVSVHVLSSTTALMSWTSSQENYNSTIVSVVSLTCQKQKESQRLEKQYCTQVNSSKPIIENLVPGAQYQVVIYLRKGPLIGPPSDPVTFAIVPTGIKDLMLYPLGPTAVVLSWTRPYLGVFRKYVVEMFYFNPATMTSEWTTYYEIAATVSLTASVRIANLLPAWYYNFRVTMVTWGDPELSCCDSSTISFITAPVAPEITSVEYFNSLLYISWTYGDDTTDLSHSRMLHWMVVAEGKKKIKKSVTRNVMTAILSLPPGDIYNLSVTACTERGSNTSMLRLVKLEPAPPKSLFAVNKTQTSVTLLWVEEGVADFFEVFCQQVGSSQKTKLQEPVAVSSHVVTISSLLPATAYNCSVTSFSHDSPSVPTFIAVSTMVTEMNPNVVVISVLAILSTLLIGLLLVTLIILRKKHLQMARECGAGTFVNFASLERDGKLPYNWRRSIFAFLTLLPSCLWTDYLLAFYINPWSKNGLKKRKLTNPVQLDDFDAYIKDMAKDSDYKFSLQFEELKLIGLDIPHFAADLPLNRCKNRYTNILPYDFSRVRLVSMNEEEGADYINANYIPGYNSPQEYIATQGPLPETRNDFWKMVLQQKSQIIVMLTQCNEKRRVKCDHYWPFTEEPIAYGDITVEMISEEEQDDWACRHFRINYADEMQDVMHFNYTAWPDHGVPTANAAESILQFVHMVRQQATKSKGPMIIHCR

SEQ ID NO: 789161 - protein, 1188 aa, Homo sapiens
MGHLPTGIHGARRLLPLLWLFVLFKNATAFHVTVQDDNNIVVSLEASDVISPASVYVVKITGESKNYFFEFEEFNSTLPPPVIFKASYHGLYYIITLVVVNGNVVTKPSRSITVLTKPLPVTSVSIYDYKPSPETGVLFEIHYPEKYNVFTRVNISYWEGKDFRTMLYKDFFKGKTVFNHWLPGMCYSNITFQLVSEATFNKSTLVEYSGVSHEPKQHRTAPYPPQNISVRIVNLNKNNWEEQSGNFPEESFMRSQDTIGKEKLFHFTEETPEIPSGNISSGWPDFNSSDYETTSQPYWWDSASAAPESEDEFVSVLPMEYENNSTLSETEKSTSGSFSFFPVQMILTWLPPKPPTAFDGFHIHIEREENFTEYLMVDEEAHEFVAELKEPGKYKLSVTTFSSSGSCETRKSQSAKSLSFYISPSGEWIEELTEKPQHVSVHVLSSTTALMSWTSSQENYNSTIVSVVSLTCQKQKESQRLEKQYCTQVNSSKPIIENLVPGAQYQVVIYLRKGPLIGPPSDPVTFAIVPTGIKDLMLYPLGPTAVVLSWTRPYLGVFRKYVVEMFYFNPATMTSEWTTYYEIAATVSLTASVRIANLLPAWYYNFRVTMVTWGDPELSCCDSSTISFITAPVAPEITSVEYFNSLLYISWTYGDDTTDLSHSRMLHWMVVAEGKKKIKKSVTRNVMTAILSLPPGDIYNLSVTACTERGSNTSMLRLVKLEPAPPKSLFAVNKTQTSVTLLWVEEGVADFFEVFCQQVGSSQKTKLQEPVAVSSHVVTISSLLPATAYNCSVTSFSHDSPSVPTFIAVSTMVTEMNPNVVVISVLAILSTLLIGLLLVTLIILRKKHLQMARECGAGTFVNFASLERDGKLPYNWSKNGLKKRKLTNPVQLDDFDAYIKDMAKDSDYKFSLQFEELKLIGLDIPHFAADLPLNRCKNRYTNILPYDFSRVRLVSMNEEEGADYINANYIPGYNSPQEYIATQGPLPETRNDFWKMVLQQKSQIIVMLTQCNEKRRVKCDHYWPFTEEPIAYGDITVEMISEEEQDDWACRHFRINYADEMQDVMHFNYTAWPDHGVPTANAAESILQFVHMVRQQATKSKGPMIIHCSAGVGRTGTFIALDRLLQHIRDHEFVDILGLVSEMRSYRMSMVQTEEQYIFIHQCVQLMWMKKKQQFCISDVIYENVSKS

SEQ ID NO: 789162 - protein, 405 aa, Homo sapiens
MVTEMNPNVVVISVLAILSTLLIGLLLVTLIILRKKHLQMARECGAGTFVNFASLERDGKLPYNWRRSIFAFLTLLPSCLWTDYLLAFYINPWSKNGLKKRKLTNPVQLDDFDAYIKDMAKDSDYKFSLQFEELKLIGLDIPHFAADLPLNRCKNRYTNILPYDFSRVRLVSMNEEEGADYINANYIPGYNSPQEYIATQGPLPETRNDFWKMVLQQKSQIIVMLTQCNEKRRVKCDHYWPFTEEPIAYGDITVEMISEEEQDDWACRHFRINYADEMQDVMHFNYTAWPDHGVPTANAAESILQFVHMVRQQATKSKGPMIIHCSAGVGRTGTFIALDRLLQHIRDHEFVDILGLVSEMRSYRMSMVQTEEQYIFIHQCVQLMWMKKKQQFCISDVIYENVSKS

SEQ ID NO: 789163 - protein, 405 aa, Homo sapiens; identical to SEQ ID NO: 789162

SEQ ID NO: 789164 - protein, 1216 aa, Homo sapiens; identical to SEQ ID NO: 789156

SEQ ID NO: 789165 - protein, 1216 aa, Homo sapiens; identical to SEQ ID NO: 789156

SEQ ID NO: 789166 - protein, 597 aa, Homo sapiens
MGHLPTGIHGARRLLPLLWLFVLFKNATAFHVTVQDDNNIVVSLEASDVISPASVYVVKITGESKNYFFEFEEFNSTLPPPVIFKASYHGLYYIITLVVVNGNVVTKPSRSITVLTKPLPVTSVSIYDYKPSPETGVLFEIHYPEKYNVFTRVNISYWEGKDFRTMLYKDFFKGKTVFNHWLPGMCYSNITFQLVSEATFNKSTLVEYSGVSHEPKQHRTAPYPPQNISVRIVNLNKNNWEEQSGNFPEESFMRSQDTIGKEKLFHFTEETPEIPSGNISSGWPDFNSSDYETTSQPYWWDSASAAPESEDEFVSVLPMEYENNSTLSETEKSTSGSFSFFPVQMILTWLPPKPPTAFDGFHIHIEREENFTEYLMVDEEAHEFVAELKEPGKYKLSVTTFSSSGSCETRKSQSAKSLSFYISPSGEWIEELTEKPQHVSVHVLSSTTALMSWTSSQENYNSTIVSVVSLTCQKQKESQRLEKQYCTQVNSSKPIIENLVPGAQYQVVIYLRKGPLIGPPSDPVTFAIVPTGIKDLMLYPLGPTAVVLSWTRPYLGVFRKYVVEMFYFNPATMTSEWTTYYEIAATVSLTASVVIFP

SEQ ID NO: 789167 - protein, 119 aa, Homo sapiens
GPKADAGRICLREEPPPGLNRRGPVRNVHLSGGSCGCEGHKQERGRSLRGGFPHAGGALRRRGPQGPGVLTPPRPGRVREPLVLPRPSRSWPRTQPGTQRPSAPGSARTLRARRSRTAR

SEQ ID NO: 789168 - protein, 126 aa, Homo sapiens
MFDPSHSMGVMSKLGLTDVGPSLSAPHAAFLKLGFSSERKECQRCIVACAFLPKLPDKLTRFSCLKRVKLHLFCPSSSNKSCKYTPLGKRQMVTKLLLSGIEIISDRHWNNFLNYYYLSSTLLHSP

SEQ ID NO: 789169 - protein, 117 aa, Homo sapiens
SQRRGSAVRGRSSGLDVARPVGQCPSWAGPVPPAPIPAETRHPPPPLPPPCRAPAPRPTPGGTCPLQLTLDVLYSLAAPAAVPLTAQVMALLSSQWLKFTLSFPCLTHARHIKACWH

SEQ ID NO: 789170 - protein, 419 aa, Homo sapiens [sequence omitted]

SEQ ID NO: 789171 - protein, 150 aa, Homo sapiens
MWSPAPKASFWSPLSTRSGGTHACSASMRQPCASPWSQGNISSTRPSLLRCANSLPSTKDKAKGPLLAGHPCPIFSPGPFPCGHREVWPEYPTPAPLHPELGATSEVSSLSEHAFPCSSRGLSRLSDAGAERPGRKGVQPVVCKALVGTC

SEQ ID NO: 789172 - protein, 94 aa, Homo sapiens
  misc_feature (4)..(5): Xaa can be any naturally occurring amino acid
ASAXXRKRRGTRLRRQSILARTSQGAKTRGTHGQTTDRRRTGRWTPLPPPSPRHLRPEDEPSLQGHGCGAPRQRRPSGALCPPGRGALMRAPLQ

SEQ ID NO: 789173 - protein, 100 aa, Homo sapiens
AGGAGGGARPGRSHFGARETIGRKRRGTRLRRQVKLASYGPSARGALREIFSGYWETGSLIIGVSQVIWERLLPWSLWGKSPGVPVDSISLGHLGGGFFF

SEQ ID NO: 789174 - protein, 418 aa, Homo sapiens
MVSSFLAVLIFVKFADEFGASGNIETKELGKKKTNVTIMLLTTLLPAKLKVLSAPHPLPGVVSVRFEEDEDRNLCLIAYPLKGDHGIVDIVDNSDCEPKSKLLRWTTNKKHHVLETEKTPKDWVRQHRKEEKMKSHKLEEEFEWLKKSEVLYYTVEKKGNISSQLKHYNPWSMKCHQQQLQRMKENAKHRNQYKFILLENLTSRYEVPCVLDLKMGTRQHGDDASEEKAANQIRKCQQSTSAVIGVRVCGMQVYQAGSGQLMFMNKYHGRKLSVQGFKEALFQFFHNGRYLRRELLGPVLKKLTELKAVLERQESYRFYSSSLLVIYDGKERPEVVLDSDAEDLEDLSEESADESAGAYAYKPIGASSVDVRMIDFAHTTCRLYGEDTVVHEGQDAGYIFGLQSLIDIVTEISEESGE

SEQ ID NO: 789175 - protein, 418 aa, Homo sapiens; identical to SEQ ID NO: 789174

SEQ ID NO: 789176 - protein, 418 aa, Homo sapiens; identical to SEQ ID NO: 789174

SEQ ID NO: 789177 - protein, 418 aa, Homo sapiens; identical to SEQ ID NO: 789174

SEQ ID NO: 789178 - protein, 418 aa, Homo sapiens; identical to SEQ ID NO: 789174

SEQ ID NO: 789179 - protein, 418 aa, Homo sapiens; identical to SEQ ID NO: 789174

SEQ ID NO: 789180 - protein, 418 aa, Homo sapiens; identical to SEQ ID NO: 789174

SEQ ID NO: 789181 - protein, 418 aa, Homo sapiens; identical to SEQ ID NO: 789174

SEQ ID NO: 789182 - protein, 418 aa, Homo sapiens; identical to SEQ ID NO: 789174

SEQ ID NO: 789183 - protein, 418 aa, Homo sapiens; identical to SEQ ID NO: 789174

SEQ ID NO: 789184 - protein, 418 aa, Homo sapiens; identical to SEQ ID NO: 789174

SEQ ID NO: 789185 - protein, 418 aa, Homo sapiens; identical to SEQ ID NO: 789174

SEQ ID NO: 789186 - protein, 418 aa, Homo sapiens; identical to SEQ ID NO: 789174

SEQ ID NO: 789187 - protein, 418 aa, Homo sapiens; identical to SEQ ID NO: 789174

SEQ ID NO: 789188 - protein, 123 aa, Homo sapiens
MDVEPRAKGVLLEPFVHQVGGHSCVLRFNETTLCKPLVPREHQFYETLPAEMRKFTPQYKGKSQLLEGLPHWRGDVRDRGHGRPWQPSLEPSLPPTLCFPSLSSFSSSWPSAQHLTPSVFNPW

SEQ ID NO: 789189 - protein, 123 aa, Homo sapiens; identical to SEQ ID NO: 789188

SEQ ID NO: 789190 - protein, 345 aa, Homo sapiens
VPAQTSFSTSSHGIVDIVDNSDCEPKSKLLRWTTNKKHHVLETEKTPKDWVRQHRKEEKMKSHKLEEEFEWLKKSEVLYYTVEKKGNISSQLKHYNPWSMKCHQQQLQRMKENAKHRNQYKFILLENLTSRYEVPCVLDLKMGTRQHGDDASEEKAANQIRKCQQSTSAVIGVRVCGMQVYQAGSGQLMFMNKYHGRKLSVQGFKEALFQFFHNGRYLRRELLGPVLKKLTELKAVLERQESYRFYSSSLLVIYDGKERPEVVLDSDAEDLEDLSEESADESAGAYAYKPIGASSVDVRMIDFAHTTCRLYGEDTVVHEGQDAGYIFGLQSLIDIVTEISEESGE

SEQ ID NO: 789191 - protein, 305 aa, Homo sapiens
MFLFVSPKDWVRQHRKEEKMKSHKLEEEFEWLKKSEVLYYTVEKKGNISSQLKHYNPWSMKCHQQQLQRMKENAKHRNQYKFILLENLTSRYEVPCVLDLKMGTRQHGDDASEEKAANQIRKCQQSTSAVIGVRVCGMQVYQAGSGQLMFMNKYHGRKLSVQGFKEALFQFFHNGRYLRRELLGPVLKKLTELKAVLERQESYRFYSSSLLVIYDGKERPEVVLDSDAEDLEDLSEESADESAGAYAYKPIGASSVDVRMIDFAHTTCRLYGEDTVVHEGQDAGYIFGLQSLIDIVTEISEESGE

SEQ ID NO: 789192 - protein, 246 aa, Homo sapiens [sequence omitted]

SEQ ID NO: 789193 - protein, 168 aa, Homo sapiens
  misc_feature (51)..(53): Xaa can be any naturally occurring amino acid
  misc_feature (55)..(58): Xaa can be any naturally occurring amino acid
  misc_feature (60)..(60): Xaa can be any naturally occurring amino acid
  misc_feature (64)..(66): Xaa can be any naturally occurring amino acid
  misc_feature (68)..(68): Xaa can be any naturally occurring amino acid
  misc_feature (71)..(73): Xaa can be any naturally occurring amino acid
  misc_feature (76)..(76): Xaa can be any naturally occurring amino acid
  misc_feature (80)..(80): Xaa can be any naturally occurring amino acid
  misc_feature (82)..(83): Xaa can be any naturally occurring amino acid
  misc_feature (85)..(87): Xaa can be any naturally occurring amino acid
  misc_feature (89)..(91): Xaa can be any naturally occurring amino acid
  misc_feature (93)..(93): Xaa can be any naturally occurring amino acid
  misc_feature (95)..(96): Xaa can be any naturally occurring amino acid
  misc_feature (99)..(99): Xaa can be any naturally occurring amino acid
  misc_feature (101)..(102): Xaa can be any naturally occurring amino acid
  misc_feature (105)..(105): Xaa can be any naturally occurring amino acid
  misc_feature (110)..(110): Xaa can be any naturally occurring amino acid
  misc_feature (115)..(119): Xaa can be any naturally occurring amino acid
  misc_feature (121)..(124): Xaa can be any naturally occurring amino acid
  misc_feature (126)..(131): Xaa can be any naturally occurring amino acid
  misc_feature (138)..(143): Xaa can be any naturally occurring amino acid
  misc_feature (148)..(148): Xaa can be any naturally occurring amino acid
  misc_feature (161)..(161): Xaa can be any naturally occurring amino acid
MDVEPRAKGVLLEPFVHQVGGHSCVLRFNETTLCKPLVPREHQFYETLPAXXXPXXXXSXFLCXXXSXDLXXXFLXFFNXIXXFXXXSXXXEXFXXLPXPXXSFXAQAHXVFLYXXXXXFXXXXFXXXXXXPFIGTSXXXXXXAGSVXWRCTFCSVCSAYXGMLLIFA

SEQ ID NO: 789194 - protein, 162 aa, Homo sapiens
SLIKLIFPPPPGNAEEPGCGGSRASWPEQAKEPRREGHTDKQQTEDVLAAGLRCLPHLPAICARRMSPAFRAMDVEPRAKGVLLEPFVHQVGGHSCVLRFNETTLCKPLVPREHQFYETLPAEMRKFTPQYKGQSQRPLVSWPSLPHFFPWSFPLWPQGSVA

SEQ ID NO: 789195 - protein, 150 aa, Homo sapiens; identical to SEQ ID NO: 789171

SEQ ID NO: 789196 - protein, 112 aa, Homo sapiens
AGGAGGGARPGRSHFGARETIGRKRRGTRLRRQQSILARTSQGAKTRGTHGQTTDRRRTGRWTPLPPPSPRHLRPEDEPSLQGHGCGAPRQRRPSGALCPPGRGALMRAPLQ

SEQ ID NO: 789197 - protein, 418 aa, Homo sapiens; identical to SEQ ID NO: 789174

SEQ ID NO: 789198 - protein, 418 aa, Homo sapiens; identical to SEQ ID NO: 789174

SEQ ID NO: 789199 - protein, 418 aa, Homo sapiens; identical to SEQ ID NO: 789174

SEQ ID NO: 789200 - protein, 418 aa, Homo sapiens; identical to SEQ ID NO: 789174

SEQ ID NO: 789201 - protein, 400 aa, Homo sapiens
MVSSFLAVLIFVKFADEFGASGNIETKELGKKKTNVTIMLLTTLLPAKLKVLSAPHPLPGVVSVRFEEDEDRNLCLIAYPLKGDHGIVDIVDNSDCEPKSKLLRWTTNKKHHVLETEKTPKDWVRQHRKEEKMKSHKLEEEFEWLKKSEVLYYTVEKKGNISSQLKHYNPWSMKCHQQQLQRMKENAKHRNQYKFILLENLTSRYEVPCVLDLKMGTRQHGDDASEEKAANQIRVYQAGSGQLMFMNKYHGRKLSVQGFKEALFQFFHNGRYLRRELLGPVLKKLTELKAVLERQESYRFYSSSLLVIYDGKERPEVVLDSDAEDLEDLSEESADESAGAYAYKPIGASSVDVRMIDFAHTTCRLYGEDTVVHEGQDAGYIFGLQSLIDIVTEISEESGE

SEQ ID NO: 789202 - protein, 123 aa, Homo sapiens; identical to SEQ ID NO: 789188

SEQ ID NO: 789203 - protein, 123 aa, Homo sapiens; identical to SEQ ID NO: 789188

SEQ ID NO: 789204 - protein, 123 aa, Homo sapiens; identical to SEQ ID NO: 789188

SEQ ID NO: 789205 - protein, 249 aa, Homo sapiens
IESVPGPMQQLQRMKENAKHRNQYKFILLENLTSRYEVPCVLDLKMGTRQHGDDASEEKAANQIRKCQQSTSAVIGVRVCGMQVYQAGSGQLMFMNKYHGRKLSVQGFKEALFQFFHNGRYLRRELLGPVLKKLTELKAVLERQESYRFYSSSLLVIYDGKERPEVVLDSDAEDLEDLSEESADESAGAYAYKPIGASSVDVRMIDFAHTTCRLYGEDTVVHEGQDAGYIFGLQSLIDIVTEISEESGE

SEQ ID NO: 789206 - protein, 129 aa, Homo sapiens
MAWVKFLRKPGGNLGKVYQPGSMLSLAPTKGLLNEPGQNSCFLNSAVQVLWQLDIFRRSLRVLTGHVCQGDACIFCALKTIFAQFQHSREKALPSDNIRHALAESFKDEQRFQLGLMDDAAECFVSVSD

SEQ ID NO: 789207 - protein, 106 aa, Homo sapiens
TPHGNIGQKFQGGNADRIDPTNERWKMVHRYFNFFISLEGQFWSIFYNNFSGIHSVIKFQLPMVVICSLIHPLLAFSLPYCLSSLLPQAPKHLPKKVFTPKSLSLG

SEQ ID NO: 789208 - protein, 80 aa, Homo sapiens
GARCPGWTCVHHDGELGQSHQESGTPLSPARRAVRMARAGSAPFGDKPEQRSRELTPAMQPCWERGAPCIPQFRGPYYLP

SEQ ID NO: 789209 - protein, 101 aa, Homo sapiens
LGGAEQCRYPHAGGREPQGPEQGEKVTHSHAGGRGVVQADEVRMWRKGHSFPPRADLVQDVRAVRPLGVGWGYMQKRRQQEKTSYLQGVDLISRYIKDTGC

SEQ ID NO: 789210 - protein, 76 aa, Homo sapiens
EPRGHGPVMSQGGVTAGTNPDPQRGILPAASDHRLPGRWLTTAASRCAPGKPNGRTARANERPVRSREERDLPRVF

SEQ ID NO: 789211 - protein, 107 aa, Homo sapiens
FLALGFLALVPWTFGAGSPSVVGPSWALQDIEQHPWPPYPGCRDYSHAPAVTTRNVSIGCQGSPGSPRTVLVLALKAPLAGKPLGPGQAGTAGHPPWGVTLPPALLH

SEQ ID NO: 789212 - protein, 126 aa, Homo sapiens
RIPSEMSAFEKHNPKVEDLQGTLFSHFCLHGGHCPLGRPGWLLAQVSPIFLGTCGIASRPEGAAGSVGSSLTQGAQLGCPLPMAGVMATSPWFMHEASSPFQLREHMQNDSHPADWKLPPLQKSGS

SEQ ID NO: 789213 - protein, 86 aa, Homo sapiens
NQRMRQLKTLHVEAPTGTTAARLQRREMDLRNLLVSGFLYENLYHTNKQMNTQTKQAQDLNSIRVSGDKHNISKCHIVTNTSMPSC

SEQ ID NO: 789214 - protein, 87 aa, Homo sapiens
MGHRLRLKSGKIKAMVEKPNKMTETRRRALRVQCLRTDCTGGALGARPYLNADPGTAAVRPQRNNTGKRRMCTILKKNYYKSPNLVR

SEQ ID NO: 789215 - protein, 140 aa, Homo sapiens
FQPSVRSLYQVLASVKNKIEQFASVERDFPGLLIQAQQYLLFRVDMSDMTPAALTKDPIQEASRTGSGKNLLDGPPRVLQPFLTHRTKVAEAPPNLPLPVRNPMLAAALFPEFLKELAALAQEHSILCYKILGDFEDSCC

SEQ ID NO: 789216 - protein, 98 aa, Homo sapiens
IESSCVLDPARLTKDPIQEASRTGSGKNLLDGPPRVLQPFLTHRTKVAEAPPNLPLPVRNPMLAAALFPEFLKELAALAQEHSILCYKILGDFEDSCC

SEQ ID NO: 789217 - protein, 96 aa, Homo sapiens
NSSWYRLPTLTKDPIQEASRTGSGKNLLDGPPRVLQPFLTHRTKVAEAPPNLPLPVRNPMLAAALFPEFLKELAALAQEHSILCYKILGDFEDSCC

SEQ ID NO: 789218 - protein, 110 aa, Homo sapiens
MRLKATDTRQREVYSGGHSDGDNPTPQSIRESTEGYPGKRKLLRLIHRYSSVEGLEPLMFCLSPEVRGLEHQWILGRAKTKTRGTRLWRSRAESAAGLTLGMAHHSINPC

SEQ ID NO: 789219 - protein, 89 aa, Homo sapiens
  misc_feature (4)..(5): Xaa can be any naturally occurring amino acid
KLPXXRLSRIPVSALYVGALLCLVQRFGEDICRNWRALYSLRGNMHLGREAADQLSWSCSPKAVWLVGAPQAGRQHPSSELLSLAVWWQ

SEQ ID NO: 789220 - protein, 106 aa, Homo sapiens
SQKSFPSLKVWSIQGQEMAEWNFHVSAGTSALQIGHSGALFSGPEGAQNPCPSSHVADGDTEDQSLAQGHQVITNGVFRWNLKKGGGKRVGLEAVPSLNLSSTVSK

SEQ ID NO: 789221 - protein, 116 aa, Homo sapiens
NKDQKLLHQLGFSDEQILTVKTSGSGTPSGSSADSSTSSSSSSSGVFSSSYAMEQEKSLPGVVMALVCNVFDMLYQLANLEEPRITLRVRKLLLLIPTDPAIQEALDQLDSLGRKV

SEQ ID NO: 789222 - protein, 114 aa, Homo sapiens
SRKGVHLGSGCSWTLLTLKVLILCCLENQEVLRDKQMASGQVPAKSARTWEPTTYSVGRGALLPLRTHAHLLLGWPSPGRAALLFAQCFLPKLISVVPFSDGWTLVASYSLCRI

SEQ ID NO: 789223 - protein, 73 aa, Homo sapiens
FIAALSTHSCSTQLRCTHKSKLVCVSLYPDKTPQGADQVLVILASPKLGPACAYQVSEKWLLEQNRGRSSGGD

SEQ ID NO: 789224 - protein, 110 aa, Homo sapiens
MQPGMGTVVLLVARPPCLPSQSTLVPGGSPAIPRRLGSITVIYHMVIAGDAERSPQTSCTFDVHADSVRQVLFSSRFTDEEPETQLQAPQQPVLGCPNPSALVQTKWISV

SEQ ID NO: 789225 - protein, 40 aa, Homo sapiens
MTSALAILLSHTAQSILCLLSSPRPHKLFSLSGMFFFTKH

SEQ ID NO: 789226 - protein, 101 aa, Homo sapiens
PHSSESTIPSGFRAIPPNAQEARHWGLLQVRVSRKHGREPQLDCVLGVSTQNWSFQGLKQGTFFWGQELTLGKSYKNPRQEEGPGHLLPDMKDTHALSRDL

SEQ ID NO: 789227 - protein, 383 aa, Homo sapiens
LPALGRANPASAPIYARKIRVQVRWGGGRWDVLLRVRREEGSHGLRAGGWRARAECSACLETFGRTSAGTPTAQRRPGASHCGPARAWAFATRYGVVQTTCGPRTATTARGSSTAARSARPARVSSASAGPLRRRTSRSESLVLLAPPGPYPGAACFDVWDQSLEMVETTLPRLRSRSRLGSRLPPNRMHNLEENFCQTQMGIAMGPGATRWTQGPHSTTVPCDAALMTSRHQSWTPPDQVQFEKCGKRVDRLDQRCSNCAWLGAIRATHPGQSACGIGEAQLPVSHREELRQGQHFCGGSLVKEQWILTARQCFSSCHMPLTGYEVWLGTLFQNPQHGEPGLQRVPVAKMLCGPSGSQLVLLKLERSVTLNQRVALICLPPE

SEQ ID NO: 789228 - protein, 154 aa, Homo sapiens
MPLTGYEVWLGTLFQNPQHGEPGLQRVPVAKMLCGPSGSQLVLLKLERSVTLNQRVALICLPPEWYVVPPGTKCEIAGRGETKGTGNDTVLNVALLNVISNQECNIKHRGHVRESEMCTEGLLAPVGACEGDYGGPLACFTHNCWVLKGIRIPN

SEQ ID NO: 789229 - protein, 416 aa, Homo sapiens
LPALGRANPASAPIYARKIRVQVRWGGGRWDVLLRVRREEGSHGLRAGGWRARAECSACLETFGRTSAGTPTAQRRPGASHCGPARAWAFATRYGVVQTTCGPRVRPKLGGYRAGAGSLEPRAGARSRPDGCPHRPQTATTARGSSTAARSARPARVSSASAGPLRRRTSRSESLVLLAPPGPYPGAACFDVWDQSLEMVETTLPRLRSRSRLGSRLPPNRMHNLEENFCQTQMGIAMGPGATRWTQGPHSTTVPCDAALMTSRHQSWTPPDQVQFEKCGKRVDRLDQRCSNCAWLGAIRATHPGQSACGIGEAQLPVSHREELRQGQHFCGGSLVKEQWILTARQCFSSCHMPLTGYEVWLGTLFQNPQHGEPGLQRVPVAKMLCGPSGSQLVLLKLERSVTLNQRVALICLPPE

SEQ ID NO: 789230 - protein, 312 aa, Homo sapiens
LPALGRANPASAPIYARKIRVQVRWGGGRWDVLLRVRREEGSHGLRAGGWRARAECSACLETFGRTSAGTPTAQRRPGASHCGPARAWAFATRYGVVQTTCGPRVRPKLGGYRAGAGSLEPRAGARSRPDGCPHRPQTATTARGSSTAARSARPARVSSASAGPLRRRTSRSESLVLLAPPGPYPGAACFDVWDQSLEMVETTLPRLRSRSRLGSRLPPNRMHNLEENFCQTQMGIAMGPGATRWTQGPHSTTVPCDAALMTSRHQSWTPPDQVQFEKCGKRVDRLDQRCSKLRVAGGHPGNSPWTVSLRNW

SEQ ID NO: 789231 - protein, 102 aa, Homo sapiens
PGESSLLLKSLVPVGNTWENMTPLGASGAECRNRNVTLPTHGHLLPISPCIDAQDFLRFLSAQHSHNLVGQLHSRNLRKERQMAARLKDTAHPSSMSVLAPG

SEQ ID NO: 789232 - protein, 262 aa, Homo sapiens
  misc_feature (195)..(195): Xaa can be any naturally occurring amino acid
  misc_feature (197)..(197): Xaa can be any naturally occurring amino acid
  misc_feature (201)..(202): Xaa can be any naturally occurring amino acid
  misc_feature (204)..(205): Xaa can be any naturally occurring amino acid
  misc_feature (208)..(208): Xaa can be any naturally occurring amino acid
  misc_feature (214)..(214): Xaa can be any naturally occurring amino acid
  misc_feature (216)..(216): Xaa can be any naturally occurring amino acid
  misc_feature (219)..(219): Xaa can be any naturally occurring amino acid
  misc_feature (226)..(226): Xaa can be any naturally occurring amino acid
  misc_feature (230)..(234): Xaa can be any naturally occurring amino acid
  misc_feature (236)..(238): Xaa can be any naturally occurring amino acid
  misc_feature (240)..(243): Xaa can be any naturally occurring amino acid
  misc_feature (247)..(248): Xaa can be any naturally occurring amino acid
  misc_feature (250)..(250): Xaa can be any naturally occurring amino acid
  misc_feature (252)..(252): Xaa can be any naturally occurring amino acid
  misc_feature (255)..(257): Xaa can be any naturally occurring amino acid
SFPGLLFLSRKAGVLPRDAPARTSSQEGLGSLLSQLLRPPCASCTGAVRCQSQVAEAVLTSQLKAHQEKPNFIIKTPKGTRDLSPQHMVVREKILDLVISCFKRHGAKGMDTPAFELKETLTEKYGEDSGLMYDLKDQGGELLSLRYDLTVPFARYLAMNKVKKMKRYHVGKVWRRESPTIVQGRYREFCQCDFXKXGEKXXKXXKKXNLKKMXKXKKXKKMGKKXKKVXXXXXKXXXKXXXXKNVXXKXKXGKXXXKSLQL

SEQ ID NO: 789233 - protein, 105 aa, Homo sapiens
WIIGRDHHVRLIFVFLIELGFLHVGQAGLELLISSDLQASASQSAGITAMSHCARPLTCFSEDKGFLGSSCPPHLHLCTFYQPKFAWVKNSQKLTTLNKTCFGVV

SEQ ID NO: 789234 - protein, 34 aa, Homo sapiens
ISILQQIELDLKATQALVLAPTRELAQQIQKVVM

SEQ ID NO: 789235 - protein, 159 aa, Homo sapiens
AATEFVPYLGLCSWALIWVEGRSLAPVYRHSGSQPNLPQGLPEALGSYRPGSEAPHGLQLAGMLGESLPACGLCTPACRMGVQKHLLIKCSGGLSEPMPRACPPWGMPRTPTLPSKFGFGRVPSCLQLCLLSERRSCSACPPKQRGWKCVGVRRTYPVR

SEQ ID NO: 789236 - protein, 47 aa, Homo sapiens
LNLVSSSLILLSHCTFSVGNILPVIFGSFFYITTINNGATQCFCQAY

SEQ ID NO: 789237 - protein, 186 aa, Homo sapiens
RQGWTRRGGRQDGGAGAKAEGADTGGVWRSIKGLRGPRSLLGGQRPPARNTARCRFSASRAQCWQAAPLWSPLGHWPCTSRSLRLREAHGEPEAGGYPPASPRRLVPAGAAFLRGARGDPRPAAPLPLRATWDGTSGPLLPTLLPQDICVLTAQSREALSSYTHSQRHCLLHWKWSPSRLLSDLLC

SEQ ID NO: 789238 - protein, 128 aa, Homo sapiens
HQRSPCFRSSDLLLWALLGVMLFIPFHFQTSCVLTLNSSSFFPLLCLICALISSQSFGLFSSPILLDLSASVTFYPHLSGNFSFHFLNVVIHLGLGPWAPSLPLSSLMGARRILLPSGCGAFLSFKDA

SEQ ID NO: 789239 - protein, 63 aa, Homo sapiens
HLYLKFNYLSSQLLPHEFTTSYITCTATPSSQIIFYLHSGPISHSSTLLNKSNYDTILRKILL

SEQ ID NO: 789240 - protein, 79 aa, Homo sapiens
ADEPGPGAPAPQELGAADKHGDLCEVSLTSSAQGEAREDPLLDKPTAQPIVQDHQEHPGLGSNCCVPLLCWAWLPRRRR

SEQ ID NO: 789241 - protein, 85 aa, Homo sapiens
GLPKCWDYRHEPPRPANDSNLFSNSSGAWKSKIKASAGPYSLQKLKGRLLSASSRCWWLQAFLGLRLQPSNLCLCLPVVHVVLLS

SEQ ID NO: 789242 - protein, 107 aa, Homo sapiens
FYCVLWNPWHMLNNFSCIFSFTTGGFCQLSLNLKLNLSSQKTILPPSLSNGCCSMYHTSSREVGLATSSVPDAASRSLNAVYLPHVVTIVYFQSLCYFRSFIKVSEN

SEQ ID NO: 789243 - protein, 134 aa, Homo sapiens
GILLHLEIVTPLLVYTRGVLLNQEVVTPLLVYTRGILLHQEMVTLPPGLYPWGCSSIRRWSLPSWSIPVGFSSLRRWSLPLLVYTHGILLPQKMVTPPPGLYPWGCSSIRRWSLSLSVAQSKNNLSGKLRGIFF

SEQ ID NO: 789244 - protein, 136 aa, Homo sapiens; identical to SEQ ID NO: 741065

SEQ ID NO: 789245 - protein, 226 aa, Homo sapiens
EQECRNGSLYVRDNTGVLSCELIDLDLSWLGHLFLFPRWSYLPPARWNSSGEGHLELWDAPVPVFPLTISPGPVTPIPVLYPESASCLLRLRNKLRGVQRNLAGSLVRLSALVKSKQKAYFILSLGRSHPAVTHVSIIVQVPAQLVWHRALRPGTAYVLTELRVSKIRGQRQHVWMTSQSSRLLLLKPECVQELELELEGPLLEADPKPLPMPSNSEDKKDPESLV

SEQ ID NO: 789246 - protein, 162 aa, Homo sapiens
RQRLPESTVSLCQTRLKKEHYFILIKQVYAATRTMESTLTLATEQPVKKNTLKKYKIACIVLLALLVIMSLGLGLGLGLRKLEKQGSCRKKCFDASFRGLENCRCDVACKDRGDCCWDFEDTCVESTRIWMCTRYRCGETRLEASLCLVQMTVAQERLLADY

SEQ ID NO: 789247 - protein, 77 aa, Homo sapiens
  misc_feature (14)..(14): Xaa can be any naturally occurring amino acid
FISCSCTLRLTTIXYAPRLLRITHRMCRSPTLHLEPASVYASPHVAARLLVNVSSLPFQPSQSCVSLKVQPESFLPL

SEQ ID NO: 789248 - protein, 77 aa, Homo sapiens; identical to SEQ ID NO: 789247
  misc_feature (14)..(14): Xaa can be any naturally occurring amino acid

SEQ ID NO: 789249 - protein, 73 aa, Homo sapiens
  misc_feature (2)..(3): Xaa can be any naturally occurring amino acid
RXXLLLDLVPYVAADSSEPQRTCRSPTLHLEPASVYASPHVAARLLVNVSSLPFQPSQSCVSLKVQPESFLPL

SEQ ID NO: 789250 - protein, 54 aa, Homo sapiens
VNMEDFIASESGSQQEGELARGWSWKVIFPKSSHLQLDSSPKQHHQAAPLKSSC

SEQ ID NO: 789251 - protein, 71 aa, Homo sapiens
GWNTYSMHTCSSCFFGNRAIITKVELEVASIFSWGYFFTILHAEVGNASPGAGLAVPSGLTGSGPHRMGGD

SEQ ID NO: 789252 - protein, 110 aa, Homo sapiens
IIGLKGEPCSGYYHSICTFSVQMKINAVFPSVLKGYEHPGYEHPGYPGSLHVDTNIEASSHSCFKPCLPEKQNVLNRGENWQSCPLCSPGHSGHWELNTLHLYLQLYQLM

SEQ ID NO: 789253 - protein, 101 aa, Homo sapiens
NISDFTQERLPLHVLNVENSLCAKMILLHIREFTQERNRTNAVTAGKPSLQNQGSMFIKENIQERGPMDVVIVGKLLRTCLSLLNTGEFTGSHFGKASCQM

SEQ ID NO: 789254 - protein, 101 aa, Homo sapiens; identical to SEQ ID NO: 789253

SEQ ID NO: 789255 - protein, 237 aa, Homo sapiens
  misc_feature (3)..(4): Xaa can be any naturally occurring amino acid
WDXXFNHDDDSKQPDSLGSPNACALPMSLRPPALPILILISLSNFLPLLSPKPRSFSPQGLCWCPAPCLACSGSPISFNYPFLKIHLFWEALPPDFIVPFPELMSCCLLLRKPTRGVYVDLVHSLIVSWERHMRYACALPTLCRSQRMCRSQRMCRSHVPLLVLTQLPRHVLLGPLQGGLQLGQLGVGILNGQLFTLLGICNGGLQETLWPLRPLNLGWTRLMFRVNSKNLIFGRPK

SEQ ID NO: 789256 - protein, 101 aa, Homo sapiens
  misc_feature (3)..(4): Xaa can be any naturally occurring amino acid
WDXXFNHDDDSKQPDSLGSPNACALPMSLRPPALPILILISLSNFLPLLSPKPRSFSPQGLCWCPAPCLACSGSPISFNYPFLKIHLFWEALPPDFTCSLP

SEQ ID NO: 789257 - protein, 295 aa, Homo sapiens
  misc_feature (293)..(293): Xaa can be any naturally occurring amino acid
TAEGENDAQVGLPGPPAEERPALHTRRPSIRVKRRRERALPTSCDSWLPGDIRLSRDSRQAGAGAPTSEERCPGRSSPCSWASAATRLGSSSGNSCAPSNGISPEGIVEEFATEGTDRKDVFFYQADDEHYIPRAVLLDLEPRVIHYILNSPYAKLYNPENIYLLEHGGGAGNNWASGFSQGEKIHEDIFDIIDEKQMEVTVWQGFVLCHSIAGGTGSGLGSYLLERLNDRYPKKLVQTYSVFPYQDEMSDVVVQPYNSLLTLKRLTQNADCVVVLDNTALNRIATDRLHIQXPF

SEQ ID NO: 789258 - protein, 304 aa, Homo sapiens
  misc_feature (302)..(302): Xaa can be any naturally occurring amino acid
TAEGENDAQVGLPGPPAEERPALHTRRPSIRVKRRRERALPTSCDSWLPGDIRLSRDSRQAGAGAPTSEERCPGRSSPCSWASAATRLGSSSGNSCAPSNGISPEGIVEEFATEGTDRKDVFFYQADDEHYIPRAVLLDLEPRVIHYILNSPYAKLYNPENIYLLEHGGGAGNNWASGFSQGEKIHEDIFDIIDREADGSDSLELQNSSSSDQGFVLCHSIAGGTGSGLGSYLLERLNDRYPKKLVQTYSVFPYQDEMSDVVVQPYNSLLTLKRLTQNADCVVVLDNTALNRIATDRLHIQXPF

SEQ ID NO: 789259 - protein, 45 aa, Homo sapiens
MIEQRRRTANEVVENLGQRGVPEVQSSGEIQSFRRGPIFRRVRFP

SEQ ID NO: 789260 - protein, 110 aa, Homo sapiens
HPLDNFSQCQCFKYSWPGPWISSLQQSSSKNSVFLPRIISWEYVVVLGLGECLSKIPSKHHALLNFSKWSLYCLFSEDFALLSWIPAGSFSLLQQNWFTWRTFFHVTLIS

SEQ ID NO: 789261 - protein, 92 aa, Homo sapiens
HLVKFICLGLWNLFLLLSLRILLFRRTFYPSNVSPVCYEDMGNNTANWWMLLRILPQSFGFIVPLRSCCSATDSPCIRCLRPIWGRSTGPCG

SEQ ID NO: 789262 - protein, 40 aa, Homo sapiens
SFLSKLPEHPGQKQAARSRATRVQSTDPRPWFSYQTGLAA

SEQ ID NO: 789263 - protein, 232 aa, Homo sapiens
MPRGHKSKLRTCEKRQETNGQPQGLTGPQATAEKQEESHSSSSSSRACLGDCRRSSDASIPQESQGVSPTGSPDAVVSYSKSDVAANGQDEKSPSTSHDVSVPQESQGASPTGSPDAGVSGSKYDVAAEGEDEESVSASQKAIIFKRLSKDAVKKKACTLAQFLQKKFEKKESILKADMLKCVRREYKPYFPQILNRTSQHLVVAFGVELKEMDSSGESYTLVSKLGLPSEG

SEQ ID NO: 789264 - protein, 260 aa, Homo sapiens
ASKNRLWRQQSARGRKPLRPGGAPARTRGLQRCPARKPILGVRAGPRGLRGSRVEGFGPRGCGAPLGAGPPAAVSASLHFPGGIPHLLNEGVEADTLGNGFELTTDFREWKEKPFLRRLPYHCMFQGPPWALCLPRHREHGLSGRAKARRRREPAVVGAGRVTAGWRGRGRWEALQKEEPPPSKFPSATHRRASPSAASIFFLCSPSPTNAGFPFSFVDFFPWILLTAPTLWPHVWQMRGGRCLNPRILTSLCAAATALS

SEQ ID NO: 789265 - protein, 115 aa, Homo sapiens
IGGIEVGLSHFPFFACLSSEFQLVSSILGFCYSDLVCCYHSDVGAAANFFGVFSPITMVKLLCDLEQASVTTGAPLFHLHKKVVVVVRDASICRAPHVHQGVHSQTGVFSFTPQK

SEQ ID NO: 789266 - protein, 218 aa, Homo sapiens
MTMPVNGAHKDADLWSSHDKMLAQPLKDSDVEVYNIIKKESNRQRVGLELIASENFASRAVLEALGSCLNNKYSEGYPGQRYYGGTEFIDELETLCQKRALQAYKLDPQCWGVNVQPYSGSPANFAVYTALVEPHGRIMGLDLPDGGHLTHGFMTDKKKISATSIFFESMPYKVNPDTGYINYDQLEENARLFHPKLIIAGTSCYSRNLEYARYGRLR

SEQ ID NO: 789267 - protein, 212 aa, Homo sapiens
MTMPVNGAHKDADLWSSHDKMLAQPLKDSDVEVYNIIKKESNRQRVGLELIASENFASRAVLEALGSCLNNKYSEGYPGQSWSAVVQSRLIAASNPWAQAILLPQPLCELGPQAPLQTLLVYTALVEPHGRIMGLDLPDGGHLTHGFMTDKKKISATSIFFESMPYKVNPDTGYINYDQLEENARLFHPKLIIAGTSCYSRNLEYARYGRLR

SEQ ID NO: 789268 - protein, 107 aa, Homo sapiens
SRVAEITDMRYHAWLIFVFLVEMRFRHAGQAGPQLLASSDLPALASQSARITGVSHCARPGSFIVCISVHFFPKKPHVFVGRTWNPIQLYSPASSTAPLQSLVPWTS

SEQ ID NO: 789269 - protein, 165 aa, Homo sapiens
RYHVTAVLALGAGSALLGTDVQVEAAPAALELVCPSSVQSDESLDLSIQNRGGSGLEAAYSIVALGEEPARAVHPLCPSDTEIFSGNGHCYRLVVEKAAWLQAQEQCRAWAGAALAMVDSPAVQRFLVSRVTRSLDVWIGFSTVQRVEVGPAPQGEAFSLESCQN

SEQ ID NO: 789270 - protein, 97 aa, Homo sapiens
AVLGLEIQEESLVISVIVEVDQGEDVMILDGVTMMVLAVMVTELALANLNGVDTVIGVTSQIKIIGQNHFHQVNAWSRYSFLEKTLGLTLRNMIIYQ

SEQ ID NO: 789271 - protein, 359 aa, Homo sapiens
MIAAQAKLVYHLNKYYNEKCQARKAAIAKTIREVCKVVSDVLKEVEVQEPRFISSLNEMDNRYEGLEVISPTEFEVVLYLNQMGVFNFVDDGSLPGCAVLKLSDGRKRSMSLWVEFITASGYLSARKIRSRFQTLVAQAVDKCSYRDVVKMVADTSEVKLRIRDRYVVQITPAFKCTGIWPRSAAHWPLPHIPWPGPNRVAEVKAEGFNLLSKECHSLAGKQSSAESDAWVLQFAEAENRLQMGGCRKKCLSILKTLRDRHLELPGQPLNNYHMKTLVSYECEKHPRESDWDESCLGDRLNGILLQLISCLQCRRCPHYFLPNLDLFQGKPHSALENAAKQTWRLAREILTNPKSLEKL

SEQ ID NO: 789272 - protein, 359 aa, Homo sapiens; identical to SEQ ID NO: 789271

SEQ ID NO: 789273 - protein, 359 aa, Homo sapiens; identical to SEQ ID NO: 789271

SEQ ID NO: 789274 - protein, 87 aa, Homo sapiens
SRGCDDGRIKWDGIIPVSCCIGIQIQYPRLHMPEIQIYSEIQWMANKCFLIEKRWKEREGREGEAREVLCGTVELGSGTSSERRGKV

SEQ ID NO: 789275 - protein, 221 aa, Homo sapiens
ACAPGSVLKGAKAQPVLGALCYSPPSGRPSRRWLFLLEQVSKVEAQTLSLLLRLRQMWVRGSWVVPSRHGGTWVWAPGTWGAVLAKQEGTGAQLLILPHSCSDVDECRTHNGGCQHRCVNTPGSYLCECKPGFRLHTDSRTCLAINSCALGNGGCQHHCVQLTITRHRCQCRPGFQLQEDGRHCVRECCQPGREDLGVEAGQAASPGLLGGSGSSGGPQGC

SEQ ID NO: 789276 - protein, 101 aa, Homo sapiens
QRARPCQARTWRMREVQLFSQVQTLEGPHVDSVASAPTHSREDTALPGRESAELGPCCSSLWHHPVSPSLSHICSARPAVKYLLSQTFVEWDEPWRFRQMP

SEQ ID NO: 789277 - protein, 356 aa, Homo sapiens
MPASSLPGKLWFVLTMLLRMLVIVLAGRPVYQDEQERFVCNTLQPGCANVCYDVFSPVSHLRFWLIQGVCVLLPSAVFSVYVLHRGATLAALGPRRCPDPREPASGQRRCPRPFGERGGLQVPDFSAGYIIHLLLRTLLEAAFGALHYFLFGFLAPKKFPCTRPPCTGVVDCYVSRPTEKSLLMLFLWAVSALSFLLGLADLVCSLRRRMRRRPGPPTSPSIRKQSGASGHAEGRRTDEEGGREEEGAPAPPGARAGGEGAGSPRRTSRVSGHTKIPDEDESEVTSSASEKLGRQPRGRPHREAAQDPRGSGSEEQPSAAPSRLAAPPSCSSLQPPDPPASSSGAPHLRARKSEWV

SEQ ID NO: 789278 - protein, 370 aa, Homo sapiens
MEGVDLLGFLIITLNCNVTMVGKLWFVLTMLLRMLVIVLAGRPVYQDEQERFVCNTLQPGCANVCYDVFSPVSHLRFWLIQGVCVLLPSAVFSVYVLHRGATLAALGPRRCPDPREPASGQRRCPRPFGERGGLQVPDFSAGYIIHLLLRTLLEAAFGALHYFLFGFLAPKKFPCTRPPCTGVVDCYVSRPTEKSLLMLFLWAVSALSFLLGLADLVCSLRRRMRRRPGPPTSPSIRKQSGASGHAEGRRTDEEGGREEEGAPAPPGARAGGEGAGSPRRTSRVSGHTKIPDEDESEVTSSASEKLGRQPRGRPHREAAQDPRGSGSEEQPSAAPSRLAAPPSCSSLQPPDPPASSSGAPHLRARKSEWV

SEQ ID NO: 789279 - protein, 317 aa, Homo sapiens
  misc_feature (213)..(213): Xaa can be any naturally occurring amino acid
  misc_feature (314)..(314): Xaa can be any naturally occurring amino acid
APPRDAARRNYFLLSPFFLPLLFPLLGSGCGGVGETLNDRARVHLSLHVDVPGNGHTDAMVTFATILQVNKVMSILFYVIFLAYLRGIQGNNMDQRSLPEDSLNSLIIKLIQADILKNKLSKQMVDVKENYQSTLPKAEAPREPERGEPAKSAFQPVIAMDTELLRQQRRYNSPRVLLSDSTPLEPPPLYLMEDYVGSPVVANRTSRRKRYAXIKSHRGEYSVCDSESLWVTDKSSAIDIRGHQVTVLGEIKRATLPSNNIFMKRDVRKQAGQKRCRGIDDNSWNSQCKTSQTYVRALTSENNKLVGWRWIRIXTPV

SEQ ID NO: 789280 - protein, 74 aa, Homo sapiens
AWEAENILSRGNSMGEEGPVTCDLACSRWHSLLGGRLEAATEVKVPGWEAPGRLVQEFRLDTVESYPGGWNGRG

SEQ ID NO: 789281 - protein, 258 aa, Homo sapiens
MLLVLVVLIPVLVSSGGPEGHYEMLGTCRMVCDPYPARGPGAGARTDGGDALSEQSGAPPPSTLVQGPQGKPGRTGKPGPPGPPGDPGPPGPVGPPGEKGEPGKPGPPGLPGAGGSGAISTATYTTVPRVAFYAGLKNPHEGYEVLKFDDVVTNLGNNYDAASGKFTCNIPGTYFFTYHVLMRGGDGTSMWADLCKNGQVRASAIAQDADQNYDYASNSVILHLDAGDEVFIKLDGGKAHGGNSNKYSTFSGFIIYSD

SEQ ID NO: 789282 - protein, 177 aa, Homo sapiens
MLLVLVVLIPVLVSSGGPEGHYEMLGTCRMVCDPYPARGPGAGARTDGGDALSEQSGAPPPSTLVQGPQGKPGRTGKPGPPGPPGDPGPPGPVGPPGEKGEPGKPGPPGLPGAGGSGAISTATYTTVPRVAFYAGLKNPHEGYEVLKFDDVVTNLGNNYDAASGKFTCNIPVPGNRG

SEQ ID NO: 789283 - protein, 258 aa, Homo sapiens; identical to SEQ ID NO: 789281

SEQ ID NO: 789284 - protein, 277 aa, Homo sapiens
MLLVLVVLIPVLVSSGGPEGHYEMLGTCRMVCDPYPARGPGAGARTDGGDALSEQSGAPPPSTLVQGPQGKPGRTGKPGPPGPPGDPGPPGPVGPPGEKGEPGKPGPPGLPGAGGSGAISTATYTTVPRVAFYAGLKNPHEGYEVLKFDDVVTNLGNNYDAASGKFTCNIPGTYFFTYHVLMRGGDGTSMWADLCKNGQVRASAIAQDADQNYDYASNSVILHLDAGDEVFIKLDGGKAHGGNSNKYSTFSGFIIYSACQPTPAWGEVAAAGLLPAL

SEQ ID NO: 789285 - protein, 103 aa, Homo sapiens [sequence omitted]

SEQ ID NO: 789286 - protein, 106 aa, Homo sapiens
GSRGCLHRPLRSSHLRLEGSVLMPYKRRVQEIGFQKKQWSPAWDYEDTKQLTLRDRVSLCCMRWNVVVILTDVVTACYSLGLLGSSHPPASASPCGGLQALPHAWL

SEQ ID NO: 789287 - protein, 255 aa, Homo sapiens
MDEPPFSEAALEQALGEPCDLDAALLTDIEDMLQLINNQDSDFPGLFDPPYAGSGAGGTDPASPDTSSPGSLSPPPATLSSSLEAFLSGPQAAPSPLSPPQPAPTPLKMYPSMPAFSPGPGIKEESVPLSILQTPTPQPLPGALLPQSFPAPAPPQFSSTPVLGYPSPPGGFSTGSPPGNTQQPLPGLPLASPPGVPPVSLHTQVQSVVPQQLLTVTAAPTAAPVTTTVTSQIQQVPVLLQPHFIKADSLLLTAM

SEQ ID NO: 789288 - protein, 70 aa, Homo sapiens
PLVCKRRKALLLPPARTRTLTPLDAGVMLESSPLLLAFLVLFLHFPFADFTDFESLTMEPLVSRDLRNRK

SEQ ID NO: 789289 - protein, 144 aa, Homo sapiens
LGLWLWPGRPCWPPLPPSVSGLRVAHLLCASCRPLIAPSCRVSLCSLPTLHTNLCHPYCCQPSFLPPGLSPYPQTLAPFLLHSSLPIPVRALTLCCHEPPSPPPRILTVVHLLPIPLLPPLCMFCQKYTCMEFLNAYSNKPAAL

SEQ ID NO: 789290 - protein, 96 aa, Homo sapiens
  misc_feature (11)..(11): Xaa can be any naturally occurring amino acid
SGVVCVISPWXISRPRQNSCRPRRHRGACAASFTGGSPVLGPGPFYGVQGFVTRALVPGPVTCVLEGGPFPASVYLLLCFLLGRHSNYNDSVTSST

SEQ ID NO: 789291 - protein, 39 aa, Homo sapiens
NRSSMWGEGLALTPSGLMLHANHLPMRGQGVTPYQELPP

SEQ ID NO: 789292 - protein, 106 aa, Homo sapiens
LSPQVGVQWRDHGSLQPWPPGLKQSSHLSLLSCWDYKHVPLHLGNFFIYCRDAVSLFSMSRRLVSNSWAKAILSPRPPKVLVLQVRATAHSFLRNHLKLLLKKSNI

SEQ ID NO: 789293 - protein, 171 aa, Homo sapiens
MEAPGPRALRTALCGGCCCLLLCAQLAVAGKGARGFGRGALIRLNIWPAVQGACKQLEVCEHCVEGDGARNLSSCVWEQCRPEEPGHCVAQSEVVKEGCSIYNRSEACPGKGVLAPKPSCMGLPSHSLPPRRKQPLSGGGFCSPIPGPGISSAFSSLRSPLLSLPISSSEN

SEQ ID NO: 789294 - protein, 78 aa, Homo sapiens
MNILSPERFLLLSVFSSCLLSSRPLKKLGGPWNIAVSSFSSAFPSSLRCQLSLMSLFDIAARTSLPAVSAVRHPFHKN

SEQ ID NO: 789295 - protein, 107 aa, Homo sapiens
DCPHLPDEKLRLGDIEESVEREMRFYYFTRLVSNSWAQAIFPCGLPKVMGLQGSFLSSPREPKKGGWLALHSSDLHSSLCVRSPVLDTGDRTVSQSDAGPALMEFMV

SEQ ID NO: 789296 - protein, 175 aa, Homo sapiens
MYSSGWPAGAAEPRHGRGRELAQALGCMHGAPSQLASLSLAHCSSLKVLQFLQLRQLSLSLLPELTDNGLVAVARGCPSLEHLALSHCSRLSDKGWAQAASSWPRLQHLNLSSCSQLIEQTLDAIGQACRQLRVLDVATCPGINMAAVRRFQAQLPQVSCVQSRFVGGADLTLTL

SEQ ID NO: 789297 - protein, 104 aa, Homo sapiens
MAESLPLEMLTYILSFLPLSDQKEASLVSWAWYRAAQNALREVRHPPSPVPSSGVSYFSLLVALLMYLHPSIHPSIHPFICSYIHIYTYIHTYLALGTVLGLYR

SEQ ID NO: 789298 - protein, 223 aa, Homo sapiens
MYSSGWPAGAAEPRHGRGRELAQALGCMHGAPSQLASLSLAHCSSLKSRPELEHQASGTKDACPEPQGPSLLTLRALQELDLTACSKLTDASLAKVLQFLQLRQLSLSLLPELTDNGLVAVARGCPSLEHLALSHCSRLSDKGWAQAASSWPRLQHLNLSSCSQLIEQTLDAIGQACRQLRVLDVATCPGINMAAVRRFQAQLPQVSCVQSRFVGGADLTLTL

SEQ ID NO: 789299 - protein, 223 aa, Homo sapiens; identical to SEQ ID NO: 789298

SEQ ID NO: 789300 - protein, 122 aa, Homo sapiens
MGTAGVGPPARLPGPGRPSLTRPRGSTLCPLLGSARTPVLVDSSLSFLEEIISCDPLGWVHSRGWTVGGTSPSPLSPNRGLLVPLTQREPAIKGIPQVRLAGVGKPGPQRPQQGGRREHGAQ

SEQ ID NO: 789301 - protein, 79 aa, Homo sapiens
MNAEGGCTPVELPRGRTQSQPQPCLGSLGLAPGSCSYRVTRVNCWPPAIPTPRVSKVLGLNETAQIRHPWVHGTRKAPQ

SEQ ID NO: 789302 - protein, 104 aa, Homo sapiens
LFPPTPVPKFHCIILAPLCTQITSRLNCLLNNPIVKISILPEMSQKNNFVTIFKSVKATRGGKNTVNFSSIKFEVAVKKCEIINILGFSTDFYIHNCRIKIKIQ

SEQ ID NO: 789303 - protein, 36 aa, Homo sapiens
LLIYRVLSRSPYSPPGIQGSQPREGKRQLHARYWAQ

SEQ ID NO: 789304 - protein, 105 aa, Homo sapiens
GSGAVSCPPGSSKAWSSDAGSGGFWGAEAGSRGAVAAPGRRGGCAQKPALASGGRARGAGREFPCPPVRPATGLSWALTTARPCFALAALLCPQNAFPASPALQR

SEQ ID NO: 789305 - protein, 103 aa, Homo sapiens
CAEASQLQLPHSPTHPRLALNLLSPEENEDRKNSTYFQGKGGHAPQRLQEPRPLGAHLPQLSIGPTVEARRFRPSEHSSLSTPAGPYQSKTMSHKIIIILKKW

SEQ ID NO: 789306 - protein, 105 aa, Homo sapiens
QRIFLNAKHIAIASPLSSTQWKKVSTYWRTFLVRQHRGSSRVGVGGALPMQGEGKNLSTQRLLKASSQEKLLSPSVPLWEHPHSLCRSRPTVWHTCFLFMVLLQK

SEQ ID NO: 789307 - protein, 55 aa, Homo sapiens
AETIAQSSRNASGLECGASVPNAAPPPDCVALKKAQPLYLPAQRARSPAQLPSVC

SEQ ID NO: 789308 - protein, 141 aa, Homo sapiens
APLQRRSHNPTSSRSAAFPAPQARDRLRGRRAIPYLGVEIMWGLSAVCHRLQSRGAVGCVTWRSAGAGRTPGRGWGRGDLGSRCHCSRHWPGIMSLLLRKLAVGQRLSIRFPPLALPCARKAWPSATVPAAGAPDLFQGLL

SEQ ID NO: 789309 - protein, 170 aa, Homo sapiens
MSLSPRPGRNKNRRPLHKLASAKAAQLFLYLGGAAFCRDLSVHGLQSLGFSGSVKIYVFFPSPQSHFTQPLLLAAAPSGVCRISVLAGNVFSPHRAGYKLCRRGLFFGMKAGPLGLLARPRWVVDITRLLCGVERLSRSPGVLTQFIEARRSKPQSHLSWPKCAAILPEI

SEQ ID NO: 789310 - protein, 145 aa, Homo sapiens
AHGPRGAPAASLSAPGRRASRREGGAPVRAEIDAHTRRASSAAGREAAACGAGTAGRAPSAGVARPSAFRSADRSPVRRLQLLGRPPHPLAHSRPLQLEGVSAPPPSPRGPRWKAHAPHATPPRAPAPLRGFSTLRPEVGWETAN

SEQ ID NO: 789311 - protein, 221 aa, Homo sapiens
MGRRRLLVWLCAVAALLSGAQARGTPLLARPAPPGASRYSLYTTGWRPRLRPGPHKALCAYVVHRNVTCILQEGAESYVKAEYRQCRWGPKCPGTVTYRTVLRPKYKVGYKTVTDLAWRCCPGFTGKRCPEHLTDHGAASPQLEPEPQIPSGQLDPGPRPPSYSRAAPSPHGRKGPGLFGERLERLEGDVQRLAQTYGTLSGLVASHEDPNRMTGGPRAPA

SEQ ID NO: 789312 - protein, 62 aa, Homo sapiens
MIDLWLYSYQRLLQTIAVLEAQRSQAVQDLESLGRHQREALKNPIGFVEKLQKKADIGLPYP

SEQ ID NO: 789313 - protein, 293 aa, Homo sapiens
MNQKVNPFSSATVHPLPSPGQGPSGVCTLPQAHFFFCAPLHPTQDDLFADLANLSHLFLHGNRLRLLTEHVFRGLGSLDRLLLHGNRLQGVHRAAFRGLSRLTILYLFNNSLASLPGEALADLPSLEFLRLNANPWACDCRARPLWAWFQRARVSSSDVTCATPPERQGRDLRALREADFQACPPAAPTRPGSRARGNSSSNHLYGVAEAGAPPADPSTLYRDLPAEDSRGRQGGDAPTEDDYWGGYGGEDQRGEQMCPGAACQAPPDSRGPALSAGLPSPLLCLLLLVPHHL

SEQ ID NO: 789314 - protein, 539 aa, Homo sapiens
ELPRCPHSPSASSLGTRTDGLTDSRADSAASGARALGVDGQPQPSPPRRAPPRPVGADGSSRGPQPGRRRVERRGPATQPGDSRALPEPRGVPAVHPAGSGSEWERPPPAAPSPEHRDKMLPGLRRLLQAPASACLLLMLLALPLAAPSCPMLCTCYSSPPTVSCQANNFSSVPLSLPPSTQRLFLQNNLIRTLRPGTFGSNLLTLWLFSNNLSTIYPGTFRHLQALEELDLGDNRHLRSLEPDTFQGLERLQSLHLYRCQLSSLPGNIFRGLVSLQYLYLQENSLLHLQDDLFADLANLSHLFLHGNRLRLLTEHVFRGLGSLDRLLLHGNRLQGVHRAAFRGLSRLTILYLFNNSLASLPGEALADLPSLEFLRLNANPWACDCRARPLWAWFQRARVSSSDVTCATPPERQGRDLRALREADFQACPPAAPTRPGSRARGNSSSNHLYGVAEAGAPPADPSTLYRDLPAEDSRGRQGGDAPTEDDYWGGYGGEDQRGEQMCPGAACQAPPDSRGPALSAGLPSPLLCLLLLVPHHL

SEQ ID NO: 789315 - protein, 33 aa, Homo sapiens
MEWNGMEWNGIEWNGMQWNGINRVQSNGIEWNG

SEQ ID NO: 789316 - protein, 272 aa, Homo sapiens
FLQTLRGSHSLPHLCPCAGCGWDPVFPAPRGTWFLCPGFCHSVTYAMPCCSHRRCREDPGTSESQEMDPVAFDDVAVNFTQEEWALLDISQRKLYKEVMLETFRNLTSVGKSWKDQNIEYEYQNPRRNFRSLIEKKVNEIKDDSHCGETFTQVPDDRLNFQEKKASPEIKSCDSFVCGEVGLGNSSFNMNIRGDIGHKAYEYQEYGPKPCKCQQPKKAFRYHPSFRTPQRDHTGEKPYACKECGKTFISHSSIQRHVVMHSGDGPYKCKFCG

SEQ ID NO: 789317 - protein, 235 aa, Homo sapiens
FLQTLRGSHSLPHLCPCAGCGWDPVFPAPRGTWFLCPGFCHSVTYAMPCCSHRRCREDPGTSESQEMDPVAFDDVAVNFTQEEWALLDISQRKLYKEVMLETFRNLTSVGKSWKDQNIEYEYQNPRRNFRSLIEKKVNEIKDDSHCGETFTQVPDDRLNFQEKKASPEIKSCDSFVCGEVGLGNSSFNMNIRGDIGHKAYEYQEYGPKPYTNLTLSPRLECSGRDLRSLQPLAPG

SEQ ID NO: 789318 - protein, 122 aa, Homo sapiens
RALPPHPTPLLPLDPALMTLTLAAAAGGSPRRAALGPTSLWLGPEHSAASAGPGLFSAALLPQGLSVPHSYPGRAALSWVLYGGPFPSVPETLILGFLPLNTDILKPNETSRSLHLILPPTP

SEQ ID NO: 789319 - protein, 135 aa, Homo sapiens
RFQVTRMKTLQFFFLFCCWKAICCNSCELTNITIAIEKEECRFCISINTTWCAGYCYTRDLVYKDPARPKIQKTCTFKELVYETVRVPGCAHHADSLYTYPVATQCHCGKCDSDSTDCTVRGLGPSYCSFGEMKE

SEQ ID NO: 789320 - protein, 127 aa, Homo sapiens
SNASVILEGEDLRFSCSVRMAGRLQGRFSVIWQLVDRQNRRSDIMWLDRDGTVQPGSSYWERSSFGSVQMEQVQPNSFSLGIFNSRKEDEGQYECHVTEWVRVVDGEWQIVGERRASTPISIIALGE

SEQ ID NO: 789321 - protein, 68 aa, Homo sapiens
QERAAHSGDWDRISTRVDLSHWKYLVLLLEGGLQVLVILLRCCSKTMLVTVLNCKCQYPSPPKQRAYH

SEQ ID NO: 789322 - protein, 105 aa, Homo sapiens
SLVWPGRLSTLISEKQMGQRGKGRGGDPQEKGSGWETQPSSADRVGAEAQALPEETPLTGACQSTVRPTRLRAVSIGAGTMQRRPTHPWGEVRPNSNAARASGFL

SEQ ID NO: 789323 - protein, 80 aa, Homo sapiens
TAYLLQGEIYSEDTEQYFNQVIKININKLIIRKSQTNPNWKTFYQKPHTQTQINDYFCYGQLIFMANKHFLKAEIIYHTI

SEQ ID NO: 789324 - protein, 187 aa, Homo sapiens
PIARSCKRAPGAFPGARRCVRAPFCCSRGGGGPRGRRGGGCGRPARGRRPPSKPPAKCSGWQKQAAGSAEQAARPGAEQARGAAGQHHGCLRAPVPSARGWSSPCPCGAGPPGTSGSPACPRLDALGLAAAGAQGFESGPREGVRLGRPRSGGPVANMLRKGCCVELLLLLVAADCPWVVAAHGTVC

SEQ ID NO: 789325 - protein, 412 aa, Homo sapiens
MTLRRRGEKATISIQEHMAIDVCPGPIRPIKQISDYFPRFPRGLPPDAGPRAAAPPDAPARPAVAGAGRRSPSDGAREDDEDVDQLFGAYGSSPGPSPGPSPARPPAKPPEDEPDADGYESDDCTALGTLDFSLLYDQENNALHCTITKAKGLKPMDHNGLADPYVKLHLLPGASKANKLRTKTLRNTLNPTWNETLTYYGITDEDMIRKTLRISVCDEDKFRHNEFIGETRVPLKKLKPNHTKTFSICLEKQLPVDKTEDKSLEERGRILISLKYSSQKQGLLVGIVRCAHLAAMDANGYSDPYVKTYLRPDVDKKSKHKTAVKKKTLNPEFNEEFCYEIKHGDLAKKSLEVTVWDYDIGKSNDFIGGVVLGIHAKGERLKHWFDCLKNKDKRIERWHTLTSELPGAVLSD

SEQ ID NO: 789326 - protein, 111 aa, Homo sapiens
MRPGWDLCPPLSAAALGTLDFSLLYDQENNALHCTITKAKVGPASLPPNSLPRGPQEGLGQGGQTTPLPRFLSRLLDVCAVWGAGPGRNSSLNLLEYPTPRNALDSQALRG

SEQ ID NO: 789327 - protein, 184 aa, Homo sapiens
MTLRRRGEKATISIQEHMAIDVCPGPIRPIKQISDYFPRFPRGLPPDAGPRAAAPPDAPARPAVAGAGRRSPSDGAREDDEDVDQLFGAYGSSPGPSPGPSPARPPAKPPEDEPDADGYESDDCTALGTLDFSLLYDQENNALHCTITKAKGLKPMDHNGLADPYVKLHLLPGASKDFSEHLTC

SEQ ID NO: 789328 - protein, 102 aa, Homo sapiens
MAGWGGWSETVGRGRTKPQTQGSWGTPGKLLAGLVGCRAGGREVLRGVLGSSWRQQGKEGVRKMGRNSVWGKGTRDTLGPQEVFRPRRQVQLEMRIPPKEQE

SEQ ID NO: 789329 - protein, 246 aa, Homo sapiens
EAGASGQWVGVPAPGQARGGPALPLPLGVQAHRQAPRSRSCFANSPLAPPVPAAGLASPPPAGGVAGALAAAAERQHPQERRPGLCSRRPPSALRGRPPPRRPSARGGSRRRRPGALHLPRASGRAGAREKRRKKRAPREPHSLGSLGAEKRRPLTPRAPVLRAPGPQVEERHPSKGTSPRGEHSGLTDPGPPAGLQAPLLPAPRDPSRDPGDSRPAPGVPLGQHAMPGLRRDRLLTLLLLGALLS

SEQ ID NO: 789330 - protein, 93 aa, Homo sapiens
SSHQQIRKLIKDGLIIGKPVMVHSQAPCQKNTLASRKGRHTGIGKRKGTANVRMPEVTWIRRMRILCWLLRRYRESKKIDRHMYHSLYLMGEG

SEQ ID NO: 789331 - protein, 115 aa, Homo sapiens [sequence omitted]

SEQ ID NO: 789332 - protein, 110 aa, Homo sapiens
RHAGELWKSAMPASHLELQVMLGSWKGCARLSVESPTQRAMQEAERSLGEERGLATPNGTIRGVNSLFANTTRTPLPIKAELDPNPDSIHVRTVIFSRSGLQLQSACLYR

SEQ ID NO: 789333 - protein, 74 aa, Homo sapiens
VSKNGAKTAEEGGGGERGAKSRQGGSDKRERGTEGRGEILAVFFRSEIILDNFLFFSCKEMTLSEPFLEASKYH

SEQ ID NO: 789334 - protein, 282 aa, Homo sapiens
  misc_feature (169)..(169): Xaa can be any naturally occurring amino acid
  misc_feature (269)..(269): Xaa can be any naturally occurring amino acid
HLSPELAAGPQPLMSEPPVYCNLVDLRRCPRSPPPGPACPLLQRLDAWEQHLDPNSGRCFYINSLTGCKSWKPPRRSRSETNPGSMEGTQTLKRNNDVLQPQAKGFRSDTGTPEPLDPQGSLSLSQRTSQLDPPALQAPRPLPQLLDDPHEVEKSGLLNMTKIAQGGRXSRKNWGPSWVVLTGNSLVFYREPPPTAPSSGWGPAGSRPESSVDLRGAALAHGRHLSSRRNVLHIRTIPGHEFLLQSDHETELRAWHRALRTVIERLDRXNPWSCVCRALDPR

SEQ ID NO: 789335 - protein, 181 aa, Homo sapiens
RCARRPRRRRSRRGPDAPKQRPAEPRATPLCALARRLSAPRPERVVGRARGAARGGRRRQHQQLPEFPLRVLGLRHAALGLAGLRVLGPPAPPHGRQAGQAALRGRSTKDARLRPARRHAPPLPGVRGRWPQRLSSGSSQLALSQGRRLPRTTALGTACPGPSEVGPGELSDIPSLGLGSE

SEQ ID NO: 789336 - protein, 181 aa, Homo sapiens; identical to SEQ ID NO: 789335

SEQ ID NO: 789337 - protein, 181 aa, Homo sapiens; identical to SEQ ID NO: 789335

SEQ ID NO: 789338 - protein, 151 aa, Homo sapiens
RIRKEAKRNRRVLSRASRVLTLQQARDVGCPLQHSAGRCWGIQTAKANLRPQNNCVWPRGVGKNSNRERPSLAYLQTGRKLLVLHVNKHAQFKLELFKFWKTAHHIQPRGGAAEQQGAQKSHSSLQFLPTALSKYTHFQDCFQIQVSTGHC

SEQ ID NO: 789339 - protein, 588 aa, Homo sapiens
MASKKREVQLQTVINNQSLWDEMLQNKGLTVIDVYQAWCGPCRAMQPLFRKLKNELNEDEILHFAVAEADNIVTLQPFRDKCEPVFLFSVNGKIIEKIQGANAPLVNKKVINLIDEERKIAAGEMARPQYPEIPLVDSDSEVSEESPCESVQELYSIAIIKPDAVISKKVLEIKRKITKAGFIIEAEHKTVLTEEQVVNFYSRIADQCDFEEFVSFMTSGLSYILVVSQGSKHNPPSEETEPQTDTEPNERSEDQPEVEAQVTPGMMKNKQDSLQEYLERQHLAQLCDIEEDAANVAKFMDAFFPDFKKMKSMKLEKTLALLRPNLFHERKDDVLRIIKDEDFKILEQRQVVLSEKEAQALCKEYENEDYFNKLIENMTSGPSLALVLLRDNGLQYWKQLLGPRTVEEAIEYFPESLCAQFAMDSLPVNQLYGSDSLETAEREIQHFFPLQSTLGLIKPHATSEQREQILKIVKEAGFDLTQVKKMFLTPEQIEKIYPKVTGKDFYKDLLEMLSVGPSMVMILTKWNAVAEWRRLMGPTDPEEAKLLSPDSIRAQFGISKLKNIVHGASNAYEAKEVVNRLFEDPEEN

SEQ ID NO: 789340 - protein, 135 aa, Homo sapiens
MDPGEFLLGLKGITQIAETWLSGSGRNPTSNKNGNFPQGKFPGFYGKAHLSSQGQPLFTCPRGRFEARYGRQSNAVFEDWKIRGCEIPPGPTPAQQLPKQTLCTRLPQAHPFAVHARARTHTHTSTHTRSCGSGV

SEQ ID NO: 789341 - protein, 104 aa, Homo sapiens [sequence omitted]

SEQ ID NO: 789342 - protein, 187 aa, Homo sapiens
MESKVSEGGLNVTLTIRLLMHGKEVGSIIGKKGETVKKMREESGARINISEGNCPERIVTITGPTDAIFKAFAMIAYKFEEDIINSMSKSPATSKPPVTLRLVEPASQCGSLIGKGGSKIKEIRAVHRMPKVQVAGDMLPNSTERAEDQSRRTPERPIIQCDKSRSWREQCRESQHKTRDRDARQVN

SEQ ID NO: 789343 - protein, 110 aa, Homo sapiens
GNDRQCEQVYAHSLRKCSLSDPLSLTQPRVRPWQDTVSLTISSHLGDFPTGPGQQNLLLTVTMVWKDHEEFSSAVGVSDTDTDNLVTALTPFGNRTKLTLLPLSCEGQPS

SEQ ID NO: 789344 - protein, 123 aa, Homo sapiens
RGAEAEGVSRGSLPQRGRGKGNPTPGGAAGWRRPGRAAAVARWAVPWGAREGPGLEPGGKDVPRPRKRSRPPWLKGEAQGGRGDPASRGHGSRAAGHREVGAGPGRPAGVGKAAVGSTVHCPG

SEQ ID NO: 789345 - protein, 128 aa, Homo sapiens
MISGVRNLPRTRSFLWRTGSEQPHVIRPLFPVGVSSGQDILASGPSAGSGIAASAGRPKSLLSEARHPNHLCSSHFVPWSSDKTQQDFMATELEGFRATEPESDTDILIPGATGYEENTYLILSEKIY

SEQ ID NO: 789346 - protein, 156 aa, Homo sapiens
MLLEIVLLLFFKGAAPSRSLVRFWFNFYGKKTFWVVGAYVCVHRLQTSACFCAVLWTTGFGCCVFSSRSCLSGLCGCGPRGLSWLWGGWACGACWGWTWACRLGGRCSWQFLIGDFGSVGLVPDVAGVGSVIVVRVVDSAVTSWLGCGAIRGPSDS

SEQ ID NO: 789347 - protein, 38 aa, Homo sapiens
NGGKRQQGRQEATNLRERLIGGRLQHDLEQDTLIRLSN

SEQ ID NO: 789348 - protein, 167 aa, Homo sapiens
PERQRCPLPAGTRASRALRPPYPGPCTHHTWGTAVRRAWARGGEKALEEEKQPGRRRPRPQQAGEGAHGARGSASVLVETAPSARRRGCPESLRTLAGGPAPAASAAGRTLKKRRNGRGPAALPYSPRRSYRARPSISYAALSPLLAFPDVRCYSRLQPLRPPPSRL

SEQ ID NO: 789349 - protein, 109 aa, Homo sapiens
ASALRANPRRELESLILREFTDCPLPFLHRRPRLPRGNASARDYISRHASPAGPRVLTIAAGLLAGALALLWFVSAVSECQLLALLVALSLLLAFLEQGAFQASWRWRS

SEQ ID NO: 789350 - protein, 60 aa, Homo sapiens
YNTPRVLASFNHLVSDFYLIHTSHNSKRQLSIHCSVDLSNSVIIRWKLVYLDAIADQFTH

SEQ ID NO: 789351 - protein, 177 aa, Homo sapiens [sequence omitted]

SEQ ID NO: 789352 - protein, 157 aa, Homo sapiens
VTTSLRALSRVASYRKPAWQPSPCQSCPLPCVATTSCVPCGSCRIQHHLYGGPLPGPVSPLRTADRQASCLADTSPSAYVSPARDPLSHPIICLSPKHPASQERQSEPEPVQLSGRGAALLHCSAWVSLKRGIGPWSLISWKGQVMFDKVFWVCSKV

SEQ ID NO: 789353 - protein, 65 aa, Homo sapiens
LQTEEPGKPGCPLGSFTCLLYDLGQAPSPLCARLFHCKKMATIMVPTSKGEMKQSDVCRVPQRAP

SEQ ID NO: 789354 - protein, 112 aa, Homo sapiens
MSIPPPAWRPTMPTFSTQAFQICFGHLKTERIIFQESETLHVPFPLLRMLFPFSQLPYHQPGKIFISAPKISDITSPGAFPDASLDSRRSYRHFCLASTFSPLHLYAMAIYW

SEQ ID NO: 789355 - protein, 113 aa, Homo sapiens
MEEERKTAELQKNRIQDSVVFEDVAVDFTQEEWALLDLAQRNLYRDVMLENFQNLASLGYPLHTPHLISQWEQEEDLQTVKRELIQGIFMGEHREGKNPWEKLFWLGEKINLK

SEQ ID NO: 789356 - protein, 289 aa, Homo sapiens
KNEKPGKVSKGCKKPAKQNGKKATSKVPSAPQFVHSNDHANREAEIKKRVEEMREKQQAAQEQERQKRRSIKSYCEDILRRQEEFQCKEEVLQELNMFPQLDDEATMKAYYKESVEVVEYSDVILEVLDARDPLGCCCCFQMGEAILWAEGNKKLVLVLKKIDLDPKEVVKWLDYLRNELPTVAFKARTQHQVSFGAENLMRVLGNYCCLGEMRTHIHMDIVGLPNIGKSSLIKSLKHSHACSVGAIPGVTKFMQEVYLDKFIRLLDAPAIVPGPSSEVGTILHNCIHI

SEQ ID NO: 789357 - protein, 343 aa, Homo sapiens
PTLHPVAPDVRCPLPRGVLSALPTLHPVAPDVGCPLQRGVLSVLPTLHPVAPDVRCPLPRGVLSALPTLHPVAPDVGAPSSGGCPLQRGVLSALPTLHPVAPDVGCPLQRGVLSVLPTLHPVAPDVRCPLQRGVLSALPTLHPVAPDGCPLQRGVLSVLPTLHPVAPDVGCPLQRGVLSALPTLHPVVPDVGCPLQRGVLSVLPTLHPVAPDVRCPLQRGVLSALPTLHPVAPDVGCPFPRGGLSALPTLHPVAPDVGCPLTWGSFLPSPALPTLQTFPAPPHLRWRLLSSWGLARSPIPAHPQRFLSWLLVFCCIVGESHLLGGGGVAGSPWSLPVHLSLPP

SEQ ID NO: 789358 - protein, 276 aa, Homo sapiens
ASWSSLGLRGRRLRVSLLKAVVDQAGSRILSYIAGLVVDLGFGGGSRVVGGMADLGLGGGGKATRSRGGSGAGGGRLKIATMRKLFSFGRRLGQALLDSMDQEYAGRGYHIRDWELRKIHRAAIKGDAAEVEHCLTRRFRDLDARDRKDRTVLHLTCAHGRVEVVTLLLSRRCQINIYDRLNRTPLMKAVHCQEEACAIILLEHGANPNIKDIYSNTALHYAVYNKGTSLAEKLLSHHANIEALNEEGNTPLLFAINSRRQQIVEFLLKNQANLHA

SEQ ID NO: 789359 - protein, 202 aa, Homo sapiens
ASWSSLGLRGRRLRVSLLKAVVDQAGSRILSYIAGLVVDLGFGGGSRVVGGMADLGLGGGGKATRSRGGSGAGGGRLKIATMRKLFSFGRRLGQALLDSMDQEYAGRGYHIRDWELRKIHRAAIKGDAAEVEHCLTRRFRDLDARDRKDRTVLHLTCAHGRVEVVTLLLSRRCQINIYDRLNRTPLMKVYSSQLFQHEMDLI

SEQ ID NO: 789360 - protein, 35 aa, Homo sapiens
MAAPGSAFLPLTHRNRMWQSGGQMTEMLVLSELRP

SEQ ID NO: 789361 - protein, 275 aa, Homo sapiens
CLSMSELIAEIEKYQEVEEDQDPSCPRLSRELLDEKEPEVLQDSLDRCYSTPSDYLELPDLGQPYSSAVYSLEEQYLGLALDVDRIKKDQEEEEDQGPPCPRLSRELLEVVEPEVLQDSLDRCYSTPSSCLEQPDSCQPYGSSFYALEEKHVGFSLDVGEIEKKGKGKKRRGRRSKKKRRRGRKEGEDDNPPCPRLYGVLMEVEEPEVLQDSLDRCYSTPSMYFEQPDSFQHYRSVFYSFEEEHISFALYVDNRFFTLTVTSLHLVFQMGVIFPQ

SEQ ID NO: 789362 - protein, 104 aa, Homo sapiens
DFCLHSLANSICKDDKKYFILAEHIAAQCSITMKIRGKWMLCNPEAWCMHQNLLVALLRHGSSPLFTGDPFQDPQWMPKTTDSTERYIFCFLCFILDIHTYGKV

SEQ ID NO: 789363 - protein, 115 aa, Homo sapiens
MAAPTSRSLPYRASLKMAAPRQPAFSIWSLPPSSGLKMAAPALTKPGPAPCNPEIWISVSSRLSRRHTGGHNEESLNKGTPGSTAWPTLVAWILRGNLGFYILPRKERLPLERKY

SEQ ID NO: 789364 - protein, 142 aa, Homo sapiens
PARGSARAARPLRLPGVLPAGGAGGCVREKAKGAAGWERRESRREGGGEAGGRGAPRSSSQGRGSPARHGYSNPSTSRKRYFLRLGGFCILSSHRWGWRRPTRRPVAARELSFQYRDSELIQSAAEGAHPSYRAAECLWLEQ

SEQ ID NO: 789365 - protein, 156 aa, Homo sapiens
ARQRLGSRGAAAATSWSSACRGRGRVCEREGEGSRGVGEEGVPAGGRGRGWREGGSTELQPGPRFACTSRLLKPKHVPKAVFSASGRFLHPQFPPLGLAATNCKRNSLGGEAGGCGGWEGDSEGWEVNAGLDRLSLSFSADLSQPESCHFSTGIQN

SEQ ID NO: 789366 - protein, 68 aa, Homo sapiens
EDEVILHQGGLHSDTSGTTGVLIRRGDRHEEKAMEIQRHRCRGRPPCEDVGRETSSQGLPMATRSWER

SEQ ID NO: 789367 - protein, 106 aa, Homo sapiens
MENSLEFPQKTKNRATIQFSHPTAEYTPKRKEISISKRYLHSHVCCSIVHNSQDLEQPKCPPTDTWIKKMWYICTVIKKELDLIICNNMDETGGHYLSEINQAQKD

SEQ ID NO: 789368 - protein, 156 aa, Homo sapiens
IGSSSVTQAGVQWQDHNSLQPQLPEYKRSSHLSLLSRWDYRHTPPHLAKFCTTCRDGILLCCPGWSLTPKLKQSAHLVLLKRWDFMREPPRLVCLSISDQTGPTLWVCRQGNRDPEKGSNMLKPTQQAAGKGQERICPPDDSAQHRLPSLLIPYPI

SEQ ID NO: 789369 - protein, 98 aa, Homo sapiens
MEGSPIPVLTVPTAPYEDQRPAGGGGLRRPTGLFEGQRNYLPNFIQSVLSSIDLRDRQGCTMVVGSDGRYFSRTAIEIVVQMAAANGIGRLIIGQNGI

SEQ ID NO: 789370 - protein, 98 aa, Homo sapiens; identical to SEQ ID NO: 789369

SEQ ID NO: 789371 - protein, 69 aa, Homo sapiens
DLKLRVIPLASLVSGFTTWTEPHYWLLRFSSLQKVIWDFSASIIIINRIPRSDLVLNDLEVKRKSPFLQ

SEQ ID NO: 789372 - protein, 106 aa, Homo sapiens
MGPGRQRAKVLLGETSNALVERGLFSTSDTVLSQFLPIRLEPLPAQPGRWACARFGHVQVLGLCPGCKVLLTGCGLWSWKGRFKGWCKASTACAGLPRKAASMTTG

SEQ ID NO: 789373 - protein, 125 aa, Homo sapiens
QQEVITLFMIETVQISNQAAVTPLRHQKKLLPYGYIVNSIIAFTISLLLFFRARTAFALDTFACDMTNSMSLTSTPVSSTSSSSLSSCWELKLPTRILDHICLTHINVMKLKMDNTNGFDITYCT

SEQ ID NO: 789374 - protein, 84 aa, Homo sapiens
MLRSLSTLRSSSCMSGLGGECQPPAGGSESAFPAPRCPGPSPPGRPGAGGGAEPSHGPAGDGFRGARPAGLGWARDRGWGGGGR

SEQ ID NO: 789375 - protein, 139 aa, Homo sapiens
MATPRLPHKTPTAWRLLRYPRGKLHPRKYTLQPPAVPLDPARFLLYPGAELSLPRGPAHLRGLEFPSFSLPTRAADTQLGGLGFHGLPACAKGPPQGGGKAVNPSNNYAHDIMSPAIPDQGHHKRRAGCLISCLHLPQT

SEQ ID NO: 789376 - protein, 157 aa, Homo sapiens
  misc_feature (79)..(79): Xaa can be any naturally occurring amino acid
  misc_feature (149)..(149): Xaa can be any naturally occurring amino acid
  misc_feature (151)..(151): Xaa can be any naturally occurring amino acid
SASRLDVRGQLEDLMGQHKDLWEFHMLEQRLAREIRALERSKEQLLSERRLVRAKLREVERRLHSPPEVEGAMAVNDGXERRKLEIIRGSKVRKPPPKVRGPAEERGRTLSSPRALRRGGFPSRRWGWPLTPSRGQQGPGPCPDPSPRXPXQEIKGR

SEQ ID NO: 789377 - protein, 103 aa, Homo sapiens [sequence omitted]

SEQ ID NO: 789378 - protein, 117 aa, Homo sapiens
DASPGAFSLCCSQECLLSRLPLLSCCPGSFIHHKPGNRFSCAESPVPWRLFPPCSWFALPAWLEHVFQQLPEKESAWEVYFVESENIFSILLYLIGIQGKYNPKLEILLPLNFEGMS

SEQ ID NO: 789379 - protein, 149 aa, Homo sapiens
RLGPAALSGSQALGLGSGSGSAPLALRRSHSSRGHPHPRLTDVPGTQMSRGVRGQGAPSLLLQPVKPGTAAPSPRAEAVSAARSDAPRPKGREIRGEPGDLRPRGAEGCTAPAPTGLFREDASPSCPREVLGSWMRKSLLSPAPRPRAF

SEQ ID NO: 789380 - protein, 70 aa, Homo sapiens
MSSLAENEANYSKQQTEYHPAITFLCICPKELKTWVHTKTCTRDIRSLIHQCPNSDTTKASFSGQTDKPC

SEQ ID NO: 789381 - protein, 102 aa, Homo sapiens
LIYVFLVVMGFCHVGWAGLESLTSGDPPASASQSAGITGMSHHAQPKRMSVSFQTFVLVQIFLNSTLFTQIASTISSKVHPRSGKMLGPRYLLCSFPKGTFL

SEQ ID NO: 789382 - protein, 104 aa, Homo sapiens
QFPVGRVHRLLRKGNYAERVGAGAPVYLAAVLEYLTAEILELAGNAARDNKKTRIIPRHLQLAIRNDEELNKLLGKVTIAQGGVLPNIQAVLLPKKTESHHKAK

SEQ ID NO: 789383 - protein, 113 aa, Homo sapiens
QPPLGQFSVPGRQSPQPLPGSREGGGKVARPGLPGSRVGGGILVSQGRTCSRPEAGRITQKHGGCWGPVLQVGCHCCPPFPYSHPHSLLHPETAGVEERLGPESHICPHLAAV

SEQ ID NO: 789384 - protein, 81 aa, Homo sapiens
RSNLFLDPVQFLSQLQTQFGSEIFSNSKTQIHGAPKSERELTMIPSHSERSMDTKMGPALSSLSTPGVARSSISEPASDTI

SEQ ID NO: 789385 - protein, 178 aa, Homo sapiens
TPVSWPVSFSAVCRLQAALRFLPVSDKDSAPLLNTTVPATGCHSRSHPHDHPLQPTCQCHLWSPLPPRIHLLIVLPHLRFIPWAKNVPPNSLFILRDPDKCHHRSGTFPCPTPDLVSPQQLAHPLVQHYTCPYTQLPPLPDSELLECAAWLLFSSSPTPHTRPGTEQPLAINKPHFKK

SEQ ID NO: 789386 - protein, 166 aa, Homo sapiens
KHQRVHTGERPYECNECGKLFSQSSSLNSHRRLHTGERPYQCSECGKFFNQSSSLNNHRRLHTGERPYECSECGKTFRQRSNLRQHLKVHKPDRPYECSECGKAFNQRPTLIRHQKIHIRERSMENVLLPCSQHTPEISSENRPYQGAVNYKLKLVHPSTHPGEVP

SEQ ID NO: 789387 - protein, 166 aa, Homo sapiens; identical to SEQ ID NO: 789386

SEQ ID NO: 789388 - protein, 157 aa, Homo sapiens
MSLHLLLPGCKGLTGFPATQAQHCQHGLFKPNSNGITALLKIPTRTPHFQGLTLCSPCDLTNSTPLSSLYPRCSHHKGLLASLGISQVYGPPTLKSFAVAVLSIWNILHPDSLMANSLISIKSSNSWPGAVAHACNPSTLGGRGGRITRSGDRDHPG

SEQ ID NO: 789389 - protein, 123 aa, Homo sapiens
PRPPAGAAEGAAEGARRRPRARLHARLLGPSALAPSKQRNGCGFVPVTRVLEILTLLNVPKGEGVQGWRLSQKAGTLRASLPRRPSFLGLAPELSWVSVSSRRERLRGGVDLGLSRLPCGPGE

SEQ ID NO: 789390 - protein, 138 aa, Homo sapiens
MDPILSEVLLVCLHLSCHLEFQRGGPGQHVGCCKDPHRGGMPEAILLAMVVPGSLFVSRLPEAVTYSGLVSQCFAELKEAPGRHESHERVGLLSILAGADVTCCLPAKFPHTCWSDSSNISLQGVVSLSLEDIQSPVI

SEQ ID NO: 789391 - protein, 113 aa, Homo sapiens
RQAQLTQLGREPRRPLNLLTPWREGLRFHGCFVCLFCFEMESHSVAQAGVQWHSLGSLQRPSPRIKGFSCLSFSSSWDYRHAPPCMPNFCILSRDGFRHVGQAGLELLTSSDP

SEQ ID NO: 789392 - protein, 83 aa, Homo sapiens
FHPTPQSPFLNPTLDLIRFELGPIQLRWPSRPGEGIFFFPNPLWWILKDHIRITVQYREGSGKFSLSYTRVGLGMVAYSCGLS

SEQ ID NO: 789393 - protein, 72 aa, Homo sapiens
MGDTVVPSVPQVMLIWSGGVVGETASEGSTAGGPSTWLFQGPGGQGTWGSRTKEETLVLVIGVEIKITKEPL

SEQ ID NO: 789394 - protein, 107 aa, Homo sapiens
GARGGQLLSTRILRKLTRIQFPQAKLKLCLEKQFLCPLVLLNVTPVWRICRTIWLQSLQLFTEQTHRVINYSLPIIVFPFFLPKRSFHFSAPEPEVWVTFLWVHTLP

SEQ ID NO: 789395 - protein, 91 aa, Homo sapiens
SAAVLGPTLRSVESAAGRGGTRKLCKAEGAASDQEPYPSGGSYGRVTVAARQLGPGSSGRAGVVTSAKQGFWAVIESCSRACRETPAALPA

SEQ ID NO: 789396 - protein, 123 aa, Homo sapiens
MKGKKLLCWRVTPGRACLDRGHPGAGAFLSRGQETNLEVKMISYLNTRCRESRFGASSAHSFCIAENCPSDSTAAFSFGGPGPYWVSAACCLSVYPAIYHVSLSHLLCFHPGLHEYQYSMLCT

SEQ ID NO: 789397 - protein, 139 aa, Homo sapiens
MASLFRSYLPAIWLLLSQLLRESLAAELRGCGPRFGKHLLSYCPMPEKTFTTTPGGWLLESGRPKEMVSTSNNKDGQALGTTSEFIPNLSPELKKPLSEGQPSLKKIILSRKKRSGRHRFDPFCCEVICDDGTSVKLCT

SEQ ID NO: 789398 - protein, 104 aa, Homo sapiens
  misc_feature (77)..(77): Xaa can be any naturally occurring amino acid
  misc_feature (100)..(100): Xaa can be any naturally occurring amino acid
MASLFRSYLPAIWLLLSQLLRESLAAELRGCGPRFGKHLLSYCPMPEKTFTTTPGGWLLESGRPKGFFTRKSSWGSXGVGGRKLAGKNIRNSLHLWEGFXVAFP

SEQ ID NO: 789399 - protein, 120 aa, Homo sapiens
GGPADSAPPPSLNADYIQRPYCMRRFNESAAERHTNFCKDQSSRRVFNPAQTAAKLASRAQGRAQMGPKKEPTVTSAVGALLQNRVLVATNEVPTKSGLAMDPASGAKLRQGFSKSSKKD

SEQ ID NO: 789400 - protein, 216 aa, Homo sapiens
DYHFKVDNDENEHQLSLRTVSLGAGAKDELHIVEAEAMNYEGSPIKVTLATLKMSVQPTVSLGGFEITPPVVLRLKCGSGPVHISGQHLVAVEEDAESEDEEEEDVKLLSISGKRSAPGGGSKVPQKKVKLAADEDDDDDDEEDDDEDDDDDDFDDEEAEEKVPVKQSIRDTPAKNAQKSNQNGKDSNIINTKIKRTRILQETGKKLLKHQKDLVL

SEQ ID NO: 789401 - protein, 68 aa, Homo sapiens
LCGVLQQEHSMTITRFNGPCLHIKTIFCRRSLSFIEAILTGITRILARNIAIIKHYRVWRFKVLGIQM

SEQ ID NO: 789402 - protein, 112 aa, Homo sapiens
MGGDNPEVGKKARNSSKFELRKSPVFSDEDSDLDFDISKLEQQSKVQNTGHGKPREKSIIDEKFFQLSEMEAYLENREKEEERKDDNDDESVKSSRNVNNKDFFDPVESDED

SEQ ID NO: 789403 - protein, 186 aa, Homo sapiens
NAADSSDDNIKTPALPPSADDNLKTPSERQLTPLPPSAPPSADDNIKTPAERLRGPLPPSADDNLKTPSERQLTPLPPSAPPSADDNIKTPAERLRGPLPPSADDNLKTPSERQLTPLPPSAPPSADDNIKTPAERLRGPLPPSADDNLKTPSERQLTPLPPSAPPSADDNIKTPAFHPQRMIISR

SEQ ID NO: 789404 - protein, 211 aa, Homo sapiens
NLKTPSERQLTPLPPSAPPSADDNIKTPAERLRGPLPPSADDNLKTPSERQLTPLPPSAPPSADDNIKTPAERLRGPLPPSADDNLKTPPLATQEAEAEKPRKPKRQRAAEMEPPPEPKRRRVGDVEPSRKPKRRRAADVEPSSPEPKRRRVGDVEPSRKPKRRRAADVEPSSPEPKRRRVGDVEPSRKPKRRRAADVEPSLPEPKRRRLS

SEQ ID NO: 789405 - protein, 234 aa, Homo sapiens
NAADSSDDNIKTPALPPSADDNLKTPSERQLTPLPPSAPPSADDNIKTPAERLRGPLPPSADDNLKTPSERQLTPLPPSAPPSADDNIKTPAERLRGPLPPSADDNLKTPSERQLTPLPPSAPPSADDNIKTPAERLRGPLPPSADDNLKTPSERQLTPLPPSAPPSADDNIKTPAERLRGPLPPSADDNLKTPSERQLTPLPPSAPPSADDNIKTPAERLRGASAGAASTLSG

SEQ ID NO: 789406 - protein, 96 aa, Homo sapiens
GTPCWLLTAPLCKPTQEDPDGTRNEKHIGQRTRYNAKNNGGDVCAVARHAQRLQEGSWSQPGDTWGLSEFAACTHASKRKSPWLASLCYMKRSPRN

SEQ ID NO: 789407 - protein, 103 aa, Homo sapiens
EHRDVLVLLPSREQLRLAVGVKATGRELFQQVCNVASIRDAQFFGLCVVRNNEYIFMDLEQKLSKYFSKDWKKERNEGNEKPRAPFVAFLRVQHYVENGRVIR

SEQ ID NO: 789408 - protein, 142 aa, Homo sapiens
ERPYECSECGKFFRDSYKLIIHQRVHTGEKPYECSNCGKFLRYRSTFIKHHKVCTGEKPHECSKCRELFRTKSSLIIHQQSHTGESPFKLRECGKDFNKCNTGQRQKTHTGERSYECGESSKVFKYNSSLIKHQIIHTGKRP

SEQ ID NO: 789409 - protein, 115 aa, Homo sapiens
KKNRSHRKKGAPETTYGAKPFKFQLLPVRGHSTAPGKSPTRGQLTRELMSNRNTTPLGMFSANQGHRRLQGPAAPLSPTLASFSSCPYFLLPTPLLFSLLLPPVPLFPSSPLSVL

SEQ ID NO: 789410 - protein, 211 aa, Homo sapiens
MAVGKNKRLTKGGKKGAKKKVVDPFSKKDWYDVKAPAMFNIRNIGKTLITRTQGTKIASDGLKGRVFEVSLADLQNDEVAFRKFKLITEDVQGKNCLTNFHGMDLTRDKMCSMVKKWQTMIEAHVDVKTTDGYLLHLFCVGFTKKRNNQIQKTSYAQHQQVRQIQKKMMEIMTREVHDNDLKEVVNKLIPDSIGKDIEKACQSIYPLHDVF

SEQ ID NO: 789411 - protein, 86 aa, Homo sapiens
EIAAAYIHMMPNAVPPGDREVDNDEEKESPFDRMSQIYQTSPDGDPVAESVLRAGLRGGDFFRQNNTFHPKWIPLNCIKKPPHGSA

SEQ ID NO: 789412 - protein, 125 aa, Homo sapiens
LKGKVKLETAQGKPAFHSMQSHRLFTKTDVYSDCFFWKDLSETQMNATIFLSATCDLEASSLLLLSPSFWKKLIYFLHILIDVSYLSTMYKTKLFPYQLGHMSSGLPEVVSWMYVLNLGKINFLN

SEQ ID NO: 789413 - protein, 113 aa, Homo sapiens
GLILILQSQACSIFRLLSLALTFLPLCYKDPLLWLKWVHPPQPECEDPLLHGTPLPRTRMGPITAAQRIGRPSPGFLGRHQDVRKAQRKKKWLGMVAHACDPSSLGDQGRRTT

SEQ ID NO: 789414 - protein, 113 aa, Homo sapiens
MTLASICPKRDWAPANRKDIGSHSSWVSAIKDDSLAKSLKDGVVLADSQINYFILFFNSSEFSAERSRCYFQGWCFLEEEEANDGGSRPLAWRQSNGMKEHHLLRTTVNLSPR

SEQ ID NO: 789415 - protein, 367 aa, Homo sapiens
SYIQLLAEFLSRDQVFQQNGYGLTQQNLLNNYDMLGIMAWNATCKNWLAAEAALEKYYLSIFYGIEFVVGVLGNTIVVYGYIFSLKNWNSSNIYLFNLSVSDLAFLCTLPMLIRSYANGNWIYGDVLCISNRYVLHANLYTSILFLTFISIDRYLIIKYPFREHLLQKKEFAILISLAIWVLVTLELLPILPLINPVITDNGTTCNDFASSGDPNYNLIYSMCLTLLGFLIPLFVMCFFYYKIALFLKQRNRQVATALPLEKPLNLVIMAVVIFSVLFTPYHVMRNVRIASRLGSWKQYQCTQVVINSFYIVTRPLAFLNSVINPVFYFLLGDHFRDMLMNQLRHNFKSLTSFSRWAHELLLSFREK

SEQ ID NO: 789416 - protein, 37 aa, Homo sapiens
SKSEFLMRTMGSKHSSYVLKRNTSHSKQGRDKMKNLE

SEQ ID NO: 789417 - protein, 89 aa, Homo sapiens
SLSLFVSLSLSLSVCVSVPLSLSVSLSLCISLSLCVSLSLYLSISLCLSTSLAHSPLTSHPEVVLPSQRSSASLAMSAPSQLLGRAMIC

SEQ ID NO: 789418 - protein, 95 aa, Homo sapiens
RHGGRPGDPKQRQSLGSTHSTYLPLSGPRFLQNMRALCKEEKKNGRNSNLNPTLWLQLRRPTQASTVRAPSGFSQALPRHTGRLQCYHCGKGQGN

SEQ ID NO: 789419 - protein, 278 aa, Homo sapiens
LGSPAPAPAPPVARSSGRSLPARCPGVGGPRARRQPASRLRPLPVPQEPVRGVRSVPESADPGEQPSAPGTARRDPRRRAAMNATFLNHSGLEEVDGVGGGAGAALGNRTHGLGTWLGCCPGGAPLAASDGVPAGLAPDERSLWVSRVAQIAVLCVLSLTVVFGVFFLGCNLLIKSESMINFLVQERRPSKDVGSSHPGAVLSAIWVRPRQRCCKKDPGDPDPRPALCALPPPPGGQLRAWGARAGTRRDCRRGRGKGLGRPALSCVRCSVAGWENVG

SEQ ID NO: 789420 - protein, 583 aa, Homo sapiens
LGSWNPATMAQGVLWILLGLLLWSDPGTASLPLLMDSVIQALAELEQKVPAAKTRHTASAWLMSAPNSGPHNRLYHFLLGAWSLNATELDPCPLSPELLGLTKEVARHDVREGKEYGVVLAPDGSTVAVEPLLAGLEAGLQGRRVINLPLDSMAAPWETGDTFPDVVAIAPDVRATSSPGLRDGSPDVTTADIGANTPDATKGCPDVQASLPDAKAKSPPTMVDSLLAVTLAGNLGLTFLRGSQTQSHPDLGTEGCWDQLSAPRTFTLLDPKASLLTMAFLNGALDGVILGDYLSRTPEPRPSLSHLLSQYYGAGVARDPGFRSNFRRQNGAALTSASILAQQVWGTLVLLQRLEPVHLQLQCMSQEQLAQVAANATKEFTEAFLGCPAIHPRCRWGAAPYRGRPKLLQLPLGFLYVHHTYVPAPPCTDFTRCAANMRSMQRYHQDTQGWGDIGYSFVVGSDGYVYEGRGWHWVGAHTLGHNSRGFGVAIVGNYTAALPTEAALRTVRDTLPSCAVRAGLLRPDYALLGHRQLVRTDCPGDALFDLLRTWPHFTATVKPRPARSVSKRSRREPPPRTLPATDL

SEQ ID NO: 789421 - protein, 96 aa, Homo sapiens
IVAAGIPGCTVGTAVGCWGWQRAWVPGTRSGHLWTRAEDEVIKLQIDPISLNPRMPEKLCGDDMLPTNSIPSETCPGVAAHTCNPSTSGGRGGRIT

SEQ ID NO: 789422 - protein, 144 aa, Homo sapiens
VKSKSSHLLVRKCWSWSPSESPGQARGPSALFCSTGALSLRTLSGLECPQHTQGETCPVQTHRRHLCPAQGRAGVSGTCRCRHIIWRVGRTNVAASWRPSVALHQEGAVMAGGAQQCRRGVTGSGVARWRPPVKFAIKQFPEFG

SEQ ID NO: 789423 - protein, 87 aa, Homo sapiens
MAMSLLQDWCRSLDVDAHRALLVTGIPEGLEQADVEAVLQPTLLPLGTFRLRHMKALMNEKAQAALVEFVEDVNHAAIPREIPGKDG

SEQ ID NO: 789424 - protein, 130 aa, Homo sapiens
NLSSDNQKLIVFSSPIVIKRLLQKFRPKAFASYFCEIQKDCKVLVMIRKPKAGKSQGRECIWQKSSPLDGSAGQTWERESRKLHGSSHKSAALLPRREMRLTAGLRHCLPSPAALIQDAGLGKATHILTA

SEQ ID NO: 789425 - protein, 125 aa, Homo sapiens [sequence omitted]

SEQ ID NO: 789426 - protein, 88 aa, Homo sapiens
MQCSSHLLQEGFPAPPVIHIRKPSVGLLENLVSACIIAASTVFLKLCFAESSMFQGDFSVATASCGISSVLSFIMRFPLKKDFQELER

SEQ ID NO: 789427 - protein, 125 aa, Homo sapiens
VSQAGVQWRNLGSLQPLLRGFKRFSCLSLSSSWDYRHTPPPPANFVFLVETGFHYAGLKLLTSGDPLASASQSAGITDVSHRAWPHFQHLCCISSRLLHHSITPFVLPLGVQEEACPLSQHFLFG

SEQ ID NO: 789428 - protein, 90 aa, Homo sapiens
THPPLFLAVKMIIIITILSLTNEAQSSLLEDKRPRRDGPRCLGQQPAPTARYEREAILDILVLLNSDDCSHRSDPSASLLPVAGGYVVLH

SEQ ID NO: 789429 - protein, 112 aa, Homo sapiens
SAEAPRRRPKLPRFLGTAGVLSRKGSAGGPQPAPEARAGFLFGYAERQSAPANNSSYDNNPPSFQTSETWAAASVLLFRHLPGAPESAEPPSPRSESSPSLSPTSLPGAGGQ

SEQ ID NO: 789430 - protein, 70 aa, Homo sapiens
VVQADGLRGVIPVDTGELSCEGPGLRGAMSDLQMLQSLGRVTRGIGESPLKGALWPFSGHGLQFLEPGSP

SEQ ID NO: 789431 - protein, 79 aa, Homo sapiens
TLARHAPSCTCENPETLVGTDTEQLDIDRNTPAEEDTSGWMSRGTYRRKSTLTAPADWQAINWQNDTKFGQGGRRRAWP

SEQ ID NO: 789432 - protein, 201 aa, Homo sapiens
MITETAAEPTVPAVPAAEEATEARGREEPAWPWKDAPIRTLVQRIHQLQAERAQGFRRLEEWLAPVQGLRAWGRGLRVPTCRRGHRQYLRSGPDYDFARYRSTVHGVTQAFAAASREVLAVEAELGGPRRQPLLAGHVRSLQELEQTRLGTVALLQLMETPELAGQEDAVRMQQLKMKVIKTMEAISEVLQDLRFDAESAE

SEQ ID NO: 789433 - protein, 179 aa, Homo sapiens
MITETAAEPTVPAVPAAEEATEARGREEPAWPWKDAPIRTLVQRIHQLQAERAQGFRRLEEGHRQYLRSGPDYDFARYRSTVHGVTQAFAAASREVLAVEAELGGPRRQPLLAGHVRSLQELEQTRLGTVALLQLMETPELAGQEDAVRMQQLKMKVIKTMEAISEVLQDLRFDAESAE

SEQ ID NO: 789434 - protein, 179 aa, Homo sapiens; identical to SEQ ID NO: 789433

SEQ ID NO: 789435 - protein, 201 aa, Homo sapiens; identical to SEQ ID NO: 789432

SEQ ID NO: 789436 - protein, 213 aa, Homo sapiens
MGRGFRGTGSSPSRKRPHSTSPLPDDSLFVASLSSPRAGVGLSRVPLRESGSVLPTYQSSPLVSGDTSWGPFRWLAPVQGLRAWGRGLRVPTCRRGHRQYLRSGPDYDFARYRSTVHGVTQAFAAASREVLAVEAELGGPRRQPLLAGHVRSLQELEQTRLGTVALLQLMETPELAGQEDAVRMQQLKMKVIKTMEAISEVLQDLRFDAESAE

SEQ ID NO: 789437 - protein, 213 aa, Homo sapiens; identical to SEQ ID NO: 789436

SEQ ID NO: 789438 - protein, 213 aa, Homo sapiens; identical to SEQ ID NO: 789436

SEQ ID NO: 789439 - protein, 195 aa, Homo sapiens
MGRGFRGTGSSPSRLSSPRAGVGLSRVPLRESGSVLPTYQSSPLVSGDTSWGPFRWLAPVQGLRAWGRGLRVPTCRRGHRQYLRSGPDYDFARYRSTVHGVTQAFAAASREVLAVEAELGGPRRQPLLAGHVRSLQELEQTRLGTVALLQLMETPELAGQEDAVRMQQLKMKVIKTMEAISEVLQDLRFDAESAE

SEQ ID NO: 789440 - protein, 213 aa, Homo sapiens; identical to SEQ ID NO: 789436

SEQ ID NO: 789441 - protein, 195 aa, Homo sapiens
MGRGFRGTGSSPSRKRPHSTSPLPDDSLFVASLSSPRAGVGLSRVPLRESGSVLPTYQSSPLVSGDTSWGPFRWLAPVQGLRAWGRGLRVPTCRRGHRQYLRSGPDYDFARYRSTVHGVTQAFAAASREVLAVEAELGGPRRQPLLAGHVRSLQELEQTRLGTVALLQLMETPELAGQEDAVRMQQLKMNSHPLL

SEQ ID NO: 789442 - protein, 47 aa, Homo sapiens
MRRGRWETGRMAPSPALTASWLGLRPTALLTFLQFQTPPTIKSSSSV

SEQ ID NO: 789443 - protein, 49 aa, Homo sapiens
MQISIYRHIHIHIEEEEEEEEEEEEEEEEKKKKEKKKKKEAAAEEEEEE

SEQ ID NO: 789444 - protein, 117 aa, Homo sapiens
GRSSVHHAPPLRPGPLRGQRSQESSLYLCGTDRNPRPARRTWTERPCSEPGAGRRALVWRLGLPTVQSPEARSSRRDDDGWAGPGVGDSQTPARRDGQLRHLGRGQYFGASVMSPVT

SEQ ID NO: 789445 - protein, 71 aa, Homo sapiens
QGSANYDPEAKPSPSAFVYKVLMEQSCEPAVCGLRLPLDTAAELIPAQTSGPAEGGAFPPSSPLSTSRRSR

SEQ ID NO: 789446 - protein, 71 aa, Homo sapiens; identical to SEQ ID NO: 789445

SEQ ID NO: 789447 - protein, 71 aa, Homo sapiens; identical to SEQ ID NO: 789445

SEQ ID NO: 789448 - protein, 96 aa, Homo sapiens
VVGERPFHPVSREAACSRPHLGRSPGSVFTVGEAPGPLLDAAGMAEIFSPEEGGSVLHCGVVVSASSPESPSRICGSWWAGIRSNRMVTGTEQRKE

SEQ ID NO: 789449 - protein, 136 aa, Homo sapiens
LPRPGGNALPAVTPAGGGGRDPCAEPPPGPAPAADGGGGWGARVWPPAHPLASTSRAVGGCALPRGQALEGPWRCRRPQPMAQRYDELPHYPGIADGPAALAGFPEAVPAAPGPYGPHRPPQPLPPGLDSDGLKRD

SEQ ID NO: 789450 - protein, 419 aa, Homo sapiens
MAQPGDPRRLCRLVQEGRLRALKEELQAAGGCPGPAGDTLLHCAARHGHRDVLAYLAEAWGMDIEATNRDYKRPLHEAASMGHRDCVRYLLGRGAAVDCLKKADWVLTEGTEVAGQSCFPACQTPESSRFSICAKDVCVLKTWPLASNVSAASICQLLLVGLRTPLMMACTRKNLGVIQELVEHGANPLLKNKDGWNSFHIASREGDPLILQYLLTVCPGAWKTESKIRRTPLHTAAMHGHLEAVKVLLKRCQYEPDYRDNCGVTALMDAIQCGHIDVARLLLDEHGACLSAEDSLGAQALHRAAVTGQDEAIRFLVSELGVDVDVRATSTHLTALHYAAKEGHTSTIQTLLSLGADINSKDEKNRSALHLACAGQHLACAKFLLQSGLKDSEDITGTLAQQLPRRADVLRGSGHSAMT

SEQ ID NO: 789451 - protein, 361 aa, Homo sapiens [sequence omitted]

SEQ ID NO: 789452 - protein, 361 aa, Homo sapiens [sequence omitted]

SEQ ID NO: 789453 - protein, 304 aa, Homo sapiens
MAQPGDPRRLCRLVQEGRLRALKEELQAAGGCPGPAGDTLLHCAARHGHRDVLAYLAEAWGMDIEATNRDYKRPLHEAASMGHRDCVRYLLGRGAAVDCLKKADWTPLMMACTRKNLGVIQELVEHGANPLLKNKDGWNSFHIASREGDPLILQYLLTVCPGAWKTESKIRRTPLHTAAMHGHLEAVKVLLKRCQYEPDYRDNCGVTALMDAIQCGHIDVARLLLDEHGACLSAEDSLGAQALHRAAVTGQDEAIRFLVSELGVDVDVRATSTHLTALHYAAKPCIWPVQVSTWPVPSFSCSRD

SEQ ID NO: 789454 - protein, 361 aa, Homo sapiens [sequence omitted]

SEQ ID NO: 789455 - protein, 358 aa, Homo sapiens
MDIEATNRDYKRPLHEAASMGHRDCVRYLLGRGAAVDCLKKADWVLTEGTEVAGQSCFPACQTPESSRFSICAKDVCVLKTWPLASNVSAASICQLLLVGLRTPLMMACTRKNLGVIQELVEHGANPLLKNKDGWNSFHIASREGDPLILQYLLTVCPGAWKTESKIRRTPLHTAAMHGHLEAVKVLLKRCQYEPDYRDNCGVTALMDAIQCGHIDVARLLLDEHGACLSAEDSLGAQALHRAAVTGQDEAIRFLVSELGVDVDVRATSTHLTALHYAAKEGHTSTIQTLLSLGADINSKDEKNRSALHLACAGQHLACAKFLLQSGLKDSEDITGTLAQQLPRRADVLRGSGHSAMT

SEQ ID NO: 789456 - protein, 266 aa, Homo sapiens
MAQPGDPRRLCRLVQEGRLRALKEELQAAGGCPGPAGDTLLHCAARHGHRDVLAYLAEAWGMDIEATNRDYKRPLHEAASMGHRDCVRYLLGRGAAVDCLKKADWTPLMMACTRKNLGVIQELVEHGANPLLKNKDGWNSFHIASREGDPLILQYLLTVCPGAWKTESKIRRTPLHTAAMHGHLEAVKVLLKRCQYEPDYRDNCGVTALMDAIQCGHIDVARLLLDEHGACLSAEDSLGAQALHRAAVTGQGRTYKYNSDSLILGS

SEQ ID NO: 789457 - protein, 257 aa, Homo sapiens
MAQPGDPRRLCRLVQEGRLRALKEELQAAGGCPGPAGDTLLHCAARHGHRDVLAYLAEAWGMDIEATNRDYKRPLHEAASMGHRDCVRYLLGRGAAVDCLKKADWTPLMMACTRKNLGVIQELVEHGANPLLKNKDGWNSFHIASREGDPLILQYLLTVCPGAWKTESKIRRTPLHTAAMHGHLEAVKVLLKRCQYEPDYRDNCGVTALMDAIQCGHIDVARLLLDEHGACLSAEDSLGAQALHRAAVTGQASWLTW

SEQ ID NO: 789458 - protein, 109 aa, Homo sapiens
VPPPPPKSVDHKSWPTLTWFVKYLPLCTFPFSLRLLADSLTTEAAWLSSGSTNLKAHQPANLECILHPWVTELRSPRLCNPRTLQPLRPNTQALPCRRAEMLRRPSGVS

SEQ ID NO: 789459 - protein, 72 aa, Homo sapiens
SAAGPSPLRATSRISESLNYEHWCYCPDFYHRLHLWPVFIGSIIDCHLDRPFLANTGLSRSLENPVGKSESW

SEQ ID NO: 789460 - protein, 157 aa, Homo sapiens
SHTGQSKCHTHQNHCLLGCITCGINYTVTLKAISATGLTADCSYQSYFSGACCPLGVKLYRLGPNGIRIYWQASRGSANYSTDLYGSKGIFTCTPSAGLSFCDVTEIPCGDVYTVMVSPVAKTGLKLTFCPKKIYSVTCSGSTLGMSEWVQGTELEF

SEQ ID NO: 789461 - protein, 118 aa, Homo sapiens
MDPLRAQQLAAELEVEMMADMYNRMTSACHRKCVPPHYKEAELSKGESVCLDRCVSKYLDIHERMGKKLTELSMQDEELMKRVQQQLWACMRSLSVYTLGCTPPLPTLINVLPVGCHL

SEQ ID NO: 789462 - protein, 145 aa, Homo sapiens
MDPLRAQQLAAELEVEMMADMYNRMTSACHRKCVPPHYKEAELSKGESVCLDRCVSKYLDIHERMGKKLTELSMQDEELMKRVQQALGLHEVPVSIHPGVYPTPSHFNKRAPCWVSSVKNSSKLIHSAQIRAYLGNSPYEGAYYN

SEQ ID NO: 789463 - protein, 118 aa, Homo sapiens
QGRDTSTENHLVPSKPRNAQLYVPHSAIAKLVANEEVLLLCFSQESSRTCGRDDGCFHAPIDQLAEEVRMTKFIPYKQHHQLSLGYDFYIHKHHDHKNVFIDFYVSCFHVYKDSSCLF

SEQ ID NO: 789464 - protein, 320 aa, Homo sapiens
RDPGCGAQHCAVMVGQMYCYPGSHLARALTRALALALVLALLVGPFLSGLAGAIPAPGGRWARDGQVPPASRSRSVLLDVSAGQLLMVDGRHPDAVAWANLTNAIRETGWAFLELGTSGQYNDSLQAYAAGVVEAAVSEELIYMHWMNTVVNYCGPFEYEVGYCERLKSFLEANLEWMQEEMESNPDSPYWHQVRLTLLQLKGLEDSYEGRVSFPAGKFTIKPLGFLLLQLSGDLEDLELALNKTKIKPSLGSGSCSALIKLLPGQSDLLVAHNTWNNYQHMLRVIKKYWLQFREGPWGRWVWVCLGDEQVGGHTRGEWS

SEQ ID NO: 789465 - protein, 341 aa, Homo sapiens
  misc_feature (333)..(333): Xaa can be any naturally occurring amino acid
RDPGCGAQHCAVMVGQMYCYPGSHLARALTRALALALVLALLVGPFLSGLAGAIPAPGGRWARDGQVPPASRSRSVLLDVSAGQLLMVDGRHPDAVAWANLTNAIRETGWAFLELGTSGQYNDSLQAYAAGVVEAAVSEELIYMHWMNTVVNYCGPFEYEVGYCERLKSFLEANLEWMQEEMESNPDSPYWHQVRLTLLQLKGLEDSYEGRVSFPAGKFTIKPLGFLLLQLSGDLEDLELALNKTKIKPSLGSGSCSALIKLLPGQSDLLVAHNTWNNYQHMLRVIKKYWLQFREGPWGDYPLVPGNKLVFSSYPGTIFSCDDFYILGSGLVXLRHHWKKT

SEQ ID NO: 789466 - protein, 198 aa, Homo sapiens
KLSVGDTGPAMDSRARDHMTGPGWKTFKNKYAGCNQQSVPLRERLKSFLEANLEWMQEEMESNPDSPYWHQVRLTLLQLKGLEDSYEGRVSFPAGKFTIKPLGFLLLQLSGDLEDLELALNKTKIKPSLGSGSCSALIKLLPGQSDLLVAHNTWNNYQHMLRVIKKYWLQFREGPWGRWVWVCLGDEQVGGHTRGEWS

SEQ ID NO: 789467 - protein, 73 aa, Homo sapiens
QGPDPCQPGGSLWAAALAAHLGQLGQHSLWERPLTPMPSLGKAEALEGWNIRHVGDIIENKNLLPMQKTFPQK

SEQ ID NO: 789468 - protein, 411 aa, Homo sapiens
SGCPRTSPRRPRSAARPRLRSAPAGARPRAPPPPTRRPDREEPMAGPAIHTAPMLFLVLLLPLELSLAGALAPGTPARNLPENHIDLPGPALWTPQASHHRRRGPGKKEWGPGLPSQAQDGAVVTATRQASRLPEAEGLLPEQSPAGLLQDKDLLLGLALPYPEKENRPPGWERTRKRSREHKRRRDRLRLHQGRALVRGPSSLMKKAELSEAQVLDAAMEESSTSLAPTMFFLTTFEAAPATEESLILPVTSLRPQQAQPRSDGEVMPTLDMALFDWTDYEDLKPDGWPSAKKKEKHRGKLSSDGNETSPAEGEPCDHHQDCLPGTCCDLREHLCTPHNRGLNNKCFDDCMCVEGLRCYAKFHRNRRVTRRNRALCGARDGQRRPGILHQRLAAPRDWGLSPGGCTKPGE

SEQ ID NO: 789469 - protein, 116 aa, Homo sapiens
RFGQKVGPVGPFRGPWLRVPSLPPDLPPAATGRSLLHCKVIKQTAQLAVLSSLAAILFSGHLAFISVILGLSLLEVPLKEADTLASVKDLHSQANASPAFTRTSLTKKRPHNRGFW

SEQ ID NO: 789470 - protein, 148 aa, Homo sapiens
MPVLKQLGPAQPKKRPDRGALSISAPLGDFRHTLHVGRGGDAFGDTSFLSRHGGGPPPEPRAPPAGAPRSPPPPAVPQSAAPSPADPLLSFHLDLGPSMLDAVLGVMDAARPEAAAAKPDAEPRPGTQPPQARCRPNADLELNDVIGL

SEQ ID NO: 789471 - protein, 142 aa, Homo sapiens
RPLDNIERGVLHGYPEPCGTGRVGLELERETRREAGAEGRRASGRERRAEETRATSVRTGTPPRGASAFPPLLSSPLTPRGKLLGDKKAWEGPVPKPSLPGDWAVIPLLPGLLPWPPRGADTLAPGAGENPPGGRRKARAGD

SEQ ID NO: 789472 - protein, 119 aa, Homo sapiens
MPVLKQLGPAQPKKRPDRGALSISAPLGDFRHTLHVGRGGDAFGDTSFLSRHGGGPPPEPRAPPAGAPRSPPPPAVPQSAAPSPADPLLSFHLDLGPSMLDAVLGVMDADLELNDVIGL

SEQ ID NO: 789473 - protein, 142 aa, Homo sapiens; identical to SEQ ID NO: 789471

SEQ ID NO: 789474 - protein, 74 aa, Homo sapiens
RPLDNIERGVLHGYPEPCGTGRVGLELERETRREAGAEGRRASGRERRAEETRATSVRSRDSAQRGLSFSTTAF

SEQ ID NO: 789475 - protein, 111 aa, Homo sapiens
MPVLKQLGPAQPKKRPDRGALSISAPLGDFRHTLHVGRGGDAFGDTSFLSRHGGGPPPEPRAPPAGAPRSPPPPAVPQSAAPSPADPLLSFHLDLGPSMLADLELNDVIGL

SEQ ID NO: 789476 - protein, 116 aa, Homo sapiens
EGPSPLLGSWIRVYFKAHSYLLAWQSIAKPGENQPFMYISGECNVPPLWRAIWLLSIEIKNMRLFLERELLGEFILQIPSRVCNDSRTRMFFKSGSQPVCYKGHELFSKMIMVLCF

SEQ ID NO: 789477 - protein, 33 aa, Homo sapiens
MFRFAAGREPRRARSWDQLHSPGFGEREAVSLP

SEQ ID NO: 789478 - protein, 75 aa, Homo sapiens
RPPRREPAGAGRGRVPMNSGVPATLAVRRVKFFGQHGGEVRSSGLCPDSRLWMQSGSWFCVVGVPECSLGSGSGH

SEQ ID NO: 789479 - protein, 381 aa, Homo sapiens
RPPRREPAGAGRGRVPMNSGVPATLAVRRVKFFGQHGGEVNSSAFSPDGQMLLTGSEDGCVYGWETRSGQLLWRLGGHTGPVKFCRFSPDGHLFASASCDCTVRLWDVARAKCLRVLKGELSWEPSSQASVPFQMVLCPVSRHLSTFPDPGLVPAGHQRSVETVSFSPDSRQLASGGWDKRVMLWDVQDVEGLGPPVWDSRTSSREDVTSLALPAQTLHWFPWPMPTAGNQGCPHLATAASPGFLAHSSPQAFCTRSPFPGLSRPGSRLPSAAFCSSGLSLVRQMLRLLVGHRDSIQSSDFSPTVNCLATGSWDSTVHIWDLRMVTPAVSHQALEGHSANISCLCYSASGLLASGSWDKTIHIWKPTTSSLLIQLKGHVTW

SEQ ID NO: 789480 - protein, 102 aa, Homo sapiens
MRIDSCDYEGQEVPQHAISKVENQGGQCCKSGQVQRPENQRSQWCHCQFKAESLRDWRPTGVKTQEPAALISNDSRCMSQRDSEFAFPLPFLSIQALNGLDH

SEQ ID NO: 789481 - protein, 70 aa, Homo sapiens
KPLASGFWDVGWAEVRPGFSLLGAPVSYLRSPFFSGAQPACSGSLASRKTRLPLLAHSKPLPISNLLPSH

SEQ ID NO: 789482 - protein, 615 aa, Homo sapiens
MKALRLSASALFCLLLINGLGAAPPGRPEAQPPPLSSEHKEPVAGDAVPGPKDGSAPEVRGARNSEPQDEGELFQGVDPRALAAVLLQALDRPASPPAPSGSQQGPEEEAAEALLTETVRSQTHSLPAPESPEPAAPPRPQTPENGPEASDPSEELEALASLLQELRDFSPSSAKRQQETAAAETETRTHTLTRVNLESPGPERVWRASWGEFQARVPERAPLPPPAPSQFQARMPDSGPLPETHKFGEGVSSPKTHLGEALAPLSKAYQGVAAPFPKARRPESALLGGSEAGERLLQQGLAQVEAGRRQAEATRQAAAQEERLADLASDLLLQYLLQGGARQRGLGGRGLQEAAEERESAREEEEAEQERRGGEERVGEEDEEAAEAEAEAEEAERARQNALLFAEEEDGEAGAEDKRSQEETPGHRRKEAEGTEEGGEEEDDEEMDPQTIDSLIELSTKLHLPADDVVSIIEEVEEKRKRKKNAPPEPVPPPRAAPAPTHVRSPQPPPPAPAPARDELPDWNEVLPPWDREEDEVYPPGPYHPFPNYIRPRTLQPPSALRRRHYHHALPPSRHYPGREAQARRAQEEAEAEERRLQEQEELENYIEHVLLRRP

SEQ ID NO: 789483 - protein, 615 aa, Homo sapiens; identical to SEQ ID NO: 789482

SEQ ID NO: 789484 - protein, 615 aa, Homo sapiens; identical to SEQ ID NO: 789482

SEQ ID NO: 789485 - protein, 615 aa, Homo sapiens; identical to SEQ ID NO: 789482

SEQ ID NO: 789486 - protein, 355 aa, Homo sapiens
MKALRLSASALFCLLLINGLGAAPPGRPEAQPPPLSSEHKEPVAGDAVPGPKDGSAPEVRGARNSEPQDEGELFQGVDPRALAAVLLQALDRPASPPAPSGSQQGPEEEAAEALLTETVRSQTHSLPAPESPEPAAPPRPQTPENGPEASDPSEELEALASLLQELRDFSPSSAKRQQETAAAETETRTRRAAGLERGAPALGSGGGRGVPARAVPPFPQLHPAADTAAALGLAPPPLPPRLAAFAPLSRPGGPGAARAGGGGGGGAPAAGAGGAGELHRARAAPAPVTALPGPAPARPRRARAPAPPSVLPAPPRCLHAPRPCPLALPLSPGCVGTCQTPLPGPEPELPELTRG

SEQ ID NO: 789487 - protein, 381 aa, Homo sapiens
MPDSGPLPETHKFGEGVSSPKTHLGEALAPLSKAYQGVAAPFPKARRPESALLGGSEAGERLLQQGLAQVEAGRRQAEATRQAAAQEERLADLASDLLLQYLLQGGARQRGLGGRGLQEAAEERESAREEEEAEQERRGGEERVGEEDEEAAEAEAEAEEAERARQNALLFAEEEDGEAGAEDKRSQEETPGHRRKEAEGTEEGGEEEDDEEMDPQTIDSLIELSTKLHLPADDVVSIIEEVEEKRKRKKNAPPEPVPPPRAAPAPTHVRSPQPPPPAPAPARDELPDWNEVLPPWDREEDEVYPPGPYHPFPNYIRPRTLQPPSALRRRHYHHALPPSRHYPGREAQARRAQEEAEAEERRLQEQEELENYIEHVLLRRP

SEQ ID NO: 789488 - protein, 330 aa, Homo sapiens
MKALRLSASALFCLLLINGLGAAPPGRPEAQPPPLSSEHKEPVAGDAVPGPKDGSAPEVRGARNSEPQDEGELFQGVDPRALAAVLLQALDRPASPPAPSGSQQGPEEEAAEALLTETVRSQTHSLPAPESPEPAAPPRPQTPENGPEASDPSEELEALASLLQELRDFSPSSAKRQQETAAAETETRTHTLTRVNLESPGPERVWRASWGEFQARVPERAPLPPPAPSQFQARMPKGPSEHSREGVSPKTREIGPCKRQGRRPRAAEAIWGPGRSPSTAAERAREQTSGKKGPPDIWDRGRGRGETRRAGEKHCDRRVLSIFFFAPEDK

SEQ ID NO: 789489 - protein, 73 aa, Homo sapiens
RGYSPSILENKVAVKPLMAARNSVTEFMTPRGKMFGGSLGGGSQDFCQKRSIYSEPAWDQETETTEKATGPAP

SEQ ID NO: 789490 - protein, 73 aa, Homo sapiens
MATKFLAQHLGKWLPSGNQESSIWDVHVEQVVTWSTGACARAIELGIVGTEMAWEAPEDIHSRVPGTREGYLP

SEQ ID NO: 789491 - protein, 104 aa, Homo sapiens
RQVTLLPRHSFFTCKMKGLGKTVSKVPRARCSGSRLSSQYFGRLMQKDHWSSLKTSLGNTGRTLSLQKIKNISWTWWQDLWFQLLRRLSGEDILNLGGRGCSEL

SEQ ID NO: 789492 - protein, 133 aa, Homo sapiens
PPDLISHYCGKPVNHLQPFAGYKRPSTNPSLSRCASTSNALPNADHWVLAQAHVRKNTWILWGRGRWRITFGECQRSAGLCAKCLIFGVWVRALIYHCMYGLALEDCSHSLDVDFHHTPQVRETCGHTCVCSM

SEQ ID NO: 789493 - protein, 155 aa, Homo sapiens
  misc_feature (54)..(54): Xaa can be any naturally occurring amino acid
MRKGVQGTTEEQREGASNHIRLLRLKSESGRAGRSAGEVRNGRQEKSILDRVAXSRPLHTAQPADSLPLALWMPPILLQLSTPPAVPTSPVPLRLLALLCQYRPHSPLLSPPPRLIPPHSLLIRGHALPSLSIPHLCSSPSPLPLLPYPPHPSLP

SEQ ID NO: 789494 - protein, 93 aa, Homo sapiens
EKELMFDANFTFKEGEIVEVDEETAAILKNSRFAQDFLIRPIGEKLPTSGGCSALELKDIITDPFKLAEESDSMKSRCVPDAAGGCCGTKKSC

SEQ ID NO: 789495 - protein, 407 aa, Homo sapiens
MGCWPDGTFGLLNQSSVRISRAKTSAALGQAGSVQAGAETRSRALAPTGLAPTSKTAGPFAVRRPRADSVQDLLLHSSFSLSLPVPPDESAAETGQSFLFDVSSLNDADEVVGAELRVLRRGSPESGPGSWTSPPLLLLSTCPGAARAPRLLYSRAAEPLVGQRWEAFDVADAMRRHRREPRPPRAFCLLLRAVAGPVPSPLALRRLGFGWPGGGGSAAEERAVLVVSSRTQRKESLFREIRAQARALGAALASEPLPDPGTGTASPRAVIGGRRRRRTALAGTRTAQGSGGGAGRGHGRRGRSRCSRKPLHVDFKELGWDDWIIAPLDYEAYHCEGLCDFPLRSHLEPTNHAIIQTLLNSMAPDAAPASCCVPARLSPISILYIDAANNVVYKQYEDMVVEACGCR

SEQ ID NO: 789496 - protein, 157 aa, Homo sapiens
PLQIQWYPCLALRESRSSLSHNVIMSYFYLQLVPRCFWGDSREATPNPLSLRCAPRNSLLLAWSSLKEWRGGWPRTEGASPPSSPPSALAPEGNPATTSSAAPPASSPGRGSPDESPRSRFQALGAWTLLRQQPGTGRILHSHPCVLALQANLILFC

SEQ ID NO: 789497 - protein, 144 aa, Homo sapiens
RTQNNPSFESRGNNLADEIAKQAASSQEAPICHLTPCPSYPAVIPIFSLADQEKLKKIGAKESPEGKWVLPDGREILSQLHQGTHWGPQAMCDAALRVYGCVGIYTLTRQVADDCIVCRKTNKQTLKKQSLGGRNPGLRLFQSV

SEQ ID NO: 789498 - protein, 136 aa, Homo sapiens
ISPPPTPFPFVFTKRAEQFKESSSPATIFCTAVARQGKPGLAGELSSYQAPPRACCVSLVHLCCISGAHVQSKGGIRSSPESQKEGLIIKNMSACDKSRVYHMILCVSSWVMTCIGFMLIKVMSSMLHVETFENFN

SEQ ID NO: 789499 - protein, 98 aa, Homo sapiens
MPAAPWSFRLRLSAELALSVTVISRYISKGDLQTLSADKVEWELLSLPPRVCIGSSGPVSTLVYKSAARTLESVAALGFTWFSHMRCDGHWIKCYCTH

SEQ ID NO: 789500 - protein, 121 aa, Homo sapiens
MYQPGAAGNTSSPGRVHRPTVGRAGVRLCAGGGRRARDGEGGCTNPLGGDQNAPPLPAWASAAKCMGSADGGCGGWRGANSFCSGQDRKALSPDTQKQEGHIKPIINILPGKNTKSIFFSE

SEQ ID NO: 789501 - protein, 105 aa, Homo sapiens
VEVLTQHRAPAQPLISPEQFKHLKDQQKIIIQQLNTPGNDELPPNLSRAHDSISNSALLRHCLETNSTLIVNQKMFKFTYSLKAPNSTLSCSTFLDQTNVFLKCM

SEQ ID NO: 789502 - protein, 161 aa, Homo sapiens
SGRAGAPEAQGPAAPGTTAPEGGDRCRGYYDVMGQWDPPFNCSSGAYSFCCGTCGYRFCCHDGPRRLDQSRCSNYDTPAWVQTGRPPARARDTAAPRDPGRERSHTAVYAVCGVAALLVLAGIGARLGLERAHSPRARRTVTRALTELLKQPGPQEPLPPT

SEQ ID NO: 789503 - protein, 111 aa, Homo sapiens
FTAELPPLSSVRGVSLKSLASLTKACPPKVPWSWSSLSMTLRQYLRSKMLSSEPEFLLSGKLRPVCALLLGQGPPSFFASKCGLPKTGLGPAWASLKAEKDGPCGGSPMSG

SEQ ID NO: 789504 - protein, 111 aa, Homo sapiens
RPGGRPALRQYLGKTHLQLSRVLLLPEPIGLGPDGPEWGRTDHRRNPQQKSPLPSSQGGGKGGAPWSEIRAETSAELGLNLKNDFLVLIPRPQQFLLRERQNQGTFLTARG

SEQ ID NO: 789505 - protein, 432 aa, Homo sapiens
MASSVDEEALHQLYLWVDNIPLSRPKRNLSRDFSDGVLVAEVIKFYFPKMVEMHNYVPANSLQQKLSNWGHLNRKVLKRLNFSVPDDVMRKIAQCAPGVVELVLIPLRQRLEERQRRRKQGAGSLQELAPQDGSGYMDVGVSQKARGEGVPDPQGGGQLSWDRPPAPRPPAYNRALQGDPSFVLQIAEKEQELLASQETVQVLQMKVRRLEHLLQLKNVRIEDLSRRLQQAERKQLVSGGPGRAGTPGYPPEPRRRAGPTHRWIDHWEGGARCSHEPAGARVPSFLGMGERGRRWDRNSRSAGPGLSRLLPLRRSGSGEWTAFQSPEATCRDLACPPKQCPTPWARPCISRRWALGGGPLALSTPPESGPRPAPRTAASPSRLVPHALSHGGICPGPLRGSPAPPGSLPGTHLGDGDRSSWRGRGEAWDRQE

SEQ ID NO: 789506 - protein, 162 aa, Homo sapiens
MASSVDEEALHQLYLWVDNIPLSRPKRNLSRDFSDGVLVAEVIKFYFPKMVEMHNYVPANSLQQKLSNWGHLNRKVLKRLNFSVPDDVMRKIAQCAPGVVELVLIPLRQRLEERQRRRKQGAGSLQELAPQDGSGYMDVGKVAFSISPSRLELSFCPSSCHL

SEQ ID NO: 789507 - protein, 111 aa, Homo sapiens
NYSLLNRTLHFSTSLSTGEKEKPAKNQQLLATLIRRLMKAMKQRWKNTSHRPLPDASILILDFPAFRTQLQRYANALHQVAATCLRPTLKISHGITAYLNKGHERRHRWVN

SEQ ID NO: 789508 - protein, 90 aa, Homo sapiens
NYSLLNRTLHFSTSLSTGEKEKPAKNQQLLATLIRRLMKAMKQRWKNTSHRPLPDASILILDFPAFRTIRLQSSNPPYQVDQAQLLLIPE

SEQ ID NO: 789509 - protein, 103 aa, Homo sapiens
MFCHLRPMRRLCLEKIFPHWFPFSRALSGAEAVNALRPFYFAVHPDFFGQHPVEREINENSVNKVKCLPRKPPETRLQVFETNSAYILCKRNRPEFLRWPGTF

SEQ ID NO: 789510 - protein, 74 aa, Homo sapiens
ADPHLPLRKCLVQMTTGCWKAETGFRKSLDWAVSVVQGDGEKGPCCSHRTGSVNLQTLVAEWIEGRKSMIEGPG

SEQ ID NO: 789511 - protein, 149 aa, Homo sapiens
CFQFKAFPFLTLSCLFHLLLLLQLSPLFALSLRAFDIFKVERSIGSYVHIYSRLLETFVGLSCHALLGWQLWVWPSFMQLCIQLRDEMSPLLLIGTLHSLGSFLGAPFMWLGAGGRDSFPSPVAQLPNFLTSLYTLDMTIFRRQVRVKR

SEQ ID NO: 789512 - protein, 104 aa, Homo sapiens
MNQIIPALMGCQRKTAARDPLETEQREEDTFPEAQMFQKPAPHSQSHPKNALEFGVLKKREEGLSKGLGTKLDPTSASAHASDGAHRWRAACPSFPWCPQTHLG

SEQ ID NO: 789513 - protein, 152 aa, Homo sapiens
EGAVLGKGGKPQFGLGELSAHATPAFTAVLTSPFPASGMPVKFDRTLYNGHSGYNPATGIFTCPVGGVYYFAYHVHVKGTNVWVALYKNNVPATYTYDEYKKGYLDQASGGAVLQLRPNDQVWVQMPSDQANGLYSTEYIHSSFSGFLLCPT

SEQ ID NO: 789514 - protein, 95 aa, Homo sapiens
ARFKFYFKFRGYTHRFVTRVSYDAEVWGAIDAITQVASLVYNSFHPPSPSFSLPALSSVSVAAIFISISTPCLASTCLSKWKRKHGVHYGYKVRA

SEQ ID NO: 789515 - protein, 155 aa, Homo sapiens
GHGQVFTQNSSYSHHENTHTGVKFCERNQCGKVLSLKHSLSQNVKFPIGEKANTCTEFGKIFTQRSHFFAPQKIHTVEKPHELSKCVNVFTQKPLLSIYLRVHRDEKLYICTKCGKAFIQNSELIMHEKTHTREKPYKCNECGKSFFQVSSLLRH

SEQ ID NO: 789516 - protein, 79 aa, Homo sapiens
MKSLTWILGLWALAACFTPGESQRGPRGPYPPGPLAPPQPFGPGFVPPPPPPPYGPGRIPPPPPAPYGPGIFPPPPPQP

SEQ ID NO: 789517 - protein, 79 aa, Homo sapiens; identical to SEQ ID NO: 789516

SEQ ID NO: 789518 - protein, 82 aa, Homo sapiens
LLLNSRPRRLKAELNIKAGRASHSESWESSALDRTKALEGGTNLVYLRKRKLASPARAQCVAGGEWRRSRDQSGACMSLQRI

SEQ ID NO: 789519 - protein, 122 aa, Homo sapiens
GARQGLERARAAPQSRPHCFRPGTLPRAVRADYARVPVAGGRACGRRLRLSRRRGGGRVGTRARFPPRRAEVGRGRGWRQVAGTWGPGPRVACDGEDAPTALRASSGYDDQPHDRPALAPAE

SEQ ID NO: 789520 - protein, 76 aa, Homo sapiens
EVLVTSSSEPWTAGLPLDVEFSVPFQGGNKAHSTGTGQSWWLMPVIPGLWEAEAGGSLEPRSFKTSVGNMAKPHLY

SEQ ID NO: 789521 - protein, 118 aa, Homo sapiens
VLHHTTPSSYLPHNTHTLTTRSHTLSHSHSQTVTNTLTHAHIHTHAHTHTRSHSHTLTLSHSHSHMLTHSHTHSHMLLFTHIHSHSHIHTRSHTLTLTHIHTHAQVGMMKDGDPLDSG

SEQ ID NO: 789522 - protein, 68 aa, Homo sapiens
MLTFTHKLTHYHTRTITHTHIHTFTHNTFTTLSQHFQICAHVHSQAHMLSQHTLHTLSHTCPLIGALT

SEQ ID NO: 789523 - protein, 104 aa, Homo sapiens
MGGWTDSKVHPPCGRARGSLSLILEVSQASYLPLQRTRPREAVSLGRDGVKLERALGWGRRCPAWLADSSQPGPRAGPVSFTSRRKPGLETPDPPLPSEAQPRP

SEQ ID NO: 789524 - protein, 140 aa, Homo sapiens
RAGREWLGVPGSPLKPRPLLPRAERPPWARPLRSPVLSWLGPDPGSQAAARAGVGKPVAAPLADAPHPARLAPHAGQSRRPGPNPGDYRGPSPRRAARTPGLGAGEGAAVYLVRTPEGAGAAQKAPAQLRRAAQRPLCPT

SEQ ID NO: 789525 - protein, 123 aa, Homo sapiens
QQISSVLVLKQFYEGVCDRIYQGVVEQNICEEAGQYSDGHLQAIQLSCISQCYLERERDINFKELVYVIVEAGKPKIYRAGHRPGTQRSCSLSVKAICWQNSQKISWVYGGIYTTFHSQNGSQ

SEQ ID NO: 789526 - protein, 918 aa, Homo sapiens
MPGGAGAARLCLLAFALQPLRPRAAREPGWTRGSEEGSPKLQHELIIPQWKTSESPVREKHPLKAELRVMAEGRELILDLEKNEQLFAPSYTETHYTSSGNPQTTTRKLEDHCFYHGTVRETELSSVTLSTCRGIRGLITVSSNLSYVIEPLPDSKGQHLIYRSEHLKPPPGNCGFEHSKPTTRDWALQFTQQTKKRPRRMKREDLNSMKYVELYLVADYLEFQKNRRDQDATKHKLIEIANYVDKFYRSLNIRIALVGLEVWTHGNMCEVSENPYSTLWSFLSWRRKLLAQKYHDNAQLITGMSFHGTTIGLAPLMAMCSVYQSGGVNMDHSENAIGVAATMAHEMGHNFGMTHDSADCCSASAADGGCIMAAATGHPFPKVFNGCNRRELDRYLQSGGGMCLSNMPDTRMLYGGRRCGNGYLEDGEECDCGEEEECNNPCCNASNCTLRPGAECAHGSCCHQCKLLAPGTLCREQARQCDLPEFCTGKSPHCPTNFYQMDGTPCEGGQAYCYNGMCLTYQEQCQQLWGPGARPAPDLCFEKVNVAGDTFGNCGKDMNGEHRKCNMRDAKCGKIQCQSSEARPLESNAVPIDTTIIMNGRQIQCRGTHVYRGPEEEGDMLDPGLVMTGTKCGYNHICFEGQCRNTSFFETEGCGKKCNGHGVCNNNQNCHCLPGWAPPFCNTPGHGGSIDSGPMPPESVGPVVAGVLVAILVLAVLMLMYYCCRQNNKLGQLKPSALPSKLRQQFSCPFRVSQNSGTGHANPTFKLQTPQGKRKVINTPEILRKPSQPPPRPPPDYLRGGSPPAPLPAHLSRAARNSPGPGSQIERTESSRRPPPSRPIPPAPNCIVSQDFSRPRPPQKALPANPVPGRRSLPRPGGASPLRPPGAGPQQSRPLAALAPKFPEYRSQRAGGMISSKI

SEQ ID NO: 789527 - protein, 955 aa, Homo sapiens
MPGGAGAARLCLLAFALQPLRPRAAREPGWTRGSEEGSPKLQHELIIPQWKTSESPVREKHPLKAELRVMAEGRELILDLEKNEQLFAPSYTETHYTSSGNPQTTTRKLEDHCFYHGTVRETELSSVTLSTCRGIRGLITVSSNLSYVIEPLPDSKGQHLIYRSEHLKPPPGNCGFEHSKPTTRDWALQFTQQTKKRPRRMKREDLNSMKYVELYLVADYLEFQKNRRDQDATKHKLIEIANYVDKFYRSLNIRIALVGLEVWTHGNMCEVSENPYSTLWSFLSWRRKLLAQKYHDNAQLITGMSFHGTTIGLAPLMAMCSVYQSGGVNMDHSENAIGVAATMAHEMGHNFGMTHDSADCCSASAADGGCIMAAATGHPFPKVFNGCNRRELDRYLQSGGGMCLSNMPDTRMLYGGRRCGNGYLEDGEECDCGEEEECNNPCCNASNCTLRPGAECAHGSCCHQCKLLAPGTLCREQARQCDLPEFCTGKSPHCPTNFYQMDGTPCEGGQAYCYNGMCLTYQEQCQQLWGPGARPAPDLCFEKVNVAGDTFGNCGKDMNGEHRKCNMRDAKCGKIQCQSSEARPLESNAVPIDTTIIMNGRQIQCRGTHVYRGPEEEGDMLDPGLVMTGTKCGYNHICFEGQCRNTSFFETEGCGKKCNGHGVCNNNQNCHCLPGWAPPFCNTPGHGGSIDSGPMPPESVGPVVAGVLVAILVLAVLMLMYYCCRQNNKLGQLKPSALPSKLRQQFSCPFRVSQNSGTGHANPTFKLQTPQGKRKVINTPEILRKPSQPPPRPPPDYLRGGSPPAPLPAHLSRAARNSPGPGSQIERTESSRRPPPSRPIPPAPNCIVSQDFSRPRPPQKALPANPVPGRRSLPRPGGASPLRPPGAGPQQSRPLAALAPKVSPREALKVKAGTRGLQGGRCRVEKTKQFMLLVVWTELPEQKPRAKHSCFLVPA

SEQ ID NO: 789528 - protein, 139 aa, Homo sapiens
AIFLNKNYFAYFLIYSYLTEGMEDLQFENWGPVPKSVIVLTTCITALLDTQESHGNANWKGPLPQGSLRRRGSVESKPTFPKSPPTRPLTPSTVRLYVSGIQGNVNFLFIWEIVHGKQIFFSLVHLLIVYNICTSMQNT

SEQ ID NO: 789529 - protein, 918 aa, Homo sapiens; identical to SEQ ID NO: 789526

SEQ ID NO: 789530 - protein, 918 aa, Homo sapiens; identical to SEQ ID NO: 789526

SEQ ID NO: 789531 - protein, 845 aa, Homo sapiens
MPGGAGAARLCLLAFALQPLRPRAAREPGWTRGSEEGSPKLQHELIIPQWKTSESPVREKHPLKAELRVMAEGRELILDLEKNEQLFAPSYTETHYTSSGNPQTTTRKLEDHCFYHGTVRETELSSVTLSTCRGIRGLITVSSNLSYVIEPLPDSKGQHLIYRSEHLKPPPGNCGFEHSKPTTRDWALQFTQQTKKRPRRMKREDLNSMKYVELYLVADYLEFQKNRRDQDATKHKLIEIANYVDKFYRSLNIRIALVGLEVWTHGNMCEVSENPYSTLWSFLSWRRKLLAQKYHDNAQLITGMSFHGTTIGLAPLMAMCSVYQSGGVNMDHSENAIGVAATMAHEMGHNFGMTHDSADCCSASAADGGCIMAAATGHPFPKVFNGCNRRELDRYLQSGGGMCLSNMPDTRMLYGGRRCGNGYLEDGEECDCGEEEECNNPCCNASNCTLRPGAECAHGSCCHQCKLLAPGTLCREQARQCDLPEFCTGKSPHCPTNFYQMDGTPCEGGQAYCYNGMCLTYQEQCQQLWGPGARPAPDLCFEKVNVAGDTFGNCGKDMNGEHRKCNMRDAKCGKIQCQSSEARPLESNAVPIDTTIIMNGRQIQCRGTHVYRGPEEEGDMLDPGLVMTGTKCGYNHICFEGQCRNTSFFETEGCGKKCNGHGVCNNNQNCHCLPGWAPPFCNTPGHGGSIDSGPMPPESVGPVVAGVLVAILVLAVLMLMYYCCRQNNKLGQLKPSALPSKLRQQFSCPFRVSQNSGTGHANPTFKLQTPQGKRKVINTPEILRKPSQPPPRPPPDYLRGGSPPAPLPAHLSRAARNSPGPGSQIERTESSRRPPPSRPLQCWSG

SEQ ID NO: 789532 - protein, 918 aa, Homo sapiens; identical to SEQ ID NO: 789526

SEQ ID NO: 789533 - protein, 918 aa, Homo sapiens; identical to SEQ ID NO: 789526

SEQ ID NO: 789534 - protein, 293 aa, Homo sapiens
MPGGAGAARLCLLAFALQPLRPRAAREPGWTRGSEEGSPKLQHELIIPQWKTSESPVREKHPLKAELRVMAEGRELILDLEKNEQLFAPSYTETHYTSSGNPQTTTRKLEDHCFYHGTVRETELSSVTLSTCRGIRGLITVSSNLSYVIEPLPDSKGQHLIYRSEHLKPPPGNCGFEHSKPTTRDWALQFTQQTKKRPRRMKREDLNSMKYVELYLVADYLEFQKNRRDQDATKHKLIEIANYVDKVRPGVYFVGKVPGASTSKGTGAAFCWIGCPSHLLKGNEQCHRGPGRS

SEQ ID NO: 789535 - protein, 109 aa, Homo sapiens
ACSTMPGYFFPPGDRILLCCTGWFQTLGLKASLPPWSLKVLELNRIKGVTNCTQLIYDDDDDDDDDDDDDVWEMESLSPRLECNGTISADCNLWLTATSTSWVQLIFVP

SEQ ID NO: 789536 - protein, 70 aa, Homo sapiens
RLQPRNSRSQATALLSVKGSPGPEAERKLRPQLPREPAYSGRHRRERRGRSGFQIPFRKVRLFFITGKGR

SEQ ID NO: 789537 - protein, 164 aa, Homo sapiens
EFITGEKPYECSDCGKSFPSKSQLQMHKRIHTGEKPYICTECGKAFTNRSNLNTHQKSHTGEKSYICAECGKAFTDRSNFNKHQTIHTGEKPYVCADCGRAFIQKSELITHQRIHTTEKPYKCPDCEKSFSKKPHLKVHQRIHTGEKPYICAECGKAFTDRSNF

SEQ ID NO: 789538 - protein, 129 aa, Homo sapiens
QGWRASLKALGPFYPHSRRKVSYAKKRLVGYPRSHAKFCRLYKKHEASILHSWQKEKGSQHFTWQEKRTEKGRGRKHQKIYSLKQENVLSHMICRSGIWSQLRWVLCLGSHKASVKVSSKLGFHLKAHL

SEQ ID NO: 789539 - protein, 118 aa, Homo sapiens
MKPVVPPIGKAPAWCCLSLAASCSDTISILLPRSWISAVLFRVSGQLGSLSCIPAEAPGETANAFVHSIQISYKCEQLLIFRGVFVQLMANPGYLDLQDLLHWAAPRLCVHSPRGPPG

SEQ ID NO: 789540 - protein, 68 aa, Homo sapiens
GPGGHQAAWPSKLQNFPFKEVEKPGDNKRRKKIVNNWSMNDGRWGRSNQKTVHRSESLKEKSDLAKNT

SEQ ID NO: 789541 - protein, 67 aa, Homo sapiens
CQNNMPQDTALPWKNRSTQLGTQILNPRSHGILRALCDFPKNHNCSWKLIFLGQKTVFLRNMETNLG

SEQ ID NO: 789542 - protein, 103 aa, Homo sapiens
WPGMDVYHLVSPSFPRRVGTSHWPDVLSSVESEWRNRGRNQRGRGKSQKRSHILIASCYWLEEEIKFYGWPTLLPIISQVFGGGRKDGIMWRATSFKGGRGEE

SEQ ID NO: 789543 - protein, 88 aa, Homo sapiens
AMTRSVTASAPETSLLCTLGRCGQDKRLPLPIAPDLGLWFRSGKGNCWDFLFLPQPHVAEALFQAGVAKRAQTLFPSAHCHLLEETPL

SEQ ID NO: 789544 - protein, 71 aa, Homo sapiens
NNRDSLSFHSARTRLGSTKSETVKVTEAAVRIDSLESLRQLSGPSCKADKIEIITLVPQQTGLVGTGPLTA

SEQ ID NO: 789545 - protein, 67 aa, Homo sapiens
TPGPAPSRGGSGVALRGRQSPQALQPSGGPWPLAAYSYRPSPGRPWACCGRGAARPELPVERLPEGR

SEQ ID NO: 789546 - protein, 67 aa, Homo sapiens; identical to SEQ ID NO: 789545

SEQ ID NO: 789547 - protein, 269 aa, Homo sapiens
PTRRGSCPPKLDPGVVRRRSLRGDWRDCAEATTGMAVWVLSRLLSAPRLALAKAVLRHVNGQDQIVPGLYACGEAACASVHGANRLGANSLLDLVVFGQACALSIEESCRPGDKVPPIKPNAGEESVMNLDKLRFADGSIRTSELRLSMQKCRWVRVSTTELVSASGAHTWGLESRSKGHRSDRKLGTKLEDTEYSYAVPMRLCLCFSRTEPSRHLKPYHERMLRKRFREDPEDPPSCSMSRLMLRRNPKVVNEAKPVQKPGIHLEVRI

SEQ ID NO: 789548 - protein, 261 aa, Homo sapiens
PTRRGSCPPKLDPGVVRRRSLRGDWRDCAEATTGMAVWVLSRLLSAPRLALAKAVLRHVNGQDQIVPGLYACGEAACASVHGANRLGANSLLDLVVFGQACALSIEESCRPGDKVPPIKPNAGEESVMNLDKLRFADGSIRTSELRLSMQKCRWVRVSTTELVSASGAHTWGLESRSKGHRSDRKLGTKLEDTEYSYAVPMTEPSRHLKPYHERMLRKRFREDPEDPPSCSMSRLMLRRNPKVVNEAKPVQKPGIHLEVRI

SEQ ID NO: 789549 - protein, 67 aa, Homo sapiens; identical to SEQ ID NO: 789545

SEQ ID NO: 789550 - protein, 67 aa, Homo sapiens; identical to SEQ ID NO: 789545

SEQ ID NO: 789551 - protein, 67 aa, Homo sapiens; identical to SEQ ID NO: 789545

SEQ ID NO: 789552 - protein, 67 aa, Homo sapiens; identical to SEQ ID NO: 789545

SEQ ID NO: 789553 - protein, 177 aa, Homo sapiens
VVSLRKDVVEREAFSLTVKAKGLLERYAPVAKDLASSRCGVSVMTLEIRRKDEAVALQKDHVYLQLCHLPPEQLAMRLPWHFQSTAMIFAGVDVTKEPIPVLPTVHYNMGGIPTNYKGRPEAREWPGSDCARPVRLWGGRLCLGTWCQSARGKLALGLGCLWSGMCPEHRRVMQAWR

SEQ ID NO: 789554 - protein, 42 aa, Homo sapiens
FNPVTVRSIICKYRQTDQPGLLCIRPAWVPACVSFVCGSVSL

SEQ ID NO: 789555 - protein, 142 aa, Homo sapiens
PTRRGSCPPKLDPGVVRRRSLRGDWRDCAEATTGMAVWVLSRLLSAPRLALAKAVLRHVNGQDQIVPGLYACGEAACASVHGANRLGANSLLDLVVFGQACALSIEESCRPGDKVPPIKPNAGEESVMNLDKLRFADGSIRT

SEQ ID NO: 789556 - protein, 113 aa, Homo sapiens
MQKCRWVRVSTTELVSASGAHTWGLESRSKGHRSDRKLGTKLEDTEYSYAVPMTEPSRHLKPYHERMLRKRFREDPEDPPSCSMSRLMLRRNPKVVNEAKPVQKPGIHLEVRI

SEQ ID NO: 789557 - protein, 67 aa, Homo sapiens; identical to SEQ ID NO: 789545

SEQ ID NO: 789558 - protein, 67 aa, Homo sapiens; identical to SEQ ID NO: 789545

SEQ ID NO: 789559 - protein, 67 aa, Homo sapiens; identical to SEQ ID NO: 789545

SEQ ID NO: 789560 - protein, 121 aa, Homo sapiens
MQKCRWVRVSTTELVSASGAHTWGLESRSKGHRSDRKLGTKLEDTEYSYAVPMRLCLCFSRTEPSRHLKPYHERMLRKRFREDPEDPPSCSMSRLMLRRNPKVVNEAKPVQKPGIHLEVRI

SEQ ID NO: 789561 - protein, 70 aa, Homo sapiens
GRVHQGPREASEPSHQHWPSRPQSVPPSGAPLGPPGHSRAQLVGASQAQQARPPLPLAPCPLPELRGPGQ

SEQ ID NO: 789562 - protein, 146 aa, Homo sapiens
GVPGIRGDQGPSGLAGKPGVPGERGLPGAHGPPGPTGPKGEPGFTGRPGGPGVAGALGQKGDLGLPGQPGLRGPSGIPGLQGPAGPIGPQGLPGLKGEPGLPGPPGEGRAGEPGTAGPTGPPGVPGSPGITGPPGPPGPPGPPGAP

SEQ ID NO: 789563 - protein, 224 aa, Homo sapiens
RGRGARGGKAEDKEWMPVTKLGRLVKDMKIKSLEEIYLFSLPIKESEIIDFFLGASLKDEVLKIMPVQKQTRAGQRTRFKAFVAIGDYNGHVGLGVKCSKEVATAIRGAIILAKLSIVPVRRGYWGNKIGKPHTVPCKVTGRCGSVLVRLIPAPRGTGIVSAPVPKKLLMMAGIDDCYTSARGCTATLGNFAKATFDAISKTYSYLTPDLWKETVSPSLLSGVH

SEQ ID NO: 789564 - protein, 94 aa, Homo sapiens [sequence omitted]

SEQ ID NO: 789565 - protein, 231 aa, Homo sapiens
  misc_feature (153)..(153): Xaa can be any naturally occurring amino acid
PQIYFRYLSFVSFVCSQYILPVCGLSFPSLYVSLVLRFFFWCPGRRRSPTPALPATHAPAPASLPAPCQSPAPPRAAMPLPSSPADRVSRDPISPPHNRPRSHPLTPRLHSSSPNRHTHPPPPYTYLAPTTPPSSRLTPFPHSPTAPSLPLRXPPHAPPQRPPPLRPSHHVLSPSPPPRLAPPPRPPHTPLPPPAPPLPTLPATPPSHPPSPPPRPSAPPLSPLSPAPPPP

SEQ ID NO: 789566 - protein, 146 aa, Homo sapiens
MPLHSSLADTASLTLHLNHTNPSRDQPLTPLPQYISHARTLSLVQILPHLPSTLSRSLTLLIFTPRPLAYLLTTSPLPTPPFFALPLTTPLHPSSSFPSPPIFLLHPASPSLPHRPPSSLLSPPAPLASRPSPPLRPLSALPPSSP

SEQ ID NO: 789567 - protein, 103 aa, Homo sapiens
MALWTAARPPSKPCAPRARPKITQLSATHSGGDQKPRGAVFTRLLSHTALMEKVGPWHVGPRREKTPLYRRFWKEAVRLALTSQLFPTSSFTLQRKPECLLIP

SEQ ID NO: 789568 - protein, 82 aa, Homo sapiens
PSRSEERPVKKRKVQSCHLQKKQLRLLEAMVEEQRRLSRAVEETCREVRRVLDQQHILQVQSLQLQERMMSLLERIITKSSV

SEQ ID NO: 789569 - protein, 124 aa, Homo sapiens
SRRLPCGDEAIRWLVSKKGEAALYRNGLLPTQQKPCVHLFLNHALMSLEISHGEGKSMWKSANTIEDFFSLPCPFPFSSFLHFFLSSSSSSSSSSSFFSLFFYNIIYTYLLFISKVVDKHLPAH

SEQ ID NO: 789570 - protein, 68 aa, Homo sapiens
SNSGFKGKGKRRALNLKIKSKQNKTSLTNLYGSSSLFSSWIFIILIHLLLCLVKSQITTSIYQLVTVS

SEQ ID NO: 789571 - protein, 82 aa, Homo sapiens
HKTAISHPGEGPQAVGTLVPSGAGSQLINEPFVAELSAGSGHSAILQQATDHHKALAHLGALIQHRYLNTQYVNSRFRTSWT

SEQ ID NO: 789572 - protein, 73 aa, Homo sapiens
DEIKGLFSGETERPQKKRPPKADIWKSSNKRTAFQPSNLIVKPTTWQAPPAHRVSKQLGSVMGTNLGTPAKNP

SEQ ID NO: 789573 - protein, 149 aa, Homo sapiens
PGSGQESSGRTDSLGGTDFLGPQKGPSFFLCLSLSFLSPCLPSLSSTPPWRISSQPLAHVSPTVVFFGGNVVAGRWARKCTLSSPSLRSSNSGQAGDACPSPPQTCPTIRLSRLCSGKKRRGPLPLCLLPLGPALTGGTQEDAHREGGK

SEQ ID NO: 789574 - protein, 80 aa, Homo sapiens
ESSFQDLKLPPIKELNEEWKENSLFANVLEPVLDRDRWSWDRHHVDFDLYKKPPPFLELLPSPAPKPVTVRKKKGNSPIS

SEQ ID NO: 789575 - protein, 619 aa, Homo sapiens
MPAQRGKKRRRERRDRFSWPHAIFIGSSLERYSTNSPNYRIFSTRSTIKLEYEGTLFTEWSVPETCFVLNKSSPTTELRCSSPGVHAIKPIVTGPDEEERYLFVESSHTCFLWYYRVRLKEEEAPLQSGQKMKFTSDPFFLSLPDLVTTTELKNILSLSVTATLTIDRVEYTGHPLEIAVFLNYCTVCNVTKKIFLVIYNEDTKQWVSQDFTLDAPIDSVTMPHFTFSALPGLLLWNKHSIYYCYHNFTFTGILQTPAGHGNLSMLSNDSIIHEVFIDYYGDILVKMENNVIFYSKINTRDAVKLHLWTNYTTRAFIFLSTSGQTYFLYALDDGTIQIQDYPLHLEAQSIAFTTKDKCPYMAFHNNVAHVFYFLDKGEALTVWTQIVYPENTGLYVIVESYGPKILQESHEISFEAAFGYCTKTLTLTFYQNVDYERISDYFETQDKHTGLVLVQFRPSEYSKACPIAQKVFQIAVGCDDKKFIAIKGFSKKGCHHHDFSYVIEKSYLRHQPSKNLRVRYIWGEYGCPLRLDFTEKFQPVVQLFDDNGYVKDVEANFIVWEIHGRDDYSFNNTMAQSGCLHEAQTWKSMIELNKHLPLEEVWGPEVRETLPSRLFIWNN

SEQ ID NO: 789576 - protein, 293 aa, Homo sapiens
MSAREVAVLLLWLSCYGSALWRYSTNSPNYRIFSTRSTIKLEYEGTLFTEWSVPETCFVLNKSSPTTELRCSSPGVHAIKPIVTGPDEEERYLFVESSHTCFLWYYRVRHFFNNFTQLITVWAYDPESADPDELLGNAEEPSINSIVLSTQMATLGQKPVIHTVLKRKVYSSNEKMRRGTWRIVVPMTKDDALKEIRGNQVTFQDCFIADFLILLTFPLLTIPEIPGYLPISSPRGSQLMASWDACVVASAVLVTDMETFHTTDSFKSWTRIRVPPDILSDDERRSVAHVILS

SEQ ID NO: 789577 - protein, 142 aa, Homo sapiens
MATLGQKPVIHTVLKRKVYSSNEKMRRGTWRIVVPMTKDDALKEIRGNQVTFQDCFIADFLILLTFPLLTIPEIPGYLPISSPRGSQLMASWDACVVASAVLVTDMETFHTTDSFKSWTRIRVPPDILSDDERRSVAHVILS

SEQ ID NO: 789578 - protein, 223 aa, Homo sapiens
MSAREVAVLLLWLSCYGSALWRYSTNSPNYRIFSTRSTIKLEYEGTLFTEWSVPETCFVLNKSSPTTELRCSSPGVHAIKPIVTGPDEEERYLFVESSHTCFLWYYRVRTWRIVVPMTKDDALKEIRGNQVTFQDCFIADFLILLTFPLLTIPEIPGYLPISSPRGSQLMASWDACVVASAVLVTDMETFHTTDSFKSWTRIRVPPDILSDDERRSVAHVILS

SEQ ID NO: 789579 - protein, 134 aa, Homo sapiens
MSAREVAVLLLWLSCYGSALWRYSTNSPNYRIFSTRSTIKLEYEGTLFTEWSVPETCFVLNKSSPTTELRCSSPGVHAIKPIVTGPDEEERYLFVESSHTCFLWYYRVSLSLCGHMIQKVQILMSCWGMQKNLQ

SEQ ID NO: 789580 - protein, 106 aa, Homo sapiens
MQWHGLGSLQPPPPGFKRFLYFSLPSSWDYRRMLPCPADFFFFVFFCRDRISQCWLGWSQTPDLKQSTHLASQSAGIIGVSHRAWPVNSYVVTFHIFIYVYTNCPL

SEQ ID NO: 789581 - protein, 126 aa, Homo sapiens
GLELLTSGDLPTSASQNAGITSMSYCTWSETAILIVSSLRKKKLSGKNMLLYLEPWTFNYNSKTLWIIYKGTKKGLNLLKIMKVVNDRRLARAKHSCLWYSAIRPQLCLCSNSLPLHLRINGTEKI

SEQ ID NO: 789582 - protein, 102 aa, Homo sapiens
MAWQRSWWNWTAVWERRGGQGRQGPHRQLQPGPDDCKGSHAGSGTHTGRAPCHSPHTSPSLSHSPTSSETEGKLRPQEVALGPSSHRDCRGLDPASPAPEPA

SEQ ID NO: 789583 - protein, 543 aa, Homo sapiens
IRLNTKEDKNGVPDLVALLAVRDTPDEEPVDSDTSESDSQESGDQETEELDNPEFVAIVAYTDPSDPWAREEMLKIASVIESLGWSDEKDKRDPLRQVLSVMSKDTNGTRVKVEEAGREVDAVVLRKAGDDGDLRECISTLAQPDLPPQAKKAGRGLFGGWSEHREDEGGLLELVALLAAQDMAEVMKEEKENAWEGGKYKYPKGKLGEVLALLAARENMGSNEGSEEASDEQSEEESEDTESEASEPEDRASRKPRAKRARTAPRGLTPAGAPPTASGARKTRAGGRGRGRGVTPEKKAGSRGSAQDDAAGSRKKKGSAGAGAHARAGEAKGQAPTGSKAARGKKARRGRRLPPKCRCGPPRSRPGCEQAPQGTRPPVAPALPSPLPVLRRRNLLASQRARAAFCQRHVPLSGPRRPGAPAIPTEEARMGGGKRSGRPRQQRRAEMGTRQVDQDWGPGLPPEGVCVWTPGTCRGEQGSSWRSRGLRLAGAVGRCRPYPSLTGPWVCGGGSVTSRAARVRAQLSARGGPSSQPGEEMIPERKV

SEQ ID NO: 789584 - protein, 543 aa, Homo sapiens; identical to SEQ ID NO: 789583

SEQ ID NO: 789585 - protein, 113 aa, Homo sapiens [sequence omitted]

SEQ ID NO: 789586 - protein, 113 aa, Homo sapiens [sequence omitted]

SEQ ID NO: 789587 - protein, 180 aa, Homo sapiens
HTHSHTHKNTDSHTHGQTQTHTQTHTDTQTHTQTDTHTDTQTHTHKLTQTHKYTDSDSNTNSHKHIYTNSQTHTHKHTHKHANLHTHEQTHTRPFWALLFLLHRKPCKVSPDLSSKARSGQPHRNPAITIPRAPLCSQMPPVPMPHASPPLYLLCPGSLEHFPPGRILIIIHGSSVMSFL

SEQ ID NO: 789588 - protein, 155 aa, Homo sapiens
ARSICEAPSTSISVWRPQSGWVRQAERGMTSRGDEPRRVAGPGKGREGRGEPEPLLVQRGSSQNPGKRALPGELCQLTEKEPEIWTSLSHPRPGSLWAGSHSVWKQASSGVSAGWRWRGWPGRACRARRHRVHSGRGGPGSAIATEPHLDTHHWL

SEQ ID NO: 789589 - protein, 180 aa, Homo sapiens
VALTRARPGQVSSYMATVSGLLKIVQAFVACIIFGALVHDSRYGRYVATQWCVAVYSLCFLATVAVVALSVMGHTGGLGCPFDRLVVVYTFLAVLLYLSAAVIWPVFCFDPKYGEPKRPPNCARGSCPWDSQLVVAIFTYVNLLLYVVDLAYSQLQQCPAGICALWASVALGGSPAEGGR

SEQ ID NO: 789590 - protein, 118 aa, Homo sapiens
  misc_feature (17)..(17): Xaa can be any naturally occurring amino acid
MAPTGVSEAWVGGGAAXPSWGGQCLVRPHWPHVAPLLTRPTWPVTSASGPSSSVDPQLPPFLTLLLSQHRFPIGHLQEKSVVKFPTLPRTHPSGILVYSLAPPNQPAETQPPNSASRN

SEQ ID NO: 789591 - protein, 149 aa, Homo sapiens
KKKSPKTKPQPPPYHLQIQSAEKQPRVPTRGSLAGCVIWALPSATRYFPARPPAPSGFQGCAPAGWSREVESRQRGVASLSPPHASPPPTPDTTTSHGWEHWGPPNPARGARPQAGEEASELKGRPFLPPPALAPATAVGAASRNLGRP

SEQ ID NO: 789592 - protein, 121 aa, Homo sapiens
PQNLARERKNLRLGTVSPFLPPFLLKCSWLRKDGEGRNFHLGSFSPMRESGQRGGEPGSSRVGQEGEQGNQDKEEDRQVAPEQAGRESESFKGALPQWPRHSVPPCVCSLAGLDPSQANFN

SEQ ID NO: 789593 - protein, 128 aa, Homo sapiens [sequence omitted]

SEQ ID NO: 789594 - protein, 77 aa, Homo sapiens
GVLTFRDVALEFSLEEWQCLDTAQQNLYRNVMLENYRNLVFVGIAASKPDLITCLEQGKEPWNVKRHEMVTEPPGLQ

SEQ ID NO: 789595 - protein, 128 aa, Homo sapiens
LYSSIPHIYLNFFLVFITDLVHLEVIPRSFSSVQGLFLVGVWYSGVLRAQSLLHHDPFVIICKLDPVELFKTLSPVFRLACAFQWVGSVLRAVRNPVSYLASASLLTSLVVVRALFLSNYMQWFMVLL

SEQ ID NO: 789596 - protein, 72 aa, Homo sapiens
CTSSLLLSPEIYDMAVCASLASGMYKATVPACGTHTQSSHRNRVLVAFYHGGKVWHRKKQVLTDRGITWEDS

SEQ ID NO: 789597 - protein, 110 aa, Homo sapiens
CGVVACLSAPTVGAWATIAALAWLMSLIEPTSHLLDLEGEGRGKAWRLTKRKEFSNGRSEPRSPKVSGLFFPPSHVTPLIQHLSFLFLSFFFFFWVISATLNVGERVIYS

SEQ ID NO: 789598 - protein, 71 aa, Homo sapiens
GRVRHCLVCEVSGAPGVCLECSRRCVSGSEWMSVRLWSVRGCVALSGSSASLGVSGGLSRGLAQECVSPSL

SEQ ID NO: 789599 - protein, 167 aa, Homo sapiens
  misc_feature (11)..(11): Xaa can be any naturally occurring amino acid
MGTRTFSAFHXVLSEKAQNEEILYVLRHYIQKPSSRKMYLSGYGVELAIKSTEYKALDDTQVKTVTNTTVEDETETNEVQGFLFGKLKEIYSDLRDNLTAFQKYLIESNKQMMPLKVWELQDLSFQAASQIMSAPVYDAIKLMKDISQNFPIKARSLTRIAVNQHMR

SEQ ID NO: 789600 - protein, 567 aa, Homo sapiens
MSVLSFWLAILLSPEYNNRTYRIDDVDWNKTPKDSFTMSDGKEITFLEYYSKNYGITVKEEDQPLLIHRPSERQDNHGMLLKGEILLLPELSFMTGIPEKMKKDFRAMKDLAQQINLSPKQHHSALECLLQRIAKNEAATNELMRWGLRLQKDVHKIEGRVLPMERINLKNTSFITSQELNWVKEVTRDPSILTIPMHFWALFYPKRAMDQARELVNMLEKIAGPIGMRMSPPAWVELKDDRIETYVRTIQSTLGAEGKIQMVVCIIMGPRDDLYGAINKLCCVQSPVPSQVVNVRTIGQPTRLRSVAQKILLQINCKLGGELWGVDIPLKQLMVIGMDVYHDPSRGMRSVVGFVASINLTLTKWYSRVVFQMPHQEIVDSLKLCLVGSLKKFYEVNHCLPEKIVVYRDGVSDGQLKTVANYEIPQLQKCFEAFENYQPKMVVFVVQKKISTNLYLAAPQNFVTPTPGTVVDHTITSCEWVDFYLLAHHVRQGCGIPTHYVCVLNTANLSPDHMQRLTFKLCHMYWNWPGTIRVPAPCKYAHKLAFLSGHILHHEPAIQLCENLFFL

SEQ ID NO: 789601 - protein, 198 aa, Homo sapiens
MRVGLSLTVVREPEGSVSHTSSLSFQVNHCLPEKIVVYRDGVSDGQLKTVANYEIPQLQKCFEAFENYQPKMVVFVVQKKISTNLYLAAPQNFVTPTPGTVVDHTITSCEWVDFYLLAHHVRQGCGIPTHYVCVLNTANLSPDHMQRLTFKLCHMYWNWPGTIRVPAPCKYAHKLAFLSGHILHHEPAIQLCENLFFL

SEQ ID NO: 789602 - protein, 38 aa, Homo sapiens
CLAFSAILDSAERSPHILKLGTHPRSVPVPSNMRKRLM

SEQ ID NO: 789603 - protein, 175 aa, Homo sapiens
GGGASGSLGGCFYPRSSADLPFQTTRCEFQTSVMELAHSLLLNEEALAQITEAKRPVFIFEWLRFLDKVLVAANKTDVKEKQKKLVEQLTGLISSSPGPPTRKLLAKNLAALYSIGDTFTVFQTLDKCNDIIRNKDDTAAYLPTKLAAVACVGAFYEKMGRMLGSAFPETVNNLL

SEQ ID NO: 789604 - protein, 104 aa, Homo sapiens
RPTHRDGANLSLNDNAGLVTNWFNSRPWVGPLVCALIMENLSPWKKLLDQVRLVAGRVRMTTCYTIKMFLDQCTDRSIALLSVVTKIVVFEEKDTCLENTRKVF

SEQ ID NO: 789605 - protein, 105 aa, Homo sapiens
GDSLALLPRLECSSDLGSLQPLPPGFKRFSCLNLPSIWDYRHVPLHPANFCTKTRFHHIGQSSLKLLTSGDMPASDSQSAGITGMSYGARPRSGVLEGVTMICFY

SEQ ID NO: 789606 - protein, 126 aa, Homo sapiens
MEQSPLGEKPVFCCLPDTGWLRNNRGGQSRQHLCGPRTQEGLALAYREGGQAQQSCPPKEHQWPLVPRPTGRLELWVTFVERDTDSGRDRDVVIQAVWHKKIKRPPSPGPLPWTSWYRASIFSSVQ

SEQ ID NO: 789607 - protein, 118 aa, Homo sapiens
KKFIRHQSDRYVKIKRNRRKPRGIDNRVRGRFKGEILMPNIDYGSNKKTKHMLPSGFRKFLVHTSRSWKCCCCATNLTVLRSLTMFPPRTAKPSWKRAAQLAVRVTNPNPRLRSKENE

SEQ ID NO: 789608 - protein, 144 aa, Homo sapiens
ISTEFNRYGISNEKPEVKIGVSVKQQFTEEEIYKDRDSQITAIEKTFEDAQKSISQHYSKPRVTPVEVMPVFPDFKMWINPCAQVIFDSDPAPKDTSGAAALEMMSQAMIRGMMDEEGNQFVAYFLPVEETLKKRKRDQEEEMD

SEQ ID NO: 789609 - protein, 140 aa, Homo sapiens
LQRLPHLTSLQLPSLLLQGRATQGRMGGGGSSAHSQKPPWLPDWGSSLCPQKAQITLLGPQTSCFALGTLHLPCNTISFWKAWTTWGGVASKSLRDPTLPSLWELPSSLSKQPRLPGFAYILCPQEVFSAPSWGLGRRGS

SEQ ID NO: 789610 - protein, 42 aa, Homo sapiens
MLKTESSGERTTLRSASPHRNAYRTEFQALKSTFDKPKSDGE

SEQ ID NO: 789611 - protein, 118 aa, Homo sapiens
MLLQDEIAALPLFPNPGKTYSEHQSLNTATELHCCSTTVSQTGENFSGHWNLIMAVSCFYPGKVPCKHLGFVESLGLRLSHRLSPYSSMASASLFNVVSQVIGVLSSHKDPHTCHCNH

SEQ ID NO: 789612 - protein, 190 aa, Homo sapiens
PSTERLLQKVIPFVLWTPGPQGFWSLGSTGASGPAGVWQRLQSRCPPWSVLSLEVTAEPLSALVCPFTQGHFVLGVFFAISTIHLTGFFGDVLSVCVFTDLALVTCGFRPCLVSGIFSSIRSLTQLFSSLAVGPRDAAAALMSSLPPSLLSLPLLSSGFTVVFQNPASIIGAFVALSVVFLAVNKIFCDF

SEQ ID NO: 789613 - protein, 40 aa, Homo sapiens
MYFPQIIINQYFGHTSYKNLKLAKTTLLFSLHSTSPRVVT

SEQ ID NO: 789614 - protein, 116 aa, Homo sapiens
FIVTSPELNCCQKDYARVASSRSGQWRRWTLTDVSMAGRLQGLETWPRSSRGLPDHMLHMGLVSVAGLGGDGAVEVTELTVWAPGPLALWVWVLGDAGIWSSVPPNYVDTLGPQRL

SEQ ID NO: 789615 - protein, 86 aa, Homo sapiens
VQRNQRWIPHVALGRTSVKSTNVQGMALVERGPLLLLTDQVVLWSGPGSSSLQKPFITPKQHLHPVIQAQGETTELAGRRGHVSRE

SEQ ID NO: 789616 - protein, 34 aa, Homo sapiens
MLTNFWWQRDCVSTTSGIMRAALQGARQPRREAA

SEQ ID NO: 789617 - protein, 115 aa, Homo sapiens
MVLGQQEGAADDKESRGRTTAWGGLGSGGAREWGQESVAGKRKFNRENREEAEIGRARNRQNGNWGQSKIGHKEEQGVKQIARMEQNKWKRRNRGKRGRNSRRGEGQKNKPILMG

SEQ ID NO: 789618 - protein, 202 aa, Homo sapiens
FTRFQTLRLQRIFPEVLAEQLISYGSCQFPTLGFVVERFKAIQAFVPEIFHRIKVTHDHKDGIVEFNWKRHRLFNHTACLVLYQLCVEDPMATVVEVRSKPKSKWRPQALDTVELEKLASRKLRINAKETMRIAEKLYTQGYISYPRTETNIFPRDLNYTVLVEQQTPDPRWGAFAQSILERGGPTPRNGNKSDQAHPAPKC

SEQ ID NO: 789619 - protein, 163 aa, Homo sapiens
MKEFSSTAQGNTEVIHTGTLQRHESHHIRDFCFQEIEKDIHNFEFQWQEEERNGHEAPMTEIKELTGSTDRHDQRHAGNKPIKDQLGSSFHSHLPELHIFQPEWKIGNQVEKSIINASLILTSQRISCSPKTRISNNYGNNSLHSSLPIQKLGSTHERKIFPM

SEQ ID NO: 789620 - protein, 237 aa, Homo sapiens
MNTIKQLESRIEELNKEVKASRDQLIAQDVTAKNAVQQLHKEMAQRMEQANKKCEEARQEKEAMVMKYVRGEKESLDLRKEKETLEKKLRDANKELEKNTNKIKQLSQEKGRLHQLYETKEGETTRLIREIDKLKEDINSHVIKVKWAQNKLKAEMDSHKETKDKLKETTTKLTQAKEEADQIRKNCQDMIKTYQESEEIKSNELDAKLRVTKGELEKQMQEKSDQLEMHHAKIKEL

SEQ ID NO: 789621 - protein, 276 aa, Homo sapiens
IFRLIKENKKHQELFVDICSEKDNLREELKKRTETEKQHMNTIKQLESRIEELNKEVKASRDQLIAQDVTAKNAVQQLHKEMAQRMEQANKKCEEARQEKEAMVMKYVRGEKESLDLRKEKETLEKKLRDANKELEKNTNKIKQLSQEKGRLHQLYETKEGETTRLIREIDKLKEDINSHVIKVKWAQNKLKAEMDSHKETKDKLKETTTKLTQAKEEADQIRKNCQDMIKTYQESEEIKSNELDAKLRVTKGELEKQMQEKSDQLEMHHAKIKEL

SEQ ID NO: 789622 - protein, 184 aa, Homo sapiens
MRRGPRSLRGRDAPAPTPCVPAECFDLLVRHCVACGLLRTPRPKPAGASSPAPRTALQPQESVGAGAGEAALPLPGLLFGAPALLGLALVLALVLVGLVSWRRRQRRLRGASSAEAPDGDKDAPEPLDKVIILSPGISDATAPAWPPPGEDPGTTPPGHSVPVPATELGSTELVTTKTAGPEQQ

SEQ ID NO: 789623 - protein, 91 aa, Homo sapiens
SSHNVEATRKGFLVPVLKAVTFSAHLYNADSPGTSLSRVVLRIKSDNAHGNTLQMEVLLFFQVCKERQRQCSCSVSEFHVTYIGLLYKSCN

SEQ ID NO: 789624 - protein, 72 aa, Homo sapiens
NSRTRLIIPTRKECSHSQIPGTDFAIIPVPGDLGKIGFLFCFVLLYLEEGSRSVTQAGVWWQEHSTWTPTFK

SEQ ID NO: 789625 - protein, 68 aa, Homo sapiens
RNDPNIAIITIIPQNPLTHDALPSRVNPQSGSHPSTSLLPCCLGGQSGQLAVSKTARNAHSAPRPWML

SEQ ID NO: 789626 - protein, 110 aa, Homo sapiens
HKHTPNTYTHPKHTHIQNIHTYTHPEYTHIQNTHTHTYQDDYLAFCNLLFQSTIYVGKNILMSMNYNIYYAPCGLHKFPLFKQFPVLSFKQYPDDTLIYHLHSSLITSGK

SEQ ID NO: 789627 - protein, 76 aa, Homo sapiens
CRLHEDGMGLGAPLSKEQVGSECATDWPGLWPPGNPHPDCPLYLFVASSGALFEDLSVCLCCSPHLFPCLFLVSFL

SEQ ID NO: 789628 - protein, 31 aa, Homo sapiens
MPDAAKKGVVKAEKSKKKKEEEEDEEDEEDE

SEQ ID NO: 789629 - protein, 54 aa, Homo sapiens
YEKKAAKLKEKYEKDIAAYRAKGKPDAAKKGVVKAEKSKKKKEEEEDEEDEEDE

SEQ ID NO: 789630 - protein, 96 aa, Homo sapiens
GYGPTEDVQGLRAAICIRWGRESGPGLCAQQPRQCHPPPVTQPALLPRSQARKGLPITGSRTSCHPKGPGSRCGPLFPPRPTLPHRRHLPGFAIQC

SEQ ID NO: 789631 - protein, 105 aa, Homo sapiens
INLESRIVSLWTTLNCSGIILAHRNLRFSGGSSDSSASASQSCEVTGVSHCAWPTFLINLLSLYPMDSSRILSCARAKNPFLGSESGPLSANFTNYHRWSPLITR

SEQ ID NO: 789632 - protein, 253 aa, Homo sapiens
TFLCFPPFSVFLAIFHILKCVFLIFRDFQFSRHIPGPSVCISHFSRFLVISSFFKSSSGCFSFSMIFSFLAIFHVLQWTFLNFPPFSVFLAIFHVLKCVFLIFRDFQFSRHIPGPSVCISHFSRFLVISSFFKSSSGCFSFSMIFSFLAIFHVLQWTFLNFPPFSVFLAIFHVLKCVFLIFRDFQFSRHIPGPSVCISHFSRFLVISSFFKSSSGCFSFSMIFSFLAIFHVLQWTFLKFHFFSCLWRTYVIRF

SEQ ID NO: 789633 - protein, 118 aa, Homo sapiens
MIFSFLAIFHVLQWTFLNFPPFSVFLAIFHVLKCVFLIFRDFQFSRHIPGPSVCISHFSRFLVISSFFKSSSGCFSFSMIFSFLAIFHVLQWTFLNFPPFSVFLAIRRGREFSSSRRP

SEQ ID NO: 789634 - protein, 243 aa, Homo sapiens
KSAAASTESVYFSFSVIFRFSRHIPGPSVCISHFSRFLVISSFFKSSSGCFSFSMIFSFLAIFHVLQWTFLNFPPFSVFLAIFHVLKCVFLIFRDFQFSRHIPGPSVCISHFSRFLVISSFFKSSSGCFSFSMIFSFLAIFHVLQWTFLNFPPFSVFLAIFHVLKCVFLIFRDFQFSRHIPGPSVCISHFSRFLVISSFFKSSSGCFSFSMIFSFLAIFHVLQWTFLKFHFFSCLWRTYVIRF

SEQ ID NO: 789635 - protein, 232 aa, Homo sapiens
TFLCFPPFSVFLAIFHILKCVFLIFRDFQFSRHIPGPSVCISHFSRFLVISSFFKSSSGCFSFSMIFSFLAIFHVLQWTFLNFPPFSVFLAIFHVLKCVFLIFRDFQFSRHIPGPSVCISHFSRFLVISSFFKSSSGCFSFSMIFSFLAIFHVLQWTFLNFPPFSVFLAIFHVLKCVFLIFRDFQFSRHIPGPSVCISHFSRFLVISSFFKSSSGCFSFSRRGREFSSSRRP

SEQ ID NO: 789636 - protein, 189 aa, Homo sapiens
MIFSFLAIFHVLQWTFLNFPPFSVFLAIFHVLKCVFLIFRDFQFSRHIPGPSVCISHFSRFLVISSFFKSSSGCFSFSMIFSFLAIFHVLQWTFLNFPPFSVFLAIFHVLKCVFLIFRDFQFSRHIPGPSVCISHFSRFLVISSFFKSSSGCFSFSMIFSFLAIFHVLQWTFLKFHFFSCLWRTYVIRF

SEQ ID NO: 789637 - protein, 207 aa, Homo sapiens
TFLCFPPFSVFLAIFHILKCVFLIFRDFQFSRHIPGPSVCISHFSRFLVISSFFKSSSGCFSFSMIFSFLAIFHVLQWTFLNFPPFSVFLAIFHVLKCVFLIFRDFQFSRHIPGPSVCISHFSRFLVISSFFKSSSGCFSFSMIFSFLAIFHVLQWTFLNFPPFSVFLAIFHVLKCVFLIFRDFQFSRSVSKALRAKDVSTMFLSST

SEQ ID NO: 789638 - protein, 182 aa, Homo sapiens
TFLCFPPFSVFLAIFHILKCVFLIFRDFQFSRHIPGPSVCISHFSRFLVISSFFKSSSGCFSFSMIFSFLAIFHVLQWTFLNFPPFSVFLAIFHVLKCVFLIFRDFQFSRHIPGPSVCISHFSRFLVISSFFKSSSGCFSFSMIFSFLAIFHVLQWTFLNFPPFSVFLAIRRGREFSSSRRP

SEQ ID NO: 789639 - protein, 149 aa, Homo sapiens
TFLCFPPFSVFLAIFHILKCVFLIFRDFQFSRHIPGPSVCISHFSRFLVISSFFKSSSGCFSFSMIFSFLAIFHVLQWTFLNFPPFSVFLAIFHVLKCVFLIFRDFQFSRHIPGPSVCISHFSRFLVISSFFKSSSGCFSFSMIFSFTS

SEQ ID NO: 789640 - protein, 117 aa, Homo sapiens
KSAAASTESVYFSFSVIFRFSRHIPGPSVCISHFSRFLVISSFFKSSSGCFSFSMIFSFLAIFHVLQWTFLNFPPFSVFLAIFHVLKCVFLIFRDFQFSRHIPGPSVCISHFSRFSL

SEQ ID NO: 789641 - protein, 207 aa, Homo sapiens
PTTTKFAAASTSGCFSFSMIFSFLAIFHVLQWTFLNFPPFSVFLAIFHVLKCVFLIFRDFQFSRHIPGPSVCISHFSRFLVISSFFKSSSGCFSFSMIFSFLAIFHVLQWTFLNFPPFSVFLAIFHVLKCVFLIFRDFQFSRHIPGPSVCISHFSRFLVISSFFKSSSGCFSFSMIFSFLAIFHVLQWTFLKFHFFSCLWRTYVIRF

SEQ ID NO: 789642 - protein, 205 aa, Homo sapiens
TFLCFPPFSVFLAIFHILKCVFLIFRDFQFSRHIPGPSVCISHFSRFLVISSFFKSSSGCFSFSMIFSFLAIFHVLQWTFLNFPPFSVFLAIFHVLKCVFLIFRDFQFSRHIPGPSVCISHFSRFLVISSFFKSSSGCFSFSMIFSFLAIFHVLQWTFLNFPPFSVFLAIFHVLKCVFLIFRDFQFSRHIPGPSVCISHSTRPRI

SEQ ID NO: 789643 - protein, 200 aa, Homo sapiens
TFLCFPPFSVFLAIFHILKCVFLIFRDFQFSRHIPGPSVCISHFSRFLVISSFFKSSSGCFSFSMIFSFLAIFHVLQWTFLNFPPFSVFLAIFHVLKCVFLIFRDFQFSRHIPGPSVCISHFSRFLVISSFFKSSSGCFSFSMIFSFLAIFHVLQWTFLNFPPFSVFLAIFHVLKCVFLIFRDFQFSRDAAANLVVVGGR

SEQ ID NO: 789644 - protein, 67 aa, Homo sapiens
PTTTKFAAASTSDFVIFQVVKWMFLIFHDFQFSCHIPRPTVDISKFSTFFSFPRHISRPKVCISHFP

SEQ ID NO: 789645 - protein, 123 aa, Homo sapiens
GQCQHCTSLGRRLFRWLIPQEDSVRYRCRGSGRTVPRHSVRSGSKAGRQRQHWPGRCSWRPPSHQGPTSPAAYPILELGTLGASDLHVATGAAVSGPLSGTAVCLQYKDCPVSVQGPVGRAGN

SEQ ID NO: 789646 - protein, 77 aa, Homo sapiens
MAKQPSPLGPGFGWYALQNSCLGLSLPLLRRTVCRDPLLHLPLLWPECRWDLGPLRTRPEDLQTHLPLRGPWEVWFL

SEQ ID NO: 789647 - protein, 158 aa, Homo sapiens
MATDDKTSPTLDSANDLPRSPTSPSHLTHFKPLTPDQDEPPFKSAYSSFVNLFRFNKERAEGGQGEQQPLSGSWTSPQLPSRTQSVRSPTPYKKQLNEELQRRSSALDTRRKAEPTFGGHDPRTAVQLRSLSTVLKRLKEIMEGKSQETSELAHIVEK

SEQ ID NO: 789648 - protein, 171 aa, Homo sapiens
MATDDKTSPTLDSANDLPRSPTSPSHLTHFKPLTPDQDEPPFKSAYSSFVNLFRFNKERAEGGQGEQQPLSGSWTSPQLPSRTQSVRSPTPYKKQLNEELQRRSSALGDLRACTYCRKIALSYAHSTDSNSIGEDLNALSDSACSVSVLDPSEPRTPVGSRKASRNIFLED

SEQ ID NO: 789649 - protein, 183 aa, Homo sapiens
MATDDKTSPTLDSANDLPRSPTSPSHLTHFKPLTPDQDEPPFKSAYSSFVNLFRFNKERAEGGQGEQQPLSGSWTSPQLPSRTQSVRSPTPYKKQLNEELQRRSSALDTRRKAEPTFGGHDPRTAVQLRSLSTVLKRLKEIMEGKSQDSDLKQYWMPDSQCKECYDCSEKFTTFRRRHHCRLC

SEQ ID NO: 789650 - protein, 53 aa, Homo sapiens
MRTHDAYSGPSMAQSACTSSLLKPMKTLDSATHRDIESTCMWKGATHCQSPEG

SEQ ID NO: 789651 - protein, 130 aa, Homo sapiens
SDRLHHTYPTYTVSWLQRLPTVSFHSILDSPIGSQVHMIAPQVLVTIPIIWGPIKENCQHEYMKLLSMNNTNSWLDRDYICLHTTWEFKITMIYTHSLFLSCKRSLHRDIILVHGFYLQGHLALVGMMKD

SEQ ID NO: 789652 - protein, 113 aa, Homo sapiens
ISSWEMTLPQHTQAGCEKRASPPWLSKGDAPLQLNLEPADPKVPVSLGPTSSCMVWSAIPPSSPRQPSRHPGLQGQVEARERSDTGHDPIHSKKQNPNLTSPQQHSFCSAIPR

SEQ ID NO: 789653 - protein, 280 aa, Homo sapiens
MSRQQKQQQQQQPSAVRGRRMTEPAMAIVDAAEVELKEEDKEPLIELFVKAGSDGDKHRKLPLFSEALHASDSSQGVVFSVTTVDLKRKPADLQNLAPGTHPPFITFNSEVKTDVNKIEEFLEEVLCPPKYLKLSPKHPESNTAGMDIFAKFSAYIKNSRPEANEALERGLLKTLQKLDEYLNSPLPDEIDENSMEDIKFSTRKFLDGNEMTLADCNLLPKLHIVKVVAKKYRNFDIPKEMTGIWRYLTNAYSRDEFTNTCPSDKEVEIAYSDVAKRLTK

SEQ ID NO: 789654 - protein, 128 aa, Homo sapiens
NKLVAEAMVSLGRWTHLCGTWNSEEGLTSLWVNGELAATTVEMATGHIVPEGGILQIGQEKNGCCVGGGFDETLAFSGRLTGFNIWDSVLSNEEIRETGGAESCHIRGNIVGWGVTEIQPHGGAQYVS

SEQ ID NO: 789655 - protein, 103 aa, Homo sapiens
PYGCALRSWRPYPNLLSISATRLGPETRELSLCPPAFGLSPNKPFVHQKYLLSAYHVPDKGDVTVRKNRVSLSATQARVQLTQGRGAPKWSIACPELVGSWSH

SEQ ID NO: 789656 - protein, 133 aa, Homo sapiens
MRPGSPSRTGFFQLVEEEEELGEEEELGEEEELGEEEEEEFEEEKEEEEFEEEEEGEEGEEEEEGEGEEEEEGEEEDYEGEEEVYEREEDYEGEEEDYEGVEEGCEEEEEDEDKEEDEEEAEDEDKEEKEKDN

SEQ ID NO: 789657 - protein, 787 aa, Homo sapiens
MAVWIQAQQLQGEALHQMQALYGQHFPIEVRHYLSQWIESQAWDSVDLDNPQENIKATQLLEGLVQELQKKAEHQVGEDGFLLKIKLGHYATQLQNTYDRCPMELVRCIRHILYNEQRLVREANNGSSPAGSLADAMSQKHLQINQTFEELRLVTQDTENELKKLQQTQEYFIIQYQESLRIQAQFGPLAQLSPQERLSRETALQQKQVSLEAWLQREAQTLQQYRVELAEKHQKTLQLLRKQQTIILDDELIQWKRRQQLAGNGGPPEGSLDVLQSWCEKLAEIIWQNRQQIRRAEHLCQQLPIPGPVEEMLAEVNATITDIISALVTSTFIIEKQPPQVLKTQTKFAATVRLLVGGKLNVHMNPPQVKATIISEQQAKSLLKNENTRNDYSGEILNNCCVMEYHQATGTLSAHFRNMSLKRIKRSDRRGAESVTEEKFTILFESQFSVGGNELVFQVKTLSLPVVVIVHGSQDNNATATVLWDNAFAEPGRVPFAVPDKVLWPQLCEALNMKFKAEVQSNRGLTKENLVFLAQKLFNNSSSHLEDYSGLSVSWSQFNRENLPGRNYTFWQWFDGVMEVLKKHLKPHWNDGAILGFVNKQQAHDLLINKPDGTFLLRFSDSEIGGITIAWKFDSQERMFWNLMPFTTRDFSIRSLADRLGDLNYLIYVFPDRPKDEVYSKYYTPVPCESATAKAVDGYVKPQIKQVVPEFVNASADAGGGSATYMDQAPSPAVCPQAHYNMYPQNPDSVLDTDGDFDLEDTMDVARRVEELLGRPMDSQWIPHAQS

SEQ ID NO: 789658 - protein, 787 aa, Homo sapiens; identical to SEQ ID NO: 789657

SEQ ID NO: 789659 - protein, 604 aa, Homo sapiens
MAVWIQAQQLQGEALHQMQALYGQHFPIEVRHYLSQWIESQAWDSVDLDNPQENIKATQLLEGLVQELQKKAEHQVGEDGFLLKIKLGHYATQLQNTYDRCPMELVRCIRHILYNEQRLVREANNGSSPAGSLADAMSQKHLQINQTTFIIEKQPPQVLKTQTKFAATVRLLVGGKLNVHMNPPQVKATIISEQQAKSLLKNENTRNDYSGEILNNCCVMEYHQATGTLSAHFRNMSLKRIKRSDRRGAESVTEEKFTILFESQFSVGGNELVFQVKTLSLPVVVIVHGSQDNNATATVLWDNAFAEPGRVPFAVPDKVLWPQLCEALNMKFKAEVQSNRGLTKENLVFLAQKLFNNSSSHLEDYSGLSVSWSQFNRENLPGRNYTFWQWFDGVMEVLKKHLKPHWNDGAILGFVNKQQAHDLLINKPDGTFLLRFSDSEIGGITIAWKFDSQERMFWNLMPFTTRDFSIRSLADRLGDLNYLIYVFPDRPKDEVYSKYYTPVPCESATAKAVDGYVKPQIKQVVPEFVNASADAGGGSATYMDQAPSPAVCPQAHYNMYPQNPDSVLDTDGDFDLEDTMDVARRVEELLGRPMDSQWIPHAQS

SEQ ID NO: 789660 - protein, 117 aa, Homo sapiens
MYPSYGQIIYGERVTSWYKLALRLWIGIITLKLHGPLCQAVEYLVLGPLDESLGINSASPRIIYLLSLMCTYLMKIPTKMMGCFGEMSVEKESRVMVLGIHGLCSACPGRSAKEAMI

SEQ ID NO: 789661 - protein, 601 aa, Homo sapiens
MAVWIQAQQLQGEALHQMQALYGQHFPIEVRHYLSQWIESQAWDSVDLDNPQENIKATQLLEGLVQELQKKAEHQVGEDGFLLKIKLGHYATQLQNTYDRCPMELVRCIRHILYNEQRLVREANNGSSPAGSLADAMSQKHLQINQTFEELRLVTQDTENELKKLQQTQEYFIIQYQESLRIQAQFGPLAQLSPQERLSRETALQQKQVSLEAWLQREAQTLQQYRVELAEKHQKTLQLLRKQQTIILDDELIQWKRRQQLAGNGGPPEGSLDVLQSWCEKLAEIIWQNRQQIRRAEHLCQQLPIPGPVEEMLAEVNATITDIISALVTSTFIIEKQPPQVLKTQTKFAATVRLLVGGKLNVHMNPPQVKATIISEQQAKSLLKNENTRNDYSGEILNNCCVMEYHQATGTLSAHFRNMSLKRIKRSDRRGAESVTEEKFTILFESQFSVGGNELVFQVKTLSLPVVVIVHGSQDNNATATVLWDNAFAEPGRVPFAVPDKVLWPQLCEALNMKFKAEVQSNRGLTKENLVFLAQKLFNNSSSHLEDYSGLSVSWSQFNRENFPGRNYALWQWFDGPPFLPPLIPLTPLLLPISPFILIIL

SEQ ID NO: 789662 - protein, 787 aa, Homo sapiens; identical to SEQ ID NO: 789657

SEQ ID NO: 789663 - protein, 787 aa, Homo sapiens; identical to SEQ ID NO: 789657

SEQ ID NO: 789664 - protein, 693 aa, Homo sapiens
MAVWIQAQQLQGEALHQMQALYGQHFPIEVRHYLSQWIESQAWDSVDLDNPQENIKATQLLEGLVQELQKKAEHQVGEDGFLLKIKLGHYATQLQNTYDRCPMELVRCIRHILYNEQRLVREANNGSSPAGSLADAMSQKHLQINQTFEELRLVTQDTENELKKLQQTQEYFIIQYQESLRIQAQFGPLAQLSPQERLSRETALQQKQVSLEAWLQREAQTLQQYRVELAEKHQKTLQLLRKQQTIILDDELIQWKRRQQLAGNGGPPEGSLDVLQSWCEKLAEIIWQNRQQIRRAEHLCQQLPIPGPVEEMLAEVNATITDIISALVTSTFIIEKQPPQVLKTQTKFAATVRLLVGGKLNVHMNPPQVKATIISEQQAKSLLKNENTRNDYSGEILNNCCVMEYHQATGTLSAHFRNMSLKRIKRSDRRGAESVTEEKFTILFESQFSVGGNELVFQVKTLSLPVVVIVHGSQDNNATATVLWDNAFAEPGRVPFAVPDKVLWPQLCEALNMKFKAEVQSNRGLTKENLVFLAQKLFNNSSSHLEDYSGLSVSWSQFNRENLPGRNYTFWQWFDGVMEVLKKHLKPHWNDGAILGFVNKQQAHDLLINKPDGTFLLRFSDSEIGGITIAWKFDSQERMFWNLMPFTTRDFSIRSLADRLGDLNYLIYVFPDRPKDEVYSKYYTPVPCESATA

SEQ ID NO: 789665 - protein, 35 aa, Homo sapiens
MVQSEAMTEAAGLCQHWRPSDTVWLVTTGGGRVQV

SEQ ID NO: 789666 - protein, 78 aa, Homo sapiens
RRGKDYKAGERRMTMMYDEFRVGFLYRESWDGLQDRLGYSGVDYYYYYICGRVDHTSVIPATQEAEEGESLVPRRRLQ

SEQ ID NO: 789667 - protein, 79 aa, Homo sapiens
ESSLLEEETPGGSRGHPSAAMLRLTLRRTPTVTSNTCRTQPPTWGQIKKLSQMAEENLRKGGSGKNESYTSPVVSDTPT

SEQ ID NO: 789668 - protein, 104 aa, Homo sapiens
AELKACRDQEEEYKSKYEEEAHRRATLENDFVVLKKDVDAVFLSKMELEGKLEALREYLYFLKHLNEEVRLNQRAGCSQERGLGGQASCGHEENGQEGKSVRVA

SEQ ID NO: 789669 - protein, 28 aa, Homo sapiens
MLIETETEPLQCLFNDAKEDSKDKSIAY

SEQ ID NO: 789670 - protein, 83 aa, Homo sapiens
QPPLPPQPCFQLVSGLGFSPRPLWVSSKPAKRLLVAESWLCQHPLKVHICTPALHHLGGYISSRFRWGGQSQDWPLGVRSLRL

SEQ ID NO: 789671 - protein, 72 aa, Homo sapiens
QIKPLHPSPASVDTTSSTSPASVDTLLSQQVKQAEASAGPRSRSRESQVSVFRFCLLTPHPRKTNPSEFYRM

SEQ ID NO: 789672 - protein, 104 aa, Homo sapiens
MGISRPPAPVLELCRVNEADVEELAPPTAALWSRGPRKIRWTQGQAAWICPPPCYAMTTSEPHTRPEFWAHLKPGIAINIFNLQKEKKKAGVVAHTCNPSTFRG

SEQ ID NO: 789673 - protein, 137 aa, Homo sapiens
PSAWLLSSRESQGQLASSPKGDGLSAQCQSPAPGGKFRSAEGVGAAGGEESPLLVCSAVAASQGPLVPKRTAAGGTSALQAGWVPGPGPRRALEARPQAGEELLSRAVAVGPHCLQELSGIGRGRTGSRFHWDSSRV

SEQ ID NO: 789674 - protein, 192 aa, Homo sapiens
MSEETVSESQFSLKTAALRVFDLPLTWYYSLSQIKFSPVAKKLFVVTAVSAISVIFLAHHFKRKRGKKKGKILPWEPEHLILEYTKRAASDKGSSCSSSRQNLTLSLSSTKDKGSQVCNYANGGLFSKYSGSAQSLASVQSVNSCHSCACGNSNSWDKADEDDIKLVNIPVTTPENLYLMGMAVLKRHCVDG

SEQ ID NO: 789675 - protein, 229 aa, Homo sapiens
DSAFSMSDCCSAPGISWEAGVGRPAVPGLELQIRRGAMSEETVSESQFSLKTAALRVFDLPLTWYYSLSQIKFSPVAKKLFVVTAVSAISVIFLAHHFKRKRGKKKGKILPWEPEHLILEYTKRAASDKGSSCSSSRQNLTLSLSSTKDKGSQVCNYANGGLFSKYSGSAQSLASVQSVNSCHSCACGNSNSWDKADEDDIKLVNIPVTTPENLYLMGMAVLKRHCVDG

SEQ ID NO: 789676 - protein, 120 aa, Homo sapiens
CATAQYGWWWGQPITTLTPVRLEDWGSKHMLWYTITQRGGADGQEARGPGAAVPANHQTPTSPEIGPLDSGPEMAIKKSSFLGGGQRPLGRYDVPAAMCEGGPTLPTGTDVTEQRLTMED

SEQ ID NO: 789677 - protein, 308 aa, Homo sapiens
SGRQVGGSKMAAAEEGCSVGAEADRELEELLESALDDFDKAKPSPAPPSTTTAPDASGPQKRSPGDTAKDALFASQEKFFQELFDSELASQATAEFEKAMKELAEEEPHLVEQFQKLSEAAGRVGSDMTSQQEFTSCLKETLSGLAKNATDLQNSSMSEEELTKAMEGLGMDEGDGEGNILPIMQSIMQNLLSKDVLYPSLKEITEKYPEWLQSHRESLPPEQFEKYQEQHSVMCKICEQFEAETPTDSETTQKARFEMVLDLMQQLQDLGHPPKELAGEMPPGLNFDLDALNLSGPPGASGEQCLIM

SEQ ID NO: 789678 - protein, 279 aa, Homo sapiens
SGRQVGGSKMAAAEEGCSVGAEADRELEELLESALDDFDKAKPSPAPPSTTTAPDASGPQKRSPGDTAKDALFASQEKFFQELFDSELASQATAEFEKAMKELAEEEPHLVEQFQKLSEAAGRVGSDMTSQQEFTSCLKETLSGLAKNATDLQNSSMSEEELTKAMEGLGMDEGDGEGNILPIMQSIMQNLLSKDVLYPSLKEITEKYPEWLQSHRESLPPEQFEKYQEQHSVMCKICEQFEAETPTDSETTQKARFEMVLDLMQQVRPLAFCPLVLST

SEQ ID NO: 789679 - protein, 271 aa, Homo sapiens
ADGKSEVARWPPLRKAVVSGPKRTGNWRSFWKDALFASQEKFFQELFDSELASQATAEFEKAMKELAEEEPHLVEQFQKLSEAAGRVGSDMTSQQEFTSCLKETLSGLAKNATDLQNSSMSEEELTKAMEGLGMDEGDGEGNILPIMQSIMQNLLSKDVLYPSLKEITEKYPEWLQSHRESLPPEQFEKYQEQHSVMCKICEQFEAETPTDSETTQKARFEMVLDLMQQLQDLGHPPKELAGEMPPGLNFDLDALNLSGPPGASGEQCLIM

SEQ ID NO: 789680 - protein, 46 aa, Homo sapiens
MPPPQPIPAEQPSRLRTKGRGVPSSPYLLSWTRLTFPAAPMGSPPA

SEQ ID NO: 789681 - protein, 44 aa, Homo sapiens
MNHPKPGASKQHTLTLPQFWRRPKSRCRQDAFLVEALAEDLFQP

SEQ ID NO: 789682 - protein, 108 aa, Homo sapiens
TAPSPGSDFLFLRKRNSRTQIDTHLELLEFSKHTTVETIIVIMMGLSYIWGALGSLQHGFKQIMSLESHNISLRSSELALLLPSSTPFIDRKTEDPRAYVSCLGTHGQ

SEQ ID NO: 789683 - protein, 73 aa, Homo sapiens
HLGKLLKPKTCHPWLHLSKITTSDPSANPADSAFKLSLSVDPAIQARIIFCLNQRKILLPGLPVSVLIQYTLY

SEQ ID NO: 789684 - protein, 105 aa, Homo sapiens
SGDSRCWQGCGEREHSSLFWDCKLVQPLWKSVWRFLRKLDIVLPEDPAIPLLGIYPEDVPTGKKDTCSTMFISAIFIIARSWKLPRCPSTEEWIQKKCGTFTQWS

SEQ ID NO: 789685 - protein, 84 aa, Homo sapiens
ARAFQVPRRPGHAARRQFSVKMPETFNPQLPGLYGSAGRGSRYLRTNSKTEVTVVKRGRGALEAWAGVLSARRSLRPQGEERLP

SEQ ID NO: 789686 - protein, 132 aa, Homo sapiens [sequence omitted]

SEQ ID NO: 789687 - protein, 198 aa, Homo sapiens
SSWAVESDSSCTCSSLPSPIVQDVLSKDSCDPNAGSQLTFDPEQPPTPLRPTTPKPQSPQSPQSPGAGSASCHSNHSALSANSEESEGRAEEPAQREPGPVSLQDPLEATHGDEGSKDLLVNIGVAAGPEEKEKEEVVPDGPWRRSSSQDEERTEAQRTPKRRWGSGRRPRPRPFSDYGQLASRSLSIPEDSVAADPQ

SEQ ID NO: 789688 - protein, 200 aa, Homo sapiens
SSWAVESDSSCTCSSLPSPIVQDVLSKDSCDPNAGSQLTFDPEQPPTPLRPTTPKPQSPQSPQSPGAGSASCHSNHSALSANSEESEGRAEEPAQREPGPVSLQDPLEATHGDEGSKDLLVNIGVAAGPEEKEKEEVRAAARSLMWATLLREGSLHRCCPWSLTCQGQWPSADLVALTVLVGMGVVKLLFTKFRSNLYLL

SEQ ID NO: 789689 - protein, 85 aa, Homo sapiens
SFTTADPSADGQADSPLLGARGLPVPVPLACLPGPLSVRPGVPGVFGWTRGCASAWANADATVRVCQTSVPQKSAGVRAHPCTRM

SEQ ID NO: 789690 - protein, 102 aa, Homo sapiens
RHSTGLLGKGPLKTFDLPLPSRPSVSEPQKPVHEGLGSLCDPGVGPHERPLLFPRTLPSSPSKSLSQLSPSALILLQEALFILFSSVSSIFHVLMIFFSKCC

SEQ ID NO: 789691 - protein, 374 aa, Homo sapiens
MAAPPRPAPSPPAPRRLDTSDVLQQIMAITDQSLDEAQARKHALNCHRMKPALFSVLCEIKEKTVVSIRGIQDEDPPDAQLLRLDNMLLAEGVCRPEKRGRGGAVARAGTATPGGCPNDNSIEHSDYRAKLSQIRQIYHSELEKYEQACREFTTHVTNLLQEQSRMRPVSPKEIERMVGAIHGKFSAIQMQLKQSTCEAVMTLRSRLLDARRKRRNFSKQATEVLNEYFYSHLNNPYPSEEAKEELARKGGLTISQVSNWFGNKRIRYKKNMGKFQEEATIYTGKTAVDTTEVGVPGNHASCLSTPSSGSSGPFPLPSAGDAFLTLRTLASLQPPPGGGCLQSQAQGSWQGATPQPATASPAGDPGSINSSTSN

SEQ ID NO: 789692 - protein, 209 aa, Homo sapiens
MRPVSPKEIERMVGAIHGKFSAIQMQLKQSTCEAVMTLRSRLLDARRKRRNFSKQATEVLNEYFYSHLNNPYPSEEAKEELARKGGLTISQVSNWFGNKRIRYKKNMGKFQEEATIYTGKTAVDTTEVGVPGNHASCLSTPSSGSSGPFPLPSAGDAFLTLRTLASLQPPPGGGCLQSQAQGSWQGATPQPATASPAGDPGSINSSTSN

SEQ ID NO: 789693 - protein, 209 aa, Homo sapiens; identical to SEQ ID NO: 789692

SEQ ID NO: 789694 - protein, 145 aa, Homo sapiens
MRPVSPKEIERMVGAIHGKFSAIQMQLKQSTCEAVMTLRSRLLDARRKRRNFSKQATEVLNEYFYSHLNNPYPSEEAKEELARKGGLTISQVSNWFGNKRIRYKKNMGKFQEEATIYTGKTAVDTTEVGVPGNHASCLSTPSSGE

SEQ ID NO: 789695 - protein, 76 aa, Homo sapiens
QSRKHHITQLQTINRRVEITKIDMVLVQKHKHIDQCNRIENPEIKLHTNSHIIFNKGNLSNGEKTPYSINGARIAV

SEQ ID NO: 789696 - protein, 117 aa, Homo sapiens
SDKSQGSWRSQPGMRGPLRLPCPVLKLSPESCVSVAQAVPSCARLRTVRNNTQNFKEIKHSNKGFLAKQFYFCTEGCLSLASRHESTPEQRDTRAFIPDASPAPVPSPHWPGSGHTI

SEQ ID NO: 789697 - protein, 101 aa, Homo sapiens
MKTAGSQEHEESVCVYVYVVCVYVVCVYVCNVCMLCVCIVCLCVCKGGAPGEDGRVGRAVVCVSGEKERPLALTCSAGITAVYVVCVCLCVVCVWCVCKSY

SEQ ID NO: 789698 - protein, 110 aa, Homo sapiens
VTRQNMSPASSCQGEPVSVHWDGQSLFTNSLGESVTNNPVSTLSYCLLNMMCVRQLANTAINPGVPHISDENTEAQLRWLLQSDSEVAGDSHICGAESQCLCSLSLCQML

SEQ ID NO: 789699 - protein, 63 aa, Homo sapiens
MRTNAGRVLTPRPSPPCALCTCSMPRLHISSGCLSRCSSPFSMLFCTPGNSLAGSTPRGSCPL

SEQ ID NO: 789700 - protein, 215 aa, Homo sapiens
MDKVQSGFLILFLFLMECQLHLCLPYADGLHPTGNITGLPGSKRSQPPRNITKEPKVFFHKTQLPGIQGAASRSTAASPTNPMKFLRNKAIIRHRPALVKVILISSVAFSIALICGMAISYMIYRLAQAEERQQLESLYKNLRIPLLGDEEEGSEDEGESTHLLPENENELEKFIHSVIISKRSKNIKKKLKEEQNSVTENKTKNASHNGKMEDL

SEQ ID NO: 789701 - protein, 111 aa, Homo sapiens
LVNCTQATCRTLSPEIPTGGGKSKQLRSHPEFSTHFWGDLGRNVGMLHPLIFFSRCCSSAQRGTEHCGIFNLHQCSLPKHQMSLLAMLHPCSYPPCLPSFSSFCLHRTRQP

SEQ ID NO: 789702 - protein, 148 aa, Homo sapiens [sequence omitted]

SEQ ID NO: 789703 - protein, 272 aa, Homo sapiens
MDAGVTESGLNVTLTIRLLMHGKEVGSIIGKKGESVKRIREESGARINISEGNCPERIITLTGPPMPSFKAFAMIIDKLEEDINSSMTNKYRGSRPPVTLRLVVPATQCGSLIGKGGCKIKEIRESTGAQVQVAGDMLANFTERAITIRWRARSLVTEWWFKQICLVMLETLSQSPQGRVMTIPYQPTAGSSPVICAGGKIGGSDAAGYPHATHDLEGPPLDAYSISGQHTISPSIWQAEPVGDNSFTCMMPGTDSRNYQSPGKPGSGVSNP

SEQ ID NO: 789704 - protein, 271 aa, Homo sapiens
MDAGVTESGLNVTLTIRLLMHGKEVGSIIGKKGESVKRIREESGARINISEGNCPERIITLTGPPMPSLRLRYDHRQAGGRYQQLHDQQYRGSRPPVTLRLVVPATQCGSLIGKGGCKIKEIRESTGAQVQVAGDMLANFTERAITIRWRARSLVTEWWFKQICLVMLETLSQSPQGRVMTIPYQPTAGSSPVICAGGKIGGSDAAGYPHATHDLEGPPLDAYSISGQHTISPSIWQAEPVGDNSFTCMMPGTDSRNYQSPGKPGSGVSNP

SEQ ID NO: 789705 - protein, 33 aa, Homo sapiens
MYTQGHSDEQLTTMLPYEGSSRPPWAGVLWATH

SEQ ID NO: 789706 - protein, 117 aa, Homo sapiens
PFSLIGSGNFPTRSNTGLGVLKVKPQSIQHQASCNILPLSVKSIAVSFHYYYQRPYCHLSVKSLNIGGTCVFTAQKNRAGAGTTLWSQAHEPLPSGKALSAHPYFGSLPGGPQVCFQ

SEQ ID NO: 789707 - protein, 281 aa, Homo sapiens
MANSTGLNASEVAGSLGLILAAVVEVGALLGNGALLVVVLRTPGLRDALYLAHLCVVDLLAAASIMPLGLLAAPPPGLGRVRLGPAPCRAARFLSAALLPACTLGVAALGLARYRLIVHPLRPGSRPPPVLVLTAVWAAAGLLGALSLLGPPPAPPPAPARCSVLAGGLGPFRPLWALLAFALPALLLLGAYGGIFVVARRAALRPPRPARGSRLRSDSLDSRLSILPPLRPRLPGGKAALAPALAVGQFAACWLPYGCACLAPAARAAEAEAAVTWVAYS

SEQ ID NO: 789708 - protein, 69 aa, Homo sapiens
MNFKSDSQLYEDTLAGRSVLIKNLTPQTLQPRWTGPYLVIYSTPTAVRLQDPPHWVHRSRIKLCPSEKK

SEQ ID NO: 789709 - protein, 127 aa, Homo sapiens
GSNHCIPPGFAPLRFPASGPRPVPEAPRLTSVSVSPSPCHLHWGLAHSHSGLCRKPCPPPTLFDLPFQSRSPREGRSLLPPVLQLRMVTPETLLRLLPRHPSSRLSRWWRSSPGLRASVPASLPSPY

SEQ ID NO: 789710 - protein, 165 aa, Homo sapiens; identical to SEQ ID NO: 771852

SEQ ID NO: 789711 - protein, 165 aa, Homo sapiens; identical to SEQ ID NO: 771852

SEQ ID NO: 789712 - protein, 67 aa, Homo sapiens
TVPTLLGFKTHKGGPPPAAPSLKSSRPTLQTTRTPKSCAASPAADGHHWEGVEKAHYDGQFRTNPLE

SEQ ID NO: 789713 - protein, 97 aa, Homo sapiens
ENSEPHRRLIKANIWRCQWQMPNYAESDEWTRSYLGLSSNPQLDLPLPRATGFPLSRHHPGLQRAGHFCSSTTSPSHPNQPLPQDLLPHPQGRGGPG

SEQ ID NO: 789714 - protein, 77 aa, Homo sapiens
RSEIQVLPASAVLRVARRGSFALPCPSPHAPDSTVLRSPSHSSAQYSRIPAGSGPHHGQIPHPTFTLRQSIAHIASG

SEQ ID NO: 789715 - protein, 34 aa, Homo sapiens
PKCWDYRREALFPAVGPFSKATSSSAIIQNNTDS

SEQ ID NO: 789716 - protein, 144 aa, Homo sapiens
MKSTVYPLNLIPLADFTSGGHHPLHNTNTWPYPSVPPPRDLKMPGGNYGTQIELGLLVCVTPPHMLGSLEQGRKRRGKRGKVTCRLESVSRPPSARGKPPRPRLCLPGGGWRRGATRSTPGAAGRGAPRAGIRRTRPGSAHRAG

SEQ ID NO: 789717 - protein, 106 aa, Homo sapiens
HQKKCHELSRETCISAVLPPLSLCPQHYIREATREHSHCSSLCRFPNDVCVLSFPGKSLQLPTQTQQCMLESISIDFIMPSIPVDGNHLESPRLYSYPSSTRVIHM

SEQ ID NO: 789718 - protein, 104 aa, Homo sapiens
MGRLSQLGLPQHQTLHGLNNRTLFLTVLEAGKSKLEGAGQSRSRRLGPSLACRGLSSRGVTTRLSLVCARGEISPSLIRSLIQPGVVAHACNPSTLGGQGGRIT

SEQ ID NO: 789719 - protein, 114 aa, Homo sapiens
GDLPESHRGGLGTPPSLALPAAHPHQALYSKSESSTFCVRLCQACYLCWPLGLELRFSAPPRWSAEGWSASAASSPAAPRPRSQARADPGAPGSGGGWKRTLGLSCATRPYRAA

SEQ ID NO: 789720 - protein, 68 aa, Homo sapiens
GSLTLGEFGCHVVRTLSSPMEKCTWGGTEVSCQQPAVSCPPHVSHFGSGAPVEPPDDGSPSRPLYCNA

SEQ ID NO: 789721 - protein, 174 aa, Homo sapiens
RTGRLPGFGGAFVSSCCGSSRSSLYCSVYSAPRGPASVTPLSAGIGRCTAKMPGPPGSLEMGPLTFRDVAIEFSLEEWQCLDTAQRNLYRKVMFENYRNLVFLGIAVSKPHLITCLEQGKEPWNRKRQEMVAKPPESYCVAQADLELLVSSYLTALASLKMWDYRNNPLCQATM

SEQ ID NO: 789722 - protein, 388 aa, Homo sapiens
RTGRLPGFGGAFVSSCCGSSRSSLYCSVYSAPRGPASVTPLSAGIGRCTAKMPGPPGSLEMGPLTFRDVAIEFSLEEWQCLDTAQRNLYRKVMFENYRNLVFLGIAVSKPHLITCLEQGKEPWNRKRQEMVAKPPVIYSHFTEDLWPEHSIKDSFQKVILRGYGKCGHENLQLRISCKSVDESKVFKEGYNELNQCLRTTQSKIFQCDKYVKVFHKFSNSNSHKKRNTGKKVFKCKECGKSFCMLSHLTQHIRIHTRENSYKCEECGKVLNWFSELIKHKGIHMGEKPYKCEECGKAFNQSSTLIKHKKIHIEEKPFKCEECGKAFSLFSILSKHKIIHTGDKPYKCDECHKAFNWFATLTNHKRIHTGEKPFKCEECGKDFNQFSNL

SEQ ID NO: 789723 - protein, 328 aa, Homo sapiens
MGPLTFRDVAIEFSLEEWQCLDTAQRNLYRKVMFENYRNLVFLGIAVSKPHLITCLEQGKEPWNRKRQEMVAKPPVIYSHFTEDLWPEHSIKDSFQKVILRGYGKCGHENLQLRISCKSVDESKVFKEGYNELNQCLRTTQSKIFQCDKYVKVFHKFSNSNSHKKRNTGKKVFKCKECGKSFCMLSHLTQHIRIHTRENSYKCEECGKVLNWFSELIKHKGIHMGEKPYKCEECGKAFNQSSTLIKHKKIHIEEKPFKCEECGKAFSLFSILSKHKIIHTGDKPYKCDECHKAFNWFATLTNHKRIHTGEKPFKCEECGKDFNQFSNL

SEQ ID NO: 789724 - protein, 259 aa, Homo sapiens
MVAKPPVIYSHFTEDLWPEHSIKDSFQKVILRGYGKCGHENLQLRISCKSVDESKVFKEGYNELNQCLRTTQSKIFQCDKYVKVFHKFSNSNSHKKRNTGKKVFKCKECGKSFCMLSHLTQHIRIHTRENSYKCEECGKVLNWFSELIKHKGIHMGEKPYKCEECGKAFNQSSTLIKHKKIHIEEKPFKCEECGKAFSLFSILSKHKIIHTGDKPYKCDECHKAFNWFATLTNHKRIHTGEKPFKCEECGKDFNQFSNL

SEQ ID NO: 789725 - protein, 451 aa, Homo sapiens
RTGRLPGFGGAFVSSCCGSSRSSLYCSVYSAPRGPASVTPLSAGIGRCTAKMPGPPGSLEMGPLTFRDVAIEFSLEEWQCLDTAQRNLYRKVMFENYRNLVFLGIAVSKPHLITCLEQGKEPWNRKRQEMVAKPPGRTGRELWLRELELSHRTASETTVKDKVCRPACVAINGCLPPGLWKGTVSPRLWLGGVWDDYEIIYSHFTEDLWPEHSIKDSFQKVILRGYGKCGHENLQLRISCKSVDESKVFKEGYNELNQCLRTTQSKIFQCDKYVKVFHKFSNSNSHKKRNTGKKVFKCKECGKSFCMLSHLTQHIRIHTRENSYKCEECGKVLNWFSELIKHKGIHMGEKPYKCEECGKAFNQSSTLIKHKKIHIEEKPFKCEECGKAFSLFSILSKHKIIHTGDKPYKCDECHKAFNWFATLTNHKRIHTGEKPFKCEECGKDFNQFSNL

SEQ ID NO: 789726 - protein, 32 aa, Homo sapiens
MSIRVTQKSYKVSTSGPRAFSSRSYTSGPGSR

SEQ ID NO: 789727 - protein, 127 aa, Homo sapiens
LPGECPSFSHCQQKTLPQPGTEHESGESMMLCDLSFVICCYCALSHPSRLEILTTPSRRPDWILPIQKTFPPSQVQREVVNRATLSKYAHLGSSIFQVLRKQRLRVTPHSQHILLLGQTLWEEPSTA

SEQ ID NO: 789728 - protein, 48 aa, Homo sapiens
RPCCSSALIPYQGKQVLLEDMAQDTLTAASEKKVRDSAGPTDNGCQVI

SEQ ID NO: 789729 - protein, 129 aa, Homo sapiens
MPQPLGAVCQSQAFPLSVLSVPLPQRGHVPPASPFQAWNQFRCSQSHPLMSGLQLGRMTLKRWGARRAQQRLISQGLTAVFIHVNVIPTIRTFLSCCFPLLVPHCFLCYDRVFRTITAAATATPPVRLC

SEQ ID NO: 789730 - protein, 85 aa, Homo sapiens
GLLLNLRSLGICVGCPRAVAGAGSPGLTENEQEEQPDQVRVIGSLLTQPAGVPLCCPRRDPASSPHTAVGLRTPWVQIHICPRQP

SEQ ID NO: 789731 - protein, 85 aa, Homo sapiens; identical to SEQ ID NO: 789730

SEQ ID NO: 789732 - protein, 34 aa, Homo sapiens
MSGARRWLLPAPTTASAGIFRLGGPPALRRTGST

SEQ ID NO: 789733 - protein, 81 aa, Homo sapiens
  misc_feature (14)..(14): Xaa can be any naturally occurring amino acid
  misc_feature (22)..(22): Xaa can be any naturally occurring amino acid
VYCMVFGAPVFLKXKILFRRRXSGFAEQQPHCSEDEDADEDPDRKKGRKSILIVPLAKPQSRRARGGAQQAAAPMGCICSL

SEQ ID NO: 789734 - protein, 57 aa, Homo sapiens
MEPCSITQAGVQWCNFGSLQPPPPGFKQFSCLSPISFKDAAYIGRENLEHKVKLPII

SEQ ID NO: 789735 - protein, 126 aa, Homo sapiens
MRIATTLAAEAAALPARHHRLLCLFPSLSPGPCIDLARAAPHCACQLSHALRLSTAGRQGQTSRGKRKQPAQTGTARVLFDQHWNWKLGFEEVKSKYNIVFYNCLLLLHPSQRTLYLKLPVDTNCT

SEQ ID NO: 789736 - protein, 109 aa, Homo sapiens
MKLFRKLLDREGGHKTCFTPVAYNYHKHHFLFSESILTANYMVTLWIEKPKTLEQESFKGVMVVCDCVHSSKSFLVCINQKMKLRPYCWEEQSSLHYLVTTKEKELRFH

SEQ ID NO: 789737 - protein, 225 aa, Homo sapiens
MGPALWAPPHGAWGGRCPWLHGGWWQHRRMAAAATTCRTPHGVQGLPELLSESCTSLRGAQCPVICRGGNGLGATNLLDIRLSLTPQYAPALCPHSLLDPRALWPQSEAQRLWVHGGWAEEAGLMCLTSAPSLCCSFTWSAARTDRNVISVLSGQVVEMFDRQFQELYLTRSSYLTRSCTLTRSCTLTPIAVPQHVCCTSPSKLYLSRSCASPVPVLAGIPLEST

SEQ ID NO: 789738 - protein, 303 aa, Homo sapiens
PTTTKFAASSTTEMRPERQPQTREQDRAHQTGETVTGSGTQTQAGATQTVEQDSSHQTGRTSKQTQEATNDQNRGTETHGQGRSQTSQAVTGGHAQIQAGTHTQTPTQTVEQDSSHQTGSTSTQTQESTNGQNRGTEIHGQGRSQTSQAVTGGHTQIQAGSHTETVEQDRSQTVSHGGAREQGQTQTQPGSGQRWMQVSNPEAGETVPGGQAQTGASTESGRQEWSSTHPRRCVTEGQGDRQPTVVGEEWVDDHSRETVILRLDQGNLHTSVSSAQGQDAAQSEEKRGITARELYSYLRSTKP

SEQ ID NO: 789739 - protein, 438 aa, Homo sapiens
MPQLLQNINGIIEAFRRYARTEGNCTALTRGELKRLLEQEFADVIVKPHDPATVDEVLRLLDEDHTGTVEFKEFLVLVFKVAQACFKTLSESAEGACGSQESGSLHSGASQELGEGQRSGTEVGRAGKGQHYEGSSHRQSQQGSRGQNRPGVQTQGQATGSAWVSSYDRQAESQSQERISPQIQLSGQTEQTQKAGEGKRNQTTEMRPERQPQTREQDRAHQTGETVTGSGTQTQAGATQTVEQDSSHQTGRTSKQTQEATNDQNRGTETHGQGRSQTSQAVTGGHAQIQAGTHTQTPTQTVEQDSSHQTGSTSTQTQESTNGQNRGTEIHGQGRSQTSQAVTGGHTQIQAGSHTETVEQDRSQTVSHGGAREQGQTQTQPGSGQRWMQVSNPEAGETVPGGQAQTGASTESGRQEPDQPGCDRRTCSDTGRDTHHSH

SEQ ID NO: 789740 - protein, 495 aa, Homo sapiens
MPQLLQNINGIIEAFRRYARTEGNCTALTRGELKRLLEQEFADVIVKPHDPATVDEVLRLLDEDHTGTVEFKEFLVLVFKVAQACFKTLSESAEGACGSQESGSLHSGASQELGEGQRSGTEVGRAGKGQHYEGSSHRQSQQGSRGQNRPGVQTQGQATGSAWVSSYDRQAESQSQERISPQIQLSGQTEQTQKAGEGKRNQTTEMRPERQPQTREQDRAHQTGETVTGSGTQTQAGATQTVEQDSSHQTGRTSKQTQEATNDQNRGTETHGQGRSQTSQAVTGGHAQIQAGTHTQTPTQTVEQDSSHQTGSTSTQTQESTNGQNRGTEIHGQGRSQTSQAVTGGHTQIQAGSHTETVEQDRSQTVSHGGAREQGQTQTQPGSGQRWMQVSNPEAGETVPGGQAQTGASTESGRQEWSSTHPRRCVTEGQGDRQPTVVGEEWVDDHSRETVILRLDQGNLHTSVSSAQGQDAAQSEEKRGITARELYSYLRSTKP

SEQ ID NO: 789741 - protein, 295 aa, Homo sapiens
MARTEMRPERQPQTREQDRAHQTGETVTGSGTQTQAGATQTVEQDSSHQTGRTSKQTQEATNDQNRGTETHGQGRSQTSQAVTGGHAQIQAGTHTQTPTQTVEQDSSHQTGSTSTQTQESTNGQNRGTEIHGQGRSQTSQAVTGGHTQIQAGSHTETVEQDRSQTVSHGGAREQGQTQTQPGSGQRWMQVSNPEAGETVPGGQAQTGASTESGRQEWSSTHPRRCVTEGQGDRQPTVVGEEWVDDHSRETVILRLDQGNLHTSVSSAQGQDAAQSEEKRGITARELYSYLRSTKP

SEQ ID NO: 789742 - protein, 348 aa, Homo sapiens
MSAAFPPSLMMMQRPLGSSTAFSIDSLIGSPPQPSPGHFVYTGYPMFMPYRPVVLPPPPPPPPALPQAALQPALPPAHPHHQIPSLPTGFCSSLAQGMALTSTLMATLPGGFSASPQHQEAAAARKFAPQPLPGGGNFDKAEALQADAEDGKGFLAKEGSLLAFSAAETVQASLVGAVRGQGKDESKVEDDPKGKEESFSLESDVDYSSDDNLTGQAAHKEEDPGHALEETPPSSGAAGSTTSTGKNRRRRTAFTSEQLLELEKEFHCKKYLSLTERSQIAHALKLSEVQVKIWFQNRRAKWKRVKAGNANSKTGEPSRNPKIVVPIPVHVSRFAIRSQHQQLEQARP

SEQ ID NO: 789743 - protein, 236 aa, Homo sapiens
VEDEARLCRWASGGHSEPPNKRGLVEGGRLAPGDQLLPWATYLSDDAFGRGRLCRSAVTWGPVGAVRGQGKDESKVEDDPKGKEESFSLESDVDYSSDDNLTGQAAHKEEDPGHALEETPPSSGAAGSTTSTGKNRRRRTAFTSEQLLELEKEFHCKKYLSLTERSQIAHALKLSEVQVKIWFQNRRAKWKRVKAGNANSKTGEPSRNPKIVVPIPVHVSRFAIRSQHQQLEQARP

SEQ ID NO: 789744 - protein, 45 aa, Homo sapiens
ERGRSVEAAAGTAQRTGTRPAAWVRFAGRGSPAVQSEEHVAISNH

SEQ ID NO: 789745 - protein, 105 aa, Homo sapiens
MRRDHATALQPGPQREAPSQKKKKEREKERKKKKERKRKKKKEREKEKGRKKEREKEERRERKKERKKERKKERKKEREKRRNKGKERKENLMPRSMVHGKIVFH

SEQ ID NO: 789746 - protein, 109 aa, Homo sapiens
RGSSILVAQLDERTFSVVQHVNTTYPKSKAGNAFIARGILYVTDTKDMRVTFAFDLLGGKQINANFDLRTSQSVLAMLAYNMRDQHLYSWEDGHLMLYPVQFLSTTLNQ

SEQ ID NO: 789747 - protein, 109 aa, Homo sapiens; identical to SEQ ID NO: 789746

SEQ ID NO: 789748 - protein, 73 aa, Homo sapiens
IVNLEEGGDCYRCLSTPLLEKAMSLNMVLLIVTVRNLKKQEVETKRGKSQWKLTFALILIAPVRQACYVSGKW

SEQ ID NO: 789749 - protein, 120 aa, Homo sapiens
MDSSSSGVSDWRDASGRGSFPGAPAFVMVDAPLRCHLLRRTSCSVLDRWAPVGPPRLEMNLKGTPCLGDLSQAGQRNNQTTVSAWRLQSFAQGPSEGGLGKTSWGLGQLSKMDKESNHLC

SEQ ID NO: 789750 - protein, 118 aa, Homo sapiens
LVAPACNPSTLGGRGRQIMRSGDQDQPGQHGETPSLLKYTKKVRYGGAPVFPGTHKRLRQEDPLKPGGKRCSELRSCHCTPASAIEQDPVSKKQKTCKKHSYCACDEREFGGEIICLL

SEQ ID NO: 789751 - protein, 76 aa, Homo sapiens
  misc_feature (27)..(27): Xaa can be any naturally occurring amino acid
PGGRMDPLTSTKDGLHHSGPSMAENHXSLKTYTLKTIRYYAYSLVLINLEELKIFPNRSLHKGSCYLKPHYNNYYY

SEQ ID NO: 789752 - protein, 108 aa, Homo sapiens
IKAPSFPDTFRVESRHRIYSLWYSVRSREPPTEENAYVSLSPWTNTRMYSPMRSTSQKELADRLGKSSHCPHNVCGPWRGCPGELDCFQCLCLGGASSIGAFLVSEVC

SEQ ID NO: 789753 - protein, 82 aa, Homo sapiens
RHTYAGVHTSTYAHMRTHTCTDMHTCMQLCTCVQAYTHTCTHTHACIHMHTHTCTGIHMHTHVPTRPAWPPRLQATLIPATS

SEQ ID NO: 789754 - protein, 108 aa, Homo sapiens
PHIGPSCFQLLQRAFAAKASSSPLLRPSMATPTQTPTKAPEEPDPFYYDYNTVQTVGMTLATILFLLGILIVISKKVKCRKADSRSESPTCKSCKSELPSSAPGGGGV

SEQ ID NO: 789755 - protein, 145 aa, Homo sapiens
PHIGPSCFQLLQRAFAAKASSSPLLRPSMATPTQTPTKAPEEPDPFYYDYNTVQTVGMTLATILFLLGILIVISKCDPFLGCLSLRFLCWLSSISYPLCPVFLFCLSLPTGKKVKCRKADSRSESPTCKSCKSELPSSAPGGGGV

SEQ ID NO: 789756 - protein, 66 aa, Homo sapiens
DAVAQSTRIIYGGSVTGATCKELASQPGVDGFLVGGASLKPEFVDIINAKTMSPIHLPYPSCQARD

SEQ ID NO: 789757 - protein, 112 aa, Homo sapiens [sequence omitted]

SEQ ID NO: 789758 - protein, 71 aa, Homo sapiens
GSSPWLHTPCLLHDPVGQVAALQGRESGDKDPEFHSPVTISKLLSMAGPPFSRWYWEGLHQDMIRGPFLLQ

SEQ ID NO: 789759 - protein, 67 aa, Homo sapiens
SQRARKENWHNMEERHARSSDFRQFILKLAQSSSFQDNKQRLFQEKFKMATQRADERQHRRKSSEKL

SEQ ID NO: 789760 - protein, 105 aa, Homo sapiens
SEGSRRSRRQGSSVSQDSDSEGHSEDSERWSGSASRNHHGSAQEQLRDGSRHPRSHQEDRAGHGHSADSSRQSGTRHTQTSSGGQAASSHEQARSSAGERHGSHH

SEQ ID NO: 789761 - protein, 96 aa, Homo sapiens
EWNAMVRSRMEWNEMEWNGMEWNGIGWNEPVSIGMEWNGMEWYGMEWVQLEWNGKEWNQHRVEWHGMEWNGMEWNGMEWNGMEWNGMEWHRMEWNQ

SEQ ID NO: 789762 - protein, 73 aa, Homo sapiens
QGDSGGPLVCDKDGLWYQVGIVSWGMDCGQPNRPGVYTNISVYFHWIRRVMSHSTPRPNPSQLLLLLALLWAP

SEQ ID NO: 789763 - protein, 144 aa, Homo sapiens
EKQSTTPGKTKARQEKQSHGPAWFSSEQGVYHHHVNSRGRSNPRESHSDGYEWGAQVCSGEGRPYRVTCSPWSPGKVSSPKPIPKWPLGLALRRARQRLWEVGGITPEVTHALIGSVCVPTQISSSIVVPISPTCRGRNPVGRN

SEQ ID NO: 789764 - protein, 109 aa, Homo sapiens
NIRVLPETLESGVVRLESRLQSVEEWTGDQEILEFSSETNWGSTIQFNSDPKEEESAPDVVATVRTVLENDPIGQCKRDCREEETTAEKPDEEIKLNINYLKNIPRSDC

SEQ ID NO: 789765 - protein, 473 aa, Homo sapiens
MAPNLKGRPRKKKPCPQRRDSFSGVKDSNNNSDGKAVAKVKCEARSALTKPKNNHNCKKVSNEEKPKVAIGEECRADEQAFLVALYKYMKERKTPIERIPYLGFKQINLWTMFQAAQKLGGYETITARRQWKHIYDELGGNPGSTSAATCTRRHYERLILPYERFIKGEEDKPLPPIKPRKQENSSQENENKTKVSGTKRIKHEIPKSKKEKENAPKPQDAAEVSSEQEKEQETLISQKSIPEPLPAADMKKKIEGYQEFSAKPLASRVDPEKDNETDQGSNSEKVAEEAGEKGPTPPLPSAPLAPEKDSALVPGASKQPLTSPSALVDSKQESKLCCFTESPESEPQEASFPSFPTTQPPLANQNETEDDKLPAMADYIANCTVKVDQLGSDDIHNALKQTPKVLVVQSFDMFKDKDLTGPMNENHGLNYTPLLYSRGNPGIMSPLAKKKLLSQVSGASPLPRYSYLSPLLY

SEQ ID NO: 789766 - protein, 229 aa, Homo sapiens
MEPNSLQWVGSPCGLHGPYIFYKAFQFHLEGKPRILSLGDFFFVRCTPKDPICIAELQLLWEERTSRQLLSSSKLYFLPEDTPQGRNSDHGEDEVIAVSEKVIVKLEDLVKWVHSDFSKWRCGFHAGPVKTEALGRNGQKEALLKYRQSTLNSGLNFKDVLKEKADLGEDEEETNVIVLSYPQYCRYRSMLKRIQDKPSSILTDQFALALGGHCSGQQEPSDPVLSGHL

SEQ ID NO: 789767 - protein, 639 aa, Homo sapiens
MEPNSLQWVGSPCGLHGPYIFYKAFQFHLEGKPRILSLGDFFFVRCTPKDPICIAELQLLWEERTSRQLLSSSKLYFLPEDTPQGRNSDHGEDEVIAVSEKVIVKLEDLVKWVHSDFSKWRCGFHAGPVKTEALGRNGQKEALLKYRQSTLNSGLNFKDVLKEKADLAPNLKGRPRKKKPCPQRRDSFSGVKDSNNNSDGKAVAKVKCEARSALTKPKNNHNCKKVSNEEKPKVAIGEECRADEQAFLVALYKYMKERKTPIERIPYLGFKQINLWTMFQAAQKLGGYETITARRQWKHIYDELGGNPGSTSAATCTRRHYERLILPYERFIKGEEDKPLPPIKPRKQENSSQENENKTKVSGTKRIKHEIPKSKKEKENAPKPQDAAEVSSEQEKEQETLISQKSIPEPLPAADMKKKIEGYQEFSAKPLASRVDPEKDNETDQGSNSEKVAEEAGEKGPTPPLPSAPLAPEKDSALVPGASKQPLTSPSALVDSKQESKLCCFTESPESEPQEASFPSFPTTQPPLANQNETEDDKLPAMADYIANCTVKVDQLGSDDIHNALKQTPKVLVVQSFDMFKDKDLTGPMNENHGLNYTPLLYSRGNPGIMSPLAKKKLLSQVSGASPLPRYSYLSPLLY

SEQ ID NO: 789768 - protein, 224 aa, Homo sapiens
MKKKIEGYQEFSAKPLASRVDPEKDNETDQGSNSEKVAEEAGEKGPTPPLPSAPLAPEKDSALVPGASKQPLTSPSALVDSKQESKLCCFTESPESEPQEASFPSFPTTQPPLANQNETEDDKLPAMADYIANCTVKVDQLGSDDIHNALKQTPKVLVVQSFDMFKDKDLTGPMNENHGLNYTPLLYSRGNPGIMSPLAKKKLLSQVSGASPLPRYSYLSPLLY

SEQ ID NO: 789769 - protein, 145 aa, Homo sapiens
SPSALVDSKQESKLCCFTESPESEPQEASFPSFPTTQPPLANQNETEDDKLPAMADYIANCTVKVDQLGSDDIHNALKQTPKVLVVQSFDMFKDKDLTGPMNENHGLNYTPLLYSRGNPGIMSPLAKKKLLSQVSGASLSSSYPY

SEQ ID NO: 789770 - protein, 172 aa, Homo sapiens
MEPNSLQWVGSPCGLHGPYIFYKAFQFHLEGKPRILSLGDFFFVRCTPKDPICIAELQLLWEERTSRQLLSSSKLYFLPEDTPQGRNSDHGEDEVIAVSEKVIVKLEDLVKWVHSDFSKWRCGFHAGPVKTEALGRNGQKEALLKYRQSTLNSGLNFKDVLKEKADLGKYDL

SEQ ID NO: 789771 - protein, 720 aa, Homo sapiens
  misc_feature (720)..(720): Xaa can be any naturally occurring amino acid
MEPNSLQWVGSPCGLHGPYIFYKAFQFHLEGKPRILSLGDFFFVRCTPKDPICIAELQLLWEERTSRQLLSSSKLYFLPEDTPQGRNSDHGEDEVIAVSEKVIVKLEDLVKWVHSDFSKWRCGFHAGPVKTEALGRNGQKEALLKYRQSTLNSGLNFKDVLKEKADLGEDEEETNVIVLSYPQYCRYRSMLKRIQDKPSSILTDQFALALGGHCSGQQEPQILYCRDTFDHPTLIENESICDEFAPNLKGRPRKKKPCPQRRDSFSGVKDSNNNSDGKAVAKVKCEARSALTKPKNNHNCKKVSNEEKPKVAIGEECRADEQAFLVALYKYMKERKTPIERIPYLGFKQINLWTMFQAAQKLGGYETITARRQWKHIYDELGGNPGSTSAATCTRRHYERLILPYERFIKGEEDKPLPPIKPRKQENSSQENENKTKVSGTKRIKHEIPKSKKEKENAPKPQDAAEVSSEQEKEQETLISQKSIPEPLPAADMKKKIEGYQEFSAKPLASRVDPEKDNETDQGSNSEKVAEEAGEKGPTPPLPSAPLAPEKDSALVPGASKQPLTSPSALVDSKQESKLCCFTESPESEPQEASFPSFPTTQPPLANQNETEDDKLPAMADYIANCTVKVDQLGSDDIHNALKQTPKVLVVQSFDMFKDKDLTGPMNENHGLNYTPLLYSRGNPGIMSPLAKKKLLSQVSGASPLPRYSYLSPLLLLIIX

SEQ ID NO: 789772 - protein, 229 aa, Homo sapiens; identical to SEQ ID NO: 789766

SEQ ID NO: 789773 - protein, 386 aa, Homo sapiens
LGFQNRLFSSDCCICIEAWHYESLYDVRLNFPLPFFQITARRQWKHIYDELGGNPGSTSAATCTRRHYERLILPYERFIKGEEDKPLPPIKPRKQENSSQENENKTKVSGTKRIKHEIPKSKKEKENAPKPQDAAEVSSEQEKEQETLISQKSIPEPLPAADMKKKIEGYQEFSAKPLASRVDPEKDNETDQGSNSEKVAEEAGEKGPTPPLPSAPLAPEKDSALVPGASKQPLTSPSALVDSKQESKLCCFTESPESEPQEASFPSFPTTQPPLANQNETEDDKLPAMADYIANCTVKVDQLGSDDIHNALKQTPKVLVVQSFDMFKDKDLTGPMNENHGLNYTPLLYSRGNPGIMSPLAKKKLLSQVSGASPLPRYSYLSPLLY

SEQ ID NO: 789774 - protein, 97 aa, Homo sapiens
FNPATRSRIVYFILSRVKYQVINNVSKFGINRLVNSGIYKAAFPLHDCKFRRQSEDPSCPNERYLLYREWAHPRSIYKKQPLDLIRKYYGEKIGIYL

SEQ ID NO: 789775 - protein, 104 aa, Homo sapiens
MDGVLGGHTYCTLLQLTRMYPGLQVYTFTERMMAYCDQIFQDETGKNRWREAEDENHLNPAGGGCSELRSHYCTPAWVTKLDSLSLKQTNKKKHFLGGRGGSCL

SEQ ID NO: 789776 - protein, 148 aa, Homo sapiens
MVQKYQSPVRVYKYPFKLIMAAYERRFPTCPLIPTFMGSDTVNEFKSEDGAVHVIERRCKLDVDAPRLLKKIAGVDYVYFVQKNSLNSRERTLHIEGHNETFSNCYTVHPENEDWTRFEQSASLDIKSFFGFESTMEKIAMKQYTSNI

SEQ ID NO: 789777 - protein, 87 aa, Homo sapiens
DSHICNCLAIACSWLLCVGLACMTGTTGVPLLPGLIHEILPYLQYQDLSSLAQYSNCAMHLYMWITSGPLHLPVPKKESQENGDPPR

SEQ ID NO: 789778 - protein, 395 aa, Homo sapiens
MAAPDGRVVSRPQRLGQGSGQGPKGSGACLHPLDSLEQKETQEQTSGQLVMLRKAQEFFQTCDAEGKGFIARKDMQRLHKELPLSLEELEDVFDALDADGNGYLTPQEFTTGFSHFFFSQNNPSQEDAGEQVAQRHEEKVYLSRGDEDLGDMGEDEEAQFRMLMDRLGAQKVLEDESDVKQLWLQLKKEEPHLLSNFEDFLTRIISQLQEAHEEKNELECALKRKIAAYDEEIQHLYEEMEQQIKSEKEQFLLKDTERFQARSQELEQKLLCKEQELEQLTQKQKRLEGQCTALHHDKHETKAENTKLKLTNQELARELERTSWELQDAQQQLESLQQEACKLHQEKEMEVYRVTESLQREKAGLLKQLDFLRCVGGHWPVLRAPPRSLGSEGPV

SEQ ID NO: 789779 - protein, 130 aa, Homo sapiens
ARGSGGAGGCLTAESRAGGAGRSTGSLHAQGHALTTAALQEAGTEPPGAIGLFVKGGAAATCHSSSMSPARASTGHLAQEKPCRSRIQSAGIQQECQENSTQVCCLLSCQVCGCTGVLLMVLFWMPGIQL

SEQ ID NO: 789780 - protein, 109 aa, Homo sapiens
SNPNSKDIQNEAKETGKLLSSQWSCHKVHALKCFTFIKVNNKRKIIRAYSLIFTFSLETNVYRSKISKVKVNFKCAKFYQIVFLVSSISLFPARLIRIEIEDICWQQQK

SEQ ID NO: 789781 - protein, 66 aa, Homo sapiens
EKEIKGIRIGKEEVKLLLFADDMIIYLENPKDSKKRLLDLIKEFSKVSGYKISVHKSVALLYTNND

SEQ ID NO: 789782 - protein, 96 aa, Homo sapiens
EAEASAPVKPSDDGSPSQRHDAASGETLSQGHPPELTLDPDPQKLQVDKAAHREQRFSLPSFSEDTTGAQRGEETSPACTAESFPKWMRPQHRRNA

SEQ ID NO: 789783 - protein, 117 aa, Homo sapiens [sequence omitted]

SEQ ID NO: 789784 - protein, 132 aa, Homo sapiens
MASRERLFELWMLYCTKKDPDYLKLWLDTFVSSYEQFLDVDFEKLPTRVDDMPPGISLLPDNILQVLRIQLLQCVQKMADGLEEQQQALSILLVKFFIILCRNLSNVEEIGTCSYINYVITMTTLYIQQLKS

SEQ ID NO: 789785 - protein, 121 aa, Homo sapiens
MLYCTKKDPDYLKLWLDTFVSSYEQFLDVDFEKLPTRVDDMPPGISLLPDNILQVLRIQLLQCVQKMADGLEEQQQALSILLVKFFIILCRNLSNVEEIGTCSYINYVITMTTLYIQQLKS

SEQ ID NO: 789786 - protein, 55 aa, Homo sapiens
FPFCCRVDDMPPGISLLPDNILQVLRIQLLQCVQKMADGLEEQQQALSILLVKFF

SEQ ID NO: 789787 - protein, 843 aa, Homo sapiens
LRGRKRFVCPASRRPAAGLRDAASSAPRGMASEGPREPESEGIKLSADVKPFVPRFAGLNVAWLESSEACVFPSSAATYYPFVQEPPVTENVYSVPGSQYLYNQPSCYRGFQTVKHRNENTCPLPQEMKALFKKKTYDEKKTYDQQKFDSERADGTISSEIKSARGSHHLSIYAENSLKSDGYHKRTDRKSRIIAKNVSTSKPEFEFTTLDFPELQGAENNMSEIQKQPKWGPVHSVSTDISLLREVVKPAAVLSKGEIVVKNNPNESVTANAATNSPSCTRELSWTPMGYVVRQTLSTELSAAPKNVTSMINLKTIASSADPKNVSIPSSEALSSDPSYNKEKHIIHPTQKSKASQGSDLEQNEASRKNKKKKEKSTSKYEVLTVQEPPRIEDAEEFPNLAVASERRDRIETPKFQSKQQPQDNFKNNVKKSQLPVQLDLGGMLTALEKKQHSQHAKQSSKPVVVSVGAVPVLSKECASGERGRRMSQMKTPHNPLDSSAPLMKKGKQREIPKAKKPTSLKKIILKERQERKQRLQENAVSPAFTSDDTQDGESGGDDQFPEQAELSGPEGMDELISTPSVEDKSEEPPGTELQRDTEASHLAPNHTTFPKIHSRRFRDYCSQMLSKEVDACVTDLLKELVRFQDRMYQKDPVKAKTKRRLVLGLREVLKHLKLKKLKCVIISPNCEKIQSKGGLDDTLHTIIDYACEQNIPFVFALNRKALGRSLNKAVPVSVVGIFSYDGAQDQFHKMVELTVAARQAYKTMLENVQQELVGEPRPQAPPSLPTQGPSCPAEDGPPALKEKEEPHYIEIWKKHLEAYSGCTLELEESLEASTSQMMNLNL

SEQ ID NO: 789788 - protein, 883 aa, Homo sapiens
LRGRKRFVCPASRRPAAGLRDAASSAPRGMASEGPREPESEGIKLSADVKPFVPRFAGLNVAWLESSEACVFPSSAATYYPFVQEPPVTEQKIYTEDMAFGASTFPPQYLSSEITLHPYAYSPYTLDSTQNVYSVPGSQYLYNQPSCYRGFQTVKHRNENTCPLPQEMKALFKKKTYDEKKTYDQQKFDSERADGTISSEIKSARGSHHLSIYAENSLKSDGYHKRTDRKSRIIAKNVSTSKPEFEFTTLDFPELQGAENNMSEIQKQPKWGPVHSVSTDISLLREVVKPAAVLSKGEIVVKNNPNESVTANAATNSPSCTRELSWTPMGYVVRQTLSTELSAAPKNVTSMINLKTIASSADPKNVSIPSSEALSSDPSYNKEKHIIHPTQKSKASQGSDLEQNEASRKNKKKKEKSTSKYEVLTVQEPPRIEDAEEFPNLAVASERRDRIETPKFQSKQQPQDNFKNNVKKSQLPVQLDLGGMLTALEKKQHSQHAKQSSKPVVVSVGAVPVLSKECASGERGRRMSQMKTPHNPLDSSAPLMKKGKQREIPKAKKPTSLKKIILKERQERKQRLQENAVSPAFTSDDTQDGESGGDDQFPEQAELSGPEGMDELISTPSVEDKSEEPPGTELQRDTEASHLAPNHTTFPKIHSRRFRDYCSQMLSKEVDACVTDLLKELVRFQDRMYQKDPVKAKTKRRLVLGLREVLKHLKLKKLKCVIISPNCEKIQSKGGLDDTLHTIIDYACEQNIPFVFALNRKALGRSLNKAVPVSVVGIFSYDGAQDQFHKMVELTVAARQAYKTMLENVQQELVGEPRPQAPPSLPTQGPSCPAEDGPPALKEKEEPHYIEIWKKHLEAYSGCTLELEESLEASTSQMMNLNL

SEQ ID NO: 789789 - protein, 320 aa, Homo sapiens
LRGRKRFVCPASRRPAAGLRDAASSAPRGMASEGPREPESEGIKLSADVKPFVPRFAGLNVAWLESSEACVFPSSAATYYPFVQEPPVTENVYSVPGSQYLYNQPSCYRGFQTVKHRNENTCPLPQEMKALFKKKTYDEKKTYDQQKFDSERADGTISSEIKSARGSHHLSIYAENSLKSDGYHKRTDRKSRIIAKNVSTSKPEFEFTTLDFPELQGAENNMSEIQKQPKWGPVHSVSTDISLLREVVKPAAVLSKGEIVVKNNPNESVTANAATNSPSCTRDPKNVSIPSSEALSSDPSYNKEKHIIHPTQKSKASQGK

SEQ ID NO: 789790 - protein, 800 aa, Homo sapiens
LRGRKRFVCPASRRPAAGLRDAASSAPRGMASEGPREPESEGIKLSADVKPFVPRFAGLNVAWLESSEACVFPSSAATYYPFVQEPPVTEKKTYDEKKTYDQQKFDSERADGTISSEIKSARGSHHLSIYAENSLKSDGYHKRTDRKSRIIAKNVSTSKPEFEFTTLDFPELQGAENNMSEIQKQPKWGPVHSVSTDISLLREVVKPAAVLSKGEIVVKNNPNESVTANAATNSPSCTRELSWTPMGYVVRQTLSTELSAAPKNVTSMINLKTIASSADPKNVSIPSSEALSSDPSYNKEKHIIHPTQKSKASQGSDLEQNEASRKNKKKKEKSTSKYEVLTVQEPPRIEDAEEFPNLAVASERRDRIETPKFQSKQQPQDNFKNNVKKSQLPVQLDLGGMLTALEKKQHSQHAKQSSKPVVVSVGAVPVLSKECASGERGRRMSQMKTPHNPLDSSAPLMKKGKQREIPKAKKPTSLKKIILKERQERKQRLQENAVSPAFTSDDTQDGESGGDDQFPEQAELSGPEGMDELISTPSVEDKSEEPPGTELQRDTEASHLAPNHTTFPKIHSRRFRDYCSQMLSKEVDACVTDLLKELVRFQDRMYQKDPVKAKTKRRLVLGLREVLKHLKLKKLKCVIISPNCEKIQSKGGLDDTLHTIIDYACEQNIPFVFALNRKALGRSLNKAVPVSVVGIFSYDGAQDQFHKMVELTVAARQAYKTMLENVQQELVGEPRPQAPPSLPTQGPSCPAEDGPPALKEKEEPHYIEIWKKHLEAYSGCTLELEESLEASTSQMMNLNL

SEQ ID NO: 789791 - protein, 81 aa, Homo sapiens
MEQPVIVAGTPVPHAHHQPREFYCYKLVLLGTFPHPEPAGSSSFRGARVAACPFRPWAASAQLDACSGSHLLPPLLSRMCS

SEQ ID NO: 789792 - protein, 90 aa, Homo sapiens
KMNAGKKGLISSKNAAGRRQDTAHELENTWSEGSPPHSGISNSNEKQPQYRGAGKTTPQSKAAGSLPRGFGEKVCCMEEFIKGSRREFWK

SEQ ID NO: 789793 - protein, 115 aa, Homo sapiens
FERPPGQVRGEWSGMEGNGMESSGIEWNGMEWNGINSIEMEWNGMEWNGVDGNGMMECNEPECRGMEWNGMQWNGVILNGTEWNGMESTRVQYNGIERNGMEWNGFNPNGMKRNG

SEQ ID NO: 789794 - protein, 184 aa, Homo sapiens [sequence omitted]

SEQ ID NO: 789795 - protein, 125 aa, Homo sapiens
RSSISHLKKAASEEKPLGVGEMEEECTLEPELAAFPKQDGGTQEYTDATLEDHRGDVQEADTLHRQLSLSQCFPLLMTEEQQNPGEQISTNIHASGEEKCYEEVQVQNEASFSTLEGEMIETSFS

SEQ ID NO: 789796 - protein, 311 aa, Homo sapiens
MEYSYLNSSAYESCMAGMDTSSLASAYADFSSCSQASGFQYNPIRTTFGATSGCPSLTPGSCSLGTLRDHQSSPYAAVPYKLFTDHGGLNEKRKQRRIRTTFTSAQLKELERVFAETHYPDIYTREELALKIDLTEARVQVWFQNRRAKFRKQERAAAAAAAAAKNGSSGKKSDSSRDDESKEAKSTDPDSTGGPGPNPNPTPSCGANGGGGGGPSPAGAPGAAGPGGPGGEPGKGGAAAAAAAAAAAAAAAAAAAAGGLAAAGGPGQGWAPGPGPITSIPDSLGGPFASVLSSLQRPNGAKAALVKSSMF

SEQ ID NO: 789797 - protein, 368 aa, Homo sapiens
ALTNNVLGAVLGCNFHHLAWRLCCIIPMSMGPSQFNHPSFISFFHLAEPSRTFSMYKMEYSYLNSSAYESCMAGMDTSSLASAYADFSSCSQASGFQYNPIRTTFGATSGCPSLTPGSCSLGTLRDHQSSPYAAVPYKLFTDHGGLNEKRKQRRIRTTFTSAQLKELERVFAETHYPDIYTREELALKIDLTEARVQVWFQNRRAKFRKQERAAAAAAAAAKNGSSGKKSDSSRDDESKEAKSTDPDSTGGPGPNPNPTPSCGANGGGGGGPSPAGAPGAAGPGGPGGEPGKGGAAAAAAAAAAAAAAAAAAAAGGLAAAGGPGQGWAPGPGPITSIPDSLGGPFASVLSSLQRPNGAKAALVKSSMF

SEQ ID NO: 789798 - protein, 109 aa, Homo sapiens
MPRPLLVPWWTLIQLGLMLSSFTCMHHSICLELEPLASEFREDACGPITVTSTLWPLWIQSRVPLLLCVFLYLPNFLQLSCVTFAISKCKPQNRQDESTYSKCRPKPCT

SEQ ID NO: 789799 - protein, 420 aa, Homo sapiens
LIMEAQRRNQLPGDPENCWSLARGKSGSVFVGDGTEPGFGAQPGSGGDRVCPGGRPRLLMAVKRRSGGFKSHSATERVERSRLARACYAEATPPETHPQPSALGQEARKATEAAERGRGAPLSPSCGGSGCPCSASRSPPGVPALRSAAELGTEAAGSRPFRPLSRSSSAACRGPRAGETGQTPEAAGGCSFDGPNTPALPFRLLKIKSLGPGATIAQPRSSTTGRRPVLQAFFTEWLRRLRPRFPAPPRRSCAHLLKSLASSGIRTKTTADITPFQRRKRKCPESQGATSGATGGGGEALPGLPTRQEAAAPGPRLPSPRATSRETPRISPGNPGQRRRPSKDRQQAETGRLGREQRDTEPPGARWERGEALGSGKLRSEWPWRTVKEPGPRGGREWTRLVRAGRRGRGGSALPELYLL

SEQ ID NO: 789800 - protein, 79 aa, Homo sapiens
AVTLHLAVTLHLAVTCPLSEAQPPPGGTQDIRSCSESPDGGWARWLTSVIPALWEAEAGGSRGQEIETIPAKTVKPRLY

SEQ ID NO: 789801 - protein, 313 aa, Homo sapiens
MQGDLKTTDLRIQAPSADLEVQAGQVDLKLPEGHMPEVAGLKGHLPKVEMPSFKMPKVDLKGPQVDVKGPKLDLKGPKAEVMAPDVEVSLPSVETDVQAPGSMLDGARLEGDLSLAHEDVAGKDSKFQGPKLSTSGFEWSSKKVSMSSSEIEGNVTFHEKTSAFPIVESVVHEGDLHDPSRDGNLGLAVGEVGMDSKFKKLHFKVPKVSFSSTKTPKDSLVPGAKSSIGLSTIPLSSSECSSFELQQVSACSEPSMQMPKVGFAGFPSSRLDLTGPHFESSILSPCEDVTLTKYQVTVPRAALAPELALEIPS

SEQ ID NO: 789802 - protein, 476 aa, Homo sapiens [sequence omitted]

SEQ ID NO: 789803 - protein, 140 aa, Homo sapiens [sequence omitted]

SEQ ID NO: 789804 - protein, 122 aa, Homo sapiens [sequence omitted]

SEQ ID NO: 789805 - protein, 140 aa, Homo sapiens [sequence omitted]

SEQ ID NO: 789806 - protein, 205 aa, Homo sapiens [sequence omitted]

SEQ ID NO: 789807 - protein, 135 aa, Homo sapiens
MRAWMFVSMQAEIWMEKQYLSQREVDLEAYFTRNHTVLQGTRFKRAIFQGQYCRNFGCCEDRDDGCVTEFYAANALCYCDKFCDRENSDCCPDYKSFCREEKEWPPHTQPWYPEGCFKDGQHYEEGSVIKENCNS

SEQ ID NO: 789808 - protein, 221 aa, Homo sapiens
MWTGYKILIFSYLTTEIWMEKQYLSQREVDLEAYFTRNHTVLQGTRFKRAIFQGQYCRNFGCCEDRDDGCVTEFYAANALCYCDKFCDRENSDCCPDYKSFCREEKEWPPHTQPWYPEGCFKDGQHYEEGSVIKENCNSCTCSGQQWKCSQHVCLVRPELIEQVNKGDYGWTAQNYSQFWGMTLEDGFKFRLGTLPPSPMLLSMNEMTVSVPSDSRMCMYL

SEQ ID NO: 789809 - protein, 155 aa, Homo sapiens
MASRSDGRGKRHATKPCPNNVEKSNRIYQCSPPYRVSSNETEIMKEIMQNGPVQAIMQVREDFFHYKTGIYRHVTSTNKESEKYRKLQTHAVKLTGWGTLRGAQGQKEKFWIAANSWGKSWGENGYFRILRGVNESDIEKLIIAAWGQLTSSDEP

SEQ ID NO: 789810 - protein, 140 aa, Homo sapiens [sequence omitted]

SEQ ID NO: 789811 - protein, 140 aa, Homo sapiens [sequence omitted]

SEQ ID NO: 789812 - protein, 142 aa, Homo sapiens
MRAWMFVSMQAEIWMEKQYLSQREVDLEAYFTRNHTVLQGCFKDGQHYEEGSVIKENCNSCTCSGQQWKCSQHVCLVRPELIEQVNKGDYGWTAQNYSQFWGMTLEDGFKFRLGTLPPSPMLLSMNEMTVSVPSDSRMCMYL

SEQ ID NO: 789813 - protein, 107 aa, Homo sapiens
RWIYEFSPLRNQTGPPRVGLLPPNALDLPWAQAGAQGIPLCSTTQQLLFKRRKTLLHAIHSHRTILYPFVRDNKTDGKSLWNLLWPWVKGRLTGAGRRKLKLTSLGF

SEQ ID NO: 789814 - protein, 154 aa, Homo sapiens
DRVMLIGTTSRPQLAEMRGLCRVYERILFMPRPDYASRYVLWKRMIEARGIQPTQHLDISALAKVSDGYTPGHILQAIQSVLSERRFLQLSKRPLVASEFLGQLVKLDPVYREEEESLKDWYFKTPLGKKSMKHRMDQLEAEEAKLDKEKKKRK

SEQ ID NO: 789815 - protein, 129 aa, Homo sapiens [sequence omitted]

SEQ ID NO: 789816 - protein, 366 aa, Homo sapiens
GNASDVVLRVQAAGTDEVRVFHAHRLLLGLHSELFLELLSNQSEAVLQEPQDCAAVFDKFIRYLYCGELTVLLTQAIPLHRLATKYGVSSLQRGVADYMRAHLAGGAGPAVGWYHYAVGTGDEALRESCLQFLAWNLSAVAASTEWGAVSPELLWQLLQRSDLVLQDELELFHALEAWLGRARPPPAVAERALRAIRYPMIPPAQLFQLQARSAALARHGPAVADLLLQAYQFHAASPLHYAKFFDVNGSAFLPRNYLAPAWGAPWVINNPARDDRSTSFQTQLGPSGHDAGRRVTWNVLFSPRWLPVSLRPVYADAAGTALPAARPEDGRPRLVVTPASSGGDAAGVSFQKTVLVGARQQGRLLV

SEQ ID NO: 789817 - protein, 160 aa, Homo sapiens
KGKHWEASGWGFHCVCTRTMKLQLDGRSPVDSNVDSKKSILGGGYRPDPAPPLGLSRRYLYCGELTVLLTQAIPLHRLATKYGVSSLQRGVADYMRAHLAGGAGPAVGWYHYAVGTGDEALRESCLQFLAWNLSAVAASTEWGAVSPELLWQLLQRSDLV

SEQ ID NO: 789818 - protein, 317 aa, Homo sapiens
IKMPRRGYSKPGSWGSFWAMLTLVGLVTLQHRLATKYGVSSLQRGVADYMRAHLAGGAGPAVGWYHYAVGTGDEALRESCLQFLAWNLSAVAASTEWGAVSPELLWQLLQRSDLVLQDELELFHALEAWLGRARPPPAVAERALRAIRYPMIPPAQLFQLQARSAALARHGPAVADLLLQAYQFHAASPLHYAKFFDVNGSAFLPRNYLAPAWGAPWVINNPARDDRSTSFQTQLGPSGHDAGRRVTWNVLFSPRWLPVSLRPVYADAAGTALPAARPEDGRPRLVVTPASSGGDAAGVSFQKTVLVGARQQGRLLV

SEQ ID NO: 789819 - protein, 39 aa, Homo sapiens
MEILHEEMDTVAGCPAGVLCREAGSIWMNELTVLCVALQ

SEQ ID NO: 789820 - protein, 112 aa, Homo sapiens
MTPALTALLCLGLSLGPRTRVQAGPFPKPTLWAEPGSVISWGSPVTIWCQGSQEAQEYRLHKEGSPEPLDRNNPLEPKNKARFSIPSMTEHHAGRYRCHYYSSAGWSEPSDP

SEQ ID NO: 789821 - protein, 82 aa, Homo sapiens
MNLSVHETSCTAPGSWEKQVPFSDVRGRRLPHLARCRAPPGHPSPSAPLPPPPVPGRRQSRLAGNYCQRSPPGSGGGRAGGG

SEQ ID NO: 789822 - protein, 131 aa, Homo sapiens
LGKEGAYQATSTGAERSQRARVPQHSSGVEAACVWWRGRLRGGCSPVGPGPGFGRCSTAKRGARKRPSLRSSRYRSREKAGIRSNTSSPSGSACWAGGGDGGGCGGGGGCHEAGAPGDKAAAPLDPRGSSC

SEQ ID NO: 789823 - protein, 1005 aa, Homo sapiens
MAPARGRLPPALWVVTAAAAAATCVSAARGEVNLLDTSTIHGDWGWLTYPAHGWDSINEVDESFQPIHTYQVCNVMSPNQNNWLRTSWVPRDGARRVYAEIKFTLRDCNSMPGVLGTCKETFNLYYLESDRDLGASTQESQFLKIDTIAADESFTGADLGVRRLKLNTEVRSVGPLSKRGFYLAFQDIGACLAILSLRIYYKKCPAMVRNLAAFSEAVTGADSSSLVEVRGQCVRHSEERDTPKMYCSAEGEWLVPIGKCVCSAGYEERRDACVACELGFYKSAPGDQLCARCPPHSHSAAPAAQACHCDLSYYRAALDPPSSACTRPPSAPVNLISSVNGTSVTLEWAPPLDPGGRSDITYNAVCRRCPWALSRCEACGSGTRFVPQQTSLVQASLLVANLLAHMNYSFWIEAVNGVSDLSPEPRRAAVVNITTNQAAPSQVVVIRQERAGQTSVSLLWQEPEQPNGIILEYEIKYYEKDKEMQSYSTLKAVTTRATVSGLKPGTRYVFQVRARTSAGCGRFSQAMEVETGKPRPRYDTRTIVWICLTLITGLVVLLLLLICKKRHCGYSKAFQDSDEEKMHYQNGQAPPPVFLPLHHPPGKLPEPQFYAEPHTYEEPGRAGRSFTREIEASRIHIEKIIGSGDSGEVCYGRLRVPGQRDVPVAIKALKAGYTERQRRDFLSEASIMGQFDHPNIIRLEGVVTRGRLAMIVTEYMENGSLDTFLRTHDGQFTIMQLVGMLRGVGAGMRYLSDLGYVHRDLAARNVLVDSNLVCKVSDFGLSRVLEDDPDAAYTTTGGKIPIRWTAPEAIAFRTFSSASDVWSFGVVMWEVLAYGERPYWNMTNRDVISSVEEGYRLPAPMGCPHALHQLMLDCWHKDRAQRPRFSQIVSVLDALIRSPESLRATATVSRCPPPAFVRSCFDLRGGSGGGGGLTVGDWLDSIRMGRYRDHFAAGGYSSLGMVLRMNAQDVRALGITLMGHQKKILGSIQTMRAQLTSTQGPRRHL

SEQ ID NO: 789824 - protein, 123 aa, Homo sapiens
DIGACLAILSLRIYYKKCPAMVRNLAAFSEAVTGADSSSLVEVRGQCVRHSEERDTPKMYCSAEGEWLVPIGKCVCSAGYEERRDACVGERAMAWAWVSRQRCLVLAGLPGCKGGRQSPQAPE

SEQ ID NO: 789825 - protein, 340 aa, Homo sapiens
PRFCRWLRRCRSKSVGAREALAAEAAAQGPSHQVHVLVSHEAQEVLETLPARGTAEALGAGTGTPASTCHRRPACVLTPRHPCQCRHGRPHLPRQPVVQHAGRIRAAGAVRGLQAAGCGREQALGGGLVDQLVPHEVLDEAEGLAAGVAAVWLLCHVDLLVTHDVKEIREVLAAVRAGVAQPIGGPCRRARGPGPTGPRCALGGGEAGCPGQGAGQLEPVHLAVAGEALRVAEDLAAELALVGPLARVHHVMLAQVEGFAEALPTHGALVGLLARVDALMALQGLAAPEAAPADAAAERLSWDAGARASRPAGPRAAEQQRVGAQERDGHSAVHHRRRGR

SEQ ID NO: 789826 - protein, 35 aa, Homo sapiens
VECSPQSVRTAPPVPMPSACGIVVLQCGQALTFGD

SEQ ID NO: 789827 - protein, 218 aa, Homo sapiens
GLLIFRDVAIEFSPEEWSYLDPAQQNLYRDVMLENYRNLVSLGIAVSKPDLITCLEQRNEPWNVKKHETVARHPAVSSHFTQDLLPEHGIKDSFQKVILRRYGSYGIENLQLKKDWESVGESKVQKECCNGLNQSLSTTHTKIFQFNKCVKVFSKSSNLNRHKIRHTGEISSNCKECDNSFYISSVLTPLQRIHTAEKSYKCKQCGKAFRHCSCFLEH

SEQ ID NO: 789828 - protein, 112 aa, Homo sapiens
MSSHCHASAMLSPMSPLQPQRCSVVCCQCFQQGVFQLFPLLHCFLMTKFILLPSQQSLICDSVMCAFGCECVCVCIHLREKTDFIISLNKLAHYICYPLSNKNRNCVIWTKW

SEQ ID NO: 789829 - protein, 110 aa, Homo sapiens
VRTGSCGVPAAVTPAAGPRRPPRLPLPLRAGRAPGRRSVLGAPRCCLCLGFSRPLGLFVSAVLRLSSVSLGPSLPRRALAGRLVARGGGGLGAGRDERRLHELRERRAGG

SEQ ID NO: 789830 - protein, 78 aa, Homo sapiens
YSLSLFHSSGKVPGEDVERSPVGSRARIRLKTVIQVRLLTLGQLSAIWTAKPRGQIPLRGQLLHLCKAGFHLLSGPGT

SEQ ID NO: 789831 - protein, 154 aa, Homo sapiens
LQSQVLACPCCPPDHLVLPATLPAPLSPRDSLAASTCWPLPAHPLSKPALPLSSWGGEGRPRLLPAATPTCHGAPLQHHQALPFPKQRDGTAVQISGPAPREGPRCRSQAAHLGVRGTSAPFSTRWCLSVGRERFYPSRTLFSVVLPSFKKCRI

SEQ ID NO: 789832 - protein, 76 aa, Homo sapiens
KAVNWKHRLQAAGAALSRSSGKSSLTWGPCCEQRHQPGNLFSVGDTGYPPGKPEKRPFRSDLRPSHRRVLHTPRDG

SEQ ID NO: 789833 - protein, 179 aa, Homo sapiens
PRPHTWDSRACSSLLDSQTATQTALLETRELHDHEDEWVPVGLQDMASTCRGPVQSAGVDSDSWLHPVFRSQPAPSLPRTQPFFSGTCHTARSCHSPSPEMTTLSSQSTGWGPVLCGCLSCITTICLHLEHLTRMYSPHTVKPHTKLTQITMCMVKPTQGTSDCQEIRNKIRRATEKWL

SEQ ID NO: 789834 - protein, 139 aa, Homo sapiens
TQKLPYCPGWDASSEAVTNLERLAHSRRCRAGNQGRQGSLETDTPPFFLFQYHQVVDISPKLGQLNLPSWDLNPWRSLDTQIKCSLDTSLAPGTVPWPVSHHTPSGGSSTPRSEPGCHPFPSLVPQPSHQFWAHLAPFQ

SEQ ID NO: 789835 - protein, 199 aa, Homo sapiens
MQKWSLEYIQEIAGCRTVPVEVGSRYTDEEWSQTLMTVNEFISKYIVNEPRDVGYLAQHQLFDQIPELKQDISIPDYCSLGDGEEEEITINAWFGPQGTISPLHQDPQQNFLVQVMGRKYIRLYSPQESGALYPHDTHLLHNTSQVDVENPDLEKFPKFAKAPFLSCILSPGEILFIPVKYWHYVRALDLSFSVSFWWS

SEQ ID NO: 789836 - protein, 416 aa, Homo sapiens
MAGDTHCPAEPLAREGTLWEALRALLPHSKEDLKLDLGEKVERSVVTLLQRATELFYEGRRDECLQSSEVILDYSWEKLNTGTWQDVDKDWRRVYAIGCLLKALCLCQAPEDANTVAAALRVCDMGLLMGAAILGDILLKVAAILQTHLPGKRPARGSLPEQPCTKKARADHGLIPDVKLEKTVPRLHRPSLQHFREQFLVPGRPVILKGVADHWPCMQKWSLEYIQEIAGCRTVPVEVGSRYTDEEWSQTLMTVNEFISKYIVNEPRDVGYLAQHQLFDQIPELKQDISIPDYCSLGDGEEEEITINAWFGPQGTISPLHQDPQQNFLVQVMGRKYIRLYSPQESGALYPHDTHLLHNTSQVDVENPDLEKFPKFAKAPFLSCILSPGEILFIPVKYWHYVRALDLSFSVSFWWS

SEQ ID NO: 789837 - protein, 58 aa, Homo sapiens
LPVQKPDKSYRLVQDLRLINQIVLPIHPVVPNPYTLLSSIRSSTTHYSVLHLKDAFFT

SEQ ID NO: 789838 - protein, 104 aa, Homo sapiens
PAPRAPRLGRCGLHRAALRVAARGEKKEGGGGGDVAASLGGAGAAASQTLQQCGQLQKLVGSSRSLSASPLAACAGCQQVRCVQGPHPAGDTDPGGKGVVDPGW

SEQ ID NO: 789839 - protein, 55 aa, Homo sapiens
MWLSERAASGSWFACLPFTLQPSYLLRPMLVQLNPMHILQALIMTFQQYLPSAAE

SEQ ID NO: 789840 - protein, 79 aa, Homo sapiens
YKCQCKKPIQAATWDRRALGIREVAQDNSSDHCVAATVERSAPEPVFLLWSQSLSLPFQHQLPLDHVEKRDKLSLQTSG

SEQ ID NO: 789841 - protein, 106 aa, Homo sapiens
CCSRLRVGPGSGAREKESLANQHSVLVDRPSPEAQAHLRQQRASARQQKQEESRPEDTYPGRKTCTPEDRERPSGCCVAVPSDWNTSCLQDTVKPLLSTHLVLTPF

SEQ ID NO: 789842 - protein, 111 aa, Homo sapiens
LGRLVTLIVSVLTVGFHLAGSQNRNPDALTGNVNVLAAKIAVLSSSCTIQAYVTWNLITLWLQRWVEDSNIQASCMKKKRSRSSKKRTENGVGVETSNRVDCPPKRKEKSS

SEQ ID NO: 789843 - protein, 96 aa, Homo sapiens
LTRTMGNMKVTGALPLRSTQPGILMAFRWLDHSLPTVDTTELEAASTFVLFCLLQHLALLPGLEYSGIIMADCNLDLLGLSNPAVPAPGESGRRMA

SEQ ID NO: 789844 - protein, 142 aa, Homo sapiens
CRLSDQDEEGKIKQEYIISDPSFSMVTVQREDSGITWETNSSRSSTPWASEESQTSGVCSREGSTVNSPPGNVSFIVDEVKKVRKRTHKSKHGSPSLRRKGNRKRNSFESQDVPTNKKGSPLTSASQVLTTEKEKSYTGIYD

SEQ ID NO: 789845 - protein, 244 aa, Homo sapiens
RGHGARGGKAKDKEEIPITKLGLLVKDMKIKSLEEIYLFSLPIRESEIIDFFLGASLKHKVLKIMPVQKQTRASQGTRFEAFVAIEDYNGHVGLGVKCSKEVATAICRAINILAKLSIVPVRRGYWGNKIGKPYAVPCKVTGHCGSVLVRLVAPPGDTGIVLARVPKKLLMMTGIDDCYTSARGCTATLGNFTKATFDAISKTYNYLTPDLWKETVFTKSPYREFTDHLVKTHTRVSVQRTRAP

SEQ ID NO: 789846 - protein, 91 aa, Homo sapiens
MYSHVYTGTASPQPSSPAPPRGGLDPPSSPAWRQTQGPLQDTTQHQPRNSSKAPGPLSGLGLGATREGPRGPPGRAPWVRARAGGAVPGPA

SEQ ID NO: 789847 - protein, 81 aa, Homo sapiens
TRWKSPRPSLQGDVALSVSQGSVGNGQGTFIWSHWGAGPQRMHRLEVGKGKTLLVKAGACAKTRKQDCFWELWDLTQKFRG

SEQ ID NO: 789848 - protein, 102 aa, Homo sapiens
MREQSAWLPPATPRARREEETVGAARRGPAAAAAAASQRGLCSWAPERFPQPRPPLLTPLQQSAGGAATEGAGSRSRELAPSAQSRSRRRAGGRAAAGGDGR

SEQ ID NO: 789849 - protein, 118 aa, Homo sapiens
RWLLLHGLHLALGLLAVSDHPYPRRTLDPQPGPPCLPSWMSPGPRAVLCLEGILSEGTSPVALPGTSFRATMALACFSPSLHAGSATACPGPMDVGTSRSAVAERPLALGGEAITVSY

SEQ ID NO: 789850 - protein, 46 aa, Homo sapiens
MVLAAPNSGASESPCLSRRRLHERVQKNKGTGSPMGLLIAIYQHDY

SEQ ID NO: 789851 - protein, 331 aa, Homo sapiens
MSKTFVKSKEMGELVNTPSWMDKGLGSQNEVKEEESRPGTYGMLSSLTEEHDSIEEEEEEEEDGEKPKRRGPKKKKMTKARLERFRARRVKANARERTRMHGLNDALDNLRRVMPCYSKTQKLSKIETLRLARNYIWALSEVLETGQTPEGKGFVEMLCKGLSQPTSNLVAGCLQLGPQSVLLEKHEDKSPICDSAISVHNFNYQSPGLPSPPYGHMETHLLHLKPQVFKSLGESSFGSHLPDCSTPPYEGPLTPPLSISGNFSLKQDGSPDLEKSYSFMPHYPSSSLSSGHVHSTPFQAGTPRYDVPIDMSYDSYPHHGIGTQLNTVFTE

SEQ ID NO: 789852 - protein, 180 aa, Homo sapiens
ASKIPASAVEMPGSADVTGLNVQFGALEFGSEPSLSEFGSAPSSENSNQIPISLYSKSLSEPLNTSLSMTSAVQNSTYTTSVITSCSLTSSSLNSASPVAMSSSYDQSSVHNRIPYQSPVSSSESAPGTIMNGHGGGRSQQTLDTPKTTGPPSALPSVSSCPAPPPALHFCRPHPSTLAT

SEQ ID NO: 789853 - protein, 93 aa, Homo sapiens
SYLKSVCEMAGKGVKTITSVAMTSVLLPIIQKLELQIAVANIRVCKGLDRIEERLPILNQPSTQVVANAKGAVTGAKDAVTTTVTGAKDSSQG

SEQ ID NO: 789854 - protein, 150 aa, Homo sapiens
SWTLCCVSLCILVAKHTDAGVIQSPRHEVTEMGQEVTLRCKPISGHDYLFWYRQTMMRGLELLIYFNNNVPIDDSGMPEDRFSAKMPNASFSTLKIQPSEPRDSAVYFCASSLATALQNHPFPVQKPWCFSFSFYLPAVLGKVFPVPPSP

SEQ ID NO: 789855 - protein, 110 aa, Homo sapiens
RGISGVSLPCTPQFPSGNSRMRCRDPSSTRCSSSLCQELGLSHRPSNLPFRPFPTGTDESSIRRDPSIWDFGIVGRSFTVCRGMQLSQCLLLRNSLCALPSLTPDPRPLS

SEQ ID NO: 789856 - protein, 245 aa, Homo sapiens
RSGDVMQAKMAEGEDVGWWRSWLQQSYQAVKEKSSEALEFMKRDLTEFTQVVQHDTACTIAATASVVKEKLAIAACSRGACFLCPFSIQTEGSSGATEKMKKGLSDFLGVISDTFAPSPDKTIDCDVITLMGTTVLAQLSPMMAPRARLYSLQSDPATYCNEPDGPPELFDAWLSQFCLEEKKGEISELLVGSPSIRALYTKMVPAAVSHSEFWHRYFYKVHQLEQEQALEGRPEAAGCSGDSCT

SEQ ID NO: 789857 - protein, 55 aa, Homo sapiens
CNFMFPGLDFLFNLTYLEYIDFSVCEDSCFYWISKIVTYVFKLCLFTLLSSSPIL

SEQ ID NO: 789858 - protein, 53 aa, Homo sapiens
MLNAKATTGAGQGVWAKWSSLCWEPVVSLQVMCQGQVGAEEMSLAQCCPGTGA

SEQ ID NO: 789859 - protein, 184 aa, Homo sapiens
MVRYSLDPENPTKSCKSRGSNLRVHFKNTRETAQAIKGMYIQKGTKYLKDVTLQKQCIPFRHYNGGVGRCAQAKQWGWTQGRWPKKSAEFLLHMLKNTESNAELKGLDVDSLVIEHIQVNKAPKMRRRTYRAHGRINPYMSSPCHIEMIFTEKEQIVPKPEEEVAQKKKISQKKLKKQKLMARE

SEQ ID NO: 789860 - protein, 103 aa, Homo sapiens
PQTNTLNKCLWIGRTRHGLQRQTDKVLRGKSGSISNQTVLVSWVWRRLSTTLWSSLRLTQWFKAEVEVIGTKLMLQERDEGGRMDSSALPWVSEMKIFRISAN

SEQ ID NO: 789861 - protein, 72 aa, Homo sapiens
IMINQEMEYGDHVSDGVITFFCRIEAVRGDMSHQAERSHPEIPIPRAYHLEFLLHVHINVNKGRVFSIITYK

SEQ ID NO: 789862 - protein, 83 aa, Homo sapiens
MMHTLCGHCGSKACHLPKSTCGKCGYPAKRKRKYDWCAKAKRLKATGTGRMSGVDFHKGTTPKPKRAAVAASSSSQEFICFFF

SEQ ID NO: 789863 - protein, 206 aa, Homo sapiens
AEVTASQEARGLRLSDLEDLEEEEEEEEEAEDEEVVATAGDRLTEFRKGAQSLPGPCAAAREGRLERRECGLAAPRFSFNDPSGSEEADFLSAETGSPRLTMHYPCLEKPRIWSLAHTATASAVEGAPPARLGHEVLSAVMIPGQPPASARRLSVPRDSACDESSCIPKAFGNPKFALQGLPLNCAPCPRRSEPVVQCQYPSGAEG

SEQ ID NO: 789864 - protein, 77 aa, Homo sapiens
VVLEIDTTTPPFAQRLHPGAILDWSLSSFPTSNPPVTLDAGSTSISTTLVQATNLSQLGYCNGLLPRPQRWPCSLTF

SEQ ID NO: 789865 - protein, 98 aa, Homo sapiens
PSHSPIAPIPIPPLEGPAGGGCGPHALCVPVSWSLSPESGSRQVRGEGSVRPAEGRVPAREREPGTRRAGRKLPHKRPESRTWIELKLRRRPAVTPAA

SEQ ID NO: 789866 - protein, 127 aa, Homo sapiens
QKAPGGQASRCLYQWLDIGRGTLWTPEGTGRKQGERAVDGDQGPWILVSALPQAGCVASPLWALTQKADIRVRSPLGPCGASSLRSFWIIRDHREKLLPSERLIGWAAAPRNIFREPCSLAPWHPRN

SEQ ID NO: 789867 - protein, 115 aa, Homo sapiens
SSQKYRLLSATTGWRNISERYVSGTPKGILFLSPWHRPCSTEERPGLQWSLQQSSSLWNSGSHRVTGEETKLTWEESLSFSFSPTETLYIGPTVHHKTHMLSFFLSHPHLGNPKT

SEQ ID NO: 789868 - protein, 148 aa, Homo sapiens
AAASAPPPCAPPDSLGEKRPQRDMLGRGSLHPPIPPFMTYCSIIFLGWLLGKPQDITIHRQKRPIDDCPLESSKRVWEASPETRDTKGLEDTSEDRSKVTLFTGEKAEAWRGSTLCPRSQVGYSRAGEESRLPGKENKGFIDPSPSRA

SEQ ID NO: 789869 - protein, 197 aa, Homo sapiens
MLPLVHLHLSCCRVYSCLQSAPSRPLPLSRTPHAPARAPAPRWPATRPHHHLRRPPPPPLPRPPTPPSLLLAPPHTTSPLPPHRRPGPYHHPPHHTSHPTPTPTPPAPLHTRPTPALRPPTTHTHTTPTRTTHNTHPHPPTTTPPPLTKHTTHTPAPTPPHSPHPTHTPHPPTHTPPTPPPPSPHHTLHPPHHHTPP

SEQ ID NO: 789870 - protein, 340 aa, Homo sapiens
  misc_feature (201)..(201): Xaa can be any naturally occurring amino acid
MPEQFSVAEFLAVTAEDLSSPAGAAAFAAKMPRYRGAALAREEILEGDQAILQRIKKAVRAIHSSGLGHVENEEQYREAVESLGNSHLSQNSHELSTGFLNLAVFTREVAALFKNLIQNLNNIVSFPLDSLMKGQLRDGRQDSKKQLEKAWKDYEAKMAKLEKERDRARVTGGIPCEPWGSQASPTKSERGLREPQELQTXLTSGTPFGDVLPQDPVRDALAPNPEGGGRGSHVRWSSQTGRLLGQRGNGAGGQTMGGAGARSGESTTRQVWATSMGGHKPRGEHIEPMIRPQCTQEAGHHNAGGQHLAVVTHIIALADRRVSPKNERKRREQKRRGHNN

SEQ ID NO: 789871 - protein, 353 aa, Homo sapiens
GGEAGSARSSSVPPAPRSGSSTLAPAMPEQFSVAEFLAVTAEDLSSPAGAAAFAAKMPRYRGAALAREEILEGDQAILQRIKKAVRAIHSSGLGHVENEEQYREAVESLGNSHLSQNSHELSTGFLNLAVFTREVAALFKNLIQNLNNIVSFPLDSLMKGQLRDGRQDSKKQLEKAWKDYEAKMAKLEKERDRARVTGGIPGEVAQDMQRERRIFQLHMCEYLLKAGESQMKQGPDFLQSLIKFFHAQHNFFQDGWKAAQSLFPFIEKLAASVHALHQAQEDELQKLTQLRDSLRGTLQLESREEHLSRKNSGCGYSIHQHQGNKQFGTEKVGFLYKKSDGIRRVWQKRKCGI

SEQ ID NO: 789872 - protein, 296 aa, Homo sapiens
AGGRLSAEQLSAPRAPLRQLHARARHAGAVQRRRVPGRHRGGPQLPGWGRRLRRQDAPILEGDQAILQRIKKAVRAIHSSGLGHVENEEQYREAVESLGNSHLSQNSHELSTGFLNLAVFTREVAALFKNLIQNLNNIVSFPLDSLMKGQLRDGRQDSKKQLEKAWKDYEAKMAKLEKERDRARVTGGIPGEVAQDMQRERRIFQLHMCEYLLKAGESQMKQGPDFLQSLIKFFHAQHNFFQDGWKAAQSLFPFIEKLAASVHALHQAQEDELQKLTQLRDSLRGTLQLESREVSP

SEQ ID NO: 789873 - protein, 125 aa, Homo sapiens
TGGACFLFSSPKPSKDSSFQPRVGTRNKGPPEEGWRLSREHGQGVCSPFSLPERGPGWREIHHTAHPGSASPSRGSRSGSARLPIRRHPEDGHRARGCASKPSPSPSLSGVSASVSFFKSCVTCM

SEQ ID NO: 789874 - protein, 160 aa, Homo sapiens [sequence omitted]

SEQ ID NO: 789875 - protein, 75 aa, Homo sapiens
SDVNQAPVRGNLTTQWKCEHGNQAASPLAATQGRGRGHSRKALWPQTPHKATWLGTCPSRGKSRHQGGLQLDDSS

SEQ ID NO: 789876 - protein, 101 aa, Homo sapiens
AAPAPGQAEPFRDESAPWGRCAKSSGEAPPLLGVSAARTALPPKTPGRPLPAWRGQRAPLAGRGRGRGARAGAAPEPTVHALPAALTFSLMELVDFTEYME

SEQ ID NO: 789877 - protein, 85 aa, Homo sapiens
TLGPVCGRWSSLPAPAPAFPMGLRPGLEDLPQPRLALWPGDRPGFPGPGPLRSAMDKCKMPRTPFLGSAQMGPGPASPPGRLAAA

SEQ ID NO: 789878 - protein, 36 aa, Homo sapiens
MRTPWGTAKSGRGIAAGGVWGKPAWAGAVGLGLLLG

SEQ ID NO: 789879 - protein, 163 aa, Homo sapiens
MTSAPPLPYDAPPPAAVRAPLCSPPPSLPPVRLFPLRPRSAADRLLPPVVTSGDTLSCTLRPSLSLPLPPPCLPLSTRSRFLSTLSFPPPPSSASPARLLPPAPFFTPPASPPPLPVLFALSLSPTSPPSPGSSVLVLPLSSLCSSTASLSPHFCPDRVLTSL

SEQ ID NO: 789880 - protein, 60 aa, Homo sapiens
ELLHGKRKSQQSEQTTHRVGEEDVKVVHKHEKMLNITNDQGNVNQNHIATPPYTCKNGHN

SEQ ID NO: 789881 - protein, 237 aa, Homo sapiens
VFGKEYTVGTKAMYSCSEGYHLQAGAEATAECLDTGLWSNRNVPPQCVPVTCPDVSSISVEHGRWRLIFETQYQFQAQLMLICDPGYYYTGQRVIRCQANGKWSLGDSTPTCRIISCGELPIPPNGHRIGTLSVYGATAIFSCNSGYTLVGSRVRECMANGLWSGSEVRCLAGHCGTPEPIVNGHINGENYSYRGSVVYQCNAGFRLIGMSVRICQQDHHWSGKTPFCVRKYVIHSP

SEQ ID NO: 789882 - protein, 971 aa, Homo sapiens
VFGKEYTVGTKAMYSCSEGYHLQAGAEATAECLDTGLWSNRNVPPQCVPVTCPDVSSISVEHGRWRLIFETQYQFQAQLMLICDPGYYYTGQRVIRCQANGKWSLGDSTPTCRIISCGELPIPPNGHRIGTLSVYGATAIFSCNSGYTLVGSRVRECMANGLWSGSEVRCLAGHCGTPEPIVNGHINGENYSYRGSVVYQCNAGFRLIGMSVRICQQDHHWSGKTPFCVLVSCGHPGSPPHSQMSGDSYTVGAVVRYSCIGKRTLVGNSTRMCGLDGHWTGSLPHCSGTSVGVCGDPGIPAHGIRLGDSFDPGTVMRFSCEAGHVLRGSSERTCQANGSWSGSQPECGVISCGNPGTPSNARVVFSDGLVFSSSIVYECREGYYATGLLSRHCSVNGTWTGSDPECLVINCGDPGIPANGLRLGNDFRYNKTVTYQCVPGYMMESHRVSVLSCTKDRTWNGTKPVCKALMCKPPPLIPNGKVVGSDFMWGSSVTYACLEGYQLSLPAVFTCEGNGSWTGELPQCFPVFCGDPGVPSRGRREDRGFSYRSSVSFSCHPPLVLVGSPRRFCQSDGTWSGTQPSCIDPTLTTCADPGVPQFGIQNNSQGYQVGSTVLFRCQKGYLLQGSTTRTCLPNLTWSGTPPDCVPHHCRQPETPTHANVGALDLPSMGYTLIYSCQEGFSLKGGSEHRTCKADGSWTGKPPICLEVRPNGRPINTAREPPLTQALIPGDVFAKNSLWKGAYEYQGKKQPAMLRVTGFQVANSKVNATMIDHSGVELHLAGTYKKEDFHLLLQVYQITGPVEIFMNKFKDDHWALDGHVSSESSGATFIYQGSVKGQGFGQFGFQRLDLRLLESDPESIGRHFASNSSSVAAAILVPFIALIIAGFVLYLYKHRRRPKVPFNGYAGHENTNVRATFENPMYDRNIQPTDIMASEAEFTVSTVCTAVKPPGLAATTATESPASSSRSPGGRK

SEQ ID NO: 789883 - protein, 157 aa, Homo sapiens
MEDDDIGAAIFSPYTILYDYKVLKKVTVIACDIWGISNIFTEYTLKLAQSSGVNDSTLHSTPTPIKKQQDSTVKNTGFEAMFFVTKKKKTVLLCRPGWSAVAHSWLTATSAACVKPFSCLSLPRSRDYRHPPLHPTNFCIFSRDGGLIMLATLVSNS

SEQ ID NO: 789884 - protein, 117 aa, Homo sapiens
ISLRLLPALHSHRKLYQNRPGQCVSGNPFQSPNLAGVLLQLGRWLKRQRKRLFIMAVYSQHGRSGKALLRLTSSSFHLLTKLPSDQASKEHNSDKAAGEGFPHCSAHPAHVLLSQTF

SEQ ID NO: 789885 - protein, 91 aa, Homo sapiens
MGYEIYVLGMPPPPILLQALIAWTKNPELSGRPFTVSDRGVLDRRQLYLTTSARDFRFYPKTELSGYPRKDSLTYWSFEETPQVWSHGPQR

SEQ ID NO: 789886 - protein, 165 aa, Homo sapiens
GKLKKTEIQNIEFEPKEKVQCPPTRVMILTAVKEMNGKKGVSILSIYKYVSSIYRYDVQRNRSLLKRMLKCLIFEGLVKQIKGHGFSGTFTLGKNYKEEDICDKTKKQAVGSPRKIQKETRKSGNKDTDSEYLPSDTSDDDDDPYYYYYKSRRNRSKLRKKLVPS

SEQ ID NO: 789887 - protein, 37 aa, Homo sapiens
QIVMNSLRSFWKVHILTQQVLESAFLMSTQVMFVLVL

SEQ ID NO: 789888 - protein, 126 aa, Homo sapiens
MSDHFTFLPHGELTHWGIFFPLEKCGYWKFPVIGKNRIGGALWGVLLPSSLLKASWCSGSTSDTRRRFSFILRPHSISATQISSGSGASTFRGSSSNDSSDSSHHSLFLFQQKDLCGGLGSTPGAE

SEQ ID NO: 789889 - protein, 77 aa, Homo sapiens
GEFRSHLGCGSFHLFIQQPLMLAESQAPSRVLGTQQAGRQTEPHAVEPADGQGWSVPGTWLGSGEPRRCPQEWGSWA

SEQ ID NO: 789890 - protein, 66 aa, Homo sapiens
RAKNTTSKTWLHGVVSESHLRRLLLSQFRFNTNDHVMQKDAYAYSVCIFDNRRDRLYYASSFVERQ

SEQ ID NO: 789891 - protein, 108 aa, Homo sapiens
GWRALRPGCLSGPRWRRSGEVRSPRLRAVIREIPALRWRNSDALGSVSRSLLGVRTLWADVDRAPATWVEWTDGTRLTHGPSPATYRGLPCCAFQGGNLELGGGENGA

SEQ ID NO: 789892 - protein, 82 aa, Homo sapiens
CCCSGTVKRERRQQTRGFVLQSMEEKAYKDTGICHFSTFIVVQWSGACCDVLSKIKDKFLYLVCPITKKEAQFLLGFFKFCS

SEQ ID NO: 789893 - protein, 159 aa, Homo sapiens
VTWVGRWRLPQTVRAGLEIFACSLLLCSTGNIHSVSAPRTYISFLGSSPFPFIFFLEIHRRLQLTGSSQQLRRCPVSPLCTRRVEEGTREGLILGKRTGGSPCAFLISIWARLRVEEEMFLEDVAYCSFLLGVPIERISSLLIERTDGMILTNPRRAAG

SEQ ID NO: 789894 - protein, 189 aa, Homo sapiens
MVSISRPRDPPASDSQSAGITGMSHRARWLACFLKKLQKFPNIFFQIIVGGVASTSQDMHTYAACTFLAASMKEGKQGIQRNQESVQLGAIEACVMWLLENEFIQSTEASDGTEGKVYHPTHLGSATLSSSLSPADTLDIFADLQRAMKGFVLENDLHILYLVTPMFEDWTAIDWYRLSVYGGEVATHE

SEQ ID NO: 789895 - protein, 129 aa, Homo sapiens
MVSISRPRDPPASDSQSAGITGMSHRARWLACFLKKLQKFPNIFFQIIVGGVASTSQDMHTYAACTFLAASMKEGKQGIQRNQESVQLGAIEACVMWLLENEFIQSTEASDGTEGKCDFSVAIYSLFLL

SEQ ID NO: 789896 - protein, 129 aa, Homo sapiens; identical to SEQ ID NO: 789895

SEQ ID NO: 789897 - protein, 129 aa, Homo sapiens; identical to SEQ ID NO: 789895

SEQ ID NO: 789898 - protein, 79 aa, Homo sapiens
SSDPPSAVQSAGITGLSRHTRPNTLSPFMAYPPTATSKIRNVSGSMLAPCLESSRVFSHLPPMTCETFCAPLPPASCDL

SEQ ID NO: 789899 - protein, 118 aa, Homo sapiens
TRRARQDAAVPSRVDLAPGRPEDAAQKPCGPRDAGLRGCSAPGEAPGIPSWRGLARPPGRSAGSAGEASRAGARDPRAPRAGAAWAGARVGLRRCGKCRLPVDAEGGVARICCGLLEK

SEQ ID NO: 789900 - protein, 144 aa, Homo sapiens
PFHSIPFHSTLVDSIPFHSTRIHSLLFHSERFHSIPFHSIPFHSIPFHSIPFRSIPFYSVSFHSIPFHSIPFHSIPFHCTRVDSIPLHSIPFHSIPFRCIPFHYIRIDSIQLPYSPFHSIPFGLFHSIPFHSTPFHCTRVDSIP

SEQ ID NO: 789901 - protein, 116 aa, Homo sapiens
MQLPDITVHVPGVCTPLISVVISRVNMTPHITQCAHPVIFFIIFKGDSASNITVGVPHVCVLCDSIFYIPREVLLVMSQWGVHPVMSFLFDLGAFFKPPYKRNGTDKKMLRLDCAA

SEQ ID NO: 789902 - protein, 185 aa, Homo sapiens
MYFCWGADSRELQRRRTAGSPGAELLQAASGERHSLLLLTNHRVLSCGDNSRGQLGRRGAQRGELPGERGAPGAGCEDPSDMGAGAWVPGAGNRVRSAGTRVRGAGAQVQGAAQMLGAAGQAGRGAGSLGFLGARRATGTRKMVPCATEEQLPQFRFPNAPRICFGFQFKFKAKLRAETNLVSAA

SEQ ID NO: 789903 - protein, 305 aa, Homo sapiens
MYFCWGADSRELQRRRTAGSPGAELLQAASGERHSLLLLTNHRVLSCGDNSRGQLGRRGAQRGELPEPIQALETLIVDLVSCGKEHSLAVCHKGRVFAWGAGSEGQLGIGEFKEISFTPKKIMTLNDIKIIQVSCGHYHSLALSKDSQVFSWGKNSHGQLGLGKEFPSQASPQRVRSLEGIPLAQVAAGGAHSFALSLCGTSFGWGSNSAGQLALSGRNVPVQSNKPLSVGALKNLGVVYISCGDAHTAVLTQDGKVFTFGDNRSGQLGYSPTPEKRGPQLVERIDGLVSQIDCGSYHTLAYVHT

SEQ ID NO: 789904 - protein, 201 aa, Homo sapiens
MAVESYPQKDSGIDIGDITARKALRKQLQCKTFRWYLVSVYPEMRMYSDIIAYGVLQNSLKTDLCLDQGPDTENVPIMYICHGMTPQNVYYTSSQQIHVGILSPTVDDDDNRCLVDVNSRPRLIECSYAKAKRMKLHWQPLRELTHPEPKSKRCLKLQGNSDLEFGFQLVLQTCSGQQGSITNVLEEPRVLTQRGHFRVPL

SEQ ID NO: 789905 - protein, 759 aa, Homo sapiens
RGFPSSAGRSDRQGSRRWRWEAAWPPTQAVAKFPRRTHLDARLPATRDPSRKGSGIFNLEKNPPGFLCQGLSGWPAAGAANLGTAATPAADRALENLGTQVLRCPAAPDVLRGASAGEFGAHDKEGPPGALLWRKEPRMVCTRKTKTLVSTCVILSGMTNIICLLYVGWVTNYIASVYVRGQEPAPDKKLEEDKGDTLKIIERLDHLENVIKQHIQEAPAKPEEAEAEPFTDSSLFAHWGQELSPEGRRVALKQFQYYGYNAYLSDRLPLDRPLPDLRPSGCRNLSFPDSLPEVSIVFIFVNEALSVLLRSIHSAMERTPPHLLKEIILVDDNSSNEELKEKLTEYVDKVNSQKPGFIKVVRHSKQEGLIRSRVSGWRAATAPVVALFDAHVEFNVGFLHRAEPVLTRIKENRKRIISPSFDNIKYDNFEIEEYPLAAQGFDWELWCRYLNPPKAWWKLENSTAPIRSPALIGCFIVDRQYFQEIGLLDEGMEVYGGENVELGIRVWQCGGSVEVLPCSRIAHIERAHKPYTEDLTAHVRRNALRVAEVWMDEFKSHVYMAWNIPQEDSGIDIGDITARKALRKQLQCKTFRWYLVSVYPEMRMYSDIIAYGVLQNSLKTDLCLDQGPDTENVPIMYICHGMTPQNVYYTSSQQIHVGILSPTVDDDDNRCLVDVNSRPRLIECSYAKAKRMKLHWQPLRELTHPEPKSKRCLKLQGNSDLEFGFQLVLQTCSGQQGSITNVLEEPRVLTQRGHFRVPL

SEQ ID NO: 789906 - protein, 132 aa, Homo sapiens
IPVAHTAAVLYHLGIGAVTEVCLAPGVSSHGSPLSLRLSCHQTTPAQWPHISRLSWEQLLALFLGGQQRWSCSTCSSPSCFGLELKQYPAFWENSTLNTQSNHASPVSQLKQRHASQEVVHWPSRVITHPST

SEQ ID NO: 789907 - protein, 420 aa, Homo sapiens
MGKRLDQPQMYPQYTYYYPHYLQTKQSYAPAPHPMAPPSPSTNSSSNNSSNNSSGEQLSKTNLYIRGLPPGTTDQDLIKLCQPYGKIVSTKAILDKNTNQCKGYGFVDFDSPAAAQKAVASLKANGVQAQMAKQQEQDPTNLYISNLPISMDEQELENMLKPFGHVISTRILRDANGVSRGVGFARMESTEKCEVVIQHFNGKYLKTPPGIPAPSEPLLCKFADGGQKKRQNQSKYTQNGRPWPREGEAGMALTYDPTAAIQNGFYSSPYSIATNRMIPQTSITPFIAASPVSTYQVQSTSWMPHPPYVMQPTGAVITPTMDHPMSMQPANMMGPLTQQMNHLSLGTTGTYMTAAAPMQGTYIPQYTPVPPTAVSIEGVVADTSPQTVAPSSQDTSGQQQQIAVDTSNEHAPAYSYQQSK

SEQ ID NO: 789908 - protein, 447 aa, Homo sapiens
MGKRLDQPQMYPQYTYYYPHYLQTKQSYAPAPHPMAPPSPSTNSSSNNSSNNSSGEQLSKTNLYIRGLPPGTTDQDLIKLCQPYGKIVSTKAILDKNTNQCKGYGFVDFDSPAAAQKAVASLKANGVQAQMAKQQEQDPTNLYISNLPISMDEQELENMLKPFGHVISTRILRDANGVSRGVGFARMESTEKCEVVIQHFNGKYLKTPPGIPAPSEPLLCKFADGGQKKRQNQSKYTQNGRPWPREGEAGMALTYDPTAAIQNGFYSSPYSIATNRMIPQTSITPFIAASPVSTYQVQSTSWMPHPPYVMQPTGAVITPTMDHPMSMQPANMMGPLTQQMNHLSLGTTGTIQSQDRIMILHQLLCQYMTAAAPMQGTYIPQYTPVPPTAVSIEGVVADTSPQTVAPSSQDTSGQQQQIAVDTSNEHAPAYSYQTINRTEECLSESLP

SEQ ID NO: 789909 - protein, 186 aa, Homo sapiens
MGKRLDQPQMYPQYTYYYPHYLQTKQSYAPAPHPMAPPSPSTNSSSNNSSNNSSGEQLSKTNLYIRGLPPGTTDQDLIKLCQPYGKIVSTKAILDKNTNQCKGYGFVDFDSPAAAQKAVASLKANGVQAQMAKQQEQDPTNLYISNLPISMDEQELENMLKPFGHVISTRILRDANGVSRGVGFAR

SEQ ID NO: 789910 - protein, 436 aa, Homo sapiens
MGKRLDQPQMYPQYTYYYPHYLQTKQSYAPAPHPMAPPSPSTNSSSNNSSNNSSGEQLSKTNLYIRGLPPGTTDQDLIKLCQPYGKIVSTKAILDKNTNQCKGYGFVDFDSPAAAQKAVASLKANGVQAQMAKQQEQDPTNLYISNLPISMDEQELENMLKPFGHVISTRILRDANGVSRGVGFARMESTEKCEVVIQHFNGKYLKTPPGIPAPSEPLLCKFADGGQKKRQNQSKYTQNGRPWPREGEAGMALTYDPTAAIQNGFYSSPYSIATNRMIPQTSITPFIAASPVSTYQVQSTSWMPHPPYVMQPTGAVITPTMDHPMSMQPANMMGPLTQQMNHLSLGTTGTIQSQDRIMILHQLLCQYMTAAAPMQGTYIPQYTPVPPTAVSIEGVVADTSPQTVAPSSQDTSGQQQQIAVDTSNEHAPAYSYQQSK

SEQ ID NO: 789911 - protein, 160 aa, Homo sapiens
MGKRLDQPQMYPQYTYYYPHYLQTKQSYAPAPHPMAPPSPSTNSSSNNSSNNSSGEQLSKTNLYIRGLPPGTTDQDLIKLCQPYGKIVSTKAILDKNTNQCKGYGFVDFDSPAAAQKAVASLKANGVQAQMAKLQERDPAVTKRLKSVTFLCMSRSLRIC

SEQ ID NO: 789912 - protein, 430 aa, Homo sapiens
MGKRLDQPQMYPQYTYYYPHYLQTKQSYAPAPHPMAPPSPSTNSSSNNSSNNSSGEQLSKTNLYIRGLPPGTTDQDLIKLCQPYGKIVSTKAILDKNTNQCKGYGFVDFDSPAAAQKAVASLKANGVQAQMAKQQEQDPTNLYISNLPISMDEQELENMLKPFGHVISTRILRDANGVSRGVGFARMESTEKCEVVIQHFNGKYLKTPPGIPAPSEPLLCKFADGGQKKRQNQSKYTQNGRPWPREGEAGMALTYDPTAAIQNGFYSSPYSIATNRMIPQTSITPFIAASPVSTYQVQSTSWMPHPPYVMQPTGAVITPTMDHPMSMQPANMMGPLTQQMNHLSLGTTGTYMTAAAPMQGTYIPQYTPVPPTAVSIEGVVADTSPQTVAPSSQDTSGQQQQIAVDTSNEHAPAYSYQYHNTMRLLTLTGY

SEQ ID NO: 789913 - protein, 107 aa, Homo sapiens
IEQSGGSPSLCSCPRVEGAQRFPLCYLRIGGVGWARWLTPVIPAFWEAKAGVSLEVRSLRPVWPTWQNPVSTKNTKISWARWQAPVIPATWKAEAGESLELGRQRLQ

SEQ ID NO: 789914 - protein, 78 aa, Homo sapiens
GKLTVHPSVCGQRPKSPQQTNGVSAGIQRLKNLKYDVQGQEEQEEASSIGKGKARRPSKQSYPTFFPLLCLCCTAASW

SEQ ID NO: 789915 - protein, 68 aa, Homo sapiens
LRNLIPVSLLMDSSRISNLAGLVCRLGFTDRYHKVSSVKTLCARASEVWSASSASWSEVGPAGVSYLE

SEQ ID NO: 789916 - protein, 104 aa, Homo sapiens
ETEARTGAETKRKTHRCKGPTSQASGNGVDINDSLVMPAGDPRGREERTPLSALGPQQALGEGTEVFHMIPVLNSQLQGEKYSCNNMPKKVNTSKIIPLTFNSA

SEQ ID NO: 789917 - protein, 104 aa, Homo sapiens
SVGITGMSHLHTQPPEYINNSYNFIIQRQMAQFFKWVSNLNRYFYKDVQMTSKCMKKCSKSLVFREMHIKITMKYNFTLTRMTGIIKSDDEFWQVCGQSRILRH

SEQ ID NO: 789918 - protein, 142 aa, Homo sapiens
LLSGPVRAGFHPTKGSGETRVQIPRAFGAGRRSSTSSVLQVGSGLRSGVWVSGSSSQAICVTPVRVESSEATAISQEKSQEEERMAVGLLKAMYQELVTFRDVAVDFSQEEWDCLDSSQRHLYSNVMLENYRILVSLGKDIF

SEQ ID NO: 789919 - protein, 103 aa, Homo sapiens [sequence omitted]

SEQ ID NO: 789920 - protein, 75 aa, Homo sapiens
VLRVAGVLDSTGRGWVELCDSGVLRVAGVLDSSGRGWVELCDSGVLRVAGVLDSSGRGWVELCDSGVLRVAGVLD

SEQ ID NO: 789921 - protein, 250 aa, Homo sapiens
MEIPKLLPARGTLQGGGGGGIPAGGGRVHRGPDSPAGQVPTRRLLLLRGPQDGGPGRRREEASTASRGPGPSLLAPRTDQPSGGGGGGGDDFFLVLLDPVGGDVETAGSGQAAGPVLREEAEEGPGLQGGESGANPAGPTALGPRCLSAVPTPAPISAPGPAAAFAGTVTIHNQDLLLRFENGVLTLATPPPHAWEPGAAPAQQPGCLIAPQAGFPHAAHPGDCPELPPDLLLAEPAEPAPAPAPEEEAE

SEQ ID NO: 789922 - protein, 104 aa, Homo sapiens
RFSAFWLRSSVGSVLNSLISDIFSIRVQYIKWIWGAGRRNRSLLVHFTHRSGIAVPPGTVHPLRGLKFNVQNRRRKKKQSVYVGWDTKEWDKNYLLAGRGGSHL

SEQ ID NO: 789923 - protein, 80 aa, Homo sapiens
KKTIQGKPIKEPGLPVFPAAISACDSPGEMSFMTLQLTWNPPPRARGSTSSRARALPGIALSTGHFTHWAGPLTGVNKEA

SEQ ID NO: 789924 - protein, 105 aa, Homo sapiens
MTIPPRPLACLAGPSPKALCHSNNQQEIVGCVSSVGIYEKSLHMFCHHGAARTRFASLADLRSWVRVHRHLSLAPHCLLRAIYHNSAVSCMLSSCILRTLNSLPR

SEQ ID NO: 789925 - protein, 68 aa, Homo sapiens
DCYQSQTLSRGEGVYRTKQVLATEHGREMGPQSVYELTENEEENVDVIQLAEINQIRFSGTWQNGNSK

SEQ ID NO: 789926 - protein, 112 aa, Homo sapiens
MPLHSSLGDRAKLCLKTNQPKTKSLSHSRVYCSFIHKCLDVSVNRYMDRENVYIRNRILSDLKKIHITNPYPTPNTQLPIQLNHSHTLSHVAEFRANLASPKASRLLHCPPF

SEQ ID NO: 789927 - protein, 116 aa, Homo sapiens
MKLQNGRPIPPTSSPSLLPSAQLPSSHNPPPVSCQMPLLDSNTSHQIMDTNPDEEFSPNSYLLRACSGPQQASSSGPPNHHSQSTLRPPLPPPHNHTLSHHHSSANSLNRNSLTNR

SEQ ID NO: 789928 - protein, 91 aa, Homo sapiens
MSNSLPLHIFRFFSLYCDIVFSNCFKVRFTQAKLKLCNQMHCENLPTHNLKKLNNKNIKFQQFLKLGLFHTYCISPKKQVILAVVTVFGCF

SEQ ID NO: 789929 - protein, 103 aa, Homo sapiens
HIVAHTHRRTHTAKHTDRQMHIQTGRHRQADTHSFMQTQADTQPCAHRRTRTHNRTPTQTHSHMHRQADTHSCMHTQANMHTGGHIQADTHNHMHTQVDTQSH

SEQ ID NO: 789930 - protein, 109 aa, Homo sapiens
MLREVGVLVLENCRMDAEIHYCARRGRGRRRELVRDTLQPRGLPGTSSSPGRLGAGRGRIHTAELRPRCSQPLFRERPLRTHSRPFLTSMESLALRERAKKQINKQQTN

SEQ ID NO: 789931 - protein, 103 aa, Homo sapiens
MASRWAVQLLLVAAWSMGCGEALKCYTCKEPMTSASCRTITRCKPEDTACMTTLVTVEAEYPFNQSPVVTRSCSSSCVATDPDSIGAAHLIFCCFRDLCNSEL

SEQ ID NO: 789932 - protein, 48 aa, Homo sapiens
MEKMGQGIHSHPTPPNPDPPLPQISLEKSLCFNKDGELPSWNSVGKLP

SEQ ID NO: 789933 - protein, 120 aa, Homo sapiens
MCQAPSHMSGVQHIPTLSPLGSSFIPITCPCWGGVQSGPSCLTLEIQSQMTGSKTPSQRHDIWNQTTWAQVSALLCGLGKLILLSFLQFSQAYNGDNNATFVRVFLRTKYERLRTVPGAH

SEQ ID NO: 789934 - protein, 112 aa, Homo sapiens
MCYLSSRQEVVTAFDVTIRAEERQEATFSCSPLLEDSLLHKCVHLNRRWSCAPCSYMSPPPLISWASQRWCTSVTSSEGLRDSGSKVEFTSASSSRQPGEIVPPSVRRQCRC

SEQ ID NO: 789935 - protein, 77 aa, Homo sapiens
HAPSSGIRMALACHQPPQAPLGSLRIGPCSLLLPLSHTNHLGAWRLTYSVHHCYCTANTTHNAQSPEDPPAQLTTGT

SEQ ID NO: 789936 - protein, 91 aa, Homo sapiens
MLGEGVSGLLGGQAGASGQELRAALGNHPELLFTHQGQCQGGLGSQQSPEEGAQAEQELPDSLAPEATPHCGRLVTEAIFTAGHVQLLNLR

SEQ ID NO: 789937 - protein, 105 aa, Homo sapiens
MANVLAFLFCYQQVSSVHTWVLSQARVTGLHHHSLCDPGLQVAPPLSAAVPPQSPHSGATGVTDQADSSRQCLRSHSRSLINPVVTSSVMLEVTCSDTQASLSTG

SEQ ID NO: 789938 - protein, 129 aa, Homo sapiens
QHTQGLLPESAKHIAFLSVDGTQSSIFLFSSGEKIKSLYVNMIDIHCAKKISVFLKKYKGKGKLICPSVTLRHTLVTSVQAPFQDSECTVYMNAYTEKFTFKSVLYLFFYNIRNRFLLRCLHVGNYRTT

SEQ ID NO: 789939 - protein, 102 aa, Homo sapiens
MTMTIIVLAIVPPLPNIYPGCAPHVLLPGVLLFSPSNFSKPHTCSLISPACKNCLPLPFLGLNNLFPLPLPHPRPIISRSMSSCQIPSPVPNMPCNKIREDK

SEQ ID NO: 789940 - protein, 106 aa, Homo sapiens
MCVSMSISLQKEDVGDSSPMHSDFSLTKFVMVGGTPHYCGSAGIASVNMPREGLLLGNGERQRGEKNIIGTLNVTQQHFFCCFKVTSFYNAFKFTCLVICSKMGSP

SEQ ID NO: 789941 - protein, 103 aa, Homo sapiens
RPGLPLAPRPFESSPALSIGRAPWRVRPAPPCLGAGRPVSGGNRVWRGGPERDVCHRLISAAQAPSQHTEPARSRPFPPSARSSVWGARWLGERDFFLSYKEN

SEQ ID NO: 789942 - protein, 104 aa, Homo sapiens
TICRPRPPEVPGLQAGATVPGLFFSFLNDLQLHIFLTKQLQDNQIPNETTPGWARYTWYNSKMHTRLPGSKLLHNSFVFFFPEIGSRSVMQAGGQWSDLGSLQP

SEQ ID NO: 789943 - protein, 150 aa, Homo sapiens [sequence omitted]

SEQ ID NO: 789944 - protein, 112 aa, Homo sapiens
SGCRVITELNPGLQIPRSVFFTRNQKRNISTVIINIFFFLRQSLALSPRMENSGTNLVHCNVCLTGSSDSRASASQVAGTTDAGHRVWIICFFLVETEFCHDGLAGLNLLAS

SEQ ID NO: 789945 - protein, 93 aa, Homo sapiens
RAEEPVGGVSTREAEALRCEARILLQALCLQQEVALGDSSPWGTALHGLGHPCSQTTASAVLPDESQSPAYREATLMPKTSRPQQCSQGCGTR

SEQ ID NO: 789946 - protein, 93 aa, Homo sapiens; identical to SEQ ID NO: 789945

SEQ ID NO: 789947 - protein, 119 aa, Homo sapiens
MLCCFQACSLKVLGSFCLGLFVPELLYKNLTTLLERPCGEDLTLYAEVEGPWLVQPSSHPVKIADPFPALLLFYSVLQPTTFPGSLVLCYLGEFCQWKTLVEGWMLLLLASLVVAVFPP

SEQ ID NO: 789948 - protein, 136 aa, Homo sapiens
MDLFLWLQICESIRKVIWYTSTEWILFKKECPTSVTMAKLKVYSVPQHAVGIVVNKGKILAKRINVHIEHIKHCKSRDSFLKCVKENDQKKKEAKEEGTWVQVKHQPAPPREAHFVKACGKEPELLEPIPCEFMAS

SEQ ID NO: 789949 - protein, 338 aa, Homo sapiens
VRRVLATETFPCHTEKVQQAVCLQVYKETSDHLLEGKKLKCYIRCCVLHNSQKLQILYKSLEKSIPESIKVYGAIFNIKDKNPFNMEVLVDAWPDYQIVITRPQKQEMKDDQDHYTNTYHIFTKAPDKLEEVLSYSNVISGSKLVQIQGCQEGLDEAIRKVATSKSVQVDYMKTILFIPELPKKHKTSSNDKMELFEVDDDNKEGNFSNMFLDASHAGLVNEHWAFGKNERSLKYIERCLQDFLGFGVLGPEGQLVSWIVMEQSCELRMGYTVPKYRHQGNMLQIGYHLEKYLSQKEIPFYFHVADNNEKSLQALNNLGFKICPCGWHQWKCTPKKYC

SEQ ID NO: 789950 - protein, 294 aa, Homo sapiens
MLVLHNSQKLQILYKSLEKSIPESIKVYGAIFNIKDKNPFNMEVLVDAWPDYQIVITRPQKQEMKDDQDHYTNTYHIFTKAPDKLEEVLSYSNVISWEQTLQIQGCQEGLDEAIRKVATSKSVQVDYMKTILFIPELPKKHKTSSNDKMELFEVDDDNKEGNFSNMFLDASHAGLVNEHWAFGKNERSLKYIERCLQDFLGFGVLGPEGQLVSWIVMEQSCELRMGYTVPKYRHQGNMLQIGYHLEKYLSQKEIPFYFHVADNNEKSLQALNNLGFKICPCGWHQWKCTPKKYC

SEQ ID NO: 789951 - protein, 775 aa, Homo sapiens
MASAGHIITLLLWGYLLELWTGGHTADTTHPRLRLSHKELLNLNRTSIFHSPFGFLDLHTMLLDEYQERLFVGGRDLVYSLSLERISDGYKEIHWPSTALKMEECIMKGKDAGECANYVRVLHHYNRTHLLTCGTGAFDPVCAFIRVGYHLEDPLFHLESPRSERGRGRCPFDPSSSFISTLIGSELFAGLYSDYWSRDAAIFRSMGRLAHIRTEHDDERLLKEPKFVGSYMIPDNEDRDDNKVYFFFTEKALEAENNAHAIYTRVGRLCVNDVGGQRILVNKWSTFLKARLVCSVPGMNGIDTYFDELEDVFLLPTRDHKNPVIFGLFNTTSNIFRGHAICVYHMSSIRAAFNGPYAHKEGPEYHWSVYEGKVPYPRPGSCASKVNGGRYGTTKDYPDDAIRFARSHPLMYQAIKPAHKKPILVKTDGKYNLKQIAVDRVEAEDGQYDVLFIGTDNGIVLKVITIYNQEMESMEEVILEELQIFKDPVPIISMEISSKRQQLYIGSASAVAQVRFHHCDMYGSACADCCLARDPYCAWDGISCSRYYPTGTHAKRRFRRQDVRHGNAAQQCFGQQFVGDALDKTEEHLAYGIENNSTLLECTPRSLQAKVIWFVQKGRETRKEEVKTDDRVVKMDLGLLFLRLHKSDAGTYFCQTVEHSFVHTVRKITLEVVEEEKVEDMFNKDDEEDRHHRMPCPAQSSISQGAKPWYKEFLQLIGYSNFQRVEEYCEKVWCTDRKRKKLKMSPSKWKYANPQEKKLRSKPEHYRLPRHTLDS

SEQ ID NO: 789952 - protein, 181 aa, Homo sapiens
VCTVHEDPAGRVPAQQVTDERQDHEQGLRGSRQGQAGQPLGEGGHQVGGEVGGGQEEVSQVEEAGAVLDVKDRGVQEARRASGRSQGLQVVFVNQDEQPVQGQEAEGPPGSARSRRPGSPFRALRPSSTARARVLSPATAHQRDPAAGPGSGASFCVRVPRFPAELRRRTRSPRGRRGGGG

SEQ ID NO: 789953 - protein, 163 aa, Homo sapiens
YPAFGGSPNPAERHVCSERLLHTSRDFIRSLPRVRSGSAGNKENARTWRRSEGGLAGPPLAKAPRSHSPPGCSPHGQSLPPRRRTPPSQLTGSARSRRPGSPFRALRPSSTARARVLSPATAHQRDPAAGPGSGASFCVRVPRFPAELRRRTRSPRGRRGGGG

SEQ ID NO: 789954 - protein, 146 aa, Homo sapiens
MSRSRLFSVTSAISTIGILCLPLFQLVLSDLPCEEDEMCVNYNDQHPNGWYIWILLLLVLVAALLCGAVVLCLQCWLRRPRIDSHRRTMAVFAVGDLDSIYGTEAAVSPTVGIHLQTQTPDLYPVPAPCFGPLGSPPPYEEIVKTT

SEQ ID NO: 789955 - protein, 63 aa, Homo sapiens
MVLDANIWVSMVLEANIWDSGAIKGSTPTVTEVSPTNVVGSSCATVLIGFQRCRRGHTPGNAT

SEQ ID NO: 789956 - protein, 63 aa, Homo sapiens; identical to SEQ ID NO: 789955

SEQ ID NO: 789957 - protein, 30 aa, Homo sapiens
MFIGNTGGRGGCTDRSNVAVDAAANLVVVG

SEQ ID NO: 789958 - protein, 85 aa, Homo sapiens
FRSYEPSFPKVLSNCAFGGGIALVGFFFARKICERNCYYVNSENSLPNKEEDVFLQEPGFSWIVSVSDEDLRMALERSPDLSFAL

SEQ ID NO: 789959 - protein, 129 aa, Homo sapiens
MRRIIGIVFQCLCGLSLASTVFGRNRSGDSLPASDRPPISSPLATSGTIFSAISCFWDLPAPFLWLAPSCQPTMSSQIRQNYSTDVEAAVNSLVNLYLQAFYTYLSLVSPQDAPGPNFLQLRTSGPPLA

SEQ ID NO: 789960 - protein, 125 aa, Homo sapiens
CSPWPESPARPRPPLSSLALTSPHSCRLLSPERLCSSPPFALDTLGCSPVEDLNQKAPISETQQWLHQHWFSSYCRMLANFTGLDLLKLTCQDLIQICGAADGIRLFNTLRARCWTLPTRVPFPL

SEQ ID NO: 789961 - protein, 88 aa, Homo sapiens
PLSVGVIEPQVLLSQLNMVEFHWDPTKRTSLFLQFTPRKKGGEKGIPFRLQIDTFRPSDKGLPLDHLHSAGCLIKVFKHKGAETENGP

SEQ ID NO: 789962 - protein, 103 aa, Homo sapiens
SQLLGSLRRENHLKPEGRGCSELRDRATALQPEQQEQNSVSKTNKKPVMSFISWKWDCCLKLVMIIITFEQTQRVPMQHPPWLSFILRHLIILYATKKEKICY

SEQ ID NO: 789963 - protein, 108 aa, Homo sapiens
TSLHSHQQWRSVPLSPHPRQHLLSPEFLILAILTGVRWNLRVVLICISLMIKDVEHFFKCFSAIRYSSGENSLFSSEPHFLMGLFDFLKSTFLSSLYMLDISPLSDLG

SEQ ID NO: 789964 - protein, 131 aa, Homo sapiens
MEWNHPEWNGMEWNGIEWNQPECNGMEWNGMEWNGTTRMEWNVMESKGVNRINPNVMEWNATEWNGMECNGMEWNGMEWNGMEWNGMIRNRMEWNEMEWNGMEWNGMEWNGIVPSGIGGNVFEWNGKEWNQ

SEQ ID NO: 789965 - protein, 76 aa, Homo sapiens
IFSSFKKGDCDKTYGSEFVYSDHAKELIVGEIFVRVYNEVPTFQLEVPKAFAASLLDYIGSQAQYLHTFMAILFSW

SEQ ID NO: 789966 - protein, 941 aa, Homo sapiens
KQVSNFNLLCHETPSGSLQRTTGSPRVRYHPDKNPEGRDMFEKVNKAYEFLCTKSAKIVDGPDPENIILILKTQSILFNRHKEDLQPYKYAGYPMLIRTITMETSDDLLFSKESPLLPAATELAFHTVNCSALNAEELRRENGLEVLQEAFSRCVAVLTRSSKPSDMSVQVCGYISKCYSVAAQFEECREKITEMPSIIKDLCRVLYFGKSIPRVAALGVECVSSFAVDFWLQTHLFQAGILWYLLGFLFNYDYTLEESGIQKSEETNQQEVANSLAKLSVHALSRLGGYLAEEQATPENPTIRKSLAGMLTPYVARKLAVASVTEILKMLNSNTESPYLIWNNSTRAELLEFLESQQENMIKKGDCDKTYGSEFVYSDHAKELIVGEIFVRVYNEVPTFQLEVPKAFAASLLDYIGSQAQYLHTFMAITHAAKVESEQHGDRLPRVEMALEALRNVIKYNPGSESECIGHFKLIFSLLRVHGAGQVQQLALEVVNIVTSNQDCVNNIAESMVLSSLLALLHSLPSSRQLVLETLYALTSSTKIIKEAMAKGALIYLLDMFCNSTHPQVRAQTAELFAKMTADKLIGPKVRITLMKFLPSVFMDAMRDNPEAAVHIFEGTHENPELIWNDNSRDKVSTTVREMMLEHFKNQQDNPEANWKLPEDFAVVFGEAEGELAVGGVFLRIFIAQPAWVLRKPREFLIALLEKLTELLEKNNPHGETLETLTMATVCLFSAQPQLADQVPPLGHLPKVIQAMNHRNNAIPKSAIRVIHALSENELCVRAMASLETIGPLMNGMKKRADTVGLACEAINRMFQKEQSELVAQALKADLVPYLLKLLEGIGLENLDSPAATKAQIVKALKAMTRSLQYGEQVNEILCRSSVWSAFKDQKHDLFISESQTAGYLTGPGVAGYLTAGTSTSVMSNLPPPVDHEAGDLGYQT

SEQ ID NO: 789967 - protein, 256 aa, Homo sapiens
GRVGRPTRRRKPREFLIALLEKLTELLEKNNPHGETLETLTMATVCLFSAQPQLADQVPPLGHLPKVIQAMNHRNNAIPKSAIRVIHALSENELCVRAMASLETIGPLMNGMKKRADTVGLACEAINRMFQKEQSELVAQALKADLVPYLLKLLEGIGLENLDSPAATKAQIVKALKAMTRSLQYGEQVNEILCRSSVWSAFKDQKHDLFISESQTAGYLTGPGVAGYLTAGTSTSVMSNLPPPVDHEAGDLGYQT

SEQ ID NO: 789968 - protein, 1194 aa, Homo sapiens
MLITMCGYFPSRDQDNAIIRPLPKVKRLLSDSTCLPHIIQLLLTFDPILVEKVAILLYHIMQDNPQLPRLYLSGVFFFIMMYTGSNVLPVARFLKYTHTKQAFKSEETKGQDIFQRSILGHILPEAMVCYLENYEPEKFSEIFLGEFDTPEAIWSSEMRRLMIEKIAAHLADFTPRLQSNTRALYQYCPIPIINYPQLENELFCNIYYLKQLCDTLRFPDWPIKDPVKLLKDTLDAWKKEVEKKPPMMSIDDAYEVLNLPQGQGPHDESKIRKAYFRLAQKYHPDKNPEGRDMFEKVNKAYEFLCTKSAKIVDGPDPENIILILKTQSILFNRHKEDLQPYKYAGYPMLIRTITMETSDDLLFSKESPLLPAATELAFHTVNCSALNAEELRRENGLEVLQEAFSRCVAVLTRSSKPSDMSVQVCGYISKCYSVAAQFEECREKITEMPSIIKDLCRVLYFGKSIPRVAALGVECVSSFAVDFWLQTHLFQAGILWYLLGFLFNYDYTLEESGIQKSEETNQQEVANSLAKLSVHALSRLGGYLAEEQATPENPTIRKSLAGMLTPYVARKLAVASVTEILKMLNSNTESPYLIWNNSTRAELLEFLESQQENMIKKGDCDKTYGSEFVYSDHAKELIVGEIFVRVYNEVPTFQLEVPKAFAASLLDYIGSQAQYLHTFMAITHAAKVESEQHGDRLPRVEMALEALRNVIKYNPGSESECIGHFKLIFSLLRVHGAGQVQQLALEVVNIVTSNQDCVNNIAESMVLSSLLALLHSLPSSRQLVLETLYALTSSTKIIKEAMAKGALIYLLDMFCNSTHPQVRAQTAELFAKMTADKLIGPKVRITLMKFLPSVFMDAMRDNPEAAVHIFEGTHENPELIWNDNSRDKVSTTVREMMLEHFKNQQDNPEANWKLPEDFAVVFGEAEGELAVGGVFLRIFIAQPAWVLRKPREFLIALLEKLTELLEKNNPHGETLETLTMATVCLFSAQPQLADQVPPLGHLPKVIQAMNHRNNAIPKSAIRVIHALSENELCVRAMASLETIGPLMNGMKKRADTVGLACEAINRMFQKEQSELVAQALKADLVPYLLKLLEGIGLENLDSPAATKAQIVKALKAMTRSLQYGEQVNEILCRSSVWSAFKDQKHDLFISESQTAGYLTGPGVAGYLTAGTSTSVMSNLPPPVDHEAGDLGYQT

SEQ ID NO: 789969 - protein, 802 aa, Homo sapiens
MLITMCGYFPSRDQDNAIIRPLPKVKRLLSDSTCLPHIIQLLLTFDPILVEKVAILLYHIMQDNPQLPRLYLSGVFFFIMMYTGSNVLPVARFLKYTHTKQAFKSEETKGQDIFQRSILGHILPEAMVCYLENYEPEKFSEIFLGEFDTPEAIWSSEMRRLMIEKIAAHLADFTPRLQSNTRALYQYCPIPIINYPQLENELFCNIYYLKQLCDTLRFPDWPIKDPVKLLKDTLDAWKKEVEKKPPMMSIDDAYEVLNLPQGQGPHDESKIRKAYFRLAQKYHPDKNPEGRDMFEKVNKAYEFLCTKSAKIVDGPDPENIILILKTQSILFNRHKEDLQPYKYAGYPMLIRTITMETSDDLLFSKESPLLPAATELAFHTVNCSALNAEELRRENGLEVLQEAFSRCVAVLTRSSKPSDMSVQVCGYISKCYSVAAQFEECREKITEMPSIIKDLCRVLYFGKSIPRVAALGVECVSSFAVDFWLQTHLFQAGILWYLLGFLFNYDYTLEESGIQKSEETNQQEVANSLAKLSVHALSRLGGYLAEEQATPENPTIRKSLAGMLTPYVARKLAVASVTEILKMLNSNTESPYLIWNNSTRAELLEFLESQQENMIKKGDCDKTYGSEFVYSDHAKELIVGEIFVRVYNEVPTFQLEVPKAFAASLLDYIGSQAQYLHTFMAITHAAKVESEQHGDRLPRVEMALEALRNVIKYNPGSESECIGHFKLIFSLLRVHGAGQVQQLALEVVNIVTSNQDCVNNIAESMVLSSLLALLHSLPSSMYTDGILETTARLAHGKELLHS

SEQ ID NO: 789970 - protein, 321 aa, Homo sapiens
MLITMCGYFPSRDQDNAIIRPLPKVKRLLSDSTCLPHIIQLLLTFDPILVEKVAILLYHIMQDNPQLPRLYLSGVFFFIMMYTGSNVLPVARFLKYTHTKQAFKSEETKGQDIFQRSILGHILPEAMVCYLENYEPEKFSEIFLGEFDTPEAIWSSEMRRLMIEKIAAHLADFTPRLQSNTRALYQYCPIPIINYPQLENELFCNIYYLKQLCDTLRFPDWPIKDPVKLLKDTLDAWKKEVEKKPPMMSIDDAYEVLNLPQGQGPHDESKIRKAYFRLAQKYHPDKNPEGRDMFEKVNKAYEFLCTKSAKIVDGPNFGYRA

SEQ ID NO: 789971 - protein, 1194 aa, Homo sapiens; identical to SEQ ID NO: 789968

SEQ ID NO: 789972 - protein, 440 aa, Homo sapiens
GDQRWSARPARAESTWRTGSSSVSGSRQLVLETLYALTSSTKIIKEAMAKGALIYLLDMFCNSTHPQVRAQTAELFAKMTADKLIGPKVRITLMKFLPSVFMDAMRDNPEAAVHIFEGTHENPELIWNDNSRDKVSTTVREMMLEHFKNQQDNPEANWKLPEDFAVVFGEAEGELAVGGVFLRIFIAQPAWVLRKPREFLIALLEKLTELLEKNNPHGETLETLTMATVCLFSAQPQLADQVPPLGHLPKVIQAMNHRNNAIPKSAIRVIHALSENELCVRAMASLETIGPLMNGMKKRADTVGLACEAINRMFQKEQSELVAQALKADLVPYLLKLLEGIGLENLDSPAATKAQIVKALKAMTRSLQYGEQVNEILCRSSVWSAFKDQKHDLFISESQTAGYLTGPGVAGYLTAGTSTSVMSNLPPPVDHEAGDLGYQT

SEQ ID NO: 789973 - protein, 215 aa, Homo sapiens [sequence omitted]

SEQ ID NO: 789974 - protein, 630 aa, Homo sapiens
MLITMCGYFPSRDQDNAIIRPLPKVKRLLSDSTCLPHIIQLLLTFDPILVEKVAILLYHIMQDNPQLPRLYLSGVFFFIMMYTGSNVLPVARFLKYTHTKQAFKSEETKGQDIFQRSILGHILPEAMVCYLENYEPEKFSEIFLGEFDTPEAIWSSEMRRLMIEKIAAHLADFTPRLQSNTRALYQYCPIPIINYPQLENELFCNIYYLKQLCDTLRFPDWPIKDPVKLLKDTLDAWKKEVEKKPPMMSIDDAYEVLNLPQGQGPHDESKIRKAYFRLAQKYHPDKNPEGRDMFEKVNKAYEFLCTKSAKIVDGPDPENIILILKTQSILFNRHKEDLQPYKYAGYPMLIRTITMETSDDLLFSKESPLLPAATELAFHTVNCSALNAEELRRENGLEVLQEAFSRCVAVLTRSSKPSDMSVQVCGYISKCYSVAAQFEECREKITEMPSIIKDLCRVLYFGKSIPRVAALGVECVSSFAVDFWLQTHLFQAGILWYLLGFLFNYDYTLEESGIQKSEETNQQEVANSLAKLSVHALSRLGGYLAEEQATPENPTIRKSLAGMLTPYVARKLAVASVTEILKMLNSNTESPYLIWNNSTRAELLEFLESQQENMIKKVCYCFINFLGNLF

SEQ ID NO: 789975 - protein, 75 aa, Homo sapiens
EVANSLAKLSVHALSRLGGYLAEEQATPENPTIRKSLAGMLTPYVARKLAVASVTEVCASQVAWVLINSARSFKQ

SEQ ID NO: 789976 - protein, 160 aa, Homo sapiens
MKFCSCSGFTAKEASNYQNLRMHQIISMMMEGNFKTQLRQVEMNYQVGLLLYGRQSCVQICTLLGINENFFSTNCVYITILGTYKQTVDNVLTLLGLMIHRRLKDKAKAVQHDKCLINVVGLAQGFLTRKPVLGRNTRFTYRPFSQFTILLFFPPFFVDC

SEQ ID NO: 789977 - protein, 168 aa, Homo sapiens
SAPPEKGAEGRTEKGEGRINPSLATPLSGPDIAEPSGAPRSQRGAPEAAPARPRCAGRGGAQVRSGATRSPRLRLTSGRPGSAAPRAIHPGAAPQTPRGAGENLKEVVARLDILKTRINWENRKGASKRGEDIPGWGRMSFKNYIPLLWRLFLTFPTIKRNVATFNFC

SEQ ID NO: 789978 - protein, 264 aa, Homo sapiens
MPLASSSNVVGRKTGKGNFGGQNEQEDTLNQLLVEMDGFNTTTNVVILASTNQPDILDPALLRPGRFDRQIFIGLPDIKGRGSIFKVHLRPLKLDSTLEKEKLARKLASLTPGFSGADVANVCNEAALIAARHLSDSINQKHFEQAIERVIGGLEKKTQVLQPEEKTVAYHEAGHAVASWYLEPTDLLLKVSIIPRGKGLGYAQYLPKEQYLYTKEQLLDRMCMTLGGRVSEEIFFGRITTGAQDDLRNSNSECICPNRTVRHE

SEQ ID NO: 789979 - protein, 124 aa, Homo sapiens
QWKLCDGDKHGNHSDVTQLNLHLKKWMPRQHKQDPGTPTGYGAVPQSQGPGFLPREVRNKDNFSLLPLSSPDTDLPTLYLPLLLPNPHPVLSRRHHCLQGMHSAAHCTQTTNSQKVMTICVWDV

SEQ ID NO: 789980 - protein, 1521 aa, Homo sapiens
MQPQNVQGLSKVSEEPSTSSDERASLIKKEIHGSLPHVAEPSVPYRGTVFAMDPRNGYMEPHYHPPHLFPAFHPPVPIDARHHEGRYHYDPSPIPPLHMTSALSSSPTYPDLPFIRISPHRNPAAASESPFSPPHPYINPYMDYIRSLHSSPSLSMISATRGLSPTDAPHAGVSPAEYYHQMALLTGQRSPYADIIPSAATAGTGAIHMEYLHAMDSTRFSSPRLSARPSRKRTLSISPLSDHSFDLQTMIRTSPNSLVTILNNSRSSSSASGSYGHLSASAISPALSFTYSSAPVSLHMHQQILSRQQSLGSAFGHSPPLIHPAPTFPTQRPIPGIPTVLNPVQVSSGPSESSQNKPTSESAVSSTGDPMHNKRSKIKPDEDLPSPGARGQQEQPEGTTLVKEEGDKDESKQEPEVIYETNCHWEGCAREFDTQEQLVHHINNDHIHGEKKEFVCRWLDCSREQKPFKAQYMLVVHMRRHTGEKPHKCTFEGCTKAYSRLENLKTHLRSHTGEKPYVCEHEGCNKAFSNASDRAKHQNRTHSNEKPYVCKIPGCTKRYTDPSSLRKHVKTVHGPEAHVTKKQRGDIHPRPPPPRDSGSHSQSRSPGRPTQGALGEQQDLSNTTSKREECLQVKTVKAEKPMTSQPSPGGQSSCSSQQSPISNYSNSGLELPLTDGGSIGDLSAIDETPIMDSTISTATTALALQARRNPAGTKWMEHVKLERLKQVNGMFPRLNPILPPKAPAVSPLIGNGTQSNNTCSLGGPMTLLPGRSDLSGVDVTMLNMLNRRDSSASTISSAYLSSRRSSGISPCFSSRRSSEASQAEGRPQNVSVADSYDPISTDASRRSSEASQSDGLPSLLSLTPAQQYRLKAKYAAATGGPPPTPLPNMERMSLKTRLALLGDALEPGVALPPVHAPRRCSDGGAHGYGRRHLQPHDALGHGVRRASDPVRTGSEGLALPRVPRFSSLSSCNPPAMATSAEKRSLVLQNYTRPEGGQSRNFHSSPCPPSITENVTLESLTMDADANLNDEDFLPDDVVQYLNSQNQAGYEQHFPSALPDDSKVPHGPGDFDAPGLPDSHAGQQFHALEQPCPEGSKTDLPIQWNEVSSGSADLSSSKLKCGPRPAVPQTRAFGFCNGMVVHPQNPLRSGPAGGYQTLGENSNPYGGPEHLMLHNSPGSGTSGNAFHEQPCKAPQYGNCLNRQPVAPGALDGACGAGIQASKLKSTPMQGSGGQLNFGLPVAPNESAGSMVNGMQNQDPVGQGYLAHQLLGDSMQHPGAGRPGQQMLGQISATSHINIYQGPESCLPGAHGMGSQPSSLAVVRGYQPCASFGGSRRQAMPRDSLALQSGQLSDTSQTCRVNGIKMEMKGQPHPLCSNLQNYSGQFYDQTVGFSQQDTKAGSFSISDASCLLQGTSAKNSELLSPGANQVTSTVDSLDSHDLEGVQIDFDAIIDDGDHSSLMSGALSPSIIQNLSHSSSRLTTPRASLPFPALSMSTTNMAIGDMSSLLTSLAEESKFLAVMQ

SEQ ID NO: 789981 - protein, 1380 aa, Homo sapiens
MDYIRSLHSSPSLSMISATRGLSPTDAPHAGVSPAEYYHQMALLTGQRSPYADIIPSAATAGTGAIHMEYLHAMDSTRFSSPRLSARPSRKRTLSISPLSDHSFDLQTMIRTSPNSLVTILNNSRSSSSASGSYGHLSASAISPALSFTYSSAPVSLHMHQQILSRQQSLGSAFGHSPPLIHPAPTFPTQRPIPGIPTVLNPVQVSSGPSESSQNKPTSESAVSSTGDPMHNKRSKIKPDEDLPSPGARGQQEQPEGTTLVKEEGDKDESKQEPEVIYETNCHWEGCAREFDTQEQLVHHINNDHIHGEKKEFVCRWLDCSREQKPFKAQYMLVVHMRRHTGEKPHKCTFEGCTKAYSRLENLKTHLRSHTGEKPYVCEHEGCNKAFSNASDRAKHQNRTHSNEKPYVCKIPGCTKRYTDPSSLRKHVKTVHGPEAHVTKKQRGDIHPRPPPPRDSGSHSQSRSPGRPTQGALGEQQDLSNTTSKREECLQVKTVKAEKPMTSQPSPGGQSSCSSQQSPISNYSNSGLELPLTDGGSIGDLSAIDETPIMDSTISTATTALALQARRNPAGTKWMEHVKLERLKQVNGMFPRLNPILPPKAPAVSPLIGNGTQSNNTCSLGGPMTLLPGRSDLSGVDVTMLNMLNRRDSSASTISSAYLSSRRSSGISPCFSSRRSSEASQAEGRPQNVSVADSYDPISTDASRRSSEASQSDGLPSLLSLTPAQQYRLKAKYAAATGGPPPTPLPNMERMSLKTRLALLGDALEPGVALPPVHAPRRCSDGGAHGYGRRHLQPHDALGHGVRRASDPVRTGSEGLALPRVPRFSSLSSCNPPAMATSAEKRSLVLQNYTRPEGGQSRNFHSSPCPPSITENVTLESLTMDADANLNDEDFLPDDVVQYLNSQNQAGYEQHFPSALPDDSKVPHGPGDFDAPGLPDSHAGQQFHALEQPCPEGSKTDLPIQWNEVSSGSADLSSSKLKCGPRPAVPQTRAFGFCNGMVVHPQNPLRSGPAGGYQTLGENSNPYGGPEHLMLHNSPGSGTSGNAFHEQPCKAPQYGNCLNRQPVAPGALDGACGAGIQASKLKSTPMQGSGGQLNFGLPVAPNESAGSMVNGMQNQDPVGQGYLAHQLLGDSMQHPGAGRPGQQMLGQISATSHINIYQGPESCLPGAHGMGSQPSSLAVVRGYQPCASFGGSRRQAMPRDSLALQSGQLSDTSQTCRVNGIKMEMKGQPHPLCSNLQNYSGQFYDQTVGFSQQDTKAGSFSISDASCLLQGTSAKNSELLSPGANQVTSTVDSLDSHDLEGVQIDFDAIIDDGDHSSLMSGALSPSIIQNLSHSSSRLTTPRASLPFPALSMSTTNMAIGDMSSLLTSLAEESKFLAVMQ

SEQ ID NO: 789982 - protein, 1282 aa, Homo sapiens
  misc_feature (1270)..(1270): Xaa can be any naturally occurring amino acid
  misc_feature (1280)..(1280): Xaa can be any naturally occurring amino acid
MQPQNVQGLSKVSEEPSTSSDERASLIKKEIHGSLPHVAEPSVPYRGTVFAMDPRNGYMEPHYHPPHLFPAFHPPVPIDARHHEGRYHYDPSPIPPLHMTSALSSSPTYPDLPFIRISPHRNPAAASESPFSPPHPYINPYMDYIRSLHSSPSLSMISATRGLSPTDAPHAGVSPAEYYHQMALLTGQRSPYADIIPSAATAGTGAIHMEYLHAMDSTRFSSPRLSARPSRKRTLSISPLSDHSFDLQTMIRTSPNSLVTILNNSRSSSSASGSYGHLSASAISPALSFTYSSAPVSLHMHQQILSRQQSLGSAFGHSPPLIHPAPTFPTQRPIPGIPTVLNPVQVSSGPSESSQNKPTSESAVSSTGDPMHNKRSKIKPDEDLPSPGARGQQEQPEGTTLVKEEGDKDESKQEPEVIYETNCHWEGCAREFDTQEQLVHHINNDHIHGEKKEFVCRWLDCSREQKPFKAQYMLVVHMRRHTGEKPHKCTFEGCTKAYSRLENLKTHLRSHTGEKPYVCEHEGCNKAFSNASDRAKHQNRTHSNEKPYVCKIPGCTKRYTDPSSLRKHVKTVHGPEAHVTKKQRGDIHPRPPPPRDSGSHSQSRSPGRPTQGALGEQQDLSNTTSKREECLQVKTVKAEKPMTSQPSPGGQSSCSSQQSPISNYSNSGLELPLTDGGSIGDLSAIDETPIMDSTISTATTALALQARRNPAGTKWMEHVKLERLKQVNGMFPRLNPILPPKAPAVSPLIGNGTQSNNTCSLGGPMTLLPGRSDLSGVDVTMLNMLNRRDSSASTISSAYLSSRRSSGISPCFSSRRSSEASQAEGRPQNVSVADSYDPISTDASRRSSEASQSDGLPSLLSLTPAQQYRLKAKYAAATGGPPPTPLPNMERMSLKTRLALLGDALEPGVALPPVHAPRRCSDGGAHGYGRRHLQPHDALGHGVRRASDPVRTGSEGLALPRVPRFSSLSSCNPPAMATSAEKRSLVLQNYTRPEGGQSRNFHSSPCPPSITENVTLESLTMDADANLNDEDFLPDDVVQYLNSQNQAGYEQHFPSALPDDSKVPHGPGDFDAPGLPDSHAGQQFHALEQPCPEGSKTDLPIQWNEVSSGSADLSSSKLKCGPRPAVPQTRAFGFCNGMVVHPQNPLRSGPAGGYQTLGENSNPYGGPEHLMLHNSPGSGTSGNAFHEQPCKAPQYGNCLNRQPVAPGALDGACGAGIQASKLKSTPMQGSGGQLNFGLPVAPNESAGSMVNGMQNQDPVGNPKGGGGVFXTPPLFGGGPXFF

SEQ ID NO: 789983 - protein, 143 aa, Homo sapiens
MEAQSHSSTTTEKKKVENSIVKCSTRTDVSEKAVASSTTSNEDESPGQTYHRERRNAITMQPQNVQGLSKVSEEPSTSSDERASLIKKEIHGSLPHVAEPSVPYRGTVFAMDPRNGYMEPHYRCARPRHLHHHRVQPPRLPDN

SEQ ID NO: 789984 - protein, 1580 aa, Homo sapiens
MEAQSHSSTTTEKKKVENSIVKCSTRTDVSEKAVASSTTSNEDESPGQTYHRERRNAITMQPQNVQGLSKVSEEPSTSSDERASLIKKEIHGSLPHVAEPSVPYRGTVFAMDPRNGYMEPHYHPPHLFPAFHPPVPIDARHHEGRYHYDPSPIPPLHMTSALSSSPTYPDLPFIRISPHRNPAAASESPFSPPHPYINPYMDYIRSLHSSPSLSMISATRGLSPTDAPHAGVSPAEYYHQMALLTGQRSPYADIIPSAATAGTGAIHMEYLHAMDSTRFSSPRLSARPSRKRTLSISPLSDHSFDLQTMIRTSPNSLVTILNNSRSSSSASGSYGHLSASAISPALSFTYSSAPVSLHMHQQILSRQQSLGSAFGHSPPLIHPAPTFPTQRPIPGIPTVLNPVQVSSGPSESSQNKPTSESAVSSTGDPMHNKRSKIKPDEDLPSPGARGQQEQPEGTTLVKEEGDKDESKQEPEVIYETNCHWEGCAREFDTQEQLVHHINNDHIHGEKKEFVCRWLDCSREQKPFKAQYMLVVHMRRHTGEKPHKCTFEGCTKAYSRLENLKTHLRSHTGEKPYVCEHEGCNKAFSNASDRAKHQNRTHSNEKPYVCKIPGCTKRYTDPSSLRKHVKTVHGPEAHVTKKQRGDIHPRPPPPRDSGSHSQSRSPGRPTQGALGEQQDLSNTTSKREECLQVKTVKAEKPMTSQPSPGGQSSCSSQQSPISNYSNSGLELPLTDGGSIGDLSAIDETPIMDSTISTATTALALQARRNPAGTKWMEHVKLERLKQVNGMFPRLNPILPPKAPAVSPLIGNGTQSNNTCSLGGPMTLLPGRSDLSGVDVTMLNMLNRRDSSASTISSAYLSSRRSSGISPCFSSRRSSEASQAEGRPQNVSVADSYDPISTDASRRSSEASQSDGLPSLLSLTPAQQYRLKAKYAAATGGPPPTPLPNMERMSLKTRLALLGDALEPGVALPPVHAPRRCSDGGAHGYGRRHLQPHDALGHGVRRASDPVRTGSEGLALPRVPRFSSLSSCNPPAMATSAEKRSLVLQNYTRPEGGQSRNFHSSPCPPSITENVTLESLTMDADANLNDEDFLPDDVVQYLNSQNQAGYEQHFPSALPDDSKVPHGPGDFDAPGLPDSHAGQQFHALEQPCPEGSKTDLPIQWNEVSSGSADLSSSKLKCGPRPAVPQTRAFGFCNGMVVHPQNPLRSGPAGGYQTLGENSNPYGGPEHLMLHNSPGSGTSGNAFHEQPCKAPQYGNCLNRQPVAPGALDGACGAGIQASKLKSTPMQGSGGQLNFGLPVAPNESAGSMVNGMQNQDPVGQGYLAHQLLGDSMQHPGAGRPGQQMLGQISATSHINIYQGPESCLPGAHGMGSQPSSLAVVRGYQPCASFGGSRRQAMPRDSLALQSGQLSDTSQTCRVNGIKMEMKGQPHPLCSNLQNYSGQFYDQTVGFSQQDTKAGSFSISDASCLLQGTSAKNSELLSPGANQVTSTVDSLDSHDLEGVQIDFDAIIDDGDHSSLMSGALSPSIIQNLSHSSSRLTTPRASLPFPALSMSTTNMAIGDMSSLLTSLAEESKFLAVMQ

SEQ ID NO: 789985 - protein, 1489 aa, Homo sapiens
KRSKIKPDEDLPSPGARGQQEQPEGTTLVKEEGDKDESKQEPEAIYETNCHWEGCAREFGTQEQLVQTSALSSSPTYPDLPFIRISPHRNPAAASESPFSPPHPYINPYMDYIRSLHSSPSLSMISATRGLSPTDAPHAGVSPAEYYHQMALLTGQRSPYADIIPSAATAGTGAIHMEYLHAMDSTRFSSPRLSARPSRKRTLSISPLSDHSFDLQTMIRTSPNSLVTILNNSRSSSSASGSYGHLSASAISPALSFTYSSAPVSLHMHQQILSRQQSLGSAFGHSPPLIHPAPTFPTQRPIPGIPTVLNPVQVSSGPSESSQNKPTSESAVSSTGDPMHNKRSKIKPDEDLPSPGARGQQEQPEGTTLVKEEGDKDESKQEPEVIYETNCHWEGCAREFDTQEQLVHHINNDHIHGEKKEFVCRWLDCSREQKPFKAQYMLVVHMRRHTGEKPHKCTFEGCTKAYSRLENLKTHLRSHTGEKPYVCEHEGCNKAFSNASDRAKHQNRTHSNEKPYVCKIPGCTKRYTDPSSLRKHVKTVHGPEAHVTKKQRGDIHPRPPPPRDSGSHSQSRSPGRPTQGALGEQQDLSNTTSKREECLQVKTVKAEKPMTSQPSPGGQSSCSSQQSPISNYSNSGLELPLTDGGSIGDLSAIDETPIMDSTISTATTALALQARRNPAGTKWMEHVKLERLKQVNGMFPRLNPILPPKAPAVSPLIGNGTQSNNTCSLGGPMTLLPGRSDLSGVDVTMLNMLNRRDSSASTISSAYLSSRRSSGISPCFSSRRSSEASQAEGRPQNVSVADSYDPISTDASRRSSEASQSDGLPSLLSLTPAQQYRLKAKYAAATGGPPPTPLPNMERMSLKTRLALLGDALEPGVALPPVHAPRRCSDGGAHGYGRRHLQPHDALGHGVRRASDPVRTGSEGLALPRVPRFSSLSSCNPPAMATSAEKRSLVLQNYTRPEGGQSRNFHSSPCPPSITENVTLESLTMDADANLNDEDFLPDDVVQYLNSQNQAGYEQHFPSALPDDSKVPHGPGDFDAPGLPDSHAGQQFHALEQPCPEGSKTDLPIQWNEVSSGSADLSSSKLKCGPRPAVPQTRAFGFCNGMVVHPQNPLRSGPAGGYQTLGENSNPYGGPEHLMLHNSPGSGTSGNAFHEQPCKAPQYGNCLNRQPVAPGALDGACGAGIQASKLKSTPMQGSGGQLNFGLPVAPNESAGSMVNGMQNQDPVGQGYLAHQLLGDSMQHPGAGRPGQQMLGQISATSHINIYQGPESCLPGAHGMGSQPSSLAVVRGYQPCASFGGSRRQAMPRDSLALQSGQLSDTSQTCRVNGIKMEMKGQPHPLCSNLQNYSGQFYDQTVGFSQQDTKAGSFSISDASCLLQGTSAKNSELLSPGANQVTSTVDSLDSHDLEGVQIDFDAIIDDGDHSSLMSGALSPSIIQNLSHSSSRLTTPRASLPFPALSMSTTNMAIGDMSSLLTSLAEESKFLAVMQ

SEQ ID NO: 789986 - protein, 775 aa, Homo sapiens
  misc_feature (755)..(755): Xaa can be any naturally occurring amino acid
  misc_feature (765)..(765): Xaa can be any naturally occurring amino acid
MQPQNVQGLSKVSEEPSTSSDERASLIKKEIHGSLPHVAEPSVPYRGTVFAMDPRNGYMEPHYHPPHLFPAFHPPVPIDARHHEGRYHYDPSPIPPLHMTSALSSSPTYPDLPFIRISPHRNPAAASESPFSPPHPYINPYMDYIRSLHSSPSLSMISATRGLSPTDAPHAGVSPAEYYHQMALLTGQRSPYADIIPSAATAGTGAIHMEYLHAMDSTRFSSPRLSARPSRKRTLSISPLSDHSFDLQTMIRTSPNSLVTILNNSRSSSSASGSYGHLSASAISPALSFTYSSAPVSLHMHQQILSRQQSLGSAFGHSPPLIHPAPTFPTQRPIPGIPTVLNPVQVSSGPSESSQNKPTSESAVSSTGDPMHNKRSKIKPDEDLPSPGARGQQEQPEGTTLVKEEGDKDESKQEPEVIYETNCHWEGCAREFDTQEQLVHHINNDHIHGEKKEFVCRWLDCSREQKPFKAQYMLVVHMRRHTGEKPHKCTFEGCTKAYSRLENLKTHLRSHTGEKPYVCEHEGCNKAFSNASDRAKHQNRTHSNEKPYVCKIPGCTKRYTDPSSLRKHVKTVHGPEAHVTKKQRGDIHPRPPPPRDSGSHSQSRSPGRPTQGALGEQQDLSNTTSKREECLQVKTVKAEKPMTSQPSPGGQSSCSSQQSPISNYSNSGLELPLTDGGSIGDLSAIDETPIMDSTISTATTALALQARRNPAGTKWMEHVKLERLKQVNGMFPRLNPILPPKAPAVSPLIGNGHHXSNKHLATWGXGPIEPFSPGA

SEQ ID NO: 789987 - protein, 156 aa, Homo sapiens
MHFQKVRTKEEKEDNLPKASQCQKQSNSKDYALSLHHAVLYLQDTFFLRQVLTWSSRLESSGTITTHCGLELLGSGDSPTLASQVAGTTGMCHYTQLYFVFFVETDFHHVAQAGLELLDSSNPPASASQSAWNYRHETLLLADNYSYCYKSGKEYD

SEQ ID NO: 789988 - protein, 83 aa, Homo sapiens
RWDIDAVMLMMVVMVMMVVMDATTAFSSLLPVAKWLSFAEHLPCSSRCCAYLISSSAQAHNAGTIIHILQMRTLRCRVVSDPF

SEQ ID NO: 789989 - protein, 151 aa, Homo sapiens
DADDGGDVDEGSDAVDGGDTDDGGDADDGGGILITAVMLMMAVILMIAVMLMMAVMLMMVMMAVILMMVVMLLMAVMLLMAVMLLMVVMLMAVMLFMAVMLLMVVDIDNSSDADDGGDAVDGSDAVDGNDTDDGGDADDGDDADDGGDVDE

SEQ ID NO: 789990 - protein, 156 aa, Homo sapiens
QLLLIFILSNTDCYKIKVDYLRVFQTLINLGEYFGLIGQKVSSFVFQVKWRVLYSVYQKKSSSLGTIPHMLNQISHLKSVPTQFLHFQAVNPTYRSPQVCFCTFLKRVEGVDGRDKMRGFAVRPSIYSTHFSQVSLGSGHRTRCWEGGSNGEGLRN

SEQ ID NO: 789991 - protein, 81 aa, Homo sapiens
RRKHSRSEVARGRRCLSPAARLGPWPPTPTAPALGGPGPAAGAALPDQSFLWNVFQSCHLAPPRTILLVLDSQVAPDGSFD

SEQ ID NO: 789992 - protein, 132 aa, Homo sapiens
RRKHSRSEVARGRRCLSPAARLGPWPPTPTAPALGGPGPAAGAALPDQSFLWNVFQSCHLAPPRHLPPPPQLPRTRVPTPAANPVPCRLPRGLPRHLPGPQRPPPSPAPTSAVSPAPARTPAGAPEPYPDRR

SEQ ID NO: 789993 - protein, 195 aa, Homo sapiens
MALVTVQRSPTPSTTSSPCASEADSGEEECRSQPRSISESFLTVKGAALFLPRGNGSSTPRISHRRNKHAGDLQQHLQAMFILLRPEDNIRLAVRLESTYQNRTRYMVVVSTNGRQDTEESIVLGMDFSSNDSSTCTMGLVLPLWSDTLIHLDGDGGFSVSTDNRVHIFKPVSVQAMWVDRDSRNKHCDVLLVEE

SEQ ID NO: 789994 - protein, 202 aa, Homo sapiens
MTLSTLARKRKAPLACTCSLGGPDMIPYFSANAVISQNAINQLISESFLTVKGAALFLPRGNGSSTPRISHRRNKHAGDLQQHLQAMFILLRPEDNIRLAVRLESTYQNRTRYMVVVSTNGRQDTEESIVLGMDFSSNDSSTCTMGLVLPLWSDTLIHLDGDGGFSVSTDNRVHIFKPVSVQAMWVDRDSRNKHCDVLLVEE

SEQ ID NO: 789995 - protein, 70 aa, Homo sapiens
RRVKRLGLLLRNQLDWVSLIGENTYISIELPADFCILARFGASASLSHRNCTLIFVLYVSYSDTCSHPLP

SEQ ID NO: 789996 - protein, 62 aa, Homo sapiens
PRRDEETMPGAHTRQLLFENGDLRALFSSNCRGISGVGEETCFTSPTSGPVWKGWRRCGQVQ

SEQ ID NO: 789997 - protein, 84 aa, Homo sapiens
MGLVGPGISSQLAVEFSRGTGPACSSIFIIFNRSRFFLLPSGYWEAPGKSWDSGVPQYGLPALGQQGQFGFLSNILAGCRGSCL

SEQ ID NO: 789998 - protein, 127 aa, Homo sapiens
  misc_feature (123)..(123): Xaa can be any naturally occurring amino acid
EAVPGRAGSCGTAMAEPASVTVTFDDVALYFSEQEWEILEKWQKQMYKQEMKTNYETLDSLGYAFSKPDLITWMEQGRMLLISEQGCLDKTRRTTSPPTDEQLNMKNTGKLLCFGDEGTPRTXEEDC

SEQ ID NO: 789999 - protein, 134 aa, Homo sapiens
MGFDVLLDQVGGMGRFQICLIAFFCITNILLFPNIVLENFTAFTPSHRCWVPLLDNDTVSDNDTGTLSKDDLLRISIPLDSNLRPQKCQRFIHPQWQLLHLNGDLPPTQMSQTREPCVDGWVYDRKLFPLHHRD

SEQ ID NO: 790000 - protein, 131 aa, Homo sapiens
PPPGPLWQPTFFPSALRLFGVSQPPWKTLELRADPPPLQGKSLESTGSRRPGRLDLEAEQGGSEGRLGEGCTAEGPPTPKPKSRSAQLPAGRAAPGSALPPRAPRPSTPTRGAVTRGNRRPELSTSGPAPG

SEQ ID NO: 790001 - protein, 122 aa, Homo sapiens
RDHVTKFTSDQRHKSKKSSPGTQDLLGIQTGIQEKDIQMSQQILTVQEDQGSAYVDYSMTSCNHNALNNICYYRRGFVKRKLSPNEKEEKHRAQHLTHNKFLLNGCLIKNDHVKDLEFQNIT

SEQ ID NO: 790002 - protein, 119 aa, Homo sapiens
LVHSGFQAQSLGHQSPVLDLLLLSFYPVLPRCPLQLPLLGTGLSLYYLSHRQFAQLPSKSAPHGTQGSPFLPAFGLVQVLLRPPSRKGLLQGDYLSLSPEVPLSKRGIPPGHMTYPPDN

SEQ ID NO: 790003 - protein, 83 aa, Homo sapiens
QARSSNMDTEVLWGHRFTPVLTLEKGFYEVDYNTFHDTYETNTPSCCAKELAEMKREGRLLQYLPSPPLLGGCAEAGLDAEVF

SEQ ID NO: 790004 - protein, 83 aa, Homo sapiens; identical to SEQ ID NO: 790003

SEQ ID NO: 790005 - protein, 83 aa, Homo sapiens; identical to SEQ ID NO: 790003

SEQ ID NO: 790006 - protein, 83 aa, Homo sapiens; identical to SEQ ID NO: 790003

SEQ ID NO: 790007 - protein, 106 aa, Homo sapiens
LVKTCGSMPQDDLRRLGLPKCYNYRREPPHPAWIFKFEISSGAVMFRRPSPSRDWLNTHFHFLLIFTVLHFIFNSLICIELTLKYQTNMFNAFVYLSSRSVFPATC

SEQ ID NO: 790008 - protein, 109 aa, Homo sapiens
STFFCHDFSRSLRLGSLTSRNKGGLPGPPRVQGCLGLQPRFGQLELCLGGWSSHLPLWALRAQGCLGLQPRLGRLQQHPGSSHPNLEGAGLALVPGFCLLHGACSPGHA

SEQ ID NO: 790009 - protein, 72 aa, Homo sapiens
ITTNTDPSCSCVTPLDFNHCLKNREDNGLPMLSTNAMSWKTISAMEKRGARETQQQRKRVFRGRGVNSAKCC

SEQ ID NO: 790010 - protein, 359 aa, Homo sapiens
MAPNGTASSFCLDSTACKITITVVLAVLILITVAGNVVVCLAVGLNRRLRNLTNCFIVSLAITDLLLGLLVLPFSAIYQLSCKWSFGKVFCNIYTSLDVMLCTASILNLFMISLDRYCAVMDPLRYPVLVTPVRVAISLVLIWVISITLSFLSIHLGWNSRNETSKGNHTTSKCKVQVNEVYGLVDGLVTFYLPLLIMCITYYRIFKVARDQAKRINHISSWKAATIREHKATVTLAAVMGAFIICWFPYFTAFVYRGLRGDDAINEVLEAIVLWLGYANSALNPILYAALNRDFRTGYQQLFCCRLANRNSHKTSLRSNASQLSRTQSREPRQQEEKPLKLQVWSGTEVTAPQGATDR

SEQ ID NO: 790011 - protein, 135 aa, Homo sapiens
SPSIARRSRGPAAPPPARPGPGPARPPPRMELSAIGEQVFAVESIRKKRVRKGKVEYLVKWKGWPPKYSTWEPEEHILDPRLVMAYEEKYGVLGTAGWGLGPAQRLPRSLLLAWQGLLGQGRGVRWGRPAQPAAG

SEQ ID NO: 790012 - protein, 151 aa, Homo sapiens
YAHSLFSLVLNVGLKVSWTLVSALDWQLALPAHLNPQAAGHGKASGSLMSDSRLTTNDLHIVPYLEDMSEREDQNPTSTSERNQPAFTWQEVGSGICMGFPLQQTEAALACPLPTKLFWPWKGAHSSSIRYSLGRADSQGGSSFYSQGAGI

SEQ ID NO: 790013 - protein, 83 aa, Homo sapiens
LNVAGRGRILPKKAAADLLNVSEQSFFKQKSVTSKHNVNGFINLLNSSFCYLLGLNLFDLRTPLHCFKKVFENLKELFFGYIY

SEQ ID NO: 790014 - protein, 85 aa, Homo sapiens
EVEEPLSACGGASVLAVLMAPSSWGSLSSGPASPARPSCLLGARGASPGQSLCLGPASLAALPPAMGGRRGGSRPVLVFAELLVD

SEQ ID NO: 790015 - protein, 85 aa, Homo sapiens; identical to SEQ ID NO: 790014

SEQ ID NO: 790016 - protein, 111 aa, Homo sapiens
REKKMMMEIIISIIRLRLAALCPFRFEPLYREKLCQILYRSFLYHQVDIILKLCSLPWHHHNNHTATRKACPILVKHLGIGMQIDNKNKRLQNWEELGMVAHSCNPCFSGG

SEQ ID NO: 790017 - protein, 643 aa, Homo sapiens
MVDAGGVENITQLPQELPQMMAAAADGLGSIAIDTTQLNMSVTDPTAWATAMNNLGMVPVGLPGQQLVSDSICVPGFDPSLNMMTGITPINPMIPGLGLVPPPPPTEVAVVKEIIHCKSCTLFPQNPNLPPPSTRERPPGCKTVFVGGLPENATEEIIQEVFEQCGDITAIRKSKKNFCHIRFAEEFMVDKAIYLSGYRMRLGSSTDKKDSGRLHVDFAQARDDFYEWECKQRMRAREERHRRKLEEDRLRPPSPPAIMHYSEHEAALLAEKLKDDSKFSEAITVLLSWIERGEVNRRSANQFYSMVQSANSHVRRLMNEKATHEQEMEEAKENFKNALTGILTQFEQIVAVFNASTRQKAWDHFSKAQRKNIDIWRKHSEELRNAQSEQLMGIRREEEMEMSDDENCDSPTKKMRVDESALAAQAYALKEENDSLRWQLDAYRNEVELLKQEKEQLFRTEENLTKDQQLQFLQQTMQGMQQQLLTIQEELNNKKSELEQAKEEQSHTQALLKVLQEQLKGTKELVETNGHSHEDSNEINVLTVALVNQDRENNIEKRSQGLKSEKEALLIGIISTFLHVHPFGANIEYLWSYMQQLDSKISANEIEMLLMRLPRMFKQEFTGVGATLEKRWKLCAFEGIKTT

SEQ ID NO: 790018 - protein, 643 aa, Homo sapiens; identical to SEQ ID NO: 790017

SEQ ID NO: 790019 - protein, 643 aa, Homo sapiens; identical to SEQ ID NO: 790017

SEQ ID NO: 790020 - protein, 306 aa, Homo sapiens
TPSVFALLPYSDHNINYLSCLTSLFTKVEQIVAVFNASTRQKAWDHFSKAQRKNIDIWRKHSEELRNAQSEQLMGIRREEEMEMSDDENCDSPTKKMRVDESALAAQAYALKEENDSLRWQLDAYRNEVELLKQEKEQLFRTEENLTKDQQLQFLQQTMQGMQQQLLTIQEELNNKKSELEQAKEEQSHTQALLKVLQEQEINVLTVALVNQDRENNIEKRSQGLKSEKEALLIGIISTFLHVHPFGANIEYLWSYMQQLDSKISANEIEMLLMRLPRMFKQEFTGVGATLEKRWKLCAFEGIKTT

SEQ ID NO: 790021 - protein, 325 aa, Homo sapiens
TPSVFALLPYSDHNINYLSCLTSLFTKVEQIVAVFNASTRQKAWDHFSKAQRKNIDIWRKHSEELRNAQSEQLMGIRREEEMEMSDDENCDSPTKKMRVDESALAAQAYALKEENDSLRWQLDAYRNEVELLKQEKEQLFRTEENLTKDQQLQFLQQTMQGMQQQLLTIQEELNNKKSELEQAKEEQSHTQALLKVLQEQLKGTKELVETNGHSHEDSNEINVLTVALVNQDRENNIEKRSQGLKSEKEALLIGIISTFLHVHPFGANIEYLWSYMQQLDSKISANEIEMLLMRLPRMFKQEFTGVGATLEKRWKLCAFEGIKTT

SEQ ID NO: 790022 - protein, 216 aa, Homo sapiens
MVDAGGVENITQLPQELPQMMAAAADGLGSIAIDTTQLNMSVTDPTAWATAMNNLGMVPVGLPGQQLVSDSICVPGFDPSLNMMTGITPINPMIPGLGLVPPPPPTEVAVVKEIIHCKSCTLFPQNPNLPPPSTRERPPGCKTVFVGGLPENATEEIIQEVFEQCGDITAIRKSKKNFCHIRFAEEFMVDKAIYLSGTLHYIRSFLGILLCFVMLI

SEQ ID NO: 790023 - protein, 116 aa, Homo sapiens
GTADLPRPCAMVVPDFELICEIMLMAEGFLEARLLARKFITLYTLCKELLSKQDHYDWGLRAIKSVLVVAGSLKRGDPSRAEDQVLMRALRDFNIPKIVTDDLPVFMGLIGDLFPA

SEQ ID NO: 790024 - protein, 75 aa, Homo sapiens
TGLLQVFELANVHPPQGLRECRSLPWEVSPAIRGSPRHFLPIPIQLSKPMPKRPPVSRVPAHLSQCVLNALPSVS

SEQ ID NO: 790025 - protein, 111 aa, Homo sapiens
MNSAVTSREHSTYSQRSDVVLSSQPMAKAGGQIGSPGVRSSCLAYDILDILPCYLCIFLGIQHFLTALGGLMAVPFILAKDLCLQQDPLTQSYLISTIFFAPASACSCKCF

SEQ ID NO: 790026 - protein, 165 aa, Homo sapiens
KLGSFSKTLGIKLKKNMGGLGGLVHGKMGRANSANGKNGDSAERGKEKKAKSRKGSKEESGASASTSPSEKTTPSPTDKAAGASPAEKGGGPRGDAWKYSTDVKLSLNILRAAMQGERKFIFAGLLLTSHRHQFHEEMIGYYLTSAQERFSAEQEQRRRDAATAA

SEQ ID NO: 790027 - protein, 105 aa, Homo sapiens
MLCAIRNPTTDLSEEKYKLLLSSAHVNIGFTAETEPEQGLMMQSWELREQELDDVKGLPPLFPLLHPMCKVCELTPGSYGSICPPLVHLYHVAMKNVNKGPSNCE

SEQ ID NO: 790028 - protein, 44 aa, Homo sapiens
ISTSFLADEEFEAPSDEELTLSHIANDTESKPVIHETCICTHHL

SEQ ID NO: 790029 - protein, 124 aa, Homo sapiens
MKGSRSHRKLLRAGPGTGSDTFHQPPLLPPAPKEKAEPALGAWMGGQEPGFQARIPDGSPGALMGGQEPRCEARGPDSRPGAWMGGQEPRCEARSLAGSPGAQVGGQEPRCEARSPHGRPGAQM

SEQ ID NO: 790030 - protein, 101 aa, Homo sapiens
HLCSLPSVHCPESHAGWVPRTLGIDYLSLSAHMVYTVGLHQYKSPDPGQARCLTPVIPALWEAEAGGTLRSGVSDQPGPHDETPSLLKNTQKLAGRSGRCL

SEQ ID NO: 790031 - protein, 118 aa, Homo sapiens
LPNGSKITMYSDLFINSLLGNISIRKREEWCSCLGDLFISPSYLLSLYLAKARPCFTDFTFLSSIFTSDLRDTWFTHVKIPAHFSRQFIDISFCQYCWEQARVKYLIPFSLYSYTHKL

SEQ ID NO: 790032 - protein, 96 aa, Homo sapiens
HVEAVAQDFLLLSLHFRKTLQVRFQEHAFRRMERGVLLVIAKIKTEEIRGERMLIGFIGLVMWFFFFFETGSSFAVQAVVQWCHHGSLQPPTPELK

SEQ ID NO: 790033 - protein, 91 aa, Homo sapiens
FVCCVLVCVLCVRVCCAFVCAVRLCVCCVCMCVRVCAVRLCAVCACVCVCVLCVCVCAVCSSVCCVCCAFVCVLCSCVCCVHVCKITYLYI

SEQ ID NO: 790034 - protein, 96 aa, Homo sapiens
LFTAAVWGCGGQATKQGWLRARSAWDQSAGHLGTPQALSRFVGVRYLALGPDGRAGVPGCCVPTSTETSASTLCRACKVWPLCWTPWGTGLCRTRP

SEQ ID NO: 790035 - protein, 118 aa, Homo sapiens
MQLEYKSMFIGFYSYHSMYSIHVNYWMKSPIIYIFGYNHTILELKTIQVSVPAFSGYLMALHNHFHPNLAKSKFKHFCIYSKTNSLSCLISVTLTSREGTLPSISLPPLTFLTIKNIQ

SEQ ID NO: 790036 - protein, 74 aa, Homo sapiens
MAEAPGPSGESRGHSATQLPAEKTVGGPSRGCSSSVLRVSQLVLQAISTHKGLTLAALKKELRNAGYEVRRKSG

SEQ ID NO: 790037 - protein, 230 aa, Homo sapiens
MPGVKLTTQAYCKMVLHGAKYPHCAVNGLLVAEKQKPRKEHLPLGGPGAHHTLFVDCIPLFHGTLALAPMLEVALTLIDSWCKDHSYVIAGYYQANERVKDASPNQVAEKVASRIAEGFSDTALIMVDNTNVYDGLRSAYGHVYEHHETTHGGCRGRKTMNYCEDLARGTRGISAYAPGTAGPNEKLVALPITTWMNIANDWTNPEINKAAYTGAKAGTAVTGLRAFPLR

SEQ ID NO: 790038 - protein, 197 aa, Homo sapiens
MPGVKLTTQAYCKMVLHGAKYPHCAVNGLLVAEKQKPRKEHLPLGGPGAHHTLFVDCIPLFHGTLALAPMLEVALTLIDSWCKDHSYVIAGYYQANERVKDASPNQVAEKVASRIAEGFSDTALIMWTNCEDLARGTRGISAYAPGTAGPNEKLVALPITTWMNIANDWTNPEINKLSYTGAKAGTAVTGLRAFPLR

SEQ ID NO: 790039 - protein, 69 aa, Homo sapiens
WDAYRKLMGLPQSRVTDYRAKITQKFRPVGSKPGRRVESVLFCKKAGNADSIHCPDTPSLPLPAKAISQ

SEQ ID NO: 790040 - protein, 108 aa, Homo sapiens
  misc_feature (1)..(1): Xaa can be any naturally occurring amino acid
XLAGQHLWRAGVQWRNLSSLQPPPPGFKRFSYLSLPSSWNYRHVPPHSANFIFLVETGFHHVGQASLKLLTSGNLPASASQNAGITGLSYCASDTYLIFILRMCSKIL

SEQ ID NO: 790041 - protein, 37 aa, Homo sapiens
PPFPHKGLETTINTTTRAGDFVTDSYYILIVLGLRQF

SEQ ID NO: 790042 - protein, 111 aa, Homo sapiens
IPDCPRGEWWSYVIGTCSHTLLCTPPGSPKSPHAGSPHLSCSRKHVRKQSRRLLRGRHESTLVLKPFPNVLVDCVVLPKLPAAGAREVTPAGAAAGGSPRWLALFLFCFFF

SEQ ID NO: 790043 - protein, 127 aa, Homo sapiens
QRQDLTLLPRAECSGVVTIHCSLSFMGSSHPQSSHLSLPSPSWDCSVRHHTWLIFFLLFVETGSRHVAQAGLELLGSSDLAALTSQSAEITGMSHHTLPAFHFYVSTCAVCIQQLFFLFAFLFCPLL

SEQ ID NO: 790044 - protein, 67 aa, Homo sapiens
SCLPPLPETMTMFENVTRALARQLNPRGDLTPLDSLIDFKRFHPFCLVLRKRKSTLFWGARYVRTDY

SEQ ID NO: 790045 - protein, 117 aa, Homo sapiens
ERKGQYSRANKSILYQGRGKSSPELWIRINLQEGGEIAWSHLVSFLFSLAFFFVLSSTILKSVKYKHYRIGHLESWVLDLVWSAIINSVILDKPLGLLGPQSPHLEIRRQIILRVLS

SEQ ID NO: 790046 - protein, 112 aa, Homo sapiens
RSDGPLGSRAGAPGLPAPEAAPPPARLPPRCPVTLRRRGADVPAPMMRKSRLGMSWSLSTRPRLIRSHKGLTSSGGSGPMVREVSEYQLWGTQSSCHLLLCLAWESWKETAA

SEQ ID NO: 790047 - protein, 106 aa, Homo sapiens
MPTMSHSAREAPSSLKVCSASEVFILSFHPPESSEDLISISQRESHLAMDMMTSALPKPRLISGLSSSTLHSGNKSIRSDAVLHSSDVPGWSWVPRIHLSVNKQGR

SEQ ID NO: 790048 - protein, 334 aa, Homo sapiens
DLGVGGCSLWDDPARFIVVPAAYALALGLGLPANVAALAMFIRSGGRLGQALLLYLFNLALVDEFFTLTLQLWLTYYLGLARRPPATRPGPPTTCPPMRRWSSPRSSACAAAASYAVPGPGRLPAWPGAYGAPRALPAPSPGWRAWPLPAWSTAGQARGWPPPRWPSRPPSCWCSGQREPGAGAQGALWPGPGPCNRRRAPARGQDHGPGVPAGLRPQSGAQPPAAGALGGWGGRQRRPVSRRLHARHPAHPQPGAAEPQQLPGPTHLLLLRAPLPPGLLLGTELPPGEGGAQGAWGLLGLLLESLLASPPVSPPCHPPSGIQGGESSLERPRF

SEQ ID NO: 790049 - protein, 105 aa, Homo sapiens
RYPPPTPRKQGSYFFFFFHTESHSIAQAGVQWCDLGSLQTPPPWFKRFSCLSLPSSWITGMSYEAWQIFVFLVETGFHRVGQAGLKLLISSDPRPRPPEVLGLQA

SEQ ID NO: 790050 - protein, 123 aa, Homo sapiens
AKSPGSGTPAKRNLHAEPKTCGALLPSSRLPPSLRFSVVAAVADKCDVGRRELPLSQAASASPSPALAHSRGRRRIYLQGGRASAGEQERRALCAESARIRPAPAHARARGAAAGREGGGCAA

SEQ ID NO: 790051 - protein, 100 aa, Homo sapiens
KDYFSLRVWHSKYLKENKGHLVFLCSGMKGFHKPGHLASPRGPAGLAVKTVKHFYTAFRVHLPAWLPVLVTPAFSNSDVTEGLIHGTRGIFRTPGQCHTQ

SEQ ID NO: 790052 - protein, 70 aa, Homo sapiens
SDGTRINENPPLTALLHFPKPQSLVLVVFCGSQNSGNTTSHLGPPRPPVIEALVPFWPHCLCGALLEMEK

SEQ ID NO: 790053 - protein, 126 aa, Homo sapiens
AKAESGTPRLKGSTHLGLPKCWDYRCEPLCLADTLQQELRRAARGPAWGPVAAQTHGALWGPLGGGALPHTIFLCSGPRRWWSGLSVPSTCHSKWLPFMGLCPASPQVPPSLQDMPWSVPSLESKI

SEQ ID NO: 790054 - protein, 122 aa, Homo sapiens
TVSSIGAQKKLVGWAHMTGALGWEKHFPVAQWQRRTFSRPVTFNVLAGGEEREEGGMGPEGRVTLKMADALSAFCQALRPHFTCVISPNPPNHPRREKKEHSEKRQLHSFPSILPLGAQDLS

SEQ ID NO: 790055 - protein, 116 aa, Homo sapiens
MYPLTLWKPWSFCPDLAVPQNHNDSRVTLFEGDNFQGCKFDLVDDYPSLPSMGWASKDVGSLKVSSGAWVAYQYPGYRGYQYVLERDRHSGEFCTYGELGTQAHTGQLQSIRRVQH

SEQ ID NO: 790056 - protein, 497 aa, Homo sapiens
PLGGCGWTFTTSYKLKRHLQSHDKLRPFGCPAEGCGKSFTTVYNLKAHMKGHEQENSFKCEVCEESFPTQAKLSAHQRSHFEPERPYQCAFSGCKKTFITVSALFSHNRAHFREQELFSCSFPGCSKQYDKACRLKIHLRSHTGERPFLCDFDGCGWNFTSMSKLLRHKRKHDDDRRFMCPVEGCGKSFTRAEHLKGHSITHLGTKPFVCPVAGCCARFSARSSLYIHSKKHLQDVDTWKSRCPISSCNKLFTSKHSMKTHMVKRHKVGQDLLAQLEAANSLTPSSELTSQRQNDLSDAEIVSLFSDVPDSTSAALLDTALVNSGILTIDVASVSSTLAGHLPANNNNSVGQAVDPPSLMATSDPPQSLDTSLFFGTAATGFQQSSLNMDEVSSVSVGPLGSLDSLAMKNSSPEPQALTPSSKLTVDTDALTPSSTLCENSVSELLTPTKAEWNVHPDSDFFGQEGETQFGFPNAAGNHGSQKETDLITVTGSSFLV

SEQ ID NO: 790057 - protein, 497 aa, Homo sapiens; identical to SEQ ID NO: 790056

SEQ ID NO: 790058 - protein, 96 aa, Homo sapiens
SISDVQRPLYARRQERICSMTWVLIAVMMMASDQSTVDLLVSARKRNCRTFGLANSRKSLKPAKYPGSEALLRWGNEHEGREGPAFWVPGAAPDKD

SEQ ID NO: 790059 - protein, 42 aa, Homo sapiens
PLSRDLNESLFLRTQQPALISPTDMKATETGQDSAPGLLDLL

SEQ ID NO: 790060 - protein, 122 aa, Homo sapiens
CVQGGLWPSGGMRQAGGGGAQGKVPNPCLTLSVERKRKPPVPVPVDPQGAGQGPPASQPRMSPAGVVSPVARARSAVKLAGPDSQERPRELVQAGFLSPPLRLLLWVSLGPGTCIAAAGVWV

SEQ ID NO: 790061 - protein, 103 aa, Homo sapiens
VLSYLLSPVMTYHILNGGRARIISLILHMLILGLGERFPDLPKLPQFVNDGGGMGATLNLQLPKTFPLSQAFVECVISGIHFGQLWFLGYCWLPIFLDLNSSN

SEQ ID NO: 790062 - protein, 116 aa, Homo sapiens
FHFLTVTNDAAMNIQSFCVDMFSILLGIRLGLELLGYIHGNFMFNTLRRCQTVFQSGCTIQQFFYILVNTYFCYLSYCSYHSRCDMGAHPEFLFFNGKIYFKIYCYFLEKEDCVKM

SEQ ID NO: 790063 - protein, 221 aa, Homo sapiens
MAADTPGKPSASPMAGAPASASRTPDKPRSAAEHRKSSKPVMEKRRRARINESLAQLKTLILDALRKESSRHSKLEKADILEMTVRHLRSLRRVQVTAALSADPAVLGKYRAGFHECLAEVNRFLAGCEGVPADVRSRLLGHLAACLRQLGPSRRPASLSPAAPAEAPAPEVYAGRPLLPSLGGPFPLLAPPLLPGLTRALPAAPRAGPQGPGGPWRPWLR

SEQ ID NO: 790064 - protein, 247 aa, Homo sapiens [sequence omitted]

SEQ ID NO: 790065 - protein, 273 aa, Homo sapiens
MAADTPGKPSASPMAGAPASASRTPDKPRSAAEHRKVGSRPGVSGATGGREGRGTQPVPDPQSSKPVMEKRRRARINESLAQLKTLILDALRKEVSRGRRPETRSLGRSCPGPPAYPRPQSSRHSKLEKADILEMTVRHLRSLRRVQVTAALSADPAVLGKYRAGFHECLAEVNRFLAGCEGVPADVRSRLLGHLAACLRQLGPSRRPASLSPAAPAEAPAPEVYAGRPLLPSLGGPFPLLAPPLLPGLTRALPAAPRAGPQGPGGPWRPWLR

SEQ ID NO: 790066 - protein, 86 aa, Homo sapiens
MGIKIVFHHGFNLHFLIMRLNNFFMFIFHSHFCEMPFFCYLSPCPQFCFIRGSYVLWIQMPFVHICCKNLLSVNDLVLLWYISEKN

SEQ ID NO: 790067 - protein, 82 aa, Homo sapiens
KNRGLYRHILLYGPPGTGKTLFAKKLALHSGMDYAIMTGGDVAPMGREGVTAMHKLFDYTEVGRPEPCFQPWPGATEPGRGV

SEQ ID NO: 790068 - protein, 247 aa, Homo sapiens
KNRGLYRHILLYGPPGTGKTLFAKKLALHSGMDYAIMTGGDVAPMGREGVTAMHKLFDWANTSRRGLLLFVDEADAFLRKRATEKISEDLRATLNAFLYRTGQHSNKFMLVLASNQPEQFDWAINDRINEMVHFDLPGQEERERLVRMYFDKYVLKPATEGKQRLKLAQFDYGRKCSEVARLTEGMSGREIAQLAVSWQATAYASEDGVLTEAMMDTRVQDAVQQHQQKMCWLKAEGPGRGDEPSPS

SEQ ID NO: 790069 - protein, 119 aa, Homo sapiens
KNRGLYRHILLYGPPGTGKTLFAKKLALHSGMDYAIMTGGDVAPMGREGVTAMHKLFDWANTSRRGLLLFVDEADAFLRKRATEKISEDLRATLNAFLYRTGQHSNNPSHVSHGGSSPA

SEQ ID NO: 790070 - protein, 56 aa, Homo sapiens
MGQSLTPWGSACLACSCRGRTLLWAAPGVTLALLGLPLVHSLLLFVDEADAFLRKR

SEQ ID NO: 790071 - protein, 67 aa, Homo sapiens
MTPACELIQTPRKPEIGSRVGWSLRQQFGPSRSLGPRGQTSGSDQSTAGWAWQPAGNLDLAIKLHST

SEQ ID NO: 790072 - protein, 143 aa, Homo sapiens
CSSGLKYSMELDEMDEVKFFSQEKDLDGKIQNAPNSHSAQHVKMGYGAWYLKPKLGKKLRSDEPLIDPKLVLEKPDEPDILDGLYGPIAFKDFILSKGYEMPGIIQRLFARRGWTYDSVKTPIQRAMQVYKYKEDVTDASEED

SEQ ID NO: 790073 - protein, 130 aa, Homo sapiens
HPRSQDLQGFGGIPTPAHRSMRFMTLLFLTALAGALVCAYDPEAASAPGSGNPCHEASAAQKENAGEDPGLARQAPKPRKQRSSLLEKGLDGAKKAVGGLGKLGKDAVEDLESVGKGAVHDVKDVLDSVL

SEQ ID NO: 790074 - protein, 89 aa, Homo sapiens
SRWIKDLNVRHKTIKTLEENLGNTIRDIGMGKDFMSKTPKAMATKARMDKWDLIKLKSFCTAKETTIRVNRQPTEWEKKFLQATYLTKG

SEQ ID NO: 790075 - protein, 107 aa, Homo sapiens
MKRSKELITKNHSQEETSILRCWKCRKCIASSGCFMEYLENQVIKDKDDSVDAQNICHVWHMNVEALPEWISCLIQKAQWTVGKLNCPFCGARLGGFNFVSTPKCSC

SEQ ID NO: 790076 - protein, 110 aa, Homo sapiens
MKICAAIPTSRALPEVVRRMPRKRISGLEWLLQQDPGFSLVNTVKAGMIISFPSNNIYSSVCCCQSEIFKYEFSNSKKSSWIQEERHLGKNNVLYSAHDVSPEKVTSALK

SEQ ID NO: 790077 - protein, 82 aa, Homo sapiens
KVPVNMDGMDLGRVLWIHSCCFPGTARGARIAVWLGPRIRKESLLLEGPGAQKGGVARTCGNEAVSAITGEEWRAGSFIVWC

SEQ ID NO: 790078 - protein, 131 aa, Homo sapiens
VDTRAGPGREVRLVLQERTESGLRSPWLEGPFPQLSAESPASNMKAPRPGNCRQSYSQPESLLILHLEPLPSLPMWVLKKNSHSTTGVLQAFETQDSNCHRLAVTYAISKMGYQSLPHGALGDDVQAEAGV

SEQ ID NO: 790079 - protein, 90 aa, Homo sapiens
VVVVGDDSSVPVILEQAVVVVGDDSSVPVILEEAVVVVGDDSYVPVILEQAVVVVGDDSSVPVIPPEDLAVGQDADVEDSDTDGPDPVRV

SEQ ID NO: 790080 - protein, 214 aa, Homo sapiens
PGPVEEMLAEVNATITDIISALVTSTFIIEKQPPQVLKTQTKFAATVRLLVGGKLNVHMNPPQVKATIISEQQAKSLLKNENIRNECSGEILNNCCVMEYHQATGTLSAHFRNMSLKRIKQVVPEFVNASADAGGSSATYMDQAPSPAVCPQAPYNMYPQNPDHVLDQDGEFDLDETMDVARHVEELLRRPMDSLDSRLSPPAGLFTSARGSLS

SEQ ID NO: 790081 - protein, 160 aa, Homo sapiens
YGPESLGCPWRTPCRVSVSLQPWLWKATEVMAMFEQMRANVGKLLKGIDRYNPENLATLERYVETQAKENAYDLEANLAVLKLYQFNPAFFQTTVTAQILLKALTNLPHTDFTLCKCMIDQAHQEERPIRQILYLGDLLETCHFQAFCKPWMKTWTSWKV

SEQ ID NO: 790082 - protein, 137 aa, Homo sapiens
KELERQQRRRFRFHHLFLFPSLRTPAGYNPENLATLERYVETQAKENAYDLEANLAVLKLYQFNPAFFQTTVTAQILLKALTNLPHTDFTLCKCMIDQAHQEERPIRQILYLGDLLETCHFQAFCKPWMKTWTSWKV

SEQ ID NO: 790083 - protein, 166 aa, Homo sapiens
MVPVQPSLLSDHGHRPDPAEGPHQLAAHRLHPVQVHDRPGTSRRTANPTDFVPRGPAGDLPFPGLLQALDENMDLLEGITGFEDSVRKFICHVVGITYQHIDRWLLAEMLGDLSDSQLKVWMSKYGWSADESGQIFICSQEESIKPKNIVEKIDFDSVSSIMASSQ

SEQ ID NO: 790084 - protein, 139 aa, Homo sapiens
YGPESLGCPWRTPCRVSVSLQPWLWKATEVMAMFGADESQHVETQAKENAYDLEANLAVLKLYQFNPAFFQTTVTAQILLKALTNLPHTDFTLCKCMIDQAHQEERPIRQILYLGDLLETCHFQAFCKPWMKTWTSWKV

SEQ ID NO: 790085 - protein, 236 aa, Homo sapiens
YGPESLGCPWRTPCRVSVSLQPWLWKATEVMAMFGADESQHVETQAKENAYDLEANLAVLKLYQFNPAFFQTTVTAQILLKALTNLPHTDFTLCKCMIDQAHQEERPIRQILYLGDLLETCHFQAFWQALEMAGLAQALDENMDLLEGITGFEDSVRKFICHVVGITYQHIDRWLLAEMLGDLSDSQLKVWMSKYGWSADESGQIFICSQEESIKPKNIVEKIDFDSVSSIMASSQ

SEQ ID NO: 790086 - protein, 118 aa, Homo sapiens
KTIQNPVSLDKPGSHQHFPFSIYSNLHRRSSKRIPLCPPFFLHQSTRNAQDSQVIPHPYILSSLYTLYVPTLTPFLFLPQFPKSFRSVFWNSWYTSSLKYPISSVLLLHTLHLTCSQL

SEQ ID NO: 790087 - protein, 76 aa, Homo sapiens
YRKRLQETLYRKSVYSDSRNTRDISYDQESSPMTTRNSATQENSISKRKRKKRQRLGEKHKILIFNKREHTFFSRY

SEQ ID NO: 790088 - protein, 289 aa, Homo sapiens
HERVHEGPRDSRTGENGSCDGAKSELRRALVRAGKWESLGSFWTRRPMAQASRSGSLPPLVIVPPLRAQPGGTGEEQWERSRTGGLRWEVHCWPSGTSGGTPWWPTPADVSEDYEADAAAWRRGPAGGGPIPPALQRLRAVLLRLHREREQLLQARDCAYHLQSAVRLMKTLSPGSPSGGPSPLPQWCRDLQLHPSQGAVLRIGPGETLEPLLLARPIGLAAQCLEAVIEMQLRALGREPASPGLSSQLAELLFALPAYHTLQRKALSHVPGAARPFPTSRVLRLLTGE

SEQ ID NO: 790089 - protein, 63 aa, Homo sapiens
MPPHRPTGAAVTLTPVPGSVDRNSQWAASTPLGALYEWDFLLIRHFKRLSTKRTNSVKYWRDL

SEQ ID NO: 790090 - protein, 87 aa, Homo sapiens
ATHSLCYDFITLSQPSPGKPLTKSQATWMTTLSYDAARRAGGRAPCILGSGQGPKSLGEAGSQTEGQSPAPCHHPGEHHGTQQPEPR

SEQ ID NO: 790091 - protein, 189 aa, Homo sapiens
TAGPAGSLSSSGRRSLFRRMGFVKVVKNKAYFKRYQVKFRRRREGKTDYYARKRLVIQDKNKYNTPKYRMIVRVTNRDIICQIAYARIEGDMIVCAAYAHELPKYGVKVGLTNYAAAYCTGLLLARRMEEMYKKAHAAIRENPVYEKKPKKEVKKKRWNRPKMSLAQKKDRVAQKKASFLRAQERAAES

SEQ ID NO: 790092 - protein, 316 aa, Homo sapiens
TAGPAGSLSSSGRRSLFRRMGFVKVVKNKAYFKRYQVKFRRRREGKTDYYARKRLVIQDKNKYNTPKYRMIVRVTNRDIICQIAYARIEGDMIVCAAYAHELPKYGVKVGLTNYAAAYCTGLLLARRLLNRFGMDKIYEGQVEVTGDEYNVESIDGQPGAFTCYLDAGLARTTTGNKVFGALKGAVDGGLSIPHSTKRFPGYDSESKEFNAEVHRKHIMGQNVADYMRYLMEEDEDAYKKQFSQYIKNSVTPDMMEEMYKKAHAAIRENPVYEKKPKKEVKKKRWNRPKMSLAQKKDRVAQKKASFLRAQERAAES

SEQ ID NO: 790093 - protein, 174 aa, Homo sapiens
MRALTAIVGAWLDHILTHGIRFSLQGALQLKQDFGVVRELLEEEQWSLSPDLRQTLLMLSIFQQLDGALLCLLQQPLPKSQVHRRPPCCCACQEVQTTKLPSSCLNSLESLEPPLQPGTSPAQTGQLQSTLGGRGPSPEGYLVGNQQAWLALRQHQRPRWHLPFFSCLGTSPES

SEQ ID NO: 790094 - protein, 169 aa, Homo sapiens
HKQAMQGFKLYMPRGRYWRLRLCPEPPSAPSEYAGLVVRTVLEPVLQGLQGLPPQAQAPALGQALTAIVGAWLDHILTHGIRFSLQGALQLKQDFGVVRELLEEEQWSLSPDLRQTLLMLSIFQQLDGALLCLLQQPLPKSQVHRRPPCCCELLPFAHCFVCPKPYSHH

SEQ ID NO: 790095 - protein, 235 aa, Homo sapiens
HKQAMQGFKLYMPRGRYWRLRLCPEPPSAPSEYAGLVVRTVLEPVLQGLQGLPPQAQAPALGQALTAIVGAWLDHILTHGIRFSLQGALQLKQDFGVVRELLEEEQWSLSPDLRQTLLMLSIFQQLDGALLCLLQQPLPKSQVHRRPPCCCACQEVQTTKLPSSCLNSLESLEPPLQPGTSPAQTGQLQSTLGGRGPSPEGYLVGNQQAWLALRQHQRPRWHLPFFSCLGTSPES

SEQ ID NO: 790096 - protein, 72 aa, Homo sapiens
SGGDDDSDSDAAVDCGGGDDVIRAASTTTKYFSSFTKFNTCSDTSILQMRTPRLREVLGHLKATQLESHGSG

SEQ ID NO: 790097 - protein, 111 aa, Homo sapiens
GLSLPEIAPTLQSPFHLSCSAPTHSSLHLLVNFLYLHLNRDSQSSDHSSYAQSFNFSTYYNPPYPAQSPWTMSLILPFHIPSTPWNFSLFTTLGWQSPTWVKTCLLLPRAC

SEQ ID NO: 790098 - protein, 130 aa, Homo sapiens
RGSSAGTPWEMGGAAGEAPPQKAALAWTPAQAPLDVLPSFGGSGRRLRPAPYAPGSAEGHMPVPPSSWLPGSISVPRVFIQVQEKVVSDDKAGEEVSGFKVPEGLSLGKADHSLSSIGVKETHQMLGKTG

SEQ ID NO: 790099 - protein, 229 aa, Homo sapiens
MSGALDVLQMKEEDVLKFLAAGTHLGGTNLDFQMEQYIYKRKSDGIYIINLKRTWEKLLLAARAIVAIENPADVSVISSRNTGQRAVLKFAAATGATPIAGRFTPGTFTNQIQAAFREPRLLVVTDPRADHQPLTEASYVNLPTIALCNTDSPLRYVDIAIPCNNKGAHSVGLMWWMLAREVLRMRGTISREHPWEVMPDLYFYRDPEEIEKEEQAAAEKAVTKEEFPG

SEQ ID NO: 790100 - protein, 105 aa, Homo sapiens
MWRGTEAPCQLPVQTCQPCKAATRAADPAAPSSDCSPSHQLDGNLTRDPELGPPSPAASESLTHRNCEIINVFCSQVRWLTSQHFGRPRQPDHKVKRSRPSWPTW

SEQ ID NO: 790101 - protein, 104 aa, Homo sapiens
LQRNTQKGSRKISNKIRTNGDSNIREENVSRDSYIQLGLMLQTSKTVALILQPCWWPWEQPCLRICEHRGQAAAGFGISLKVRRVDTSFGKFGCNFWSSLYVGR

SEQ ID NO: 790102 - protein, 136 aa, Homo sapiens
SCRCWDPPGWACVSVCALQTGVQLGPEVMHPLGRREAALPGRRTWRPLCTPGPPPPTFPGHQEPQTRSGLAGEPWRPRIFLSSGLHWPPLTWPAAPCSHSKLLHCSAGPRVPGRGPWAAPLHCQPCSPHSAPPWGL

SEQ ID NO: 790103 - protein, 150 aa, Homo sapiens
PGSSNCLASASRVAGITGARLYIWLIFFEFFLVETGFLHVGQAGLELPTSGDPPASASQSAGIIEVRPCVGSGLGEACPTFTAWLCLVATAAVLGHRGPPASSFLVCADFNTVGYSRGTGSATSHTSGEVAAEESLPQGRGRPQDIWVPD

SEQ ID NO: 790104 - protein, 195 aa, Homo sapiens [sequence omitted]

SEQ ID NO: 790105 - protein, 120 aa, Homo sapiens
HKGFSTFLPTLVIFCLSFYFFKHAPLSMQMLRRSGAKLALFLISQRPDDLLVRLYLLHISLRSTTQKTQGLNTKRKTTVDLCWKEPFSQQSKMSNNTQVPFLQLFFLFLVQEHLHYMIIL

SEQ ID NO: 790106 - protein, 108 aa, Homo sapiens
VVSLFLRPGLCLGGCWRNSLGVQCCHCWIHGKLCLSPLGLVKFAVATKDLSGQPKPAVPVSVFSLAIAFSLLDPASSYMLWSSERCFLNCNIFLVGFMGSSASLHLGW

SEQ ID NO: 790107 - protein, 123 aa, Homo sapiens
GVRVRGRSCRRQPELRAAAAEDGCGRGGGHSADAWSRADRDHLSTVEKDTNGEVLWVWCYPSTTATLRNLLLRKCCLTDENKLLHPFVFGQYRRTWFYITTIEVPDSSILKDSFFYCPDRQRF

SEQ ID NO: 790108 - protein, 247 aa, Homo sapiens
GVRVRGRSCRRQPELRAAAAEDGCGRGGGHSADAWSRADRDHLSTVEKDTNGEVLWVWCYPSTTATLRNLLLRKCCLTDENKLLHPFVFGQYRRTWFYITTIEVPDSSILKMYLKHGSPVKMMESYIAVLTKGICQSEENGSFLSKDFDARKAYLAGSIKDIVSQFGMETVILHTALMLKKRIVVYHPKIEAVQEFTRTLPALVWHRQDWTILHSYVHLNADELEALQMCTGYVAGFVDLEVTRPTL

SEQ ID NO: 790109 - protein, 72 aa, Homo sapiens
GVRVRGRSCRRQPELRAAAAEDGCGRGGGHSADAWSRADRSHQGPRGRGKRLTPTSRRSKWRPRPSLCTDTP

SEQ ID NO: 790110 - protein, 72 aa, Homo sapiens; identical to SEQ ID NO: 790109

SEQ ID NO: 790111 - protein, 116 aa, Homo sapiens
GFGCEAGPAGGSQSCAPRRRKMAAAEVADTQLMLGVGLIEKDTNGEVLWVWCYPSTTATLRNLLLRKCCLTDENKLLHPFVFGQYRRTWFYITTIEVPDSSILKDSFFYCPDRQRF

SEQ ID NO: 790112 - protein, 79 aa, Homo sapiens
LHRGSGERTASEAAAWDEPLAIPLTSSVTSDKLLKVSGLQFCHLSRRKSSSPCVMKIQGETHGLTLNNMDTEQNLNLWF

SEQ ID NO: 790113 - protein, 144 aa, Homo sapiens
GAVKAVAWCPWKSNVPATGGGTSDRHICIWNVCSGACLSAVDALSQVCSTLWSPHYKELISGHGFAQNQLVIWKYPTMAKVAELKGHTSRVLTLTMSPDGATVASAAADETPRLWHCFELDPVWRREREKASAAKSSFIHQGIR

SEQ ID NO: 790114 - protein, 78 aa, Homo sapiens
VGSCQAPKTPRPSTQSHGGSTASGRPATLGLRVSPSAPAQPNPSATHLVTPNCSKTTLPVTQQLLKFKSLEQFTVIRP

SEQ ID NO: 790115 - protein, 108 aa, Homo sapiens
TVSPLPSSMDLLIQDSPDSSTSPKGKQPTSAENSVAKKEDKVPVKKQKTRTVFSSTQLCVLNDRFQRQKYLSLQQMQELSNILNLSYKQVGLFCPCNKVNKNWTNLHG

SEQ ID NO: 790116 - protein, 143 aa, Homo sapiens
GESSHEFQAYKTTALELRGGSRRAPGRRGHSWVVGRASSVSCKGCLALPARGAGGWDGGFNIKRRKSQIFLPSMPSSPPLPPPTHTLSLDAQRITYLPGRDPFPPHTPQLGPSYGDAARVGDYETRNGTLSPLIRLQTLIRPA

SEQ ID NO: 790117 - protein, 103 aa, Homo sapiens
MLASFSSLADRVLPIWWVEPYSWTSNFCTHQGSGTEKGPEYRHLNKPSSYSLSQTPISRTFQLTYKQKSILIVFEINPYCVLYCGDYLLYSVSMAIANKYMSP

SEQ ID NO: 790118 - protein, 70 aa, Homo sapiens
FSVLLPPALSIVTVDPSLSSMLPPACCDLTLFCCPGTSWASSRVPFLLLILCLAVWLLELSPGLRRMTNK

SEQ ID NO: 790119 - protein, 173 aa, Homo sapiens
MPGCRISACGPGAQEGTAEQRSPPPPRDPMPSSQPPPPTPTLTPTPTPGQSPPLPDAAGASAGAAEDQELQRWRQGASGIAGLAGPGGGSGAAAGAGGRALELAEARRRLLEVEGRRRLVSELESRVLQLHRVFLAAELRLAHRAESLSRLSGGVAQAELYLAAHGSRLKKGP

SEQ ID NO: 790120 - protein, 160 aa, Homo sapiens
MPGCRISACGPGAQEGTAEQRSPPPTPTLTPTPTPGQSPPLPDAAGASAGAAEDQELQRWRQGASGIAGLAGPGGGSGAAAGAGGRALELAEARRRLLEVEGRRRLVSELESRVLQLHRVFLAAELRLAHRAESLSRLSGGVAQAELYLAAHGSRLKKGP

SEQ ID NO: 790121 - protein, 104 aa, Homo sapiens
VQTITARLHVEIYIWTGPSFSLQSRKKRATHSFHPYAANCCCCCCFLPLRLLYDTDRCLKAFRPERTVGKIAAKGLTNDDLSVRKVLISCAKWTKRIKERRKIH

SEQ ID NO: 790122 - protein, 95 aa, Homo sapiens
MRGPVGTEEELPRLFAEEMENEDEMSEEEDGGLEAFDDFFPVEPVSLPKKKKPKKLKENKCKGKRKKKEGSNDELSENEEDLEEKSESEGSDYSP

SEQ ID NO: 790123 - protein, 139 aa, Homo sapiens
EIKSLTSRLDVVARQDFGRPKQVDHLRSGVQDQPGQHGETPSLLKIQKSAGREYMALGDRRPGGYMQRFQQQPQQGWKVANSLKHSRQLASFAKPAQEPLTRGSRSHLLGRGEEREERVLTELNINPELIMLNTKCLSI

SEQ ID NO: 790124 - protein, 109 aa, Homo sapiens
LLASCVHWGVLSPLEFCLLAANQESATQTMQPPGPLLFPCSMTWGPPPCSTHLHKHVFTMGVLSLNRPFLLLVGAREFLPMETQSKTTLKNTDPCERGHLLSPCPLADK

SEQ ID NO: 790125 - protein, 108 aa, Homo sapiens
GSGPEERCACGVCRRSVGVRAHFLPSPSAARFIYMFISLQRHIHFYSLCFQVYLYTSAQTHQISWDAHTRVDYRPPSPSQKAQISMRVGKARKRCGDSVGHRSSPALS

SEQ ID NO: 790126 - protein, 67 aa, Homo sapiens
NKSGVLEQLIWMVWLRASRETVVKLTVGAVVIWRLNGLTDPLSTRLLHLVAGRRPQFLLCGPPLGAA

SEQ ID NO: 790127 - protein, 112 aa, Homo sapiens
MCAPFLSSRRFQAGTQPASSLHGWPSSLPPNRGSKKSHGCLSRSRSPSPQSARHNVTGKCEGETSSPQESSSLAGMQALLKAVADQVLKGCSIWPMYILSHSFCNKEGGKGQ

SEQ ID NO: 790128 - protein, 122 aa, Homo sapiens
CQNATSTQDCDVYARLDLSEMELGSEARLKGRSGGSGYAGKGLGSFQYRLGWEAAVRRSVSVRTLEWDLGRAGSWELGTRRAGWGCSVLGAGNEEGWLGLPLSRGWQARGRVDVYLLGCGVS

SEQ ID NO: 790129 - protein, 132 aa, Homo sapiens
SAVMLLGGWLLLAFNAIFLLSWAVAPKGLCPRRSSVPMPGVQAVAATAMIVGLLIFPIGLASPFIKEVCEASSMYYGGKCRLGWGYMTAILNAVLASLLPIISWPHTTKVQGRTIIFSSATERIIFVPEMNK

SEQ ID NO: 790130 - protein, 107 aa, Homo sapiens
ETESWSVTRLECSGTISTYRAPGSSDSLASASQVAGTTGTHHHAQLIFLFSVEMGFHHVGQAGLKLTSGDPPALASQSAGIASVSHHTRPFFNQLVECACGLSYLAD

SEQ ID NO: 790131 - protein, 36 aa, Homo sapiens
LELRVLLSRTDNESQSCSDGEIQKCLFALSPPSVVF

SEQ ID NO: 790132 - protein, 68 aa, Homo sapiens
GERGNITPKLTATEGMRICIRRGSERLTLLPTRTVERGPEVRDTVTGVLEVKKLRVSFEINSTGQWLK

SEQ ID NO: 790133 - protein, 1007 aa, Homo sapiens
MKDEAGERDREVSSLNSKLLSLQLDIKNLHDVCKRQRKTLQDNQLCMEEAMNSSHDKKQAQALAFEESEVEFGSSKQCHLRQLQQLKKKLLVLQQELEFHTEELQTSYYSLRQYQSILEKQTSDLVLLHHHCKLKEDEVILYEEEMGNHNENTGEKLHLAQEQLALAGDKIASLERSLNLYRDKYQSSLSNIELLECQVKMLQGELGGIMGQEPENKGDHSKVRIYTSPCMIQEHQETQKRLSEVWQKVSQQDDLIQELRNKLACSNALVLEREKALIKLQADFASCTATHRYPPSSSEECEDIKKILKHLQEQKDSQCLHVEEYQNLVKDLRVELEAVSEQKRNIMKDMMKLELDLHGLREETSAHIERKDKDITILQCRLQELQLEFTETQKLTLKKDKFLQEKDEMLQELEKKLTQVQNSLLKKEKELEKQQCMATELEMTVKEAKQDKSKEAECKALQAEVQKLKNSLEEAKQQERLAAQQAAQCKEEAALAGCHLEDTQRKLQKGLLLDKQKADTIQELQRELQMLQKESSMAEKEQTSNRKRVEELSLELSEALRKLENSDKEKRQLQKTVAEQDMKMNDMLDRIKHQHREQGSIKCKLEEDLQEATKLLEDKREQLKKSKEHEKLMEGELEALRQEFKKKDKTLKENSRKLEEENENLRAELQCCSTQLESSLNKYNTSQQVIQDLNKEIALQKESLMSLQAQLDKALQKEKHYLQTTITKEAYDALSRKSAACQDDLTQALEKLNHVTSETKSLQQSLTQTQEKKAQLEEEIIAYEERMKKLNTELRKLRGFHQESELEVHAFDKKLEEMSCQVLQWQKQHQNDLKMLAAKEEQLREFQEEMAALKENLLEDDKEPCCLPQWSVPKDTCRLYRGNDQIMTNLEQWAKQQKVANEKLGNQLREQVNYIAKLSGEKDHLHSVMVHLQQENKKLKKEIEEKKMKAENTRLCTKALGPSRTESTQREKVCGTLGWKGLPQDMGQRMDLTKYIGMPHCPGSSYC

SEQ ID NO: 790134 - protein, 236 aa, Homo sapiens
LFSEQDNPASFSPYILTRFLTYSYLLAFNVWLLLAPVTLCYDWQVGSIPLVETIWDMRNLATIFLAVVMALLSLHCLAAFKRLEHKEVLVGLLFLVFPFIPASNLFFRVGFVVAERVLYMPSMGYCILFVHGLSKLCTWLNRCGATTLIVSTVLLLLLFSWKTVKQNEIWLSRESLFRSGVQTLPHNAKVHYNYANFLKDQGRNKEAIYHYRTALNNNKAWDYLCWRFRKTLTDLP

SEQ ID NO: 790135 - protein, 143 aa, Homo sapiens
SNPPRGRLAVGSCPYPVQTRVWLESPGPPLDRVLIQGWRFISGQGQGGGTLPVCLEDTHMASFDSSCRSPWHHFLRHRTQPPPTGKAPALCPDSPSCAWLPHLCLAPPETPVPAQCAVCSLCHLLGWSDGSMRAGRLSTLFTV

SEQ ID NO: 790136 - protein, 368 aa, Homo sapiens
MPAWEVVTSAILRGSWQGAKAEAAAEQSASVEVPSSNVQQHQKQHCGEKPLKRQEGRVPVLRSCRVHLSEKSLQSREVGKDLLTSSGVLKHQVTHTGEKSHRSSKSREAFHAGKRHYKCSECGKAFGQKYLLVQHQRLHTGEKPYECSECGKLFSHKSNLFIHQIVHTGERPYGCSDCGKSFSRNADLIQHQRVHTGEKPFTCSECGKAFRHNSTLVQHHRIHTGVRPYECSECGKLFSFNSSLMKHQRVHTGERPYKCSECGKFYSHKSSLINHWRVHTGERPYECSECGKFFSQSSSLMQHRKVHTGEKPFKCNECGRFFSENSSLVKHQRVHTGAKPYECRECGKFFRHSSSLVKHRRIHTGEIQ

SEQ ID NO: 790137 - protein, 442 aa, Homo sapiens
MAAATLRDPAQQGYVTFEDVAVYFSQEEWRLLDDAQRLLYRNVMLENFTLLASLGLASSKTHEITQLESWEEPFMPAWEVVTSAILRGSWQGAKAEAAAEQSASVEVPSSNVQQHQKQHCGEKPLKRQEGRVPVLRSCRVHLSEKSLQSREVGKDLLTSSGVLKHQVTHTGEKSHRSSKSREAFHAGKRHYKCSECGKAFGQKYLLVQHQRLHTGEKPYECSECGKLFSHKSNLFIHQIVHTGERPYGCSDCGKSFSRNADLIQHQRVHTGEKPFTCSECGKAFRHNSTLVQHHRIHTGVRPYECSECGKLFSFNSSLMKHQRVHTGERPYKCSECGKFYSHKSSLINHWRVHTGERPYECSECGKFFSQSSSLMQHRKVHTGEKPFKCNECGRFFSENSSLVKHQRVHTGAKPYECRECGKFFRHSSSLVKHRRIHTGEIQ

SEQ ID NO: 790138 - protein, 134 aa, Homo sapiens
ISHTGGSPALRQVGGRNGRSLAGGLKPKGPRRRVPASFQPRPPGRNPLPTGPWAPPARRCPGAPRHMLPAGRAARRSAHCRGGSQPIKSPGFLQPYGPRGEQQCPGPFTSKAAIRGKAPPENFFFPSAFHSWFE

SEQ ID NO: 790139 - protein, 139 aa, Homo sapiens
ALPIAQGHPPLAGAGPSTTPSFHPLWSRAPSSQQRKVHPSACSLLPLSGVLVPVCSPWTPSPDSSRCQPWVQPGACPRLPVGRAAMASRVPRTLGNGGGGCWRGLACACRVGWGKEGRPQPVWGPLRAECVGASESRVC

SEQ ID NO: 790140 - protein, 101 aa, Homo sapiens
LHLQPSSCSARSCFGELAAGAQQLGEFCLQCFPKRPVGHLGLPWWWGFWPQQQGSGGRNDSNPVKREGQKGQRSQCKSTVWESESTQIVPSGNMACAWCDS

SEQ ID NO: 790141 - protein, 133 aa, Homo sapiens
PNSETDNVVQKEANGLTPGISGTGCIVCAYLTSFQSWSLLASTISLLVQAKTSCCLSESILCLFCFVFVCLFVCLFLTVSCSVTHTGVQWCNLSSLHPPPPRFKLFFCLSLPSSWDYRHAPPCPANFFVFLVE

SEQ ID NO: 790142 - protein, 131 aa, Homo sapiens
SRSYKELVLISGDLSAQGSCSARSSPGQHHTETSLCKHGAPCRRAGGFLVLENSSLKPLCWRTAWPGGGCVAQQFLLLANSQQSDPLTSQHSHASKSSTVFPWKLLEGLSSFPLRKLFLAVIHIPVALFSS

SEQ ID NO: 790143 - protein, 115 aa, Homo sapiens
GSAWHLNPVPSAPRPSQWRLRFSLQRQSCHRGHWEVACSVSTDRRSPTTRHGGFLGSSPPRTAIRSGDSDTGQQQRFPPGRQPDAHTHADHTIQKVHLRPETQLFEGDQKIRWYL

SEQ ID NO: 790144 - protein, 153 aa, Homo sapiens
TDLRRQALPQQPCKGQDTEGPSQGAALREATIPGLSQTLGAPGEATGAQVLAPPHSEASPGRGLQRPCRVPGRKAWGPPSGHPYQVKGHGPLGALLVQPLGSSRSMALSLHRPSSRRGPHHIMSHQACHVVPPPAIPHHQPLPEQGPALPRVL

SEQ ID NO: 790145 - protein, 126 aa, Homo sapiens
SSRAEPHSLRDCLEVCFSMPSSFERAVACPTSKSPGAPVSRQGFTGHLQRETGANPRQRPCDYAWPWPIPQQLVLTCVTGGIRGDGETKGVVQACAGGRGKQVTFPSMPRKIENTWDPRGVGGACD

SEQ ID NO: 790146 - protein, 103 aa, Homo sapiens
ARLPICKKQPLCRNRPLPGWPVKKQSKATRSSAAWLPGSVVLAVKLPDSHCLLCVVRRTWTSVLCAHKTVLGGWARGPRFASVPEVSFPFQEGGSVDPLSVTT

SEQ ID NO: 790147 - protein, 59 aa, Homo sapiens
MPRSPCSSDTSGGWAEDGQDQDGKASTRTQGGEVSRASEVTGIRGHREESRSTGQCRES

SEQ ID NO: 790148 - protein, 117 aa, Homo sapiens
MPSTVLPSTVLPSLLPTAGAGWSMRWILCWSLTLCLMAQTALGALHTKRPQVVTKYGTLQGKQMHVGKTPIQVFLGVPFSRPPLGILRFAPPEPPEPWKGIRDATTYPPGKESEACP

SEQ ID NO: 790149 - protein, 150 aa, Homo sapiens
ENAAASPRGLTGASTLLGGNPGGPQFPSQQLLANLCAKQRATLQDHEARQPRRLLQGVLSGVTPELSRFPGPLDIACASNSEIDGVSGMRRSPASSPPGGEPRGLGPERRQPGCSPPGELPSPAGDSGEPADCEAEEGSAWFSYPLLSSG

SEQ ID NO: 790150 - protein, 75 aa, Homo sapiens [sequence omitted]

SEQ ID NO: 790151 - protein, 75 aa, Homo sapiens
MPGLVTEEGAVLMHTGLSQRWPVFQGARCGMEQRTPFTPASNAPLPDANATTDRTLQGQGCQQKLGLAPRSHASS

SEQ ID NO: 790152 - protein, 51 aa, Homo sapiens
MNCGDTLEASTPSPFSGFPPQPGHGRLKSCQFLFLGLWVLVERLTPPRKHF

SEQ ID NO: 790153 - protein, 35 aa, Homo sapiens
MGPSSHWAVQRDCVSGASRARWLSVNASQIKGLWL

SEQ ID NO: 790154 - protein, 70 aa, Homo sapiens
IKISKSLVKLTKKEMIQITNVRNEIKDITTDFMDTKRIMKEYYEQFYAHKLENLDEIGQFLERYHLPKLI

SEQ ID NO: 790155 - protein, 105 aa, Homo sapiens
VWQKNWEVEGVPLVGPELWFQLGEVTPALLPLPASPPLSLSQSFCLGKQQTFPGLSSEWCSVGISSKESRGVSALGFLYCAFRNPMEAMYPHIFYFHFKNLRKAY

SEQ ID NO: 790156 - protein, 129 aa, Homo sapiens
FKKACTRLGEFAVCTSAPSDLGCAPQLGTPGAHSRTSGWRHIKAAPSLCRLAPEMLSDLLMVPPPVNCSDLHFSFEKTETQKIKIFECYLAEGELLFITTAWEFPAGFLHSLGKKNSPKSILRTAQRRS

SEQ ID NO: 790157 - protein, 129 aa, Homo sapiens; identical to SEQ ID NO: 790156

SEQ ID NO: 790158 - protein, 124 aa, Homo sapiens
LHRRVGFVPGLFRDPFSAILLASPSFSFQYCLYIGFPHGGKMIAAVSGIIPSPPIWLKGHIPFRLGNDLLEVYTVFRVVPVAPHALAFEVKAAERLAFYSFSLLGGEVALLITPVRMINSLKKK

SEQ ID NO: 790159 - protein, 67 aa, Homo sapiens
ENFQKGTIGLELEARLLGFEERRGGGGCVLHEDVFTDSNLLWSGQRARRRCQLPSDVSSSYHGCVKL

SEQ ID NO: 790160 - protein, 67 aa, Homo sapiens; identical to SEQ ID NO: 790159

SEQ ID NO: 790161 - protein, 40 aa, Homo sapiens
MMTATYLPLKKDSTHNSTCNFRELMEPLMPKDLRRKCSVR

SEQ ID NO: 790162 - protein, 203 aa, Homo sapiens
MRLGTRHGCCSDTILSALGPLLPREEEVKALVLRYHPLSSCLTARLMGLLSDPELGPAAADGFSLLMSDCTDVLTRAGHAEVRIMFRQRFFTDNVPALVQGFHAAPQDVKPNYLKGLSHVLNRLPKPVLLPELPTLLSLLLEALSCPDCVVQLSTLSCLQPLLLGSTTCIGGSSLIERIDSLARLEVMSVKSPQAPLWVSHGT

SEQ ID NO: 790163 - protein, 218 aa, Homo sapiens
MRLGTRHGCCSDTILSALGPLLPREEEVKALVLRYHPLSSCLTARLMGLLSDPELGPAAADGFSLLMSDCTDVLTRAGHAEVRIMFRQRFFTDNVPALVQGFHAAPQDVKPNYLKGLSHVLNRLPKPVLLPELPTLLSLLLEALSCPDCVVQLSTLSCLQPLLLEAPQVMSLHVDTLVTKFLNLSSSPSMAVRIAALQCMHALTRLPTPVSCCRTNHR

SEQ ID NO: 790164 - protein, 47 aa, Homo sapiens
MRKPILCSENKAILPLDVILCRRYSAGCLWYYYKKLDISIFKYHLRK

SEQ ID NO: 790165 - protein, 75 aa, Homo sapiens
PNPLGWKRRKWRVWGRRRPSRGQVSTASCPAEGVQVLGIMNKELDKMHKATEEGSSKGRDVWNMNAHSTVQWEPG

SEQ ID NO: 790166 - protein, 293 aa, Homo sapiens
AEPVTTLPPGPGDDALHQPPLSSTMVVLRGPRRCRHCPRRCHYPLRAPGKPTAFPLLPAPALPALGPLSPVRRYHHPSCEAAINTHISLELHASYVYLSMAFYFDQDDAALEHFDRYFLRQSQEKREHAQELMSLQNLRGGRICLHDIRKPEGQGWESGLKAMECTFHLEKNINQSLLELHQLARENGDPQLCDFLENDFLNQQAKTIKELGGYLSNLHKMGAPEAGLAEYLFNKLTLGRSQKHTRAQTGPTATGCLPLLAPPGGTSMFPFQNILFIFLLSVLPLLAIKLSVL

SEQ ID NO: 790167 - protein, 125 aa, Homo sapiens
PLDYIAATQWTQPSQGQVPHSVDIPRKITLEPVSPPGRACLAPSPLPRPHQLTSHAAVPRHHHSLAVNHPQPHFRSAGSAGSRITVESAAQQVGSPGFRPHRSLVGGILSGNCFKFYFLPLKKMK

SEQ ID NO: 790168 - protein, 143 aa, Homo sapiens
MDWANVPPLLESGDLGGKGRTGWLEEPPPCKGPGGRLRRRQAQSSNMHLPQLQGRSGACQFTPPHDLMAVCARHWLREQHLTEKILGWATGQNWAKTLERGTWLKATPHFHVIFQWHQLSWTDVLTELHMPQSSLVARVSSVH

SEQ ID NO: 790169 - protein, 114 aa, Homo sapiens
LLPPRPCPCHGSRLANTAFIGCLPVELPLHSSVSRTFQVNSPGRIPAKTVLKGPFKQSIPSIGLPWFLSTRAAYPPLSDGYRGWCEAGRLPFLGRTSGCVAPSTLSSWPARQQD

SEQ ID NO: 790170 - protein, 131 aa, Homo sapiens
CEGNSTCSENEVCVRPGECRCRHGYFGANCDTKCPRQFWGPDCKELCSCHPHGQCEDVTGQCTCHARRWGARCEHACQCQHGTCHPRSGACRCEPGWWGAQCASACYCSATSRCDPQTGACLCHAGWWGRS

SEQ ID NO: 790171 - protein, 123 aa, Homo sapiens
LHQGSDLPQVTRQVGARVHAPDSAGDLCTHFPLWVPAPHVQRWGTEGEATLSLFIPACEQAPGLWRPAGRVTASHLHPSPFSFYKERRKTGSSWGDPGRRQRPPQGGVGERTGTYQPRATGAR

SEQ ID NO: 790172 - protein, 68 aa, Homo sapiens
LPSNHYRREDDDDNDDADDNDGLCATLCWPSQRLYQESPTAWDFCSWKQLRLWQEALPQGNSISPVCL

SEQ ID NO: 790173 - protein, 82 aa, Homo sapiens
AGEREEDQRLSPVTLHLQSCRKEEKPERETEKEERMEREENQESEESWKTGEESVQGHSMVFYCQMLLLGQITIDLLPLKSQ

SEQ ID NO: 790174 - protein, 72 aa, Homo sapiens
PCGSRYPGRMRGLLDVAICHPWVAGHKDEAVAATVTRWPLKVELTGKGPRLPQRYRRCPAGVVASRGKPGST

SEQ ID NO: 790175 - protein, 160 aa, Homo sapiens
SWVAEDFHQAGPGRRKGPQSPQEGRAGLGKKKKKSYHLHVCSVKFKRDFKNVHVSFPGFSLGTHVSFLLSPTQFCGAWEALQQSLGPDWSPGEGRPRSPRSFPSRGFALSSAVPSRSPPGSRVGRRERLGAALAREWLTPDVAPLEAVARPPWRQLPRPG

SEQ ID NO: 790176 - protein, 115 aa, Homo sapiens
MTMTQHIIFSDFKAINLVFKFNHSRFSFVSLLFLPFLKVNLNFQRTYILCCNQKKGLCLSYSVADHSKTFYCHHEAGITAESMLSLWSLVVKFIHSKSYSFQPQVSLGPSIFCRL

SEQ ID NO: 790177 - protein, 31 aa, Homo sapiens
MNPMGVTHHLLTMRKLPPQLPQEEKAQSCRS

SEQ ID NO: 790178 - protein, 77 aa, Homo sapiens
LPACPDFRKERRSFASSVAGSALQCLMFTEILIVVSLPQDFIVWKMPSPSNLSSRPGSPKVTNFNGALKLNRNHPSH

SEQ ID NO: 790179 - protein, 119 aa, Homo sapiens
TIISVGCRLIFFSFETESRSIPQARVYGVILAHCNLHLLGSSDSPASGSPATGTTAACHHARLVFLFLVKMGFHHVGQAGLELLISGDLPTSASQNAGITGMSHHAQTGTILMLSIKLG

SEQ ID NO: 790180 - protein, 60 aa, Homo sapiens
MDRGAVVGLDLRMTFNCQDLVTNRMSGTERKAQVGKTQGFQCGRLLHSAGPHRVLGKGPI

SEQ ID NO: 790181 - protein, 111 aa, Homo sapiens
SSLSLEVIERLLQAWWEKSQFDRRWRDKREDLSDVAQTGSDLLKRQPWAAGKRSCQETQCRCQQDQKISFLERVPPGRGKPREGAQQRAKLGGGGSTQTEGRATLATSSEY

SEQ ID NO: 790182 - protein, 112 aa, Homo sapiens
RNWSSCHFSAFQGKLSQVHRTESLTGIFKGSGFSPTCLFQIMGNWALRQTQSPLSASLRISVPSRFSQLHTLVCNGRVYVGSRYILSSSCLWQLSGVTYEYAVKLRCLRLCA

SEQ ID NO: 790183 - protein, 154 aa, Homo sapiens
QPGERVDLQTTQQALAVSSMRNRRDIHGTSCRKEEEEKSYLLGPYPGKFPTLVLFTGCCPERQILSSPSHERGNQGCKQESDSAKVTQLESGRDGTQHDISLQSWQLLRALPLLNRDLPGMTRRPSGFSGLVLRTFIRFFSKYLLSATVCQALF

SEQ ID NO: 790184 - protein, 454 aa, Homo sapiens
MLKQILSEMYIDPDLLAELSEEQKQILFFKMREEQIRRWKEREAAMERKESLPVKPRPKKENGKSVHWKLGADKEVWVWVMGEHHLDKPYDVLCNEIIAERARLKAEQEAEEPRKTHSEEFTNSLKTKSQYHDLQAPDNQQTKDIWKKVAEKEELEQGSRPAPTLEEEKIRSLSSSSRNIQQMLADSINRMKAYAFHQKKESMKKKQDEEINQIEEERTKQICKSWKEDSEWQASLRKSKAADEKRRSLAKQAREDYKRLSLGAQKGRGGERLQSPLRVPQKPERPPLPPKPQFLNSGAYPQKPLRNQGVVRTLSSSAQEDIIRWFKEEQLPLRAGYQKTSDTIAPWFHGILTLKKANELLLSTGMPGSFLIRVSERIKGYALSYLSEDGCKHFLIDASADAYSFLGVDQLQHATLADLVEYHKEEPITSLGKELLLYPCGQQDQLPDYLELFE

SEQ ID NO: 790185 - protein, 454 aa, Homo sapiens; identical to SEQ ID NO: 790184

SEQ ID NO: 790186 - protein, 454 aa, Homo sapiens; identical to SEQ ID NO: 790184

SEQ ID NO: 790187 - protein, 454 aa, Homo sapiens; identical to SEQ ID NO: 790184

SEQ ID NO: 790188 - protein, 427 aa, Homo sapiens
MLKQILSEMYIDPDLLAELSEEQKQILFFKMREEQIRRWKEREAAMERKESLPVKPRPKKENGKSVHWKLGADKEVWVWVMGEHHLDKPYDVLCNEIIAERARLKAEQEAEEPRKTHSEEFTNSLKTKSQYHDLQAPDNQQTKDIWKKVAEKEELEQGSRPAPTLEEEKIRKKESMKKKQDEEINQIEEERTKQICKSWKEDSEWQASLRKSKAADEKRRSLAKQAREDYKRLSLGAQKGRGGERLQSPLRVPQKPERPPLPPKPQFLNSGAYPQKPLRNQGVVRTLSSSAQEDIIRWFKEEQLPLRAGYQKTSDTIAPWFHGILTLKKANELLLSTGMPGSFLIRVSERIKGYALSYLSEDGCKHFLIDASADAYSFLGVDQLQHATLADLVEYHKEEPITSLGKELLLYPCGQQDQLPDYLELFE

SEQ ID NO: 790189 - protein, 241 aa, Homo sapiens
MLKQILSEMYIDPDLLAELSEEQKQILFFKMREEQIRRWKEREAAMERKESLPVKPRPKKENGKSVHWKLGADKEVWVWVMGEHHLDKPYDVLCNEIIAERARLKAEQEAEEPRKTHSEEFTNSLKTKSQYHDLQAPDNQQTKDIWKKVAEKEELEQGSRPAPTLEEEKIRKKESMKKKQDEEINQIEEERVLVIDTNAVGRRPGDKRQVGVMQPEGKGHQGSPATSRSQQRGMGQVPHKP

SEQ ID NO: 790190 - protein, 104 aa, Homo sapiens
MCQPVLGTEDTGGKARIAPCSPGAHHPGGRHSRQPELVQRRHLSRFRIQSLFKKIKEPDAPARDRARSGSRVHPETLHPKGKGRPSLLGTRTHLLPVGLSLSPK

SEQ ID NO: 790191 - protein, 110 aa, Homo sapiens
GCGRGRTGPGLRVSRGWLPYFLWSQPEAGTPTQQPCDTLMSHLHIFAENPQGREGPIYSGRNLLGPNPATSQDWMAQPRDEHVSGFHGQWERLHPAHVLLWLSGQTDGWG

SEQ ID NO: 790192 - protein, 116 aa, Homo sapiens
GGKRDQEELWAHRQSLCFSLEEGCPEMQKGFPEEVGEDCTQQILYSLPRITDLRPDFSVSSQDHAFCRPQPMGVGGWGVGPSIVHGTFGGPQMQGSVASLLDPRSQAAAELKETVQ

SEQ ID NO: 790193 - protein, 180 aa, Homo sapiens
MERERQRRRQGQELSAARQRLQEDEMRRAAEERRREKAEELAARQRVREKIERDKAERAKKYGGSVGSQPPPVAPEPGPVPSSPSQEPPTKREYDQCRIQVRLPDGTSLTQTFRAREQLAAVRLYVELHRGEELGGGQDPVQLLSGFPRRAFSEADMERPLQELGLVPSAVLIVAKKCPS

SEQ ID NO: 790194 - protein, 86 aa, Homo sapiens
EFPCPDKPGSATRAQGLFHPLSTTVKDSRPQSGQVEKDYGKIWVEAWGPSCGNIPLGDDSDPDRVHGGGERWSEPGYMLKSVSRIS

SEQ ID NO: 790195 - protein, 105 aa, Homo sapiens
MSERLRGFGLVKETQTETCGNFQELTTLSAGIQVYSMLLQRPKVRITCRITRRQMRFHIKKKINRSRYLEMRWSTLCSHRLSPRVFKGKPVASCPVRTGADGAWN

SEQ ID NO: 790196 - protein, 135 aa, Homo sapiens
VSLPLASPYEISSVVITAHLATLWRGRKLSFAPTKANTFPGQAMHYRVSSPALGPINNQVGAPGRSPEPSPALAGSRVPGPAHPSRGPRCAQPGRDEPPRSVFAVNSASPPDLALNPDTLGGAKRPPGARPAPRR

SEQ ID NO: 790197 - protein, 79 aa, Homo sapiens
SCSGGGSENWITGYGGDWDNSTATDRNTEGRGSLDLQGLQLTPMGTLDGQRHSPRLGDESIPLTARQGTQGSAAEKLEL

SEQ ID NO: 790198 - protein, 78 aa, Homo sapiens
TKYGSQESAGINPSLTPDSTAQSCKRDFFLLLEEKRGKSREDFVLHLGYWLSHNKVSLQRCMNHSIPGLGVPPKAETA

SEQ ID NO: 790199 - protein, 99 aa, Homo sapiens
TLAGHATTRHQNTGAILAALLSLSLCIQPPGPVGPTTWTLSDTCPSAFLLPLPMCKHSSLFCFIATVAQQLFLPTFSPSPSSLFYSIARVTWLEKEPQM

SEQ ID NO: 790200 - protein, 146 aa, Homo sapiens
QGAECEETRDTAALAPHARLSGGCAPAVLGRMEPVLYETVVENYKQATRGGGLELQSGGCGPRYTVSTRPVRLAWQPELTIVRPRPLDALGDCWAHTGVILSKVTVKSGWVASPCKVAPLCQHSLMASCFRKHPELQLAIELLHIN

SEQ ID NO: 790201 - protein, 76 aa, Homo sapiens
PRYQPRRLEGQPSSNHWASHRSVALLLTLALLFVPGVLFKTKLLEEFGGNYDCNHVFKQLTLEREWTKLNINHCCW

SEQ ID NO: 790202 - protein, 111 aa, Homo sapiens
KKWGALWLPTPHPCSPTPPQPCAKGRAEPPPRRPRPWGDSELMQGECSQVGVSKRRARRWGGCQARGSACPRPRVLSRQRAEAGEAAPGPADPDMPSAWCLVVFEGLGRRP

SEQ ID NO: 790203 - protein, 172 aa, Homo sapiens
ERMQSRQRSCFPTPGFDSPTSPPPGKRALGWHRGTRARLLSSFLSFLNGSSANQAVGQGPEAGEGRGEGCLQLGEKNGRPQSFPVCASLGICESDRSGGNGGAFSVAEISGAPRQGLLENRGDRKLSRGIRRGSPAPRSVTGTYFSFFNSLFLPFSLCLTCFIKKKEVIKLL

SEQ ID NO: 790204 - protein, 95 aa, Homo sapiens
PEICFLIQEQHLKPESRLENQGLPSRSDRLGGGQYPDGVASYTANLKTGHRAHLLPGGQPHAEIHPADRFLDFADRWEGSIDVDSKPFNKSDFDV

SEQ ID NO: 790205 - protein, 168 aa, Homo sapiens
RRGRSRRKGAAAATAASARSQGRAAAMSYCRQEGKDRIIFVTKEDHETPSSAELVADDPNDPYEEHGLILPNGNINWNCPCLGGMASGPCGEQFKSAFSCFHYSTEEIKGSDCVDQFRAMQECMQKYPDLYPQEDEDEEEEREKKPAEQAEETAPIEATATKEEEGSS

SEQ ID NO: 790206 - protein, 155 aa, Homo sapiens
MPVSYSSVTTRYYHRAGAEEGKDRIIFVTKEDHETPSSAELVADDPNDPYEEHGLILPNGNINWNCPCLGGMASGPCGEQFKSAFSCFHYSTEEIKGSDCVDQFRAMQECMQKYPDLYPQEDEDEEEEREKKPAEQAEETAPIEATATKEEEGSS

SEQ ID NO: 790207 - protein, 168 aa, Homo sapiens; identical to SEQ ID NO: 790205

SEQ ID NO: 790208 - protein, 106 aa, Homo sapiens
AGFLLLSDPSLLLARLRIFSVPVLLEFHYDVTYGTFLSCFQLLILIQFQTHRVIARIVQGALTRAFRTHCLLPSAPLPPPRPVHVQLLRVKQRRRAPGPSTLVYIS

SEQ ID NO: 790209 - protein, 130 aa, Homo sapiens
WVRVLQKELWLNSKIFPYAWCVSPLCIAIKEYLRLGNLFYKMFIWLSVLQSVQEVHCPASASGEASGNLQPWQKVKGEPACHVARAGARVQEGRWPHAFKQPPPTRTHSLLRGRQYQGDGAKPFMRNFPP

SEQ ID NO: 790210 - protein, 108 aa, Homo sapiens
GSSQSLELQLEFTTLGWHMEVRRTDRQLNRQPQGLRQESPSAGTFSNSLKTDSAQAVSAFTEVGLGGGWLREAGEGHQVPQLLMASHRDKAWGPFLSSLTQDAPVSCL

SEQ ID NO: 790211 - protein, 68 aa, Homo sapiens
MLELLRTLGFYYILHFLGSLIHALGFKYHLSDSISNIDLSSEFQNLAILLDVSWVLQYSVSSYLTETF

SEQ ID NO: 790212 - protein, 39 aa, Homo sapiens
MAVLARQLQRLLWTACKKKEREKEGREEEEEEEAGRRAP

SEQ ID NO: 790213 - protein, 128 aa, Homo sapiens
RVPGGTCLEARHCTGPSDTACAACLGAWEMTVICDLAGPRKPILQMRKLRPKGTKRPLSASPRALEGGVGLRPCAQRAQQQEGSWASSSPPSEASQSDRKVRGPGEGAGPGSGNFLSLSVGSVHLITP

SEQ ID NO: 790214 - protein, 105 aa, Homo sapiens
MKTLPAMLGTGKLFWVFFLIPYLDIWNIHGKESCDVQLYIKRQSEHSILAGDPFELECPVKYCANRPHVTWCKLNGTTCVKLEDRQTSWKEEKNISFFILHFEPV

SEQ ID NO: 790215 - protein, 108 aa, Homo sapiens
GYAPSPCPGCYVYTPTRILTSCLQVAFFNSAGANAQEEQRVCCQPLAHPVASSQKKPEVAAPAPESGGESVFGETHRALQGAMEKLQVSRSWHGPTRGAGGQDKAGDS

SEQ ID NO: 790216 - protein, 92 aa, Homo sapiens
SGPSADRLLHTPQRSLLPADSTALPGLALAQLPATIVPTTEPLHRPLPQTRQPLVHSLKPSSGVTSSKKPSSPPPAGSEDLPLCSLGHLCYL

SEQ ID NO: 790217 - protein, 95 aa, Homo sapiens
GGCAGARAEPFVQENIPQRQPPHLESLWFLFQALPWRNSRRVCSSQAWLLAHPTSWPSTGPLTSLNLNFLTCRMGTKILTSNDRCEIKLNAKTQM

SEQ ID NO: 790218 - protein, 86 aa, Homo sapiens
MGLEALNENLPEINIDLTYKQGRLQFRPPFEEIRAKYYREMKRFIGIPNQFKGVGEAGDESIFSIMIDRNASGFLTIFSKAEDLFR

SEQ ID NO: 790219 - protein, 110 aa, Homo sapiens
DGALRQPSGAGSGRGTIRWGLRARPLKPWTGVRERRVSPARTAEAPPPWSPLWGGLAGAGWGRPALVGLSPLELGGSLRRAERTQCRGSERRPRESWGWRTHVLPALGWA

SEQ ID NO: 790220 - protein, 53 aa, Homo sapiens
MSKRYLQTAHNGNTANTHIHVHLVGHSWIHAANPHTSSPWLTTANSVTVRGPP

SEQ ID NO: 790221 - protein, 51 aa, Homo sapiens
MSRSIFRCFSSCFRFALAAMAAAPREEAGRAGSRAALRRGPAVPRAALAAA

SEQ ID NO: 790222 - protein, 102 aa, Homo sapiens
MRQKSLPCSLWALCQCLPWEAPGCAVDPSLWRTLAWPLPTPLEPLLRALCYKGPEKGPWGGGYMEATFIHSFTDSFNRYTLYLYCVYLLSPSLGILSWLRYG

SEQ ID NO: 790223 - protein, 102 aa, Homo sapiens
TGSYQKRTKKRNEPIVAEEKHAEICFKFTLNHRRSGNSTHQELSHSRKWAQPTIHTMETRMARKCHRSGTSICRISVHSSTILTKFKGKQTLSHTNMGIQNC

SEQ ID NO: 790224 - protein, 149 aa, Homo sapiens
NSIAFHAAKCTLISREDVEALYTSCKTERVLKTKRRRVGRALATKAPPPERAAAASPRPGFWKDKHQLWRGLSGAARPLPISAQSQRPGAAAARPAAHLPQIFSKYPGSHYPEIVRSPCKPPLNYETAPLQGNYVAFPSDPAYFRSLLC

SEQ ID NO: 790225 - protein, 104 aa, Homo sapiens
LGLMLLLSIRKRSPYHSSDTLQNLRIMVLHNVSEGIHPPTQELKWNLPHPTCGISPRLLFRQILICLVVILLGTMQSKLFHLVIFIPFPSLIVSFTTDSSSSFQ

SEQ ID NO: 790226 - protein, 102 aa, Homo sapiens
GPSSPADVALSARCLGAYSTLLTGLRPHQPCLELAPPPVITPARLQMSKVLLGSHKLSSASQVRHTTIPHCFPSSSHSKHTGRVLNPILHMSLNDLLEVTQS

SEQ ID NO: 790227 - protein, 104 aa, Homo sapiens
MLYYTLPCQARSPHACGLSMGHPVLGQGKKEVKYNLTRTISPPPSGSLQHLARTTCALCWALPLSQMCCEALPCLKLNFLRPRALASLRALLVCSGFPGSAYHQ

SEQ ID NO: 790228 - protein, 143 aa, Homo sapiens
RSPQVAFLLAQGSQSGCTGRSPGEMFKSLRLYPTQIKSEPLREGISSSQLGSHVQPRAEPHCLGRRNEGVQGAPDQKEAAEESSQGALKPLSFLGWVPICLEYLFFGLYGTAIIHPKFRWAKIRTLFFAVTSFLTLSPHSGIL

SEQ ID NO: 790229 - protein, 614 aa, Homo sapiens
THTRTAYSALPARSHCPQARPARGKCVPRRSHRRDQERSARSLREPAQGSSGCSWIRAPQRSVAAAGTPWAAPRTAAPQTTSNRARPRRGWRAQGRHPASSWAPGHPYERRRSRAKEQDARQQDSSASPAGPLFPRPPGAQEAKCNHRATAERGRGQRHPLARNPVPAAAARPGRGPSGPGVSSSRRRGSGPGLAGAGEEGRDGGRARGRGGGPERIKMAMSLIQACCSLALSTWLLSFCFVHLLCLDFTVAEKEEWYTAFVNITYAEPAPDPGAGAAGGGGAELHTEKTECGRYGEHSPKQDARGEVVMASSAHDRLACDPNTKFAAPTRGKNWIALIPKGNCTYRDKIRNAFLQNASAVVIFNVGSNTNETITMPHAGVEDIVAIMIPEPKGKEIVSLLERNITVTMYITIGTRNLQKYRRLGDAAKKAISKLQIRTIKKGDKETESDFDNCAVCIEGYKPNDVVRILPCRHLFHKSCVDPWLLDHRTCPMCKMNILKALGIPPNADCMDDLPTDFEGSLGGPPTNQITGASDTTVNESSVTLDPAVRTVGALQVVQDTDPIPQEGDVIFTTNSEQEPAVSSDSDISLIMAMEVGLSDVELSTDQDCEEVKS

SEQ ID NO: 790230 - protein, 165 aa, Homo sapiens
MIPEPKGKEIVSLLERNITVTMYITIGTRNLQKYVSRTSVVFVSISFIVLMIISLAWLVFYYIQRFRYANARDRNQRRLGDAAKKAISKLQIRTIKKGDKETESDFDNCAVCIEGYKPNDVVRILPCRLTHPQSSLHLLGIKTVSKNVPVYHLPSLTLFLWPHNC

SEQ ID NO: 790231 - protein, 236 aa, Homo sapiens
MIPEPKGKEIVSLLERNITVTMYITIGTRNLQKYVSRTSVVFVSISFIVLMIISLAWLVFYYIQRFRYANARDRNQRRLGDAAKKAISKLQIRTIKKGDKETESDFDNCAVCIEGYKPNDVVRILPCRHLFHKSCVDPWLLDHRTCPMCKMNILKALGIPPNADCMDDLPTDFEGSLGGPPTNQITGASDTTVNESSVTLDPAVRTVGALQVVQDTDPIPQEGDVIFTTNSEFCHT

SEQ ID NO: 790232 - protein, 93 aa, Homo sapiens
TIITYPWFQNSSVILLLNKKDLPEEKIMYSHLVDYFPEYDGPQRDAQAAREFILKMFVDLNPVTKLSTPTSHAPQTPRISALCLLPSRTPSSS

SEQ ID NO: 790233 - protein, 93 aa, Homo sapiens
GIIMDVVPVLEVPKLKVCALHVSSRSTAASSSLGKTLTFAQLALAFPRPVASACSPILTRAKVYRHFGQAWGTPHSHTKPYVHPKGQPQLKKN

SEQ ID NO: 790234 - protein, 39 aa, Homo sapiens
MSLGFYFDRDDVALEGVSHFFRELAEEKREGYERLLKMQ

SEQ ID NO: 790235 - protein, 73 aa, Homo sapiens
MQLRFAPFSEQATTLTQGSTQATGYDLNGAYDDTIPPMEKALGKMDIQIALPSGCYRRVAPWFGLAAKHFIDR

SEQ ID NO: 790236 - protein, 83 aa, Homo sapiens
AILEKHRTVRRPLLRLVTMKAMTSSLRFVVTGLCNYGQVISILVPVKLEGRKVKKRAAGVPPSWSILYSWGAIQAGSPRERSI

SEQ ID NO: 790237 - protein, 105 aa, Homo sapiens
LCSKPCNLSSFHQNKSKSLQRAASPHMIHSSPHTRYLFDLIWYYPPSLTLPQPQWPSCSFSNRPGMVLALESLHRQFPLLGVTIATIFISFKCCFGIEAYPHFLI

SEQ ID NO: 790238 - protein, 168 aa, Homo sapiens
SSSRSCGSRCISSRIWRYSSFWLSSNMPCSSQGPWGGTLPASSPRTAQAGGGGSIMRKEPFPSPLHTHPTSASRSAGITGMRHRAQPPKLLKLISNFSKVSSYKINVQEIVIAFLYTNNNRAESQIMSELPLTIATRRIRYLAIQVTREVKDLYKENNKPLLKEIRED

SEQ ID NO: 790239 - protein, 108 aa, Homo sapiens
PGSPGGGRSPGSPGFPGGGRSPGSPGTWSGYISTSVPVALGRTARLASGPRPQQTNTGPQQVSEVPALGSLLAFPPPKSGRGTKPALFLYECSGPHLAMNRGVGWETG

SEQ ID NO: 790240 - protein, 110 aa, Homo sapiens [sequence omitted]

SEQ ID NO: 790241 - protein, 51 aa, Homo sapiens
MLKCNMVVLSAKRGPERALNTHERFSPKFSKYVQGTRCGSSSVLDTGDPAA

SEQ ID NO: 790242 - protein, 75 aa, Homo sapiens
SSIDITEITLYELCQFTGLGKMYENLPVTGLDDDVPTKAIEVQNESGGEEVTEVKVASREIYGSRLLRVPRRDRL

SEQ ID NO: 790243 - protein, 100 aa, Homo sapiens
LACCSPGTWLKLSSCREWWGLTGHPCRICTLQCPPLLSTPQPQPLGPYKAGKGPPGRGEAAALQEFHTGPVLPLLLQEPPGEVRPSSRPCAPGDAHSTST

SEQ ID NO: 790244 - protein, 85 aa, Homo sapiens
PGGSPKERVRSKDRCSSEFLWNLARCRAWTQGFHEAVKEVARKLNLVWRARRGFGTEGQSSRLRGSCRKEHAFSQRLSTLHGDSC

SEQ ID NO: 790245 - protein, 106 aa, Homo sapiens
PALPPPLREDPLARCCLCTQASHQKRRHPTRRGECGPTLALNPARLPCTRDPFPCLPADGTSVPLAVLSSQSRASTRLCLPPEMLLFTPYHWCSLVLHLRRDLRIR

SEQ ID NO: 790246 - protein, 89 aa, Homo sapiens
EVTLAFFPGEVRQSPVCSEQYRQGFTKRAGAGKGPGGWLGFPQGQFQGHKMACLGEDFKTGQDKGVFGKWIQCVGTSEVRRQAQTISFT

SEQ ID NO: 790247 - protein, 51 aa, Homo sapiens
REEGVRREEGGILPNSFYEAKHYSDTKARPGQHKKRKLYANSPDEHRCKNP

SEQ ID NO: 790248 - protein, 102 aa, Homo sapiens [sequence omitted]

SEQ ID NO: 790249 - protein, 174 aa, Homo sapiens
SDLPPKCMQEIPQEQIKEIKKEQLSGSPWILLRENEVSTLYKGEYHRAPVAIKVFKKLQAGSIAIVRQTFNKEIKTMKKFESPNILRIFGICIDETVTPPQFSIVMEYCELGTLRELLDREKDLTLGKRMVLVLGAARGLYRLHHSEAPELHGKIRSSNFLVTQGYQVKIWVPG

SEQ ID NO: 790250 - protein, 111 aa, Homo sapiens
NLHYSHEVEYSRHHKKVLLYPSAVNPFPIPPAPDLLSDSVSVLPFLELHINGVIQYVLDWLLSLSIMLLRVIHVALSVVHLFSLLCRIPQCVYLCTRQVVSSMWQLWKKLL

SEQ ID NO: 790251 - protein, 67 aa, Homo sapiens
CPKLEAAPAKHWKHPALHQDKPREPQLAGNIPSPSSPLLSPDLPHLPGLQTLAVAVPTPGTPFPPGT

SEQ ID NO: 790252 - protein, 797 aa, Homo sapiens
MAHRCLRLWGRGGCWPRGLQQLLVPGGVGPGEQPCLRTLYRFVTTQARASRNSLLTDIIAAYQRFCSRPPKGFEKYFPNGKNGKKASEPKEVMGEKKESKPAATTRSSGGGGGGGGKRGGKKDDSHWWSRFQKGDIPWDDKDFRMFFLWTALFWGGVMFYLLLKRSGREITWKDFVNNYLSKGVVDRLEVVNKRFVRVTFTPGKTPVDGQYVWFNIGSVDTFERNLETLQQELGIEGENRVPVVYIAESDGSFLLSMLPTVLIIAFLLYTIRRGPAGIGRTGRGMGGLFSVGETTAKVLKDEIDVKFKDVAGCEEAKLEIMEFVNFLKNPKQYQDLGAKIPKGAILTGPPGTGKTLLAKATAGEANVPFITVSGSEFLEMFVGVGPARVRDLFALARKNAPCILFIDEIDAVGRKRGRGNFGGQSEQENTLNQLLVEMDGFNTTTNVVILAGTNRPDILDPALLRPGRFDRQIFIGPPDIKGRASIFKVHLRPLKLDSTLEKDKLARKLASLTPGFSGADVANVCNEAALIAARHLSDSINQKHFEQAIERVIGGLEKKTQVLQPEEKKTVAYHEAGHAVAGWYLEHADPLLKVSIIPRGKGLGYAQYLPKEQYLYTKEQLLDRMCMTLGGRASEEIFFGRITTGAQDDLRKVTQSAYAQIVQFGMNEKVGQISFDLPRQGDMVLEKPYSEATARLIDDEVRILINDAYKRTVALLTEKKADVEKVALLLLEKEVLDKNDMVELLGPRPFAEKSTYEEFVEGTGSLDEDTSLPEGLKDWNKEREKEKEEPPGEKVAN

SEQ ID NO: 790253 - protein, 241 aa, Homo sapiens
MAHRCLRLWGRGGCWPRGLQQLLVPGGVGPGEQPCLRTLYRFVTTQARASRNSLLTDIIAAYQRFCSRPPKGFEKYFPNGKNGKKASEPKEVMGEKKESKPAATTRSSGGGGGGGGKRGGKKDDSHWWSRFQKGDIPWDDKDFRMFFLWTALFWGGVMFYLLLKRSGREITWKDFVNNYLSKGVVTDCQVAQRMSTRLTQETRCGQRGTLAWTWRNGHKRWLRNAAPGKTQSRQPPKRGAR

SEQ ID NO: 790254 - protein, 705 aa, Homo sapiens
MGEKKESKPAATTRSSGGGGGGGGKRGGKKDDSHWWSRFQKGDIPWDDKDFRMFFLWTALFWGGVMFYLLLKRSGREITWKDFVNNYLSKGVVDRLEVVNKRFVRVTFTPGKTPVDGQYVWFNIGSVDTFERNLETLQQELGIEGENRVPVVYIAESDGSFLLSMLPTVLIIAFLLYTIRRGPAGIGRTGRGMGGLFSVGETTAKVLKDEIDVKFKDVAGCEEAKLEIMEFVNFLKNPKQYQDLGAKIPKGAILTGPPGTGKTLLAKATAGEANVPFITVSGSEFLEMFVGVGPARVRDLFALARKNAPCILFIDEIDAVGRKRGRGNFGGQSEQENTLNQLLVEMDGFNTTTNVVILAGTNRPDILDPALLRPGRFDRQIFIGPPDIKGRASIFKVHLRPLKLDSTLEKDKLARKLASLTPGFSGADVANVCNEAALIAARHLSDSINQKHFEQAIERVIGGLEKKTQVLQPEEKKTVAYHEAGHAVAGWYLEHADPLLKVSIIPRGKGLGYAQYLPKEQYLYTKEQLLDRMCMTLGGRASEEIFFGRITTGAQDDLRKVTQSAYAQIVQFGMNEKVGQISFDLPRQGDMVLEKPYSEATARLIDDEVRILINDAYKRTVALLTEKKADVEKVALLLLEKEVLDKNDMVELLGPRPFAEKSTYEEFVEGTGSLDEDTSLPEGLKDWNKEREKEKEEPPGEKVAN

SEQ ID NO: 790255 - protein, 80 aa, Homo sapiens
AFLLYTIRRGPAGIGRTGRGMGGLFSVGETTAKVLKDEIDVKFKDVAGCEEAKLEIMEFVNFLKNPKQYQDLGAKIPKVK

SEQ ID NO: 790256 - protein, 30 aa, Homo sapiens
MEGHCCGYQMAQGDSVEKYFVSKKNQSVLI

SEQ ID NO: 790257 - protein, 42 aa, Homo sapiens
NGMEWNGTECNVMEWNGINPSAGEWNGMECNGMESSGMEWNG

SEQ ID NO: 790258 - protein, 116 aa, Homo sapiens
PENSQGTETESIPHRAEGRPGSHTARVPGSRSPRRACHRQHRYCHCQDAGTVAGPEWMQTPPCSAGCTFWTGRDLTVTLGARPTQGAGQGGGPHHSMKRTQQKGESERGEGVRPTH

SEQ ID NO: 790259 - protein, 98 aa, Homo sapiens
QPALYSPGVVLKRFSGRHRLVGVVQSALRSLRQPEADKGRSRSPRSPLPLPNKRRKKNLVLDEKINACHLPLQLETATCPQNKRLQGGDWSCRPGSFV

SEQ ID NO: 790260 - protein, 108 aa, Homo sapiens
MTTSQTPSELSSWSLKLSNCSPSIFHLIHPRSSSLHSLFSSISPSKPVHHKVLLSIFIAKSLSNRSDFQSPLFCHPNASHCTVLSFSLVRCLLHTLCTPCSLFYYQQP

SEQ ID NO: 790261 - protein, 340 aa, Homo sapiens
ADAVEMQGPPLLTAAHLLCVCTAALAVAPGPRFLVTAPGIIRPGGNVTIGVELLEHCPSQVTVKAELLKTASNLTVSVLEAEGVFEKGKINSIKSYPSLPLNSADEIYELRVTGRTQDEILFSNSTRLSFETKRISVFIQTDKALYKPKQEVKFRIVTLFSDFKPYKTSLNILIKDPKSNLIQQWLSQQSDLGVISKTFQLSSHPILGDWSIQVQVNDQTYYQSFQVSEYVLPKFEVTLQTPLYCSMNSKHLNGTITAKYTYGKPVKGDVTLTFLPLSFWGKKKNITKTFKINGSANFSFNDEEMKNVMDSSNGLSEYLDLSSPGPVEILTTVTESVTGL

SEQ ID NO: 790262 - protein, 102 aa, Homo sapiens
SRDELLHAWEFWRAQWKEGARAGGGDRKGKGNPRRFQHPLFRKTESLPGQLLRSHHKLKSRPPVWSVPFLATLSSPKLQLVPCSPPVLARLSGEAAAPPASR

SEQ ID NO: 790263 - protein, 85 aa, Homo sapiens
HGLCPSCVLCPAGCTSAPCGSLPLSLSKCPEPLSPTAAPLYPGSAALLLHDVCLPTADGAMNVDASFTAVCRHPEQDWSPEQAPD

SEQ ID NO: 790264 - protein, 128 aa, Homo sapiens
MRKAPPWAVGAVARARRAYEQRDPTGGLPPSAVAAGLMHRRPQGSVRTGSTRRPVRPWRHSRARRNMIPVTEFRQFSEQQPAFRVLKPWWDVFTDYLSVAMLMIGVFGCTLQNSEFKSSLKDTQNCHQ

SEQ ID NO: 790265 - protein, 174 aa, Homo sapiens
MASPEPRRGGDGAAQAARKTRVEGNSLLSKNSGSLNEAEALNPEVTLSSEGSLNLEDILYLEDTGDLDETLYVQETEKAEEALYIEEAMQPDEALHVEEPGNPEETVCVEETTEPDRIQFVEGPVEPGKPTSPEHVVYEGETVTRAEKSNPEESLRAEQSPSMEENLSIEDLEL

SEQ ID NO: 790266 - protein, 113 aa, Homo sapiens
SLREFLLHGLRCQLFLGLQPAGFRLELHSWLPGPPAGRHTLQILGLVTLHARVSQSLEISFSLHVHSLLVSLETPDEYTNQCRFVAQQTQCAGAARTGLQEPTVKFLGILCAS

SEQ ID NO: 790267 - protein, 196 aa, Homo sapiens
LGASLKDEILKVTPVQKQTRAGQSTRFKAFVAIGDYNGHVGLGVKCSKEVATTIRKAIILAKLSIVPVHRGYWGNKIGKPHTVPCKVTGRCGSVLVCLIPAPRGTGIVSAPVPKKLLMMAGIDDCYTSARGCNATLGNFAKATFDAISKTYSYLTPDLWKDTVFTKSPYQEFTDHLVKTHTRVSVQRTQAPAVATT

SEQ ID NO: 790268 - protein, 86 aa, Homo sapiens
CLFPFKKGVVATPAKKADVTPGKKAAATPAKKTVTPAAFHFRVKPAEGPPSSGSLTFMTPRLSLPIPPTFSFSLFFFFLRFEGKRP

SEQ ID NO: 790269 - protein, 129 aa, Homo sapiens
IRFIRPFQLPRLPEVLGLGQALSPCFLETLIFLVCNMKSALAPPPTPYHLPMEGRLQGRAAASPLLRHHHSQHRQGHSSGSLGPPCASQHSLPHPHSPRTRLPQKVTTGPGLRLQGTRRHCQPGVHQAW

SEQ ID NO: 790270 - protein, 121 aa, Homo sapiens
VEMGSSYVAQAALELLGSSHLLASASQSAGITGVSHHAWHVFSSAEEKNHNVSGSEAPDPGDGSPGRPEESFSRNLAIATCLRRQGKGPGWHRGERWGLGRTWQPAPLNDIQLSRIWKINL

SEQ ID NO: 790271 - protein, 393 aa, Homo sapiens
MDPKRSQKESVLITGGSGYFGFRLGCALNQNGVHVILFDISSPAQTIPEGIKFIQGDIRHLSDVEKAFQDADVTCVFHIASYGMSGREQLNRNLIKEVNVRGTDNILQVCQRRRVPRLVYTSTFNVIFGGQVIRNGDESLPYLPLHLHPDHYSRTKSIAEQKVLEANATPLDRGDGVLRTCALRPAGIYGPGEQRHLPRIVSYIEKGLFKFVYGDPRSLVEFVHVDNLVQAHILASEALRADKGHIASGQPYFISDGRPVNNFEFFRPLVEGLGYTFPSTRLPLTLVYCFAFLTEMVHFILGRLYNFQPFLTRTEVYKTGVTHYFSLEKAKKELGYKAQPFDLQEAVEWFKAHGHGRSSGSRDSECFVWDGLLVFLLIIAVLMWLPSSVILSL

SEQ ID NO: 790272 - protein, 393 aa, Homo sapiens; identical to SEQ ID NO: 790271

SEQ ID NO: 790273 - protein, 45 aa, Homo sapiens
ILQVEVLTLLCSLFSDQPWRPWGLGGVAAYSLGEVWAASPLSGQV

SEQ ID NO: 790274 - protein, 69 aa, Homo sapiens
DKKKPPESLHIVRRVSMLPRYTVGYYMILTHLRKENRNYQLTKMGFEETKYDSVYTVLSVKRKSCIQEM

SEQ ID NO: 790275 - protein, 124 aa, Homo sapiens
KISKGANPVEIRRGVMLVVDAVIAELKKQSKPVTTPEEIAQVATISANGDKEIGNISDAMKKVGRKGVITVKDGKTLNDELEIIEGIKFDRGYISPYFINTSKGQKCEFQDAYVLLSEKKISSV

SEQ ID NO: 790276 - protein, 85 aa, Homo sapiens
PIGGPSRTPQQPRPAPHLRVTGMIRLSPGPRGPGTRGQRAVGTAQPRTLLRECGSFGLERDVLARLPTNLQFPRAPLKQELFPKP

SEQ ID NO: 790277 - protein, 194 aa, Homo sapiens
APAHTSAAALPGSHPSAGGGPRVLRALPPLAGWTPQGQRRSLRPTSRVPPGTGTGRRAPTVLLVQHHGPDGSSRTSAEDTEGRVAPTPAAGRLRCSRRPRAGAESGEPRPPTGADGPESGAQPRGQGAQEEGLGGRRGGETARPGSREPREQQLPGPGRSRSLSRARVLPPRRPYSPQQSEGCISQGPSDSPVN

SEQ ID NO: 790278 - protein, 130 aa, Homo sapiens
RSSSVQCRHTPMCCALPVSLSQAPAWKQRWTRNLPTHPLPGYRHHFHHKTESGFRDSAQGRSSGHLPLSEGRFLLPLAQPFPLFPPMSCHWSTHLGAGEREEEGDQVTPSWLVTLCPGNRRLELILMAEA

SEQ ID NO: 790279 - protein, 119 aa, Homo sapiens [sequence omitted]

SEQ ID NO: 790280 - protein, 103 aa, Homo sapiens
ISGLPKQMSNIPPILASLLFHGDFCPTTSDPGVHRRTIQVSFWNSPSLESLLQDRCLSDSRTAPSPRHEVPFYYQTSTASPRLGQTHPEMQGQNYDVPTCLHK

SEQ ID NO: 790281 - protein, 163 aa, Homo sapiens [sequence omitted]

SEQ ID NO: 790282 - protein, 169 aa, Homo sapiens
QWEGNSFWVQTKSWLVTLTNTTTTCLRLSAHENQQTSKIALHNTECGTSRKFRGNEIANVRDRVKDCILSLFPPKLVLPLPWNKEQLSKGRERKQSNEEFQPPILSGESWRVLFPNSAIGRKPEVRPLHQEKEMQTAQVTQIPEPCLHKGVSFHVAAQYVKDESLILSK

SEQ ID NO: 790283 - protein, 143 aa, Homo sapiens
LQLGLFKHLSWQGKRGSLSGTSILLVATFMVCVFVCVLSHKGGCGRGAPLREEVNSARVARGAACVPGGAVHAVPGPALKSPNSPGLSPAPALLGRGRPLVKGMGAPLPTGRDGAPPLRPVGELRNLLGRFWAEGGLFWLGAV

SEQ ID NO: 790284 - protein, 76 aa, Homo sapiens
TCRGSYCNPSALEGKVVGSPEARSSRQTRATQQDPVSTKIEKISWAQWHTPVIPALWEAKAEGLLEARSLRLAWPT

SEQ ID NO: 790285 - protein, 110 aa, Homo sapiens
PRQRAGDCGSVPEAGREPAELGEEPPTPGAEHVRINKMKLGETGGQIAPGSRSPRPGRSTSPPYPSPAAAPTPGRSPRGSCSPGAPPPARAPSPARGRFAAVINKEGRQA

SEQ ID NO: 790286 - protein, 96 aa, Homo sapiens
SPARGHVHRLSPVRRPDVLRINKMKLGETGGQIAPGSRSPRPGRSTSPPYPSPAAAPTPGRSPRGSCSPGAPPPARAPSPARGRFAAVINKEGRQA

SEQ ID NO: 790287 - protein, 151 aa, Homo sapiens
  misc_feature (90)..(90): Xaa can be any naturally occurring amino acid
GKENKITITNDKGRLSKEDIERMVQEAEKYKAEDEKQRDKVSSKNSLEFYAFNMKATVEDEKLQGKINDEDKQKILDKCNEIINWLDKNXTAEKEEFEHQQKELEKVCNPIITKLYQSAGGMPGGMPGGFPGGGAPPSGGASSGPTIEEVD

SEQ ID NO: 790288 - protein, 151 aa, Homo sapiens; identical to SEQ ID NO: 790287
  misc_feature (90)..(90): Xaa can be any naturally occurring amino acid

SEQ ID NO: 790289 - protein, 195 aa, Homo sapiens
VGVRARGSDVTARLRRPRSASRREPQVRGGGGGAGSGRLGPLPPGGRRGCGRTGVKSGRRGGGRGAARASFGRDVSGSAPRQVAPVESDPSAPLPAAELQGGEAAHSKLAARLRGAAGRAACGAGGQRGLTPPPSAPALCRQASGEAGSFPPGLALSPARDPSPTVNPTGKAQNCAGLRPSAVEPLRVSLPPPAA

SEQ ID NO: 790290 - protein, 77 aa, Homo sapiens
PCTLRAVILSGLGELTGSWQGWRERGTEASGGHTWVFSGPGPAALLWGGAFTVSSSTPLEILLMGQGHHTWAPTFPN

SEQ ID NO: 790291 - protein, 82 aa, Homo sapiens
ICHGEHMDSWAIPKNNFWVKQQCQLLAPTAFTYEWSHVQSRLFWASLRRGSHDDIGTFGHHVHQPGTSMRAPLLIVPAGLAG

SEQ ID NO: 790292 - protein, 123 aa, Homo sapiens
DGATTEQSHALKLVTFYPEHRVNAHRFCNTGYKDSKTALLFASFVTSSKLLKFLSLRYCIHKRAVAKLVPASSGCCGVESELICVRSRGQCLLHKHFVSVIIAFKTLFTVCVRLSSVLHRLSV

SEQ ID NO: 790293 - protein, 520 aa, Homo sapiens
WFLTLNLKSVEMNNEEDLLQEDSTRDEGNETEANSMNTLRRTRKKVTKPYVCSTEVGETDMSNSNDCMRDSSQILTPPQLSSRMKHIRQAMAKNRLQFVRFEATDLHGVSRSKTIPAHFFQEKVSHGVCMPRGYLEVIPNPKDNEMNNIRATCFNSDIVLMPELSTFRVLPWADRTARVICDTFTVTGEPLLTSPRYIAKRQLSHLQASGFSLLSAFIYDFCIFGVPEILNSKIISFPALTFLNNHDQPFMQELVDGLYHTGANVESFSSSTRPGQMEISFLPEFGISSADNAFTLRTGVKEVARKYNYIASFFIETGFCDSGILSHSLWDVDRKKNMFCSTSGTEQLTITGKKWLAGLLKHSAALSCLMAPSVSCRKRYSKDRKDLKKSVPTTWGYNDNSCIFNIKCHGEKGTRIENKLGSATANPYLVLAATVAAGLDGLHSSNEVLAGPDESTDFYQVEPSEIPLKLEDALVALEEDQCLRQALGETFIRYFVAMKKYELENEEIAAERNKFLEYFI

SEQ ID NO: 790294 - protein, 290 aa, Homo sapiens
ELSPYNLYFYSLDSSGNQNLYATYQLSHFQSISVLGNLEARMVDTVLYDNTQLQLKAESPWEALDWGQKLWEVVHAAVPGYMGRQNELTISPGLGHHDDYTQNHSFQKKTSGLLPPSPVLDSSKQYQNILKSGTLYRLTVQNNWKAFTFVLSRAYLMAFQPGKLDEDPLLSYNVDVCLAVQMDNLDGCDSCFQVIFPQDVLRLRAETRQRAQEWMEALKIAANVARSSEQNLQVTLRNKPKDQMGGHELRKNKRQSVTTSFLSILTTLSLERGLTAQSFKCAGMKQIFSL

SEQ ID NO: 790295 - protein, 100 aa, Homo sapiens
WSARLTSGSAKWKGPDSVRSKYEYLEDTQTDEAPWNLLLWSALGISCMSDHEVAPHFCLPGLREVGALVRGVSSAQQREPHLVSTGWNPGSSRSDGEEVW

SEQ ID NO: 790296 - protein, 96 aa, Homo sapiens
KDNKLLLLHLAHLTVDFSREDAVTEFEEQDLSWKSTPVKARGYKQNCAEEEGKPQCRPNCASTDVAKSKVNVAYQTFYIGPAWSGNYIPAWVSHCM

SEQ ID NO: 790297 - protein, 116 aa, Homo sapiens
GAAPLAQARARLDMATYCDDLGPSSAPPGQAQATAHPPGYEPGDLGAVGGGPLLWVNAPALSPKSYASGPGPAPPYAAPSYGAPGPLLGAPGGLAGADLAWLSLSGQQELLRLVRP

SEQ ID NO: 790298 - protein, 190 aa, Homo sapiens
MAGGAREVLTLQLGHFAGFVGAHWWNQQDAALGRATDSKEPPGELCPDVLYRTGRTLHGQETYTPRLILMDLKGSLSSLKEEGGLYRDKQLDAAIAWQGKLTTHKEELYPKNPYLQDFLSAEGVLSSDGVWRVKSIPNGKGSSPLPTATTPKPLIPTEASIRVWSDFLRVHLHPRSICMIQKYNHDGTRG

SEQ ID NO: 790299 - protein, 336 aa, Homo sapiens
MAGGAREVLTLQLGHFAGFVGAHWWNQQDAALGRATDSKEPPGELCPDVLYRTGRTLHGQETYTPRLILMDLKGSLSSLKEEGGLYRDKQLDAAIAWQGKLTTHKEELYPKNPYLQDFLSAEVRASVLNFLTRCHNLRVSKGQGVLSSDGVWRVKSIPNGKGSSPLPTATTPKPLIPTEASIRVWSDFLRVHLHPRSICMIQKYNHDGEAGRLEAFGQGESVLKEPKYQEELEDRLHFYVEECDYLQVVAWQCALQGGSSSHPANYLSSLTPAQGFQILCDLHDGFSGVGAKAAELLQDEYSGRGIITWGLLPGPYHRGVSGTWRSKHSNPIGRVA

SEQ ID NO: 790300 - protein, 342 aa, Homo sapiens
MAGGAREVLTLQLGHFAGFVGAHWWNQQDAALGRATDSKEPPGELCPDVLYRTGRTLHGQETYTPRLILMDLKGSLSSLKEEGGLYRDKQLDAAIAWQGKLTTHKEELYPKNPYLQDFLSAEHSFSKGLRLGEQKGGYAVWPANSRRMKQPLPLNCLELNVDFSDPSQGVLSSDGVWRVKSIPNGKGSSPLPTATTPKPLIPTEASIRVWSDFLRVHLHPRSICMIQKYNHDGYGDPRGFEEAGRLEAFGQGESVLKEPKYQEELEDRLHFYVEECDYLQGFQILCDLHDGFSGVGAKAAELLQDEYSGRGIITWGLLPGPYHRGVSGTWRSKHSNPIGRVA

SEQ ID NO: 790301 - protein, 208 aa, Homo sapiens
MAGGAREVLTLQLGHFAGFVGAHWWNQQDAALGRATDSKEPPGELCPDVLYRTGRTLHGQETYTPRLILMDLKGSLSSLKEEGGLYRDKQLDAAIAWQGKLTTHKEELYPKNPYLQDFLSAEGVLSSDGVWRVKSIPNGKGSSPLPTATTPKPLIPTEWKLGRDLTKLDLRRWASFMDAGVEHDDVAELLQELQSLAQCYQGGDSLVD

SEQ ID NO: 790302 - protein, 154 aa, Homo sapiens
MAGGAREVLTLQLGHFAGFVGAHWWNQQDAALGRATDSKEPPGELCPDVLYRTGRTLHGQETYTPRLILMDLKGSLSSLKEEGGLYRDKQLDAAIAWQGKLTTHKEELYPKNPYLQDFLSAEASIRVWSDFLRVHLHPRSICMIQKYNHDGTRG

SEQ ID NO: 790303 - protein, 119 aa, Homo sapiens
GGSNPFPMAKVRLLQILMDGGLGRAETWRKVHFLCLSSGSSPLPTATTPKPLIPTEASIRVWSDFLRVHLHPRSICMIQKYNHDGYGDPRGFEARNMGPHQCRMRLLRPSSLPFPRTRG

SEQ ID NO: 790304 - protein, 138 aa, Homo sapiens
SLIAQVLEVHLDLLAVLLQQGFTCVGRDSRCYRMSEFPTYALSLNGTYPNLVGQGGQIHSAREASLNWWEKRPPAPGSRISFHRRSLHLPLIISPSDNLGLSWDKVSVSQGLCTLISSSPTEAGKCFISRGSINVECK

SEQ ID NO: 790305 - protein, 1036 aa, Homo sapiens
MYLVAGDRGLAGCGHLLVSLLGLLLLLARSGTRALVCLPCDESKCEEPRNCPGSIVQGVCGCCYTCASQRNESCGGTFGIYGTCDRGLRCVIRPPLNGDSLTEYEAGVCEDENWTDDQLLGFKPCNENLIAGCNIINGKCECNTIRTCSNPFEFPSQDMCLSALKRIEEEKPDCSKARCEVQFSPRCPEDSVLIEGYAPPGECCPLPSRCVCNPAGCLRKVCQPGNLNILVSKASGKPGECCDLYECKPVFGVDCRTVECPPVQQTACPPDSYETQVRLTADGCCTLPTRCECLSGLCGFPVCEVGSTPRIVSRGDGTPGKCCDVFECVNDTKPACVFNNVEYYDGDMFRMDNCRFCRCQGGVAICFTAQCGEINCERYYVPEGECCPVCEDPVYPFNNPAGCYANGLILAHGDRWREDDCTFCQCVNGERHCVATVCGQTCTNPVKVPGECCPVCEEPTIITVDPPACGELSNCTLTGKDCINGFKRDHNGCRTCQCINTEELCSERKQGCTLNCPFGFLTDAQNCEICECRPRPKKCRPIICDKYCPLGLLKNKHGCDICRCKKCPELSCSKICPLGFQQDSHGCLICKCREASASAGPPILSGTCLTVDGHHHKNEESWHDGCRECYCLNGREMCALITCPVPACGNPTIHPGQCCPSCADDFVVQKPELSTPSICHAPGGEYFVEGETWNIDSCTQCTCHSGRVLCETEVCPPLLCQNPSRTQDSCCPQCTDQPFRPSLSRNNSVPNYCKNDEGDIFLAAESWKPDVCTSCICIDSVISCFSESCPSVSCERPVLRKGQCCPYCIEDTIPKKVVCHFSGKAYADEERWDLDSCTHCYCLQGQTLCSTVSCPPLPCVEPINVEGSCCPMCPEMYVPEPTNIPIEKTNHRGEVDLEVPLWPTPSENDIVHLPRDMGHLQVDYRDNRLHPSEDSSLDSIASVVVPIIICLSIIIAFLFINQKKQWIPLLCWYRTPTKPSSLNNQLVSVDCKKGTRVQVDSSQRMLRIAEPDARFSGFYSMQKQNHLQADNFYQTV

SEQ ID NO: 790306 - protein, 502 aa, Homo sapiens
MYLVAGDRGLAGCGHLLVSLLGLLLLLARSGTRALVCLPCDESKCEEPRNCPGSIVQGVCGCCYTCASQRNESCGGTFGIYGTCDRGLRCVIRPPLNGDSLTEYEAGVCEDENWTDDQLLGFKPCNENLIAGCNIINGKCECNTIRTCSNPFEFPSQDMCLSALKRIEEEKPDCSKARCEVQFSPRCPEDSVLIEGYAPPGECCPLPSRCVCNPAGCLRKVCQPGNLNILVSKASGKPGECCDLYECKPVFGVDCRTVECPPVQQTACPPDSYETQVRLTADGCCTLPTRCECLSGLCGFPVCEVGSTPRIVSRGDGTPGKCCDVFECVNDTKPACVFNNVEYYDGDMFRMDNCRFCRCQGGVAICFTAQCGEINCERYYVPEGECCPVCEDPVYPFNNPAGCYANGLILAHGDRWREDDCTFCQCVNGERHCVATVCGQTCTNPVKVPGECCPVCEEPTIITVDPPACGELSNCTLTGKDCINGFKRDHNGCRTCQCINSE

SEQ ID NO: 790307 - protein, 142 aa, Homo sapiens
MANSGMVVYRLAGNFLYSGTQGPSLLWLYNLPRGFSCICVQPAKGSRAWEVSTGGFAGRACKWCTCLALTTPGQSSVSWPRPTVKEAGKCSPCAQEQKEKESWEQLMVSATGSRAGVAQTSGLPAGGAHYFLFCLISSFKKK

SEQ ID NO: 790308 - protein, 165 aa, Homo sapiens
CGRRTIRGQLAVSDLWVEGHWLCQACVRRAIGCVSLWAKGDWLCQACGRRAIGCVRPVSEERWLCQACGRSAIGCVRLVGQGRLAVSGLWEEREWLFQARGPRAIGCVRPVGGGRLERERQVKSWGKHRGWLWPGKERGPKHLLAAWSDHGAGDCIVSMSAPEVK

SEQ ID NO: 790309 - protein, 102 aa, Homo sapiens
SSHFDLPKCCNYRHEPPCPVPCILSGVLGGWWGGPWGGEHSMESQFEGQDSGLRHSQVGPSRHLDPGVQGSGRDLAGSTSPGLSPLRVMGTLSISEITRESV

SEQ ID NO: 790310 - protein, 221 aa, Homo sapiens
IYYQGNYVRETPYEYSECGKIFNQHILLTDHIHTAEKPSECGKAFSHTSSLSQPQMLLTGEKPYKCDECGKRFSQRIHLIQHQRIHTGEKPFICNGCGKAFRQHSSFTQHLRIHTGEKPYKCNQCGKAFSRITSLTEHHRLHTGEKPYECGFCGKAFSQRTHLNQHERTHTGEKPYKCNECGKAFSQSAHLNQHRKIHTREKLCEYKCEQTVRHSPSFSST

SEQ ID NO: 790311 - protein, 318 aa, Homo sapiens
IYYQGNYVRETPYEYSECGKIFNQHILLTDHIHTAEKPSECGKAFSHTSSLSQPQMLLTGEKPYKCDECGKRFSQRIHLIQHQRIHTGEKPFICNGCGKAFRQHSSFTQHLRIHTGEKPYKCNQCGKAFSRITSLTEHHRLHTGEKPYECGFCGKAFSQRTHLNQHERTHTGEKPYKCNECGKAFSQSAHLNQHRKIHTREKLWKLGFIVSNLGPDKLEFQLGLFGKFLFFPPFCMACQAAADELYTIVLFRVSYEQSSSGNSCSLVFCLLTRCWFFTNISRVEGLAVLYLASTTTSSASLSLLSLPFQNERCIDNTV

SEQ ID NO: 790312 - protein, 209 aa, Homo sapiens
IYYQGNYVRETPYEYSECGKIFNQHILLTDHIHTAEKPSECGKAFSHTSSLSQPQMLLTGEKPYKCDECGKRFSQRIHLIQHQRIHTGEKPFICNGCGKAFRQHSSFTQHLRIHTGEKPYKCNQCGKAFSRITSLTEHHRLHTGEKPYECGFCGKAFSQRTHLNQHERTHTGEKPYKCNECGKAFSQSAHLNQHRKIHTREKLYASFIC

SEQ ID NO: 790313 - protein, 221 aa, Homo sapiens; identical to SEQ ID NO: 790310

SEQ ID NO: 790314 - protein, 111 aa, Homo sapiens
SDECIEEDDLLGYSASRIQKIRLLKSNIRSHCCFYSRDWVSLCFPGRSLTTGLKYLSAAASQSDGIRGISHPTQPQPRLNLNNGFFIIFRQYTFYNFLFLIYFSNKNTLTL

SEQ ID NO: 790315 - protein, 58 aa, Homo sapiens
MVLGRCERYLEGGFKFGKFGKSSKGTILGLSPVGVWEAGRAGEAGLGPRWAQLPSVIA

SEQ ID NO: 790316 - protein, 77 aa, Homo sapiens
TPTPTPNKGSSRGSCQLQSQLLDTYCPRLGVKRFRLKDPSVDCSQNSRGLSFGLAGAIPTCVQEAPHSAGAGGRRRS

SEQ ID NO: 790317 - protein, 109 aa, Homo sapiens
DKIRYSCVTGYILDGHPQLTCIANSVNTASWDFPVPICRAEDACGGTMRGSSGIISSPSFPNEYHNNADCTWTIVAEPGDTISLIFTDFQMEEKYDYLEIEGSEPPTIW

SEQ ID NO: 790318 - protein, 131 aa, Homo sapiens
DKIRYSCVTGYILDGHPQLTCIANSVNTASWDFPVPICRAEDACGGTMRGSSGIISSPSFPNEYHNNADCTWTIVAEPGDTISLIFTDFQMEEKYDYLEIEGSEPPTIWFGYLKDLTGKLCEEVVRAEGYF

SEQ ID NO: 790319 - protein, 82 aa, Homo sapiens
MLISKIDVQVECYIISEEEASSPSLRGENGLVEEWSLNSVLKYVQDCFMWKAERKNIPGDEMFQQGHRAEESNSNRNWLAWT

SEQ ID NO: 790320 - protein, 175 aa, Homo sapiens
MANPGGGAVCNGKLHNHKKQSNGSQSRNCTKNGIVKEAQQNGKPHFYDKLIVESFEEAPLHVMVFTYMGYGIGTLFGYLRDFLRNWGIEKCNAAVERKEQKVRMRTSLDLCQCLLLSKVFSEVVMQVQILESMRCSGTIQGKFHSSPPAKPHYPWAYGPVFTNISWATTICHIPN

SEQ ID NO: 790321 - protein, 236 aa, Homo sapiens
MANPGGGAVCNGKLHNHKKQSNGSQSRNCTKNGIVKEAQQNGKPHFYDKLIVESFEEAPLHVMVFTYMGYGIGTLFGYLRDFLRNWGIEKCNAAVERKEQKDFVPLYQDFENFYTRNLYMRIRDNWNRPICSAPGPLFDVMERVSDDYNWTFRFTGRVIKDVINMGSYNFLGLAAKYDESMRTIKDVLEVYGTGVASTRHEMGTLDKHKELEDLVAKFLNVEAAMVFGMGFATNSM

SEQ ID NO: 790322 - protein, 150 aa, Homo sapiens
FFFLGKCQQAEGLGHMVVKYDLLLKQLQSIFQNDCIIIHSRQPSLKVPVPPHLGKLLLLLLRRRFPLVAQAGVQWRDLSSSPPLPPRFKLFSCLSLPSSWDYRNAPPCPANFLFSVETGFLHVDQAGLELLTSGDPPASASQSAGITGMS

SEQ ID NO: 790323 - protein, 113 aa, Homo sapiens
MPKKTRAKETPLLFLPSSGISCWSSSSPRSLLLRPEVSLSFLPWVPALCPQPIMPAVHASCTQDFLLGLGLGLDNDPDDPRGHWGPGSFAAELASSSHPFTCFLILSPQALSS

SEQ ID NO: 790324 - protein, 129 aa, Homo sapiens
VTRVLLRDLIRRLGLPFWIGSDNGPAFVADLLQKTAKVLGITRKLHAASRPQSSGKVERMNRTIKNNIIVFPAGYVKQHHEGHQTTCYIGGNLILSPPPPVPDIRGNNTGVMYTHCFIGSNVILCLLGY

SEQ ID NO: 790325 - protein, 72 aa, Homo sapiens
GFGSCQLVPATPYSGPLKPVRGWQPCDTSPHSATESEIEVEVGEYVVAVRAAFCKMLPGGACDSRPSSLQRK

SEQ ID NO: 790326 - protein, 31 aa, Homo sapiens
MRSGWLWSRDLHSHFGPDTHWLCLNLSFLLG

SEQ ID NO: 790327 - protein, 65 aa, Homo sapiens
MQAVLVWLSLVPLCFSRALQVMLKYSRLRTAALGQGRPIETQHEPKMCFSLSSGHIKKMQMKLKA

SEQ ID NO: 790328 - protein, 107 aa, Homo sapiens
WSWLLTRWTHVPFFLRNVVILKCLALRLALRLLCLWKAVWSHVAPSSAPMLSQNTTINDRAGRWLKKICGRAQWLMPVIPALWEAEAGGSRGQGIETILANMVKPCL

SEQ ID NO: 790329 - protein, 87 aa, Homo sapiens
PTEWNISLDPAVFDSFWQDTEILNTAVLTGKTVAMPIKVVSVEENSAVMDISESVECKSTDEDVIKVSHSTASWMEPVGTSLGHPVC

SEQ ID NO: 790330 - protein, 71 aa, Homo sapiens
APIEAEAAGPAGRPPPGARLPGAREGAALGGGARAPPEAAAAVSPPLLPAWHLPPARAGIAADKPASNFSK

SEQ ID NO: 790331 - protein, 71 aa, Homo sapiens; identical to SEQ ID NO: 790330

SEQ ID NO: 790332 - protein, 100 aa, Homo sapiens
APIEAEAAGPAGRPPPGARLPGAREGAALGGGARAPPEAAAAINLPVISANETWNTSRPEDGKGSSFDKRRPAWLGILSPAGWEMQRCFQRGADELRGKK

SEQ ID NO: 790333 - protein, 103 aa, Homo sapiens
LQEFFLSWDLKLSSGCLLLSSCLLSSYREMVQSINLAGRVGKGAYLEVEFSWKMHCFLLTCMFTGDGLGKPIEVLLEGSTSSSPTKYPLKLTLSSWAGKHQQS

SEQ ID NO: 790334 - protein, 115 aa, Homo sapiens
MLSKNNVLVVLKEPLENISWPACPSARVQSPPHRGLPGPSLQGVWALLLQVRRPKLREAGQLPQGHSEWVRPGLGTRKPRPCSEAQDKCPLTTPSWSSGCRSRRQSPEGLISTWG

SEQ ID NO: 790335 - protein, 39 aa, Homo sapiens
MSKCRGGKITPKWFFVESHCLLENVSPCVATFYSFLRKT

SEQ ID NO: 790336 - protein, 89 aa, Homo sapiens
SPFQVFSPQIKLSFQMLHQSVPFRGRCIAKSHSPSQFLSYLACWRHPAQLLVSFFTDFTFFTGSRLLHSLFSFYMGSRRKLPSGTVAEP

SEQ ID NO: 790337 - protein, 110 aa, Homo sapiens
SHACPHCRASELLLYRESVRMWYVHNLLSIFYSLLCLFEVVYPNFLFPSSLTSLSSLAPGCCILSFPSTWVVEGNYQVGLLLSPEAQSLRPSPLQLRFTSEYGDFIQSHG

SEQ ID NO: 790338 - protein, 247 aa, Homo sapiens
CLEGAVRAGRIPRVPLTHAGWGQGWTLARTRSLLIMLGPGSNRRRPTQGERGPGSPGEPMEKYQVLYQLNPGALGVNLVVEEMETKVKHVIKQVECMDDHYASQALEELMPLLKLRHAHISVYQELFITWNGEISSLYLCLVMEFNELSFQEVIEDKRKAKKIIDSEWMQNVLGQVLDALEYLHHLDIIHRNLKPSNIILISSDHCKLQDLSSNVLMTDKAKWNIRAEEEPFVSPGMALKPQFSFSR

SEQ ID NO: 790339 - protein, 119 aa, Homo sapiens
CLEGAVRAGRIPRVPLTHAGWGQGWTLARTRSLLIMLGPGSNRRRPTQGERGPGSPGEPMEKYQVLYQLNPGALGVNLVVEEMETKVKHVIKQVECMDDHYASQALEEQWGLTILPRLV

SEQ ID NO: 790340 - protein, 174 aa, Homo sapiens
  misc_feature (1)..(1): Xaa can be any naturally occurring amino acid
  misc_feature (7)..(7): Xaa can be any naturally occurring amino acid
  misc_feature (10)..(10): Xaa can be any naturally occurring amino acid
XWIVSIXCRXYGQHLYGMKVIITIVTVIIIIITTSDFLNANQAPVIKREPRCKDGGRLSILREPLRPVGKARFRHQGQAAWDDRWNKEETQEPPPQPRNPHHRPDLHDRQAPDSGYEGVSPKRVAEANFSLGSAPQAAQGRSHGQSPGVHGFFSHGSPAASSDIMKRLPPPGLF

SEQ ID NO: 790341 - protein, 167 aa, Homo sapiens
QLQPSQLLHDCFVIITIVTVIIIIITTSDFLNANQAPVIKREPRCKDGGRLSILREPLRPVGKARFRHQGQAAWDDRWNKEETQEPPPQPRNPHHRPDLHDRQAPDSGYEGVSPKRVAEANFSLGSAPQAAQGRSHGQSPGVHGFFSHGSPAASSDIMKRLPPPGLF

SEQ ID NO: 790342 - protein, 149 aa, Homo sapiens
RLSRVVGRGRQGDGAVPPDADLRGRAHTVAGLAAAGGGAQGTAALVAHGPRLLLVDGLVVQPQDLLQAQRVPGAPGRAAGCPGLPRPLAAHCLSPRLPAARRASRLSHPAGGRCARQSRRVPASPQLRSIVVARRRLTIPGTAAAQRGR

SEQ ID NO: 790343 - protein, 104 aa, Homo sapiens
PQNPYSFSEFPPEARWALPGAFSGNSETFRRCMVCVLPENHGPSYSWHSHGHQDQPGPNSDSRVLLLREVAQSQVPSMAADCQEQWLGAAAPPNPACRTGTTES

SEQ ID NO: 790344 - protein, 52 aa, Homo sapiens
MISTVCYLSPSPSSSSITITINTIIINITITITTIITITVTTITITITIIII

SEQ ID NO: 790345 - protein, 53 aa, Homo sapiens
MHQRSAAGYLSRPGSPSPESWGRIIYLSADRQAGRFAESLGASSSYKGECTTK

SEQ ID NO: 790346 - protein, 178 aa, Homo sapiens
SSLISSPFAHSTHSSGEPPKSYSSTMSLETDSITHLSPSSSGATPTIQPSPSSTDSRMIPSSPQPETITHPSSGSPSAELTPSSHSTLPSSESLTPHWSPTSHSPGTEPLTSTDQTLEPPGPAPGDTGPRELHRNPSVVVVVCLLVSLLLIGSVVMAVRFCHRNESKFENLDEVSMVR

SEQ ID NO: 790347 - protein, 232 aa, Homo sapiens
SSLISSPFAHSTHSSGEPPKSYSSTMSLETDSITHLSPSSSGATPTIQPSPSSTDSRMIPSSPQPETITHPSSGSPSAELTPSSHSTLPSSESLTPHWSPTSHSPGTEPLTSTDQTLEPPGPAPGDTGPRELHRNPSVVVVVCLLVSLLLIGSVVMAVRFCHRNESKFENLDEVSMWFWELVDSGLAPVSPLGGGIIRRGFSGTPLLPSLPSRLVLPGEVEPSTHVVFTIEA

SEQ ID NO: 790348 - protein, 191 aa, Homo sapiens
SSLISSPFAHSTHSSGEPPKSYSSTMSLETDSITHLSPSSSGATPTIQPSPSSTDSRMIPSSPQPETITHPSSGSPSAELTPSSHSTLPSSESLTPHWSPTSHSPGTEPLTSTDQTLEPPGPAPGDTGPRELHRNPSVVVVVCLLVSLLLIGSVVMAVRFCHRNESKFENLDEVSMGSVNDRLSFAHHLQE

SEQ ID NO: 790349 - protein, 96 aa, Homo sapiens
TDSITHLSPSSSGATPTIQPSPSSTDSRMIPSSPQPETITHPSSGSPSAELTPSSHSTLPSSESLTPHWSPTSHSPGTEPLTSTDQTLEPPGPGEY

SEQ ID NO: 790350 - protein, 672 aa, Homo sapiens
MSDPEGETLRSTFPSYMAEGERLYLCGEFSKAAQSFSNALYLQDGDKNCLVARSKCFLKMGDLERSLKDAEASLQSDPAFCKGILQKAETLYTMGDFEFALVFYHRGYKLRPDREFRVGIQKAQEAINNSVGSPSSIKLENKGDLSFLSKQAENIKAQQKPQPMKHLLHPTKGEPKWKASLKSEKTVRQLLGELYVDKEYLEKLLLDEDLIKGTMKGGLTVEDLIMTGINYLDTHSNFWRQQKPIYARERDRKLMQEKWLRDHKRRPSQTAHYILKSLEDIDMLLTSGSAEGSLQKAEKVLKKVLEWNKEEVPNKDELVGNLYSCIGNAQIELGQMEAALQSHRKDLEIAKEYDLPDAKSRALDNIGRVFARVGKFQQAIDTWEEKIPLAKTTLEKTWLFHEIGRCYLELDQAWQAQNYGEKSQQCAEEEGDIEWQLNASVLVAQAQVKLRDFESAVNNFEKALERAKLVHNNEAQQAIISALDDANKGIIRELRKTNYVENLKEKSEGEASLYEDRIITREKDMRRVRDEPEKVVKQWDHSEDEKETDEDDEAFGEALQSPASGKQSVEAGKARSDLGAVAKGLSGELGTRSGETGRKLLEAGRRESREIYRRPSGELEQRLSGEFSRQEPEELKKLSEVGRREPEELGKTQFGEIGETKKTGNEMEKEYE

SEQ ID NO: 790351 - protein, 244 aa, Homo sapiens
MSDPEGETLRSTFPSYMAEGERLYLCGEFSKAAQSFSNALYLQDGDKNCLVARSKCFLKMGDLERSLKDAEASLQSDPAFCKGILQKAETLYTMGDFEFALVFYHRGYKLRPDREFRVGIQKAQEAINNSVGSPSSIKLENKGDLSFLSKQAENIKAQQKPQPMKHLLHPTKGEPKWKASLKSEKTVRQLLGELYVDKEYLEKLLLDEVTFLMQNREPLTTLAEFLPELGNSSKPLTRGKKRSS

SEQ ID NO: 790352 - protein, 549 aa, Homo sapiens
NPGPFCSTTCPSSIKLENKGDLSFLSKQAENIKAQQKPQPMKHLLHPTKGEPKWKASLKSEKTVRQLLGELYVDKEYLEKLLLDEDLIKGTMKGGLTVEDLIMTGINYLDTHSNFWRQQKPIYARERDRKLMQEKWLRDHKRRPSQTAHYILKSLEDIDMLLTSGSAEGSLQKAEKVLKKVLEWNKEEVPNKDELVGNLYSCIGNAQIELGQMEAALQSHRKDLEIAKEYDLPDAKSRALDNIGRVFARVGKFQQAIDTWEEKIPLAKTTLEKTWLFHEIGRCYLELDQAWQAQNYGEKSQQCAEEEGDIEWQLNASVLVAQAQVKLRDFESAVNNFEKALERAKLVHNNEAQQAIISALDDANKGIIRELRKTNYVENLKEKSEGEASLYEDRIITREKDMRRVRDEPEKVVKQWDHSEDEKETDEDDEAFGEALQSPASGKQSVEAGKARSDLGAVAKGLSGELGTRSGETGRKLLEAGRRESREIYRRPSGELEQRLSGEFSRQEPEELKKLSEVGRREPEELGKTQFGEIGETKKTGNEMEKEYE

SEQ ID NO: 790353 - protein, 512 aa, Homo sapiens
MRTHTPLCFNNSKQSKFTEGPAAATGRKQEANPLEACSPGASSHPFPTDLIKGTMKGGLTVEDLIMTGINYLDTHSNFWRQQKPIYARERDRKLMQEKWLRDHKRRPSQTAHYILKSLEDIDMLLTSGSAEGSLQKAEKVLKKVLEWNKEEVPNKDELVGNLYSCIGNAQIELGQMEAALQSHRKDLEIAKEYDLPDAKSRALDNIGRVFARVGKFQQAIDTWEEKIPLAKTTLEKTWLFHEIGRCYLELDQAWQAQNYGEKSQQCAEEEGDIEWQLNASVLVAQAQVKLRDFESAVNNFEKALERAKLVHNNEAQQAIISALDDANKGIIRELRKTNYVENLKEKSEGEASLYEDRIITREKDMRRVRDEPEKVVKQWDHSEDEKETDEDDEAFGEALQSPASGKQSVEAGKARSDLGAVAKGLSGELGTRSGETGRKLLEAGRRESREIYRRPSGELEQRLSGEFSRQEPEELKKLSEVGRREPEELGKTQFGEIGETKKTGNEMEKEYE

SEQ ID NO: 790354 - protein, 238 aa, Homo sapiens
MSDPEGETLRSTFPSYMAEGERLYLCGEFSKAAQSFSNALYLQDGDKNCLVARSKCFLKMGDLERSLKDAEASLQSDPAFCKGILQKAETLYTMGDFEFALVFYHRGYKLRPDREFRVGIQKAQEAINNSVGSPSSIKLENKGDLSFLSKQAENIKAQQKPQPMKHLLHPTKGEPKWKASLKSEKTVRQLLGELYVDKEYLEKLLLDEGFGHFVGTGPWGKGNLGGCFMHELKAEPVI

SEQ ID NO: 790355 - protein, 126 aa, Homo sapiens
PGPPQHTMEAPKGWALARRLGRGWSRKKSFVGPWVRGLSAHQKPPALETKPPRRCGSDPQSLSPTWSWEGGGRCGPGPRTAEGSVGQARTPPGALMVLSLPGRRKAAGTFAWYNHYCSTAQEFGIE

SEQ ID NO: 790356 - protein, 167 aa, Homo sapiens
QTRPLTEFRWGRLGDPPLTRALACRHARAPDTTQEPGGAGRSPWYRPPRPGHLGPGQHPGRTGVWVAGGFPWPLLSPTLSSPLGVAVEGILCAGGARWGGLLSRDPGVPFQKTEHHVLGPDTAHLFQGTARRTRSVPHSQAPAPHKASASRELHLGKYPPSTKETQP

SEQ ID NO: 790357 - protein, 138 aa, Homo sapiens
LSLSTQVWTRYPRAQSPLFLSWGAPLCCSATTGGLICLHHTVATGYRYRYITADTGQRSVCLIALLIGRLTRNLLSPLEPFPWLFQNTGPPTPGLDHTLQVCLRYAGSLQAGCQLYTYWFCNALGAHDLMDPVRAPSL

SEQ ID NO: 790358 - protein, 66 aa, Homo sapiens
TSTMKHGVKNRFIFRTLLNIPCLRGSKYTQHDQCYQQIMQTKLLFRNYKSIMLTVKYLQLRKVYYK

SEQ ID NO: 790359 - protein, 102 aa, Homo sapiens
YRSSSTLFYFLAFWQEVEGLTMPFCFVITQLCSHLGQAMRGRTEKKSNGVGPTFWKPLLHQLERNFQSFGSCGALSTSHCQHHHHHHDHGTSWKLWGQTMKR

SEQ ID NO: 790360 - protein, 168 aa, Homo sapiens
RPPSPTLQHAASEDNLSSSTGEAPSRAVGHHGDGPRPWLRGQKKSLGKKREESLEAKRRKRRSRSFEVTGQGLSHPKTHLLGPHQAERISDHRMPVCRHPAPGIRHLGKVTLPLAKVKLPPSQNTGPGDSSPLAVPPNPGGGSRRATRGPRLPHGTSTHGKDGCSRHN

SEQ ID NO: 790361 - protein, 71 aa, Homo sapiens
CCNIYRSIIGFVKLRSNKVKRSQKLVYMGKLKEKESFGEISVLLQVPFTCTIITKKEVEMAIIEDKDLFVA

SEQ ID NO: 790362 - protein, 148 aa, Homo sapiens
TPENIQLLSTAQPTPASDTTMTGSCCGSTLSSLSYGGGCCQPCCCRDPCCCRPVTCQTTVCRPVTCVPRCTRPICEPCRRPVCCDPCSLQEGCCRPITCCPSSCTAVVCRPCCWATTCCQPVSVQSPCCRPPCGQPTPCSTTCRTSSC

SEQ ID NO: 790363 - protein, 103 aa, Homo sapiens
DSLEDMALLEDVDLLEDTDFLEDPDFLEAIDLREDKDFLEDMDSLEDLEAIGRCGFSGRHGFFGRRRFSGRPKLSGRLGLLGRRGFSGRCEFEFVFGISGLQI

SEQ ID NO: 790364 - protein, 121 aa, Homo sapiens [sequence omitted]

SEQ ID NO: 790365 - protein, 121 aa, Homo sapiens [sequence omitted]

SEQ ID NO: 790366 - protein, 67 aa, Homo sapiens
MGTTQHSGISLEPKSSDGILLSTVFCGMCYHRRSSPNLSCVQYVSAPRLAEADGIKEPLNTGANTDM

SEQ ID NO: 790367 - protein, 114 aa, Homo sapiens
HTHTHTHIVQALDLASVSFLRDGQQHSFSTISSGSGKKKKKILGRWKRTMGNLFLPCPHLDNNYMGRICQMYYFGTLESIEEGLQLPGKGLDSKLLLILDNFSFYLNSYASPTH

SEQ ID NO: 790368 - protein, 190 aa, Homo sapiens
RLPFGIEENGGTPFLTAASGRHHHQHQHQHQHQHHSNYSLSLTLENKEGPLRSPNSSSKSLTKLSPGTPALFSEAAAHLKKLELETVKAAGPWPPLHININKAEEKKVSEKTLQTPLLPSPVADHVKCNILKAQLENASRVNIQGGKEESPFVNINKKSSLQDASVRSPIPIRVETAQPAVEKPEIKPPR

SEQ ID NO: 790369 - protein, 114 aa, Homo sapiens
ATLSDSEGHATLPACCCCCCTYNPATPNEICPPLLAAFPRLRFSSLFPWVPRARVARTPTLRLRVPAPIAGAPLGTRIPQMTTQTRSCPQVRRAGRPPRPQPTPPEFLRHPQRP

SEQ ID NO: 790370 - protein, 114 aa, Homo sapiens; identical to SEQ ID NO: 790369

SEQ ID NO: 790371 - protein, 130 aa, Homo sapiens
MVSHFMGSLSVLCFLLLLGFQFVCPQPSTQHRKVPQRMAAEGAPEDDGGGGAPGVWGAWGPWSACSRSCSGGVMEQTRPCLPRSYRLRGGQRPGAPARAFADHVVSAVRTSVPLHRSRDETPALAGTDAS

SEQ ID NO: 790372 - protein, 130 aa, Homo sapiens; identical to SEQ ID NO: 790371

SEQ ID NO: 790373 - protein, 607 aa, Homo sapiens
LTSATLAPPTRHMLLLLLLLPPLLCGRVGAKEQKDYLLTMQKSVTVQEGLCVSVLCSFSYPQNGWTASDPVHGYWFRAGDHVSRNIPVATNNPARAVQEETRDRFHLLGDPQNKDCTLSIRDTRESDAGTYVFCVERGNMKWNYKYDQLSVNVTASQDLLSRYRLEVPESVTVQEGLCVSVPCSVLYPHYNWTASSPVYGSWFKEGADIPWDIPVATNTPSGKVQEDTHGRFLLLGDPQTNNCSLSIRDARKGDSGKYYFQVERGSRKWNYIYDKLSVHVTALTHMPTFSIPGTLESGHPRNLTCSVPWACEQGTPPTITWMGASVSSLDPTITRSSMLSLIPQPQDHGTSLTCQVTLPGAGVTMTRAVRLNISYPPQNLTMTVFQGDGTASTTLRNGSALSVLEGQSLHLVCAVDSNPPARLSWTWGSLTLSPSQSSNLGVLELPRVHVKDEGEFTCRAQNPLGSQHISLSLSLQNEYTGKMRPISGVTLGAFGGAGATALVFLYFCIIFVVVRSCRKKSARPAVGVGDTGMEDANAVRGSASQGPLIESPADDSPPHHAPPALATPSPEEGEIQYASLSFHKARPQYPQEQEAIGYEYSEINIPK

SEQ ID NO: 790374 - protein, 138 aa, Homo sapiens
PCQIQFQPFQPGARLAGRERGPSAFPRRPPGNELFRAELGSGQRSSGEMGEDKGLGAFGSVDLAALIVPPFLDHLPSHSRAPGHPTEGLESGQSSRQGLERPAAGRGGQGRGSAAGARPFPGASTLQGSPRAGGPRWK

SEQ ID NO: 790375 - protein, 118 aa, Homo sapiens
RALQKMPARSPILHPARPHGHLHTDPTLHCWTSTQVFHRMPPSFRKGTVLGQVKLSQSGPSCSGAPNLSGSPTLQVQPTLDIVPPCRPSLRGFLRTRPIRPVALTWLSACQVKSFSRQ

SEQ ID NO: 790376 - protein, 92 aa, Homo sapiens
ATPGRLVAGARGGWGYVQSCRGAGTAAVKPLGSAETAVPIARLGCRRFSRSRCCRRRGRGSLLSFSAAKVRSCLGSARGGAPGAARMGQQKK

SEQ ID NO: 790377 - protein, 141 aa, Homo sapiens
ATPGRLVAGARGGWGYVQSCRGAGTAAVKPLGSAETAVPIARLGCRRFSRSRCCRRRGRGSLLSFSAAKVAFFNSAGANAQEEQRVCCQPLAHPVASSQKKPEVAAPAPESGGESVFGETHRALQGAMEKLQRLYGRRRWT

SEQ ID NO: 790378 - protein, 73 aa, Homo sapiens
LNLTTIRIWGYILVAVESVLCTVECLAASLAFTRCMSGAPPALTITKKTLALTGNTSSQTLSDVTWGTKVTSG

SEQ ID NO: 790379 - protein, 114 aa, Homo sapiens
SQTLFCHRTPARGPAGLPGLAAPRGSGRGPALGDKVQGSSPATAEGGRAGCHLAGAPTDSPALPESEPATRASPGTRAGLRARFSRPGQPRARAGKVPATSQGGGGGGSGPRPP

SEQ ID NO: 790380 - protein, 196 aa, Homo sapiens
DVTFANSPAPILPLCWEGVCFSPPALDPLNLLLSEGWGSEAWGGKGLTCPADGVLTCPLLPATPPLPRPWDQTLPTSSPRPTSCHVLYPKVTGMNAWLPLLSSPSSGPSSPADVALSARCLGAYSTLLTGLRPHQPCLELAPPPVITPARLQMSKVLLGSHKLSSSTPSSPGCPSVPHFPSFPSQVQAILLPQPPK

SEQ ID NO: 790381 - protein, 107 aa, Homo sapiens
MRETSANQQPPSWMVAAPPDLLRFITSPAPRLRTCRHRGALTGPAEYSLSCSMPASTCAHLRDMTRTLLGPAPPICKEGPRIQWNIGPFYFQVFLFVFSKIKQIAII

SEQ ID NO: 790382 - protein, 154 aa, Homo sapiens
MALLLSVLRVLLGGFFALVGLAKLSEEISAPVSERMNALFVQFAEVFPLKVFGYQPDPLNYQIAVGFLELLAGLLLVMGPPMLQEISNLFLILLMMGAIFTLAALKESLSTCIPAIVCLGFLLLLNVGQLLAQTKKVVRPTRKKTLSTFKESWK

SEQ ID NO: 790383 - protein, 156 aa, Homo sapiens
MKEPLDGECGKAVVPQQELLDKIKEEPDNAQEYGCVQQPKTQESKLKIGGVSSVNERPIAQQLNPGFQLSFASSGPSVLLPSVPAVAIKVFCSGCKKMLYKGQTAYHKTGSTQLFCSTRCITRHSSPACLPPPPKKTCTNCSKYKILNIPFYFTFF

SEQ ID NO: 790384 - protein, 275 aa, Homo sapiens
MKEPLDGECGKAVVPQQELLDKIKEEPDNAQEYGCVQQPKTQESKLKIGGVSSVNERPIAQQLNPGFQLSFASSGPSVLLPSVPAVAIKVFCSGCKKMLYKGQTAYHKTGSTQLFCSTRCITRHSSPACLPPPPKKTCTNCSKDILNPKDVITTRFENSYPSKDFCSQSCLSSYELKKKPVVTIYTKSISTKCSMCQKNADTRFEVKYQNVVHGLCSDACFSKFHSTNNLTMNCCENCGSYCYSSSGPCQSQKVFSSTSVTAYKQNSAQNPPTAS

SEQ ID NO: 790385 - protein, 723 aa, Homo sapiens
MKEPLDGECGKAVVPQQELLDKIKEEPDNAQEYGCVQQPKTQESKLKIGGVSSVNERPIAQQLNPGFQLSFASSGPSVLLPSVPAVAIKVFCSGCKKMLYKGQTAYHKTGSTQLFCSTRCITRHSSPACLPPPPKKTCTNCSKDILNPKDVITTRFENSYPSKDFCSQSCLSSYELKKKPVVTIYTKSISTKCSMCQKNADTRFEVKYQNVVHGLCSDACFSKFHSTNNLTMNCCENCGSYCYSSSGPCQSQKVFSSTSVTAYKQNSAQIPPYALGKSLRPSAEMIETTNDSGKTELFCSINCLSAYRVKTVTSSGVQVSCHSCKTSAIPQYHLAMSNGTIYSFCSSSCVVAFQNVFSKPKGTNSSAVPLSQGQVVVSPPSSRSAVSIGGGNTSAVSPSSIRGSAAASLQPLAEQSQQVALTHTVVKLKCQHCNHLFATKPELLFYKGKMFLFCGKNCSDEYKKKNKVVAMCDYCKLQKIIKETVRFSGVDKPFCSEVCKFLSARDFGERWGNYCKMCSYCSQTSPNLVENRLEGKLEEFCCEDCMSKFTVLFYQMAKCDGCKRQGKLSESIKWRGNIKHFCNLFCVLEFCHQQIMNDCLPQNKVNISKAKTAVTELPSARTDTTPVITSVMSLAKIPATLSTGNTNSVLKGAVTKEAAKIIQDESTQEDAMKFPSSQSSQPSRLLKNKGISCKPVTQTKATSCKPHTQHKECQTECPVRAVC

SEQ ID NO: 790386 - protein, 723 aa, Homo sapiens; identical to SEQ ID NO: 790385

SEQ ID NO: 790387 - protein, 723 aa, Homo sapiens; identical to SEQ ID NO: 790385

SEQ ID NO: 790388 - protein, 723 aa, Homo sapiens; identical to SEQ ID NO: 790385

SEQ ID NO: 790389 - protein, 457 aa, Homo sapiens
MKEPLDGECGKAVVPQQELLDKIKEEPDNAQEYGCVQQPKTQESKLKIGGVSSVNERPIAQQLNPGFQLSFASSGPSVLLPSVPAVAIKVFCSGCKKMLYKGQTAYHKTGSTQLFCSTRCITRHSSPACLPPPPKKTCTNCSKDILNPKDVITTRFENSYPSKDFCSQSCLSSYELKKKPVVTIYTKSISTKCSMCQKNADTRFEVKYQNVVHGLCSDACFSKFHSTNNLTMNCCENCGSYCYSSSGPCQSQKVFSSTSVTAYKQNSAQIPPYALGKSLRPSAEMIETTNDSGKTELFCSINCLSAYRVKTVTSSGVQVSCHSCKTSAIPQYHLAMSNGTIYSFCSSSCVVAFQNVFSKPKGTNSSAVPLSQGQVVVSPPSSRSAVSIGGGNTSAVSPSSIRGSAAASLQPLAEQSQQVALTHTVVKLKCQHCNHLFATKPELLFYKVKRDHERDCI

SEQ ID NO: 790390 - protein, 457 aa, Homo sapiens; identical to SEQ ID NO: 790389

SEQ ID NO: 790391 - protein, 314 aa, Homo sapiens
  misc_feature (4)..(4): Xaa can be any naturally occurring amino acid
  misc_feature (7)..(7): Xaa can be any naturally occurring amino acid
VALXDPXISGLSLLLHKILLQSAQILSFIKSNALNSRMLTILCEEMGSEHVSLPLHAEVRWISRGRMLKRLFELRHEIEIFLSQKHSDLAKYFHDEEWVGKLAYLSDIFSLINELNLSLQGTLTTFFNLCNKIDVFKRKLKMWLKRTQENDYDMFPSFSEFSNSSGLNMTDITRIIFEHLEGLSQVFSDCFPPEQDLRSGNLWIIHPFMNHQNNNLTDFEEEKLTELSSDLGLQALFKSVSVTQFWINAKTSYPELHERAMKFLLPFSTVYLCDAAFSALTESKQKNLLGSGPALRLAVTSLIPRIEKLVKEKE

SEQ ID NO: 790392 - protein, 170 aa, Homo sapiens
MKEPLDGECGKAVVPQQELLDKIKEEPDNAQEYGCVQQPKTQESKLKIGGVSSVNERPIAQQLNPGFQLSFASSGPSVLLPSVPAVAIKVFCSGCKKMLYKGQTAYHKTGSTQLFCSTRCITRHSSPACLPPPPKKTCTNCSKYKILNIPFYFTFFLVCILFSSNILLIL

SEQ ID NO: 790393 - protein, 457 aa, Homo sapiens; identical to SEQ ID NO: 790389

SEQ ID NO: 790394 - protein, 457 aa, Homo sapiens; identical to SEQ ID NO: 790389

SEQ ID NO: 790395 - protein, 170 aa, Homo sapiens; identical to SEQ ID NO: 790392

SEQ ID NO: 790396 - protein, 103 aa, Homo sapiens
ERNGKERKLITVIGTWKVLSECGLLPCWGLVVSIALPGTGVDPLAPFPALLFTQLKAGLAALSHFCDICQSRPREAGALVSLATQLSLSPHHKSYHAPVSPYP

SEQ ID NO: 790397 - protein, 83 aa, Homo sapiens
IDHRSGKKLEDGPKFLKSGDAAIVGMVPGKPMCVESFSDYPPLGPAVRDMRQTVAVGVIKAVDKKAAGAGKVTKSSQKAQKAK

SEQ ID NO: 790398 - protein, 86 aa, Homo sapiens
CPLERGFVFDECGPPCPRTCFNQHIPLGELAAHCVRPCVPGCQCPAGLVEHEAHCIPPEACPQVLLTGDQPLGARPSPSREPQETP

SEQ ID NO: 790399 - protein, 65 aa, Homo sapiens
MRSHVVSAPGGNRLQLGEERSYQRTTAPGMLRARPVTHFLCGGHSAPPAAGARRLSENHISRHAP

SEQ ID NO: 790400 - protein, 145 aa, Homo sapiens
LFSQNIYYPVDLKNSSEHRKHVSSILCELKPKDLGMKSKTSRHLIQKGQESEDEIVDEKLDTSFRISVFKLPIYTSGSLKNNAVLREKKQHFFPAYPQPIYTTHPKPIIKKDIRLERSMKEFFAPQRADLKKYIKDIVKKNLLWI

SEQ ID NO: 790401 - protein, 173 aa, Homo sapiens
RVRVAVNEHLNQKKYATQKLIEENKETIQNSLRQVWQNRFNYLEKARERKALFLKEKSQKASERLLVQNLNNERTLLTRGLLKIDRLEKNEAVLKEKSLIVKQKLKAEKYRKNLLKEMKKVRSQEIYKRHCEEKFVMDMIAFEKACERLQDAKTKVAIVKTNLDFKVPNGLIK

SEQ ID NO: 790402 - protein, 83 aa, Homo sapiens
RPPVTGRKSNHPKWGFEGKVAFRQAQKGCRLDLPGKGVEVGKYLIVGSVEGVSSVTVWLYCGIHEEGQPEIMATWFGAKFWGT

SEQ ID NO: 790403 - protein, 75 aa, Homo sapiens
EGKEGKKGRKEEREREKEKRKKEKEKERRKEGKKEREERKKKKERKKQRKRKKREMGSDQCWGLDPGLRVKAERV

SEQ ID NO: 790404 - protein, 111 aa, Homo sapiens
MWKKQKVRTEQTRDIVKGDVKTCKWLFETQPMESLYEKVSLMTSSEEIHKGDVKTCTWLFETQPLDTIKDDSETAVKLQTVKQEEIQGGDVRTAIWQISHFQSVFLEQIFL

SEQ ID NO: 790405 - protein, 106 aa, Homo sapiens
ISSWLGLPPASVASWGLTDCELEQLVFLHMDFIFQRGSQSFSHGFQSEGVELCKAMFGNVTTLPLYSMPKESKKSGQIKGFRNRLHLFMRGAGKSHCKAAWAQREE

SEQ ID NO: 790406 - protein, 84 aa, Homo sapiens
VRGGRRKGAPRARLSSNERKQPPATEPRSQALLENRDRLLSLYPHWRFSPAVRLWALPHFLRLKVVEATMILGITTISLQILDP

SEQ ID NO: 790407 - protein, 365 aa, Homo sapiens
MSSSVEQKKGPTRQRKCGFCKSNRDKECGQLLISENQKVAAHHKCMLFSSALVSSHSDNESLGGFSIEDVQKEIKRGTKLMCSLCHCPGATIGCDVKTCHRTYHYHCALHDKAQIREKPSQGIYMVYCRKHKKTAHNSEADLEESFNEHELEPSSPKSKKKSRKGRPRKTNFKGLSEDTRSTSSHGTDEMESSSYRDRSPHRSSPSDTRPKCGFCHVGEEENEARGKLHIFNAKKAAAHYKCMLFSSGTVQLTTTSRAEFGDFDIKTVLQEIKRGKRMKCTLCSQPGATIGCEIKACVKTYHYHCGVQDKAKYIENMSRGIYKLYCKNHSGNDERDEEDEERESKSRGKVEIDQQQLTQQQLNGN

SEQ ID NO: 790408 - protein, 365 aa, Homo sapiens; identical to SEQ ID NO: 790407

SEQ ID NO: 790409 - protein, 311 aa, Homo sapiens
MSSSVEQKKGPTRQRKCGFCKSNRDKECGQLLISENQKVAAHHKCMLFSSALVSSHSDNESLGGFSIEDVQKEIKRGTKLMCSLCHCPGATIGCDVKTCHRTYHYHCALHDKAQIREKPSQGIYMVYCRKHKKTAHNSEADLEESFNEHELEPSSPKSKKKSRKGRPRKTNFKGLSEDTRSTSSHGTDEMESSSYRDRSPHRSSPSDTRPKCGFCHVGEEENEARGKLHIFNAKKAAAHYKCMLFSSGTVQLTTTSRAEFGDFDIKTVLQEIKRGKRMVCSFYICYATLHLICCFKFRVHPKFIQSSENLK

SEQ ID NO: 790410 - protein, 112 aa, Homo sapiens
SILPSVDVSAAVQGSPISGVGLGMVTPAGCLEGENQGPREIPGTAFPPSSRAGQTGQVVSGAQVSSWRECQPCSGSPSRILGTDANVGTAGKLSLVPLPGFKNKPNKELSAE

SEQ ID NO: 790411 - protein, 112 aa, Homo sapiens; identical to SEQ ID NO: 790410

SEQ ID NO: 790412 - protein, 112 aa, Homo sapiens; identical to SEQ ID NO: 790410

SEQ ID NO: 790413 - protein, 134 aa, Homo sapiens
FHLSSTFFSVLSLRVQVAISSAQYFLPMEKDFFAPRNFPCLLEGFFFPFIYFLIKRKAVLCNTKVSQIGRKRTSAFTVSIREYFLVEIFSVSRTSVPPLICSHSASNFFQDVLAVLLFGGQCFTLTGSLSSCRK

SEQ ID NO: 790414 - protein, 153 aa, Homo sapiens
LQPGQQSEPLSQKKKRKENVFHIQMQNPLKMSLLRHQPIPHQGIWYLPKGRFCHEPGVRQGPKTPSTCRCDWKANHLYMGTGRERTALGGPHMFLGPAVGYPPTFRHWVLTLFIKTLCVESLPCGWKEVGFLQERMAQCGELVSAWLLSLLKI

SEQ ID NO: 790415 - protein, 121 aa, Homo sapiens
MVEVYQEEKPARHTVGTTMREEVTEGLYCYCSLGSSKYKKVTLSAPPKLRASSLIFLLPGPPSATVVHTEHWSWGPSSHHFTQFDPVQLFWFCLSFFPSSESLAGENNSPYPGTHTAFSHL

SEQ ID NO: 790416 - protein, 42 aa, Homo sapiens
MQQGRISYLMQRCWVMDDFLEKVTAWKDFNFTLSEWRREVRA

SEQ ID NO: 790417 - protein, 87 aa, Homo sapiens
MESPEIDPHKRGHQSFDKEQNKFKGERVVCSKMLLGKAVICVKNQTLTYPSCLVQTSKTPKLLEETIGNPYDLTLGSKIQNFCFKTL

SEQ ID NO: 790418 - protein, 125 aa, Homo sapiens
HPPPTRPRIPKGGEGGEQRGLRPPGAPRRPSAARPLVALEAAPAGTRGQRQDFRRGGSNSRIQRGARAETAAGAEGAPGEACPCRGRGLPQEAGTHASRARQESPAARNLPQGRAERVAGPRSRP

SEQ ID NO: 790419 - protein, 70 aa, Homo sapiens
FLHCPMGPTSWLGHPASSRTKMHFEKVIKVTACPPNAQDNWQTIFGRFTATSVPKINTQQQKGWHLPRYC

SEQ ID NO: 790420 - protein, 98 aa, Homo sapiens
EQCQRQANKVTEITLNNFDKVLEHDGKLTELEQRSDQLLDMSSAFSKTTKTLAQKKCWENIHCQIYLGLVVGGSLLIILIEQLAIFLPQSDTSNAPQT

SEQ ID NO: 790421 - protein, 42 aa, Homo sapiens
MTKALFLLEAFQGSVGSWGRARETTAFLVSPVSAPYPISGEG

SEQ ID NO: 790422 - protein, 120 aa, Homo sapiens
MGTNFPFWVSQLTFFKLSITGTYDLKSVLGQLGITKVFSNGADLSGVTEEAPLKLSKAVHKAVLTIDEKGTEAAGAMFLEAIPMSIPPEVKFNKPFVFLMIEQNTKSPLFMGKVVNPTQK

SEQ ID NO: 790423 - protein, 57 aa, Homo sapiens
RERSCEVVHTDPKTCQSCSWLQHGGGRVWSPGLFHVGMIQDLGSRNFICESFEGKGP

SEQ ID NO: 790424 - protein, 162 aa, Homo sapiens
MGITPIGLAKEEPSHSDLHRMRAQFLIPKSSPSELEDRGKPLEELAGLARRGPRVLTLSRSSGSARRPRAPPTPFLPGFMGAAGAGNPRGTARSPAPRIPTSPARQRTRIRPPRNPASLYSPAESTQQAVLEDGPARLAEARGARREAPCSSTLGGAPSGSA

SEQ ID NO: 790425 - protein, 146 aa, Homo sapiens
DRARPEGWGPAGDSRCWNAGAYRGENLGGLPAWKPRPSLGLGHSRRSINESKFLPGRRPGLSGESQRGRVLEGSLAAGVRCGLKSEQELGAALGDRLWGTAPREWGKCGPGPLGPPRQQSAGPWEGRCPPAVKGGGPSRVRPSAEA

SEQ ID NO: 790426 - protein, 105 aa, Homo sapiens
MQFPCSKIPHGLLNKPNFVAWYLSPAPAKLSSFVILQEDSCVYSMRKPTQATYWSLHILRKPGNIQLIMFHSRDHSLCLLAHHTTSTLLSCQAPFSPQHGISYPQ

SEQ ID NO: 790427 - protein, 91 aa, Homo sapiens
RKYIEIDSDEEPRGELLSLPDIERLHKKPKSDKETRLATAMAGKTDRKEFVRKKTKVNPFSSSKSKEKKKQKNFMMMWYSQNVWSENKRSF

SEQ ID NO: 790428 - protein, 88 aa, Homo sapiens
CGGGGAGGREGVTRESHCRSSIGPSVVQAEDSGSPPGEHRASQLQEENGARKDDAKFPCTISEPGSHSPGKHLPWCPHGRGVLSGGGL

SEQ ID NO: 790429 - protein, 69 aa, Homo sapiens
MQLGGRLLWDPSPLPPPLPGVNESSVAIRIRCIRSVPLLSPLMTIFLNSESPAPAKGLDKEGAEQEQRI

SEQ ID NO: 790430 - protein, 128 aa, Homo sapiens
MSGRDLPHATVNKGKRQDQNSGSLAASPALLTTGSSCPRMKTIAVRMKAHKMPSESSGYSPSHHLPRQTLRLWPWLCQKLIPCCSPRGPRNCRCARTFLADKCGVAGGLDGVPLCPSAPCVGALMYGV

SEQ ID NO: 790431 - protein, 30 aa, Homo sapiens
MFMHPLELCQAVNLFTPYNVLTLLEKGLKQ

SEQ ID NO: 790432 - protein, 326 aa, Homo sapiens
NLLHRMTEEKTLTAEGLVKLLQAVKTTFPNLGLLLEKLQKSATLPSTTVQPSPDDYGTELLRRYHENLSEIFTDNQILLKMISHMTSLAPGEREVMEKLVKRDSGSGGFNSLISAVLEKQTLSATAIWQLLLVVQETKTCPLDLLMEEIRREPGADAFFRAVTTPEHATLETILRHNQLILEAIQQKIECKLFTSEEEHLAETVKEILSIPSETASPEASLRAVLSRAMEKSVPAIEICHLLCSVHKSFPGLQPVMQELAYIGVLTKEDGEKETWKVSNKFHLEANNKEDEKAAKEDSQPGEQNDQGETGSLPGQQEKEASASPDP

SEQ ID NO: 790433 - protein, 109 aa, Homo sapiens
TPPTPRPTPAAAGGPADRGGADIGPHSRAALRGPHTAPPRASSTSAHCPGSSRNGGHTTRETQTTPLPSCTSFSCNKSPQSRQLQHQKWTFSQLQVQSGFTGHNKGVRC

SEQ ID NO: 790434 - protein, 109 aa, Homo sapiens
VRKTFSYIFLSIKFYTFKFIIRAGHLGSNRDPAAAKPCLSFVCLAWVITAPSLEGYCGDSPLCRECFGPSSSTVRAVSVLLIVAVCVLIMRSESSFSFCLAAWTTVLVS

SEQ ID NO: 790435 - protein, 66 aa, Homo sapiens
CPHMRLSHSTPGSSQRAGSRKSRKEMKGYSRYILPLDTNDQGPVIRSHSPTFEFLLFLLSSVFFSK

SEQ ID NO: 790436 - protein, 513 aa, Homo sapiens
MIRTPLSASAHRLLLPGSRGRPPRNMQPTGREGSRALSRRYLRRLLLLLLLLLLRQPVTRAETTPGAPRALSTLGSPSLFTTPGVPSALTTPGLTTPGTPKTLDLRGRAQALMRSFPLVDGHNDLPQVLRQRYKNVLQDVNLRNFSHGQTSLDRLRDGLVGAQFWSASVSCQSQDQTAVRLALEQIDLIHRMCASYSELELVTSAEGLNSSQKLACLIGVEGGHSLDSSLSVLRSFYVLGVRYLTLTFTCSTPWAESSTKFRHHMYTNVSGLTSFGEKVVEELNRLGMMIDLSYASDTLIRRVLEVSQAPVIFSHSAARAVCDNLLNVPDDILQLLKKNGGIVMVTLSMGVLQCNLLANVSTVADHFDHIRAVIGSEFIGIGGNYDGTGRFPQGLEDVSTYPVLIEELLSRSWSEEELQGVLRGNLLRVFRQVEKVREESRAQSPVEAEFPYGQLSTSCHSHLVPQNGHQATHLEVTKQPTNRVPWRSSNASPYLVPGLVAAATIPTFTQWLC

SEQ ID NO: 790437 - protein, 108 aa, Homo sapiens
MCQSFAYLLFDSFPTLHLQTTFSRLICQLAPAGFKWKTGGPEEAREFPPLPFSACGDISSSGLFFSMIPTPSRQTFPLQSQVLLNTPMQMQFFTCGTTILSLFYQPLS

SEQ ID NO: 790438 - protein, 126 aa, Homo sapiens
CFPSRARERAHARPSRGLSRVPLGPLLTALWRPRGCAARDRASAARGPRPEQLTRQAAPGARPQRQGGSQGPQPRPGPPASAPSHRPRPRASASRAGAAGGIVRAARAWPRRPQARPRAEAAAQAG

SEQ ID NO: 790439 - protein, 153 aa, Homo sapiens [sequence omitted]

SEQ ID NO: 790440 - protein, 76 aa, Homo sapiens
MAVTCCNTYLGTLQFLVSLSFRAPPHSPHPDAGAHSGSHLWHIWSSHSLKGSWHMELPTLPQQPACLAVQWPDPVF

SEQ ID NO: 790441 - protein, 58 aa, Homo sapiens
MLFIVYQCGGTIYFSLRCLMNTMITWTLHVSLGSCDSEAGKLDYLWKLNLEVKGGCRI

SEQ ID NO: 790442 - protein, 72 aa, Homo sapiens
AVGAKPSCPQLPSVSFYAHCAQNLEGARAAGGWCVSTAQLCSEIREGREKLGSRNRHFHACKGKGVSGDLPQ

SEQ ID NO: 790443 - protein, 104 aa, Homo sapiens
WRGQARGDSKSQSPEQREVGPARGAGGGCLDTSLAPGNQDIKAPPEPPCGGVPFIPLKVLLPLGFPEGEPRWDGGAWGSPLAGVSLSGLEGCCCKNNSFDELPY

SEQ ID NO: 790444 - protein, 107 aa, Homo sapiens
  misc_feature (1)..(1): Xaa can be any naturally occurring amino acid
  misc_feature (35)..(35): Xaa can be any naturally occurring amino acid
  misc_feature (37)..(37): Xaa can be any naturally occurring amino acid
XRGARIRIPNFEVAVATHTIRTDGTETAAPVSDLXLXASLPVALSCVLACGDVEGKFDILFNRVQAIQKKSGNFDLLLCVGNFFGSTQDAEWEEYKTGIKKGIEIFL

SEQ ID NO: 790445 - protein, 106 aa, Homo sapiens
  misc_feature (1)..(1): Xaa can be any naturally occurring amino acid
  misc_feature (104)..(104): Xaa can be any naturally occurring amino acid
XRGARIRIPNFRWQSQPVLFGQMAQKPLRLLACGDVEGKFDILFNRVQAIQKKSGNFDLLLCVGNFFGSTQDAEWEEYKTGIKKAPIQTYVLGANNQETVKYFXGC

SEQ ID NO: 790446 - protein, 80 aa, Homo sapiens
MSLRKQTPSDFLKQIIGRPVVVKLNSGVDYRGVLACLDGYMNIALEQTEEYVNGQLKNKYGDAFIRGNNVLYISTQKRRM

SEQ ID NO: 790447 - protein, 125 aa, Homo sapiens
EKCPCLGAFGFGWDHPRRPGSWGAWSEGSGSRRRGEPHRCAGRRRGRAQPQVRCPSVQSRCGAAAAAALGRARQPRKGPAVNRLGLREGTAGWRVPAKCRVQALRAWNGWERSDGGRRDRPQRGA

SEQ ID NO: 790448 - protein, 80 aa, Homo sapiens; identical to SEQ ID NO: 790446

SEQ ID NO: 790449 - protein, 103 aa, Homo sapiens
MSLRKQTPSDFLKQIIGRPVVVKLNSGVDYRGVLACLDGYMNIALEQTEEYVNGQLKNKYGDAFIRGNNGNISSPYSTAFKISLSIYNPDSPKRFLDNLKVHF

SEQ ID NO: 790450 - protein, 80 aa, Homo sapiens; identical to SEQ ID NO: 790446

SEQ ID NO: 790451 - protein, 127 aa, Homo sapiens
MPTMWRMLHQALKLRRRTVLAGQEISYVLPVMFVVSEEDSNRDVFLVAGYRHLEFGERIAIWGSSMQHVERRRWPLDSIQKRMGQSFTGWAEEAAPGMKTKKEYAEIGVKPRQNACEMCPGMILSTT

SEQ ID NO: 790452 - protein, 74 aa, Homo sapiens
ATHFADLRSRGRTGESEGARAERGPGTSPVASDLTGNVGAVLKALCLITIESQKQLLGSVKNSTETSKVLGLHI

SEQ ID NO: 790453 - protein, 93 aa, Homo sapiens
LFANQPSNHTRPGPFHSKVTLSDAILPSAQCAERIRSSPLLVLLLVLAAGFWLVQLLRSVCNLFSYWDIQVFYREALHIPPVSWVAVSVQRVP

SEQ ID NO: 790454 - protein, 151 aa, Homo sapiens
LLETAMAPVSESGSGPQGAQIKKGKKKKHSGLDCHVMLFMRLEGSKLADTLLSPMFILLRNWKFFLHHKATCHLLFCTLTSSKLVPTQATAFSFLLPAYDTSLAFQTSFCHFTLQPSKLADTLLSPMFILLRNWKFFLHHQATVTYFFCHL

SEQ ID NO: 790455 - protein, 131 aa, Homo sapiens
LLETAMAPVSESGSGPQGAQIKKGKKKKHSGLDCHVMLFMRLEGSKLADTLLSPMFILLRNWKFFLHHKATCHLLFCTLTSSKLVPTQATAFSFLLPAYDTSLAFQTSFCHFTLQPSMVHTHDQIWMPKSS

SEQ ID NO: 790456 - protein, 67 aa, Homo sapiens
SNLAYTFHIQLLTLLKDTKSILLQANKGELQSSYQKNTPRRIPSNQPKTQKLLAKKKGKRKEIKDCE

SEQ ID NO: 790457 - protein, 123 aa, Homo sapiens
NTFPSLRPAVSTFCKASTTGEWLRLEVPETHTLSMSLLITTKRLELPQPEKARSSSQDGRVGCGPLNLLAHKREVPQITFSSAHSAGWFNRTQKLCMRFFFLIFSMNVFSIIIMKIYNIFVFN

SEQ ID NO: 790458 - protein, 155 aa, Homo sapiens
PRGSMPSWHFGRPVTSYTGLGCPHPSSAEKENCNPSQTDPAWTLRREPGESDQQRNSNLPTYPTLNPPTPIQAPEEEKQTTTEQAIAQELQSEGEVDGNGFSAVPRISSQNTDDKAGDVTHMLSQSAPHPGLVLRSLTRNRQSTLTHSFIIKGVY

SEQ ID NO: 790459 - protein, 120 aa, Homo sapiens
QGLALLPRLECSGAISAHCNLHLLGSSDSPTTASQVLRTTAMSHHAQLIFVFFGRDGVSHVDQPGFELLTSGDPPASTFQNARITGVSHHTQPEVDQSYLSILMNTNEPHQVYPYLPTAY

SEQ ID NO: 790460 - protein, 81 aa, Homo sapiens
MFQSIIYPFSSFFQAFFIHTLTCSLILTQPRRELRQKVQAFVSDNHTNSSASRLQLRLAARLKRLKRQELESIYRPSVRSI

SEQ ID NO: 790461 - protein, 67 aa, Homo sapiens
NKGGRCILEHHLLSAACSCAWETAPAEMSESFGGIEYPVNYLLEQLDSTLHPPAFQEAMEASNDFLH

SEQ ID NO: 790462 - protein, 121 aa, Homo sapiens
KKCVSPSAMIMKPPQPCGTVGSPYVAQAELQLLGSSNAPISVSQSAEITVSLCCPVWSTGMILAYCKLRLPGSSNSSASVSQAAGIIGPRRQGREQEPEPEEVLQDLPISRRQSEPREGWP

SEQ ID NO: 790463 - protein, 114 aa, Homo sapiens
KKCVSPSAMIMKPPQPCGTVGSPYVAQAELQLLGSSNAPISVSQSAEITVSLCCPVWSTGMILAYCKLRLPGSSNSSASVSQAAGIIGPRRQGREQEPEPEEEEDSRRDVLQGV

SEQ ID NO: 790464 - protein, 77 aa, Homo sapiens
ASEVAYPRSPSKQYSNPILHPKLSAAFRKQRQAPWRSRSAAGCGAGRGLRFPSLPQSCWVPGGEACAAPRGGRAKLA

SEQ ID NO: 790465 - protein, 90 aa, Homo sapiens
DVSEKAIKAKENFKFLFQPVSLGKNTTHVNDTTRHTQNRRTRNGHTNEKRNDNETNTHRQMTDTKDETNDTRKKERKKRKKERKKERIPV

SEQ ID NO: 790466 - protein, 72 aa, Homo sapiens
MYICYLFIRSVICWHLLSRNVKGHELIQDLLSSLHLDSSYPPDAGLSDDDEPPNASLPPDPPLLTVPQMHSV

SEQ ID NO: 790467 - protein, 68 aa, Homo sapiens
PGKLRTQSESSMPMGSEPCPGHFTNREMPARRTQHLGLAGHHLPGSAPVGLTAVCLSDIPFSPIFGIQ

SEQ ID NO: 790468 - protein, 440 aa, Homo sapiens
DLDVDLDLHRTLHCWLAMMYRPDVVRARKRVCWEPWVIGLVIFISLIVLAVCIGLTVHYVRYNQKKTYNYYSTLSFTTDKLYAEFGREASNNFTEMSQRLESMVKNAFYKSPLREEFVKSQVIKFSQQKHGVLAHMLLICRFHSTEDPETVDKIVQLVLHEKLQDAVGPPKVDPHSVKIKKINKTETDSYLNHCCGTRRSKTLGQSLRIVGGTEVEEGEWPWQASLQWDGSHRCGATLINATWLVSAAHCFTTYKNPARWTASFGVTIKPSKMKRGLRRIIVHEKYKHPSHDYDISLAELSSPVPYTNAVHRVCLPDASYEFQPGDVMFVTGFGALKNDGYSQNHLRQAQVTLIDATTCNEPQAYNDAITPRMLCAGSLEGKTDACQGDSGGPLVSSDARDIWYLAGIVSWGDECAKPNKPGVYTRVTALRDWITSKTGI

SEQ ID NO: 790469 - protein, 145 aa, Homo sapiens
DLDVDLDLHRTLHCWLAMMYRPDVVRARKRVCWEPWVIGLVIFISLIVLAVCIGLTVHYVRYNQKKTYNYYSTLSFTTDKLYAEFGREASNNFTEMSQRLESMVKNAFYKSPLREEFVKSQVIKFRNQQDRNRQLSKPLLRNTKK

SEQ ID NO: 790470 - protein, 154 aa, Homo sapiens
LFKVCAANFGDICHAVGQEATEKFLIPKFFELCSDAVWGMRKACAECFTAVSHSSSPGVRRTQLFPLFIRLVSDPCRWVHQAAFQSLGPFTSTFANPSRAGLYLREDGALSIWPLTQDLDSGFASGSPAPSSGGNTSPARYALARVTTRTLDVP

SEQ ID NO: 790471 - protein, 112 aa, Homo sapiens
MLVLSSCVAYRSPFPPPPAASTATDHRDVNRQWKALLALQWSTFFRNQYFSILYYPARCVLCRVQVYVTARVRQSFAAAAAAAASRTGCIRKLLSECRNVLLRKQCLPSSFS

SEQ ID NO: 790472 - protein, 68 aa, Homo sapiens
RHSNIWIPHSGSSQEPRSPRTIWALELFSQPPVPRSPFTNLLHTLSPGPMSPQNTDPLLRPHPLTEGP

SEQ ID NO: 790473 - protein, 159 aa, Homo sapiens
GTLCDWSIFLVSETSNAQKIDREISAILKYLKQQCHAQKIGIRDSAWGGTAVHHLMMKYSEFRAGVSVYGIVKDSEDIYNLKNPTLFIFAENDVVIPLKDVSLLTQKLKEHCKVEYQIKTFSGQTHGFVHRKREDCSPADKPYIDEARRNLIEWLNKYM

SEQ ID NO: 790474 - protein, 159 aa, Homo sapiens; identical to SEQ ID NO: 790473

SEQ ID NO: 790475 - protein, 108 aa, Homo sapiens [sequence omitted]

SEQ ID NO: 790476 - protein, 207 aa, Homo sapiens
KWGGNAGEVGADHINILALGWVGVEPQKCSQAHSYQEPMSKIRGLPPEVREPGPGVELGVENGLLCQLIHSPEFNLFSNSVVFESNFIQTHVPEADFQVTKPGNWRDVCEGSATVILGVTSSVPSLPLPNVLLMANVTWPQGPFTTWSTPGDAPVINLSSLKTASCHPPSPASPSCCWRLSRPVAVSHSSQESPSSQQTGTMTLPLK

SEQ ID NO: 790477 - protein, 338 aa, Homo sapiens
KWGGNAGEVGADHINILALGWVGVEPQKCSQAHSYQEPMSKIRGLPPEVREPGPGVELGVENGLLCQLIHSPEFNLFSNSVVFESNFIQVTKPGNWRDVCEGSATVILGVTSSVPSLPLPNVLLMANVTWPQGPFTTWSTPGDAPVINLSRLLPLKYVELRIYDRLQRILRVRTVTEKIYYLKLHEKHPEIVFQFWVRLVKILQKGLSITTKDPRIKFTHCLVPKMPTNSTETTPENSLLSSPQPSEPLVLLAAEQTSGSFSQLSGKPQLTADRNNDTAIEIDNCSSYKIPSPVASPINLNIPMRAALSHSLWEQEDWNEHLLQVHIASYLGEHFLGA

SEQ ID NO: 790478 - protein, 347 aa, Homo sapiens
KWGGNAGEVGADHINILALGWVGVEPQKCSQAHSYQEPMSKIRGLPPEVREPGPGVELGVENGLLCQLIHSPEFNLFSNSVVFESNFIQTHVPEADFQVTKPGNWRDVCEGSATVILGVTSSVPSLPLPNVLLMANVTWPQGPFTTWSTPGDAPVINLSRLLPLKYVELRIYDRLQRILRVRTVTEKIYYLKLHEKHPEIVFQFWVRLVKILQKGLSITTKDPRIKFTHCLVPKMPTNSTETTPENSLLSSPQPSEPLVLLAAEQTSGSFSQLSGKPQLTADRNNDTAIEIDNCSSYKIPSPVASPINLNIPMRAALSHSLWEQEDWNEHLLQVHIASYLGEHFLGA

SEQ ID NO: 790479 - protein, 252 aa, Homo sapiens
KWGGNAGEVGADHINILALGWVGVEPQKCSQAHSYQEPMSKIRGLPPEVREPGPGVELGVENGLLCQLIHSPEFNLFSNSVVFESNFIQVTKPGNWRDVCEGSATVILGVTSSVPSLPLPNVLLMANVTWPQGPFTTWSTPGDAPVINLSRLLPLKYVELRIYDRLQRILRVRTVTEKIYYLKLHEKHPEIVFQFWVRLVKILQKGLSITTKDPRIKFTHCLVPKMPTNSTETTVSGPPSGTCREISIYKYI

SEQ ID NO: 790480 - protein, 71 aa, Homo sapiens
VVDGKVPDTLRKCFSEGEKVNYEKFRNWLFLNKDAFTFSRWLLSGGVYVTLTDDSDTPTFYQTLAGVTHCK

SEQ ID NO: 790481 - protein, 143 aa, Homo sapiens
VVDGKVPDTLRKCFSEGEKVNYEKFRNWLFLNKDAFTFSRWLLSGGVYVTLTDDSDTPTFYQTLAGVTHLEESDIIDLEKRYWLLKAQSRTGRFDLETFGPLVSPPIRPSLSEGLFNAFDENRDNHIDFKEISCGLSACCRGP

SEQ ID NO: 790482 - protein, 151 aa, Homo sapiens
ALVPLGIGIAKENECHNRVIFKQLLQAKALQFLQIDSCRLGSVNENLSVLLMAKKFEIPVCPHAGGVGLCELVQHLIIFDYISVSASLENRVCEYVDHLHEHFKYPVMIQRASYMPPKDPGYSTEMKEESVKKHQYPDGEVWKKLLPAQEN

SEQ ID NO: 790483 - protein, 151 aa, Homo sapiens; identical to SEQ ID NO: 790482

SEQ ID NO: 790484 - protein, 151 aa, Homo sapiens; identical to SEQ ID NO: 790482

SEQ ID NO: 790485 - protein, 417 aa, Homo sapiens [sequence omitted]

SEQ ID NO: 790486 - protein, 424 aa, Homo sapiens
MTLRPGTMRLACMFSSILLFGAAGLLLFISLQDPTELAPQQVPGIKFNIRPRQPHHDLPPGGSQDGDLKEPTERVTRDLSSGAPRGRNLPAPDQPQPPLQRGTRLRLRQRRRRLLIKKMPAAATIPANSSDAPFIRPGPGTLDGRWVSLHRSQQERKRVMQEACAKYRASSSRRAVTPRHVSRIFVEDRHRVLYCEVPKAGCSNWKRVLMVLAGLASSTADIQHNTVHYGSALKRLDTFDRQGILHRLSTYTKMLFVREPFERLVSAFRDKFEHPNSYYHPVFGKAILARYRANASREALRTGSGVRFPEFVQYLLDVHRPVGMDIHWDHVSRLCSPCLIDYDFVGKFESMEDDANFFLSLIRAPRNLTFPRFKDRHSQEARTTARIAHQYFAQLSALQRQRTYDFYYMDYLMFNYSKPFADLY

SEQ ID NO: 790487 - protein, 235 aa, Homo sapiens
GAFPARKPDPAVLRGGERTRRRRQQEVGDRSRRGPKRNAAPRPLAPRTLRLPAPRCSPTDRTGFRLERAEAPGPSWVGGPLRRLRAPSRGSAAENRSRTGGARGLGCVRCARSRPDGRLVWTMREERAPHTQEVTPEPAPDDPATWNNAAGLHVLFHPAVRSCRPPPLHQPAGPYGARPPAGARTETSAVSSINGRPPACIAEGGVLLQPRRLEEIWEFKTFTGIDLQSPTHFSG

SEQ ID NO: 790488 - protein, 119 aa, Homo sapiens
STIAVVVYDITNINSFKETDKWVEHVRAERGDDVVIMLLGNKIDLDNKRQVTAEQGEEKSRNLNVMFIETSAKTGYNVKKLFRRVASALLSTRTSPPPKEGTVEIELESFEESGNRSYC

SEQ ID NO: 790489 - protein, 105 aa, Homo sapiens
MSYKTEQGVKLPVALFCHPQPCKMEQFTPSSAGCSLQYSQAPQGEGGAPPEASCCCPQGIKCWVLLTCGCAPSEGHRFVGIGMSTFGRKNKKPENQQIPLCNSLK

SEQ ID NO: 790490 - protein, 67 aa, Homo sapiens
PVPSRDFLKKVTSELSFKAGLGVTQASQSHKGTAGRGDSRSHGVEVENSSGCAFFQITPEHPIPTRL

SEQ ID NO: 790491 - protein, 104 aa, Homo sapiens
VQVCEEGSPVLPWPPLSQMDSARVFSVCACVPVCLFPGEAGCLACLNTHIPQACMCSRRRHPCTVALTPPVTAVVLASRVGGRCPISQLLSVVQKFNCPASQSC

SEQ ID NO: 790492 - protein, 33 aa, Homo sapiens
MVYGWAQWLTPVIPALWEAEAGGSQGQEIKTIL

SEQ ID NO: 790493 - protein, 118 aa, Homo sapiens
VSCFHRIIPGFICQGGDFTCHNGTGGKSICGEKSDDENFILKHTGPGILSVVNAGPNTNGSQFVICTAKTEWLDGKHVVFGKVKEKEGMKIVEAMERFGSRNGKTSKKITIADCRQLQ

SEQ ID NO: 790494 - protein, 133 aa, Homo sapiens
MLFGIRILVNTPSPLVTGLHHYNPSIHRDQGECANQWRKGPGSAHLAGLAGRCSLINTPSPLVTGLQRYNPSMDRAQGMCASLEEEAGLCTPLWAWWELQSHKHSQTSHHRAAGLQSQHAPGSGRVRITGGKV

SEQ ID NO: 790495 - protein, 117 aa, Homo sapiens
MTLFFDSPILKWGKRLEQAPLKGGSPITREPRRSSSPQPSRGHSLVPFRSAVLATTQGSDSPCAGRRCIGNSHTTQSDCAINTDSAFVSVSRRAAPLTLGILECGKSVFLHANEMTG

SEQ ID NO: 790496 - protein, 108 aa, Homo sapiens
MRSLCCAPLLLLLLLPPLLLTPRAGDAAVITGACDKDSQCGGGMCCAVSIWVKSIRICTPMGKLGDSCHPLTRKVPFFGRRMHHTCPCLPGLACLRTSFNRFICLAQK

SEQ ID NO: 790497 - protein, 129 aa, Homo sapiens
MRSLCCAPLLLLLLLPPLLLTPRAGDAAVITGACDKDSQCGGGMCCAVSIWVKSIRICTPMGKLGDSCHPLTRKNNFGNGRQERRKRKRSKRKKEVPFFGRRMHHTCPCLPGLACLRTSFNRFICLAQK

SEQ ID NO: 790498 - protein, 72 aa, Homo sapiens
MPNIHFSVLPTLILPHFLCSPIPQASGPCFRPPFLPQYDSYLLEVKRPLPTPLQGNGTTAFRLPVLNACGRT

SEQ ID NO: 790499 - protein, 120 aa, Homo sapiens
AQAAGSAGAEPRSDWLARPSLSAPGRVESSLHLLRPEPGVRGRSAVLSPIFLGEGEEEIVKGSNNRGQQPCSPKATPSRDSVPSTSSYCLHSAIPPVCTKPEATCLAPWIRGLLQVLGQR

SEQ ID NO: 790500 - protein, 105 aa, Homo sapiens
GIIGMSHHAQPISLVLYPTAPFPCVPTVRPHAPFLLQSQHADPPTVLLPLNPNSSPTPTSHVNLHEILKPQFPPLWHECLKRAYQGNVVRMKLATTRKTLSRCLF

SEQ ID NO: 790501 - protein, 69 aa, Homo sapiens
MFLDCIAGPQREALPMDTEVYESPYADPEEIRPKEVYLDRKLLTLEDKELGSGNFGTVKKGYYQMKKKL

SEQ ID NO: 790502 - protein, 108 aa, Homo sapiens
RDGVLLCYLAGVQWRYLGSLQPPPPKFKQFSCLSLLSSWDYRHAPPRLANFCIFSRDGVSSCWSGWSRTPDLMIRPPRPWYILNSQNDQYIVRVENSGDDKELRLRLS

SEQ ID NO: 790503 - protein, 113 aa, Homo sapiens
AAGITDTRHHTWLIFVFLIETGFRYVDQAGPELLTSGDPPASASQSAGIIGVSHCTQPGGSLISATLCFHVISSQRSQFPRARLFLFHLSALLSLQATSFPHCSSALLPSDSR

SEQ ID NO: 790504 - protein, 68 aa, Homo sapiens
SRRQPEQNWFLPTPEGVLHLPISVEASTMPCAAPSLGTTFTSFSLPPTANPDTSAFKTAMESAPFFFS

SEQ ID NO: 790505 - protein, 106 aa, Homo sapiens
IDSDNGTRFSANIVKGLTQTLGINWEYHTPWHPPSSRKVEKNEPNFKESFKSILKTSLPWTKCLPIALLRIQTAPQKDITYLVYLLFELPLKKTLHTWSIFYFVFS

SEQ ID NO: 790506 - protein, 106 aa, Homo sapiens; identical to SEQ ID NO: 790505

SEQ ID NO: 790507 - protein, 413 aa, Homo sapiens
GACEEAPGPQPLSEIPSRALAPRAPEGPPGRRRPSRGSAFSMNRSHRHGAGSGCLGTMEVKSKFGAEFRRFSLERSKPGKFEEFYGLLQHVHKIPNVDVLVGYADIHGDLLPINNDDNYHKAVSTANPLLRIFIQKKEEADYSAFGTDTLIKKKNVLTNVLRPDNHRKKPHIVISMPQDFRPVSSIIDVDILPETHRRVRLYKYGTEKPLGFYIRDGSSVRVTPHGLEKVPGIFISRLVPGGLAQSTGLLAVNDEVLEVNGIEVSGKSLDQVTDMMIANSRNLIITVRPANQRNNVVRNSRTSGSSGQSTDNSLLGYPQQIEPSFEPEDEDSEEDDIIIEDNGVPQQIPKAVPNTESLESLTQIELSFESGQNGFIPSNEVSLAAIASSSNTEFETHAPDQKLLEEDGTIITL

SEQ ID NO: 790508 - protein, 162 aa, Homo sapiens
HPSLPRPSTQQTRLSRSALDIGTFQKQCQDALFENTVKCFTFHLRYLPWERLSYFSLKENKGQGRGGDHPGPAPHAGRLLRLPDLSRSDTSHTLEDALPPPNAPLAEMRGLYRQCRTGFNVFSHNPLHTTPPFLHLPTSLSADRHHRCFLLSMNPDLSAYLL

SEQ ID NO: 790509 - protein, 280 aa, Homo sapiens
GACEEAPGPQPLSEIPSRALAPRAPEGPPGRRRPSRGSAFSMNRSHRHGAGSGCLGTMEVKSKFGAEFRRFSLERSKPGKFEEFYGLLQHVHKIPNVDVLVGYADIHGDLLPINNDDNYHKAVSTANPLLRIFIQKKDGTFQKQCQDALFENTVKCFTFHLRYLPWERLSYFSLKENKGQGRGGDHPGPAPHAGRLLRLPDLSRSDTSHTLEDALPPPNAPLAEMRGLYRQCRTGFNVFSHNPLHTTPPFLHSPTSLSADRHHRCFLLSMNPDLSAYLLP

SEQ ID NO: 790510 - protein, 52 aa, Homo sapiens
MSSVPRTLPLLTLQMDLLPPNPAPSLPPPSLPTGHLGRVKMAIRTGAAIFTQ

SEQ ID NO: 790511 - protein, 69 aa, Homo sapiens
STTVTGEWEMENQRNVSIAGKFHTEIRYLEKDSLKTDSLYPYILKRPHVPQEVCVSQFEGQYSRTDKNV

SEQ ID NO: 790512 - protein, 97 aa, Homo sapiens
CKFSALALPKESIGTYWWTQNQGAVSLLPGSWLQEALCHISALINYLVECSSLAWAYPIGDIVMYLWAHRLDYMALVFFLGPIHSEDCDISVDPAPT

SEQ ID NO: 790513 - protein, 77 aa, Homo sapiens
RRIIGNFSQVCGTKEICQRGRTLATELDSEVKLDFLSREKREGADSGKARPQVISYQFRLMGPKQKFKLQTRGTNTK

SEQ ID NO: 790514 - protein, 122 aa, Homo sapiens
MGLLGLHRFTLHQPALLPDSPVSVLGTSSCCPPGLEFGNHLQYFSLPVLQLPVCLVLTGPPSLSSLPQCPQRISNSKTYFSSTGLHPGLEQIWNSQFCPQPPPLAPVPSCSPPNTPILLPQF

SEQ ID NO: 790515 - protein, 1156 aa, Homo sapiens
MGNLLSKFRPGCRRRPLPGPGRGAPAPLSRDASPPGRAHSVPTPRPFRGLFRRNARRRPSAASIFVAPKRPCPLPRAAAAPLGVLPAVGWGLAIRKTPMLPARNPPRFGHPSSVRIPPPSRMFTLLLPSPREPAVKARKPIPATLLEETEVWAQEGPRRVKKDEDPVQIEGEDDEKRTPLSSGEASSTSRSQGTQGDVASFRCSPGPLEGNVYHKFSENSMSEKAQASPASSCLEGPAMPSTHSQAGCARHLGKPDPDATAPPEPAVGCSLLQQKLAAEVLNEEPPPSSLGLPIPLMSGKRMPDEKPFCIPPRSAAPPRAARNRPCKRKMSIPLLLPLPPSLPLLWDRGELPPPAKLPCLSVEGDLHTLEKSPEYKRNSRILEDKTETMTNSSITQPAPSFSQPVQTTDSLPLTTYTSQVSAPLPIPDLADLATGPLILPIPPLSTTPKMDEKIAFTIPNSPLALPADLVPILGDQSNEKGGSYNSVVGAAPLTSDPPTPPSSTPSFKPPVTRESPISMCVDSPPPLSFLTLLPVPSTGTSVITSKPMNSTSVISTVTTNASAHLTSQTAVDPEVVNMDTTAPSQVVIFTSSLSSRVSSLPNSQIHCSAEQRHPGKTSVYTSPLPFIFHNTTPSFNQLFGKEATPQPKFEAPDGQPQKASLPSACVFLSLPIIPPPDTSTLVNSASTASSSKPPIETNAMHTTPPSKAVILQSASVSKKYLPFYLGLPGSGNTQPSGNTASVQGSTSLPAQSVRAPATASNHPLNPGATPQPKFGAPDGPQQKTSLPSAHDFLSLPIMVPPDTSTLVSSASAASLSKPAIDTSDMNTTPPSKTVILQSTFVSRKEEYIRFYMGLPGSGNTLHSDSIASAQVSTSFPAQADRRPTTTSSHPLNTGSISHSTLGATDGQQKSDSSFILGNPATPAPVIGLTSPSVQPLSGSIIPPGFAELTSPYTALGTPVNAEPVEGHNASAFPNGTAKTSGFRIATGMPGTGDSTLLVGNTIPGPQVIMGPGTPMDGGSIGFSMSAPGPSSTSGELNIGQGQSGTPSTTSVFPFGQAAWDPTGHSMAAAPQGASNIPVFGYTSAAAYIPGLDPPTQNSCSGMGGDGTRSIVGGPCVPAFQQCILQHTWTERKFYTSSTHYYGQETYVRRHVCFQLP

SEQ ID NO: 790516 - protein, 108 aa, Homo sapiens
GRLITEAFSALRERSSLFAHTRAYFISLSSSFCFVPKILILSFREGAEVNKSTIKAFSEQNGCIILWVSRTQILVSVLNSASSPLERGSNGEKQKQVILLITTLPALF

SEQ ID NO: 790517 - protein, 64 aa, Homo sapiens
MMITRGWEGWGRRGARGAGTGTGLGGPGTPESSVTPPEFPLPPATRITPNFPNTLDPAISRSSS

SEQ ID NO: 790518 - protein, 76 aa, Homo sapiens
IQIHPLCVYMCQILQGRGQTSSKYTHCVCTCVRFCRGGGRPHPNTPTVCVHVSDSAGEGADLIQIRRLCVYTGQQS

SEQ ID NO: 790519 - protein, 87 aa, Homo sapiens
MRSPGYMFASVATRLFPEHKWEAQPPSHCPSYSSLLQDSFLLFKRSEFGQAWWLTAVIPALWEAKAGGSRGQEIKTILANMVKPHLY

SEQ ID NO: 790520 - protein, 152 aa, Homo sapiens [sequence omitted]

SEQ ID NO: 790521 - protein, 88 aa, Homo sapiens
MLPNTQPCGTGCHCYRIQGTGSLKFAMQQMKKKQAVNKDHRVGNNRYYPRCAEKQESRENTQPIHLETVSSLGEKQYFYAAFSYSSGE

SEQ ID NO: 790522 - protein, 155 aa, Homo sapiens
GSRAQGSPGREAGVAVRRALTAAERGLAVPDVQAGGFPAGLPQRQVVLVVSCDPGRAQHRPQIQIQRQEDAQQPDQLQGESTPTRAPPPCRCPPKPFLDAAAARGRQAGPGSQESDLPRGEATEPPRTGTRSLGALRAPCRATKIYGEVNPENLH

SEQ ID NO: 790523 - protein, 104 aa, Homo sapiens
MPGMGGSRSLPLAARVGRGLSEGAQTQTSSAAFFGGPYPLLLQWHFGIYCRHICLLPHLIYKSLTGRRQDPCVFRCTSWAVLTAGKKLTKQELILKTFQRKMCF

SEQ ID NO: 790524 - protein, 38 aa, Homo sapiens
VEGEVCLLPFSKHLCVLQVLQGKLVGGCLSTPRQITPT

SEQ ID NO: 790525 - protein, 717 aa, Homo sapiens
MGDLPPYPERPAQQPPGRRTSQASQRRHSRDQAQALAADPEERQQIPPDAQRNAPGWSQRGSLSQQENLLMPQVFQAEEARLGGMEYPSVNTGFPSEFQPQPYSDESRMQVAELTTSLMLQRLQQGQSSLFQQLDPTFQEPPVNPLGQFNLYQTDQFSEGAQHGPYIRDDPALQFLPSELGFPHYSAQVPEPEPLELAVQNAKAYLLQTSINCDLSLYEHLVNLLTKILNQRPEDPLSVLESLNRTTQWEWFHPKLDTLRDDPEMQPTYKMAEKQKALFTRSGGGTEGEQEMEEEVGETPVPNIMETAFYFEQAGVGLSSDESFRIFLAMKQLVEQQPIHTCRFWGKILGIKRSYLVAEVEFREGEEEAEEEEVEEMTEGGEVMEAHGEEEGEEDEEKAVDIVPKSVWKPPPVIPKEESRSGANKYLYFVCNEPGLPWTRLPHVTPAQIVNARKIKKFFTGYLDTPVVSYPPFPGNEANYLRAQIARISAATQVSPLGFYQFSEEEGDEEEEGGAGRDSYEENPDFEGIPVLELVDSMANWVHHTQHILPQGRCTWVNPLQKTEEEEDLGEEEEKADEGPEEVEQEVGPPLLTPLSEDAEIMHLAPWTTRLSCSLCPQYSVAVVRSNLWPGAYAYASGKKFENIYIGWGHKYSPESFNPALPAPIQQEYPSGPEIMEMSDPTVEEEQALKAAQEQALGATEEEEEGEEEEEGEETDD

SEQ ID NO: 790526 - protein, 114 aa, Homo sapiens
MLNSVWFKCFFIHSELSPNWMCKQAITNSSTNLWVSANHRQPTLQTMFKEGKRQARTHPAVSVPYFCFPYVTLFFLPINHPRPRGSLEASLNLFCFGDCPIQEPFFTQLNSVTF

SEQ ID NO: 790527 - protein, 103 aa, Homo sapiens
GWAEFPRWPRPWLGAPEATRPRLWGALHPRPVRPCGGKCRSETGAIAAPPRDGPASATWKRVSCRRLQSLPAQGAGMRPCGGAGGPRAGLTLLRLCGGEPSDE

SEQ ID NO: 790528 - protein, 122 aa, Homo sapiens
MVVVEKGASLMSRASLMPAQARAPFQRLRDCRGPADSSHAFKLQCFPSHCRRPPWVISRKGRAINKYSICISCVALHLEISFIWQLLQNEPNLEGGLGRFMLASLSLQQVISILAFTRVKQL

SEQ ID NO: 790529 - protein, 108 aa, Homo sapiens
LRRSLHACSHWHSHCMEGNQPRVTQLVSSNIAGLKSKVPGHASMRDRLQGRLILALGSLSWAARITSIVRDPKLCSHLPFPVSAWAMITVTLATLHGHYSTLCHSLLV

SEQ ID NO: 790530 - protein, 128 aa, Homo sapiens
CPSHMQNTLIPIPTVPEVLTQTSINCKSKISCKYRLNQVWVRFEVWFILRQNSSPAVNLYDQTRNYLLPKQDRQSIDISSLKVGHWKEPSYPYGKNQATHTERTKLPYGKNQATIRKEPSYHTERTKL

SEQ ID NO: 790531 - protein, 68 aa, Homo sapiens
QQAWEHHEPAPQSPCDILLTLSPLLKTGSVVLWFPAIYKLCQRAFLLANLCPCCYHRQLLLPFPRCPT

SEQ ID NO: 790532 - protein, 114 aa, Homo sapiens
AADSTRGQAERGMGAQRPLPTRRPRARPPSELHPAPSARAHVPPQPRPVRAHATTRARRRGAREKGSCQGVHYSCGFLDLYRQKPHRLLRSPIFLDKGWEIFLNPDIQHRCCDG

SEQ ID NO: 790533 - protein, 102 aa, Homo sapiens
VLCIMSVIIITLFHQHDHYFHFTDKKNESTQEKVTFQDHKVNGAAEIQSQVVSDPKSPPFTKYGKPLRRAYDTQHFQAYSAREPLHPGPHRGTLGNTALVCS

SEQ ID NO: 790534 - protein, 178 aa, Homo sapiens
RCALRVGSARRPTGGSEELAPSSPPPPRRAGPARPLLPWVGPCSFSGRVYLHRGNCPKWPLWRSWLRRRGRARRSAATRRLTPAPGGPRASGCPACSSRTQPLPQQHRPLGESTRDERAMGPGERAGGGGDAGKGNAAGGGGGGRSATTAGSRAVSALCLLLSVGSAAACLLLGVQAA

SEQ ID NO: 790535 - protein, 82 aa, Homo sapiens
SARLEARGERCSYSSARGGAASRHLRGDQRLPGRGAAGMARPRPREYKAGDLVFAKMKGYPHWPARIGTFGRKSKLSSYLYP

SEQ ID NO: 790536 - protein, 124 aa, Homo sapiens
IILQVIQLVVLPALFLLVQHVYFAGWIRTCGHHLRFFHVNPGTSRCFGLNFGLMAAQIPMILSTDRETSKIKIAFLHPSKMPERLWMAEVTGLPPTSQSVVESVVITLDLCSLSTSVGPKLMKV

SEQ ID NO: 790537 - protein, 102 aa, Homo sapiens
EAESRSVGQAGVQWHDLGSLQPPPPRLKQFCCLSLLSSWDYRRVPPCPANFCVFFLVETEFHHVGQAGLELLTSGSPPASASESAGITDVSHRAQPYLQFSR

SEQ ID NO: 790538 - protein, 132 aa, Homo sapiens [sequence omitted]

SEQ ID NO: 790539 - protein, 130 aa, Homo sapiens
HLVQVTFRGKEDFGKQKAENKNIWGGGGGGGGAGAVAHACNPSTLGGRRRVDHLRSGVQDQPGQHGETPSLLKIQKISRAWWRLLVIPATGELQSLRQENGLNPGGRGCTKPRLHYITLQPGQQEQNSIS

SEQ ID NO: 790540 - protein, 141 aa, Homo sapiens
SLQNPEIQFSGSNLLSPKGNKSTSSWGQSSRAGPLPSCGHHGPEAGRAPRSFSQNSADASQAYAALPGPLTPPTRLALSPSGPGVAAGAEGRLSRRRAPRGSGSPFSKARAKEPQSLARGACHQWSLCSGAAGRAVCAVSL

SEQ ID NO: 790541 - protein, 82 aa, Homo sapiens
KERNYIQIGREEVKLSVFGDNMILYIENPKDSTKGLLELINDFSKVSGYKINVQKSVAFLYMNNVQAENQIKNAILFTVATE

SEQ ID NO: 790542 - protein, 107 aa, Homo sapiens
YSYLIFDKANKNKRWGMDFLFNKWCWDSWLTICRRMNLDPYLSPDTKINSNWIKYLNIRPQTIRILENTILDISLRKEFMAKFSKAITMKTKIEKWGLMKLKSFCMQ

SEQ ID NO: 790543 - protein, 104 aa, Homo sapiens
MGRSPCFFKSFKGKLHKDRSPDPSTLASPHPSTEARRPVEAGSAEWTWGWMKRLPPASLSPGIAMSCYSGDSMLQKYKVKNAYRLHWQGREEPGASTFASLVFQ

SEQ ID NO: 790544 - protein, 143 aa, Homo sapiens
MDLPVDEWKSYLLQKWASLPTSVQVTISTAETLRDIFLHSSSLLQPEDELFLKRLSKGYLVGKDSDAPLFYREEGNKKFQEKDYTGAAVLYSKGVSHSRPNTEDMSLCHANRSAALFHLGQYEVSIRIPGMSGQDPEGFLLED

SEQ ID NO: 790545 - protein, 754 aa, Homo sapiens
MDLPVDEWKSYLLQKWASLPTSVQVTISTAETLRDIFLHSSSLLQPEDELFLKRLSKGYLVGKDSDAPLFYREEGNKKFQEKDYTGAAVLYSKGVSHSRPNTEDMSLCHANRSAALFHLGQYETCLKDINRAQTHGYPERLQPKIMLRKAECLVALGRLQEASQTISDLERNFTATPALADVLPQTLQRNLHRLKMKMQEKDSLTESFPAALAKTLEDAALREENEQLSNASSSIGLCVDPLKGRCLVATKDILPGELLVQEDAFVSVLNPGELPPPHHGLDSKWDTRVTNGDLYCHRCLKHTLATVPCDGCSYAKYCSQECLQQAWELYHRTECPLGGLLLTLGVFCHIALRLTLLVGFEDVRKIITKLCDKISNKDICLRESNNQVKTLNYGLGESEKNGNIVETPIPGCDINGKYENNYNAVFNLLPHTENHSPEHKFLCALCVSALCRQLEAASLQAIPTERIVNSSQLKAAVTPELCPDVTIWGVAMLRHMLQLQCNAQAMTTIQHTGPKGSIVTDSRQVRLATGIFPVISLLNHSCSPNTSVSFISTVATIRASQWIRKGQEILHCYGPHKSRMGVAERQQKLRSQYFFDCACPACQTEAHRMAAGPRWEAFCCNSCGAPMQGDDVLRCGSRSCAESAVSRDHLVSRLQDLQQQVRVAQKLLRDGELERAVQRLSGCQRDAESFLWAEHAVVGEIADGLARACAALGDWQKSATHLQRSLCVVEVRHGPSSVEMGHELFKLAQIFFNG

SEQ ID NO: 790546 - protein, 754 aa, Homo sapiens; identical to SEQ ID NO: 790545

SEQ ID NO: 790547 - protein, 609 aa, Homo sapiens
MLRKAECLVALGRLQEASQTISDLERNFTATPALADVLPQTLQRNLHRLKMKMQEKDSLTESFPAALAKTLEDAALREENEQLSNASSSIGLCVDPLKGRCLVATKDILPGELLVQEDAFVSVLNPGELPPPHHGLDSKWDTRVTNGDLYCHRCLKHTLATVPCDGCSYAKYCSQECLQQAWELYHRTECPLGGLLLTLGVFCHIALRLTLLVGFEDVRKIITKLCDKISNKDICLRESNNQVKTLNYGLGESEKNGNIVETPIPGCDINGKYENNYNAVFNLLPHTENHSPEHKFLCALCVSALCRQLEAASLQAIPTERIVNSSQLKAAVTPELCPDVTIWGVAMLRHMLQLQCNAQAMTTIQHTGPKGSIVTDSRQVRLATGIFPVISLLNHSCSPNTSVSFISTVATIRASQWIRKGQEILHCYGPHKSRMGVAERQQKLRSQYFFDCACPACQTEAHRMAAGPRWEAFCCNSCGAPMQGDDVLRCGSRSCAESAVSRDHLVSRLQDLQQQVRVAQKLLRDGELERAVQRLSGCQRDAESFLWAEHAVVGEIADGLARACAALGDWQKSATHLQRSLCVVEVRHGPSSVEMGHELFKLAQIFFNG

SEQ ID NO: 790548 - protein, 784 aa, Homo sapiens
MDLPVDEWKSYLLQKWASLPTSVQVTISTAETLRDIFLHSSSLLQPEDELFLKRLSKGYLVGKDSDAPLFYREEGNKKFQEKDYTGAAVLYSKGVSHSRPNTEDMSLCHANRSAALFHLGQYETCLKDINRAQTHGYPERLQPKIMLRKAECLVALGRLQEASQTISDLERNFTATPALADVLPQTLQRNLHRLKMKMQEKDSLTESFPAALAKTLEDAALREENEQLSNASSSIGLCVDPLKGRCLVATKDILPGELLVQEDAFVSVLNPGELPPPHHGLDSKWDTRVTNGDLYCHRCLKHTLATVPCDGCSYAKYCSQECLQQAWELYHRTECPLGGLLLTLGVFCHIALRLTLLVGFEDVRKIITKLCDKISNKDICLRESNNQVKTLNYGLGESEKNGNIVETPIPGCDINGKYENNYNAVFNLLPHTENHSPEHKFLCALCVSALCRQLEAASLQAIPTERIVNSSQLKAAVTPELCPDVTIWGVAMLRHMLQLQCNAQAMTTIQHTGPKGSIVTDSRQVRLATGIFPVISLLNHSCSPNTSVSFISTVATIRASQWIRKGQEILHCYGPHKSRMGVAERQQKLRSQYFFDCACPACQTEAHRMAAGPRWEAFCCNSCGAPMQGDDVLRCGSRSCAESAVSRDHLVSRLQDLQQQVRVAQKLLRDGELERAVQRLSGCQRDAESFLWAEHAVVGEIADGLARACAALGDWQKSATHLQRSLCVVEVRHGPSSVEMGHELFKLAQIFFNGFAVPEALSTIQKAEEVLSLHCGPMGTDDNP

SEQ ID NO: 790549 - protein, 415 aa, Homo sapiens
MDLPVDEWKSYLLQKWASLPTSVQVTISTAETLRDIFLHSSSLLQPEDELFLKRLSKGYLVGKDSDAPLFYREEGNKKFQEKDYTGAAVLYSKGVSHSRPNTEDMSLCHANRSAALFHLGQYETCLKDINRAQTHGYPERLQPKIMLRKAECLVALGRLQEASQTISDLERNFTATPALADVLPQTLQRNLHRLKMKMQEKDSLTESFPAALAKTLEDAALREENEQLSNASSSIGLCVDPLKGRCLVATKDILPGELLVQEDAFVSVLNPGELPPPHHGLDSKWDTRVTNGDLYCHRCLKHTLATVPCDGCSYAKYCSQECLQQAWELYHRTECPLGGLLLTLGVFCHIALRLTLLVGFEDVRKIITKLCDKISNKDICLRESNNQVKTLNYGLGESVEMGHELFKLAQIFFNG

SEQ ID NO: 790550 - protein, 30 aa, Homo sapiens
MVPRCSTVLMWQRHGILAGQFGGILGTVLE

SEQ ID NO: 790551 - protein, 96 aa, Homo sapiens
VSPSQTCFLYLQLLPEATYKQPCHVATQHWSCHTHAQSYMSTHMHTCAQTCMHIYGRTYTCVHTYTCIYTHTVNTHTHTHTHTHTHRVTHSVLPVC

SEQ ID NO: 790552 - protein, 120 aa, Homo sapiens
GATPPGPRPGADPATPGRPLAPSPTAACARAVTALAPRPRPRDSVTERVPLIRPAWPRPRASRGFQAGPSPVTAGSVAPSPSWAPARPNRHFCRPRSWAWRFGLFSGGSCNSSPSVFEVE

SEQ ID NO: 790553 - protein, 194 aa, Homo sapiens
MPASLLAGVKGAGISEVSWAESPEWEEVAGRGSEEENRGPGGLCFFPDTGAVEETSAADARGASRPRQSWDLGLSCCASIVGALETGGPPEAPVASEDKVWEGREGLQSGMALSSTCSALLMRWNAVSFSRCRSSAVTRYPSSKGGGSIKGSPRLRGSRGILRLRGLESWDLGEPPVGAIVCPGAVSAPFSHRV

SEQ ID NO: 790554 - protein, 194 aa, Homo sapiens; identical to SEQ ID NO: 790553

SEQ ID NO: 790555 - protein, 957 aa, Homo sapiens
ESFYGPEKGHNILSHPETQSQNSADRNVSKDTKRDVDSKSPGMPLFEAEEGVLSRTQIFPTTIKVIDPEFLEEPPALAFLYKDLYEEAVGEKKKEEETASEGDSVNSEASFPSRNSDTDDGTGIYFEKYILKDDILHDTSLTQKDQGQGLEEKRVGKDDSYQPIAAEGEIWGKFGTICREKSLEEQKGVYGEGESVDHVETVGNVAMQKKAPITEDVRVATQKISYAVPFEDTHHVLERADEAGSHGNEVGNASPEVNLNVPVQVSFPEEEFASGATHVQETSLEEPKILVPPEPSEERLRNSPVQDEYEFTESLHNEVVPQDILSEELSSESTPEDVLSQGKESFEHISENEFASEAEQSTPAEQKELGSERKEEDQLSSEVVTEKAQKELKKSQIDTYCYTCKCPISATDKVFGTHKDHEVSTLDTAISAVKVQLAEFLENLQEKSLRIEAFVSEIESFFNTIEENCSKNEKRLEEQNEEMMKKVLAQYDEKAQSFEEVKKKKMEFLHEQMVHFLQSMDTAKDTLETIVREAEELDEAVFLTSYEEINERLLSAMESTASLEKMPAAFSLFEHYDDSSARSDQMLKQVAVPQPPRLEPQEPNSATSTTIAVYWSMNKEDVIDSFQVYCMEEPQDDQEVNELVEEYRLTVKESYCIFEDLEPDRCYQVWVMAVNFTGCSLPSERAIFRTAPSTPVIRAEDCTVCWNTATIRWRPTTPEATETYTLEYCRQHSPEGEGLRSFSGIKGLQLKVNLQPNDNYFFYVRAINAFGTSEQSEAALISTRGTRFLLLRETAHPALHISSSGTVISFGERRRLTEIPSVLGEELPSCGQHYWETTVTDCPAYRLGICSSSAVQAGALGQGETSWYMHCSEPQRYTFFYSGIVSDVHVTERPARVGILLDYNNQRLIFINAESEQLLFIIRHRFNEGVHPAFALEKPGKCTLHLGIEPPDSVRHK

SEQ ID NO: 790556 - protein, 337 aa, Homo sapiens
MGENWAMWKAEKGERHHHLYLIPFGFLTQNTLSDEKLKTESCQAVEDHVLLRSQESKLALLHDCPDSLSAAPSTPVIRAEDCTVCWNTATIRWRPTTPEATETYTLEYCRQHSPEGEGLRSFSGIKGLQLKVNLQPNDNYFFYVRAINAFGTSEQSEAALISTRGTRFLLLRETAHPALHISSSGTVISFGERRRLTEIPSVLGEELPSCGQHYWETTVTDCPAYRLGICSSSAVQAGALGQGETSWYMHCSEPQRYTFFYSGIVSDVHVTERPARVGILLDYNNQRLIFINAESEQLLFIIRHRFNEGVHPAFALEKPGKCTLHLGIEPPDSVRHK

SEQ ID NO: 790557 - protein, 957 aa, Homo sapiens; identical to SEQ ID NO: 790555

SEQ ID NO: 790558 - protein, 326 aa, Homo sapiens
MAEHKMIKKNELVEEYRLTVKESYCIFEDLEPDRCYQVWVMAVNFTGCSLPSERAIFRTAPSTPVIRAEDCTVCWNTATIRWRPTTPEATETYTLEYCRQHSPEGEGLRSFSGIKGLQLKVNLQPNDNYFFYVRAINAFGTSEQSEAALISTRGTRFLLLRETAHPALHISSSGTVISFGERRRLTEIPSVLGEELPSCGQHYWETTVTDCPAYRLGICSSSAVQAGALGQGETSWYMHCSEPQRYTFFYSGIVSDVHVTERPARVGILLDYNNQRLIFINAESEQLLFIIRHRFNEGVHPAFALEKPGKCTLHLGIEPPDSVRHK

SEQ ID NO: 790559 - protein, 337 aa, Homo sapiens; identical to SEQ ID NO: 790556

SEQ ID NO: 790560 - protein, 710 aa, Homo sapiens
ESFYGPEKGHNILSHPETQSQNSADRNVSKDTKRDVDSKSPGMPLFEAEEGVLSRTQIFPTTIKVIDPEFLEEPPALAFLYKDLYEEAVGEKKKEEETASEGDSVNSEASFPSRNSDTDDGTGIYFEKYILKDDILHDTSLTQKDQGQGLEEKRVGKDDSYQPIAAEGEIWGKFGTICREKSLEEQKGVYGEGESVDHVETVGNVAMQKKAPITEDVRVATQKISYAVPFEDTHHVLERADEAGSHGNEVGNASPEVNLNVPVQVSFPEEEFASGATHVQETSLEEPKILVPPEPSEERLRNSPVQDEYEFTESLHNEVVPQDILSEELSSESTPEDVLSQGKESFEHISENEFASEAEQSTPAEQKELGSERKEEDQLSSEVVTEKAQKELKKSQIDTYCYTCKCPISATDKVFGTHKDHEVSTLDTAISAVKVQLAEFLENLQEKSLRIEAFVSEIESFFNTIEENCSKNEKRLEEQNEEMMKKVLAQYDEKAQSFEEVKKKKMEFLHEQMVHFLQSMDTAKDTLETIVREAEELDEAVFLTSYEEINERLLSAMESTASLEKMPAAFSLFEHYDDSSARSDQMLKQVAVPQPPRLEPQEPNSATSTTIAVYWSMNKEDVIDSFQVYCMEEPQDDQEVNELVEEYRLTVKESYCIFEDLEPDRCYQVWVMAVNFTGCSLPSERAIFRTGKEMDAKGALEDNAQFFTDS

SEQ ID NO: 790561 - protein, 137 aa, Homo sapiens
MEFLHEQMVHFLQSMDTAKDTLETIVREAEELDEAVFLTSFEESKMGSNTLRPLWHIYFYSFIFHYSLRLFISLCGIYIILAFKHYLGMPDAYRKGPANPESLNAQIQLKDTAERDSLQHHHPLRPTGFIGHCLRGR

SEQ ID NO: 790562 - protein, 76 aa, Homo sapiens
DLVKFDIVGYGGFGMPLPKLGQEEALYQALKNAYPHLHIYKKEGFPKHFHLAKHDRVLPIVMYANFGYSINGVSSF

SEQ ID NO: 790563 - protein, 71 aa, Homo sapiens
YQGLGGQVKPDAKLTGNTVFQDHAAAVKCRNGPLFEQLLPFYECAYPLCHTHPCTTGDTEDHSLLVTTPNP

SEQ ID NO: 790564 - protein, 179 aa, Homo sapiens
MRLAGRGAERQRTSQCAAGREGYIKLGSRTYWNWSRLPASWQRPSAQLCGVMENAGGAEGTESGAAACAATDGPTRRAGADSGYAGFWRPWVDAGGKKEEETPNHAAEAMPDGPGMTAASGKLYQFRHPVRLFWPKSKCYDYLYQEAEALLKNFPIQATISFYEDSDSEDEIEDLTCEN

SEQ ID NO: 790565 - protein, 186 aa, Homo sapiens
MCSRPRGLYKARVSDLLELVKIARELAAAFRPALRRHGERGRRRGYREWSCGVRGHRRPYAARGRGLRVGFPALLCASQLPPSLPPAPPQLLPSNSPSPTARCQRSASVDSPGSGLTSPLRALCSPIPQIRRLLETLGGRRRQERRGDAEPRRGGDARWPWNDRSLRKALPIQAPSQTILAKIKML

SEQ ID NO: 790566 - protein, 118 aa, Homo sapiens
RPWVDAGGKKEEETPNHAAEAVSEPRVSGRASHGCRRSTRALGTQGLRETCETPGPASRLTSRLPVAIKVPTRRMCPLERWATGTQPGARLLRALGLHSQRARGTLGRARFHFLEGGG

SEQ ID NO: 790567 - protein, 109 aa, Homo sapiens
AGVRTPHVGRESGGILVSDTTRDKRIILRGRVEQAEREKLFECNKEWGFKISFAQRQVLPIGSFPESNLLSLTVGRNAGLLSEERLGFFKGLFFIQVLCEQWLFFFIPF

SEQ ID NO: 790568 - protein, 135 aa, Homo sapiens
HDIQSAPASSASASYDNPVSRWGPQPADSGVPPPKCGGATASSRGQGAPRLLRPPQPTRAARTPTHPTPAGRQGRGVQWGRGPRTRLGSEGGVVAADVGFAAPGQRAAWGTVGLFPAWEGTGAPAREDGRRGTAA

SEQ ID NO: 790569 - protein, 34 aa, Homo sapiens
GNIGFIRQQVIKKAFTCEKKCLVWYTLLKYQMPL

SEQ ID NO: 790570 - protein, 209 aa, Homo sapiens
MMNNFVILNGQLAILLPLRLYFSLFFLLFQAEVIDVSYGMADDLKRIRKIKNVTNQIALLKLGKLPLLYKLSSLEKAGFGGVLLYIDPCDLPKTVNPSHDTFMVSLNPGGDPSTPGYPSVDESFRQSRSNLTSLLVQPISAPLVAKLISSPKARTKNEACSSLELPNNEIRVVSMQVQTVTKLKTVTNVVGFVMGLTSPDRYIIVGSHH

SEQ ID NO: 790571 - protein, 102 aa, Homo sapiens [sequence omitted]

SEQ ID NO: 790572 - protein, 154 aa, Homo sapiens
QDPALNLPLTSLPSCSSPRVEMTAPGLISKWWDKAGTPASSLHTSWEGRSLPSQRQLFPPSQNKCLEGLAEDWDASNLLLLSPGTQLCPAQALPSYEAVVGPLCAVSFGLSPCIVLATYSAKWQSSLVGPPPRSRDCLYFFVCFLKGWGVSHHV

SEQ ID NO: 790573 - protein, 124 aa, Homo sapiens
RAPRSRPSTSDSSPSPRASGCLPLCPSRGDSGEEPPPQRWPGFSRSSLPGCPRQPLGRVQEIPQVAPARMGLTEPERRILKKSCRNSSWGENKETNQQKTGTRAGAGIKPATMAVSAPRAHQLR

SEQ ID NO: 790574 - protein, 102 aa, Homo sapiens
HALATPPPCLRVTGKWEGLWAGDNPAACTLHRESMRRTEEERAGKKQKMQADGSEDRAGSSLNEGLSQPTDSTETVPTQLPCKLGTATPILWAGTQRLRDVK

SEQ ID NO: 790575 - protein, 79 aa, Homo sapiens
IQSYFKNLGNPPQSAVGVPENRDLESMVQVRVDNRKLLQFLEGQQIHPTTALCNIWDNTLLQLVLVQEDVSLQYFIPAL

SEQ ID NO: 790576 - protein, 118 aa, Homo sapiens
RIGSVPKRTLVQNAPPRTAPLCFSGLPRCRAPNFPVVCSFLERYGPLLDLPELPFPDLERVLQGPHRTSATEKSVRKPCSSSGFEGYRKNTRGAGGGSSPKLNHSNEPQHKIPGKGVC

SEQ ID NO: 790577 - protein, 118 aa, Homo sapiens; identical to SEQ ID NO: 790576

SEQ ID NO: 790578 - protein, 132 aa, Homo sapiens
LSSGFWESVGLMVVRSFCTVPRVCLHTSACSPQSSATRPSSSSLSCSQFRHFKSSLSCMWAHWSCPARLSSSSHRCSASACSCCCSCRPQNLVSASHGTGKDGGRLEKSSPLIHSHQSRALAHRSPQKCRFT

SEQ ID NO: 790579 - protein, 124 aa, Homo sapiens
WITPWSRGLCRPSREVFCTQPVGQLPWCPQGAPLSVPTSSLGPHSEDVASDRGWGRYTRVERWTLRASGYDDDDSQTGDSQTGGSLGSSGKAKSPACHIHRLLSQIPGKNLRLSMSGSLMTILC

SEQ ID NO: 790580 - protein, 109 aa, Homo sapiens
GGVSLSHPDECSGVTSVHCNLCLPASRDSPASASQVPEITGACHHTWLIFVFLEKTGFHHVGQTGLELLTSNDPPALASQSAGITGVNHCTWPLFSLSKAYVLSVTRQW

SEQ ID NO: 790581 - protein, 215 aa, Homo sapiens
PGLQEFGTMPAQRERAPVSGTQEKNKIRPRGQRDSSYYWEIEASEVMLSTRIGSSSFGTVYKGKWHGDVAVKILKVVDPTPEQFQAFRNEVAVLQPRHVNILLFMGYMTKDNLAIVTQWCEGSSLYKHLHVQETKFQMFQLIDIARQTAQGMDYLHAKNIIHRDMKSNSIFLHEGLTVQVVTYWLLSSGWPPEVIRMQDYNPFFPVGCLLLWASF

SEQ ID NO: 790582 - protein, 136 aa, Homo sapiens
QGRVRASAWARPGGPGASHDVVQQVGAGHPVERARLGGGHDHAHEGAAGAPVRGVDGGGREAPVGLDELAKLLVDARELVAQEDAAQPQLALDVDEGHLARAPARLAVLIQARRARRWRQDQRLHVGLAAPRRGRP

SEQ ID NO: 790583 - protein, 153 aa, Homo sapiens
SPPSGCICPSHTLMAPKTHLGPILPRLPEHTFKYPLNISRASQAYHGQAELLSHTIHTELPYALTTSPSTLHLSEHSPSHQLPRPKTLQASSAPLLFSCPTSNPETNSFQPTSKKKLGHMPVIPALWEAEAGGSPEVRSSRPAWPTWQNPIST

SEQ ID NO: 790584 - protein, 115 aa, Homo sapiens
ALLPRQPSETGSLSPSALLLLPVHLTLQPPVMFRERCFPAGGWAFNPWPQVPLTRLPGPLTECPPALEPSSQCLPFHPSRGLSPLHLTTTLCCAAVKQQLHEGYPGQATTGWGPA

SEQ ID NO: 790585 - protein, 183 aa, Homo sapiens
SPLLYNVIMSYHHCFWLTVGVYILGILGSTIHTSFMLRLFLCKTNVINHYFCDLFPLLGLSCSSTYINELLVLVLSAFNILMPALTILASYIFIIASILRIHSTEGRSKAFSTCSSHILAVAVFFGSAAFMYLQPSSVSSMDQRKVSSVFYTTIVPMLNPLIYSLRNKDVKLAVKKILHQTAC

SEQ ID NO: 790586 - protein, 102 aa, Homo sapiens
CFGMPGGTVSDMWSPCEPVCAGVREPSALSLCVLHVHDLIPSLSLILASNNLFTADSFGAFVTASGPRTPILPLLLDLISEMDSTSVGAPTGREQSCPETKD

SEQ ID NO: 790587 - protein, 76 aa, Homo sapiens
RGSPWVDRGFWYKRRVQGAKGFQHQRMTNGAMNVEIGNPTYKMYEGGEPDDVGGLLDACLCLDPWPGLGSAALQLA

SEQ ID NO: 790588 - protein, 48 aa, Homo sapiens
MAPPAGRERVAELLFETLAVPACHMASTALLALCSTGAFSGLAVEAGA

SEQ ID NO: 790589 - protein, 90 aa, Homo sapiens
RTRLADTVVLAGGSTLFPGFAERLDKELEAQCRRHGYAALRPHLVAKHGRGMAVWTGGSMVASLHSFQRRWITRAMYQECGSRLLYDVFN

SEQ ID NO: 790590 - protein, 107 aa, Homo sapiens
MCGEPRAGVCPCLFLNLLTWNSLSSPLPLTARQAYLLLLVKALPPKSGLRHPSLRPGPPSCGASLCSSNHQALQAPGPAPFRQPSAPLSLLSSQPSLELLVICMHFP

SEQ ID NO: 790591 - protein, 70 aa, Homo sapiens
AVLATLSLSTVEIPHHHGHQPPGPAVHALSLIPPTLPPSGPIYHNHQTPMPLQATSPTHMWLPLPPSLVS

SEQ ID NO: 790592 - protein, 86 aa, Homo sapiens
ACFAPPTRPGTATKSPTQLFPFPEYPGTLLPSSSSEDSKTVSVPHSSKTTSFSRGGLPDLALLELQERRCTGLTSPAHWRVSEPSV

SEQ ID NO: 790593 - protein, 104 aa, Homo sapiens
APQGSPTSDVVLGMVTPAGCLEGGKQGPREIPGTPFPPSSRAGQRGQALSGAQVSSWRERQPCSGSRGPLHILGRDGNVGTTGMQGLVPLPGIRKKPNKELSAE

SEQ ID NO: 790594 - protein, 110 aa, Homo sapiens
QSGHWAHGGGTAHDPAPREPQAGTTTSKSKCWAPGVPHGWMSKQNMLETHNGILCSLTKEGILTCTTVWLNLGLNLHMGPSESSQTQKPHSVRLHSCTVSRTTSIETESS

SEQ ID NO: 790595 - protein, 45 aa, Homo sapiens
MSNSCSADGRGVEGMNGSQSLWILLPITHLAPVAISPQALWWLRP

SEQ ID NO: 790596 - protein, 71 aa, Homo sapiens
LTENLVWPYNLPGLSLRSSVAPGSDGVERARDLVPHLPEGTGYPLSPAAQPAPRISALRERLTLAAGSLDL

SEQ ID NO: 790597 - protein, 57 aa, Homo sapiens
MKALVPAKDPRFRRWALAAVNKLGVGRRAAPPPSGPPARTPAPGRGRSQSREPGGAE

SEQ ID NO: 790598 - protein, 103 aa, Homo sapiens
LNGKFKQRNNPSIKQRNNLSSSICSKVKKWSPCHKESVTEPGVRSKSLDSKYCALSALIFPVCFTVCLISYLFNTVELISCILVIQVCLLLAIIIFYGLYHKF

SEQ ID NO: 790599 - protein, 143 aa, Homo sapiens
MLVGTTNAGWLRFMPLAWELLQGEDGVWVPGQIPAKSLSQPALDMQISTVAVTGWWIEGKTDLSLIKSEPLTGCVCVYVLVGGGPVPCRTCGCIPDLHLPITKTTKASRLAKCPMGTKLPYIENQCLKQPWTRCAVLLLPAEA

SEQ ID NO: 790600 - protein, 574 aa, Homo sapiens
TWRDAGQDPGGRRTERKGTPGRERRRAGAGGGGGGAGQGGRPGRGRAVALSPSAPPGSQCPLPRALAALPGYFYARTPDTGHRAGAAAAAAEAAEAGPHRGRASGPHVGSRVAGAARAMEPRCPPPCGCCERLVLNVAGLRFETRARTLGRFPDTLLGDPARRGRFYDDARREYFFDRHRPSFDAVLYYYQSGGRLRRPAHVPLDVFLEEVAFYGLGAAALARLREDEGCPVPPERPLPRRAFARQLWLLFEFPESSQAARVLAVVSVLVILVSIVVFCLETLPDFRDDRDGTGLAAAAAAGPFPAPLNGSSQMPGNPPRLPFNDPFFVVETLCICWFSFELLVRLLVCPSKAIFFKNVMNLIDFVAILPYFVALGTELARQRGVGQQAMSLAILRVIRLVRVFRIFKLSRHSKGLQILGQTLRASMRELGLLIFFLFIGVVLFSSAVYFAEVDRVDSHFTSIPESFWWAVVTMTTVGYGDMAPVTVGGKIVGSLCAIAGVLTISLPVPVIVSNFSYFYHRETEGEEAGMFSHVDMQPCGPLEGKANGGLVDGEVPELPPPLWAPPGKHLVTEV

SEQ ID NO: 790601 - protein, 145 aa, Homo sapiens
VFWSLGCRPGARATPVTPARSPDDKLLGRATSTPAGNFEHDPCARHCCRPHMQLLPESSQSPGVGAAGWMPSEAQKDDPNQGHTANYQDRILTPVHTVQSPSFKPSHGEGAAPSPTMLRVPLPPPLPLTSAHDALVKAESCSFFL

SEQ ID NO: 790602 - protein, 103 aa, Homo sapiens
TSPKNANSAAQAVPGNDCRLQGQVIEINSPCPSLNNTQDETQWWGTAASPRLRGWGLSPALHLPWVRAACGQHTSCPPSSSSFRTVSYHIPGTDPGQGGSLQT

SEQ ID NO: 790603 - protein, 122 aa, Homo sapiens
KCCFSFVLKTLLSGTRYTNRAILRTPSMGHKPNTQSRSEDRGCRVALPDILSSAHCTVNSFSARNEDTSLCSGKLHLASPSFCGAGKFSSTKRLYCRWLTICHVPARYHLVSRFCQVLGVKA

SEQ ID NO: 790604 - protein, 82 aa, Homo sapiens
GTVTVAWAALRPTVLSTSPLRLQGAIMVTSCVRMLVGFSGLTGFLMGFICSLAVAPTNCLVALPLLDSAGNNAGIQWGISAM

SEQ ID NO: 790605 - protein, 146 aa, Homo sapiens
RLLCHCAGLSSDTGSHSQIPQHRAEAARCCRRLFKRAFGSSPRLTTNPGRGQTCPLPGPQFPLTYPNRIGLVILGPSTPATVILELVDWYFEESTRQAHWQVISVGIYLLTHSICYLRSVRQVRKQLAPPEALDKAPWGLKGGICF

SEQ ID NO: 790606 - protein, 144 aa, Homo sapiens
MLQHTARRPALPAGARPQDRAVPAPLGAHHPPECPGPGRPERRHEDAEPQSGSHGPHSQITRPLEHVKNTATEEGFSLKRGVGMENASAGGHVRLAREGRGPGWAEGNAGARKGTAGTGLARGAGAHWPLARTGPGALLGTGAA

SEQ ID NO: 790607 - protein, 52 aa, Homo sapiens
MPRGRASRAVRGRVLLGRKARHGPARVLRAQRSLLVWVENCMRLIKDHHPLK

SEQ ID NO: 790608 - protein, 70 aa, Homo sapiens
ARVVCMELLSRSSGLSSDVHPCPQVDTAPPSIWCNSTLLQNGPLPGKAWLAITSLCTFSGFPATIKPLSL

SEQ ID NO: 790609 - protein, 63 aa, Homo sapiens
TLIGHLLSRKPWVKNCFQNLVNFGQARWLMPAIPALWEVKAGGLLDVRSLASWPGQHNGTPFP

SEQ ID NO: 790610 - protein, 93 aa, Homo sapiens
MLSQSLGQEMEESGERRGEITAITTTSSSSTSPRKESRNARRWGQNHEAAEGQKQEAGSKQEAAEAGSSRSRKRQKQAAAGKGERQKQEAGTE

SEQ ID NO: 790611 - protein, 108 aa, Homo sapiens
AVCCAVYLAYKQGFMFRAMEYGVRGLTGKVVAEKEVGEWDMRQVWNVCTEIKKHPFLSMEAGHFVYFLENMKVFQSQHESYIKTSLFCDSGFLLFVQIDSTLLNTNFN

SEQ ID NO: 790612 - protein, 126 aa, Homo sapiens [sequence omitted]

SEQ ID NO: 790613 - protein, 418 aa, Homo sapiens
MYKHVFQRPPDRHSDFSRLARVLTGNAIALVLGGGGARGCAQVGVLKALAECGIPVDMVGGTSIGAFVGALYSEERNYSQMRIRAKQWAEGMTSLMKAALDLTYPITSMFSGAGFNSSIFSVFKDQQIEVHPHPQEPMQPPVPVPSWPPTSWPWVSLPRHRTGACWERAHLSPVRPQDLWIPYFAITTDITASAMRVHTDGSLWRYVRASMSLSGYMPPLCDPKDGHLLMDGGYINNLPADVARSMGAKVVIAIDVGSRDETDLTNYGDALSGWWLLWKRWNPLATKVKVLNMAEIQTRLAYVCCVRQLEVVKSSDYCEYLRPPIDSYSTLDFGKFNEICEVGYQHGRTVFDIWGRSGVLEKMLRDQQGPSKKPASAVLTCPNASFTDLAEIVSRIEPAKPAMVDGEWRRKTKPWRRA

SEQ ID NO: 790614 - protein, 662 aa, Homo sapiens
ATTVHAVRDSELAKLPAGALTSIKRRYPQVVTRLIHLLGEKILGSLQQGPVTGHQLGLPTEGSKWDLGNPAVNLSTVAVMPVSEEVPLTAFALELEHALSAIGPTLLLTSDNIKRRLGSAALDSVHEYRLSSWLGQQEDTHRIVLYQADGTLTPWTQRCVRQADCILIVGLGDQEPTVGELERMLESTAVRAQKQLILLHREEGPAPARTVEWLNMRSWCSGHLHLCCPRRVFSRRSLPKLVEMYKHVFQRPPDRHSDFSRLARVLTGNAIALVLGGGGARGCAQVGVLKALAECGIPVDMVGGTSIGAFVGALYSEERNYSQMRIRAKQWAEGMTSLMKAALDLTYPITSMFSGAGFNSSIFSVFKDQQIEDLWIPYFAITTDITASAMRVHTDGSLWRYVRASMSLSGYMPPLCDPKDGHLLMDGGYINNLPADVARSMGAKVVIAIDVGSRDETDLTNYGDALSGWWLLWKRWNPLATKVKVLNMAEIQTRLAYVCCVRQLEVVKSSDYCEYLRPPIDSYSTLDFGKFNEICEVGYQHGRTVFDIWGRSGVLEKMLRDQQGPSKKPASAVLTCPNASFTDLAEIVSRIEPAKPAMVDDESDYQTEYEEELLDVPRDAYADFQSTSAQQGSDLEDESSLRHRHPSLAFPKLSEGSSDQDG

SEQ ID NO: 790615 - protein, 259 aa, Homo sapiens
IRHAGARRAGSAPVPWLCMPVQGVTRAGFSLADVARSMGAKVVIAIDVGSRDETDLTNYGDALSGWWLLWKRWNPLATKVKVLNMAEIQTRLAYVCCVRQLEVVKSSDYCEYLRPPIDSYSTLDFGKFNEICEVGYQHGRTVFDIWGRSGVLEKMLRDQQGPSKKPASAVLTCPNASFTDLAEIVSRIEPAKPAMVDDESDYQTEYEEELLDVPRDAYADFQSTSAQQGSDLEDESSLRHRHPSLAFPKLSEGSSDQDG

SEQ ID NO: 790616 - protein, 497 aa, Homo sapiens
ATTVHAVRDSELAKLPAGALTSIKRRYPQVVTRLIHLLGEKILGSLQQGPVTGHQLGLPTEGSKWDLGNPAVNLSTVAVMPVSEEVPLTAFALELEHALSAIGPTLLLTSDNIKRRLGSAALDSVHEYRLSSWLGQQEDTHRIVLYQADGTLTPWTQRCVRQADCILIVGLGDQEPTVGELERMLESTAVRAQKQLILLHREEGPAPARTVEWLNMRSWCSGHLHLCCPRRVFSRRSLPKLVEMYKHVFQRPPDRHSDFSRLARVLTGNAIALVLGGGGARGCAQVGVLKALAECGIPVDMVGGTSIGAFVGALYSEERNYSQMRIRAKQWAEGMTSLMKAALDLTYPITSMFSGAGFNSSIFSVFKDQQIEDLWIPYFAITTDITASAMRVHTDGSLWRYVRASMSLSGYMPPLCDPKDGHLLMDGGYINNLPADVARSMGAKVVIAIDVGSRDETDLTNYGDALSGWWLLWKRWNPLATKVKVLNMARDIARGSS

SEQ ID NO: 790617 - protein, 157 aa, Homo sapiens
RVTQPLPFIHLNSQPHLRPEVEPRFASHPTQWEMGMKAACWRGRRTRRAGPLPSMLHPGPCAWAFSQWPPHSRTGHSPGRRLHGCRRPRGPWARQPLSTVARSGVLEPSGCLADKGRSVCPLLVLVEDPRSDVLGQSWSQTEPGVVCRAALGPGGCV

SEQ ID NO: 790618 - protein, 96 aa, Homo sapiens
ATTVHAVRDSELAKLPAGALTSIKRRYPQVVTRLIHLLGEKILGSLQQGPVTGHVLANVCGVWFERELTLVCLLGAAQAQCEGCILRHLQLSDPNT

SEQ ID NO: 790619 - protein, 297 aa, Homo sapiens
ATTVHAVRDSELAKLPAGALTSIKRRYPQVVTRLIHLLGEKILGSLQQGPVTGHQLGLPTEGSKWDLGNPAVNLSTVAVMPVSEEVPLTAFALELEHALSAIGPTLLLTSDNIKRRLGSAALDSVHEYRLSSWLGQQEDTHRIVLYQADGTLTPWTQRCVRQADCILIVGLGDQEPTVGELERMLESTAVRAQKQLILLHREEGPAPARTVEWLNMRSWCSGHLHLCCPRRVFSRRSLPKLVEMYKHVFQRPPDRHSDFSRLARVLTGNAIALVLGGGGARGCAQVGVLKALAECVL

SEQ ID NO: 790620 - protein, 111 aa, Homo sapiens
LQKPATDIEEPIYTMDKQSSAGGVKRSVPCDSNEANEMMPETPTGDSDPQPAPKKMKTSESSTILVVRYRRNFKRTSPEELLNDHARENRINPLQMEEEEFMEIMVEIPAK

SEQ ID NO: 790621 - protein, 76 aa, Homo sapiens
ERPQWAEGRTAVDTPTPLREAGSGASTMSPCRILPGSQESSCSGRACSDLLTSLCGGREEYLGAHEAQGPLLQKEP

SEQ ID NO: 790622 - protein, 128 aa, Homo sapiens [sequence omitted]

SEQ ID NO: 790623 - protein, 120 aa, Homo sapiens
MWLHLARSPAAEISRQTRVSEPVPARPRCWPLTTSCGWCGGRSEGRGADRGCQKHMKLISATLPRKLVPDRDMWKGICTRKSENICPSKDCLQMCIAVLLIIAPNWKQSKYSSTDGYSVV

SEQ ID NO: 790624 - protein, 43 aa, Homo sapiens
RKTGLGLSSQKEQRKPGTESEGPVSPPEELFVGWLEPTSSTTQ

SEQ ID NO: 790625 - protein, 151 aa, Homo sapiens [sequence omitted]

SEQ ID NO: 790626 - protein, 114 aa, Homo sapiens
FPPTPPALGNNQSTFLRQRFEPLLGGIIVEWKIQFGTWCKLELLSWFFLVPWVGHCRKSIASILSSVLCCTRMAFLPLLQMRKLRLRDIKQGAEWGLSMRPQSLCSCTYIIRPT

SEQ ID NO: 790627 - protein, 103 aa, Homo sapiens
AGTVLLCICLFLFQIPPEQLRIPWVGDKSRQNIERSTLCQAEILHPSCCVILSTSLLILSLGFLFWKMGRGWFTQMPWELRLLAECLAYNRYAVAPVLNQQLD

SEQ ID NO: 790628 - protein, 109 aa, Homo sapiens
ARSSGNECQAEASCRAALCPCQDLTLKTQLEAVNGKTMPALEVFAHALRFFREHALQVRCGPTSADCGRDPLFSPHPKPLPHPVPDIGWVATAGAQRSSSPVPSSLFVW

SEQ ID NO: 790629 - protein, 311 aa, Homo sapiens
MTACVTHSAEYYRHFFLIQSLVVWGSEMGSEKEQSPEPHLPEEGEGGKPWRVDDSEGSWIPPGEKEHGQESLSDELQETHPKKPWQKVTVRARELGDPIAHPRHEADEKPFICAQCGKTFNNTSNLRTHQRIHTGEKPYKCSECGKSFSRSSNRIRHERIHLEEKHYKCPKCQESFRRRSDLTTHQQDHLGKRPYRCDICGKSFSQSATLAVHHRTHLEPAPYICCECGKSFSNSSSFGVHHRTHTGERPYECTECGRTFSDISNFGAHQRTHRGEKPYRCTVCGKHFSRSSNLIRHQKTHLGEQAGKDSS

SEQ ID NO: 790630 - protein, 284 aa, Homo sapiens
MGSEKEQSPEPHLPEEGEGGKPWRVDDSEGSWIPPGEKEHGQESLSDELQETHPKKPWQKVTVRARELGDPIAHPRHEADEKPFICAQCGKTFNNTSNLRTHQRIHTGEKPYKCSECGKSFSRSSNRIRHERIHLEEKHYKCPKCQESFRRRSDLTTHQQDHLGKRPYRCDICGKSFSQSATLAVHHRTHLEPAPYICCECGKSFSNSSSFGVHHRTHTGERPYECTECGRTFSDISNFGAHQRTHRGEKPYRCTVCGKHFSRSSNLIRHQKTHLGEQAGKDSS

SEQ ID NO: 790631 - protein, 301 aa, Homo sapiens
MSLFLQGPEEMLPLSSEGSEMGSEKEQSPEPHLPEEGEGGKPWRVDDSEGSWIPPGEKEHGQESLSDELQETHPKKPWQKVTVRARELGDPIAHPRHEADEKPFICAQCGKTFNNTSNLRTHQRIHTGEKPYKCSECGKSFSRSSNRIRHERIHLEEKHYKCPKCQESFRRRSDLTTHQQDHLGKRPYRCDICGKSFSQSATLAVHHRTHLEPAPYICCECGKSFSNSSSFGVHHRTHTGERPYECTECGRTFSDISNFGAHQRTHRGEKPYRCTVCGKHFSRSSNLKPFIPLWRMVLYSL

SEQ ID NO: 790632 - protein, 304 aa, Homo sapiens [sequence omitted]

SEQ ID NO: 790633 - protein, 304 aa, Homo sapiens [sequence omitted]

SEQ ID NO: 790634 - protein, 339 aa, Homo sapiens [sequence omitted]

SEQ ID NO: 790635 - protein, 306 aa, Homo sapiens
MAQISSGGGGQSRCLLFALGSEMGSEKEQSPEPHLPEEGEGGKPWRVDDSEGSWIPPGEKEHGQESLSDELQETHPKKPWQKVTVRARELGDPIAHPRHEADEKPFICAQCGKTFNNTSNLRTHQRIHTGEKPYKCSECGKSFSRSSNRIRHERIHLEEKHYKCPKCQESFRRRSDLTTHQQDHLGKRPYRCDICGKSFSQSATLAVHHRTHLEPAPYICCECGKSFSNSSSFGVHHRTHTGERPYECTECGRTFSDISNFGAHQRTHRGEKPYRCTVCGKHFSRSSNLIRHQKTHLGEQAGKDSS

SEQ ID NO: 790636 - protein, 315 aa, Homo sapiens [sequence omitted]

SEQ ID NO: 790637 - protein, 311 aa, Homo sapiens; identical to SEQ ID NO: 790629

SEQ ID NO: 790638 - protein, 311 aa, Homo sapiens; identical to SEQ ID NO: 790629

SEQ ID NO: 790639 - protein, 586 aa, Homo sapiens
MEPAAALHFSRPASLLLLLSLCALVSAQVTVVGPTDPILAMVGENTTLRCCLSPEENAEDMEVRWFQSQFSPAVFVYKGGRERTEEQKEEYRGRTTFVSKDSRGSVALIIHNVTAEDNGIYQCYFQEGRSCNEAILHLVVAGLDSEPVIEMRDHEDGGIQLECISGGWYPKPLTVWRDPYGEVVPALKEVSTPDADSLFMVTTAVIIRDKSVRNVSCSINDTLLGQKKESVIFIPESFMPSRSPCVVILPVIMIILMIPIAICIYWINNLQKEKKDSHLMTFNLCLSLAGWRRTFLHAANVVLDQDTGHPYLFVSEDKRSVTLDPSRESIPGNPERFDSQLCVLGQESFASGKHYLEVDVENVIEWTVGICRDNVERKWEVPLLPQNGFWTLEMHKRKYWALTSLKWILSLEEPLCQVGIFLDYEAGDVSFYNMRDRSHIYTFPHSAFSVPVRPFFSLGSYDSQILICSAFTGASGVTVPEEGWTLHRAGTHHSPQNQFPSLTAMETSPGHLSSHCTMPLVEDTPSSPLVTQENIFQLPLSHPLQTSAPVHLLIRCGFSSSFGCNYGMESRHRELVVPQLPARKKV

SEQ ID NO: 790640 - protein, 108 aa, Homo sapiens
MYFVVSASRDLIPIIAALEYNQWFTKLSSKDLKLSTDVCEQILRVVSRSNRLEELVLENAGLRTDFAQKLASALAHNPNSGLHTINLAGNPLEDRGTAEFSLSLMPEL

SEQ ID NO: 790641 - protein, 101 aa, Homo sapiens
RFIRSNPEHILRASNLRNLSMQDQFSKRFRFKSGVRAKSGSWWNLRKVPRHHVRPCAMKPNCRTEKDALLPTQLARPNPAKNTPSGSKITKTSPRSHHPQW

SEQ ID NO: 790642 - protein, 420 aa, Homo sapiens
MEANHSEQLSAERQSTPPGDSSSLPSHNGLEKEDGQDSPTPVQPPEKEASVHPDISEELNRQLEDIINTYGSAASTAGKEGSARASEQPENAESPDNEDGDCEETTEEAGREPVASGEPPTVKEPVSNKEQKLEKKILKGLGKEANLLMQNLNKLQTPEEKFDFLFKKYAELLDEHRTEQKKLKLLQKKQVQIQKEKDQLQGEHSRAILARSKLESLCRELQRHNKTLKEEALQRAREEEEKRKEITSHFQSTLTDIQGQIEQQSERNMKLCQENTELAEKLKSIIDQYELREEHLDKIFKHRELQQKLVDAKLEQAQEMMKEAEERPKREKEYLLNQAAEWKLQAKVLKEQKTVLQAQVRPGGQGMGVLSSLSPNKKAGAKGGHQKSSYVAGDGGMGIGNKEHLPIYSYFQVKIKAPFY

SEQ ID NO: 790643 - protein, 143 aa, Homo sapiens [sequence omitted]

SEQ ID NO: 790644 - protein, 112 aa, Homo sapiens
MTELGRVLEGSTKAKKSYKKKKPTNNNLRAKKIKVSKKEEWSTVNCSRGQVRGMPLILSVRGRVWWLTPVIPVLWVAEAENCLNLGGRHYSKPRSHHCTPAWVNQCETLSQK

SEQ ID NO: 790645 - protein, 143 aa, Homo sapiens
RRRSLCQVSATPSRWVKGCPSPRTHSLGSERTRGARGGVLHLHPGLVSPVPCGNRRRACPPQPPAVVINLRPQSPPGLALREKVWDPPGAALPSGEASEAEHATSLSGPSGPGRQRPHGSGPGWAWPPPDGMYRGNRPAFQSP

SEQ ID NO: 790646 - protein, 122 aa, Homo sapiens
INLPCYPICGVPTIRSDIPAPRIRRISDRTNYGEEGSAYSLLYPTIFARKGVFERDFFKTRSKEEIAEILCNIGVKLSDEEFENVWNLASKKHHRGEVCVENIRNVLDELRHADRIKCKTLM

SEQ ID NO: 790647 - protein, 102 aa, Homo sapiens
PKISVQKHLFEQPLPHSHPTPGRSCFGSCTLWKLLASLFCWVRVGEGLSASPSSLPCSVVGFTFSERLYQMQEMRMKATLEGCKEGRASTVPTVCCLRGLVS

SEQ ID NO: 790648 - protein, 53 aa, Homo sapiens
MLIPLQQYLVSLLPIPVSFLQLQWALFLNNFPTLYFVYDMPFCAYSKTLSKSN

SEQ ID NO: 790649 - protein, 31 aa, Homo sapiens
MLHCAAKPVSERRGANQRAPFRKLPFMARAA

SEQ ID NO: 790650 - protein, 121 aa, Homo sapiens
MDCTPWPQAAVWRDLSSPLPTVTSEHQGRGFLLHLGLFLLPGAALLPPPVTVHPPYPPHPHHERISRAHPPPVPVLSAAFEVTLGWKGCLGYCSDVLAALPPRNTPLLVFRMKLSSNKASF

SEQ ID NO: 790651 - protein, 120 aa, Homo sapiens
ELPTRGQCITRVCGAAVGVTKPTAPVIPEYTPTVTYSTIQYVIIDDKRLLLLCVFAILLRAYSAYLLETKSTVKQPQAGSSGGIQKKAIGVTGDDSSMCVVAPEYLPVGQDVEVEDPDPV

SEQ ID NO: 790652 - protein, 129 aa, Homo sapiens
RGSFGPAWQPEVQSYSAYPAVRRVQPCRSALSTKEISPACQLSPRSSADGCDCLWWGLRQLASRKAPSRAQGFLRGFLLREIWRQMCHMKERMALCKPRRQAWNGPFPLALGRTQPADTLISDFWPPEL

SEQ ID NO: 790653 - protein, 243 aa, Homo sapiens
ELALVFDQAKGAHPSMSQEGQTNLHLLKTNPPVPPSGDTELLSFPVEIQVTAATPIPEQDKESKEVFQTEELEPKAMPQDQVTQSPKHRFVFLSDITNEPPKMLQEMPKHARCREGDSIILECLISGEPQPVVTWFQNGVLLKQNQKFQFEEVNCSHQLYIKDVNSQDSGKYKCVAENNSGAVESVSDLTVEPVTYRENSQFENIGEIYGKYSRDQQLQDQGESVRAHFYDYPAGPFTPWTNV

SEQ ID NO: 790654 - protein, 191 aa, Homo sapiens
ERLEGVEGVAHIIDPKAISKDHLYGTLDPNTREWTDGLFTHVLRKIIDSVRGELQKRQWIVFDGDVDPEWVENLNSVLDDNKLLTLPNGERLSLPPNVRIMFEVQDLKYATLATCNNNKLSLSNAISTALPLTQLRWVKQTNTEKKASVVTLPVYLNFTRADLIFTVDFEIATKEDPRSFYERGVAVLCTE

SEQ ID NO: 790655 - protein, 89 aa, Homo sapiens
MHPRSYTHTTHSTRMNTAHTRAQHTHEHTAHTQTHSTCALLIGGCSYQHGFNYLTDTHTHARTHTHTHLVPFGTSTSRGLTTTDLRELP

SEQ ID NO: 790656 - protein, 108 aa, Homo sapiens
GCGPQLSRASLGRTEEQGDTDRSAEAAPPQSAELVLAKLWKEKDSDYLSGAGAGLFCGTAAGPGRIFSSRKAGEAGASRGANPRPRAAAPAPPPRASAAWQGTGWAES

SEQ ID NO: 790657 - protein, 125 aa, Homo sapiens
RTTPFSRVGSPFPSRDRGSSDPLPSLTVHPQDPRPCVWPVPAASPSRPPFAFVASVVEHSRPPFLRTPALPYVVPSCPSLSPSHTMPPRGTHTPLPARRPPAPLPYPRSSMPLPPTPSFCLLFGL

SEQ ID NO: 790658 - protein, 101 aa, Homo sapiens
ETGAEGWRAGGSTRRARPQPEARGSLPSCASALQRSCNARRLHFNVPGSNPGFYSVNLAKSCSFLGLNFLLWQSRGSPRSPSLDLRGLRGTVGLAGVTSRQ

SEQ ID NO: 790659 - protein, 61 aa, Homo sapiens
MDIHLSYQNSLLGLGFWPDFSYNLGTLLWSSPGLSGLESCINLRALPRLIANLGLACPLML

SEQ ID NO: 790660 - protein, 67 aa, Homo sapiens
MVQQSRRLRTEKLGRKGAWAGTAASCRLPVPIRGKMKGRNVDTDSLHLATWERKHHHASLTPGPGSS

SEQ ID NO: 790661 - protein, 593 aa, Homo sapiens
WGRGPWQVHSSANQRPARLVDSVTSPRSPHTPASFLLLPQLHSLVPPHRACWAPLPFHCSAAAWWGHQGQASQGLCLTGLGQCRMGVQAGLFGMLGFLGVALGGSPALRWYRTSCHLTKAVPGNPLGYLSFLAKDAQGLALIHARWDAHRRLQACSWEDEPELTAAYGALCAHETAWGSFIHTPGPELQRALATLQSQWEACRALEESPAGARKKRAAGQSGVPGGGHQREKRGWTMPGTLWCGVGDSAGNSSELGVFQGPDLCCREHDRCPQNISPLQYNYGIRNYRFHTISHCDCDTRFQQCLQNQHDSISDIVGVAFFNVLEIPCFVLEEQEACVAWYWWGGCRMYGTVPLARLQPRTFYNASWSSRATSPTPSSRSPAPPKPRQKQHLRKGPPHQKGSKRPSKANTTALQDPMVSPRLDVAPTGLQGPQGGLKPQGARWVCRSFRRHLDQCEHQIGPREIEFQLLNSAQEPLFHCNCTRRLARFLRLHSPPEVTNMLWELLGTTCFKLAPPLDCVEGKNCSRDPRAIRVSARHLRRLQQRRHQLQDKGTDERQPWPSEPLRGPMSFYNQCLQLTQAARRPDRQQKSWSQ

SEQ ID NO: 790662 - protein, 124 aa, Homo sapiens
AHPLSLISNCPLWPLGIQLACFLHQSDLSPPSLCCPLLRLLFHSLDCLGWGGGYGGKGGSCHMSGVQQIVPTYQAQKHTRKAPPLCGRDKAAILFPHANPSFSLPSQTCLFSFFFFWSSAAWNT

SEQ ID NO: 790663 - protein, 142 aa, Homo sapiens
MIDCASLAVYMRHWSPSQAYPPVSPRPRKARPCSQAKSLLSMGDGWPERDTPGLSGVGRGVWRERRVMSYVWGSANCTHIPGTETYKEGTPALWARQSSNPLPTCQPIFFFAFTNVPFFFLLFLVLCSLEYMRKKSGRQEER

SEQ ID NO: 790664 - protein, 103 aa, Homo sapiens [sequence omitted]

SEQ ID NO: 790665 - protein, 136 aa, Homo sapiens
PILFFYFLDRVSLCHPGWSAVTRSWLTATSASWVQSDSPASASRIAGITGVRHHTRLIFVFLVESGFHCVSQAGLELLTSSDLPTLASQSAGITGVSHHTWPESSFRYVGLRYLLDFQLEILAVWLYRSAKMLWSI

SEQ ID NO: 790666 - protein, 104 aa, Homo sapiens
QRGGAWSLLFLGGTWSSICQAGSTLGGTLALWRVPVSFFFFHPINPALFTLQIVCQPSFLWSCDKDPVLSSTKEKVAQHYYLVQCLPFKKNKNKTRKKASETQC

SEQ ID NO: 790667 - protein, 106 aa, Homo sapiens
LFADSAPKSSSFPECSACAPSPACLLIGSCSHVHTCCVTLTLPLLPTSFPQLPSITTCSITQASLRRVADLFLFGHWPSLEQVALTCSTGWMWFLCFERVPAWATW

SEQ ID NO: 790668 - protein, 135 aa, Homo sapiens
SPSSGTEWQRAWEPQEPPGLDPFPATVIALPRALQTPGWEGAGERTRGNPKNIHFLFPREPGSGQVGTLGKGAEWGNGKEFLGNFTTPPPPPPAPPHPPHPTRRDPADPCPAGTRFLASELLSEATERSRLAAGT

SEQ ID NO: 790669 - protein, 138 aa, Homo sapiens
SKSSPSSWGDSLCTHAGIGWLTDGTICLPSSLLLELKYPGLGNKKGFLEEEKLELGFRRPSVSDWKGPWRSFIPAVFKFCSLRTLSSKKLCVEKQYIKQFFIIETYFLLQVAHEKWSRNRKETWELWKRQKAIGRYGR

SEQ ID NO: 790670 - protein, 117 aa, Homo sapiens
KEQFTGGWRGHCEEGTLTSPCAHEGIQILNEGDPRRAMTFPWVSNPSISSMVVAERNYAQCRECPSYESYSQQLFLTIKWVILMEEGKICSIKVSRQTVQKLHFQTSLVNVVKPRLY

SEQ ID NO: 790671 - protein, 271 aa, Homo sapiens
MRAPMLQKQQAPRMDTPPPEERLEKQNEKLNNQEEETEFKELDGLREALANLRGLSEEERSEKAMLRSRIEEQSQLICILKRRSDEALERCQILELLNAELEEKMMQEAEKLKAQGEYSRKLEERFMTLAANHELMLRFKDEYKSENIKLREENEKLRLENSSLFSQALKDEEAKVLQLTVRCEALTGELETLKERCAQDACQAQAREKELLELQSQQACTHTKETEQLRSQLQTLKQQHQQAVEQIAKAEETHSSLSQELQARLQTVTRE

SEQ ID NO: 790672 - protein, 145 aa, Homo sapiens
MALLCYNRSCGQRFDPETNSDDACTYHPGVPVFHDALKGWSCCKRRTTDFSDFLSIVGCTKGRHNSEKPPEPVKPEVKTTEKKELSELKPKFQEHIQAPKTVDAIKRPSPDEPMTNLELKISASLKQALDKLKLSSGNEENKKRR

SEQ ID NO: 790673 - protein, 72 aa, Homo sapiens
SLLPTSGTLTSPQRPPGRPAFLSPSARGFPSVSPGARCSLTLLGLVSPDLQLVFDFPSGKRLQFQGKPRAKV

SEQ ID NO: 790674 - protein, 105 aa, Homo sapiens
MTKGKENPHQGKNTVQGSEAQIPGRGVKVVCRTWVKGWGWRVGEEATQVRRCQITKGLVCQTKKTELDHEVRQTLWRVLKQGVVWMNKPVMGWGYQGGLPGGGQT

SEQ ID NO: 790675 - protein, 1009 aa, Homo sapiens
MSWMFKRDPVWKYLQTVQYGVHGNFPRLSYPTFFPRFEFQDVIPPDDFLTSDEEVDSVLFGSLRGHVVGLRYYTGVVNNNEMVALQRDPNNPYDKNAIKVNNVNGNQVGHLKKELAGALAYIMDNKLAQIEGVVPFGANNAFTMPLHMTFWGKEENRKAVSDQLKKHGFKLGPAPKTLGFNLESGWGSGRAGPSYSMPVHAAVQMTTEQLKTEFDKLFEDLKEDDKTHEMEPAEAIETPLLPHQKQALAWMVSRENSKELPPFWEQRNDLYYNTITNFSEKDRPENVHGGILADDMGLGKTLTAIAVILTNFHDGRPLPIERVKKNLLKKEYNVNDDSMKLGGNNTSEKADGLSKDASRCSEQPSISDIKEKSKFRMSELSSSRPKRRKTAVQYIESSDSEEIETSELPQKMKGKLKNVQSETKGRAKAGSSKVIEDVAFACALTSSVPTTKKKMLKKGACAVEGSKKTDVEERPRTTLIICPLSVLSNWIDQFGQHIKSDVHLNFYVYYGPDRIREPALLSKQDIVLTTYNILTHDYGTKGDSPLHSIRWLRVILDEGHAIRNPNAQQTKAVLDLESERRWVLTGTPIQNSLKDLWSLLSFLKLKPFIDREWWHRTIQRPVTMGDEGGLRRLQSLIKNITLRRTKTSKIKGKPVLELPERKVFIQHITLSDEERKIYQSVKNEGRATIGRYFNEGTVLAHYADVLGLLLRLRQICCHTYLLTNAVSSNGPSGNDTPEELRKKLIRKMKLILSSGSDEECAICLDSLTVPVITHCAHVFCKPCICQVIQNEQPHAKCPLCRNDIHEDNLLECPPEELARDSEKKSDMEWTSSSKINALMHALTDLRKKNPNIKSLVVSQFTTFLSLIEIPLKASGFVFTRLDGSMAQKKRVESIQCFQNTEAGSPTIMLLSLKAGGVGLNLSAASRVFLMDPAWNPAAEDQCFDRCHRLGQKQEVIITKFIVKDSVEENMLKIQNKKRELAAGAFGTKKPNADEMKQAKINEIRTLIDL

SEQ ID NO: 790676 - protein, 1009 aa, Homo sapiens; identical to SEQ ID NO: 790675

SEQ ID NO: 790677 - protein, 1009 aa, Homo sapiens; identical to SEQ ID NO: 790675

SEQ ID NO: 790678 - protein, 1009 aa, Homo sapiens; identical to SEQ ID NO: 790675

SEQ ID NO: 790679 - protein, 991 aa, Homo sapiens
MSWMFKRDPVWKYLQTVQYGVHGNFPRLSYPTFFPRFEFQDVIPPDDFLTSDEEVDSVLFGSLRGHVVGLRYYTGVVNNNEMVALQRDPNNPYDKNAIKVNNVNGNQVGHLKKELAGALAYIMDNKLAQIEGVVPFGANNAFTMPLHMTFWGKEENRKAVSDQLKKHGFKLGPAPKTLGFNLESGWGSGRAGPSYSMPVHAAVQMTTEQLKTEFDKLFEDLKEDDKTHEMEPAEAIETPLLPHQKQALAWMVSRENSKELPPFWEQRNDLYYNTITNFSEKDRPENVHGGILADDMGLGKTLTAIAVILTNFHDGRPLPIERVKKNLLKKEYNVNDDSMKLGGNNTSEKADGLSKDASRCSEQPSISDIKEKSKFRMSELSSSRPKRRKTAVQYIESSDSEEIETSELPQKMKGKLKNVQSETKGRAKAGSSKVIEDVAFACALTSSVPTTKKKMLKKGACAVEGSKKTDVEERPRTTLIICPLSVLSNWIDQFGQHIKSDVHLNFYVYYGPDRIREPALLSKQDIVLTTYNILTHDYGTKGDSPLHSIRWLRVILDEGHAIRNPNAQQTKAVLDLESERRWVLTGTPIQNSLKDLWSLLSFLKLKPFIDREWWHRTIQRPVTMGDEGGLRRLQSLIKNITLRRTKTSKIKGKPVLELPERKVFIQHITLSDEERKIYQSVTHYADVLGLLLRLRQICCHTYLLTNAVSSNGPSGNDTPEELRKKLIRKMKLILSSGSDEECAICLDSLTVPVITHCAHVFCKPCICQVIQNEQPHAKCPLCRNDIHEDNLLECPPEELARDSEKKSDMEWTSSSKINALMHALTDLRKKNPNIKSLVVSQFTTFLSLIEIPLKASGFVFTRLDGSMAQKKRVESIQCFQNTEAGSPTIMLLSLKAGGVGLNLSAASRVFLMDPAWNPAAEDQCFDRCHRLGQKQEVIITKFIVKDSVEENMLKIQNKKRELAAGAFGTKKPNADEMKQAKINEIRTLIDL

SEQ ID NO: 790680 - protein, 870 aa, Homo sapiens
MSWMFKRDPVWKYLQTVQYGVHGNFPRLSYPTFFPRFEFQDVIPPDDFLTSDEEVDSVLFGSLRGHVVGLRYYTGVVNNNEMVALQRDPNNPYDKNAIKVNNVNGNQVGHLKKELAGALAYIMDNKLAQIEGVVPFGANNAFTMPLHMTFWGKEENRKAVSDQLKKHGFKLGPAPKTLGFNLESGWGSGRAGPSYSMPVHAAVQMTTEQLKTEFDKLFEDLKEDDKTHEMEPAEAIETPLLPHQKQALAWMVSRENSKELPPFWEQRNDLYYNTITNFSEKDRPENVHGGILADDMGLGKTLTAIAVILTNFHDGRPLPIERVKKNLLKKEYNVNDDSMKLGGNNTSEKADGLSKDASRCSEQPSISDIKEKSKFRMSELSSSRPKRRKTAVQYIESSDSEEIETSELPQKMKGKLKNVQSETKGRAKAGSSKVIEDVAFACALTSSVPTTKKKMLKKGACAVEGSKKTDVEERPRTTLIICPLSVLSNWIDQFGQHIKSDVHLNFYVYYGPDRIREPALLSKQDIVLTTYNILTHDYGTKGDSPLHSIRWLRVILDEGHAIRNPNAQQTKAVLDLESERRWVLTGTPIQNSLKDLWSLLSFLKLKPFIDREWWHRTIQRPVTMGDEGGLRRLQSLIKNITLRRTKTSKIKGKPVLELPERKVFIQHITLSDEERKIYQSVKNEGRATIGRYFNEGTVLAHYADVLGLLLRLRQICCHTYLLTNAVSSNGPSGNDTPEELRKKLIRKMKLILSSGSDEECAICLDSLTVPVITHCAHVFCKPCICQVIQNEQPHAKCPLCRNDIHEDNLLECPPEELARDSEKKSDMEWTSSSKINALMHALTDLRKKNPNSLWICVYSFGWFHGPKEKS

SEQ ID NO: 790681 - protein, 1009 aa, Homo sapiens; identical to SEQ ID NO: 790675

SEQ ID NO: 790682 - protein, 1009 aa, Homo sapiens; identical to SEQ ID NO: 790675

SEQ ID NO: 790683 - protein, 88 aa, Homo sapiens
GQEVGETEGTETECAGRHRKGDTERVKSTSERTLAKNYPKWLKDTRENMLKIQNKKRELAAGAFGTKKPNADEMKQAKINEIRTLIDL

SEQ ID NO: 790684 - protein, 305 aa, Homo sapiens
MSWMFKRDPVWKYLQTVQYGVHGNFPRLSYPTFFPRFEFQDVIPPDDFLTSDEEVDSVLFGSLRGHVVGLRYYTGVVNNNEMVALQRDPNNPYDKNAIKVNNVNGNQVGHLKKELAGALAYIMDNKLAQIEGVVPFGANNAFTMPLHMTFWGKEENRKAVSDQLKKHGFKLGPAPKTLGFNLESGWGSGRAGPSYSMPVHAAVQMTTEQLKTEFDKLFEDLKEDDKTHEMEPAEAIETPLLPHQKQALAWMVSRENSKELPPFWEQRNDLYYNTITNFSEKDRPENVHGGILADDMGLVIIFFFS

SEQ ID NO: 790685 - protein, 203 aa, Homo sapiens
QFDLDSIWTFIFGVPASSGTVVSSIHNVCTEAVFLLLGMLRSMLTSPWQSEEEGSWLREYPVTLMQFFRYLYHNVPDLASMWMSPDFLCALAATVFPFNIRPYSEMVTDLDDEVGSPAEEFKAFAADTGMNRSQSEYCNVGTKTYLTNHPAKKFVFDFMRVLIIDNLCLTPASKQTPLIDLLLEVKKKKRIYISFALLFKLEH

SEQ ID NO: 790686 - protein, 175 aa, Homo sapiens
AVCFSASGSRVAWVSHDSTVCLADADKKMAVATLASETLPLLALTFITDNSLVAAGHDCFPVLFTYDAAAGMLSFGGRLDVPKQSSQRGLTARERFQNLDKKASSEGGTAAGAGLDSLHKNSVSQISVLSGGKAKCSQFCTHLALDGGMKYFWECERELGESQPLEGAFTDHNDL

SEQ ID NO: 790687 - protein, 64 aa, Homo sapiens
MICLFVSFVVLLNHFSYSFLCSLYTLDTNSLLAICIANIFSQSVAYFKILFVVSFCLAKVLILK

SEQ ID NO: 790688 - protein, 121 aa, Homo sapiens
LRLPVSSNSCASASRVAGITSVHHIWLIFVFLVEIGFHHVGQACLEFLASSDLPASASQSAGITGVSHRAWPFGLQNLTIMGSKLSGGITSGAAEQDYRKGIIKYSEVCLCKQTQMSTLEE

SEQ ID NO: 790689 - protein, 369 aa, Homo sapiens
  misc_feature (308)..(308): Xaa can be any naturally occurring amino acid
ARCTVDDESGLGAPGRGRAGRQSWVRARASGARRDSEMQAARMAASLGRQLLRLGGGSSRLTALLGQPRPGPARRPYAGGAAQESKSFAVGMFKGQLTTDQVFPYPSVLNEEQTQFLKELVEPVSRFFEEVNDPAKNDALEMVEETTWQGLKELGAFGLQVPSELGGVGLCNTQYARLVEIVGMHDLGVGITLGAHQSIGFKGILLFGTKAQKEKYLPKLASGETVAAFCLTEPSSGSDAASIRTSAVPSPCGKYYTLNGSKLWISNVGLADIFTVFAKTAVTDPATGAVKEKITAFVVAEGLRGHLXMGPWEKWAQRQQSEGVLGEQGIREHAGGGQAQGREPTQRWKWPRRRKPYTDRHTARNTGTH

SEQ ID NO: 790690 - protein, 393 aa, Homo sapiens
  misc_feature (331)..(331): Xaa can be any naturally occurring amino acid
ARCTVDDESGLGAPGRGRAGRQSWVRARASGARRDSEMQAARMAASLGRQLLRLGGGSSRLTALLGQPRPGPARRPYAGGAAQLALDKSDSHPSDALTRKKKKPAKAESKSFAVGMFKGQLTTDQVFPYPSVLNEEQTQFLKELVEPVSRFFEEVNDPAKNDALEMVEETTWQGLKELGAFGLQVPSELGGVGLCNTQYARLVEIVGMHDLGVGITLGAHQSIGFKGILLFGTKAQKEKYLPKLASGETVAAFCLTEPSSGSDAASIRTSAVPSPCGKYYTLNGSKLWISNVGLADIFTVFAKTAVTESSTGAVKEKITAFVVERGFGGTXPWAPGRNGPSVNKAEGVLGEQGIREHAGGGQAQGREPTQRWKWPRRRKPYTDRHTARNTGTH

SEQ ID NO: 790691 - protein, 129 aa, Homo sapiens
RKIHPSAPVRGLPPALPIRGQRPQACRSVPLHSGSRRPWARGLGVGNPAPWSALESLSFPSPVLSSHWCPVRRWDYPFSIPLSNAGSIQQLQVALQPTLPPSSASASTLPFILPFIHSSFSPRPSFIHS

SEQ ID NO: 790692 - protein, 218 aa, Homo sapiens
MSGALDVLQMKEEDVLKFLAAGTHLGGTNLDFQMEQYIYKRKSDGIYIINLKRTWEKLLLAARAIVAIENPADVSVISSRNTGQRAVLKFAAATGATPIAGRFTPGTFTNQIQAAFREPRLLVVTDPRADHQPLTEASYVNLPTIALCNTDSPLRYVDIAIPCNNKGAHSVGLMWWMLAREVLRMRGTISREHPWEVMPDLYFYRDPEEIDTRRAGCC

SEQ ID NO: 790693 - protein, 253 aa, Homo sapiens
KAFRALLLKKRRTESRPLPNKLNANQGGFENGEIGESEENNPLDVHSIYIVPFQCPKCEKCFESEQILNEHSCFAARSGKIPSRFKRSYNYKTIVKKILAKLKRARSKKLDNFQSEKKVFKKSFLRNCDLISGEQSSEQTQRTFVGSLGKHGTYKTIGNRKKKTLTLPFSWQNMGKNLKGILTTENILSIDNSVNKKDLSICGSSGEEFFNNCEVLQCGFSVPRENIRTRHKICPCDKCEKVFPSISKLKRHY

SEQ ID NO: 790694 - protein, 205 aa, Homo sapiens
KAFRALLLKKRRTESRPLPNKLNANQGGFENGEIGESEENNPLDVHSIYIVPFQCPKCEKCFESEQILNEHSCFAARSGKIPSRFKRSYNYKTIVKKILAKLKRARSKKLDNFQSEKKVFKKSFLRNCDLISGEQSSEQTQRTFVGSLGKHGTYKTIGNRKKKTLTLPFSWQNMGKNLKGILTTENILSIDNSVNKKDLSIWGSP

SEQ ID NO: 790695 - protein, 134 aa, Homo sapiens [sequence omitted]

SEQ ID NO: 790696 - protein, 68 aa, Homo sapiens
QERAAAQEHLKKEAVIRIRNHQEVRMRRGKILTSAGAQKLGWSELRSDGCEEVETACVDIFSRLHGCG

SEQ ID NO: 790697 - protein, 108 aa, Homo sapiens [sequence omitted]

SEQ ID NO: 790698 - protein, 70 aa, Homo sapiens
PNKLGHSQLNCLFLRVFKDNNPYRKYHHFRESANYNNPTAVPRHSRQHRSRFMFHPNGLFTPWKAPTKDS

SEQ ID NO: 790699 - protein, 119 aa, Homo sapiens [sequence omitted]

SEQ ID NO: 790700 - protein, 67 aa, Homo sapiens
ERGVTCSTTPTQMEGTFSVVLATPSVVKVPGLEVGYVFLGSSLQYLKPQTCNLKLPSATIPVNLWKT

SEQ ID NO: 790701 - protein, 110 aa, Homo sapiens
MLVWGRGPHCIATCAKGGPRETWVLTYALCFSPPKKNAGGTAGGLGTKPDRVSGGLHGFSTSGCQRLRNKAPGGGEEKLTDRTNDEEQTSKDEAHDKRHDHKTTTKQERT

SEQ ID NO: 790702 - protein, 113 aa, Homo sapiens
MNQDQGGRTGHKAQLCSLLHSDFPQEPQLRTEKGDSPLSAHLSTCCPSLPLSKHHSRERTPCPRPSQPPSKEPQWSPHGLGTRLMFCREATRHSHAPGFTGPDILGHVSVWRP

SEQ ID NO: 790703 - protein, 118 aa, Homo sapiens
MGACLRAGFLIEGFGSLLIIYPLVGFISKVQQYRTCPLGSLLGFFLPHNIFSHVFMRGKSFLLVELIVDQATCVGLLCPGKRGFTESGGHPPPRLGSIEHLKNTENLDPVGINKRSLG

SEQ ID NO: 790704 - protein, 145 aa, Homo sapiens
APCLPQYERALDVAAEPKHERQHRAQIRKNITETLVSLRVHTVDDIQQIAAALAQCMGPSRELVCRSCLKQTLHKLEAMMLILQAETTAGTVTPTAIGDSILNITGDLIHLASSDVRAPQPSELGAESPSRMVASQAYNLTSALM

SEQ ID NO: 790705 - protein, 116 aa, Homo sapiens
GDRGGPGIPGFKGEPGLSIRGPKGVQGPRGPVGAPGLKGDGYPGVPGPRGLPGPPGPMGLRGVGDTGAKTLNTSHGLEDPSCPDCSFCHFSLAADIQPKWPALLQLIPASGTRQDG

SEQ ID NO: 790706 - protein, 118 aa, Homo sapiens
GDRGGPGIPGFKGEPGLSIRGPKGVQGPRGPVGAPGLKGDGYPGVPGPRGLPGPPGPMGLRGVGDTGAKGEPGVRGPPGPSGPRGVGTQGPKGDTGQKGLPGPPGPPGYGSQGIKVSE

SEQ ID NO: 790707 - protein, 104 aa, Homo sapiens
FSLIERNVHGALFVYWQIYDEKRKYQANHHGHISEKRDTSLRRVPGRSFMGISEEGIAIIGDDSSVHVTAREDLPVGQDVKVEDDDIDDSDLCMPRLMYLCLSF

SEQ ID NO: 790708 - protein, 230 aa, Homo sapiens
GDYVGLELTAVLTRPRAASRFCWDRLLLQEVASTRGTGAWGVLVLDEAQERSVASDSLQGLLQDARLEKLPGDLRVVVVTDPALEPKLRAFWGNPPIVHIPREPGERPSPIYWDTIPPDRVEAACQAVLELCRKELPGDVLVFLPSEEEISLCCESLSREVESLLLQGLPPRVLPLHPDCGRAVQAVYEDMDARKVVVTHWLADFSFSLPSIQHVIDSGLELRSVSERER

SEQ ID NO: 790709 - protein, 276 aa, Homo sapiens
GDYVGLELTAVLTRPRAASRFCWDRLLLQEVASTRGTGAWGVLVLDEAQERSVASDSLQGLLQDARLEKLPGDLRVVVVTDPALEPKLRAFWGNPPIVHIPREPGERPSPIYWDTIPPDRVEAACQAVLELCRKELPGDVLVFLPSEEEISLCCESLSREVESLLLQGLPPRVLPLHPDCGRAVQAVYEDMDARKVVVTHWLADFSFSLPSIQHVIDSGLELRSVYNPRIRAEFQVSRPMSKCQAEARRLRARGFPPGSCLCLYPKSFLELEAPPL

SEQ ID NO: 790710 - protein, 257 aa, Homo sapiens
  misc_feature (252)..(252): Xaa can be any naturally occurring amino acid
GDYVGLELTAVLTRPRAASRFCWDRLLLQEVASTRGTGAWGVLVLDEAQERSVASDSLQGLLQDARLEKLPGDLRVVVVTDPALEPKLRAFWGNPPIVHIPREPGERPSPIYWDTIPPDRVEAACQAVLELCRKELPGDVLVFLPSEEEISLCCESLSREVESLLLQGLPPRVLPLHPDCGRAVQAVYEDMDARKVVVTHWLADFSFSLPSIQHVIDSGLELRSVYNPRIRAEFQCRANVGGTTRIVICLLXPGVKT

SEQ ID NO: 790711 - protein, 249 aa, Homo sapiens
GDYVGLELTAVLTRPRAASRFCWDRLLLQEVASTRGTGAWGVLVLDEAQERSVASDSLQGLLQDARLEKLPGDLRVVVVTDPALEPKLRAFWGNPPIVHIPREPGERPSPIYWDTIPPDRVEAACQAVLELCRKELPGDVLVFLPSEEVKNKTKQKKQPAEMSLQKEEISLCCESLSREVESLLLQGLPPRVLPLHPDCGRAVQAVYEDMDARKVVVTHWLADFSFSLPSIQHVIDSGLELRSVSERER

SEQ ID NO: 790712 - protein, 119 aa, Homo sapiens
PFPLSSLDGGRCGSNPAGSQRVSMYLGLQGHRWGEEGWRGWRGKWKTPSTFHNFIFLNKCFESFLKVRKFCLPVSFRRALISVVTNVAPGPPAKYTLRRGSLGGQGGRITRSGDRDHPG

SEQ ID NO: 790713 - protein, 168 aa, Homo sapiens
SPAATVSHPAPKASPVPAAPPPCPAASPSPAASPAPLATSPVLTASPPLPAASPTLAAFPVHTASPPIHIASPPVHIASPSVHVASPPVHVASPPVHVASPSVSCSGDSTSDCFPPQPGAVFPHSPAPSLGGWSHLVAAPPQRALLGALGPGVQLRKEADNKGLWTLK

SEQ ID NO: 790714 - protein, 103 aa, Homo sapiens
RVGPVDSGRPWVVNHPGLPTSDRFLGHRIFHAKTRTVPGNLDGHPSGADAELWFSVQLLSVSQFPHLELRAYNSTLCMVAGRWGRVTLNNVLKVLSIRHSMSI

SEQ ID NO: 790715 - protein, 121 aa, Homo sapiens
PLAADSPSYPVPLSGWVTVTSNVTIDVTLTFLPFPEWSGNWDGGRHTLPGQQHALRGQSKEAFLTVVTLTSLDLSIPQLSFGALYNTSLVIIMSQGQEIKGVGEYVTLFKEKAREMLVDLK

SEQ ID NO: 790716 - protein, 133 aa, Homo sapiens
KVGGSGPARTGRGGAGAVPAAEAPKAFARPLAAAAGAGWTRRAGSRMRMNPSVLECPEALRLSFPPRGKGVRGDPDIQGPEVSASRSWAGDWAGCAGSQRGDSSGGRPGCWGLRAADKAAAPPRGAGQWNEWA

SEQ ID NO: 790717 - protein, 91 aa, Homo sapiens
VKGTFYVVAARENEEVQKRKPLIKPSDLVRLIHYHENSMREIAPLIQIISHRVPPIECGNYGSTIQDEIWVETQRQTVSRTLSENLTMLTS

SEQ ID NO: 790718 - protein, 112 aa, Homo sapiens
ACGSLEAAGQGGAWKPEILPAGPNALSTTTAADECLAAHLSPRGPAEPPGCIPWPATERTPPHPHFPGEEPGLWDLRRGLQVRTVATRDLAAADALWEACVQPFVLPGAGTY

SEQ ID NO: 790719 - protein, 136 aa, Homo sapiens
DPNVVSISFLRDLIQTGLPMIMEKTLNSERTDGQVMNQLGQPVCQPTAAHLLLLASPPITLPDVAEMLWEIIQVYQTDFLSMVRKFLKGLPKENNRGSLSPVTPPTTYELPTSQVTSAEECKQVCWALRDFTRLFR

SEQ ID NO: 790720 - protein, 150 aa, Homo sapiens
VEASRGRACLGWLHLGPQLEQGNGVQEPVPLRRGTYRHADPNRPTHFRFTSPWGEEQRDRITCQRSPGKEKLSLQTGPAEGANCCPCSVTPSTQSPSDKKKEKLGLTIPEFTAGRCQPCFLSLSTTATSITNNIYQFLQILVKKSYSKRF

SEQ ID NO: 790721 - protein, 117 aa, Homo sapiens
TEPNSVSKNNNKRKINCLFSFLCPSFCSLQYRQGSVTENIGVNPGEGVLVALTQIQTPLSAHIQTTELEIEKGPPSASSPVLSSVDAPGHLWLWSTGVWLGQIQMGCKCKNTLVSKT

SEQ ID NO: 790722 - protein, 71 aa, Homo sapiens
RKAKLRRKSIDPWRTLTWHWYFGSQDCPTGRPPNSEPDPMSCIDYEYTEGAFTEAVLLFWVYKCHQNGRPS

SEQ ID NO: 790723 - protein, 44 aa, Homo sapiens
MAAGLMHWDGTSSFFLRQSFTLSPRLEFSGMISAHCNLYLPGSS

SEQ ID NO: 790724 - protein, 94 aa, Homo sapiens
MCTGALRVRYTACSIVWIHLTAQDRSIRSLFWHLLDWGEQRARQQARGRRQKETPRRGEAQGLREADSSLQKSLPSKAPVLWAGRGGCKLRRGH

SEQ ID NO: 790725 - protein, 150 aa, Homo sapiens
SIYANEGLKLLSSDWPAQLSSDWPMPLSPDWLIEPSSDCLVLVYSGKASMLKNICPGILHGLREKKAYLSLCIQTLICKLWEKYKNKPDMNYEARGCALRSYYHREILAKAEGQRLVYQCKDMPSNRLVIDNDKRQTCNEGLAAASDASH

SEQ ID NO: 790726 - protein, 101 aa, Homo sapiens
GNARHISSIPRPQRLRLSMVRRLMRGTRELRPSRREQSPASCRARTAWAAWLAESPVQFMHMHTCSLHRCVQQNVCVNHLNHPQICILITLVQGPGQRRLK

SEQ ID NO: 790727 - protein, 237 aa, Homo sapiens
  misc_feature (215)..(215): Xaa can be any naturally occurring amino acid
LVKFHRSRRLLGVCYIVVKVSLLVVVEIGVFPLICGWWLDICSLEMFDATLKDRELSFQSAPGTTMFLHWLVGMVYVFYFASFILLLREVLRPGVLWFLRNLNDPDFNPVQEMIHLPIYRHLRRFILSVIVFGSIVLLMLWLPIRIIKSVLPNLLPYNVMLYSDAPVSELSLELLLLQVVLPSITRTGTHEAVAEGAGASVDCDRRILAGSSFLXYWETRKKMKTVQINKLTIISKL

SEQ ID NO: 790728 - protein, 139 aa, Homo sapiens
AEIAPLHSSLGDRVRLCLKKEKKKSTHEHVFPHIGAHFTTTDNKHKFRVVSFKSVSYILQESSLWQGLSFASHLYSSSTSGSSALKPPAVALPPHAKFMTASRVHVFAPVRNTSHGPGPESQASQNPWQQRIPPLPLGP

SEQ ID NO: 790729 - protein, 71 aa, Homo sapiens
LMIITVSPPPPIYKQPIKTHFGEFDILFIKSDGWARWFTPVIPALWEAQVGGSQGQEIETILANMGKPCLY

SEQ ID NO: 790730 - protein, 60 aa, Homo sapiens
MLNILSITEFKSITIKTLVPHLTSPIPRTQQPNATTTRMVQLQAELWPLTSAQLNSMSTN

SEQ ID NO: 790731 - protein, 77 aa, Homo sapiens
RQVPNMSREKCSPGEGAEEGRGSEASGLKASAGNRRAQEDSGASPGTGGAQALGPHGRPKHKTVCPLESQRDPCAMN

SEQ ID NO: 790732 - protein, 109 aa, Homo sapiens
KNVSFNLRAPGLGQSPQNTWGHMTPVPQELPGRRGGHLPAPLAPTEKPAWVALRGQTESLGTSSPTIPLKESWGRGRLLGFGLQDLALDRCQMFAGYMRHLFLQKGNCT

SEQ ID NO: 790733 - protein, 107 aa, Homo sapiens
PSPPGPAPLPQVHPFPNQPRQVTAPWPKARLPGQQRKIKFHFAHCLPPRAPLFEERGALSFLAPSHIWELCRQRTHTNGLAPFPNRDSRAIHSTSLSDLIKQKLKNE

SEQ ID NO: 790734 - protein, 77 aa, Homo sapiens
LSDLNNRNVFLTVPEAKKSKITVPAWLVSGAASLPGLQMAAFSPCPLMAEKVCELSGFRSYKDTNPIEPGPYPHNII

SEQ ID NO: 790735 - protein, 198 aa, Homo sapiens
TSSCRIGTSEKSNDKKLLEMTINMLNVFGNEDFDCHGDLKTDQLKMDILIKKLKQKEQAQYEKQLEQLNKDNMASLNKKELTLKDVECKFSEMKTAYEEVTTELEEYKEAFAAALKANNSMSKKLTKSNKKIAVISMKLLMEKEQMKYFLSALPTRRDPESPCVENLTSIGLNRKYIPQTPIRIPISSPQTSNNCKNS

SEQ ID NO: 790736 - protein, 127 aa, Homo sapiens
CAHQRPKSRGGRGRRRLVCYHHPAHTHTQLGRHSTWAWPQLWKLEQALGARRGQAVGAGTSKPAGAEGLPGPRESTGMPRSAAVAGQLQLPPEGQVSHSANLERGQGSHLFPAPAGSVECTAPAARP

SEQ ID NO: 790737 - protein, 151 aa, Homo sapiens
PSLCTSRCCHVAKEVFSSPSAMIINFLRPPQPCGTKRKRHQRCAHSETRHMRTQRQGGYLQARERGLGEANPAYALILDFQPPELQNLSEMGINHELGYSSIIPMMKRFWCLWEFLEPIPCGYRGAPVHVTCCVFIHRWVDTAAVSIPCLL

SEQ ID NO: 790738 - protein, 151 aa, Homo sapiens; identical to SEQ ID NO: 790737

SEQ ID NO: 790739 - protein, 180 aa, Homo sapiens
LYTGAFILNKNFTNVKNAAKPLLNPHPLINKRIHTGEKPYTCEECGKAFYRSSHLTEHKNIHTGEKSYKCEECGNAFYRSSHLTKHKRIHSGQKPYKCEECGKAFRQSSALNEHKKIHTAEKPYKCKECGKAFRWSRSLNEHTNIHIGEKPYTCEECGKDFTWSSTLTVHQRIQTGEKHS

SEQ ID NO: 790740 - protein, 101 aa, Homo sapiens
VMYQFGDFQVCAFSTFLFCFVLRRSLSLSPRLECSGAISAHCKLCLLGSRHSPASASRVAGTTGAHHHIRLIAFSTFLGEVCGNSKAFYMLNRMNKTNAEQ

SEQ ID NO: 790741 - protein, 455 aa, Homo sapiens
MASKCLKAGFSSGSLKSPGGASGGSTRVSAMYSSSSCKLPSLSPVARSFSACSVGLGRSSYRATSCLPALCLPAGGFATSYSGGGGWFGEGILTGNEKETMQSLNDRLAGYLEKVRQLEQENASLESRIREWCEQQVPYMCPDYQSYFRTIEELQKKTLCSKAENARLVVEIDNAKLAADDFRTKYETEVSLRQLVESDINGLRRILDDLTLCKSDLEAQVESLKEELLCLKKNHEEEVNSLRCQLGDRLNVEVDAAPPVDLNRVLEEMRCQYETLVENNRRDAEDWLDTQSEELNQQVVSSSEQLQSCQAEIIELRRTVNALEIELQAQHSMRDALESTLAETEARYSSQLAQMQCMITNVEAQLAEIRADLERQNQEYQVLLDVRARLECEINTYRGLLESEDSKLPCNPCAPDYSPSKSCLPCLPAASCGPSAARTNCSPRPICVPCPGGRF

SEQ ID NO: 790742 - protein, 117 aa, Homo sapiens
MPSQRDALESTLAETEARYSSQLAQMQCMITNVEAQLAEIRADLERQNQEYQVLLDVRARLECEINTYRGLLESEDSKLPCNPCAPDYSPSKSCLPCLPAASCGPSAARTNCSPRPI

SEQ ID NO: 790743 - protein, 455 aa, Homo sapiens; identical to SEQ ID NO: 790741

SEQ ID NO: 790744 - protein, 104 aa, Homo sapiens [sequence omitted]

SEQ ID NO: 790745 - protein, 157 aa, Homo sapiens
CVPLVVGFLWPLRARLPSAMASVLNVKESKAPERTVVVAGLPVDLFSDQLLAVLVKSHFQDIKNEGGDVEDVIYPTRTKGVAYVIFKEKKVAENVIRQKKHWLARKTRHAELTVSLRVSHFGDKIFSSVNAILDLSVFGKEVTLETLVKDLKKKSRV

SEQ ID NO: 790746 - protein, 127 aa, Homo sapiens
CVPLVVGFLWPLRARLPSAMASVLNVKESKAPERTVVVAGLPVDLFSDQLLAVLVKSHFQDIKNEGGDVEDVIYPTRTKGVAYVIFKEKKVAENVIRQKKHWLARKTRHAELTVSLRVSHFGDKVFG

SEQ ID NO: 790747 - protein, 145 aa, Homo sapiens
IIRLPFCGPNQLDNFFCDVRQVIKLACTDMFVVELLMVFNSGLMTLMCFLGLLASYAVILCRIRASSSEAKNKAMSTCTTHIIVIFFMFGPGIFIYTCPFRAFPADKVVSLFHTVILPLLNPVIYTLHNQEVKASMKKVFNKHIA

SEQ ID NO: 790748 - protein, 108 aa, Homo sapiens [sequence omitted]

SEQ ID NO: 790749 - protein, 289 aa, Homo sapiens
  misc_feature (276)..(276): Xaa can be any naturally occurring amino acid
MAACGRVRRMFRLSAALHLLLLFAAGAEKLPGQGVHSQGQGPGANFVSFVGQAGGGGPAGQQLPQLPQSSQLQQQQQQQQQQQQPQPPQPPFPAGGPPARRGGAGAGGGWKLAEEESCREDVTRVCPKHTWSNNLAVLECLQDVREPENEISSDCNHLLWNYKLNLTTDPKFESVAREVCKSTITEIKECADEPVGKGYMVSCLVDHRGNITEYQCHQYITKMTAIIFSDYRLICGFMDDCKNDINILKCGSIRLGEKDAHLQGEVVSCLEKGLVXEAEEREPKIQVSE

SEQ ID NO: 790750 - protein, 93 aa, Homo sapiens
ALRNQLEQHSKTSSLQKIQKLGLTRSRSSLASLENVLHQKERINQEEEDRGSGNRDDGARKSQDDSCASGLQQPGWEQKDGELWECLQERKRN

SEQ ID NO: 790751 - protein, 131 aa, Homo sapiens
QGGGTPRQPGWLRRVEAGGAQPGAREGWHLAPTACPPARPPAQVGLGFPAFNNHPHRRGTEARNTPALAFQASRGWIIRAFRRRGREEKERWRPGDHTGRQCTELPQPSAATSYAAPETDRHCFSKAQPVR

SEQ ID NO: 790752 - protein, 125 aa, Homo sapiens
MWLPALVLATLAASAAWGHPSSPPVVDTVHGKVLGKFVSLEGFAQPVAIFLGIPFAKPPLGPLRFTPPQPAEPWSFVKNATSYPPMCTQDPKAGQLLSELFTNRKENIPLKLSEDCLYLNIYTPA

SEQ ID NO: 790753 - protein, 113 aa, Homo sapiens [sequence omitted]

SEQ ID NO: 790754 - protein, 74 aa, Homo sapiens
MSICGHEEWPRMTMPGLSELFTRTGHGIKKVKTGRAQWRMPVIPALWEAKAGGSRGQEIETILANTVNTAKPCL

SEQ ID NO: 790755 - protein, 94 aa, Homo sapiens
HWGLLLPHWLLQDGPSASLVSPLGVRGRVYVEACFPGDGALICMLIFDLGPNRQTLSIAEESLGWHLVAWALGSAGPWSPAGLVPGRFGPISSM

SEQ ID NO: 790756 - protein, 65 aa, Homo sapiens
  misc_feature (33)..(33): Xaa can be any naturally occurring amino acid
  misc_feature (54)..(54): Xaa can be any naturally occurring amino acid
MICSLKNNGLKHAVKNVALQLDRPNTTFLLMAXSIYLHDQNPDAGLRALHQGDXLECTAMTVQIL

SEQ ID NO: 790757 - protein, 101 aa, Homo sapiens
QHQAVAGWVLLCAVISVGVGKLAVSRPRCEAETGRREVSGPGWVDGDLLACTVSSLVKWGLHSPHLDRHVGTEVIDSQRGGASRSVPGGPWPGGGRHFPFS

SEQ ID NO: 790758 - protein, 137 aa, Homo sapiens
MPKAQRLLRVAPRIGLQRSERGGDGGCKGWLLQEREACPWLPAPVTPGDLTPRPSFPSSRPISGTLRLKEPRDLFKAARATTWSHKKALVRASSPWSLALHSSSRLSDLFPSAPLPLPQAWVPKALGHALGPGKRRG

SEQ ID NO: 790759 - protein, 206 aa, Homo sapiens
ARGTACVRVPPCLSPFLAPALSLRCPSSGSGEAQAKAGREGALWIRPRACPKIGPAGFPTHKRLLESGPRGPQAARPSLNSAATTAPALCPQQPWCHHPAESCQTTTRHDKGFFNCDGFLALMGVYHEKAQNQESELRAAFRVFDKEGKGYIDWNTLKYVLMNAGEPLNEVEAEQMMKEADKDGDRTIDYEEFVAMMTGESFKLIQ

SEQ ID NO: 790760 - protein, 74 aa, Homo sapiens
TSYPGLSHNGEHLLGTHLEPLNRHVSILVLDPNNLVFTPHCTDEEQGMDVEKLKLLNAGESLALKKWRTLVQKG

SEQ ID NO: 790761 - protein, 53 aa, Homo sapiens
MDRKAAGLSVLWGSGSAVTFPRRGQDFYANSSLCEGKAGCGSNSELAAGISTS

SEQ ID NO: 790762 - protein, 83 aa, Homo sapiens
WGWPEEGALGGLQLLESKPHKPTEDEVEGPTVNPTWPASESRAPQGGSAPCKPETWPSHCSELNLSFIVCELGMPERIEPGRL

SEQ ID NO: 790763 - protein, 144 aa, Homo sapiens
LRPDLSTGSTGTSPAARSRKGPSRMRKPQAESGGSSVASQPQACQDGVRGWSQPKSKKIVVSFHSSSLRTKPHNDRILKKKLGMGDGNNPCHWNTGLSGQVTSLAPLPLCLYRWHGAISCLGSGLCSVLPLALSPLFLRGLDVS

SEQ ID NO: 790764 - protein, 170 aa, Homo sapiens
MAYYFHFYGELPSQESPHPGVYSPHPQGGWQPTADSYREWHNEDLNPRMSHWTYAQELVSYKKTSFIVWRHRISPNGVTSRKPYCHFHGGQWPGPTPPSCLSSAFASGSFSHFEDSPYILLHVVLQMCWLRAQRLNQRDLGLNPTSAIEHQLSDLDCVPLLLWASDSPSE

SEQ ID NO: 790765 - protein, 143 aa, Homo sapiens
MIKQSSRVWLCLVTRRVYKGGQELRATAKIQNLQKPAADIEEPIYTMDKQSSAGGVKRSVPCDSNEANEMMPETSSGYSDPQPAPKKLKTSESSTILVVRYRRNFKRTSPEELVNDHARKNRINPLQMEEEEFMEIMVEIPAK

SEQ ID NO: 790766 - protein, 143 aa, Homo sapiens; identical to SEQ ID NO: 790765

SEQ ID NO: 790767 - protein, 102 aa, Homo sapiens
PRGLCMGTSRPSSLHVLQARSLKPPVMGMTESGMIFFCFLSKKTTKSSAYTDSHKPFARGSSVDLRRCHFSEEPSLLWNYSQPCNPPSPWTLLLLSVKTMLR

SEQ ID NO: 790768 - protein, 108 aa, Homo sapiens
VNLFCSTVKGQSWLLSPNGSEVRLHRFHSASTSCCATLIKCLSSPGPQQIRVTKIPTKMLVFMFKEHLPGQGQPPWKTPQQSWMGWRREVTTCFLLKETLNRKSLSHK

SEQ ID NO: 790769 - protein, 104 aa, Homo sapiens
VPIRSVPEVLSAKGNKVKVPDSMTTLVYPAHASPQLHPAWACLEDRWERWREMPALDPGTQTSCCSRDCLKVPQTWDWEDPVEDTESPTSNKEASSFLRNPQQR

SEQ ID NO: 790770 - protein, 118 aa, Homo sapiens
PRDSGDCRALRKRRKIKTQRSPGGARTREGLACRRGRGRFALGVARVSRVLSGTRPPVRMLPILGEPGRCAGVTSAHVVQVTPGEEQTPVCKTFRGFRASGSGRASRAAAQNYNPQAP

SEQ ID NO: 790771 - protein, 120 aa, Homo sapiens
HRIRALMPRPRHAYLLAGISLRPVWHRQRQGPALGAQGWQSRVIEAGGVQTVASPQELLALRELRAPQWGILAELQGKAGWRPGSSAPISSAPTLEGGQISMLTFVLTQLIQTIHKNKLA

SEQ ID NO: 790772 - protein, 106 aa, Homo sapiens
IQKSEVSDVERFAQDGRGGSGGGPTSADFHVQVQSCGFRFQNADPSENLSGHSLSFALFKNLILFLFKRENRALLAGRCKSSLWGLFVPGYVLSHTPTYLPSPPLA

SEQ ID NO: 790773 - protein, 68 aa, Homo sapiens
IGLFKDGQGSAHRWMDGSAPTYINWDSRKLDDNGTTPACVMMLYQGHWSNSSCKSESPVYICEKRQSC

SEQ ID NO: 790774 - protein, 110 aa, Homo sapiens
PRTVAFLIFLFAAWTVDPLDLQALPCLSLHAGGSGRLHPWGALGAAGDVHSEQWRAVVSSDLHAGELVRVAVGPLVKLPWLLTSKEMRKERYYRFSLRNKYCLLFLSFLW

SEQ ID NO: 790775 - protein, 1530 aa, Homo sapiens
IKSMSEDESEMITTVSEIESKAPTVESGTIASKERTLSSGQEQVVESDTLTIESGPLASEDKPLSCGTNSGKEQEINETLPITTVAQSSVLLHPQEEAARIRMSARQKQIMEIEEQKQKQLELLEQIEQQKLRLETDCFRAQLEEEKRKKTQPTGVGCRKSHHYINHLVGIAPASCPVISDEDSHRQMIRNYQHQLLQQNRLHRQSVETARKQLLEYQTMLKGRCPSVSAPSLITDSVISVPSWKSERPTAISEHWDQGQRLKLSPNKYQPIQPIQTSKLEQDHFQVARQNHFPQRQVETTETLRASDILTNQALESQEHLRQFSQTETQQRDYKLVPKDSETLSRALSHDRQLISQDARKISETFGATTFQSLESQQLFSENSENISYHLTEPSSFVPLVPQHSFSSLPVKVESGKIQEPFSAMSKSTVSTSHSIISQMHDRPLLPSENITAQQGNMKALQEQLDLQKKVLQATQEAQEQLLLCKQKEVEQQTGLSVFLPLVTPDSSALLPSAKADLGRIQESSPTKNNIAVSSDHHVISQLQDKRLSLSQPILSQQNNFKFLQEQLNIQKDSLQARREAQEVLYVHKQSELDRRVCSEQAEPSFPFQVAQHTFTSLPSADTKSGKIQEQHSSKSEKGLVSCQSDIPISQDGSLSFLQQFLPLHDSLKLLQEQLTKQRDTLQARHEAQVELLLHRQRDLGDSKSGLVSSSSSPVVVQHSVASQASAKAEPRRIQELYLSEKENVGPSCHLIIPTFQDKSLSFPQHSLAQQENLTILQEQSQIQRVILGAKEGTQEFVHTESELEKRISSEQTGTSSSLSQVDESERFQECISIKSDSTIPLSHPKIPRCQERLLRVSQHMLPLQDNLEEHQAWLDTEKEAFHFSQKTQENTSSEQTGSSSFIPQLVQLSFTSLASAESGTILEPLFTESESKIFSSHLQIPQLQDRLLRISQLIQPQQDNLKALQEQLATQREAIILARQEAREELLLHQSEWEGRISPEQVDTSSLPLVPQHSFASLPLNESERNQEPCSINSDNIVSSGHSEIPTLPDGLLGLSHLVLPQQDNLIALEEHLHAQTDFLPSIEKTQKELVLSKPCKFEEKVSSEHFIQSHHGDLQALQQQLDTQKKAIRSIQEVQEELLLQRLSELEKRVSSEQVCSSSFVSQVPVADSERTQKSFPTKSNDTLPSSHREIPRLQDRLLSLSKPILPQQDNMTAQLDAQREVMYSYEKPQEELSLNKQRKLNKSESAEHTIPSLFLPKETEHSFIPLPFAEAKPKSTCELYSSQNEHAAPPSNPVIPGFQDRLLSFSQSVLTQQDNLGLQKQLDLQREVLHYSQKAQEKLLVQRQTALQQQIQKHEETLKDFFKDSQISKPTVENDLKTQKMGQLRDWFPNTQDLAGNDQENIRHADRNNSDDNHLASEDTSAKQSGEHLEKDLGRRSSKPPVAKVKCGLDLNQHELSAIQEVESPAIGRTSILGKPGIYEDRDPLRVSISREQSFFGSPLAHDPFSCLQLVGQENVCGDDYDEAGEK

SEQ ID NO: 790776 - protein, 1492 aa, Homo sapiens
IKSMSEDESEMITTVSEIESKAPTVESGTIASKERTLSSGQEQVVESDTLTIESGPLASEDKPLSCGTNSGKEQEINETLPITTVAQSSVLLHPQEEAARIRMSARQKQIMEIEEQKQKQLELLEQIEQQKLRLETDCFRAQLEEEKRKKTQPTGVGCRKSHHYINHLVGIAPASCPVISDEDSHRQMIRNYQHQLLQQNRLHRQSVETARKQLLEYQTMLKGRCPSVSAPSLITDSVISVPSWKSERPTAISEHWDQGQRLKLSPNKYQPIQPIQTSKLEQDHFQVARQNHFPQRQVETTETLRASDILTNQALESQEHLRQFSQTETQQRDYKLVPKDSETLSRALSHDRQLISQDARKISETFGATTFQSLESQQLFSENSENISYHLTEPSSFVPLVPQHSFSSLPVKVESGKIQEPFSAMSKSTVSTSHSIISQMHDRPLLPSENITAQQGNMKALQEQLDLQKKVLQATQEAQEQLLLCKQKEVEQQTGLSVFLPLVTPDSSALLPSAKADLGRIQESSPTKNNIAVSSDHHVISQLQDKRLSLSQPILSQQNNFKFLQEQLNIQKDSLQARREAQEVLYVHKQSELDRRVCSEQAEPSFPFQVAQHTFTSLPSADTKSGKIQEQHSSKSEKGLVSCQSDIPISQDGSLSFLQQFLPLHDSLKLLQEQLTKQRDTLQARHEAQVELLLHRQRDLGDSKSGLVSSSSSPVVVQHSVASQASAKAEPRRIQELYLSEKENVGPSCHLIIPTFQDKSLSFPQHSLAQQENLTILQEQSQIQRVILGAKEGTQEFVHTESELEKRISSEQTGTSSSLSQVDESERFQECISIKSDSTIPLSHPKIPRCQERLLRVSQHMLPLQDNLEEHQAWLDTEKEAFHFSQKTQENTSSEQTGSSSFIPQLVQLSFTSLASAESGTILEPLFTESESKIFSSHLQIPQLQDRLLRISQLIQPQQDNLKALQEQLATQREAIILARQEAREELLLHQSEWEGRISPEQVDTSSLPLVPQHSFASLPLNESERNQEPCSINSDNIVSSGHSEIPTLPDGLLGLSHLVLPQQDNLIALEEHLHAQTDFLPSIEKTQKELVLSKPCKFEEKVSSEHFIQSHHGDLQALQQQLDTQKKAIRSIQEVQEELLLQRLSELEKRVSSEQVCSSSFVSQVPVADSERTQKSFPTKSNDTLPSSHREIPRLQDRLLSLSKPILPQQDNMTAQLDAQREVMYSYEKPQEELSLNKQRKLNKSESAEHTIPSLFLPKETEHSFIPLPFAEAKPKSTCELYSSQNEHAAPPSNPVIPGFQDRLLSFSQSVLTQQDNLGLQKQLDLQREVLHYSQKAQEKLLVQRQTALQQQIQKHEETLKDFFKDSQISKPTVENDLKTQKMGQLRDWFPNTQDLAGNDQENIRHADRNNSDDNHLASEDTSAKQSGKPGIYEDRDPLRVSISREQSFFGSPLAHDPFSCLQLVGQENVCGDDYDEAVKLKESVLKIMQC

SEQ ID NO: 790777 - protein, 68 aa, Homo sapiens
SPGACIGKKGQTGPPYWLTLRRGWGKRAEGAQGQAGAAEDPWELRVHKGAALPGLQAASPMGAEKVQS

SEQ ID NO: 790778 - protein, 263 aa, Homo sapiens
SGSPDTSPVPLVPQRTGLLQLCPHSPKSLVFPPAGSLWPHQEKKMAYEKSTDISDVSRSMFLYPWLEYPDKTKELRKAMAPVHLPLSCYQMPKEEFPPSPECWRQHPSKPNSVPYCYFKKPEIYTHWHDLYDQREEREAEKMLRKMRDDCRYIKEVHQTHIKMFHLPMSKLTIKSEMRSRPLEPTQDPLKWQRLRELTKSLESPREDEQFYAAQALGCLRISDKFVMEALQQVAQTGPEKVKYEAYRTLAILGCLNKHVIRAL

SEQ ID NO: 790779 - protein, 263 aa, Homo sapiens
SGSPDTSPVPLVPQRTGLLQLCPHSPKSLVFPPAGSLWPHQEKKMAYEKSTDISDVSRSMFLYPWLEYPDKTKELRKAMAPVHLPLSCYQMPKEEFPPSPECWRQHPSKPNSVPYCYFKKPEIYTHWHDLYDQREEREAEKMLRKMRDDCRYIKEVHQTHIKMFHLPMSKLTIKSEMRSRPLEPTQDPLKWQRLRELTKSLESPREDEQFYAAQALGCLRISDKFVMEALQQVVSLRTAGVQERRKQGLRCVACGHRRGSPGC

SEQ ID NO: 790780 - protein, 126 aa, Homo sapiens
MKPSQKALSLQAEDLLGQRPTLTPALNSIAAKWIFLVPRPLVVFPNIFYFQPTPRFSVASLESVRSPASAEHVPLLLPQCLPNSPETATPHQAKARTPSGFLMLCPRTLCHSECQPHQFLQVNKHS

SEQ ID NO: 790781 - protein, 77 aa, Homo sapiens
QWSSHKVAFDKINSYLMEARYSLSRFRLLTGSLEAVQVQVDNLQNLQDDLEKQERSLQKFGSITNQLLKECHPPVTE

SEQ ID NO: 790782 - protein, 75 aa, Homo sapiens
ALGPPLFVCRVGVYIKALRGLSFGLSLVQVACTPPACSPAPLNPWEPQVAIFICQVQSSEPGNPSTLGGRSRWIT

SEQ ID NO: 790783 - protein, 95 aa, Homo sapiens
RLAQSSTRGDGQASQGQRESDAGLERCGGECGPRGAKSSRSNWVSGWARQGLVGWARKTERGAHLTPGRTEGVGQELDLGRLGPPRGLQSSPSPP

SEQ ID NO: 790784 - protein, 113 aa, Homo sapiens
LSLVLFCELLESKAHHVYFFVFCLFVCFGSPWHMVVQWVCSKFWSRDLPSYLPLPSPRSYLLSVVSPSCFPFRHSGHPLLISHTAPAAHRDLHILFLSLEFSPFYIWPTPTHL

SEQ ID NO: 790785 - protein, 121 aa, Homo sapiens
VNSLSQSLSANPLTASTLVHLDLSGNVLRGDDLSHMYNFLAQPNAIVHLDLSNTECSLDMVCGALLRGCLQYLAVLNLSRTVFSHRKGKEVPPSFKQFFSSSLALMHINLSGTKLSPEPLK

SEQ ID NO: 790786 - protein, 81 aa, Homo sapiens
EAGSPEVGVLAGRALLKPPGQGQPHARLLAWAPASGPRRSPAHCCMAPTSASPTMWPPPGVSVSKSPALSKDNSHWSWDPS

SEQ ID NO: 790787 - protein, 100 aa, Homo sapiens
QAAQVSAWLLVRLQGGSKRREEAPGSLMQESLTSRRVHGLLEVGHTAGGGWQASERYRLSSASCQISGGIRFSLDHEPHRELHARDLGCTLLMRIKCLMI

SEQ ID NO: 790788 - protein, 88 aa, Homo sapiens
RWFWARVGPALCGRSGEPNSSVERGEERREWGRKGHIIPVNGGDPQTSAWLGLGIQHPHGKLSREVDSLWAPSLGKALRLIPPAHLCT

SEQ ID NO: 790789 - protein, 88 aa, Homo sapiens; identical to SEQ ID NO: 790788

SEQ ID NO: 790790 - protein, 102 aa, Homo sapiens [sequence omitted]

SEQ ID NO: 790791 - protein, 102 aa, Homo sapiens [sequence omitted]

SEQ ID NO: 790792 - protein, 654 aa, Homo sapiens
YSISELNEDDRRKVEEIKAELFGHGRTTDLSKGLQSPRGMGCKPEAVCSHIIIESHEKGCFRTLTSEHPQLDRHPCAFRSAGPSEMTRGRQNPSSCRAKHVNLSASLDQNNSHFKVWNSLQLKSHSPFQNFIPDEFKISKGLRMPFDEKMDPWLSELVEPAFVPPKEVDFHSSSQMPSPEPMKKFTTSITFSSHRHSKCISNSSVVKVGVTEGSQCTGASVGVFNSHFTEEQNPPRDLKQKTSSPSSFKMHSNSQDKEVTILAEGRRQSQKLPVDFERSFQEEKPLERSDFTGSHSEPSTRANCSNFKEIQISDNHTLISMGRPSSTLGVNRSSSRLGVKEKNVTITPDLPSCIFLEQRELFEQSKAPRADDHVRKHHSPSPQHQDYVAPDLPSCIFLEQRELFEQCKAPYVDHQMRENHSPLPQGQDSIASDLPSPISLEQCQSKAPGVDDQMNKHHFPLPQGQDCVVEKNNQHKPKSHISNINVEAKFNTVVSQSAPNHCTLAASASTPPSNRKALSCVHITLCPKTSSKLDSGTLDERFHSLDAASKARMNSEFNFDLHTVSSRSLEPTSKLLTSKPVAQDQESLGFLGPKSSLDFQVVQPSLPDSNTITQDLKTIPSQNSQIVTSRQIQVNISDFEGHSNPEGTPVFADR

SEQ ID NO: 790793 - protein, 289 aa, Homo sapiens
TTGSRRVECCSQPRASQTRVGVPPPLPPAQPGAEGGGDRGLGDRPAPKDKWSNFDPTGLERAAKAARELEHSRYAKDALNLAQMQEQTLQLEQQSKLKEYEAAVEQLKSEQIRAQAEERRKTLSEETRQHQARAQYQDKLARQRYEDQLKQQQLLNEENLRKQEESVQKQEAMRRATVEREMELRHKNEMLRVEAEARARAKAERENADIIREQIRLKAAEHRQTVLESIRTAGTLVWGRIPCLCDRLGPSDSHGGWADAAECRGSTQPRIARLSLDAPRGWLGKPPTA

SEQ ID NO: 790794 - protein, 325 aa, Homo sapiens
GPPARGAWRLLPAARESDSGGGPGGGSGGGGASMSWLFGINKGPKGEGAGPPPPLPPAQPGAEGGGDRGLGDRPAPKDKWSNFDPTGLERAAKAARELEHSRYAKDALNLAQMQEQTLQLEQQSKLKEYEAAVEQLKSEQIRAQAEERRKTLSEETRQHQARAQYQDKLARQRYEDQLKQQQLLNEENLRKQEESVQKQEAMRRATVEREMELRHKNEMLRVEAEARARAKAERENADIIREQIRLKAAEHRQTVLESIRTAGTLVWGRIPCLCDRLGPSDSHGKHIHKTGLAGGCKAAFSEAEVGGSRGPEIEIILVRVKPCFY

SEQ ID NO: 790795 - protein, 76 aa, Homo sapiens
  misc_feature (25)..(25): Xaa can be any naturally occurring amino acid
AEPILCALRYRHRGFNESSAECRVXCHGYHFHKGQQSLIPQDHYDPFKESWTPSEPGQNSRVDHYQLLNSRPASTN

SEQ ID NO: 790796 - protein, 106 aa, Homo sapiens
GSLGHNAVSARQALLRWVCTLLSEQDWSHPAAATSHLQLGNAHLNRLQSHPVKDQALGCHGGWWLHLDSAGMGHFPFITESSSRRCCTRVSTALSLQEAMCRLHLS

SEQ ID NO: 790797 - protein, 107 aa, Homo sapiens
LAQSSRGQKDLSWTLRTSSQHRSVRVAGWSREPELHTVLLQKGLGSLGGVHPQKHPRAGTSGQLPRPSLGRHASLQLQPRMHGGFPKVLEVPLPSIEPGFPFPAPLV

SEQ ID NO: 790798 - protein, 72 aa, Homo sapiens
VDAAVFVTRTDFCVHKDEPCDTVGIAYLGGVCSAKRKCVLAEDNGLNLAFTIAHELGHNTPQETDTEDLEWL

SEQ ID NO: 790799 - protein, 201 aa, Homo sapiens
RSASPTPQTRAADDPAAAMALLRGVFVVAAKRTPFGAYGGLLKDFTATDLLNCCKVMGNVLQSSSDAIYLARHVGLRVGIPKETPALTINRLCGSGFQSIVNGCQEICVKEAEVVLCGGTESMSQAPYCVRNVRFGTKLGSDIKLEDSLWVSLTDQHVQLPMAMTAENLAVKHKISREECDKYALQSQQRWKAANDACYFK

SEQ ID NO: 790800 - protein, 120 aa, Homo sapiens
RAVFLSVTLSSCSKHMYLKQLYTKLIKIKDGQPVPGNVEEELVIEFPWWDKRITHLAFNERFPELHPFPSLTAGSCRPCGAHSGRGKMRPEARRCALGAMRTQPSQVNAASATARALIII

SEQ ID NO: 790801 - protein, 111 aa, Homo sapiens
MQPFAFAMPCPVYFLRGLFLYFCRINFSNLELEGTIYVCVCIYIYKRKTYIYFNYLKCKNLPNTNGKSDVYYIILLFVHLCDLFTHFMFFIYKIVKLAKIILVFLIGREET

SEQ ID NO: 790802 - protein, 68 aa, Homo sapiens
MGADFQFCKRNYEHSLYSLLFVIVYVISEVICLSYSNVFKARESEKREEERKVFKLISFEFKMHIKYN

SEQ ID NO: 790803 - protein, 342 aa, Homo sapiens
AGGLAGMGGIQNKKETVQSLNNHLASYLDRVRSLETENWRLESKIWEHLEKKGPQVRDWSHCFKTIEDLRAQIFTNTVDNARIVLQINNAHLAADDFRVKYETELAMRQSVENDTMGSARSLMTPMSHRLQLETEIEALKEELLFMKKNHEEEVKGLQAQIASSGLTVEVDAPKSQDLTKIMADIRAQYDELARKNREELDKYWSQQIEESTTVVTTQSVEVGAAEMMLTELRCTVQSLEIKLDSVRNLKPSLENSLREVEARYTLQIEQLSGILLHLELALTWAEGQPGPGLETLLNINVKLEAEIATYRRLLEDGEDFNLGDALDSSNSMQTIQKPPPAG

SEQ ID NO: 790804 - protein, 92 aa, Homo sapiens
MKVGSGASEDGLLFGGKVPGATAVTPLDTLVCPERRGKQGPSPTGPHTPEPHTAGPHTPEPTQRAPTHQNPTQRVPPHQNPHSGPPHTRTHT

SEQ ID NO: 790805 - protein, 70 aa, Homo sapiens
AQDVAGMANSIAIRGRQGNRGNGHKVQEVEGSRVTQRVHAPPKGIQIYYFKNSMLTSRVSWGLRLQPCRW

SEQ ID NO: 790806 - protein, 108 aa, Homo sapiens [sequence omitted]

SEQ ID NO: 790807 - protein, 108 aa, Homo sapiens [sequence omitted]

SEQ ID NO: 790808 - protein, 169 aa, Homo sapiens
DLFENRKKKNNIKLYVRRDFIMDNCEELIPEYLNFIRGVVDSEDLPLNISREMLQQSKILKVIRKNLVKKCLELFTELAEDKENYKKFYEQFSKNIKLGIHEDSHEMVSLKDYCTRMKENQKHIYYITGETKDQVANSAFVERLRKHGLEVIYMIEPIDEYCVQQLKEF

SEQ ID NO: 790809 - protein, 127 aa, Homo sapiens
KKPYECTQCGKALSSLTSFQTHIRMHSGERPYECKICGKGFCSANSFQRHEKTHSGEKPYKCKQCGKAFIHSSSLRYHERIHTGEKPMSVSNVGRPSDLPHTFNCMVGLTLERSPMNVRNVGKPSDL

SEQ ID NO: 790810 - protein, 130 aa, Homo sapiens
MDMHKAIPKVTIRMSTSSSKLGQKFNRSVGGYSSWELAEFYRVREWETPGVSLIYAMRDSLLAIGSSGWPLQSFCRVASLGLDAYCALRWLVGTGPVNSSLDVLVLVLCVGSVSKGPLAVQFRAKDWAGP

SEQ ID NO: 790811 - protein, 77 aa, Homo sapiens
ENQLAEIRCDLERQNQEYQVLLDVKARLEGEINTYWGLLDSEDSRLSCSPCSTTCTSSNTCEPCSAYVICTVENCCL

SEQ ID NO: 790812 - protein, 122 aa, Homo sapiens [sequence omitted]

SEQ ID NO: 790813 - protein, 80 aa, Homo sapiens
NGRERQSVDQVQVKGSPIMLGIRSGRFTHYLRKLVFVTDKSCSASWETQAPVLVPSSCTQMLSFNSSVTVLDPSSLPIRG

SEQ ID NO: 790814 - protein, 137 aa, Homo sapiens
LTSWCLPNPPNHHRTIPSHTLLTRRFNRLLIDRPYHPRRKLWLNHPLPSRQWRLNILHLPLPTHRPRPILRLISLPRNLKHWHHPPTYNYSNSLHGLCPPMRPNILLRGHSNYKPAIRRPIHRNRSGPMNLRRLLSR

SEQ ID NO: 790815 - protein, 337 aa, Homo sapiens [sequence omitted]

SEQ ID NO: 790816 - protein, 572 aa, Homo sapiens
MDDDYEAYHSLFLSLLGLCPSKTPINENAPVFDPEPVIAHCFKQFQQKDFRLPQTRRRIIMVPRKEDQTPLNPASQPQAPPKPIPSFKVLEARDIQEQPEDRKTWLSQRSKLRQELESFGDVKRWLENKPSITPSEAKVLHMIHEEQSAQPNASQATTRTTRKKAPRLSRLSRQMVPQLQLPEPPALSVMYSYLHSRKIKILEIFHKVGQGENQRITREEFIAAVKAVGVPLKNQEVEDIVIYLSSLGKHNTITMDILANTYKQWSMAQQRSSLATAREHYILAKHRDSLKGPLKKQEVDSAPQLPKVDLLTVPAVDTQMETRPMTLEEMEEVGKRYRERQRQHKLTIPSIQYTEQCHLVRCGNRHFDEHCLPSTIHGDMRELIDSARRHNFLVYLQCWKLCKSYGLPLTEDILMKALLYPGDKIIFQMDKVCPIRQPGGYYSDWKVFSPNLALLRSQGPGKSKRTDKKTPKKSKKMRFKEFEEFTRKLKVKRSSGLQQTHPNSFWPGHLLDKLQLYLPTVATDRSLALFSCVQHQPHVYPATYHPDHWWPLRNKNYMTHAHYDAAKVYYIN

SEQ ID NO: 790817 - protein, 422 aa, Homo sapiens
MKRTTVCSCRCSKKAPRLSRLSRQMVPQLQLPEPPALSVMYSYLHSRKIKILEIFHKVGQGENQRITREEFIAAVKAVGVPLKNQEVEDIVIYLSSLGKHNTITMDILANTYKQWSMAQQRSSLATAREHYILAKHRDSLKGPLKKQEVDSAPQLPKVDLLTVPAVDTQMETRPMTLEEMEEVGKRYRERQRQHKLTIPSIQYTEQCHLVRCGNRHFDEHCLPSTIHGDMRELIDSARRHNFLVYLQCWKLCKSYGLPLTEDILMKALLYPGDKIIFQMDKVCPIRQPGGYYSDWKVFSPNLALLRSQGPGKSKRTDKKTPKKSKKMRFKEFEEFTRKLKVKRSSGLQQTHPNSFWPGHLLDKLQLYLPTVATDRSLALFSCVQHQPHVYPATYHPDHWWPLRNKNYMTHAHYDAAKVYYIN

SEQ ID NO: 790818 - protein, 72 aa, Homo sapiens
SYTSVHSFNLHSSPGGHPGMECTALPDRKRFGCLRNNSLSGLLMRREAMVSFFSALNGSLDVTTARNHWRDK

SEQ ID NO: 790819 - protein, 81 aa, Homo sapiens
ELLPGSWIQLLLTAGGPKPEGLSTCPVPKRCTEAGRGSAGADQPAHERRVQLGFLGRVGVQKAVKHSFPASGLTSVLDEEY

SEQ ID NO: 790820 - protein, 69 aa, Homo sapiens
FFSEKPRLGLDHRPNISGFQSQSGKSLSCKKTKEGAGPTHAGYSERRENNCSFYQKRRSRILLLDSFLG

SEQ ID NO: 790821 - protein, 131 aa, Homo sapiens [sequence omitted]

SEQ ID NO: 790822 - protein, 166 aa, Homo sapiens
RRNTLHKEKDHLVNDYEQNMKLLQTKYDADINLLKQEHALSASKASSMIEELEQNVCQLKQQLQESELQRKQQLRDQENKFQMEKSHLKHIYEKKAHDLQSELDKGKEDTQKKIHKFEEALKEKEEQLTRVTEVQRLQAQQADAALEEFKRQVELNSEKVYAEMKE

SEQ ID NO: 790823 - protein, 76 aa, Homo sapiens
AALDGSREATNSTPTKSQNFKPERDLKPDPTHLSDTETEAWEERLSCSRSQRLLLGAELASKPGLLTASQGHAPQQ

SEQ ID NO: 790824 - protein, 115 aa, Homo sapiens
EGERKAKGLNVTFIETRAKAGYNVKQLFRRVAAALPGMESTQDGSREDMSDIKLEKPQEQTVSEGGCSCYSPMSSSTLPQKPPYSFIDCSVNIGLNLFPSLITFCNSSLLPVSWR

SEQ ID NO: 790825 - protein, 92 aa, Homo sapiens
ACLAVGMGNAVTTPGWHPIPHPGEWGSQEVDWKQAQASLSLPPRASSPAGGHYNADVKLVSGFSGRFGYRGNTPALRQSTSVFGEVTHFPLF

SEQ ID NO: 790826 - protein, 54 aa, Homo sapiens
MQISLQQAPGNLLITKSRNAVIPDRQCKGVVERGLSARVGIPALSVSLNSVLGY

SEQ ID NO: 790827 - protein, 86 aa, Homo sapiens
CGHFRSLLEAPEPDVEAELSRLSEDRLARPEPLNTTSGSPSRRRRREAAEDPAGRVAGPGEVSDGCREALAAWLAPQAASLSWDRL

SEQ ID NO: 790828 - protein, 58 aa, Homo sapiens
KHVHTMEQNGNCAHVLQVKHKTPQEFQACSEPLGTPLVSADPWWHTLKSNAMRSHSRY

SEQ ID NO: 790829 - protein, 137 aa, Homo sapiens
RAQTLSGTQALPDPGKSPLRLPVGHGHIEGMLESPWVKQVTLWGGHPLPAHCCPYPPSTGCQGRCPVEGGRWFIPISLLREDTQTCAVITVEHFHHPRKTPCTHRPSLPCPFLPATSNHRLVGAFCFHGFANSGYFV

SEQ ID NO: 790830 - protein, 137 aa, Homo sapiens; identical to SEQ ID NO: 790829

SEQ ID NO: 790831 - protein, 119 aa, Homo sapiens
RRGQPPFLTDMPNLHQTKALWAEAIMVIAAICEGLSSGGCSRDNDKALDCHTPSFPSHAGFELGQEASPEEEGRTHQDSSLLNTQASALVPTLTSTGHSVLSACLCPTEPPAPQHKTLV

SEQ ID NO: 790832 - protein, 110 aa, Homo sapiens
EGKIMSLRASLCHFSLDGGHRGPLLAEGCHCCLPHLYPQGPCSHWVRPLGHGVPSALFLDKPILCRSLPSTPVFRNSARFLQPHPYPPPNLLFFWCPSLSMANRSTTQRS

SEQ ID NO: 790833 - protein, 74 aa, Homo sapiens
MSTCSHQFTSSRSMKGSCSIGGSIRGGSSRISSVLAGGSCHAPSTYGGACVSPSLASPLGEPAGWGAAMAVASA

SEQ ID NO: 790834 - protein, 83 aa, Homo sapiens
SPAAKPQPAILRPALQPPPQSLLTWRRRPPPAQPRTGAASPESFPSVDTFALQQPRETVFRSCALEWLFLHLSASSPPNSGRE

SEQ ID NO: 790835 - protein, 94 aa, Homo sapiens
NIEGPEGKLKGPKFKMPEMNIKAPKISMPDIDLNLKGPKVKGDMDVSLPKVEGDMQVPDLDIKGPKVDINAPDVDVRGPDWHLKMPKMKMPKIS

SEQ ID NO: 790836 - protein, 104 aa, Homo sapiens
MARLLRRPSRCFSALLGSSRLASAPPIGLGFSGSSRPTSAPTTRLWLPSPSLGFSAAPRLSSFSSAFSARLQFSPISPLQFGSFRVSPWHPGLGVALGLVGSLS

SEQ ID NO: 790837 - protein, 102 aa, Homo sapiens
PQASIHLPSLTLSEAITLLSQDRRGEKNENSAQGTMEGKWDSFRTGSTDTSGQGEMTTSSEKWRAPPDGKASCPGTSAQSFSESAPHRAPHLHAVLRTDCLA

SEQ ID NO: 790838 - protein, 72 aa, Homo sapiens
PQASIHLPSLTLSEAITLLSQDRRGEKNENSAQGTMEGKWDSFRTGSTDTSGQGEMTTSSEKWRAPPDGKAR

SEQ ID NO: 790839 - protein, 89 aa, Homo sapiens
HGNYPHIPGCNHSHCCALCWIGLHCERVFPASIKSIHQGYLSSPCHGLQYTIKRTPAVTTVGSRKRRPLIRLCKTIQHDVYPQASTPPP

SEQ ID NO: 790840 - protein, 117 aa, Homo sapiens
MGGDKVSPKRRRERGKGRKKRQSLKVDRNSSQKLQSQGNPTQRAGDVGVCLCLAPFIPSGWPPLPSEPFGSSCPPEGLPSPTTTVLTVCPRILDPPTFLGLLLVQVISTGAISGSPG

SEQ ID NO: 790841 - protein, 121 aa, Homo sapiens
SSSALSFPILCGGPACPRPAHRGCQGPRPGSGLEVTRPQMICTPFFSGLVLCGKVSTVRGYRHVSQAVFDFLLSLSLSLYLSRLQINEDLISQEIWVSFFFLRLCQQWPGACESGPFSLSN

SEQ ID NO: 790842 - protein, 76 aa, Homo sapiens
LPSPSSLLFCSPGKFWTSLAQGLRGLASPAPVGTGQRDKADHLSLLEGRYPRAVVIRECHSGHIPAWAGLYGEVPV

SEQ ID NO: 790843 - protein, 109 aa, Homo sapiens
VTLFHHYHLPYTPGGQQSKIRSPTLTSRCLQGWFHLETLGENPFPCCFQLLVATCIPWLVAPSSIFKVHHPISAPSPHHRLPFCSQMFLCLLFISILIIIFMAHEDNPG

SEQ ID NO: 790844 - protein, 39 aa, Homo sapiens
MNQPLNGLQFPACNGAIPLFHLIYWRAEWHAGIGSHPAG

SEQ ID NO: 790845 - protein, 43 aa, Homo sapiens
MLTALGQVNNIQKEFTIKKTKQADHNLVARIDEIQYVQGTINL

SEQ ID NO: 790846 - protein, 140 aa, Homo sapiens
MHQCILKRHMRSHTGERPYPCEICGKKFTRREHMKRHTLVHSKDKKYVCKVCSRVFMSAASVGIRHGSRRHGVCTDCAGRGMAGPLDHGGGGGEGSPEALFPGDGPYLEDPEDPRGEAEELGEDDEGLAPEDALLADDKD

SEQ ID NO: 790847 - protein, 109 aa, Homo sapiens
MALHWGTALGSHLPLTARHVRVAEEETHPVDLSSLSSKLLPGFTTLGFKDERRNKVTFLSSATTALSMQNNSAFGDLKSDELELLYSAYGDETGVQCAPRWTPAPGASV

SEQ ID NO: 790848 - protein, 81 aa, Homo sapiens
MPLVIYDNGLLHDTKSPTIKRQSRYIGFYQNLKLGTGLSIQIRKSKIQNAPIENLNLSTNMTHNKNAHLNILEFRFGRLNW

SEQ ID NO: 790849 - protein, 52 aa, Homo sapiens
CAPQGKGSHGNPANSCLKNSSLFNAVDVSGTLKSFLQGVGWEEEEDAELVFL

SEQ ID NO: 790850 - protein, 105 aa, Homo sapiens
VETRFHHVGQAGLELLTSGDPPASASQSAGITGMSHCTQSSFRFIKLSWFELSICFVCDMVSLEYTGTSLELLGLNDPPTPASQSTGITGVSHCAWLPLLLRFFR

SEQ ID NO: 790851 - protein, 115 aa, Homo sapiens
MYISHVLSDVSCPEHVSNQLHPNPLGPHMFSGSPGTASWAFRHSYLAQNHSPSILQGFTLFLDNPQRAATVGGSETAGLQGMVLPKLHVQTQLEAVLPRGWSEGPQERPTQEFPT

SEQ ID NO: 790852 - protein, 113 aa, Homo sapiens
QQGFTPRSVSLVDSCAVQKRLGLLCVCTGGCGEWGGHLWVVLVQATCTEGAGALRGGSEALSLHFSLWNVTLTPFPSALVKTTNMPQYTQSVLLTLLPVWKIRVCFPKCHQGT

SEQ ID NO: 790853 - protein, 131 aa, Homo sapiens
FREPGTQIKVLSFCLEGKPSSLKSNLTSPALAGIVDAQIELASPRLICPEYPSPLLCSMTQSTPFPRVGLGQPLQILLCYSHCNKTMWWAQNEGRHCFSAFQQLSIAVSGASERKICGTLRIHSSPGQNLQ

SEQ ID NO: 790854 - protein, 108 aa, Homo sapiens
QSAVSSALNLSSAWEVPPLPACDWSARAPRSRIGCQYQPITCCLAPGLSGRCSPAPQFPAGAFRVSVCPGSGSVSLSGPSKEKSQRQVRADLDTLCGVEPEILVPFCC

SEQ ID NO: 790855 - protein, 242 aa, Homo sapiens
MCTPVDVCDTQCTYLCLEGLPMSLCVINPGPHASWGAHKHGFLMASSPAPQVLFFPSPHVTLLPWLPAQPAHGLSLPTPPACPHLLPLLEIPSGMFRLLPCHSPGLEHPHFLLSGPTSTPAWILTEMLPPLDRPQSLRSPALPSSCSPLPHGASSYLLPCVGADAPKLGALWLGLTPMASLTPVLAEPIVVHTILSSVAPESLGPSIPLLKVERLSQGWGQPSDTWSSHTWLSGTRPCPSMM

SEQ ID NO: 790856 - protein, 92 aa, Homo sapiens
HVKTLGQGVAHEVARNGLHFLPQKTTIALMKLKGEGGFSSKLRVECLVGQGQNCVEDPAGCSMEPSECMEPVAKQTRIFDMISVGAVRPWVA

SEQ ID NO: 790857 - protein, 149 aa, Homo sapiens
IRHEERLEICARVTHKHTRTHNPKTTTTRSQPLLAEIILKANGGISQQQEGRRRMKRRPGRSCKLEEKNARYCPSPRPWQAGDGVERSGVALRTPNFLGVPVKKGRNGSEQRNSLLQPALASPPSSFPQASRRPGVSHSGCRDFFSRLF

SEQ ID NO: 790858 - protein, 148 aa, Homo sapiens
MRDTIIFFFSFRNRVLLPPLRAVVQSQLIAASNSWAQVILPPLPPPPQELELQDPILVRDLMMFTVKTEAKKAHTARPRSLITRSIREEGPQLSDGGRPSFLHGRGGGQGLRAAAPGTSGGSEAPGSQSEFILREMESCGRLWEEGQD

SEQ ID NO: 790859 - protein, 106 aa, Homo sapiens
CIHLRFRTPWSRDLSFIHLRPSWSQPASSLLRGRHSHTSPLIMGGPSAKSLTQNVTRSLCTWLRSCKRGNHTGPGGLSHLSHITYHPHRGHCGSGGARRMTPHAGI

SEQ ID NO: 790860 - protein, 122 aa, Homo sapiens
MAHQALHDLPSPPPSTPATQASSLFFQHNMPGVVLPQGFGTTCPSPLAWNALTSCRCQGHVTSSKKPSLASCPGCPGFSERSPLHTTHAGTNHMFTSVTINTAGSAPGPDRLWFPGPGPLQA

SEQ ID NO: 790861 - protein, 122 aa, Homo sapiens; identical to SEQ ID NO: 790860

SEQ ID NO: 790862 - protein, 90 aa, Homo sapiens
LSVRVLDHKDRKQDSLEGTWAEERVLTEPTGDWGTRLRPTGAKGASEGKEAWCKRIANITQPEQPVQGRCCRGWLCTGSGSRPARHSPLS

SEQ ID NO: 790863 - protein, 109 aa, Homo sapiens
MLTSITVSVSLDFPIPGPRRVQLPYTATAFCPSVAWPCVAQCRGSLSVSEAEGRLVPHSLCASQAALMLCAPNLCRTGFRPGQRRLCPHPRCSQCPRTLSTGINLVSLQ

SEQ ID NO: 790864 - protein, 128 aa, Homo sapiens
QAPAHLPAAQGGQSRLHRGQRLLGRGQAGTPCMQCWVGTSCTGRDAGVWGPGHVSCPVREPGLVREALWAPRCFPALGSRGGTGVGKSGSPSSHRLHLYLHRGCPGQILGLLVLQLSFVISMRGVPTH

SEQ ID NO: 790865 - protein, 355 aa, Homo sapiens
MKASVIEMFLVLLVTGVHSNKETAKKIKRPKFTVPQINCDVKAGKIIDPEFIVKCPAGCQDPKYHVYGTDVYASYSSVCGAAVHSGVLDNSGGKILVRKVAGQSGYKGSYSNGVQSLSLPRWRESFIVLESKPKKGVTYPSALTYSSSKSPAAQAGETTKAYQRPPIPGTTAQPVTLMQLLAVTVAVATPTTLPRPSPSAASTTSIPRPQSVGHRSQEMDLWSTATYTSSQNRPRADPGIQRQDPSGAAFQKPVGADVSLGLVPKEELSTQSLEPVSLGDPNCKIDLSFLIDGSTSIGKRRFRIQKQLLADVAQALDIGPAGPLMGVVQYGDNRYSFNLEKRIPRLEKDEKFSEG

SEQ ID NO: 790866 - protein, 196 aa, Homo sapiens
MKASVIEMFLVLLVTGVHSNKETAKKIKRPKFTVPQINCDVKAGKIIDPEFIVKCPAGCQDPKYHVYGTDVYASYSSVCGAAVHSGVLDNSGGKILVRKVAGQSGYKGSYSNGVQSLSLPRWRESFIVLESKPKKGVTYPSALTYSSSKSPAAQAGKCSRVIESKPSESMNTRRVLGDSGEINILTGQAPLALAIF

SEQ ID NO: 790867 - protein, 124 aa, Homo sapiens [sequence omitted]

SEQ ID NO: 790868 - protein, 66 aa, Homo sapiens
RLRRRGTGSGLLVPAEPWAGPDPGPRLPHPAPPSRGLGASSESRVPHRTALDSGPLRPSQLAVHFK

SEQ ID NO: 790869 - protein, 66 aa, Homo sapiens
VSATGVDNAGPYKASCWLLRAFLLWAERIKKHHDCPFSGKDTRHTLTAQKRHFFLFLVSSFTINLN

SEQ ID NO: 790870 - protein, 61 aa, Homo sapiens
MVRSSTRMSPTWASKLAAAAGRARGGGDVPASTVPSSLPAVLGRGARLLSGPSAGARTGGG

SEQ ID NO: 790871 - protein, 113 aa, Homo sapiens
WFYPLIITITEVGVIPVEMQVIVLAEHTAPALNYTQVALHLLTNKVNQIRKVVQQNCMAAHIVTTAQGGTCALAGTQCCTFIPNNHHNITAALQGVSQEIKVIEHLTEDPLQR

SEQ ID NO: 790872 - protein, 135 aa, Homo sapiens
QDPSSLAFSFLICPQPQNPGRRLPQWLVHSCRPCEHIYFLVGRAREPLVESSPRVQEPHSPALGPPGREKTKVMLLNLDARREQLWGKACLEPRKTCLPGAIPHTSCRQGQESHRLHCSCNLACGRKAQNVPQRS

SEQ ID NO: 790873 - protein, 132 aa, Homo sapiens
YVKIVPASSLPSTMIGSFLRPSQQQKPIQSDSSPAIPQWLGDSHFKSVEFYPEGGCVDSDYILSSMPIWVRPCDEWSSVEYEQKCYVSEEDMPSPSFLFPYPLVCVGFQGVLGRGLGHNFKRHSAKYHNPKC

SEQ ID NO: 790874 - protein, 85 aa, Homo sapiens
YVKIVPASSLPSTMIGSFLRPSQQQKPIQSDSSPAIPQWLGDSHFKSVEFYPEGGCVDSDYILSSMHGLRPSLLTLPGCGCARGE

SEQ ID NO: 790875 - protein, 98 aa, Homo sapiens
VSPCVPVVPRGIGGPGSGRSRGPAALLPCAEDVAPRYPCGSWCPSEMRAHWRPTCLGDTGGAAPRFVRPVPAVPSAGPRGWAALCICIWIPTFVLLIH

SEQ ID NO: 790876 - protein, 67 aa, Homo sapiens
MWSRDDHTCGIIRENTMARHPRTAGSFPAFKTEMQPSADTQQPTPPGPNHRGQRHAGPSGPMVPFSA

SEQ ID NO: 790877 - protein, 70 aa, Homo sapiens
RSEDSNLSNFTPVSATNITLHHNRGHQYLSQFSSILQVQSLASSSTGKERAFGEEITSGISPSVVFSQRN

SEQ ID NO: 790878 - protein, 255 aa, Homo sapiens
SPPAVNGQANPPGLLALLDEECWFPKATDKSFVEKVAQEQGGHPKFQRPRHLRDQADFSVLHYAGKVDYKANEWLMKNMDPLNDNVAALLHQSTDRLTAEIWKDVEGIVGLEQVSSLGDGPPGGRPRRGMFRTVGQLYKESLSRLMATLSNTNPSFVRCIVPNHEKRAGKLEPRLVLDQLRCNGVLEGIRICRQGFPNRILFQEFRQRYEILTPNAIPKGFMDGKQACEKMIQALTGPHNQPSSRDPLERPQHQQ

SEQ ID NO: 790879 - protein, 196 aa, Homo sapiens
SPPAVNGQANPPGLLALLDEECWFPKATDKSFVEKVAQEQGGHPKFQRPRHLRDQADFSVLHYAGKVDYKANEWLMKNMDPLNDNVAALLHQSTDRLTAEIWKDVEGIVGLEQVSSLGDGPPGGRPRRGMFRTVGQLYKESLSRLMATLSNTNPSFVRCIVPNHEKRAGKLEPRLVLDQLRCNGVLGNGARPERRP

SEQ ID NO: 790880 - protein, 216 aa, Homo sapiens
QHQAVAGWVLLCAVISVGVGKLAVSRPRCEAETGRREVSGPGWVDGDLLACTVSSLVKWGLHSPHLDRHVGTEVIDSQRGGASRSVPGGPWPGGGRHFPFSLRGFIDLVLQVVWPEGRCGLQSSSLGQVQGSGVLSCHWRRASGPPQQLPPAQPQRGCVPGSPAPGDTISTEVASLNQGLPREGLRLGCGITPSLGSRQGWPGTVAHASDLSPLRG

SEQ ID NO: 790881 - protein, 110 aa, Homo sapiens [sequence omitted]

SEQ ID NO: 790882 - protein, 151 aa, Homo sapiens
QKYRPFLCLLLHAAGVLLHVSVLLGPALSALLRAHTPLHMAALLLLPWLMLLTGRVSLAQFALAFVTDTCVAGALLCGAGLLFHGMLLLRGQTTWEWARGQHSYDLGPCHNLQAALGPRWALVWLWPFLASPLPGDGITFQTTADVGHTAS

SEQ ID NO: 790883 - protein, 151 aa, Homo sapiens; identical to SEQ ID NO: 790882

SEQ ID NO: 790884 - protein, 126 aa, Homo sapiens
SLTSCLFHFLAAGRRCLLLCPERRKSGCLARGLSKGKPGQWSHPAHSVRGPPRTTWLRHPSRGGDWPLHPHGKHANRPPPITASCFLDGINCLAFGQDYFCTKQDCYHLIENNYPMQIEFNLSSWK

SEQ ID NO: 790885 - protein, 121 aa, Homo sapiens [sequence omitted]

SEQ ID NO: 790886 - protein, 121 aa, Homo sapiens [sequence omitted]

SEQ ID NO: 790887 - protein, 111 aa, Homo sapiens
MLVCEKSNFEQDKPEARFSGRRGATIARSQVREAQFDELLNQMRHRSHEEILKFHLRKAKDFLKNMKSRSADEMPKDRKGWPEIYNYGHRQPTQVPSSLVSKLRTKVLPLT

SEQ ID NO: 790888 - protein, 67 aa, Homo sapiens
LLIFATRWRSYHMLSACSFPACAQGGFGGVGYAVCPLQIPGCPTSRNLAMQGKAHILSPASLGSNAV

SEQ ID NO: 790889 - protein, 132 aa, Homo sapiens [sequence omitted]

SEQ ID NO: 790890 - protein, 285 aa, Homo sapiens
MWEVRFEAILVQPKVQVGGCGWGAWALGPAPCAAEAVARRIQCPAILAALATLLGAVLSFTCIPASTKGAKTDAQAPLPGGPRASVFDLKAIASLLRLPDVPRIFLVKVASNCPTGLFMVMFSIISMDFFQLEAAQAGYLMSFFGLLQMVTQGLVIGQLSSHFSEEVLLRASVLVFIVVGLAMAWMSSVFHFCLLVPGLVFSLCTLNVVTDSMLIKAVSTSDTGTMLGLCASVQPLLRTLGPTVGGLLYRSFGVPVFGHVQVAINTLVLLVLWRKPMPQRKDKVR

SEQ ID NO: 790891 - protein, 326 aa, Homo sapiens
MQGARALRDQGRSPGRMSALGRSSVILLTYVLAATELTCLFMQFSIVPYLSRKLGLDSIAFGYLQTTFGVLQLLGGPVFGRIQCPAILAALATLLGAVLSFTCIPASTKGAKTDAQAPLPGGPRASVFDLKAIASLLRLPDVPRIFLVKVASNCPTGLFMVMFSIISMDFFQLEAAQAGYLMSFFGLLQMVTQGLVIGQLSSHFSEEVLLRASVLVFIVVGLAMAWMSSVFHFCLLVPGLVFSLCTLNVVTDSMLIKAVSTSDTGTMLGLCASVQPLLRTLGPTVGGLLYRSFGVPVFGHVQVAINTLVLLVLWRKPMPQRKDKVR

SEQ ID NO: 790892 - protein, 83 aa, Homo sapiens
MSALGRSSVILLTYVLAATELTCLFMQFSIVPYLSRKLGLDSIAFGYLQTTFGVLQLLGGPVFGRFADQRGARAALTLSFLAA

SEQ ID NO: 790893 - protein, 873 aa, Homo sapiens
AGRAPGCLSNPSAFCSWTVAAAGSMMEPPKPEPELQRFYHRLLRPLSLFPTRTTSPEPQKRPPQEGRILQSFPLAKLTVASLCSQVAKLLAGSGIAAGVPPEARLRLIKVILDELKCSWREPPAELSLSHKNNQKLRKRLEAYVLLSSEQLFLRYLHLLVTMSTPRGVFTESATLTRLAASLARDCTLFLTSPNVYRGLLADFQALLRAEQASGDVDKLHPVCPAGTFKLCPIPWPHSTGFAQVQCSNLNLNYLIQLSRPPEFLNEPGRMDPVKELKSIPRLKRKKPFHWLPSIGKKREIDISSSQMVSLPSYPVAPTSRASPSPFCPELRRGQSMPSLREGWRLADELGLPPLPSRPLTPLVLATESKPELTGLIVAEDLKQLIKKMKLEGTRYPPLDSGLPPLLGVVTRHPAAGHRLEELEKMLRNLQEEEASGQWDPQPPKSFPLHPQPVTITLKLRNEVVVQAAAVRVSDRNFLDSFHIEGAGALYNHLAGELDPKAIEKMDIDNFVGSTTREVYKELMSHVSSDHLHFDQGPLVEPAADKDWSTFLSSAFLRQEKQPQIINPELVGLYSQRANTLQSNTKKMPSLPSLQATKSWEKWSNKASLMNSWKTTLSVDDYFKYLTNHETDFLHVIFQMHEEEVPVEIVAPARESLEIQHPPPLLEDEEPDFVPGEWDWNTVLEHRLGAGKTPHLGEPHKILSLQKHLEQLWSVLEVPDKDQVDMTIKYSSKARLRQLPSLVNAWERALKPIQLREALLARLEWFEGQASNPNRFFKKTNLSSSHFLEENQVRSHLHRKLNLMESSLVSLLEEIELIFGEPVIFKGRPYLDKMKSDKVEMLYWLQQQRRVRHLVSALKDPHQSTLFRSSAASL

SEQ ID NO: 790894 - protein, 278 aa, Homo sapiens
  misc_feature (262)..(262): Xaa can be any naturally occurring amino acid
  misc_feature (268)..(268): Xaa can be any naturally occurring amino acid
AGRAPGCLSNPSAFCSWTVAAAGSMMEPPKPEPELQRFYHRLLRPLSLFPTRTTSPEPQKRPPQEGRILQSFPLAKLTVASLCSQVAKLLAGSGIAAGVPPEARLRLIKVILDELKCSWREPPAELSLSHKNNQKLRKRLEAYVLLSSEQLFLRYLHLLVTMSTPRGVFTESATLTRLAASLARDCTLFLTSPNVYRGLLADFQALLRAEQASGDVDKLHPVCPAGTFKLCPIPWPHSTGFAQVQCSNLNLNYYQLAHKFYXQKMIMXMIILVREKLH

SEQ ID NO: 790895 - protein, 68 aa, Homo sapiens
ARSSPLTEFPRLDTPPARITMIQTLSVTDSLCIWLLLLSIMLSSFLLPSIPSCAYTTICLFLLLLLGI

SEQ ID NO: 790896 - protein, 104 aa, Homo sapiens
EKQKSQSTTFTHFPIYFVELTPETRSDWALLSFRMIYHSPYHSPSSRWRRKLSFFPAVPSFRHLVYRTPSPPFLSPMFWVALCPMLPKLILVALDAPLFLSNMF

SEQ ID NO: 790897 - protein, 86 aa, Homo sapiens
IPSSPTPAWGSPPCQKLERGKTQPTWEGLYRVLLTTEMTVGKGPIPGGILDLHSRINAFQINIQKGLICLFLLPVAAQGRLIINIR

SEQ ID NO: 790898 - protein, 103 aa, Homo sapiens
LLGLGNCRGSCPQSVCEDGTWWRTWEVATGNGRLIVKCRDLELFYHSLPTGWKSYEMTPARGVPTPSCDIGHFSSNTSLPTPLPIYKLKEGGPSRGRERATHS

SEQ ID NO: 790899 - protein, 146 aa, Homo sapiens [sequence omitted]

SEQ ID NO: 790900 - protein, 85 aa, Homo sapiens
  misc_feature (10)..(10): Xaa can be any naturally occurring amino acid
  misc_feature (27)..(27): Xaa can be any naturally occurring amino acid
CPGPGEGSQXRRRNVPESGSGEPFSFXHPPSAGALNRPGPLTMHLPSKKGPHACQGREPRPQGHSSLEGIPGTLNQHPAWFQQRH

SEQ ID NO: 790901 - protein, 100 aa, Homo sapiens
GRLSKGKQRTVCLFPPPTTTRAGGGNRPRGPDGPGAARRRGTPTAPPKVPLRMRRSGRRRPRQTARRHSGPVSVATGWWEGPGGAGALAAVPRGHVAMAT

SEQ ID NO: 790902 - protein, 42 aa, Homo sapiens
NWKLNRSVVILQHIENKDRRYHCYGPKPGLGIVCCQELELSR

SEQ ID NO: 790903 - protein, 73 aa, Homo sapiens
KKVTLSREMARAVGQAQTWALRSSCGVSIHLLQAQAWVGFILPGDRGGRCALLSSLAEVTRAELHFCGRRKSH

SEQ ID NO: 790904 - protein, 100 aa, Homo sapiens
CFVGLVVTARFSKLVSKSLASEPALPSQLLDPPGAQQTPSPSSDGERRRAWLSQAPIRSQGSPACLPTNPALPGLKNTEKGARLHLHPWHSGARSQGVLW

SEQ ID NO: 790905 - protein, 246 aa, Homo sapiens
HALIIYDDLSKQAVAYRQMSLLLRRPPGREAYPGDVFYLHSRLLERAAKMNDAFGGGSLTALPVIETQAGDVSAYIPTNVISITDGQIFLETELFYKGIRPAINVGLSVSRVGSAAQTRAMKQVAGTMKLELAQYREVAAFAQFGSDLDAATQQLLSRGVRLTELLKQGQYSPMAIEEQVAVIYVGVRRYLDKLEPSKVTKFENAFLSRVVSQHQALLGTIRADGKISEEPDAKLKEIVNKLLGWI

SEQ ID NO: 790906 - protein, 90 aa, Homo sapiens
IPVEGPTPPQDPAGAVDKDALRPRLFKPALLGGLELRSSQSRAAAGAFCRLSVDLELTASYDLEVDSEDRTVHLDIYSPFSHSLCLPWSR

SEQ ID NO: 790907 - protein, 96 aa, Homo sapiens
MHWRSHVRGAFGSRETAREPQWEPSGDPEDRIRGTARYLPTPLGHHSENQNQRYWGFPTGQERVLWIPLVRRAQPSDEESTPATQEEAQAQAGVAA

SEQ ID NO: 790908 - protein, 102 aa, Homo sapiens
RQPVSKAENLSQVTRLPGEKESGLTVPWLSHRAAVAFHLFHRLCRFSRLSLYVPVGVLGAKVHNVTLHTLLCLSRWDLQVSPASYLPLFPVSRVFAIYSFLQ

SEQ ID NO: 790909 - protein, 35 aa, Homo sapiens
MLVADPSTATQVSFHWSLSEQHSCHRVPQPMLRPH

SEQ ID NO: 790910 - protein, 481 aa, Homo sapiens
MAASWSLLVTLRPLAQSPLRGRCVGCGAWAAALAPLATAPGKPFWKAYTVQTSESMTPTATSETYLKALAVCHGPLDHYDFLIKAHELKDDEHQRRVIQCLQKLHEDLKGYNIEAEGLFSKLFSRSKPPRGLYVYGDVGTGKTMVMDMFYAYVEMKRKKRVHFHGFMLDVHKRIHRLKQSLPKRKPGFMAKSYDPIAPIAEEISEEACLLCFDEFQVTDIADAMILKQLFENLFKNGVVVVATSNRPPEDLYKNGLQRANFVPFIAVLKEYCNTVQLDSGIDYRKRELPAAGKLYYLTSEADVEAVMDKLFDELAQKQNDLTRPRILKVQGRELRLNKACGTVADCTFEELCERPLGASDYLELSKNFDTIFLRNIPQFTLANRTQGRRFITLIDNFYDLKVRIICSASTPISSLFLHQHHDSELEQSRILMDDLGLSQDSAEGLSMFTGEEEIFAFQRTISRLTEMQTEQYWNEGDRTKK

SEQ ID NO: 790911 - protein, 448 aa, Homo sapiens
MCATPPSLNFKKLAYTVQTSESMTPTATSETYLKALAVCHGPLDHYDFLIKAHELKDDEHQRRVIQCLQKLHEDLKGYNIEAEGLFSKLFSRSKPPRGLYVYGDVGTGKTMVMDMFYAYVEMKRKKRVHFHGFMLDVHKRIHRLKQSLPKRKPGFMAKSYDPIAPIAEEISEEACLLCFDEFQVTDIADAMILKQLFENLFKNGVVVVATSNRPPEDLYKNGLQRANFVPFIAVLKEYCNTVQLDSGIDYRKRELPAAGKLYYLTSEADVEAVMDKLFDELAQKQNDLTRPRILKVQGRELRLNKACGTVADCTFEELCERPLGASDYLELSKNFDTIFLRNIPQFTLANRTQGRRFITLIDNFYDLKVRIICSASTPISSLFLHQHHDSELEQSRILMDDLGLSQDSAEGLSMFTGEEEIFAFQRTISRLTEMQTEQYWNEGDRTKK

SEQ ID NO: 790912 - protein, 335 aa, Homo sapiens
MAASWSLLVTLRPLAQSPLRGRCVGCGAWAAALAPLATAPGKPFWKGIHRLKQSLPKRKPGFMAKSYDPIAPIAEEISEEACLLCFDEFQVTDIADAMILKQLFENLFKNGVVVVATSTGHRKEYCNTVQLDSGIDYRKRELPAAGKLYYLTSEADVEAVMDKLFDELAQKQNDLTRPRILKVQGRELRLNKACGTVADCTFEELCERPLGASDYLELSKNFDTIFLRNIPQFTLANRTQGRRFITLIDNFYDLKVRIICSASTPISSLFLHQHHDSELEQSRILMDDLGLSQDSAEGLSMFTGEEEIFAFQRTISRLTEMQTEQYWNEGDRTKK

SEQ ID NO: 790913 - protein, 209 aa, Homo sapiens
MCATPPSLNFKKLAYTVQTSESMTPTATSETYLKALAVCHGPLDHYDFLIKAHELKDDEHQRRVIQCLQKLHEDLKGYNIEAEGLFSKLFSRSKPPRGLYVYGDVGTGKTMVMDMFYAYVEMKRKKRVHFHGFMLDVHKRIHRLKQSLPKRKPGFMAKSYDPIAPIAEEISEEACLLCFDEFQGSWNIGWMAMDSGNRLFGKSGSKTGV

SEQ ID NO: 790914 - protein, 257 aa, Homo sapiens
TSQDTSLETGQGYEDEQDGWNSSSKTTRVNENITNQGNQIVSLIIIQEENGPRPEEGGVSSDNPYNSKRAELVTARSQEGSINGITFQGVPMVMGAGCISQPEQSSPESALTHQSNEGNSTCEVHQKGSHGVQKSYKCEECPKVFKYLCHLLAHQRRHRNERPFVCPECQKGFFQISDLRVHQIIHTGKKPFTCSMCKKSFSHKTNLRSHERIHTGEKPYTCPFCKTSYRQSSTYHRHMRTHEKITLPSVPSTPEAS

SEQ ID NO: 790915 - protein, 45 aa, Homo sapiens
LSLISLEKAATGTRAAHVHFVSNYFLGNQWINGSFFLFWETESGR

SEQ ID NO: 790916 - protein, 117 aa, Homo sapiens
MSEIPSTIVSKNMTNDKNSLESMNISSSSSTEENPKKQARKNEEHGPDPSANPFHLSGDVDFFLLRDQERNKALSVSIQDRRQHLRELPCSHCFLEWPHCPSQRSTFLRSFSFQNSQ

SEQ ID NO: 790917 - protein, 119 aa, Homo sapiens
VKLCTGRTLTNHPHYEDSSLRERTRAVYQIYAKRAPEEVHALLRSFGTDYVILEDSICYERRHRRGCRLRDLLDIANGHMMDGPGENDPDLKPADHPRFCEEIKRNLPPYVAYFTRVFQ

SEQ ID NO: 790918 - protein, 283 aa, Homo sapiens
KNENGAPEDEENFEEAIKNVNTALNTTQIPSSIEDIFNDDRCIKYHQTDSIILDFSSALKEFVAKEGQGNLPVGGTIPDMIADSRRNILNSQNVYREKAKKDAAAVGNHVAKLLQSIGQAPESISEKELKLLCSNSAFLRVVRCRSLAEEYGLDTINKDEIISSMDNPDNEIVLYLMLRAVDRFHKQQGRYPGVSNYQVEEDIGKLKSCLTGFLQEYGLSVMVKDDYVHEFCRYGAAEPHTIAAFLGGAAAQEVIKIITKQFVIFNNTYIYSGMSQTSATFQL

SEQ ID NO: 790919 - protein, 64 aa, Homo sapiens
MPSHNVVTRPAHSLSVPAYCQALKRMKRNCTFLRRRCTSVMMGCRNTRYHSSCGTPQPLTARGR

SEQ ID NO: 790920 - protein, 107 aa, Homo sapiens
LQGPPGLPGRISPGVPLTPLATCHASSAPGIWNLELQRLEGPRTLALLRPACSCHTSSKVPSSRKSSLTTANAHTYAHIHACTWDKYVFFLAWSLCTLSFPALSTNN

SEQ ID NO: 790921 - protein, 71 aa, Homo sapiens
MKLSHEKPYKRSTKPKAGPLKKMNKIDRPLGRLISKREKIQGQAQWLTPVIPELWEAKMGRSPQVGTSRPA

SEQ ID NO: 790922 - protein, 102 aa, Homo sapiens
MLQCHSFYRKDVQVEHPKSLNPKYSQIENFLSADMALKRKCLLSISDLDFWIWDAQPVGIMQTLQNLKKIPNPGCFWSQAFQIRDTQPILPLGGRYYITIRQ

SEQ ID NO: 790923 - protein, 356 aa, Homo sapiens
SHNFARVSWLSAAPIHCPRASIHLSGRLSSERGSRPGAAATRGTEARRGAKSAADPCGPGQGTVAAAMQSCARAWGLRLGRGVGGGRRLAGGSGPCWAPRSRDSSSGGGDSAAAGASRLLERLLPRHDDFARRHIGPGDKDQREMLQTLGLASIDELIEKTVPANIRLKRPLKMEDPVCENEILATLHAISSKNQIWRSYIGMGYYNCSVPQTILRNLLENSGWITQYTPYQPEVSQGRLESLLNYQTMVCDITGLDMANASLLDEGTAAAEALQLCYRHNKRRKFLVDPRCHPQTIAVVQTRAKYTGVLTELKLPCEMDFSGKDVSGVLFQYPDTEGKVEDFTELVERAHQSGVG

SEQ ID NO: 790924 - protein, 212 aa, Homo sapiens
MGGGTGPPQRASVLLRGRSSPVPAASGAMGTGLRSQSLREPRPSYGKLQEPWGRPQEGQLRRALSLRQGQEKSRSQGLERGTEGPDATAQERVPGSLGDTEQLIQAQLKRQPVVAEAVPTGKKKVGELCRHLPQRDSESAGLPVAHTGHHQLKMLEAIVAPLLCLDQPTVSADLPLHSSLDFGWVALGGFCHQLTGVATWLPLLALALPLQH

SEQ ID NO: 790925 - protein, 187 aa, Homo sapiens
MIQKQNLIYAISVCLSVPMGLAQPLEAQPRVRQGTGTARWHRVTGCGPVAEHAVVLSLILFSFVLFFLFFLFLTPASFAFYLTKAKTIARWLVGQPGREDPGLGFSNLRPFLQPSPPPAPPSISCRDPRRWSHSFTIAPNPGILGGLHSHHHTLIPCFLPKSHLSSLPRRYRGRAQTTTAGHDIALK

SEQ ID NO: 790926 - protein, 43 aa, Homo sapiens
MRINLAWERNTIESKKNGNHEYRVLTEDIQGYAKRSPQDNSLG

SEQ ID NO: 790927 - protein, 61 aa, Homo sapiens
DGPRHRARSGLGFTVAGAHISCTLTAMLMCPEGRSLPLQFPDIGTCCPYVWPLMHLLLLEL

SEQ ID NO: 790928 - protein, 130 aa, Homo sapiens
SLSVGSCVIIKGTLIDSSINEPQLQVDFYTEMNEDSEIAFHLRVHLGRRVVMNSREFGIWMLEENLHYVPFEDGKPFDLRIYVCHNEYEVKVNGEYIYAFVHRIPPSYVKMIQVWRDVSLDSVLVNNGRR

SEQ ID NO: 790929 - protein, 108 aa, Homo sapiens
MSNPTCISVFNHLESRRAWAAKQKDSEGIFSPASSQVSGLQVNTYAEDLTLFNSLQRHSRKVQCRKEKREREQKGGREELVEGREGERGKEGRDGGRGRWGRESLLPR

SEQ ID NO: 790930 - protein, 196 aa, Homo sapiens
EQSGRGLLPPVAPSWLDLAGLGVMPDTFNSRSPSVEGSLWAVGTESQGRDWRHLPTITSELSGAPRCHTVPCAGSTALQEPGEPQGPPASPSCPEEALAATWEQPWASEVFGPERMPPSGAARSFQEVTEPAVVAVDRQAIFPDTWDSHGGTWPTAGEAKARAREAGKQLPCLSYHGAARCKDDREGKCGQANPGT

SEQ ID NO: 790931 - protein, 209 aa, Homo sapiens
SGTAPASLACTVGSLAPVASCLLRARLPLTEAAMAAAGRGREQDSARFVYVTRFGSHQCSGVLQLGGRGAQGLWGQGPGAGCRQEKPREAMAVAGVQGGSELPLGSQLRVPTTPGVEAAASASSQLRASRVQSGTRQSARAGLIQKDAAKKYDFPIPLNEASKIMKKKKKVLVWNRVYKVISRMLEENEKYRHRLKCQRLSSESSNYTR

SEQ ID NO: 790932 - protein, 135 aa, Homo sapiens
GAASGTPDGSGRGRRRRRRGRGAALRRGSRGLLGRPAPPAPHVGTEAEGEGKAAGKGRAQWAQWGRPGPGGEARGAGQEGPGLRKRLEGEGSIRMAGASLRIAFSRHLVSSVTGARSRELSSLRAWDGARWRGGR

SEQ ID NO: 790933 - protein, 139 aa, Homo sapiens
MGLAASGAKEKHPTNQGEEGSRPPHGRKLRSERQGWAGPVLGALQTPDQGRLSSPREGPVHGRSQPHRADCTGDAHEDSRPLRTQLSRHRSPSAKARVQIMQTEARLPWTPEPQTPSTKAKWTHLHQIHHKDGLRDSVS

SEQ ID NO: 790934 - protein, 114 aa, Homo sapiens
MNHSPRKCVPAETIASPAGRTQLPLPSSEHRLYKYLGLLVKYAIDAVFFKSLKVSFMSTLLKLISGVFRDFLCLATCAALLNAHYSSVCLGSYVTLVHFLPLLSGFTGLFPFQK

SEQ ID NO: 790935 - protein, 120 aa, Homo sapiens
NEWRAAATAAAGPAARAAPPPSLREEEASRRFVPTKPRSKQLENNCMSSGLGLSDSISKLPEERHIDTGEVRAFELQCHPRHPPPPPAPPPNGTLDNFSLSCDFCHFLRQLEPAPLKSIF

SEQ ID NO: 790936 - protein, 260 aa, Homo sapiens
AEKRDTPALSEGFRTEGKKLRRVVRLPARRGHFSWALPELSRDLCAPSGRLPRPGLGTTSGVGCKESLRLLPPASPPLGLGGSPPAPARSALPGTASCPETATMNKLYIGNLNESVTPADLEKVFAEHKISYSGQFLVKSGYAFVDCPDEHWAMKAIETFSGKVELQGKRLEIEHSVPKKQRSRKIQIRNIPPQLRWEVLDSLLAQYGTVENCEQVNTESETAVVNVTYSNREQTRHSLEEFLNCCFNTRHDGVQPGRLI

SEQ ID NO: 790937 - protein, 680 aa, Homo sapiens
AEKRDTPALSEGFRTEGKKLRRVVRLPARRGHFSWALPELSRDLCAPSGRLPRPGLGTTSGVGCKESLRLLPPASPPLGLGGSPPAPARSALPGTASCPETATMNKLYIGNLNESVTPADLEKVFAEHKISYSGQFLVKSGYAFVDCPDEHWAMKAIETFSGKVELQGKRLEIEHSVPKKQRSRKIQIRNIPPQLRWEVLDSLLAQYGTVENCEQVNTESETAVVNVTYSNREQTRQAIMKLNGHQLENHALKVSYIPDEQIAQGPENGRRGGFGSRGQPRQGSPVAAGAPAKQQQVDIPLRLLVPTQYVGAIIGKEGATIRNITKQTQSKIDVHRKENAGAAEKAISVHSTPEGCSSACKMILEIMHKEAKDTKTADEVPLKILAHNNFVGRLIGKEGRNLKKVEQDTETKITISSLQDLTLYNPERTITVKGAIENCCRAEQEIMKKVREAYENDVAAMSLQSHLIPGLNLAAVGLFPASSSAVPPPPSSVTGAAPYSSFMQAPEQEMVQVFIPAQAVGAIIGKKGQHIKQLSRFASASIKIAPPETPDSKVRMVIITGPPEAQFKAQGRIYGKLKEENFFGPKEEVKLETHIRVPASAAGRVIGKGGKTVNELQNLTAAEVVVPRDQTPDENDQVIVKIIGHFYASQMAQRKIRDILAQVKQQHQKGQSNQAQARRK

SEQ ID NO: 790938 - protein, 45 aa, Homo sapiens
KSKLLQVIKWQSWDSSCCRPDSKPILFTYSIVSREIRLLGLNYVK

SEQ ID NO: 790939 - protein, 45 aa, Homo sapiens
MLGCRMEACAAQMDSACTAVTPDCIWVASIHAHVAGTVRLPPGQT

SEQ ID NO: 790940 - protein, 100 aa, Homo sapiens
EEPSKMGISTVILEMCLLWGQVLSTGGWIPRTTDYASLIPSEVPLDPTVAEGSPFPSESTLESTVAEGSPISLESTLESTVAEGSLIPSESTLESTVAEG

SEQ ID NO: 790941 - protein, 101 aa, Homo sapiens
KPPDSFVIFCKVSSQLFIQEKDTLKSLTLCHSIERDMYYKIYNKIWKQRSYIYSFFLLRDEMLLCCLRCLELLGLSNPLTSAFQVAGTTGMSHCSQLIFAL

SEQ ID NO: 790942 - protein, 218 aa, Homo sapiens
MFISLSRNKCKGRVLANTKFCPWNQFHFMKLCCQSKQPLPVSRPDSVNYSSAAQPALSPLLSFLRLLGASASVTGLPFGMAVTHAHRWQSGKTPGLTPDALRTAAELANWVQLALKRIYAEQTAPWPPQVPAGAGISTHHSSEWNSGKGLCPPWLPGSTSLTVCGCRGGQFPHIGDLEVPSLQGDSAGHTSPGRGPGDITRDTPGRLLSAQLGFTVAF

SEQ ID NO: 790943 - protein, 110 aa, Homo sapiens
MGNGQVKMRIAKNYTPTNRIVVILSLRLQEKLYTGGRIFYHFGMLPKKWDTKGVNFRSLEVAKLEGDLWRHDLQFFLRSIKLKRKEKANSACAWILDLALIQTPLLECKP

SEQ ID NO: 790944 - protein, 62 aa, Homo sapiens
KLQPEITKSPYSSASELFKNHFRDTMITERYTKHGDGRVKTASLDFTSSQSSTALRSVTSNT

SEQ ID NO: 790945 - protein, 97 aa, Homo sapiens
ASAGDSSEGCLLTCLAVNATSQLGPHKGSWRHTAPGLSVWLGLPHSMEARSQEQEPEPAASCITSLPLSQRNQPATCAVLCFPACLPVFLPLSFLPS

SEQ ID NO: 790946 - protein, 141 aa, Homo sapiens
GLCCEMAEKQETRWGGGHPPEIEFQGHCLCSHRANTRPLFPGPCGRGASGCPFRQCGPQTRRTGLVLLASRPPATPFTRSLGPSLHPQCLPRPSQQGGWASPHVHGFESRRRTGCQDRGSALSARSGSAHPRGGGADVLPG

SEQ ID NO: 790947 - protein, 104 aa, Homo sapiens
MDCSPRSRISVRGYPQLPLRQIREWGRPSKPGSSAKMPPLSLACLAQVPAAPRSSPQVPHLRSAPADGAAASQGLRVRGRLRFRPGKRVSRVGARRTPYSGLRP

SEQ ID NO: 790948 - protein, 134 aa, Homo sapiens
FEFIPFHSSPFHSSTLHSIPLLSGPFNSTAFHRCPFHCIPFHSIPSHPIPSIPIPIPIPLYSIPFESILFHSIPFYSSTFHSIPFHSIPFHSIPFHSGSFHSVIILFHSSPFNAIPFHMSPFNSIPFESIPFHS

SEQ ID NO: 790949 - protein, 118 aa, Homo sapiens
VCSPMSSLVGYYVLILPMVIHPLEGSLTLWSWSSKYSKRRQAPVHKHSSSLCLRYMYLISTKANHIAKLRVGVGGSCPRVQIEKEEESVAIFVISHRWPGTLAPLRLKSPVECGDSRL

SEQ ID NO: 790950 - protein, 92 aa, Homo sapiens
LKLQNLMLCALQTVNGAEAGKESRGAHAGEDYKVRLLATPTCTCLFLPPGGTQPHPCIFSAFYVVSPKVYPKNAFFPLVTLIPGFSPFSGSL

SEQ ID NO: 790951 - protein, 157 aa, Homo sapiens
MPPLSWLAQWAHTGAVVWVFLPPVSQCSWWPCSGLSCHRLSPPGGQMGRWAALPARDTGLAQPTVSKERRVEGAALYRSHLGLMLCFAGITHVDIPCVLLFLPCWYSPRVAVPPVSLFPPCRCSPRVAVPPVSLFPPCRCSPRVAVPPVSLFPPCRC

SEQ ID NO: 790952 - protein, 128 aa, Homo sapiens
MNHSALMFQFYTAFLASRICFNAGMATALLENYLKDQKGPGEAYFLGFSSWTRKEWFHSASRRSWSLSLSASGSCLLCFGSEEVSDSFDTSGNLNQAVKPRPPCVKIKVVSLWLHQDVCVRLSQQGGE

SEQ ID NO: 790953 - protein, 32 aa, Homo sapiens
GKSFMYNYRLMRHKRVHTGERPYECNTCGKFF

SEQ ID NO: 790954 - protein, 105 aa, Homo sapiens
NPSDSRCIGEKYRLKIIGYPSRKEIYEVWVRPAVISLKLLIVEPLQDYRLFLSGCQAPLREAGELLNAQVYPAGGTGILLEALSGHALIPSISTVAIPSRYWSPL

SEQ ID NO: 790955 - protein, 79 aa, Homo sapiens
RPLPMPQFLTGLLGLHPTACFSSSPSSGQHWDDECHEPGHFTPLPCTAQWGVEAVALDACTRLPRFWPLPPPLAPNPQP

SEQ ID NO: 790956 - protein, 174 aa, Homo sapiens [sequence omitted]

SEQ ID NO: 790957 - protein, 69 aa, Homo sapiens
YKGNSKDVNLRISGIIHERLELNPIDKSPDQNPIMTDTPIPRNSQDITPVDNSMGQQYPSKAKFIQKDR

SEQ ID NO: 790958 - protein, 106 aa, Homo sapiens
FSLKHVIGASREGKVAKLFCHCARSKGMVSMLSFPQKGKNTSNWRPPTTGLEGTLRQQSEVMKSQTQDSGCLGCLLILPFLNRMPWARPQSHCCPCTRRLILISIV

SEQ ID NO: 790959 - protein, 133 aa, Homo sapiens [sequence omitted]

SEQ ID NO: 790960 - protein, 112 aa, Homo sapiens
WAAKQIIGNNPGAWQGNRCTMERTLPDTEDKSSEGTEQVTPRAAQRCVSCSHGSQSLCSNCPPAGLSPVPSAWAGVWPLAEPWRPALLPAPFQPGAARGRSIPGAGLSPVVG

SEQ ID NO: 790961 - protein, 133 aa, Homo sapiens [sequence omitted]

SEQ ID NO: 790962 - protein, 133 aa, Homo sapiens [sequence omitted]

SEQ ID NO: 790963 - protein, 75 aa, Homo sapiens
MKNEILCLKEDIIWWIYAPKRYLNPTSMLLDEHFKDLIGWVRWLMPIIPALQEAKAGRSLELQTSLGSIAKSCLY

SEQ ID NO: 790964 - protein, 57 aa, Homo sapiens
MSPLTKGRQAIFGCSTWIAEALNLDRGAPNPDRGAVSLGSSLSGEGWRGGHFFTLCA

SEQ ID NO: 790965 - protein, 304 aa, Homo sapiens
PPPPASGSNLRGSLTLWDLCSFALHNKSPCCSLFVSVSSLRAVTLTRKMESRSGIQAGVRCRDLGSLQPPPLALKQFSSLSLPSSWDYRRLPPRCGFLFEVSETTNPPAGTNSRHTLTVKLDGLAKIRTAREAPSECVCPPGTPGRRGKPEEKRRPGPPGTLGRMASPDFQARTGEKGAPRRLWTTGETKDTMELHGPHGAPWNLLGPGDLLATLGKDGPRGNHKGQRAPKESRKRRRDGPTGPQGPRVSMEYLDRRCNHGDTRPARANSGHRRAMEQEARGDERCGRCPGRRGTDPEARSPDG

SEQ ID NO: 790966 - protein, 143 aa, Homo sapiens
PPPPASGSNLRGSLTLWDLCSFALHNKSPCCSLFVSVSSLRAVTLTRKMESRSGIQAGVRCRDLGSLQPPPLALKQFSSLSLPSSWDYRRLPPRCGFLFEVSETTNPPAGTNSRHTLTVKLDGLAKIRTAREAPSECVCPPGK

SEQ ID NO: 790967 - protein, 117 aa, Homo sapiens
IYAPNTTAPGFIKQILLVLQRDIGNHTIIVDFNTPLMILERSSRQITNKDIWDLHLTIDKIELTCIYRKVHSTKAEYKSFSSMHDTYSKIDYMLSQKFSIISKKPKSYQPHSPTTAQ

SEQ ID NO: 790968 - protein, 278 aa, Homo sapiens
LSVALRLLAELTFLGGQALLYGFRVAPHFACAGPPCPHTVDCFVSRPTEKTVFVLFYFAVGLLSALLSVAELGHLLWKGRPRAGERDNRCNRAHEEAQKLLPPPPPPPPPPALPSRRPGPEPCAPPAYAHPAPASLRECGSGRGKASRPPAAEIWPSRGGHRLARTGRRGPDPATSARTAEAGSCFHQSCRGTCPGRRRVVGTARGRHRTCLVLPPSGCRQAPGAGQGWGQENELRQVLDATTQVERKETRTLRESGPEGENRAEGGEWLFYWGQKQL

SEQ ID NO: 790969 - protein, 69 aa, Homo sapiens
GSSCNDIARLSWLHLLEHKSFMCPIFLASPETPVLTAPPAKSLSSLWVHHAAATFSWPASPPWGSLHSR

SEQ ID NO: 790970 - protein, 119 aa, Homo sapiens
MISHSYSCLDPYFTEDQDLKLPLAIHCKVYFFSLRKLFFIFFRDWFSCTPPRLEYSDTIITNCSLNLLGSSAPLASTSQLLGRLRQENGVNPGGRACSERRSRHCTPAWATEQDSVSKT

SEQ ID NO: 790971 - protein, 67 aa, Homo sapiens
ASHQGASNRCKDWRTLRDEHVQEAPGLCTHRKDHVRTQREGGHPQAKEKGLKNKQICQHLDFELPAS

SEQ ID NO: 790972 - protein, 118 aa, Homo sapiens
REGGQSTVNAPEVWQIRPTLSARLGAPDLHWRETAKARGRRGRSLVPCSYCSRGVPAYPPGSAGAHLAPPGTDEIPRAPERARSSLCYTKSERERSPGGSEQRIHPACLREIKFNCDL

SEQ ID NO: 790973 - protein, 119 aa, Homo sapiens
AHRCCNRNRIEERSQTVKCSCFSGQVAGTTRAKPSCVDDLLLAAHCARRDPRAALRLLLPQPPSSCRDGGVRWSPACRGRSVRCSRTCRDGAAAVDTKSKPPRSHDSSWGSRPGQERLD

SEQ ID NO: 790974 - protein, 118 aa, Homo sapiens
LISLAFPHMYLSHNPLKHMQKTTDLIASLLIKGCQRCVQLSGYDPAILFLPLSEEQSHTLLVCDLDWQVAMTDFIGNISFHLPASKLLNFLQTVPVKFVSIVVSEPFTSCHHCLYRWL

SEQ ID NO: 790975 - protein, 67 aa, Homo sapiens
NPTAFSALRCGLDFHVNLKSVLKSRLPPRVYFGGNFTSLQQESFQPRNVVRFRIYSDLPSTPLNFLH

SEQ ID NO: 790976 - protein, 107 aa, Homo sapiens
MPSFQSTESPDKSTPEDECCNVQLLKNLRKCLSLNSHRRSPFTKVALSSAGARSTGGTCAMCRVIPLFPGAGGTCAVCRVIPLFPGAGGTCAVCHVIPLFPDTGGTC

SEQ ID NO: 790977 - protein, 113 aa, Homo sapiens
MPFRAWTAAVAAPGAMSPLATGGLTACAQAGSGSPRVRGSPRVRGQEGAHRVCTGRQRLTPCAWVTPCAWTGGGSPRVHEHRVLVEPVIHADLQVHAGLRHPDRHIDGHAHDP

SEQ ID NO: 790978 - protein, 122 aa, Homo sapiens
MLACAWLAPGHGYGVPQGIWRQERIMERGLYVSPVASGLDKAQRHLKDTSRAFQQRCHICLRIAAPGPHTQFTQEGSREALPGVVWWWYAGVGGNHSWRTNCAKTMEPAVSCPGSQASSVAF

SEQ ID NO: 790979 - protein, 101 aa, Homo sapiens
RWDGYPAGRRRSWASFAMQSTDLGNKESGKIWHRKPSPATRDGIIVNIIHNTSDYHPKVLRFLNVAFDGTGDCLIAGDHQGNIYVFDLHGNRYLAKYCHKC

SEQ ID NO: 790980 - protein, 189 aa, Homo sapiens
RWDGYPAGRRRSWASFAMQSTDLGNKESGKIWHRKPSPATRDGIIVNIIHNTSDYHPKVLRFLNVAFDGTGDCLIAGDHQGNIYVFDLHGNRFNLVQRTAQACTALAFNLRRKSEFLVALADYSIKCFDTVTKELVSWMRGHESSVFSISVHASGKYAITTSSDTAQLWDLDTFQRKRKLNIRQSVGIQ

SEQ ID NO: 790981 - protein, 67 aa, Homo sapiens
PQGTGCRKVVKGPKDACVASGSAGRKPESESENFSRFTFLRGRQTVFQSSCLIVPSHSVSVHPYSHT

SEQ ID NO: 790982 - protein, 111 aa, Homo sapiens
RTLPTPHPRHLIPKEEKSTSKAPASSLENYPLFSFLASPPGEWKPLAHSIEPDSNPDDPENLYGDRQGGREERAKSSLQGRWRLRKPRARRSRPPPAARPRRAAALAPGLA

SEQ ID NO: 790983 - protein, 145 aa, Homo sapiens
AARECLCTRLWPAHASCGVGRLGADRGVCGGGVRGIALGARVCVCVCECPRGCACTGLCLARGPEGNNARGAPPEGSWAAPRGTRDCRQPGAEVQLPPASRSRGPVWHFPPWSEAFSVSGATGAGPRGPTPQVLCLGFERSPRGG

SEQ ID NO: 790984 - protein, 610 aa, Homo sapiens
MHFQAFWLCLGLLFISINAEFMDDDVETEDFEENSEEIDVNESELSSEIKYKTPQPIGEVYFAETFDSGRLAGWVLSKAKKDDMDEEISIYDGRWEIEELKENQVPGDRGLVLKSRAKHHAISAVLAKPFIFADKPLIVQYEVNFQDGIDCGGAYIKLLADTDDLILENFYDKTSYIIMFGPDKCGEDYKLHFIFRHKHPKTGVFEEKHAKPPDVDLKKFFTDRKTHLYTLVMNPDDTFEVLVDQTVVNKGSLLEDVVPPIKPPKEIEDPNDKKPEEWDERAKIPDPSAVKPEDWDESEPAQIEDSSVVKPAGWLDDEPKFIPDPNAEKPDDWNEDTDGEWEAPQILNPACRIGCGEWKPPMIDNPKYKGVWRPPLVDNPNYQGIWSPRKIPNPDYFEDDHPFLLTSFSALGLELWSMTSDIYFDNFIICSEKEVADHWAADGWRWKIMIANANKPGVLKQLMAAAEGHPWLWLIYLVTAGVPIALITSFCWPRKVKKKHKDTEYKKTDICIPQTKGVLEQEEKEEKAALEKPMDLEEEKKQNDGEMLEKEEESEPEEKSEEEIEIIEGQEESNQSNKSGSEDEMKEADESTGSGDGPIKSVRKRRVRKD

SEQ ID NO: 790985 - protein, 610 aa, Homo sapiens; identical to SEQ ID NO: 790984

SEQ ID NO: 790986 - protein, 610 aa, Homo sapiens; identical to SEQ ID NO: 790984

SEQ ID NO: 790987 - protein, 162 aa, Homo sapiens
SLAYELRRIGALTAGPAPPGLLRFREVHSPAAAAPARCPLRPASRGRGDSAPGRGLRWLQLPMGKTGSRVSVHRGSQTLQDPEIVWDPHQSEEKKNRKRRDSPPLQAPSCRTLNRMMLKRIWRFMQVTSLRNFSIECTMPWVSRFPLKIPWLTLFFYHYLGR

SEQ ID NO: 790988 - protein, 43 aa, Homo sapiens
MSLVSLKCMKPGCARPPWARHQDFLRLCHRRVSSTLANKPPKM

SEQ ID NO: 790989 - protein, 157 aa, Homo sapiens
TSLLTPSLVMTTDTLGTSPEPTTSSPPNLSSTSHEILTTDEDTTAIEAMHPSTSTAATNVETTSSGHGSQSSVLADSEKTKATAPMDTTSTMGHTTVSTSMSVSSETTKIKRESTYSLTPGLRETSISQNASFSTDTSIVLSEVDAAANLVVVVGGR

SEQ ID NO: 790990 - protein, 121 aa, Homo sapiens
AIWRGLGESSERILPQGPPNPPPESYQRRTHVGALELLFKFVSLPFQATRCSAGKNFKWLKQRIWGRCHWVPFSCLLQFLQTSLHPRQLRFMQRFRSPWEEPEGCCLFLKSTLLAAVVMSK

SEQ ID NO: 790991 - protein, 47 aa, Homo sapiens
MVRSSTRMSPTWASKLAAAAGRARGGGDVPASTVPSSLPAVLGRGAR

SEQ ID NO: 790992 - protein, 237 aa, Homo sapiens
HEGFRSSAITNTGVFQHILCNFELWMNTADNLELSLFSHLLEILQSPREGPRNAEAAHQAQLIPKLIFLFNEPSLIPSKIPTIIGILACQLRGHFSTQDLLRIGLFVVYTLKPSSVNERQICMDGALDPSLPAGSQTSGKTIWLRNQLLEMLLSVISSPQLHLSSESKEEMFLKLGPDWFLLLLQGHLHASTTVLALKLLLYFLASPSLRTRFRDGLCAGSWVERSTEGVDIVMGEH

SEQ ID NO: 790993 - protein, 73 aa, Homo sapiens
EVGQDSVIQSLPQSRQVRSHHGQLALADVAELSWGRGLRAPTVDFSTWVGPLMARVPCSKQSFPRMSSQKRRY

SEQ ID NO: 790994 - protein, 123 aa, Homo sapiens
MVRNVDDLDFHLPSHAQDMLDGLQRLRSQPKLADVTLLVGGRELPCHRGLLALSSPYFHAMFAGDFAESFSARVELRDVEPAVVGQLVDFVYTGRLTITQGNVEALTRTAARLHFPSVQKVCG

SEQ ID NO: 790995 - protein, 160 aa, Homo sapiens
MECALLLACAFPAAGSGPPRGLAGLGRVAKALQLCCLCCASVAAALASDSSSGASGLNDDYVFVTPVEVDSAGSYISHDILHNGRKKRSAQNARSSLHYRFSAFGQELHLELKPSAILSSHFIVQVLGKDGASETQKPEVQQCFYQGFIRNDSSSSVAVS

SEQ ID NO: 790996 - protein, 129 aa, Homo sapiens
GVPLLGSMGWDKAGAGFLHPKCPGACVPSLLTVGPGQSARSKAGGLAPPPGANTRAGCVLRGARGLPLGTSRVQGSPRARPKPSPSAPGARARAHPPAPRPCARAGLGVGSPRARPPEFPRSGPGSGGR

SEQ ID NO: 790997 - protein, 112 aa, Homo sapiens
PHPPIPSLAPAPSTGPPRAGLTWGSSLRPAGCWGCWQFLRPAHVGATVCKGQARAGAVYPELHSLHGTSMSLKHLLPMEVTPACGLALLRLFAAKAPVPPARSAAHRPCPSP

SEQ ID NO: 790998 - protein, 155 aa, Homo sapiens
LHLGDQSSFHFFERNEHCLHTNNGRKILVFPKQPPQATQEPNSGEVRKIQEVGIAAQRQHRAALTRPQRQHRAALTRPQRQHGAALTRPQRQHRAALTRPQRQHRAALTRPQRQHRAALTRPQRQHRAALTRPQRQHRAALTRPQRQHRAALTRP

SEQ ID NO: 790999 - protein, 102 aa, Homo sapiens
MCFPMAHPIDGAPYPRLSSLRKPFKEGRLIVFLSPLIILPSSAPAATATATAAVEVGAVPSASSKWLLQASFRAGVPVSSASSCGFPPSKVTGFTHPFLPQP

SEQ ID NO: 791000 - protein, 602 aa, Homo sapiens
SWGWLSAGECERECAHAAGASLPSPRTLLRASEEPGNVNRLEVWHVAKMVSAKKVPAIALSAGVSFALLRFLCLAVCLNESPGQNQKEEKLCTENFTRILDSLLDGYDNRLRPGFGGPVTEVKTDIYVTSFGPVSDVEMEYTMDVFFRQTWIDKRLKYDGPIEILRLNNMMVTKVWTPDTFFRNGKKSVSHNMTAPNKLFRIMRNGTILYTMRLTISAECPMRLVDFPMDGHACPLKFGSYAYPKSEMIYTWTKGPEKSVEVPKESSSLVQYDLIGQTVSSETIKSITGEYIVMTVYFHLRRKMGYFMIQTYIPCIMTVILSQVSFWINKESVPARTVFGITTVLTMTTLSISARHSLPKVSYVTAMDWFIAVCFAFVFSALIEFAAVNYFTNIQMEKAKRKTSKPPQEVPAAPVQREKHPEAPLQDTNANLNMRKRTNALVHSESDVGNRTEVGNHSSKSSTVVQESSKGTPRSYLASSPNPFSRANAAETISAARALPSASPTSIRTGYMPRKASVGSASTRHVFGSRLQRIKTTVNTIGATGKLSATPPPSAPPPSGSGTSKIDKYARILFPVTFGAFNMVYWVVYLSKDTMEKSESLM

SEQ ID NO: 791001 - protein, 258 aa, Homo sapiens
SWGWLSAGECERECAHAAGASLPSPRTLLRASEEPGNVNRLEVWHVAKMVSAKKVPAIALSAGVSFALLRFLCLAVCLNESPGQNQKEEKLCTENFTRILDSLLDGYDNRLRPGFGGPVTEVKTDIYVTSFGPVSDVEMEYTMDVFFRQTWIDKRLKYDGPIEILRLNNMMVTKVWTPDTFFRNGKKSVSHNMTAPNKLFRIMRNGTILYTMRLTISAECPMRLVDFPMDGHACPLKFGSCLSKSEMTILDLIGKPFK

SEQ ID NO: 791002 - protein, 542 aa, Homo sapiens
RLVSRPVTVGMLNDAPNLNESPGQNQKEEKLCTENFTRILDSLLDGYDNRLRPGFGGPVTEVKTDIYVTSFGPVSDVEMEYTMDVFFRQTWIDKRLKYDGPIEILRLNNMMVTKVWTPDTFFRNGKKSVSHNMTAPNKLFRIMRNGTILYTMRLTISAECPMRLVDFPMDGHACPLKFGSYAYPKSEMIYTWTKGPEKSVEVPKESSSLVQYDLIGQTVSSETIKSITGEYIVMTVYFHLRRKMGYFMIQTYIPCIMTVILSQVSFWINKESVPARTVFGITTVLTMTTLSISARHSLPKVSYVTAMDWFIAVCFAFVFSALIEFAAVNYFTNIQMEKAKRKTSKPPQEVPAAPVQREKHPEAPLQDTNANLNMRKRTNALVHSESDVGNRTEVGNHSSKSSTVVQESSKGTPRSYLASSPNPFSRANAAETISAARALPSASPTSIRTGYMPRKASVGSASTRHVFGSRLQRIKTTVNTIGATGKLSATPPPSAPPPSGSGTSKIDKYARILFPVTFGAFNMVYWVVYLSKDTMEKSESLM

SEQ ID NO: 791003 - protein, 151 aa, Homo sapiens
MRKRTNALVHSESDVGNRTEVGNHSSKSSTVVQESSKGTPRSYLASSPNPFSRANAAETISAARALPSASPTSIRTGYMPRKASVGSASTRHVFGSRLQRIKTTVNTIGATGKLSATPPPSAPPPSGSGTSKIDKYARILFPVTFGAFNMV

SEQ ID NO: 791004 - protein, 68 aa, Homo sapiens
AAQGKESSTCSQDTSEEAVCVLQKNLGINGRGAARQRDQPVQRLRGSKVHVRYPLAKKLTFQKGVLRQ

SEQ ID NO: 791005 - protein, 73 aa, Homo sapiens
LAGDERLLPPGRKDIGAPQARSPPQFLGPFLLPLPARADDTENRILRPTQEQLGEEHQKFNAPWRCIPRALPA

SEQ ID NO: 791006 - protein, 73 aa, Homo sapiens; identical to SEQ ID NO: 791005

SEQ ID NO: 791007 - protein, 205 aa, Homo sapiens
PGSAPRRRGGREGWRVEPETRDPVPAHLPVPRSFGRRHWQEMKGCCRPVGRTSAPPRPGPRPSSSGLSCCPCLRGPTTRRTGSCAQPRSPPSFRGPGLDPAEPQMCEQERQSPDARPAGSGREMVPSFCPEGEPCTEGPLRAWHCLPNSPSASLPGWAMRGLDRIALVPSWQWVWVGSWGQGFPECRQLGLHLPRPPTQAQISRA

SEQ ID NO: 791008 - protein, 110 aa, Homo sapiens
SSHCLLLSDLTEVRVIKAWGTGTGLRGVLSPSVFQPRGDSACLGRWKGFLRAHHLPPPCACPLLGPGFSSDYSPCCFPHSGEHRALPRGLNLAPQGSGITQKTGDSQGGS

SEQ ID NO: 791009 - protein, 230 aa, Homo sapiens
GRVFPHPQDCAQHLMNGDTLSGVYPIFLNGELSQKLQVYCDMTTDGGGWIVFQRRQNGQTDFFRKWADYRVGFGNVEDEFWLGLDNIHRITSQGRYELRVDMRDGQEAAFASYDRFSVEDSRNLYKLRIGSYNGTAGDSLSYHQGRPFSTEDRDNDVAVTNCAMSYKGAWWYKNCHRTNLNGKYGESRHSQGINWYHWKGHEFSIPFVEMKMRPYNHRLMAGRKRQSLQF

SEQ ID NO: 791010 - protein, 108 aa, Homo sapiens
AVLNFLLVYSLWAEMPLASPTLPCAHCSAPLASALGSPPATLSTFPSHQQPGLCPTRLVLKGGLLTGIVSRQPPITRAQVVFLRNPNFYVFLRPPLSLSPKLECGGAI

SEQ ID NO: 791011 - protein, 106 aa, Homo sapiens
ISEDDQRSLLSPFWFWWVLADFFTATCFISKVFMTCILCPHPISSCKLECLNLLGMQPSRSHSALFYLAPFKMELLWFTCLGQNHCTWDIHHVKDLSFLYARPLEF

SEQ ID NO: 791012 - protein, 103 aa, Homo sapiens
MLCRFRAVEAVHGPHRNAPKPGHRKHRRTDPDPGPGPARLQGRAPHIDKDTGAAPRRQEGCEELPLYSEPDAAYGTGPPRLGLAGCRAARHAWVHPAGAGCGR

SEQ ID NO: 791013 - protein, 74 aa, Homo sapiens
SPDISHLSLCDQPTWRGERTRSCFSGPPASGHVGDTWAPVDLSELLGEDLNGENETQASAPNSYTRGAEAMPLA

SEQ ID NO: 791014 - protein, 90 aa, Homo sapiens
ILKEGLQGACPGSCASEGWKEVAFYSGERWRVGAFASQNTSPSQLPMHLPNPAIKLLTHPAPTGVYTTDNARVQIPTPDSPLTGCVTLEK

SEQ ID NO: 791015 - protein, 192 aa, Homo sapiens
ARGWPSSASPPLPLQVPCTQASVHAARDSPRFPSTPSPASQSRRFCSWLPAHAWVPSSATSLQGPMPCALPVPVCCGATTPIAVNSKGSPREPGARDGILLCCPGWSRTSGLKRSFCLSLLNCWDYRCEPPHPARFLIFNKDSLWLCEEKVPVLNGGRLGPPRQEMVAAVAMLGAQAGTGRNSRGTPGLGLE

SEQ ID NO: 791016 - protein, 478 aa, Homo sapiens
MAASQLAALEGVDSGPRVPGASPGFLYSEGQRLALEALLSKGAEAFQTCVQREELWPFLSADEVQGLAAAAEDWTVAKQEPSGMAEGATTADVDAGSLSYWPGQSEQPAPVLRLGWPVDSAWKGITRAQLYTQPPGEGQPPLKELVRLEIQAAHKLVAVVMDVFTDPDLLLDLVDAATRRWVPVYLLLDRQQLPAFLELAQQLGVNPWNTENVDVRVVRGCSFQSRWRRQVSGTVREKFVLLDGERVISGSYSFTWSDARLHRGLVTLLTGEIVDAFSLEFRTLYAASCPLPPAPPQKPSVIGGLQRGRSLHRVSRRRSVAPASPPPPDGPLAHRLAACRVSPATPGPALSDILRSVQRARTPSGPPARPSRSMWDLSRLSQLSGSSDGDNELKKSWGSKDTPAKALMRQRGTGGGPWGEVDSRSPWGGALPLPPAHRLRYLSPARRRFGGDATFKLQEPRGIRPSDWAPRAGLGGQP

SEQ ID NO: 791017 - protein, 163 aa, Homo sapiens
MAASQLAALEGVDSGPRVPGASPGFLYSEGQRLALEALLSKGAEAFQTCVQREELWPFLSADEVQGLAAAAEDWTVAKQEPSGMAEGATTADVDAGSLSYWPGQSEQPAPVLRLGWPVDSAWKGITRAQLYTQPPGEGQPPLKELVRLEIQAAHKVGCRGGPV

SEQ ID NO: 791018 - protein, 478 aa, Homo sapiens; identical to SEQ ID NO: 791016

SEQ ID NO: 791019 - protein, 294 aa, Homo sapiens
ISVLTWAVFTPPLPSRYFSCAHSTDREAEAGEVRTRLRSYGLPWDLAEDGGRAGPSGLETLTPYSPTPSFTWSDARLHRGLVTLLTGEIVDAFSLEFRTLYAASCPLPPAPPQKPSVIGGLQRGRSLHRVSRRRSVAPASPPPPDGPLAHRLAACRVSPATPGPALSDILRSVQRARTPSGPPARPSRSMWDLSRLSQLSGSSDGDNELKKSWGSKDTPAKALMRQRGTGGGPWGEVDSRSPWGGALPLPPAHRLRYLSPARRRFGGDATFKLQEPRGIRPSDWAPRAGLGGQP

SEQ ID NO: 791020 - protein, 505 aa, Homo sapiens
MAASQLAALEGVDSGPRVPGASPGFLYSEGQRLALEALLSKGAEAFQTCVQREELWPFLSADEVQGLAAAAEDWTVAKQEPSGMAEGATTADVDAGSLSYWPGQSEQPAPVLRLGWPVDSAWKGITRAQLYTQPPGEGQPPLKELVRLEIQAAHKLVAVVMDVFTDPDLLLDLVDAATRRWVPVYLLLDRQQLPAFLELAQQLGVNPWNTENVDVRVVRGCSFQSRWRRQVSGTVREKFVLLDGERVISGSYSFTWSDARLHRGLVTLLTGEIVDAFSLEFRTLYAASCPLPPAPPQKPSVIGGLQRGRSLHRVSRRRSVAPASPPPPDGPLAHRLAACRVSPATPGPALSDILRSVQRARTPSGPPARPSRSMWDLSRLSQLSGSSDGDNELKKSWGSKDTPAKALMRQRGTGGGPWGEVDSRSPWGGALPLPPAHRLRYLSPARRRFGGDATFKLQEALCLNALPWTRLLASASVKQKGCLSLVLQLGPGVVAHACNPCTLGG

SEQ ID NO: 791021 - protein, 84 aa, Homo sapiens
VRASRLLCLPKQAWAMAGAPPPASLPPCSLISDCCASNQRDSVGVGPSEPGVGYSLVLRRFLSRSEKRNIRVGVTRFSRWEVGR

SEQ ID NO: 791022 - protein, 102 aa, Homo sapiens
INEICVRSRKGRTYQEKVKRIPKVHIRKVRGKQPHAREKSSQQAPVCLGVSSFSTESPTPRETPQSWANQDGWPPYTTNCPCGEQEKRWLQEQTFRKKNEIR

SEQ ID NO: 791023 - protein, 180 aa, Homo sapiens
GRESPALRPPAEAEEEEEDEEVVVEVVDGDEDDEEDEDEEGGSRRRRGLGRVEEKPRGGAEEEDDDEEEEDEEVVVEVVDGDEDDEDGEERFVPLGPGHAVPRGPARGALKVGSIKREMTFTFQSEDLKRDCGKKMSHQHVFSLAMEEDVKTADTKKASRILDHEKENTRSICLLEQKRK

SEQ ID NO: 791024 - protein, 78 aa, Homo sapiens
GKKKERGKKKEEEEKKRRRREEKKKKKKRKRRRNKQSVPRAQKDHTCWTGLQALGPILMKKISVQTFASWALHDCAFQ

SEQ ID NO: 791025 - protein, 117 aa, Homo sapiens
GLPAAWARGQNPSERCLGPPLHGATPWNQTETVTPCRDGETEARAGGWPQIPPKVGHPMFNCRAPLLGLSGPSHLKPGFLGGKKSTAFSGPGRRPGAGDDVSLSEKERRGQSKRRQP

SEQ ID NO: 791026 - protein, 147 aa, Homo sapiens
VTAAPRGGHLGRPRQSGGRVSPAPGTRTRASTRVTAGLPSSIGKERSVSSHPPPQARGAKVTGRAARAAESIGIEIPLLVCREFYVGVKSPSGHGLARVGPAFPPPRLGVAWPLGVENWPRPMGQGGGEVRLPHSPLEIPFKETHYE

SEQ ID NO: 791027 - protein, 98 aa, Homo sapiens
GGAGAGDQGVRGGRGCDGEFETVRTGQRRRADRESRADPQVTGTSDSSREGDTDHGKPSEARDAGLPGFHVRSLSRNPRGPGRVSFEFMAALCRALFG

SEQ ID NO: 791028 - protein, 118 aa, Homo sapiens
VFSVLISCGCSNKLPQTGWCKTIEINSLTVLEARSSKSVLLGQNQGDGRALFLLEGGCRRESIPCFSLILVGAGIPGYGPCPSSLRKQHFQFSLPCLLLLPLFWRQSLALLPRLDAAT

SEQ ID NO: 791029 - protein, 82 aa, Homo sapiens
TCKAHSRLRAQGVHPALATWAPLHGNHPNPRLPAGKQLFSTNPLQEQSRPGKALLAVRGRRDAPKAPFPDTTLKAGPSEKAT

SEQ ID NO: 791030 - protein, 108 aa, Homo sapiens
ILIFIFLYNTPPHHCVKNWPSPRQKWPASQCTKQTCLSSEPREDALLLMPGRIFRKILQNTVGVLILSFVFPISKGSQARLPQYFLLSYHKHSPRNDPNTSSWIQLTK

SEQ ID NO: 791031 - protein, 120 aa, Homo sapiens
MGSGAETVTVTVLFREEGRRNQCRGRLWGVDRRCPQLTGSMTLEEWKLRQSRDVRVNCSPGHRWRPEPSSLRAPGEAASAVCWCCPPAALGPHGTWLSPAPQGPFLLPPTCHQPPGQVSV

SEQ ID NO: 791032 - protein, 109 aa, Homo sapiens
CRHLELPTPWQQPACLCNARTPHSLTHPSHCSTSDSSLGGVGSRPVPRAKRSLPGRVGGTSLAGPSKTQSKAPPATGFQPEKRHPRDPHNSISINFREIEKATRMRIKL

SEQ ID NO: 791033 - protein, 71 aa, Homo sapiens
TPRWKEGLRMRSAWLPATFVYLELGRFHHGCKDGGKAERTGETGGVEVSSLESLQRCHLPKPGDQRRGFLF

SEQ ID NO: 791034 - protein, 39 aa, Homo sapiens
MELQAGPRGGIWNFLLSLTPTYNQNVYICFKKIKITLKM

SEQ ID NO: 791035 - protein, 103 aa, Homo sapiens
MKKLYLQSSKKAAITCCCRKLPCGLASWEFAWLFVAAIQNWEPQVKDAGKCHQSRREMQPRDASLTRRDCRVTLSDYQPRLEEIQPMMKFMAGKFPVQGGATA

SEQ ID NO: 791036 - protein, 123 aa, Homo sapiens
MQKPLWEERTPGQPLTPFPTPTSRLGARSCTWLCCGASLMSQSGGRQLCLWSLLLIVWKCRDVWFLPEQNRSLFLYYPELAKESHVAVGGVLGMRRGTAGRDYAEVELGLQVSATTPSSMQSQ

SEQ ID NO: 791037 - protein, 126 aa, Homo sapiens
MPDPAKSAPAPKKGSKKAVTKVQKKDGKKRKRSRKESYSVYVYKVLKQVHPDTGISSKAMGIMNSFVNDIFERIAGEASRLAHYNKRSTITSREIQTAVRLLLPGELAKHAVSEGTKAVTKYTSSK

SEQ ID NO: 791038 - protein, 327 aa, Homo sapiens
GRVGEYFESWGESGEKNVFEALSELIILTASHCLHGKEIRSQLNEKVAQLYADLDGGFSHAAWLLPGWLPLPSFRRRDRAHREIKDIFYKAIQKRRQSQEKIDDILQTLLDATYKDGRPLTDDEVAGMLIGLLLAGQHTSSTTSAWMGFFLARDKTLQKKCYLEQKTVCGENLPPLTYDQLKDLNLLDRCIKETLRLRPPIMIMMRMARTPQTVAGYTIPPGHQVCVSPTVNQRLKDSWVERLDFNPDRYLQDNPASGEKFAYVPFGAGRHRCIGENFAYVQIKTIWSTMLRLYEFDLIDGYFPTVNYTTMIHTPENPVIRYKRRSK

SEQ ID NO: 791039 - protein, 164 aa, Homo sapiens
GGSRGSRPVSPPPGWLPLPSFRRRDRAHREIKDIFYKAIQKRRQSQEKIDDILQTLLDATYKDGRPLTDDEVAGMLIGLLLAGQHTSSTTSAWMGFFLARDKTLQKKCYLEQKTVCGENLPPLTYDQLKPLVSPPSITVLEHVISPLTGLSGFKSLDKYHNRAT

SEQ ID NO: 791040 - protein, 108 aa, Homo sapiens
KKHMKKCSSSLAIREMQIKTTMRYHLTPVRMAIIKKSGNNRCWRGRGETGTLLHCWWDCKLVQPLWKSVWRFLRDLELEIPFDPSIPLLGIYVKILIQSNVLPYMVSL

SEQ ID NO: 791041 - protein, 163 aa, Homo sapiens
MNRLNPGRHVVFRTPTVAPRQPAPAAPRFQRPPQPRGLASTCPAGPQQKGSDPPGRSAGGGRWGRRLGGRGAPGFRVLPPPRGEQQDGAEAVSLSSAPICREGTPCSDLKVTAEPAGGLGRSRPTGPGGDPRADIGVQAAAPASAPTHAGPGPRSPGKSPAGG

SEQ ID NO: 791042 - protein, 116 aa, Homo sapiens
FGPRIHFHPTHIYQSAHLVPGTVLGANGHSGEQARHGFLESTFWCNVPLPFSLLISLISSSRAPLSSSHLYSNHPSPESHGTCRTSLALIVCIALLVLTILYVTFCVYVLPMQLDF

SEQ ID NO: 791043 - protein, 154 aa, Homo sapiens
ETAQAIKGMHIRKATKYLKDVTLQKQCVPFRRYNAGVGRCAQAKQRGWTQGRWPRKSTEFLLHMLKNAESNAELKGLDVDSLVIEHIQVNKAPKMRRWTYRAHGRINPYMSSPCRIEMILTEKEQIVPKPEEEVAQKKKISQKKLQKQKLMAWE

SEQ ID NO: 791044 - protein, 103 aa, Homo sapiens
EKSRSRQVLGPVFIGRTPCSGLPSTGPALGSVSPQAPSRCFREHQALSVSTSCKDLGFLLLQSPLGSSTPHCLMSRPLWWCPVLSFWSVLPAPPGSSSPKSDF

SEQ ID NO: 791045 - protein, 162 aa, Homo sapiens [sequence omitted]

SEQ ID NO: 791046 - protein, 108 aa, Homo sapiens
MPPPPDSMEARGSRKEFYQPLSPSTSSLLSVPPIDQTQLEPCQQRSHQLPLAQGRAENHSRECIWVGCEQNSRHIESSIARVFQSYRLKGSPGNCSTPRQVLQNFKTP

SEQ ID NO: 791047 - protein, 97 aa, Homo sapiens
HCEGKSPRRVQSFRLQFNEKYPQTTNTLPTRLGSPSSHRRTPARAGHFPGRRLQKEPVAGGLQAGCRDPPSEKRLRTRAATESQPGFYHPNPFWRIL

SEQ ID NO: 791048 - protein, 32 aa, Homo sapiens
GFLDSHTSASLRSSRFLLHGNNPLNYYSEKAH

SEQ ID NO: 791049 - protein, 186 aa, Homo sapiens
GVPWGMGRPGLRAVVSGPGEAVSLSQGLLLLLLLSMGGTWASREMLRPRCRPINATLAVEKEGCPVCITVNTTICAGYCPTMTRVLQGVLPALPQVVCNYRDVRFESIRLPGCPRGVNPVVSYAVALSCQCALCRRSTTDCGGPKDHPLTCDDPRFQASSSSKAPPPSLPSPSRLPGPSDTPILPQ

SEQ ID NO: 791050 - protein, 165 aa, Homo sapiens
MEMFQGLLLLLLLSMGGTWASREMLRPRCRPINATLAVEKEGCPVCITVNTTICAGYCPTMTRVLQGVLPALPQVVCNYRDVRFESIRLPGCPRGVNPVVSYAVALSCQCALCRRSTTDCGGPKDHPLTCDDPRFQASSSSKAPPPSLPSPSRLPGPSDTPILPQ

SEQ ID NO: 791051 - protein, 168 aa, Homo sapiens
ECNQCGKAFSQKTSLKAHMRTHTGEKPYECNQCGKSFGTSSYLIVHKRIHTGEKLYECSECGKAFNTSSHLKVHKKIHTGENVYECSDCGKVFSGVSSLRMHIRTHTGEKPYECKECRKAFSVSSSLRRHVRIHTGEKPYECIQCGKAFSQSSSLIIHKRIHTERETL

SEQ ID NO: 791052 - protein, 172 aa, Homo sapiens
MGQGDGCLGSRQARGEKDAHAETWTAVTRPLADEAGSQHLVRGRQGTAQAATLPLSQALCMYGHMLIPVRQRLLKPYLSLDMWHWASYLIFLSTDFLTVEMAMRTQRMWRLRWTELRAAWATVGTELGARRPSGHISWPSAFPNGIPYPLPCSLPEVVLNDLRLFQNKGIHT

SEQ ID NO: 791053 - protein, 75 aa, Homo sapiens
TWNQPKCPSVEDWVKKYTMEYYLDIKKNEVMSLAATWLVPEAIMLSKITQKQKVEYHVLPYKWGLNNGHTRTYKE

SEQ ID NO: 791054 - protein, 143 aa, Homo sapiens
RKEIPYPVWNALLPLLSDRYSLPIPCSASSCGIFEKPSFIAILHLPCSWGSTQPLFHRTSHKTAAGMADLCICLSHQTVGSLNRVNMKNRSLQFLLIVYRWADLASMAEDTWGTGESTEGDVKSIGSSKEDGCTTICSSTCCP

SEQ ID NO: 791055 - protein, 109 aa, Homo sapiens
MLQTFSWPTLANRNLGGFFPRAMASVLRCPCRGWLCACLPSDHCRGWLCACLPSAHYSWLSGAPQRICQIGHDIEGLRALWVFISLIPASYPNAVFKSPWSSLPALQCC

SEQ ID NO: 791056 - protein, 188 aa, Homo sapiens
MPLVGLGDYVPEPFGTSCTLDWWLAQASVGGQVFILNILFFCLLLPTAVIVFSYVKIIAKVKSSSKEVAHFDSRIHSSHVLEMKLTKVAMLICAGFLIAWIPYAVVSVWSAFGRPDSIPIQLSVVPTLLAKSAAMYNPIIYQVIDYKFACCQTGGLKATKKKSLEGFRLHTVTTVRKSSAVLEIHEEV

SEQ ID NO: 791057 - protein, 129 aa, Homo sapiens
EGCVYEARPGAVSAPRTGFTQEVMVIVLCKRPLWRRRVAVLWWRRWVHGCSGHSMGPSKGLEPSWGLEQGQGLLDKPCLLSWARSPTQCPGAPFTCWCPQGHPAPESQVTVSAGHAGVRWHLTASGTHR

SEQ ID NO: 791058 - protein, 84 aa, Homo sapiens
QSHEGTASQSWVKLTLPGKWRAGIPVSQPPSGRQQPGRGTHSVIPSWLEGSGLVDPASSLMEKVAPDADPYRPGPQALAGSACF

SEQ ID NO: 791059 - protein, 102 aa, Homo sapiens
MRTCMQYKSRDAGTESCASPLLRAESGYPPFQLFLLPRSRGPLPEGRTAQLRRGAKERNPRLRGARRCSSVPGPCSAVPTPTVPSSGRAGTRRCEGSCPAPP

SEQ ID NO: 791060 - protein, 219 aa, Homo sapiens
GKFFMDSSTLIKHQRVHTGERPYKCNDCGKFFRYISTLIRHQRIHTGERPYECSVCGELFRYNSSLVKHWRNHTGERPYKCSECGKSFRYHCRLIRHQRVHTGERPYECSECGKFFRYNSNLIKHWRNHTGERPYECRECGKAFSHKHILVEHQKIHSGERPYECSECQKAFIRKSHLVHHQKIHSEERLVCSMNVGNSLAKTPTSLNIRDFTMEKVYH

SEQ ID NO: 791061 - protein, 219 aa, Homo sapiens; identical to SEQ ID NO: 791060

SEQ ID NO: 791062 - protein, 219 aa, Homo sapiens; identical to SEQ ID NO: 791060

SEQ ID NO: 791063 - protein, 102 aa, Homo sapiens
GEPVGRHPCSQAALTSRRGPPTAPGWKSAQVLSLVETQQVLGEAPKVGPRLGAGWFLESQGVWARCRDGPSRALGSGCPCPAPSHNKDGFLPPLQGLLASWG

SEQ ID NO: 791064 - protein, 89 aa, Homo sapiens
MSLKETWPRGAVWCCGIGLLCGVDPLVVQEGRALTEGAATLRAHEGLLARVNAPVAEQHGALGETLATVHAAEGPLARVQELVLGEVGA

SEQ ID NO: 791065 - protein, 134 aa, Homo sapiens
HGIMFFCNNCKVFRFCKSKCHKNFKKKCNPHKVRWTKAFQKATSKELTVDNSFEFEKHRNELIKYQQELWNKTIDAMKRVEEIKQKWQAKFIMNGLKKNKELQKVQDIKEVKQNIHLILAPFAGKEKQLEEKMV

SEQ ID NO: 791066 - protein, 112 aa, Homo sapiens
DPSISTSQSAVIAGVSHHAWPRHPLSKGHLKAQRGPSAQTLLSQQTLLRSQSLWGHHQQGRSARATLSLVRGERREWAPTDHIALRQGKPMVCSGIRVDRLQIPLRREASVI

SEQ ID NO: 791067 - protein, 31 aa, Homo sapiens
MCKQAQKKTAPSSVCDKAERGARSHHLKLQE

SEQ ID NO: 791068 - protein, 124 aa, Homo sapiens
SHFAWEGRRKGNLHRLCPRRVLILLANSKRTPTHWKVSQEPTLDAEESWGVPLSGTPVSFQKVRDPPRRGLQRSALRPPNLKLISRSSRGSDRLCKWSGPVHRLLGRHLWTATDSTSLCHPLGG

SEQ ID NO: 791069 - protein, 113 aa, Homo sapiens
SHFAWEGRRKGNLHRLCPRRVLILLANSKRTPTHWKVSQEPTLDAEESWGVPLSGTPVSFQKVRDPPRRGLQRSALRPPNLKLISRSSRGSDRLCKWSLMGSRGKELLSAEKH

SEQ ID NO: 791070 - protein, 116 aa, Homo sapiens
MLSPVPAFGLQAPGFEWVSSRPHRACICDSRGPYQVAASKAFLPALQPPLISANATSAPWVQSQSSLSLGSAFLHLCLDLLFGNCFFASFAGFRLGESFFFLRRSFAFVAQAPLNG

SEQ ID NO: 791071 - protein, 124 aa, Homo sapiens
VEELSFAAACCVPSQEPAPAFNELNGWEYGESYKGELWDAVRTYTWGFFVLHERHRKGRSSRSQEASLGELQGQLGRAGAQTAAPAQTPGMGKAVVRAEVGRRLPALDLDCSHSNGRFAPMSPF

SEQ ID NO: 791072 - protein, 120 aa, Homo sapiens
PSGLGPSTSGLSEQICTVSKWRRKSRSSILHGGPVRPCPAPPRGGPKIPEMTPRSQSPSHFLNIVKYPSGSRNEPQMPGPLALPNSSKSSDMPHKSPRFTSCPQISLNCHQPPNSKTLRL

SEQ ID NO: 791073 - protein, 102 aa, Homo sapiens
MANTQLDHLHYTTEFTRNDLLIICKKFNLMLMDEDIISLLAIFIKMCLWLWKQFLKRGSKCSETSELLEKVKLQLAFTAYKYVDICFPEQMAYSRYIRWYIH

SEQ ID NO: 791074 - protein, 62 aa, Homo sapiens
TRADLGTRHQVIKALEEPGWRAPQTPPVQLTVTVQDPCPEPLGLLESGWRENLELPILSNPL

SEQ ID NO: 791075 - protein, 306 aa, Homo sapiens
EFTGMPEQWARLLQTSHITKLEQKKNPQAVLDVLKFYDSNTVKQKYLSFTPPEKDGFPSGTPALNAKGTEAPAVVTEEEDDDEETAPPVIAPRPDHTKSIYTRSVIDPVPAPVGDSHVDGAAKSLDKQKKKTKMTDEEIMEKLRTIVSIGDPKKKYTRYEKIGQGASGTVFTATDVALGQEVAIKQINLQKQPKKELIINEILVMKELKNPNIVNFLDSYLVGDELFVVMEYLAGGSLTDVVTETCMDEAQIAAVCRECLQALEFLHANQVIHRDIKSDNVLLGMEGSVKLTDFGFCAQITPEQSK

SEQ ID NO: 791076 - protein, 112 aa, Homo sapiens
ATPRPCRAPCPRHPTPTPACHPYCDIIVISNPLSPQVAGVALPSLCAFLPASSGSRAGDQGPVRESVGLWNLIAFGLTKPLSLNADSICSSKPSADDRGGRAIAVLDYTDCS

SEQ ID NO: 791077 - protein, 309 aa, Homo sapiens
RAGKVTNYSIQVLAFTRAVRRGQEEQIFTRTKEDVPGPPAGVKAAAASASMVFGPGIPPLKLNGIIRKYTVFCSHPYPTVISEFEASPDSFSYRIPNLSRNRQYSVWVVAVTSAGRGNSSEIITVEPLAKAPARILTFSGTVTTPWMKDIVLPCKAVGDPSPAVKWMKDSNGTPSLVTIDGRRSIFSNGSFIIRTVKAEDSGYYSCIANNNWGSDEIILNLQVQVPPDQPRLTVSKTTSSSITLSWLPGDNGGSSIRGYILQYSEDNSEQWGSFPISPSERSYRLENLKCGTWYKFTLTAQNGVGPGRI

SEQ ID NO: 791078 - protein, 228 aa, Homo sapiens
HFPVPAPNQEAPSLCPKITPHLEVTRGLAGGSCQGTGSGEWRKHWVPGFGLGAMYASSYPPPPQLSPRSHLCPPPPHPTPPQLNNLLLLEGRKSSLPSVAPTGSASAAEDSDLLTQPWYSGNCDRYAVESALLHLQKDGAYTVRPSSGPHGSQPFTLAVLLRGRVFNIPIRRLDGGRHYALGREGRNREELFSSVAAMVQHFMWHPLPLVDRHSGSRELTCLLFPTKP

SEQ ID NO: 791079 - protein, 104 aa, Homo sapiens
KQEGRYLEKCQKSPCQSPTVASGNCSQHEAHGTHGCPASLASSSPPWRPWSSTSCGTLCPLWTDTAAAGNSPACSSPPSLEATAKYTPPLAPVCFLSRPTLGCL

SEQ ID NO: 791080 - protein, 174 aa, Homo sapiens
GRADKAADAVFFFTFALMVFTARRVYESEDPRATLVGDGQDTTARQAAPASGGGNARRSRRASAVETGSQVLAEWTSPYISGPAPVRQAAGDWPGGGSHSNCLLCLANQGSPGSQRRCVCGVRHLCLSSVFLGLAPADPSWARTVPLGHLPQATKPPRWASLGPVSRRTEMTNR

SEQ ID NO: 791081 - protein, 174 aa, Homo sapiens; identical to SEQ ID NO: 791080

SEQ ID NO: 791082 - protein, 174 aa, Homo sapiens; identical to SEQ ID NO: 791080

SEQ ID NO: 791083 - protein, 78 aa, Homo sapiens
EWPRSFFAIFCALSWEVGLAPTGTRGTSLVTRPVEVGAVMTAAKGGTSVLKLDKGSHQTHWHIPESPSVGAVCPGHNI

SEQ ID NO: 791084 - protein, 102 aa, Homo sapiens
SSGAVGLTSAHQLSTQMGEEEMALQRPSELPPAAHSRASVMKIHQLSPQLGAWELRAGPDNLAPAPRAGTFPSFSSELHQRKQRPVTPLLFLPRLRPPPLTL

SEQ ID NO: 791085 - protein, 144 aa, Homo sapiens
MLPKAPEASQKAPVPPPTPHSSLTSSWPLTFLGIENAGLTQLAEEGAPTAGGLQVVQVEVGWVQPTGQVGEAFMGVAAHSCTMGRLLGVGERKDRSEGSGTGLPWDEAEGPIPLATKLPKKASPWKGSLEGQKSFQCCLEEQLQ

SEQ ID NO: 791086 - protein, 239 aa, Homo sapiens
MQTGRTESQRCESRPTASKPPALKNPPKFAPLPENSVNFCFDSAFLTVRRVPAEVSNTHQNSYQPGRKHGEQESSKNPEMACHGSSSFLPAANDTATLCESKFPSPHHKPVTGEPGRGKGTFLHSENSAFESWNAHQPKLLERKDTAGTVPESKAPKHYGDTTLLREPCPPERTVSPCQVQASCSQEENRLAAGALSTSIPWGCRDPGAQVFAVEGKAPSSQPDSQEKPAQPPWRKPKT

SEQ ID NO: 791087 - protein, 179 aa, Homo sapiens
KGDREVLGGEGWVPGEGSTPGPVPTDLGEDRHSSLHVQMLHFPRPLCPATPPFCAYKNPKTLAGRHTSWMPRETHWRRNTQVDGRREECTGVGAHWDASRPSTGGMTQSLAGAVGEELGHQAARLQGKTISLLAAPSAESCFHSIKPRTHSPSPHVILFFWYAKARIQKALCPCHKAGV

SEQ ID NO: 791088 - protein, 68 aa, Homo sapiens [sequence omitted]

SEQ ID NO: 791089 - protein, 103 aa, Homo sapiens
EESRLWGRVAEKQVQGHIASQRHLYCNSGLCFAYCSNFPFAQMKTFRHGGQFFRKILLLGKDKTEPAPDSGTSCHDHFLKIQTYFLPTLLDFIPSIPINIRKV

SEQ ID NO: 791090 - protein, 105 aa, Homo sapiens
VPVCCKPVCCVPVCCGASSCCQQSSCQPACCASSSCQQSCRVPVCCKAVCCVPTCSESSSSCCQQSSCQPACCTSSPCQQSCCVSVCCKPVCCKSICCVPVCSGA

SEQ ID NO: 791091 - protein, 99 aa, Homo sapiens
GKWLTDEGRASSGCLNPNRCKFTPREAGMKARDRKRGGGGGGGGGAQRRPLPPGPPRRLCQLSSEQVSDTDFPGVDSQPLPLGPRASPTRTRILETFNL

SEQ ID NO: 791092 - protein, 77 aa, Homo sapiens
LVAYIYSQVKMKNKLTGRLHGDGSVEARLGVRWPRLGRSSLCVTCLGCVVRRLGVVRLLTCAPAESVAVPAGMLGAQ

SEQ ID NO: 791093 - protein, 142 aa, Homo sapiens
GCQRSIGLSNGKAKVCNYSGWYYCSSCHVDDSFLIPARIVHNWDTSKYKVSKQAKEFLEYVYEEPLIDIQQENAMLYHHAEPLAAVLRLRQRLKSLRAYLFSCRAAVAEDLRRRIFPREYLLQQIHLYSLADLQQQYQKKWM

SEQ ID NO: 791094 - protein, 144 aa, Homo sapiens
GCQRSIGLSNGKAKVCNYSGWYYCSSCHVDDSFLIPARIVHNWDTSKYKVSKQAKEFLEYVYEEPLIDIQQENAMLYHHAEPLAAVLRLRQRLKSLRAYLFSCRAAVAEDLRRRIFPREYLLQQIHLYSLADLQQTQALQPNLT

SEQ ID NO: 791095 - protein, 622 aa, Homo sapiens
DPDLPTCTTLAMGNSHCVPQAPRRLRASFSRKPSLKGNREDSARMSAGLPGPEAARSGDAAANKLFHYIPGTDILDLENQRENLEQPFLSVFKKGRRRVPVRNLGKVVHYAKVQLRFQHSQDVSDCYLELFPAHLYFQAHGSEGLTFQGLLPLTELSVCPLEGSREHAFQITGPLPAPLLVLCPSRAELDRWLYHLEKQTALLGGPRRCHSAPPQRRLTRLRTASGHEPGGSAVCASRVKLQHLPAQEQWDRLLVLYPTSLAIFSEELDGLCFKGELPLRAVHINLEEKEKQIRSFLIEGPLINTIRVVCASYEDYGHWLLCLRAVTHREGAPPLPGAESFPGSQVMGSGRGSLSSGGQTSWDSGCLAPPSTRTSHSLPESSVPSTVGCSSQHTPDQANSDRASIGRRRTELRRSGSSRSPGSKARAEGRGPVTPLHLDLTQLHRLSLESSPDAPDHTSETSHSPLYADPYTPPATSHRRVTDVRGLEEFLSAMQSAPGPTPSSPLPSVPVSVPASDPRSCSSGPAGPYLLSKKGALQSRAAQRHRGSAKDGGPQPPDAPQLVSSAREGSPEPWLPLTDGRSPRRSRDPGYDHLWDETLSSSHQKCPQLGGPEASGGLVQWI

SEQ ID NO: 791096 - protein, 158 aa, Homo sapiens
MGPNGKPSWDDKCKMPYTEAVLHEVLRFCNIVPLGIFHATSEDAVVRGYSIPKGTTVITNLYSVHFDEKYWRDPEVFHPERFLDSSGYFAKKEALVPFSLGRRHCLGEHLARMEMFLFFTALLQRFHLHFPHELVPDLKPRLGMTLQPQPYLICAERR

SEQ ID NO: 791097 - protein, 64 aa, Homo sapiens
MVNSRFFGVCSRRTTGVGVCCENGECRGTPLTEKRALGNDCERVNELMTKIRCGGPTAQMVMPF

SEQ ID NO: 791098 - protein, 486 aa, Homo sapiens
MVNSRFFGVCSRRTTGVGVCCENGECRGTPLTEKRALGNDCERVNELMTKIRCGGPTAQMIFSLDLGGISTVVLNGYDVVKECLVHQSEIFADRPCLPLFMKMTKMGGLLNSRYGRGWVDHRRLAVNSFRYFGYGQKSFESKILEETKFFNDAIETYKGRPFDFKQLITNAVSNITNLIIFGERFTYEDTDFQHMIELFSENVELAASASVFLYNAFPWIGILPFGKHQQLFRNAAVVYDFLSRLIEKASVNRKPQLPQHFVDAYLDEMDQGKNDPSSTFSKENLIFSVGELIIAGTETTTNVLRWAILFMALYPNIQGQVQKEIDLIMGPNGKPSWDDKCKMPYTEAVLHEVLRFCNIVPLGIFHATSEDAVVRGYSIPKGTTVITNLYSVHFDEKYWRDPEVFHPERFLDSSGYFAKKEALVPFSLGRRHCLGEHLARMEMFLFFTALLQRFHLHFPHELVPDLKPRLGMTLQPQPYLICAERR

SEQ ID NO: 791099 - protein, 384 aa, Homo sapiens
MTKMGGLLNSRYGRGWVDHRRLAVNSFRYFGYGQKSFESKILEETKFFNDAIETYKGRPFDFKQLITNAVSNITNLIIFGERFTYEDTDFQHMIELFSENVELAASASVFLYNAFPWIGILPFGKHQQLFRNAAVVYDFLSRLIEKASVNRKPQLPQHFVDAYLDEMDQGKNDPSSTFSKENLIFSVGELIIAGTETTTNVLRWAILFMALYPNIQGQVQKEIDLIMGPNGKPSWDDKCKMPYTEAVLHEVLRFCNIVPLGIFHATSEDAVVRGYSIPKGTTVITNLYSVHFDEKYWRDPEVFHPERFLDSSGYFAKKEALVPFSLGRRHCLGEHLARMEMFLFFTALLQRFHLHFPHELVPDLKPRLGMTLQPQPYLICAERR

SEQ ID NO: 791100 - protein, 384 aa, Homo sapiens; identical to SEQ ID NO: 791099

SEQ ID NO: 791101 - protein, 268 aa, Homo sapiens
MPCSSKRNFCRQTMPSFIHEDDKNGRLIEKASVNRKPQLPQHFVDAYLDEMDQGKNDPSSTFSKENLIFSVGELIIAGTETTTNVLRWAILFMALYPNIQGQVQKEIDLIMGPNGKPSWDDKCKMPYTEAVLHEVLRFCNIVPLGIFHATSEDAVVRGYSIPKGTTVITNLYSVHFDEKYWRDPEVFHPERFLDSSGYFAKKEALVPFSLGRRHCLGEHLARMEMFLFFTALLQRFHLHFPHELVPDLKPRLGMTLQPQPYLICAERR

SEQ ID NO: 791102 - protein, 328 aa, Homo sapiens
MVNSRFFGVCSRRTTGVGVCCENGECRGTPLTEKRALGNDCERVNELMTKIRCGGPTAQMIFSLDLGGISTVVLNGYDVVKECLVHQSEIFADRPCLPLFMKMTKMGGLLNSRYGRGWVDHRRLAVNSFRYFGYGQKSFESKILEETKFFNDAIETYKGRPFDFKQLITNAVSNITNLIIFGERFTYEDTDFQHMIELFSENVELAASASVFLYNAFPWIGILPFGKHQQLFRNAAVVYDFLSRLIEKASVNRKPQLPQHFVDAYLDEMDQGKNDPSSTFSKENLIFSVGELIIAGTETTTNVLRWAILFMALYPNIQVLERPRSVPS

SEQ ID NO: 791103 - protein, 501 aa, Homo sapiens
MVRKPVVSTISKGGYLQGNVNGRLPSLGNKEPPGQEKVQLKRKVTLLRGVSIIIGTIIGAGIFISPKGVLQNTGSVGMSLTIWTVCGVLSLFGALSYAELGTTIKKSGGHYTYILEVFGPLPAFVRVWVELLIIRPAATAVISLAFGRYILEPFFIQCEIPELAIKLITAVGITVVMVLNSMSVSWSARIQIFLTFCKLTAILIIIVPGVMQLIKGQTQNFKDAFSGRDSSITRLPLAFYYGMYAYAGWFYLNFVTEEVENPEKTIPLAICISMAIVTIGYVLTNVAYFTTINAEELLLSNAVAVTFSERLLGNFSLAVPIFVALSCFGSMNGGVFAVSRLFYVASREGHLPEILSMIHVRKHTPLPAVIVLHPLTMIMLFSGDLDSLLNFLSFARWLFIGLAVAGLIYLRYKCPDMHRPFKVPLFIPALFSFTCLFMVALSLYSDPFSTGIGFVITLTGVPAYYLFIIWDKKPRWFRIMSEKITRTLQIILEVVPEEDKL

SEQ ID NO: 791104 - protein, 501 aa, Homo sapiens; identical to SEQ ID NO: 791103

SEQ ID NO: 791105 - protein, 494 aa, Homo sapiens
MVRKPVVSTISKGGYLQGNVNGRLPSLGNKEPPGQEKVQLKRKVTLLRGVSIIIGTIIGAGIFISPKGVLQNTGSVGMSLTIWTVCGVLSLFGALSYAELGTTIKKSGGHYTYILEVFGPLPAFVRVWVELLIIRPAATAVISLAFGRYILEPFFIQCEIPELAIKLITAVGITVVMVLNSMSVSWSARIQIFLTFCKLTAILIIIVPGVMQLIKGQTQNFKDAFSGRDSSITRLPLAFYYGMYAYAGWFYLNFVTEEVENPEKTIPLAICISMAIVTIGYVLTNVAYFTTINAEELLLSNAVAVTFSERLLGNFSLAVPIFVALSCFGSMNGGVFAVSRLFYVASREGHLPEILSMIHVRKHTPLPAVIVLHPLTMIMLFSGDLDSLLNFLSFARWLFIGLAVAGLIYLRYKCPDMHRPFKVPLFIPALFSFTCLFMVALSLYSDPFSTGIGFVITLTGVPAYYLFIIWDKKPRWFRIMSGFLALMPAQACDM

SEQ ID NO: 791106 - protein, 192 aa, Homo sapiens
SDNTKYTYTPGCPIFYCLQDIMRVCSESSTHFATLTARMLIALDKWLDERHAQSHFIPALFRPSPLERIKTNVINPAYATESGQTENSLHMGYSALEIKSKMLALEKADTCIYNPLFGSDLQYTNRVDKVVINPYFGLGAPDYSKIQIPKQEKWQRSMSSVTEDKERQWVDDFPLHRSACEGRFRITKPSSQ

SEQ ID NO: 791107 - protein, 108 aa, Homo sapiens
THIQSGKKSLDSSIVFILKKKKDSGVRLLTLYSHLKTFRQKSSNSSSRVSGFLSIDAASPQRPQVPQAPSPPPAQNKGRHPQTSGHRSPTRTHTHPSLSPPSESPSNA

SEQ ID NO: 791108 - protein, 38 aa, Homo sapiens
MVQPFVDDPDISGHHLPMSALFSSGFPVLVWCLSDGRP

SEQ ID NO: 791109 - protein, 122 aa, Homo sapiens
MFSLRSHCRLCGHLQTLRSVWTTFVSTTLSGFCSGWLSIVPTHLRTTLSTIGNSSSPAIGPQRSPCLHTSSVSNLHTQLSPGLSFRDLASHPLALQRSPGPFQLSLAPHAARTPWQAVSGIY

SEQ ID NO: 791110 - protein, 120 aa, Homo sapiens
MLLIHTCGPQETKGDLCWHGLDFLSTNAHEMWKLSEHPHQNHTLKQAGWGRETPSHHGEAEMLQPPRSLCSRGGTILLCVLPALSEVCEGRGQCSKELALPQRREWNVRGHMKAVTLPTF

SEQ ID NO: 791111 - protein, 74 aa, Homo sapiens
AELELEEDEEEGEEAELDGDLLEEEELEEAEEEDRSSLLLLSPPAATASQTQQIPGGSLGSVLLPAARFDAREA

SEQ ID NO: 791112 - protein, 132 aa, Homo sapiens
WANRCSVFQALSQVSADLAAPRNGPSGPAAARTLLHSKLLRAPGAPRSLGEVRAGVRRAKGTGEPCRSRLSPARLLRDRIKGSHSVRRGRECCLSSFASELRERVVFCFSAPHPPELPAPERGRRLQVAGNR

SEQ ID NO: 791113 - protein, 75 aa, Homo sapiens
PPHLAFRVFQVGPERPVLKGSGPPETLPGVRIWASAPGCRAQAVPGLYELWGCSPFFPGFLPGPGWFQQNSRQGT

SEQ ID NO: 791114 - protein, 104 aa, Homo sapiens
MSWGCHSSWAEPAGSGQLSWPKHQCMNHPRGIPGAHSQEPKSGGCSWDPSPVNCPCQAFLASLYLPVQWAQPPCWDRRVCPTSRSILTASDSCQLTTNGFPPPQ

SEQ ID NO: 791115 - protein, 104 aa, Homo sapiens
MDASLLKCHSRKVVWGPYSVIDHEGWPKKGLATQEVVENVQLISLQAYADYSRGTPHGSWANGKCCDEKRCTEPAPRRRRHTMAHMYENEGRYVKQSQTGKEKE

SEQ ID NO: 791116 - protein, 75 aa, Homo sapiens
RTPSVGGPPEDQLNLELRRKMCCEQGEPQLPQAVQDRRVFLKAGASFEEVPIRLHLVDYSGAATKRDEQACVEIE

SEQ ID NO: 791117 - protein, 75 aa, Homo sapiens; identical to SEQ ID NO: 791116

SEQ ID NO: 791118 - protein, 78 aa, Homo sapiens
AVEGGASCGARIQLPRFPQLPRTLSVSRGSSVNQHAASPGTLGMGSLCGSGEASTGFAALSEKAGCLSVLLVGGSPPL

SEQ ID NO: 791119 - protein, 88 aa, Homo sapiens
AQVLPWQQVISLQEDQGLAGLQGSQGHRREALAVWLQLGSCLLGTHSFFLRCLQASSLALGNGDSGSTPAPCNQELLAWWESRGDMKR

SEQ ID NO: 791120 - protein, 82 aa, Homo sapiens
HEQRKGRLLRPPLFVFEGAMRGDRGRGRGGRFGSRGGPGGGFRPFVPHIPFDFYLCEMAFPLKPETRVGCLLCFYSALHWKF

SEQ ID NO: 791121 - protein, 101 aa, Homo sapiens
PVVPPAGHRALSPAGVLLAVPAMLSLDFLDDVRRMNKRQVSLSVLFFSWLFLSLRGCCCGARRTPGFWCEGLSWSDTRVIRFLWRLWPEAALSASLFLTPN

SEQ ID NO: 791122 - protein, 70 aa, Homo sapiens
MLSLDFLDDVRRMNKRQLYYQVLNFGMICLIWHYTDLGKGLIGNNLEVKVLIVCVCSDGSYWNLAYSYEE

SEQ ID NO: 791123 - protein, 86 aa, Homo sapiens
CSTGEPGPGRDHPSGHRGHPGAAGAADKGVCLIHALQTLVSLLQPRLVCNGVFLAHCNLHLLGSSDSPASAFRVAGISQMPATTPS

SEQ ID NO: 791124 - protein, 127 aa, Homo sapiens
QRTHTGEKPYRCSECWKTFSQSSTLVIHQRTHTGEKPYKCPDCGESFSQSFNLIRHRRTHIGEKPYKCTSCEKCFSRSAYLSQHRKIHVEKPFESPDVGDFPHEWTWKNCSGEMPFISSFSVSNSSS

SEQ ID NO: 791125 - protein, 103 aa, Homo sapiens
TTKMRGNRNREAENSKNQNTSSPPKDYNSLPAREQNWMENEFDELIEVGFRKWVITNFSELKEHVPTHHKEAKNLEKRLEEWLTRITSVEKSINDLMELKNTA

SEQ ID NO: 791126 - protein, 115 aa, Homo sapiens
ALWERGLCLGKQPACRGWKRKRPKTPEKNGAWPPARREMARFQRTKEREEDRCSLNIYYVRNTTQGTAPACVGKRMQPSPTGKGGKCCTVHGLTRKIHNVQPNLQSPILSAACVD

SEQ ID NO: 791127 - protein, 106 aa, Homo sapiens
VPLVEFGCESVWFWTFFGWNGAWPPARREMARFQRTKEREEDRCSLNIYYVRNTTQGTAPACVGKRMQPSPTGKGGKCCTVHGLTRKIHNVQPNLQSPILSAACVD

SEQ ID NO: 791128 - protein, 108 aa, Homo sapiens
MELNTNIKSKKGLGRRNLKPMNGAWPPARREMARFQRTKEREEDRCSLNIYYVRNTTQGTAPACVGKRMQPSPTGKGGKCCTVHGLTRKIHNVQPNLQSPILSAACVD

SEQ ID NO: 791129 - protein, 108 aa, Homo sapiens; identical to SEQ ID NO: 791128

SEQ ID NO: 791130 - protein, 101 aa, Homo sapiens
ALWERGLCLGKQPACRGWKRKRPKTPEKNGAWPPARREMARFQRTKEREEDRCSLNIYYVRNTTQGTAPACSQGRYIMYSRIYSLLFCQLLVLIKTSIKIL

SEQ ID NO: 791131 - protein, 258 aa, Homo sapiens
MPVILSPQRTGSGATGGPAARAYSVAEAVKQFRAGPAGTGAGCSLQGCWAAPRPFEHRTNKLRELSTLAHCSRELQTQVPDASAHSLAVTLSELHSCRDLQDECLDSRFAEGPRRLLPPYHSLINNFVKPEKLTKVETRLKEKIVAEMTDLNKHIKQAQTQRKQLLEESRELHREKLLVQAENRFFLEYLTNKTEEYTEATGEGFGTGILQTSGQIGRGKTRISSRFGEQISVRKTRALRKGNFIRFEGICCMWGHCL

SEQ ID NO: 791132 - protein, 111 aa, Homo sapiens
MTDLNKHIKQAQTQRKQLLEESRELHREKLLVQAENRFFLEYLTNKTEEYTEHLEKVLEQLFYNQVDRLDEERQELAPDLENKFQCVKHGLCEREISSDLKEFAACGDIVY

SEQ ID NO: 791133 - protein, 98 aa, Homo sapiens
PAGHGKEGRGGVFIQECASELLLFPFFSPAPPSCCLSVAVCVCVSFSRSCDADLGGGWAGAGGHVAGSLQPRRVCALLGLFNSKICTNLQSISASAQE

SEQ ID NO: 791134 - protein, 75 aa, Homo sapiens
STILHRANFRAAVRGCRCSLTGQVGLSAVTKSGCPPLVKPLGGCGGAEGSVQEPLSPSQGSLSSWIVCARVHVCA

SEQ ID NO: 791135 - protein, 73 aa, Homo sapiens
NESEHGLWGFEGSGSSLILTSFFSCLLRSSHSSAFHALGLLCMLLSLPGVVPWYPSPVYFLVLSVKAPSPYLR

SEQ ID NO: 791136 - protein, 129 aa, Homo sapiens
  misc_feature (9)..(9): Xaa can be any naturally occurring amino acid
RKKFMKCIXIFFFLKMELKKNFFNSNLPFTPSAELSSPKSKHTPVPTSRMESPPSYARVFMIWPQPTILAPGHGPIFHILCCLHRKQLANPRHTCFHLERLPIMIPPPGPFTWKTPIHSSKPSSDGTSP

SEQ ID NO: 791137 - protein, 149 aa, Homo sapiens
RRDSPTTCGPCPPRHYTQFWNYLERCRYCNVLCGEREEEARACHATHNRACRCRTGFFAHAGFCLEHASCPPGAGVIAPGTPSQNTQCQPCPPGTFSASSSSSEQCQPHRNCTALGLALNVPGSSSHDTLCTSCTGFPLSTRVPGEPEA

SEQ ID NO: 791138 - protein, 238 aa, Homo sapiens
RRDSPTTCGPCPPRHYTQFWNYLERCRYCNVLCGEREEEARACHATHNRACRCRTGFFAHAGFCLEHASCPPGAGVIAPGTPSQNTQCQPCPPGTFSASSSSSEQCQPHRNCTALGLALNVPGSSSHDTLCTSCTGFPLSTRVPGAEECERAVIDFVAFQDISIKRLQRLLQALEAPEGWGPTPRAGRAALQLKLRRRLTELLGAQDGALLVRLLQALRVARMPGLERSVRERFLPVH

SEQ ID NO: 791139 - protein, 122 aa, Homo sapiens
SVVRDQNLSNVWTVEYALELLFIGGLVPEAVWLAYKLGDWKTSVSIGVAFQLFCKRDSNFMRSKKKSLNLPLRMTPAQIFQEKLQCVLGQPASLEAKNEMGSKYKQFTGVLCMYSLIRVRLI

SEQ ID NO: 791140 - protein, 145 aa, Homo sapiens
RAPVPRSLLGSRRRERTEETAAAAQSPGPRDEAPTCPQLPGPAGELIIHPTGSGFAGPRDAALGGRAPALSARPLRAPGKEFVWLSLRLSAEVAGLRGDPRLGESLGRTKRRTVWRRSHPWPSRLPLPIPSLPLRGGKGRTWKKK

SEQ ID NO: 791141 - protein, 103 aa, Homo sapiens
SLSCISWSFHYSSQRENIYHSADGCICTFKTFLRGYSAPGRLLLWLMTMRMIIPRVWSMPLSQGPHEPNQLKSFRSNNEPDGESTCFSQAACLFGLSMCNKKH

SEQ ID NO: 791142 - protein, 106 aa, Homo sapiens
RVHILPDTGTVCGLVSKAMAQTHSLVYRVGNLGLTRFSVFHKRDRTGSLASELKIQISVVTQVSRKARFAWLCCDVQLSITVCLGAYRMLVSAFPLSGRMLPSQVA

SEQ ID NO: 791143 - protein, 164 aa, Homo sapiens
GTSKILPGLCIGNFKDARDAEQLSKNKVTHILSVHDSARPMLETRHFKESIKFIHECRLRGESCLVHCLAGVSRSVTLVIAYIMTVTDFGWEDALHTVRAGRSCANPNVGFQRQLQEFEKHEVHQYRQWLKEEYGESPLQDAEEAKNILAAPGIMKFWAFLRRL

SEQ ID NO: 791144 - protein, 185 aa, Homo sapiens
GTSKILPGLCIGNFKDARDAEQLSKNKVTHILSVHDSARPMLETRHFKESIKFIHECRLRGESCLVHCLAGVSRSVTLVIAYIMTVTDFGWEDALHTVRAGRSCANPNVGFQRQLQEFEKHEVHQYRQWLKEEYGESPLQDAEEAKNILGKYKEQGRTEPQPGARRWSSFPALAPLTYDNYTTET

SEQ ID NO: 791145 - protein, 112 aa, Homo sapiens
AVAGLAAGGDCGGGSLRRGWGLLRGTSGPGGMEVPLRGGRKKRGKVAQEGACPPGFPGATVARVPGGHAPGQQGVVPAGSQAGAGCLLGRSDLSAAVCKQYARILFIVKNFY

SEQ ID NO: 791146 - protein, 105 aa, Homo sapiens
LDHRWTLYHADYFFQELGLRPRDSWHPLLAARLIFLYLGNRRGAADAYLVEQRKAGSSQRKRTRQSDRGEQAWELRGANVHLCPSFPLDAPESLPSTPACLLKLV

SEQ ID NO: 791147 - protein, 126 aa, Homo sapiens [sequence omitted]

SEQ ID NO: 791148 - protein, 70 aa, Homo sapiens
MGPGAEQWETIQGVVTTTKLPSVWAETELYPSPTPILPAIPPDSRPKGIKDESEGRREGPQENRTQASTV

SEQ ID NO: 791149 - protein, 121 aa, Homo sapiens
MTLHSTSFHYWVMRKKFDSRWVPLSVWNLHILLKSVWVFSGYYSFLPHPKHTHRMLGLSACLNGPTFEQVRCVCVCVCVCVCVCVCVSAPCDGMASWPGLVPPLCPELLGWALATHKPELE

SEQ ID NO: 791150 - protein, 107 aa, Homo sapiens
FKTAWLSESHRSRDWMPGLVPVGQHRLRRRGLWRPQAEPLRGIFKQRAPHTSWDPRVWLPCRVWELQRVGNQGAVAHACNPSTLGGQGSRGQEIETILAHTVKPHLH

SEQ ID NO: 791151 - protein, 118 aa, Homo sapiens
GACTPRDGETETRARDTHADRPEGCREGEGEKSVEAGSGGKRPGAGRAQQSGRGAGSWLVKAASSGEITARIAELHKTPPARPAAEPAPISSLIAARAGYAFKCYLIGLRRSWGPERP

SEQ ID NO: 791152 - protein, 90 aa, Homo sapiens
MELLRLQVESEASSMPGMVRALRDRDPLLQEPKAHAVLLTTELYYTFKEEPLPILLKLFQKTKEEGTLPNSLYKATITLIPKPDKNTTTK

SEQ ID NO: 791153 - protein, 84 aa, Homo sapiens
  misc_feature (12)..(12): Xaa can be any naturally occurring amino acid
  misc_feature (16)..(16): Xaa can be any naturally occurring amino acid
  misc_feature (19)..(19): Xaa can be any naturally occurring amino acid
  misc_feature (24)..(24): Xaa can be any naturally occurring amino acid
  misc_feature (33)..(34): Xaa can be any naturally occurring amino acid
  misc_feature (46)..(46): Xaa can be any naturally occurring amino acid
QDAFFNLDFQPXRSGXNKXLRVCXSISFEAVEXXCRRQHDTGLLYXKVKTSCLSEIRLPVNFFGLESNLRILHLAPFNFLGISP

SEQ ID NO: 791154 - protein, 118 aa, Homo sapiens
MSCQQSQQQCQPPPKCTPKCPPKCTPKCPPKCPPKCPPQCSAPCPPPVSSCCGSSSGGCCSSEGGGCCLSHHRPRQSLRRRPQSSSCCGSGSGQQSGGSSCCHSSGGSGCCHSSGGCC

SEQ ID NO: 791155 - protein, 1388 aa, Homo sapiens
MSIPLHSLRFNNTMREENVEPQNKQMAFCRPMTETRADVQILHSHVQLPIVSTSASDPGGTSTQLMTSPVFDTMSAPLMGVPNSGALSPPLMPASDSGALSPLLMPASDSGALSPLLMPALDSGTLSPLLSTSEYGVMSPGMMTIPDFGTMSATLMVAPDSAEISPLAMPAPSSGVVCTPIMSTSSSEAMSTPLMLAPDSGELSPILMQDMNPGVMSTQPVPAPSSEAMSPLQITDEDTEAMSKVLMTALASGEISSLLMSGTDSEAISSLIMSAVASGGTSPQPTSTQNSGGIPTPLMSDLDSGIMSSLLMSSPGSEVMSTPLLSVPDAGEMSTLPKPAPDAEAMSPALMTALPSGVMPTQTMPAPGSGAMSPWSTQNVDSEMMSNPPVRATASGVMSAPPVRALDSGAMSTPLMGAPASGNMSTLQKTVPASGAMTTSLMTVPSSGVMSTEQMSATASRVMSAQLTMAKTSGAMPTGSMKAVAKQYKRATASGKMSTPLRRAPTSGAMSTQPVTATASETMSMPQLTVPASGSMSMLQMRAPVSEAMSMPQMRTMASGLTSAAQMKAMTSGAMSTPLMTAQTSGSTSTLLMRDTASGVMSCPQMRSLASGALSKPLMTPKASGTMFTEKMTTTASEAMPTLLMRDTVSGALSMPQMTDTASGGLSASLMRDTASGAMSTSQMTATVSGGMSMPLMRAQDPGVMPASLMRAKVSGKMLSQPMSTQDPGGMSMSPMKSMTAGGMQMNSPTSDVMSTPTVRAWTSETMSTPLMRTSDPGERPSLLTRASSSGEMSLPLMRAPASGEIATPLRSPAYGAMSAPQMTATASGMMSSMPQVKAPISGAMSMPLTRSTASGGMSMPLMRAPDSRVTSTSQMMPTASGDMCTLPVRAPASGGVSSPLVRAPASGTMSTPLRRPSACETVSTELMRASASGHMSTAQTTAMVSGGMSKPLMRAPASGTMPMPLMSAMASGEMSMPLMETMASGATSTLQTSVANSRSMSLSQTTYTVSGRMATAPIRASASGARSTSFMRASVSGSMPMPLPRATASGCGMGMSMPQMTATDSRGMSTPLMRASGPGTMSTPQTAFGVMSTPEIKATDSGEASTSHINITASGSKPTSHMTATTPETAKPPPKEVPSFGMLTPALCYLLEEQEAARGSCSVEEEMEIDEEKQMKGFLDDSERMAFLVSLHLGAAERWFILQMEVGEPLSHENKSFLRRSQGIYDSLSEIDILSAVLCHPKQGQKSVRQYATDFLLLARHLSWSDAILRTRFLEGLSEAVTTKMGRIFLKVAGSLKELIDRSLYTECQLAEEKDSPGNSSQVLPTACKRNNEEAMGNELSSQQQTEEHQHVSKRCYYLKEHGDPQEGLHDHLGQSTGHHQKAHTNK

SEQ ID NO: 791156 - protein, 113 aa, Homo sapiens
GSRVYDLEGFCPLGGDPGSSTWWRVQREGEPPKDLPQTLLCRWVAFTRFWIFPACAFLSSSTRNLLPGQKGVRGVIAVDPPSSSSQTHLCLLCIHQGQLCLQVSLSAPVTPGG

SEQ ID NO: 791157 - protein, 156 aa, Homo sapiens
KPDNQSLGHRGRRPSGPDGAAREHILRQLPITYPSAEEDLASHEDSVPSAMTTRLRRQSERERERELRDVRIRKMPENSDLLPVAQTEPSIWTVDDVWAFIHSLPGCQDIADEFRAQEIDGQALLLLKEDHLMSAMNIKLGPALKICARINSLKES

SEQ ID NO: 791158 - protein, 107 aa, Homo sapiens
KPDNQSLGHRGRRPSGPDGAAREHILRQLPITYPSAEEDLASHEDSVPSAMTTRLRRQSERERERELRDVRIRKMPENSDLLPVAQTEPSIWTVDDVWAFIHSLPGM

SEQ ID NO: 791159 - protein, 104 aa, Homo sapiens
AGRGQRVGRWAPVKFATMYSVTRCRNAGSGDSIYGIQKEPVTIPAPTSNEHANVTGVVFSRCDEKELEAGQAEAHLSGSPPGCQSPLVVSRCCLHRFTQTPPVG

SEQ ID NO: 791160 - protein, 112 aa, Homo sapiens
TLTPPAFDQIGGYGQLEAAYAQAIPSRTIANTTCHLPRTDAMHMFRDPHTGDLPWTGMTFGLTIMATWYWCTDQVIVQRSLSARDLNHAKAGSILASYLKMLPMGLIIMPGM

SEQ ID NO: 791161 - protein, 56 aa, Homo sapiens
MVEADRPGNLFIGGLNTETNEKALEAVFGKYGRIVEVLLMKDRETNKSRGFAFVTF

SEQ ID NO: 791162 - protein, 72 aa, Homo sapiens
VPAHPHLRLENSWPVEYPVCRRASLQVTGKGCRVAYPAGEAARRGPGAATGLREDRPRVADFDLQGQSLTAA

SEQ ID NO: 791163 - protein, 80 aa, Homo sapiens
  misc_feature (57)..(57): Xaa can be any naturally occurring amino acid
MDPSPAVRPDGSPLLACSDPYARLGWLSGGSWGDLATWDRRACAAPSSEVPNVGHTXLAQRGPSGQWRRAIGGARALGQG

SEQ ID NO: 791164 - protein, 36 aa, Homo sapiens
MIPLYPSFNFNKSHFAFQILPIATNILFFSGVAELI

SEQ ID NO: 791165 - protein, 131 aa, Homo sapiens
SQVWSDQGCISGHLQGLATAHSQARQLLCRAGSSRHRDRGQLCASLQLDHMHQQVPLQGLLSGQGEYGGTWQLRDARNCEAPKRVSQPWLREPLGVGSPKDHSSSLLLVTCNVASFGCGHFSPVYVTSSFS

SEQ ID NO: 791166 - protein, 76 aa, Homo sapiens
GIPEGGSDPTKVKGLPPGNQPLLIPKAACPPWRARDPQILSTKGAGPVSDAGLRPGLQGVALARDGTAHPSRHHPG

SEQ ID NO: 791167 - protein, 84 aa, Homo sapiens
LGAFRLRLHQVHFVVWEFLFHAPRWEAGSSRKEQKGLGLWSCQRSPGALLGSPQTHVQQWEVSFCPFFCLPFPCHLLHPHRWKG

SEQ ID NO: 791168 - protein, 91 aa, Homo sapiens
LTQGPMAVSGKPGLLTAPASSMHASPSAEPGQAQGNATTEPERQPGGGGLDREMWKKQLIPEISCLAWIRPCWGLAAPCPVGAGAFRLGVF

SEQ ID NO: 791169 - protein, 90 aa, Homo sapiens
LRSPHSYPRAKDKSPFTDPSSNCPDSYRMRSTYLFTSHNKAGKKTSPGCGQVTCTPDSLSSPTLTQFSCTPNSAPQPRPGSGPIKACYFL

SEQ ID NO: 791170 - protein, 67 aa, Homo sapiens
RGPGPAPQKGKVGMKKAMTWDNHRQWQVSGLPTQHGDPQAYQDIKVHPGGHIRLRRLLPVSLQLMSG

SEQ ID NO: 791171 - protein, 103 aa, Homo sapiens
MPVFEPKIMLLPGTPYFRVGISKADLRMAPGQPEPSPSTSTPTLQTPDVFTSICPGRQPWSEPLGESQGSTLRKGPIWLPLPSLAQLERQEGGVASLLARPHV

SEQ ID NO: 791172 - protein, 334 aa, Homo sapiens
MKDSPFQVTKLYWLNEKWDFIASASDMAAEQGQILVIATAAVGGFTLLVILTLFFLITGRCQWYIKAKMKSEEKRRNHLQNGHLRFPGIKTYIDPDTYEDPSLAVHEFAKEIDPSRIRIERVIGAGEFGEVCSGRLKTPGKREIPVAIKTLKGGHMDRQRRDFLREASIMGQFDHPNIIRLEGVVTKRSFPAIGVEAFCPSFLRAGFLNSIQAPHPVPGGGSLPPRIPAGRPVMIVVEYMENGSLDSFLRKHDGHFTVIQLVGMLRGIASGMKYLSDMGYVHRDLAARNILVNSNLVCKVSDFGLSRVLEDDPEAAYTTTDLFQTLTLNLCYSA

SEQ ID NO: 791173 - protein, 334 aa, Homo sapiens; identical to SEQ ID NO: 791172

SEQ ID NO: 791174 - protein, 110 aa, Homo sapiens
MPRETHWRRNTQVDGRREECTGVGAHWDASRPSTGGMTQSLAGAVGEELGHQAARLQGKTISLLAAPSAESCFHSIKPRTHSPSPHVILFFWYAKARIQKALCPCHKAGV

SEQ ID NO: 791175 - protein, 157 aa, Homo sapiens
WLGCHTQSCHTHSGVELAHCPATHGCSSRLQCSHAVSTVCTPVSLCKDVGLSLQEQFSDHRQSENHGLRHHLWGSREGPDLADRCCVGRAGPCSLGSVTFHSVSSPSLAETDGERDRDGEREMERDRDRRREMEREIETERERERQRDRDRERETER

SEQ ID NO: 791176 - protein, 470 aa, Homo sapiens
QAETRRTEVFRIDEEPPNMASESGKLWGGRFVGAVDPIMEKFNASIAYDRHLWEVVLFKASNSNKEGAVEKAGLLTKAEMDQIIHGLEKVAEEWAQGTFKLNSNDEDIHTANERRLKELIGATVMGSCTRDGAWNDQVVTDLRLWMRQTCLQRSRGLLWELIRTMVDRAEAERDVLFPGYTHLQRAQPIRWSHWILSHAVALTRDSERLLEVRKRINVLPLGSGAIAGNPLGVDRELLRAELNFGAITLNSMDATSERDFVAEFLFWASLCMTHLSRMAEDLILYCTKEFSFVQLSDAYSTGSSLMPQKKCAGLLMTLKGLPSTYNKDLQEDKEAVFEVSDTMSAVLQVATGVISTLQIHQENMGQALSPDMLATDLAYYLVRKGHPMPFRQAHEASGKAVFMAETKGVALNQLSLQELQTISPLFSGDVICVWDYGHSVEQYGALGGTARSSVDWQIRQVRALLQAQQA

SEQ ID NO: 791177 - protein, 385 aa, Homo sapiens
QAETRRTEVFRIDEEPPNMASESGKLWGGRFVGAVDPIMEKFNASIAYDRHLWEVVLFKASNSNKEGAVEKAGLLTKAEMDQIIHGLEKVAEEWAQGTFKLNSNDEDIHTANERRLKELIGATVMGSCTRDGAWNDQVVTDLRLWMRQTCLQRSRGLLWELIRTMVDRAEAERDVLFPGYTHLQRAQPIRWSHWILSHAVALTRDSERLLEVRKRINVLPLGSGAIAGNPLGVDRELLRAELNFGAITLNSMDATSERDFVAEFLFWASLCMTHLSRMAEDLILYCTKEFSFVQLSDAYSTQMPFRQAHEASGKAVFMAETKGVALNQLSLQELQTISPLFSGDVICVWDYGHSVEQYGALGGTARSSVDWQIRQVRALLQAQQA

SEQ ID NO: 791178 - protein, 73 aa, Homo sapiens
ADGGWPGGQDPGSSPCASLFPQCAGLLMTLKGLPSTYNKDLQVEAGGGLASMCQFSGLWHTQAGPHPGIAIHP

SEQ ID NO: 791179 - protein, 423 aa, Homo sapiens
QAETRRTEVFRIDEEPPNMASESGKLWGGRFVGAVDPIMEKFNASIAYDRHLWEVVLFKASNSNKEGAVEKAGLLTKAEMDQIIHGLEKVAEEWAQGTFKLNSNDEDIHTANERRLKELIGATVMGSCTRDGAWNDQVVTDLRLWMRQTCLQRSRGLLWELIRTMVDRAEAERDVLFPGYTHLQRAQPIRWSHWILSHAVALTRDSERLLEVRKRINVLPLGSGAIAGNPLGVDRELLRAELNFGAITLNSMDATSERDFVAEFLFWASLCMTHLSRMAEDLILYCTKEFSFVQLSDAYSTGSSLMPQKKNPDSLELIRTRLGVCLGGCAGLLMTLKGLPSTYNKDLQASGKAVFMAETKGVALNQLSLQELQTISPLFSGDVICVWDYGHSVEQYGALGGTARSSVDWQIRQVRALLQAQQA

SEQ ID NO: 791180 - protein, 47 aa, Homo sapiens
MNPCPCSGAIAGNPLGVDRELLRAGETSCPSSPGRITLSTRQDLQTH

SEQ ID NO: 791181 - protein, 35 aa, Homo sapiens
MAHYQQSSLSSVILHLPISGPCMVSGDDIDDSVLR

SEQ ID NO: 791182 - protein, 302 aa, Homo sapiens
RVYADGIFDLFHSGHARALMQAKNLFPNTYLIVGVCSDELTHNFKGFTVMNENERYDAVQHCRYVDEVVRNAPWTLTPEFLAEHRIDFVAHDDIPYSSAGSDDVYKHIKEAGMFAPTQRTEGISTSDIITRIVRDYDVYARRNLQRGYTAKELNVSFINEKKYHLQERVDKVKKKVKDVEEKSKEFVQKVEEKALTHSEVGGERPEKFMGKFSGNVGPGKEHLKHIAERGGRGRIACRPSGEEEAQKRPNRRGPLPLFFGGLSGKKSHTWPRKFPGKGGILRGGKKCSLRPFADKNLFMGPT

SEQ ID NO: 791183 - protein, 190 aa, Homo sapiens
RVYADGIFDLFHSGHARALMQAKNLFPNTYLIVGVCSDELTHNFKGFTVMNENERYDAVQHCRYVDEVVRNAPWTLTPEFLAEHRIDFVAHDDIPYSSAGSDDVYKHIKEAGMFAPTQRTEGISTSDIITRIVRDYDVYARRNLQRGYTAKELNVSFINVSSSLTPEFPDSVGDISPPTPSQLNWLCSWL

SEQ ID NO: 791184 - protein, 64 aa, Homo sapiens [sequence omitted]

SEQ ID NO: 791185 - protein, 98 aa, Homo sapiens
EHTLGFLTAFISSMVWRGPRILMCSQSRYRVAGHQVLAGSQWMPRAHFCQDGLGIPLDLGGITMVDLLTHESPQEQDLRIFCGDINWIRKEPTRAGWT

SEQ ID NO: 791186 - protein, 273 aa, Homo sapiens
MIARRNPEPLRFLPDEARSLPPPKLTDPRLLYIGFLGYCSGLIDNLIRRRPIATAGYRKHMVTHLPNNFHPIPSKLFTNRLPPSSTDTCCSLNSDANHAPSLTRRTLHATSRLSDTLPTQTYVPRPPPPTHTPHPPPPPTHHTATKPPAAHRAPPPPPPAHTPPNPTSPHPPPTPPPPPPAPPPPHTTPTPPPHPGHTTRQPPPSNTTNSRPPHPPHHPPPTTHQTHPTHPPPPLHPQHLHPHTTTHTHTHHHNHPNPQPTQHHPPHTHSHNH

SEQ ID NO: 791187 - protein, 107 aa, Homo sapiens
  misc_feature (66)..(66): Xaa can be any naturally occurring amino acid
  misc_feature (103)..(103): Xaa can be any naturally occurring amino acid
MIARRNPEPLRFLPDEARSLPPPKLTDPRLLYIGFLGYCSGLIDNLIRRRPIATAGCIPSFYDIYXPFFLAGNIILVKTLKTNLFCFEGNREIFGNILKFPSXKEFP

SEQ ID NO: 791188 - protein, 194 aa, Homo sapiens
VSHSRLPLQDCVVVWLHFAEKGRGKVKPSSWTWVCSSLPDNVLPWGFCPGLQCGPLDPRKEAAQDGDETSIAPGPMHPLTLSRPAQTQSGTAAKTMDSWPQDPGRDAERGSPKTGPHKRHPFLTHRAHSSKDTHTHTHTHTEGKKHTEGERQREKGEWETQPHTQSYRGGREIHAPRQPLRLPGSALEGNNPRL

SEQ ID NO: 791189 - protein, 129 aa, Homo sapiens
MVAQEEDPDLFRLGAGVRVSPSPEGDLPDPGREGPTAGCPGGPRRGSGPRAKAAAPRKEPRTPLHAVPAAEATDPEVRAPPPRSLPSPRAARSGAGGGRQEGRRAQWGGPLPFPQRGPRSSSRVQARGR

SEQ ID NO: 791190 - protein, 107 aa, Homo sapiens
SHISVGSATGTISSTVLFSDYISRPEDHTSILHFDKNETQKTCQVLIIDDSLYEEEESFSVSLRLPVGGQLGARFPTTKVTILADRYDDGAEEFYSILLDSRKCLLP

SEQ ID NO: 791191 - protein, 156 aa, Homo sapiens
PSLPSCRRKSLCFLCSHRQPELGRPGLSGWGSFLCTQCVYVCARECVCQTLIASFRLGGLRCSREGIRISSCPCPRLFVPSPEQREVSSLAHTPGPDPGWEPPPPPPPQPSEPGFCPSASIPAHASAVPGGRRAVSRRLGLGPRPAAAGAKTYWSG

SEQ ID NO: 791192 - protein, 95 aa, Homo sapiens
ARWAQSQPRLFLLRLVPSFGPRRKTLISPHERLSVGVWTGASPTRLLTPDHKEAGSSSSASAANCRAFFSVFCPHFQLRTNQRTPNTSYHQPPDT

SEQ ID NO: 791193 - protein, 134 aa, Homo sapiens [sequence omitted]

SEQ ID NO: 791194 - protein, 103 aa, Homo sapiens
MAEGLGCILEQEGEGQVWIWGETGLRGIWEDDQGVGEPWLAAGGAVGCHEPRPAGGLQGRGRPLRCTQHTGAGTELGASMPHPQGLPTSGGTHPRPTLPSCFL

SEQ ID NO: 791195 - protein, 125 aa, Homo sapiens [sequence omitted]

SEQ ID NO: 791196 - protein, 378 aa, Homo sapiens
GGAASSALRHCPGRRAALGPAALGPSRGHGGQHASHGGTARGQPSKHQASSAGRPRAPAPLRPRSPAAAPPSPQTPRRCGGGAGLSAGRVARAQEPDGLSADFSSEYLGIENELEGNRGAALARLLPRTLPEHRSPARQRDLELPQSQPEPEAGVAPAMRGLCAAPRGSWPCPPCPLLCNKTCGGSTETHTCNSAASALKEVKRSSPEKPRDPGVLAEAPRMGRGAGPAPPQRKSPAEPGWAGAGGGGALGLLPWILRGRHRFPAQIRTQIRLPRLPRLQGAQSCSQLAARAPDGGSAHWPLPLLFLAPEIETVNLNSLDLLPLGPGGSRIQAQPGSLRRCRKPPTTPTRVRPILGQDAAVAEPLGVCNGELPRRWGQ

SEQ ID NO: 791197 - protein, 356 aa, Homo sapiens
GGAASSALRHCPGRRAALGPAALGPSRGHGGQHASHGGTARGQPSKHQASSAGRPRAPAPLRPRSPAAAPPSPQTPRRCGGGAGLSAGRVARAQEPDGLSADFSSEYLGIENELEGNRGAALARLLPRTLPEHRSPARQRDLELPQSQPEPEAGVAPAMRGLCAAPRGSWPCPPCPLLCNKTCGGSTETHTCNSAASALKEVKRSSPEKPRDPGVLAEAPRMGRGAGPAPPQRKSPAEPGWAGAGGGGALGLLPWILRGRHRFPAQIRTQIRLPRLPRLQGAQSCSQLAARAPDGGSAHWPLPLLFLAPEIETVNLNSLDLLPLGPGGSRIQAQPGSLRRTFKNPPTNAVAWMHCL

SEQ ID NO: 791198 - protein, 198 aa, Homo sapiens
GGAASSALRHCPGRRAALGPAALGPSRGHGGQHASHGGTARGQPSKHQASSAGRPRAPAPLRPRSPAAAPPSPQTPRRCGGGAGLSAGRVARAQEPDGLSADFSSEYLGIENELEGNRGAALARLLPRTLPEHRSPARQRDLELPQSQPEPEAGVAPAMRGLCAAPRGSWPCPPCPLLCNKTCGGSTETHTCNSAPPR

SEQ ID NO: 791199 - protein, 106 aa, Homo sapiens
TIPHPPPVASHGLILLVLLIPIKLSLLFLLTSAQKALGVACFHQRLPSSEGEVEASGVSSPEGLRTCSSEIAQAGQQPDGSGVARSVCRPWPGDSTEPVSKIGNGH

SEQ ID NO: 791200 - protein, 52 aa, Homo sapiens
MVFSRSRALGDLGSPPTVPAKLHVVLLADGLPACWHLLLCSSACVLPFVRPL

SEQ ID NO: 791201 - protein, 361 aa, Homo sapiens
MAAQPPRPVGERSMGSSREAARAPARSPAWASTQASTPGAALAVQRESPESGLQKHYSNLCMEKSQKINPFILHILQEVDEEIKKGLAAGITLNIAGNNRLVPVERVTGEDFWILSKILKNCLYINGLDVGYNLLCDVGAYYAAKLLQKQLNLIYLNLMFNDIGPEGGELIAKVLHKNRTLKYLRMTGNKIENKGGMFFAAMLQINSSLEKLDLGDCDLGMQSVIAFATVLTQNQAIKAINLNRPILYSEQEESTVHVGRMLKENHCLVALHMCKHDIKNSGIQQLCDALYLNSSLRYLDVSCNKITHDGMVYLADVLKSNTTLEVIDLSFNRIENAGANYLSETLTSHNRSLKALVWFYI

SEQ ID NO: 791202 - protein, 300 aa, Homo sapiens
MEKSQKINPFILHILQEVDEEIKKGLAAGITLNIAGNNRLVPVERVTGEDFWILSKILKNCLYINGLDVGYNLLCDVGAYYAAKLLQKQLNLIYLNLMFNDIGPEGGELIAKVLHKNRTLKYLRMTGNKIENKGGMFFAAMLQINSSLEKLDLGDCDLGMQSVIAFATVLTQNQAIKAINLNRPILYSEQEESTVHVGRMLKENHCLVALHMCKHDIKNSGIQQLCDALYLNSSLRYLDVSCNKITHDGMVYLADVLKSNTTLEVIDLSFNRIENAGANYLSETLTSHNRSLKALVWFYI

SEQ ID NO: 791203 - protein, 203 aa, Homo sapiens
MFNDIGPEGGELIAKVLHKNRTLKYLRMTGNKIENKGGMFFAAMLQINSSLEKLDLGDCDLGMQSVIAFATVLTQNQAIKAINLNRPILYSEQEESTVHVGRMLKENHCLVALHMCKHDIKNSGIQQLCDALYLNSSLRYLDVSCNKITHDGMVYLADVLKSNTTLEVIDLSFNRIENAGANYLSETLTSHNRSLKALVWFYI

SEQ ID NO: 791204 - protein, 464 aa, Homo sapiens
MAAQPPRPVGERSMGSSREAARAPARSPAWASTQASTPGAALAVQRESPESGLQKHYSNLCMEKSQKINPFILHILQEVDEEIKKGLAAGITLNIAGNNRLVPVERVTGEDFWILSKILKNCLYINGLDVGYNLLCDVGAYYAAKLLQKQLNLIYLNLMFNDIGPEGGELIAKVLHKNRTLKYLRMTGNKIENKGGMFFAAMLQINSSLEKLDLGDCDLGMQSVIAFATVLTQNQAIKAINLNRPILYSEQEESTVHVGRMLKENHCLVALHMCKHDIKNSGIQQLCDALYLNSSLRYLDVSCNKITHDGMVYLADVLKSNTTLEVIDLSFNRIENAGANYLSETLTSHNRSLKALSVVSNNIEGEGLVALSQSMKTNLTFSHIYIWGNKFDEATCIAYSDLIQMGCLKPDNTDVEPFVVDGRVYLAEVSNGLKKHYYWTSTYGESYDHSSNAGFALVPVGQQP

SEQ ID NO: 791205 - protein, 303 aa, Homo sapiens
MAAQPPRPVGERSMGSSREAARAPARSPAWASTQASTPGAALAVQRESPESGLQKHYSNLCMEKSQKINPFILHILQEVDEEIKKGLAAGITLNIAGNNRLVPVERVTGEDFWILSKILKNCLYINGLDVGYNLLCDVGAYYAAKLLQKQLNLIYLNLMFNDIGPEGGELIAKVLHKNRTLKYLRMTGNKIENKGGMFFAAMLQINSSLEKLDLGDCDLGMQSVIAFATVLTQNQAIKAINLNRPILYSEQEESTVHVGRMLKENHCLVALHMCKHDIKNSGIQQLCDALYLNSSLRYLDVSW

SEQ ID NO: 791206 - protein, 242 aa, Homo sapiens
MAAQPPRPVGERSMGSSREAARAPARSPAWASTQASTPGAALAVQRESPESGLQKHYSNLCMEKSQKINPFILHILQEVDEEIKKGLAAGITLNIAGNNRLVPVERVTGEDFWILSKILKNCLYINGLDVGYNLLCDVGAYYAAKLLQKQLNLIYLNLMFNDIGPEGGELIAKVLHKNRTLKYLRMTGNKIENKGGMFFAAMLQINSSLEKLDLGDCDLGRVYSPCRPHVERKSLSCCTTHV

SEQ ID NO: 791207 - protein, 361 aa, Homo sapiens; identical to SEQ ID NO: 791201

SEQ ID NO: 791208 - protein, 361 aa, Homo sapiens; identical to SEQ ID NO: 791201

SEQ ID NO: 791209 - protein, 242 aa, Homo sapiens; identical to SEQ ID NO: 791206

SEQ ID NO: 791210 - protein, 46 aa, Homo sapiens
QGPPRVFSEEREAWNPDYSAEANGVSGGAQPVPGATRELRCDRVSG

SEQ ID NO: 791211 - protein, 342 aa, Homo sapiens
GHKVGGLAVVDMHGFGGTAATSPLTAVFSLSRSLLAAALLYGFCLGAIKTPWPEQHVPVLFSVFCGLLVALSYHLSRQSSDPTVLWSLIRSKLFPELEERSLETARAEPPDPLPDKMRQSVREVLHSDLVMCVVIAVLTFAISASTVFIALKSVLGFVLYALAGAVGFFTHYLLPQLRKQLPWFCLSQPVLKPLEYSQYEVRGAAQVMWFEKLYAGLQCVEKYLIYPAVVLNALTVDAHTVVSHPDKYCFYCRALLMTVAGLKLLRSAFCCPPQQYLTLAFTVCLILIPGFPGFGEYLWPVWQWDVADGSAAMAGNGAFPCTWDWVVSGGFTHKRGFSLGTV

SEQ ID NO: 791212 - protein, 127 aa, Homo sapiens
RCLPLAHSCRALLMTVAGLKLLRSAFCCPPQQYLTLAFTVLLFHFDYPRLSQGFLLDYFLMSLLCSKVSWWLWPRPQAVQWEQSQLLPGWEENFLTVWPPLCSQPRGPLQQPLKEGVTSTLYREEAG

SEQ ID NO: 791213 - protein, 408 aa, Homo sapiens
GHKVGGLAVVDMHGFGGTAATSPLTAVFSLSRSLLAAALLYGFCLGAIKTPWPEQHVPVLFSVFCGLLVALSYHLSRQSSDPTVLWSLIRSKLFPELEERSLETARAEPPDPLPDKMRQSVREVLHSDLVMCVVIAVLTFAISASTVFIALKSVLGFVLYALAGAVGFFTHYLLPQLRKQLPWFCLSQPVLKPLEYSQYEVRGAAQVMWFEKLYAGLQCVEKYLIYPAVVLNALTVDAHTVVSHPDKYCFYCRALLMTVAGLKLLRSAFCCPPQQYLTLAFTVLLFHFDYPRLSQGFLLDYFLMSLLCSKLWDLLYKLRFVLTYIAPWQITWGSAFHAFAQPFAVPHSAMLFVQALLSGLFSTPLNPLLGSAVFIMSYARPLKFWERDYNTKRVDHSNTRLVTQLDRN

SEQ ID NO: 791214 - protein, 61 aa, Homo sapiens [sequence omitted]

SEQ ID NO: 791215 - protein, 162 aa, Homo sapiens
MSQIGRVRLREARPLAQCLTVAQCRGKACVSSPFPEPAGSQGQHFRPQLCPVPVRNLKPAQPLPLIHAPQPGLQLHICIMGERGPGDLWLLLAYACVTDGREMKIGLRVPPSQGFEAVSPQGSHTMVETLKATGWEAKQSSEEVGEKGLEAGGGGRETANCG

SEQ ID NO: 791216 - protein, 86 aa, Homo sapiens
RPGEEQLHHEGLALMPPPAQLCMACPSGLSCPSCMWPQASPTQPSCFLWPCRVATRTPAGEGGCGWPVSELGFPPAWSPPHPLSYL

SEQ ID NO: 791217 - protein, 206 aa, Homo sapiens
MSPKPRASGPPAKATEAGKRKSSSQPSPSDPKKKTTKVAKKGKAVRRGRRGKKGAATKMAAVTAPEAESGPAAPGPSDQPSQELPQHELPPEEPVSEGTQHDPLSQESELEEPLSQESEVEEPLSQESQVEEPLSQESEVEEPLSQESQVEEPLSQESEVEEPLSQESQVEEPLSQESEMEEPLSQESQVEEPLSQESEMEELPSV

SEQ ID NO: 791218 - protein, 186 aa, Homo sapiens
MSPKPRASGPPAKATEAGKRKSSSQPSPSDPKKKTTKVAKKGKAVRRGRRGKKGAATKMAAVTAPEAESGPAAPGPSDQPSQELPQHELPPEEPVSEGTQHDPLSQESELEEPLSQESEVEEPLSQESQVEEPLSQESEVEEPLSQESQVEEPLSQESEVEEPLSQESQVEEPLSQESEMEELPSV

SEQ ID NO: 791219 - protein, 216 aa, Homo sapiens
MSPKPRASGPPAKATEAGKRKSSSQPSPSDPKKKTTKVAKKGKAVRRGRRGKKGAATKMAAVTAPEAESGPAAPGPSDQPSQELPQHELPPEEPVSEGTQHDPLSQESELEEPLSQESEVEEPLSQESQVEEPLSQESQVEEPLSQESEVEEPLSQESEVEEPLSQESQVEEPLSQESEMEEPLSQESQMEEPLSQESQVEEPLSQESEMEELPSV

SEQ ID NO: 791220 - protein, 141 aa, Homo sapiens
VDAPLPLSELSMALVNSVFLEVLGREHLWGLLLTPSSGNAGAHIYVFGGLRGGTTSLELDVCCSCLFGVCSVPFDSFQLSPPLQDLLKVSALLSQARGRSGSPYHKVLGGMWGLFLHRVQVNTSVASVLGCFLSPSNLITL

SEQ ID NO: 791221 - protein, 131 aa, Homo sapiens
WLCDSQASVCHRVWRWEGRRTALPHTGGARKSKPTLAYMCQQSDVGSCCGPRGSCSVGRECVGWCMATGATLLKLSASQARSVSAVGVVQASREPEIAQQAGMGMLGPWERPADQGELKSDRPHLMGKTTL

SEQ ID NO: 791222 - protein, 137 aa, Homo sapiens
MPCLFLRMPATFLGRWDWDGGGSGTLAISLAPAHQFPAAPQGPCSSGSSTLLLSNPMCLPQAAQAFSLVPTVTGSTASGDTAGSASLSPGPSISLLCLWGELRASVPWQRSLRSQRWPPMVLPHSAALEGRLRAALA

SEQ ID NO: 791223 - protein, 130 aa, Homo sapiens
NLNNVKTRTRLNIQFTSRNKWPTWGKDTLQLVFFSPWLQKAPRPWRRVLVALLIHGGGVLRPSRRLGFGKAQMGTCKHKNKRESNPHCTVSTPQLCKQIKWSISSGSSPSCLCVDAQARTCTHTHTHKPL

SEQ ID NO: 791224 - protein, 49 aa, Homo sapiens
MAHFPQLHAGLGGPLGNEQKPCPGHPDTVGEELYCREALNTHPLSVTGG

SEQ ID NO: 791225 - protein, 139 aa, Homo sapiens
LSGAESKPLCSMGIFLPLDLTVIYWPRERQARVRRGRRPQNRVDKSWPRARPVRPRDVSPAPATRVKLARTCLLRGFSQKCLVKAFVKESVFTCAGRAPALGPGRRRISELLESNPGKQNQPWTVGAPGAPCSLSKASY

SEQ ID NO: 791226 - protein, 160 aa, Homo sapiens
MGIGAVSAGEHRCSECRCRWAQVQWVQVQWAQVQWTQVGTGAVGAGTVGHRCSGCRYSGRTCSGHRWAQVQWAQVGTRAVGARAVGASAVGTGGHRCSWRRCSGRKWAHVQWVQVQWVQVPVGTGSNWAPGCKLSQGHQPRVSPHRLTSPKILKASPPSA

SEQ ID NO: 791227 - protein, 61 aa, Homo sapiens
MEPHTVAQAGVPQHDLGSLQSLLPRFKRFSCLILPKIWDYRNMNTALIKRNRYTPETGRKS

SEQ ID NO: 791228 - protein, 97 aa, Homo sapiens
AAPIRPSRSSLGHDRKSLGAQFCVPPRRFSGTAQETSCGSDTLVCCNFGRRKLESVGALTENGKRGPKFTEMLKCKPKNKFSFDFSPRGKLAKAHVL

SEQ ID NO: 791229 - protein, 69 aa, Homo sapiens
LALDHTASEWQSKPDIPGTCNYQQLLSPLCAYFLTCIIEVSKDSPRSPMVEAGGDCPSTPPRPLKAGPA

SEQ ID NO: 791230 - protein, 366 aa, Homo sapiens
MSEEVTYADLQFQNSSEMEKIPEIGKFGEKAPPAPSHVWRPAALFLTLLCLLLLIGLGVLASMFHVTLKIEMKKMNKLQNISEELQRNISLQLMSNMNISNKIRNLSTTLQTIATKLCRELYSKEQEHKCKPCPRRWIWHKDSCYFLSDDVQTWQESKMACAAQNASLLKINNKNALEFIKSQSRSYDYWLGLSPEEDSTRGMRVDNIINSLACYKKPPDYRDGVYKGLLAQLSGFLPRCFWMPSRHLVSIFRGWGQSTLHGCTIRGIILCLFCRHYSWSISLSYLSLSTRLYLFSYLASYYITVLLSHRLYHSSPRPYPPRLVFCFVLLCTLLLCYFYLSLLSLSCSPPSTLLLPIHHCAPSPIP

SEQ ID NO: 791231 - protein, 108 aa, Homo sapiens
AAGIGTREEQPFKFDFCMWIDFFTYSSMSEEVTYADLQFQNSSEMEKIPEIGKFGEKAPPAPSHVWRPAALFLTLLCLLLLIGLGVLASMCMYCPCFGQEEVSRISNI

SEQ ID NO: 791232 - protein, 234 aa, Homo sapiens
GEHMCFYENYAEIDFFTYSSMSEEVTYADLQFQNSSEMEKIPEIGKFGEKAPPAPSHVWRPAALFLTLLCLLLLIGLGVLASMFHVTLKIEMKKMNKLQNISEELQRNISLQLMSNMNISNKIRNLSTTLQTIATKLCRELYSKEQEHKCKPCPRRWIWHKDSCYFLSDDVQTWQESKMACAAQNASLLKINNKNALEFIKSQSRSYDYWLGLSPEEDSTRGMRVDNIINSSAW

SEQ ID NO: 791233 - protein, 107 aa, Homo sapiens
RKPQPGAADGAAQQVGQVQAMDSQQGPAGSLQSPKAPPNSAEQQLAASSKHRAQFCSSWPLSHIMLLKNRRKILQGLTLTLNRMHGGRSCTAACVEGSSHKRVMHSK

SEQ ID NO: 791234 - protein, 43 aa, Homo sapiens
MYWPSSSSRLNQLYSSEFCIFLFTKKRKRKRKHHFIRLCMFFS

SEQ ID NO: 791235 - protein, 126 aa, Homo sapiens
TLLNVVGLGCCELRRYPGEAGHPGTRMTRGRLRVALSAPSCGGEDARVLAGPCAGERDRGALSLRPAASRAQVHIGELGTQATQAVSGSRSYVIMSRAEQGRAPAFLAKPSCPLCTYTVTSKDFPK

SEQ ID NO: 791236 - protein, 312 aa, Homo sapiens
MPGPGRRAAASRRMKSSVGGRREKLLGAPKAQPSRDFTCVHDGESEAELIPDDFEEKPEREKKHTNFTLCNVCNIQLNSAAQAQIHYNGKSHQKRLKQLSNGTLKNDNGGTCQSPALPALVRPPAPPLQPSLDIKPFLPFPLDTAAAVNLFPNFNAMDPIQKSCNKPYIRGSSSPPKKADHIMQHLPSGDLILKPGCGPTTKGTKIAKEGSTALEAMKNKAEICNCPGQRPRITFTPSIPLPSITSSDQNRGGNNGAHGSRVGFNLTILARRRVLAGPGISRAHTVYTRKQRFVQRIPPLSGKSAYEPWEDS

SEQ ID NO: 791237 - protein, 134 aa, Homo sapiens
MPGPGRRAAASRRMKSSVGGRREKLLGAPKAQPSRDFTCVHDGESEAELIPDDFEEKPEREKKHTNFTLCNVCNIQLNSAAQAQIHYNGKSHQKRLKQLSNGTLKNDNGSCLEDCISYYILLNLRCHQFEDAML

SEQ ID NO: 791238 - protein, 63 aa, Homo sapiens
MAKRRRSVMSRYTSSWGSQRRGSCSVELRIFFTPCKVKEQRCQQRGAAAQLDRRLLFRFLEAA

SEQ ID NO: 791239 - protein, 141 aa, Homo sapiens
MPTCMNTHLPESPPAPMSTGTNAHLHPCPLAQMPTCTEAHPHKCPPAKMSACTDVHLHECPPVSTCTNTHLHRCPPARMPTCTKAYLRECPPAWMPTRTDAHLHSYPSEQPSGASFCLHMFKSSQSYSRLFLVGVILGMLF

SEQ ID NO: 791240 - protein, 104 aa, Homo sapiens
RCAVGVKLLSFSLGAAGKGPKHSEAEASLPRNPGSYNRQAQWPQSSLHLKGTIPDTTSLNTPWKMLSSLKVPSWQGAVAHAYNPSTLGGQGGWITRSGDRDHPG

SEQ ID NO: 791241 - protein, 84 aa, Homo sapiens
GPGYLEPPKTRASPPTKALRHNPKASHTTSTLKRHTPRPKIASAPSSTRCKQREDTTHSSSYSVTCISREHTFICAHRWYPPRR

SEQ ID NO: 791242 - protein, 100 aa, Homo sapiens
RYDLFTQCFEHVSISIDQIYKKLCRNNSAQVSSYIKEQTQDQFQMIVISLKEEFYSRADALIGIYPEYDDCMFSRVLTLDLSQYPDTEGQESSKRHGESR

SEQ ID NO: 791243 - protein, 83 aa, Homo sapiens
EVDAALDNTNIGKVSSYIKEQTQDQFQMIVISLKEEFYSRADALIGIYPEYDDCMFSRVLTLDLSQYPDTEGQESSKRHGESR

SEQ ID NO: 791244 - protein, 92 aa, Homo sapiens
WPSRQSPRCNKGTTLSQRLSGTVSSYIKEQTQDQFQMIVISLKEEFYSRADALIGIYPEYDDCMFSRVLTLDLSQYPDTEGQESSKRHGESR

SEQ ID NO: 791245 - protein, 32 aa, Homo sapiens
AILDPCVRKSKSSSPLIFTILQLSFWFPSVVI

SEQ ID NO: 791246 - protein, 101 aa, Homo sapiens
LVPEGIPASKHSAFDRNVIDDKRTRYSENCRLIFVPLNSSLLQPLHQSFFVLFCFSRGRISQSPRLECSDTIIAHCSLKLLGPGESLGPRRRRLQRAEIAP

SEQ ID NO: 791247 - protein, 111 aa, Homo sapiens
ARELKGPPLPPSTPDADSEAHKRGAVRQPVRRGGGTLRPSREKAAAAAAAAAARRGAKPVLRLSGRPGRERLHVGLHWRKAEAFRGLGLFYDHHHYFILPVAQKGSPAPIP

SEQ ID NO: 791248 - protein, 132 aa, Homo sapiens
EAGVSGMRTSRARSLRVPGSRVLPFPGDSPNYRNWPKFSISRLSLGKGAEEVPATRRATTERATDSPRLGSGPAQPPPLPPVRAPSRAPRPGLHPLRRSGSGRAGLRRPHPRPGSEAGPSGALRASGLHAAA

SEQ ID NO: 791249 - protein, 129 aa, Homo sapiens
ASPTPETQPLGAEKLSPPGPRARDAGAQQRGGAPRWPGAARGPALVPRARRRYEDTDAVAQLPSPAAIPEPGSRPPLGPAQAASPRRGVPPRYPPPRRPHKQVLEVRRQEAGRSAGAGGGPGSGQRLRP

SEQ ID NO: 791250 - protein, 116 aa, Homo sapiens
MCRSIDASFGFEMEMFEFLNICQAHGFPKILGVLTHLDSFKHNKQLKKTKKGLKHRFWTEVYQVAKLFYLSGMVHGEYQNQEIHNLGHFITVMKFRPLMANFSPLYPGRQLKGWKI

SEQ ID NO: 791251 - protein, 116 aa, Homo sapiens; identical to SEQ ID NO: 791250

SEQ ID NO: 791252 - protein, 116 aa, Homo sapiens; identical to SEQ ID NO: 791250

SEQ ID NO: 791253 - protein, 73 aa, Homo sapiens
LDSSNPPTSPSQSAKITHMSHHTRHIHAFCWVKRELVLEKVKEKRIFNDFLITLIVNLTVIKEIIKKNFDKMT

SEQ ID NO: 791254 - protein, 71 aa, Homo sapiens
PCPPSGPVPAPPRAPPAPPTLSSTHDGPAPVSSYRRFENPKSDLPCPRPPCIYRDPQNKTLSRARRGGLRL

SEQ ID NO: 791255 - protein, 161 aa, Homo sapiens
RLVRAEGSGAGAARGCRPRSAAVRAAGGSRCLGPRAGWQPAAGTERGRAAGCAPARGFSLEAEGQTWGPVAARPHRPAAGRVLLRGGDTAPRAARGFLLEEGNGEFEGDCSMLEDKGHCSLGASRRRRGGVRSLPLRPELGLWLLGPGTQRGAGAGRPTAQ

SEQ ID NO: 791256 - protein, 872 aa, Homo sapiens
MPKLVKNLLGEMPLWVCQSCRKSMEEDERQTGREHAVAISLSHTSCKSQSCGDDSHSSSSSSSSSSSSSSSSCPGNSGDWDPSSFLSAHKLSGLWNSPHSSGAMPGSSLGSPPTIPGEAFPVSEHHQHSDLTAPPNSPTGHHPQPASLIPSHPSSFGSPPHPHLLPTTPAAPFPAQASECPVAAATAPHTPGPCQSSHLPSTSMPLLKMPPPFSGCSHPCSGHCGGHCSGPLLPPPSSQPLPSTHRDPGCKGHKFAHSGLACQLPQPCEADEGLGEEEDSSSERSSCTSSSTHQRDGKFCDCCYCEFFGHNAAKGRKWQRESYDSDEYVYVCNPKRSERLGVMKAEWKQKGSQSPKCDSQAEGQAVSTDGARKEAQIRGHAGSGQGEEAVQKSHKPPAAPTSRNYTEIREKLRSRLTRRKEELPMKGGTLGGIPGEPAVDHRDVDELLEFINSTEPKVPNSARAAKRARHKLKKKEKEKAQLAAEALKQANRVSGSREPRPARERLLEWPDRELDRVNSFLSSRLQEIKNTVKDSIRASFSVCELSMDSNGFSKEGAAEPEPQSLPPSNLSGSSEQQPDINLDLSPLTLGSPQNHTLQAPGEPAPPWAEMRGPHPPWTEVRGPPPGIVPENGLVRRLNTVPNLSRVIWVKTPKPGYPSSEEPSSKEVPSCKQELPEPVSSGGKPQKGKRQGSQAKKSEASPAPRPPASLEVPSAKGQVAGPKQPGRVLELPKVGSCAEAGEGSRGSRPGPGWAGSPKTEKEKGSSWRNWPGEAKARPQEQESVQPPGPARPQSLPQGKGRSRRSRNKQEKPASSLDDVFLPKDMDGVEMDETDREVEYFKRFCLDSAKQTRQKVAVNWTNFSLKKTTPSTAQ

SEQ ID NO: 791257 - protein, 169 aa, Homo sapiens
RYAAAAAAAVAAAAARRVERGSGASGGMTRRRSRPSGGAGRRERARAAGPQKPQAPEPPPPPSLEAGAGAGPPEAPAEPDHDGPREDDEPNLVPGPQVGASGETSAARALSPSPSGSGSGAGLGMGHPAAAGVAAFPRVRRRSFLPRGGNGGWTPLPKAEARSALLRLG

SEQ ID NO: 791258 - protein, 789 aa, Homo sapiens
MPKLVKNLLGEMPLWVCQSCRKSMEEDERQTGREHAVAISLSHTSCKSQSCGDDSHSSSSSSSSSSSSSSSSCPGNSGDWDPSSFLSAHKLSGLWNSPHSSGAMPGSSLGSPPTIPGEAFPVSEHHQHSDLTAPPNSPTGHHPQPASLIPSHPSSFGSPPHPHLLPTTPAAPFPAQASECPVAAATAPHTPGPCQSSHLPSTSMPLLKMPPPFSGCSHPCSGHCGGHCSGPLLPPPSSQPLPSTHRDPGCKGHKFAHSGLACQLPQPCEADEGLGEEEDSSSERSSCTSSSTHQRDGKFCDCCYCEFFGHNAPPAAPTSRNYTEIREKLRSRLTRRKEELPMKGGTLGGIPGEPAVDHRDVDELLEFINSTEPKVPNSARAAKRARHKLKKKEKEKAQLAAEALKQANRVSGSREPRPARERLLEWPDRELDRVNSFLSSRLQEIKNTVKDSIRASFSVCELSMDSNGFSKEGAAEPEPQSLPPSNLSGSSEQQPDINLDLSPLTLGSPQNHTLQAPGEPAPPWAEMRGPHPPWTEVRGPPPGIVPENGLVRRLNTVPNLSRVIWVKTPKPGYPSSEEPSSKEVPSCKQELPEPVSSGGKPQKGKRQGSQAKKSEASPAPRPPASLEVPSAKGQVAGPKQPGRVLELPKVGSCAEAGEGSRGSRPGPGWAGSPKTEKEKGSSWRNWPGEAKARPQEQESVQPPGPARPQSLPQGKGRSRRSRNKQEKPASSLDDVFLPKDMDGVEMDETDREVEYFKRFCLDSAKQTRQKVAVNWTNFSLKKTTPSTAQ

SEQ ID NO: 791259 - protein, 789 aa, Homo sapiens; identical to SEQ ID NO: 791258

SEQ ID NO: 791260 - protein, 925 aa, Homo sapiens
RVLSTYLSRPRPGPPASSQPVQTCCLLCHRERKGWEEGGGDMHNSRDSTRRLSRAMPSGCTSLPESPAARCSVGRRGKKLTGIEHLLCAGPGQVPPASSQPVQTCCLLCHRERKGWEEGPSQNGLVLQGEKLPPDFMPKLVKNLLGEMPLWVCQSCRKSMEEDERQTGREHAVAISLSHTSCKSQSCGDDSHSSSSSSSSSSSSSSSSCPGNSGDWDPSSFLSAHKLSGLWNSPHSSGAMPGSSLGSPPTIPGEAFPVSEHHQHSDLTAPPNSPTGHHPQPASLIPSHPSSFGSPPHPHLLPTTPAAPFPAQASECPVAAATAPHTPGPCQSSHLPSTSMPLLKMPPPFSGCSHPCSGHCGGHCSGPLLPPPSSQPLPSTHRDPGCKGHKFAHSGLACQLPQPCEADEGLGEEEDSSSERSSCTSSSTHQRDGKFCDCCYCEFFGHNAPPAAPTSRNYTEIREKLRSRLTRRKEELPMKGGTLGGIPGEPAVDHRDVDELLEFINSTEPKVPNSARAAKRARHKLKKKEKEKAQLAAEALKQANRVSGSREPRPARERLLEWPDRELDRVNSFLSSRLQEIKNTVKDSIRASFSVCELSMDSNGFSKEGAAEPEPQSLPPSNLSGSSEQQPDINLDLSPLTLGSPQNHTLQAPGEPAPPWAEMRGPHPPWTEVRGPPPGIVPENGLVRRLNTVPNLSRVIWVKTPKPGYPSSEEPSSKEVPSCKQELPEPVSSGGKPQKGKRQGSQAKKSEASPAPRPPASLEVPSAKGQVAGPKQPGRVLELPKVGSCAEAGEGSRGSRPGPGWAGSPKTEKEKGSSWRNWPGEAKARPQEQESVQPPGPARPQSLPQGKGRSRRSRNKQEKPASSLDDVFLPKDMDGVEMDETDREVEYFKRFCLDSAKQTRQKVAVNWTNFSLKKTTPSTAQ

SEQ ID NO: 791261 - protein, 768 aa, Homo sapiens
MPKLVKNLLGEMPLWVCQSCRKSMEEDERQTGREHAVAISLSHTSCKSQSCGDDSHSSSSSSSSSSSSSSSSCPGNSGDWDPSSFLSAHKLSGLWNSPHSSGAMPGSSLGSPPTIPGEAFPVSEHHQHSDLTAPPNSPTGHHPQPASLIPSHPSSFGSPPHPHLLPTTPAAPFPAQASECPVAAATAPHTPGPCQSSHLPSTSMPLLKMPPPFSGCSHPCSGHCGGHCSGPLLPPPSSQPLPSTHRDPGCKGHKFAHSGLACQLPQPCEADEGLGEEEDSSSERSSCTSSSTHQRDGKFCDCCYCEFFGHNAPPAAPTSRNYTEIREKLRSRLTRRKEELPMKGGTLGGIPGEPAVDHRDVDELLEFINSTEPKVPNSARAAKRARHKLKKKEKEKAQLAAEALKQANRVSGSREPRPARERLLEWPDRELDRVNSFLSSRLQEIKNTVKDSIRASFSVCELSMDSNGFSKEGAAEPEPQSLPPSNLSGSSEQQPDINLDLSPLTLGSPQNHTLQAPGEPAPPWAEMRGPHPPWTEVRGPPPGIVPENGLVRRLNTVPNLSRVIWVKTPKPGYPSSEEPSSKEVPSCKQELPEPVSSGGKPQKGKRQGSQAKKSEASPAPRPPASLEVPSAKGQVAGPKQPGRVLELPKVGSCAEAGEGSRGSRPGPGWAGSPKTEKEKGSSWRNWPGEAKARPQEQESVQPPGPARPQSLPQGKGRSRRSRNKQEKPASSLDDVFLPKDMDGVEMDETDREVEYFKSTLGGRGGWIT

SEQ ID NO: 791262 - protein, 789 aa, Homo sapiens; identical to SEQ ID NO: 791258

SEQ ID NO: 791263 - protein, 698 aa, Homo sapiens
MPKLVKNLLGEMPLWVCQSCRKSMEEDERQTGREHAVAISLSHTSCKSQSCGDDSHSSSSSSSSSSSSSSSSCPGNSGDWDPSSFLSAHKLSGLWNSPHSSGAMPGSSLGSPPTIPGEAFPVSEHHQHSDLTAPPNSPTGHHPQPASLIPSHPSSFGSPPHPHLLPTTPAAPFPAQASECPVAAATAPHTPGPCQSSHLPSTSMPLLKMPPPFSGCSHPCSGHCGGHCSGPLLPPPSSQPLPSTHRDPGCKGHKFAHSGLACQLPQPCEADEGLGEEEDSSSERSSCTSSSTHQRDGKFCDCCYCEFFGHNAPPAAPTSRNYTEIREKLRSRLTRRKEELPMKGGTLGGIPGEPAVDHRDVDELLEFINSTEPKVPNSARAAKRARHKLKKKEKEKAQLAAEALKQANRVSGSREPRPARERLLEWPDRELDRVNSFLSSRLQEIKNTVKDSIRASFSVCELSMDSNGFSKEGAAEPEPQSLPPSNLSGSSEQQPDINLDLSPLTLGSPQNHTLQAPGEPAPPWAEMRGPHPPWTEVRGPPPGIVPENGLVRRLNTVPNLSRVIWVKTPKPGYPSSEEPSSKEVPSCKQELPEPVSSGGKPQKGKRQGSQAKKSEASPAPRPPASLEVPSAKGQVAGPKQPGRVLELPKVGSCAEAGEGSRGSRPGPGWAGSPKTEKDETDREVEYFKWPCLDSGVPS

SEQ ID NO: 791264 - protein, 169 aa, Homo sapiens; identical to SEQ ID NO: 791257

SEQ ID NO: 791265 - protein, 169 aa, Homo sapiens; identical to SEQ ID NO: 791257

SEQ ID NO: 791266 - protein, 849 aa, Homo sapiens
MPKLVKNLLGEMPLWVCQSCRKSMEEDERQTGREHAVAISLSHTSCKSQSCGDDSHSSSSSSSSSSSSSSSSCPGNSGDWDPSSFLSAHKLSGLWNSPHSSGAMPGSSLGSPPTIPGEAFPVSEHHQHSDLTAPPNSPTGHHPQPASLIPSHPSSFGSPPHPHLLPTTPAAPFPAQASECPVAAATAPHTPGPCQSSHLPSTSMPLLKMPPPFSGCSHPCSGHCGGHCSGPLLPPPSSQPLPSTHRDPGCKGHKFAHSGLACQLPQPCEADEGLGEEEDSSSERSSCTSSSTHQRDGKFCDCCYCEFFGHNARSERLGVMKAEWKQKGSQSPKCDSQPRDEAVSTDGARKEAQIRGHAGSGQGEEAVQKSHKPPAAPTSRNYTEIREKLRSRLTRRKEELPMKGGTLGGIPGEPAVDHRDVDELLEFINSTEPKVPNSARAAKRARHKLKKKEKEKAQLAAEALKQANRVSGSREPRPARERLLEWPDRELDRVNSFLSSRLQEIKNTVKDSIRASFSVCELSMDSNGFSKEGAAEPEPQSLPPSNLSGSSEQQPDINLDLSPLTLGSPQNHTLQAPGEPAPPWAEMRGPHPPWTEVRGPPPGIVPENGLVRRLNTVPNLSRVIWVKTPKPGYPSSEEPSSKEVPSCKQELPEPVSSGGKPQKGKRQGSQAKKSEASPAPRPPASLEVPSAKGQVAGPKQPGRVLELPKVGSCAEAGEGSRGSRPGPGWAGSPKTEKEKGSSWRNWPGEAKARPQEQESVQPPGPARPQSLPQGKGRSRRSRNKQEKPASSLDDVFLPKDMDGVEMDETDREVEYFKRFCLDSAKQTRQKVAVNWTNFSLKKTTPSTAQ

SEQ ID NO: 791267 - protein, 794 aa, Homo sapiens
MPKLVKNLLGEMPLWVCQSCRKSMEEDERQTGREHAVAISLSHTSCKSQSCGDDSHSSSSSSSSSSSSSSSSCPGNSGDWDPSSFLSAHKLSGLWNSPHSSGAMPGSSLGSPPTIPGEAFPVSEHHQHSDLTAPPNSPTGHHPQPASLIPSHPSSFGSPPHPHLLPTTPAAPFPAQASECPVAAATAPHTPGPCQSSHLPSTSMPLLKMPPPFSGCSHPCSGHCGGHCSGPLLPPPSSQPLPSTHRDPGCKGHKFAHSGLACQLPQPCEADEGLGEEEDSSSERSSCTSSSTHQRDGKFCDCCYCEFFGHNAPPAAPTSRNYTEIREKLRSRLTRRKEELPMKGGTLGGIPGEPAVDHRDVDELLEFINSTEPKVPNSARAAKRARHKLKKKEKEKAQLAAEALKQANRVSGSREPRPARERLLEWPDRELDRVNSFLSSRLQEIKNTVKDSIRASFSVCELSMDSNGFSKEGAAEPEPQSLPPSNLSGSSEQQPDINLDLSPLTLGSPQNHTLQAPGEPAPPWAEMRGPHPPWTEVRGPPPGIVPENGLVRRLNTVPNLSRVIWVKTPKPGYPSSEEPSSKEVPSCKQELPEPVSSGGKPQKGKRQGSQAKKSEASPAPRPPASLEVPSAKGQVAGPKQPGRVLELPKVGSCAEAGEGSRGSRPGPGWAGSPKTEKEKGSSWRNWPGEAKARPQEQESVQPPGPARPQSLPQGKGRSRRSRNKQEKPASSLDDVFLPKDMDGVEMDETDREVEYFKSIFGQARWLMLLILALWEAEAGGSPEIRSSRPAWPSW

SEQ ID NO: 791268 - protein, 786 aa, Homo sapiens
MPKLVKNLLGEMPLWVCQSCRKSMEEDERQTGREHAVAISLSHTSCKSQSCGDDSHSSSSSSSSSSSSSSSSCPGNSGDWDPSSFLSAHKLSGLWNSPHSSGAMPGSSLGSPPTIPGEAFPVSEHHQHSDLTAPPNSPTGHHPQPASLIPSHPSSFGSPPHPHLLPTTPAAPFPAQASECPVAAATAPHTPGPCQSSHLPSTSMPLLKMPPPFSGCSHPCSGHCGGHCSGPLLPPPSSQPLPSTHRDPGCKGHKFAHSGLACQLPQPCEADEGLGEEEDSSSERSSCTSSSTHQRDGKFCDCCYCEFFGHNAPPAAPTSRNYTEIREKLRSRLTRRKEELPMKGGTLGGIPGEPAVDHRDVDELLEFINSTEPKVPNSARAAKRARHKLKKKEKEKAQLAAEALKQANRVSGSREPRPARERLLEWPDRELDRVNSFLSSRLQEIKNTVKDSIRASFSVCELSMDSNGFSKEGAAEPEPQSLPPSNLSGSSEQQPDINLDLSPLTLGSPQNHTLQAPGEPAPPWAEMRGPHPPWTEVRGPPPGIVPENGLVRRLNTVPNLSRVIWVKTPKPGYPSSEEPSSKEVPSCKQELPEPVSSGGKPQKGKRQGSQAKKSEASPAPRPPASLEVPSAKGQVAGPKQPGRVLELPKVGSCAEAGEGSRGSRPGPGWAGSPKTEKEKGSSWRNWPGEAKARPQEQESVQPPGPARPQSLPQGKGRSRRSRNKQEKPASSLDDVFLPKDMDGVEMDETDREVEYFKRFCLDSAKQTRQKVAVNWTNFSLKGILRP

SEQ ID NO: 791269 - protein, 784 aa, Homo sapiens
MPKLVKNLLGEMPLWVCQSCRKSMEEDERQTGREHAVAISLSHTSCKSQSCGDDSHSSSSSSSSSSSSSSSSCPGNSGDWDPSSFLSAHKLSGLWNSPHSSGAMPGSSLGSPPTIPGEAFPVSEHHQHSDLTAPPNSPTGHHPQPASLIPSHPSSFGSPPHPHLLPTTPAAPFPAQASECPVAAATAPHTPGPCQSSHLPSTSMPLLKMPPPFSGCSHPCSGHCGGHCSGPLLPPPSSQPLPSTHRDPGCKGHKFAHSGLACQLPQPCEADEGLGEEEDSSSERSSCTSSSTHQRDGKFCDCCYCEFFGHNAPPAAPTSRNYTEIREKLRSRLTRRKEELPMKGGTLGGIPGEPAVDHRDVDELLEFINSTEPKVPNSARAAKRARHKLKKKEKEKAQLAAEALKQANRVSGSREPRPARERLLEWPDRELDRVNSFLSSRLQEIKNTVKDSIRASFSVCELSMDSNGFSKEGAAEPEPQSLPPSNLSGSSEQQPDINLDLSPLTLGSPQNHTLQAPGEPAPPWAEMRGPHPPWTEVRGPPPGIVPENGLVRRLNTVPNLSRVIWVKTPKPGYPSSEEPSSKEVPSCKQELPEPVSSGGKPQKGKRQGSQAKKSEASPAPRPPASLEVPSAKGQVAGPKQPGRVLELPKVGSCAEAGEGSRGSRPGPGWAGSPKTEKEKGSSWRNWPGEAKARPQEQESVQPPGPARPQSLPQGKGRSRRSRNKQEKPASSLDDVFLPKDMDGVEMDETDREVEYFKSAGPTLLSLCLVFLFLFLFCFFPILYF

SEQ ID NO: 791270 - protein, 153 aa, Homo sapiens
MPKLVKNLLGEMPLWVCQSCRKSMEEDERQTGREHAVAISLSHTSCKSQSCGDDSHSSSSSSSSSSSSSSSSCPGNSGDWDPSSFLSAHKLSGLWNSPHSSGAMPGSSLGSPPTIPGEAFPVSEHHQHSDLTAPPNSPTGHHPQLAPELAARP

SEQ ID NO: 791271 - protein, 169 aa, Homo sapiens; identical to SEQ ID NO: 791257

SEQ ID NO: 791272 - protein, 101 aa, Homo sapiens
PSLWAWSCLTHGWEWPLVVPQPVVLRGHPSCSSVAAPGLRSQDSQECGRGHPESFGLWGLLEKQNQVGGAEGTLATHRHHHLWGPQSLCNNLVPQSSSAFE

SEQ ID NO: 791273 - protein, 58 aa, Homo sapiens
PPSSPALAPPAPGRALLDPDPEPAERRARLSAPPGPLPSTGRENRGAPLSSSPRYERP

SEQ ID NO: 791274 - protein, 187 aa, Homo sapiens
DLPDGHCQAALPAFRALDRGPFKLPPRPGQDAATAQRGSQRTPSEPSGLYFHFFLAGRNFLLLRKTSLNRATNGSRVSRTSPARRNNSAMSCVEWIGSTWSLFPFKIPQGLSLEEPGCLINHAGTFIRSSVCEQKPEGEGGGPLGPPESGPTGGLDKRRDLSLEHLLHAPEVLTHPGPAGEVPQDLP

SEQ ID NO: 791275 - protein, 31 aa, Homo sapiens
EESMGCLLSLRGSAMCLVMPYLLTLSPCCWP

SEQ ID NO: 791276 - protein, 100 aa, Homo sapiens
VLIELQSSSWRAGSQHGAYRPVDTVPSGYQNYRQMSMPTHINWKSHCPGPGTQAGHVVFDARQRRLAVGKDKCEALSPRRLHQEAPSNSGKPSRSGDIRM

SEQ ID NO: 791277 - protein, 76 aa, Homo sapiens
QPPRRLTQGTGLKALSPSAPHTPPRPAGNLPREPALAVGDGKASPGFLDLSLFGRAKKNPRPGTVAHACNPSTLGG

SEQ ID NO: 791278 - protein, 117 aa, Homo sapiens
VRFCFHCDKAASNSMQCLTIAALSLFQAQRFSLYATKPLPWDGDRWHQQLKTVFPTLFIASFNSMKLKSDYPGRGSCKDLGFSGPSNSKYRQEQLPNLHTTDLSTRRQMEPLFSSEF

SEQ ID NO: 791279 - protein, 30 aa, Homo sapiens
MDLRWGVALSCDRSSRQPWTRGHEQSSHFS

SEQ ID NO: 791280 - protein, 41 aa, Homo sapiens
DEFSDFKDLQMSVVEIASGGFMLTLKYSILEGMWLLIASYQ

SEQ ID NO: 791281 - protein, 127 aa, Homo sapiens
QGLGVEKMTYSGLSNMKFVLIRFHTVRKKYLILGNYKEKRFNWLTVPHGWGGVRKLTIMVEGTSSQGGRRENERQAKKEKPFIKLSPPASVRSLTPVIPALWEAEVGGSRGQEIEIILANTVKPHLY

SEQ ID NO: 791282 - protein, 449 aa, Homo sapiens
RAAGNCFPEPGFVKQLSAAAAVVAPAAAATEGSIPDTGKMEDGTPKHIIQMTGFKMEEKEALVKLLLKLDCTFIKSEKYKNCTHLIAERLCKSEKFLAACAAGKWILTKDYIIHSAKSGRWLDETTYEWGYKIEKDSRYSPQMQSAPKRWREELKRTGAPGAFHRWKVVLLVRTDKRSDSLIRVLEAGKANVILPKSSPSGITHVIASNARIKAEKEKDNFKAPFYPIQYLGDFLLEKEIQNDEDSQTNSVWTEHSNEETNKDFRKDAGFLEMKGALRETMYRTQKEMQNHEDVNVGSILIQHHKKEKFSGSSKDLKFVKMRNTFGSHTYENQKEIKKKDEDIQRSYTLRRKRKKGKESNCKKGVEHEKIKSTLRRHIYNRDQKEMKNSIFAEYAKESKAMAIKTDVDVVEIKNTLRKHIYRAQSFGGWKGKCHFTKKFTKWNNSCDCQ

SEQ ID NO: 791283 - protein, 462 aa, Homo sapiens
RAAGNCFPEPGFVKQLSAAAAVVAPAAAATEGSIPDTGKMEDGTPKHIIQMTGFKMEEKEALVKLLLKLDCTFIKSEKYKNCTHLIAERLCKSEKFLAACAAGKWILTKDYIIHSAKSGRWLDETTYEWGYKIEKDSRYSPQMQSAPKRWREELKRTGAPGAFHRWKVVLLVRTDKRSDSLIRVLEAGKANVILPKSSPSGITHVIASNARIKAEKEKDNFKAPFYPIQYLGDFLLEKEIQNDEDSQTNSVWTEHSNEETNKDFRKDAGFLEMKGALRETMYRTQKEMQNHEDVNVGSILIQHHKKEKFSGSSKDLKFVKMRNTFGSHTYENQKEIKKKDEDIQRSYTLRRKRKKGKESNCKKGVEHEKIKSTLRRHIYNRDQKEMKNSIFAEYAKESKAMAIKTDVDVVEIKNTLRKHIYRAQAVRYNCIRIDKQPVYNVEVKNAEFPRGVLNLIESLIEG

SEQ ID NO: 791284 - protein, 107 aa, Homo sapiens
DSVSRKKQTKAGKALGGLCSRLTWTQPWLDSAVQAPSHKQKAALRTTQRWDLRGCCLLVNSGSTISVVTLDRSLNFSEPLFPYLQSGVSLRAAARMVEVEAEGNCQC

SEQ ID NO: 791285 - protein, 166 aa, Homo sapiens
VGGEGMAEIKHGDYPTISGSYPAAVDMTANPPENGFAALHGSALPPHLRLAQRHTSVVIGSSLAETRVGTEMASLTADFSGQQLCARRREGRAHWRCGARQGQSASGRRCKPDRSTDTCRDVPSRQLAGTWERVGSLAGGEPGLRETARGRVREWRRSPDPRAHAA

SEQ ID NO: 791286 - protein, 793 aa, Homo sapiens
MEARVERAVQKRQVLFLCVFLGMSWAGAEPLRYFVAEETERGTFLTNLAKDLGLGVGELRARGTRIVSDQNMQILLLSSLTGDLLLNEKLDREELCGPREPCVLPFQLLLEKPFQIFRAELWVRDINDHAPVFLDREISLKILESTTPGAAFLLESAQDSDVGTNSLSNYTISPNAYFHINVHDSGEGNIYPELVLNQVLDREEIPEFSLTLTALDGGSPPRSGTALVRILVLDVNDNAPDFVRSLYKVQVPENSPVGSMVVSVSARDLDTGSNGEIAYAFSYATERILKTFQINPTSGSLHLKAQLDYEAIQTYTLTIQAKDGGGLSGKCTVVVDVTDINDNRPELLLSSLTSPIAENSPETVVAVFRIRDRDSGNNGKTVCSIQDDVPFILKPSVENFYTLVTEKPLDRERNTEYNITITVTDLGTPRLKTEHNITVLVSDVNDNAPAFTQTSYTLFVRENNSPALPIGSVSATDRDSGTNAQVIYSLLPSQDPHLPLASLVSINADNGHLFALRSLDYEALQAFEFRVGATDRGSPALSSEALVRVLVLDANDNSPFVLYPLQNSSAPCTEPLPRAAEPGYLVTKVVAVDGDSGQNAWLSYQLLKATEPGLFGVWAHNGEVRTARLLSERDAAKQRLVVLVKDNGEPPRSATATLHVLLVDGFSQPYLRLPEAAPDQANSLTVYLVVALASVSSLFLLSVLLFVAVRLCRRSRAAPVGRCSVPEGPFPRHLVDLSGTGTLSQSYQYEVCLTGGSGTNEFKFLKPIIPNLLPQSTGREVEENRPFQNNLGF

SEQ ID NO: 791287 - protein, 793 aa, Homo sapiens; identical to SEQ ID NO: 791286

SEQ ID NO: 791288 - protein, 121 aa, Homo sapiens
KKHLQLLNGGWVATVPALGARFIPRDQPSADLGIWSEWSCWSWEQACSGHRSSLYRKAPSFRCPASTEESKGVFLNLYPVMCSHSSFDGPQWSQDSVCSKRMAKASLSCVSYWVEFYVVTR

SEQ ID NO: 791289 - protein, 117 aa, Homo sapiens
GRRPCSDRAPGLAASCSPALPAQLLGEAAPPTHPNHMSTGIQRPRSPWRPGERRQGVPEKEEGRAQAAAFLLCLLCQQLSPSTGRSLGRTEGCHKELLNRSKGIEGWSDMIYDLPNP

SEQ ID NO: 791290 - protein, 83 aa, Homo sapiens
KDESYFSVWCLAHSAGVQNHQRLDCRCNICSRKADLTHVEAPFPHLLSQDADGVAFRDCYTDRVLEGCVARKRCCADVRGLYL

SEQ ID NO: 791291 - protein, 604 aa, Homo sapiens
QEYILNLFQRYVDEGLHFINKKCSQAIPQVDISKVTTLCCLLESLILGKDGVNLAMEQTKLNTILCQTFVFCYLWSLGGNLTENYYDSFDTFIRTQFDDNPDARLPNSGDLWSIHMDFDTKRLDPWERIIPTFKYNRDVPFFEMLVPTTDTVRYGYLMEKLLAVKHSVLFTGITGVGKSVIAKGLLNKIQESAGYVPVYLNFSAQTSSARTQEIIESKLERKRKNILGAPGNKRIVIFVDDLNMPRLDRYGSQPPIELLRQYQDFGGFYDRNKLFWKEIQDVTIISACAPPGGGRNPVTPRFIRHFSMLCLPMPSEHSLKQIFQLNGFLSDFPPAVKQTASSIVEASVEIYNKMSVDLLPTPAKSHYVFNLRDLSKCVQDKHFGIAIDLEYFLNKPIIFGDFIKFGADKADRIYDDMPDIEKTANVLQDYLDDYNLTNPKEVKLVFFQDAIEHVSRIARMIRQERGNALLVGVGGTGKQSLTRLAAHICGYKCLQIELSRGYNYDSFHEDLRKLYKMAGVEDKNMVFLFTDTQIVVEEFLEDINNILNSGEVPNLFEKDELEQVLAATRPRAKEVGISEGNRDEVGCARVVMWLYHKNVSSPFI

SEQ ID NO: 791292 - protein, 84 aa, Homo sapiens
ADRSPEPSREDAPLKMTLLGVHEEGEATEGWRAPGLEEELESVPCHDPQAAGATAQSGTVTLAPSFTCAFSSHIPGRLARLCQL

SEQ ID NO: 791293 - protein, 126 aa, Homo sapiens
AVVKKAAKRSSTADSCKTAPGCTESRAVESPGALTRRPRGDEKHPNLLLRKARGQGSAITAATVCTVLKSIKSQVHHLGKSAVATGNIRIYPPALRWFPERMRELTLSTLLGALSIFTHSVLTSPL

SEQ ID NO: 791294 - protein, 113 aa, Homo sapiens
YSSYKVAQQNRENNWLKSYKHICYRLHVCRWSQGSVCNHSCLRIGYTGFFMKLTFKSFIPTGSQSSAVFLLGCCSFPLLKLEGFLVYFLILSSPPGFCCETATQFAFFLSTLQ

SEQ ID NO: 791295 - protein, 93 aa, Homo sapiens
LNLFNSILYRSNIVPESAEAARKEVSSRTKLHIFLGRSASLLRPNGHSLARWLETTVPERTQGKISRRNPNRKIYDWEAKGFAKAWGKEDLYV

SEQ ID NO: 791296 - protein, 30 aa, Homo sapiens
MSPNARVWTYFHHKPQRELPEEQGLPGAPT

SEQ ID NO: 791297 - protein, 114 aa, Homo sapiens [sequence omitted]

SEQ ID NO: 791298 - protein, 135 aa, Homo sapiens
SDVAPCASPSKTTICGMAPPWPLHSCPPPAGRGFLPALSIHSFHLGLVILATAAPPWCSAKLCCLQAAPSWTLSLTQITSFLLHSPPPCSASSLTQLKVHGHGHPLTMPSSLPVPSGSTVLTAQPCPYLHPTLHL

SEQ ID NO: 791299 - protein, 81 aa, Homo sapiens
SQRSKVHAGHVSEDEIMDGSHTWSPPSFHLASSPSIPPCSEGISSADGGWPAVYLDLLGSEISCAWLLHFVSILGKDAEVC

SEQ ID NO: 791300 - protein, 37 aa, Homo sapiens
GPSRLGSRDRMGGIRGLESAPGSLPATRIPAPFRPFG

SEQ ID NO: 791301 - protein, 125 aa, Homo sapiens
MAFRYHYQLIEHCQIHTGEKPFECKECGKAFTLLTKLVRHQKIHTGEKPFECRECGKAFSLLNQLNRHKNIHTGEKPFECKECGKSFNRSSNLVQHQSIHAGIKPYECKECGKGFNRGAHLIQHQ

SEQ ID NO: 791302 - protein, 106 aa, Homo sapiens
MRTTPEAADQVRAAPGPTPPDCPPSHSTPQERKLLEDRLAEFSSQAAEEEEKVKSLNKLRLKYEATIADLEDRLRKEEKGRQELEKLKRRLDGESSELQEQMVEQQ

SEQ ID NO: 791303 - protein, 356 aa, Homo sapiens
MYRSSGSDIEILTPNAIPKGFMDGKQACEKMIQALELDPNLYRVGQSKIFFRAGVLAQLEEERDLKVTDIIVSFQAAARGYLARRAFQKRQQQQSALRVMQRNCAAYLKLRHWQWWRLFTKVKPLLQVTRQDEVLQARAQELQKVQELQQQSAREVGELQGRVAQLEEERARLAEQLRAEAELCAEAEETRGRLAARKQELELVVSELEARVGEEEECSRQMQTEKKRLQQHIQELEAHLEAEEGARQKLQLEKVTTEAKMKKFEEDLLLLEDQNSKLSKERKLLEDRLAEFSSQAAEEEEKVKSLNKLRLKYEATIADLEDRLRKEEKGRQELEKLKRRLDGESSELQEQMVEQQ

SEQ ID NO: 791304 - protein, 124 aa, Homo sapiens
RYWTLTYLALPTVTDQEASSMPSTGDSEATPSPPTGNSESAPVPATGDSQDAPVSPSGDSEAPPYPLRVTLRPVPTLGDTEAAPVSPTDDSEEAQMLQSLVSSVPSALVSRGREGATPGAPLPS

SEQ ID NO: 791305 - protein, 229 aa, Homo sapiens
MATGALLPCSRPCPMSRLDFLKASHFSLGPDLRLHEGTMRTTSHRDFAYPAATREPPSLQPPPALLFPMDPRWDREERVSEAHRAFPPPSTPPWELLQAQARERTLAMQAGNLHLHEDAHAGIGLSNAHAAYGWPELPARTRERIRGARLIFDRDSLPPGDRDKLRIPPTTHQALFPPHDARPQPRAPSCHLGGPNTLKWDYTRQDGTSYQRQFQALPGPPALRCKRVN

SEQ ID NO: 791306 - protein, 82 aa, Homo sapiens
MVIFTILILLIHEHRRFSICLYHLWFLSSVFCSSMCRDLSPLWLSIFLGFFLKLLWFQVLHLTLFLFSKKGVACCQRSFNFT

SEQ ID NO: 791307 - protein, 106 aa, Homo sapiens
VCGWHSPATPSRPLPRRCTPRARQARGAGVASQQGAQAATSPQGTPSTQAGRDDTNVRRGVSGVTGRQNERRGPHCLEGITRNPRYSAGRWVRRLAPRTLEAWKSR

SEQ ID NO: 791308 - protein, 66 aa, Homo sapiens
ACACSPESPPALEGKEPGHGATAAGATTLAQIFPAGMTIHWVLGLGPLDPQTEPRGYREKLKYIPP

SEQ ID NO: 791309 - protein, 127 aa, Homo sapiens [sequence omitted]

SEQ ID NO: 791310 - protein, 430 aa, Homo sapiens
MSSRSPRPPPRRSRRRLPRPSCCCCCCRRSHLNEDTGRFVLLAALIGLYLVAGATVFSALESPGEAEARARWGATLRNFSAAHGVAEPELRAFLRHYEAALAAGVRADALRPRWDFPGAFYFVGTVVSTIGFGMTTPATVGGKAFLIAYGLFGCAGTILFFNLFLERIISLLAFIMRACRERQLRRSGLLPATFRRGSALSEADSLAGWKPSVYHVLLILGLFAVLLSCCASAMYTSVEGWDYVDSLYFCFVTFSTIGFGDLVSSQHAAYRNQGLYRLGNFLFILLGVCCIYSLFNVISILIKQVLNWMLRKLSCRCCARCCPAPGAPLARRNAITPGSRLRRRLAALGADPAARDSDAEGRRLSGELISMRDLTASNKVSLALLQKQLSETANGYPRSVCVNTRQNGFSGGVGALGIMNNRLAETSASR

SEQ ID NO: 791311 - protein, 430 aa, Homo sapiens; identical to SEQ ID NO: 791310

SEQ ID NO: 791312 - protein, 137 aa, Homo sapiens
MTTPATVGGKAFLIAYGLFGCAGTILFFNLFLERIISLLAFIMRACRERQLRRSGLLPATFRRGSALSEADSLAGWKPSVYHVLLILGLFAVLLSCCASAMYTSVEGWDYVDSLYFCFVTFSTIGFGDLVSSQHAAY

SEQ ID NO: 791313 - protein, 74 aa, Homo sapiens
KDQTSSSVIVGLRLNKEAPIKTKSMWPPGEHIATDAICEMCKTLAGTRPVSLLQTWRSVLKLFSKQNLSTTKVP

SEQ ID NO: 791314 - protein, 159 aa, Homo sapiens
MRKNESYLNQPAPPIPIPTLSLMGGCREHFENHWKGRARWLMPVIPALWEAKAGRSPEVRSSKPAWPTWRNPIFTKNTKISQVLELFLNYQSLICALEKQKRQKGSLAIFCWSFQGGCVSKRPDVPSLKSQKPKRKRITGRKRLSKGFWSLLFSNLGRF

SEQ ID NO: 791315 - protein, 159 aa, Homo sapiens; identical to SEQ ID NO: 791314

SEQ ID NO: 791316 - protein, 159 aa, Homo sapiens; identical to SEQ ID NO: 791314

SEQ ID NO: 791317 - protein, 159 aa, Homo sapiens; identical to SEQ ID NO: 791314

SEQ ID NO: 791318 - protein, 322 aa, Homo sapiens
AQRWALGRLRRSTRLVRTKWARGGREKGRAKMAVQVVQAVQAVHLESDAFLVCLNHALSTEKEEVMGLCIGELNDDTRSDSKFAYTGTEMRTVAEKVDAVRIVHIHSVIILRRSDKRKDRVEISPEQLSAASTEAERLAELTGRPMRVVGWYHSHPHITVWPSHVDVRTQAMYQMMDQGFVGLIFSCFIEDKNTKTGRVLYTCFQSIQAQKSSEYERIEIPIHIVPHVTIGKVCLESAVELPKILCQEEQDAYRRIHSLTHLDSVTKIHNGSVFTKNLCSQMSAVSGPLLQWLEDRLEQNQQHLQELQQEKEELMQELSSLE

SEQ ID NO: 791319 - protein, 322 aa, Homo sapiens; identical to SEQ ID NO: 791318

SEQ ID NO: 791320 - protein, 121 aa, Homo sapiens
MIEFDSYPPGGELYERIEIPIHIVPHVTIGKVCLESAVELPKILCQEEQDAYRRIHSLTHLDSVTKIHNGSVFTKNLCSQMSAVSGPLLQWLEDRLEQNQQHLQELQQEKEELMQELSSLE

SEQ ID NO: 791321 - protein, 94 aa, Homo sapiens
DAWVDPRVAAVELPKILCQEEQDAYRRIHSLTHLDSVTKIHNGSVFTKNLCSQMSAVSGPLLQWLEDRLEQNQQHLQELQQEKEELMQELSSLE

SEQ ID NO: 791322 - protein, 316 aa, Homo sapiens
MAVQVVQAVQAVHLESDAFLVCLNHALSTEKEEVMGLCIGELNDDTRSDSKFAYTGTEMRTVAEKVDAVRIVHIHSVIILRRSDKRKDRVEISPEQLSAASTEAERLAELTGRPMRVVGWYHSHPHITVWPSHVDVRTQAMYQMMDQGFVGLIFSCFIEDKNTKTGRVLYTCFQSIQAQKSSESLHGPRDFWSSSQHISIEGQKEEERYERIEIPIHIVPHVTIGKVCLESAVELPKILCQEEQDAYRRIHSLTHLDSVTKIHNGSVFTKNLCSQMSAVSGPLLQWLEDRLEQNQQHLQELQQEKEELMQELSSLE

SEQ ID NO: 791323 - protein, 128 aa, Homo sapiens
MGGRFNTLFPSPYRPSTSSEYERIEIPIHIVPHVTIGKVCLESAVELPKILCQEEQDAYRRIHSLTHLDSVTKIHNGSVFTKNLCSQMSAVSGPLLQWLEDRLEQNQQHLQELQQEKEELMQELSSLE

SEQ ID NO: 791324 - protein, 148 aa, Homo sapiens
MAVQVVQAVQAVHLESDAFLVCLNHALSTEKEEVMGLCIGELNDDTRSDSKFAYTGTEMRTVAEKVDAVRIVHIHSVIILRRSDKRKDRVEISPEQLSAASTEAERLAELTGRPMRVVGWYHSHPHITVWPSHVGKYHGVAMFIVFRN

SEQ ID NO: 791325 - protein, 106 aa, Homo sapiens
LSLPNYMNGPLLPFGVQEKPTSININIDLKSDKKYLQSILSEDLLPGGLICMMKPWPPPPLIITQTFIYIDNNSFNQLPIRQFLNPPMTWKPPPFLFVPPFQIQPM

SEQ ID NO: 791326 - protein, 128 aa, Homo sapiens
AAGTCAFCPVPSTPVEHPTFLPVLHKHRLLQGCAPWNGFPEPPQARAPAGLRPLNGFAEPPLAQAPAGLCPLERLRRASTSTGSCRAVPPGTASHCRAAPPGTASQSLHQHGLLQGCAPGTALQSLPG

SEQ ID NO: 791327 - protein, 108 aa, Homo sapiens
KQVSWAQWLPPVILALWEAEAGLELPMSSDLPTSASQTAEITGMSHHAWPRLCSFACGYAVFPSPFVGETFFSLLSSLGTLVKDHLSIYVRVYFWVFVLFHWSVCLSL

SEQ ID NO: 791328 - protein, 107 aa, Homo sapiens
PLGRGGAVALCAVRPPRECSCELITAWRACVPHTSSRTALIPTPTPNCQPLALAPSFQGASAGPGTCHLLSQLHMGFPKRPILPASHFWFAQFTLRKPICLPVFLVG

SEQ ID NO: 791329 - protein, 847 aa, Homo sapiens
MSQRQGKEAYPTPTKDLHQPSLSPASPHSQGFERGKEDISQNKDESSLSMSKSKSESKLYNGSEKDSSTSSKLTKKESLKVQKKNYREEKKRATKELLSTITDPSVIVMADWLKIRGTLKSWTKLWCVLKPGVLLIYKTQKNGQWVGTVLLNACEIIERPSKKDGFCFKLFHPLEQSIWAVKGPKGEAVGSITQPLPSSYLIIRATSESDGRCWMDALELALKCSSLLKRTMIREGKEHDLSVSSDSTHVTFYGLLRANNLHSGDNFQLNDSEIERQHFKDQDMYSDKSDKENDQEHDESDNEVMGKSEESDTDTSERQDDSYIEPEPVEPLKETTYTEQSHEELGEAGEASQTETVSEENKSLIWTLLKQVRPGMDLSKVVLPTFILEPRSFLDKLSDYYYHADFLSEAALEENPYFRLKKVVKWYLSGFYKKPKGLKKPYNPILGETFRCLWIHPRTNSKTFYIAEQVSHHPPISAFYVSNRKDGFCLSGSILAKSKFYGNSLSAILEGEARLTFLNRGEDYVMTMPYAHCKGILYGTMTLELGGTVNITCQKTGYSAILEFKLKPFLGSSDCVNQISGKLKLGKEVLATLEGHWDSEVFITDKKTDNSEVFWNPTPDIKQWRLIRHTVKFEEQGDFESEKLWQRVTRAINAKDQTEATQEKYVLEEAQRQAARDRKTKNEEWSCKLFELDPLTGEWHYKFADTRPWDPLNDMIQFEKDGVIQTKVKHRTPMVSVPKMKHKPTRQQKKVAKGYSSPEPDIQDSSGSEAQSVKPSTRRKKGIELGDIQSSIESIKQTQEEIKRNIMALRNHLVSSTPATDYFLQQKDYFIIFLLILLQVIINFMFK

SEQ ID NO: 791330 - protein, 889 aa, Homo sapiens
MEGGLADGEPDRTSLLGDSKDVLGPSTVVANSDESQLLTPGKMSQRQGKEAYPTPTKDLHQPSLSPASPHSQGFERGKEDISQNKDESSLSMSKSKSESKLYNGSEKDSSTSSKLTKKESLKVQKKNYREEKKRATKELLSTITDPSVIVMADWLKIRGTLKSWTKLWCVLKPGVLLIYKTQKNGQWVGTVLLNACEIIERPSKKDGFCFKLFHPLEQSIWAVKGPKGEAVGSITQPLPSSYLIIRATSESDGRCWMDALELALKCSSLLKRTMIREGKEHDLSVSSDSTHVTFYGLLRANNLHSGDNFQLNDSEIERQHFKDQDMYSDKSDKENDQEHDESDNEVMGKSEESDTDTSERQDDSYIEPEPVEPLKETTYTEQSHEELGEAGEASQTETVSEENKSLIWTLLKQVRPGMDLSKVVLPTFILEPRSFLDKLSDYYYHADFLSEAALEENPYFRLKKVVKWYLSGFYKKPKGLKKPYNPILGETFRCLWIHPRTNSKTFYIAEQVSHHPPISAFYVSNRKDGFCLSGSILAKSKFYGNSLSAILEGEARLTFLNRGEDYVMTMPYAHCKGILYGTMTLELGGTVNITCQKTGYSAILEFKLKPFLGSSDCVNQISGKLKLGKEVLATLEGHWDSEVFITDKKTDNSEVFWNPTPDIKQWRLIRHTVKFEEQGDFESEKLWQRVTRAINAKDQTEATQEKYVLEEAQRQAARDRKTKNEEWSCKLFELDPLTGEWHYKFADTRPWDPLNDMIQFEKDGVIQTKVKHRTPMVSVPKMKHKPTRQQKKVAKGYSSPEPDIQDSSGSEAQSVKPSTRRKKGIELGDIQSSIESIKQTQEEIKRNIMALRNHLVSSTPATDYFLQQKDYFIIFLLILLQVIINFMFK

SEQ ID NO: 791331 - protein, 847 aa, Homo sapiens; identical to SEQ ID NO: 791329

SEQ ID NO: 791332 - protein, 847 aa, Homo sapiens; identical to SEQ ID NO: 791329

SEQ ID NO: 791333 - protein, 847 aa, Homo sapiens; identical to SEQ ID NO: 791329

SEQ ID NO: 791334 - protein, 847 aa, Homo sapiens; identical to SEQ ID NO: 791329

SEQ ID NO: 791335 - protein, 353 aa, Homo sapiens [sequence omitted]

SEQ ID NO: 791336 - protein, 118 aa, Homo sapiens [sequence omitted]

SEQ ID NO: 791337 - protein, 847 aa, Homo sapiens; identical to SEQ ID NO: 791329

SEQ ID NO: 791338 - protein, 847 aa, Homo sapiens; identical to SEQ ID NO: 791329

SEQ ID NO: 791339 - protein, 133 aa, Homo sapiens
MIQFEKDGVIQTKVKHRTPMVSVPKMKHKPTRQQKKVAKGYSSPEPDIQDSSGSEAQSVKPSTRRKKGIELGDIQSSIESIKQTQEEIKRNIMALRNHLVSSTPATDYFLQQKDYFIIFLLILLQVIINFMFK

SEQ ID NO: 791340 - protein, 176 aa, Homo sapiens
MSQRQGKEAYPTPTKDLHQPSLSPASPHSQGFERGKEDISQNKDESSLSMSKSKSESKLYNGSEKDSSTSSKLTKKESLKVQKKNYREEKKRATKELLSTITDPSVIVMADWLKIRGTLKSWTKLWCVLKPGVLLITSFGFKMSFEQLEQVFLVRGGGGRSGGTVYPVRHSVEQNS

SEQ ID NO: 791341 - protein, 135 aa, Homo sapiens
MCLRVYRRGLPVLDISSMLCVSTLPEWRHMPYGSAGIPMSAPVNECDIPGHCQHGGTCLNLPGSYQCQCLQGFTGQYCDSLYVPCAPSPCVNGGTCRQTGDFTFECNCLPETVRRGTELWERDREVWNGKEHDEN

SEQ ID NO: 791342 - protein, 114 aa, Homo sapiens
GLRPLSAAGHGRSPARPHTVPAPVWPQPTPRRHWADGGGGSCLPAFGRAERSAPDRVRLPSGIGTRGALKFGESRSRREGMRSPLSGGAEWASFQPLRRQDFPSCALHRGLPSP

SEQ ID NO: 791343 - protein, 110 aa, Homo sapiens
LCVVVEDWHWETWEAKSWAWPGQASGFQELLVPGDTQWGKSWLLGGPQPRAGRPSSQLWSLLTSALWLLMHFSSSSLAAPADAEATPASPAMYYLTSYQPPQDDALCFHR

SEQ ID NO: 791344 - protein, 104 aa, Homo sapiens
MASSRRGCARLLTESIKKVLHGGVQQEKQGTSMPPDPAGPARVTRAGCSVSLGLSCHPNPFNVFLMLPAHRFVFPFLSPLSKGLFYFTHFVLLLLPLTCISILF

SEQ ID NO: 791345 - protein, 94 aa, Homo sapiens
VESPYQQEGSHQMWPLDLGCSLQNYSRSKEPSASLVVWKNWDSPQCSGNSWESRTTYFPSTTSKALQRTEPQSCQYTMNNAKISRNPKAYFSMY

SEQ ID NO: 791346 - protein, 30 aa, Homo sapiens
MLKGTLVILISVPIIVEFHSTASQALLVLT

SEQ ID NO: 791347 - protein, 37 aa, Homo sapiens
LSTLPPCEDTATSCPLGSRKQLSPDIKSASTLILDFP

SEQ ID NO: 791348 - protein, 159 aa, Homo sapiens [sequence omitted]

SEQ ID NO: 791349 - protein, 305 aa, Homo sapiens
MRLMYICLLVLGALCLYFSMYSLNPFKEQSFVYKKDGNFLKLPDTDCRQTPPFLVLLVTSSHKQLAERMAIRQTWGKERMVKGKQLKTFFLLGTTSSAAETKEVDQESQRHGDIIQKDFLDVYYNLTLKTMMGIEWVHRFCPQAAFVMKTDSDMFINVDYLTELLLKKNRTTRFFTGFLKLNEFPIRQPFSKWFVSKSEYPWDRYPPFCSGTGYVFSGDVASQVYNVSKSVPYIKLEDVFVGLCLERLNIRLEELHSQPTFFPGGLRFSVCLFRRIVACHFIKPRTLLDYWQALENSRGEDCPPV

SEQ ID NO: 791350 - protein, 305 aa, Homo sapiens; identical to SEQ ID NO: 791349

SEQ ID NO: 791351 - protein, 305 aa, Homo sapiens; identical to SEQ ID NO: 791349

SEQ ID NO: 791352 - protein, 305 aa, Homo sapiens; identical to SEQ ID NO: 791349

SEQ ID NO: 791353 - protein, 314 aa, Homo sapiens
MCLEMAFPKMRLMYICLLVLGALCLYFSMYSLNPFKEQSFVYKKDGNFLKLPDTDCRQTPPFLVLLVTSSHKQLAERMAIRQTWGKERMVKGKQLKTFFLLGTTSSAAETKEVDQESQRHGDIIQKDFLDVYYNLTLKTMMGIEWVHRFCPQAAFVMKTDSDMFINVDYLTELLLKKNRTTRFFTGFLKLNEFPIRQPFSKWFVSKSEYPWDRYPPFCSGTGYVFSGDVASQVYNVSKSVPYIKLEDVFVGLCLERLNIRLEELHSQPTFFPGGLRFSVCLFRRIVACHFIKPRTLLDYWQALENSRGEDCPPV

SEQ ID NO: 791354 - protein, 176 aa, Homo sapiens
QVLGAPCHFPAALPRGSRRRGEVEPRELGRGPRLVVAAMTAARDWLLFRAPPAGGEGKMSMSGFKGKPKLLASIFQENQEPQPRLTPHRNIKITSGHLSQQDLESQMRELIYTTQILLSPPLLTIQRCRKHSDKWAKVARVIGLLASHKTDLQENTPVVEAFPNSPRTPTLPGVLT

SEQ ID NO: 791355 - protein, 168 aa, Homo sapiens
QVLGAPCHFPAALPRGSRRRGEVEPRELGRGPRLVVAAMTAARDWLLFRAPPAGGEGKMSMSGFKGKPKLLASIFQENQEPQPRLTPHRNIKITSGHLSQQDLESQMRELIYTTQILLSPPLLTIQRCRKHSDKWAKVARVIGLLASHKTDLQENTPVVEVMSFMTEM

SEQ ID NO: 791356 - protein, 137 aa, Homo sapiens
QVLGAPCHFPAALPRGSRRRGEVEPRELGRGPRLVVAAMTAARDWLLFRAPPAGGEGKMSMSGFKGKPKLLASIFQENQEPQPRLTPHRNIKITSGHLSQQDLESQMRELIYTTQILLSPPLLTIQRCRKHSDNSNC

SEQ ID NO: 791357 - protein, 106 aa, Homo sapiens
MAAPGRAQGHRPAGRLNKQKRRRGPGGGVPALLGFRGELVPPAGAWWERGDNPPRQKRLREAPGLPRPLGPGRGRQRRNLAAERRERRAGAGRDKMRTARAGPGAA

SEQ ID NO: 791358 - protein, 102 aa, Homo sapiens
VSHQFFFSNSSHNHPSSFNPAPPPHGSWVHKILHLHMRAPTQQGVGYTVSPQQTQSTFPHYISAFVLCQACTSEYRSQLASFDCKPSSSSGSTCRLATHSLC

SEQ ID NO: 791359 - protein, 70 aa, Homo sapiens
LPAGVGPLREGAEPLLPGPGPGASLRPAGPNLSHCQCGVPHSSAFWSRGCAEAGEWEKFERERVKGSPGP

SEQ ID NO: 791360 - protein, 102 aa, Homo sapiens
CSNSGLNFKVTQINIFDHSDLSSLIYFCSITKFLALANQLIFSYLLSFQASLLWLMPSSCPKMPSPLCSACVAHIALKGHHKFHLLLKLFLTPIFLWQVFNL

SEQ ID NO: 791361 - protein, 101 aa, Homo sapiens
TDSMTPYGTPSCLHHASPLGLCLLMSADGLPLAHTSIKGQGPPCLVPHDAAHMAPPASGPLSPQISTSVASLLTSAARAPVSTRRAALSASVFPATRVASC

SEQ ID NO: 791362 - protein, 154 aa, Homo sapiens
LASAQLDDAGVYTAEVIRAGVSQQTHEFTVGVYEPLPQLSVQPKAPETEEGAAELRLRCLGWGPGRGELSWSRDGRALEAAESEGAETPRMRSEGDQLLIVRPVRSDHARYTCRVRSPFGHREAAADVSVFYGPDPPTITVSSDRDAAPARFVT

SEQ ID NO: 791363 - protein, 127 aa, Homo sapiens
GQLRLGRRFLEGWDGDEGLRVRFLFQLAESSLWERGRVRREEAGAEALLPSLCGVTLGCLFSVSEPRLVREIMNVKGGALAGPSLSVNGVELFGAILLASLKGDVKPCFLLNSSGTIKNANMPNKCG

SEQ ID NO: 791364 - protein, 482 aa, Homo sapiens
MVMEKPSPLLVGREFVRQYYTLLNKAPEYLHRFYGRNSSYVHGGVDASGKPQEAVYGQNDIHHKVLSLNFSECHTKIRHVDAHATLSDGVVVQVMGLLSNSGQPERKFMQTFVLAPEGSVPNKFYVHNDMFRYEDEVFGDSEPELDEESEDEVEEEQEERQPSPEPVQENANSGYYEAHPVTNGIEEPLEESSHEPEPEPESETKTEELKPQVEEKNLEELEEKSTTPPPAEPVSLPQEPPKAFSWASVTSKNLPPSGTVSSSGIPPHVKAPVSQPRVEAKPEVQSQPPRVREQRPRERPGFPPRGPRPGRGDMEQNDSDNRRIIRYPDSHQLFVGNLPHDIDENELKEFFMSFGNVVELRINTKGVGGKLPNFGFVVFDDSEPVQRILIAKPIMFRGEVRLNVEEKKTRAARERETRGGGDDRRDIRRNDRGPGGPRGIVGGGMMRDRDGRGPPPRGGMAQKLGSGRGTGQMEGRFTGQRR

SEQ ID NO: 791365 - protein, 109 aa, Homo sapiens
GRPWSLSHVAAPGAREEVVVRQTNSRLSGFRGFRVVGGRGRRAIRTRRTRSSATLLTSARRTRRRRWLEHLTLCSKEMVMEKPSPLLVGREFVRQYYTLLNKAPEYLHR

SEQ ID NO: 791366 - protein, 559 aa, Homo sapiens
GRPWSLSHVAAPGAREEVVVRQTNSRLSGFRGFRVVGGRGRRAIRTRRTRSSATLLTSARRTRRRRWLEHLTLCSKEMVMEKPSPLLVGREFVRQYYTLLNKAPEYLHRFYGRNSSYVHGGVDASGKPQEAVYGQNDIHHKVLSLNFSECHTKIRHVDAHATLSDGVVVQVMGLLSNSGQPERKFMQTFVLAPEGSVPNKFYVHNDMFRYEDEVFGDSEPELDEESEDEVEEEQEERQPSPEPVQENANSGYYEAHPVTNGIEEPLEESSHEPEPEPESETKTEELKPQVEEKNLEELEEKSTTPPPAEPVSLPQEPPKAFSWASVTSKNLPPSGTVSSSGIHPMLKHQSHSQESKLNQKFNLSHLVCVNNDLENDLVFLLEDQDQAEEIMEQNDSDNRRIIRYPDSHQLFVGNLPHDIDENELKEFFMSFGNVVELRINTKGVGGKLPNFGFVVFDDSEPVQRILIAKPIMFRGEVRLNVEEKKTRAARERETRGGGDDRRDIRRNDRGPGGPRGIVGGGMMRDRDGRGPPPRGGMAQKLGSGRGTGQMEGRFTGQRR

SEQ ID NO: 791367 - protein, 242 aa, Homo sapiens
MLRLLRLALAFYGRTADPAERQGPQQQGLPQGDTQLTTVQGVVTSFCGDYGMIDESIYFSSDVVTGNVPLKVGQKVNVVVEEDKPHYGLRAIKVDVVPRHLYGAGPSDSGTRVLIGCVTSINEDNIYISNSIYFSIAIVSEDFVPYKGDLLEVEYSTEPGISNIKATSVKPIRCIHTEEVCITSVHGRNGVIDYTIFFTLDSVKLPDGYVPQVDDIVNVVMVESIQFCFIWRAISITPVHKS

SEQ ID NO: 791368 - protein, 109 aa, Homo sapiens
MNCGLTVCSQPLSAFHSVTAIFPCKIGGGERVGLLGEVLDLSAICFVPWVSPEIRAFGWVCSLKVENGFCLRGCVSITSSMVCCYSTSRLPFEHPFRKERKVNKLHFTH

SEQ ID NO: 791369 - protein, 72 aa, Homo sapiens
AHFLLLLPWKKRLSPPAVILRPFQPCQTQNVTEKQKHLEYVTEVIKKSHVICACFPFCHDCKFPDAFSAMQN

SEQ ID NO: 791370 - protein, 125 aa, Homo sapiens
AHFLLLLPWKKRLSPPAVILRPFQPCQTQNVTEKQKHLEYVTEVIKKSHVICACFPFCHDCKFPDAFSAMQNSCFKHLQEDTLYNCINRVCSLTLLLRLESVAQSQLTPTSASWVQMILLPQPPK

SEQ ID NO: 791371 - protein, 142 aa, Homo sapiens
HCPVDPLIWLFICILSKLVNGPLDGAASLVEEATLVLQGNQDEMATRDPWVWMASLDFQARKGKRETKDKMELLGLRGPLDLLGPGALLATLGKMAPGEHKAQRAPKESPDKTARWAQRDPQGPRVSLEYLVVNKIFPGNLE

SEQ ID NO: 791372 - protein, 47 aa, Homo sapiens
AVSSVKGEVVFVIHQDLSRAVPSLHWGSGLPAWGPTAGFATSTVLRT

SEQ ID NO: 791373 - protein, 110 aa, Homo sapiens
VRGWRATRGPLLQAWFGITDHPADTLPVSICTEEFAGCGLQPTHPNHRHALSPPFGPSNNSMPRTFYCPGLSGSLRRPDRPSPPQAFVQPLLHARPTLVRLCRAELLVIL

SEQ ID NO: 791374 - protein, 55 aa, Homo sapiens
HGASSVFTSSPEGRRQSQWCQVWTVWPDPKTRSQSQIAGPCSGTIVSREAFIISL

SEQ ID NO: 791375 - protein, 115 aa, Homo sapiens
MVTASQPPGRTIVPPLSWLGPGRGCQICFVHVKCGGIMSPSNQIPTKIKTKQIKRLSEDSPEGSVVSAWEPGSLVDLTCFSDFAMFIADVPVLVLATHLHYRLILTTSRCGMQWF

SEQ ID NO: 791376 - protein, 506 aa, Homo sapiens
MQPGSSRCEEETPSLLWGLDPVFLAFAKLYIRDILDMKESRQVPGVFLYNGHPIKQVDVLGTVIGVRERDAFYSYGVDDSTGVINCICWKKLNTESVSAAPSAARELSLTSQLKKLQETIEQKTKIEIGDTIRVRGSIRTYREEREIHATAYYKVDDPVWNIQIARMLELPTIYRKVYDQPFHSSALEKEEALRGENPGGMRMCAYLLIYDKRTLRGDTENRNPGALDLPSLTSLLSEKAKEFLMENRVQSFYQQELEMVESLLSLANQPVIHSACSDQVNFKKDTTSKAIHSIFKNAIQLLQDKGLVFQKDDGFDNLYYVTREDEDLHRKIHRIIQQDLQKPNHMAEGAVTSWKSWACARLDIPPGLSEVLLEPKVLEDPGREPQWPMVRTTGGLIITKLSSKRTRRTTLWGDHHTKRGRYNPPGGQTYTPLITGGDHTSEAQTPTTEVSNYILGHERGNTGWALIAKNSAEERRIQAEQQNTPAPPDAGHNNETARVRILRNHS

SEQ ID NO: 791377 - protein, 153 aa, Homo sapiens
MQPGSSRCEEETPSLLWGLDPVFLAFAKLYIRDILDMKESRQVPGVFLYNGHPIKQVDVLGTVIGVRERDAFYSYGADDSIWSYKLHLLPVNPESASAVPRVARELSLTLLTYRTYMATIGHAHRMASRLHRPRRQTQLFRYIPPDYRLDSMP

SEQ ID NO: 791378 - protein, 512 aa, Homo sapiens
MQPGSSRCEEETPSLLWGLDPVFLAFAKLYIRDILDMKESRQVPGVFLYNGHPIKQVDVLGTVIGVRERDAFYSYGVDDSTGVINCICWKKLNTESVSAAPSAARELSLTSQLKKLQETIEQKTKIEIGDTIRVRGSIRTYREEREIHATAYCKHKIFYQIGGFSGCASSKPLVQLEVKLSKSSVEDKVDDPVWNIQIARMLELPTIYRKVYDQPFHSSALEKEEALSNPGALDLPSLTSLLSEKAKEFLMENRVQSFYQQELEMVESLLSLANQPVIHSACSDQVNFKKDTTSKAIHSIFKNAIQLLQDKGLVFQKDDGFDNLYYVTREDEDLHRKIHRIIQQDLQKPNHMAEGAVTSWKSWACARLDIPPGLSEVLLEPKVLEDPGREPQWPMVRTTGGLIITKLSSKRTRRTTLWGDHHTKRGRYNPPGGQTYTPLITGGDHTSEAQTPTTEVSNYILGHERGNTGWALIAKNSAEERRIQAEQQNTPAPPDAGHNNETARVRILRNHS

SEQ ID NO: 791379 - protein, 208 aa, Homo sapiens
MQPGSSRCEEETPSLLWGLDPVFLAFAKLYIRDILDMKESRQVPGVFLYNGHPIKQVDVLGTVIGVRERDAFYSYGVDDSTGVINCICWKKLNTESVSAAPSAARELSLTSQLKKLQETIEQKTKIEIGDTIRVRGSIRTYREEREIHATAYYKVDDPVWNIQIARMLELPTIYRTKIRWHSPPGSDFQHHAGAYLSGGSYLIINYKI

SEQ ID NO: 791380 - protein, 460 aa, Homo sapiens
MQPGSSRCEEETPSLLWGLDPVFLAFAKLYIRDILDMKESRQVPGVFLYNGHPIKQVDVLGTVIGVRERDAFYSYGVDDSTGVINCICWKKLNTESVSAAPSAARELSLTSQLKKLQETIEQYREEREIHATAYYKVDDPVWNIQIARMLELPTIYRKVYDQPFHSSALEKEEALSNPGALDLPSLTSLLSEKAKEFLMENRVQSFYQQELEMVESLLSLANQPVIHSACSDQVNFKKDTTSKAIHSIFKNAIQLLQDKGLVFQKDDGFDNLYYVTREDEDLHRKIHRIIQQDLQKPNHMAEGAVTSWKSWACARLRHSARAEEVLLEPKVLEDPGREPQWPMVRTTGGLIITKLSSKRTRRTTLWGDHHTKRGRYNPPGGQTYTPLITGGDHTSEAQTPTTEVSNYILGHERGNTGWALIAKNSAEERRIQAEQQNTPAPPDAGHNNETARVRILRNHS

SEQ ID NO: 791381 - protein, 120 aa, Homo sapiens
VKGCFTDFHIDFGGTSVGTMFSGVEDFLADSSNAAQLALYEEWVLSGKQSDIFLGDRVERCQRIELKQGYTFFIPSGWIHAVYTPVDSLVFGGNILHSFNVPMQLRIYEIEDRTREKNKL

SEQ ID NO: 791382 - protein, 120 aa, Homo sapiens; identical to SEQ ID NO: 791381

SEQ ID NO: 791383 - protein, 111 aa, Homo sapiens
  misc_feature (43)..(43): Xaa can be any naturally occurring amino acid
GTALELEEAQEPSCHCPGLAQAESVAGARGGREGVTSTAPTAXSHTAPSPGHSGSYGGRDQGVQPGLLCLTGEGLLSFSRAAALLLKSLLLLLLGVFACLQEVLESKKRSL

SEQ ID NO: 791384 - protein, 109 aa, Homo sapiens
MTRNCSAKGLGWGFGVIIHINHEVWLWFEVQSMHWLLSLTGRASLPLAPKSTAAAGLMPQGRREPAAPLPPLPPSCQPFTPPARFRIRTYEQSVSFFFFLCLCLSFSFD

SEQ ID NO: 791385 - protein, 120 aa, Homo sapiens
LSSPSQILAACPGTHCETCPSVTPEVGLNISISVVDLEAALQLGFCPSQLQTGAVLPVQSLTQWSSKSLPGDLEESYPFTTGQQAYSCAPEVDHQPSTSPLDQVVETVETTLGPDRIHAC

SEQ ID NO: 791386 - protein, 396 aa, Homo sapiens
MWNSSDANFSCYHESVLGYRYVAVSWGVVVAVTGTVGNVLTLLALAIQPKLRTRFNLLIANLTLADLLYCTLLQPFSVDTYLHLHWRTGATFCRVFGLLLFASNSVSILTLCLIALGRYLLIAHPKLFPQVFSAKGIVLALVSTWVVGVASFAPLWPIYILVPVVCTCSFDRIRGRPYTTILMGIYFVLGLSSVGIFYCLIHRQVKRAAQALDQYKLRQASIHSNHVARTDEAMPGRFQELDSRLASGGPSEGISSEPVSAATTQTLEGDSSEVGDQINSKRAKQMAEKSPPEASAKAQPIKGARRAPDSSSEFGKVTRMCFAVFLCFALSYIPFLLLNILDARVQAPRVVHMLAANLTWLNGCINPVLYAAMNRQFRQAYGSILKRGPRSFHRLH

SEQ ID NO: 791387 - protein, 71 aa, Homo sapiens
QMRGRSKDGGCGSPCGGALCTPAPPWRIMGNRKGTHCGRFFGMDPRVLTAFLSGSWGSSELMPSLVHRLFM

SEQ ID NO: 791388 - protein, 93 aa, Homo sapiens
QQAARGEPGSARGQLQVSPEMSITHKEKENAHLKEILLFVNAEAFSQPQPHSAPVCEGQQLTGKFSTSVLTRAGGDASPCSWERLLCYGWSHC

SEQ ID NO: 791389 - protein, 112 aa, Homo sapiens
SPASSERGAEPFLMDTGSREAAFTRDLPRKPADAQVSPEMSITHKEKENAHLKEILLFVNAEAFSQPQPHSAPVCEGQQLTGKFSTSVLTRAGGDASPCSWERLLCYGWSHC

SEQ ID NO: 791390 - protein, 178 aa, Homo sapiens
APPDFLQVPYDPALGSPSRLFHPWTADMPAHSPGALPPPHPSLGLTPQKTHLQPSFGAAHELPLTPPADPSYPYEFSPVKMLPSSMAALPASCAPAYVPYAAQAALPPGYSNLLPPPPPPPPPPTCRQLSPNPAPDDLPWWSIPQAGAGPGASGVPGSGLSGACAGAPHAPRFPASAA

SEQ ID NO: 791391 - protein, 71 aa, Homo sapiens
PLSARRSAASNPEVITHQEGIIPGTAGSASLLGFRSQKPIRQLNSNNDPPLNTLREEHDEEFVQEEARSTC

SEQ ID NO: 791392 - protein, 99 aa, Homo sapiens
KNECFHVLHPQNFWFFLLEPKEQGQNEEHDVSYRQLLMTSPSRTEGGILLHLGLGASFSIQYWGSSSSIQDLGVILLHPGPEGCPFLRFLGWQSFPSCL

SEQ ID NO: 791393 - protein, 65 aa, Homo sapiens
PGEHRKLYLAEMSHVGKHKMHNPSNFHHLPQFTTMGVINHTQTQLMLQFFIQFQITSFHDFTVKL

SEQ ID NO: 791394 - protein, 81 aa, Homo sapiens
MVFLNYKCTTPLILLLPSQIPRSYKQDWLLYCSKLISLAYHAFLIFMPSLMMFSLLEIYHILLPQLLLQVNFLLKAEPDQI

SEQ ID NO: 791395 - protein, 230 aa, Homo sapiens
IPGLQPGTDYKIYLYTLNDNARSSPVVIDASTAIDAPSNLRFLATTPNSLLVSWQPPRARITGYIIKYEKPGSPPREVVPRPRPGVTEATITGLEPGTEYTIYVIALKNNQKSEPLIGRKKTDELPQLVTLPHPTLHGPEILDVPSPVQKTPFVTHPGYDTGNGIQLPGTSGQQPSVGQQMIFEEHGFRRTTPPTTATPIRHRPRPYPPNVGQEALSQDNHLMGPIPGHF

SEQ ID NO: 791396 - protein, 236 aa, Homo sapiens
IPGLQPGTDYKIYLYTLNDNARSSPVVIDASTAIDAPSNLRFLATTPNSLLVSWQPPRARITGYIIKYEKPGSPPREVVPRPRPGVTEATITGLEPGTEYTIYVIALKNNQKSEPLIGRKKTVQKTPFVTHPGYDTGNGIQLPGTSGQQPSVGQQMIFEEHGFRRTTPPTTATPIRHRPRPYPPNVGEEIQIGHIPREDVDYHLYPHGPGLNPNASTGQEALSQDNHLMGPIPGHF

SEQ ID NO: 791397 - protein, 170 aa, Homo sapiens
IPGLQPGTDYKIYLYTLNDNARSSPVVIDASTAIDAPSNLRFLATTPNSLLVSWQPPRARITGYIIKYEKPGSPPREVVPRPRPGVTEATITGLEPGTEYTIYVIALKNNQKSEPLIGRKKTRTRSSLSRQPSHGPHSRTLLSTSFHVILLALMKNPYSSGFLELLPVPL

SEQ ID NO: 791398 - protein, 102 aa, Homo sapiens
SGEEDRKGCGLMKLTFRQTTHNSDDWKVQDHGTGICSASGEGHVLCQDMVETWKGALPSCWNSWCVSDIIVRLGEGNPGLYKMSGEKMALSNWPLHRDQPAS

SEQ ID NO: 791399 - protein, 128 aa, Homo sapiens
LCSFRTWVLKWSFEGWLRGLHSIPPTVPSAPPPSPHEPVRTYHTYGGPWSHPSFQVFPERVDAALGQEGLFPSLLSFCSSAWFWLAFAGVERLKCAKKGVLAITVVVPVSPAAPVPQQLTDNRGLEGV

SEQ ID NO: 791400 - protein, 135 aa, Homo sapiens
AGEAGARAPPASGAPAGDGGAGDVPVLSGPGSSMHPDATDSGGAGLSPARAAGAGGRPVSGFRGERRPESPGDAEAAAAAPGAPGGRSWWKPVAVAALATVALSFLGPGSGEAAGAAGLSSVLLRLSLYLSCAAA

SEQ ID NO: 791401 - protein, 528 aa, Homo sapiens
PLSVADSQAEAKLSSFWQLIVDEKKQVFTSEKFLVMASEDALCTVLHLTERLFLDHPHRLTGNKVQQYHRALVAVLLSRTWHVRRQAQQTVRKLLSSLGGFKLAHGLLEELKTVLSSHKVLPLEALVTDAGEVTEAGKAYVPPRVLQEALCVISGVPGLKGDVTDTEQLAQEMLIISHHPSLVAVQSGLWPALLARMKIDPEAFITRHLDQIIPRMTTQSPLNQSSMNAMGSLSVLSPDRVLPQLISTITASVQNPALRLVTREEFAIMQTPAGELYDKSIIQSAQQDSIKKANMKRENKAYSFKEQIIELELKEEIKKKKGIKEEVQLTSKQKEMLQAQLDREAQVRRRLQELDGELEAALGLLDIILAKNPSGLTQYIPVLVDSFLPLLKSPLAAPRIKNPFLSLAACVMPSRLKALGTLVSHVTLRLLKPECVLDKSWCQEELSVAVKRAVMLLHTHTITSRVGKGEPGAAPLSAPAFSLVFPFLKMVLTEMPHHSEEEEEWMAQILQILTVQAQLRASPNTPPG

SEQ ID NO: 791402 - protein, 75 aa, Homo sapiens
MAPEVLPKPRMRGLLARRLRNHMAVAFVLSLGVAALYKFRVADQRKKAYADFYRNYDVMKDFEEMRKAGIFQSVK

SEQ ID NO: 791403 - protein, 85 aa, Homo sapiens
  misc_feature (5)..(5): Xaa can be any naturally occurring amino acid
  misc_feature (8)..(8): Xaa can be any naturally occurring amino acid
SPGLXGIXRPRRHGCEKDDRRGTARFVFPLVRKDVGVEVSIRIKDSNYHGSRSFAKTSDAWPSGQASAKSYGCSIRAIPGGCSFV

SEQ ID NO: 791404 - protein, 104 aa, Homo sapiens
GHNGTLPLSLCLGFSRDLCVSAVVQLQASPASTLSRFRCGLREGGGRTTDRKDVGVEVSIRIKDSNYHGSRSFAKTSDAWPSGQASAKSYGCSIRAIPGGCSFV

SEQ ID NO: 791405 - protein, 70 aa, Homo sapiens
ILLLRAATARFVFPLVRKDVGVEVSIRIKDSNYHGSRSFAKTSDAWPSGQASAKSYGCSIRAIPGGCSFV

SEQ ID NO: 791406 - protein, 75 aa, Homo sapiens; identical to SEQ ID NO: 791402

SEQ ID NO: 791407 - protein, 75 aa, Homo sapiens; identical to SEQ ID NO: 791402

SEQ ID NO: 791408 - protein, 77 aa, Homo sapiens
MTDAAVSFAKDFLAGGVAAAISKTAVAPIERVKLLLQVQHASKQITADKQYKGFIDWVGRFQGARRFVLLRGNLANV

SEQ ID NO: 791409 - protein, 75 aa, Homo sapiens; identical to SEQ ID NO: 791402

SEQ ID NO: 791410 - protein, 75 aa, Homo sapiens; identical to SEQ ID NO: 791402

SEQ ID NO: 791411 - protein, 75 aa, Homo sapiens; identical to SEQ ID NO: 791402

SEQ ID NO: 791412 - protein, 104 aa, Homo sapiens
  misc_feature (11)..(12): Xaa can be any naturally occurring amino acid
RAGGGVEIVCXXQRTLVLRLAYVSRTVTTMAPEVLPKPRMRGLLARRLRNHMAVAFVLSLGVAALYKFRVADQRKKAYADFYRNYDVMKDFEEMRKAGIFQSVK

SEQ ID NO: 791413 - protein, 92 aa, Homo sapiens
  misc_feature (8)..(8): Xaa can be any naturally occurring amino acid
LGLCRTTXVKSFLGITTMAPEVLPKPRMRGLLARRLRNHMAVAFVLSLGVAALYKFRVADQRKKAYADFYRNYDVMKDFEEMRKAGIFQSVK

SEQ ID NO: 791414 - protein, 70 aa, Homo sapiens; identical to SEQ ID NO: 791405

SEQ ID NO: 791415 - protein, 75 aa, Homo sapiens; identical to SEQ ID NO: 791402

SEQ ID NO: 791416 - protein, 75 aa, Homo sapiens; identical to SEQ ID NO: 791402

SEQ ID NO: 791417 - protein, 75 aa, Homo sapiens; identical to SEQ ID NO: 791402

SEQ ID NO: 791418 - protein, 75 aa, Homo sapiens; identical to SEQ ID NO: 791402

SEQ ID NO: 791419 - protein, 75 aa, Homo sapiens; identical to SEQ ID NO: 791402

SEQ ID NO: 791420 - protein, 970 aa, Homo sapiens
TVLVLRFCASLMEMKLPGQEGFEASSAPRNIPSGELDSNPDPGTGPSPDGPSDTESKELGVPKDPLLFIQLNELLGWPQALEWRETGRWVLFEEKLEVAAGRWSAPHVPTLALPSLQKLRSLLAEGLVLLDCPAQSLLELVEQVTRVESLSPELRGQLQALLLQRPQHYNQTTGTRPCWGSTHPRKASDNEEAPLREQCQNPLRQKLPPGAEAGTVLAGELGFLAQPLGAFVRLRNPVVLGSLTEVSLPSRFFCLLLGPCMLGKGYHEMGRAAAVLLSDPQFQWSVRRASNLHDLLAALDAFLEEVTVLPPGRWDPTARIPPPKCLPSQHKRLPSQQREIRGPAVPRLTSAEDRHRHGPHAHSPELQRTGRLFGGLIQDVRRKVPWYPSDFLDALHLQCFSAVLYIYLATVTNAITFGGLLGDATDGAQGVLESFLGTAVAGAAFCLMAGQPLTILSSTGPVLVFERLLFSFSRDYSLDYLPFRLWVGIWVATFCLVLVATEASVLVRYFTRFTEEGFCALISLIFIYDAVGKMLNLTHTYPIQKPGSSAYGCLCQYPGPGGNESQWIRTRPKDRDDIVSMDLGLINASLLPPPECTRQGGHPRGPGCHTVPDIAFFSLLLFLTSFFFAMALKCVKTSRFFPSVVRKGLSDFSSVLAILLGCGLDAFLGLATPKLMVPREFKPTLPGRGWLVSPFGANPWWWSVAAALPALLLSILIFMDQQITAVILNRMEYRLQKGAGFHLDLFCVAVLMLLTSALGLPWYVSATVISLAHMDSLRRESRACAPGERPNFLGIREQRLTGLVVFILTGASIFLAPVLKFIPMPVLYGIFLYMGVAALSSIQFTNRVKLLLMPAKHQPDLLLLRHVPLTRVHLFTAIQLACLGLLWIIKSTPAAIIFPLMLLGLVGVRKALERVFSPQELLWLDELMPEEERSIPEKGLEPEHSFSGSDSEDSELMYQPKAPEINISVN

SEQ ID NO: 791421 - protein, 959 aa, Homo sapiens
TVLVLRFCASLMEMKLPGQEGFEASSAPRNIPSGELDSNPDPGTGPSPDGPSDTESKELGVPKDPLLFIQLNELLGWPQALEWRETGRWVLFEEKLEVAAGRWSAPHVPTLALPSLQKLRSLLAEGLVLLDCPAQSLLELVEQVTRVESLSPELRGQLQALLLQRPQHYNQTTGTRPCWGSTHPRKASDNEEAPLREQCQNPLRQKLPPGAEAGTVLAGELGFLAQPLGAFVRLRNPVVLGSLTEVSLPSRFFCLLLGPCMLGKGYHEMGRAAAVLLSDPQFQWSVRRASNLHDLLAALDAFLEEVTVLPPGRWDPTARIPPPKCLPSQHKRLPSQQREIRGPAVPRLTSAEDRHRHGPHAHSPELQRTGRKVPWYPSDFLDALHLQCFSAVLYIYLATVTNAITFGGLLGDATDGAQGVLESFLGTAVAGAAFCLMAGQPLTILSSTGPVLVFERLLFSFSRDYSLDYLPFRLWVGIWVATFCLVLVATEASVLVRYFTRFTEEGFCALISLIFIYDAVGKMLNLTHTYPIQKPGSSAYGCLCQYPGPGGNESQWIRTRPKDRDDIVSMDLGLINASLLPPPECTRQGGHPRGPGCHTVPDIAFFSLLLFLTSFFFAMALKCVKTSRFFPSVVRKGLSDFSSVLAILLGCGLDAFLGLATPKLMVPREFKPTLPGRGWLVSPFGANPWWWSVAAALPALLLSILIFMDQQITAVILNRMEYRLQKGAGFHLDLFCVAVLMLLTSALGLPWYVSATVISLAHMDSLRRESRACAPGERPNFLGIREQRLTGLVVFILTGASIFLAPVLKFIPMPVLYGIFLYMGVAALSSIQFTNRVKLLLMPAKHQPDLLLLRHVPLTRVHLFTAIQLACLGLLWIIKSTPAAIIFPLMLLGLVGVRKALERVFSPQELLWLDELMPEEERSIPEKGLEPEHSFSGSDSEDSELMYQPKAPEINISVN

SEQ ID NO: 791422 - protein, 752 aa, Homo sapiens
TVLVLRFCASLMEMKLPGQEGFEASSAPRNIPSGELDSNPDPGTGPSPDGPSDTESKELGVPKDPLLFIQLNELLGWPQALEWRETGSSSASLLLDMGEMPSITLSTHLHHRWVLFEEKLEVAAGRWSAPHVPTLALPSLQKLRSLLAEGLVLLDCPAQSLLELVEQVTRVESLSPELRGQLQALLLQRPQHYNQTTGTRPCWGSTHPRKASDNEEAPLREQCQNPLRQKLPPGAEAGTVLAGELGFLAQPLGAFVRLRNPVVLGSLTEVSLPSRFFCLLLGPCMLGKGYHEMGRAAAVLLSDPQFQWSVRRASNLHDLLAALDAFLEEVTVLPPGRWDPTARIPPPKCLPSQHKRLPSQQREIRGPAVPRLTSAEDRHRHGPHAHSPELQRTGRLFGGLIQDVRRKVPWYPSDFLDALHLQCFSAVLYIYLATVTNAITFGGLLGDATDGAQGVLESFLGTAVAGAAFCLMAGQPLTILSSTGPVLVFERLLFSFSRDYSLDYLPFRLWVGIWVATFCLVLVATEASVLVRYFTRFTEEGFCALISLIFIYDAVGKMLNLTHTYPIQKPGSSAYGCLCQYPGPGGNESQWIRTRPKDRDDIVSMDLGLINASLLPPPECTRQGGHPRGPGCHTVPDIAFFSLLLFLTSFFFAMALKCVKTSRFFPSVVRKGLSDFSSVLAILLGCGLDAFLGLATPKLMVPREFKPTLPGRGWLVSPFGANPWWPQRPVLLVRYFTRFTEEGFCALSYLLT

SEQ ID NO: 791423 - protein, 994 aa, Homo sapiens
TVLVLRFCASLMEMKLPGQEGFEASSAPRNIPSGELDSNPDPGTGPSPDGPSDTESKELGVPKDPLLFIQLNELLGWPQALEWRETGSSSASLLLDMGEMPSITLSTHLHHRWVLFEEKLEVAAGRWSAPHVPTLALPSLQKLRSLLAEGLVLLDCPAQSLLELVEQVTRVESLSPELRGQLQALLLQRPQHYNQTTGTRPCWGSTHPRKASDNEEAPLREQCQNPLRQKLPPGAEAGTVLAGELGFLAQPLGAFVRLRNPVVLGSLTEVSLPSRFFCLLLGPCMLGKGYHEMGRAAAVLLSDPQFQWSVRRASNLHDLLAALDAFLEEVTVLPPGRWDPTARIPPPKCLPSQHKRLPSQQREIRGPAVPRLTSAEDRHRHGPHAHSPELQRTGRLFGGLIQDVRRKVPWYPSDFLDALHLQCFSAVLYIYLATVTNAITFGGLLGDATDGAQGVLESFLGTAVAGAAFCLMAGQPLTILSSTGPVLVFERLLFSFSRDYSLDYLPFRLWVGIWVATFCLVLVATEASVLVRYFTRFTEEGFCALISLIFIYDAVGKMLNLTHTYPIQKPGSSAYGCLCQYPGPGGNESQWIRTRPKDRDDIVSMDLGLINASLLPPPECTRQGGHPRGPGCHTVPDIAFFSLLLFLTSFFFAMALKCVKTSRFFPSVVRKGLSDFSSVLAILLGCGLDAFLGLATPKLMVPREFKPTLPGRGWLVSPFGANPWWWSVAAALPALLLSILIFMDQQITAVILNRMEYRLQKGAGFHLDLFCVAVLMLLTSALGLPWYVSATVISLAHMDSLRRESRACAPGERPNFLGIREQRLTGLVVFILTGASIFLAPVLKFIPMPVLYGIFLYMGVAALSSIQFTNRVKLLLMPAKHQPDLLLLRHVPLTRVHLFTAIQLACLGLLWIIKSTPAAIIFPLMLLGLVGVRKALERVFSPQELLWLDELMPEEERSIPEKGLEPEHSFSGSDSEDSELMYQPKAPEINISVN

SEQ ID NO: 791424 - protein, 970 aa, Homo sapiens; identical to SEQ ID NO: 791420

SEQ ID NO: 791425 - protein, 994 aa, Homo sapiens; identical to SEQ ID NO: 791423

SEQ ID NO: 791426 - protein, 120 aa, Homo sapiens
SSGPSCLAFRSASARGSPSWDLLAGAAAFQGNCPCPWGTASVRGDTCGPSPLPAWRKGRGGPPYVTSGCSAARAHSGAAGAAWTPDARAVQSGDSEAEPVGGRPGGHGRPRPAFCWATEL

SEQ ID NO: 791427 - protein, 151 aa, Homo sapiens
WTWTVAWALESWPFPDLLSQRQHPNPRDPRDACAQSLREAPGRLFAVTRRSPRMPVRSHLEKSQDACAQSLGEAPGPLCTVTRRSPKLTQLCRNDCCKQILEVARGLCLQCYSQDGCVVWQRDSEGMVKFTNPLTLKQGGASGPDLITPTL

SEQ ID NO: 791428 - protein, 146 aa, Homo sapiens
RLGTEAWVWVRWKMRRSLRAGKRRQTAGRKSKSPPKVPIVIQDDSLPAGPPPQIRILKRPTSNGVVSSPNSTSRPTLPVKSLAQREAEYAEARKRILGSASPEEEQEKPILDRPTRISQPEDSRQPNNVIRQPLGPDGSQGFKQRR

SEQ ID NO: 791429 - protein, 146 aa, Homo sapiens; identical to SEQ ID NO: 791428

SEQ ID NO: 791430 - protein, 146 aa, Homo sapiens; identical to SEQ ID NO: 791428

SEQ ID NO: 791431 - protein, 152 aa, Homo sapiens
MEDEEVAESWEEAADSGEIDRRLEKKLKITQKESRKSKSPPKVPIVIQDDSLPAGPPPQIRILKRPTSNGVVSSPNSTSRPTLPVKSLAQREAEYAEARKRILGSASPEEEQEKPILDRPTRISQPEDSRQPNNVIRQPLGPDGSQGFKQRR

SEQ ID NO: 791432 - protein, 236 aa, Homo sapiens
ACADQGGMSGFAGKREEAAEGGGKLILFGLLNSAKIPHHPSRWTSRVFFLFHFYSKKSLWAGRQVSRGLCQSNRKLCGAAPLPLSDPRPREGLGVRLSESREIDRRLEKKLKITQKESRKSKSPPKVPIVIQDDSLPAGPPPQIRILKRPTSNGVVSSPNSTSRPTLPVKSLAQREAEYAEARKRILGSASPEEEQEKPILDRPTRISQPEDSRQPNNVIRQPLGPDGSQGFKQRR

SEQ ID NO: 791433 - protein, 156 aa, Homo sapiens
MGRIREGEESDERWVWDMDRASLVRSMICEAVFAALSARKSKSPPKVPIVIQDDSLPAGPPPQIRILKRPTSNGVVSSPNSTSRPTLPVKSLAQREAEYAEARKRILGSASPEEEQEKPILDRPTRISQPEDSRQPNNVIRQPLGPDGSQGFKQRR

SEQ ID NO: 791434 - protein, 146 aa, Homo sapiens; identical to SEQ ID NO: 791428

SEQ ID NO: 791435 - protein, 146 aa, Homo sapiens; identical to SEQ ID NO: 791428

SEQ ID NO: 791436 - protein, 152 aa, Homo sapiens
QARGGGGGGGKAASKIRWKMRRSLRAGKRRQTAGRKSKSPPKVPIVIQDDSLPAGPPPQIRILKRPTSNGVVSSPNSTSRPTLPVKSLAQREAEYAEARKRILGSASPEEEQEKPILDRPTRISQPEDSRQPNNVIRQPLGPDGSQGFKQRR

SEQ ID NO: 791437 - protein, 146 aa, Homo sapiens; identical to SEQ ID NO: 791428

SEQ ID NO: 791438 - protein, 152 aa, Homo sapiens; identical to SEQ ID NO: 791431

SEQ ID NO: 791439 - protein, 89 aa, Homo sapiens
QARGGGGGGGKAASKIRWKMRRSLRAGKRRQTAGRKSKSPPKVPIVIQDDSLPAGPPPQIRILKRPTSNGVVSSPNSTSRPTLPVKSPW

SEQ ID NO: 791440 - protein, 152 aa, Homo sapiens; identical to SEQ ID NO: 791436

SEQ ID NO: 791441 - protein, 133 aa, Homo sapiens
MRRSLRAGKRRQTAGRKSKSPPKVPIVIQDDSLPAGPPPQIRILKRPTSNGVVSSPNSTSRPTLPVKSLAQREAEYAEARKRILGSASPEEEQEKPILDRPTRISQPEDSRQPNNVIRQPLGPDGSQGFKQRR

SEQ ID NO: 791442 - protein, 146 aa, Homo sapiens; identical to SEQ ID NO: 791428

SEQ ID NO: 791443 - protein, 187 aa, Homo sapiens
RLGYRGLGVGKMEDEEVAESWEEAADSGGWCEQKMNVWEKNVDSHNTLYRYKEIDRRLEKKLKITQKESRKSKSPPKVPIVIQDDSLPAGPPPQIRILKRPTSNGVVSSPNSTSRPTLPVKSLAQREAEYAEARKRILGSASPEEEQEKPILDRPTRISQPEDSRQPNNVIRQPLGPDGSQGFKQRR

SEQ ID NO: 791444 - protein, 146 aa, Homo sapiens; identical to SEQ ID NO: 791428

SEQ ID NO: 791445 - protein, 157 aa, Homo sapiens
MEDEEVAESWEEAADSGEIDRRLEKKLKITQKESRKSKSPPKVPIVIQDDSLPAGPPPQIRILKRPTSNGVVSSPNSTSRPTLPVKSLAQREAEYAEARKRILGSASPEEEQEKPILDSIDKGCPKSMERERVGVRGRLGGPSKDSESQTVPLGHLG

SEQ ID NO: 791446 - protein, 146 aa, Homo sapiens; identical to SEQ ID NO: 791428

SEQ ID NO: 791447 - protein, 180 aa, Homo sapiens
RLGTEAWVWVRWKMRRSLRAGKRRQTAGRKSKSPPKVPIVIQDDSLPAGPPPQIRILKRPTSNGVVSSPNSTSRPTLPVKSLAQREAEYAEARKRILGSASPEEEQEKPILDRPTRISQPEDSRQPNNVIRQPLVSRDSRNLWGPVFWSCDPRGAHGPLGCLNRRAWEGGLHPCSLTLLV

SEQ ID NO: 791448 - protein, 256 aa, Homo sapiens [sequence omitted]

SEQ ID NO: 791449 - protein, 659 aa, Homo sapiens
MAPLHSRLDDKVRHCFQKRRRKEEEEGEERKKENEEGEGEGGGGGGGGGGGSGSGGGGSTGGGGGTAGGGTQSTAGPGGISQHLTYTSYILKQTPQGTFLVGQPSPQTSGKQLTTGSVVQGTLGVSTSSAQGQQTLKVISGQKTTLFTQAAHGGQASLMKISDSTLKTVPATSQLSKPGTTMLRVAGGVITTATSPAVALSANGPAQQSEGMAPVSSSTVSSVTKTSGQQQVCVSQATVGTCKAATPTVVSATSLVPTPNPISGKATVSGLLKIHSSQSSPQQAVLTIPSQLKPLSVNTSGGVQTILMPVNKVVQSFSTSKPPAILPVAAPTPVVPSSAPAAVAKVKTEPETPGPSCLSQEGQTAVKTEESSELGNYVIKIDHLETIQQLLTAVVKKIPLITAKSEDASCFSAKSVEQYYGWNIGKRRAAEWQRAMTMRKVLQEILEKNPRFHHLTPLKTKHIAHWCRCHGYTPPDPESLRNDGDSIEDVLTQIDSEPECPSSFSSADNLCRKLEDLQQFQKREPENEEEVDILSLSEPVKINIKKEQEEKQEEVKFYLPPTPGSEFIGDVTQKIGITLQPVALHRNVYASVVEDMILKATEQLVNDILRQALAVGYQTASHNRIPKEITVSNIHQAICNIPFLDFLTNKHMGILNEDQ

SEQ ID NO: 791450 - protein, 1433 aa, Homo sapiens
AGRNAPGGLHRAVCFRRLRGSLGPCGGAAPRGFARSLTSPCSLAAAGGARAAAGDPEKGEELNVIMSGIKRTIKETDPDYEDVSVALPNKRHKAIENSARDAAVQKIETIIKEQFALEMKNKEHEIEVIDQRLIEARRMMDKLRACIVANYYASAGLLKVSEGSKTCDTMVFNHPAIKKFLESPSRSSSPANQRAETPSANHSESDSLSQHNDFLSDKDNNSNMDIEERLSNNMEQRPSRNTGRDTSRITGSHKTEQRNADLTDETSRLFVKKTIVVGNVSKYIPPDKREENDQSTHKWMVYVRGSRREPSINHFVKKVWFFLHPSYKPNDLVEVREPPFHLTRRGWGEFPVRVQVHFKDSQNKRIDIIHNLKLDRTYTGLQTLGAETVVDVELHRHSLGEDCIYPQSSESDISDAPPSLPLTIPAPVKASSPIKQSHEPVPDTSVEKGFPASTEAERHTPFYALPSSLERTPTKMTTSQKVTFCSHGNSAFQPIASSCKIVPQSQVPNPESPGKSFQPITMSCKIVSGSPISTPSPSPLPRTPTSTPVHVKQGTAGSVINNPYVIMDKQPGQVIGATTPSTGSPTNKISTASQVSQGTGSPVPKIHGSSFVTSTVKQEDSLFASMPPLCPIGSHPKVQSPKPITGGLGAFTKVIIKQEPGEAPHVPATGAASQSPLPQYVTVKGGHMIAVSPQKQVITPGEGIAQSAKVQPSKVVGVPVGSALPSTVKQAVAISGGQILVAKASSSVSKAVGPKQVVTQGVAKAIVSGGGGTIVAQPVQTLTKAQVTAAGPQKSGSQGSVMATLQLPATNLANLANLPPGTKLYLTTNSKNPSGKGKLLLIPQGAILRATNNANLQSGSAASGGSGAGGGGGGGGGGGSGSGGGGSTGGGGGTAGGGTQSTAGPGGISQHLTYTSYILKQTPQGTFLVGQPSPQTSGKQLTTGSVVQGTLGVSTSSAQGQQTLKVISGQKTTLFTQAAHGGQASLMKISDSTLKTVPATSQLSKPGTTMLRVAGGVITTATSPAVALSANGPAQQSEGMAPVSSSTVSSVTKTSGQQQVCVSQATVGTCKAATPTVVSATSLVPTPNPISGKATVSGLLKIHSSQSSPQQAVLTIPSQLKPLSVNTSGGVQTILMPVNKVVQSFSTSKPPAILPVAAPTPVVPSSAPAAVAKVKTEPETPGPSCLSQEGQTAVKTEESSELGNYVIKIDHLETIQQLLTAVVKKIPLITAKSEDASCFSAKSVEQYYGWNIGKRRAAEWQRAMTMRKVLQEILEKNPRFHHLTPLKTKHIAHWCRCHGYTPPDPESLRNDGDSIEDVLTQIDSEPECPSSFSSADNLCRKLEDLQQFQKREPENEEEVDILSLSEPVKINIKKEQEEKQEEVKFYLPPTPGSEFIGDVTQKIGITLQPVALHRNVYASVVEDMILKAQRSCN

SEQ ID NO: 791451 - protein, 1487 aa, Homo sapiens
AGRNAPGGLHRAVCFRRLRGSLGPCGGAAPRGFARSLTSPCSLAAAGGARAAAGDPEKGEELNVIMSGIKRTIKETDPDYEDVSVALPNKRHKAIENSARDAAVQKIETIIKEQFALEMKNKEHEIEVIDQRLIEARRMMDKLRACIVANYYASAGLLKVSEGSKTCDTMVFNHPAIKKFLESPSRSSSPANQRAETPSANHSESDSLSQHNDFLSDKDNNSNMDIEERLSNNMEQRPSRNTGRDTSRITGSHKTEQRNADLTDETSRLFVKKTIVVGNVSKYIPPDKREENDQSTHKWMVYVRGSRREPSINHFVKKVWFFLHPSYKPNDLVEVREPPFHLTRRGWGEFPVRVQVHFKDSQNKRIDIIHNLKLDRTYTGLQTLGAETVVDVELHRHSLGEDCIYPQSSESDISDAPPSLPLTIPAPVKASSPIKQSHEPVPDTSVEKGFPASTEAERHTPFYALPSSLERTPTKMTTSQKVTFCSHGNSAFQPIASSCKIVPQSQVPNPESPGKSFQPITMSCKIVSGSPISTPSPSPLPRTPTSTPVHVKQGTAGSVINNPYVIMDKQPGQVIGATTPSTGSPTNKISTASQVSQGTGSPVPKIHGSSFVTSTVKQEDSLFASMPPLCPIGSHPKVQSPKPITGGLGAFTKVIIKQEPGEAPHVPATGAASQSPLPQYVTVKGGHMIAVSPQKQVITPGEGIAQSAKVQPSKVVGVPVGSALPSTVKQAVAISGGQILVAKASSSVSKAVGPKQVVTQGVAKAIVSGGGGTIVAQPVQTLTKAQVTAAGPQKSGSQGSVMATLQLPATNLANLANLPPGTKLYLTTNSKNPSGKGKLLLIPQGAILRATNNANLQSGSAASGGSGAGGGGGGGGGGGSGSGGGGSTGGGGGTAGGGTQSTAGPGGISQHLTYTSYILKQTPQGTFLVGQPSPQTSGKQLTTGSVVQGTLGVSTSSAQGQQTLKVISGQKTTLFTQAAHGGQASLMKISDSTLKTVPATSQLSKPGTTMLRVAGGVITTATSPAVALSANGPAQQSEGMAPVSSSTVSSVTKTSGQQQVCVSQATVGTCKAATPTVVSATSLVPTPNPISGKATVSGLLKIHSSQSSPQQAVLTIPSQLKPLSVNTSGGVQTILMPVNKVVQSFSTSKPPAILPVAAPTPVVPSSAPAAVAKVKTEPETPGPSCLSQEGQTAVKTEESSELGNYVIKIDHLETIQQLLTAVVKKIPLITAKSEDASCFSAKSVEQYYGWNIGKRRAAEWQRAMTMRKVLQEILEKNPRFHHLTPLKTKHIAHWCRCHGYTPPDPESLRNDGDSIEDVLTQIDSEPECPSSFSSADNLCRKLEDLQQFQKREPENEEEVDILSLSEPVKINIKKEQEEKQEEVKFYLPPTPGSEFIGDVTQKIGITLQPVALHRNVYASVVEDMILKATEQLVNDILRQALAVGYQTASHNRIPKEITVSNIHQAICNIPFLDFLTNKHMGILNEDQ

SEQ ID NO: 791452 - protein, 1487 aa, Homo sapiens; identical to SEQ ID NO: 791451

SEQ ID NO: 791453 - protein, 1487 aa, Homo sapiens; identical to SEQ ID NO: 791451

SEQ ID NO: 791454 - protein, 1487 aa, Homo sapiens; identical to SEQ ID NO: 791451

SEQ ID NO: 791455 - protein, 1310 aa, Homo sapiens
AGRNAPGGLHRAVCFRRLRGSLGPCGGAAPRGFARSLTSPCSLAAAGGARAAAGDPEKGEELNVIMSGIKRTIKETDPDYEDVSVALPNKRHKAIENSARDAAVQKIETIIKEQFALEMKNKEHEIEVIDQRLIEARRMMDKLRACIVANYYASAGLLKVSEGSKTCDTMVFNHPAIKKFLESPSRSSSPANQRAETPSANHSESDSLSQHNDFLSDKDNNSNMDIEERLSNNMEQRPSRNTGRDTSRITGSHKTEQRNADLTDETSRLFVKKTIVVGNVSKYIPPDKREENDQSTHKWMVYVRGSRREPSINHFVKKVWFFLHPSYKPNDLVEVREPPFHLTRRGWGEFPVRVQVHFKDSQNKRIDIIHNLKLDRTYTGLQTLGAETVVDVELHRHSLGEDCIYPQSSESDISDAPPSLPLTIPAPVKASSPIKQSHEPVPDTSVEKGFPASTEAERHTPFYALPSSLERTPTKMTTSQKVTFCSHGNSAFQPIASSCKIVPQSQVPNPESPGKSFQPITMSCKIVSGSPISTPSPSPLPRTPTSTPVHVKQGTAGSVINNPYVIMDKQPGQVIGATTPSTGSPTNKISTASQVSQGTGSPVPKIHGSSFVTSTVKQEDSLFASMPPLCPIGSHPKVQSPKPITGGLGAFTKVIIKQEPGEAPHVPATGAASQSPLPQYVTVKGGHMIAVSPQKQVITPGEGIAQSAKVQPSKVVGVPVGSALPSTVKQAVAISGGQILVAKASSSVSKAVGPKQVVTQGVAKAIVSGGGGTIVAQPVQTLTKAQVTAAGPQKSGSQGSVMATLQLPATNLANLANLPPGTKLYLTTNSKNPSGKGKLLLIPQGAILRATNNANLQSGSAASGGSGAGGGGGGGGGGGSGSGGGGSTGGGGGTAGGGTQSTAGPGGISQHLTYTSYILKQTPQGTFLVGQPSPQTSGKQLTTGSVVQGTLGVSTSSAQGQQTLKVISGQKTTLFTQAAHGGQASLMKISDSTLKTVPATSQLSKPGTTMLRVAGGVITTATSPAVALSANGPAQQSEGMAPVSSSTVSSVTKTSGQQQVCVSQATVGTCKAATPTVVSATSLVPTPNPISGKATVSGLLKIHSSQSSPQQAVLTIPSQLKPLSVNTSGGVQTILMPVNKVVQSFSTSKPPAILPVAAPTPVVPSSAPAAVAKVKTEPETPGPSCLSQEGQTAVKTEESSELGNYVIKIDHLETIQQLLTAVVKKIPLITAKSEDASCFSAKSVEQYYGWNIGKRRAAEWQRAMTMRKVLQEILEKNPRFHHLTPLKTKHIAHWCRCIAVSWVTELIVSC

SEQ ID NO: 791456 - protein, 1098 aa, Homo sapiens
AGRNAPGGLHRAVCFRRLRGSLGPCGGAAPRGFARSLTSPCSLAAAGGARAAAGDPEKGEELNVIMSGIKRTIKETDPDYEDVSVALPNKRHKAIENSARDAAVQKIETIIKEQFALEMKNKEHEIEVIDQRLIEARRMMDKLRACIVANYYASAGLLKVSEGSKTCDTMVFNHPAIKKFLESPSRSSSPANQRAETPSANHSESDSLSQHNDFLSDKDNNSNMDIEERLSNNMEQRPSRNTGRDTSRITGSHKTEQRNADLTDETSRLFVKKTIVVGNVSKYIPPDKREENDQSTHKWMVYVRGSRREPSINHFVKKVWFFLHPSYKPNDLVEVREPPFHLTRRGWGEFPVRVQVHFKDSQNKRIDIIHNLKLDRTYTGLQTLGAETVVDVELHRHSLGEDCIYPQSSESDISDAPPSLPLTIPAPVKASSPIKQSHEPVPDTSVEKGFPASTEAERHTPFYALPSSLERTPTKMTTSQKVTFCSHGNSAFQPIASSCKIVPQSQVPNPESPGKSFQPITMSCKIVSGSPISTPSPSPLPRTPTSTPVHVKQGTAGSVINNPYVIMDKQPGQVIGATTPSTGSPTNKISTASQVSQGTGSPVPKIHGSSFVTSTVKQEDSLFASMPPLCPIGSHPKVQSPKPITGGLGAFTKVIIKQEPGEAPHVPATGAASQSPLPQYVTVKGGHMIAVSPQKQVITPGEGIAQSAKVQPSKVVGVPVGSALPSTVKQAVAISGGQILVAKASSSVSKAVGPKQVVTQGVAKAIVSGGGGTIVAQPVQTLTKAQVTAAGPQKSGSQGSVMATLQLPATNLANLANLPPGTKLYLTTNSKNPSGKGKLLLIPQGAILRATNNANLQSGSAASGGSGAGGGGGGGGGGGSGSGGGGSTGGGGGTAGGGTQSTAGPGGISQHLTYTSYILKQTPQGTFLVGQPSPQTSGKQLTTGSVVQGTLGVSTSSAQGQQTLKVISGQKTTLFTQAAHGGQASLMKISDSTLKTVPATSQLSKPGTTMLRVAGGVITTATSPAVALSANGPAQQSEGMAPVSSSTVSSVTKTSGQQQVCVSQATVGTCKAATPTVVSATSLVPTPNPISGKATVSD

SEQ ID NO: 791457 - protein, 627 aa, Homo sapiens
AGRNAPGGLHRAVCFRRLRGSLGPCGGAAPRGFARSLTSPCSLAAAGGARAAAGDPEKGEELNVIMSGIKRTIKETDPDYEDVSVALPNKRHKAIENSARDAAVQKIETIIKEQFALEMKNKEHEIEVIDQRLIEARRMMDKLRACIVANYYASAGLLKVSEGSKTCDTMVFNHPAIKKFLESPSRSSSPANQRAETPSANHSESDSLSQHNDFLSDKDNNSNMDIEERLSNNMEQRPSRNTGRDTSRITGSHKTEQRNADLTDETSRLFVKKTIVVGNVSKYIPPDKREENDQSTHKWMVYVRGSRREPSINHFVKKVWFFLHPSYKPNDLVEVREPPFHLTRRGWGEFPVRVQVHFKDSQNKRIDIIHNLKLDRTYTGLQTLGAETVVDVELHRHSLGEDCIYPQSSESDISDAPPSLPLTIPAPVKASSPIKQSHEPVPDTSVEKGFPASTEAERHTPFYALPSSLERTPTKMTTSQKVTFCSHGNSAFQPIASSCKIVPQSQVPNPESPGKSFQPITMSCKIVSGSPISTPSPSPLPRTPTSTPVHVKQGTAGSVINNPYVIMDKQPGQVIGATTPSTGSPTNKISTASQVSQGTGSPVPKIHGSSFVTSTVKVTFLLRYYTC

SEQ ID NO: 791458 - protein, 718 aa, Homo sapiens
AGRNAPGGLHRAVCFRRLRGSLGPCGGAAPRGFARSLTSPCSLAAAGGARAAAGDPEKGEELNVIMSGIKRTIKETDPDYEDVSVALPNKRHKAIENSARDAAVQKIETIIKEQFALEMKNKEHEIEVIDQRLIEARRMMDKLRACIVANYYASAGLLKVSEGSKTCDTMVFNHPAIKKFLESPSRSSSPANQRAETPSANHSESDSLSQHNDFLSDKDNNSNMDIEERLSNNMEQRPSRNTGRDTSRITGSHKTEQRNADLTDETSRLFVKKTIVVGNVSKYIPPDKREENDQSTHKWMVYVRGSRREPSINHFVKKVWFFLHPSYKPNDLVEVREPPFHLTRRGWGEFPVRVQVHFKDSQNKRIDIIHNLKLDRTYTGLQTLGAETVVDVELHRHSLGEDCIYPQSSESDISDAPPSLPLTIPAPVKASSPIKQSHEPVPDTSVEKGFPASTEAERHTPFYALPSSLERTPTKMTTSQKVTFCSHGNSAFQPIASSCKIVPQSQVPNPESPGKSFQPITMSCKIVSGSPISTPSPSPLPRTPTSTPVHVKQGTAGSVINNPYVIMDKQPGQVIGATTPSTGSPTNKISTASQVSQGTGSPVPKIHGSSFVTSTVKQEDSLFASMPPLCPIGSHPKVQSPKPITGGLGAFTKVIIKQEPGEAPHVPATGAASQSPLPQYVTVKGGHMIAVSPQKQVITPGEGIAQSAKVQPSKVCVG

SEQ ID NO: 791459 - protein, 1487 aa, Homo sapiens; identical to SEQ ID NO: 791451

SEQ ID NO: 791460 - protein, 144 aa, Homo sapiens
MGEQSEGMAPVSSSTVSSVTKTSGQQQVCVSQATVGTCKAATPTVVSATSLVPTPNPISGKATVSGELHCDIISLSFLSLGWNIFVCLFEIASHSVAQARVQYHNLDSLQPLPSRLKPSSHLSLLIIRDHRHMSPHPANFLCFW

SEQ ID NO: 791461 - protein, 913 aa, Homo sapiens
SPPTPSCTGSPTNKISTASQVSQGTGSPVPKIHGSSFVTSTVKQEDSLFASMPPLCPIGSHPKVQSPKPITGGLGAFTKVIIKQEPGEAPHVPATGAASQSPLPQYVTVKGGHMIAVSPQKQVITPGEGIAQSAKVQPSKVVGVPVGSALPSTVKQAVAISGGQILVAKASSSVSKAVGPKQVVTQGVAKAIVSGGGGTIVAQPVQTLTKAQVTAAGPQKSGSQGSVMATLQLPATNLANLANLPPGTKLYLTTNSKNPSGKGKLLLIPQGAILRATNNANLQSGSAASGGSGAGGGGGGGGGGGSGSGGGGSTGGGGGTAGGGTQSTAGPGGISQHLTYTSYILKQTPQGTFLVGQPSPQTSGKQLTTGSVVQGTLGVSTSSAQGQQTLKVISGQKTTLFTQAAHGGQASLMKISDSTLKTVPATSQLSKPGTTMLRVAGGVITTATSPAVALSANGPAQQSEGMAPVSSSTVSSVTKTSGQQQVCVSQATVGTCKAATPTVVSATSLVPTPNPISGKATVSGLLKIHSSQSSPQQAVLTIPSQLKPLSVNTSGGVQTILMPVNKVVQSFSTSKPPAILPVAAPTPVVPSSAPAAVAKVKTEPETPGPSCLSQEGQTAVKTEESSELGNYVIKIDHLETIQQLLTAVVKKIPLITAKSEDASCFSAKSVEQYYGWNIGKRRAAEWQRAMTMRKVLQEILEKNPRFHHLTPLKTKHIAHWCRCHGYTPPDPESLRNDGDSIEDVLTQIDSEPECPSSFSSADNLCRKLEDLQQFQKREPENEEEVDILSLSEPVKINIKKEQEEKQEEVKFYLPPTPGSEFIGDVTQKIGITLQPVALHRNVYASVVEDMILKATEQLVNDILRQALAVGYQTASHNRIPKEITVSNIHQAICNIPFLDFLTNKHMGILNEDQ

SEQ ID NO: 791462 - protein, 106 aa, Homo sapiens
MPVPRSSEISLCPQAEAPSMGGSGRQEKVALPGARVYWRRPISDFLTQPVWKAEQRMHAQSEICSILLQENRKPVSQSQRNLPKQRNSCFHGSCRCLSQEGKAGSD

SEQ ID NO: 791463 - protein, 106 aa, Homo sapiens; identical to SEQ ID NO: 791462

SEQ ID NO: 791464 - protein, 606 aa, Homo sapiens
AGRNAPGGLHRAVCFRRLRGSLGPCGGAAPRGFARSLTSPCSLAAAGGARAAAGDPEKGEELNVIMSGIKRTIKETDPDYEDVSVALPNKRHKAIENSARDAAVQKIETIIKEQFALEMKNKEHEIEVIDQRLIEARRMMDKLRACIVANYYASAGLLKVSEGSKTCDTMVFNHPAIKKFLESPSRSSSPANQRAETPSANHSESDSLSQHNDFLSDKDNNSNMDIEERLSNNMEQRPSRNTGRDTSRITGSHKTEQRNADLTDETSRLFVKKTIVVGNVSKYIPPDKREENDQSTHKWMVYVRGSRREPSINHFVKKVWFFLHPSYKPNDLVEVREPPFHLTRRGWGEFPVRVQVHFKDNQLKPLSVNTSGGVQTILMPVNKVVQSFSTSKPPAILPVAAPTPVVPSSAPAAVAKVKTEPETPGPSCLSQEGQTAVKTEESSELGNYVIKIDHLETIQQLLTAVVKKIPLITAKSEDASCFSAKSVEQYYGWNIGKRRAAEWQRAMTMRKVLQEILEKNPRFHHLTPLKTKHIAHWCRCHGYTPPDPESLRNDGDSIEDVLTQIDSEPECPSSFSSADNLCRKLEDLQQFQSSPGDRGDPVSKID

SEQ ID NO: 791465 - protein, 1244 aa, Homo sapiens
AGRNAPGGLHRAVCFRRLRGSLGPCGGAAPRGFARSLTSPCSLAAAGGARAAAGDPEKGEELNVIMSGIKRTIKETDPDYEDVSVALPNKRHKAIENSARDAAVQKIETIIKEQFALEMKNKEHEIEVIDQRLIEARRMMDKLRACIVANYYASAGLLKVSEGSKTCDTMVFNHPAIKKFLESPSRSSSPANQRAETPSANHSESDSLSQHNDFLSDKDNNSNMDIEERLSNNMEQRPSRNTGRDTSRITGSHKTEQRNADLTDETSRLFVKKTIVVGNVSKYIPPDKREENDQSTHKWMVYVRGSRREPSINHFVKKVWFFLHPSYKPNDLVEVREPPFHLTRRGWGEFPVRVQVHFKDSQNKRIDIIHNLKLDRTYTGLQTLGAETVVDVELHRHSLGEDCIYPQSSESDISDAPPSLPLTIPAPVKASSPIKQSHEPVPDTSVEKGFPASTEAERHTPFYALPSSLERTPTKMTTSQKVTFCSHGNSAFQPIASSCKIVPQSQVPNPESPGKSFQPITMSCKIVSGSPISTPSPSPLPRTPTSTPVHVKQGTAGSVINNPYVIMDKQPGQVIGATTPSTGSPTNKISTASQVSQGTGSPVPKIHGSSFVTSTVKQEDSLFASMPPLCPIGSHPKVQSPKPITGGLGAFTKVIIKQEPGEAPHVPATGAASQSPLPQYVTVKGGHMIAVSPQKQVITPGEGIAQSAKVQPSKVVGVPVGSALPSTVKQAVAISGGQILVAKASSSVSKAVGPKQVVTQGVAKAIVSGGGGTIVAQPVQTLTKAQVTAAGPQKSGSQGSVMATLQLPATNLANLANLPPGTKLYLTTNSKNPSGKGKLLLIPQGAILRATNNANLQSGSAASGGSGAGGGGGGGGGGGSGSGGGGSTGGGGGTAGGGTQSTAGPGGISQHLTYTSYILKQTPQGTFLVGQPSPQTSGKQLTTGSVVQGTLGVSTSSAQGQQTLKVISGQKTTLFTQAAHGGQASLMKISDSTLKTVPATSQLSKPGTTMLRVAGGVITTATSPAVALSANGPAQQSEGMAPVSSSTVSSVTKTSGQQQVCVSQATVGTCKAATPTVVSATSLVPTPNPISGKATVSGLLKIHSSQSSPQQAVLTIPSQLKPLSVNTSGGVQTILMPVNKVVQSFSTSKPPAILPVAAPTPVVPSSAPAAVAKVKTEPETPGPSCLSQEGQTAVKTEESSELGNYVIKIDHLETIQQLLTAVVKKIPLITAKSKTITLNIGVHF

SEQ ID NO: 791466 - protein, 1176 aa, Homo sapiens
AGRNAPGGLHRAVCFRRLRGSLGPCGGAAPRGFARSLTSPCSLAAAGGARAAAGDPEKGEELNVIMSGIKRTIKETDPDYEDVSVALPNKRHKAIENSARDAAVQKIETIIKEQFALEMKNKEHEIEVIDQRLIEARRMMDKLRACIVANYYASAGLLKVSEGSKTCDTMVFNHPAIKKFLESPSRSSSPANQRAETPSANHSESDSLSQHNDFLSDKDNNSNMDIEERLSNNMEQRPSRNTGRDTSRITGSHKTEQRNADLTDETSRLFVKKTIVVGNVSKYIPPDKREENDQSTHKWMVYVRGSRREPSINHFVKKVWFFLHPSYKPNDLVEVREPPFHLTRRGWGEFPVRVQVHFKDSQNKRIDIIHNLKLDRTYTGLQTLGAETVVDVELHRHSLGEDCIYPQSSESDISDAPPSLPLTIPAPVKASSPIKQSHEPVPDTSVEKGFPASTEAERHTPFYALPSSLERTPTKMTTSQKVTFCSHGNSAFQPIASSCKIVPQSQVPNPESPGKSFQPITMSCKIVSGSPISTPSPSPLPRTPTSTPVHVKQGTAGSVINNPYVIMDKQPGQVIGATTPSTGSPTNKISTASQVSQGTGSPVPKIHGSSFVTSTVKQEDSLFASMPPLCPIGSHPKVQSPKPITGGLGAFTKVIIKQEPGEAPHVPATGAASQSPLPQYVTVKGGHMIAVSPQKQVITPGEGIAQSAKVQPSKVVGVPVGSALPSTVKQAVAISGGQILVAKASSSVSKAVGPKQVVTQGVAKAIVSGGGGTIVAQPVQTLTKAQVTAAGPQKSGSQGSVMATLQLPATNLANLANLPPGTKLYLTTNSKNPSGKGKLLLIPQGAILRATNNANLQSGSAASGGSGAGGGGGGGGGGGSGSGGGGSTGGGGGTAGGGTQSTAGPGGISQHLTYTSYILKQTPQGTFLVGQPSPQTSGKQLTTGSVVQGTLGVSTSSAQGQQTLKVISGQKTTLFTQAAHGGQASLMKISDSTLKTVPATSQLSKPGTTMLRVAGGVITTATSPAVALSANGPAQQSEGMAPVSSSTVSSVTKTSGQQQVCVSQATVGTCKAATPTVVSATSLVPTPNPISGKATVSGELHCDIISLSFLSLGWNIFVCLFEIASHSVAQARVQYHNLDSLQPLPSRLKPSSHLSLLIIRDHRHMSPHPANFLCFW

SEQ ID NO: 791467 - protein, 97 aa, Homo sapiens
THRPQQSQAGDAIPTPHLGVAPAPIPTDLLGFASSREPQVSSATHRFAERSGHQGLSRATHLACQDVQSFQNDSVDCWGLFSAQDQVRPSLEVAARQ

SEQ ID NO: 791468 - protein, 80 aa, Homo sapiens
MPVPSSMLQILTPNCLLGSHTELYNVHRKLPLSETEHNVPCSSPVVIFPMSGDGTTIHSGAQVKILNSSLTHPPPIQWRP

SEQ ID NO: 791469 - protein, 152 aa, Homo sapiens
GGPDAPLGTLCGPRGPGPATPAAPGGPRLPQDALAAGPRRCRLLRVPDGLLSRALRAGRSRRLARVRSVSSGNEDEERRAGSESPARAPSSSPLSSRAPLPERLEARAVALGRAGRLAWLLSTVREPASPPPAAPRGEPVRRRPRARAVRCR

SEQ ID NO: 791470 - protein, 298 aa, Homo sapiens
SAFGHVRERTFHLSFNMGKGNEDPDLHCSSIQCSTDQPPFQQISFTEKGSDEKKPFKGKGKTAFSHSSEKHTQRQAGSDPNPNKENSEETKLKAGNSTAGSEPESSSYQENCRKRKISSKDICQDRAGNCPEEECNLTLNKKSRSSTAVHNSEIQETCDAHHRGSSRACTGRSKRHRSRALEVQTPSLRKSLVTSVRAMSEAVYQDLAQVWAQQIHSPLTCEQLTLLTRLRGPLCAQVQTLYSMATQAAYVFPAESWLVPATLPGPGDSALDREAHPFPGQEITEPVSGSDEAKLGAP

SEQ ID NO: 791471 - protein, 111 aa, Homo sapiens
DGVLLLLPRLECNGAILAYRSLCLLGSRDSPASAFLSSWDYRHAPPHPANFVFLVETGFLHVGQADLELPTSDDRPASASQSAGITGVSHRSRPPVNCYYEVDGDYILLLS

SEQ ID NO: 791472 - protein, 113 aa, Homo sapiens
RSAEIYTSLNYECSKPTTAVLPVYKILSLIETYIYYYYYYYYTLSSGIHAQNVQFCYIGIHVVWWFAAPINPSSTLGISPNAIPPLAPPRQVPVCDVPFPVSMCSHCLAPTYE

SEQ ID NO: 791473 - protein, 117 aa, Homo sapiens
EGREIVPGLLKDAASEMNIEDWGGFKQVETDGMDTGLGSSASPTSAEEHRKFCSTGFLCSSTYASSFSLVACRAWLALRPEVLKSAGILHLCNLLLSPSHHRNQSLEAFGLGAAFTV

SEQ ID NO: 791474 - protein, 92 aa, Homo sapiens
QEESWREDMHPLKTQREAVCLPRSSYIRLRHFLFTGDYKIPAPCSFGADAILGLSPSAPRRSLKQCVAPHRLVLLVGALSGFRPIQEPCRKH

SEQ ID NO: 791475 - protein, 123 aa, Homo sapiens
DLRGFPCIFVFLFSGRLASVTVWCSRAHSSIRGLATSSEKPSYMIPLKLHFLLSAPIMGIARLPSAFGNAKTIRNDNSSRFGKYIDIYFNPSGVIEGARIEQFLLEKSRVCRQVRPPPSQVGS

SEQ ID NO: 791476 - protein, 107 aa, Homo sapiens
IAQSISFRSCLPSAADTSVQISGLSGDAGLFEENQPNEIKSWGWGEAEQTQDLVAHRRCYRVSFLFRILYSAHVIYLSIYITITTRRVDTRCHTLQESINKVQYFQI

SEQ ID NO: 791477 - protein, 204 aa, Homo sapiens
EGGDPEDLKLTDDEEPPNMASESGKLWGGRFVGAVDPIMEKFNASIAYDRHLWEVDVQGSKAYSRGLEKAGLLTKAEMDQILHGLDKVAEELGPGTFKLNSNDEDIHTANERRLKELIGATAGKLHTGRSRNDQVVTDLRLWMRQTCSTLSGLLWELIRTMVDRAEPNVMSLSGDPIGEGQPFRGATDFEPRRGLTRGALKAPC

SEQ ID NO: 791478 - protein, 393 aa, Homo sapiens
EGGDPEDLKLTDDEEPPNMASESGKLWGGRFVGAVDPIMEKFNASIAYDRHLWEVDVQGSKAYSRGLEKAGLLTKAEMDQILHGLDKVAEELGPGTFKLNSNDEDIHTANERRLKELIGATAGKLHTGRSRNDQVVTDLRLWMRQTCSTLSGLLWELIRTMVDRAEAERDVLFPGYTHLQRAQPIRWSHWILSHAVALTRDSERLLEVRKRINVLPLGSGAIAGNPLGVDRELLRAELNFGAITLNSMDATSERDFVGEFLFWASLCMTHLSRMGEDLILYLTKEFSSCSLRCLQQGSKLMPQKKKPEGGADPEPGWACVGGGAGLIAPGTPDLTQDFGGRPVRAHGRPGHGAQRIQNGSHQGGGLRRGPAAEVAGAPGGTRRGRVAEGTQRE

SEQ ID NO: 791479 - protein, 106 aa, Homo sapiens [sequence omitted]

SEQ ID NO: 791480 - protein, 102 aa, Homo sapiens
  misc_feature (55)..(55): Xaa can be any naturally occurring amino acid
  misc_feature (96)..(96): Xaa can be any naturally occurring amino acid
MRQYLQAWQHEVYVYTPCSFLQGTTIAEAFVALSAKLPSNLALDGSLADLIKKVXPSLSIFSIYLSTYLSIYLFPFSYPPIQAGPGGLQHQGGKGXGGLLNF

SEQ ID NO: 791481 - protein, 95 aa, Homo sapiens
IQTPREGSWISRKKEFRGTTIAEAFVALSAKLPSNLALDGSLADLIKKLPVQTSINAGSTSKHCGDMSVPPSRPSILNSGCSLDIPEELSKETSA

SEQ ID NO: 791482 - protein, 151 aa, Homo sapiens
MQASPTASRLRRTEPPPLLLGLRSIPLPISWRISVVWAGNLYPVIRQKTMKGGPLDRRLYGRKQSPPQGAGRPLGTRPAGHSAEAGHAWSLQVLPALPQPFYDTHPAARKGFRRETAWGPEGARPSFTLWTTSDLPRSHIYNSTFQKVEES

SEQ ID NO: 791483 - protein, 126 aa, Homo sapiens
QCDQEELKRGLSIPATAAPFSLGCRHPDRKGVLTTPQGLAPPCAAKLATPSAWHAHPRHPHHWLPIVPWVLSVRKPHKSSCLSSTVGLLHRTFSSFPGIYIILEPFYLRVHLSNHTAMVLKYVLNS

SEQ ID NO: 791484 - protein, 35 aa, Homo sapiens
MDRLECPGVDLPGGHKGYIQLNAAEIILIKVFNVL

SEQ ID NO: 791485 - protein, 101 aa, Homo sapiens
GGIQHHDDILCAAFLPPQTLVTGSYDGEIVLWNNSTENAHHVLHPDYQRLLKSKLDTKPQKLLSAGRSQPSHPMADHSTTGVRNFEIDTEGKNAVMRLCFL

SEQ ID NO: 791486 - protein, 139 aa, Homo sapiens
MHYINRLRDNHMIISINAKEVFDKVQHTFLIKSPSTLCIEGKFLNIIKDIYGKHTANIIINEEKLEVFHLRSTVQGCSFSPLPFNIVLEVLARAIRQEKEIKGLQIRNEEVKLSVFADYIILYIDNPKDSAKKLLCIIN

SEQ ID NO: 791487 - protein, 98 aa, Homo sapiens
RDYYIETTYIDIESLDTKHLTNRPNLSTLPFFHSASEQRGSTPLWAAGQLSESTDLEQAQEGKGGEEGRADTQDSTAGINRSRRATQDTVKGLKSLFW

SEQ ID NO: 791488 - protein, 148 aa, Homo sapiens
CPPSPGCGAGRRALATPGPLESPAAAQDPLPRHVGPSGLGWSLEPAARVLSGLLVGAGVGPRLPCGARWFHAPERPRCADLAALRGDGSALKTVVFPKPSLLSGLQGAAGEGFVPVAKALQVEPYLLWEGPAFSDSRRALCRLLAEKR

SEQ ID NO: 791489 - protein, 754 aa, Homo sapiens
SPEDPRRPESRLRPEVAHQLFRCFQYQEDMGPRASLSRLRELCGHWLRPALHTKKQILELLVLEQFLSVLPPHLLGRLQGQPLRDGEEVVLLLEGIHREPSHAGPLDFSCNAGKSCPRADVTLEEKGCASQVPSHSPKKELPAEEPSVLGPSDEPPRPQPRAAQPAEPGQWRLPPSSKQPLSPGPQKTFQALQESSPQGPSPWPEESSRDQELAAVLECLTFEDVPENKAWPAHPLGFGSRTPDKEEFKQEEPKGAAWPTPILAESQADSPGVPGEPCAQSLGRGAAASGPGEDGSLLGSSEILEVKVAEGVPEPNPELQFICADCGVSFPQLSRLKAHQLRSHPAGRSFLCLCCGKSFGRSSILKLHMRTHTDERPHACHLCGHRFRQSSHLSKHLLTHSSEPAFLCAECGRGFQRRASLVQHLLAHAQDQKPPCAPESKAEAPPLTDVLCSHCGQSFQRRSSLKRHLRIHARDKDRRSSEGSGSRRRDSDRRPFVCSDCGKAFRRSEHLVAHRRVHTGERPFSCQACGRSFTQSSQLVSHQRVHTGEKPYACPQCGKRFVRRASLARHLLTHGGPRPHHCTQCGKSFGQTQDLARHQRSHTGEKPCRCSECGEGFSQSAHLARHQRIHTGEKPHACDTCGHRFRNSSNLARHRRSHTGERPYSCQTCGRSFRRNAHLRRHLATHAEPGQEQAEPPQECVECGKSFSRSCNLLRHLLVHTGARPYSCTQCGRSFSRNSHLLRHLRTHARETLY

SEQ ID NO: 791490 - protein, 89 aa, Homo sapiens
MWLCLEASKRALMCKVQPHLCPQLQDGLAHIPHPGFSSQAVPHPPSVWPLPRNVGPRLQTPTWPGFFHRTCPIQLHPSKEPQSRQTLLP

SEQ ID NO: 791491 - protein, 81 aa, Homo sapiens
AHCGSVGQLGCLRSSCLLSSLDLARNALMGMAEAKMVGRRTITKNAEWGAGLSVGPLLKQTFLQPPGHHPCHLYCQRHRVP

SEQ ID NO: 791492 - protein, 318 aa, Homo sapiens
SAVSGSRGRRHRCGCLSYCRSRRGIRRVEPLRRARARVGPRFRPLCRMEIIRSNFKSNLHKVYQAIEEADFFAIDGEFSGISDGPSVSALTNGFDTPEERYQKLKKHSMDFLLFQFGLCTFKYDYTDSKYITKSFNFYVFPKPFNRSSPDVKFVCQSSSIDFLASQGFDFNKVFRNGIPYLNQEEERQLREQYDEKRSQANGAGALSYVSPNTSKCPVTIPEDQKKFIDQVVEKIEDLLQSEENKNLDLEPCTGFQRKLIYQTLSWKYPKGIHVETLETEKKERYIVISKVDEEERKRREQQKHAKEQEELNDAVGFL

SEQ ID NO: 791493 - protein, 267 aa, Homo sapiens
SAVSGSRGRRHRCGCLSYCRSRRGIRRVEPLRRARARVGPRFRPLCRMEIIRSNFKSNLHKVYQAIEEADFFAIDGEFSGISDGPSVSALTNGFDTPEERYQKLKKHSMDFLLFQFGLCTFKYDYTDSKYITKSFNFYVFPKPFNRSSPDVKFVCQSSSIDFLASQGFDFNKVFRNGIPYLNQEEERQLREQYDEKRSQANGAGALSYVSPNTSKCPVTIPEDQKKFIDQVVEKIEDLLQSEENKNLDLEPCTGFQRKLIYQTLSWK

SEQ ID NO: 791494 - protein, 290 aa, Homo sapiens
ARFPEVAAGVTAAAASATAAVAAEFDFKSNLHKVYQAIEEADFFAIDGEFSGISDGPSVSALTNGFDTPEERYQKLKKHSMDFLLFQFGLCTFKYDYTDSKYITKSFNFYVFPKPFNRSSPDVKFVCQSSSIDFLASQGFDFNKVFRNGIPYLNQEEERQLREQYDEKRSQANGAGALSYVSPNTSKCPVTIPEDQKKFIDQVVEKIEDLLQSEENKNLDLEPCTGFQRKLIYQTLSWKYPKGIHVETLETEKKERYIVISKVDEEERKRREQQKHAKEQEELNDAVGFL

SEQ ID NO: 791495 - protein, 114 aa, Homo sapiens
GATRDLPGPLGKLATHQAQSQKNAVPTRRQNKYSNPNNGHQITQQVLISTPPALSPSPDGTLVLCPALALDNPISPLTLEQGKEHTPPPPAERMASSSKPLFLILTLEMGGWPG

SEQ ID NO: 791496 - protein, 102 aa, Homo sapiens
MPALSFPSVTHFYWLREKLQPPGEVLGQVPRLLAGVVSGFPLMICKVTWGPQLPPTKLLHLLYHFQIRSPLQHLDTPGQHEPEAHALQPERVQRARVRRGRP

SEQ ID NO: 791497 - protein, 67 aa, Homo sapiens
LQLNANQAFFLLVNGHSMVSVSTPISEVYESEKDEDGFLYMVCASQETFGMKLSVLNQKKCISSRIF

SEQ ID NO: 791498 - protein, 79 aa, Homo sapiens
MRPVALLLLPSLLALLAHGLSLEAPTVGKGQAPGIEETDGELTAAPTPEQPERGVHFVTTAPTLKLLNHHPLLEEFLQE

SEQ ID NO: 791499 - protein, 89 aa, Homo sapiens
YVQHNKSATYSVGMQKTYSMICLAIDDDDKTDKTKKISKKLSFLSWGTNKNRQKSASTLCLPSVGAARPQVKKKLPSPFSLLNSDSSWY

SEQ ID NO: 791500 - protein, 68 aa, Homo sapiens
MAVIPVLWEAEVGDHEVKRSRPSWPTWGNPMSTKNTKISWAWWHMPVVPATQGAEAGEWREPGRLRLQ

SEQ ID NO: 791501 - protein, 99 aa, Homo sapiens
RSAQALCGQPGHSIRAPLSFRRSPPWAVLQGCGLGHDGPQLRSSSPFPAGWWAAPSGDLGSEGTPPGTTRCLHLSRDAAGPRVTDCNPRTTLGSLSPRP

SEQ ID NO: 791502 - protein, 71 aa, Homo sapiens
RGIGTYYVADSDCEEELSQVKSGRQVPCDREEVDLKGAGIVALLKPSLLRKAKAKQQEVATEAVWSLEVEG

SEQ ID NO: 791503 - protein, 105 aa, Homo sapiens
MRRQFDYEIHPKTYNFRVFAWIAEDGFLQNVSTTVIVRVWDENDNSPTFLHDVLFLKVEESPVPQGVIGKITAIDMDSGKNGQLLYFLLSDGKFFKMNPNTGSTS

SEQ ID NO: 791504 - protein, 1075 aa, Homo sapiens
QRTEKGHLRGKFPDGCQQSATSLWLCTLSTRFYRAYHILVHKRTSPRSTLAPSYETGFIIRILYEGNLTVERELSCSRRHSRAHRWQNPTRARFDPRGGNHGRPPGCASRAELRSESSPPCGHRPAPTPAPARSSLAASSPRPPRSWWRRGGRRRREGGRWHRERPSAGRERGERDTCGPEHRGHPVPAGPGPRPLAGDTWKNTEFYTRVDLLMAHTFRGCSLAFMFIITWLLIKAKIDACKRGDVTVKPSHVILLGSTVNITCSLKPRQGCFHYSRRNKLILYKFDRRINFHHGHSLNSQVTGLPLGTTLFVCKLACINSDEIQICGAEIFVGVAPEQPQNLSCIQKGEQGTVACTWERGRDTHLYTEYTLQLSGPKNLTWQKQCKDIYCDYLDFGINLTPESPESNFTAKVTAVNSLGSSSSLPSTFTFLDIVRPLPPWDIRIKFQKASVSRCTLYWRDEGLVLLNRLRYRPSNSRLWNMVNVTKAKGRHDLLDLKPFTEYEFQISSKLHLYKGSWSDWSESLRAQTPEEEPTGMLDVWYMKRHIDYSRQQISLFWKNLSVSEARGKILHYQVTLQELTGGKAMTQNITGHTSWTTVIPRTGNWAVAVSAANSKGSSLPTRINIMNLCEAGLLAPRQVSANSEGMDNILVTWQPPRKDPSAVQEYVVEWRELHPGGDTQVPLNWLRSRPYNVSALISENIKSYICYEIRVYALSGDQGGCSSILGNSKHKAPLSGPHINAITEEKGSILISWNSIPVQEQMGCLLHYRIYWKERDSNSQPQLCEIPYRVSQNSHPINSLQPRVTYVLWMTALTAAGESSHGNEREFCLQGKANWMAFVAPSICIAIIMVGIFSTHYFQQKVFVLLAALRPQWCSREIPDPANSTCAKKYPIAEEKTQLPLDRLLIDWPTPEDPEPLVISEVLHQVTPVFRHPPCSNWPQREKGIQGHQASEKDMMHSASSPPPPRALQAESRQLVDLYKVLESRGSDPKPENPACPWTVLPAGDLPTHDGYLPSNIDDLPSHEAPLADSLEELEPQHISLSVFPSSSLHPLTFSCGDKLTLDQLKMRCDSLML

SEQ ID NO: 791505 - protein, 309 aa, Homo sapiens
PTLKAISFNTCLSSFIFLSEIPYRVSQNSHPINSLQPRVTYVLWMTALTAAGESSHGNEREFCLQGKANWMAFVAPSICIAIIMVGIFSTHYFQQKVFVLLAALRPQWCSREIPDPANSTCAKKYPIAEEKTQLPLDRLLIDWPTPEDPEPLVISEVLHQVTPVFRHPPCSNWPQREKGIQGHQASEKDMMHSASSPPPPRALQAESRQLVDLYKVLESRGSDPKPENPACPWTVLPAGDLPTHDGYLPSNIDDLPSHEAPLADSLEELEPQHISLSVFPSSSLHPLTFSCGDKLTLDQLKMRCDSLML

SEQ ID NO: 791506 - protein, 80 aa, Homo sapiens
FGSAVNPGAVIDSFSTKIIFKLLQARCSISRLESQNFRRLRWEDCLSPGVQESETNLGNTVKPKFYKKYKKSGWHGCVHL

SEQ ID NO: 791507 - protein, 118 aa, Homo sapiens
GRNAPGKGHNETGFIRTACLREIKQGTGHQVCPWAPAAADRVLGAEDTRLGESNWKKCKALQRRPIKSSLFCSFFSCFCILGILLNWGETKMPRSQILQLSSSKMSNERTKVCWILYC

SEQ ID NO: 791508 - protein, 118 aa, Homo sapiens; identical to SEQ ID NO: 791507

SEQ ID NO: 791509 - protein, 156 aa, Homo sapiens
MAPARAGFCPLLLLLLLGLWVAEIPVSAKPKGMTSSQWFKIQHMQPSPQACNSAMKNINKHTKRCKDLNTFLHEPFSSVAATCQTPKIACKNGDKNCHQSHGPVSLTMCKLTSGKYPNCRYKEKRQNKSYVVACKPPQKKDSQQFHLVPVHLDRVL

SEQ ID NO: 791510 - protein, 60 aa, Homo sapiens
QEGKGCGCSCCSCCDPCSHCSCHNHISTGRASGSARAEEGGGKKKKKKKDKKHKKDKKHK

SEQ ID NO: 791511 - protein, 131 aa, Homo sapiens
HRGHTPSVRTTSKAGPPSHTVLAETETGDQEPGPTLACSLGGCWGCGGPLGCWLGLGEPLKVHGDRDSFSSVCFLADSKLLPLEALAQDGEASAGQVPRPCPPLMGLTLRRWHPAGHTMALAPCLTHTWWQ

SEQ ID NO: 791512 - protein, 71 aa, Homo sapiens
AAAFGHQNSRFSHVEPRHPSSAAFGHQNSRFSGLCTLGCVAATPAPGFQAFGLRLQATPLASLVLRLLDLD

SEQ ID NO: 791513 - protein, 122 aa, Homo sapiens
RGSVAPLAVVVGSNGEIAARLERIHQQLLKHIRKLSKNPQNTNSEGTSTGTPDEAAPLAGRTPDTAESLVEKTPDEAAPLVEGTSDKIQCLGKATSGKFEQSAEEYVRPCVSITAIELCIVQ

SEQ ID NO: 791514 - protein, 181 aa, Homo sapiens
MDSGCIGSAVLLMAASHTLGPVPGTQQALDSRKPSHARGGPRLSGWERAEPLSGSWLLLLRTPLAFSSLPILSPSQPGLRTRLFPPFRITLPDTIYVFKKQTHLLNKRMKQWMRRGGNQAGWHRHQYMWWLLEGGRARAAAGHSPGPCPPSSQGLSGLLQWVPKGPSLPWASGHLDPQPTC

SEQ ID NO: 791515 - protein, 110 aa, Homo sapiens
YKRSLSSWVFFVFFILEIHNTPNALRTMDSTQVLQMSSPGFRRKVVDILSIMTQTNNYIPGFVGEKARWPTWRFMPKQPLYNTTHGVLDVGLVCQSHHLIPFRNLSAISR

SEQ ID NO: 791516 - protein, 179 aa, Homo sapiens
IVCPPAGWSPDPKYQICLCFGEEDPGPTQHPKEQLIMADVQVQLRPGSSSCTLSASTERPDGSSTPGNPDGILTFNAAASILSEPLPLLVPAEGSPQQGGSLLPPNPAHTKPIDLGPPPAHHPGLPDGRGGSRPSTPLSRAPSWAWGFGRKLNLILRPQKGSNWSRSKTSSLADSPICQ

SEQ ID NO: 791517 - protein, 55 aa, Homo sapiens
VPDCIQRRHKTAATPVWLLFYGGVGICTGLWVWGRRVIQTMGKDLTPITPSREAW

SEQ ID NO: 791518 - protein, 123 aa, Homo sapiens
MAAAAVQGERSGGSGGCSGAGGASNCGTGSGRSGLLDKWKIDDKPVKIDKWDGSAVKNSLDDSAKKVLLDTISCFFAIVALIWDYMHPFPESKPVLALCVISYFVMMGILTIYTSYKEKSIFL

SEQ ID NO: 791519 - protein, 100 aa, Homo sapiens
ILLSPAEHRGDEEFSSEQRAQGMQPSRECMLPTSKLTGLKDSHRSSLPKSQGSVRLLELDSSSRAAAPPVPMLTHLRCSWYQPEFENWKAGGLGPSPVLP

SEQ ID NO: 791520 - protein, 136 aa, Homo sapiens
GFRIVHKFEGSRRLTPMLEEVLLWVKCYQTAFHTTEKPGMKGRVNQCDKLHCCLILRNCSQAWRLMPVISASRVAGITGTCHHAQLIFVFLVETGFHHVGQAGLELLTSSYPPALASQSVGIIGVSHRTQPSCELF

SEQ ID NO: 791521 - protein, 157 aa, Homo sapiens
LKHPLSSQTARGSSGPSPWVGKKLRGCESPGRPLLLNLAELGERSKFQREPVCTGEEAELVRSSHTATATADVPTPQPLPLHPRASGARPETFAPSSEDRPLRPCGPRPASLRWRFLGAGPTEGVGGAESGHQRAARDFPVCFRSGSHQTNTPISQA

SEQ ID NO: 791522 - protein, 104 aa, Homo sapiens
MSMEFTQITSRNLWNKKFTTPWPHTKMLGCRKPEAESSIITVKSPPSADPTNSHSASHHLKKTHVSNYYTSSEYWKMVHSSYVLICLSCVQSVLSFQATLFLVY

SEQ ID NO: 791523 - protein, 147 aa, Homo sapiens
MHGSRDQPVLPSQRPLHPTGCAPWNVVVALGAATRGRGRTVFGADHGQAAPHQAASCWCHQSLGYPLLKPSLVSTCPTPLPCPSYFLPGYLLTSCPGHQSFTCGHAPFPDNPFFILHFSTTPSSPSTPSCSTLSPLLHTQPPAPPPF

SEQ ID NO: 791524 - protein, 150 aa, Homo sapiens
MHGSRDQPVLPSQRPLHPTGCAPWNVVVALGAATRGRGRTVFGADHGQAAPHQAASCWCHQSLGYPLLKPSLVSTCPTPLPCPSYFLPGYLLTSCPGHQSFTCGHAPFPDNPFFILHFSTTPTPPPLPAPPHSTPSTPTTPSCSTLNPQL

SEQ ID NO: 791525 - protein, 143 aa, Homo sapiens
CFRFWPATSQVPPLPGERCLNSSPRQALLVNVLLLRKKHFIKPPTRRALSAPLGYSGPSVTLHVLNRGWFCFGIWKIRKVKKQTKKQLSGRHAPKIVYSAPTFVSPRVRRGGKKKGGNCPCAVSRCPPSPAAPGSAAVRWGWG

SEQ ID NO: 791526 - protein, 131 aa, Homo sapiens
MDFHRQRKDPALGAESHLPAGPSKLWSLGGQGREPTPSSVHGSGSWPEPACVEATPAAPSPAQLCPHSCKASILPFVKFTTVMSHPPFAEISPKLPGNPDPAPPPQLSFFMEFLFQNKETDTPKTIKEINL

SEQ ID NO: 791527 - protein, 111 aa, Homo sapiens
QPGPPRSLATLSPAEPSPLLQAPAPLLSSPGLSHPHCLAEPMSSRFLDTKSCVSKHGAKEDGLAQNHPENQAQRQLKGQKHSGPPQQHMNVNISLRIYPNSGNTNVRKCSL

SEQ ID NO: 791528 - protein, 456 aa, Homo sapiens
MDTVVFEDVVVDFTLEEWALLNPAQRKLYRDVMLETFKHLASVDNEAQLKASGSISQQDTSGEKLSLKQKIEKFTRKNIWASLLGKNWEEHSVKDKHNTKERHLSRNPRVERPCKSSKGNKRGRTFRKTRNCNRHLRKNCCTSVRRYECSQCGKLFTHSSSLIRHKRAHSGQKLYKCKECGKAFSRPSYLQTHEKTHSGEKPYACQSCGKTFLRSHSLTEHVRTHTGEKPYECGQCGKGFSCPKSFRAHVMMHAGGRPYECKHCGKAFRCQKSFRVHMIMHAGGRPYECKQCGKAYCWATSFQRHVRIHNGEKPYKCGKCGKAFGWPSSLHKHARTHAKKKPVSGGSVGKSSARPRPSTDVKSQTREKVYKCETCGKTYGWSSSLHKHERKHTGEKPVNAASVGKPSGGLCSSKNVRTQIGQKPSKCEKCGKAFSCPKAFQGHVRSHTGKKSCTSK

SEQ ID NO: 791529 - protein, 123 aa, Homo sapiens
RALWLPGACEGCQPTWPLPYMGVEAEAWRETAFSRGTNEAWKGPGQHLSVQTPGWCSFQNSPLRGLASSSCELVTGPAHVSPRAPMKMAKCDRNMGFGVIEPWVPRCKSVPTSSTFCDDGKRL

SEQ ID NO: 791530 - protein, 67 aa, Homo sapiens
EDGSMGIAWFFLLQLSEEGEIVDLLLMKILSFLGIKSKREEPGSSREQPGSLSQTRHSRPAQALPKD

SEQ ID NO: 791531 - protein, 93 aa, Homo sapiens
GVFLDYECGTISFFNINDQSLIYTLTCRFEGLLRPYIEYPSYNEQNGTPIVICPVTQESEKEASWQRASAIPETSNSESSSQATTPFLPRGEM

SEQ ID NO: 791532 - protein, 137 aa, Homo sapiens
MAQEFEATVNYLTALQPERQNETPSFKKKGTEMTPSNPTSYARLYFHPISEEFLSLLGFLWLHTQILLALYNMDGLSVLCSVPAQDATCPELEPTRQGASLLSLVKGRWLEVDILDSSLQALTSRKTNKQKQAVSLN

SEQ ID NO: 791533 - protein, 140 aa, Homo sapiens
MEAKTRELIARRTTPLLEYIKNRKLEKQRIREEKREERRRRELEKKRLREEEKRRRREEERCKKKETDKQKKIAEKEVRIKLLKKPEKGEEPTTEKPKERGEEIDTGGGKQESCAPGAVVKARPMEGSLGGAPGDVTQRQ

SEQ ID NO: 791534 - protein, 217 aa, Homo sapiens
MEAKTRELIARRTTPLLEYIKNRKLEKQRIREEKREERRRRELEKKRLREEEKRRRREEERCKKKETDKQKKIAEKEVRIKLLKKPEKGEEPTTEKPKKEERRLILEVASRNPVPPVQSSAVIKSPGMWRDLKNQNLKPKDSMLDDGRRHRAHHEPERLSRRSEDEQRWRRRQESSLRIREEKREERRRRELEKKRLREEEKRRRREEERCKKKETD

SEQ ID NO: 791535 - protein, 79 aa, Homo sapiens
PPRLWAFAARFRALRSQASWGWGQENGEGPIQALHLSSTFRQAPPAIRDETLAVFGGRRESLPLFPSPSGSFALPSRLQ

SEQ ID NO: 791536 - protein, 185 aa, Homo sapiens
FSSFGDVACMAICSCQCPAAMAFCFLETLWWEFTASYDTTCIGLASRPYAFLEFGSIIQKVKWHFNYVSSSQMECSLEKIQEELKLQPPAVLTLEDTDVANGVMNGHTPMHLEPAPNFRMEPVTALGILSLILNIMCAALNLQPVQHVYLGQLDLGAHPERALLEERKEIFWSFKLNDTVNHLIQ

SEQ ID NO: 791537 - protein, 100 aa, Homo sapiens
QSRPRCPPFVPLPSYGGSGWLLGWGTEKPARLTDQTSQICPRVYGETEAWRGAACPGYLLGLPPLAQAAVGPSQMVVHLGHIYVCGPSTSGGMSATWSWL

SEQ ID NO: 791538 - protein, 74 aa, Homo sapiens
FSRLFSANCVSFFSWAQVGGPTFLVDGNFICSSDITILFTLRVDDVRLRVLCLCGGAFPCTSDGFIVELQMSSG

SEQ ID NO: 791539 - protein, 141 aa, Homo sapiens
LFSVFAVASAWNPRFSWSLSGLFSSFKAQCEGSLILGALPEAPESPSPFLLAPSQSLRFLVFSCWLCPVSLTVSSGGELTVTHPEPQDCVLPFLPPPCPLDAGSCSLHAWITEAICTLKGRRCRPGTVAHAYNPSTLRNLA

SEQ ID NO: 791540 - protein, 120 aa, Homo sapiens
  misc_feature (85)..(85): Xaa can be any naturally occurring amino acid
  misc_feature (106)..(106): Xaa can be any naturally occurring amino acid
  misc_feature (108)..(108): Xaa can be any naturally occurring amino acid
MASVALEDVAVNFTREEWALLGPCQKNLYKDVMQETIRNLDCVVMKWKDQNIEDQYRYPRKNLRCRMLERFVESKDGTQCGETSXQIQDSIVTKNTLPGVGPCESXMXGEIVMGHSSLNC

SEQ ID NO: 791541 - protein, 128 aa, Homo sapiens
TSHHLGLSLQPTLRAALTRYRPARRYRRALGAGRWARRLSLPRAARPLLSERKNCAAREAADALWSGPCRMAWAGTRPAPLGEAICPWVGRSLTVGLGCIREWQGHRTAGTVTEHMPLFHALCRAVSA

SEQ ID NO: 791542 - protein, 119 aa, Homo sapiens
GASFGLPMAAHGSISRHFLHPIKASGSGRARERMEGQEDQLQREAALSANSRRRWDNQLHRGTTLSAESFRDLQRLRDYSAERSKEHPLQGLLSAESSRCWEDLPTERSYPLWVSSELF

SEQ ID NO: 791543 - protein, 101 aa, Homo sapiens
RGELALIIGIIIIFKKRKKLGMGRKKMKPNPVPLSVFFESTRKWTQEAGRPARRAPRAPALVSNSRRGAKAASARAPAAARRAVAAGGEEKMGHCPSDQSI

SEQ ID NO: 791544 - protein, 105 aa, Homo sapiens
DEKQKLWTVAKSPSSQGWGGVSPQPAWFRHTFHCRSERNPCHHPTESAWSLLLKCLETVNEGAISINFVVLSSSEMTNLHEGGVVQAWASIKIKKCALHLRQWWD

SEQ ID NO: 791545 - protein, 105 aa, Homo sapiens; identical to SEQ ID NO: 791544

SEQ ID NO: 791546 - protein, 107 aa, Homo sapiens
HILPPANILTPLHSGDQLFSNAGAGNSLFTAVEAILLGNSLRSSLERESLTDSAEVLIWRCPNLGETLPTICLQAVFWSSQIRTLWTGGKICMRGSPAACGLAACQA

SEQ ID NO: 791547 - protein, 126 aa, Homo sapiens
LSRLDVYFSHNPAGTSVQNMLHWSQLLNSTHLKAYDWGSPDLNLVHYNQTTSPLYNMTNMNVATAIWNGKSDLLADPEDVNILHSEITNHIYYKTISYYNHIDSLFGLDVYDQVYHEIIDIIQDNL

SEQ ID NO: 791548 - protein, 244 aa, Homo sapiens
TVGQDVDTQKKRRQRTGRKIKKVTMGKKVAIIGAGVSGLASIRSCLEEGLEPTCFEKSNDIGGLWKFSDHAEEGRASIYKSVFSNSSKEMMCFPDFPFPDDFPNFMHNSKIQEYIIAFAKEKNLLKYIQFKTFVSSVNKHPDFATTGQWDVTTERDGKKESAVFDAVMVCSGHHVYPNLPDYKEPGVFNGKRVLVVGLGNSGCDIATELSRTAEQVMISSKWALGDEPGLDMVSLELCCTNWTS

SEQ ID NO: 791549 - protein, 247 aa, Homo sapiens
GWYRSGEVRMCRRCKPELRQNFQSASGICICHWLQIRRTRSREGRAMWLPPALLLLSLSGCFSIQGPESVRAPEQGSLTVQCHYKQGWETYIKWWCRGVRWDTCKILIETRGSEQGEKSDRVSIKDNQKDRTFTVTMEGLRRDDADVYWCGIERRGPDLGTQVKVIVDPEGAASTTASSPTNSNMAVFIGSHKRNHYMLLVFVKVPILLILVTAILWLKGSQRVPEEPGEQPIYMNFSEPLTKDMAT

SEQ ID NO: 791550 - protein, 106 aa, Homo sapiens
GPFTCPEHTVIRDSWDPSSRLSDSWQALPCTLAIFQPVFSAGPSNSTMERCPVRSPFRPAPPVWFLTHSQLSFELGMVTCVCDLSFSKVQAGGWLEPRSLRPGWAT

SEQ ID NO: 791551 - protein, 108 aa, Homo sapiens
AVGTAAALASPGISGAPSCGCSQPRQPESRRKAPAKAEAARVLAGRPITGLAVLVRDSLSAIFLRGSGKRQPGLNSSGDNPGLEEGHVAICRLYFSYCEHPCALLPKT

SEQ ID NO: 791552 - protein, 118 aa, Homo sapiens
MHIRQQKKSFKPPFREQLPVWGPAGLWRPTPQTLSSRRTSQGLLSKPVPPPAPGGLASRVGRGSVSGALSPEWNGERQHHRGVVLTHPQSPNHQAGSPNPNTRQALATLSVPNKPFIE

SEQ ID NO: 791553 - protein, 132 aa, Homo sapiens [sequence omitted]

SEQ ID NO: 791554 - protein, 104 aa, Homo sapiens
THRIRLKACPSASSAPIDSGFMLAPKDTGSRPSHVNTSSRHAQVDQGSRPTPMDPGTRLHSVDTGIRPAYSMTQALGYPTQGLQQQASSWASSAFLPRISEQAD

SEQ ID NO: 791555 - protein, 291 aa, Homo sapiens [sequence omitted]

SEQ ID NO: 791556 - protein, 208 aa, Homo sapiens
MDFENLFSKPPNPALGKTATDSDERIDDEIDTEVEETQEEKIKLECEQIPKKFRHSAISPKSSLHRKSRSKDYDVYSDNDICSQESEDNFAKELQQYIQAREMANAAQPEESTKKEGVKDTPQAAKQKNKNLKAGHKNGKQKKMKRKWPGPGNKGSNALLRNSGSQEEDGKPKEKQQHLSQAFINQHTVERKGKQICKYFLERKCIKV

SEQ ID NO: 791557 - protein, 189 aa, Homo sapiens
MANAAQPEESTKKEGVKDTPQAAKQKNKNLKAGHKNGKQKKMKRKWPGPGNKGSNALLRNSGSQEEDGKPKEKQQHLSQAFINQHTVERKGKQICKYFLERKCIKGDQCKFDHDAEIEKKKEMCKFYVQGYCTRGENCLYLHNEYPCKFYHTGTKCYQGEYCKFSHAPLTPETQELLAKVLDTEKKSCK

SEQ ID NO: 791558 - protein, 291 aa, Homo sapiens [sequence omitted]

SEQ ID NO: 791559 - protein, 116 aa, Homo sapiens
TPSPSLLPVPSYLQGQEGIFLYLCVNTAAHKTKFCSHFLTATLCLRLDLRCAYTSCWVLHWEDSSQKKLAQGQEVALVIPVREFQGPGSWGHSGYPGFGCWPGDFSPHKKSQVGVL

SEQ ID NO: 791560 - protein, 147 aa, Homo sapiens
RSCLSRRKWRRQSLGPASARRGPGPPTNNPTSRPSEAQPLEVPGGTEHGCSPWEPLSNSAAQTPFFPPLHPTAPSCPLGLPGSPPGNPPAPKPLPRLCLQGNPNQDTSLLHQMQCVFLLIDMERPSGETQESGDNDRLWRDTSRRHQ

SEQ ID NO: 791561 - protein, 103 aa, Homo sapiens
LLSAVSIQLQGSIAGQKQALQYKAAHFKASRLTFVVCAYSSYKLLFIKIVNSPLFCPHPLLRMRGWQETINTKIYVATTTIWPVERCLCRKKHKKTKRKCVNF

SEQ ID NO: 791562 - protein, 154 aa, Homo sapiens
VVAVGQPLAVQPQGTVMLTSKNIQCMRTLLNLAHCHGAVLGTSWQLVLATLQHLVWILGLKPSSGGALKPGRAVEGPSTVLTTAVMTDLPVISNILSRLFESSQYLDDVSLHHLINALCSLSLEAMDMAYGNNKEPSLFAVAKLLETGLVNMHR

SEQ ID NO: 791563 - protein, 92 aa, Homo sapiens
MDELLRERDILNKNMLKAVNATQKQTDLVKLHEQAKRNLEGEIQNYKDEAQKQRKIIFHLEKERDRYINQASDLTQKADSVRMPWPLDKGKW

SEQ ID NO: 791564 - protein, 132 aa, Homo sapiens
MASTAPRLCMLRDACRPALSCPQSPLGFPPVPVGDQSLEGAKMTGVLHVNTTQSTYTPSWVATAPRLSFNFAPKIRVDTGSGEMPGSGSRQLQACMTGGLPGSPRAEGCLGPELWLGSCSCAWELRAPALPT

SEQ ID NO: 791565 - protein, 213 aa, Homo sapiens
HCLQWVVPALQVYHKGISRHLFLTWNEWSSVVLFLLFASVFLLLLVFNEGPAQVLKEPQTLNQGLGAWRAGKSHTTLVPASKWMPPALLYKRGCCVSVHPSTEPGRAFIQKHLEEANPFGVDFSSQALSISSHRIKTSQSACIPHLALTQHGALQKSVAPPKAKVQCEMCLGKGAASTLLGTAPAACTAPSYPSFSPGGWPMVAPTSPLHGFS

SEQ ID NO: 791566 - protein, 181 aa, Homo sapiens
SVECRAPAGPVSVVAIIEHVGRGWWGQCPKIPGTRIGRKNCLISVCQGKQSTLGEARNPALTGAAASREDELCLVPWATSPGLGWTSLWTSCGFSSGISPFRLVSQGRPSVGELWATAGGPLPQGLYWTWLWWMRGQGLRQKGGQVPLSRTKGSRPALYLRSMGTRWGPALCDLVWVTHIP

SEQ ID NO: 791567 - protein, 482 aa, Homo sapiens
MARKLSVLEVLLIIFCLIVVTIDILLLLLVLEETSDTSFTPECPEIPQSERIDCTPDQEVTEDICRWQYKCCWSPVADANVPRCFFPWNWGYEASNGHTNTSTGFTAQLKRLPSPSLFGNDVATTLFTAEYQTSNRFHFKITDFNNIRYEVSHENINLVDGIADASNLSYYVEVTDKPFSIKIMRTSNRRVLLDTSIGPLQFAQQYLQLSFRLPSANVYGLGEHVHQQYRHNMTWKTWPIFTRDATPTEGMINLYGAHTFFLCLEDARGSSFGVFLMNSNAMEVTLQPAPAITYRTIGGILDFYVFLGNTPEQVVQEYLELVGRPFFPPYWSLGFQLSRRDYGGINKLKEVVSRNRLAEIPYDVQYSDIDYMDGKKDFTVDEVAYSGLPDFVKELHDNGQKYLIIMNPGISKNSNYEPYNNGSLKRVWILGSNGFAVGEGYPGPTVFPDYTNPVCTEWWTDQVAKFHDHLEFDGVWIVSYYS

SEQ ID NO: 791568 - protein, 135 aa, Homo sapiens
MTAGLQVWVQYKLHLTPSSDKSSPGGFIEQSLWGSLHGAPFCPRAEGVSSGCAGACLALPTRTLFSTHLCPKHSCFRLCYGQTPGFLEVMPVLLPSAPSEQRCPRDQLEGSLHTCGCYPTCHLKMTPCPSSEVRN

SEQ ID NO: 791569 - protein, 82 aa, Homo sapiens
YTLSNHRDTPLWFGIIISVFEQGNVTSQRTHSQYSAELEIKPGPSKAKAICLFTGPLWKCFSTLMMAPVTGSSHQDCDLPGI

SEQ ID NO: 791570 - protein, 146 aa, Homo sapiens
EKGIGRRALLGEGHCWEKKGIARRRALLGEEGHCGEKGIAGRKALLGEEAHCGEKGIAGRRALLGEGHCGEKGIAGRRRALQREGHCGEKGIAGKRALLGEGCCWQKGVAGRRALLGEGCCWENGIAGRGDSQREGWRVGGKRKLR

SEQ ID NO: 791571 - protein, 68 aa, Homo sapiens
LLGEGFEALLSLLGRPCSQGCRGIIVQDRAGEQRAGPCPRLCVGDRGEPALPRALGTATPARGELDQA

SEQ ID NO: 791572 - protein, 83 aa, Homo sapiens
RERGPGSLGRPGQRPLTSSRRAAESSVPRGNERDEGLELFHRLREGRERTVFAPLLQIALALLKDALQRQPKSKKGLLGLFCG

SEQ ID NO: 791573 - protein, 97 aa, Homo sapiens
NECIHLLSIYYTVGTWGYHIKYIIVPIHLELTQVMKLCLFAPLTIQSKSSYVGPSKVGNGEEERLQVERHPYRGWEPPKGPALRRNAEFRAGTRSTK

SEQ ID NO: 791574 - protein, 136 aa, Homo sapiens
MREAEAGPPQVGLSRPTCSLPASSPGPALPPGCVSRPDCCLPTTSLDSAPAHLLAALVGPQLPQAKLPRPRSGLTVASPGSAPALRWRLQAPNGLRSVGSSAPSLGLLATSAGPSRPEVGVSRPCLPASKQALWAQ

SEQ ID NO: 791575 - protein, 297 aa, Homo sapiens
GTLRRGVSPCLTLAPPTLREVGVSPLPHTGPSHTDPLAHTGPSHAERGQREPLPHTGPSHAERGQREPLPQQATVREEQGRTQAAGSRQGLGRGRRGGARAGPGDAPGRQQRGLLTLFCCQSWDCTGHREAGCGPEELGCRNFGVYKTLEGAEPKELACWEAGAGPRDAARRNSWACRGRHEGGRGRASSSRPLQTHMQPPGVLSGPSSSSRLRLQARLLPPNNLFGLSACPSPGGLGRPTASSSQAPQAQVRPHGGLSRISSCPPMASPGPKRSPVGGLLRAQLGPPGDLCRPKSS

SEQ ID NO: 791576 - protein, 140 aa, Homo sapiens
QGPANMGLIRTKTVKKAAWGIIEKYYMCLGNDFHTNKRVCEEIAIIPSKKLCNKIAGYVTHLMKRIQRGPGRGISINLQEEERERRDSYVSEVSALDQEIIEVDPDTKEMLKLLDFGSLSNPQVTQPTVGMNYKMPRGPV

SEQ ID NO: 791577 - protein, 35 aa, Homo sapiens
KPGPLSVPPARLTMCAFTHPIRNLGGILYSSVTYP

SEQ ID NO: 791578 - protein, 109 aa, Homo sapiens
AAAAASHTYTLTGGGAWTARSRDMEQQEDQAEAEGASKRQHYEQKCLREGEKRQVVPAAASKEGQGLSLPEIKTKQEGWVGWKEPPLPSHSPQTEMRLRQATLKGPGCP

SEQ ID NO: 791579 - protein, 147 aa, Homo sapiens
MHLGALFPFLHLPAHGIAATLMERPLIWHLPGLFPRPQFCPCSCGCFLHCGSHGEETRVPLVESGKNSIFTSLPANDHSSFTTSAGTYLGKETGPMWWPSLRCGRASGVALMHSTAQACGHHSPWAAWHLDSFPSLAEVCVALQGRI

SEQ ID NO: 791580 - protein, 96 aa, Homo sapiens
IRQHLPHSLQASPLARALSHQETEGRDFWAALGAGTVPYLLLLGFPKSSDIRPSWGEKYQYPDTSAPCYMTGLASGISYKEEEEEEERTAWSHVYI

SEQ ID NO: 791581 - protein, 163 aa, Homo sapiens
MLRQDQSKRGHCLCGPSGASSKAEPGFGPSLQGHLPPLPARPGLAAEAEGRQGCLSPLFGGVYTCRCQGVWTVGVGGLPGPDFPRPILTLVGEALGEGCGLGGGARPAETYRTVEHLGLPPNSTRSSEHQLQSPGSRRAGPSPLSPILKAGRNPEGSFHQGFP

SEQ ID NO: 791582 - protein, 108 aa, Homo sapiens
MGRVFITRTPKAMATKTKIYKWDLTKLKSICSAKETIIRVNRQTTEWENIVAIYPSDKGLICRIYKEQIYKKKKKTSKREQRVRTDTYQRRHLYSQRTCEAKRVITGH

SEQ ID NO: 791583 - protein, 154 aa, Homo sapiens
TLHNLIVHLRAWPPQGKLTTTLTKVAAKEFRRLTRDPRSCWTQQTAKQSGKHVVFLVSHCSFDIGTCYFHLFSGRIPANPRTISFLIRVLDLGLTAEPLRRGTRNEAPGRREAAGGAITSEVQEASAAQRKGRCVRENLNGDEESSGDWSLRRV

SEQ ID NO: 791584 - protein, 120 aa, Homo sapiens
PHPCQLSFLFLILSQGGHTVPPPLPGQKNVFFCTALAVAPGSPPRRSHSRKWGTCHRCPGGAAGAGKHPQIRTSVRARESNTKLGVLREGKRALQESFIPTDNTHPIKTPGQASPGSWAT

SEQ ID NO: 791585 - protein, 34 aa, Homo sapiens
GQRIMESLPLRCILPFTYKQAHATVLKIHTLDDI

SEQ ID NO: 791586 - protein, 35 aa, Homo sapiens
MPLLWKGFYAVILFGFAILMPIVFVVIVIVAVVVA

SEQ ID NO: 791587 - protein, 122 aa, Homo sapiens
DDLDMDSSEGSSPNASPHDREEACSPQQEPQGCRCPLDRFQDFALIDAPTLEDEPQEGQQWEIALPNNWQRYPRTKVEEKEASDTGGEEPEKEEEDLYYGLPDGAGDLLPDKELGFEPDTQG

SEQ ID NO: 791588 - protein, 168 aa, Homo sapiens
VKTVIDDLIQKLFDLLVLSLKKSIQAHLHEIDTFVTEAMEVLTIMPQSVEEIGDANLQYSKLQERKPEILPLFQEAEDKNRLLRTVAGGGLETISNLKAKWDKFELMMESHQLMIKDQIEVMKGNVKSRLQIYYQELEKFKARWDQLKPGDDVIETGQHNTLDKSAKL

SEQ ID NO: 791589 - protein, 159 aa, Homo sapiens
MNAAHTGVGSCLSWPIHRGSVPRNCGTFIRGPLLDKALFCSFQRSFLPYAPSAGTQHVCVRACLCVCVCAYGGWLRGQPGLLVCEMPKVLGGRDAPPWSRKISRRAESFKDGAHPHCSLIVLLLTTQSVSPGVATAAPTRRRGAASCCRWSAQAGLPAA

SEQ ID NO: 791590 - protein, 118 aa, Homo sapiens
LTAAHPFSLQYVVRILPFPTMNPPAEIPVHILSTKNLNLKEWLKEVRRHLQHFYWRSPCLDHQILTVLPRLQCSGAISTHCNLYLLGSSNSPASASQVAGITELMVFKQLVVKIWWKR

SEQ ID NO: 791591 - protein, 106 aa, Homo sapiens
LTAAHPFSLQYVVRILPFPTMNPPAEIPVHILSTKNLNLKEWLKEVRRHLQHFYWRSPCLDHQILTVLPRLQCSGAISTHCNLYLLGSSNSPASASQVAGITGITH

SEQ ID NO: 791592 - protein, 102 aa, Homo sapiens
LTAAHPFSLQYVVRILPFPTMNPPAEIPVHILSTKNLNLKETSKYTGPLYSNRSVTLRQQSLQQRKSLMLTGYQVAQRGQEAPSTLLLEISLSRSSDSHCVT

SEQ ID NO: 791593 - protein, 109 aa, Homo sapiens
LTAAHPFSLQYVVRILPFPTMNPPAEIPVHILSTKNLNLKEWLKEVRRHLQHFYWRSPCLDHQILTVLPRLQCSGAISTHCNLYLLGSSNSPASASQVAGITGEETGVK

SEQ ID NO: 791594 - protein, 310 aa, Homo sapiens
MNLSTEQALPVASEEEQERHERSEKKQPQVKEGNNTNKSEKIQLSENICDSTSSAAAGRLTQQRKIGKTYPQQFPKKLKEEHDRCTLKQENEEKTNVNMLYKKNREELERKEKQYKKEVEAKQLEPTVQSLEMKSKTARNTPNRDFHNHEEMKGLMDENCILKADIAILRQEICTMKNDNLEKENKYLKDIKIVKETNAALEKYIKLNEEMITETAFRYQQELNYLKAENTRLNAELLKEKESKKRLEADIESYQSRLAAAISKHSESVKTERNLKLALERTRDVSVQVEMSSAISKVKDENEFLTEQLS

SEQ ID NO: 791595 - protein, 92 aa, Homo sapiens
HGAPHPLSRTHCPALPSEMNPVPQLEMQKSPIFCDTHAGSYRLELFLFGHLGSTLMRLIHNHENSTGNTRLHDSVTSHGVPSATRGDYYSSR

SEQ ID NO: 791596 - protein, 106 aa, Homo sapiens
SPLRLLVGDAQAKTVTDTLAHTHARTQAHARRSSPGLATVVAPGAAARARTTASAPPPPRREGPRRTSSAAAPGRQGWGSGREEEQPEPPPPPSPRPPGPGWNLRP

SEQ ID NO: 791597 - protein, 130 aa, Homo sapiens
MFRFVKHEQSPKTFFRPSYVLGNVQVDTVAVRRLNPTPRIMSSWLCSEVQEMLHLLGQVETPACYPVSHGLVAAISPPWDKSLSLVSNYSSASRGRGPGGFRLGAQLGVQQPCPGSTLISRNGFNQRIGL

SEQ ID NO: 791598 - protein, 117 aa, Homo sapiens
SSYPSYIVLEKGSRYIAQTGLELLGSRDLPTLASQSAGFTGMTPSCFSIPKREVSACLHLHCRSSFLPGLPTYSFPFLQASLFSIHQSELMVFKIKLENITPAPNYPWFPISNKISA

SEQ ID NO: 791599 - protein, 70 aa, Homo sapiens
KKERRGSWEQGSEAGEVPDSLTHSLIHSFPHTLSRHVPSTSFVPGPIWMSMPGERQADLGLPGWRTDEDH

SEQ ID NO: 791600 - protein, 75 aa, Homo sapiens
GFERRYPLGLGKKGLGLGKKGLGLGKRKLPGPPEAELSREREICPPAHPALGDQSGTPVLKKKKKKKRPLEFHLG

SEQ ID NO: 791601 - protein, 107 aa, Homo sapiens
WAGKESLRHVRTKRLPRIGHFLWLHPCCWLCLLAPVTLDRGGSFEAHREKEASLTVLFAIVHSFFTCSACPLQYFLVERESLRAEGEQSPSSGQLFLARLPINLFGW

SEQ ID NO: 791602 - protein, 218 aa, Homo sapiens
LQDSLDRCYSTPSGYLELPDLGQPYRSAVYSLEEQYLGLALDVDRIKKDQEEEEDQGPPCPRLSRELLEVVEPEVLQDSLDRCYSTPSSCLEQPDSCQPYRSSFYALEEKHVGFSLDVGEIEKKGKGKKRRGRRSKKKRRRGRKEGEEDQILQDSLDRCYSTPSMYFELPDSFQHYRSVFYSFEEQHITFALDMDNSFFTLTVTSLHLVFQMGVIFPQ

SEQ ID NO: 791603 - protein, 105 aa, Homo sapiens
MGIGTGHTSMNKGGKDVTLLELSVEKRRWRINMETSKIILEKMQSDDVLDGNRERSNEREGRDSLSEKLKSKQNLKDEEKLRYIKTGKSIQVEGTVRAKALRWVQ

SEQ ID NO: 791604 - protein, 100 aa, Homo sapiens
FGTRAAAFFPTRGFFCFLTLRICVFLSLQEDAAAHAVGNKWAGISPEVSLYGGLGLGAPQSSQGRSDRPLCNFSPPLRRPSHSGCSAPAPSPSHSGSSRG

SEQ ID NO: 791605 - protein, 128 aa, Homo sapiens
MSLCSACTSPASHQLLLNCQGQTVAKSHSSADAGVSLVSGRWCAWWPEHCSESMFPSQHPVLSSNLADSSGQGRSPAGAHPALCPFHKSPWFPHFPQILPREWSWCGPERPAGCSLGLKAEAALVGKK

SEQ ID NO: 791606 - protein, 101 aa, Homo sapiens
LTAAGHKLAVVQFSSKRCGPCKRMFPVFHAMSVKYQNVFFANVDVNNSPELAETCHIKTIPTFQMFKKSQKVTLFSRIKRIICCYRSGFMSNLCLADDGNE

SEQ ID NO: 791607 - protein, 229 aa, Homo sapiens
QSIGTVPTVDLASRYECAAVVLHSPLTSGMRVAFPDTKTTYCFDAFPEVSGPGGDGGGAGTGGRAGPGPGAKSHPLHAASRSIEKVSEITSPVLIIHGTEDEVIDFSHGLALYERCPKAVEPLWVEGAGHNDIELYSQYLERLRRFISQELPSQRAYRRPHRPDLSNKAAPGPHPAPAPQGLHVDPPGGPGDPAPDPGAVDDVQATELRTPFLLEARRKYVKTEIKDLK

SEQ ID NO: 791608 - protein, 126 aa, Homo sapiens
DKVSLCRPGRSAMARSQPTATSAFHSRFSCLSLLSSWDYRHAPPCPANFCILVETGFHHVGQAGLELLTSSDPPASASESAGITGVSHCTWPQLVFPNRCIQKICLHFSSAASVPLIMFALLSLLS

SEQ ID NO: 791609 - protein, 88 aa, Homo sapiens
KSLPYEERSPLVEKMNTRMEAHRSERGGLEEGTRVRRWAPPALGQSQRKDRGRKQEHSGQGALAAAHSSSSSGGRGLAPAQCPHVREW

SEQ ID NO: 791610 - protein, 116 aa, Homo sapiens
MLCSSRLTSLVSPQLTGHTPCSATDPHARSHTQPVCGQPLCLEGSSQRPWARGAVRLSVYPVHMHHIPSGSRFVQRFLAPSGLFHRAGTRGRKSLVFSPSIGPSIQVISKNVTWMS

SEQ ID NO: 791611 - protein, 285 aa, Homo sapiens
SGRPVPASPVKATGVSRGSARARDDGRDGQVWARGHAARRRESQVLGAWASEDAQRSLAARRRSSAGARRCPKTLPASERAEPRASPGDNPKSALMEEEKYLPELMAEKDSLDPSFVHASRLLAEEIEKFQGSDGKKEDEEKKYLDVISNKNIKLSERVLIPVKQYPKFNFVGKLLGPRGNSLKRLQEETGAKMSILGKGSMRDKAKEEELRKSGEAKYAHLSDELHVLIEVFAPPGEAYSRMSHALEEIKKFLVPDYNDEIRQEQLRELSYLNGSEGLWSWQRY

SEQ ID NO: 791612 - protein, 141 aa, Homo sapiens
VGTFFFLRQSLTLLSRLESSGAISAHCNLRLPSSNDSPASASQVAGVTSTHHHARLIFCIFSRDRFHHVGQAGLELLTSGDPPASASQSAGITGRSHHAQPKHFYLTKNSSKTLGAATMQMNGHIYKKGVYIYKDCYHIYH

SEQ ID NO: 791613 - protein, 139 aa, Homo sapiens [sequence omitted]

SEQ ID NO: 791614 - protein, 76 aa, Homo sapiens
NPSELLARTEPKSINVAKKFDLRKVICRKTFSCPKGCTSESLVLLLGQILFDSLRTVKKIATKWNHQYRIPGSTGP

SEQ ID NO: 791615 - protein, 481 aa, Homo sapiens
MKGRGMLVLLLHAVVLGLPSAWAVGACARACPAACACSTVERGCSVRCDRAGLLRVPAELPCEAVSIDLDRNGLRFLGERAFGTLPSLRRLSLRHNNLSFITPGAFKGLPRLAELRLAHNGDLRYLHARTFAALSRLRRLDLAACRLFSVPERLLAELPALRELAAFDNLFRRVPGALRGLANLTHAHLERGRIEAVASSSLQGLRRLRSLSLQANRVRAVHAGAFGDCGVLEHLLLNDNLLAELPADAFRGLRRLRTLNLGGNALDRVARAWFADLAELELLYLDRNSIAFVEEGAFQNLSGLLALHLNGNRLTVLAWVAFQPGFFLGRLFLFRNPWCCDCRLEWLRDWMEGSGRVTDVPCASPGSVAGLDLSQVTFGRSSDGLCVDPEELNLTTSSPGPSPEPAATTVSRFSSLLSKLLAPRVPVEEAANTTGGLANASLSDSLSSRGVGGAGRQPWFLLASCLLPSVAQHVVFGLQMD

SEQ ID NO: 791616 - protein, 481 aa, Homo sapiens; identical to SEQ ID NO: 791615

SEQ ID NO: 791617 - protein, 172 aa, Homo sapiens
MAASRSTRVTRSTVGLNGLDESFCGRTLRNRSIAHPEEISSNSQVRSRSPKKRPEPVPIQKGNNNGRTTDLKQQSTRESWVSPRKRGLSSSEKDNIERQAIENCERRQTEPVSPVLKRIKRCLRSEAPNSSEEDSPIKSDKESVEQRSTVVDNDADFQGTKRACRCLILDDC

SEQ ID NO: 791618 - protein, 158 aa, Homo sapiens
SHGVGVAGHGDLEESEDPAGLQVFSAEPQGDSPAAPDPSGGSPSIRDVPGLTPKAPLSVIWQGQPRSEGSPGQGSPPPGPGTPGSVHRPEGPPSAWPPLGGALRDRRWGGDWAGEMERAAHPQGRRRRRATAQPGNGSRGGASALVDPARGVAGAAAA

SEQ ID NO: 791619 - protein, 104 aa, Homo sapiens
ANSQLCGGIKRSREPSWVPETPDCLHLQLPGSLQPGSVDFPRLSARSSGSVEPGGMDEASRAPSSGEKGSLPNASCGPSRVPWAMAPAGSSSPGAGIQDAEARK

SEQ ID NO: 791620 - protein, 730 aa, Homo sapiens
MQVFYSPVIFCFSWCLRRPHFPGQGPPCSWKTDYVGPLTSTQGWHCSRLCCYCPSLVSQLQPHHQSAWFLLSVCSLTMEHLLSRKPLRSGQMTFHAIAIHRHQALLSTGSVSSKTDSKTSDFGLLLVTRLTKTRCSLNVAVPEKGPSSLGCFLSNDQNEGARNHLDLFGKFDEPFLIIPGHEASLFTLTTPPGPRGYCTPVSPARSSLILMRPPGCSCRIAMDSDRWDRDHWLRAPPPDPPTVVHTGQNGGRDRPLETLLKSSVPLAPDCPDGKSGSEQGHGEQSKAPATDIGHTNFIPVEGEEPPQPQEPRPTPQRRTTSASGASAHTPEKNHLSLKSLGPHPGEEPPQPQEPRPTSRRTTSASGASAHTPLPPLRGKRGGAMNDLFPLLSSLVSVFLVKENNLVPLTQTITSTLTDCWLSHRHQAALNTAGLPLPLTYREIFGNSRGGPRLDWQCGQTGQGKWMALKQSLQSREGLHPVAQTELETVRFTSRSGGYIVVIVKVHFSVHTGPNSQEKPNLGVPAIVTHTLFSEAPRVPQIYTPCMGGSQVLSCFSSPKRAFLSPYTLWILLRMEVDTIDRPCSTPTAMQIENRAAVLTLTLWAVRYDGNHPVRKMAWNLSLTSNEVINGIALEGKQVSLHSPARVVRDGSIAPDSLLVAQSITNSVIHTLGRKEMTVNGSNKGTPQQGTQARRTIVLFHSGFAELLLLGLAQMLTGSSLRPGVGHTSFP

SEQ ID NO: 791621 - protein, 297 aa, Homo sapiens
RKHQMADDAGAVGGPGGPGGPGMGNRGGFRRGFASGIRGRGRSRGPGRGRGRGARGGKAKDKEWMPVTKLGRLVKDMKIKSLEEIYLFSLPIKESEIIDFFLGASLKDEVLKIMPVQKQTRAGQRTRFKAFVAIGDYNGHVGLGVKCSKEVATATRGAIILAKLSIVPVRRGYWGNKIGKPHTVPCKVTGRCGSVLVRLIPAPRGTGIVSAPVPKKLLMMAGIDDCYTSARGCTATLGNFAKATFDAISKTYSYLTPDLWKETVFTKSPYQEFTDHLVKTHTRVSVQRTQAPAVATT

SEQ ID NO: 791622 - protein, 42 aa, Homo sapiens
LCPHRWPQRDRGIPTLQYQTQRDLEDCKHEMKKICKAEVTLE

SEQ ID NO: 791623 - protein, 139 aa, Homo sapiens
WKIQLWYKATLASHKSYLPIKLKQMFLLPTSSHPAFPPPACLQQHCTLRRRAEAFPTAAPDLHKAKLTHPADPNKCRICPDAFPNSMGCSLFFFPSNSSTTALYYSNVDINLILSSLQRTCLVYVPILLTPWTCSESIT

SEQ ID NO: 791624 - protein, 120 aa, Homo sapiens
MQFFASFKLGSGRQSCTTHRCRAQDSLLGLPGLGCACCPCGQHTRTFHLKARIRRTFPEEVVVWHYDLSLPKKVIELHWREQHPGAAGMGLGLTGRGSVSGWGLGSCAAPVCQKHSVNLC

SEQ ID NO: 791625 - protein, 100 aa, Homo sapiens
PTRPAFIAPCGPHKGDGIYEFEVPGFKIRGSWELREQVGAERTAPQRPGAEAVRATPGAVSASVTAFIAPCGPHKGDGIYEFSFPSLLKNSFMPGAVAHT

SEQ ID NO: 791626 - protein, 273 aa, Homo sapiens
EIEASAVYFRCRYRVSLEVLESAACEKLPTPTPQVVKEGDSFPDTLAKNGQEIAPAQISKSLMVDNYTKDGVPGQERPKGPSAVVPSTSTGGVALPITTAIETVNIHGDHSLKNKAELADSMKNEAGIDEGHVIGESESVHSGASKHSVEKVTELAKGHLLPGVPVEDQSLPGEARALEGYADRGNFPAHPVNEEKETKEGSVAVQIPDLLEDKAQKLSFCEDQNAQDRNSKGSDSLNKKVDLTLLSPKSENDKLKEISLACKITELESVSLP

SEQ ID NO: 791627 - protein, 273 aa, Homo sapiens
GQEQAGGEELINKSSPLEVLESAACEKLPTPTPQVVKEGDSFPDTLAKNGQEIAPAQISKSLMVDNYTKDGVPGQERPKGPSAVVPSTSTGGVALPITTAIETVNIHGDHSLKNKAELADSMKNEAGIDEGHVIGESESVHSGASKHSVEKVTELAKGHLLPGVPVEDQSLPGEARALEGYADRGNFPAHPVNEEKETKEGSVAVQIPDLLEDKAQKLSFCEDQNAQDRNSKGSDSLNKKVDLTLLSPKSENDKLKEISLACKITELESVSLP

SEQ ID NO: 791628 - protein, 336 aa, Homo sapiens
MTTLSPENSLSARQSASFILVKRKPPIDKTEWDSFFDESGHLAKSRDFICVNILERGLHPFVRTEAWKFLTGYFSWQSSQDERLTVDSMRRKNYKALCQMYEKIQPLLENLHRNFTETRNNIARDIQKIYDKDPLGNVLIDKKRLEKILLLSYVCNTQAEYQQGFHEMMMLFQLMVEHDHETFWLFQFFLQKTEHSCVINIGVAKNLDMLSTLITFLDPVFAEHLKGKGAGAVQSLFPWFCFCFQRAFKSFDDVWRLWEVLLTGKPCRNFQVLVAYSMLQMVREQVLQESMGGDDILLACNNLIDLDADELISAACVVYAELIQKDVPQTLKDFFL

SEQ ID NO: 791629 - protein, 156 aa, Homo sapiens
AGSVRTEEVESRAYADPCSRRKKRQQQEEEDLNLEDRGEELVLGCWKQGKQRAEHAVMKEEEEATASERNDADEKHPEHAEQNIRKSRKKEKKRRKEKTKKKKKRQERQEERKEKERKGERKKRGKERRKGKQNKRKVVEQKNIVTKFNFIQWADE

SEQ ID NO: 791630 - protein, 47 aa, Homo sapiens
MAAPCCVLQSSQTLHLRPWACINVKALQCYHVETDDRNPANEQKGCD

SEQ ID NO: 791631 - protein, 143 aa, Homo sapiens
MQNRDCSGKNEWLCDDEIPGRHRATCGGASGRSRSHPRTLPPALPPSRRRAGSTCVCLCAEWGRGRCRRRGGVRANVTGGAAQSAAGSRPRRWYWGSEGAVLYNAVSGSQRGRKKPSGRKAPSPPPGPGHRVPGPGSFPPPAA

SEQ ID NO: 791632 - protein, 102 aa, Homo sapiens
HAGKWSVFKENTCFARIFHLISCNFFSKTSFISEGMKVGGHTRLPHPLAGCPLAMELSKASSLETGHPTRPVRAQDTGAQTRPAAKYRWSDINPVSLSSPGT

SEQ ID NO: 791633 - protein, 107 aa, Homo sapiens
CTDAVWKAPPEICSDGRVYSSISNTHAASPCLGLPGSLSKNSQGIFLPWSQQPSSPSMSLIGHTAFPFLLLSFYPPSLFLKTSPASPLAPALSSHQQNMQVVVSLLR

SEQ ID NO: 791634 - protein, 101 aa, Homo sapiens
LNDVALNPRSLQKCHPLREKQAFALGCFKDPVIITINKHLEMLPYYAGLEQEERSESQAIQSDCKKGSDLGKSQGFSHSSLWGLQCLKVNFPPPLVPTVWN

SEQ ID NO: 791635 - protein, 265 aa, Homo sapiens
MDDKASVGKISVSSDSVSTLNSEDFVLVSRQGDETPSTNNGSDDEKTGLKIVGNGSEQQLQKELADVLMDPPMDDQPGEKELVKRSQLDGEGDGPLSNQLSASSTINPVPLVGLQKPEMSLPVKPGQGDSEASSPFTPVADEDSVVFSKLTYLGCASVNAPRSEVEALRMMSILRSQCQISLDVTLSVPNVSEGIVRLLDPQTNTEIANYPIYKILFCVRGHDGTPESDCFAFTESHYNAELFRIHVFRCEIQEAVSPQEKTLCK

SEQ ID NO: 791636 - protein, 345 aa, Homo sapiens [sequence omitted]

SEQ ID NO: 791637 - protein, 310 aa, Homo sapiens
MMSILRSQCQISLDVTLSVPNVSEGIVRLLDPQTNTEIANYPIYKILFCVRGHDGTPESDCFAFTESHYNAELFRIHVFRCEIQEAVSRILYSFATAFRRSAKQTPLSATAAPQTPDSDIFTFSVSLEIKEDDGKGYFSAVPKDKDRQCFKLRQGIDKKIVIYVQQTTNKELAIERCFGLLLSPGKDVRNSDMHLLDLESMGKSSDGKSYVITGSWNPKSPHFQVVNEETPKDKVLFMTTAVDLVITEVQEPVRFLLETKVRVCSPNERLFWPFSKRSTTENFFLKLKQIKQRERKNNTDTLYEVVCLES

SEQ ID NO: 791638 - protein, 479 aa, Homo sapiens
MDDKASVGKISVSSDSVSTLNSEDFVLVSRQGDETPSTNNGSDDEKTGLKIVGNGSEQQLQKELADVLMDPPMDDQPGEKELVKRSQLDGEGDGPLSNQLSASSTINPVPLVGLQKPEMSLPVKPGQGDSEASSPFTPVADEDSVVFSKLTYLGCASVNAPRSEVEALRMMSILRSQCQISLDVTLSVPNVSEGIVRLLDPQTNTEIANYPIYKILFCVRGHDGTPESDCFAFTESHYNAELFRIHVFRCEIQEAVSRILYSFATAFRRSAKQTPLSATAAPQTPDSDIFTFSVSLEIKEDDGKGYFSAVPKDKDRQCFKLRQGIDKKIVIYVQQTTNKELAIERCFGLLLSPGKDVRNSDMHLLDLESMGKSSDGKSYVITGSWNPKSPHFQVVNEETPKDKVLFMTTAVDLVITEVQEPVRFLLETKVRVCSPNERLFWPFSKRSTTENFFLKLKQIKQRERKNNTDTLYEVVCLES

SEQ ID NO: 791639 - protein, 479 aa, Homo sapiens; identical to SEQ ID NO: 791638

SEQ ID NO: 791640 - protein, 495 aa, Homo sapiens
MDDKASVGKISVSSDSVSTLNSEDFVLVSRQGDETPSTNNGSDDEKTGLKIVGNGSEQQLQKELADVLMDPPMDDQPGEKELVKRSQLDGEGDGPLSNQLSASSTINPVPLVGLQKPEMSLPVKPGQGGEDCCIACVTEELLFLIYSEASSPFTPVADEDSVVFSKLTYLGCASVNAPRSEVEALRMMSILRSQCQISLDVTLSVPNVSEGIVRLLDPQTNTEIANYPIYKILFCVRGHDGTPESDCFAFTESHYNAELFRIHVFRCEIQEAVSRILYSFATAFRRSAKQTPLSATAAPQTPDSDIFTFSVSLEIKEDDGKGYFSAVPKDKDRQCFKLRQGIDKKIVIYVQQTTNKELAIERCFGLLLSPGKDVRNSDMHLLDLESMGKSSDGKSYVITGSWNPKSPHFQVVNEETPKDKVLFMTTAVDLVITEVQEPVRFLLETKVRVCSPNERLFWPFSKRSTTENFFLKLKQIKQRERKNNTDTLYEVVCLE

SEQ ID NO: 791641 - protein, 219 aa, Homo sapiens
MEPKEATGKENMVTKKKNLAFLRSRLYMLERRKTDTVVESSVSGDHSGTLRRSQSDRTEYNQKLQEKMTPQGECSVAETLTPEEEHHMKRMMAKREKIIKELIQTEKDYLNDLELCVREVVQPLRNKKTDRLDVDSLFSNIESVHQISAKLLSLLEEATTDVEPAMQVIGEVFLQIKGPLEDIYKIYCYHHDEAHSILESYEKEEELKEHLSHCIQSLK

SEQ ID NO: 791642 - protein, 182 aa, Homo sapiens
HRALLPPEALGRALPPFQLPLVPVLLGLWPHHSGLCLHLMPRSLKRAQLRSLLPRPPAVSHTQPWYRAAHPTTSPTAASRDVHPASGAVPGPWLVEGTAVREGPQLQDAVPQRPTRPSKALWPAQMSAAPAIRLGQMVPGDTRGLWGPQGTLLTWTYRGGQGGRWTRRAEGPREGTFAEQRP

SEQ ID NO: 791643 - protein, 143 aa, Homo sapiens
VLFPYSTPCPRPRSLKRAQLRSLLPRPPAVSHTQPWYRAAHPTTSPTAASRDVHPASGAVPGPWLVEGTAVREGPQLQDAVPQRPTRPSKALWPAQMSAAPAIRLGQMVPGDTRGLWGPQGTLLTWTYRGGQGGRWTRRAEGP

SEQ ID NO: 791644 - protein, 127 aa, Homo sapiens [sequence omitted]

SEQ ID NO: 791645 - protein, 56 aa, Homo sapiens
MVVVQQVRRRGRRPGRLLLALEGSALEDLSPGAGHGQQGGGLGSQREPRGSGGGGR

SEQ ID NO: 791646 - protein, 88 aa, Homo sapiens
TGMGQWPPICPQRQQLALLGRLLRHRYTSGLRVAPSLLTALVQDALSAASVTCTTDIGLRAPFPGTGGTMVKRSLPCEAFTLVVQGKR

SEQ ID NO: 791647 - protein, 121 aa, Homo sapiens
MGHSEVIPRGERLLRRRPWVDGDERADAELLGAMDHLGFQPRAGLFLGPSKMSSLLDALELQESADTSPEQGPHCPSPPPLSGNVARRCQLRGVPGMMVSTAGAGPGPWRQLSGLRAPVNA

SEQ ID NO: 791648 - protein, 104 aa, Homo sapiens
AAITSTFPCPIQPLSDSNPVLLKRYSWVSGSWWSLGNQKIQRVPVGSQSYTDCEDPGCLSWGPGTTPQYMQKCAREHTHTLRGRKLLLKLFHCFFLLCSNVTNK

SEQ ID NO: 791649 - protein, 118 aa, Homo sapiens
SPLHHLQYWRFTLCRGLERVLICSVHFLQMQLRRIHSRHVFIVREHCACVSSSVNEEMSFSHICIVSENISPDCGSLGAAHTWFLIRLIKRLGMSIAVRQKVVVIQLGAQLPITVIRA

SEQ ID NO: 791650 - protein, 90 aa, Homo sapiens
MDVPYLINCLVFLFCFSKSNEHSSEYPFVRDLSLEGRLLAKNICTFNIHIHIYTHFFLRQRFTLSPRLKCSGMIIVHCSLYLLGSSNPPT

SEQ ID NO: 791651 - protein, 159 aa, Homo sapiens
MACTQAGERTAIYCLTQNEWRLDEATDSFFQNPDSLHRESMRNAVDKKKLERLYGRYKDPQDENKIGVDGIQQFCDDLSLDPASISVLVIAWKFRAATQCEFSRKEFLDGMTELGCDSMEKLKALLPRLEQELKDTAKFKDFYQFTFTFAKNPGQKGLD

SEQ ID NO: 791652 - protein, 134 aa, Homo sapiens
VGGRSTGSWHNLAEVAGCFLSQLGLARHAQFCATTVTQMEPHRENEQQAQEQGVCFLRGSSPCLRVHMALWASWLQRGRPQAIFRRSLCGSAESSQDYHPWDSAFCGPGLTEFGPRQDKLTRSNMSEPGAVHVR

SEQ ID NO: 791653 - protein, 119 aa, Homo sapiens
MGFVRCRIKSVVHRVMPFAVRECKGRAGNSRMGRCVNVDLQVGHKQCLEIPLGKRSLLESGQAEGSLSSGIFLCSSHWLEMENERKRSLFQARDLTNRITTLRPCSRGHKLPSLFPCGL

SEQ ID NO: 791654 - protein, 107 aa, Homo sapiens
MIGSFNSQFPGNHLALCMKLQIGLFCNAALARPHVFHYLWKSAWPWVGTVDVSIRKHILSTETTGQVVDEKCLTSVNLQLLTTRFCFFKGVDKLILIVFTSILLKGL

SEQ ID NO: 791655 - protein, 41 aa, Homo sapiens
STAMFLTDLQMEICNECTKRDSMSDANLWAKSLWDTLLIVG

SEQ ID NO: 791656 - protein, 53 aa, Homo sapiens
MGNAGSESLTLVPGFKRLRASCVQAEVNGDSNCRLALTIRNKNKIRKGIDDRK

SEQ ID NO: 791657 - protein, 111 aa, Homo sapiens
FQVEDLSAQSLQFSPVLSRKISARSRLGMAHLSPLGRKAPASKGVSGAQSRAKLQEGAMGNAGSESLTLVPGFKRLRASCVQAEVNGDSNCRLALTIRNKNKIRKGIDDRK

SEQ ID NO: 791658 - protein, 124 aa, Homo sapiens
EGVQVSQACLSLSMSGREAVSLGRKTKTQAYENHFLTLLIIFPFPPTPSRSLRKWWATCPDLMAACQGHMNPVQDPQRKVLLQWLLALNPHHDAQSSPLLLSAPSHPCVVSSCVQWFPISTWVG

SEQ ID NO: 791659 - protein, 149 aa, Homo sapiens
RDQSSPGLGGGHWPAVCGSFQKHGRSCRGRGGLGQKHWKSLLESVSLWGWGRPGAPQHVRAVPGEGPAGTPFLPAAPRACPAAPSRGSAFPTVLGELGWVGWGGAGRGQLRLQGGRGLLGAPQPPAPRPGSRPRAPGLGHAASGGRLRP

SEQ ID NO: 791660 - protein, 79 aa, Homo sapiens
LVTYKYPQGAGTHEQRDRDKYYRCLRVWISSRRKNKKSPGTTLVDRELVGEAGKPDNKAHGDSEPRVNRLEVRLSSSPA

SEQ ID NO: 791661 - protein, 107 aa, Homo sapiens
MPRTRTPSTSNTHSPSSMTFVFLESIFLSQALATKTPAYRSSVLAQHAWTHSSARQTSWGTFCEQALGRQGQPASVPTVLKRQQARPPQHGEVGTVFTNNKGGQRLV

SEQ ID NO: 791662 - protein, 556 aa, Homo sapiens
METESGNQEKVMEEESTEKKKEVEKKKRSRVKQVLADIAKQVDFWFGDANLHKDRFLREQIEKSRDGYVDISLLVSFNKMKKLTTDGKLIARALRSSAVVELDLEGTRIRRKKPLGERPKDEDERTVYVELLPKNVNHSWIERVFGKCGNVVYISIPHYKSTGDPKGFAFVEFETKEQAAKAIEFLNNPPEEAPRKPGIFPKTVKNKPIPALRVVEEKKKKKKKKGRMKKEDNIQAKEENMDTSNTSISKMKRSRPTSEGSDIESTEPQKQCSKKKKKRDRVEASSLPEVRTGKRKRSSSEDAESLAPRSKVKKIIQKDIIKEASEASKENRDIEISTEEEKDTGDLKDSSLLKTKRKHKKKHKERHKMGEEVIPLRVLSKSEWMDLKKEYLALQKASMASLKKTISQIKSESEMETDSGVPQNTGMKNEKTANREECRTQEKVNATGPQFVSGVIVKIISTEPLPGRKQVRDTLAAISEVLYVDLLEGDTECHARFKTPEDAQAVINAYTEINKKHCWKLEILSGDHEQGIGRRFWLIDRQNLISLGKRKEALKS

SEQ ID NO: 791663 - protein, 563 aa, Homo sapiens
MIPNIEGMETESGNQEKVMEEESTEKKKEVEKKKRSRVKQVLADIAKQVDFWFGDANLHKDRFLREQIEKSRDGYVDISLLVSFNKMKKLTTDGKLIARALRSSAVVELDLEGTRIRRKKPLGERPKDEDERTVYVELLPKNVNHSWIERVFGKCGNVVYISIPHYKSTGDPKGFAFVEFETKEQAAKAIEFLNNPPEEAPRKPGIFPKTVKNKPIPALRVVEEKKKKKKKKGRMKKEDNIQAKEENMDTSNTSISKMKRSRPTSEGSDIESTEPQKQCSKKKKKRDRVEASSLPEVRTGKRKRSSSEDAESLAPRSKVKKIIQKDIIKEASEASKENRDIEISTEEEKDTGDLKDSSLLKTKRKHKKKHKERHKMGEEVIPLRVLSKSEWMDLKKEYLALQKASMASLKKTISQIKSESEMETDSGVPQNTGMKNEKTANREECRTQEKVNATGPQFVSGVIVKIISTEPLPGRKQVRDTLAAISEVLYVDLLEGDTECHARFKTPEDAQAVINAYTEINKKHCWKLEILSGDHEQGIGRRFWLIDRQNLISLGKRKEALKS

SEQ ID NO: 791664 - protein, 165 aa, Homo sapiens
CIQPELGIRNYALTGGKTRAASVHPASSAPEFPLPGQQWPQEPWRLGTAPCPSSLGRWSGSSRSDKSARYPQMAASVLSQPILERRKRSETSWPAHSQGPGAGMGGLWHPPICHLCKGPGLSFPQREARPNHSLEAQECGWESGRVWQGTKRPVRGTGWLRCQAS

SEQ ID NO: 791665 - protein, 130 aa, Homo sapiens
QALELSLPPRVAQCLPSPCPPVLLFLSSHHSSLSWHSPSEPHWLPSLYSFVGRTQLCQHRALLAMPHLDGAVLEGCCVGGSFELPALSILQRVAASRIVCRRKQGSWSNLSSSSLLWAFPVHLPASPCVP

SEQ ID NO: 791666 - protein, 120 aa, Homo sapiens
SNQLSSPGQRQDSEPALIWVLGRGSQYLSAMLSPSPGSVDPLPASPQQGPGTQIPANVKKTPTWHRKPQLAASSAGTVMWLVIRWAPSPRIWGRAQPGRQLYPALAVSCWAHTLIILSLN

SEQ ID NO: 791667 - protein, 339 aa, Homo sapiens
LEAQSPRRRAGWCSCAGGVLRLGVVTGSRMASDSGNQGTLCTLEFAVQMTCQSCVDAVRKSLQGVAGVQDVEVHLEDQMVLVHTTLPSQEVQALLEGTGRQAVLKGMGSGQLRGDHCGLGPSRREVAQSWYKSNHRILRLWVGVALRKVWKLCETPCPSRAAEEVCWVRWQASPSVFLAENLGAAVAILGGPGTVQGVVRFLQLTPERCLIEGTIDGLEPGLHGLHVHQYGDLTNNFNSCWESLLTLMEHLMGGPQDSDRTGPRGTLPGQSSGSSDSYENWYAQGGHWVLKGNQDEGVESGNQKNAASHHVAPFPITPGVHHHRGNRAGGKVTGGHSEG

SEQ ID NO: 791668 - protein, 329 aa, Homo sapiens
LEAQSPRRRAGWCSCAGGVLRLGVVTGSRMASDSGNQGTLCTLEFAVQMTCQSCVDAVRKSLQGVAGVQDVEVHLEDQMVLVHTTLPSQEVQALLEGTGRQAVLKGMGSGQLQYLAENLGAAVAILGGPGTVQGVVRFLQLTPERCLIEGTIDGLEPGLHGLHVHQYGDLTNNFNSCWESLLTLMEHLMGGPQDSDRHRGDLGNVRADADGGAIFRMEDEQLKVWDVIGRSLIIDEGEDDLGGEGHPLSKITGNSGEEGLAVASCARSVGLFQNPKTDLVLCDGLTNLGEEARRPNRGKARKGVKAAPATFGEELTWVLVRLQGSLSIP

SEQ ID NO: 791669 - protein, 114 aa, Homo sapiens
LEAQSPRRRAGWCSCAGGVLRLGVVTGSRMASDSGNQGTLCTLEFAVQMTCQSCVDAVRKSLQGVAGVQDVEVHLEDQMVLVHTTLPSQEVQALLEGTGRQAVLKGMGSGQLRE

SEQ ID NO: 791670 - protein, 118 aa, Homo sapiens
PEFRGTFRGGVWLGVSFEAAHQLDSPLPGCSHRARAGGLSPAPCGLPTGLRACLWDCHSLFLSRRLERERERARRGHGACMSQSRVLHPVPSATLCSFHVRYQVSPVLREGNCASPFS

SEQ ID NO: 791671 - protein, 161 aa, Homo sapiens
MVSSQPKYDLIREVGRGSYGVVYEAVIRKTSARVAVKKIRCHAPENVELALREFWALSSIKSQHPNVIHLEECILQKDGMVQKMSHGSNSSLYLQLVETSLKGEIAFDPRSAYYLWFVMDFCDGGDMNEYLLSRKPNRKTNTSFMLQLSSALAFLHQVGYQ

SEQ ID NO: 791672 - protein, 286 aa, Homo sapiens
MVSSQPKYDLIREVGRGSYGVVYEAVIRKTSARVAVKKIRCHAPENVELALREFWALSSIKSQHPNVIHLEECILQKDGMVQKMSHGSNSSLYLQLVETSLKGEIAFDPRSAYYLWFVMDFCDGGDMNEYLLSRKPNRKTNTSFMLQLSSALAFLHKNQIIHRDLKPDNILISQTRLDTSDLEPTLKVADFGLSKVCSASGQNPEEPVSVNKCFLSTACGTDFYMAPEVWEGHYTAKADIFALGIIIWAMLERITFIDTETKKELLGSYVKQGTEIVPVGEALLEN

SEQ ID NO: 791673 - protein, 260 aa, Homo sapiens
SKGTISASCPRSSRSTMAAAASPAFLLCLPLLHLLSGWSRAGWVDTHCLCYDFIITPKSRPEPQWCEVQGLVDERPFLHYDCVNHKAKAFASLGKKVNVTKTWEEQTETLRDVVDFLKGQLLDIQVENLIPIEPLTLQARMSCEHEAHGHGRGSWQFLFNGQKFLLFDSNNRKWTALHPGAKKMTEKWEKNRDVTMFFQKISLGDCKMWLEEFLMYWEQMLDPTKPPSLAPGTTQPKAMATTLSPWSLLIIFLCFILAGR

SEQ ID NO: 791674 - protein, 129 aa, Homo sapiens
GFLPSVSPCFPTIYHDTQPASVHEPAVSSYHCRRHPLLGCSRCRVWRKVRSKGALSVETHTPTASLTPRPTHSTVTGFLHRGPADLSSSPNLELDMFSLQMQKDKSLLRGPVVAQSRAKRKYMFLSSII

SEQ ID NO: 791675 - protein, 560 aa, Homo sapiens
MPQTRSQAQATISFPKRKLSRALNKAKNSSDAKLEPTNVQTVTCSPRVKALPLSPRKRLGDDNLCNTPHLPPCSPPKQGKKENGPPHSHTLKGRRLVFDNQLTIKSPSKRELAKVHQNKILSSVRKSQEITTNSEQRCPLKKESACVRLFKQEGTCYQQAKLVLNTAVPDRLPAREREMDVIRNFLREHICGKKAGSLYLSGAPGTGKTACLSRILQDLKKELKGFKTIMLNCMSLRTAQAVFPAIAQEICQEEVSRPAGKDMMRKLEKHMTAEKGPMIVLVLDEMDQLDSKGQDVLYTLFEWPWLSNSHLVLIGIANTLDLTDRILPRLQAREKCKPQLLNFPPYTRNQIVTILQDRLNQVSRDQVLDNAAVQFCARKVSAVSGDVRKALDVCRRAIEIVESDVKSQTILKPLSECKSPSEPLIPKRVGLIHISQVISEVDGNRMTLSQEGAQDSFPLQQKILVCSLMLLIRQLKIKEVTLGKLYEAYSKVCRKQQVAAVDQSECLSLSGLLEARGILGLKRNKETRLTKVFFKIEEKEIEHALKDKALIGNILATGLP

SEQ ID NO: 791676 - protein, 560 aa, Homo sapiens; identical to SEQ ID NO: 791675

SEQ ID NO: 791677 - protein, 560 aa, Homo sapiens; identical to SEQ ID NO: 791675

SEQ ID NO: 791678 - protein, 254 aa, Homo sapiens
MPQTRSQAQATISFPKRKLSRALNKAKNSSDAKLEPTNVQTVTCSPRVKALPLSPRKRLGDDNLCNTPHLPPCSPPKQGKKENGPPHSHTLKGRRLVFDNQLTIKSPSKRELAKVHQNKILSSVRKSQEITTNSEQRCPLKKESACVRLFKQEGTCYQQAKLVLNTAVPDRLPAREREMDVIRNFLREHICGKKAGSLYLSGAPGTGKTACLSRILQDLKVSRDQVLDNAAVQFCARKVSAVSGDVRKALDVCR

SEQ ID NO: 791679 - protein, 101 aa, Homo sapiens
FLWQQMDNSNWTSVSHFVLLGISTHPEEQIPLFLVFSLMYAINISGNLAIITLILSAPRLHIPMYIFLSNLALTDICFTSTTVPKMLQIIFSPTKKWKSQS

SEQ ID NO: 791680 - protein, 215 aa, Homo sapiens
TSDDPPALASQSAGITGVSHCTQPNFLIWYKVEEGGKADTLSSKLQAGDEVVHINEVTLSSSRKEAVSLVKGSYKTLRLVVRRARFVTQPGVQWCDLDSPKLGSPGLKRFSRLSLPGGWDYSRARWLMPVIPALWKAEAGESLGGRELETILANLVSLYVVAHIRSPSYSGRLGHENPLNLGKWTVRRRRDNALQTGGQSNDSSPKQQKHKTTTT

SEQ ID NO: 791681 - protein, 83 aa, Homo sapiens
TSDDPPALASQSAGITGVSHCTQPNFLIWYKVEEGGKADTLSSKLQAGDEVVHINEVTLSSSRKEAVSLVKGSYKTLRLVVRS

SEQ ID NO: 791682 - protein, 106 aa, Homo sapiens
DSNPILRYRWVKEVAKEASSIPSAAKMPPVITTGLGPNFVLRALPTGLPNCCTAIPMEAIQETRAACSSNAATNSTKKTPKERSTPNTSADWKNAESTTTNHPQPP

SEQ ID NO: 791683 - protein, 81 aa, Homo sapiens
DSNPILRYRWVKEVAKEASSIPSAAKMPPVITTGLGPNFVLRALPTGPEEVEGAAARRSQGSPPQHLPPLALPLPSRRIPS

SEQ ID NO: 791684 - protein, 78 aa, Homo sapiens
HSKAKRKEAGPLEVVVTTPAMWRSLGLALALCLLPSGGTESQDQSSLCKQPPAWSIRDQDPMLNSNGSVTVVALLQAS

SEQ ID NO: 791685 - protein, 75 aa, Homo sapiens
KVDLRIPGSTDVVVYLICALVLDAGGSRVVSQSLWEAMARRITDNPSNVEKPGACPGSLSPPIGRNREPGPKLLM

SEQ ID NO: 791686 - protein, 78 aa, Homo sapiens; identical to SEQ ID NO: 791684

SEQ ID NO: 791687 - protein, 69 aa, Homo sapiens
PFLKNLTIQVLLENSFSTRTVCCKRKLQEFLEEETGDLVHQSRSSFYSRLVFKKLLVCVALGKLEIITL

SEQ ID NO: 791688 - protein, 105 aa, Homo sapiens
LIISDGWAGGAAGRPSQGLGSLQGEKEVGAARAGPCVLHRRFWARNWKQSSPGGLGVQAPKLWLALSLPTPPALFAGTRVLWAVADVETGRMSSYFSKTQCPLPL

SEQ ID NO: 791689 - protein, 79 aa, Homo sapiens
SPRPTGQGHQPWRGHRAQRGQLGCELIPPRPPVLVPAPPPKARVAGWCLAPTPKVGRGLEAIRLQAALGAAPWRQGNKG

SEQ ID NO: 791690 - protein, 82 aa, Homo sapiens
RCCTKPQTQRLLHSTPRPSCCHLCGDQQDDCPSFQRAWYWGAPGEGVPGCGQPVDAHDCDATALGPPLSRVRWEQEPQRSQG

SEQ ID NO: 791691 - protein, 115 aa, Homo sapiens
MPPHHPVGERAGKQGTWAWGRPQGQVLQAGRLWQKPLCQPPPSCPRMQRPAPPRPSAQEARVRKQTEMPACLQIDSNRSQENFQPAGLWRPLLKGPSECPSLLFCAHKCHPIAAA

SEQ ID NO: 791692 - protein, 311 aa, Homo sapiens
EGRGGAGKMAAPEKMTFPEKPSHKKYRAALKKEKRKKRRQELARLRDSGLSQKEEEEDTFIEEQQLEEEKLLERERQRLHEEWLLREQKAQEEFRIKKEKEEAAKKRQEEQERKLKEQWEEQQRKEREEEEQKRQEKKEKEEALQKMLDQAENELENGTTWQNPEPPVDFRVMEKDRANCPFYSKTGACRFGDRCSRKHNFPTSSPTLLIKSMFTTFGMEQCRRDDYDPDASLEYSEEETYQQFLDFYEDVLPEFKNVGKVIQFKVSCNLEPHLRGNVYVQYQSEEECQAALSLLTDDGMQDDSCSVNSAP

SEQ ID NO: 791693 - protein, 139 aa, Homo sapiens
MEKDRANCPFYSKTGACRFGDRCSRKHNFPTSSPTLLIKSMFTTFGMEQCRRDDYDPDASLEYSEEETYQQFLDFYEDVLPEFKNVGKVIQFKVSCNLEPHLRGNVYVQYQSEEECQAALSLLTDDGMQDDSCSVNSAP

SEQ ID NO: 791694 - protein, 337 aa, Homo sapiens
GAGRCRQDGCAREDDVSRETKRSGELGQRCIVAADRRVYVLIFQPQKVQGRPEEGETKETSAGTCSTERLRTLTEEEEEDTFIEEQQLEEEKLLERERQRLHEEWLLREQKAQEEFRIKKEKEEAAKKRQEEQERKLKEQWEEQQRKEREEEEQKRQEKKEKEEALQKMLDQAENELENGTTWQNPEPPVDFRVMEKDRANCPFYSKTGACRFGDRCSRKHNFPTSSPTLLIKSMFTTFGMEQCRRDDYDPDASLEYSEEETYQQFLDFYEDVLPEFKNVGKVIQFKVSCNLEPHLRGNVYVQYQSEEECQAALSLFNGRWYAGRQLQCEFCPVTRW

SEQ ID NO: 791695 - protein, 430 aa, Homo sapiens
GAGRCRQDGCAREDDVSRETKRSGELGQRCIVAADRRVYVLIFQPQKVQGRPEEGETKETSAGTCSTERLRTLTEEEEEDTFIEEQQLEEEKLLERERQRLHEEWLLREQKAQEEFRIKKEKEEAAKKRQEEQERKLKEQWEEQQRKEREEEEQKRQEKKEKEEALQKMLDQAENELENGTTWQNPEPPVDFRVMEKDRANCPFYSKTGACRFGDRCSRKHNFPTSSPTLLIKSMFTTFGMEQCRRDDYDPDASLEYSEEETYQQFLDFYEDVLPEFKNVGKVIQFKVSCNLEPHLRGNVYVQYQSEEECQAALSLFNGRWYAGRQLQCEFCPVTRWKWRFVVYLKYNNVQEESTATFFMCSEIPTMNSGKLIETSTCLQIGLAPPLGRTPKGGRGWATTTTTTAGCGEEISQTHIKESGEAQFTKQRKK

SEQ ID NO: 791696 - protein, 34 aa, Homo sapiens
MWKMLTAAGSHQVAKSTASCGPRPKKHYLVFFLK

SEQ ID NO: 791697 - protein, 117 aa, Homo sapiens
KRKAIERTANQAVRLPRGSPRSFYYNSCHRVQKKEPRSLSSLLEENMKAAEGQKSHLVTSHRCSGGSLSHERVLTKRRLLFQSRTPAQQSRLGRKRLCPAFQFIPPSDFYNKKNLSA

SEQ ID NO: 791698 - protein, 126 aa, Homo sapiens
GWYCLGCSGLAGCRVPVAVGLCFLPLLPEAGFEVNSGPVWGGEAARCAQGPPRLLAPPAKEVGARVRAMGDNAAQGAVSSPGKTEASLYHQSRTCSGCGKRWPLLSKHFQGILAAEFPWEHVLVLR

SEQ ID NO: 791699 - protein, 110 aa, Homo sapiens
AALSRRGGSRVRPRTRPEGLRQLRMRTGWATPRRPAGLLMLLFWFFDLAEPSGRAEQTCGLVWGSTGILNPQPFGSIVWQECPLHDAGDGMHLVTCARLGLCRWPLLPKH

SEQ ID NO: 791700 - protein, 1583 aa, Homo sapiens
AALSRRGGSRVRPRTRPEGLRQLRMRTGWATPRRPAGLLMLLFWFFDLAEPSGRAANDPFTIVHGNTGKCIKPVYGWIVADDCDETEDKLWKWVSQHRLFHLHSQKCLGLDITKSVNELRMFSCDSSAMLWWKCEHHSLYGAARYRLALKDGHGTAISNASDVWKKGGSEESLCDQPYHEIYTRDGNSYGRPCEFPFLIDGTWHHDCILDEDHSGPWCATTLNYEYDRKWGICLKPENGCEDNWEKNEQFGSCYQFNTQTALSWKEAYVSCQNQGADLLSINSAAELTYLKEKEGIAKIFWIGLNQLYSARGWEWSDHKPLNFLNWDPDRPSAPTIGGSSCARMDAESGLWQSFSCEAQLPYVCRKPLNNTVELTDVWTYSDTRCDAGWLPNNGFCYLLVNESNSWDKAHAKCKAFSSDLISIHSLADVEVVVTKLHNEDIKEEVWIGLKNINIPTLFQWSDGTEVTLTYWDENEPNVPYNKTPNCVSYLGELGQWKVQSCEEKLKYVCKRKGEKLNDASSDKMCPPDEGWKRHGETCYKIYEDEVPFGTNCNLTITSRFEQEYLNDLMKKYDKSLRKYFWTGLRDVDSCGEYNWATVGGRRRAVTFSNWNFLEPASPGGCVAMSTGKSVGKWEVKDCRSFKALSICKKMSGPLGPEEASPKPDDPCPEGWQSFPASLSCYKVFHAERIVRKRNWEEAERFCQALGAHLSSFSHVDEIKEFLHFLTDQFSGQHWLWIGLNKRSPDLQGSWQWSDRTPVSTIIMPNEFQQDYDIRDCAAVKVFHRPWRRGWHFYDDREFIYLRPFACDTKLEWVCQIPKGRTPKTPDWYNPDRAGIHGPPLIIEGSEYWFVADLHLNYEEAVLYCASNHSFLATITSFVGLKAIKNKIANISGDGQKWWIRISEWPIDDHFTYSRYPWHRFPVTFGEECLYMSAKTWLIDLGKPTDCSTKLPFICEKYNVSSLEKYSPDSAAKVQCSEQWIPFQNKCFLKIKPVSLTFSQASDTCHSYGGTLPSVLSQIEQDFITSLLPDMEATLWIGLRWTAYEKINKWTDNRELTYSNFHPLLVSGRLRIPENFFEEESRYHCALILNLQKSPFTGTWNFTSCSERHFVSLCQKYSEVKSRQTLQNASETVKYLNNLYKIIPKTLTWHSAKRECLKSNMQLVSITDPYQQAFLSVQALLHNSSLWIGLFSQDDELNFGWSDGKRLHFSRWAETNGQLEDCVVLDTDGFWKTVDCNDNQPGAICYYSGNETEKEVKPVDSVKCPSPVLNTPWIPFQNCCYNFIITKNRHMATTQDEVHTKCQKLNPKSHILSIRDEKENNFVLEQLLYFNYMASWVMLGITYRNKSLMWFDKTPLSYTHWRAGRPTIKNEKFLAGLSTDGFWDIQTFKVIEEAVYFHQHSILACKIEMVDYKEEYNTTLPQFMPYEDGIYSVIQKKVTWYEALNMCSQSGGHLASVHNQNGQLFLEDIVKRDGFPLWVGLSSHDGSESSFEWSDGSTFDYIPWKGQTSPGNCVLLDPKGTWKHEKCNSVKDGAICYKPTKSKKLSRLTYSSRCPAAKENGSRWIQYKGHCYKSDQALHSFSEA

SEQ ID NO: 791701 - protein, 1346 aa, Homo sapiens
AALSRRGGSRVRPRTRPEGLRQLRMRTGWATPRRPAGLLMLLFWFFDLAEPSGRAANDPFTIVHGNTGKCIKPVYGWIVADDCDETEDKLWKWVSQHRLFHLHSQKCLGLDITKSVNELRMFSCDSSAMLWWKCEHHSLYGAARYRLALKDGHGTAISNASDVWKKGGSEESLCDQPYHEIYTRDGNSYGRPCEFPFLIDGTWHHDCILDEDHSGPWCATTLNYEYDRKWGICLKPENGCEDNWEKNEQFGSCYQFNTQTALSWKEAYVSCQNQGADLLSINSAAELTYLKEKEGIAKIFWIGLNQLYSARGWEWSDHKPLNFLNWDPDRPSAPTIGGSSCARMDAESGLWQSFSCEAQLPYVCRKPLNNTVELTDVWTYSDTRCDAGWLPNNGFCYLLVNESNSWDKAHAKCKAFSSDLISIHSLADVEVVVTKLHNEDIKEEVWIGLKNINIPTLFQWSDGTEVTLTYWDENEPNVPYNKTPNCVSYLGELGQWKVQSCEEKLKYVCKRKGEKLNDASSDKMCPPDEGWKRHGETCYKIYEDEVPFGTNCNLTITSRFEQEYLNDLMKKYDKSLRKYFWTGLRDVDSCGEYNWATVGGRRRAVTFSNWNFLEPASPGGCVAMSTGKSVGKWEVKDCRSFKALSICKKMSGPLGPEEASPKPDDPCPEGWQSFPASLSCYKVFHAERIVRKRNWEEAERFCQALGAHLSSFSHVDEIKEFLHFLTDQFSGQHWLWIGLNKRSPDLQGSWQWSDRTPVSTIIMPNEFQQDYDIRDCAAVKVFHRPWRRGWHFYDDREFIYLRPFACDTKLEWVCQIPKGRTPKTPDWYNPDRAGIHGPPLIIEGSEYWFVADLHLNYEEAVLYCASNHSFLATITSFVGLKAIKNKIANISGDGQKWWIRISEWPIDDHFTYSRYPWHRFPVTFGEECLYMSAKTWLIDLGKPTDCSTKLPFICEKYNVSSLEKYSPDSAAKVQCSEQWIPFQNKCFLKIKPVSLTFSQASDTCHSYGGTLPSVLSQIEQDFITSLLPDMEATLWIGLRWTAYEKINKWTDNRELTYSNFHPLLVSGRLRIPENFFEEESRYHCALILNLQKSPFTGTWNFTSCSERHFVSLCQKYSEVKSRQTLQNASETVKYLNNLYKIIPKTLTWHSAKRECLKSNMQLVSITDPYQQAFLSVQALLHNSSLWIGLFSQDDELNFGWSDGKRLHFSRWAETNGQLEDCVVLDTDGFWKTVDCNDNQPGAICYYSGNETEKEVKPVDSVKCPSPVLNTPWIPFQNCCYNFIITKNRHMATTQDEVHTKCQKLNPKSHILSIRDEKENNFVLEQLLYFNYMASWVMLGITYRSKL

SEQ ID NO: 791702 - protein, 730 aa, Homo sapiens
AALSRRGGSRVRPRTRPEGLRQLRMRTGWATPRRPAGLLMLLFWFFDLAEPSGRAANDPFTIVHGNTGKCIKPVYGWIVADDCDETEDKLWKWVSQHRLFHLHSQKCLGLDITKSVNELRMFSCDSSAMLWWKCEHHSLYGAARYRLALKDGHGTAISNASDVWKKGGSEESLCDQPYHEIYTRDGNSYGRPCEFPFLIDGTWHHDCILDEDHSGPWCATTLNYEYDRKWGICLKPENGCEDNWEKNEQFGSCYQFNTQTALSWKEAYVSCQNQGADLLSINSAAELTYLKEKEGIAKIFWIGLNQLYSARGWEWSDHKPLNFLNWDPDRPSAPTIGGSSCARMDAESGLWQSFSCEAQLPYVCRKPLNNTVELTDVWTYSDTRCDAGWLPNNGFCYLLVNESNSWDKAHAKCKAFSSDLISIHSLADVEVVVTKLHNEDIKEEVWIGLKNINIPTLFQWSDGTEVTLTYWDENEPNVPYNKTPNCVSYLGELGQWKVQSCEEKLKYVCKRKGEKLNDASSDKMCPPDEGWKRHGETCYKIYEDEVPFGTNCNLTITSRFEQEYLNDLMKKYDKSLRKYFWTGLRDVDSCGEYNWATVGGRRRAVTFSNWNFLEPASPGGCVAMSTGKSVGKWEVKDCRSFKALSICKKMSGPLGPEEASPKPDDPCPEGWQSFPASLSCYKVFHAERIVRKRNWEEAERFCQALGAHLSSFSHVDEIKEFLHFLTDQFR

SEQ ID NO: 791703 - protein, 1746 aa, Homo sapiens
AALSRRGGSRVRPRTRPEGLRQLRMRTGWATPRRPAGLLMLLFWFFDLAEPSGRAANDPFTIVHGNTGKCIKPVYGWIVADDCDETEDKLWKWVSQHRLFHLHSQKCLGLDITKSVNELRMFSCDSSAMLWWKCEHHSLYGAARYRLALKDGHGTAISNASDVWKKGGSEESLCDQPYHEIYTRDGNSYGRPCEFPFLIDGTWHHDCILDEDHSGPWCATTLNYEYDRKWGICLKPENGCEDNWEKNEQFGSCYQFNTQTALSWKEAYVSCQNQGADLLSINSAAELTYLKEKEGIAKIFWIGLNQLYSARGWEWSDHKPLNFLNWDPDRPSAPTIGGSSCARMDAESGLWQSFSCEAQLPYVCRKPLNNTVELTDVWTYSDTRCDAGWLPNNGFCYLLVNESNSWDKAHAKCKAFSSDLISIHSLADVEVVVTKLHNEDIKEEVWIGLKNINIPTLFQWSDGTEVTLTYWDENEPNVPYNKTPNCVSYLGELGQWKVQSCEEKLKYVCKRKGEKLNDASSDKMCPPDEGWKRHGETCYKIYEDEVPFGTNCNLTITSRFEQEYLNDLMKKYDKSLRKYFWTGLRDVDSCGEYNWATVGGRRRAVTFSNWNFLEPASPGGCVAMSTGKSVGKWEVKDCRSFKALSICKKMSGPLGPEEASPKPDDPCPEGWQSFPASLSCYKVFHAERIVRKRNWEEAERFCQALGAHLSSFSHVDEIKEFLHFLTDQFSGQHWLWIGLNKRSPDLQGSWQWSDRTPVSTIIMPNEFQQDYDIRDCAAVKVFHRPWRRGWHFYDDREFIYLRPFACDTKLEWVCQIPKGRTPKTPDWYNPDRAGIHGPPLIIEGSEYWFVADLHLNYEEAVLYCASNHSFLATITSFVGLKAIKNKIANISGDGQKWWIRISEWPIDDHFTYSRYPWHRFPVTFGEECLYMSAKTWLIDLGKPTDCSTKLPFICEKYNVSSLEKYSPDSAAKVQCSEQWIPFQNKCFLKIKPVSLTFSQASDTCHSYGGTLPSVLSQIEQDFITSLLPDMEATLWIGLRWTAYEKINKWTDNRELTYSNFHPLLVSGRLRIPENFFEEESRYHCALILNLQKSPFTGTWNFTSCSERHFVSLCQKYSEVKSRQTLQNASETVKYLNNLYKIIPKTLTWHSAKRECLKSNMQLVSITDPYQQAFLSVQALLHNSSLWIGLFSQDDELNFGWSDGKRLHFSRWAETNGQLEDCVVLDTDGFWKTVDCNDNQPGAICYYSGNETEKEVKPVDSVKCPSPVLNTPWIPFQNCCYNFIITKNRHMATTQDEVHTKCQKLNPKSHILSIRDEKENNFVLEQLLYFNYMASWVMLGITYRNKSLMWFDKTPLSYTHWRAGRPTIKNEKFLAGLSTDGFWDIQTFKVIEEAVYFHQHSILACKIEMVDYKEEYNTTLPQFMPYEDGIYSVIQKKVTWYEALNMCSQSGGHLASVHNQNGQLFLEDIVKRDGFPLWVGLSSHDGSESSFEWSDGSTFDYIPWKGQTSPGNCVLLDPKGTWKHEKCNSVKDGAICYKPTKSKKLSRLTYSSRCPAAKENGSRWIQYKGHCYKSDQALHSFSEAKKLCSKHDHSATIVSIKDEDENKFVSRLMRENNNITMRVWLGLSQHSVDQSWSWLDGSEVTFVKWENKSKSGVGRCSMLIASNETWKKVECEHGFGRVVCKVPLGPDYTAIAIIVATLSILVLMGGLIWFLFQRHRLHLAGFSSVRYAQGVNEDEIMLPSFHD

SEQ ID NO: 791704 - protein, 1648 aa, Homo sapiens
AALSRRGGSRVRPRTRPEGLRQLRMRTGWATPRRPAGLLMLLFWFFDLAEPSGRAANDPFTIVHGNTGKCIKPVYGWIVADDCDETEDKLWKWVSQHRLFHLHSQKCLGLDITKSVNELRMFSCDSSAMLWWKCEHHSLYGAARYRLALKDGHGTAISNASDVWKKGGSEESLCDQPYHEIYTRDGNSYGRPCEFPFLIDGTWHHDCILDEDHSGPWCATTLNYEYDRKWGICLKPENGCEDNWEKNEQFGSCYQFNTQTALSWKEAYVSCQNQGADLLSINSAAELTYLKEKEGIAKIFWIGLNQLYSARGWEWSDHKPLNFLNWDPDRPSAPTIGGSSCARMDAESGLWQSFSCEAQLPYVCRKPLNNTVELTDVWTYSDTRCDAGWLPNNGFCYLLVNESNSWDKAHAKCKAFSSDLISIHSLADVEVVVTKLHNEDIKEEVWIGLKNINIPTLFQWSDGTEVTLTYWDENEPNVPYNKTPNCVSYLGELGQWKVQSCEEKLKYVCKRKGEKLNDASSDKMCPPDEGWKRHGETCYKIYEDEVPFGTNCNLTITSRFEQEYLNDLMKKYDKSLRKYFWTGLRDVDSCGEYNWATVGGRRRAVTFSNWNFLEPASPGGCVAMSTGKSVGKWEVKDCRSFKALSICKKMSGPLGPEEASPKPDDPCPEGWQSFPASLSCYKVFHAERIVRKRNWEEAERFCQALGAHLSSFSHVDEIKEFLHFLTDQFSGQHWLWIGLNKRSPDLQGSWQWSDRTPVSTIIMPNEFQQDYDIRDCAAVKVFHRPWRRGWHFYDDREFIYLRPFACDTKLEWVCQIPKGRTPKTPDWYNPDRAGIHGPPLIIEGSEYWFVADLHLNYEEAVLYCASNHSFLATITSFVGLKAIKNKIANISGDGQKWWIRISEWPIDDHFTYSRYPWHRFPVTFGEECLYMSAKTWLIDLGKPTDCSTKLPFICEKYNVSSLEKYSPDSAAKVQCSEQWIPFQNKCFLKIKPVSLTFSQASDTCHSYGGTLPSVLSQIEQDFITSLLPDMEATLWIGLRWTAYEKINKWTDNRELTYSNFHPLLVSGRLRIPENFFEEESRYHCALILNLQKSPFTGTWNFTSCSERHFVSLCQKYSEVKSRQTLQNASETVKYLNNLYKIIPKTLTWHSAKRECLKSNMQLVSITDPYQQAFLSVQALLHNSSLWIGLFSQDDELNFGWSDGKRLHFSRWAETNGQLEDCVVLDTDGFWKTVDCNDNQPGAICYYSGNETEKEVKPVDSVKCPSPVLNTPWIPFQNCCYNFIITKNRHMATTQDEVHTKCQKLNPKSHILSIRDEKENNFVLEQLLYFNYMASWVMLGITYRNKSLMWFDKTPLSYTHWRAGRPTIKNEKFLAGLSTDGFWDIQTFKVIEEAVYFHQHSILACKIEMVDYKEEYNTTLPQFMPYEDGIYSVIQKKVTWYEALNMCSQSGGHLASVHNQNGQLFLEDIVKRDGFPLWVGLSSHDGSESSFEWSDGSTFDYIPWKGQTSPGNCVLLDPKGTWKHEKCNSVKDGAICYKPTKSKKLSRLTYSSRCPAAKENGSRWIQYKGHCYKSDQALHSFSEAKKLCSKHDHSATIVSIKDEDENKFVSRLMRENNNITMRVWLGLSQHSVGMSVSPQGTHACLLLEF

SEQ ID NO: 791705 - protein, 770 aa, Homo sapiens
AALSRRGGSRVRPRTRPEGLRQLRMRTGWATPRRPAGLLMLLFWFFDLAEPSGRAANDPFTIVHGNTGKCIKPVYGWIVADDCDETEDKLWKWVSQHRLFHLHSQKCLGLDITKSVNELRMFSCDSSAMLWWKCEHHSLYGAARYRLALKDGHGTAISNASDVWKKGGSEESLCDQPYHEIYTRDGNSYGRPCEFPFLIDGTWHHDCILDEDHSGPWCATTLNYEYDRKWGICLKPENGCEDNWEKNEQFGSCYQFNTQTALSWKEAYVSCQNQGADLLSINSAAELTYLKEKEGIAKIFWIGLNQLYSARGWEWSDHKPLNFLNWDPDRPSAPTIGGSSCARMDAESGLWQSFSCEAQLPYVCRKPLNNTVELTDVWTYSDTRCDAGWLPNNGFCYLLVNESNSWDKAHAKCKAFSSDLISIHSLADVEVVVTKLHNEDIKEEVWIGLKNINIPTLFQWSDGTEVTLTYWDENEPNVPYNKTPNCVSYLGELGQWKVQSCEEKLKYVCKRKGEKLNDASSDKMCPPDEGWKRHGETCYKIYEDEVPFGTNCNLTITSRFEQEYLNDLMKKYDKSLRKYFWTGLRDVDSCGEYNWATVGGRRRAVTFSNWNFLEPASPGGCVAMSTGKSVGKWEVKDCRSFKALSICKKMSGPLGPEEASPKPDDPCPEGWQSFPASLSCYKVFHAERIVRKRNWEEAERFCQALGAHLSSFSHVDEIKEFLHFLTDQFSGQHWLWIGLNKRSPDLQGSWQWSDRTPVSTIIMPNEFHCI

SEQ ID NO: 791706 - protein, 86 aa, Homo sapiens
GIANQLRMRSHRPPSRNLQKAFQNRKTRKAAISRNSRAFRMRLSGVKGAVLHMQGSGQGCQALFIWERQAACLHLVWAPEGRAAPA

SEQ ID NO: 791707 - protein, 96 aa, Homo sapiens
PMGPSRLVRGPRPQGMRSPYRRPGMGWPRPRFPRMFKCSRRRYQQGLRGRTASSAAINPATRAMGINNTHTDTTIVWIFPPQVLRHLRQPGIFLIL

SEQ ID NO: 791708 - protein, 96 aa, Homo sapiens
YFDSGPPPAFSPPPPPGRAYDTVRSSFKPGLEARLGAGAAGLYEPGAALGPLPYPERQKRARSMIILQDSAPESGDAPRPPPAATPPERPKRRPRP

SEQ ID NO: 791709 - protein, 112 aa, Homo sapiens
HFYELLRTVTLTAKVCSFTPEARETTNPPEGMNNSRRTAFKSCNTYQRMSAASLLKSARPQTQQKEETPDTSEHLKEQTLDTPSLRTVTLTVRVNRFILEVSQTKNPPIPSI

SEQ ID NO: 791710 - protein, 819 aa, Homo sapiens
MDLGWDRSRGPRRSTSSVRVRELSWQGLHNPCPQSKGPGSQRDRLGEQLVEEYLSPARLQALARVDDLRLVRTLEMCVDTREGSLGNFGVHLPNLDQLKLNGSHLGSLRDLGTSLGHLQVLWLARCGLADLDGIASLPALKELYASYNNISDLSPLCLLEQLEVLDLEGNSVEDLGQVRYLQLCPRLAMLTLEGNLVCLQPAPGPTNKVPRGYNYRAEVRKLIPQLQVLDEVPAAHTGPPAPPRLSQDWLAVKEAIKKGNGLPPLGTAAAPGGPTAEPQLPPGRGPHPRLLRNGKPHLMHFSSLDPGPQSCAHPAPGQDTVSEQPTEGEEGLKMRASLEGCSVRGQPQAMQHGDWGPWSVDRVWGALSGWALVTSASEPRADCPRGAPIRRLDPELSLPETQSRASRPWPFSLLVHGGPLPEGLLSEDLAPEDNTSSLTHGNCLASKLTLQPLGPEPGPAMLSLAGAGQVLCGNPTKGLRERRHQCQAREPPEQLPQHRPGDPAASTSTPEPDPADSSDFLALAGLTAWREHGVRPLPYRHPESQQEGAVAPWGPRRVPEEQVHQAEPKTPSSPPSLASEPSGTSSQHLVPSPPKHPRPRDSGSSSPRWSTDLQSRGRRLRVLGSWGPGLGDGVAAVPVLRALEVASGLSPRAQGCPGPKPAHMQQLDLPGQLNSLTPAPSPLNIAPTARLACAGATTCPHMWSQSTEYLGGCVGGWKECLALGRTLLVEGSGGLGPAREAAEAGTQFRPPTGFGLGREGPAPQPFLRARLSRGHGGGGWSPEQACERPLLLELGMAEGQGLELRVHHSLASPRVRATS

SEQ ID NO: 791711 - protein, 819 aa, Homo sapiens
MDLGWDRSRGPRRSTSSVRVRELSWQGLHNPCPQSKGPGSQRDRLGEQLVEEYLSPARLQALARVDDLRLVRTLEMCVDTREGSLGNFGVHLPNLDQLKLNGSHLGSLRDLGTSLGHLQVLWLARCGLADLDGIASLPALKELYASYNNISDLSPLCLLEQLEVLDLEGNSVEDLGQVRYLQLCPRLAMLTLEGNLVCLQPAPGPTNKVPRGYNYRAEVRKLIPQLQVLDEVPAAHTGPPAPPRLSQDWLAVKEAIKKGNGLPPLGTAAAPGGPTAEPQLPPGRGPHPRLLRNGEPHLMHFSSLDPGPQSCAHPAPGQDTVSEQPTEGEEGLKMRASLEGCSVRGQPQAMQHGDWGPWSVDRVWGALSGWALVTSASEPRADCPRGAPIRRLDPELSLPETQSRASRPWPFSLLVHGGPLPEGLLSEDLAPEDNTSSLTHGNCLASKLTLQPLGPEPGPAMLSLAGAGQVLCGNPTKGLRERRHQCQAREPPEQLPQHRPGDPAASTSTPEPDPADSSDFLALAGLTAWREHGVRPLPYRHPESQQEGAVAPWGPRRVPEEQVHQAEPKTPSSPPSLASEPSGTSSQHLVPSPPKHPRPRDSGSSSPRWSTDLQSRGRRLRVLGSWGPGLGDGVAAVPVLRALEVASGLSPRAQGCPGPKPAHMQQLDLPGQLNSLTPAPSPLNIAPTARLACAGATTCPHMWSQSTEYLGGCVGGWKECLALGRTLLVEGSGGLGPAREAAEAGTQFRPPTGFGLGREGPAPQPFLRARLSRGHGGGGWSPEQACERPLLLELGMAEGQGLELRVHHSLASPRVRATS

SEQ ID NO: 791712 - protein, 819 aa, Homo sapiens
MDLGWDRSRGPRRSTSSVRVRELSWQGLHNPCPQSKGPGSQRDRLGEQLVEEYLSPARLQALARVDDLRLVRTLEMCVDTREGSLGNFGVHLPNLDQLKLNGSHLGSLRDLGTSLGHLQVLWLARCGLADLDGIASLPALKELYASYNNISDLSPLCLLEQLEVLDLEGNSVEDLGQVRYLQLCPRLAMLTLEGNLVCLQPAPGPTNKVPRGYNYRAEVRKLIPQLQVLDEVPAAHTGPPAPPRLSQDWLAVKEAIKKGNGLPPLGTAAAPGGPTAEPQLPPGRGPHPRLLRNGEPHLMHFSSLDPGPQSCAHPAPGQDTVSEQPTEGEEGLKMRASLEGCSVRGQPQAMQHGDWGPWSVDRVWGALSGWALVTSASEPRADCPRGAPIRRLDPELSLPETQSRASRPWPFSLLVHGGPLPEGLLSEDLAPEDNTSSLTHGNCLASKLTLQPLGPEPGPAMLSLAGAGQVLCGNPTKGLRERRHQCQAREPPEQLPQHRPGDPAASTSTPEPDPADSSDFLALAGLTAWREHGVRPLPYRHPESQQEGAVAPWGPRRVPEEQVHQAEPKTPSSPPSLASEPSGTSSQHLVPSPPKHPRPRDSGSSSPRWSTDLQSRGRRLRVLGSWGPGLGDGVAAVPVLRALEVASGLSPRAQGCPGPKPAPLQQLDLPGQLNSLTPAPSPLNIAPTARLACAGATTCPHMWSQSTEYLGGCVGGWKECLALGRTLLVEGSGGLGPAREAAEAGTQFRPPTGFGLGREGPAPQPFLRARLSRGHGGGGWSPEQACERPLLLELGMAEGQGLELRVHHSLASPRVRATS

SEQ ID NO: 791713 - protein, 105 aa, Homo sapiens
MRAKWRKKRMRRLKRKRRKMRQSPSKPLACCTVEATGAETWNARRWGCWYKLWDCMLLSRACLNGSRTSSPSDRRSPLRPTLLINKMPMLVLCPGPVTFWTISVF

SEQ ID NO: 791714 - protein, 177 aa, Homo sapiens
SVLPSAAPTTGQMKRIKKERKKRVQAQCPLPCPRLGEASTQVELRTNGDENRRGGFRAGEAPKSHSTEALTACVNPSCEYREKGCQASSTQGELRGHDGDMKSTLLNQLEMQPPLGLEDQGLLVFLAYVSEAWQNLHPWLLIDTGKARDKLVSIPVSDMRKFPSHQEQGLAHGLTFP

SEQ ID NO: 791715 - protein, 67 aa, Homo sapiens
PHTAADRGPLPTLVSPYELRKLRGLPSAPSCSLGCLYFQLGKGSGPQSTCPLSACTRPPCFPSNAVD

SEQ ID NO: 791716 - protein, 69 aa, Homo sapiens
VKRCQNPRRGSTNALPRRAVEELADGGTTEGSMGEQRQLQESGPNNHGNRTFRSTSSESHFLPVVGKGL

SEQ ID NO: 791717 - protein, 69 aa, Homo sapiens; identical to SEQ ID NO: 791716

SEQ ID NO: 791718 - protein, 134 aa, Homo sapiens
SRPLSKLLSLPHVLFSPEPAPFQLRKRTEDPMDSTLRQETPRGPCALTKRGTLFSGWLVSQTLGAQGHRTPGSRNQSGRKQVVEMAFLRTAVTHQPELKATCWPTGRDPDPHPSQEAPAQAVWGVAEGLLSLCR

SEQ ID NO: 791719 - protein, 407 aa, Homo sapiens
MRPPYLKIIRAIYDKPTANIILNGQKLEAFPLKTGARQGCPLSPLLFNTVLEVLARAIRQEKERKGIQLGKEEVKLSLFADDMIVHVENSIVSAQNLLKLISNFSKVSGYKINVQKSQAFLYINNRQRESQIMSELPFTIATKRIKYLGIQLTRDVKDLFKENYKPLLNQVKEDQTNGRTFHAHGWEEINIVKMAILPKVIYRFNAIPIKLPMTFFTELEKTTLKFIWNQKRACIAKTTLSQKNKAEGITLSNFKLYYKATVTKTACYWYQNRDTDQWNRTEPSEIIPHIYNHLIFDKPDKKKKWGKDALFNKWCWENWLAICRKLKLDPFLTPYTKVNSRWIKDLNVRPKTRKTLEENLGNTIQDIGMGKDFMTKTPKAMATKLKIDKWDLIKELLHSKRNYHQSE

SEQ ID NO: 791720 - protein, 106 aa, Homo sapiens
MALLHIALPRTSMWATLGCVWTCLPFHGWTSPDKRCGARRHRTGVTRLSQHCHLLAAGENAEFNRESTLVKDQLQKHTGRDPRTHIPTYTPQNRAPPTLARPQQHL

SEQ ID NO: 791721 - protein, 536 aa, Homo sapiens
AEEGAVAKGAGRPWSLSHVAAPGAREEVVVRQTNSRLSGFRGFRVVGGRGRRAIRTRRTRSSATLLTSARRTRRRRWLEHLTLCSKEMVMEKPSPLLVGREFVRQYYTLLNKAPEYLHRFYGRNSSYVHGGVDASGKPQEAVYGQNDIHHKVLSLNFSECHTKIRHVDAHATLSDGVVVQVMGLLSNSGQPERKFMQTFVLAPEGSVPNKFYVHNDMFRYEDEVFGDSEPELDEESEDEVEEEQEERQPSPEPVQENANSGYYEAHPVTNGIEEPLEESSHEPEPEPESETKTEELKPQVEEKNLEELEEKSTTPPPAEPVSLPQEPPKPRVEAKPEVQSQPPRVREQRPRERPGFPPRGPRPGRGDMEQNDSDNRRIIRYPDSHQLFVGNLPHDIDENELKEFFMSFGNVVELRINTKGVGGKLPNFGFVVFDDSEPVQRILIAKPIMFRGEVRLNVEEKKTRAARERETRGGGDDRRDIRRNDRGPGGPRGIVGGGMMRDRDGRGPPPRGGMAQKLGSGRGTGQMEGRFTGQRR

SEQ ID NO: 791722 - protein, 536 aa, Homo sapiens; identical to SEQ ID NO: 791721

SEQ ID NO: 791723 - protein, 569 aa, Homo sapiens
AEEGAVAKGAGRPWSLSHVAAPGAREEVVVRQTNSRLSGFRGFRVVGGRGRRAIRTRRTRSSATLLTSARRTRRRRWLEHLTLCSKEMVMEKPSPLLVGREFVRQYYTLLNKAPEYLHRFYGRNSSYVHGGVDASGKPQEAVYGQNDIHHKVLSLNFSECHTKIRHVDAHATLSDGVVVQVMGLLSNSGQPERKFMQTFVLAPEGSVPNKFYVHNDMFRYEDEVFGDSEPELDEESEDEVEEEQEERQPSPEPVQENANSGYYEAHPVTNGIEEPLEESSHEPEPEPESETKTEELKPQVEEKNLEELEEKSTTPPPAEPVSLPQEPPKAFSWASVTSKNLPPSGTVSSSGIPPHVKAPVSQPRVEAKPEVQSQPPRVREQRPRERPGFPPRGPRPGRGDMEQNDSDNRRIIRYPDSHQLFVGNLPHDIDENELKEFFMSFGNVVELRINTKGVGGKLPNFGFVVFDDSEPVQRILIAKPIMFRGEVRLNVEEKKTRAARERETRGGGDDRRDIRRNDRGPGGPRGIVGGGMMRDRDGRGPPPRGGMAQKLGSGRGTGQMEGRFTGQRR

SEQ ID NO: 791724 - protein, 449 aa, Homo sapiens
MVMEKPSPLLVGREFVRQYYTLLNKAPEYLHRFYGRNSSYVHGGVDASGKPQEAVYGQNDIHHKVLSLNFSECHTKIRHVDAHATLSDGVVVQVMGLLSNSGQPERKFMQTFVLAPEGSVPNKFYVHNDMFRYEDEVFGDSEPELDEESEDEVEEEQEERQPSPEPVQENANSGYYEAHPVTNGIEEPLEESSHEPEPEPESETKTEELKPQVEEKNLEELEEKSTTPPPAEPVSLPQEPPKPRVEAKPEVQSQPPRVREQRPRERPGFPPRGPRPGRGDMEQNDSDNRRIIRYPDSHQLFVGNLPHDIDENELKEFFMSFGNVVELRINTKGVGGKLPNFGFVVFDDSEPVQRILIAKPIMFRGEVRLNVEEKKTRAARERETRGGGDDRRDIRRNDRGPGGPRGIVGGGMMRDRDGRGPPPRGGMAQKLGSGRGTGQMEGRFTGQRR

SEQ ID NO: 791725 - protein, 536 aa, Homo sapiens; identical to SEQ ID NO: 791721

SEQ ID NO: 791726 - protein, 316 aa, Homo sapiens
DWEEKRVLAICLASQSEDEVEEEQEERQPSPEPVQENANSGYYEAHPVTNGIEEPLEESSHEPEPEPESETKTEELKPQVEEKNLEELEEKSTTPPPAEPVSLPQEPPKPRVEAKPEVQSQPPRVREQRPRERPGFPPRGPRPGRGDMEQNDSDNRRIIRYPDSHQLFVGNLPHDIDENELKEFFMSFGNVVELRINTKGVGGKLPNFGFVVFDDSEPVQRILIAKPIMFRGEVRLNVEEKKTRAARERETRGGGDDRRDIRRNDRGPGGPRGIVGGGMMRDRDGRGPPPRGGMAQKLGSGRGTGQMEGRFTGQRR

SEQ ID NO: 791727 - protein, 206 aa, Homo sapiens
WLTLEDTLPLLPPRVREQRPRERPGFPPRGPRPGRGDMEQNDSDNRRIIRYPDSHQLFVGNLPHDIDENELKEFFMSFGNVVELRINTKGVGGKLPNFGFVVFDDSEPVQRILIAKPIMFRGEVRLNVEEKKTRAARERETRGGGDDRRDIRRNDRGPGGPRGIVGGGMMRDRDGRGPPPRGGMAQKLGSGRGTGQMEGRFTGQRR

SEQ ID NO: 791728 - protein, 185 aa, Homo sapiens
RLSRGSLGPPRPGRGDMEQNDSDNRRIIRYPDSHQLFVGNLPHDIDENELKEFFMSFGNVVELRINTKGVGGKLPNFGFVVFDDSEPVQRILIAKPIMFRGEVRLNVEEKKTRAARERETRGGGDDRRDIRRNDRGPGGPRGIVGGGMMRDRDGRGPPPRGGMAQKLGSGRGTGQMEGRFTGQRR

SEQ ID NO: 791729 - protein, 536 aa, Homo sapiens; identical to SEQ ID NO: 791721

SEQ ID NO: 791730 - protein, 351 aa, Homo sapiens
AEEGAVAKGAGRPWSLSHVAAPGAREEVVVRQTNSRLSGFRGFRVVGGRGRRAIRTRRTRSSATLLTSARRTRRRRWLEHLTLCSKEMVMEKPSPLLVGREFVRQYYTLLNKAPEYLHRFYGRNSSYVHGGVDASGKPQEAVYGQNDIHHKVLSLNFSECHTKIRHVDAHATLSDGVVVQVMGLLSNSGQPERKFMQTFVLAPEGSVPNKFYVHNDMFRYEDEVFGDSEPELDEESEDEVEEEQEERQPSPEPVQENANSGYYEAHPVTNGIEEPLEESSHEPEPEPESETKTEELKPQVEEKNLEELEEKSTTPPPAEPVSLPQEPPKVRSKNSLDLQHHMFKFGAVNEV

SEQ ID NO: 791731 - protein, 111 aa, Homo sapiens
SGRGGGGKGGGTSVVLVARRSAWRPGRGGCEADELAALRLPRLPSCRRKGAASNKNPPHPVLSDSSDLRATYPPPPLAGAFDIVQQRNGYGEAQSAACRAGVCEAILYFAE

SEQ ID NO: 791732 - protein, 169 aa, Homo sapiens
MEQNDSDNRRIIRYPDSHQLFVGNLPHDIDENELKEFFMSFGNVVELRINTKGVGGKLPNFGFVVFDDSEPVQRILIAKPIMFRGEVRLNVEEKKTRAARERETRGGGDDRRDIRRNDRGPGGPRGIVGGGMMRDRDGRGPPPRGGMAQKLGSGRGTGQMEGRFTGQRR

SEQ ID NO: 791733 - protein, 536 aa, Homo sapiens; identical to SEQ ID NO: 791721

SEQ ID NO: 791734 - protein, 423 aa, Homo sapiens
AEEGAVAKGAGRPWSLSHVAAPGAREEVVVRQTNSRLSGFRGFRVVGGRGRRAIRTRRTRSSATLLTSARRTRRRRWLEHLTLCSKEMVMEKPSPLLVGREFVRQYYTLLNKAPEYLHRFYGRNSSYVHGGVDASGKPQEAVYGQNDIHHKVLSLNFSECHTKIRHVDAHATLSDGVVVQVMGLLSNSGQPERKFMQTFVLAPEGSVPNKFYVHNDMFRYEDEVFGDSEPELDEESEDEVEEEQEERQPSPEPVQENANSGYYEAHPVTNGIEEPLEESSHEPEPEPESETKTEELKPQVEEKNLEELEEKSTTPPPAEPVSLPQEPPKPRVEAKPEVQSQPPRVREQRPRERPGFPPRGPRPGRGDMEQNDSDKGLITRIYEELRKFYRKKKSNNHLKMGKRLDISQDKHGKTSVYGSVQHH

SEQ ID NO: 791735 - protein, 240 aa, Homo sapiens
AEEGAVAKGAGRPWSLSHVAAPGAREEVVVRQTNSRLSGFRGFRVVGGRGRRAIRTRRTRSSATLLTSARRTRRRRWLEHLTLCSKEMVMEKPSPLLVGREFVRQYYTLLNKAPEYLHRFYGRNSSYVHGGVDASGKPQEAVYGQNDIHHKVLSLNFSECHTKIRHVDAHATLSDGVVVQVMGLLSNSGQPERKFMQTFVLAPEGSVPNKFYVHNDMFRYEDEVFGDSEPELDEESEDEV

SEQ ID NO: 791736 - protein, 94 aa, Homo sapiens
LSPGGRWLPVAHSDLRPPSCRQPPTARTEIFLPFFSFQALLKVLTRQIAMESEFKWPFKVDQLSEWLCLRRHRDLGQPVRDTPRSVYTALGLLF

SEQ ID NO: 791737 - protein, 102 aa, Homo sapiens
HFLNLSVSFAVSFILHSFCIGTFCWIPYFFFQGPISNTTPLKTFLHRNNLWCIYFCHLNEINGKIWQHKLFKVNLVIHIEETSICKRLLEIKPFKECIVNNY

SEQ ID NO: 791738 - protein, 159 aa, Homo sapiens
ARAAASPPVSLPPTGARLGHTAPLWLPHPLLFGLLTQPLNINSTPGKASWTILVPEGPSAKGRERGSGVVQGDTERGGHLGAEDAGTRSARKSRGSGVGGCGFQRNRRGCGRTRKEGVPERTRAAAGHKRCGTQEAVGSCGSPGHLDMDPPDLWLLQRP

SEQ ID NO: 791739 - protein, 93 aa, Homo sapiens
SRTGRAPRDTGTRRDMGDTEGHGGHGGRVLPSLGALAFLCLWSQESTPRADVRLLPMGPRAGMAQLLMALFFCVQDIKLPPIRSFNLFGAWIS

SEQ ID NO: 791740 - protein, 416 aa, Homo sapiens [sequence omitted]

SEQ ID NO: 791741 - protein, 122 aa, Homo sapiens
MGFHFCIWIIFLLPPPCKKCLSPPTMNLRPPKSCGNVFYWVLVLNSELLYKFCQTIKCRANWRPVRAPRGWNEATERHQERRTQMETEMGGISTTYWHRLCTCTDRRAEKLVMDGNNCWFHK

SEQ ID NO: 791742 - protein, 106 aa, Homo sapiens
LDPEIILQVFKRLFYMINAVTLNDLLLRKDVCSWSTGMQLRYNISQLEEWLWGRNLHQSGVVQTMEPLIQAAQLLQLKKKTQEDAEAICSLCASLSTQQIVQFLNL

SEQ ID NO: 791743 - protein, 271 aa, Homo sapiens
  misc_feature (32)..(33): Xaa can be any naturally occurring amino acid
  misc_feature (44)..(44): Xaa can be any naturally occurring amino acid
  misc_feature (46)..(46): Xaa can be any naturally occurring amino acid
CLPAPSHHVGARGSLAAYPSLFVLAQEKVPCXXPSFTPMMPLSXWXFPPPFGPPRPPFWLVLGCQNGPPFWSPNFFPFPSKDPDVGAPIYFAFKQNFPFFKLQKKYGPIYSVRMGTKTTVIVGHHQLAKEVLIKKGKDFSGRPQMATLDIASNNRKGIAFADSGAHWQLHRRLAMATFALFKDGDQKLEKIICQEISTLCDMLATHNGQSIDISFPVFVAVTNVISLICFNTSYKNGDPELNVIQNYNEGIIPNKTLEKLKSHVKIRNDLL

SEQ ID NO: 791744 - protein, 152 aa, Homo sapiens
MPSLCGVSLEDQSQGCCLTGEQQDSDLDVSDSGILSPNPDAFPASLDDLASLHPVPMPCPFSILEFLKPQWAVHSVLLWVTYDASLPPGPPANPRPLLIGVSLAGEQRAFWGCQVAALSAPVLARVAWLPETSCCLLAGGGPGHARTVSCSP

SEQ ID NO: 791745 - protein, 529 aa, Homo sapiens
MKPHLKQWRQRMLFGIFAWGLLFLLIFIYFTDSNPAEPVPSSLSFLETRRLLPVQGKQRAIMGAAHEPSPPGGLDARQALPRAHPAGSFHAGPGDLQKWAQSQDGFEHKEFFSSQVGRKSQSAFYPEDDDYFFAAGQPGWHSHTQGTLGFPSPGEPGPREGAFPAAQVQRRRVKKRHRRQRRSHVLEEGDDGDRLYSSMSRAFLYRLWKGNVSSKMLNPRLQKAMKDYLTANKHGVRFRGKREAGLSRAQLLCQLRSRARVRTLDGTEAPFSALGWRRLVPAVPLSQLHPRGLRSCAVVMSAGAILNSSLGEEIDSHDAVLRFNSAPTRGYEKDVGNKTTIRIINSQILTNPSHHFIDSSLYKDVILVAWDPAPYSANLNLWYKKPDYNLFTPYIQHRQRNPNQPFYILHPKFIWQLWDIIQENTKEKIQPNPPSSGFIGILIMMSMCREVHVYEYIPSVRQTELCHYHELYYDAACTLGAYHPLLYEKLLVQRLNMGTQGDLHRKGKVVLPGFQAVHCPAPSPVIPHS

SEQ ID NO: 791746 - protein, 466 aa, Homo sapiens
MKPHLKQWRQRMLFGIFAWGLLFLLIFIYFTDSNPAEPVPSSLSFLETRRLLPVQGKQRAIMGAAHEPSPPGGLDARQALPRAHPAGSFHAGPGDLQKWAQSQDGFEHKEFFSSQVGRKSQSAFYPEDDDYFFAAGQPGWHSHTQGTLGFPSPGEPGPREGAFPAAQVQRRRVKKRHRRQRRSHVLEEGDDGDRLYSSMSRAFLYRLWKGNVSSKMLNPRLQKAMKDYLTANKHGVRFRGKREAGLSRAQLLCQLRSRARVRTLDGTEAPFSALGWRRLVPAVPLSQLHPRGLRSCAVVMSAGAILNSSLGEEIDSHDAVLRFNSAPTRGYEKDVGNKTTIRIINSQILTNPSHHFIDSSLYKDVILVAWDPAPYSANLNLWYKKPDYNLFTPYIQHRQRNPNQPFYILHPKFIWQLWDIIQENTKEKIQPNPPSSGFIGSFVKIGHIRACSEPRSRDCTPAWTTE

SEQ ID NO: 791747 - protein, 468 aa, Homo sapiens
MKPHLKQWRQRMLFGIFAWGLLFLLIFIYFTDSNPAEPVPSSLSFLETRRLLPVQGKQRAIMGAAHEPSPPGGLDARQALPRAHPAGSFHAGPGDLQKWAQSQDGFEHKEFFSSQVGRKSQSAFYPEDDDYFFAAGQPGWHSHTQGTLGFPSPGEPGPREGAFPAAQVQRRRVKKRHRRQRRSHVLEEGDDGDRLYSSMSRAFLYRLWKGNVSSKMLNPRLQKAMKDYLTANKHGVRFRGKREAGLSRAQLLCQLRSRARVRTLDGTEAPFSALGWRRLVPAVPLSQLHPRGLRSCAVVMSAGAILNSSLGEEIDSHDAVLRFNSAPTRGYEKDVGNKTTIRIINSQILTNPSHHFIDSSLYKDVILVAWDPAPYSANLNLWYKKPDYNLFTPYIQHRQRNPNQPFYILHPKFIWQLWDIIQENTKEKIQPNPPSSGFIDGVSLCYSGWSAVARSQLTATSASQVQAI

SEQ ID NO: 791748 - protein, 529 aa, Homo sapiens; identical to SEQ ID NO: 791745

SEQ ID NO: 791749 - protein, 120 aa, Homo sapiens
MVTSALKVQLSSHSPRRQDITVPDQPKGLHLPPSTQGALSASAGIVPVPTPASPAHRDRCSELIPGVTPHKGGGRWPGSELLPSWVGGFCPACRRAARGSCARARSVELQGGALGCLQAE

SEQ ID NO: 791750 - protein, 176 aa, Homo sapiens
MWFPRAPAGLRPGRVEGGGWKATFRPSWNHAAASRLPPTRQALPPVGTRGASTPSRPCAFRAGLLGKAAARGLEGPGSRLVPLWPPNRPAPRNWPTRAESPRSSKGARAGPPRPALGARLPEDPSESLRLPSRKWACSVSTPQRCPQWEGGPWTCREQSRGPWQRRTPRSQQPRGR

SEQ ID NO: 791751 - protein, 111 aa, Homo sapiens
MWASGSRDSMEAPGRKPSRASFQFPFGPRGPLLPNPKMSLPDTLRGNQPGCDALAQALPCLTSLPQPPCSWHIWSLAPVYSCACSTQRPLSSHLLSGGLRALGSRLPDPLS

SEQ ID NO: 791752 - protein, 120 aa, Homo sapiens
MSAPHCMALVRSLCLLGPHCVHSLLHATKHLPDVPAPPAPASSQGRRRRLPLLKGLFPMAPLRPLQETISPSQPRPFSPLPSPQALNGPATTLNSDLGQPSTGGAGGSVNSEGNSLTECQ

SEQ ID NO: 791753 - protein, 136 aa, Homo sapiens
MQSDIYHPGHSFPSWVLCWVHSCGHEGHLRETAEIRKTHQNGDLQIRGGRGRRESTEIFQVASVTEGEESPPAICMEVFLFLWFIAPIYACVCRIFKIQVRNTVKNSSTASLAPSISTSEERQIRIERHHYHLYGQ

SEQ ID NO: 791754 - protein, 73 aa, Homo sapiens
KHREKLLSGSESSSKKRQRKKKEKKKSGRYSSSSSSSSDSSSSSSDSEDEDKKQGKQRKKKKNRSLNQTVRIV

SEQ ID NO: 791755 - protein, 53 aa, Homo sapiens
MCVQAQGSRLHEEAELPCVPLSGRSNGGKAAVFTRICLTEASGAGGGGTSVLH

SEQ ID NO: 791756 - protein, 221 aa, Homo sapiens
MSTKAEQFASKIRYLQEYHNRVLHNIYPVPSGTDIANTLKYFSQTLLSILSRTGKKENQDASNLTVPMTMCLFPVPFPLTPSLRPQVSSINPTVTRSLLYSVLRDAPSERGPQSRDAQLSDYPSLDYQGLYVTLVTLLDLVPLLQHGQHDLGQSIFYTTTCLLPFLNDDILSTLPYTMISTLATFPPFLHKDIIEYLSTSFLPMAILGSSRREGVPAHVNL

SEQ ID NO: 791757 - protein, 102 aa, Homo sapiens
HLLTSRSGGDWARGAAPRVAGEPGPKRLPTVSGRRRAEVSLIRPSPRRSLASVSTSVHPPLHPPFHLSIHPTLGGRCPDARVRRGRCLEGSRAGPSFAAGAA

SEQ ID NO: 791758 - protein, 32 aa, Homo sapiens
CKEIVRFKDFFKLLTFNFLVLLNSAQKLQLLK

SEQ ID NO: 791759 - protein, 118 aa, Homo sapiens
IPTSPHRPSLQMGRPRPGAPRNSARPRARQWQSRRLLYALHPHPSRGSLFYSNLKVPPSAPNLPPTPRSAGKVNCGWRGIWGVWGAGRQGAGRMDVISGPELHSCPRAKRPFPAEVPN

SEQ ID NO: 791760 - protein, 145 aa, Homo sapiens
SQARKAEEKPWWDTAGDPGLAGLQQQGGPAAHWQRRELWDGKAAVNGQMQSLGQVFIALILGTSPGCPHGFTHRRALGYPKWAYPPCHSALPYPLTPIPAPSVAVHTLHRLGALCSQPVCQPTPQDTSSGADPWTCNNNKYFHNH

SEQ ID NO: 791761 - protein, 116 aa, Homo sapiens
MAPSLYGLRSGCLQGKAPLRFPAPYICGGGQRLQRHAAQPRQPVHADHVSVGLWGWGGKCWPSGRKRAVPQSFPRIESKVLRPGLLPPGASVPAEAKIGLSTFPAPILNRCVLDGG

SEQ ID NO: 791762 - protein, 204 aa, Homo sapiens
RGAECLLPWAALNLQGFQLLLLHPSATAMMDVSELGESARYLRQGYQEMTKVHTIPWDGKKRVWVPDEQDAYVEAEVKSEATGGRVTVETKDQKVLMVREAELQPMNPPRFDLLEDMAMMTHLNEASVLHNLRQRYARWMIYTYSGLFCVTINPYKWLPVYTASVVAAYKGKRRSDSPPHIYAVADNAYNDMLRNRDNQSMLIT

SEQ ID NO: 791763 - protein, 255 aa, Homo sapiens
SRPRPGRARALTESQQARARLPRVSSGSVVAATLGAESLRSRAAVESQRKEAQGAGEARSWTLLLPHLRDPHALRRGNDRHAATVGRGSHELRVSRGRGRGRRRQSRAGKARYPAPSAPTPPPRSWPRTPGLWSGRRGRRAASELDRTGAAGGSRAAEEVAFDGQRGVEIPSQRCDLLEPTLPLWWRGGSGPAPSRAWELNDPVCKAHLGDRKQPLPRLQFHTTCRYTSQNLRLGRPGPPEAKRVHFVISPGFSF

SEQ ID NO: 791764 - protein, 72 aa, Homo sapiens
SGLEPGKLIAIPKVTLMQEMGPMILGSSTPVAFAGYRLPPGCFHGLVMRKLKLREPKSFAQGDPALKGEASH

SEQ ID NO: 791765 - protein, 53 aa, Homo sapiens
KPETFSYVTLPKKEEEQVPERGLVSVPKYHFWEQKEDFTFVSLLTRPEVITAL

SEQ ID NO: 791766 - protein, 103 aa, Homo sapiens [sequence omitted]

SEQ ID NO: 791767 - protein, 116 aa, Homo sapiens
RQSLPAQTPFSRHQTLGSRLLLSPNNSLGGSPLAKAARASPWHSRRSPALHAPLRHPILPSCTQTPALPRPRAPDSPSSPVGRHPRPVWPQLPNLGPRCSPVYTRSPAPPAPRLRP

SEQ ID NO: 791768 - protein, 113 aa, Homo sapiens
DSHPCAQSSQAPTMAFSGRARPCIIPENGEIPRAALNTVHEANGTEDERAVSKLQRRHSDVKVYKEFCDFYAKFNMANALASATCERCKGGFAPAETIVNSNGELYHEQCFVL

SEQ ID NO: 791769 - protein, 113 aa, Homo sapiens; identical to SEQ ID NO: 791768

SEQ ID NO: 791770 - protein, 211 aa, Homo sapiens
MPDPPKFLLLLPQGAGRAQSAAPGALQPHKHAPAPGGGRAAGKDISEVSCGCNKLFKSALEHRCDLSFSILGQTAPETGNSPAPPHPTPQALLVGVGQGELSGMPGLSVQAWQPCPMGGADSVSHAPCPREEVGVPSIEMVKNKGGSDRLWDPVRSAFAGRKRLGHMERVINWKILGSSILKGDMIPWKGHELSCQFVLAFSNQCCVATAN

SEQ ID NO: 791771 - protein, 211 aa, Homo sapiens; identical to SEQ ID NO: 791770

SEQ ID NO: 791772 - protein, 71 aa, Homo sapiens
MGITAPQRYSSSPLRDPCSAMNSRFFLLSGDRDPVPSEGRVHPGLCSLPTAEPGELVAAVAPPPLLGANAA

SEQ ID NO: 791773 - protein, 887 aa, Homo sapiens
MLNSGRGTAKANVHEKDYIPVKGEVCIAKYTVDQTWNRAIIQNVDVQQKKAHVLYIDYGNEEIIPLNRIYHLNRNIDLFPPCAIKCFVANVIPAEGNWSSDCIKATKPLLMEQYCSIKIVDILEEEVVTFAVEVELPNSGKLLDHVLIEMGYGLKPSGQDSKKENADQSDPEDVGKMTTENNIVVDKSDLIPKVLTLNVGDEFCGVVAHIQTPEDFFCQQLQSGRKLAELQASLSKYCDQLPPRSDFYPAIGDICCAQFSEDDQWYRASVLAYASEESVLVGYVDYGNFEILSLMRLCPIIPKLLELPMQAIKCVLAGVKPSLGIWTPEAICLMKKLVQNKIITVKVVDKLENSSLVELIDKSETPHVSVSKVLLDAGFAVGEQSMVTDKPSDVKETSVPLGVEGKVNPLEWTWVELGVDQTVDVVVCVIYSPGEFYCHVLKEDALKKLNDLNKSLAEHCQQKLPNGFKAEIGQPCCAFFAGDGSWYRALVKEILPNGHVKVHFVDYGNIEEVTADELRMISSTFLNLPFQGIRCQLADIQSRNKHWSEEAITRFQMCVAGIKLQARVVEVTENGIGVELTDLSTCYPRIISDVLIDEHLVLKSASPHKDLPNDRLVNKHELQVHVQGLQATSSAEQWKTIELPVDKTIQANVLEIISPNLFYALPKGMPENQEKLCMLTAELLEYCNAPKSRPPYRPRIGDACCAKYTSDDFWYRAVVLGTSDTDVEVLYADYGNIETLPLCRVQPITSSHLALPFQIIRCSLEGLMELNGSSSQLIIMLLKNFMLNQNVMLSVKGITKNVHTVSVEKCSENGTVDVADKLVTFGLAKNITPQRQSALNTEKMYRMNCCCTELQKQVEKHEHILLFLLNNSTNQNKFIEMKKLVKS

SEQ ID NO: 791774 - protein, 868 aa, Homo sapiens
MLNSGRGTAKANVHEKDYIPVKGEVCIAKYTVDQTWNRAIIQNVDVQQKKAHVLYIDYGNEEIIPLNRIYHLNRNIDLFPPCAIKCFVANVIPAEGNWSSDCIKATKPLLMEQYCSIKIVDILEEEVVTFAVEVELPNSGKLLDHVLIEMGYGLKPSGQDSKKENADQSDPEDVGKMTTENNIVVDKSDLIPKVLTLNVGDEFCGVVAHIQTPEDFFCQQLQSGRKLAELQASLSKYCDQLPPRSDFYPAIGDICCAQFSEDDQWYRASVLAYASEESVLVGYVDYGNFEILSLMRLCPIIPKLLELPMQAIKCVLAGVKPSLGIWTPEAICLMKKLVQNKIITVKVVDKLENSSLVELIDKSETPHVSVSKVLLDAGFAVGEQSMVTDKPSDVKETSVPLGVEGKVNPLEWTWVELGVDQTVDVVVCVIYSPGEFYCHVLKEDALKKLNDLNKSLAEHCQQKLPNGFKAEIGQPCCAFFAGDGSWYRALVKEILPNGHVKVHFVDYGNIEEVTADELRMISSTFLNLPFQGIRCQLADIQSRNKHWSEEAITRFQMCVAGIKLQARVVEVTENGIGVELTDLSTCYPRIISDVLIDEHLVLKSASPHKDLPNDRLVNKHELQVHVQGLQATSSAEQWKTIELPVDKTIQANVLEIISPNLFYALPKGMPENQEKLCMLTAELLEYCNAPKSRPPYRPRIGDACCAKYTSDDFWYRAVVLGTSDTDVEVLYADYGNIETLPLCRVQPITSSHLALPFQIIRCSLEGLMELNGSSSQLIIMLLKNFMLNQNVMLSVKGITKNVHTVSVEKCSENGTVDVADKLVTFGLAKNITPQRQSALNTEKMYRRIAAAQSYRNKLKNMNIFFSSS

SEQ ID NO: 791775 - protein, 43 aa, Homo sapiens
PDSLRFPKSPLLLPWLLNTVTCLKAFLGVGWKNLDKVYHPRSS

SEQ ID NO: 791776 - protein, 152 aa, Homo sapiens
RVDNVSWGTIRLLQIPFFQFDLLLFDMLGLPLCNKSQRRPRTTGTFKQENKLAFRESKHLQKRKPHRSTVGLLLLPQVLLKLSPSVELPLSEQVEVIKAVKPGKAPPIFPCTEEGKIKVQKYGTRECGLCMASLDMNSVIIWVKQLTVQQES

SEQ ID NO: 791777 - protein, 104 aa, Homo sapiens
GPRTFRFQAIHPIAAPTWTNFQAEGEQQPQLPARGFPRVTAGLGSITRPLNGRTDDSFRRAASRTFQARICLPAVPLREAGGAGPGHICGARRPVWRFSYSVEW

SEQ ID NO: 791778 - protein, 141 aa, Homo sapiens
LSVHVSSERSLPEEEWRAVIGDIYQCKLCNYNTQLKANFQLHCKTDKHMQKYQLVAHIKEGGKSNEWRLKCIAIGNPVHLKCNACDYYTNSVDKLRLHTTNHRHEAALKLYKVSSDIHFRWHRVEKGINSFRAWSTSLQLK

SEQ ID NO: 791779 - protein, 102 aa, Homo sapiens
SIRVPFRHLATMHQHSRVQQGMRAPFQHPATMHQHSSVQQSVRAPFQHPATMHQHSSVQKSIRQHPGVQWHMCTWTFQCGELSGTEQGQRDKKMKVTQYSPL

SEQ ID NO: 791780 - protein, 234 aa, Homo sapiens
GPRPVLPRAAGVVGAGGRICAWPRVSVGVTHRPRPASASTRSGLKEARTRARAAWNAPRAAFHVFLGFSSFPPSSSNWICEHDELCFPELVLCLLFWPHLTEQNIKATEHQEGCCLGKLCEKSPGGLGAGQALLSLSWRLGRASRRLPGRRNHGQGLPHQDAFPTTEGFKPLVGESWINQDLSLLGGAEDRGHCEVSFSWVDSPGASEAGFRPCPLAAPLEALSIYPSGTLSLV

SEQ ID NO: 791781 - protein, 72 aa, Homo sapiens
MRFMDVAIEFSEERVAMTWTLDSTNYLIGTVNVKRTYHAKPGHAMECTAELNSYAQTTLTLTGRTATRAPDT

SEQ ID NO: 791782 - protein, 538 aa, Homo sapiens
MAAGGSAPEPRVLVCLGALLAGWVAVGLEAVVIWRSYENVTLHCGNISGLRGQVTWYRNNSEPVFLLSSNSSLRPAEPRFSLVDATSLHIESLSLGDEGIYTCQEILNVTQWFQVWLQVASGPYQIEVHIVATGTLPNGTLYAARGSQVDFSCNSSSRPPPVVEWWFQALNSSSESFGHNLTVNFFSLLLISPNLQGNYTCLALNQLSKRHRKVTTELLVYYPPPSAPQCWAQMASGSFMLQLTCRWDGGYPDPDFLWIEEPGGVIVGKSKLGVEMLSESQLSDGKKFKCVTSHIVGPESGASCMVQIRGPSLLSEPMKTCFTGGNVTLTCQVSGAYPPAKILWLRNLTQPEVIIQPSSRHLITQDGQNSTLTIHNCSQDLDEGYYICRADSPVGVREMEIWLSVKEPLNIGGIVGTIVSLLLLGLAIISGLLLYYSPVFCWKVGNTSRGQNMDDVMVLVDSEEEEEEEEEEDAAVGEQEGAREREELPKEIPKQDHIHRVTALVNGNIEQMGNGFQDLQDDSSEEQSDIVQEEDRPV

SEQ ID NO: 791783 - protein, 114 aa, Homo sapiens
KPSSRAKVEEVGLPPGWEAGGIPLLLFSAGRSRLAGAGGGVRPPSPARALGSGDPSLQPSSAAGPGHSAQPSILPGGRGSGATLPFRGPGRSPRYPGPRGPGAHTSSPARACVS

SEQ ID NO: 791784 - protein, 517 aa, Homo sapiens
MIDKRDWRLLSFGEVHENVTLHCGNISGLRGQVTWYRNNSEPVFLLSSNSSLRPAEPRFSLVDATSLHIESLSLGDEGIYTCQEILNVTQWFQVWLQVASGPYQIEVHIVATGTLPNGTLYAARGSQVDFSCNSSSRPPPVVEWWFQALNSSSESFGHNLTVNFFSLLLISPNLQGNYTCLALNQLSKRHRKVTTELLVYYPPPSAPQCWAQMASGSFMLQLTCRWDGGYPDPDFLWIEEPGGVIVGKSKLGVEMLSESQLSDGKKFKCVTSHIVGPESGASCMVQIRGPSLLSEPMKTCFTGGNVTLTCQVSGAYPPAKILWLRNLTQPEVIIQPSSRHLITQDGQNSTLTIHNCSQDLDEGYYICRADSPVGVREMEIWLSVKEPLNIGGIVGTIVSLLLLGLAIISGLLLYYSPVFCWKVGNTSRGQNMDDVMVLVDSEEEEEEEEEEDAAVGEQEGAREREELPKEIPKQDHIHRVTALVNGNIEQMGNGFQDLQDDSSEEQSDIVQEEDRPV

SEQ ID NO: 791785 - protein, 194 aa, Homo sapiens
  misc_feature (172)..(172): Xaa can be any naturally occurring amino acid
  misc_feature (184)..(184): Xaa can be any naturally occurring amino acid
RRRSALALAMERPAPGEVVMSQAIQPAHATARGELSAGQLLKWIDTTACLAAEKHAGVSCVTASVDDIQFEETARVGQVITIKAKVTRAFSTSMEISIKVMVQDMLTGIEKLVSVAFSTFVAKPVGKGFILREGKFDYNMKITFNNLMKESSKFDDLIFDEEEGAGFTRGTXVQSIAGPPTPCXPSRYIWWPDL

SEQ ID NO: 791786 - protein, 124 aa, Homo sapiens
PKDAIRALKKRLNGNRNYREVMLALTVLETCVKNCGHRFHILVANRDFIDSVLVKIISPKNNPPTIVQDKVLALIQAWADAFRSSPDLTGVVHIYEQPSAPESELLLSVHTSRLSRRGGRIFIS

SEQ ID NO: 791787 - protein, 136 aa, Homo sapiens
MKEDRFMLLFPLMCSHSVNLQIPCGAPREAGRKEPVPPRSPRRRGPRPRKRLVRPQLLSAAVVGGSWGASLDEGRCPAAAEALPAQPPSGAGTFGPEVHQPGRTPTFPQSACYRQRLLRRPKLTLQPPPGQERVAA

SEQ ID NO: 791788 - protein, 191 aa, Homo sapiens [sequence omitted]

SEQ ID NO: 791789 - protein, 136 aa, Homo sapiens; identical to SEQ ID NO: 791787

SEQ ID NO: 791790 - protein, 117 aa, Homo sapiens
MIFPCGAPREAGRKEPVPPRSPRRRGPRPRKRLVRPQLLSAAVVGGSWGASLDEGRCPAAAEALPAQPPSGAGTFGPEVHQPGRTPTFPQSACYRQRLLRRPKLTLQPPPGQERVAA

SEQ ID NO: 791791 - protein, 110 aa, Homo sapiens
MTHTEKTKHHHYRHCVNSLPATHTAQSRLCPCLCRPGLCLAAGDFISGCRSVCPCLLAGSSPAPGSQGAPWWGLCGPGPSLLPQGCEATGRPPRSLMLSVHCLYKYKESL

SEQ ID NO: 791792 - protein, 75 aa, Homo sapiens
ATGVTSQVLSSVPSRDVATVCQGSCCKGFQSLAPSPDAPALLRQRLCKSSPFSFPRLGLHPYKVSLQTPPSKPGF

SEQ ID NO: 791793 - protein, 111 aa, Homo sapiens
LIYKSSLYFKTIDAFIIIYCKHFFHFVICLFGLVMVFGIIHSCLVFIKSILSASSFITALVMFRKPCGEELLPPHLHPPHNAVKYLIQTCEIKLCTRGSPALLFTLIIASK

SEQ ID NO: 791794 - protein, 106 aa, Homo sapiens [sequence omitted]

SEQ ID NO: 791795 - protein, 108 aa, Homo sapiens
MPRMKYPCCSDSTDPSEVGHSLTNGILQRGSGSETDLVNGARSDRLLTRCGFSVDVPRTSSAEEEALLLTIFGRMTFCCCRSTRSPLLLCNLSLLFPFHLKLGCLCHR

SEQ ID NO: 791796 - protein, 77 aa, Homo sapiens
SSPPPHRADAGHFINPETVPKPCCAPTQLNAISVLYFDDSSNVILKKYRNMVVRACGCHSSSENSETYMILHRPKQV

SEQ ID NO: 791797 - protein, 168 aa, Homo sapiens
NPDDPDTVDVIMHMLDRDHDRRLDFTEFLLMIFKLTMACNKVLSKEYCKASGSKKHRRGHRHQEEESETEEDEEDTPGHKSGYRHSSWSEGEEHGYSSGHSRGTVKCRHGSNSRRLGRQGNLSSSGNQEGSQKRYHRSSCGHSWSGGKDRHGSSSVELRERINKSHIS

SEQ ID NO: 791798 - protein, 153 aa, Homo sapiens
AQSLPGVVVLPPAPRFFGGWPFQLQFCPGHNADDMVDTVLMNFLRGGWPGAGAWALRARGAPFRAAARCSSPRRRWCRTGTSAASTTSQKRGAPGTCSSAWRRRGRRRCWTSCTRPNAWRWPRPRGPRAPAPAPAVGRWPAARSARPAPSWTA

SEQ ID NO: 791799 - protein, 132 aa, Homo sapiens
ADSRVSLALVWPLVVGRVGRTGLPPLSLGLMTRARQLDTLDSEAPRFPSNSLTCLLSTSWPRFTFQLIRQDRAPFLQDSANLETPRAPGLGFLLLRHDPSFLIGGNRHHCEDFTSWLLACWEPLTRNQHPQQ

SEQ ID NO: 791800 - protein, 126 aa, Homo sapiens
MASVRANTYCRLLSLSVDNFNEVLEEYPMMRRAFETVAIDRLDRIGKKNSILLHKVQHDLNSGVFNNQQNAIIQEIVKYDGEMVQQAELGQRLGLFPPPPPPQVTSAIATLQQAVVMSFCPQVARP

SEQ ID NO: 791801 - protein, 261 aa, Homo sapiens
MAGQCLPTQGWVPSFPQIPPLGKHYSQRWAQEDLLEEQKDGARAAAVADKKKGLMGPLTELDTKDVDALLKKSEAQHEQPEDGCPFGALTQRLLQALVEENIISPMEDSPIPDMSGKESGADGASTSPRNQNKPFSVPHTKSLESRIKEELIAQGLLESEDRPAEDSEDEVLAELRKRQAELKALSAHNRTKKHDLLRLAKEEVSRQELRQRVRMADNEVMDAFRKIMAARQKKRTPTKKEKDQAWKTLKERESILKLLDG

SEQ ID NO: 791802 - protein, 255 aa, Homo sapiens
MRGEDEAEHYKIPPLGKHYSQRWAQEDLLEEQKDGARAAAVADKKKGLMGPLTELDTKDVDALLKKSEAQHEQPEDGCPFGALTQRLLQALVEENIISPMEDSPIPDMSGKESGADGASTSPRNQNKPFSVPHTKSLESRIKEELIAQGLLESEDRPAEDSEDEVLAELRKRQAELKALSAHNRTKKHDLLRLAKEEVSRQELRQRVRMADNEVMDAFRKIMAARQKKRTPTKKEKDQAWKTLKERESILKLLDG

SEQ ID NO: 791803 - protein, 87 aa, Homo sapiens
KEKIDRCSGKRLGDGPKFLKSGDAAIVDMVPGKPMCVESFSDYPPLGRFAVRDMRQTVAVGVIKAVDKKAAGAGKVTKSAQKAQKAK

SEQ ID NO: 791804 - protein, 97 aa, Homo sapiens
MSVVVGPASSARDLPSPRGYTMTPQTMKVDEEVMAFRGAQCDGIRVLPSSMEDTPALKRAKSSKTQPTGDSWAGRLILSVDGSGFCERVKSLVVKQF

SEQ ID NO: 791805 - protein, 148 aa, Homo sapiens
THSFGEGGQDFSPEPLATRGVYISSGLIDDHRRPMALTPRHPRSGITAPRPRPQPPGRVGIPEPTALSPSPGPPPPPCSTPGRCQVPSLERRRKEGREPASVGRGCGGHGISPSSDIFFHLNFCLSHPPDLFVFVCSISNQLYIFHDP

SEQ ID NO: 791806 - protein, 110 aa, Homo sapiens
MARSWFTAASDLLGSSHPPISTSRIARTTGTRHQTREFIVQWKRKTQKSHNHSPTQNPCIGHCWSTGRVYFNLWVQDGVAKVLQKEVSLLGYGFFEKILLMGILDGHIMK

SEQ ID NO: 791807 - protein, 155 aa, Homo sapiens
EKCLKFGSRSHGPRGVLGRGHRGEGRGGGRCPEPRGGRDPEDEERESLRRRDRRDSETERQPRRQRRGDEQRRGDAERERDSEIDAQREQRRGELRTELRAGAQHSERGRARAGDSLAGWGRGAALPPAPSPLPPLPPAPPPPRSPPPPSTPLRA

SEQ ID NO: 791808 - protein, 138 aa, Homo sapiens
AEWHLSGPCRATLGAANRGRALGVRAAWRGAPLCQRVMMPSRTNLATGIPSSKVKYSRLSSTDDGYIDLQFKLIGAFLIIIGSLLLSGYISKGGADRAVPVLIIGILVFLPGFYHLRIAYYASGYRGYSYDDIPDFDD

SEQ ID NO: 791809 - protein, 162 aa, Homo sapiens
TALFAEIKLRVIRVGHSSPLAQLASFQKPVLFVLRLNSRRFLFLSLARSEDGEENNLCQRVMMPSRTNLATGIPSSKVKYSRLSSTDDGYIDLQFKLIGAFLIIIGSLLLSGYISKGGADRAVPVLIIGILVFLPGFYHLRIAYYASGYRGYSYDDIPDFDD

SEQ ID NO: 791810 - protein, 49 aa, Homo sapiens
MLQRTLTARVGLGLGLLPLGLALAAAQDELHGEALCPRSHANPVTAPTV

SEQ ID NO: 791811 - protein, 106 aa, Homo sapiens
GPLYMCSLRLQGHLLSAFSIASPSHILSPFIPVPLPKPLHFPEQRISPQTPLMSCGWHSFQWGCASSDLPRPGVTTVDKRDGTPSAMVEAIMPQRRVAEASQAGMH

SEQ ID NO: 791812 - protein, 120 aa, Homo sapiens
PSWLLVIFMITPHLHASPICLPALRMWPPGTRVYPEQIVVWAVASFRGKFRILAEPGSASCLLPLHVGCVEAPSPRGETLDVSLYKRAFTVSGLVFFFFFCFSKLISDIESCQSDCSLCG

SEQ ID NO: 791813 - protein, 178 aa, Homo sapiens
LIAPSWVLSAAHCFMTNGTLEPAAEWSVLLGVHSQDGPLDGAHTRAVAAIVVPANYSQVELGADLALLRLASPASLGPAVWPVCLPRASHRFVHGTACWATGWGDVQEADPLPLPWVLQEVELRLLGEATCQCLYSQPGPFNLTLQILPGMLCAGYPEGRRDTCQGDSGGPLVCEEGG

SEQ ID NO: 791814 - protein, 131 aa, Homo sapiens
MRSSALRKDTSEFLHGAHSALGLCIRKRKCPRALTPGLLGARNRPRGRGITHCLTVVCVHTAQAEREMTQSLDRGDSTQAGTAANTEMIKGSLPLFPLSQERGKRNLRGGVRFFCFVLFFKEQFHKLSINI

SEQ ID NO: 791815 - protein, 124 aa, Homo sapiens
PHNFMYSKTVKRLSKLREYQQYHPSLTCVMEGKDIEDWSCCPTPWTSFQSSCYFISTGMQSWTKSQKNCSVMGADLVVINTREEQDFIIQNLKRNSSYFLGLSDPGGRRHWQWVDQTPYNENVT

SEQ ID NO: 791816 - protein, 124 aa, Homo sapiens; identical to SEQ ID NO: 791815

SEQ ID NO: 791817 - protein, 67 aa, Homo sapiens
GYPLQQLQLQQPQLQQLQLQQLQLQQLQLQQLQLQQLQLQQPQLQQLQLQQLQLQQLKRDKLMHNYS

SEQ ID NO: 791818 - protein, 113 aa, Homo sapiens
AWRAAVLGSLERARGQARRAGMAPGAGGPRATPRRLVGGAGVSRVGKRLPQVGRPMGEKTGLHRRLTEQVPPYVAGAPSEGRGRCAGGLYLGTWAHWHYLEDHVRGRYSGSCL

SEQ ID NO: 791819 - protein, 877 aa, Homo sapiens
QVPCAHLCLGMGRNRSWGTLGSGRTSTPGHQSGPLTRRRAVSQLYRRYLLFSISASDPSLRSGTQAPDIHLGEPARGTGCVRGKQTSIRVQDCGRREEARAASRELRREKAQEHPRESWAHPQPYPAPQPLALRPETQPCPACRSSPPGRLLLRPALPGHPFLLPIMAVYRLCVTTGPYLRAGTLDNISVTLVGTCGESPKQRLDRMGRDFAPGSVQKYKVRCTAELGELLLLRVHKERYAFFRKDSWYCSRICVTEPDGSVSHFPCYQWIEGYCTVELRPGTARTICQDSLPLLLDHRTRELRARQECYRWKIYAPGFPCMVDVNSFQEMESDKKFALTKTTTCVDQGDSSGNRYLPGFPMKIDIPSLMYMEPNVRYSATKTISLLFNAIPASLGMKLRGLLDRKGSWKKLDDMQNIFWCHKTFTTKYVTEHWCEDHFFGYQYLNGVNPVMLHCISSLPSKLPVTNDMVAPLLGQDTCLQTELERGNIFLADYWILAEAPTHCLNGRQQYVAAPLCLLWLSPQGALVPLAIQLSQTPGPDSPIFLPTDSEWDWLLAKTWVRNSEFLVHENNTHFLCTHLLCEAFAMATLRQLPLCHPIYKLLLPHTRYTLQVNTIARATLLNPEGLVDQVTSIGRQGLIYLMSTGLAHFTYTNFCLPDSLRARGVLAIPNYHYRDDGLKIWAAIESFVSEIVGYYYPSDASVQQDSELQAWTGEIFAQAFLGRESSGFPSRLCTPGEMVKFLTAIIFNCSAQHAAVNSGQHDFGAWMPNAPSSMRQPPPQTKGTTTLKTYLDTLPEVNISCNNLLLFWLVSQEPKDQRPLGTYPDEHFTEEAPRRSIAAFQSRLAQISRDIQERNQGLALPYTYLDPPLIENSVSI

SEQ ID NO: 791820 - protein, 781 aa, Homo sapiens
QVPCAHLCLGMGRNRSWGTLGSGRTSTPGHQSGPLTRRRAVSQLYRRYLLFSISASDPSLRSGTQAPDIHLGEPARGTGCVRGKQTSIRVQDCGRREEARAASRELRREKAQEHPRESWAHPQPYPAPQPLALRPETQPCPACRSSPPGRLLLRPALPGHPFLLPIMAVYRLCVTTGPYLRAGTLDNISVTLVGTCGESPKQRLDRMGRDFAPGSVQKYKVRCTAELGELLLLRVHKERYAFFRKDSWYCSRICVTEPDGSVSHFPCYQWIEGYCTVELRPGTARTICQDSLPLLLDHRTRELRARQECYRWKIYAPGFPCMVDVNSFQEMESDKKFALTKTTTCVDQGDSSGNRYLPGFPMKIDIPSLMYMEPNVRYSATKTISLLFNAIPASLGMKLRGLLDRKGSWKKLDDMQNIFWCHKTFTTKYVTEHWCEDHFFGYQYLNGVNPVMLHCISSLPSKLPVTNDMVAPLLGQDTCLQTELERGNIFLADYWILAEAPTHCLNGRQQYVAAPLCLLWLSPQGALVPLAIQLSQTPGPDSPIFLPTDSEWDWLLAKTWVRNSEFLVHENNTHFLCTHLLCEAFAMATLRQLPLCHPIYKLLLPHTRYTLQVNTIARATLLNPEGLVDQVTSIGRQGLIYLMSTGLAHFTYTNFCLPDSLRARGVLAIPNYHYRDDGLKIWAAIESFVSEIVGYYYPSDASVQQDSELQAWTGEIFAQAFLGRESSGFPSRLCTPGEMVKFLTAIIFNCSAQHAAVNSGQDGRGGIRDGEEGGDTPLLAN

SEQ ID NO: 791821 - protein, 76 aa, Homo sapiens
  misc_feature (17)..(17): Xaa can be any naturally occurring amino acid
SHTFNHTNTHPAPKTLXRPLGTYPDEHFTEEAPRRSIAAFQSRLAQISRDIQERNQGLALPYTYLDPPLIENSVSI

SEQ ID NO: 791822 - protein, 710 aa, Homo sapiens
MVVRERGNKFFLNAGVWKPMKNQLLAAAPPAAAAVPHRSSGHSLVSGSIMQANGAGGGGGGGGGGGGGGGGGGGQGQTPELACLSAQNGESSPSSSSSAGDLAHANGLLPSAPSAASNNSNSLNVNNGVPGGAAAASSATVAAASATTAASSSLATPELGSSLKKKKRLSQSDEDVIRLIGQHLNGLGLNQTVDLLMQESGCRLEHPSATKFRNHVMEGDWDKAENDLNELKPLVHSPHAIVVRGALEISQTLLGIIVRMKFLLLQQKYLEYLEDGKVLEALQVLRCELTPLKYNTERIHVLSGYLMCSHAEDLRAKAEWEGKGTASRSKLLDKLQTYLPPSVMLPPRRLQTLLRQAVELQRDRCLYHNTKLDNNLDSVSLLIDHVCSRRQFPCYTQQILTEHCNEVWFCKFSNDGTKLATGSKDTTVIIWQVDPDTHLLKLLKTLEGHAYGVSYIAWSPDDNYLVACGPDDCSELWLWNVQTGELRTKMSQSHEDSLTSVAWNPDGKRFVTGGQRGQFYQCDLDGNLLDSWEGVRVQCLWCLSDGKTVLASDTHQRIRGYNFEDLTDRNIVQEDHPIMSFTISKNGRLALLNVATQGVHLWDLQDRVLVRKYQGVTQGFYTIHSCFGGHNEDFIASGSEDHKVYIWHKRSELPIAELTGHTRTVNCVSWNPQIPSMMASASDDGTVRIWGPAPFIDHQNIEEECSSMDS

SEQ ID NO: 791823 - protein, 697 aa, Homo sapiens
MKNQLLAAAPPAAAAVPHRSSGHSLVSGSIMQANGAGGGGGGGGGGGGGGGGGGGQGQTPELACLSAQNGESSPSSSSSAGDLAHANGLLPSAPSAASNNSNSLNVNNGVPGGAAAASSATVAAASATTAASSSLATPELGSSLKKKKRLSQSDEDVIRLIGQHLNGLGLNQTVDLLMQESGCRLEHPSATKFRNHVMEGDWDKAENDLNELKPLVHSPHAIVAQTFSETSINFFPLTAAFCACQRMKFLLLQQKYLEYLEDGKVLEALQVLRCELTPLKYNTERIHVLSGYLMCSHAEDLRAKAEWEGKGTASRSKLLDKLQTYLPPSVMLPPRRLQTLLRQAVELQRDRCLYHNTKLDNNLDSVSLLIDHVCSRRQFPCYTQQILTEHCNEVWFCKFSNDGTKLATGSKDTTVIIWQVDPDTHLLKLLKTLEGHAYGVSYIAWSPDDNYLVACGPDDCSELWLWNVQTGELRTKMSQSHEDSLTSVAWNPDGKRFVTGGQRGQFYQCDLDGNLLDSWEGVRVQCLWCLSDGKTVLASDTHQRIRGYNFEDLTDRNIVQEDHPIMSFTISKNGRLALLNVATQGVHLWDLQDRVLVRKYQGVTQGFYTIHSCFGGHNEDFIASGSEDHKVYIWHKRSELPIAELTGHTRTVNCVSWNPQIPSMMASASDDGTVRIWGPAPFIDHQNIEEECSSMDS

SEQ ID NO: 791824 - protein, 514 aa, Homo sapiens
MQESGCRLEHPSATKFRNHVMEGDWDKAENDLNELKPLVHSPHAIVVRGALEISQTLLGIIVRMKFLLLQQKYLEYLEDGKVLEALQVLRCELTPLKYNTERIHVLSGYLMCSHAEDLRAKAEWEGKGTASRSKLLDKLQTYLPPSVMLPPRRLQTLLRQAVELQRDRCLYHNTKLDNNLDSVSLLIDHVCSRRQFPCYTQQILTEHCNEVWFCKFSNDGTKLATGSKDTTVIIWQVDPDTHLLKLLKTLEGHAYGVSYIAWSPDDNYLVACGPDDCSELWLWNVQTGELRTKMSQSHEDSLTSVAWNPDGKRFVTGGQRGQFYQCDLDGNLLDSWEGVRVQCLWCLSDGKTVLASDTHQRIRGYNFEDLTDRNIVQEDHPIMSFTISKNGRLALLNVATQGVHLWDLQDRVLVRKYQGVTQGFYTIHSCFGGHNEDFIASGSEDHKVYIWHKRSELPIAELTGHTRTVNCVSWNPQIPSMMASASDDGTVRIWGPAPFIDHQNIEEECSSMDS

SEQ ID NO: 791825 - protein, 371 aa, Homo sapiens
GRPLARHARRLQTLLRQAVELQRDRCLYHNTKLDNNLDSVSLLIDHVCSRRQFPCYTQQILTEHCNEVWFCKFSNDGTKLATGSKDTTVIIWQVDPDTHLLKLLKTLEGHAYGVSYIAWSPDDNYLVACGPDDCSELWLWNVQTGELRTKMSQSHEDSLTSVAWNPDGKRFVTGGQRGQFYQCDLDGNLLDSWEGVRVQCLWCLSDGKTVLASDTHQRIRGYNFEDLTDRNIVQEDHPIMSFTISKNGRLALLNVATQGVHLWDLQDRVLVRKYQGVTQGFYTIHSCFGGHNEDFIASGSEDHKVYIWHKRSELPIAELTGHTRTVNCVSWNPQIPSMMASASDDGTVRIWGPAPFIDHQNIEEECSSMDS

SEQ ID NO: 791826 - protein, 694 aa, Homo sapiens
MVVRERGNKFFLNAGVWKPMKNQLLAAAPPAAAAVPHRSSGHSLVSGSIMQANGAGGGGGGGGGGGGGGGGGGGQGQTPELACLSAQNGESSPSSSSSAGDLAHANGLLPSAPSAASNNSNSLNVNNGVPGGAAAASSATVAAASATTAASSSLATPELGSSLKKKKRLSQSDEDVIRLIGQHLNGLGLNQTVDLLMQESGCRLEHPSATKFRNHVMEGDWDKAENDLNELKPLVHSPHAIVRMKFLLLQQKYLEYLEDGKVLEALQVLRCELTPLKYNTERIHVLSGYLMCSHAEDLRAKAEWEGKGTASRSKLLDKLQTYLPPSVMLPPRRLQTLLRQAVELQRDRCLYHNTKLDNNLDSVSLLIDHVCSRRQFPCYTQQILTEHCNEVWFCKFSNDGTKLATGSKDTTVIIWQVDPDTHLLKLLKTLEGHAYGVSYIAWSPDDNYLVACGPDDCSELWLWNVQTGELRTKMSQSHEDSLTSVAWNPDGKRFVTGGQRGQFYQCDLDGNLLDSWEGVRVQCLWCLSDGKTVLASDTHQRIRGYNFEDLTDRNIVQEDHPIMSFTISKNGRLALLNVATQGVHLWDLQDRVLVRKYQGVTQGFYTIHSCFGGHNEDFIASGSEDHKVYIWHKRSELPIAELTGHTRTVNCVSWNPQIPSMMASASDDGTVRIWGPAPFIDHQNIEEECSSMDS

SEQ ID NO: 791827 - protein, 694 aa, Homo sapiens; identical to SEQ ID NO: 791826

SEQ ID NO: 791828 - protein, 694 aa, Homo sapiens; identical to SEQ ID NO: 791826

SEQ ID NO: 791829 - protein, 694 aa, Homo sapiens; identical to SEQ ID NO: 791826

SEQ ID NO: 791830 - protein, 694 aa, Homo sapiens; identical to SEQ ID NO: 791826

SEQ ID NO: 791831 - protein, 658 aa, Homo sapiens
MVVRERGNKFFLNAGVWKPMKNQLLAAAPPAAAAVPHRSSGHSLVSGSIMQANGAGGGGGGGGGGGGGGGGGGGQGQTPELACLSAQNGESSPSSSSSAGDLAHANGLLPSAPSAASNNSNSLNVNNGVPGGAAAASSATVAAASATTAASSSLATPELGSSLKKKKRLSQSDEDVIRLIGQHLNGLGLNQTVDLLMQESGCRLEHPSATKFRNHVMEGDWDKAENDLNELKPLVHSPHAIVRMKFLLLQQKYLEYLEDGKVLEALQVLRCELTPLKYNTERIHVLSGYLMCSHAEDLRAKAEWEGKGTASRSKLLDKLQTYLPPSVMLPPRRLQTLLRQAVELQRDRCLYHNTKLDNNLDSVSLLIDHVCSRRQFPCYTQQILTEHCNEVWFCKFSNDGTKLATGSKDTTVIIWQVDPDTHLLKLLKTLEGHAYGVSYIAWSPDDNYLVACGPDDCSELWLWNVQTGELRTKMSQSHEDSLTSVAWNPDGKRFVTGGQRGQFYQCDLDGNLLDSWEGVRVQCLWCLSDGKTVLASDTHQRIRGYNFEDLTDRNIVQEDHPIMSFTISKNGRLALLNVATQGVHLWDLQDRVLVRKYQGVTQGFYTIHSCFGGHNEDFIASGSEGKLCPYQFTYVDIKVCKSQFMKAVMSPRKFRVVS

SEQ ID NO: 791832 - protein, 253 aa, Homo sapiens
MKNQLLAAAPPAAAAVPHRSSGHSLVSGSIMQANGAGGGGGGGGGGGGGGGGGGGQGQTPELACLSAQNGESSPSSSSSAGDLAHANGLLPSAPSAASNNSNSLNVNNGVPGGAAAASSATVAAASATTAASSSLATPELGSSLKKKKRLSQSDEDVIRLIGQHLNGLGLNQTVDLLMQESGCRLEHPSATKFRNHVMEGDWDKAENDLNELKPLVHSPHAIVVRGALEISQTLLGIIVVNTLLFLVSHLCLF

SEQ ID NO: 791833 - protein, 354 aa, Homo sapiens
MKNQLLAAAPPAAAAVPHRSSGHSLVSGSIMQANGAGGGGGGGGGGGGGGGGGGGQGQTPELACLSAQNGESSPSSSSSAGDLAHANGLLPSAPSAASNNSNSLNVNNGVPGGAAAASSATVAAASATTAASSSLATPELGSSLKKKKRLSQSDEDVIRLIGQHLNGLGLNQTVDLLMQESGCRLEHPSATKFRNHVMEGDWDKAENDLNELKPLVHSPHAIVRMKFLLLQQKYLEYLEDGKVLEALQVLRCELTPLKYNTERIHVLSGYLMCSHAEDLRAKAEWEGKGTASRSKLLDKLQTYLPPSVMLPPRRLQTLLRQAVELQRDRCLYHNTKLDNNLDSVSLLIDHVCSR

SEQ ID NO: 791834 - protein, 334 aa, Homo sapiens
MKNQLLAAAPPAAAAVPHRSSGHSLVSGSIMQANGAGGGGGGGGGGGGGGGGGGGQGQTPELACLSAQNGESSPSSSSSAGDLAHANGLLPSAPSAASNNSNSLNVNNGVPGGAAAASSATVAAASATTAASSSLATPELGSSLKKKKRLSQSDEDVIRLIGQHLNGLGLNQTVDLLMQESGCRLEHPSATKFRNHVMEGDWDKAENDLNELKPLVHSPHAIVVRGALEISQTLLGIIVRMKFLLLQQKYLEYLEDGKVLEALQVLRCELTPLKYNTERIHVLSGYLMCSHAEDLRAKAEWEGKGTASRSKLLDKLQTYLPPSVMLPPRAESWA

SEQ ID NO: 791835 - protein, 262 aa, Homo sapiens
MKNQLLAAAPPAAAAVPHRSSGHSLVSGSIMQANGAGGGGGGGGGGGGGGGGGGGQGQTPELACLSAQNGESSPSSSSSAGDLAHANGLLPSAPSAASNNSNSLNVNNGVPGGAAAASSATVAAASATTAASSSLATPELGSSLKKKKRLSQSDEDVIRLIGQHLNGLGLNQTVDLLMQESGCRLEHPSATKFRNHVMEGDWDKAENDLNELKPLVHSPHAIVVRGALEISQTLLGIIVAQTFSETSINFFPLTAAFCHVRG

SEQ ID NO: 791836 - protein, 90 aa, Homo sapiens
AGLSPPSSSSSSSSSSSSSVVVVVGLPPAAAPPAAAAVPHRSSGHSLVSGSIMQANGAGGGGGGGGGGGGGGGGGGGQGQTPELACLSAQ

SEQ ID NO: 791837 - protein, 694 aa, Homo sapiens; identical to SEQ ID NO: 791826

SEQ ID NO: 791838 - protein, 732 aa, Homo sapiens
MVVRERGNKFFLNAGVWKPMKNQLLAAAPPAAAAVPHRSSGHSLVSGSIMQANGAGGGGGGGGGGGGGGGGGGGQGQTPELACLSAQNGESSPSSSSSAGDLAHANGLLPSAPSAASNNSNSLNVNNGVPGGAAAASSATVAAASATTAASSSLATPELGSSLKKKKRLSQSDEDVIRLIGQHLNGLGLNQTVDLLMQESGCRLEHPSATKFRNHVMEGDWDKAENDLNELKPLVHSPHAIVVRGALEISQTLLGIIVAQTFSETSINFFPLTAAFCHCQRMKFLLLQQKYLEYLEDGKVLEALQVLRCELTPLKYNTERIHVLSGYLMCSHAEDLRAKAEWEGKGTASRSKLLDKLQTYLPPSVMLPPRRLQTLLRQAVELQRDRCLYHNTKLDNNLDSVSLLIDHVCSRRQFPCYTQQILTEHCNEVWFCKFSNDGTKLATGSKDTTVIIWQVDPDTHLLKLLKTLEGHAYGVSYIAWSPDDNYLVACGPDDCSELWLWNVQTGELRTKMSQSHEDSLTSVAWNPDGKRFVTGGQRGQFYQCDLDGNLLDSWEGVRVQCLWCLSDGKTVLASDTHQRIRGYNFEDLTDRNIVQEDHPIMSFTISKNGRLALLNVATQGVHLWDLQDRVLVRKYQGVTQGFYTIHSCFGGHNEDFIASGSEDHKVYIWHKRSELPIAELTGHTRTVNCVSWNPQIPSMMASASDDGTVRIWGPAPFIDHQNIEEECSSMDS

SEQ ID NO: 791839 - protein, 514 aa, Homo sapiens; identical to SEQ ID NO: 791824

SEQ ID NO: 791840 - protein, 451 aa, Homo sapiens
MKFLLLQQKYLEYLEDGKVLEALQVLRCELTPLKYNTERIHVLSGYLMCSHAEDLRAKAEWEGKGTASRSKLLDKLQTYLPPSVMLPPRRLQTLLRQAVELQRDRCLYHNTKLDNNLDSVSLLIDHVCSRRQFPCYTQQILTEHCNEVWFCKFSNDGTKLATGSKDTTVIIWQVDPDTHLLKLLKTLEGHAYGVSYIAWSPDDNYLVACGPDDCSELWLWNVQTGELRTKMSQSHEDSLTSVAWNPDGKRFVTGGQRGQFYQCDLDGNLLDSWEGVRVQCLWCLSDGKTVLASDTHQRIRGYNFEDLTDRNIVQEDHPIMSFTISKNGRLALLNVATQGVHLWDLQDRVLVRKYQGVTQGFYTIHSCFGGHNEDFIASGSEDHKVYIWHKRSELPIAELTGHTRTVNCVSWNPQIPSMMASASDDGTVRIWGPAPFIDHQNIEEECSSMDS

SEQ ID NO: 791841 - protein, 508 aa, Homo sapiens
MVVRERGNKFFLNAGVWKPMKNQLLAAAPPAAAAVPHRSSGHSLVSGSIMQANGAGGGGGGGGGGGGGGGGGGGQGQTPELACLSAQNGESSPSSSSSAGDLAHANGLLPSAPSAASNNSNSLNVNNGVPGGAAAASSATVAAASATTAASSSLATPELGSSLKKKKRLSQSDEDVIRLIGQHLNGLGLNQTVDLLMQESGCRLEHPSATKFRNHVMEGDWDKAENDLNELKPLVHSPHAIVRMKFLLLQQKYLEYLEDGKVLEALQVLRCELTPLKYNTERIHVLSGYLMCSHAEDLRAKAEWEGKGTASRSKLLDKLQTYLPPSVMLPPRRLQTLLRQAVELQRDRCLYHNTKLDNNLDSVSLLIDHVCSRRQFPCYTQQILTEHCNEVWFCKFSNDGTKLATGSKDTTVIIWQVDPDTHLLKLLKTLEGHAYGVSYIAWSPDDNYLVACGPDDCSELWLWNVQTGELTAPRTEPVSCRHARQLWPRNPHRQPLQTENTRCTVPTH

SEQ ID NO: 791842 - protein, 333 aa, Homo sapiens
MVVRERGNKFFLNAGVWKPMKNQLLAAAPPAAAAVPHRSSGHSLVSGSIMQANGAGGGGGGGGGGGGGGGGGGGQGQTPELACLSAQNGESSPSSSSSAGDLAHANGLLPSAPSAASNNSNSLNVNNGVPGGAAAASSATVAAASATTAASSSLATPELGSSLKKKKRLSQSDEDVIRLIGQHLNGLGLNQTVDLLMQESGCRLEHPSATKFRNHVMEGDWDKAENDLNELKPLVHSPHAIVRMKFLLLQQKYLEYLEDGKVLEALQVLRCELTPLKYNTERIHVLSGYLMCSHAEDLRAKAEWEGKGTASRSKLLDKLQSKSLNFLCCCVFS

SEQ ID NO: 791843 - protein, 82 aa, Homo sapiens
QLSWLQSGIGGQKASTAFSGPGTYQPNSMVTLAGPAGSSGDGKSKALGASPAKRGKGQARAGAQAGNQLSLHFLCGWRQTRR

SEQ ID NO: 791844 - protein, 100 aa, Homo sapiens
LGKRACVCTGNRPFWRWSGREGGVRLDLSACGETSGVAVSELPASETAALVPEGHGPGLRACALSLPDAPGASGGRHHLILVPVPFQLSLKWLYSSPSLG

SEQ ID NO: 791845 - protein, 100 aa, Homo sapiens; identical to SEQ ID NO: 791844

SEQ ID NO: 791846 - protein, 107 aa, Homo sapiens
MGRVSGLVPSRFLTLLAHLVVVITLFWSRDSNIQACLPLTFTPEEYDKQDIQLVAALSVTLGLFAVELAGFLSGVSMFNSTQSLICILSACPPFPHDPLLSGLPSAT

SEQ ID NO: 791847 - protein, 146 aa, Homo sapiens
MGRVSGLVPSRFLTLLAHLVVVITLFWSRDSNIQACLPLTFTPEEYDKQDIHPLPLCRLVAALSVTLGLFAVELAGFLSGVSMFNSTQSLISIGAHCSASVALSFFIFERWECTTYWYIFVFCSALPAVTEMALFVTVFGLKKKPF

SEQ ID NO: 791848 - protein, 140 aa, Homo sapiens
MGRVSGLVPSRFLTLLAHLVVVITLFWSRDSNIQACLPLTFTPEEYDKQDIQLVAALSVTLGLFAVELAGFLSGVSMFNSTQSLISIGAHCSASVALSFFIFERWECTTYWYIFVFCSALPAVTEMALFVTVFGLKKKPF

SEQ ID NO: 791849 - protein, 107 aa, Homo sapiens
MGRVSGLVPSRFLTLLAHLVVVITLFWSRDSNIQACLPLTFTPEEYDKQDIQLVAALSVTLGLFAVELAGFLSGVSMFNSTQSLISGTLGKEKPGLFLEIKACYKIK

SEQ ID NO: 791850 - protein, 100 aa, Homo sapiens
LGKRACVCTGNRPFWRWSGREGGVRLDLSACGETSGVAVSELPASETAALVPEGHGPGLRACALSLPDAPGASGGRHHLILVPGQQHTGLPASHVHPRGV

SEQ ID NO: 791851 - protein, 146 aa, Homo sapiens; identical to SEQ ID NO: 791847

SEQ ID NO: 791852 - protein, 182 aa, Homo sapiens
LGKRACVCTGNRPFWRWSGREGGVRLDLSACGETSGVAVSELPASETAALVPEGHGPGLRACALSLPDAPGASGGRHHLILVPGKTHGCLNPSPFPSLSGPSPTLPPPSVLPSWVFLFPAAPRPALQPAPFSLLFLCPAPRTATYRPACLSRSPPRSMTSRTFSELLGRGGQNEEVVGVEGS

SEQ ID NO: 791853 - protein, 107 aa, Homo sapiens; identical to SEQ ID NO: 791846

SEQ ID NO: 791854 - protein, 75 aa, Homo sapiens
MQVMLMWKVTAGGHQGQSVAQTSMWTRVPCPLWIAQSCLFSLQLQYSEEDCAFEEEIRPDGYNVYRSEKHRLPVS

SEQ ID NO: 791855 - protein, 216 aa, Homo sapiens
MRSGCVVVHVWILAGLWLAVAGRPLAFSDAGPHVHYGWGDPIRLRHLYTSGPHGLSSCFLRIRADGVVDCARGQSAHSLLEIKAVALRTVAIKGVHSVRYLCMGADGKMQGLLQYSEEDCAFEEEIRPDGYNVYRSEKHRLPVSLSSAKQRQLYKNRGFLPLSHFLPMLPMVPEEPEDLRGHLESDMFSSPLETDSMDPFGLVTGLEAVRSPSFEK

SEQ ID NO: 791856 - protein, 2111 aa, Homo sapiens
QGGDVRKGCFIFETFSLDEIKEESDYISTKKTITEEVIQGDVKSYRMLFETQPLYAIQDREGSYHEVTTVKKEEVIHGDVRGTRWLFETKPLDSINKSETVYVIKSVTQEDIQKGDVSSVRYRFETQPLDQISEESHNIMPSIDHIQGGNVKTSRQFFESENLIRITIYETVSVNEIQKGNVKTSTWLFETHTMDELRGEGLEYENIKTVTQEDVQKGDVKQAVWHFENRTFDSIMEAHKGITKMTKEEIPPSDVKTTTWLFETTPLHEFNETRVEKIEIIGKSIKETLEDLYSQKVIQAPGIIIEADEIGDVRMAKYKLMNQASPEIQKEEIIRADLRNIMVNLLSKRDCTEREILISEEEKGNVNLTKTQLLNRSTEFHAEKEEIVKGDVQQAIKNLFSEERSVKKGILIQEDEKGDINMTIYCLLHENDGDTIEREEVIGGDVKRTIHNLLSSTSNNKISERAKIDASERGNVQFFTTCIEAGALDYLKQLHTESNETLTAKKQEGEKEIIGGDVEGTKLLLKKRQSLVERTVSETDIIPGDVHNTVKVFMTEPQSTFGKIPKEEIIKGDLTSTLNSLSQAVNQKTVTKTEEIIKGNMLATLKSLKESSHRWKESKQPDAIPGDIEKAIECLEKATNTKTEILKKELLKDDLETSLRSLKEAQRSFKEVHKEGVIKKDAKAVMAGSSGEQKTDIHQVAVQRNKNSLLQPKPGPFEPAAKWQGGADTLSQTMGKSCHGNLVEERTEVNLPKAPKGTVKIVIDREQNNDALEKSLRRLSNSHHKSNVLESGDKTGVWTDTTGEQHLRDEYMSRQLTSTVSVKNNLTTKESDRAVRELKKDDVFNSIQSAGKTVGKQQTYELRNDHQKMEGFHIKSPKKTKNIKILTDTQSSKPSPTQHPVSMPVGGTYDLSGDFQKQTLLKQETKYSNKDIKKKNINLQPMWQLLPVEQDTSNVTEMKVSEKSHNTFKATNKKRETDVHLKSQDFLMKTNTSTGLKMAMERSLNPINFNPENNVKESECPLPPPSPPPPPPSNASSEIEFPLPPPPPLMMFPEKKWVPLPSLSTEKIKADFESFPGLPLPPPPVDEKSERESSSMFLPPPPPPTPSQKPAHLLSSSAPEKHSGDFMQQYSQKEASNSQNSQAKIITGKTGVLPPPTLPKPKLPKHIKDNKNDFSPKVELATSLSDMECKITTSKDQKKVMVMTSSEHTETKQNVISKSLDERKQLSIDSANCLSHTVPGTSAPRKKQIAPLIKSHSFPESSGQQNPKPYMRKFKTPLMIAEEKYRQQKEEIEKQKQESSYYNIVKTQSQNQHITEVEKEMPLQKTNEEVSLSGIDSECTVVQPSPGSQSNARILGVCSDNQLSTTSPETVAAKRLHHVLAASEDKDKMKKEVLQSSRDIMQSKSACEIKQSHQECSTQQTQQKKYLEQLHLPQSKPISPNFKVKTIKLPTLDHTLNETDHSYESHKQQSEIDVQTFTKKQYLKTKKTEASTECSHKQSLAERHYQLPKKEKRVTVQLPTESIQKNQEDKLKMVPRKQREFSGSDRGKLPGSEEKNQGPSMIGRKEERLITERKHEHLKNKSAPKVVKQKVIDAHLDSQTQNFQQTQIQTAESKAEHKKLPQPYNSLQEEKCLEVKGIQEKQVFSNTKDSKQEITQNKSFFSSVKESQRDDGKGALNIVEFLRKREELQQILSRVKQFEAEPNKSGLKTFQTLLNTIPGWLISEDKREYAVHIAMENNLEKVKEEITHIKTQAEDMLVSYENIIQTAMMSSKTGKPGNKPTSLDETSSKVSNVHVSNNKNSEQKENKIAKEKTVQHQVAAHHEATVRSHVKTHQEIKLDDSNIPPPSLKTRPPSPTFITIESTARRTENPTKNELSQSPKKDSYVEPPPRRPMSQKSEIHRANTSPSPPRSRSEQLVRLKDTTAKLSKGAIPCPAATPVPIVEKRSEIIMSPATLRRQIKIETRGRDSPPTITIPVNINHAASGSFRESVDAQEEIRKVEKRATYVHKDGLNSTDHMVPDTESYDAVEIIRKVAVPPRLSEHTQRYEAANRTVQMAENFVNDPENEINRWFREFEHGPVSEAKSNRRVYAKGETNHNIQQESRTFVRRNLD

SEQ ID NO: 791857 - protein, 2069 aa, Homo sapiens
QGGDVRKGCFIFETFSLDEIKEESDYISTKKTITEEVIQGDVKSYRMLFETQPLYAIQDREGSYHEVTTVKKEEVIHGDVRGTRWLFETKPLDSINKSETVYVIKSVTQEDIQKGDVSSVRYRFETQPLDQISEESHNIMPSIDHIQGGNVKTSRQFFESENLIRITIYETVSVNEIQKGNVKTSTWLFETHTMDELRGEGLEYENIKTVTQEDVQKGDVKQAVWHFENRTFDSIMEAHKGITKMTKEEIPPSDVKTTTWLFETTPLHEFNETRVEKIEIIGKSIKETLEDLYSQKVIQAPGIIIEADEIGDVRMAKYKLMNQASPEIQKEEIIRADLRNIMVNLLSKRDCTEREILISEEEKGNVNLTKTQLLNRSTEFHAEKEEIVKGDVQQAIKNLFSEERSVKKGILIQEDEKGDINMTIYCLLHENDGDTIEREEVIGGDVKRTIHNLLSSTSNNKISERAKIDASERGNVQFFTTCIEAGALDYLKQLHTESNETLTAKKQEGEKEIIGGDVEGTKLLLKKRQSLVERTVSETDIIPGDVHNTVKVFMTEPQSTFGKIPKEEIIKGDLTSTLNSLSQAVNQKTVTKTEEIIKGNMLATLKSLKESSHRWKESKQPDAIPGDIEKAIECLEKATNTKTEILKKELLKDDLETSLRSLKEAQRSFKEVHKEGVIKKDAKAVMAGSSGEQKTDIHQVAVQRNKNSLLQPKPGPFEPAAKWQGGADTLSQTMGKSCHGNLVEERTEVNLPKAPKGTVKIVIDREQNNDALEKSLRRLSNSHHKSNVLESGDKTGVWTDTTGEQHLRDEYMSRQLTSTVSVKNNLTTKESDRAVRELKKDDVFNSIQSAGKTVGKQQTYELRNDHQKMEGFHIKSPKKTKNIKILTDTQSSKPSPTQHPVSMPVGGTYDLSGDFQKQTLLKQETKYSNKDIKKKNINLQPMWQLLPVEQDTSNVTEMKVSEKSHNTFKATNKKRETDVHLKSQDFLMKTNTSTGLKMAMERSLNPINFNPEKKWVPLPSLSTEKIKADFESFPGLPLPPPPVDEKSERESSSMFLPPPPPPTPSQKPAHLLSSSAPEKHSGDFMQQYSQKEASNSQNSQAKIITGKTGVLPPPTLPKPKLPKHIKDNKNDFSPKVELATSLSDMECKITTSKDQKKVMVMTSSEHTETKQNVISKSLDERKQLSIDSANCLSHTVPGTSAPRKKQIAPLIKSHSFPESSGQQNPKPYMRKFKTPLMIAEEKYRQQKEEIEKQKQESSYYNIVKTQSQNQHITEVEKEMPLQKTNEEVSLSGIDSECTVVQPSPGSQSNARILGVCSDNQLSTTSPETVAAKRLHHVLAASEDKDKMKKEVLQSSRDIMQSKSACEIKQSHQECSTQQTQQKKYLEQLHLPQSKPISPNFKVKTIKLPTLDHTLNETDHSYESHKQQSEIDVQTFTKKQYLKTKKTEASTECSHKQSLAERHYQLPKKEKRVTVQLPTESIQKNQEDKLKMVPRKQREFSGSDRGKLPGSEEKNQGPSMIGRKEERLITERKHEHLKNKSAPKVVKQKVIDAHLDSQTQNFQQTQIQTAESKAEHKKLPQPYNSLQEEKCLEVKGIQEKQVFSNTKDSKQEITQNKSFFSSVKESQRDDGKGALNIVEFLRKREELQQILSRVKQFEAEPNKSGLKTFQTLLNTIPGWLISEDKREYAVHIAMENNLEKVKEEITHIKTQAEDMLVSYENIIQTAMMSSKTGKPGNKPTSLDETSSKVSNVHVSNNKNSEQKENKIAKEKTVQHQVAAHHEATVRSHVKTHQEIKLDDSNIPPPSLKTRPPSPTFITIESTARRTENPTKNELSQSPKKDSYVEPPPRRPMSQKSEIHRANTSPSPPRSRSEQLVRLKDTTAKLSKGAIPCPAATPVPIVEKRSEIIMSPATLRRQIKIETRGRDSPPTITIPVNINHAASGSFRESVDAQEEIRKVEKRATYVHKDGLNSTDHMVPDTESYDAVEIIRKVAVPPRLSEHTQRYEAANRTVQMAENFVNDPENEINRWFREFEHGPVSEAKSNRRVYAKGETNHNIQQESRTFVRRNLD

SEQ ID NO: 791858 - protein, 2424 aa, Homo sapiens
QGGDVRKGCFIFETFSLDEIKEESDYISTKKTITEEVIQGDVKSYRMLFETQPLYAIQDREGSYHEVTTVKKEEVIHGDVRGTRWLFETKPLDSINKSETVYVIKSVTQEDIQKGDVSSVRYRFETQPLDQISEESHNIMPSIDHIQGGNVKTSRQFFESENLIRITIYETVSVNEIQKGNVKTSTWLFETHTMDELRGEGLEYENIKTVTQEDVQKGDVKQAVWHFENRTFDSIMEAHKGITKMTKEEIPPSDVKTTTWLFETTPLHEFNETRVEKIEIIGKSIKETLEDLYSQKVIQAPGIIIEADEIGDVRMAKYKLMNQASPEIQKEEIIRADLRNIMVNLLSKRDCTEREILISEEEKGNVNLTKTQLLNRSTEFHAEKEEIVKGDVQQAIKNLFSEERSVKKGILIQEDEKGDINMTIYCLLHENDGDTIEREEVIGGDVKRTIHNLLSSTSNNKISERAKIDASERGNVQFFTTCIEAGALDYLKQLHTESNETLTAKKQEGEKEIIGGDVEGTKLLLKKRQSLVERTVSETDIIPGDVHNTVKVFMTEPQSTFGKIPKEEIIKGDLTSTLNSLSQAVNQKTVTKTEEIIKGNMLATLKSLKESSHRWKESKQPDAIPGDIEKAIECLEKATNTKTEILKKELLKDDLETSLRSLKEAQRSFKEVHKEGVIKKDAKAVMAGSSGEQKTDIHQVAVQRNKNSLLQPKPGPFEPAAKWQGGADTLSQTMGKSCHGNLVEERTEVNLPKAPKGTVKIVIDREQNNDALEKSLRRLSNSHHKSNVLESGDKTGVWTDTTGEQHLRDEYMSRQLTSTVSVKNNLTTKESDRAVRELKKDDVFNSIQSAGKTVGKQQTYELRNDHQKMEGFHIKSPKKTKNIKILTDTQSSKPSPTQHPVSMPVGGTYDLSGDFQKQTLLKQETKYSNKDIKKKNINLQPMWQLLPVEQDTSNVTEMKVSEKSHNTFKATNKKRETDVHLKSQDFLMKTNTSTGLKMAMERSLNPINFNPENNVKESECPLPPPSPPPPPPSNASSEIEFPLPPPPPLMMFPEKKWVPLPSLSTEKIKADFESFPGLPLPPPPVDEKSERESSSMFLPPPPPPTPSQKPAHLLSSSAPEKHSGDFMQQYSQKEASNSQNSQAKIITGKTGVLPPPTLPKPKLPKHIKDNKNDFSPKVELATSLSDMECKITTSKDQKKVMVMTSSEHTETKQNVISKSLDERKQLSIDSANCLSHTVPGTSAPRKKQIAPLIKSHSFPESSGQQNPKPYMRKFKTPLMIAEEKYRQQKEEIEKQKQESSYYNIVKTQSQNQHITEVEKEMPLQKTNEEVSLSGIDSECTVVQPSPGSQSNARILGVCSDNQLSTTSPETVAAKRLHHVLAASEDKDKMKKEVLQSSRDIMQSKSACEIKQSHQECSTQQTQQKKYLEQLHLPQSKPISPNFKVKTIKLPTLDHTLNETDHSYESHKQQSEIDVQTFTKKQYLKTKKTEASTECSHKQSLAERHYQLPKKEKRVTVQLPTESIQKNQEDKLKMVPRKQREFSGSDRGKLPGSEEKNQGPSMIGRKEERLITERKHEHLKNKSAPKVVKQKVIDAHLDSQTQNFQQTQIQTAESKAEHKKLPQPYNSLQEEKCLEVKGIQEKQVFSNTKDSKQEITQNKSFFSSVKESQRDDGKGALNIVEFLRKREELQQILSRVKQFEAEPNKSGLKTFQTLLNTIPGWLISEDKREYAVHIAMENNLEKVKEEITHIKTQAEDMLVSYENIIQTAMMSSKTGKPGNKPTSLDETSSKVSNVHVSNNKNSEQKENKIAKEKTVQHQVAAHHEATVRSHVKTHQEIKLDDSNIPPPSLKTRPPSPTFITIESTARRTENPTKNELSQSPKKDSYVEPPPRRPMSQKSEIHRANTSPSPPRSRSEQLVRLKDTTAKLSKGAIPCPAATPVPIVEKRSEIIMSPATLRRQIKIETRGRDSPPTITIPVNINHAASGSFRESVDAQEEIRKVEKRATYVHKDGFIPNEEPNMCKNIAENTLVPGDRNEHLDAGNSEGQRNDLRKLGERGKLKVIWPPSKEIPKKTLPFEEELKMSKPKWPPEMTTLLSPEFKSESLLEDVRTPENKGQRQDHFPFLQPYLQSTHVCQKEDVIGIKEMKMPEGRKDEKKEGRKNVQDRPSEAEDTKSNRKSAMDLNDNNNVIVQSAEKEKNEKTNQTNGAEVLQVTNTDDEMMPENHKENLNKNNNNNYVAVSYLNNCRQKTSILEFLDLLPLSSEANDTANEYEIEKLENTSRISELLGIFESEKTYSRNVLAMALKKQTDRAAAGSPVQPAPKPSLSRGLMVKGGSSIISPDTNLLNIKGSHSKSKNLHFFFSNTVKITAFSKKNENIFNCDLIDSVDQIKNMPCLDLRELERMLNLGMLKQQKLPAIMKTQVLML

SEQ ID NO: 791859 - protein, 2111 aa, Homo sapiens; identical to SEQ ID NO: 791856

SEQ ID NO: 791860 - protein, 107 aa, Homo sapiens
THCNSKLIWEIMHHFMDKYTVNLTLNNFSNPKEIMMKVLDISSIKIDGTAKTKADQWTLFLMKNQICVKILQKTPLALHCDQNLNVHYDLQVQGCFLQYFYTYLVLH

SEQ ID NO: 791861 - protein, 1627 aa, Homo sapiens
QGGDVRKGCFIFETFSLDEIKEESDYISTKKTITEEVIQGDVKSYRMLFETQPLYAIQDREGSYHEVTTVKKEEVIHGDVRGTRWLFETKPLDSINKSETVYVIKSVTQEDIQKGDVSSVRYRFETQPLDQISEESHNIMPSIDHIQGGNVKTSRQFFESENLIRITIYETVSVNEIQKGNVKTSTWLFETHTMDELRGEGLEYENIKTVTQEDVQKGDVKQAVWHFENRTFDSIMEAHKGITKMTKEEIPPSDVKTTTWLFETTPLHEFNETRVEKIEIIGKSIKETLEDLYSQKVIQAPGIIIEADEIGDVRMAKYKLMNQASPEIQKEEIIRADLRNIMVNLLSKRDCTEREILISEEEKGNVNLTKTQLLNRSTEFHAEKEEIVKGDVQQAIKNLFSEERSVKKGILIQEDEKGDINMTIYCLLHENDGDTIEREEVIGGDVKRTIHNLLSSTSNNKISERAKIDASERGNVQFFTTCIEAGALDYLKQLHTESNETLTAKKQEGEKEIIGGDVEGTKLLLKKRQSLVERTVSETDIIPGDVHNTVKVFMTEPQSTFGKIPKEEIIKGDLTSTLNSLSQAVNQKTVTKTEEIIKGNMLATLKSLKESSHRWKESKQPDAIPGDIEKAIECLEKATNTKTEILKKELLKDDLETSLRSLKEAQRSFKEVHKEGVIKKDAKAVMAGSSGEQKTDIHQVAVQRNKNSLLQPKPGPFEPAAKWQGGADTLSQTMGKSCHGNLVEERTEVNLPKAPKGTVKIVIDREQNNDALEKSLRRLSNSHHKSNVLESGDKTGVWTDTTGEQHLRDEYMSRQLTSTVSVKNNLTTKESDRAVRELKKDDVFNSIQSAGKTVGKQQTYELRNDHQKMEGFHIKSPKKTKNIKILTEYTKLHHVLAASEDKDKMKKEVLQSSRDIMQSKSACEIKQSHQECSTQQTQQKKYLEQLHLPQSKPISPNFKVKTIKLPTLDHTLNETDHSYESHKQQSEIDVQTFTKKQYLKTKKTEASTECSHKQSLAERHYQLPKKEKRVTVQLPTESIQKNQEDKLKMVPRKQREFSGSDRGKLPGSEEKNQGPSMIGRKEERLITERKHEHLKNKSAPKVVKQKVIDAHLDSQTQNFQQTQIQTAESKAEHKKLPQPYNSLQEEKCLEVKGIQEKQVFSNTKDSKQEITQNKSFFSSVKESQRDDGKGALNIVEFLRKREELQQILSRVKQFEAEPNKSGLKTFQTLLNTIPGWLISEDKREYAVHIAMENNLEKVKEEITHIKTQAEDMLVSYENIIQTAMMSSKTGKPGNKPTSLDETSSKVSNVHVSNNKNSEQKENKIAKEKTVQHQVAAHHEATVRSHVKTHQEIKLDDSNIPPPSLKTRPPSPTFITIESTARRTENPTKNELSQSPKKDSYVEPPPRRPMSQKSEIHRANTSPSPPRSRSEQLVRLKDTTAKLSKGAIPCPAATPVPIVEKRSEIIMSPATLRRQIKIETRGRDSPPTITIPVNINHAASGSFRESVDAQEEIRKVEKRATYVHKDGLNSTDHMVPDTESYDAVEIIRKVAVPPRLSEHTQRYEAANRTVQMAENFVNDPENEINRWFREFEHGPVSEAKSNRRVYAKGETNHNIQQESRTFVRRNLD

SEQ ID NO: 791862 - protein, 76 aa, Homo sapiens
TDVDEMTGKFRTSTPILFFPFLQEGSRQPPCEEHQLWCSPDTSPTKSGGAGESPLTVSSIAFSMKKHGRLYPKALG

SEQ ID NO: 791863 - protein, 86 aa, Homo sapiens
VHGPSTSRPGLPPSSSPHVALCFFLLSPVQVGWAPPSPRGASPPPFRVSALEGVVFSPTSVPASRLELPRHAVGPISSPFRFHARS

SEQ ID NO: 791864 - protein, 423 aa, Homo sapiens
MIEAFSHPGHTTPQSMQVDTSSEISSAQISTYKEKSSSVPLLISNGVNVASQPPAPTPQKTQRNEFTAQLPDCSESVRQMLQDEMFKLVQLQQINFMSLMQIVGSSFANLPDTQQLVQQSQSVHLGESQESNLRGCGDVEDSNKNLKERFFIKPQSMGENAREPRKNSPHCHEGTIPSGQNSTGNVQNVPHGSIPLCQLNGQPRKKGPIPSSQNLPSTSFYPAPAGNTHLYLLSTPSVVQKAPRLIPHAKTFSPGDGFPLLQFKSKQEFQPLFLHTGSIPQVPFRPLPQPREAWGLSDSFQPALPQRAAQTTPASHLNVSQYNTEARKKEVEQKTWAETVITEIPNHVNLDQYVGQENLTPQQDSSVFIKPEKLFDVKPGTLEISPHHSFGLPLLYLPLKPPNMFPSTSRASITVPSTPIQPI

SEQ ID NO: 791865 - protein, 520 aa, Homo sapiens
INDDIISITHNTKKEFIDIDENLLEVEAFTEEEMDMHISDYEEDIEESVGGFRSPSLAICMMTLPQQLEEEFTEEVQCQREEPLETIMEEKSTEQKGMIEAFSHPGHTTPQSMQVDTSSEISSAQISTYKEKSSSVPLLISNGVNVASQPPAPTPQKTQRNEFTAQLPDCSESVRQMLQDEMFKLVQLQQINFMSLMQIVGSSFANLPDTQQLVQQSQSVHLGESQESNLRGCGDVEDSNKNLKERFFIKPQSMGENAREPRKNSPHCHEGTIPSGQNSTGNVQNVPHGSIPLCQLNGQPRKKGPIPSSQNLPSTSFYPAPAGNTHLYLLSTPSVVQKAPRLIPHAKTFSPGDGFPLLQFKSKQEFQPLFLHTGSIPQVPFRPLPQPREAWGLSDSFQPALPQRAAQTTPASHLNVSQYNTEARKKEVEQKTWAETVITEIPNHVNLDQYVGQENLTPQQDSSVFIKPEKLFDVKPGTLEISPHHSFGLPLLYLPLKPPNMFPSTSRASITVPSTPIQPI

SEQ ID NO: 791866 - protein, 204 aa, Homo sapiens
CPARRGGAYRGRQASLSCGGLHPVRASGLLCLPNQAWAMAGAPPPASLQPCSLISDCCASNQRDSVGVGPSEPGVGYNFVVRRFLSPSEKRSIRVGVTRFSRCCPSPLSLTRKGNSLTPCASQSEAMPRPALARARCAHPLTCARCLALPSEMNPVPQMEMQKSPVFCVAHAGSCRPELFLFGHLGSSLQELLNNIHTDPLWNY

SEQ ID NO: 791867 - protein, 154 aa, Homo sapiens
MKLITILFLCSRLLLSLTQESQSEEIDCNDKDLFKAVDAALKKYNSQNQSNNQFVLYRITEATKTVGSDTFYSFKYEIKEGDCPVQSGKTWQDCEYKDAAFSVATQTCQITPAEGPVVTAQYDCLGCVHPISTQSPDLEPILRHGIQYFNNNTQ

SEQ ID NO: 791868 - protein, 139 aa, Homo sapiens
AGVQGRDFVLLQYGGIPCRQCMMFSTRHLTNSSYLSLFLRQGLTLSPGLEGSGLISAHCNLCFPGSSDPPTSALQVAGATGVCCHARLILPYFVEMGFPHVAQAGLELLSSSDPPTLASQSAAISGISHPPKKYLIYRL

SEQ ID NO: 791869 - protein, 143 aa, Homo sapiens
AGVQGRDFVLLQYGGIPCRQCMMFSTRHLTNSSYLSLFLRQGLTLSPGLEGSGLISAHCNLCFPGSSDPPTSALQVAGATGVCCHARLILPYFVEMGFPHVAQAGLELLSSSDPPTLASQSAGVTGMSHHAQLSFIHLFKNIY

SEQ ID NO: 791870 - protein, 548 aa, Homo sapiens
MRKQGLFQWLDSLQIDNLTSPDLRLTVGAVIVEEMRAAIERETGFQCSAGISHNKVLAKLACGLNKPNRQTLVSHGSVPQLFSQMPIRKIRSLGGKLGASVIEILGIEYMGELTQFTESQLQSHFGEKNGSWLYAMCRGIEHDPVKPRQLPKTIGCSKNFPGKTALATREQVQWWLLQLAQELEERLTKDRNDNDRVATQLVVSIRVQGDKRLSSLRRCCALTRYDAHKMGHDAFTVIKNCNTSGIQTEWSPPLTMLFLCATKFSASAPSSSTDITSFLSSDPSSLPKVPVTSSEAKTQGSGPAVTATKKATTSLESFFQKAAERQKVKEASLSSLTAPTQAPMSNSPSKPSLPFQTSQSTGTEPFFKQKSLLLKQKQLNNSSVSSPQQNPWSNCKALPNSLPTEYPGCVPVCEGVSKLEESSKATPAEMDLAHNSQSMHASSASKSVLEVTQKATPNPSLLAAEDQVPCEKCGSLVPVWDMPEHMDYHFALELQKSFLQPHSSNPQVVSAVSHQGKRNPKSPLACTNKRPRPEGMQTLESFFKPLTH

SEQ ID NO: 791871 - protein, 39 aa, Homo sapiens
ADTDNLGISLASITAQSNIVPTLGVQSLLFGVRPSWGLK

SEQ ID NO: 791872 - protein, 222 aa, Homo sapiens
MLIPKTMGKMSPGHVRGLDSSPSHHRPRGLGGKDDFMGQALGSPALCRLQTWYPAFQKLQPCLKEAKVQLGFWLQRVEVQGIGSFHGVLSLQGHRSQLLRLGNLHLDFKRCMEMPDDQAEVCCIGGPSWRTSARAVWKGNVGLEPPHRVPTVALPSGAVRRGPLSSRPLNGRSTDSLHCAPEKAADTQCQPMRAAGREAIPCKTTGADCPRLCEPASCISLT

SEQ ID NO: 791873 - protein, 594 aa, Homo sapiens
MVSHILQSELGDFHEETDRKHLAQTRYLPNQDCLEGKIMHFHQKHIGRSPAESDILLLDIARKLDMYGIRPHPASDGEGMQIHLAVAHMGVLVLRGNTKINTFNWAKIRKLSFKRKHFLIKLHANILVLCKDTLEFTMASRDACKAFWKTCVEYHAFFRLSEEPKSKPKTLLCSKGSSFRYSGRTQRQLLEYGRKGRLKSLPFERKHYPSQYHERQCRSSPDLLSDVSKQVEDLRLAYGGGYYQNVNGVHASEPVLESRRRNSALEVTFATELEHSKPEADPTLLHQSQSSSSFPFIYMDPVFNTEPNPNPDPRDIFSERSSLSSFQTSCKFSGNHMSIYSGLTSKVRPAKQLTYTDVPYIPCTGQQVGIMPPQVFFYVDKPPQVPRWSPIRAEERTSPHSYVEPTAMKPAERSPRNIRMKSFQQDLQVLQEAIARTSGRSNINVGLEEEDPNLEDAFVCNIQEQTPKRSQSQSDMKTIRFPFGSEFRPLGPCPALSHKADLFTDMFAEQELPAVLMDQSTAERYVASESSDSESEILKPDYYALYGKEIRSPMARIRLSSGSLQLDEEDEDAYFNTPTAEDRTSLKPCNYFLA

SEQ ID NO: 791874 - protein, 96 aa, Homo sapiens
SSDSHLWNENHPPQVVMQDKGGQMGIPTSRKPPGFIPLGLSECRALGNELTFALFVWHPPRDNTLNPGNNLARQVYPAPVSVEHTGAGAGWQFAQS

SEQ ID NO: 791875 - protein, 108 aa, Homo sapiens [sequence omitted]

SEQ ID NO: 791876 - protein, 119 aa, Homo sapiens
CPSSPVCHQSVMVEAGLRLRSSEPYSRSFAFMLALLPRYTMGVIWCLPSPGTLFFYLEQLLREENGVLGMCPFPIALKDALCQVPWTFHRLVLGKSICQQVTILAFNSELRYFVLSAVK

SEQ ID NO: 791877 - protein, 63 aa, Homo sapiens
MSGDPSGHVSKTEHLQPTKRLPSALPSPKLTQSLGSCELHLKACTSRSRGVGAAEIDEAHPDE

SEQ ID NO: 791878 - protein, 169 aa, Homo sapiens
MRTQGEDVHLQVKERGLGENQPRRHLQLQPLASRTVRKCLVYKRSTQAPVLQMRRVMTRKDKAPPFWRSESPKCVPPTYTAPAKGDSRGTHKMTLHFFPFLKSKSQNWRNLSASTQSPPSQAMGSNRTRHSMAVSMLSRENKGMLGASQTSRARAPPGGLVRQQVCGRA

SEQ ID NO: 791879 - protein, 107 aa, Homo sapiens
MAGEDVGAPPDHLWVHQEGIYRDEYQRTWVAVVEEETSFLRARVQQIQVPLGDAARPSHLLTSQLPLMWQLYPEERYMDNNSRLWQIQHHLMVRGVQELLLKLLPDD

SEQ ID NO: 791880 - protein, 136 aa, Homo sapiens
LWGRGGGSGRAAGARGRALGHGGGARPAAPGKRPRGLGQAWPSGRRAVAGRGPGVRPGGGGGREAALWGRRRTYSVSGARAPGQAPPEYRRPFCPPAKETRARPTRLGDSPLRRHLRERRPLEPGGRSFESQSQNS

SEQ ID NO: 791881 - protein, 68 aa, Homo sapiens
MTNLVAGNPTKNHAPFSVSIWAVNFHPLLECTTLGLREEWGRTLCPHHALATAPTTLRDTRHRLSQST

SEQ ID NO: 791882 - protein, 136 aa, Homo sapiens; identical to SEQ ID NO: 791880

SEQ ID NO: 791883 - protein, 110 aa, Homo sapiens
GGGRQPLRLGTRPGLSSGRRAVAGRGPGVRPGGGGGREAALWGRRRTYSVSGARAPGQAPPEYRRPFCPPAKETRARPTRLGDSPLRRHLRERRPLEPGGRSFESQSQNS

SEQ ID NO: 791884 - protein, 136 aa, Homo sapiens; identical to SEQ ID NO: 791880

SEQ ID NO: 791885 - protein, 108 aa, Homo sapiens
CQQNQQQCQPPPKCPPKCTPKCPPKCPPKCPPQCPAPCSPAVSSCCGPSSGSCCGPSSGGCCSSGGGGCCLSHHRPRLFHRRRHQSPDCCESEPSGASGCCHSSGGCC

SEQ ID NO: 791886 - protein, 155 aa, Homo sapiens
MQPSPPPTELVPSERAVVLLSCALSALGSGLLVATHALWPDLRSRARRLLLFLSLADLLSAASYFYGVLQDFAGPSWDCVLQGALSTFANTSSFFWTVAIALYLYLSIVRAARGPRTDRLLWAFHVVRWVAVALLFQEPPTQADPSRSCPPRGRV

SEQ ID NO: 791887 - protein, 121 aa, Homo sapiens
MCWDASKTLCLGIRSSGILCIPIQNPKENDFIEIELKRQELSYQNLLNVSCCELGIKPERVEKIRKLPNTLLRKDKDIRRLRDFQEVELILMKNGSSRLTEYVPSLTERPCYDSKAAKMTY

SEQ ID NO: 791888 - protein, 154 aa, Homo sapiens
MGRRSPFKPRNKVFGFSYPWCRSYQPFPRKRAWPPSRVWLGACCASLASPPKGTIPSGEYYRPAPSSSGDSLRRESGALLQYLPSLASPCANHATRCSLLFPIYKIKMTLLYLTGLARTHCCCLADRCAEAVESAFYLVGSLCINARGAAHLTD

SEQ ID NO: 791889 - protein, 208 aa, Homo sapiens
AYHPFRRLAILPASAPPATSNPDPAVSRVMNMSAILPLPGQSVERLCVDPRHRQGPVNLLSDPEQGVEVTGQYEREKAGFSWIEVTFKNPLVWVHASPEHVVVTRNRRSSAYKWKETLFSVMPGLKMTMDKTGLLLLSDPDKVTIGLLFWDGRGEGLRLLLRDTDRFSSHVGGTLGQFYQEVLWGSPAASDDGRRTLRVQGNDHSATR

SEQ ID NO: 791890 - protein, 30 aa, Homo sapiens
LSEKVRVPVCPLPAPSFPSVAVNEPVSVLT

SEQ ID NO: 791891 - protein, 340 aa, Homo sapiens
APSRSQAGECQFWHQPSCSLLGPLLPHLSGVESEKARHQGGTCALLHILPPAARRACRPRPPRLWSLPLCCVFMSLRVLGSGTWPSAPKMFLLLTALQVLAIAMTQSQEDENKIIGGHTCTRSSQPWQAALLAGPRRRFLCGGALLSGQWVITAAHCGRPILQVALGKHNLRRWEATQQVLRVVRQVTHPNYNSRTHDNDLMLLQLQQPARIGRAVRPIEVTQACASPGTSCRVSGWGTISSPIARYPASLQCVNINISPDEVCQKAYPRTITPGMVCAGVPQGGKDSCQGDSGGPLVCRGQLQGLVSWGMERCALPGYPGVYTNLCKYRSWIEETMRDK

SEQ ID NO: 791892 - protein, 122 aa, Homo sapiens
GLEEWSSLLSLLIHASSKERAQLGQHTMQTLLPAHLTTPAPGCAHSPTRCRHCSRPTSPHPPLAAPQSHPMQTLLLTHLTMPAAGCAHSPTRCRHCSRPTSPRPPLAAPTVPPDADTAPGPP

SEQ ID NO: 791893 - protein, 132 aa, Homo sapiens
MNDAEDGRFLHFQLRYQVHLTGACQTNRCSPWSRAGHRLTWEAQGVGEFPLLQKGSRERLHLENRDTPTLILHFSNGLSKRLTRRLYPAPGSEGPMPKEPCSLLAQQSEIKLQGDSEAEGGASAIAEARVHK

SEQ ID NO: 791894 - protein, 105 aa, Homo sapiens
KRGEHQWSPKALEDKTEAPSDSRATQPACSFSLSAEKISDFLTVATFIMWILAPASLVDTDSADLFARPSNPDCPCTYPPPSDIDHETRSPTYNSPSPFRINNNC

SEQ ID NO: 791895 - protein, 113 aa, Homo sapiens
KRGEHQWSPKALEDKTEAPSDSRATQPACSFSLSAEKISDFLTVATFIMWILAPASLVDTDSADLFARPSNPDCPCTYPPPSDIDHETRSPTYNSPFTILAESPSPFRINNNC

SEQ ID NO: 791896 - protein, 141 aa, Homo sapiens
TVLNIYAPNTGDPKFIKQLLLDIRNEVVGNTIIVGDVNTPLAALGRSPRQKVNKETMDLNYTLEQMDLTDTYRTFYPTSIEYTLYTSEHGTFSKIDHMIGHKTSLSKFKKIRIISSTLSDHSGIKLEINSERNTQKHANTW

SEQ ID NO: 791897 - protein, 255 aa, Homo sapiens
ASAFAEHPGHVSFGPGELLQLGEPRTAREEVGHFGVLGQHRVHRVPAVVAAVHGAGVAPPGRPAVLLRRRVERLELDLEDERLSERHESPAPYPESKVKSSSVFRVELYVPAMGSLPRAASPSEGHSQLHALFPKWAETSSRPSGPPSFLSASRGSAAALPARRPREGGRDPWPAGAPRSRRPDSQLPLERTPSLPPGTPPCPPLIPTSRESVLHREGIPGEQGGGGRRRRRRRRAQGAARVRDQPARKRSLVPT

SEQ ID NO: 791898 - protein, 73 aa, Homo sapiens
NTCVILNCIVFMTFPVFIWLADECKMPFSFMEGTHESWLCDKQKKPRFGGFLVCVRVHLHVCGHTLVPNGPPV

SEQ ID NO: 791899 - protein, 100 aa, Homo sapiens
EGGYPAYASGGGYVIAGRLAPWLLRAAARVAPFPFEDVYTGLCIRALGLVPQAHPGFLTAWPADRTADHCAFRNLLLVRPLGPQASIRLWKQLQDPRLQC

SEQ ID NO: 791900 - protein, 514 aa, Homo sapiens
MALLLLLFLGLLGLWGLLCACAQDPSPAARWPPGPRPLPLVGNLHLLRLSQQDRSLMELSERYGPVFTVHLGRQKTVVLTGFEAVKEALAGPGQELADRPPIAIFQLIQRGGGIFFSSGARWRAARQFTVRALHSLGVGREPVADKILQELKCLSGQLDGYRGRPFPLALLGWAPSNITFALLFGRRFDYRDPVFVSLLGLIDEVMVLLGSPGLQLFNVYPWLGALLQLHRPVLRKIEEVRAILRTLLEARRPHVCPGDPVCSYVDALIQQGQGDDPEGLFAEANAVACTLDMVMAGTETTSATLQWAALLMGRHPDVQGRVQEELDRVLGPGRTPRLEDQQALPYTSAVLHEVQRFITLLPHVPRCTAADTQLGGFLLPKGTPVIPLLTSVLLDETQWQTPGQFNPGHFLDANGHFVKREAFLPFSAGSEGGCGGCSCAPLGRSPPLPSRSRPGAAHSVPGHPPQAAASVLGSAWPGPSSSCCLPASCRGTACCPRLASVRPPWTPRPPGLLP

SEQ ID NO: 791901 - protein, 464 aa, Homo sapiens
MALLLLLFLGLLGLWGLLCACAQDPSPAARWPPGPRPLPLVGNLHLLRLSQQDRSLMELSERYGPVFTVHLGRQKTVVLTGFEAVKEALAGPGQELADRPPIAIFQLIQRGGGIFFSSGARWRAARQFTVRALHSLGVGREPVADKILQELKCLSGQLDGYRGRPFPLALLGWAPSNITFALLFGRRFDYRDPVFVSLLGLIDEVMVLLGSPGLQLFNVYPWLGALLQLHRPVLRKIEEVRAILRTLLEARRPHVCPGDPVCSYVDALIQQGQGDDPEGLFAEANAVACTLDMVMAGTETTSATLQWAALLMGRHPDVQGRVQEELDRVLGPGRTPRLEDQQALPYTSAVLHEVQRFITLLPHVPRCTAADTQLGGFLLPKGTPVIPLLTSVLLDETQWQTPGQFNPGHFLDANGHFVKREAFLPFSAGQQPSGPGWGGTSRAPGVGRPQLRLPPLHPPPDLRF

SEQ ID NO: 791902 - protein, 263 aa, Homo sapiens
ASTRPSQGETTLPAGGARQAQSPPGRWRLHGTAWSGAAPGQQSIPWPSLLVPAPYHRDAAWNSLLAIADAPGRRVARGVAGLPQAVTEHPLVPGSPLRYSLVGWLSGGPDSPRSEVCSVFHSMTHRRFKVTSTVAAASLLPLQDGRRSCCANLPGCPLPGHGQGVSWQFLVLPGGLRVPPFCGRLQHIHPESLGVNTAAGDDHRLPSVQPWGCVLISAPPASAQLFNVYPWLGALLQLHRPVLRKIEEVRAILRTLLEARRPH

SEQ ID NO: 791903 - protein, 136 aa, Homo sapiens
LLSRSPRSSLALPVALSPFRILVPTLPFPWSASRVSRTPAPTPFPNLGLRVLSLFFPLPAPARGLRGPAPLCPAHLEAPAAQLGAGPARSPTPREPRAARSWRGGARPRGRWPGSRRREESGGRLQAGGGRREAAA

SEQ ID NO: 791904 - protein, 90 aa, Homo sapiens
MGGVERENQEARDQAGEGRRVSPLAPALLGARPIPQAWPTPGPSVRSRGSQGRIPRPSRQARGSSRPSTPAGRRSHAPPIMGAPEGGREA

SEQ ID NO: 791905 - protein, 134 aa, Homo sapiens
FQQGPGPCGAPVGPVRLPSRAFLKGRVSPAVCVRVRVRACAGGGVCKTPASPPSLHPQAAGPRGSNSRCPAGHTPPRGSGLGTKALATPRQRNGPLPSHPRPREAPREDADRGCWLCCLAPRLLSARREHSAGG

SEQ ID NO: 791906 - protein, 135 aa, Homo sapiens
EETRRKPGWRSSAGPRSLGGQHPGRRRPRPQPERPAGGRSRAHEGASAGREPGERVALSFPGLHSGGSRGARSRSEPGAAGGGGLGRGWGELVVGGGGCVWVGGGVRNGGAARQRVHFPGNQQQAAIFRECCPFN

SEQ ID NO: 791907 - protein, 120 aa, Homo sapiens
IFFKMKGETQSCYAAQASLEPLTSSNPPVSASQVSGITDTSNKKTEPPGRCYKQCELVLEEERIHQCPGPSKASLRERHLDRDAKDKEEAGHPPLGKVQKPKIHVHVLQAQKEDPVAGVE

SEQ ID NO: 791908 - protein, 88 aa, Homo sapiens
FAHAVLLVATASMSYRRERRLGTAKAPHGYTLVERLPPWKGHLNHFLLVPLQTFQTLSPIQRWLSTDYMSNQQANPLGAMKKHEATAT

SEQ ID NO: 791909 - protein, 127 aa, Homo sapiens
MGCSEDPPSDTSSIDTVSTAWGSQTGGQLEGWLTCCRRRLSHRGNSAPHGNVRTLTPCQRLPHSECTCTSAKRIPAHVLTNPQTPIAPWMSTLEWSIRRAGDLHQKQGVIISVHHIWGLWSWHKLNS

SEQ ID NO: 791910 - protein, 68 aa, Homo sapiens
AYWAYGGNCGVYGGNRGVWRKLGHTEETVGRTEEIEAYGGNWGIRRKRGCTEQTVRHPSEPSIVSVNT

SEQ ID NO: 791911 - protein, 131 aa, Homo sapiens
MAAEIDFLREQNRRLNEDFRRYQMESFSKYSSVQKAVCQGEGDDTFENLVFDQSFLAPLVTEYDKHLGELNGQLKYYQKQVGEMKLQLENVIKENERVLLCLPGWSAVVRSRLTASSASRIRAILLPQPPQ

SEQ ID NO: 791912 - protein, 101 aa, Homo sapiens
SDELSIVPGTSRCSIFYTHFSWPYNIPVYETLQLVHPIPYHSFVLDTPSGSRGSKDAAMVRVSPSTLPANPSSPNEVNFLCWGLRMQTPVSEQAQVQIPWP

SEQ ID NO: 791913 - protein, 107 aa, Homo sapiens
MAGKQINEGAAIDLNNRPPARSPALKFLRDPHPSWFVDLKVEAALQPFPPERKEAAPKSVLAPWPSCSFEGGGNRCFNPLFRRIWNEHFFFGGWGLFVPLNVLKQIS

SEQ ID NO: 791914 - protein, 103 aa, Homo sapiens
PHTPPPPPPSAAMKPRHPRGLGGRMLAGRALETRRTGSSPRSPVSQGDWGAPRHAESRCKSREREHLLAESTRGAPCPGPRAPPQFPGSCRRALADASSAPAA

SEQ ID NO: 791915 - protein, 132 aa, Homo sapiens [sequence omitted]

SEQ ID NO: 791916 - protein, 160 aa, Homo sapiens
QAGGESPGAHGARAPSGTLPRPWAGPVGAGSPGSVRRAGPGWRAAPGPRQLEKEPEPGRDEKVTPPGAPLALWGKMLAYCVQDATVVDVEKRRNPSKHYVYIINVTWSDSTSQTIYRRYSKFFDLQMQLLDKFPIEGGQKDPKQRIIPFLPGKILFRRSQ

SEQ ID NO: 791917 - protein, 164 aa, Homo sapiens
MDPGNPGSSPRCASRPLGLPRSRQKAHERKVRHLGQRKKKNRACRKAGPGSSTDEGAFPSAPALGPGEPGVPGWKPGYTLDPLGVPQGEQKAHEGKVRHLRQRKKKNRAAEKRGLGPPLTKVSFRQPLSWVPRTLTSLVRAHAAPQAATSTPRRKEGPKVSAEV

SEQ ID NO: 791918 - protein, 79 aa, Homo sapiens
LRAVPMLALRVALVRVVLLQVAVTAHLVLGPRDAGLARGHAPPQLLLHPQVGDRGGHQRHKQHRQLSLGVRRGMPGTRG

SEQ ID NO: 791919 - protein, 179 aa, Homo sapiens
  misc_feature (152)..(152): Xaa can be any naturally occurring amino acid
MLILGIFILGIFRCQSGPRTSTSGALISTLGPLISKSGTCMSPSTFGRDTSISPFTLGPFRLRSMSGMEILGALMFISGILNLGPFNFPSGPSIFTSGTSMSTLGPETSRSALGKFTSTSGPSTLKPGMLNLGIFTLGIFRCQSGPVNINIXSINVHFGALDVNFMTLEVTLLPNFHEV

SEQ ID NO: 791920 - protein, 265 aa, Homo sapiens
CCVPPRIHPRSSIPGYSRSLTTGQLSDELNQQLEAVCGSVFGELESQAVDALDLPGCFRMRSHSYLRAIQAGCSQDDDCLPLLATPAAVSGRPGSSFNVQKGPGTLNPSRGQPWAPAPHSPLEPARARHPTSGARRGFHRLRPKVAPPVPGQPRQRDPDPEQTAVYRDISHKWGLPAQQRERSGPHRVHEPTGEQVTKEPQHTEINTTSQENQVPPRKPGRDPPGQKPTGPTGPDWASLVRSGPPHRRGAKVEHHPTCQKSSDPP

SEQ ID NO: 791921 - protein, 734 aa, Homo sapiens
MHWEPGEREQPQLSDELNQQLEAVCGSVFGELESQAVDALDLPGCFRMRSHSYLRAIQAGCSQDDDCLPLLATPAAVSGRPGSSFNFRKAPPPIPPGSQAPPRISITAQSSTDSAHESFTAAEGPARRCSSADGLDGPAMGARTLELAPVPPRASPKPPTLIIKTIPGREELRSLARQRKWRPSIGVQVETISDSDTENRSRREFHSIGVQVEEDKRRARFKRSNSVTAGVQADLELEGLAGLATVATEDKALQFGRSFQRHASEPQPGPRAPTYSVFRTVHTQGQWAYREGYPLPYEPPATDGSPGPAPAPTPGPGAGRRDSWIERGSRSLPDSGRASPCPRDGEWFIKMLRAEVEKLEHWCQQMEREAEDYELPEEILEKIRSAVGSTQLLLSQKVQQFFRLCQQSMDPTAFPVPTFQDLAGFWDLLQLSIEDVTLKFLELQQLKANSWKLLEPKEEKKVPPPIPKKPLRGRGVPVKERSLDSVDRQRQEARKRLLAAKRAASFRHSSATESADSIEIYIPEAQTRLLTGPARPARPGPAVLHPYCTPSVEVTVNAGRPVRPPHRHRTPRPPGPSHSRGFFTFLIPREGARAGQGAVPLRPAPLTWIPCPPGPTLCPHLLPMGTISAILSPTGQAGPGPSSGLCVPPSPTPRGWASWGSSFVAFYEESRTLPRSPPHPPRGSILSPLPTGPRDHSGWTNPGPGRLGLSPFPAAGEGRWGLPLTTPVAVPTSP

SEQ ID NO: 791922 - protein, 108 aa, Homo sapiens
GIARGSCSLFLIERFLVPNPQLTNYDYFHYCTFIEHLSIDKFQSDFISPSVGKGIEARVVGRVPGWEAGIDTLAPFLDPSLCLRPVVQSRPQARVCAGVRTASRFKNK

SEQ ID NO: 791923 - protein, 170 aa, Homo sapiens
GVSLLLPRLECNGAVSAHCNLCLLGSSDSPASATQVAGITGACHHAWVIFAFLETGFHHVTQAGFKLLTSGDPSRLGLPMCWDYRHKLLTQPNPTLISGFNGQNCFLVQKEKVCHQEQSPSTSQPCSTNLFVPAPEEAPPLLCKGMCTHLGPGSHCSSSSRTGALQLECA

SEQ ID NO: 791924 - protein, 139 aa, Homo sapiens
LGNPYCSPTLVRKKAIRSKVIRSGAYRGCTYETQLQLSAREACELWEHACPVCTWDSARALLDQPEVGVSARSCKAVAAPPSDACALCVFACIRVCAKGTVYSRVWTRTVGRKARVQICLLSRVERLGEDTTLGDEACG

SEQ ID NO: 791925 - protein, 225 aa, Homo sapiens
EIGEFWLILSLVHIPTSSKVPGPVPPPGVSVHLREWQEGIGRSRPRSGARGWDPASRAPTGDRKPVFKQVESSVSPELKERVNPSRLDSEFCVLPLTSPPSAFGVPFLALQTLRACSREDETGGSRAAGRVRYELLRGVGRGAGEGRVSRGPWMGEPGARGAPRQAVQASRCWNKGCGAARLPRPLMGKDVSSWGSSFACKSSAGPLFFVGKQKDVCVFVGTKPA

SEQ ID NO: 791926 - protein, 119 aa, Homo sapiens
KCQQSICQRSPCFCLQMRVPRGIVSNGRLSPTFSPLFSFLDTVHIHSRVPFFLPPPLLILLRRIFISNAQCLGFSLGSFSPDLRRFLYTKMYGSGTFVTIIVITIYTFLFFNNYCFNFC

SEQ ID NO: 791927 - protein, 88 aa, Homo sapiens
SKVFFHVSETEKGRKRRRKGRGKGKRKEENELQLRKWKSEKRFQIPDLTGGFLGLLKKKKKEKEKEKKKRSVINKKKTYLGAMNTLNI

SEQ ID NO: 791928 - protein, 121 aa, Homo sapiens
QAEQIPENKRGRRPDKGGEGVSLFLPCTATLTPSMPPQQQEGRQGFQTGGNECISGMHGLPGTAVPPKPTFHRGALPGSSHSWRCHLSFIDPDSWHQSPPPLHPQQKPEGSCIPSFCQSGS

SEQ ID NO: 791929 - protein, 80 aa, Homo sapiens
NPLQVQARVASAFLVRHTATQTEHPLLPHSPQAAKSSQETFFSPLKAVHLGLVSPAEKWVMADRGRSGSLRQSPLLHSAI

SEQ ID NO: 791930 - protein, 154 aa, Homo sapiens
DSADQMLTSYPSERKRHKVWYKKFFHHLLHITVLNSYILFKKDNPEHTMSHINFRLALIERMLEKHHKPGQQHLRGRPCSDDVTPLRLSGRHFPKSIPATSGKQNPTGRCKICCSQYDKDGKKIRKETRYFCAECDVPLCVVPCFEIYHTKKNY

SEQ ID NO: 791931 - protein, 105 aa, Homo sapiens
RFHYSCRRFSVGLMPPARLSIYLLLIWIQWGHFSGQRVGALKGPWGALKEQHGGLSGEPESVPSSKPWVGPPHCHRICNTCCHDKEEKNSTQRTEYKADLEGKEL

SEQ ID NO: 791932 - protein, 70 aa, Homo sapiens
MAPEEDAGGEALGGSFWEAGNYRRTVQRVEDGHRLCGDLVSCFQERARIEKAYAQQLADWARKWRGTVEK

SEQ ID NO: 791933 - protein, 119 aa, Homo sapiens
DGVLVCCPDRSAVVLAHCKLHLPGSSDSPASASQVAGTTGTCHHTQLTFVFLVEMGFHHVGQADLKPLTLGSALLGLPKCWDYRWEPPCPASLTSFLCLRLNSAIRWLTIWLSKSSPPK

SEQ ID NO: 791934 - protein, 141 aa, Homo sapiens
PHSTLLRLIRVDRSRCGSSGICWCELRGGVPHQAPQRAPLGSSHRPLLGLAGGFPRRPLRRGCSSPLDLWDSPSVSGMTPLLVIWVADIPSVSVACLAALFMVRFCHADVSNFALSGLGNLSVRDLCFWCLCTNSFPVQKA

SEQ ID NO: 791935 - protein, 101 aa, Homo sapiens
QAMDAGLGPICTCQCPSRQQQRPAAVMRGVATALVLEGKHLPRSPLTPAPVEAEGKGRPKRRPPHLAALPCTHVQAPPSALSESCGLKPKNVTCNGARFTK

SEQ ID NO: 791936 - protein, 551 aa, Homo sapiens
MAEGEDMQTFTSIMDALVRISTSMKNMEKELLCPVCQEMYKQPLVLPCTHNVCQACAREVLGQQGYIGHGGDPSSEPTSPASTPSTRSPRLSRRTLPKPDRLDRLLKSGFGTYPGRKRGALHPQVIMFPCPACQGDVELGERGLAGLFRNLTLERVVERYHQSVSVGGAILCQLCKPPPLEATKGCTECRATFCNECFKLFHPWGTQKAQHEPTLPTLSFRPKGLMCPDHKEEVTHYCKTCQRLVCQLCRVRRTHSGHKITPVLSAYQALKDKLTKSLTYILGNQDTVQTQICELEEAVRHTEVSGQQAKEEVSQLVRGLGAVLEEKRASLLQAIEECQQERLARLSAQIQEHRSLLDGSGLVGYAQEVLKETDQPCFVQAAKQLHNRIARATEALQTFRPAASSSFRHCQLDVGREMKLLTELNFLRVPEAPVIDTQRTFAYDQIFLCWRLPPHSPPAWHYTVEFRRTDVPAQPGPTRWQRREEVRGTSALLENPDTGSVYVLRVRGCNKAGYGEYSEDVHLHTPPAPGIQNLARRGGACLQFQLLGRLR

SEQ ID NO: 791937 - protein, 564 aa, Homo sapiens
MAEGEDMQTFTSIMDALVRISTSMKNMEKELLCPVCQEMYKQPLVLPCTHNVCQACAREVLGQQGYIGHGGDPSSEPTSPASTPSTRSPRLSRRTLPKPDRLDRLLKSGFGTYPGRKRGALHPQVIMFPCPACQGDVELGERGLAGLFRNLTLERVVERYHQSVSVGGAILCQLCKPPPLEATKGCTECRATFCNECFKLFHPWGTQKAQHEPTLPTLSFRPKGLMCPDHKEEVTHYCKTCQRLVCQLCRVRRTHSGHKITPVLSAYQALKDKLTKSLTYILGNQDTVQTQICELEEAVRHTEVSGQQAKEEVSQLVRGLGAVLEEKRASLLQAIEECQQERLARLSAQIQEHRSLLDGSGLVGYAQEVLKETDQPCFVQAAKQLHNRIARATEALQTFRPAASSSFRHCQLDVGREMKLLTELNFLRGCGHRGLCSGAPPVPEAPVIDTQRTFAYDQIFLCWRLPPHSPPAWHYTVEFRRTDVPAQPGPTRWQRREEVRGTSALLENPDTGSVYVLRVRGCNKAGYGEYSEDVHLHTPPAPGIQNLARRGGACLQFQLLGRLR

SEQ ID NO: 791938 - protein, 133 aa, Homo sapiens
MNSAVTSEDSCSKCLIMRRCAGLRRLCDVCTVRKPAFLLLSNLGSAFWNFSALIFPHTPLTATTYHHHNPKQSKQTESLNKNLHLGKRFYSSRVEFLFIPIIDSQLQKSVKSYFGHGSCKKPYLQTFYFKEGI

SEQ ID NO: 791939 - protein, 70 aa, Homo sapiens
RCGGSGCGEQRCLPPGFICKFPSLQKSGMPTDGAPTSAPSPGLPLSELLMGFSQGSACCLYSGGISRPPG

SEQ ID NO: 791940 - protein, 141 aa, Homo sapiens
KHFLMVHLCVSSPGLGWRSPGEVQVPPSQPGPTLSTTHSPFCGQTTSPSPSWKRLLGPPTLRSPATLSTDETTGFTNLSSDSLDTLIPFWSFFPLPFLRHYSIGPLIIINSVSLGCGGRIKINYLTYFISIHFCWLLLLLQ

SEQ ID NO: 791941 - protein, 129 aa, Homo sapiens
EGKVSGCQESQRAEQGEETRRRVRRRQHGIPPSGLSGRCWWGIKMNTLQTRTRAPQELFVPPETSGPTSEKMLVSFHGSSLRNEATPQYGLEEEAGNGRWQQSLSLECWPLWTSHPFGTPSLMTLAVER

SEQ ID NO: 791942 - protein, 67 aa, Homo sapiens
WQCLGVKALRLRPDGSTGSRGKSPDAKSHKGPNRVRKPDAESGEGSMESLPQASLDGVGGGESPQKS

SEQ ID NO: 791943 - protein, 143 aa, Homo sapiens
PVLIQLCGGGSASCLQLGQKLWGPSRALGSHLCTSSQSPRPRCRPAKRRIPAETSRLTQSLSAHLLFPGRALALLIPVWFRRCGRRRHLDCTGKAPGVDLERQERSVEESAPGRGNSLCQGPETPAGEPNNGNSQHLPRQGMF

SEQ ID NO: 791944 - protein, 104 aa, Homo sapiens
MRIRGRWPSRPLTLRLQGPRKTTDRKPGSGGVLCSGPPSRSTHPYPRLPGRLFRKPRPFPAARGRARLLITGSARQYKTSLAPGAPPTGQPRPFPLTPPRPSAV

SEQ ID NO: 791945 - protein, 120 aa, Homo sapiens
VFCHLPSFSQALVTSAPWVHVLGRGSQLRGLGPWCREPHSTSKASHPSLAFQNSQRPQVSILRNEPFTPAHTVLEEHATLHFQKPINCTCPPCGEDKVSGEMKGLSHCPSRWLGQARQFC

SEQ ID NO: 791946 - protein, 129 aa, Homo sapiens
FGSLGLMTSVLVCPDGKTIEAEAAHWTVTRHYREHQKGGPTSTNPIASIFAWTRGLEHRGKLDGNQDLIRFAQMLEKVCVETVESGAMTKDLAGCIHGLSNVKLNEHFLNTTDFLDTIKSNLDRALGRQ

SEQ ID NO: 791947 - protein, 159 aa, Homo sapiens
MTEPTKGSRVLSPHLPPSLTSCTSMKITFVPPTRNFLQLSKCSLSWCTLRPLHGANPSLKSLCPHAFIWRTHTSVQTLRCDCFRVTAFSAISLGLENTFCKLQGELLSSPFPGALLMPLSQHSAHDTRITGSQSPASKGSACMPPGVISRAPSSVPVQW

SEQ ID NO: 791948 - protein, 350 aa, Homo sapiens
MAPAHAKLALLGIVPRAMFPSITGYPWHQGMMVGIGQKDSYLGDEAQSKCSILTLKVPVDHRIITNWDDMEKIWHHTFYDELHVAPKEHPVLLPEAPLNPRANRKKMTRIETFNTPARYTAIQAVLSLYTSGYTTGISYTAETHTVPVYKGYAFPHAILCLDDWHLTNHPMEIFREPSYCFTTTAKREILCNIKEKLRKWPPQRPPPPWRRSEELSKWFQCLEVLFQASFLGMESCGIHQATFNSIKCDVHIRKDLFANMVLSGDTPVYLGITYMMQKITTLVPSSKKIITFPERKSLCGLAAPSWPPSSRCGSSSRSRMNQAPPSPTANASKWTASRHVSCASWINAEV

SEQ ID NO: 791949 - protein, 114 aa, Homo sapiens
TRAQSLALPTPLSGLRAAQQGQSGLGWDDTCARGCRRTVPACPTHPAPEGTLACGISQHTVPGRRLRESQAPGIPAQKLPQRNPVLQGSFRHNSNSLLDFPDTRKGARGTHQLS

SEQ ID NO: 791950 - protein, 529 aa, Homo sapiens
MSSTVSYWILNSTRNSIATLQGGRRLYSRYVSNRNKLKWRLFSRVPPTLNSSPCGGFTLCKAYRHTSTEEDDFHLQLSPEQINEVLRAGETTHKILDLESRVPNSVLRFESNQLAANSPVEDRRGVASCLQTNGLMFGIFDGHGGHACAQAVSERLFYYVAVSLMSHQTLEHMEGAMESMKPLLPILHWLKHPGDSIYKDVTSVHLDHLRVYWQELLDLHMEMGLSIEEALMYSFQRLDSDISLEIQAPLEDEVTRNLSLQVAFSGATACMAHVDGIHLHVANAGDCRAILGVQEDNGMWSCLPLTRDHNAWNQAELSRLKREHPESEDRTIIMEDRLLGVLIPCRAFGDVQLKWSKELQRSILERGFNTEALNIYQFTPPHYYTPPYLTAEPEVTYHRLRPQDKFLVLASDGLWDMLSNEDVVRLVVGHLAEADWHKTDLAQRPANLGLMQSLLLQRKASGLHEADQNAATRLIRHAIGNNEYGEMEAERLAAMLTLPEDLARMYRDDITVTVVYFNSESIGAYYKGG

SEQ ID NO: 791951 - protein, 529 aa, Homo sapiens; identical to SEQ ID NO: 791950

SEQ ID NO: 791952 - protein, 114 aa, Homo sapiens
MWAWCVVGGKGSLSDPFCLLLLVAGACMLWWLRPNPICLGISPVWKTGPGAMHTKLLGKAESTPRLLTKTCGGGRLPLSTQGSRNAAKNKSCSHQEMQVTPMDQKKDRNMTENW

SEQ ID NO: 791953 - protein, 315 aa, Homo sapiens
MSLEQRSPHCKPDEDLEAQGEDLGLMGAQEPTGEEEETTSSSDSKEEEVSAAGSSSPPQSPQGGASSSISVYYTLWSQFDEGSSSQEEEEPSSSVDPAQLEFMFQEALKLKVAELVHFLLHKYRVKEPVTKAEMLESVIKNYKRYFPVIFGKASEFMQVIFGTDVKEVDPAGHSYILVTALGLSCDSMLGDGHSMPKAALLIIVLGVILTKDNCAPEEVIWEALSVMGVYVGKEHMFYGEPRKLLTQDWVQENYLEYRQVPGSDPAHYEFLWGSKAHAETSYEKVINYLVMLNAREPICYPSLYEEVLGEEQEGV

SEQ ID NO: 791954 - protein, 315 aa, Homo sapiens; identical to SEQ ID NO: 791953

SEQ ID NO: 791955 - protein, 78 aa, Homo sapiens
VHVDWTRLSFRDILGVIAFVLLILGAGLYLWKKCGKKKKKKDEEEEEEEEQKEEEEREETGIGRLHFSIEAQISPLPH

SEQ ID NO: 791956 - protein, 571 aa, Homo sapiens
MALPRPSEAVPQDKVCYPPESSPQNLAAYYTPFPSYGHYRNSLATVEEDFQPFRQLEAAASAAPAMPPFPFRMAPPLLSPGLGLQREPLYDLPWYSKLPPWYPIPHVPREVPPFLSSSHEYAGASSEDLGHQIIGGDNESGPCCGPDTLIPPPPADASLLPEGLRTSQLLPCSPSKQSEDGPKPSNQEGKSPARFQFTEEDLHFVLYGVTPSLEHPASLHHAISGLLVPPDSSGSDSLPQTLDKDSLQLPEGLCLMQTVFGEVPHFGVFCSSFIAKGVRFGPFQGKVVNASEVKTYGDNSVMWEIFEDGHLSHFIDGKGGTGNWMSYVNCARFPKEQNLVAVQCQGHIFYESCKEIHQNQELLVWYGDCYEKFLDIPVSLQVTEPGKQPSGPSEESAEGYRCERCGKVFTYKYYRDKHLKYTPCVDKGDRKFPCSLCKRSFEKRDRLRIHILHVHEKHRPHKCSTCGKCFSQSSSLNKHMRVHSGDRPYQCVYCTKRFTASSILRTHIRQHSGEKPFKCKYCGKSFASHAAHDSHVRRSHKEDDGCSCSICGKIFSDQETFYSHMKFHEDY

SEQ ID NO: 791957 - protein, 184 aa, Homo sapiens
MGFCCVAQAGLKLLSSSDLPASVSQGAGITGVSHCAQPGHYHFYHQIPKLATPRDISLLVIKEASSRARNNIQILDPLDHIARLTNYTLTSCFSSNKVPTMPGSLPTGSKQGNVQTLDSIRWMPATPVPAPECHQKYAISTETAFPTLSTFMNTEKSVKGSNADFTKRNPRWRFLFGIYCRWGS

SEQ ID NO: 791958 - protein, 145 aa, Homo sapiens
MIPKLATPRDISLLVIKEASSRARNNIQILDPLDHIARLTNYTLTSCFSSNKVPTMPGSLPTGSKQGNVQTLDSIRWMPATPVPAPECHQKYAISTETAFPTLSTFMNTEKSVKGSNADFTKRNPRWRFLFGIYCSLHHAMTIFI

SEQ ID NO: 791959 - protein, 108 aa, Homo sapiens [sequence omitted]

SEQ ID NO: 791960 - protein, 76 aa, Homo sapiens
AVIYVCCVYTVEYLQTLCQCAMLPSPAFRDTNLGAEKQRWQDYLHHGNRQKLLIKPSLFCLYCLDLESDCNVNNAD

SEQ ID NO: 791961 - protein, 146 aa, Homo sapiens
DRVSLFLPRLECNGAILAHHNLPLLGSSDSPVSASPVAGIKGMCHHARLIFVFLVEMKFLHVGQAGLELLTSGDLPASASQSAGITGVSHRARPRSCIKKKKRSSRHSVVPVDPALASLGVVTVLHCGVMCHSHRATLGHSADHTN

SEQ ID NO: 791962 - protein, 102 aa, Homo sapiens
FLVTIGSVRRAGSRLLAHASCALFSLPPSSSPLLLSLFPFPPTSREPWLSVRVWERESTPDSHPLGRAAAVRVRVPVRRRALVRGPQLTRPRREGEGAAGAR

SEQ ID NO: 791963 - protein, 84 aa, Homo sapiens
APGENTPIRRSAFVDGLLGSKGLSERNDEQGGLEVQLGQGLGNVEFSSSEFLHISTYACMCVYVCVFSNYSPKSKMKIVCFQGF

SEQ ID NO: 791964 - protein, 136 aa, Homo sapiens
MAGVGGNTGPPRLVEGQVISLGFPLGPVQDSHPFGGTSGQNVEVGEEKPAPCAPAGSPRGEPGKENREAGSGDPGVGEGARRSPCGRGRAPSPRASVSPLYCGGPVGCRDRWGLAAGRGRPRLPRGALGAGRGRGG

SEQ ID NO: 791965 - protein, 128 aa, Homo sapiens [sequence omitted]

SEQ ID NO: 791966 - protein, 237 aa, Homo sapiens
AAEEAAAAGGSSGGGGTGSGPAGRASPGALRGGELGGLRVPQDRSGQSKMAGILAWFWNERFWLPHNVTWADLKNTEEATFPQAEDLYLAFPLAFCIFMVRLIFERFVAKPCAIALNIQANGPQIAPPNAILEKVFTAITKHPDEKRLEGLSKQLDWDVRSIQRWFRQRRNQEKPSTLTRFCESMWRFSFYLYVFTYGVRFLKKTPWLWNRGIAGTKYPYQPITTDLHYYYILGAVE

SEQ ID NO: 791967 - protein, 185 aa, Homo sapiens
AAEEAAAAGGSSGGGGTGSGPAGRASPGALRGGELGGLRVPQDRSGQSKMAGILAWFWNERFWLPHNVTWADLKNTEEATFPQAEDLYLAFPLAFCIFMVRLIFERFVAKPCAIALNIQANGPQIAPPNAILEKVFTAITKHPDEKRLEGLSKQLDWDVRSIQRWFRQRRNQEKPSTLTRFCESM

SEQ ID NO: 791968 - protein, 123 aa, Homo sapiens
KEELTLEGIRQFYINVEREEWKLDTLCDLYETLTITQAVIFINTRRKVDWLTEKMHARDFTVSAMHGDMDQKERDVIMREFRSGSSRVLITTDLLARGIDVQQVSLVINYDLPTNRENYIHRI

SEQ ID NO: 791969 - protein, 501 aa, Homo sapiens
MEQQDQSMKEGRLTLVLALATLIAAFGSSFQYGYNVAAVNSPALLMQQFYNETYYGRTGEFMEDFPLTLLWSVTVSMFPFGGFIGSLLVGPLVNKFGRKGALLFNNIFSIVPAILMGCSRVATSFELIIISRLLVGICAGVSSNVVPMYLGELAPKNLRGALGVVPQLFITVGILVAQIFGLRNLLANVDGWPILLGLTGVPAALQLLLLPFFPESPRYLLIQKKDEAAAKKALQTLRGWDSVDREVAEIRQEDEAEKAAGFISVLKLFRMRSLRWQLLSIIVLMGGQQLSGVNAIYYYADQIYLSAGVPEEHVQYVTAGTGAVNVVMTFCAVFVVELLGRRLLLLLGFSICLIACCVLTAALALQDTVSWMPYISIVCVISYVIGHALGPSPIPALLITEIFLQSSRPSAFMVGGSVHWLSNFTVGLIFPFIQEGLGPYSFIVFAVICLLTTIYIFLIVPETKAKTFIEINQIFTKMNKVSEVYPEKEELKELPPVTSEQ

SEQ ID NO: 791970 - protein, 501 aa, Homo sapiens; identical to SEQ ID NO: 791969

SEQ ID NO: 791971 - protein, 501 aa, Homo sapiens; identical to SEQ ID NO: 791969

SEQ ID NO: 791972 - protein, 547 aa, Homo sapiens
MEQQDQSMKEGRLTLVLALATLIAAFGSSFQYGYNVAAVNSPALLMQQFYNETYYGRTGEFMEDFPLTLLWSVTVSMFPFGGFIGSLLVGPLVNKFGRKGALLFNNIFSIVPAILMGCSRVATSFELIIISRLLVGICAGVSSNVVPMYLGELAPKNLRGALGVVPQLFITVGILVAQIFGLRNLLANVDGWPILLGLTGVPAALQLLLLPFFPESPRYLLIQKKDEAAAKKALQTLRGWDSVDREVAEIRQEDEAEKAAGFISVLKLFRMRSLRWQLLSIIVLMGGQQLSGVNAVWAGLRLRELGRARGARGAGPGAPGVGPGAEAASSGQPPSPALALQIYYYADQIYLSAGVPEEHVQYVTAGTGAVNVVMTFCAVFVVELLGRRLLLLLGFSICLIACCVLTAALALQDTVSWMPYISIVCVISYVIGHALGPSPIPALLITEIFLQSSRPSAFMVGGSVHWLSNFTVGLIFPFIQEGLGPYSFIVFAVICLLTTIYIFLIVPETKAKTFIEINQIFTKMNKVSEVYPEKEELKELPPVTSEQ

SEQ ID NO: 791973 - protein, 339 aa, Homo sapiens
MTGLGPALQRAPSGWWGGRWCQLAAFLPGWPILLGLTGVPAALQLLLLPFFPESPRYLLIQKKDEAAAKKALQTLRGWDSVDREVAEIRQEDEAEKAAGFISVLKLFRMRSLRWQLLSIIVLMGGQQLSGVNAIYYYADQIYLSAGVPEEHVQYVTAGTGAVNVVMTFCAVFVVELLGRRLLLLLGFSICLIACCVLTAALALQDTVSWMPYISIVCVISYVIGHALGPSPIPALLITEIFLQSSRPSAFMVGGSVHWLSNFTVGLIFPFIQEGLGPYSFIVFAVICLLTTIYIFLIVPETKAKTFIEINQIFTKMNKVSEVYPEKEELKELPPVTSEQ

SEQ ID NO: 791974 - protein, 501 aa, Homo sapiens; identical to SEQ ID NO: 791969

SEQ ID NO: 791975 - protein, 472 aa, Homo sapiens
MLLLSTPQHVYHAKQIYRVTTYYVLELIDIHGTLPLMFLWSVPCAVPICSVFELLLLGPIGEVSLGTPIKGALLFNNIFSIVPAILMGCSRVATSFELIIISRLLVGICAGVSSNVVPMYLGELAPKNLRGALGVVPQLFITVGILVAQIFGLRNLLANVDGWPILLGLTGVPAALQLLLLPFFPESPRYLLIQKKDEAAAKKALQTLRGWDSVDREVAEIRQEDEAEKAAGFISVLKLFRMRSLRWQLLSIIVLMGGQQLSGVNAIYYYADQIYLSAGVPEEHVQYVTAGTGAVNVVMTFCAVFVVELLGRRLLLLLGFSICLIACCVLTAALALQDTVSWMPYISIVCVISYVIGHALGPSPIPALLITEIFLQSSRPSAFMVGGSVHWLSNFTVGLIFPFIQEGLGPYSFIVFAVICLLTTIYIFLIVPETKAKTFIEINQIFTKMNKVSEVYPEKEELKELPPVTSEQ

SEQ ID NO: 791976 - protein, 354 aa, Homo sapiens
MYLGELAPKNLRGALGVVPQLFITVGILVAQIFGLRNLLANVDGWPILLGLTGVPAALQLLLLPFFPESPRYLLIQKKDEAAAKKALQTLRGWDSVDREVAEIRQEDEAEKAAGFISVLKLFRMRSLRWQLLSIIVLMGGQQLSGVNAIYYYADQIYLSAGVPEEHVQYVTAGTGAVNVVMTFCAVFVVELLGRRLLLLLGFSICLIACCVLTAALALQDTVSWMPYISIVCVISYVIGHALGPSPIPALLITEIFLQSSRPSAFMVGGSVHWLSNFTVGLIFPFIQEGLGPYSFIVFAVICLLTTIYIFLIVPETKAKTFIEINQIFTKMNKVSEVYPEKEELKELPPVTSEQ

SEQ ID NO: 791977 - protein, 501 aa, Homo sapiens; identical to SEQ ID NO: 791969

SEQ ID NO: 791978 - protein, 501 aa, Homo sapiens; identical to SEQ ID NO: 791969

SEQ ID NO: 791979 - protein, 501 aa, Homo sapiens; identical to SEQ ID NO: 791969

SEQ ID NO: 791980 - protein, 294 aa, Homo sapiens
MEQQDQSMKEGRLTLVLALATLIAAFGSSFQYGYNVAAVNSPALLMQQFYNETYYGRTGEFMEDFPLTLLWSVTVSMFPFGGFIGSLLVGPLVNKFGRKGALLFNNIFSIVPAILMGCSRVATSFELIIISRLLVGICAGVSSNVVPMYLGELAPKNLRGALGVVPQLFITVGILVAQIFGLRNLLANVDGWPILLGLTGVPAALQLLLLPFFPESPRYLLIQKKDEAAAKKALQTLRGWDSVDREVAEIRQEDEAEKAAGFISVLKLFRMRSCSWWSSWVGGCCCCWASPSAS

SEQ ID NO: 791981 - protein, 386 aa, Homo sapiens
MGCSRVATSFELIIISRLLVGICAGVSSNVVPMYLGELAPKNLRGALGVVPQLFITVGILVAQIFGLRNLLANVDGWPILLGLTGVPAALQLLLLPFFPESPRYLLIQKKDEAAAKKALQTLRGWDSVDREVAEIRQEDEAEKAAGFISVLKLFRMRSLRWQLLSIIVLMGGQQLSGVNAIYYYADQIYLSAGVPEEHVQYVTAGTGAVNVVMTFCAVFVVELLGRRLLLLLGFSICLIACCVLTAALALQDTVSWMPYISIVCVISYVIGHALGPSPIPALLITEIFLQSSRPSAFMVGGSVHWLSNFTVGLIFPFIQEGLGPYSFIVFAVICLLTTIYIFLIVPETKAKTFIEINQIFTKMNKVSEVYPEKEELKELPPVTSEQ

SEQ ID NO: 791982 - protein, 410 aa, Homo sapiens
MGTTWLLKGALLFNNIFSIVPAILMGCSRVATSFELIIISRLLVGICAGVSSNVVPMYLGELAPKNLRGALGVVPQLFITVGILVAQIFGLRNLLANVDGWPILLGLTGVPAALQLLLLPFFPESPRYLLIQKKDEAAAKKALQTLRGWDSVDREVAEIRQEDEAEKAAGFISVLKLFRMRSLRWQLLSIIVLMGGQQLSGVNAIYYYADQIYLSAGVPEEHVQYVTAGTGAVNVVMTFCAVFVVELLGRRLLLLLGFSICLIACCVLTAALALQDTVSWMPYISIVCVISYVIGHALGPSPIPALLITEIFLQSSRPSAFMVGGSVHWLSNFTVGLIFPFIQEGLGPYSFIVFAVICLLTTIYIFLIVPETKAKTFIEINQIFTKMNKVSEVYPEKEELKELPPVTSEQ

SEQ ID NO: 791983 - protein, 131 aa, Homo sapiens [sequence omitted]

SEQ ID NO: 791984 - protein, 268 aa, Homo sapiens
MVLGRPQRLLLNKRNEGACVTSPGLLNLRLHPGTPWGRGFVWSIGLSSIGQSGFAQLPPRVRSGPDGSRPSLCPWLHSLNTGDPRRHALSEGNSASAEPGASPLRSPRLLVLASQSSLVSKGLCLICTGFGRRTLSRNNATPGSECPMLPPLKCPDFWPYVTSWVARALGTRGCAPGYHQLRPLSNSPCTETTTRVTPAGPVRAQPGSGDQAGAWHTWRRPLTPPRTGPHPGTLSLGASGGGAGPWRRRQRCAPRRGARRVHRPRRRP

SEQ ID NO: 791985 - protein, 73 aa, Homo sapiens
QKQLRPRGAKAPKQGLQQAGSTVEMEPAPLSSTACLREEQPRGPGLVSGVSSAVDTRHGLSSPPTDKCNLSLL

SEQ ID NO: 791986 - protein, 328 aa, Homo sapiens [sequence omitted]

SEQ ID NO: 791987 - protein, 104 aa, Homo sapiens
KIKLKPLSTTKQTKTSKNLGFSHKFLDDIAHLFIVKLYRLFFSLQLVRAIPDSQRHHHQTVLRREFGLILHIVLSARYGVQSNFAKLTWLPLRMMNSLSYQCIM

SEQ ID NO: 791988 - protein, 127 aa, Homo sapiens
MPGIPKVQRCLKNLGYGCIAGFVHFTQHKSEVPWSTVTLRMPALAVPWLWVGGFLCGSSRFCLGSQFTGTWAPRTQGHLRGVMLDTSHGCLLCDGSWISEFSFRFQEIRKKDKREGGKAGNEGSTHF

SEQ ID NO: 791989 - protein, 177 aa, Homo sapiens
KLPLPWWKSAQAGPEDRSPGGLGLGQDETPAVPSPMPPQTGPRTQPPSRRQQEHRGRRAAVAIFKGDAAYLSGVERESAQPMRMREAPAVAPVTVVPTVVLETSPRGFAEQEPSVAVLGYRGSELRSHLSTGSKGNSPDASSRKGPTMKMKPQVETGEAARDPSLRPARTVFVGVSL

SEQ ID NO: 791990 - protein, 128 aa, Homo sapiens
MPTRHASFLAPRGAERHTPDSALVPRARVLHAQPRPSRSPRTLPSGPMRQLAPQGRKSAFLGSLAPPGRCAQPARQPRDGVRAASPASPSGPLPPAGRPPSAGFRERVLAPARPPGPRRTEGASPFPA

SEQ ID NO: 791991 - protein, 103 aa, Homo sapiens
MVDVGCKRRPSLNTLTTQIPGRSRLCWARDSARPAPGREDGASELRLTKENMEPEEMVSQRKPAPKEGKVRCCQAKKKDVMDKETTFFQLKIGVEARVIPLLV

SEQ ID NO: 791992 - protein, 106 aa, Homo sapiens
GVLLCDRLHSCDDYCIVHLLILMMYRLSKAQLLYNVQINTNSISGKRKGTTVTYGPNLMIHIKLIIIILPPLSPSSPLRNKNQSLSHCLVIYAVLTQKGKFTSHEF

SEQ ID NO: 791993 - protein, 110 aa, Homo sapiens
VEMYSLTVLEARSPKPSCQQALAPSETRDGILPCLFLASSGGRQALAFLGLQTHHCNRCLCHHMVFSLCVSVCVSSSLLIRTPIILDSGSTLLQYGLILTNYVCNGPISK

SEQ ID NO: 791994 - protein, 296 aa, Homo sapiens
RLPGNAARAMEASYESESESESEAGPGTQRPGTGTVSAAVREHLRKLCLREFPCGAGSWNKSRFLPQTWRTWRELVPREEDVVSPGEETVEALLGLVRSRHSPWALLNNSNAEDSFLRELAIRNPLTITDTFFYSYFRSLRVIDKKVTLVDKDLLKFLKLEELVLSANRIKEVDATNLPPTLKVLELYGNEISSMECLCAHPPAGLQHLGLGHNKLLGPLESLYVTANHWPNLVSLDLGFNDLTDLQSMVTSLRTLRHLRLLVLQGNPLALVPYYRGLTIDSLAQLCVLDDITVSP

SEQ ID NO: 791995 - protein, 242 aa, Homo sapiens
RLPGNAARAMEASYESESESESEAGPGTQRPGTGTVSAAVREHLRKLCLREFPCGAGSWNKSRFLPQTWRTWRELVPREEDVVSPGEETVEALLGLVRSRHSPWALLNNSNAEDSFLRELAIRNPLTITDTFFYSYFRSLRVIDKKVTLVDKDLLKFLKLEELVLSANRIKEVDATNLPPTLKVLELYGNEISSMECLCAHPPAGLQHLGLGHNKLLGPLESLYVTANHWLLAPCSPGFLTP

SEQ ID NO: 791996 - protein, 271 aa, Homo sapiens
RLPGNAARAMEASYESESESESEAGPGTQRPGTGTVSAAVREHLRKLCLREFPCGAGSWNKSRFLPQTWRTWRELVPREEDVVSPGEETVEALLGLVRSRHSPWALLNNSNAEDSFLRELAIRNPLTITDTFFYSYFRSLRVIDKKILSWPVVLPAVDSPLSAKKGKGEKDKKGKEKDRTGKGEKEPAKEWKVLKKKKEPPKELRQDPPILQVLGRGLVILEPLLAGEPLVSTVCNFGVVRTLTSDRLTLARDSKKIKKVAKKARCGGGCL

SEQ ID NO: 791997 - protein, 305 aa, Homo sapiens
RLPGNAARAMEASYESESESESEAGPGTQRPGTGTVSAAVREHLRKLCLREFPCGAGSWNKSRFLPQTWRTWRELVPREEDVVSPGEETVEALLGLVRSRHSPWALLNNSNAEDSFLRELAIRNPLTITDTFFYSYFRSLRVIDKKILSWPVVLPAVDSPLSAKKGKGEKDKKGKEKDRTGKGEKEPAKEWKVLKKKKEPPKELRQDPPILQVLGRGLVILEPLLAGEPLVSTVCNFGVVRTLTSDRLTLARDSKKIKKVAKKEKPKAVIPIYEGDYHPEPLTVEVQIQLNQCRSAEEALRMFAV

SEQ ID NO: 791998 - protein, 147 aa, Homo sapiens
RLPGNAARAMEASYESESESESEAGPGTQRPGTGTVSAAVREHLRKLCLREFPCGAGSWNKSRFLPQTWRTWRELVPREEDVVSPGEETVEALLGLVRSRHSPWALLNNSNAEDSFLRELAISRQPEEVNVGGHMLLDFKTHAYMNM

SEQ ID NO: 791999 - protein, 251 aa, Homo sapiens
MRSPLATAAVEQQDNKSRFLPQTWRTWRELVPREEDVVSPGEETVEALLGLVRSRHSPWALLNNSNAEDSFLRELAIRNPLTITDTFFYSYFRSLRVIDKKVTLVDKDLLKFLKLEELVLSANRIKEVDATNLPPTLKVLELYGNEISSMECLCAHPPAGLQHLGLGHNKLLGPLESLYVTANHWPNLVSLDLGFNDLTDLQSMVTSLRTLRHLRLLVLQGNPLALVPYYRGLTIDSLAQLCVLDDITVSP

SEQ ID NO: 792000 - protein, 171 aa, Homo sapiens
GWRKGGLLHQPFLGACLLAPSHPFHADPPQSPYPASRSSLGQGRREPQGRARERVGAAERTGRGKNPTAARGWAGRAEPVGGRGGSSRPRASRDPGTRADGTRPPRSCRGAPFPTEATEVPKAPATRRGLESAGARPPRPARVPRPKPGAPGPAPPGPRPRPNQSWFRAAA

SEQ ID NO: 792001 - protein, 81 aa, Homo sapiens
MGFYHSTAASAHGYFPLAFSFESTYVQIATCTTVPSWGALSELQLSPLASLGTPSVILCTVGRDASSRCCLERLLLLVPNP

SEQ ID NO: 792002 - protein, 164 aa, Homo sapiens
GWNPAQESARRKTKTGRQASPFKRLPSGNKRAGCPAAYSRHWARLELGHSSSRYDMPCAAHFLSRGIKQAMALLVPSKASTLLAASLARPACRCAQLPGRWQSYVSRAERELGAVRQFCGSGEIRGPGPGKEGEGGKGASLHSFVVNSLHWFSVWLDHRLARGR

SEQ ID NO: 792003 - protein, 83 aa, Homo sapiens
HPRDCPRELAPGECSCRSQLTSWVCSLSRPSQLHRGPPRTWQRGGAGTHPTGADAIASKAAVHHVQRHDSEGRQPLGEPLPVM

SEQ ID NO: 792004 - protein, 107 aa, Homo sapiens
WLHASPGPLGVPLRESQACRAAASPGCPQGPQCGLGETPLLVLAFSYSLEWTFFFGLSSQQGLFFVVAEREQGAFVEGAGVGQPGRAWVGARILQGMGMGLGPRPWS

SEQ ID NO: 792005 - protein, 95 aa, Homo sapiens
RAARWPVTAPHSFAFWARGLNRAFQHRHFCRPALPATERFHVLGGLASVCCRPADMSRRVQTRGGYWGHQGVEPAGSVASRPGLGQWVQPSLGLS

SEQ ID NO: 792006 - protein, 126 aa, Homo sapiens
MPELAKSAPAPKKGSKKAVTKAQKKDGKKRKRSRKESYSVYVYKVLKQVHPDTGISSKAMGIMNSFVNDIFERIASEASRLAHYNKRSTITSREIQTAVRLLLPGELAKHAVSEGTKAVTKYTSSK

SEQ ID NO: 792007 - protein, 102 aa, Homo sapiens
LLMSSLPFPVPPDTPHPLTHTHTLLFSDFLPLQDKKPVLFLEDHTNSCLALRHSCQGAKQLSRNYGQGHSTNTPAHFSDNQTNIPYITESSGFLTTEISCPK

SEQ ID NO: 792008 - protein, 114 aa, Homo sapiens
PPAAWHRSYPPNWKCRLGEGHQAQGKVGRKPWDQQSLWKRRSSLHPALGQADCVDQILGLPPLAFGEGSRRGSSAQLQVKGWHCFPTAAAPARQPCPYCSLLQAPMPAPLTYPG

SEQ ID NO: 792009 - protein, 217 aa, Homo sapiens
MNIDARTLNKILANQIQQHIKKIIHHDQVGFIPGIQAWFNICKSINVIHHINRIKNKNHMFISIDAEKAVDKIQHHFMIKTFSKIGIQGTYFNVIKVIYDKPTANIISIPSGTRQGCPLSQILFNIALEVLARAIRQEKEIKRIQISKEEVKRSLFADNTIVYFENPKDSSRKLLEPIKEFSKVSGYKTSVHKSVSLFTTTATKQRIKSRTQPLGQV

SEQ ID NO: 792010 - protein, 104 aa, Homo sapiens
MKSLRTQMLIGPGTGLPMSRAPLLPCLVLSEYPQSKRDLETPGWRVLGDSPRVRDRVESRAGTSLSSLRAWRTAGAKVEAGLSSVLLPWSWFGLSKPGNLLHGS

SEQ ID NO: 792011 - protein, 112 aa, Homo sapiens
RGTKKAWGLRERSFQFPRDRNPPQPRFLPQRGLLIGVIGVWFAARPHKATQSSLGSLVTENDVTLAGFGGCSFWRGRSGPRGVVATEPRRGGARLWVRGRGGPFIPGQVGQQ

SEQ ID NO: 792012 - protein, 75 aa, Homo sapiens
GAFVTRAEDRRDLPTRASRCCWWRELTSNACGPGEQNLPLHPTPRLSPAKGASFGRPHEVRKSLFSSSWISLQEY

SEQ ID NO: 792013 - protein, 95 aa, Homo sapiens
SQLRLWKQVTTDGGSSSTNVSLTVLEAGCPRSRCQQARQQARFLPGFPGPAGAAFLLRARRSVCVLVSLFPLLRRTLVIADPGPTCVASFYLTHL

SEQ ID NO: 792014 - protein, 259 aa, Homo sapiens
TDYCGIHLISGSRDTTCMIWQITQQGGVPVGLASKPFQILYGHTNEVLSVGISTELDMAVSGSRDGTVIIHTIQKGQYMRTLRPPCESSLFLTIPNLAISWEGHIVVYSSTEEKTTLKDKNALHLFSINGKYLGSQILKEQVSDICIIGEHIVTGSIQGFLSIRDLHSLNLSINPLAMRLPIHCVCVTKEYSHILVGLEDGKLIVVGVGKPAEVKPSISNFISHAVGDYFGSPSFQLIEKSPLGINKLKAKFDFSKGSK

SEQ ID NO: 792015 - protein, 99 aa, Homo sapiens
YLRISLLKGTYKDPVYKRSHSLNLSINPLAMRLPIHCVCVTKEYSHILVGLEDGKLIVVGVGKPAEMRSGQLSRKFWGSSKRLSQISAGETEYNTQDSK

SEQ ID NO: 792016 - protein, 254 aa, Homo sapiens
TDYCGIHLISGSRDTTCMIWQITQQGGVPVGLASKPFQILYGHTNEVLSVGISTELDMAVSGSRDGTVIIHTIQKGQYMRTLRPPCESSLFLTIPNLAISWEGHIVVYSSTEEKTTLKDKNALHLFSINGKYLGSQILKEQVSDICIIGEHIVTGSIQGFLSIRDLHSLNLSINPLAMRLPIHCVCVTKEYSHILVGLEDGKLIVVGVGKPAEMRSGQLSRKFWGSSKRLSQISAGETEYNTQDSKSRITKQQR

SEQ ID NO: 792017 - protein, 255 aa, Homo sapiens
TDYCGIHLISGSRDTTCMIWQITQQGGVPVGLASKPFQILYGHTNEVLSVGISTELDMAVSGSRDGTVIIHTIQKGQYMRTLRPPCESSLFLTIPNLAISWEGHIVVYSSTEEKTTLKDKNALHLFSINGKYLGSQILKEQVSDICIIGEHIVTGSIQGFLSIRDLHSLNLSINPLAMRLPIHCVCVTKEYSHILVGLEDGKLIVVGVGKPAEVKPSISNFISHAVGDYFGSPSFQLIEKSPLGINKLKAKFDFS

SEQ ID NO: 792018 - protein, 108 aa, Homo sapiens
SCESCRSLALGRGLMILSPLRKFRSLDSNSGTCFSWTGWLWVGELCLLAIVLWTFNSPSLESTVPSATVFLMGQGQHVLAGEMKNQKTGFGSFHWCLCALWSPFRGVW

SEQ ID NO: 792019 - protein, 67 aa, Homo sapiens
KRVHKLGRSHFHRMHRSQRKDTENMKKQGNGAPPTEPSNSPAADPHPKETEDILERELNIHIIQLWA

SEQ ID NO: 792020 - protein, 94 aa, Homo sapiens
ALLQLFNSTFYGKSSLQQHARVWRCSNKTLFTRTGNGLGLAAELFADPAPRQRKEVQEGCNESRGLDWELVRQVQRALGQNSRHLAQVSQPTPL

SEQ ID NO: 792021 - protein, 37 aa, Homo sapiens
ETCLLKVYSPCGRWSNPDTSQIISALCSELWVFYPTQ

SEQ ID NO: 792022 - protein, 103 aa, Homo sapiens
ETGFCFVTEAGVQWCNDIIIGHCNLDLLGPSKPPTSASQVAETTGMHYHTQLIFFTFVDTGSPYVAHAGFKHLGSSNPPPSASQNAGIIGMSHRAWPSFTFKK

SEQ ID NO: 792023 - protein, 193 aa, Homo sapiens
  misc_feature (25)..(25): Xaa can be any naturally occurring amino acid
MVPPKHRRALIWFGCVPTQISFFFXNSELFIGLLLPKGYPASAGLMPQNFGVIGLRHHFAIHYPAGGGLLDGLHGVAAVQGITKIKVLAIFQQAAVGGDLSLQLDLDVQQGLILLGLALSLCPGLCQLCLKVQQDPVELLHLEGERASTSLRLFSKLAFRFLMESRSISKDWTVRLSSVSVVSAAPTSLVPNP

SEQ ID NO: 792024 - protein, 171 aa, Homo sapiens
IGPHTFNHLIFDKPDKNKERVKDSLFNKWCWDNWLAMYGRLKLNPFLPPYTKINSRWIKDLNVKPKTIKALEDNLGNTILDIGTGRDFMMKMPKAIATKAKIDKWDLIKELLHSKRNTNRVNRQPIGWEKISANCASNKGVISSIYKEHKQIYKKNYELILYMCLHVCEIV

SEQ ID NO: 792025 - protein, 171 aa, Homo sapiens; identical to SEQ ID NO: 792024

SEQ ID NO: 792026 - protein, 70 aa, Homo sapiens
FRSQMNPDEPQSQMNLRAKVNLTLKSLKTGLVAESIISRQLAFQGFLRRASNPLHTAFISSWGRSYVFAS

SEQ ID NO: 792027 - protein, 76 aa, Homo sapiens
VVVVEMGVGVGVCVPVGVGVGVTVMVVVMGVDVGVCVPVGARLSMGWGRSAEQGTGGGSEQGPFGSQNMTSWGFSL

SEQ ID NO: 792028 - protein, 311 aa, Homo sapiens
GAQILVVEWWGLVILLFCDWTTAQVLDDDQECALGMLEVPLCQILPYADLTLEQRFQLDHSGLDSLISMRLVLRFLQVEERELGSPYTGPEALKKGPLLIKKVATNQGPKAQPQEEGPTDLPCPPDPASDTKDVSRSTTTTTSATTVATEPTSQETGPEPKGKDSAKRFCEPIGEKKSPATIFLTVPGPHSPGPIKSPRPMKCPASPFAWPPKRLAPSMSSLNSLASSCFDLADISLNIEYAPLCLIFSKIACMKNTSLDGKVDMNLHFCASCFFTKYLPKRQHGVVERTQDKGERAKQAVYGSSCVLTIK

SEQ ID NO: 792029 - protein, 206 aa, Homo sapiens
RSVLHLEHNQLCGSSCVLTIHRSSDTKDVSRSTTTTTSATTVATEPTSQETGPEPKGKDSAKRFCEPIGEKKSPATIFLTVPGPHSPGPIKSPRPMKCPASPFAWPPKRLAPSMSSLNSLASSCFDLADISLNIEYAPLCLIFSKIACMKNTSLDGKVDMNLHFCASCFFTKYLPKRQHGVVERTQDKGERAKQAVYGSSCVLTIK

SEQ ID NO: 792030 - protein, 99 aa, Homo sapiens
GAQILVVEWWGLVILLFCDWTTAQVLDDDQECALGMLEVPLCQILPYADLTLEQRFQLDHSGLDSLISMRLVLRVNLSGPLGEGRNRALAMEQGVLPQH

SEQ ID NO: 792031 - protein, 170 aa, Homo sapiens
MSEELAQGPKESPPAPRAGPREVWKKGGRLLSVLLAVNVLLLACTLISGGAFNKVAVYDTDVFALLTAMMLLATLWILFYLLRTVRCPCAVPYRDAHAGPIWLRGGLVLFGICTLIMDVFKTGYYSSFFECQSAIKILHPLIQAVFVIIQTYFLWVSAKDCVHVHLDLTW

SEQ ID NO: 792032 - protein, 632 aa, Homo sapiens
ERGALRGAAAGPSRRGRTHQPLRYHLATPAEATPTAWLKPRGHQAEALEMPLHQLGDKPLTFPSPNSAMENGLDHTPPSRRASPGTPLSPGSLRSAAHSPLDTSKQPLCQLWAEKHGARGTHEVRYISAGQSVACGWWAFAPPCLQVLNTPKGILFFLCAAAFLQGMTVNGFINTVITSLERRYDLHSYQSGLIASSYDIAACLCLTFVSYFGGSGHKPRWLGWGVLLMGTGSLVFALPHFTAGRYEVELDAGVRTCPANPGAVCADSTSGLSRYQLVFMLGQFLHGVGATPLYMLGVLFFAIACFLYKPLSESQFSLSASEAATLFGYLVVPAGGGGTFLGGFFVNKLKLRGSAVIKFCLFCTVVSLLGILVFSLHCPSVPMAGVTASYGGSLLPEGHLNLTAPCNAACSCQPEHYSPVCGSDGLMYFSLCHAGCPAATETNVDGQKVYRDCSCIPQNLSSGFGHATAGKCTSTCQRKPLLLVFIFVVIFFTFLSSIPALTATLRCVRDPQRSFALGIQWIVVRILGGIPGPIAFGWVIDKACLLWQDQCGQQGSCLVYQNSAMSRYILIMGLLYKVLGVLFFAIASSRAASDHRPRPPGHGGHSAFPDDRTVPLGDAITRELLFDLQPST

SEQ ID NO: 792033 - protein, 149 aa, Homo sapiens
SGAFTLATSAAPTMAEEEETAALTEKVIRTQRVFINLLDSYSSGNIGKFLSNCVVGASLEEITEEEEEEDENKSAMLEASSTKVKEGTFQIVGTLSKPDSPRPDFAVETYSAISQEDLLMRLLECDVIIYNITESSQQMEEAIWAVSGQ

SEQ ID NO: 792034 - protein, 120 aa, Homo sapiens
SGAFTLATSAAPTMAEEEETAALTEKVIRTQRVFINLLDSYSSGNIGKFLSNCVVGASLEEITEEEEEEDENKSAMLEASSTKVKEGTFQIVGTLSKPDSPRPDFAVETYSVSPGGSGQE

SEQ ID NO: 792035 - protein, 272 aa, Homo sapiens
SGAFTLATSAAPTMAEEEETAALTEKVIRTQRVFINLLDSYSSGNIGKFLSNCVVGASLEEITEEEEEEDENKSAMLEASSTKVKEGTFQIVGTLSKPDSPRPDFAVETYSAISQEDLLMRLLECDVIIYNITESSQQMEEAIWAVSALSEEVSHFEKRKLFILLSTVMTWARSKALDPEDSEVPFTEEDYRRRKSHPNFLDHINAEKMVLKFGKKARKFAAYVVAAGLQYGAEGGMLHTFFKMAWLGEIPALPVFGDGTNVIPTIHVLDLA

SEQ ID NO: 792036 - protein, 222 aa, Homo sapiens
SGAFTLATSAAPTMAEEEETAALTEKVIRTQRVFINLLDSYSSGNIGKFLSNCVVGASLEEITEEEEEEDENKSAMLEASSTKVKEGTFQIVGTLSKPDSPRPDFAVETYSAISQEDLLMRLLECDVIIYNITESSQQMEEAIWAVSALSEEVSHFEKRKLFILLSTVMTWARSKALDPEDSEVPFTEEDYRRRKSHPNFLDHINAEKMVLKFGKKAVIYAH

SEQ ID NO: 792037 - protein, 157 aa, Homo sapiens
GEFQEVDKIMTSDEVSETSTLVTPEPLTFVDPVLTEATPKEKECEELKSCPWLSLPGNSAISNVDNGKEELCKPNLVCEADDNHQQLHGHHNEQPSSTHDSPTATSPLKENSEVSCFTSDLSGPESRTISLENCGFEGGGLLKRSAEKTDSSYFYRG

SEQ ID NO: 792038 - protein, 89 aa, Homo sapiens
GLWLVEKHWLPLLSLNEACRASSRTCTLPLIMFMIGRKWIKSGQKVKKKRWPPERDIHIYLSTYQDTCFGSLLLLREIPGYPGETSDNK

SEQ ID NO: 792039 - protein, 92 aa, Homo sapiens
SAKRAARLKRGPSPEFDWTKGAARIVKENYCFGDRVHALSLQATVQVVQSSLIQTCVSQVQVILLSQPPQQMRLQVCTTTPSTLGGQGGRIT

SEQ ID NO: 792040 - protein, 155 aa, Homo sapiens
MGPVTPAHAGAYRCCGCFSHSRYEWSAPSDPLDIVITGKYKKPSLSTQVDPMMRLGEKLTLFCSSEISFDQYHLFRHGVAHGQWLSGGQRHREAFQANFSVGRATPVPGGTYRCYGSFNDSPYKPPVTRCNFTPQETLRVLLCHSQNPPLNLVSK

SEQ ID NO: 792041 - protein, 184 aa, Homo sapiens
MGPVTPAHAGAYRCCGCFSHSRYEWSAPSDPLDIVITGKYKKPSLSTQVDPMMRLGEKLTLFCSSEISFDQYHLFRHGVAHGQWLSGGQRHREAFQANFSVGRATPVPGGTYRCYGSFNDSPYKPPVTRCNFTPQETLRVLLCHSQNPPLNLTPPWQTQSPRKANGRMKRSLQQKRHRRSYMPS

SEQ ID NO: 792042 - protein, 119 aa, Homo sapiens
WGLGATTLKKGGRSPDEVTLTSIVPTRDGTAPPPQSPGSPGTGQDEEWSDEESPRKAATGVRVRALYDYAGQEADELSFRAGEELLKMSEEDEQGWCQGQLQSGRIGLYPANYVECVGA

SEQ ID NO: 792043 - protein, 115 aa, Homo sapiens
MPVIAPEDFPVGQDVVVEDSDIDDPDPVLAYDNGSQYVGQAGLEILASSNPLASASKSGGITGMGHHALPLPFLHLDMFGHKNAPGLQWPTVFSTVTCCAGLWHRSNRLYYSYRL

SEQ ID NO: 792044 - protein, 98 aa, Homo sapiens
MKWLCQDSIREAPPPHGQRAGALLEGIGPSAKMELQAVCETLLPGSGAGPEASRTGGQERRWARSGKGQGPPGLHEATREPTWTVQCPTSVSYHFMLH

SEQ ID NO: 792045 - protein, 133 aa, Homo sapiens
MGACTPRLVPDSGGPALAVVGPSPHLKIMGVGLDPGSNQKSQRFSRDAAEARGAEETPASDRLGAISSSAHCSCGPCSTSLHPSVPQPPHQQSHSMAQKSERETVAMCGGWHTMGLWKNVSSPQGSLWPHPLL

SEQ ID NO: 792046 - protein, 147 aa, Homo sapiens
GLSTEVGVLHLPELLLDMLLGPDLRLQADCSSSRADMSSFWLRRTFHSGSSVLDPRLELLKASSSSVILEARAMTVTHANFQSSVDFLGFHLQSSGLLQKEFFLCKFIYNINEMFLNFLANCPRKVDFQYRELLLPPISKMLEPPLL

SEQ ID NO: 792047 - protein, 129 aa, Homo sapiens
MLPENRTNLSSVHGILSFIQSSTRRAYQHIVDEMGENRRPVQYGRSAATTSNPHRDNIRYGTSNIDTSEGTSDDMTVADAASLRRQIIKLNRRLQHLEEENKERAKREMVMYSITIGLWLLSNWLWFRR

SEQ ID NO: 792048 - protein, 70 aa, Homo sapiens
NDYWVVILAPSFNLATLEVLIGPIQLTRNSLHVTNYSLTIGISPRAKIRQRNQVIKKLRKLQLRIDKKIE

SEQ ID NO: 792049 - protein, 727 aa, Homo sapiens
GTMEPGDAARPGSGRATGAPPPRLLLLPLLLGWGLRVAAAASASSSGAAAEDSSAMEELATEKEAEESHRQDSVSLLTFILLLTLTILTIWLFKHRRVRFLHETGLAMIYGLIVGVILRYGTPATSGRDKSLSCTQEDRAFSTLLVNVSGKFFEYTLKGEISPGKINSVEQNDMLRKVTFDPEVFFNILLPPIIFHAGYSLKKRHFFRNLGSILAYAFLGTAVSCFIIGNLMYGVVKLMKIMGQLSDKFYYTDCLFFGAIISATDPVTVLAIFNELHADVDLYALLFGESVLNDAVAIVLSSSIVAYQPAGLNTHAFDAAAFFKSVGIFLGIFSGSFTMGAVTGVNANVTKFTKLHCFPLLETALFFLMSWSTFLLAEACGFTGVVAVLFCGITQAHYTYNNLSVESRSRTKQLFEVLHFLAENFIFSYMGLALFTFQKHVFSPIFIIGAFVAIFLGRAAHIYPLSFFLNLGRRHKIGWNFQHMMMFSGLRGAMAFALAIRDTASYARQMMFTTTLLIVFFTVWIIGGGTTPMLSWLNIRVGVEEPSEEDQNEHHWQYFRVGVDPDQDPPPNNDSFQVLQGDGPDSARGNRTKQESAWIFRLWYSFDHNYLKPILTHSGPPLTTTLPAWCGLLARCLTSPQVYDNQEPLREEDSDFILTEGDLTLTYGDSTVTANGSSSSHTASTSLEGSRRTKSSSEEVLERDLGMGDQKVSSRGTRLVFPLEDNA

SEQ ID NO: 792050 - protein, 727 aa, Homo sapiens; identical to SEQ ID NO: 792049

SEQ ID NO: 792051 - protein, 727 aa, Homo sapiens; identical to SEQ ID NO: 792049

SEQ ID NO: 792052 - protein, 707 aa, Homo sapiens
GTMEPGDAARPGSGRATGAPPPRLLLLPLLLGWGLRVAAAASASSSGAAAEDSSAMEELATEKEAEESHRQDSVSLLTFILLLTLTILTIWLFKHRRVRFLHETGLAMIYGLIVGVILRYGTPATSGRDKSLSCTQEDRAFSTLLVNVSGKFFEYTLKGEISPGKINSVEQNDMLRKVTFDPEVFFNILLPPIIFHAGYSLKKRHFFRNLGSILAYAFLGTAVSCFIIGNLMYGVVKLMKIMGQLSDKFYYTDCLFFGAIISATDPVTVLAIFNELHADVDLYALLFGESVLNDAVAIVLSSSIVAYQPAGLNTHAFDAAAFFKSVGIFLGIFSGSFTMGAVTGVNANVTKFTKLHCFPLLETALFFLMSWSTFLLAEACGFTGVVAVLFCGITQAHYTYNNLSVESRSRTKQLFEVLHFLAENFIFSYMGLALFTFQKHVFSPIFIIGAFVAIFLGRAAHIYPLSFFLNLGRRHKIGWNFQHMMMFSGLRGAMAFALAIRDTASYARQMMFTTTLLIVFFTVWIIGGGTTPMLSWLNIRVGVDPDQDPPPNNDSFQVLQGDGPDSARGNRTKQESAWIFRLWYSFDHNYLKPILTHSGPPLTTTLPAWCGLLARCLTSPQVYDNQEPLREEDSDFILTEGDLTLTYGDSTVTANGSSSSHTASTSLEGSRRTKSSSEEVLERDLGMGDQKVSSRGTRLVFPLEDNA

SEQ ID NO: 792053 - protein, 492 aa, Homo sapiens
GTMEPGDAARPGSGRATGAPPPRLLLLPLLLGWGLRVAAAASASSSGAAAEDSSAMEELATEKEAEESHRQDSVSLLTFILLLTLTILTIWLFKHRRVRFLHETGLAMIYGLIVGVILRYGTPATSGRDKSLSCTQEDRAFSTLLVNVSGKFFEYTLKGEISPGKINSVEQNDMLRKVTFDPEVFFNILLPPIIFHAGYSLKKRHFFRNLGSILAYAFLGTAVSCFIIGNLMYGVVKLMKIMGQLSDKFYYTDCLFFGAIISATDPVTVLAIFNELHADVDLYALLFGESVLNDAVAIVLSSSIVAYQPAGLNTHAFDAAAFFKSVGIFLGIFSGSFTMGAVTGVNANVTKFTKLHCFPLLETALFFLMSWSTFLLAEACGFTGVVAVLFCGITQAHYTYNNLSVESRSRTKQLFEVLHFLAENFIFSYMGLALFTFQKHVFSPIFIIGAFVAIFLGRAAHIYPLSFFLNLGRRHKIGWNFQHMMMFSGKKA

SEQ ID NO: 792054 - protein, 349 aa, Homo sapiens
GTMEPGDAARPGSGRATGAPPPRLLLLPLLLGWGLRVAAAASASSSGAAAEDSSAMEELATEKEAEESHRQDSVSLLTFILLLTLTILTIWLFKHRRVRFLHETGLAMIYGLIVGVILRYGTPATSGRDKSLSCTQEDRAFSTLLVNVSGKFFEYTLKGEISPGKINSVEQNDMLRKVTFDPEVFFNILLPPIIFHAGYSLKKRHFFRNLGSILAYAFLGTAVSCFIIGNLMYGVVKLMKIMGQLSDKFYYTDCLFFGAIISATDQNQEPLREEDSDFILTEGDLTLTYGDSTVTANGSSSSHTASTSLEGSRRTKSSSEEVLERDLGMGDQKVSSRGTRLVFPLEDNA

SEQ ID NO: 792055 - protein, 130 aa, Homo sapiens
YNHPFLCPSSIHPPIPLSILPFFPPSTYSPIQPSIPPSIQTSIHPLNKSMALPHWPSFISSVNPFSPTSEPSRTSPPIPIYTPREYLLSLRKASPKSQSEVGPPAIPLLKNLIPSFSTVVIDITKRLLLG

SEQ ID NO: 792056 - protein, 125 aa, Homo sapiens
GLHYNLALHVDQEIGGRSSGLQFIMTAIGKFNCPSWLVCLKSMCNRDQALALGGESSWHPLSILSWVLSHSDSAWWRDSHPFLPCLKTHISLRTDFQLPGLISQDILATLCVGTFNPGQRVMGYK

SEQ ID NO: 792057 - protein, 147 aa, Homo sapiens [sequence omitted]

SEQ ID NO: 792058 - protein, 120 aa, Homo sapiens
MLKSLVNEVTDGSWSMVGCLAGARAAMERLTCCQKCYMSRKKMGEKPGFLPTLPYAKVDSPISLAGSQLTREPVRVSPPTRLSRVGEKQAMDLRASSPPGLVYINMYCIRSAARGPRVLQ

SEQ ID NO: 792059 - protein, 116 aa, Homo sapiens
LACNGVISAHRNLRLLGSTDSHASASRVAGITGAGHYTQLIFVFSVVMGFHHVGQAGLELLTLGDPPASASQSAGITGVRHHAWPVNCLLSSLSPVGNLGYQLQLRAPQTCACPKH

SEQ ID NO: 792060 - protein, 150 aa, Homo sapiens
MGGNSTTTISELGFLALDGMWLVLQGSSYNGPRVSLCEGENILSTKKVEPPSFLEHSRRCIQTQIFVIADYCYYCQNSQLFLQGFGSPGLSTDAALGPVPPVPPLLTASVHSEDSPVMDLWGWIPLGWSALDRSPEMCHSRSCPGDSRCN

SEQ ID NO: 792061 - protein, 99 aa, Homo sapiens
LACFSKVMISTLGLGGSYIFLPAGTGSGPALPRGGCEPCGGRERTKWKGIFLPESHLLCMPVPAKDRRGETAAPRASSLLLRKKGTNKFSSILRILCSC

SEQ ID NO: 792062 - protein, 76 aa, Homo sapiens
TSLLVPAPAFLIIFQKHWMLLLGSGTDPFLALCTAQTPAVTFPSSEASPSVLGVPLAPSYSTFLEVKPVAPGPASL

SEQ ID NO: 792063 - protein, 221 aa, Homo sapiens
MSGALDVLQMKEEDVLKFLAAGTHLGGTNLDFQMEQYIYKRKSDGIYIINLKRTWEKLLLAARAIVAIENPADVSVISSRNTGQRAVLKFAAATGATPIAGRFTPGTFTNQIQAAFREPRLLVVTDPRADHQPLTEASYVNLPTIALCNTDSPLRYVDIDIPCNNKGAHSVGLMWWMLAREILHMCGTISHEHPWRSCLISTSTEILKRLKKKSRLLLKRL

SEQ ID NO: 792064 - protein, 198 aa, Homo sapiens
PRSGLSKSIYPADGRVLKETIYPHLLCSTSVQENKEQSRPFVMGYMNERKEPFYKVLFSGEVSGRITLWHIPDVPVSKFDGSPREIPVTATWTLQDNFDKHDTMSQSIIDYFSGLKDGAGTAVVTSSEYIPSLDKLICGCEDGTIIITQALNAAKARLLEDSPPHKVLKGHHQSVTSLLYPHGLSLWDIFTEEILHKF

SEQ ID NO: 792065 - protein, 83 aa, Homo sapiens
WPVGPMAIAKSDKRPYLWPPGPAGLENSAGAPRLGRVGAWNGPGWGRGAGVPALVCLGEFSPQTHLIAKKLILPCGRWYSPSK

SEQ ID NO: 792066 - protein, 117 aa, Homo sapiens
NFTGYFSVSSVDPSFLPNFLILHHFRVQSLAFICIHTYSLVITSVPMALKSICLPMTNTFILLLKLFSKLKTYVSNSLFDISWIPPNSHLKLIMSQIKLLIHPLHPAYFTCSLSQLS

SEQ ID NO: 792067 - protein, 74 aa, Homo sapiens
GEDKALKNNCSSLQHFTFHTRDKRPNPHYPLRSRKGNGTGLCLLGVGSHECCCRSATETPNTLGPMAAHLSLIK

SEQ ID NO: 792068 - protein, 574 aa, Homo sapiens
MLREFSKWGVEASPGKAWERKRSLLRGAVGRYRGATGGDLFWAPFPSWGTMEFPEHSQQLLQSLREQRSQGFLCDCTVMVGSTQFLAHRAVLASCSPFFQLFYKERELDKRDLVCIHNEIVTAPAFGLLLDFMYAGQLTLRGDTPVEDVLAAASYLHMNDIVKVCKRRLQARALAEADSTKKEEETNSQLPSLEFLSSTSRGTQPSLASAETSGHWGKGEWKGSAAPSPTVRPPDEPPMSSGADTTQPGMEVDAPHLRAPHPPVADVSLASPSSSTETIPTNYFSSGISAVSLEPLPSLDVGPESLRVVEPKDPGGPLQGFYPPASAPTSAPAPVSAPVPSQAPAPAEAELVQVKVEAIVISDEETDVSDEQPQGPERAFPSGGAVYGAQPSQPEAFEDPGAAGLEEVGPSDHFLPTDPHLPYHLLPGAGQYHRGLVTSPLPAPASLHEPLYLSSEYEAAPGSFGVFTEDVPTCKTCGKTFSCSYTLRRHATVHTRERPYECRYCLRSYTQSGDLYRHIRKAHNEDLAKRSKPDPEVGPLLGVQPLPGSPTADRQSSSGGGPPKDFVLAPKTNI

SEQ ID NO: 792069 - protein, 613 aa, Homo sapiens
VTLQPQTQVKENKTQPPVAYQYWPPAELQYLPPPESQYGYPGMPPALQGRAPYPQPPTVRLNPTASRSGQGGTLHAVIDEARKQGDLEAWRFLVILQLVQAGEETQVGAPARAETRCEPFTMKMLKDIKEGVKQYGSNSPYIRTLLDSIAHGNRLTPYDWESLAKSSLSSSQYLQFKTWWIDGVQEQVRKNQATKPTVNIDADQLLGTGPNWSTINQQSVMQNEAIEQVRAICLRAWGKIQDPGTAFPINSIRQGSKEPYPDFVARLQDAAQKSITDDNARKVIVELMAYENANPECQSAIKPLKGKVPAGVDVITEYVKACDGIGGAMHKAMLMAQAMRGLTLGGQVRTFGKKCYNCGQIGHLKRSCPVLNKQNIINQAITAKNKKPSGLCPKCGKGKHWANQCHSKFDKDGQTIVGKQEEGPASGPPTNWGIPSSTVCSSGFSRTTTPTENTTTSGSQPITTIQQLSRATAGSATVDLCSTQMVSLLPGEPPQKIPRGVYGPLPEGRVGLILGRSSLNLKGVQIHTGVIYSDYKGGIQLVISSTVPWSANPGDRIAQLLLLPYVKIGENKTERTGGFGSTNPAGKATYWANQVSEDRPVCTVTIQGKSLKD

SEQ ID NO: 792070 - protein, 73 aa, Homo sapiens
QESCQVGRRAKRFFKFLRWSHHPRGIAVWRWCLSRSRRNQREQQEELRDSFAESRNDRVSEKDVSILVPQGTN

SEQ ID NO: 792071 - protein, 78 aa, Homo sapiens
VSTGVPRKQAQTAKTKTVLAVSTGVPRKQAQTAKTKTVLAVFTGVPRKQAQTAKTKTVLAVFTGVPRKQAQTAKTKTV

SEQ ID NO: 792072 - protein, 101 aa, Homo sapiens
GRASWSPDGSQHRRGTEPSLQGQPPWASRLSLPCPGGEEAHPEGLGGVSGGELRVPRWMMEEPHMGYRDRQKDGEEETGRQTQGPLTGSEGGGAGGLDSWV

SEQ ID NO: 792073 - protein, 289 aa, Homo sapiens
RGQARPGPIRGLTACPAVHPEEARPLCPIRKSQGSGEVRMVAPAARVFLRAVRAALTSTVPDLLCLLARGSPRGLASGRLPLAVHSAQHGPGSGAPWLRIARRALRFVLSKHWGDDCYLTNRLWQDLKPPSHVENGQELRLAPPVQWALQVQGNQLQTAVLCLRMAPPEPAGSLPKNLERVYVDTQVSASGDFLRGRARGTAGPGGSGSGSPRGRGRLRRPGRSPGAAPSSVSRGRKEATQARSRARGRRGGAVARVCRPESRQRWARPTSSPGGLIRGRRKNGIEAFQ

SEQ ID NO: 792074 - protein, 593 aa, Homo sapiens
MKADLKQHHHHWSIFSYIRLRLPSMLLLFSVILISWVSTVGGEGTLCDFPKIHHGFLYDEEDYNPFSQVPTGEVFYYSCEYNFVSPSKSFWTRITCTEEGWSPTPKCLRMCSFPFVKNGHSESSGLIHLEGDTVQIICNTGYSLQNNEKNISCVERGWSTPPICSFTKGECHVPILEANVDAQPKKESYKVGDVLKFSCRKNLIRVGSDSVQCYQFGWSPNFPTCKGQVRSCGPPPQLSNGEVKEIRKEEYGHNEVVEYDCNPNFIINGPKKIQCVDGEWTTLPTCVEQVKTCGYIPELEYGYVQPSVPPYQHGVSVEVNCRNEYAMIGNNMITCINGIWTELPMCVATHQLKRCKIAGVNIKTLLKLSGKEFNHNSRIRYRCSDIFRYRHSVCINGKWNPEVDCTEKREQFCPPPPQIPNAQNMTTTVNYQDGEKVAVLCKENYLLPEAKEIVCKDGRWQSLPRCVESTAYCGPPPSINNGDTTSFPLSVYPPGSTVTYRCQSFYKLQGSVTVTCRNKQWSEPPRCLDPCVVSEENMNKNNIQLKWRNDGKLYAKTGDAVEFQCKFPHKAMISSPPFRAICQEGKFEYPICE

SEQ ID NO: 792075 - protein, 202 aa, Homo sapiens
MKADLKQHHHHWSIFSYIRLRLPSMLLLFSVILISWVSTVGGEGTLCDFPKIHHGFLYDEEDYNPFSQVPTGEVFYYSCEYNFVSPSKSFWTRITCTEEGWSPTPKCLRMCSFPFVKNGHSESSGLIHLEGDTVQIICNTGYSLQNNEKNISCVERGWSTPPICSFTKGECHVPILEANVDAQPKKESYKVGDVLKFSCRIT

SEQ ID NO: 792076 - protein, 43 aa, Homo sapiens
NHSTRIKELLGHGLDRGEAADMFAQQKVFNLKAKAHGRWSVKG

SEQ ID NO: 792077 - protein, 117 aa, Homo sapiens
MAGGVEPFAVSVNCHGLLSHAESSTLVVSGWVKLHQVIKMPSCSVKEEKKIIDAGIVPKSPLLDFIWMSLHLNEKLSTFAKSTVGRSIKSSVLINYTYSLAKIGCVSHRQCSCRPCW

SEQ ID NO: 792078 - protein, 101 aa, Homo sapiens
GGAAQPEMALARPNWAGVPPFPHSRGGEGSLSLTTLYGRPPYLPGLGMASQEHSGSFLAEEALLASLAPVCVCVCVCVCVCVCVCVCVCARARVRAEVEGG

SEQ ID NO: 792079 - protein, 97 aa, Homo sapiens
  misc_feature (30)..(30): Xaa can be any naturally occurring amino acid
MRPEDRMFHIRAVILRALSLAFLLSLRGAXAIKADHVSTYAAFVQTHRPTRELMLEFDEDEMVYVDLDKKETVWHLEELAKPFPLRLKGGLPNTAIL

SEQ ID NO: 792080 - protein, 332 aa, Homo sapiens
KPNLVPRLAECLRAVLMALYELFSHPVERSYRAGLCSKAALFLLLAAALTYIPPLLVAFRSHGFWLKRSSYEEQPTVRFQHQVLLVALLGPESDGFLAWSTFPAFNRLQGDRLRVPLVSTREEDRNQDGKTDMLHFKLELPLQSTEHVLGVQLILTFSYRLHRMATLVMQSMAFLQSSFPVPGSQLYVNGDLRLQQKQPLSCGGLDARYNISVINGTSPFAYDYDLTHIVAAYQERNVTTVLNDPNPIWLVGRAADAPFVINAIIRYPVEVISYQPGFWEMVKFAWVQYVSILLIFLWVFERIKIFVFQNQVVTTIPVTVTPRGDLCKEHLS

SEQ ID NO: 792081 - protein, 113 aa, Homo sapiens
AGARSARPASLTASLPPSLTQGLAEAEQLRGAADRALPTPGAARGPARTRKRRVPRLEHVPRLQPAARGSPARPARFVVYSKTVGHCVCTEVMWIPPRLISDQGCWACLGFLD

SEQ ID NO: 792082 - protein, 133 aa, Homo sapiens
KPNLVPRLAECLRAVLMALYELFSHPVERSYRAGLCSKAALFLLLAAALTYIPPLLVAFRSHGFWLKRSSYEEQPTVRFQHQVLLVALLGPESDGFLAWSTFPAFNRLQGDRLRVPLVSLCTARQWVIVYVQK

SEQ ID NO: 792083 - protein, 367 aa, Homo sapiens
KPNLVPRLAECLRAVLMALYELFSHPVERSYRAGLCSKAALFLLLAAALTYIPPLLVAFRSHGFWLKRSSYEEQPTVRFQHQVLLVALLGPESDGFLAWSTFPAFNRLQGDRLRVPLVSLCTARQWVIVYVQKLMWIPPRLISDQGCWACLGFQTREEDRNQDGKTDMLHFKLELPLQSTEHVLGVQLILTFSYRLHRMATLVMQSMAFLQSSFPVPGSQLYVNGDLRLQQKQPLSCGGLDARYNISVINGTSPFAYDYDLTHIVAAYQERNVTTVLNDPNPIWLVGRAADAPFVINAIIRYPVEVISYQPGFWEMVKFAWVQYVSILLIFLWVFERIKIFVFQNQVVTTIPVTVTPRGDLCKEHLS

SEQ ID NO: 792084 - protein, 106 aa, Homo sapiens
ENLYFHLQPLSKSRTKSPGSVFQNTASPVGKTPGASCLPRREWRPGGFAQTLTVLLPSDQLWGLAPLPLGRGLGRWASLHPSPCSPARDPEFQPRVMRGSNRYTYF

SEQ ID NO: 792085 - protein, 150 aa, Homo sapiens
  misc_feature (27)..(27): Xaa can be any naturally occurring amino acid
  misc_feature (34)..(34): Xaa can be any naturally occurring amino acid
  misc_feature (71)..(71): Xaa can be any naturally occurring amino acid
  misc_feature (105)..(105): Xaa can be any naturally occurring amino acid
  misc_feature (150)..(150): Xaa can be any naturally occurring amino acid
MDEERGKKAATRRGKTSNTRPKPRRRXNRDDTHXTTEAHKQRTTNGPPTKPDALKDTTEAHTTDDGPKEDXPPPRRPRPAEDPPRPGNRQSPELNPTPPQSAPRXNKHGPRAHNRPAPPHNRTSPPPEGAPRTHPPHTQQHPGPPPDPRX

SEQ ID NO: 792086 - protein, 151 aa, Homo sapiens
LGAIGLLETSRLLTATPKTPALTPRMEQLGLKGSIASVSLAQAEREMLLLPPFLHSLQQTQPGPNADDEEIQLLKKRERRKLLQLFDLLNIQEPIWHGFYGFILFCFALFFLEFMSCSDVMETVSVIVPTSCLLGEVRNNYVQSMNFHLGY

SEQ ID NO: 792087 - protein, 298 aa, Homo sapiens
RVPMQPWQCLRRFALAWWERTAEGRARSPREEAGPRDPGGRGEPDPERSSPPMLSADDAEYPREYRTLGGGGGGGSGGRRFSNVGLVHTSERRHTVIAAQSLEALSGLQKADADRKRDAFMDHLKSKYPQHALALRGQQDRMREQVGGWTVDPVCLLSSLCSHLHGDSAPSGAGQPAQTRSSRHTQGAQPGLADQAAKLSYASAESLETMSEAELPLGFSRMNRFRQSLPLSRSASQTKLRSPGTARPVHPPSPHRLLPLLFTPWSPLLPYSTPARLKLCSLSHSPFSPSNPSSLHLS

SEQ ID NO: 792088 - protein, 142 aa, Homo sapiens
SRRDPLGGWAAPGRARRDPAVPLSPLADPERSSPPMLSADDAEYPREYRTLGGGGGGGSGGRRFSNVGLVHTSERRHTVIAAQSLEALSGLQKADADRKRDAFMDHLKSKYPQHALALRGQQDRMREQVSGLPAAAAAAAAA

SEQ ID NO: 792089 - protein, 144 aa, Homo sapiens
MGSDKQRGGGVLILGSSHPARPLQTRSSRHTQGAQPGLADQAAKLSYASAESLETMSEAELPLGFSRMNRFRQSHASLPLGQPDQAALPRYCPPSPPSLPTQAPPSALHSLEPPPPLQHASSPQALLSFPQPLLPKQPQLSPSL

SEQ ID NO: 792090 - protein, 224 aa, Homo sapiens
RVPMQPWQCLRRFALAWWERTAEGRARSPREEAGPRDPGGRGEPDPERSSPPMLSADDAEYPREYRTLGGGGGGGSGGRRFSNVGLVHTSERRHTVIAAQSLEALSGLQKADADRKRDAFMDHLKSKYPQHALALRGQQDRMREQTRSSRHTQGAQAASPPGVLFLQFGEETRRVHITHEVSSLDTLHALIAHMFPQKLTMGMLKSPNTAILIKDEARNVFYEL

SEQ ID NO: 792091 - protein, 145 aa, Homo sapiens
MSIFSAKNCDEKPVGLSFVIAHSLSCISIRHCCESRGDCQLQNFFHDLVFAWCLRENGCSSLPLTVHVWDYCLAAPVELILISSPNFRSSLLSITPHLCMWLSELTGDSVIARKGISCLCDYKYQGTDSPSPTPTSTLTQRCMTK

SEQ ID NO: 792092 - protein, 139 aa, Homo sapiens
PPTPGAALTFRAGGRGRGGGEGGGGERLLFLLFRALSRPCSAPTGPEHGWRPQPGREGGRAGAESETAPPPRTNKHRRLQPEPAPRPPPPAASFQPGSALQPPPAPPRRDESASLRCSVLPPARRAVAAVAAALGKWRP

SEQ ID NO: 792093 - protein, 87 aa, Homo sapiens
GCRLERARSRARSWGRLTGWCPQGRCRHPPASRRPGLSLPGPFLASSSCPRYRGARRRRPRPHPAMTERGPHPPPEHPKTPGNAVLT

SEQ ID NO: 792094 - protein, 128 aa, Homo sapiens
MAIFTILILPIHEHGMFFHLFVSSLISLSSGLWFSSKRSFASLVSFIPRYFILFVAIMNVSLFMIWLYACMLLVYRNASDFCTLILYPQALLKLLISLRSFCTETMEFSRYRIMSSANKDNMTSSLSI

SEQ ID NO: 792095 - protein, 174 aa, Homo sapiens
MTTKNLETKVTVTSSPIRGAGDGMETEEPPKSVEVTSGVQSRKHHSLQSPWKKAVPSESPGVLQLGKMLTEKAMEVKAVRILVPKAAITHDIPNKNTKVKSLGHHKGEFLGQSEGVIEPNKELSEVKNVLEKLKNSERRLLQDKEGLSNQLRVQTEVRRALIDKMSTTLYVWTF

SEQ ID NO: 792096 - protein, 400 aa, Homo sapiens
MTTKNLETKVTVTSSPIRGAGDGMETEEPPKSVEVTSGVQSRKHHSLQSPWKKAVPSESPGVLQLGKMLTEKAMEVKAVRILVPKAAITHDIPNKNTKVKSLGHHKGEFLGQSEGVIEPNKELSEVKNVLEKLKNSERRLLQDKEGLSNQLRVQTEVNRELKKLLVASVGDDLQYHFERLAREKNQLILENEALGRNTAQLSEQLERMSIQCDVWRSKFLASRVMADELTNSRAALQRQNRDAHGAIQDLLSEREQFRQEMIATQKLLEELLVSLQWGREQTYSPSVQPHSTAELALTNHKLAKAVNSHLLGNVGINNQKKIPSTVEFCSTPAEKMAETVLRILDPVTCKESSPDNPFFESSPTTLLATKKNIGRFHPYTRYENITFNCCNHCRGELIAL

SEQ ID NO: 792097 - protein, 400 aa, Homo sapiens; identical to SEQ ID NO: 792096

SEQ ID NO: 792098 - protein, 400 aa, Homo sapiens; identical to SEQ ID NO: 792096

SEQ ID NO: 792099 - protein, 400 aa, Homo sapiens; identical to SEQ ID NO: 792096

SEQ ID NO: 792100 - protein, 139 aa, Homo sapiens [sequence omitted]

SEQ ID NO: 792101 - protein, 104 aa, Homo sapiens
DLCGGIGTRGRGDLELSWKGVPENGFMAWSQREKDAAWTPSESLSLPSCLEMIVTRDFDDGPIQFLNFRRDHRILIVLLPSRPLSPAWVGFPLLGSLALQLIFL

SEQ ID NO: 792102 - protein, 118 aa, Homo sapiens
APRVPVGPQVGGSGRGRARERRPRLEVSGNEARPRLLPPLKDSFPRWRRDAALGPNPGFGRPSRFPGPFPRPGRGDGNGARATKAGSVTPPTCLVCRRGLPQCQALWSQNLAKKKTAN

SEQ ID NO: 792103 - protein, 110 aa, Homo sapiens
QIKKRNRLQAGLNSVVRVGLTENMRSESSLQGCEEVSFWQKSCEGLSGQRRLQCKSPEVGTCLVCLKESNEASVARTECARREGTEDVEGRSVCNCTPSMLILCVISRLY

SEQ ID NO: 792104 - protein, 108 aa, Homo sapiens
ETEFHTVYQIGVQWCNPSLLQPVGPGLKRSSHLCHLNRWDYRWVPPYPAVEKKMVGYYSVAQAGVELLASSDPPASASQSAGITGLSYFPRLFPRLLIHTMTLAFPTS

SEQ ID NO: 792105 - protein, 392 aa, Homo sapiens
MSCLYSRLSAPCGVRAFSCISACGPRPGRCCITAAPYRGVSCYRGLTGGFGSHSVCGGFRAGSCGRSFGYRSGGVCGPSPPCIATVSVNESLLTPLNLEIDPNAQCVKQEEKEQIKSLNSRFAAFMDKVHFLEQQNKLLETKLQFFQNRECCKSNLEPLFEGYNSATGGRVHGSHSGRLASELNHVQEVLEGYKKKYEEEVALRATAENEFVALKKDVDCAYLRKSDLEANVEALTQEIDFLRRLYEEEIRVLQSHISDTSVVVKMDNSRDLNMHCVITEIKAQYDDIATRSRAEAESWYRSKCEEMKATVIRHGETLRRTKEEINELNRMIQRLTAEVENAKCQNSKLEAAVAQSEQQGEAALSDARCKLAELEGALQKAKQDMACLIREY

SEQ ID NO: 792106 - protein, 109 aa, Homo sapiens
MWSTPCLCTSYCQFCLDSGCSPRRAGDIGSSNQHFSHFHTRCTSWSSRTSCWRQSCSSSRTVSAARATWSLCLRATTLRREAECMEANSGRLASELNHVQEVLEGYKKK

SEQ ID NO: 792107 - protein, 210 aa, Homo sapiens
MSCLYSRLSAPCGVRAFSCISACGPRPGRCCITAAPYRGVSCYRGLTGGFGSHSVCGGFRAGSCGRSFGYRSGGVCGPSPPCIATVSVNESLLTPLNLEIDPNAQCVKQEEKEQIKSLNSRFAAFMDKVHFLEQQNKLLETKLQFFQNRECCKSNLEPLFEGYNSATGGRVHGSQQWEAGLRAQPRAGGAGGLQEEVSAVGGGFGEIKWD

SEQ ID NO: 792108 - protein, 244 aa, Homo sapiens
MDKFPSVQHFFDSCDHLQKIQFPECVCLCLHSHFFSSPDLSLVCFVPRYEEEVALRATAENEFVALKKDVDCAYLRKSDLEANVEALTQEIDFLRRLYEEEIRVLQSHISDTSVVVKMDNSRDLNMHCVITEIKAQYDDIATRSRAEAESWYRSKCEEMKATVIRHGETLRRTKEEINELNRMIQRLTAEVENAKCQNSKLEAAVAQSEQQGEAALSDARCKLAELEGALQKAKQDMACLIREY

SEQ ID NO: 792109 - protein, 67 aa, Homo sapiens
MRPPRAPVVPPDLGGPRLCPVPAAGGARSPSSPYSVETPYGFHLDLDFLKYIEELERGPAACRAPGP

SEQ ID NO: 792110 - protein, 81 aa, Homo sapiens
GLGDTGQRCPCRLCLWLGPQGEGGNPRPAASYPELQATSSAPWHCTCTVGREGGKAGRGGGGRMSLEVGVLLQPWVSRCLG

SEQ ID NO: 792111 - protein, 59 aa, Homo sapiens
MENKFYAISDCKLRKFREKQTAATNHLHLHHRCHHLEWNCPHFCCCCKCTKIKTSLEDD

SEQ ID NO: 792112 - protein, 119 aa, Homo sapiens
PPLPSPARPLCDPRGARGLSLAGLRSPPQRSRGRACRNRAGEKALWRPLCTPSCRAQTGGVMWVYCLGLRQVAAASLGVFKDRESDAEWLKVTEDSAGRYVKIPSQGRNLEFPRMSRGL

SEQ ID NO: 792113 - protein, 115 aa, Homo sapiens [sequence omitted]

SEQ ID NO: 792114 - protein, 444 aa, Homo sapiens
LATNTHSCIIHAKATHAHSCIIHAKVTNTHSCIVHAKATNTHSCMVHVKATNTQSRMVHAKATNTHSCIIHAKVTNTHSCIVHAKATNTHSCMVHVKATNTQSCMVHVKATNTHSCMVHAKATNTHSCIIHAKVTNTHSCIVHAKATHAHSCVVHAKATNTHSCMVHAKATNTHSCIVHAKATHAHSCIVHAKATHAHSCMVHHNNNGGNNPRVHQQDTQNVVFLHSAVQLSHREGGSPLGSSAGSHEGPELTKPDTRATRGPVTFIRGVQNRSPRQKPLHVPRTSQRWRRAVGRPRGRARGGEGPWAGPVDEPEVEKGRGPAPWTSQRWRRAVGWPHGADEPWCHGSRFIKALKGSQCRGDGEEGLGRVSTSPGHLSFVEHSLRLAVGIPCESGQPGHRSCFLLARFSHRGTPHACTRVHTITHSDFTHMHLHVRPWQRHPTQ

SEQ ID NO: 792115 - protein, 76 aa, Homo sapiens
MKSSRCGWASICGTGAPRSGHWSRIRSARLRVPGLSSSSPQGMKKAKSTWPWYSLPAAQSYRIFLAAMVLPMPAGP

SEQ ID NO: 792116 - protein, 106 aa, Homo sapiens
MVCSQPGPDPQSQVPVTSGAAKPSPHRDLDTPGQDVGLDGPFSVLSLISTPATAYTHPTHAGTHSLCTHVFLARFHPPMTGVCEVQMDTAHTQTLHQAVTSLPLRP

SEQ ID NO: 792117 - protein, 567 aa, Homo sapiens
MRPDSPTMAAPAESLRRRKTGYSDPEPESPPAPGRGPAGSPAHLHTGTFWLTRIVLLKALAFVYFVAFLVAFHQNKQLIGDRGLLPCRVFLKNFQQYFQDRTSWEVFSYMPTILWLMDWSDMNSNLDLLALLGLGISSFVLITGCANMLLMAALWGLYMSLVNVGHVWYSFGWESQLLETGFLGIFLCPLWTLSRLPQHTPTPRIVLWGFRWLIFRIMLGAGLIKIRGDRCWRDLTCMDFHYETQPMPNPVAYYLHHSPWWFHRFETLSNHFIELLVPFFLFLGRRACIIHGVLQILFQAVLIVSGNLSFLNWLTMVPSLACFDDATLGFLFPSGPGSLKDRVLQMQRDIRGARPEPRFGSVVRRAANVSLGVLLAWLSVPVVLNLLSSRQVMNTHFNSLHIVNTYGAFGSITKERAEVILQGTASSNASAPDAMWEDYEFKCKPGDPSRRPCLISPYHYRLDWLMWFAAFQTYEHNDWIIHLAGKLLASDAEALSLLAHNPFAGRPPPRWVRGEHYRYKFSRPGGRHAAEGKWWVRKRIGAYFPPLSLEELRPYFRDRGWPLPGPL

SEQ ID NO: 792118 - protein, 567 aa, Homo sapiens; identical to SEQ ID NO: 792117

SEQ ID NO: 792119 - protein, 883 aa, Homo sapiens
MRPDSPTMAAPAESLRRRKTGYSDPEPESPPAPGRGPAGSPAHLHTGTFWLTRIVLLKALAFVYFVAFLVAFHQNKQLIGDRGLLPCRVFLKNFQQYFQDRTSWEVFSYMPTILWLMDWSDMNSNLDLLALLGLGISSFVLITGCANMLLMAALWGLYMSLVNVGHVWYSFGWESQLLETGFLGIFLCPLWTLSRLPQHTPTPRIVLWGFRWLIFRIMLGAGLIKIRGDRCWRDLTCMDFHYETQPMPNPVAYYLHHSPWWFHRFETLSNHFIELLVPFFLFLGRRACIIHGVLQILFQAVLIVSGNLSFLNWLTMVPSLACFDDATLGFLFPSGPGSLKDRVLQMQRDIRGARPEPRFGSVVRRAANVSLGVLLAWLSVPVVLNLLSSRQVMNTHFNSLHIVNTYGAFGSITKERAEVILQGTASSNASAPDAMWEDYEFKCKPGDPSRRPCLISPYHYRLDWLMWFAAFQTYEHNDWIIHLAGKLLASDAEALSLLAHNPFAGRPPPRRLRDPPPPRGSLSSRFSWRNSDLGREESSSITHPDPKRLKARRSRVDPEALTLPAKGHGPRSPPPAPRAQLCAGHQKPQIMTAAQTVATGPWCSVKPLAPAWAHSRGHERVLLWLHHHTHRAAGAQLCHGSQPGSSRPVGWRSFRSCCTTAKGPGGPGACDGDNSAWRLLLRGSRATLDMRGLRPTPRRKCPVLRESSEGLQPGTKTQYGLNQAWSPGVRRDLIQGSAERPARYPAPGEMGVGAFIPLGHDRGEQPASICTSQAGKGLKPWEAEAPPSGNRSRPGSLTASDCPVDRNPQAPCARTGLMVETPHHEQWVRGEHYRYKFSRPGGRHAAEGKWWVRKRIGAYFPPLSLEELRPYFRDRGWPLPGPL

SEQ ID NO: 792120 - protein, 883 aa, Homo sapiens; identical to SEQ ID NO: 792119

SEQ ID NO: 792121 - protein, 555 aa, Homo sapiens
SAPSPHMRPDSPTMAAPAESLRRRKTGYSDPEPESPPAPGRGPAGSPAHLHTGTFWLTRIVLLKALAFVYFVAFLVAFHQNKQLIGDRGLLPCRVFLKNFQQYFQDRTSWEVFSYMPTILWLMDWSDMNSNLDLLALLGLGISSFVLITGCANMLLMAALWGLYMSLVNVGHVWYSFGWESQLLETGFLGIFLCPLWTLSRLPQHTPTPRIVLWGFRWLIFRIMLGAGLIKIRGDRCWRDLTCMDFHYETQPMPNPVAYYLHHSPWWFHRFETLSNHFIELLVPFFLFLGRRACIIHGVLQILFQAVLIVSGNLSFLNWLTMVPSLACFDDATLGFLFPSGPGSLKDRVLQMQRDIRGARPEPRFGSVVRRAANVSLGVLLAWLSVPVVLNLLSSRQVMNTHFNSLHIVNTYGAFGSITKERAEVILQGTASSNASAPDAMWEDYEFKCKPGDPSRRPCLISPYHYRLDWLMWFAAFQTYEHTTVHEHEQGDQGGGAEQSRIDRAEWPVSGPQARVTWQVRRRDGLPAAKDAVAKRRAHPSPKRTERLGRHHGAG

SEQ ID NO: 792122 - protein, 103 aa, Homo sapiens
SAPSPHMRPDSPTMAAPAESLRRRKTGYSDPEPESPPAPGRGPAGSPAHLHTGTFWLTRIVLLKALAFVYCECRAGPGHPPVSPPRTTTPALPRDSSARSRGR

SEQ ID NO: 792123 - protein, 165 aa, Homo sapiens
MQAETILEGLEAGLPQAVSSGLSLVPAPGLVLTCLSAPSGPGGMALEPPPTTLRKAFLAQSTLLESTLEGAPEWAAPRPEEQRRSPPACSQHTPPLPSTPTGPPPCSPGGNHPLCALSGRGGGRCSIPSLSSSSTFSLFSSGCWNPRVKLRVRKSQSQGRAGQLI

SEQ ID NO: 792124 - protein, 105 aa, Homo sapiens
MSRLYLLTKYLNGSKVIRITWADSLKYTFLDLTPGYSNSVQYKKCDSARLENLFVYGIFGLSSFFFSFFLRWSLTLSPRLECSGAISAHCKLCLLGSRHSPASAS

SEQ ID NO: 792125 - protein, 117 aa, Homo sapiens
LAFSPSHILKTSEGHCEIQHLSIFISDEWLRRQWVEEAGTAAQLASVHSCSLISFWDSYTQRTLSPNIMVLCSQNAVMQYSPGSYTDFSVNFNNNSYDSMLFKPKYYAEINIEKKLI

SEQ ID NO: 792126 - protein, 151 aa, Homo sapiens
MKTARIKPNAITYGYYNKVVLESPWPSSTRSGIFLWTKVRNVVRGLAQFRQPLKKTVQRSQVSSISALQNVTGGSDGDTVSHGSVDSSNDANNGEHTVFVRDLIRLESIDNHSSTGGQSDQGYGSKDELIKDDAEIHVPEEQAARELITKT

SEQ ID NO: 792127 - protein, 186 aa, Homo sapiens
RCYTNPPQWAKCLFSHCYSLWFICLPAYVRVSHPKVRALQQAYDVLIKMRKTDVDPLDEVCYRVVMQLCGLWGHPVLAVRVLFEMKTARIKPNAITYGYYNKVVLESPWPSSTRSGIFLWTKVRNVVRGLAQFRQPLKKTVQRSQVSSISGGQSDQGYGSKDELIKDDAEIHVPEEQAARELITKT

SEQ ID NO: 792128 - protein, 1564 aa, Homo sapiens
MSSKEVKTALKSARDAIRNKEYKEALKHCKTVLKQEKNNYNAWVFIGVAAAELEQPDQAQSAYKKAAELEPDQLLAWQGLANLYEKYNHINAKDDLPGVYQKLLDLYESVDKQKWCDVCKKLVDLYYQEKKHLEVARTWHKLIKTRQEQGAENEELHQLWRKLTQFLAESTEDQNNETQQLLFTAFENALGLSDKIPSEDHQVLYRHFIQSLSKFPHESARLKKACEGMINIYPTVQYPLEVLCLHLIESGNLTDEGQQYCCRLVEMDSKSGPGLIGLGIKALQDKKYEDAVRNLTEGLKESPVCTSGWYHLAEAQVKMHRPKEAVLSCSQALKIVDNLGASGNSLYQRNLCLHLKAEALIKLSDYDSSEEAIRTLDQISDADNIPGLLVLKSLAYRNKGSFDEAAKIMEDLLSSYPDLAEVHALEALIHFTKKDYLQAEKCFQRALEKDTEVAEYHYQLGLTYWFMGEETRKDKTKALTHFLKAARLDTYMGKVFCYLGHYYRDVVGDKNRARGCYRKAFELDDTDAESGAAAVDLSVELEDMEMALAILTTVTQKASAGTAKWAWLRRGLYYLKAGQHSQAVADLQAALRADPKDFNCWESLGEAYLSRGGYTTALKSFTKASELNPESIYSVFKVAAIQQILGKYKEAVAQYQMIIKKKEDYVPALKGLGECHLMMAKAALVDYLDGKAVDYIEKALEYFTCALQHRADVSCLWKLAGDACTCLYAVAPSKVNVHVLGVLLGQKEGKQVLKKNELLHLGGRCYGRALKLMSTSNTWCDLGINYYRQAQHLAETGSNMNDLKELLEKSLHCLKKAVRLDSNNHLYWNALGVVACYSGIGNYALAQHCFIKSIQSEQINAVAWTNLGVLYLTNENIEQAHEAFKMAQSLDPSYLMCWIGQALIAEAVGSYDTMDLFRHTTELNMHTEGALGYAYWVCTTLQDKSNRETELYQYNILQMNAIPAAQVILNKYVERIQNYAPAFTMLGYLNEHLQLKKEAANAYQRAILLLQTAEDQDTYNVAIRNYGRLLCSTGEYDKAIQAFKSTPLEVLEDIIGFALALFMKGLYKESSKAYERALSIVESEQDKAHILTALAITEYKQGKTDVAKTLLFKCSILKEPTTESLQALCALGLAMQDATLSKAALNELLKHIKHKDSNYQRCLLTSAIYALQGRSVAVQKQISKAVHSNPGDPALWSLLSRVVAQYAQRNAKGGVVAGNVAHILDSNHGKKALLYTAVNQLAMGSSSAEDEKNTALKTIQKAALLSPGDPAIWAGLMAACHADDKLALVNNTQPKRIDLYLALLSAVSASIKDEKFFENYNQSLEKWSLSQAVTGLIDTGRISEAETLCTKNLKSNPDQPAVILLLRQVQCKPLLESQKPLPDAVLEELQKTVMSNSTSVPAWQWLAHVYQSQGMMRAAEMCYRKSLQLASQRGSWSGKLSSLLRLALLALKVCMANISNDHWPSLVQEATTEALKLCFCPLAVLLQALLQFKRKMGARETRRLLERVVYQPGYPKSIASTARWYLLRHLYAKDDYELIDVLVNNAKTHGDTRALELNQRLSSQ

SEQ ID NO: 792129 - protein, 1546 aa, Homo sapiens
MSSKEVKTALKSARDAIRNKEYKEALKHCKTVLKQEKNNYNAWVFIGVAAAELEQPDQAQSAYKKAAELEPDQLLAWQGLANLYEKYNHINAKDDLPGVYQKLLDLYESVDKQKWCDVCKKLVDLYYQEKKHLEVARTWHKLIKTRQEQGAENEELHQLWRKLTQFLAESTEDQNNETQQLLFTAFENALGLSDKIPSEDHQVLYRHFIQSLSKFPHESARLKKACEGMINIYPTVQYPLEVLCLHLIESGNLTDEGQQYCCRLVEMDSKSGPGLIGLGIKALQDKKYEDAVRNLTEGLKESPVCTSGWYHLAEAQVKMHRPKEAVLSCSQALKIVDNLGASGNSLYQRNLCLHLKAEALIKLSDYDSSEEAIRTLDQISDADNIPGLLVLKSLAYRNKGSFDEAAKIMEDLLSSYPDLAEVHALEALIHFTKKDYLQAEKCFQRALEKDTEVAEYHYQLGLTYWFMGEETRKDKTKALTHFLKAARLDTYMGKVFCYLGHYYRDVVGDKNRARGCYRKAFELDDTDAESGAAAVDLSVELEDMEMALAILTTVTQKASAGTAKWAWLRRGLYYLKAGQHSQAVADLQAALRADPKDFNCWESLGEAYLSRGGYTTALKSFTKASELNPESIYSVFKVAAIQQILGKYKEAVAQYQMIIKKKEDYVPALKGLGECHLMMAKAALVDYLDGKAVDYIEKALEYFTCALQHRADVSCLWKLAGDACTCLYAVAPSKVNVHVLGVLLGQKEGKQVLKKNELLHLGGRCYGRAFQAQHLAETGSNMNDLKELLEKSLHCLKKAVRLDSNNHLYWNALGVVACYSGIGNYALAQHCFIKSIQSEQINAVAWTNLGVLYLTNENIEQAHEAFKMAQSLDPSYLMCWIGQALIAEAVGSYDTMDLFRHTTELNMHTEGALGYAYWVCTTLQDKSNRETELYQYNILQMNAIPAAQVILNKYVERIQNYAPAFTMLGYLNEHLQLKKEAANAYQRAILLLQTAEDQDTYNVAIRNYGRLLCSTGEYDKAIQAFKSTPLEVLEDIIGFALALFMKGLYKESSKAYERALSIVESEQDKAHILTALAITEYKQGKTDVAKTLLFKCSILKEPTTESLQALCALGLAMQDATLSKAALNELLKHIKHKDSNYQRCLLTSAIYALQGRSVAVQKQISKAVHSNPGDPALWSLLSRVVAQYAQRNAKGGVVAGNVAHILDSNHGKKALLYTAVNQLAMGSSSAEDEKNTALKTIQKAALLSPGDPAIWAGLMAACHADDKLALVNNTQPKRIDLYLALLSAVSASIKDEKFFENYNQSLEKWSLSQAVTGLIDTGRISEAETLCTKNLKSNPDQPAVILLLRQVQCKPLLESQKPLPDAVLEELQKTVMSNSTSVPAWQWLAHVYQSQGMMRAAEMCYRKSLQLASQRGSWSGKLSSLLRLALLALKVCMANISNDHWPSLVQEATTEALKLCFCPLAVLLQALLQFKRKMGARETRRLLERVVYQPGYPKSIASTARWYLLRHLYAKDDYELIDVLVNNAKTHGDTRALELNQRLSSQ

SEQ ID NO: 792130 - protein, 1575 aa, Homo sapiens
MSSKEVKTALKSARDAIRNKEYKEALKHCKTVLKQEKNNYNAWVFIGVAAAELEQPDQAQSAYKKAAELEPDQLLAWQGLANLYEKYNHINAKDDLPGVYQKLLDLYESVDKQKWCDVCKKLVDLYYQEKKHLEVARTWHKLIKTRQEQGAENEELHQLWRKLTQFLAESTEDQNNETQQLLFTAFENALGLSDKIPSEDHQVLYRHFIQSLSKFPHESARLKKACEGMINIYPTVQYPLEVLCLHLIESGNLTDEGQQYCCRLVEMDSKSGPGLIGLGIKALQDKKYEDAVRNLTEGLKESPVCTSGWYHLAEAQVKMHRPKEAVLSCSQALKIVDNLGASGNSLYQRNLCLHLKAEALIKLSDYDSSEEAIRTLDQISDADNIPGLLVLKSLAYRNKGSFDEAAKVGFFIQTEHYFELKAFLFGYRIDRCLLYKIMEDLLSSYPDLAEVHALEALIHFTKKDYLQAEKCFQRALEKDTEVAEYHYQLGLTYWFMGEETRKDKTKALTHFLKAARLDTYMGKVFCYLGHYYRDVVGDKNRARGCYRKAFELDDTDAESGAAAVDLSVELEDMEMALAILTTVTQKASAGTAKWAWLRRGLYYLKAGQHSQAVADLQAALRADPKDFNCWESLGEAYLSRGGYTTALKSFTKASELNPESIYSVFKVAAIQQILGKYKEAVAQYQMIIKKKEDYVPALKGLGECHLMMAKAALVDYLDGKAVDYIEKALEYFTCALQHRADVSCLWKLAGDACTCLYAVAPSKVNVHVLGVLLGQKEGKQVLKKNELLHLGGRCYGRAFQAQHLAETGSNMNDLKELLEKSLHCLKKAVRLDSNNHLYWNALGVVACYSGIGNYALAQHCFIKSIQSEQINAVAWTNLGVLYLTNENIEQAHEAFKMAQSLDPSYLMCWIGQALIAEAVGSYDTMDLFRHTTELNMHTEGALGYAYWVCTTLQDKSNRETELYQYNILQMNAIPAAQVILNKYVERIQNYAPAFTMLGYLNEHLQLKKEAANAYQRAILLLQTAEDQDTYNVAIRNYGRLLCSTGEYDKAIQAFKSTPLEVLEDIIGFALALFMKGLYKESSKAYERALSIVESEQDKAHILTALAITEYKQGKTDVAKTLLFKCSILKEPTTESLQALCALGLAMQDATLSKAALNELLKHIKHKDSNYQRCLLTSAIYALQGRSVAVQKQISKAVHSNPGDPALWSLLSRVVAQYAQRNAKGGVVAGNVAHILDSNHGKKALLYTAVNQLAMGSSSAEDEKNTALKTIQKAALLSPGDPAIWAGLMAACHADDKLALVNNTQPKRIDLYLALLSAVSASIKDEKFFENYNQSLEKWSLSQAVTGLIDTGRISEAETLCTKNLKSNPDQPAVILLLRQVQCKPLLESQKPLPDAVLEELQKTVMSNSTSVPAWQWLAHVYQSQGMMRAAEMCYRKSLQLASQRGSWSGKLSSLLRLALLALKVCMANISNDHWPSLVQEATTEALKLCFCPLAVLLQALLQFKRKMGARETRRLLERVVYQPGYPKSIASTARWYLLRHLYAKDDYELIDVLVNNAKTHGDTRALELNQRLSSQ

SEQ ID NO: 792131 - protein, 1534 aa, Homo sapiens
MSSKEVKTALKSARDAIRNKEYKEALKHCKTVLKQEKNNYNAWVFIGVAAAELEQPDQAQSAYKKAAELEPDQLLAWQGLANLYEKYNHINAKDDLPGVYQKLLDLYESVDKQKWCDVCKKLVDLYYQEKKHLEVARTWHKLIKTRQEQGAENEELHQLWRKLTQFLAESTEDQNNETQQLLFTAFENALGLSDKIPSEDHQVLYRHFIQSLSKFPHESARLKKACEGMINIYPTVQYPLEVLCLHLIESGNLTDEGQQYCCRLVEMDSKSGPGLIGLGIKALQDKKYEDAVRNLTEGLKESPVCTSGWYHLAEAQVKMHRPKEAVLSCSQALKIVDNLGASGNSLYQRNLCLHLKAEALIKLSDYDSSEEAIRTLDQISDADNIPGLLVLKSLAYRNKGSFDEAAKAEVHALEALIHFTKKDYLQAEKCFQRALEKDTEVAEYHYQLGLTYWFMGEETRKDKTKALTHFLKAARLDTYMGKVFCYLGHYYRDVVGDKNRARGCYRKAFELDDTDAESGAAAVDLSVELEDMEMALAILTTVTQKASAGTAKWAWLRRGLYYLKAGQHSQAVADLQAALRADPKDFNCWESLGEAYLSRGGYTTALKSFTKASELNPESIYSVFKVAAIQQILGKYKEAVAQYQMIIKKKEDYVPALKGLGECHLMMAKAALVDYLDGKAVDYIEKALEYFTCALQHRADVSCLWKLAGDACTCLYAVAPSKVNVHVLGVLLGQKEGKQVLKKNELLHLGGRCYGRAFQAQHLAETGSNMNDLKELLEKSLHCLKKAVRLDSNNHLYWNALGVVACYSGIGNYALAQHCFIKSIQSEQINAVAWTNLGVLYLTNENIEQAHEAFKMAQSLDPSYLMCWIGQALIAEAVGSYDTMDLFRHTTELNMHTEGALGYAYWVCTTLQDKSNRETELYQYNILQMNAIPAAQVILNKYVERIQNYAPAFTMLGYLNEHLQLKKEAANAYQRAILLLQTAEDQDTYNVAIRNYGRLLCSTGEYDKAIQAFKSTPLEVLEDIIGFALALFMKGLYKESSKAYERALSIVESEQDKAHILTALAITEYKQGKTDVAKTLLFKCSILKEPTTESLQALCALGLAMQDATLSKAALNELLKHIKHKDSNYQRCLLTSAIYALQGRSVAVQKQISKAVHSNPGDPALWSLLSRVVAQYAQRNAKGGVVAGNVAHILDSNHGKKALLYTAVNQLAMGSSSAEDEKNTALKTIQKAALLSPGDPAIWAGLMAACHADDKLALVNNTQPKRIDLYLALLSAVSASIKDEKFFENYNQSLEKWSLSQAVTGLIDTGRISEAETLCTKNLKSNPDQPAVILLLRQVQCKPLLESQKPLPDAVLEELQKTVMSNSTSVPAWQWLAHVYQSQGMMRAAEMCYRKSLQLASQRGSWSGKLSSLLRLALLALKVCMANISNDHWPSLVQEATTEALKLCFCPLAVLLQALLQFKRKMGARETRRLLERVVYQPGYPKSIASTARWYLLRHLYAKDDYELIDVLVNNAKTHGDTRALELNQRLSSQ

SEQ ID NO: 792132 - protein, 1254 aa, Homo sapiens
MSSKEVKTALKSARDAIRNKEYKEALKHCKTVLKQEKNNYNAWVFIGVAAAELEQPDQAQSAYKKAAELEPDQLLAWQGLANLYEKYNHINAKDDLPGVYQKLLDLYESVDKQKWCDVCKKLVDLYYQEKKHLEVARTWHKLIKTRQEQGAENEELHQLWRKLTQFLAESTEDQNNETQQLLFTAFENALGLSDKIPSEDHQVLYRHFIQSLSKFPHESARLKKACEGMINIYPTVQYPLEVLCLHLIESGNEMALAILTTVTQKASAGTAKWAWLRRGLYYLKAGQHSQAVADLQAALRADPKDFNCWESLGEAYLSRGGYTTALKSFTKASELNPESIYSVFKVAAIQQILGKYKEAVAQYQMIIKKKEDYVPALKGLGECHLMMAKAALVDYLDGKAVDYIEKALEYFTCALQHRADVSCLWKLAGDACTCLYAVAPSKVNVHVLGVLLGQKEGKQVLKKNELLHLGGRCYGRAFQAQHLAETGSNMNDLKELLEKSLHCLKKAVRLDSNNHLYWNALGVVACYSGIGNYALAQHCFIKSIQSEQINAVAWTNLGVLYLTNENIEQAHEAFKMAQSLDPSYLMCWIGQALIAEAVGSYDTMDLFRHTTELNMHTEGALGYAYWVCTTLQDKSNRETELYQYNILQMNAIPAAQVILNKYVERIQNYAPAFTMLGYLNEHLQLKKEAANAYQRAILLLQTAEDQDTYNVAIRNYGRLLCSTGEYDKAIQAFKSTPLEVLEDIIGFALALFMKGLYKESSKAYERALSIVESEQDKAHILTALAITEYKQGKTDVAKTLLFKCSILKEPTTESLQALCALGLAMQDATLSKAALNELLKHIKHKDSNYQRCLLTSAIYALQGRSVAVQKQISKAVHSNPGDPALWSLLSRVVAQYAQRNAKGGVVAGNVAHILDSNHGKKALLYTAVNQLAMGSSSAEDEKNTALKTIQKAALLSPGDPAIWAGLMAACHADDKLALVNNTQPKRIDLYLALLSAVSASIKDEKFFENYNQSLEKWSLSQAVTGLIDTGRISEAETLCTKNLKSNPDQPAVILLLRQVQCKPLLESQKPLPDAVLEELQKTVMSNSTSVPAWQWLAHVYQSQGMMRAAEMCYRKSLQLASQRGSWSGKLSSLLRLALLALKVCMANISNDHWPSLVQEATTEALKLCFCPLAVLLQALLQFKRKMGARETRRLLERVVYQPGYPKSIASTARWYLLRHLYAKDDYELIDVLVNNAKTHGDTRALELNQRLSSQ

SEQ ID NO: 792133 - protein, 1479 aa, Homo sapiens
SRGDSEYSLLVRNRTTLLSSYPGLPGTAHTHTHTKSYSGKCKLKSIIPSYWKKTLEIKRRQEKKHLEVARTWHKLIKTRQEQGAENEELHQLWRKLTQFLAESTEDQNNETQQLLFTAFENALGLSDKIPSEDHQVLYRHFIQSLSKFPHESARLKKACEGMINIYPTVQYPLEVLCLHLIESGNLTDEGQQYCCRLVEMDSKSGPGLIGLGIKALQDKKYEDAVRNLTEGLKESPVCTSGWYHLAEAQVKMHRPKEAVLSCSQALKIVDNLGASGNSLYQRNLCLHLKAEALIKLSDYDSSEEAIRTLDQISDADNIPGLLVLKSLAYRNKGSFDEAAKIMEDLLSSYPDLAEVHALEALIHFTKKDYLQAEKCFQRALEKDTEVAEYHYQLGLTYWFMGEETRKDKTKALTHFLKAARLDTYMGKVFCYLGHYYRDVVGDKNRARGCYRKAFELDDTDAESGAAAVDLSVELEDMEMALAILTTVTQKASAGTAKWAWLRRGLYYLKAGQHSQAVADLQAALRADPKDFNCWESLGEAYLSRGGYTTALKSFTKASELNPESIYSVFKVAAIQQILGKYKEAVAQYQMIIKKKEDYVPALKGLGECHLMMAKAALVDYLDGKAVDYIEKALEYFTCALQHRADVSCLWKLAGDACTCLYAVAPSKVNVHVLGVLLGQKEGKQVLKKNELLHLGGRCYGRAFQAQHLAETGSNMNDLKELLEKSLHCLKKAVRLDSNNHLYWNALGVVACYSGIGNYALAQHCFIKSIQSEQINAVAWTNLGVLYLTNENIEQAHEAFKMAQSLDPSYLMCWIGQALIAEAVGSYDTMDLFRHTTELNMHTEGALGYAYWVCTTLQDKSNRETELYQYNILQMNAIPAAQVILNKYVERIQNYAPAFTMLGYLNEHLQLKKEAANAYQRAILLLQTAEDQDTYNVAIRNYGRLLCSTGEYDKAIQAFKSTPLEVLEDIIGFALALFMKGLYKESSKAYERALSIVESEQDKAHILTALAITEYKQGKTDVAKTLLFKCSILKEPTTESLQALCALGLAMQDATLSKAALNELLKHIKHKDSNYQRCLLTSAIYALQGRSVAVQKQISKAVHSNPGDPALWSLLSRVVAQYAQRNAKGGVVAGNVAHILDSNHGKKALLYTAVNQLAMGSSSAEDEKNTALKTIQKAALLSPGDPAIWAGLMAACHADDKLALVNNTQPKRIDLYLALLSAVSASIKDEKFFENYNQSLEKWSLSQAVTGLIDTGRISEAETLCTKNLKSNPDQPAVILLLRQVQCKPLLESQKPLPDAVLEELQKTVMSNSTSVPAWQWLAHVYQSQGMMRAAEMCYRKSLQLASQRGSWSGKLSSLLRLALLALKVCMANISNDHWPSLVQEATTEALKLCFCPLAVLLQALLQFKRKMGARETRRLLERVVYQPGYPKSIASTARWYLLRHLYAKDDYELIDVLVNNAKTHGDTRALELNQRLSSQ

SEQ ID NO: 792134 - protein, 1546 aa, Homo sapiens; identical to SEQ ID NO: 792129

SEQ ID NO: 792135 - protein, 1508 aa, Homo sapiens
MSSKEVKTALKSARDAIRNKEYKEALKHCKTVLKQEKNNYNAWVFIGVAAAELEQPDQAQSAYKKAAELEPDQLLAWQGLANLYEKYNHINAKDDLPGVYQKLLDLYESVDKQKWCDVCKKLVDLYYQEKKHLEVARTWHKLIKTRQEQGAENEELHQLWRKLTQFLAESTEDQNNETQQLLFTAFENALGLSDKIPSEDHQVLYRHFIQSLSKFPHESARLKKACEGMINIYPTVQYPLEVLCLHLIESGNLTDEGQQYCCRLVEMDSKSGPGLIGLGIKALQDKKYEDAVRNLTEGLKESPVCTSGWYHLAEAQVKMHRPKEAVLSCSQALKIVDNLGASGNSLYQRNLCLHLKAEALIKLSDYDSSEEAIRTLDQISDADNIPGLLVLKSLAYRNKGSFDEAAKIMEDLLSSYPDLAEVHALEALIHFTKKDYLQAEKCFQRALEKDTEVAEYHYQLGLTYWFMGEETRKDKTKALTHFLKAARLDTYMGKVFCYLGHYYRDVVGDKNRARGCYRKAFELDDTDAESGAAAVDLSVELEDMEMALAILTTVTQKASAGTAKWAWLRRGLYYLKAGQHSQAVADLQAALRADPKDFNCWESLGEAYLSRGGYTTALKSFTKASELNPESIYSVFKVAAIQQILGKYKEAVAQYQMIIKKKEDYVPALKGLGECHLMMAKAALVDYLDGKAVDYIEKALEYFTCALQHRADVSCLWKLAGDACTCLYAVAPSKVNVHVLGVLLGQKEGKQVLKKNELLHLGGRCYGRAFQAQHLAETGSNMNDLKELLEKSLHCLKKAVRLDSNNHLYWNALGVVACYSGIGNYALAQHCFIKSIQSEQINAVAWTNLGVLYLTNENIEQAHEAFKMAQSLDPSYLMCWIGQALIAEAVGSYDTMDLFRHTTELNMHTEGALGYAYWVCTTLQDKSNRETELYQYNILQMNAIPAAQVILNKYVERIQNYAPAFTMLGYLNEHLQLKKEAANAYQRAILLLQTAEDQDTYNVAIRNYGRLLCSTGEYDKAIQAFKSTPLEVLEDIIGFALALFMKGLYKESSKAYERALSIVESEQDKAHILTALAITEYKQGKTDVAKTLLFKCSILKEPTTESLQALCALGLAMQDATLSKAALNELLKHIKHKDSNYQRCLLTSAIYALQGRSVAVQKQISKAVHSNPGDPALWSLLSRVVAQYAQRNAKGGVVAGNVAHILDSNHGKKALLYTAVNQLAMGSSSAEDEKNTALKTIQKAALLSPGDPAIWAGLMAACHADDKLALVNNTQPKRIDLYLALLSAVSASIKDEKFFENYNQSLEKWSLSQAVTGLIDTGRISEAETLCTKNLKSNPDQPAVILLLRQVQCKPLLESQKPLPDAVLEDLQLASQRGSWSGKLSSLLRLALLALKVCMANISNDHWPSLVQEATTEALKLCFCPLAVLLQALLQFKRKMGARETRRLLERVVYQPGYPKSIASTARWYLLRHLYAKDDYELIDVLVNNAKTHGDTRALELNQRLSSQ

SEQ ID NO: 792136 - protein, 489 aa, Homo sapiens
LEWHITPNHKRKEQEKKNDQQKQFENNKTDVAKTLLFKCSILKEPTTESLQALCALGLAMQDATLSKAALNELLKHIKHKDSNYQRCLLTSAIYALQGRSVAVQKQISKAVHSNPGDPALWSLLSRVVAQYAQRNAKGGVVAGNVAHILDSNHGKKALLYTAVNQLAMGSSSAEDEKNTALKTIQKAALLSPGDPAIWAGLMAACHADDKLALVNNTQPKRIDLYLALLSAVSASIKDEKFFENYNQSLEKWSLSQAVTGLIDTGRISEAETLCTKNLKSNPDQPAVILLLRQVQCKPLLESQKPLPDAVLEELQKTVMSNSTSVPAWQWLAHVYQSQGMMRAAEMCYRKSLQLASQRGSWSGKLSSLLRLALLALKVCMANISNDHWPSLVQEATTEALKLCFCPLAVLLQALLQFKRKMGARETRRLLERVVYQPGYPKSIASTARWYLLRHLYAKDDYELIDVLVNNAKTHGDTRALELNQRLSSQ

SEQ ID NO: 792137 - protein, 322 aa, Homo sapiens [sequence omitted]

SEQ ID NO: 792138 - protein, 117 aa, Homo sapiens
PTTTKFAAANISNDHWPSLVQEATTEALKLCFCPLAVLLQALLQFKRKMGARETRRLLERVVYQPGYPKSIASTARWYLLRHLYAKDDYELIDVLVNNAKTHGDTRALELNQRLSSQ

SEQ ID NO: 792139 - protein, 1269 aa, Homo sapiens
MSSKEVKTALKSARDAIRNKEYKEALKHCKTVLKQEKNNYNAWVFIGVAAAELEQPDQAQSAYKKAAELEPDQLLAWQGLANLYEKYNHINAKDDLPGVYQKLLDLYESVDKQKWCDVCKKLVDLYYQEKKHLEVARTWHKLIKTRQEQGAENEELHQLWRKLTQFLAESTEDQNNETQQLLFTAFENALGLSDKIPSEDHQVLYRHFIQSLSKFPHESARLKKACEGMINIYPTVQYPLEVLCLHLIESGNLTDEGQQYCCRLVEMDSKSGPGLIGLGIKALQDKKYEDAVRNLTEGLKESPVCTSGWYHLAEAQVKMHRPKEAVLSCSQALKIVDNLGASGNSLYQRNLCLHLKAEALIKLSDYDSSEEAIRTLDQISDADNIPGLLVLKSLAYRNKGSFDEAAKIMEDLLSSYPDLAEVHALEALIHFTKKDYLQAEKCFQRALEKDTEVAEYHYQLGLTYWFMGEETRKDKTKALTHFLKAARLDTYMGKVFCYLGHYYRDVVGDKNRARGCYRKAFELDDTDAESGAAAVDLSVELEDMEMALAILTTVTQKASAGTAKWAWLRRGLYYLKAGQHSQAVADLQAALRADPKDFNCWESLGEAYLSRGGYTTALKSFTKASELNPESIYSVFKVAAIQQILGKYKEAVAQYQMIIKKKEDYVPALKGLGECHLMMAKAALVDYLDGKAVDYIEKALEYFTCALQHRADVSCLWKLAGDACTCLYAVAPSKVNVHVLGVLLGQKEGKQVLKKNELLHLGGRCYGRAFQAQHLAETGSNMNDLKELLEKSLHCLKKAVRLDSNNHLYWNALGVVACYSGIGNYALAQHCFIKSIQSEQINAVAWTNLGVLYLTNENIEQAHEAFKMAQSLDPSYLMCWIGQALIAEAVGSYDTMDLFRHTTELNMHTEGALGYAYWVCTTLQDKSNRETELYQYNILQMNAIPAAQVILNKYVERIQNYAPAFTMLGYLNEHLQLKKEAANAYQRAILLLQTAEDQDTYNVAIRNYGRLLCSTGEYDKAIQAFKSTPLEVLEDIIGFALALFMKGLYKESSKAYERALSIVESEQDKAHILTALAITEYKQGKTDVAKTLLFKCSILKEPTTESLQALCALGLAMQDATLSKAALNELLKHIKHKDSNYQRCLLTSAIYALQGRSVAVQKQISKAVHSNPGDPALWSLLSRVVAQYAQRNAKGGVVAGNVAHILDSNHGKKALLYTAVNQLAMGSSSAEDEKNTALKTIQKAALLSPGDPAIWAGLMAACHADDKLA

SEQ ID NO: 792140 - protein, 113 aa, Homo sapiens
  misc_feature (5)..(5): Xaa can be any naturally occurring amino acid
  misc_feature (18)..(18): Xaa can be any naturally occurring amino acid
FVCRXTMPLGGGTDNFQXATTEALKLCFCPLAVLLQALLQFKRKMGARETRRLLERVVYQPGYPKSIASTARWYLLRHLYAKDDYELIDVLVNNAKTHGDTRALELNQRLSSQ

SEQ ID NO: 792141 - protein, 911 aa, Homo sapiens
MSSKEVKTALKSARDAIRNKEYKEALKHCKTVLKQEKNNYNAWVFIGVAAAELEQPDQAQSAYKKAAELEPDQLLAWQGLANLYEKYNHINAKDDLPGVYQKLLDLYESVDKQKWCDVCKKLVDLYYQEKKHLEVARTWHKLIKTRQEQGAENEELHQLWRKLTQFLAESTEDQNNETQQLLFTAFENALGLSDKIPSEDHQVLYRHFIQSLSKFPHESARLKKACEGMINIYPTVQYPLEVLCLHLIESGNLTDEGQQYCCRLVEMDSKSGPGLIGLGIKALQDKKYEDAVRNLTEGLKESPVCTSGWYHLAEAQVKMHRPKEAVLSCSQALKIVDNLGASGNSLYQRNLCLHLKAEALIKLSDYDSSEEAIRTLDQISDADNIPGLLVLKSLAYRNKGSFDEAAKIMEDLLSSYPDLAEVHALEALIHFTKKDYLQAEKCFQRALEKDTEVAEYHYQLGLTYWFMGEETRKDKTKALTHFLKAARLDTYMGKVFCYLGHYYRDVVGDKNRARGCYRKAFELDDTDAESGAAAVDLSVELEDMEMALAILTTVTQKASAGTAKWAWLRRGLYYLKAGQHSQAVADLQAALRADPKDFNCWESLGEAYLSRGGYTTALKSFTKASELNPESIYSVFKVAAIQQILGKYKEAVAQYQMIIKKKEDYVPALKGLGECHLMMAKAALVDYLDGKAVDYIEKALEYFTCALQHRADVSCLWKLAGDACTCLYAVAPSKVNVHVLGVLLGQKEGKQVLKKNELLHLGGRCYGRAFQAQHLAETGSNMNDLKELLEKSLHCLKKAVRLDSNNHLYWNALGVVACYSGIGNYALAQHCFIKSIQSEQINAVAWTNLGVLYLTNENIEQAHEAFKMAQSLDPSYLMCWIGQALIAEAVGSYDTMDLFRHTTELNMHVRI

SEQ ID NO: 792142 - protein, 445 aa, Homo sapiens
MSSKEVKTALKSARDAIRNKEYKEALKHCKTVLKQEKNNYNAWVFIGVAAAELEQPDQAQSAYKKAAELEPDQLLAWQGLANLYEKYNHINAKDDLPGVYQKLLDLYESVDKQKWCDVCKKLVDLYYQEKKHLEVARTWHKLIKTRQEQGAENEELHQLWRKLTQFLAESTEDQNNETQQLLFTAFENALGLSDKIPSEDHQVLYRHFIQSLSKFPHESARLKKACEGMINIYPTVQYPLEVLCLHLIESGNLTDEGQQYCCRLVEMDSKSGPGLIGLGIKALQDKKYEDAVRNLTEGLKESPVCTSGWYHLAEAQVKMHRPKEAVLSCSQALKIVDNLGASGNSLYQRNLCLHLKAEALIKLSDYDSSEEAIRTLDQISDADNIPGLLVLKSLAYRNKGSFDEAAKIMEDLLSSYPDLAEVHALEALIHFTKKDYLQAEKWEVL

SEQ ID NO: 792143 - protein, 334 aa, Homo sapiens
MSSKEVKTALKSARDAIRNKEYKEALKHCKTVLKQEKNNYNAWVFIGVAAAELEQPDQAQSAYKKAAELEPDQLLAWQGLANLYEKYNHINAKDDLPGVYQKLLDLYESVDKQKWCDVCKKLVDLYYQEKKHLEVARTWHKLIKTRQEQGAENEELHQLWRKLTQFLAESTEDQNNETQQLLFTAFENALGLSDKIPSEDHQVLYRHFIQSLSKFPHESARLKKACEGMINIYPTVQYPLEVLCLHLIESGNLTDEGQQYCCRLVEMDSKSGPGLIGLGIKALQDKKYEDAVRNLTEGLKESPVCTSGWYHLAEAQVKMHRPKEAVLSCSQEYF

SEQ ID NO: 792144 - protein, 1296 aa, Homo sapiens
  misc_feature (1296)..(1296): Xaa can be any naturally occurring amino acid
MSSKEVKTALKSARDAIRNKEYKEALKHCKTVLKQEKNNYNAWVFIGVAAAELEQPDQAQSAYKKAAELEPDQLLAWQGLANLYEKYNHINAKDDLPGVYQKLLDLYESVDKQKWCDVCKKLVDLYYQEKKHLEVARTWHKLIKTRQEQGAENEELHQLWRKLTQFLAESTEDQNNETQQLLFTAFENALGLSDKIPSEDHQVLYRHFIQSLSKFPHESARLKKACEGMINIYPTVQYPLEVLCLHLIESGNLTDEGQQYCCRLVEMDSKSGPGLIGLGIKALQDKKYEDAVRNLTEGLKESPVCTSGWYHLAEAQVKMHRPKEAVLSCSQALKIVDNLGASGNSLYQRNLCLHLKAEALIKLSDYDSSEEAIRTLDQISDADNIPGLLVLKSLAYRNKGSFDEAAKIMEDLLSSYPDLAEVHALEALIHFTKKDYLQAEKCFQRALEKDTEVAEYHYQLGLTYWFMGEETRKDKTKALTHFLKAARLDTYMGKVFCYLGHYYRDVVGDKNRARGCYRKAFELDDTDAESGAAAVDLSVELEDMEMALAILTTVTQKASAGTAKWAWLRRGLYYLKAGQHSQAVADLQAALRADPKDFNCWESLGEAYLSRGGYTTALKSFTKASELNPESIYSVFKVAAIQQILGKYKEAVAQYQMIIKKKEDYVPALKGLGECHLMMAKAALVDYLDGKAVDYIEKALEYFTCALQHRADVSCLWKLAGDACTCLYAVAPSKVNVHVLGVLLGQKEGKQVLKKNELLHLGGRCYGRAFQAQHLAETGSNMNDLKELLEKSLHCLKKAVRLDSNNHLYWNALGVVACYSGIGNYALAQHCFIKSIQSEQINAVAWTNLGVLYLTNENIEQAHEAFKMAQSLDPSYLMCWIGQALIAEAVGSYDTMDLFRHTTELNMHTEGALGYAYWVCTTLQDKSNRETELYQYNILQMNAIPAAQVILNKYVERIQNYAPAFTMLGYLNEHLQLKKEAANAYQRAILLLQTAEDQDTYNVAIRNYGRLLCSTGEYDKAIQAFKSTPLEVLEDIIGFALALFMKGLYKESSKAYERALSIVESEQDKAHILTALAITEYKQGKTDVAKTLLFKCSILKEPTTESLQALCALGLAMQDATLSKAALNELLKHIKHKDSNYQRCLLTSAIYALQGRSVAVQKQISKAVHSNPGDPALWSLLSRVVAQYAQRNAKGGVVAGNVAHILDSNHGKKALLYTAVNQLAMGSSSAEDEKNTALKTIQKAALLSPGDPAIWAGLMAACHADDKLALVNNTQPKRIDLYLALLSAVSASIKDX

SEQ ID NO: 792145 - protein, 1196 aa, Homo sapiens
MSSKEVKTALKSARDAIRNKEYKEALKHCKTVLKQEKNNYNAWVFIGVAAAELEQPDQAQSAYKKAAELEPDQLLAWQGLANLYEKYNHINAKDDLPGVYQKLLDLYESVDKQKWCDVCKKLVDLYYQEKKHLEVARTWHKLIKTRQEQGAENEELHQLWRKLTQFLAESTEDQNNETQQLLFTAFENALGLSDKIPSEDHQVLYRHFIQSLSKFPHESARLKKACEGMINIYPTVQYPLEVLCLHLIESGNLTDEGQQYCCRLVEMDSKSGPGLIGLGIKALQDKKYEDAVRNLTEGLKESPVCTSGWYHLAEAQVKMHRPKEAVLSCSQALKIVDNLGASGNSLYQRNLCLHLKAEALIKLSDYDSSEEAIRTLDQISDADNIPGLLVLKSLAYRNKGSFDEAAKIMEDLLSSYPDLAEVHALEALIHFTKKDYLQAEKCFQRALEKDTEVAEYHYQLGLTYWFMGEETRKDKTKALTHFLKAARLDTYMGKVFCYLGHYYRDVVGDKNRARGCYRKAFELDDTDAESGAAAVDLSVELEDMEMALAILTTVTQKASAGTAKWAWLRRGLYYLKAGQHSQAVADLQAALRADPKDFNCWESLGEAYLSRGGYTTALKSFTKASELNPESIYSVFKVAAIQQILGKYKEAVAQYQMIIKKKEDYVPALKGLGECHLMMAKAALVDYLDGKAVDYIEKALEYFTCALQHRADVSCLWKLAGDACTCLYAVAPSKVNVHVLGVLLGQKEGKQVLKKNELLHLGGRCYGRAFQAQHLAETGSNMNDLKELLEKSLHCLKKAVRLDSNNHLYWNALGVVACYSGIGNYALAQHCFIKSIQSEQINAVAWTNLGVLYLTNENIEQAHEAFKMAQSLDPSYLMCWIGQALIAEAVGSYDTMDLFRHTTELNMHTEGALGYAYWVCTTLQDKSNRETELYQYNILQMNAIPAAQVILNKYVERIQNYAPAFTMLGYLNEHLQLKKEAANAYQRAILLLQTAEDQDTYNVAIRNYGRLLCSTGEYDKAIQAFKSTPLEVLEDIIGFALALFMKGLYKESSKAYERALSIVESEQDKAHILTALAITEYKQGKTDVAKTLLFKCSILKEPTTESLQALCALGLAMQDATLSKAALNELLKHIKHKDSNYQRCLLTSAIYALQGRSVAVQKQISKAVHSNPGDPALWSLLSRVVAQYAQRNAKVK

SEQ ID NO: 792146 - protein, 419 aa, Homo sapiens [sequence omitted]

SEQ ID NO: 792147 - protein, 93 aa, Homo sapiens
TPKPRQAVSWKKKAARSPEWPGSCLISWTSSLGGYWIANKAELIKVNELRLHRRHGIQAPVCLGFHLPDGQRRGCSNTYPEWWGWGEKGKNAL

SEQ ID NO: 792148 - protein, 118 aa, Homo sapiens
MSTPEPRLSNPTSISRGDSRNRQNGTHDRRSAKAPRAEARVQPRPRGPPAAASRCRTLTQGPGAALLDGFVLAPGRLLLQLPQDFFHLDLPGAGPPPTGREARASRAGEAAAAWPWAP

SEQ ID NO: 792149 - protein, 130 aa, Homo sapiens
DTVNSSLFLEILSSLVFSVAPFAPVFLLFLCILRGSRGFCSWSSSFSICFRETCKSTTQPNMPVQVPDLKSSSLLVDPFISTRLEQNSCGSLSGLLISVNFTTKYPVLKQETLGFTFDSSLPLNAQISWV

SEQ ID NO: 792150 - protein, 110 aa, Homo sapiens
MTPEHPAIPLFLKSTSLPGRYPGLLLATFQDSVERSLPLVPGSLFHLTTSYGAFIFAWTCEFPEASFVSPAHCCTAKSWDGVATPQGFETSNQHSKSWRWGRHRGTRGEG

SEQ ID NO: 792151 - protein, 196 aa, Homo sapiens
KDLGYLQQWLKAFVGAFKKSISLSSLEPRRPEEAGAEVPLLPLDELHVLAEQLHQADLEQALLLLKLFIILCRNLENIEAGRGQVLVPRVLALLTKLVAELKGCPPPQGRGTQLENVALHALLLCEGLFDPYQTWRRQRSGEVISSKEKSKYKFPPAALPQEFSAFFQESLQNADHLPPITAVTSHPPLLRRPRWR

SEQ ID NO: 792152 - protein, 128 aa, Homo sapiens
YLGNFSVDWILSLPLLQPLLTVCSTTMTPILSTFFLIDMNILTLSPLPPMGSVFEKFRNPKSNHVWPKPFSPSNYMLEQNIILRVLHNIRGKFSPSFKQITLICPIFQRKNSNKNVKWEQMRTNFYTN

SEQ ID NO: 792153 - protein, 96 aa, Homo sapiens [sequence omitted]

SEQ ID NO: 792154 - protein, 234 aa, Homo sapiens
GEEAPRFPHLGSGRWEQEDRALSPVIPLIPRASIPVFPDTKPYGALGLEVPGKLPVTTWEKGKGSEVSVMLTVSAAAAKNLNGVMVAVAELLSMKIPNSYEVLFPESPARAGTEPKKGEAEGPGECGREALWDLRGVILVGGSDPLLSAGGKEKGLEGKSPDTGPDWLKQFDAVLPGYTLKSQLDILSLLKQESPAPEPPTQHSYTYNVSNLDVRQLSAPPPEEPSPPPSPLAP

SEQ ID NO: 792155 - protein, 208 aa, Homo sapiens
GEEAPRFPHLGSGRWEQEDRALSPVIPLIPRASIPVFPDTKPYGALGLEVPGKLPVTTWEKGKGSEVSVMLTVSAAAAKNLNGVMVAVAELLSMKIPNSYEVLFPESPARAGTEPKKGEAEGPGGKEKGLEGKSPDTGPDWLKQFDAVLPGYTLKSQLDILSLLKQESPAPEPPTQHSYTYNVSNLDVRQLSAPPPEEPSPPPSPLAP

SEQ ID NO: 792156 - protein, 204 aa, Homo sapiens
GEEAPRFPHLGSGRWEQEDRALSPVIPLIPRASIPVFPDTKPYGALGLEVPGKLPVTTWEKGKGSEVSVMLTVSAAAAKNLNGVMVAVAELLSMKIPNSYEVLFPESPARAGTEPKKGEAEGPGGKEKGLEGKSPDTGPDWLKQFDAVLPGYTLKSQLDILSLLKQVGLGEKKGWVLEKRGCRPGAVAHICNPSALGGKASESL

SEQ ID NO: 792157 - protein, 82 aa, Homo sapiens
STPPPALVELCPGSPWLFLCVCLSLSYLATFVHQHFHGNTPGQQVHPPEPLAPLSPIYLACKCVFLNLRATSGSPERCTLYL

SEQ ID NO: 792158 - protein, 335 aa, Homo sapiens
MLFSDSPFLQGFLQQCKFTDVTLSPWSGDSKCHQRRVLTYTIPISNPLGPKSASVVETQTLFRRGPQAGGCVVDSEVLTQGIPYQDYFYTAHRYCILGLARNKARLRVSSEIRYRKQPWSLVKSLIEKNSWSGIEDYFHHLERELAKAEKLSLEEGGKDARGLLSGLRRRKRPLSWRAHGDGPQHPDPDPCARAGIHTSGSLSSRFSEPSVDQGPGAGIPSALVLISIVLIILIALNVLLFYRLWSLERTAHTFESWHSLALAKGKFPQTATEWAEILALQKQFHSVEVHKWRQILRASVELLDEMKFSLEKLHQGITVSDPPFDTQPRPDDSFS

SEQ ID NO: 792159 - protein, 335 aa, Homo sapiens; identical to SEQ ID NO: 792158

SEQ ID NO: 792160 - protein, 335 aa, Homo sapiens; identical to SEQ ID NO: 792158

SEQ ID NO: 792161 - protein, 405 aa, Homo sapiens
MFDTTPHSGRSTPSSSPSLRKRLQLLPPSRPPPEPEPGTMVEKGSDSSSEKGGVPGTPSTQSLGSRNFIRNSKKMQSWYSMLSPTYKQRNEDFRKLFSKLPEAERLIVDYSCALQREILLQGRLYLSENWICFYSNIFRWETTISIQLKEVTCLKKEKTAKLIPNAIQICTESEKHFFTSFGARDRCFLLIFRLWQNALLEKTLSPRELWHLVHQCYGSELGLTSEDEDYVSPLQLNGLGTPKEVGDVIALSDITSSGAADRSQEPSPVGSRRGHVTPNLSRASSDADHGAEEDKEEQVDSQPDASSSQTVTPVAEPPSTEPTQPDGPTTLGPLDLLPSEELLTDTSNSSSSTGEEATWLPCFPTSPAASSSTLSSMWALSGSSRCSSRTRPSSRASYSSASSQT

SEQ ID NO: 792162 - protein, 405 aa, Homo sapiens; identical to SEQ ID NO: 792161

SEQ ID NO: 792163 - protein, 405 aa, Homo sapiens; identical to SEQ ID NO: 792161

SEQ ID NO: 792164 - protein, 145 aa, Homo sapiens
HLTPSCSPAGSLSSRFSEPSVDQGPGAGIPSALVLISIVLIILIALNVLLFYRLWSLERTAHTFESWHSLALAKGKFPQTATEWAEILALQKQFHSVEVHKWRQILRASVELLDEMKFSLEKLHQGITVSDPPFDTQPRPDDSFS

SEQ ID NO: 792165 - protein, 128 aa, Homo sapiens
VVWGCSEHLDPRNPDLLTPVPSLIILIALNVLLFYRLWSLERTAHTFESWHSLALAKGKFPQTATEWAEILALQKQFHSVEVHKWRQILRASVELLDEMKFSLEKLHQGITVSDPPFDTQPRPDDSFS

SEQ ID NO: 792166 - protein, 136 aa, Homo sapiens
MFDTTPHSGRSTPSSSPSLRKRLQLLPPSRPPPEPEPGTMVEKGSDSSSEKGGVPGTPSTQSLGGHCWHGVSARHLPPAPPDGPTRGCADVGTTEPRCTLDQGAGPASGRPPTNLFCPAEVVGGASWGARFPQLWV

SEQ ID NO: 792167 - protein, 335 aa, Homo sapiens; identical to SEQ ID NO: 792158

SEQ ID NO: 792168 - protein, 335 aa, Homo sapiens; identical to SEQ ID NO: 792158

SEQ ID NO: 792169 - protein, 335 aa, Homo sapiens; identical to SEQ ID NO: 792158

SEQ ID NO: 792170 - protein, 335 aa, Homo sapiens; identical to SEQ ID NO: 792158

SEQ ID NO: 792171 - protein, 344 aa, Homo sapiens
MLFSDSPFLQGFLQQCKFTDVTLSPWSGDSKCHQRRVLTYTIPISNPLGPKSASVVETQTLFRRGPQAGGCVVDSEVLTQGIPYQDYFYTAHRYCILGLARNKARLRVSSEIRYRKQPWSLVKSLIEKNSWSGIEDYFHHLERELAKAEKLSLEEGGKDARGLLSGLRRRKRPLSWRAHGDGPQHPDPDPCARAGIHTSGSLSSRFSEPSVDQGPGAGIPSALVLISIVLIILIALNVLLFYRLWSLERTAHTFESWHSLALAKGKFPQTATEWAEILALQKQFHSVEVHKWRQILRASVELLDEVGGAARAGLGAAGLQGPVLKPHRAAGTSPLRISVSSSVK

SEQ ID NO: 792172 - protein, 334 aa, Homo sapiens
EKGSDELLQGFLQQCKFTDVTLSPWSGDSKCHQRRVLTYTIPISNPLGPKSASVVETQTLFRRGPQAGGCVVDSEVLTQGIPYQDYFYTAHRYCILGLARNKARLRVSSEIRYRKQPWSLVKSLIEKNSWSGIEDYFHHLERELAKAEKLSLEEGGKDARGLLSGLRRRKRPLSWRAHGDGPQHPDPDPCARAGIHTSGSLSSRFSEPSVDQGPGAGIPSALVLISIVLIILIALNVLLFYRLWSLERTAHTFESWHSLALAKGKFPQTATEWAEILALQKQFHSVEVHKWRQILRASVELLDEMKFSLEKLHQGITVSDPPFDTQPRPDDSFS

SEQ ID NO: 792173 - protein, 405 aa, Homo sapiens; identical to SEQ ID NO: 792161

SEQ ID NO: 792174 - protein, 205 aa, Homo sapiens
MFDTTPHSGRSTPSSSPSLRKRLQLLPPSRPPPEPEPGTMVEKGSDSSSEKGGVPGTPSTQSLGSRNFIRNSKKMQSWYSMLSPTYKQRNEDFRKLFSKLPEAERLIVDYSCALQREILLQGRLYLSENWICFYSNIFRWETTISIQLKEVTCLKKEKTAKLIPNAIQICTESEKVTEDPVTGPRGPPLSRPPPPNMQSPICSAP

SEQ ID NO: 792175 - protein, 125 aa, Homo sapiens
MLSPTYKQRNEDFRKLFSKLPEAERLIVDYSCALQREILLQGRLYLSENWICFYSNIFRWETTISIQLKEVTCLKKEKTAKLIPNAIQICTESEKVTEDPVTGPRGPPLSRPPPPNMQSPICSAP

SEQ ID NO: 792176 - protein, 67 aa, Homo sapiens
SWFNSGLECRLWNNNANPGSLEPLSIEDLVQVIQRLHCLPFLICVKCLEEYLSHNKSSITWSKCKKI

SEQ ID NO: 792177 - protein, 259 aa, Homo sapiens
LTLPSTQCILFLISLPMSQSRLPKGSQPGAVELSGLCLRSCVLTTVAAAPGGLRPAPLHTWAAGLPRASPQTSGEGSPRGREGSLMPISFRSLRATRPTDVGLSCLDVQFLWLTPQARSSGTEGGLWAPVDFHSQDFTSLPRASDRTATSSHECRAWTKLERQRRLWQGPSWKPWQARACMCWLARAYFGVCVGDTGLLRDWRGSRVGSSLVEARPGTHSVVQIPAPLPAVSTVSSPVKWEYLCGGRVLRFPRANLPAV

SEQ ID NO: 792178 - protein, 83 aa, Homo sapiens
MSPGVTFFAERRAHASVPWAVESQCSALLSAADLVPGDSLSKCSGDNVQWEAEAGEWHEAELAVSQDRTTVLQPGQQSEALSQ

SEQ ID NO: 792179 - protein, 126 aa, Homo sapiens
VADGQVLLVSRLGRSLGPAFPFSVPLLWLLDSLWNIPGDSWASRESGLQGVGPASPCLAGFPGQRSCCSPVIPPVLQPFSLVQTHTLPSHCLGLLSSPFWLEGLARALSPALPVRRAQVCGFGGAA

SEQ ID NO: 792180 - protein, 216 aa, Homo sapiens
PKNKLEKFWRFPTVWKTDELHSLGILKTLLTWALRPAELAPLYGCWGLRTGIAVACAPHHASLNLHGLNQIRNVKKQSVYLMNLRKSGTLGHPGSVDETTYERLAEESLDSLAEFFEDLADKPYTFEDYDVSFGSGVLTGKLGRDLATYVINKQTPNKQIWLSSPSNGLKRYDWTEKNWVYSHDCVTLHDVLAAELTKALKTKLDLSSLAYSGEDA

SEQ ID NO: 792181 - protein, 162 aa, Homo sapiens
AAVFCCGFRDHKYCCDDPHSFFPYEHSYMWWLSIGALIGLSVAAVVLLAFIVTACVLCYLFISSKPHTKLDLGLSLQTAGPEEVSPDCQGVNTGMAAEVPKVSPLQQSYSCLNPQLESNEGQAVNSKRLLHHCFMATVTTSDIPGSPEEASVPNPDLCGPVP

SEQ ID NO: 792182 - protein, 82 aa, Homo sapiens
AAVFCCGFRDHKYCCDDPHSFFPYEHSYMWWLSIGALIGLSVAAVVLLAFIVTACVLCYLFISSKPHTKLDLGLSLQTAGGS

SEQ ID NO: 792183 - protein, 159 aa, Homo sapiens
HPQVKGPGTGLWGISLGADICLSMASFLKNDSDTVSINGSGISGNRGINCKQNSIPPLGYDLRRIKVAFSGLVDVVDIKNDLVGGYKNPSMISMEKAQGPIIFIVGQDDHNWRSELYAQSLNGYGPMERKNPRSSVTLGLGFTLSLLTSPCAQLPFTNY

SEQ ID NO: 792184 - protein, 104 aa, Homo sapiens
AKLKRKCCLNVTAPFRKTQLVSVWVRSPRGHSPCVGRWHRVEATPVTPIPHLPVSATQADLHPMTQKGFVKIKSRVLCRGVCAHGGWDGGMGCVGLTEASAAGT

SEQ ID NO: 792185 - protein, 67 aa, Homo sapiens
SLGAGGAELGKWSPGESPAIARSFPGFPCGGRVCWVSELTRGPEVAKSWNSCPSAPGKGVKARPESL

SEQ ID NO: 792186 - protein, 80 aa, Homo sapiens
KYGLKSHSSLPYRLDSGGSQLAVQTPPAPVVGSAWTDHDHSQGAKRFGEIRAAAGTDSVRREPSTSQEVSSLQEQKLPAP

SEQ ID NO: 792187 - protein, 173 aa, Homo sapiens
AARREPQPSPPTRGARGPGSPRPGASREPGPGASRAPRGGRATMLKMAMKLKARAAESEKKTAAAAAEVAAEAAAAAAALAEPREPLAPRKSGDPEKLAKNPKNPAREALPEKFLTDKERKKLEKKLLEQRRKEEKKKEKERKKMEKMLKKKKKKVPEAQEEARCPEAAAAAA

SEQ ID NO: 792188 - protein, 173 aa, Homo sapiens
MCGGLQEWQGSGASSVKTEVTVSLAPPALPPRTGVFASVLISCWVLPWTLSGMQAGTSLLSSYIPPRAQGSVRGPATPWQGSCTSIISCLRAPDPPPGTTLVGLRLEGKECQNSSPGGRRVCEPSPALSDSQTFISSSFSWLEVPCIIFFFFFFRWSLTLLPRLECSGAMSAH

SEQ ID NO: 792189 - protein, 98 aa, Homo sapiens
PSQKTNNNNNKKKRASLQQFTQQPRQDLLETISILFPGLCQLLECYQHHQTLVVLVSSGSVLQDLFEPGNRLSCLWVPHLILGIHIWISGLHSFCSWM

SEQ ID NO: 792190 - protein, 116 aa, Homo sapiens
SGLGLSVAVLWPLCWAPSQKITHPWHLPGPSAASLHVKRSPLASRRYIYLEELLDFKVFCSGKEEGTSPHGPILGAPQTGIPVVTKDPARDGGTKSSLENTGPSSLPALRASYVRL

SEQ ID NO: 792191 - protein, 121 aa, Homo sapiens
LRHGIQYFNNNTQHSSLFTLNEVIVQTNCSKENFLVLTSDCKSLWNGDTGECTDNAYIDIQLRIASFSQNCDIYPGKDFVQPPTKICVGCPRDIPTNSPELEETLTHTITKLNAENNATFY

SEQ ID NO: 792192 - protein, 104 aa, Homo sapiens
MEKIHCRFICIKDLLRYPSMRKPLFHSFFILLAPDSLSEFQNLILMKYGTQVSGSDFDTVSPFPAQATPLTSLLVGTALLALPITALILHFLELNLAQQMLNES

SEQ ID NO: 792193 - protein, 70 aa, Homo sapiens
MGVVPAMNGVYYKCEFRGAIPASRTGDGGCVATDGPDPLGVKGKYGEKFPSPPGTAPIFVEFVIKASCSS

SEQ ID NO: 792194 - protein, 189 aa, Homo sapiens [sequence omitted]

SEQ ID NO: 792195 - protein, 114 aa, Homo sapiens
RGRDFGDLLIYSGALLVFLSLLGWILWYTGNIEISRQELERDYGLRPSALARLARKLSRRWSAPAAAGQRPAPGSRRARRAARAPPPPAAGSRRVRLQLATLEAGPGAAGAGSE

SEQ ID NO: 792196 - protein, 128 aa, Homo sapiens
RGRDFGDLLIYSGALLVFLSLLGWILWYTGNIEISRQELERDYGLRPSALARLARKLSRRWSPRAPAARHARGRARGGGRGQRVRPRQPLGSSCQDQTEMCSCPYIRGQTDAPCTPSLLTWIKSRFAL

SEQ ID NO: 792197 - protein, 112 aa, Homo sapiens
RGRDFGDLLIYSGALLVFLSLLGWILWYTGNIEISRQELERDYGLRPSALARLARKLSRRWSGRGQRVRPRQPLGSSCQDQTEMCSCPYIRGQTDAPCTPSLLTWIKSRFAL

SEQ ID NO: 792198 - protein, 112 aa, Homo sapiens
MQLALLPVPINQTPPHSVSEFSIGSSASADINAYHCCVHVSSPCTLQAPLSFTYPSPCMRSGASNQIQPEGTSACACCSQEKRQPVLGGAPSLAHPLVLKQKARINYLKAKE

SEQ ID NO: 792199 - protein, 112 aa, Homo sapiens; identical to SEQ ID NO: 792198

SEQ ID NO: 792200 - protein, 129 aa, Homo sapiens
REKQSFEAELIKGTSTNNPSHGGGGVFEDPMRASNKGESLEQIIVVKWRQRASNVSGIGGFLVALTSRMKPRTLTVVSLVAVHPSTVNMLGKQLCQKPSDSPASTPQAKWRRKICASFSQGILCLWGTF

SEQ ID NO: 792201 - protein, 76 aa, Homo sapiens
REKQSFEAELIKGTSTNNPSHGGGGVFEDPMRASNKGESLEQIIVVKWRQRASNVSGIGGFLVALTSRMKPRTLTV

SEQ ID NO: 792202 - protein, 166 aa, Homo sapiens
RRPLSLPSPNRDPASQNHRHSHLWRRRGPTDPRRRGRAAARPSAPSQPAPAHPAPPARHGDLYGPPPRRPSKGPRPWVSRAGAPGQSWRRQGRDRTVGPARPTADAEPASGLGAGLTRPRKGPAPRGPQTGRPARQTDRLTPARGSRRSGCAGPATAFWPQAAPQG

SEQ ID NO: 792203 - protein, 107 aa, Homo sapiens
RYLIPLVFFRPSQSALPLLRPYTQKELRRERPRLPTAKPILLPAAASPSWQEKCRLFLWLHADPSLELPSRPCLRLSLTLFSVLGHHPLPHSHLPLDPIHPPGPTNE

SEQ ID NO: 792204 - protein, 130 aa, Homo sapiens [sequence omitted]

SEQ ID NO: 792205 - protein, 113 aa, Homo sapiens
YSRTTGQCPRLFSLHNAPAPVPLFLPNSPAQWREAPDTAGMVGARNLVGWSMFPGDPEAAGPTPQTSGALVVQTKTDASLSYPPRLSLLELISGLRKKALNSTPDTRMTSAFK

SEQ ID NO: 792206 - protein, 206 aa, Homo sapiens
MLLLINVILTLWVSCANGQVKPCDFPDIKHGGLFHENMRRPYFPVAVGKYYSYYCDEHFETPSGSYWDYIHCTQNGWSPAVPCLRKCYFPYLENGYNQNYGRKFVQGNSTEVACHPGYGLPKAQTTVTCTEKGWSPTPRCIRVRTCSKSDIEIENGFISESSSIYILNKEIQYKCKPGYATADGNSSGSITCLPHAQKKWYMSGEK

SEQ ID NO: 792207 - protein, 230 aa, Homo sapiens
MLLLINVILTLWVSCANGQVKPCDFPDIKHGGLFHENMRRPYFPVAVGKYYSYYCDEHFETPSGSYWDYIHCTQNGWSPAVPCLRKCYFPYLENGYNQNYGRKFVQGNSTEVACHPGYGLPKAQTTVTCTEKGWSPTPRCIRVRTCSKSDIEIENGFISESSSIYILNKEIQYKCKPGYATADGNSSGSITCLHFLLSFVQIFLSFLLFIVPSSLSVLYFFFVYKDFLKR

SEQ ID NO: 792208 - protein, 229 aa, Homo sapiens
MLLLINVILTLWVSCANGQVKPCDFPDIKHGGLFHENMRRPYFPVAVGKYYSYYCDEHFETPSGSYWDYIHCTQNGWSPAVPCLRKCYFPYLENGYNQNYGRKFVQGNSTEVACHPGYGLPKAQTTVTCTEKGWSPTPRCIRVRTCSKSDIEIENGFISESSSIYILNKEIQYKCKPGYATADGNSSGSITCLPHMGWFSTNQICFTACIAFRCSRSEKVVHVGGEMSA

SEQ ID NO: 792209 - protein, 114 aa, Homo sapiens
GFIGETQEEDGTAYSGTAFQVERGAPGLPQKSLESLGYRQDSKSSELQLQEDVKCKQTGELAPEKHSIYLLIYLALGLNSGGTQEYFLQSDIWLLVGPSVITSAEGLKGALRVI

SEQ ID NO: 792210 - protein, 123 aa, Homo sapiens
LQRRKLSSGTWNLSKVTQLQAHWHRAWPTVCGVDPNQCCAGNHSWLPKRRPGASGHVHISSSASAASPSLERAALISGYPLPLRAPACPISWNERQLPGSGVYLFPKQALCLERASSRSLSHQ

SEQ ID NO: 792211 - protein, 97 aa, Homo sapiens
RHLQLSPARPSQLGTGKEQGKRNEKTWGRIHVFSWFPSWNICKFFSFKEKLSSQWAIKPTFIIQFNLIQNTLIRQLLYAEHMTKQKNHSSGEKNVFL

SEQ ID NO: 792212 - protein, 121 aa, Homo sapiens
GISALIVGFDDDGISRLYQTDPSGTYHAWKANAIGRSAKTVREFLEKNYTEDAIASDSEAIKLAIKALLEVVQSGGKNIELAIIRRNQPLKMFSAKEVELYVTEIEKEKEEAEKKKSKKSV

SEQ ID NO: 792213 - protein, 126 aa, Homo sapiens [sequence omitted]

SEQ ID NO: 792214 - protein, 88 aa, Homo sapiens
QPQLAGFRPGRLHLEAWGSCSYGTEASWEILGGSLPLSLDFNHTMRTYNTINLLSELGQKSEQAARDRAHLTNGYPSLCLAQSLAHSC

SEQ ID NO: 792215 - protein, 103 aa, Homo sapiens
LENERVGRHAGQKVVAKNCCDEPMRAETGLCFGIYSTSYSIMTLEGGMESLPTTEEARSEFGHAGGAAAGVWTPTTPPQPGACGSSQETPWGRHPAASGGHHQ

SEQ ID NO: 792216 - protein, 117 aa, Homo sapiens
MVSHSVPQAGVQWRNLGSLQPPPPGFKKFSCLSFPSNWDYRRTPPAQLIFYFYFFLFFSRDGVSLCCPGWWCVPVVPATQETEAGELLEPGRWSLQRAKIVTLHSSLDDRLRLHLKK

SEQ ID NO: 792217 - protein, 117 aa, Homo sapiens; identical to SEQ ID NO: 792216

SEQ ID NO: 792218 - protein, 68 aa, Homo sapiens
MTTLSGSVPHCSKWLLRLSSVVSKLNPPMKSFLSCSGSLGDSDLDKTARRRETLMMLLPWHPWAERHK

SEQ ID NO: 792219 - protein, 114 aa, Homo sapiens
MRHSADSPEQPTPTRTHPGRGNPLKTSGVLIPHLQLDKVPPWCRGKAAAIFLVQEKEQASPRLQPVGLWSTVGTPRWGERKTSVLSPLPVPPLPGVWLEEERKRTGVGRDAHHI

SEQ ID NO: 792220 - protein, 108 aa, Homo sapiens
MVASLLFSDLGFLASRISKNGFLTHAVRCYPSIQLDEDELGALSPRRNNGEPLARLGAAVGAASLGQKCSRHPAGSRGVKSAAGLRQRQTAVVDSEQKLSSSSNKYGP

SEQ ID NO: 792221 - protein, 115 aa, Homo sapiens
MDRSCTGGDSHQSATDSGALPTLSLLREKQAAVIFVCSFCAGKGVSRGKLWYLSPQTTTSVLSWPDCTRPIKRSRGEIEACSSGSPIKVGAVVTLTLSLPREKLRAEILHQFTLC

SEQ ID NO: 792222 - protein, 136 aa, Homo sapiens
RISRRRAAAFPGRLGLARSGSPRCRDGKCLPTAGLGTHSRALQAPELFLGKGVNEAPAQPLSFSWHFPVNPPGVQVGHFPLPGSALGLGLRPVPSLQSAVQSRWGWKGSGLLPSQVSSSAWAATRLDLSAHYMDKP

SEQ ID NO: 792223 - protein, 105 aa, Homo sapiens
MYHHVSRSCMILELWVVFQFFIMIKNAVINIFAWSIFAHLAIYVQLQEMLGEREHVYKNVMSQAWWHAPVIPAALEREEILTRVPAFLVHKLALVLPGAGDHQVT

SEQ ID NO: 792224 - protein, 92 aa, Homo sapiens
LLQVCFPLWMPDIENVTHAVLFHILQAPPQLSSGMRLGSMDLFSLAFVLMLPAVQGAARAPSHGSFPPSGTAVTGWHGCQSLAGPSVVETTL

SEQ ID NO: 792225 - protein, 92 aa, Homo sapiens; identical to SEQ ID NO: 792224

SEQ ID NO: 792226 - protein, 567 aa, Homo sapiens
MRPDSPTMAAPAESLRRRKTGYSDPEPESPPAPGRGPAGSPAHLHTGTFWLTRIVLLKALAFVYFVAFLVAFHQNKQLIGDRGLLPCRVFLKNFQQYFQDRTSWEVFSYMPTILWLMDWSDMNSNLDLLALLGLGISSFVLITGCANMLLMAALWGLYMSLVNVGHVWYSFGWESQLLETGFLGIFLCPLWTLSRLPQHTPTSRIVLWGFRWLIFRIMLGAGLIKIRGDRCWRDLTCMDFHYETQPMPNPVAYYLHHSPWWFHRFETLSNHFIELLVPFFLFLGRRACIIHGVLQILFQAVLIVSGNLSFLNWLTMVPSLACFDDATLGFLFPSGPGSLKDRVLQMQRDIRGARPEPRFGSVVRRAANVSLGVLLAWLSVPVVLNLLSSRQVMNTHFNSLHIVNTYGAFGSITKERAEVILQGTASSNASAPDAMWEDYEFKCKPGDPSRRPCLISPYHYRLDWLMWFAAFQTYEHNDWIIHLAGKLLASDAEALSLLAHNPFAGRPPPRWVRGEHYRYKFSRPGGRHAAEGKWWVRKRIGAYFPPLSLEELRPYFRDRGWPLPGPL

SEQ ID NO: 792227 - protein, 567 aa, Homo sapiens; identical to SEQ ID NO: 792226

SEQ ID NO: 792228 - protein, 458 aa, Homo sapiens
MPTILWLMDWSDMNSNLDLLALLGLGISSFVLITGCANMLLMAALWGLYMSLVNVGHVWYSFGWESQLLETGFLGIFLCPLWTLSRLPQHTPTSRIVLWGFRWLIFRIMLGAGLIKIRGDRCWRDLTCMDFHYETQPMPNPVAYYLHHSPWWFHRFETLSNHFIELLVPFFLFLGRRACIIHGVLQILFQAVLIVSGNLSFLNWLTMVPSLACFDDATLGFLFPSGPGSLKDRVLQMQRDIRGARPEPRFGSVVRRAANVSLGVLLAWLSVPVVLNLLSSRQVMNTHFNSLHIVNTYGAFGSITKERAEVILQGTASSNASAPDAMWEDYEFKCKPGDPSRRPCLISPYHYRLDWLMWFAAFQTYEHNDWIIHLAGKLLASDAEALSLLAHNPFAGRPPPRWVRGEHYRYKFSRPGGRHAAEGKWWVRKRIGAYFPPLSLEELRPYFRDRGWPLPGPL

SEQ ID NO: 792229 - protein, 475 aa, Homo sapiens
  misc_feature (297)..(297): Xaa can be any naturally occurring amino acid
RITTHFELKHLSSGDLLRDNMLRGTEIGVLAKAFIDQGKLIPDDVMTRLALHELKNLTQYSWLLDGFPRTLPQAEALDRAYQIDTVINLNVPFEVIKQRLTARWIHPASGRVYNIEFNPPKTVGIDDLTGEPLIQREDDKPETVIKRLKAYEDQTKPVLEYYQNVYAFLQTKVPQRSQKASVTPGGEMCELFNSKMGKPPESLHLEAAYPKTSSMYEFFENYYYFYFYMINKDTKDVPNDTDTKMHRLKSSRCVVCKLSSKTFMESERLTHLLEHITQSIGSSTKLRGPLTYRGEHXYTNYAGQGPTRVTMPREENTEPHIGPDWIRKNKHHGARARQAHTAPTRSNKKTDKKYSRHQGGVHKPERRRNTRDNKRNKDRQTRTARQARRREREGQRRTVRAGTVLCMGRGEEEGASGGRRTQTAGGSARRRKAGYTSERKGAKEARGMKEGRGKAGQTRQGGRQRTRAQRTTDSG

SEQ ID NO: 792230 - protein, 492 aa, Homo sapiens
  misc_feature (314)..(314): Xaa can be any naturally occurring amino acid
RITTHFELKHLSSGDLLRDNMLRGTEIGVLAKAFIDQGKLIPDDVMTRLALHELKNLTQYSWLLDGFPRTLPQAEALDRAYQIDTVINLNVPFEVIKQRLTARWIHPASGRVYNIEFNPPKTVGIDDLTGEPLIQREDDKPETVIKRLKAYEDQTKPVLEYYQKKGVLETFSGTETNKIGPMYMLSYKLKFHKEARKLQLLHEETCVNYSIVRWANLLVLAFRSCLSKTSSMYEFFENYITFDFYMINKDTKDVPNDTDTKMHRLKSSRCVVCKLSSKTFMESERLTHLLEHITQSIGSSTKLRGPLTYGAEHXYTNYAGQGPTRVTMPREENTEPHIGPDWIRKNKHHGARARQAHTAPTRSNKKTDKKYSRHQGGVHKPERRRNTRDNKRNKDRQTRTARQARRREREGQRRTVRAGTVLCMGRGEEEGASGGRRTQTAGGSARRRKAGYTSERKGAKEARGMKEGRGKAGQTRQGGRQRTRAQRTTDSG

SEQ ID NO: 792231 - protein, 70 aa, Homo sapiens
GVVSWGYGCTLRDFPGVYTTSRSTCSGSCSKSGSCPEQAGLGSHLGRLRRDQDLPPPSDLRFGLRCRPPS

SEQ ID NO: 792232 - protein, 62 aa, Homo sapiens
MAPPGPANPAKQSWTQKQTPWPAKLSLQNPSLQLFRKIDLSNNSIYHVARLASMIKLYCNAV

SEQ ID NO: 792233 - protein, 78 aa, Homo sapiens
QPNNAQAIHSSCPCKCQRQPSQKSLKPTKPEDCAVPLSPTFSPSTLRNLATVSPCGQAWNITSVRCNLWISYETERKE

SEQ ID NO: 792234 - protein, 76 aa, Homo sapiens
QPNNAQAIHSSCPCKCQRQPSQKSLKPTKPEDCAVPLSPTFSPSTLRNLATVSPCGQAWNITSVRCNLWISYEMDI

SEQ ID NO: 792235 - protein, 68 aa, Homo sapiens
QPNNAQAIHSSCPCKCQRQPSQKSLKPTKPEDCAVPLSPTFSPSTLRNLATDGYLRASELSLPPSIIS

SEQ ID NO: 792236 - protein, 147 aa, Homo sapiens
TAKQCAGNPQQLPLQMSAPAQSKELETYQAGGLCCASLAHIFPKHSQEPGNSVPLWPSLEHHICTLQSVDQLRGKSLFGRGGGLCWTCLPKSMKSGSQGSEWRPFLPYHLNKNFTLAAGLNLWVGAGDFRCCCFKAAAKAMFFKVVS

SEQ ID NO: 792237 - protein, 321 aa, Homo sapiens
MTLWCQGTLDTQGYYLTKEGNPMTWYQQSPPEPRNKTNFFIPSMREHHAGRYHCHYLSPAGWSERSEPLELVVTGVSRKPSLLTLQGPVVAPGENLTLQCGSDVGYDKFTLYKEGGHDLVQGSGRQPQAGLSQANFTLGPVRVSHGGQYRCYGAHNLSSEWSAPSDPLSILIAGQIRGRPSLSVQPGPTVASGENVTLLCQSREQLDTFLLTKEGAAHHPLRLRSEHQAQQHQAEFPMSPVTSAHAGTYRCYSSRRFFPYLLSHPSDPLELVVSGAAETLSPSQNKTDSKTASHPQDYTVENLIRVAVAGLVLVVLGILLL

SEQ ID NO: 792238 - protein, 365 aa, Homo sapiens
MVSILTVLLCLRLSLGQKAQALAGTLPKPSLWAEPGSVITWESPMTLWCQGTLDTQGYYLTKEGNPMTWYQQSPPEPRNKTNFFIPSMREHHAGRYHCHYLSPAGWSERSEPLELVVTGVSRKPSLLTLQGPVVAPGENLTLQCGSDVGYDKFTLYKEGGHDLVQGSGRQPQAGLSQANFTLGPVRVSHGGQYRCYGAHNLSSEWSAPSDPLSILIAGQIRGRPSLSVQPGPTVASGENVTLLCQSREQLDTFLLTKEGAAHHPLRLRSEHQAQQHQAEFPMSPVTSAHAGTYRCYSSRRFFPYLLSHPSDPLELVVSGAAETLSPSQNKTDSKTASHPQDYTVENLIRVAVAGLVLVVLGILLL

SEQ ID NO: 792239 - protein, 160 aa, Homo sapiens
VTWSPLSPPGNGGWGALGRGVRDPEEEARARWRGGRGGVESARDGKERRGSGGARLGPRLPDSQPPGPGRGERSEDRGQGEREGIPGDRGRSRHPLLGSRSPKGSEMLPFDVYARGEGGMPRSRLTAGSGLPVPGIPGGKRGGSGDGTGDPRRLSSHPAA

SEQ ID NO: 792240 - protein, 110 aa, Homo sapiens [sequence omitted]

SEQ ID NO: 792241 - protein, 132 aa, Homo sapiens
MHLQKTDCLGLMRVGVQQDRVFQLHCFSLGQEAQTQGDPIPSLGHPTSLEYRQGPGSIKTVPQPLELRPDCLISICLLREGSLQPAWARCCPGENGILESSNLDPCQFIVASTLACLGKGLVLPCPHTSLPA

SEQ ID NO: 792242 - protein, 54 aa, Homo sapiens
MVHPSHSTPCSLTTQCPPTGGHPASEAVAASEAVADIRSSCRHPKQLPTSEAVA

SEQ ID NO: 792243 - protein, 147 aa, Homo sapiens
MNESWAGPGPAERAEEAVSGVGVEAKTQHAGQGAQPGGMGCGFSSGPIGMALGLGLVGTAATRGGSSAWPDSTCNVGRQWAPPGGRNTVRSMQRAGDHGACDLRAHPGQTWVRGGLGRQDGEGLQGVFVLCPYTGDLHGRVRSIRML

SEQ ID NO: 792244 - protein, 103 aa, Homo sapiens
IKTPTFNITLMSEQVIRIRSCVKPPYMLLVGNIIIIPNTQNIECDNCKLFMCIDATFNPTTSILFVRAREGVWIPVSLHHPWESSPSIHIVNEVLKGILKRTK

SEQ ID NO: 792245 - protein, 108 aa, Homo sapiens [sequence omitted]

SEQ ID NO: 792246 - protein, 191 aa, Homo sapiens
  misc_feature (187)..(187): Xaa can be any naturally occurring amino acid
YILYTLVFAFSKYQHKNLLILYDAIGTLADSVGHHLNKPEYIQMLMPPLIQKWNMLKDEDKDLFPLLECLSSVATALQSGFLPYCEPVYQRCVNLVQKTLDLLSGLAEGLGGNIEQLVARSNILTLMYQCMQDKMPEVRQSSFALLGDLTGTNLNPEFISVCNNATWALGEISIQMGIEMQAYIPMXCTSL

SEQ ID NO: 792247 - protein, 67 aa, Homo sapiens
LRPKATTRSLPGCLHYSTPDCRHRHPRLCLQLKSPSLPCPITEVIGSPAPSLTGIKGSGLVSMAPHG

SEQ ID NO: 792248 - protein, 225 aa, Homo sapiens
KLPLVTPHTQCRLKLLKLERIKDYLLMEEEFIRNQEQMKPLEEKQEEERSKVDDLRGTPMSVGTLEEIIDDNHAIVSTSVGSEHYVSILSFVDKDLLEPGCSVLLNHKVHAVIGVLMDDTDPLVTVMKVEEIKESVELPLTHPEYYEEMGIKPPKGVILYGPPGTGKTLLAKAVANQTSATFLRVVGSELIQKYLGDGPKLVRELFRVAEEHAPSIVFIDEIDAI

SEQ ID NO: 792249 - protein, 41 aa, Homo sapiens
MTRNVVRQEFEAPGKPQDSSQQDACLILVKGNWTTNEMEVK

SEQ ID NO: 792250 - protein, 41 aa, Homo sapiens; identical to SEQ ID NO: 792249

SEQ ID NO: 792251 - protein, 105 aa, Homo sapiens
MGITAGCWEHPPWGVESLQEKSPPGPNTPLGCTVAYDSDKPHSAASSWPGSTCGLGHVSTPWGSLPPTWLPTPQSFLEQQCAQGTWGSFLQSLTEIVTQIILFCR

SEQ ID NO: 792252 - protein, 113 aa, Homo sapiens
DLGMLSTGPLGPLLFSHVFSPFQTCPCLEAGDPIHTAVPGILPGQCIAGNHLCPGCLSTQEAMTLQRQGKGSAGSPALLPPHHPRRGPACPGSLDMGFQWAITAISRVAKFLD

SEQ ID NO: 792253 - protein, 56 aa, Homo sapiens
EIAPLHSSLGDSTRLRLNKTKQNKSESQHCRYRTKFAFLGLTFLVSWIADSWSKAH

SEQ ID NO: 792254 - protein, 72 aa, Homo sapiens
PRSVTALSFPVAAVVGSYLFSCRRSSDNRPLQEGLLPPLHTASLIYGILRALAAAVGFEAPGLSPSQEGPQC

SEQ ID NO: 792255 - protein, 127 aa, Homo sapiens
AGRKAGAPRCSRKAAGTKQTSTLKQEDASKRKAELEAAVRKKIEFERKALHIVEQLLEENITEEFLMECGRFITPAHYSDVVDERSIVKLCGYPLCQKKLGIVPKQKYKISTKTNKVYDITERKVSL

SEQ ID NO: 792256 - protein, 156 aa, Homo sapiens
MGIVQQFLVLLTTSSDESLRFLSFRLDFNEHYKAREPRLRVSWVPGGGAAPTREARGPPRELRVMFVALLDTKFPLTSCRNCMLQVSCPSAHECAMFQRSGVWEKPRRVAHVGVECICKSLSQVGWLHCSHLSLKVFIPKRYHNLLRLLNLKCSKL

SEQ ID NO: 792257 - protein, 106 aa, Homo sapiens
MTCLSLLSSSPSSLCLVLFRHLLLGTFDFSHCRAAPTKDDCPVFVALRSSQNPLHLPPTLRHSKQPGFVPVRKRFLSSSYFFEQNILHTEARSSCKSDFVPNYLRL

SEQ ID NO: 792258 - protein, 45 aa, Homo sapiens
LIALIGIFSTMWNKSGEGKHPCLVLDLREKAFIINYYVSCGFSID

SEQ ID NO: 792259 - protein, 147 aa, Homo sapiens
PREGADCLWAEPGFSDSSSLSPWGVSSSGPPTPQGAHEPAGYVALQPAQCCFKLPLESSSVGTAWGPLHSQAARRRCESAQTLEARRGPGLPAGSTTCLGQGPAKSTVTGRQGVEQPLFCRQKQANFLKEEVPALAGGARFITPSFL

SEQ ID NO: 792260 - protein, 455 aa, Homo sapiens
VVESMEQDRIPEVHVPPSSAVSGVKEWFGLGGEQAEEKAFESVIEPVQESSFRSRKIAVEDENDLEELNNGEPQTEHQQESESEIDSVPKTQSELASESEHIPKPQSTGWFGGGFTSYLGFGDEDTGLELIAEESNPPLQDFPNSISSDKEATVPCTEILTEKKDTITNDSLSLKPSWFDFGFAILGFAYAKEDKIMLDDRKNEEDGGADEHEHPLTSELDPEKEQEIETIKIIETEDQIDKKPVSEKTDESDTIPYLKKFLYNFDNPWNFQNIPKETELPFPKQILDQNNVIENEETGEFSIDNYPTDNTKVMIFKSSYSLSDMVSNIELPTRIHEEVYFEPSSSKDSDENSKPSVDTEGPALVEIDRSVENTLLNSQMVSTDNSLSSQNYISQKEDASEFQILKYLFQIDVYDFMNSAFSPIVILTERVSLPFKPFAIILPILLNIRVATKYV

SEQ ID NO: 792261 - protein, 106 aa, Homo sapiens [sequence omitted]

SEQ ID NO: 792262 - protein, 112 aa, Homo sapiens
MGTTGNRLFLVSPSLASAASHLHSAPGRVWRLLEHGRPTSVPVGPRPRLDFEPRTPGPPLEGCAGPREVWDLDSAGAGSQGLVKETAGTPATAMAPRKDDLEQALRAVCTSA

SEQ ID NO: 792263 - protein, 106 aa, Homo sapiens
GHIRREGGVGSCSGAGTGDPRPPRSDGSDLSPSLSPCPRAVEAGYIFQKPNCKQLWRCQNSPPSDTALRRRFPQAGLFLSFPSAFLGDDKRLCSGNRNLEKKKKLR

SEQ ID NO: 792264 - protein, 128 aa, Homo sapiens
RWWERSTFSKEAYELISLQHFIMKKMQTRKVIFGFVKLGSTLASSKKRCQVSYCIVESGAWQRCVGCKYTFLSCLWLPNLLSNYFLKKASLSCPCKLAVCPMLLRSSIVSHNYKLVFSYVMSVFLSII

SEQ ID NO: 792265 - protein, 150 aa, Homo sapiens
GCGEIGTLLHCWWDCKLVQPLWKLVWRFLRDLELEIPFDPAIPLLGIYPKDYKSCLLAKFLSLNVLFIQDASLLFDTCGSVVSLASSFFLVVVTVKFGSVKGFQKCLPVISTYKQIKGNILLEVSQFSVLRHLPCLCHIYTVVPYSGDSI

SEQ ID NO: 792266 - protein, 164 aa, Homo sapiens
ISAHCNPHFQGSSNSSALASQAARITGTRHHARLIFVFLVETEFHHVGLKLLTLGDPPVSASQSAGITGESPHARPGSAFFPGPVTLLDVPWAPEGSVRCSAHLCCPFPPHPIHWAPGAPTPLQVSSWTLLSLHFCPRRPGRLMGTGIIFSSTVHCLMHESAGL

SEQ ID NO: 792267 - protein, 113 aa, Homo sapiens
NYTLSSGIHVQNMQVCYIGIHMPWWFAAPINQSFTLGISPNAIPPLAPNPSTGPRCMMFPSLCPCVLIVQLPLMSKSMQCLVFCSCVSLLRMMVSSFIHVPAKDMNPSFFMAA

SEQ ID NO: 792268 - protein, 79 aa, Homo sapiens
PLGAQRRLDRHGPRGCFPDVFVPGASAWKSAFVATLPLLLVLAALALGVLRKQRRSREKLRKQAEKRQGCVQISTFELR

SEQ ID NO: 792269 - protein, 220 aa, Homo sapiens
MEDSSTDTEKEEEEEKDEKDQEPIYAIVPTINIQDERFVDLSETPAFIFLHELHAMGKLPGTRMAALKAKYTLLHDAVMSTQESEVQLLQNAKRFTEQIQQQQFHLQQADNFPEAFSTEVSKMREQLLKYQNEYNAVKEREFHNQYRLNSLKEEKIIIVKEFEKITKPGEMEKKMKILRESTEELRKEIMQKKLEIKNLREDLASKQKQLLKEQKELEEL

SEQ ID NO: 792270 - protein, 69 aa, Homo sapiens
DPVIEFRRLRGVNGLCTSQIILQNNNSSERGDEAAGVPTVLCWPLGVTVRSRPASSTVVLGRMSSPSLG

SEQ ID NO: 792271 - protein, 71 aa, Homo sapiens
GALSEQGCYMQDPLVSIDLSEWLRIIGFFLKGSRNEASHKMILLNNCQMLLALYESLAVSIPESLKVFKKV

SEQ ID NO: 792272 - protein, 127 aa, Homo sapiens
LKVEKGETSLQSSETHPPEVALPPVGEPPALENSTALLEGVNTVVVTTSAPEALLASWARISARARTPEAVESPQEASGKRNMKSLFWSNGEISLVDINHWYILGYIKIPLRAGDSWTLPTEFLVQV

SEQ ID NO: 792273 - protein, 92 aa, Homo sapiens
DEVPDRMGMEDIVEANYEFASFAFLRMEDRCRGGNKAGGSHTSSSILGLEFTPAIPTPRPLARRTSHRAMPVFKQQRNVKHVGSSICLRHPG

SEQ ID NO: 792274 - protein, 99 aa, Homo sapiens
PWMQCYHRGARGRGRLWHPDDKSGDSAVERKQNHPGMQRYHPGARSQGRLSHPDDITKSGDSAVERKQDHPGMKLYHPGARSPGRFWWQDGSTNLEIQQ

SEQ ID NO: 792275 - protein, 279 aa, Homo sapiens
MSGELPPNINIKEPRWDQSTFIGRANHFFTVTDPRNILLTNEQLESARKIVHDYRQGIVPPGLTENELWRAKYIYDSAFHPDTGEKMILIGRMSAQVPMNMTITGCMMTFYRTTPAVLFWQWINQSFNAVVNYTNRSGDAPLTVNELGTAYVSATTGAVATALGLNALTKHVSPLIGRFVPFAAVAAANCINIPLMRQRELKVGIPVTDENGNRLGESANAAKQAITQVVVSRILMAAPGMAIPPFIYETLWKKKSLFEEVPWMSAPIQVGLVGSVGGC

SEQ ID NO: 792276 - protein, 261 aa, Homo sapiens
MSGELPPNINIKEPRWDQSTFIGRANHFFTVTDPRNILLTNEQLESARKIVHDYRQGIVPPGLTAGEKMILIGRMSAQVPMNMTITGCMMTFYRTTPAVLFWQWINQSFNAVVNYTNRSGDAPLTVNELGTAYVSATTGAVATALGLNALTKHVSPLIGRFVPFAAVAAANCINIPLMRQRELKVGIPVTDENGNRLGESANAAKQAITQVVVSRILMAAPGMAIPPFIYETLWKKKSLFEEVPWMSAPIQVGLVGSVGGC

SEQ ID NO: 792277 - protein, 270 aa, Homo sapiens
MSGELPPNINIKEPRWDQSTFIGRANHFFTVTDPRNILLTNEQLESARKIVHDYRENELWRAKYIYDSAFHPDTGEKMILIGRMSAQVPMNMTITGCMMTFYRTTPAVLFWQWINQSFNAVVNYTNRSGDAPLTVNELGTAYVSATTGAVATALGLNALTKHVSPLIGRFVPFAAVAAANCINIPLMRQRELKVGIPVTDENGNRLGESANAAKQAITQVVVSRILMAAPGMAIPPFIYETLWKKKSLFEEVPWMSAPIQVGLVGSVGGC

SEQ ID NO: 792278 - protein, 510 aa, Homo sapiens
MLTRNPKTKSSLQILQDSVKWHHMAHKVNSLLDAYSGLLSNESMILAVNSSFVDPLLQFESQLKIIESSFGMLVVMPSLDKVKEMGSSYEYIEDMENLYHNILNIYENILTSLVSKDLYKLQILKEMLVWMSKDSSYLQERIMVIINKVLRFTVTKVRKYLSVDAPCLGLLAAELSLLCSHEDPSIVKQASLGMCHLLYIARCQNDIGTNKPTNGKSHSLQFPSSDVEFLPKEFQQDESKIAQRVGQTLLPPLLTDFVQSLLMKLSSPDDKIASDAASILIFTLEFHAEKVTMVSKIVDAIYRQLCDNNCMKDVMLQVITLLTCTSPKKVIFQLMDYPVPADDTLIQMWKAACSQASVAPHVLKTILLILKGKPGEMEDTVTEGKRFSLDITNLMPLAACQALCTFLPLGSYRKAVAQYFPQLLTTLMFQVFYNSELKPILKDRALYAQDALRVLLNCSGLQQVDITLMKENFWDQLSEDLCYYHGVCFIAKTLSEYNFPQFPETLKLSL

SEQ ID NO: 792279 - protein, 111 aa, Homo sapiens [sequence omitted]

SEQ ID NO: 792280 - protein, 63 aa, Homo sapiens
SKGSGGDGGSKALTIEAPPSLRTSGNGDRDHLPGTRKPPSPSWANLAAYSVFFRNPTDTSVNS

SEQ ID NO: 792281 - protein, 126 aa, Homo sapiens
RIRKEIFYELIDNDDEMIKKLLKLNIAFPSDEDMCQKFLQQNSWNIFRKDLLQLLVEPCQSQLFTPNRPKKREIYNPKSVVLDLCSINKTTKPRYPIFMAPQKYLPPLRIVQAIKAPRYKIRELLA

SEQ ID NO: 792282 - protein, 138 aa, Homo sapiens [sequence omitted]

SEQ ID NO: 792283 - protein, 166 aa, Homo sapiens
GRQPRARAPREAELGGTRGGRALQVAAAAAPARPRQVRRSSCTFGSARAPLSSAPSGVSLWGGAFPPRQGLALDWRLKPWDPGAEGAKPHLPARSPLLWSQTIGRLGLKREGGAMGENPSPGVEPGPGGITCGGGSSWGSSGVRCSRSLIHLLNSINTCLLQAYHV

SEQ ID NO: 792284 - protein, 143 aa, Homo sapiens
FFILPGVVEYLSNGGVADNHKDFKELRYNECLMNFSCNGKNGSSEGRITHGFQLKSAYENNLMPYTNYTFDFKGVIDYIFYSKTHMNVLGVLGPLDPQWLVENNITGCPHPHIPSDHFSLLTQLELHPPLLPLVNGVHLPNRR

SEQ ID NO: 792285 - protein, 174 aa, Homo sapiens
  misc_feature (130)..(130): Xaa can be any naturally occurring amino acid
  misc_feature (135)..(135): Xaa can be any naturally occurring amino acid
QGLPEVAQWGWQSWGSGHFPSGGLGRWALSPRVPPTRGLVASDSLSTRLHHSPAVSPSGSLCASLSVSPPPLSAAEVPLRARAKRPVNHQSWDSGRVSVLLSLSSCRIRHEHFLNFTTVSPCGTGKSKSXKKPVXRGWWEMGSPYGPVSQENRVQRQGTSGHIRLEPYQEMLSP

SEQ ID NO: 792286 - protein, 177 aa, Homo sapiens [sequence omitted]

SEQ ID NO: 792287 - protein, 119 aa, Homo sapiens
HLRPGESGCDRFLWEPKAHLRQEARPALGRDHQHLILTRLTEHCVPCVVNKDAYCVCGWLWRLPWGSQALPLTLSLGSSGSPRTSGSVPNHTMPPVACFQRSFPAPTHTLCNILNYIYL

SEQ ID NO: 792288 - protein, 124 aa, Homo sapiens
GPPGRLKREGQRTDMRRRHTGTQGGGFPKGELAGHGLCPERAEEVTWPWGGFGGILVGAALGEGRGAVKREAVKALATRERGTRGRDRGAGSRKVLFLSGNNFLIFKCFSLNQKVHLYGSKFKI

SEQ ID NO: 792289 - protein, 57 aa, Homo sapiens
KGEKLPGPVPSRSSAPSLVHPEHQLGATGAVSLRPASAACGEFPWVHDSLPCPCGQE

SEQ ID NO: 792290 - protein, 458 aa, Homo sapiens
MAWASRLGLLLALLLPVVGASTPGTVVRLNKAALSYVSEIGKAPLQRALQVTVPHFLDWSGEALQPTRIRILNVHVPRLHLKFIAGFGVRLLAAANFTFKVFRAPEPLELTLPVELLADTRVTQSSIRTPVVSISACSLFSGHANEFDGSNSTSHALLVLVQKHIKAVLSNKLCLSISNLVQGVNVHLGTLIGLNPVGPESQIRYSMVSVPTVTSDYISLEVNAVLFLLGKPIILPTDATPFVLPRHVGTEGSMATVGLSQQLFDSALLLLQKAGALNLDITGQLRSDDNLLNTSALGRLIPEVARQFPEPMPVVLKVRLGATPVAMLHTNNATLRLQPFVEVLATASNSAFQSLFSLDVVVNLRLQLSVSKVKLQGTTSVLGDVQLTVASSNVGFIDTDQVRTLMGTVFEKPLLDHLNALLAMGIALPGVVNLHYVAPEIFVYEGYVVISSGLFYQS

SEQ ID NO: 792291 - protein, 165 aa, Homo sapiens
PGLAEAADGPDRQPLTSGPRPPGLAFGPPGQCLRRGLGDGPGATSAEAARKALSPRGLARPESLARAHAAAAWAFRASAGPRALPGQAPLRPWLPASLAGLQSLDPACRARGGAAATAEAERDPPNLRATAGRQRTASRATCPAGPLKKSCARRPSLRTRTAPPA

SEQ ID NO: 792292 - protein, 113 aa, Homo sapiens
SLFSNAFLPAIAKSRECMCPALGQVICGVAERALGCSGRIGRSRFELHLTWISLLVRAWADELPWVQCGNEINTVCLTWLRSAASPAQQALPTDPQPTLQFAPKCSPCLNPCG

SEQ ID NO: 792293 - protein, 120 aa, Homo sapiens
MASASGAMAKHEQILVLDPPTDLKFKGPFTDVVTTNLKLRNPSDRKVCFKVKTTAPRRYCVRPNSGIIDPGSTVTVSVMLQPFDYDPNEKSKHKFMVQTIFAPPNTSDMEAVWKEANLMN

SEQ ID NO: 792294 - protein, 125 aa, Homo sapiens
MEDKLKAANIQTSESETRLYNKCQDLESLIQEKDDVIQNLELQLEEQKQIRIQEAKIIEEKAAKIKEWVTVKLNELELENQNLRLINQNQTEEIRTMQSKLQEVQGKKSSTVSTLKLSEGQRLSS

SEQ ID NO: 792295 - protein, 190 aa, Homo sapiens
MAELSEPEGPVDWKERCVALESQLMKFRVQASKIRELLAEKMQQLERQVIDAERQAEKAFQQVQVMEDKLKAANIQTSESETRLYNKCQDLESLIQEKDDVIQNLELQLEEQKQIRIQEAKIIEEKAAKIKEWVTVKLNELELENQNLRLINQNQTEEIRTMQSKLQEVQGKKSSTVSTLKLSEGQRLSS

SEQ ID NO: 792296 - protein, 102 aa, Homo sapiens
MPEQDKPFSCCGVGLRLQSTPSRMPWCAGGSRTPQHALSSDLTVIQAGSLALASSICLCPAHLCPLLPPSQLCPPSTHAGSPTFPFYSPPHLSLPTPGVCKF

SEQ ID NO: 792297 - protein, 80 aa, Homo sapiens
EVSPEADATMLPVDSLQSREPINLISYKLPSLGYFFTAMQERSDIALYYLHVLKEDGIGPGVVAHTLNPNSLGGQGGQIT

SEQ ID NO: 792298 - protein, 119 aa, Homo sapiens
MEDEQLDSLEGWAPGPARPLRRSREAPAALPGGVEWRGGQVSCDLSRPHRAAAAAARGGPAGAGAQTQGRCGALAGKRTRASRVAPPPGMALECTESSVIIGYLIIITIIEAWLAAARH

SEQ ID NO: 792299 - protein, 129 aa, Homo sapiens
MKRTWRREAPNGVALCQLTSLFQGLQLGHPKTGQVTAHRRRGVLPFTSGSPMSAPAVFCPRESSEGGDCKHRDAQAPRRPSSCRSEKDWTPFWDCSTRVATPPGWIRIPVIHLLALWTTRPLACFPSLY

SEQ ID NO: 792300 - protein, 110 aa, Homo sapiens
VAQAGLQLLGSNDPPALASQSAGIIGMSPCAWSIFILMNRLKHLWGWGDKVKICRAGRQAGDLGYSGCCSSSLESFCQRPSRPSTDWTRPTHTLEGDLLYSKSTDFGLAE

SEQ ID NO: 792301 - protein, 101 aa, Homo sapiens
MNGRRRSPSALSSGPVPTARRWLAEAGARRGISGRAVKQGLLYRGLFFAAVSSPVAARPPPPLSSRARSARRPRAEARGRGGGAVSRHARRRCRSRDGKAA

SEQ ID NO: 792302 - protein, 192 aa, Homo sapiens [sequence omitted]

SEQ ID NO: 792303 - protein, 135 aa, Homo sapiens
LGLAGTAVGGEKPGGLGAPAGIGSRLGCERFSRSREILQAITMSTDTGVSLPSYEEDQGSKLIRKAKEAPFVPVGIAGFAAIVAYGLYKLKSRGNTKMSIHLIHMRVAAQGFVVGAMTVGMGYSMYREFWAKPKP

SEQ ID NO: 792304 - protein, 95 aa, Homo sapiens
SDWLGRLWVGRSREDWVRLQGSEAGWGVRGFLALGIAGFAAIVAYGLYKLKSRGNTKMSIHLIHMRVAAQGFVVGAMTVGMGYSMYREFWAKPKP

SEQ ID NO: 792305 - protein, 106 aa, Homo sapiens
MKFFLREILQAITMSTDTGVSLPSYEEDQGSKLIRKAKEAPFVPVGIAGFAAIVAYGLYKLKSRGNTKMSIHLIHMRVAAQGFVVGAMTVGMGYSMYREFWAKPKP

SEQ ID NO: 792306 - protein, 56 aa, Homo sapiens
MFMVCTEQWTFEIGNFLAGLIDVMELGTQGIICELASVAYMMCTMGREEPGSTSER

SEQ ID NO: 792307 - protein, 116 aa, Homo sapiens [sequence omitted]

SEQ ID NO: 792308 - protein, 140 aa, Homo sapiens
AKSRPTIPMLSFPAFLGHPVWLPGMDGPGLEWWSGEDNWGGLADDVPQEPVPTLWNEPAELPSGEGPVESTSPGREPVDTGPPAPTVAPGPEDSTAQERLDQGGGSLGPGAIAAIVIAALLATCVVLALVVVALRKFSAS

SEQ ID NO: 792309 - protein, 94 aa, Homo sapiens
SPGPGDHEFTSVISVSMTNPTGAAHSRIPHPRPAPSAMPPTSQPEVGTATLGRTEGAVATGSLRLTEESEARRTMELGPALGTKHSPFAAAEPS

SEQ ID NO: 792310 - protein, 190 aa, Homo sapiens
KPAARTSPTVATQTGASATSTRGTSPTRSAAPGARGSPPRPPPPPPLLGTVSSPSSSPTHLWTGEVSAAPPPARVRHRRRSPEQSRSSPEKRSPSAPVCKAGDKTRQPSSSPSSIIRRTSSLDTLAAPYLAGHWPRDSHGQAAPCMRDKATQTESAWAEEYSEKKKGSHKRSASWGSTDQLKEVRKMVLR

SEQ ID NO: 792311 - protein, 483 aa, Homo sapiens
DEFSRIPRTISSPAATQASVPDDSSSRRCSAPGASPKERHPDSRQRERGGGPKKPWKCGDCGKAFSYCSAFILHQRIHTGEKPFACPECGKAFSQSVHLTLHQRTHTGEKPYACHECGKAFSQGSYLASHWRTHTGEKPHRCADCGKAFTRVTHLTQHRRVHTGERPYACAQCAKAFRNRSSLIEHQRIHTGEKPYECSACAKAFRFSSALIRHQRIHTEEKPYRCGQCAKAFAQIAHLTQHRRVHTGEKPYTCQDCGALFSQSASLAEHRRIHTGEKPYACGQCAKAFTQVSHLTQHQRTHTGERPYPCHDCGKRFSNRSHLLQHRLVHTGERPYRCLQCGAAFSHVSSLIEHQKIHTGERPYKCGECGKAFSQGSSLALHQRTHTGERPYTCPECGKAFSNRSYLIQHHIVHTGEKPYECSGCGKAFSFSSALIRHQRTHADSSGRLCPAPTPDSTPGLSQGGETCQQGCPGRNPRGPAED

SEQ ID NO: 792312 - protein, 597 aa, Homo sapiens
MESQEFIVLYTHQKMKKSKVWQDGILKITHLGNKAILYDDKGACLESLFLKCLEVKPGDDLESDRYLITVEEVKVAGAIGIVKQNVNKEAPELNSRTFISSGRSLGCQPSGLKRKFTGFQGPRQVPKKMVIMESGESAASHEAKKTGPTIFSPFCSMPPLFPTVGKKDVNNILADPENIVTYKNRERNAMDFSSVFSPSFQINPEVLCEENYFCSPVNSGNKLSDSLLTNEPVKRDSLASHYSGVSQNIRSKAQILALLKSESSSSCEELNSEMTEHFPQKQPQGSLKIATKPKYLIQQEECAEMKSTENLYYQHQSENTMRNKSRWAMYLSSQSSPIHSSTVDGNDTERKPKAQEDDVNSNLKDLSLQKIIQFVETYAEERKKYNVDQSVGNNDPSWNQEVKLEIPSFNESSSLQVTCSSAENDGILSESDIQEDNKIPFNQNDKGCIKGSVLIKENAQEVNTCGTLEKEYEQSESSLPELKHLQIESSNNSRISDDITDMISESKMDNESLNSIHESLSNVTQPFLEVTFNLNNFETSDTEEESQESNKISQDSESWVKDILVNDGNSCFQKRSENTNCEEIEGEHLPFLTSVMT

SEQ ID NO: 792313 - protein, 634 aa, Homo sapiens
KPIRSRHVTYTHNSLYIEKHQLVYNFRRNNGKPRIYCSIYSSKDEEVKSVARWNSEDHSLRKQTDNQTQLLLLMTKLDACLGRVCILNCLEVKPGDDLESDRYLITVEEVKVAGAIGIVKQNVNKEAPELNSRTFISSGRSLGCQPSGLKRKFTGFQGPRQVPKKMVIMESGESAASHEAKKTGPTIFSPFCSMPPLFPTVGKKDVNNILADPENIVTYKNRERNAMDFSSVFSPSFQINPEVLCEENYFCSPVNSGNKLSDSLLTNEPVKRDSLASHYSGVSQNIRSKAQILALLKSESSSSCEELNSEMTEHFPQKQPQGSLKIATKPKYLIQQEECAEMKSTENLYYQHQSENTMRNKSRWAMYLSSQSSPIHSSTVDGNDTERKPKAQEDDVNSNLKDLSLQKIIQFVETYAEERKKYNVDQSVGNNDPSWNQEVKLEIPSFNESSSLQVTCSSAENDGILSESDIQEDNKIPFNQNDKGCIKGSVLIKENAQEVNTCGTLEKEYEQSESSLPELKHLQIESSNNSRISDDITDMISESKMDNESLNSIHESLSNVTQPFLEVTFNLNNFETSDTEEESQESNKISQDSESWVKDILVNDGNSCFQKRSENTNCEEIEGEHLPFLTSVMT

SEQ ID NO: 792314 - protein, 597 aa, Homo sapiens; identical to SEQ ID NO: 792312

SEQ ID NO: 792315 - protein, 283 aa, Homo sapiens
YDFALPPNKSKGINMNLHIPHIQNQIAENSNLFSEDAQPQPFILGSDLDKNDEHVLPSTSSSDNSVQLLNTNQNHYECIALDKSNTHISNSLFYPLGKKHLISKDTEAHISEPEDLGKIRSPPPDHVEVETAREGKQYWNPRNSSELSGLVNTISILKSLCEHSTALDSLEILKKKNTVFQQGTQQTYEPDSPPEVRKPFITVVSPKSPHLHKDSQQILKEDEVELSEPLQSVQFSSSGSKEETAFQAVIPKQIERKTCDPKVKFVKNIDLFNQLHFLFCLKQ

SEQ ID NO: 792316 - protein, 597 aa, Homo sapiens; identical to SEQ ID NO: 792312

SEQ ID NO: 792317 - protein, 324 aa, Homo sapiens
ITVYSNHTNQVAVNTTITKADSNTTVKPAFPSGLQKLGAQTPVTISANQIILNKVSQTSDLKLGNQTLKPDGQKLILTTLGKSGSPIVLALPHSQLPQAQKVTTQAQSGDAKLPPQQIKVVTIGGRPEVKPVIGVSALTPGSQLINTTTQPSVLQTQQLKTVQIAKKPRTPTSGPVITKLIFAKPINSKAVTGQTTQVSPPVIAGRVLSQSTPGTPSKTITISESGVIGSTLNSTTQTPNKIAISPLKSPNKAVKSTVQTITVGGVSTSQFKTIIPLATAPNVQQIQVPGSKFHYVRLVTATSASSSTQPVSQNPSTNTQPLQQ

SEQ ID NO: 792318 - protein, 180 aa, Homo sapiens
TVPDQLSSGRTIMEVVPAEIAKKPRTPTSGPVITKLIFAKPINSKAVTGQTTQVSPPVIAGRVLSQSTPGTPSKTITISESGVIGSTLNSTTQTPNKIAISPLKSPNKAVKSTVQTITVGGVSTSQFKTIIPLATAPNVQQIQVPGSKFHYVRLVTATSASSSTQPVSQNPSTNTQPLQQ

SEQ ID NO: 792319 - protein, 103 aa, Homo sapiens
LQVGVPMTPSLGSVNLLEWLTELKETLNYMYCFVMKDITKDMNEDMYRARYGGRGMKLHAPPWVHHPPGTSTCAGIQELSDPCHFGFLWRLHCIGMIDNCVEM

SEQ ID NO: 792320 - protein, 130 aa, Homo sapiens
TNIFQEQKASMFGPFMNPCTLIVRVLSVPIHLEITNMFHFEPILQGRKSGACSLFSWPGARLQMFESLGSLSGCVSQSGADSWCSQHAACPSARSLQVSESQMVDGLFRVHRSAPNRLSSLSLFLPLKYM

SEQ ID NO: 792321 - protein, 253 aa, Homo sapiens
LNIFHVIVVIEDVNDHAPQFRKDEINLEISESVSLGMGTILESAEDPDISMNSLSKYQLSPNEYFSLVEKDNPDGGKYPELVLQKTLDRETQSAHHLVLTALDGGDPPRSGTAQIRILVIDANDNPPVFSQDVYRVSLREDVPPGTSILRVKATDQDEGINSEITYSFFGVADKAQHVFSLDYTTGNILTQQPLDFEEVERYTINIEAKDRGSLSTRCKVIVDDSQSSPKAWFGASPFTSFQSPRSMLKFWRT

SEQ ID NO: 792322 - protein, 72 aa, Homo sapiens
ASSKLHLTTGDSSFTFSSSLSQSGWAGKARKATLATLQPLLPPPTAVRQAMVPQAPTSSMWQVIPLPLLLVL

SEQ ID NO: 792323 - protein, 751 aa, Homo sapiens
VIILNCMRSRNPDESAKLADSIALNYQLSSKEQRAFGAKLKEIEKQHKNCENFYSFMIMKSNFDETYIENVVRNILKGQDVDSKEAQLISFLALLSSYVTDSTISVSQCEIFLGIIYTSTPWEPESLEDKMGTYSTLLIKTEVAEYGRYTGVRIIHPLIALYCLKELERSYHLDKCQIALNILEENLFYDSGIGRDKFQHDVQTLLLTRQRKVYGDETDTLFSPLMEALQNKDIEKVLSAGSRRFPQNAFICQALARHFYIKEKDFNTALDWARQAKMKAPKNSYISDTLGQVYKSEIKWWLDGNKNCRSITVNDLTHLLEAAEKASRAFKESQRQTDSKNYETENWSPQKSQRRYDMYNTACFLGEIEVGLYTIQILQLTPFFHKENELSKKHMVQFLSGKWTIPPDPRNECYLALSKFTSHLKNLQSDLKRCFDFFIDYMVLLKMRYTQKEIAEIMLSKKVSRCFRKYTELFCHLDPCLLQSKESQLLQEENCRKKLEALRADRFAGLLEYLNPNYKDATTMESIVNEYAFLLQQNSKKPMTNEKQNSILANIILSCLKPNSKLIQPLTTLKKQLREVLQFVGLSHQYPGPYFLACLLFWPENQELDQDSKLIEKYVSSLNRSFRGQYKRMCRSKQASTLFYLGKRKGLNSIVHKAKIEQYFDKAQNTNSLWHSGDVWKKNEVKDLLRRLTGQAEGKLISVEYGTEEKIKIPVISVYSGPLRSGRNIERVSFYLGFSIEGPLAYDIEVI

SEQ ID NO: 792324 - protein, 751 aa, Homo sapiens; identical to SEQ ID NO: 792323

SEQ ID NO: 792325 - protein, 72 aa, Homo sapiens
GGGGEASLPLWGVSRLGELFVSLTPRARGQRRDHRFSSVPLPAAAARWSPSRDGCVGSTGSSLRLGPMETRN

SEQ ID NO: 792326 - protein, 280 aa, Homo sapiens
MTSAVIDEFVGDMMKDLPILKSDDPVVPSLFKQKTSDELLHWHAQRLLSDDYDRIKCHVDEQSRDPHVLDFLKKIQDYQQFYGKSLESISTKVIVTQTTRPKEDSSGASGEILQNTKPHQITKKSKKKSFLKEDQNKAQQNDDLLFSIEEEMKNNLHSGIRKLEDYLTSCASNSVKFGVEMLGLIACFKAWKKHCRGEGKISKDLSIAVQMMKRIHSLLERYPEILEAEHHQYIAKCLKYLGFNDLANSLDPTLIGDDKIGRISIGMDSRVEWIMGILIE

SEQ ID NO: 792327 - protein, 83 aa, Homo sapiens
QCCGEGKHQAQADWYWLKNGCHIIVLAEGWLVNLGCAMGRPSFVGSNSFNQVMVQIALWTHPDKYPILYQKYRKICLASSLHL

SEQ ID NO: 792328 - protein, 99 aa, Homo sapiens
KRSQKDGGQHTYGNYHHGLHASGELLTQSRSHRPHGLRLLEVANWGKRMAGARFLHDTSRDLRASSCSSGAHPAALPRRPRGWQSQRHRLCRQSKDVDG

SEQ ID NO: 792329 - protein, 107 aa, Homo sapiens
KRSQKDGGQHTYGNYHHGLHASGELLTQSRSHRPHGLRLLEVANWGKRMAGARFLHDTSRDLRASSCSSGAHPAALPRRPRGWQSQRIDHKRRLPFKLFILWFRGLM

SEQ ID NO: 792330 - protein, 107 aa, Homo sapiens; identical to SEQ ID NO: 792329

SEQ ID NO: 792331 - protein, 95 aa, Homo sapiens
LGSAGTASYTWPLQHGDVTEASDSSHRCWIPRRECFQGSPAESASNASDTCLGRARAPLLLWSIGKPITKAGLYSKEELDPTSPWAAQQIIRGLG

SEQ ID NO: 792332 - protein, 108 aa, Homo sapiens
MGVPVPVLGLLGTTQDSRRKSAGISQKETPKKTVDMESTEVFTKKTELTEEEKNDQKHLNKINQYYQFTLPQYVKAVYQYHKIMKPWKNMKTNAYQVIPTLGSLRFLN

SEQ ID NO: 792333 - protein, 288 aa, Homo sapiens
MGDAKEAGAEGPPAGAAARGGLSLLSQGESEESSAQGSALFLGGNEVKSRAVVKYSSAPPRTAFARLEEKTDLKLPPANWLRESAKLGPAGTTILGNSKKSKPFSSFGMAYDFIDSVGNDVDVVSDSENIKKLLKIPYSKSHVSMAVHRIGRTLLLDELDIQELFMRSSQTGDWTWLKEFYQRLIDQKWQRKKKSKEHWYQKAILSKFLYYSINGDGAAQPVSSTAEQQESSSSDQTNDSEGASWPAPFEMPSSVSEDPSASSQGSEPLEPSYIVGHVASAPKEQNLI

SEQ ID NO: 792334 - protein, 386 aa, Homo sapiens
MGDAKEAGAEGPPAGAAARGGLSLLSQGESEESSAQGSALFLGGNEVKSRAVVKYSSAPPRTAFARLEEKTDLKLPPANWLRESAKLGPAGTTILGNSKKSKPFSSFGMAYDFIDSVGNDVDVVSDSENIKKLLKIPYSKSHVSMAVHRIGRTLLLDELDIQELFMRSSQTGDWTWLKEFYQRLIDQKWQRKKKSKEHWYQKAILSKFLYYSINGDGAAQPVSSTAEQQESSSSDQTNDSEGASWPAPFEMPSSVSEDPSASSQGLKNDFVRNILWTFEDIHMLVGSNMPIFGGGRYPAVSLRLRDNNKPINVLTGIDYWLDNLICNVPELVMCFHVNGIVQKYEMIKTEEIPNLENSNFSTKVIKDIAQNILSFLKSNCTKEGHT

SEQ ID NO: 792335 - protein, 74 aa, Homo sapiens
TTRENGWGSAWLTLPPLAKPGSEIQGTEVGVGCWIWVGIGRLWPQGTACLGGISYSRYQFQNQGDESKLKKIPD

SEQ ID NO: 792336 - protein, 729 aa, Homo sapiens
GGFRVRARPRARVVMSLDCTSHIALGAASPAPEETYDHLSEVPVTREQLNHYRNVAQNARSELAATLVKFECAQSELQDLRSKMLSKEVSCQELKAEMESYKENNARKSSLLTSLRDRVQELEEESAALSTSKIRTEITAHAAIKENQELKKKVVELNEKLQKCSKENEENKKQVSKNCRKHEEFLTQLRDCLDPDERNDKASDEDLILKLRDLRKENEFVKGQIVILEETINVHEMEAKASRETIMRLASEVNREQKKAASCTEEKEKLNQDLLSAVEAKEALEREVKIFQERLLAGQQVWDASKQEVSLLKKSSSELEKSLKASQDAVTTSQSQYSSFREKIAALLRGRLSMTGSTEDTILEKIREMDSREESRDRMVSQLEAQISELVEQLGKESGFHQKALQRAQKAENMLETLQGQLTHLEAELVSGGVLRDNLNFEKQKYLKFLDQLSQKMKLDQMAAELGFDTRLDVVLARTEQLVRLESNAVIENKTIAHNLQRKLKTQKERLESKELHMSLLRQKIAQLEEEKQARTALVVERDNAHLTIRNLQKKVERLQKELNTCRDLHTELKAKLADTNELKIKTLEQTKAIEDLNKSRDQLEKMKEKAEKKLMSVKSELDTTEHEAKENKERARNMIEVVTSEMKTLKKSLEEAEKREKQLADFREVVSQMLGLNVTSLALPDYEIIKCLERLVHSHQHHFVTCACLKDVTTGQERHPQGHLQLLH

SEQ ID NO: 792337 - protein, 729 aa, Homo sapiens; identical to SEQ ID NO: 792336

SEQ ID NO: 792338 - protein, 121 aa, Homo sapiens
GWILALSPRLECSGLISAHCNFPLPGSSDSPALAFRIAGNTSVCHHVWLIFVFLVETGFHHVGQAGLELLESACLGLPKCWDYRCEPLHLAKGPILSEAFTIVPGKAVSSTLLNYNESCFV

SEQ ID NO: 792339 - protein, 258 aa, Homo sapiens
AQIVAYPACAAAIASAHRRSMGVQGFQEFLEKRCPGAVVPVDLLKLARTVSRQQQQQHLHRQLPPTAALAPGAPRAARGSVPLQPPLPPAALGAYSGGAGPTRHHHPAHHFHHHGQAQPGLHPPLPPPPPPQLPGARVLVDAGSALPRLYGGYQTDWVCGGQWNAMLGYLSALCQACAYPGGDGLELVVMFPGGLGKDRLAEWGRRCQAERQTAQLIVGHVGNKGTPPPRAWFLPPACLSHCVRLALIRFRVKQAAML

SEQ ID NO: 792340 - protein, 260 aa, Homo sapiens
AQIVAYPACAAAIASAHRRSMGVQGFQEFLEKRCPGAVVPVDLLKLARTVSRQQQQQHLHRQLPPTAALAPGAPRAARGSVPLQPPLPPAALGAYSGGAGPTRHHHPAHHFHHHGQAQPGLHPPLPPPPPPQLPGARVLVDAGSALPRLYGGYQTDWVCGGQWNAMLGYLSALCQACAYPGGDGLELVVMFPGGLGKDRLAEWGRRCQAERQTAQLIVGHVGNKGTPPPRAWFLPPACLSHCVRLALIRFRVKPFSVFRV

SEQ ID NO: 792341 - protein, 258 aa, Homo sapiens; identical to SEQ ID NO: 792339

SEQ ID NO: 792342 - protein, 1248 aa, Homo sapiens
MIPSNSTRLPVAYQGNQGLNQSFSEQQVDWTQQCISKGLTYPDYRPPPKLYRYSPQSFLPDSTIQKQNFIPHTSLQVKNSQLPNSVLTLPSRQTSAVPSQQYATQTDKRPPPPPYNCRYGSQPLQSTQHITKHLSMEVPQSQEMLSSEIRTSFQQQWQNPNENVSTIGNFTNLKVNTNSKQPFNGPIRSSVDGVQTLAQTNEEKIMDSCNPTSNQVLDTSVAKEKLVRDIKTLVEIKQKFSELARKIKINKDLLMAAGCIKMTNTSYSEPAQNSKLSLKQTAKIQSGPQITPVMPENAERQTPTVVESAETNKTQCMLNSDIQEVNCRRFNQVDSVLPNPVYSEKRPMPDPSHDVKVLTSKTSAVEMTQAVLNTQLSSENVTKVEQNSPAVCETISVPKSMSTEEYKSKIQNENMLLLALLSQARKTQKTVLKDANQTIQDSKPDSCEMNPNTQMTGNQLNLKNMETPSTSNVSGRVLDNSFCSGQESSTKGMPAKSDSSCSMEVLATCLSLWKKQPSDTAKEKECDKLRTNTTAVGISKPANIHVKSPCSVVGNSNSQNKISNPSQQTALSMVMHNYESSGINITKGTELQIAVVSPLVLSEVKTLSVKGITPAVLPETVYPVIKEGSVCSLQNQLAENAKATAALKVDVSGPVASTATSTKIFPLTQKEKQNESTNGNSEVTPNVNQGKHNKLESAIHSPMNDQQISQESRNSTVVSSDTLQIDNICSLVEGDTSYNSQIAKIFSSLPLKMVEPQKPSLPNQQGIGSREPEKQLDNTTENKDFGFQKDKPVQCTDVSHKICDQSKSEPPLESSFNNLETNRVILEKSSLEHATEKSTANDTCSSAAIQEDIYPQEIDASSNYTPQDPARNEIHSDKAPVLYLHDQLSELLKEFPYGIEAVNTREGSVGQQTTYQTSEDQTADKTSSDSKDPADQIQITILSSEQMKEIFPEQDDQPYVVDKLAEPQKEEPITEVVSQCDLQAPAAGQSRDSVILDSEKDDIHCCALGWLSMVYEGVPQCQCNSIKNSSSEEEKQKEQCSPLDTNSCKQGERTSDRDVTVVQFKSLVNNPKTPPDGKSHFPELQDDSRKDTPKTKHKSLPRTEQELVAGQFSSKCDKLNPLQNHKRKKLRFHEVTFHSSNKMTASYEQASQETRQKKHVTQNSRPLKTKTAFLPNKDVYKKHSSLGQSLSPEKIKLKLKSVSFKQKRKLDQGNVLDMEVKKKKHDTQDAEKNDLASKGHSPHPQRLK

SEQ ID NO: 792343 - protein, 60 aa, Homo sapiens
FLQVLKTRHQRELTAKWPGVPLHEWRLSQSPAAGALVAGPHTHTHTHTHTHTHTHPFLYF

SEQ ID NO: 792344 - protein, 144 aa, Homo sapiens
GWDRERKQLCFHADPDPLWGGVSKLVAEIGDLKNILSYPTAKVDDSNVSNPVYRNNGVVNQFVNSLWTLKSEILSTGTTGIHKVRILCCVTFSNKEVGQSAAQLMLNYNSISVHNVACNSCQPSGDTFEFGHLGNVPSFTSCCF

SEQ ID NO: 792345 - protein, 102 aa, Homo sapiens
VVITVTIITITFTIITTTIIITITITTIIIIIIIITTPAPLTIIIIIITITTTIITIIIIYFTIEVPRACDLPKIPFPVRAGVNTLVQVSQLQKKWTFFSSW

SEQ ID NO: 792346 - protein, 94 aa, Homo sapiens
PRAADVPRPFGSSLVQLKPWLRGRGTAWEGLGEILGSPLALTNVATRGRKVAEPGLGQDALCWVGANTRKEAWAIGKLPLVLGQPAAALRLLLF

SEQ ID NO: 792347 - protein, 94 aa, Homo sapiens; identical to SEQ ID NO: 792346

SEQ ID NO: 792348 - protein, 123 aa, Homo sapiens
RMLVLSFLTGGQSPSSFWEDSSNYGGGGACRAAVPRGVWGSWGSRGSFFFIAQIPKPVTLRIFVFLATFQSEALVERAELEPDGRVVGEEWVEGTWRMFQVVSLFLAPYFAYWSFPVCSRRPL

SEQ ID NO: 792349 - protein, 90 aa, Homo sapiens
GYWMNVANSTSNTHLTRATRRIRQSNREGVVFQFFSARTYVDIRYCLNTLTGSDTPIRSGKFLTVARSPPEIAQVSTTDDSSPRSPISEM

SEQ ID NO: 792350 - protein, 148 aa, Homo sapiens
SRSSSSSGAEKRTRVCVRVCVCVCVCVCARWGRAQRTAGRRVRFAGRSVLGRVPQGPQRLLRRRGSCSGSCAPWPTPWRARADPLGYSTLLPPPLANASSLQLPPSPAPPSLAPNANPATDDQPSRLRSPPADHNGSPCDTLAGEFYS

SEQ ID NO: 792351 - protein, 111 aa, Homo sapiens
MAREECKALLDGLNKTTACYHHLVLTVGGSADSQNLRQELQKTRQKAQELAVSTCARLTAVLRDRGLAADERAEFERLWVAFSGCLDLLEADMRRALELGAAFPLHAPRRP

SEQ ID NO: 792352 - protein, 444 aa, Homo sapiens
PEQKQVFANPSPTQKSPVQPVEDLAGNLWEKLREKIRSFVAYSIAIDEITDINNTTQLAIFIRGVDENFDVSEELLDTVPMTGTKSGNEIFLRVEKSLKKFCINWSRLVSVASTGTPAMVDANNGLVTKLKSRVATFCKGAELKSICCIIHPESLCAQKLKMDHVMDVVVKSVNWICSRGLNHSEFTTLLYELDSQYGSLLYYTEIKWLSRGLVLKRFFESLEEIDSFMSSRGKPLPQLSSIDWIRDLAFLVDMTMHLNALNISLQGHSQIVTQMYDLIRAFLAKLCLWETHLTRNNLAHFPTLKLVSRNESDGLNYIPKIAELKTEFQKRLSDFKLYESELTLFSSPFSTKIDSVHEELQMEVIDLQCNTVLKTKYDKVGIPEFYKYLWGSYPKYKHHCAKILSMFGSTYICEQLFSIMKLSKTKYCSQLKDSQWDSVLHIAT

SEQ ID NO: 792353 - protein, 129 aa, Homo sapiens
PQRPFPTPPQPALGGTAPRPRLVVVVLLLPARAVVALSAAAADRGRAHRVDLLVSPERGALHEALPALHADVGRLLAPRRPEPVPVLGPLVRQEPGPVPEALPALQTHVRLGGRGAPRPGPRGLCPRAR

SEQ ID NO: 792354 - protein, 132 aa, Homo sapiens
CCDPRNLGTLTKLRCSEGRGCGHVFDSHGTLMKTLPAPCLGYSYWKPGHTGPGRGGGAQKGPQSKRGKMLPPLPPISERPLSPGLTLLTRIDSILPRNTFTQCKRSGLILKPPKLPCVYIFMSASDAAHFER

SEQ ID NO: 792355 - protein, 196 aa, Homo sapiens
CFVSQSGTSQAAAHVAGIAAMMLSAEPELTLAELRQRLIHFSAKDVINEAWFPEDQRVLTPNLVAALPPSTHGAGWQLFCRTVWSAHSGPTRMATAIARCAPDEELLSCSSFSRSGKRRGERMEAQGGKLVCRAHNAFGGEGVYAIARCCLLPQANCSVHTAPPAEASMGTRVHCHQQGHVLTGCSSHWEVEDLGT

SEQ ID NO: 792356 - protein, 92 aa, Homo sapiens
MVLAFQLVSFTYIWIILKPNVCAASNIKMTHQRCSSSMKQTWLECGGPIIVHYNLKHLCSSGPPTSTSQVAGTTGVCHYTWLLYFFGRDWVS

SEQ ID NO: 792357 - protein, 109 aa, Homo sapiens
MWLLVSVILISRISSVGGEATFCDFPKINHGIYIVSRQMSKYPSGERVRYQCRSPYEMFGDEEVMCLNGNWTEPPQCKDSTGKCGPPPPIDNGDITSFSVVSICSSFIS

SEQ ID NO: 792358 - protein, 330 aa, Homo sapiens
MWLLVSVILISRISSVGGEATFCDFPKINHGILYDEEKYKPFSQVPTGEVFYYSCEYNFVSPSKSFWTRITCTEEGWSPTPKCLRLCFFPFVENGHSESSGQTHLEGDTVQIICNTGYRLQNNENNISCVERGWSTPPKCRSTDTSCVNPPTVQNAYIVSRQMSKYPSGERVRYQCRSPYEMFGDEEVMCLNGNWTEPPQCKDSTGKCGPPPPIDNGDITSFPLSVYAPASSVEYQCQNLYQLEGNKRITCRNGQWSEPPKCLHPCVISREIMENYNIALRWTAKQKLYSRTGESVEFVCKRGYRLSSRSHTLRTTCWDGKLEYPTCAKR

SEQ ID NO: 792359 - protein, 312 aa, Homo sapiens
MWLLVSVILISRISSVGGEATFCDFPKINHGILYDEEKYKPFSQVPTGEVFYYSCEYNFVSPSKSFWTRITCTEEGWSPTPKCLRLCFFPFVENGHSESSGQTHLEGDTVQIICNTGYRLQNNENNISCVERGWSTPPKCRSTDTFCVNPPTVLRYQCRSPYEMFGDEEVMCLNGNWTEPPQCKDSTGKCGPPPPIDNGDITSFPLSVYAPASSVEYQCQNLYQLEGNKRITCRNGQWSEPPKCLHPCVISREIMENYNIALRWTAKQKLYSRTGESVEFVCKRGYRLSSRSHTLRTTCWDGKLEYPTCAKR

SEQ ID NO: 792360 - protein, 312 aa, Homo sapiens
MWLLVSVILISRISSVGGEATFCDFPKINHGILYDEEKYKPFSQVPTGEVFYYSCEYNFVSPSKSFWTRITCTEEGWSPTPKCLRLCFFPFVENGHSESSGQTHLEGDTVQIICNTGYRLQNNENNISCVERGWSTPPKCRSTDTSCVNPPTVQNAYIVSRQMSKYPSGERVRYQCRSPYEMFGDEEVMCLNGNWTEPPQCKDSRCQYMLQLHQLKYQCQNLYQLEGNKRITCRNGQWSEPPKCLHPCVISREIMENYNIALRWTAKQKLYSRTGESVEFVCKRGYRLSSRSHTLRTTCWDGKLEYPTCAKR

SEQ ID NO: 792361 - protein, 165 aa, Homo sapiens
MQVGSAANAVCRARLSCTDGSPTHKARLTCPRASNFDIPAPPWGSRTSPSCLCPTAPLWPSSDDGVKSGELRSQLPSTPPGFLDTNISLSVSLHLGMSEEWTGGNSLQLLRAERDGWRDRKMDHERGRGPQAAPALSRSQKLLEATHSREMNNVRGGGFTPGLDI

SEQ ID NO: 792362 - protein, 71 aa, Homo sapiens
WFHRVGPADSLDSGIERERWNQDEHLEERGCHLPSLGNKPKNFILGMSHLRSPWRCRVLSWLPDLELRRVV

SEQ ID NO: 792363 - protein, 165 aa, Homo sapiens
VVEPQAFLGLRQIRLLNLSNNLLSTLEESTFHSVNTLETLRVDGNPLACDCRLLWIVQRRKTLNFDGRLPACATPAEVRGDALRNLPDSVLFEYFVCRKPKIRERRLQRVTATAGEDVRFLCRAEGEPAPTVAWVTPQHRPVTATSAGRARVLPGGTLEIQDARP

SEQ ID NO: 792364 - protein, 235 aa, Homo sapiens
PKYEVLVATKFTPKRDNPEQFLEAAATSLQALSPQKQSFVLEVLSGCLEYRKLLTVVVDAFYVEDGRLCLRVDHSRFEVICYLATFLLEELGFQLFCNIIKSQPVDKMCKFLRFFFNPLHLCSWIKDEWSLIYEPAHVKENWIDPPDEVPQSTYQPPKEQQQLETVKRYNRRKAEELLLRANIEELRCAMPRSCRERVQVPPSSLKTHHRGAIFSSHQKVPPNAIAVTTYVAFSH

SEQ ID NO: 792365 - protein, 113 aa, Homo sapiens
ARYPRPRTMTSLTSFPLLPTLTHQHPVVLAPALFLLQCRPPPPSPSPTSTKLSALAFLGPLPLAAADHRLFLPPLQQVPQSTYQPPKEQQQLETVKRYNRRKAEVSCVRPLPS

SEQ ID NO: 792366 - protein, 115 aa, Homo sapiens
MLRPRAGGRVGGKARDPAGSARRRPRSRLPHVSLRLGPPSLHLGGLAPRPTGRGRSSGASSAFSHRGAATHSRPVVAASLPPKPPAPAQARAPALAPAPACAAAAAGREGEGGKG

SEQ ID NO: 792367 - protein, 199 aa, Homo sapiens
KPPRKMKGLYQAAGRILVTLGILSVCSGVIAFFPVFSYKPWFTGWSVRIACPIWNGALAITTGVLLLLAYREWTQRYLGEATFTFVILSIMGCPLHFAIALESALLGPYCFYSFSGIAGTNYLGYAVTFPYPYAKFPLACVDPPHYEEYHLTLQALDLCLSFTLLCTSLTVFIKLSARLIQNGHINMQLPAGNPNPFSP

SEQ ID NO: 792368 - protein, 199 aa, Homo sapiens; identical to SEQ ID NO: 792367

SEQ ID NO: 792369 - protein, 68 aa, Homo sapiens
AFSTHCPVYPSSLSPQQQPLDHPSGLGCILRPTLPSEEWTLGREVLIRERAGSEQRGRQPEEGQNHGL

SEQ ID NO: 792370 - protein, 166 aa, Homo sapiens
PRKCFPDRLLCRAWWVRIGLAAHSICVSYRDLFLSCTGNPEAEGPGSGHWHVFCFTRKQRSPISHLNLCHQLGCCPCPCDTCTCHIHLCTELSLVTTSHQTGTGRCSLFGPVCVPARCSVIPMEGGSKPCHKHPELSSDVLLGLNPASQVFRPETTEEVGRPPPWI

SEQ ID NO: 792371 - protein, 87 aa, Homo sapiens
SGASPRTYEQRAVFPAPWGRLPGESATVAAHGEMKSRSVAQAGMQWRDLGSLQPLPPGFGRFSCLGLLSSWDYRCVPPRTANFCIFS

SEQ ID NO: 792372 - protein, 87 aa, Homo sapiens; identical to SEQ ID NO: 792371

SEQ ID NO: 792373 - protein, 798 aa, Homo sapiens
MAWDMCNQDSESVWSDIECAALVGEDQPLCPDLPELDLSELDVNDLDTDSFLGGLKWCSDQSEIISNQYNNEPSNIFEKIDEENEANLLAVLTETLDSLPVDEDGLPSFDALTDGDVTTDNEASPSSMPDGTPPPQEAEEPSLLKKLLLAPANTQLSYNECSGLSTQNHANHNHRIRTNPAIVKTENSWSNKAKSICQQQKPQRRPCSELLKYLTTNDDPPHTKPTENRNSSRDKCTSKKKSHTQSQSQHLQAKPTTLSLPLTPESPNDPKGSPFENKTIERTLSVELSGTAGLTPPTTPPHKANQDNPFRASPKLKSSCKTVVPPPSKKPRYSESSGTQGNNSTKKGPEQSELYAQLSKSSVLTGGHEERKTKRPSLRLFGDHDYCQSINSKTEILINISQELQDSRQLENKDVSSDWQGQICSSTDSDQCYLRETLEASKQVSPCSTRKQLQDQEIRAELNKHFGHPSQAVFDDEADKTGELRDSDFSNEQFSKLPMFINSGLAMDGLFDDSEDESDKLSYPWDGTQSYSLFNVSPSCSSFNSPCRDSVSPPKSLFSQRPQRMRSRSRSFSRHRSCSRSPYSRSRSRSPGSRSSSRSCYYYESSHYRHRTHRNSPLYVRSRSRSPYSRRPRYDSYEEYQHERLKREEYRREYEKRESERAKQRERQRQKAIEERRVIYVGKIRPDTTRTELRDRFEVFGEIEECTVNLRDDGDSYGFITYRYTCDAFAALENGYTLRRSNETDFELYFCGRKQFFKSNYADLDSNSDDFDPASTKSKYDSLDFDSLLKEAQRSLRR

SEQ ID NO: 792374 - protein, 798 aa, Homo sapiens; identical to SEQ ID NO: 792373

SEQ ID NO: 792375 - protein, 142 aa, Homo sapiens
FEIGVLLLLLGLECNGNISAHCNLCLLGSSSSPPQPGIQGSDLAPIPPLNAAKTPAVGWIIFPPSNLCSHHVLQNTLPTPVSGKILKVSLKCHLPQTNKATLLLNAPTAFAYASKVSELHMHLSILEKGKLPKGRSYDLQLT

SEQ ID NO: 792376 - protein, 73 aa, Homo sapiens
LPSPSPCSLGSLLGVLGRLLDKLKPRTAATLPIITLAAVGKLAVFWKTACLECLASSQASDSPLGMQKVCIAV

SEQ ID NO: 792377 - protein, 248 aa, Homo sapiens
REKIEETCQVGMKPPVPGGYTLQGKWITTFCNQVQLDTIKINGCLKGKLIYLLGDSTLRQWIYYFPKVVKTLKFFDLHETGIFKKHLLLDAERHTQIQWKKHSYPFVTFQLYSLIDHDYIPREIDRLSGDKNTAIVITFGQHFRPFPIDIFIRRAIGVQKAIERLFLRSPATKVIIKTENIREMHIETERFGDFHGYIHYLIMKDIFKDLNVGIIDAWDMTIAYGTDTIHPPDHVIGNQINMFLNYIC

SEQ ID NO: 792378 - protein, 108 aa, Homo sapiens
DRFQPFPGCTHQASSSSPGLGILFLYGTVRNQYFQSRTPFYSENPSEELLHLPPTPTHTHTHTHTHMHTHTGSLKAEKGAECGIQGSDDTHNNAVTPGCCRAEQRKCL

SEQ ID NO: 792379 - protein, 120 aa, Homo sapiens
LVALAGVQWHNGAISAHRNLRLLGSSDSPASASQVAGITGTRHHHAWLIFVFLVETGFHHVGQAGLKLLTSGDAPCLGLPKCWDYRREPPHPARGSLLRHVKCRWDRLETRRHPATQHSA

SEQ ID NO: 792380 - protein, 506 aa, Homo sapiens
MAGEVSAATGRFSLERLGLPGLALAAALLLLALCLLVRRTRRPGEPPLIKGWLPYLGVVLNLRKDPLRFMKTLQKQHGDTFTVLLGGKYITFILDPFQYQLVIKNHKQLSFRVFSNKLLEKAFSISQLQKNHDMNDELHLCYQFLQGKSLDILLESMMQNLKQVFEPQLLKTTSWDTAELYPFCSSIIFEITFTTIYGKVIVCDNNKFISELRDDFLKFDDKFAYLVSNIPIELLGNVKSIREKIIKCFSSEKLAKMQGWSEVFQSRQDVLEKYYVHEDLEIGAHHLGFLWASVANTIPTMFWAMYYLLRHPEAMAAVRDEIDRLLQSTGQKKGSGFPIHLTREQLDSLICLESSIFEALRLSSYSTTIRFVEEDLTLSSETGDYCVRKGDLVAIFPPVLHGDPEIFEAPEEFRYDRFIEDGKKKTTFFKRGKKLKCYLMPFGTGTSKCPGRFFALMEIKQLLVILLTYFDLEIIDDKPIGLNYSRLLFGIQYPDSDVLFRYKVKS

SEQ ID NO: 792381 - protein, 68 aa, Homo sapiens
HVCFVSSSCILCVNTCAGWKILLTFCECLHEDLPLVNGSPYFLCVCISTVFGGDSLHAVCVYMDANVC

SEQ ID NO: 792382 - protein, 465 aa, Homo sapiens
MLLDGGPQFPGLGVGSFGAPRHHEMPNREPAGMGLNPFGDSTHAAAAAAAAAAFKLSPAAAHDLSSGQSSAFTPQGSGYANALGHHHHHHHHHHHTSQVPSYGGAASAAFNSTREFLFRQRSSGLSEAASGGGQHGLFAGSASSLHAPAGIPEPPSYLLFPGLHEQGAGHPSPTGHVDNNQVHLGLRGELFGRADPYRPVASPRTDPYAAGAQFPNYSPMNMNMGVNVAAHHGPGAFFRYMRQPIKQELSCKWIDEAQLSRPKKSCDRTFSTMHELVTHVTMEHVGGPEQNNHVCYWEECPREGKSFKAKYKLVNHIRVHTGEKPFPCPFPGCGKIFARSENLKIHKRTHTGEKPFKCEFEGCDRRFANSSDRKKHMHVHTSDKPYICKVCDKSYTHPSSLRKHMKVHESQGSDSSPAASSGYESSTPPAIASANSKDTTKTPSAVQTSTSHNPGLPPNFNEWYV

SEQ ID NO: 792383 - protein, 102 aa, Homo sapiens
CLPKCWDNKCEPPRLAQSLSFTFGHHQAKGCRQVLRSSVWGHLHQISPQPQNASQKGLAVGGCPLAPSSCEPLTVAMTQAWLCWPLAGWGLSPNSWCFLPVL

SEQ ID NO: 792384 - protein, 140 aa, Homo sapiens
MLGELLGEGLLILVTLGVQFVKFIVLYADSRFYVSYTFRVKKCTFFFLRQSLPLLSRLQCSGTISAHCNLRLPGSSSSPASTSRVAGITDAHHHARLIFLFLVETGFRHVGQAAVKLLTSGDPPSSASQSAGITGMSHLA

SEQ ID NO: 792385 - protein, 115 aa, Homo sapiens [sequence omitted]

SEQ ID NO: 792386 - protein, 84 aa, Homo sapiens
SILHIPSSSAFPPVLFPIVFPGRWEPFNTNGAGDALIHMHPNTTPTPQALSSPVTDITFYGHIFISLSYNYGQGNDELCGDFKT

SEQ ID NO: 792387 - protein, 278 aa, Homo sapiens
HGGSRDPGTVTIPPAMWELRSASFWRAIFAEFFATLFYVFFGLGSSLRWAPGPLHVLQVAMAFGLALATLVQSVGHISGAHVNPAVTFAFLVGSQMSLLRAFCYMAAQLLGAVAGAAVLYSVTPPAVRGNLALNTLHPAVSVGQATTVEIFLTLQFVLCIFATYDERRNGQLGSVALAVGFSLALGHLFGMYYTGAGMNPARSFAPAILTGNFTNHWVYWVGPIIGGGLGSLLYDFLLFPRLKSISERLSVLKGAKPDVSNGQPEVTGEPVELNTQAL

SEQ ID NO: 792388 - protein, 131 aa, Homo sapiens
MEIFLTLQFVLCIFATYDERRNGQLGSVALAVGFSLALGHLFGMYYTGAGMNPARSFAPAILTGNFTNHWVYWVGPIIGGGLGSLLYDFLLFPRLKSISERLSVLKGAKPDVSNGQPEVTGEPVELNTQAL

SEQ ID NO: 792389 - protein, 162 aa, Homo sapiens
ISSSSPLLNSAEDAEKQLQDLTELLRGPRETYQHPGKDKTSGVHLASPGCRVWPPPPFTFPSLGSKVTPKPRQSSRKPKASEPTGQLPTPLLGRTGVGEADPPRSRLTQLQGLVAPEQRGLRLLLALQAPRLACQPAQPALGREALLQQAAQHHVHAPHLRP

SEQ ID NO: 792390 - protein, 57 aa, Homo sapiens
MRAAKPVPAPTSAHARPVPSLPPCSAPMVRSAPGAGPGGISLAQEWRLSYLLPSLGD

SEQ ID NO: 792391 - protein, 100 aa, Homo sapiens
LEVHHSSFAILMSSELLQGKGFPPPQACSNPPKTKKETCRSNKERSVMELSWVQAGSSRPGVLESRDELSRQHGIVSELRPWQVRLLHLAGCLHVGRFCG

SEQ ID NO: 792392 - protein, 116 aa, Homo sapiens
PPWGLQVWVLCVPRGQAKTRLEPAGRAPEAPLPALSVLAGGSDSDSRFRQSLSSAAAPGADSLGARTELRVEPGPCAPPSPSPSPSPELDHREHRRRQPQSRGCAGKRKRKRGLRS

SEQ ID NO: 792393 - protein, 94 aa, Homo sapiens
SLCNKSLCRRSPFCSQQRARCKFCGLHLLSACRPAGQKTVSHLQFNRPTHSSPPSHGKSLQAELSGLARNPSSEGASPLWLSASSETGISPPTA

SEQ ID NO: 792394 - protein, 67 aa, Homo sapiens
NPPTSASQSAGITGMSHHASIMYNRNLVERKDGTTSRRRKGIQARWMKLNKTESIPNSRYKCRIQAD

SEQ ID NO: 792395 - protein, 367 aa, Homo sapiens
GVWWQHAQYHAPALPQAAWWTVWGLHLLCLPSRLPDGVWLLELSHNNLSHLPAGAFQGFWGLRVLLLSLNILRDLSDGALGGLSFLEQLNLSHNQLAHLPTDFSATLGSLLCLDLSHNLLTSLDPTSLWRLGGLEQLNLSHNQLAELAAGVFGGLFHLHWLSLAGNQLQRVKGAALTTVPGLEVLSVAGNDISELEAEAFATLEHWAFSLLGNRLQHLEVKAVAGIRTAGMRLLLLDNPWTRDCDLQGAFGKLGHLRHLSVVDLGILTCAGPERLSGAVLSGVEAQLCLAETATVLGITGTVLLTVAVAVLMAERKRRQGPQEAGELGSFLERLFNQQADQQAKISTITANLNADEWITTWSNLAMR

SEQ ID NO: 792396 - protein, 112 aa, Homo sapiens
PGRRVRPTCSRASARSCRCLWPAPTPPAPRGALEEAASALAQGNEVLNESQLAGLTSGLCSCCSPAWSALITRCLSSPHTPGMSIRCFVDPMLCAQGDKACTHGAVSTCSSW

SEQ ID NO: 792397 - protein, 120 aa, Homo sapiens
MRLPMKIFFGTETKQNKKAQPTLNLFSLAQPMCHYKPSRALPQQGLCFGALHDAICLSADTTLRCLQSQSQVKKWGYCVDYFRSEYRPKKTKLVLFEIAWLPSFCHLTLHGEILLQELPK

SEQ ID NO: 792398 - protein, 90 aa, Homo sapiens
REGIGLSQEAVSSWEAGSNPTPGLKYLPPLAGSGPHGKAEGRSSRVAIPRTGVTGPTSTHVSQLMHRRASWSLPGQGPQPQTQQLPLRPP

SEQ ID NO: 792399 - protein, 153 aa, Homo sapiens
QGSVLGGRGSGEKGAAGMWGWGQPALGQEMTPGPPVMVTLLVRMSRRTAERGGKRVSAGTGVGASRVGSTEGFGLLIPAWELRPVPSLPARQLRSQLQPGSHTHTCAHTHAHTHTHPCTHACTHTHVGAQTTPQRPSWGHGVHLPQASLHLSV

SEQ ID NO: 792400 - protein, 152 aa, Homo sapiens
TPPTCLPGPRAAISTGMWGWGQPALGQEMTPGPPVMVTLLVRMSRRTAERGGKRVSAGTGVGASRVGSTEGFGLLIPAWELRPVPSLPARQLRSQLQPGSHTHTCAHTHAHTHTHPCTHACTHTHVGAQTTPQRPSWGHGVHLPQASLHLSV

SEQ ID NO: 792401 - protein, 84 aa, Homo sapiens
PQPHLQHTRTSKRLNRSGQVFLQNLLPQELATRAGNLATGPMNARSPGFLLSRIPSVWDPTENRTVQLTWQPLPEPLELWPKAL

SEQ ID NO: 792402 - protein, 98 aa, Homo sapiens
SWLLWRPAGNGTSKRNYVWKAVVQGHFAGYKRGLRNQREHTALLKIEGVYARDETEFYLGKRCAYVYKAKKDLEDLLFKEKLKSKKESESQQYQQSQI

SEQ ID NO: 792403 - protein, 30 aa, Homo sapiens
MHNLVTLLVSKPTHLRVNVPYCTPTPYRLH

SEQ ID NO: 792404 - protein, 272 aa, Homo sapiens
PPAPPFPAAPGPWLRRPLFSLKLSDTEDVFPRRAGPLEVPADSRVFVQAALARPSPRWGLALHRCSVTPSSRPAPGPALALLREGCPADTSVAFPPPPPPSPGAARPARFSFRLRPVFNASVQFLHCQLSRCRRLRGVRRAPAPLTPPPPPPPSRCLPQDEACADTGSGSAEGLAADGPHLHTLTQPIVVTVPRPPPRPPKSVPGRAVRPEPPAPAPAALEPAPVVALVLAAFVLGAALAAGLGLVCAHSAPHAPGPPARASPSGPQPRRSQ

SEQ ID NO: 792405 - protein, 270 aa, Homo sapiens
MKSETKDKVRLRHYEKSEANKPDNLAETKDKVRLRHYEKSEVNKLDNLAETKDKVRLRHYEKSEANKLDNLAETKDKVRLRHYEKSQANKLDNLAETKDKVRLRHYEKSQANKLDNLAETKDKVRLRHYEKSQANKLDNLAETKDKVRLRHYEKSQANKPDNLAETKDKVRLRHYEKSQVNKLDNLAETKDKVRLWHYEKSQANKLDNLAETKDKVRLRHYEKSQANKLDNLAETKDKVRLRHYEKSQANKLDNLAETKDKVRLWHYEKS

SEQ ID NO: 792406 - protein, 108 aa, Homo sapiens
MTKSHMIISIDAERAFDKIQHHFMLKTLNNLGIDGTYLKIIRAVYDKPTVNITLNGQKLEPFPLKTSRRQGCPLSPLLFNTVLEVLARAIRQEKEIKGIQLGKEEVKL

SEQ ID NO: 792407 - protein, 91 aa, Homo sapiens
GRGPRAGRHPNVAPSQLTTPLARCPAGVHHHMPTRKPRGGGPSAEPTALASVDMPPPYPSREQMTPRERPTVYPEVQACRGHSEVGCPSAS

SEQ ID NO: 792408 - protein, 179 aa, Homo sapiens
GGAAVAQGPPAGPGRGGWALLATFLLSLLSEKFVRCQPSSQLGTEQETSPASLAGVAAGVSVACAGQDARPTGLPLRGPHQPPHSRSPGRRERRGWTSGKAWRAASGKPSGLLPPPSTGESQATVNEEQRAGETSASAQEQRPATPPTGDPVDALVATLPGSPSPSEPERISVPLLLGA

SEQ ID NO: 792409 - protein, 158 aa, Homo sapiens
GFESSLSPGLALSPHSALASSHLKCLLFCHEVPRVFSSLNVLFMFQVVLGIYYVLRTSMSVSVGVVLYFISLCGLCLVLSESTVGLRGPCPREETCVCLDCPGQPALGQKEWTPRDPRRLCPRHSPSPPPAGSVGGLKPSCLLGRQQFWKSKADTTEG

SEQ ID NO: 792410 - protein, 133 aa, Homo sapiens
METNINWGARVFLADFQAQKVITNPAGKGLGEVLKVKTTAVNFQHKGIPPKNHLGALLNLYCFFQHKNNFRGDWGFQSSLALTASWEQHGSFPNHGGVNAGLWGKKSLMGGNKWALALQMVPSPPLTGILLAL

SEQ ID NO: 792411 - protein, 52 aa, Homo sapiens
MRSGVQPGQYDETLSLLKIQKISQAWCQVPVVPATQEAETGESLEPRKRRLQ

SEQ ID NO: 792412 - protein, 111 aa, Homo sapiens
VLGPSLWQLLRRRTGPRRRERRGGATPRRECAGTAGPSRTRRATEARSPLQGAGAEPRPPSRRRSVHCSFRCLPGAGRREARAAETPAGREGRGVNGSQLRAPEDNDHSPS

SEQ ID NO: 792413 - protein, 49 aa, Homo sapiens
LEDPKHCGLILESAMTAVNTASYHCPFVGLTLFYSLFVKMGTAARNSVI

SEQ ID NO: 792414 - protein, 106 aa, Homo sapiens
AEDKLLGHLGTAAKCGRSQGHYANMRNTFFSLDNQPGRVKNYRDKRSQCYPTAKSEITGCLEGLEWLKKLNIYMDIHVRICMCVYVYICNILYIYMHIFKRSPKMC

SEQ ID NO: 792415 - protein, 176 aa, Homo sapiens
TAQLPGASIETLKGMYRLESRSAGALVIEESEGLRMEVLMHFSVYQASSMSLFCGNHPSVDCIMWSLHYMLREEPNLEGALSHPPVNPAPWDPGACEASMHFLSRQPLRQGLKRASCDRRMAGVEAGSAPRIPPGSGFRLEIQAEANLQPPELSQTPRQHGAPAAWSRTWEGGLLA

SEQ ID NO: 792416 - protein, 136 aa, Homo sapiens
DGVLLSLPRLECNGTISAHCNLRLPGSSNSPVSASRVARITEACHHAWLICVFLVETGFHHIGQAGLKVLTSGDLPTSASQSAGITGVSHCAQPEQTFLRSQSLQYFLLRSLPLLLAYKSFSIQKSNIYLFSFKML

SEQ ID NO: 792417 - protein, 164 aa, Homo sapiens
STMLSRRKTFDQKREMRKRLSSEKCLPVPRLRGPHARLAPTEAGHPPGPTRRHSAPWTRGGPGPPRGRPPHTAFAPRGPLAAEADGAPLPGPWGPRLPRADSFDSARASASSCGRTPRTQPAPLFTQGRPGGAGRDPGTRSRPETLSSGPPLAAPAPGAGPDPT

SEQ ID NO: 792418 - protein, 180 aa, Homo sapiens
GRRQRLLGPGQVSAAQARPYLSTVRASGQQRAPEDHERPAEESAPAPMPSSAPRGPTEPALRRPSSAERPLAPGPSSSPGAGRAPGAMASPSGSSEAPGKPRGRDGRPRREEDDVPPEEKRLRLLLEGGSAQPQDCEDGQDAPRSARKETGTQTGGDGRGVTVAHTCNPSTLAGRGWWIT

SEQ ID NO: 792419 - protein, 197 aa, Homo sapiens
GRRQRLLGPGQVSAAQARPYLSTVRASGQQRAPEDHERPAEESAPAPMPSSAPRGPTEPALRRPSSAERPLAPGPSSSPGAGRAPGAMASPSGSSEAPGKPRGRDGRPRREEDDVPPEEKRLRLLLEGGSAQPQDCEDGQDAPRSARKETGTQTGGDGRGVFTLLCNESQKYIIELTARYLTHKRLHKWDSASGKWW

SEQ ID NO: 792420 - protein, 103 aa, Homo sapiens [sequence omitted]

SEQ ID NO: 792421 - protein, 241 aa, Homo sapiens
METAIWRRSYISLISSERPVHNWRGKSVQKKQAESKSQIKLHTQSAPFGLCPKDMMLTQAPSSVVRSRNSRNHTVNSGGSCLSASTVAIPAINDSSAAMSACSTISAQPASSMDTQMHSPKKQERVNKRVIWGIEVAEELHWKGWELGKETTRNLVLKNRSLKLQKMKYRPPKTKFFFTVIPQPIFLSPGITLTLPIVFRPLEAPLTAVIYEVQATCWYGAGSRQRSSIQLQAVASAPSCW

SEQ ID NO: 792422 - protein, 164 aa, Homo sapiens
MMLTQAPSSVVRSRNSRNHTVNSGGSCLSASTVAIPAINDSSAAMSACSTISAQPASSMDTQMHSPKKQERVNKRVIWGIEVAEELHWKGWELGKETTRNLVLKNRSLKLQKMKYRYQYKGSRTQCHSLEPRKQALFKTKQNKQKKPLTCHIKASECLKYVQYE

SEQ ID NO: 792423 - protein, 220 aa, Homo sapiens
METAIWRRSYISLISSERPVHNWRGKSVQKKQAESKSQIKLHTQSAPFGLCPKDMMLTQAPSSVVRSRNSRNHTVNSGGSCLSASTVAIPAINDSSAAMSACSTISAQPASSMDTQMHSPKKQERVNKRVIWGIEVAEELHWKGWELGKETTRNLVLKNRSLKLQKMKYRPPKTKFFFTVIPQPIFLSPGITLTLPIVFRPLEAGPAHLLHLGVLQPIPD

SEQ ID NO: 792424 - protein, 35 aa, Homo sapiens
MDGGEGCTTASTHVVPLTCTLKNGSNGKFYVIFTT

SEQ ID NO: 792425 - protein, 139 aa, Homo sapiens [sequence omitted]

SEQ ID NO: 792426 - protein, 109 aa, Homo sapiens
VFNLKNTEKKLNRKINCASDIHETSSALAYVVMGVSREQEREKDTGIRFEEIIAENFPNLMKSINLQIQEDQQTPNKMNTRKIQTWTHHSQTVERQIKEQEKIDSQCPE

SEQ ID NO: 792427 - protein, 131 aa, Homo sapiens
HRQAPAPGWVKEFEGCRLNAPVETLGAASALCALVGFALGRRVHAPFSQALCGFLKPLSWCLGRVSGSSISTASPPPLLILPPPGASPAPQRPPCEGYRCRCPAGCRPVRPRSASSGLAWGIDPAPLLLEW

SEQ ID NO: 792428 - protein, 78 aa, Homo sapiens
EEERGDFGRSGVILGRGNVEKGTALRSLCKGTRDRGVLTAAPGFLAVLSRENMKETQAWEKMDTSVVDVLSGRCCLYH

SEQ ID NO: 792429 - protein, 33 aa, Homo sapiens
MAAGGVPRPRDRCCSPRVSMAVWCASKLGLSIL

SEQ ID NO: 792430 - protein, 80 aa, Homo sapiens
SLTAPHEIIIHYVTRREEREYFVKLSHSKPPPEARRRPQSCEHSRDLPTDTLKSQHDSGKHFQRVFYLGQIIFRFVSERQ

SEQ ID NO: 792431 - protein, 460 aa, Homo sapiens
KTFSRSFSLKLHQNIHTGEKPFECSNCRKAFRQISSILLHQRIHSGKKSHECNKCGESFNQRTTLILHMRIHDGKEILDCGKALSQCQSFNIHQKIHVVGNVCQCRKCGKAFNQMSSLLLHKKIHNGKKTHKYNKCGRGFKKKSVFVVHKRIHAGEKIPENAKALSQSLQQRSHHLENPFKCRKCGKLFNRISPLMLHQRIHTSEKPYKCDKCDKFFRRLSTLILHLRIHNGEKLYRCNKCEKVCNRHSSLIQHQKVHTKKKKLFECKECGKMFSGTANLKIHQNIHSEEKPFKCNKCSKVFGRQSFLIEHQRIHTGEKPYQCEECGKAFSHRISLTRHKRIHTEDRPYECDQCGKAFSQSAHLAQHERIHTGEKPYTCKTCGKAFSQRTSLILHERSHTGEKPYECNECGKAFSSGSDLIRHQRSHSSEKPYECSKCGKAYSRSSSLIRHQNTHSEEKA

SEQ ID NO: 792432 - protein, 460 aa, Homo sapiens; identical to SEQ ID NO: 792431

SEQ ID NO: 792433 - protein, 279 aa, Homo sapiens [sequence omitted]

SEQ ID NO: 792434 - protein, 275 aa, Homo sapiens
MFPLLYELTAVSPSPFPQRTAFPASGKKRETDYSDGDPLDVHKRLPSSTGEDRAVMLGFAMMGFSVLMFFLLGTTILKPFMLSIQREESTCTAIHTDIMDDWLDCAFTCGVHCHGQGKYPCLQVFVNLSHPGQKALLHYNEEAVQINPKCFYTPKCHQDRNDLLNSALDIKEFFDHKNGTPFSCFYSPASQSEDVILIKKYDQMAIFHCLFWPSLTLLGGALIVGMVRLTQHLSLLCEKYSTVVRDEVGGKVPYIEQHQFKLCIMRRSKGRAEKS

SEQ ID NO: 792435 - protein, 195 aa, Homo sapiens
MTAFPASGKKRETDYSDGDPLDVHKRLPSSTGEDRAVMLGFAMMGFSVLMFFLLGTTILKPFMLSIQREESTCTAIHTDIMDDWLDCAFTCGVHCHGQGKYPCLQVFVNLSHPGQKALLHYNEEAVQINPKCFYTPKCHQDRNDLLNSALDIKEFFDHKNGTPFSCFYSPASQSEDVILIKNVMLQTAELKKSRH

SEQ ID NO: 792436 - protein, 650 aa, Homo sapiens
ESASLPENTAQVESNEVMGAPDDRTRTPLEPSNCWSDLDGGSHTENVGEAAVTQVGEQADTVASCPLGHSDDTVYHDDRCMVEVPQQLETSIGHSLEKEFTNQEAAEPKEVPVQSTEAGRDHNEEEGEEKGLRDEKPIKTEVPGSPAGTESKGQEATGPSTVDTQSEPSDMKEPDEEKNDQQGEALDSLQKRKNKKKKKKRKKSPVPIETLKDVEKELTYQNTDLSEIKEEEQVKSTDRKSAVEAQNEVTENPKQKIAAESSENVDCPENPKMKLDGKLDQEGNDVKTAAEEVLAGRDTLDFEDVTVQSSGPRAGGEELDEGVAKDNAKIDGATYSNPEEPESEDADHCTVPKNESPSQDISDACEAESTERCGMSEHPSQTIRKALDSNSLKNHDLLAPGGEPGDFNPESREDTRGGNEKGKAKKTVPCPKLRQAAGVVHRKSECEGLFFSPLPMTAFPASGKKRETDYSDGDPLDVHKRLPSSTGEDRAVMLGFAMMGFSVLMFFLLGTTILKPFMLSIQREESTCTAIHTDIMDDWLDCAFTCGVHCHGQGKYPCLQVFVNLSHPGQKALLHYNEEAVQINPKCFYTPKCHQDRNDLLNSALDIKEFFDHKNGTPFSCFYSPASQSEDVILIKNVMLQTAELKKSRH

SEQ ID NO: 792437 - protein, 275 aa, Homo sapiens; identical to SEQ ID NO: 792434

SEQ ID NO: 792438 - protein, 257 aa, Homo sapiens [sequence omitted]

SEQ ID NO: 792439 - protein, 298 aa, Homo sapiens
REEDIYQFAYCYPYTYTRFQHYLDSLQKRNMDYFFREQLGQSVQQRKLDLLTITSPDNLREGAEQKVVFITGRVHPGETPSSFVCQGIIDFLVSQHPIACVLREYLVFKIAPMLNPDGVYLGNYRCSLMGFDLNRHWLDPSPWVHPTLHGVKQLIVQMYNDPKTSLEFYIDIHAHSTMMNGFMYGNIFEDEERFQRQAIFPKLLCQNAEDFSYSSTPFNRDAVKAGTGRRFLGGLLDHTSYCYTLEVSFYSYIISGTTAAVPYTEEACILSPHPALGQPSSSREYPSLTGQELGPQLR

SEQ ID NO: 792440 - protein, 180 aa, Homo sapiens
RVGLDGRICEAILTPSSRARLVEDRFGNPPTLRGPKTKDAKPYKFSTADSERWKGNQDKKPKCLLEEDIASQNNCERCKHSPGNKQHNSFKALKDEDLPVEKYLMERQPVGEPAADQVAMDVMHSPILQLERKHKVSSDSNQTETTAEKLPEDSFLKNKQKQVYIGLHPKKHHLMHLREQ

SEQ ID NO: 792441 - protein, 192 aa, Homo sapiens
RVGLDGRICEAILTPSSRARLVEDRFGNPPTLRGPKTKDAKPYKFSTADSERWKGNQDKKPKCLLEEDIASQNNCERCKHSPGNKQHNSFKALKDEDLPVEKYLMERQPVGEPAADQVAMDVMHSPILQLERKHKVSSDSNQTETTAEKLPEDSFLKNKQKQVYIGPPPKNKVLSNNASSQKPTHSSAEIHQ

SEQ ID NO: 792442 - protein, 107 aa, Homo sapiens
TGHTPAGPGTGLCVPMATAAALLDRPKPSSWVEHHHHWGHPGKGKVFQNHKCFSHKPQQSPEQLDTLCIVYKDSKGPMAADQDGGVSASSQRTILTLQAMRSRRGRQ

SEQ ID NO: 792443 - protein, 99 aa, Homo sapiens
MAQLEGYCFSAALSCTFLVSCLLFSAFSRALREPYMDEIFHLPQAQRYCEGHFSLSQWDPMITTLPGLYLVSVGVVKPAIWIFAWSEHVVCSIGMLRFV

SEQ ID NO: 792444 - protein, 144 aa, Homo sapiens
MIATGLRDAGARPERRCHSKSTASRAKARDLTRKGDSPPVPLGRPSGTHRPGSRRLAGRKGCQARRASREAASSGIKDVPRTWAGRQPGTPGGRAPTAQEPTPASTGKISPEPTCRGSHSRLEPSQSPAPRPPRAQAAPPSAAA

SEQ ID NO: 792445 - protein, 156 aa, Homo sapiens
SCHPAQVVRLAGREQDAAARVPQLSQVRAGGAPSLLSPALEAPSETLHGADWWVSRPWHRGVALANRSPAPPRGPDVSPDVAKSDSGSQMPTWSVYADHPFLQRDRRLLEVFCDLSGPDGLRNIARSSRVRGSLWLSTDDLPFRLCYRINRESVCS

SEQ ID NO: 792446 - protein, 101 aa, Homo sapiens
RACHARDAQMLLGLQRSKLAGPRGPSPRGRWISGAPHPLRRISRKWTEEYIATIISALGLVRVAGLGQSPAWAVDIKIRRALPALCGQKDERIALLLRFHC

SEQ ID NO: 792447 - protein, 380 aa, Homo sapiens
QSGSGALPGLTATPEAMLRFLPDLAFSFLLILALGQAVQFQEYVFLQFLGLDKAPSPQKFQPVPYILKKIFQDREAAATTGVSRDLCYVKELGVRGNVLRFLPDQGFFLYPKKISQASSCLQKLLYFNLSAIKEREQLTLAQLGLDLGPNSYYNLGPELELALFLVQEPHVWGQTTPKPGKMFVLRSVPWPQGAVHFNLLDVAKDWNDNPRKNFGLFLEILVKEDRDSGVNFQPEDTCARLRCSLHASLLVVTLNPDQCHPSRKRRAAIPVPKLSCKNLCHRHQLFINFRDLGWHKWIIAPKGFMANYCHGECPFSLTISLNSSNYAFMQALMHAVDPEIPQAVCIPTKLSPISMLYQDNNDNVILRHYEDMVVDECGCG

SEQ ID NO: 792448 - protein, 193 aa, Homo sapiens
QSGSGALPGLTATPEAMLRFLPDLAFSFLLILALGQAVQFQEYVFLQFLGLDKAPSPQKFQPVPYILKKIFQDREAAATTGVSRDLCYVKELGVRGNVLRFLPDQGFFLYPKKISQASSCLQKLLYFNLSAISLNSSNYAFMQALMHAVDPEIPQAVCIPTKLSPISMLYQDNNDNVILRHYEDMVVDECGCG

SEQ ID NO: 792449 - protein, 234 aa, Homo sapiens
QSGSGALPGLTATPEAMLRFLPDLAFSFLLILALGQAVQFQEYVFLQFLGLDKAPSPQKFQPVPYILKKIFQDREAAATTGVSRDLCYVKELGVRGNVLRFLPDQGFFLYPKKISQASSCLQKLLYFNLSAIKEREQLTLAQLGLDLGPNSYYNLGPELELALFLVQEPHVWGQTTPKPGKMFVLRSVPWPQGAVHFNLLDVAKDWNDNPRKNFGLFLEILVKEDRDSGVNFQP

SEQ ID NO: 792450 - protein, 252 aa, Homo sapiens
QSGSGALPGLTATPEAMLRFLPDLAFSFLLILALGQAVQFQEYVFLQFLGLDKAPSPQKFQPVPYILKKIFQDREAAATTGVSRDLCYVKELGVRGNVLRFLPDQGFFLYPKKISQASSCLQKLLYFNLSAIKEREQLTLAQLGLDLGPNSYYNLGPELELALFLVQEPHVWGQTTPKPGKMFVLRSVPWPQGAVHFNLLDVAKDWNDNPRKNFGLFLEILVKEDRDSGVNFQPEDTCARLRCSHFHALPGQ

SEQ ID NO: 792451 - protein, 472 aa, Homo sapiens
PRPLQPLAELNPSRVMAAALPRTLGELQLYRILQKANLLSYFDAFIQQGGDDVQQLCEAGEEEFLEIMALVGMASKPLHVRRLQKALRDWVTNPGLFNQPLTSLPVSSIPIYKLPEGSPTWLGISCSSYERSSNAREPHLKIPKCAATTCVQSLGQGKSDVVGSLALQSVGESRLWQGHHATESEHSLSPADLGSPASPKESSEALDAAAALSVAECVERMAPTLPKSDLNEVKELLKTNKKLAKMIGHIFEMNDDDPHKEEEIRKYSAIYGRFDSKRKDGKHLTLHELTVNEAAAQLCVKDNALLTRRDELFALARQISREVTYKYTYRTTKSKCGERDELSPKRIKVEQPEKVMAKQMEFLCNQAGYERLQHAERRLSAGLYRQSSEEHSPNGLTSDNSDGQGERPLNLRMPNLQNRQPHHFVVDGELSRLYPSEAKSHSSESLGILKDYPHSAFTLEKKVIKTEPEDSR

SEQ ID NO: 792452 - protein, 502 aa, Homo sapiens
PRPLQPLAELNPSRVMAAALPRTLGELQLYRILQKANLLSYFDAFIQQGGDDVQQLCEAGEEEFLEIMALVGMASKPLHVRRLQKALRDWVTNPGLFNQPLTSLPVSSIPIYKLPEGSPTWLGISCSSYERSSNAREPHLKIPKCAATTCVQSLGQGKSDVVGSLALQSVGESRLWQGHHATESEHSLSPADLGSPASPKESSEALDAAAALSVAECVERMAPTLPKSDLNEVKELLKTNKKLAKMIGHIFEMNDDDPHKEEEIRKYSAIYGRFDSKRKDGKHLTLHELTVNEAAAQLCVKDNALLTRRDELFALARQISREVTYKYTYRTTKSKCGERDELSPKRIKVEDGFPDFQDSVQTLFQQARAKSEELAALSSQQPEKVMAKQMEFLCNQAGYERLQHAERRLSAGLYRQSSEEHSPNGLTSDNSDGQGERPLNLRMPNLQNRQPHHFVVDGELSRLYPSEAKSHSSESLGILKDYPHSAFTLEKKVIKTEPEDSR

SEQ ID NO: 792453 - protein, 90 aa, Homo sapiens
LATCIPRERVSLRLTSDNSDGQGERPLNLRMPNLQNRQPHHFVVDGELSRLYPSEAKSHSSESLGILKDYPHSAFTLEKKVIKTEPEDSR

SEQ ID NO: 792454 - protein, 320 aa, Homo sapiens
PRPLQPLAELNPSRVMAAALPRTLGELQLYRILQKANLLSYFDAFIQQGGDDVQQLCEAGEEEFLEIMALVGMASKPLHVRRLQKALRDWVTNPGLFNQPLTSLPVSSIPIYKLPEGSPTWLGISCSSYERSSNAREPHLKIPKCAATTCVQSLGQGKSDVVGSLALQSVGESRLWQGHHATESEHSLSPADLGSPASPKESSEALDAAAALSVAECVERMAPTLPKSDLNEVKELLKTNKKLAEIRKYSAIYGRFDSKRKDGKHLTLHELTVNEAAAQLCVKDNALLTRRDELFALARQISRHAPITHLLDPPIHNVLT

SEQ ID NO: 792455 - protein, 502 aa, Homo sapiens; identical to SEQ ID NO: 792452

SEQ ID NO: 792456 - protein, 367 aa, Homo sapiens
PRPLQPLAELNPSRVMAAALPRTLGELQLYRILQKANLLSYFDAFIQQGGDDVQQLCEAGEEEFLEIMALVGMASKPLHVRRLQKALRDWVTNPGLFNQPLTSLPVSSIPIYKLPEGSPTWLGISCSSYERSSNAREPHLKIPKCAATTCVQSLGQGKSDVVGSLALQSVGESRLWQGHHATESEHSLSPADLGSPASPKESSEALDAAAALSVAECVERMAPTLPKSDLNEVKELLKTNKKLAKMIGHIFEMNDDDPHKEEEIRKYSAIYGRFDSKRKDGKHLTLHELTVNEAAAQLCVKDNALLTRRDELFALARQISREVTYKYTYRTTKMGFQISRILCKHSSSRLELRVKNLQLLVHSSLKR

SEQ ID NO: 792457 - protein, 420 aa, Homo sapiens
PRPLQPLAELNPSRVMAAALPRTLGELQLYRILQKANLLSYFDAFIQQGGDDVQQLCEAGEEEFLEIMALVGMASKPLHVRRLQKALRDWVTNPGLFNQPLTSLPVSSIPIYKLPEGSPTWLGISCSSYERSSNAREPHLKIPKCAATTCVQSLGQGKSDVVGSLALQSVGESRLWQGHHATESEHSLSPADLGSPASPKESSEALDAAAALSVAECVERMAPTLPKSDLNEVKELLKTNKKLAKMIGHIFEMNDDDPHKEEEIRKYSAIYGRFDSKRKDGKHLTLHEDGFPDFQDSVQTLFQQARAKSEELAALSSQRLQHAERRLSAGLYRQSSEEHSPNGLTSDNSDGQGERPLNLRMPNLQNRQPHHFVVDGELSRLYPSEAKSHSSESLGILKDYPHSAFTLEKKVIKTEPEDSR

SEQ ID NO: 792458 - protein, 74 aa, Homo sapiens
VLAAEGEMNASKSLKSASMVLAESPIALQLRYLQTLSTVATEKNSTIVFPLPMNILEGIGGVSYDNHKKLPNKA

SEQ ID NO: 792459 - protein, 155 aa, Homo sapiens
MQGSHSAVQAGVWWCHHDSLQPWPPGLRRSSCLSLQSLWDYRSLALSLRLACNGTTSAHCDLCLLSSSDSPASASQVAGITGEKTAEPHKAHAAQGERHLSSHMSPDENMTEKFCPGPRASFHLRILAASRHLVKRLLNEYTVTVLRDKSYLRNN

SEQ ID NO: 792460 - protein, 155 aa, Homo sapiens; identical to SEQ ID NO: 792459

SEQ ID NO: 792461 - protein, 145 aa, Homo sapiens
VFAGSSEQDANLAKQFWISASMYPPSESQLVLRRDSSQRLPVARPRRSRGSENSHSSQSFHLASNKNRDIFAEALKIQESEEKVKYLQKAKTREEILQLLRKQREERISKELISLPYKPKAKEHKAKKVVSESDKEDQEEVKTLD

SEQ ID NO: 792462 - protein, 172 aa, Homo sapiens
VFAGSSEQDANLAKQFWISASMYPPSESQLVLRRDSSQRLPVARPRRSRGSENSHSSQSFHLASNKNRDIFAEALKIQESEEKVKYLQKTRSHSVTQNEVQWHDHGSLQPQLSRIQAKTREEILQLLRKQREERISKELISLPYKPKAKEHKAKKVVSESDKEDQEEVKTLD

SEQ ID NO: 792463 - protein, 95 aa, Homo sapiens
VFAGSSEQDANLAKQFWISASMYPPSESQLVLRRDSSQRLPVARPRRSRGSENSHSSQSFHLASNKNRDIFAEALKIQESEEKVKYLQKITGTIV

SEQ ID NO: 792464 - protein, 38 aa, Homo sapiens
MTVVSIEAMALVLVCSGVSGLERSPWTQELPLRNVQVV

SEQ ID NO: 792465 - protein, 243 aa, Homo sapiens
FNRGSNLVQHQSIHTGEKPYECKECGKAFRLHLQLSQHEKTHTGEKPFECKECGKFFRRGSNLNQHRSIHTGKKPFECKECGKAFRLHMHLIRHQKFHTGEKPFECKECGKAFSLHTQLNHHKNIHTGEKPFKCKECGKSFNRVSNLVQHQSIHAGVKPYECKECGKGFSRVSNLIQHQKTHSSAKPFVCKECRKTFRYHYQLTEHYRIHTGEKPFECKECGKAFGLLTQLAQHQIIHTGEKP

SEQ ID NO: 792466 - protein, 225 aa, Homo sapiens
FNRGSNLVQHQSIHTGEKPYECKECGKAFRLHLQLSQHERRGSNLNQHRSIHTGKKPFECKECGKAFRLHMHLIRHQKFHTGEKPFECKECGKAFSLHTQLNHHKNIHTGEKPFKCKECGKSFNRVSNLVQHQSIHAGVKPYECKECGKGFSRVSNLIQHQKTHSSAKPFVCKECRKTFRYHYQLTEHYRIHTGEKPFECKECGKAFGLLTQLAQHQIIHTGEKP

SEQ ID NO: 792467 - protein, 151 aa, Homo sapiens
MFEICVFNPYVFLAAKKDQLQVNNAQLNCDSCQLYHCLNHSTIQTHSISTLIILGRIPGLWIPVNLSEPWAATPTLHFVKLLTQLTHGTRRALGMIIFTIVSLITLIPSVVVSSVALDSSTQTAQYAENWMHTADQAWMFQNKTNTEIQTE

SEQ ID NO: 792468 - protein, 118 aa, Homo sapiens
RAAGSGWNCSRPADFTRARGPHLPGAACSMAPSAVSPPQAPRRPLLGPWGLRAAGITETHIPVASSLSLCSEERQKGILLFPSRFLHLPSSDKPKNLPSEKTARISRYLGVEVGLRAS

SEQ ID NO: 792469 - protein, 107 aa, Homo sapiens
LESYRKFMMPLKLLLRCRHLLHLLISLWPMYDIDIQPIPKSLNEDIILQKSSAWANTNSPLTEKWESKKLQTTIQSSTRRITCLKQTTIKYNHLYLSSSFCHFGWLS

SEQ ID NO: 792470 - protein, 114 aa, Homo sapiens
MPLPGDRSLGCTKAEQLGTVGMRNIRGRWALYRKRFSCVWTRRFLIRLFTATSDEKPSDIIQKCSGGDRTNHFYTLIFPSRLYIIFSVLAGESNSFFKTRDTCSTWQGFHKNIW

SEQ ID NO: 792471 - protein, 340 aa, Homo sapiens
MRKELQLSLSVTLLLVCGFLYQFTLKSSCLFCLPSFKSHQGLEALLSHRRGIVFLETSERMEPPHLVSCSVESAAKIYPEWPVVFFMKGLTDSTPMPSNSTYPAFSFLSAIDNVFLFPLDMKRLLEDTPLFSWYNQINASAERNWLHISSDASRLAIIWKYGGIYMDTDVISIRPIPEENFLAAQASRYSSNGIFGFLPHHPFLWECMENFVEHYNSAIWGNQGPELMTRMLRVWCKLEDFQEVSDLRCLNISFLHPQRFYPISYREWRRYYEVWDTEPSFNVSYALHLWNHMNQEGRAVIRGSNTLVENLYRKHCPRTYRDLIKGPEGSVTGELGPGNK

SEQ ID NO: 792472 - protein, 208 aa, Homo sapiens
MLLQINASAERNWLHISSDASRLAIIWKYGGIYMDTDVISIRPIPEENFLAAQASRYSSNGIFGFLPHHPFLWECMENFVEHYNSAIWGNQGPELMTRMLRVWCKLEDFQEVSDLRCLNISFLHPQRFYPISYREWRRYYEVWDTEPSFNVSYALHLWNHMNQEGRAVIRGSNTLVENLYRKHCPRTYRDLIKGPEGSVTGELGPGNK

SEQ ID NO: 792473 - protein, 139 aa, Homo sapiens
MRKELQLSLSVTLLLVCGFLYQFTLKSSCLFCLPSFKSHQGLEALLSHRRGIVFLETSERMEPPHLVSCSVESAAKIYPEWPVVFFMKGLTDSTPMPSNSTYPAFSFLSAIDNVFLFPLDMKRLLEDTPLFSWYNQVSV

SEQ ID NO: 792474 - protein, 130 aa, Homo sapiens
PPSATRAHPHIDSREYPPHMDPLTHTHTHTHTHTHSEILSQTETHTHTHTHTRKKCISKETTRNVHIPFDHFAFVSFLCHRFPAKLIQSPVGLTCSSLQNILQSFWEYLIATATRIPKYFPNTLAAGSKI

SEQ ID NO: 792475 - protein, 108 aa, Homo sapiens
SSTFIGSFFHLPNKKQTKKNWKHTLNAERISPLKTVSHCEDIKFIVADGERPFPCRSKKDVLILIPGSCEYLPGMLKVRFLRWRKDLDYSAGPTKGMQEAGESEKEMW

SEQ ID NO: 792476 - protein, 82 aa, Homo sapiens
LISPGKKSQTQCQRRGNASNPEQQTQLLSHGTPRADIASRSQHPFPGSLGSASRLCFRFTKLCTASSHQLELVQNMETLCSA

SEQ ID NO: 792477 - protein, 82 aa, Homo sapiens; identical to SEQ ID NO: 792476

SEQ ID NO: 792478 - protein, 224 aa, Homo sapiens
VFLLCSLRMWMLLICGPHFEKYTGDSCGGKNSHPGIKTCLHILAMELGGLALLLRMEYSGAILSHCSIDLWGLSHPCTSASQVAGTTGDATKGAILEVDTRPSPDTKPAGASIFNFQPPECHGFWKKRLKMFSVAAVFRHHESLLLPSIKTNNKTLQRKSPQKHADFRRIHDLEYFYKYLRKQESFPYIWSLEILSIYMVLGESSFYEKGDFQNLLHFTISILA

SEQ ID NO: 792479 - protein, 95 aa, Homo sapiens
GRGKSVVPEGRWAPLQAPCSPAITSRTFWLTDQGQVDWVQSDRPFTFNSFGSADMYTYKVEPTRSGAFCPRHRTKDCPAGRWQEQFLTSVEYLWP

SEQ ID NO: 792480 - protein, 119 aa, Homo sapiens
LLDQMFLASSTATSPSRHQQTLTAKKTLELLLLCWVRGNMLCLWLELSFLQHSTLMGRSSICTTLLKWNSSRTQWLMSVIPTLWEAEVGGSPDVRSSRPAWSTWRNPVSTKNTKISWAW

SEQ ID NO: 792481 - protein, 118 aa, Homo sapiens
QRNSMEKLSKDGVDLITRKEKKANLMEQLFGASGSSTISSKSSDPNSVASSKGDIDPLNFLPGNKGSRDQEHDEDEDFFLSEGRSFNPNRHRLKHADDKPAVKAADSVEDEIEEVALR

SEQ ID NO: 792482 - protein, 442 aa, Homo sapiens
MGVARSFIIKRKDGTRRTIKTHTPCEGENTAREIRRSTTETDATPTTSGAGRPKQMHPPLTHNNEYLRHPMRESKTNREQRGTVRIKKRDSICRLLRDKNYTPRVDYNLVQNLYQQERKMIKTRTDTSQREKQQRSEEERQEKQGRGTRHRQEKERREDRDRESEAARQQRRRRRRGERRRGRRERNEKKKSTGTKDRKHEHTRTAEGGGTASTERTTGERADKKKGKRRRKRGEAGESGKARNPDDKGNRRRETAGGRREKGETEEEGREEKMKGAEEEEAKAGTEKRKSRREDRRSGEGERQTAAERRGGERERGEEGKQGTRARGKEGETARVERGTGEGDEPGNGGEGREEQERGEETRDAEEEAGEAPRKAGRGEKRNRGEGRGREEKREKSRTGAGERGKDREESDGAGGKVTTQGREENAPEEQGKQGTHGREGK

SEQ ID NO: 792483 - protein, 206 aa, Homo sapiens
QQPNAHRISQPIRQIIYGLLLNASPHLDKTSWNALPPQPLAFSEVERINNLSRLTELSLRRRQMLLLETLKVKQTILEPIPTSLKLPIAVSCYWLQHTETKAKLHHLQSLLLTMLVGPLIAIINSPGKEELQEDGAKMLYAEFQRVKAQTRLGTRLDLDTAHIFCQWQSCLQMGMYLNQLLSTPLPEPDLTRLYSGSLVHGLCQQL

SEQ ID NO: 792484 - protein, 111 aa, Homo sapiens [sequence omitted]

SEQ ID NO: 792485 - protein, 279 aa, Homo sapiens
LWPATCLWGGGSGSGVRCALLGATCLFACVPLSSVALESRRAAPSLDMSYNYVVTAQKPTAVNGCVTGHFTSAEDLNLLIAKNTRLEIYVVTAEGLRPVKEVGMYGKIAVMELFRPKGESKDLLFILTAKYNACILEYKQSGESIDIITRAHGNVQDRIGRPSETGIIGIIDPECRMIGLRLYDGLFKVIPLDRDNKELKAFNIRLEELHVIDVKFLYGCQAPTICFVYQDPQGRHVKTYEVSLRGKGNSIKGPLRNPGKHVRKVEAFPWGISKSPESP

SEQ ID NO: 792486 - protein, 87 aa, Homo sapiens
IGIIDPECRMIGLRLYDGLFKVIPLDRDNKELKAFNIRLEELHVIDVKFLYGCQAPTICFVYQVLDQEERARNCEVDVIGVVFANWH

SEQ ID NO: 792487 - protein, 94 aa, Homo sapiens
SLGVCWETAAGIRTLPGAESEAGWKSSSSNSAPRQLFDCCQVPQLWEPQAFICEMAIPVFLTRLLEDFIEDTVLVFQHFNISGLKLCHKIDHKP

SEQ ID NO: 792488 - protein, 108 aa, Homo sapiens
SHFQINSEIHLVWVRQHHTRHSSQFIVLEETSKIHLSLLLSCEKPCDSYAVIATSVTVRTGAAYSSFKARRAATAGFLNLGTTNILSRVFSRGAALCIVGCLAALDAH

SEQ ID NO: 792489 - protein, 118 aa, Homo sapiens
MGQLDSEGNVEILISRRCWCQKYDKRLIDGPGAVAHACIPSTLGGQGGWIMRSRVRDHPGQYGETLSLLKIQKISWAWWHASVVPTTWEAEAGELLEPGGGGCSEQRSCHCSPAWAAD

SEQ ID NO: 792490 - protein, 94 aa, Homo sapiens
SARLRRGKQPRALLPPALCRRQPAEPTAGAQRAQQLLSPGSKGGRRDEPVAMTQTRTTPIAEPAELLGGRGCSELRFCDYTPTWATERDSIPKK

SEQ ID NO: 792491 - protein, 104 aa, Homo sapiens
MGQLDSEGNVEILISRRCWCQKYDKRLIDGPGAVAHACIPSTLGGQGGWIMRSRVRDHPGQYGETLSLLKIQKISWAWWHASVVPTTWEAEAGESLEPRVWKLQ

SEQ ID NO: 792492 - protein, 134 aa, Homo sapiens
GSGGDPAGSARLRRGKQPRALLPPALCRRQPAEPTAGAQRAQQLLSPGSKGGRRDEPVAMTQTRTTPIAEPAELLGEWPPGGISCSQPGGGFGDPGCGAASSHAFSSPRYGVKNPRDPRVSVHQGRSRLPRNVA

SEQ ID NO: 792493 - protein, 126 aa, Homo sapiens
ESQGGPGLGAPSSSAPFAGTPGVCPLAPFRPVTPATGPSKRLVPKMFTMGFLKTVLLGTSACVSPPTMPAFFSLPAERRLQAWPQSEAPLSVSSCFQNRPPEPASFQNLRPEPASLQNLRTEPTSF

SEQ ID NO: 792494 - protein, 116 aa, Homo sapiens
MYHLLSSPGYRSSDFIHVSLSLMTGALNTLSIDRHTHTFAYPFLCLVSQPVWTTSEMPCSLLLMQSPSRRQTGGRRVNYTIPLFLPVLILAWLCPWPATTAPLKKATSSQLSPVLW

SEQ ID NO: 792495 - protein, 76 aa, Homo sapiens
LWSSRSCPHLNRSPGEEVKLLQRRLRFVKPKGSRASMAHSSQQVLWGAQMDKGENDCHQPVSTCLASRERALKIQW

SEQ ID NO: 792496 - protein, 143 aa, Homo sapiens
TESRSVTQVGVQWHDIGSLQPPPPRFKRFSCLSLPSSWDYRITGVCHHAQLIFVFLVETGFHLNSGSRGCGELRLHHCTPAWVTEPDSVSKKRKKKICKQSQHSPTGKQSKNVQNVHETLLHSHGADQAADKLQSQRERPHFK

SEQ ID NO: 792497 - protein, 125 aa, Homo sapiens
TESRSVTQVGVQWHDIGSLQPPPPRFKRFSCLSLPSSWDYRITGVCHHAQLIFVFLVETGFHLNSGSRGCGELRLHHCTPAWVTEPDSVSKKRKKKICKQSQHSPTGKQSKNVQNVHETLLHSHK

SEQ ID NO: 792498 - protein, 117 aa, Homo sapiens
SKLSKFPLAVSAKRVFQNCSMKCYVQLCELNTNITKKFLRILLSSFYGKIFPFPPWASKRSKCPLADSTKRVFQTCSLKRKFQLCELKAHITKKFVRMLLSSVYVNIFPFQTKASKQ

SEQ ID NO: 792499 - protein, 169 aa, Homo sapiens
IKIELKHAQQKLLDSTKMCSSLTAEYKHCQQKIKELELEVLKHTQSIKSQNNLQEKLVQEKSKVADAEEKILDLQRKLEHAHKVCLTDTCISEKQQLEEKIKEATQNEAKVKQQYQEEQQKRKLLYQNVDELHRQVRTLQDKENLLEMTCSQQQSRIQQQEALLKQLEN

SEQ ID NO: 792500 - protein, 118 aa, Homo sapiens
MESRSVTQAGVQWRDLGSLQPPPPRFKRFSCFVSLVETGFRHVGQAGLKLLTSGDPPAWTSQSAGITGVSYRARPFHVLKNIFCHPLVDSGSPPAQEATQADVNGDQAGTGIVVSLAL

SEQ ID NO: 792501 - protein, 433 aa, Homo sapiens
MGDWSFLGNILEEVNEHSTVIGRVWLTVLFIFRILILGTAAEFVWGDEQSDFVCNTQQPGCENVCYDEAFPISHIRLWVLQIIFVSTPSLMYVGHAVHYVRMEEKRKSREAEELGQQAGTNGGPDQGSVKKSSGSKGTKKFRLEGTLLRTYICHIIFKTLFEVGFIVGHYFLYGFRILPLYRCSRWPCPNVVDCFVSRPTEKTIFILFMLSVASVSLFLNVMELGHLGLKGIRSALKRPVEQPLGEIPEKSLHSIAVSSIQKAKGYQLLEEEKIVSHYFPLTEVGMVETSPLPAKPFNQFEEKISTGPLGDLSRGYQETLPSYAQVGAQEVEGEGPPAEEGAEPEVGEKKEEAERLTTEEQEKVAVPEGEKVETPGVDKEGEKEEPQSEKVSKQGLPAEKTPSLCPELTTDDARPLSRLSKASSRARSDDLTV

SEQ ID NO: 792502 - protein, 144 aa, Homo sapiens
YYSLVEMYWNSCLLPAVLHGIISWYYPHRETNFTTASPDKIKKWSPREVKQFAQDHTAAICIATKFVTCLNFHHHSYFCHTLDPPSTKNEYSDMATHLRNPFTSHRRKRIPQIPQRQLFFLKTAALPVMRATFPIQVGGQVTFV

SEQ ID NO: 792503 - protein, 74 aa, Homo sapiens
APPSTSPIPPPPRTPLGTPPGAEIGFTEPGENDSGVVVRGCAPAVPVRVVFTRAQWWPMGSRPLSPPQARGDGI

SEQ ID NO: 792504 - protein, 99 aa, Homo sapiens
VCERKPGIWLLTFQYNLLLCIWMTSLLCPLQRCAYRALTVQELLRTEPGNPDDLVDPVPPKGGAHGDCTLVTDWQAICLLQPTKSHRSFWILCSRLFIP

SEQ ID NO: 792505 - protein, 107 aa, Homo sapiens
KIILLQGLLRNSSEVGEHLRISQLCSTGFTNISRGHSQSSSPTNHSWHAKQLLEVPMLTCDHESFLSVLLTCDHESCLPVLLTCDHESCLSVLLTCDDCLSVLLTNF

SEQ ID NO: 792506 - protein, 118 aa, Homo sapiens
QKHLPKERSDQGTPQLKTLPWLPVPLEKTLISFRLCSSITSSLSLPTTHASATAAFFLAPRLYQAHSYPRPFALPVSSTERVLPQPLTRPFRHSANISMTLSILLPPDHYLFVSAFSL

SEQ ID NO: 792507 - protein, 122 aa, Homo sapiens
SLPAGCFASSAGPARPTFGSPSNSFHFLPRLPPTPRFSASPPFLFSLAPHFICLSTPFSLPTPPPFSSAPPAPHPFPAYQARDPGLRMENEWARCLELGWGLGEGRHHCDPFLWGVSLFKVH

SEQ ID NO: 792508 - protein, 123 aa, Homo sapiens
KYILIALETRSAKSRHWQALAPSAGSKGRAFFAASSFQGPQAFFGLWLHHSSPCLCLRVTFSSVFSPSRLLNNTCCHVQQGIPVVPATREAEAGGLLDPGVLGCSALHQSSVCTKFSINMVTS

SEQ ID NO: 792509 - protein, 77 aa, Homo sapiens
GALCATIFPMSSSNVSILLEDIGWILLAGWILWSKLEREGNSPSLMTGAGWTLQESRGHWVWKSQRSQRNNALEAAE

SEQ ID NO: 792510 - protein, 99 aa, Homo sapiens
RIKGTGGDTGPLQPQEDQQWPGLLVSSFVVGTLSPGPASYLASWLIILPEASPAWGCWRVPGPTWLGMECKPRRCHVRVQRGVGLSKSKERDCIRHRIC

SEQ ID NO: 792511 - protein, 109 aa, Homo sapiens
GGRGRGQKGEAWGSETNVSCLLPHGHVARPLTHSGLCSNVPLHERPFWTTHPITLYLLTLLYFHSLHLSPLDISSICLFSCLSIQSVHLMITGTLFCSLLGSDLSSANY

SEQ ID NO: 792512 - protein, 107 aa, Homo sapiens
MSHLTPVVIKQPYLGSICSGHILVLPLPGFHLQWPHPHPPTPWFPSAVATSSSSGSLGSICSSHLLILRLSGFHLQWPHPRPPAVWVPSAVATSSSSSSLSKFSAQT

SEQ ID NO: 792513 - protein, 109 aa, Homo sapiens
MVILELEIIPVLCCTGNGQVCLFFSFFLHQIVLLRDAGIGPHFPKPGRSLNVSTDHFSQSFFGSWQEGILGMDRCLIITVLSRAIFFIGPICARVQGTMSPSARLLALQ

SEQ ID NO: 792514 - protein, 110 aa, Homo sapiens
HLLTVTPCAHPQTINNYESTLFFYMFALLDITCRWNHTVCVLLCLASFTQHVFKVHVIECISTSFIFHGQIIYSFNFRSILNLFLHLLVGGYLGCFYFLDIVSNAAMNPE

SEQ ID NO: 792515 - protein, 291 aa, Homo sapiens
MLTDPLELGPCGDGHGTRIMEDCLLGGTRVSLPEDLLEDPEIFFDVVSLSTWQEVLSDSQREHLQQFLPQFPEDSAEQQNELILALFSGENFRFGNPLHIAQKLFRDGHFNPEVVKYRQLCFKSQYKRYLNSQQQYFHRLLKQILASRSDLLEMARRSGPALPFRQKRPSPSRTPEEREWRTQQRYLKVLREVKEECGDTALSSDEEGTLDLQEQFSFEDLSSWLPSSPARSPSPAVPLRVVPTLSTTDMKTADKVELGDSDLKIMLKKHHEKRKHQPVRWEGRAAVWFSA

SEQ ID NO: 792516 - protein, 334 aa, Homo sapiens
GTQTPCGSERVWEPAAGEGLRVRGPAPAVQSTCGEETMDSLDHMLTDPLELGPCGDGHGTRIMEDCLLGGTRVSLPEDLLEDPEIFFDVVSLSTWQEVLSDSQREHLQQFLPQFPEDSAEQQNELILALFSGENFRFGNPLHIAQKLFRDGHFNPEVVKYRQLCFKSQYKRYLNSQQQYFHRLLKQILASRSDLLEMARRSGPALPFRQKRPSPSRTPEEREWRTQQRYLKVLREVKEECGDTALSSDEEGTLDLQEQFSFEDLSSWLPSSPARSPSPAVPLRVVPTLSTTDMKTADKVELGDSDLKIMLKKHHEKRKHQPVRWEGRAAVWFSA

SEQ ID NO: 792517 - protein, 144 aa, Homo sapiens
  misc_feature (3)..(3): Xaa can be any naturally occurring amino acid
  misc_feature (8)..(8): Xaa can be any naturally occurring amino acid
MLXCMKDXQGIKKSGRPSPSRTPEEREWRTQQRYLKVLREVKEECGDTALSSDEEDLSSWVPSSPARSPSPAVPLRVVPTLSTTDMKTADKVELGDSDLKIMLKKHHEKRKHQPDHPDLLTGDLTLNDIMTRVNAGRKGSLAGK

SEQ ID NO: 792518 - protein, 320 aa, Homo sapiens
MDSRGLPAWTSQSTEISTCGEETMDSLDHMLTDPLELGPCGDGHGTRIMEDCLLGGTRVSLPEDLLEDPEIFFDVVSLSTWQEVLSDSQREHLQQFLPQFPEDSAEQQNELILALFSGENFRFGNPLHIAQKLFRDGHFNPEVVKYRQLCFKSQYKRYLNSQQQYFHRLLKQILASRSDLLEMARRSGPALPFRQKRPSPSRTPEEREWRTQQRYLKVLREVKEECGDTALSSDEEGTLDLQEQFSFEDLSSWLPSSPARSPSPAVPLRVVPTLSTTDMKTADKVELGDSDLKIMLKKHHEKRKHQPVRWEGRAAVWFSA

SEQ ID NO: 792519 - protein, 469 aa, Homo sapiens
LPLQTTSVGKTAPERNVEIPPSSPNPDGKGYLAGTLAPLQMRKRENHPKKRVARTVGEHTQVKCEPGKLLVEPDVKGVPCVISSGISQLGHSQPFKQEWLNKHSMQNRIVHSPEVKQQKRLLPSCSFQQNLFHVDKNGGFHTDAGTSHRQQFYQMPVAARGPIPTAALLQASSKTPVGCNAFAFNRHLEQKGLGEVSLSSAPHQLRLANMLSPNMPMKEGDEVGGTAHTMPNKALVHPPPPPPPPPPPPLALPPPPPPPPPLPPPLPNAEVPSDQKQPPVTMETTKRLSWPQSTGICSNIKSEPLSFEEGLSSSCELGMKQVSYDQNEMKEQLKAFALKSADFSSYLLSEPQKPFTQLAAQKMQVQQQQQLCGNYPTIHFGSTSFKRAASAIEKSIGILGSGSNPATGLSGQNAQMPVQNFADSSNADELELKCSCRLKAMIVCKGCGAFCHDDCIGPSKLCVACLVVR

SEQ ID NO: 792520 - protein, 227 aa, Homo sapiens
MELGSCFKTYEDFKECFSAYKRENRCSFILRDCVSVRFHNLNHGTSIREDILYVQVKFVCIRTQSNRKRTREADMCPAYLLLRYNERLDRLFISELNTQHIHGDSKVASPGGDTTGKSQKTMCLQRLQPVQPTTKKDLDTAEKSLVEPSFCLDKVQVSSKPEQEGITPSDLAKIAKVMKNFLKVDEGSMASFSVGDSQHLDRLSFQSSKMTDLFIRFPENLLLHRVE

SEQ ID NO: 792521 - protein, 102 aa, Homo sapiens
MELGSCFKTYEDFKECFSAYKRENRCSFILRDCVSVRFHNLNHGTSIREDILKGGRGGAGQEGGEEAGPPEGCLEEEGCIGTHWAAWPFIQQALIEHLLCAL

SEQ ID NO: 792522 - protein, 115 aa, Homo sapiens
PGVLWRSLCLGGSGVGLRRCVCKKRPACSHILSSRVRLAARGSAGSPGHRTWLCVQRTLISTVAPREPPWRSPGQLGQSLPGAGRGSPGVCFPEFTGNGVTSTHAWVVSGVGSLC

SEQ ID NO: 792523 - protein, 109 aa, Homo sapiens [sequence omitted]

SEQ ID NO: 792524 - protein, 238 aa, Homo sapiens
MMCVVLTTLPCLTFSIAVTEVQKSINGSADVLPDMLPDLPVSLVLLSLIMVDIIEKLRIYPLRGSQKSSENGHIHSTSLQHIKTVTEQVRQSPENAASPQATNSTQVSQPSGAMTRSQESVFMGPQEPSCDSGILRMMSRRDVRAELFLWSFLLWSDTIEMVRVAGHPNVYKSSWLYPVYIFSFISLLRITFTPQNPLLNSLSVLLQDLPFVFVRLGLIIALGTITPVLGLCKNILVT

SEQ ID NO: 792525 - protein, 105 aa, Homo sapiens
PAACCTMKSAKLGFLLRFFIFCSLNTLLLGGVNKIAEKICGDLKDPCKLDMNFGSCYEVHFRYFYNRTSKRCETFVFSGCNGNLNNFKLKIEREVACVAKYKPPR

SEQ ID NO: 792526 - protein, 103 aa, Homo sapiens
MVGASRSASNQVCLDYLSLQNLALCLSHTSHSINSPPTPLSTYDLPQSSGTSSNVIVYYILYIIHCFVVYNLSIIQIRNIPRAENVPNALWCLHPTGLSIVIF

SEQ ID NO: 792527 - protein, 106 aa, Homo sapiens [sequence omitted]

SEQ ID NO: 792528 - protein, 109 aa, Homo sapiens
VLSKWCVDKCFVCIVLYLFHCALEENSSCTESLLWILVLRIRLNFGKKTSESIQRKLSSKQQSKQYTDMAKSWNVGWAWRLMPVILAFWEAEARGSLEVKSLRSAWPTW

SEQ ID NO: 792529 - protein, 84 aa, Homo sapiens
FSPGVTRSDKAFSIVCVRERKDGRWTFNPNCGALDERSPSNVIAKSETYREMGIKSSHHSRCYKAFPSRCYRFYSPEHRRKVRH

SEQ ID NO: 792530 - protein, 112 aa, Homo sapiens
SPMQGSQLSPLLTQFLFPHFNISEMTIHDIINGILQLLPAEQQSWYTSHPGGVNLAVSLADIIGQLQPLDVSISKLFKSHLRKENKPYLFPENILLISSGKVKKVPASKLAE

SEQ ID NO: 792531 - protein, 206 aa, Homo sapiens
AASLAGRWPLPRGKAGARAEARGAHGGRGARAGAGGAPRSRRAPRAAGNPTPRARLSGWKLRNAFCVDKFSRGAGRPLCGAVHRSVEPFPPRSRSLVPALQRREGNPEGTRSAHPVCRGAGIARRRLGWGPVLRVLGALEQITFPSAGRGSQPGAFPAAAAQTDGACFLLPPRGGDRASPISKPIFSQRREAIKVASGDSGNLYKE

SEQ ID NO: 792532 - protein, 103 aa, Homo sapiens
TPLSPGLSSTPPSSPSELLWTLQRRLVSRKPSKMSCWVRSPSLCPKPLEVPISAPVTLWFMVTHLASCLTGRSAPGGQGGVWLICECPGPLQALSSHSPVFVS

SEQ ID NO: 792533 - protein, 119 aa, Homo sapiens
PFYSPIHIPPDRSSLTSFTQSSLQNSTHSFQYLSPLLCSLLGRQAQFLPFGTIPPSSGFSGLIMYPFSITKAKLESSLEHRPGQETAQIEQREKGGSEHSCINCFGLITVSFFFFLSFL

SEQ ID NO: 792534 - protein, 108 aa, Homo sapiens
EWASYSCPEEVLSVLKQDRSDSTVNPSSIQKPTYSLYFLDHLVKALQKMCLHELTVPVLQLGVLISDSVVGSKGLSDLYHLRWVQLLFRSVISPKQNKNKQHVKVLIL

SEQ ID NO: 792535 - protein, 157 aa, Homo sapiens
PRVRRGGGHPLWRRTPKRVPSTSPSCWLAGSEMKGERWWLQGSATATSQACQREWLAESVSRPAALGKSHCPRSLGQLGEQCRVCCLGVPGLRGGWHMVGSGLELGWSEGALTRSPEGRLQTSPQILMPGYRAEGSLKSTGSPCSTWESPSHHLSWN

SEQ ID NO: 792536 - protein, 125 aa, Homo sapiens
MKGERWWLQGSATATSQACQREWLAESVSRPAALGKSHCPRSLGQLGEQCRVCCLGVPGLRGGWHMVGSGLELGWSEGALTRSPEGRLQTSPQILMPGYRAEGSLKSTGSPCSTWESPSHHLSWN

SEQ ID NO: 792537 - protein, 85 aa, Homo sapiens
PLTGSVYLLLLPSPTSSSSSAGGDLHDLKDSTPQGGSPWKAQQESRQRRDVMGASGIPSNLHSPRSQPDRQLSQAGENGSLEPCK

SEQ ID NO: 792538 - protein, 101 aa, Homo sapiens
LAYSGMLSAHCNLCPLNLWYSPCLILNFKRQSHTALGERTRWGSDWSKDQVQECPGSWTMASPQAHAPRSPGLASSLLDLFPQGYYCSISVIPPFIHGRDS

SEQ ID NO: 792539 - protein, 149 aa, Homo sapiens
MGSLLSASSRQCRRRGLAAPCPGCGPGAQSAMSLACAPPRSVRAPVMHPQGSCNRGPHTGGLQTTEMHPCTLPEARSPKASAGLTPSGVSEGEFHSIRSQLLLAPALLCLWTLQSTLPLLSHGFSLLRTLVIEFTALPTSEQSHRNILN

SEQ ID NO: 792540 - protein, 53 aa, Homo sapiens
MNPVAQQKLNFLKVLDAKVQNRHHLADKVLGAMPDPETTGEQLSVGLPAPAAA

SEQ ID NO: 792541 - protein, 79 aa, Homo sapiens
MSEILPYSEDKMGRFGADPEGSDLSFSCRLQDTNSFFAGNQAKRPPKLGQIGRAKRVVIEDDRIDDVLKGMGEKPPSGV

SEQ ID NO: 792542 - protein, 136 aa, Homo sapiens [sequence omitted]

SEQ ID NO: 792543 - protein, 136 aa, Homo sapiens [sequence omitted]

SEQ ID NO: 792544 - protein, 84 aa, Homo sapiens
QDDPKEQKGPVMAAMGGLTEPVPTLDLGKKLSVPQDLMMEELSLRNNRGSLLFQKRQRRVQKFTFELAASQRAVSKPPLCSWGK

SEQ ID NO: 792545 - protein, 174 aa, Homo sapiens
PVPDPAAAEMLMPKKNRIAIYELLFKEGVMVAKKDVHMPKHPELADKNVPNLHVMKAMQSLKSRGYVKEQFAWRHFYWYLTNEGIQYLRDYLHLPPEIVPATLRRSRPETGRPRPKGLEGERPARLTRGEADRDTYRRSAVPPGADKKAEAGAGSATEFQFRGGFGRGRGQPPQ

SEQ ID NO: 792546 - protein, 174 aa, Homo sapiens; identical to SEQ ID NO: 792545

SEQ ID NO: 792547 - protein, 163 aa, Homo sapiens
MWLVFHRPHPRPSWPLRAALGFGRRQSSLRCFPVLPSARPYVSANPTLRGGRLRQDPESETGVGDLPDPVTTLVLLHNRLPLAVTVGCLPSRCPTEKRALPWQGLLHCLAVDVEVGQESEEKTERREVEPTSEKRGGKFRWEVDGSEEFEQTPTVKESDLSKQ

SEQ ID NO: 792548 - protein, 169 aa, Homo sapiens
ASCVRMGRGFGGRVTSGGSRDAVPGAEPPKMAVCIAVIAKENYPLYIRSTPTENELKFHYMVHTSLDVVDEKISAMGKALVDQRELYLGLLYPTEDYKVYGYVTNSKVKFVMVVDSSNTALRDNEIRSMFRKLHNSYTDVMCNPFYNPGDRIQSRAFDNMVTSMMIQVC

SEQ ID NO: 792549 - protein, 134 aa, Homo sapiens
ASCVRMGRGFGGRVTSGGSRDAVPGAEPPKMAVCIAVIAKENYPLYIRSTPTENELKFHYMVHTSLDVVDEKISAMGKALVDQRELYLGLLYPTEDYKVYLSGQGVCQGGPTVARCTLGSDNLKPFRRKRGESF

SEQ ID NO: 792550 - protein, 169 aa, Homo sapiens; identical to SEQ ID NO: 792548

SEQ ID NO: 792551 - protein, 155 aa, Homo sapiens
ASCVRMGRGFGGRVTSGGSRDAVPGAEPPKMAVCIAVIAKENYPLYIRSTPTENELKFHYMVHTSLDVVDEKISAMGKALVDQREYGYVTNSKVKFVMVVDSSNTALRDNEIRSMFRKLHNSYTDVMCNPFYNPGDRIQSRAFDNMVTSMMIQVC

SEQ ID NO: 792552 - protein, 112 aa, Homo sapiens
CHQQCLLQPTALFSSLPASSPPQQELFSPHSPLHHSFFLLSSLDSTFFLTLSLAQASSHPLCLPLSSPHRAETLGPSFFFSWALNRVLDQKIAEALAFFSLIPPWVPNSVLP

SEQ ID NO: 792553 - protein, 113 aa, Homo sapiens
RVEVSTPFHGDCQEPYAINDSKVPSQTQEHKPSTQNLQLQKDELDRQNPKRINAVSHLPSRTPLIQTKKSTSSSSSEFEDLNAYASQRNFYKRNLNRYCQERWPFQPCLTGRP

SEQ ID NO: 792554 - protein, 73 aa, Homo sapiens
FVQNRKKWPRQKDLLAMGSYRRFGRGEEYYINALGEADPMIPPPQSISNRHLEFRFRNPCPSFLCLQQQPTKT

SEQ ID NO: 792555 - protein, 181 aa, Homo sapiens
MRRSPSGLKSPRVSQGRKPRDPESLLFLRCCLGSEPHNLSSLLSPEAGQEPLPKLLPQPLAGHAAWGIHGVPTSLLLAGECWGQGMAVPADPPPASPYRTSPRPPPGPLPRYRPQQHLLLPLGRLHALCPGCPLQQSLQFERGTLSAPRLWSWMKLETIILSKLSQGQKTKHRMFSLISES

SEQ ID NO: 792556 - protein, 117 aa, Homo sapiens
CSQIVITGSHSQLHLWCLGWETRQLRAGADRSPLALPHLHVASLQCPQHGCFRVYRPVHGSQGYLDMCPKGRRGPGRGCIVIVPALESRQHHLLIIVFTGAETETLPDSRFWKSMWR

SEQ ID NO: 792557 - protein, 104 aa, Homo sapiens
RQKKKGRREERKEEKDKSSKDIEEQFIHPSVYLSIHSFLRQISAEFLSSTILGTKDITVNKRKLPAADPQHFQVTLVCAYVSVCVHVGASPLSAQACCQGTCLP

SEQ ID NO: 792558 - protein, 80 aa, Homo sapiens
LQCASFWKCLLEMERGDLQSSSLQKTACSAVRQLDSKSLAKSFQGAKQMAAPSTAAANSFIFGLFPGTRGARGWLTAVYL

SEQ ID NO: 792559 - protein, 367 aa, Homo sapiens
MSGKDEQQEQTIAEDLVVTKYKMEGDIANRGTSVLGGSISSGVSVLSLCEKGDAVIMEETGKIFKKEKEMKKGIAFPTSISVNNCVCHFSPLKSNQDYILKEGDLVKIELGVHVDGFIANVAHTFVVDVAQGTKYTGRKADVIKAAHLCAEAALRLVKPGNQNTQVTQAWNKVAHSFNCTPVEGMLSHQLKQHVIDGEKTIIQNPTDQQKKDHEKAEFDIHKVYAVDVLVSSGEGKPKDAGQRTTIYKQDPSKQYGLKMKTSRAFFSEVETRFDAMPFTLRAFEDEKKAQMGVVECAKHELLQPFNVLYEKEGEFVAQFKFTVLLMPSGPMRITSGPFEPDLCKSEMEVQDAELKALLQSSTSRKTQ

SEQ ID NO: 792560 - protein, 75 aa, Homo sapiens
ISTVGYGDMYPETHLGRFFAFLCIAFGIILNGMPISILYNKFSDYYSKLKAYEYTHHTQGEGRGELHAESQKEDS

SEQ ID NO: 792561 - protein, 78 aa, Homo sapiens
  misc_feature (12)..(12): Xaa can be any naturally occurring amino acid
CNPYNAGRNKVXKSAAQSDAPGKYQDQERKGIPVHPSNANRGNGPRGNDAAATASPGDLLATEVLRLRHRTTESEILE

SEQ ID NO: 792562 - protein, 142 aa, Homo sapiens
FSPESVSFTYRLQRPCKTLMRHIHWVHEALPVSPSTGAERELIPSLGGAQEAENLLPVSTPRFQITPFPAYCRGQQGPLPDPLAWASALVIVGPEWPRILAPAPPVWSLALLALPENGKAGLFTGHGARSALKNKEQIKCHK

SEQ ID NO: 792563 - protein, 232 aa, Homo sapiens
PYHPSLAKILLSLDGNLAKQQALSHILTALQIMYARDAVVGALMPAAMIAPVECPSFSSAAPSDASAMASPMNGEECMLAVDIEDRLSPNPWQEKREIVSSEDAVTPSAVTPSAPSASARPFIPVTDDLGAASIIAETMTKTKEDVESQNKAAGPEPQALDEFTSLLIADDTRVVVDLLKLSVCSRAGDRGRDVLSAVLSGMGTAYPQVADMLLELCVTELEDVATRLAERP

SEQ ID NO: 792564 - protein, 169 aa, Homo sapiens
PYHPSLAKILLSLDGNLAKQQALSHILTALQIMYARDAVVGALMPAAMIAPVECPSFSSAAPSDASAMASPMNGEECMLAVDIEDRLSPNPWQEKREIVSSEDAVTPSAVTPSAPSASARPFIPVTDDLGAASIIAETMTKTKEGGRYAVGALCHRVGGCGHKTRRAAA

SEQ ID NO: 792565 - protein, 98 aa, Homo sapiens
ATSVPVATQCHVLPDAEGLHSWGSGGRKTVRCLLLSMPSHRMRGTGLIPQKPQPKKLRAREDPAHTGLGWASRSTGGASYHLCSEAWALCRCPLLCCN

SEQ ID NO: 792566 - protein, 144 aa, Homo sapiens
MVAKDIHMPKHLELSDKNVSNLPVIKAMQSLKSRGYVKAQFAWRHFYWYLPNEGIQYLRDYLHLPPEIVPATLCRSRPGTGRPRPKGLKGERPARLTRGKADRDTYRRSAVPPGADKKAEAGTGSATEFQFRGEFGHGHGRPPQ

SEQ ID NO: 792567 - protein, 643 aa, Homo sapiens
MLLDVLYRWDVSSFFQQIQRSSLSNNPLFQYKYLALNMHYVGYILSVVLLTLPRQHLVQLYLYFLTALLLYAGHQISRDYVRSELEFAYEGPMYLEPLSMNRFTTALIGQLVVCTLCSCVMKTKQIWLFSAHMLPLLARLCLVPLETIVIINKFAMIFTGLEVLYFLGSNLLVPYNLAKSAYRELVQVVEVYGLLALGMSLWNQLVVPVLFMVFWLVLFALQIYSYFSTRDQPASRERLLFLFLTSIAECCSTPYSLLGLVFTVSFVALGVLTLCKFYLQGYRAFMNDPAMNRGMTEGVTLLILAVQTGLIELQVVHRAFLLSIILFIVVASILQSMLEIADPIVLALGASRDKSLWKHFRAVSLCLFLLVFPAYMAYMICQFFHMDFWLLIIISSSILTSLQVLGTLFIYVLFMVEEFRKEPVENMDDVIYYVNGTYRLLEFLVALCVVAYGVSETIFGEWTVMGSMIIFIHSYYNVWLRAQLGWKSFLLRRDAVNKIKSLPIATKEQLEKHNDICAICYQDMKSAVITPCSHFFHAGCLKKWLYVQETCPLCHCHLKNSSQLPGLGTEAVLQTHAGAEQNVMFQEGTEPPGQEHTPGTRIQEGSRDNNEYIARRPDNQEGAFDPKEYPHSAKDEAHPVESA

SEQ ID NO: 792568 - protein, 643 aa, Homo sapiens; identical to SEQ ID NO: 792567

SEQ ID NO: 792569 - protein, 643 aa, Homo sapiens; identical to SEQ ID NO: 792567

SEQ ID NO: 792570 - protein, 80 aa, Homo sapiens
PAVLTGLIELQVVLRAFLLSIILLGVVASMNDPAINRGMTEGVTLLILAVQTGLIELQVVHRAFLLSIILFIVVKFCNVC

SEQ ID NO: 792571 - protein, 643 aa, Homo sapiens; identical to SEQ ID NO: 792567

SEQ ID NO: 792572 - protein, 246 aa, Homo sapiens
MLLDVLYRWDVSSFFQQIQRSSLSNNPLFQYKYLALNMHYVGYILSVVLLTLPRQHLVQLYLYFLTALLLYAGHQISRDYVRSELEFAYEGPMYLEPLSMNRFTTALIGQLVVCTLCSCVMKTKQIWLFSAHMLPLLARLCLVPLETIVIINKFAMIFTGLEVLYFLGSNLLVPYNLAKSAYRELVQVVEVYGLLALGMSLWNQLVVPVLFMVFWLVLFALQIYSYFSTRDQPASRERLLFLFLTR

SEQ ID NO: 792573 - protein, 118 aa, Homo sapiens
NETKTWFFENTNTIDRPLGRLTMKRREKNQVSSSRNETGDITTDTTEIQKIIQGYYEHLYAHKLESLEEIDKFQEIYNPLKLNKGDIKFLNRSKTSSKIEIVIKKLSAKKSRTRQIHR

SEQ ID NO: 792574 - protein, 105 aa, Homo sapiens
GLMGRLKPAVRSSSGHSRQQERPAGGAGSIGPGLESELPSEAQLLSGPPQTGLCSWAGQDPAAWAFCLPAAPALSWRGKWASLPSVHAQDVALGLNGDVIFYTNP

SEQ ID NO: 792575 - protein, 109 aa, Homo sapiens
MTVEFLAVPITPQHDACQNAPNLLPDAGAIAISGHRQLRAALSNGCPWDTSLRDAFVGKGFCGSITFGSAAHLSPSWTFTKAVIAVKALTSPIEKLLAKPSLTHVFKLI

SEQ ID NO: 792576 - protein, 157 aa, Homo sapiens
PLMQFGPSFLQPANLETRTWIFIGRLGDFLTALGLCEKGPGLSLQKPTCYWLARTVSTFRHQLHPNTLCCIYNHGAFPRDAHLTASWPLRPGCTAWTIALRQRQCLSLYVLLPLVEMWLGHLEWGRRQVAWASWRLAAPMAESSATHPDVSTPLSCP

SEQ ID NO: 792577 - protein, 109 aa, Homo sapiens
MNPGSEKDSRLPRAAQPSRNVRRPRVKTQRTGSWWRGWCSGGWPCPQLMPQAQHLEKVLPPGLVLPRGPESRGKSRAGSMGTCSSSLGLARGQGSCVCSGWNLTPFGMD

SEQ ID NO: 792578 - protein, 66 aa, Homo sapiens
PNGDSNKSALETAIKKHFNEDIQCSDVSPGAPDSITQEFRSGLNLSAPPAPPHRPVSSWFRIARGR

SEQ ID NO: 792579 - protein, 129 aa, Homo sapiens
LSRCYNPLTLAASVSLKHLNFCPLQPSLLVLHTFWFALSPDLCGLAPPSHLGLSLNVTSLEESFLITLPKETYPRLPYPIPCFFLQTPLSEMISFLCQLSDFPLARKLHESQDHFIHTVSPAYRAVLGT

SEQ ID NO: 792580 - protein, 365 aa, Homo sapiens
MLGQVVTLILLLLLKVYQGKGCQGSADHVVSISGVPLQLQPNSIQTKVDSIAWKKLLPSQNGFHHILKWENGSLPSNTSNDRFSFIVKNLSLLIKAAQQQDSGLYCLEVTSISGKVQTATFQVFVFDKVEKPRLQGQGKILDRGRCQVALSCLVSRDGNVSYAWYRGSKLIQTAGNLTYLDEEVDINGTHTYTCNVSNPVSWESHTLNLTQDCQNAHQEFRFWPFLVIIVILSALFLGTLACFCVWRRKRKEKQSETSPKEFLTIYEDVKDLKTRRNHEQEQTFPGGGSTIYSMIQSQSSAPTSQEPAYTLYSLIQPSRKSGSRKRNHSPSFNSTIYEVIGKSQPKAQNPARLSRKELENFDVYS

SEQ ID NO: 792581 - protein, 329 aa, Homo sapiens
MLGQVVTLILLLLLKVYQGKGCQGSADHVVSISGVPLQLQPNSIQTKVDSIAWKKLLPSQNGFHHILKWENGSLPSNTSNDRFSFIVKNLSLLIKAAQQQDSGLYCLEVTSISGKVQTATFQVFVFDKVEKPRLQGQGKILDRGRCQVALSCLVSRDGNVSYAWYRGSKLIQTAGNLTYLDEEVDINGTHTYTCNVSNPVSWESHTLNLTQDCQNAHQEFRFWPFLVIIVILSALFLGTLACFCVWRRKRKEKQSETSPKEFLTIYEDVKDLKTRRNHEQEQTFPGGGSTIYSMIQSQSSAPTSQEPAYTLYSLIQPSRKGDRFYSFSG

SEQ ID NO: 792582 - protein, 273 aa, Homo sapiens
MLGQVVTLILLLLLKVYQGKGCQGSADHVVSISGVPLQLQPNSIQTKVDSIAWKKLLPSQNGFHHILKWENGSLPSNTSNDRFSFIVKNLSLLIKAAQQQDSGLYCLEVTSISGKVQTATFQVFVFEFRFWPFLVIIVILSALFLGTLACFCVWRRKRKEKQSETSPKEFLTIYEDVKDLKTRRNHEQEQTFPGGGSTIYSMIQSQSSAPTSQEPAYTLYSLIQPSRKSGSRKRNHSPSFNSTIYEVIGKSQPKAQNPARLSRKELENFDVYS

SEQ ID NO: 792583 - protein, 140 aa, Homo sapiens
MLGQVVTLILLLLLKVYQGKGCQGSADHVVSISGVPLQLQPNSIQTKVDSIAWKKLLPSQNGFHHILKWENGSLPSNTSNDRFSFIVKNLSLLIKAAQQQDSGLYCLEVTSISGKVQTATFQVFVFGMAMCPMLGTEGAS

SEQ ID NO: 792584 - protein, 117 aa, Homo sapiens
VARGCPGRRTPDPSASSWSTSLLPLPYPRTVSWSAGGWTRSAAFATGLFSSHFLWDLGLPNRRWMVCQRILSPPTANLQSQAGCSPEALGGRPLPAAGIWGRGTAFGVGNEVLVLHI

SEQ ID NO: 792585 - protein, 118 aa, Homo sapiens
PVLQNCEVQARDWQIQCLVSIHLLVHTWSPLALSSHSERGMRVLSCRIRHEEAAVMEGAGAGSGFRKELVSRLLHLHFKDDKTKEAAVRGVRQAQAEDALRVDVDQLEKVLPQLLLDF

SEQ ID NO: 792586 - protein, 168 aa, Homo sapiens
AFLLGTPQRHGRAHGHTHTPWARTDTDTEAQVRSVNWQSLRHSGLRRQMSTDRHRPSRAIGDRHKSTAGRPRDPLRGTPRRGQNVLKDTLLPRASLWSTWGHAHGRLHGRQEAPAHLAPPAFPYGARAECACVPVRAATCGRRGARCARGCPPSAARGELLPWRAERG

SEQ ID NO: 792587 - protein, 102 aa, Homo sapiens
KKKKKKKRTMATDSCSPLPQQMHFPKNREKCNPFGFLSSLSIALGNHVKTHMAGAYSDKPNNAHRWLPCESSQTTQECAGSNPPRPPPKQNLFKTANCSAAL

SEQ ID NO: 792588 - protein, 107 aa, Homo sapiens
SVTQAGVQWHDLSSPQPPSLGFKPFSSQVAGIIGMSNHSQLIFVFLVETGFHHGGHAGLELLTSSYLPASASQSAGITGMSHHAGPNSYFLLTSKWYIARMINDEGL

SEQ ID NO: 792589 - protein, 47 aa, Homo sapiens
MPEYCPQAERRLQRGAGFQQARLTRSLAFPVLALGRPRCCFPLGASF

SEQ ID NO: 792590 - protein, 103 aa, Homo sapiens
MTIVDIICCTAFQAQNISREKTNLPQSPLYVILQEGSKLYLLASFSIFQVLISLLSKALNHFCYINAIGLYFSFPNLYLYSYYNHTQQTKNCFLGLPLLEGGG

SEQ ID NO: 792591 - protein, 130 aa, Homo sapiens
QPMKLPGIPNPKSSLPFVKTLDTLSGLLKVALTTTSSILFSEPARPPASLEDKFPEERPCLLCPALTGCSRSLMVWGPFKGFPPTHLPMLLPPHGISSPHPTTRLPDEFPCLARLPIPHDPSDRFSVTDT

SEQ ID NO: 792592 - protein, 117 aa, Homo sapiens
SKPNPSPPIKQINGNKIILTYLRQPTYCSYCRKFIWGVFGKQGYQCQVCTCVTHKHCHHLTITACICQNNINQEDSKIAKQRFRINISHNFSIHNYKSLPLCNHCGALLWGIMGLHF

SEQ ID NO: 792593 - protein, 188 aa, Homo sapiens
STTSQQVKLIALTQTLTLAKGLRVNIYTDSKYAFHILHHHTVIWAERGFLTTQGSSIINASLIKTLLKATLLPKEAGFIHCKGHQKASDPIAQGNTYADKVAKKAASIPTSVPHGQFFSFSSVTPTYSPTETSTYQSLPTQGKWFLDQGKYLLPASQAHSILSSFHSLFHVGYKPLAHLLEPLISFPS

SEQ ID NO: 792594 - protein, 83 aa, Homo sapiens
LAGDLNGKTQDSGFHTGKGSAVEPYPCDETIGLLINYKNSCRIRHELVSSFFFFFFSKVFASCLFLKRNYFLTHIFMFHSSGT

SEQ ID NO: 792595 - protein, 111 aa, Homo sapiens
PTLASQSGGMTGVSHHAWPMPLLLVFSLRSKRGNLHSHAPAKKVPFHAVTCPTAAVFTELHAESLTASGLTKCLKGKADKPTWLSLARPVCALGLGHKLENKIEKETNIFF

SEQ ID NO: 792596 - protein, 135 aa, Homo sapiens
PDLAPVGWVGASAVSLLTPAAFPGPGSLSPAFKDSFSFQAPCRLSSLWRADTPPARGRTRAEGPGFQTGRRLSAIQPARPQLSCSQPDVSQGCHSHSKASRTQYQPHQVLLPCRPALGPHAHPTALALPATGSSR

SEQ ID NO: 792597 - protein, 331 aa, Homo sapiens
FCFSSFVFLALFPAVFFTHLVVSVSLLPDGVWFRLRSFVARCPPGLGSLALSASPPFPAPLKIFGYNAPPGPWARYNCTVRLLDDSEYTLHHPERCQGQYLLTFFATIVDLLEKDYFGIRFVDPDKQRHWLEFDKVCGETIEIQPPFTMCFRVKFYPADPAALKEEMTGIKSSCRSKGISTMADSSVKHPDAALLAAYIIQAEIGDYDSGKHPEGYSSKFQFFPKHSEKLERKIAEIHKTELSGQTPATSELNFLRKAQTLETYGVDPHPCKDVSGNAAFLAFTPFGFVVLQGNKRVHFIKWNEVTKLKFEGKTFYLYVSQKKKGIGSCPV

SEQ ID NO: 792598 - protein, 102 aa, Homo sapiens
MAWLCVSTQISSQFVIPVYQERKAIGSLGWFLSCCFCDSDEFSKDLIFFYKCLTFPLFAYFLLPPYEKGPCFPFAFCHDCKFTEVSLAMWNYESIKPFCLIN

SEQ ID NO: 792599 - protein, 131 aa, Homo sapiens
MGEGDGSKTTSTLPDPSKLAVLPVTCRSSHLPGLSIRPHLSRGPPQFSIPEASWWLTPSRPRRDFSPVPRTSPDLSDLPCPFPQRALPFSPVPKLHASRVSLRPFAALRPLGSAAGLFGPAPGGESSPARP

SEQ ID NO: 792600 - protein, 79 aa, Homo sapiens
RHGQSANKKLREIIEGTAMLFAPGQIWVEVDQGLPGCANSLHEPCSRAPDSIPHPWEVPVAITENFPETAISPECNLLG

SEQ ID NO: 792601 - protein, 79 aa, Homo sapiens
LGGPERGAAGLQPGNPERKRVLCKMGLHPCPAPSSMGSDAKTEAQGSEVTHPRSHSLSVAELGFNPREKPMQCCTSNHY

SEQ ID NO: 792602 - protein, 138 aa, Homo sapiens [sequence omitted]

SEQ ID NO: 792603 - protein, 1278 aa, Homo sapiens
KAAKIMMGKVDTFLDSLKKFDKEHIPEACLKAFKPYQGNPTFDPEFIRSKSTAAAGLCSWCINIVRFYEVYCDVAPKRQALEEANAELAEAQEKLSRIKNKIAELNANLSNLTSAFEKATAEKIKCQQEADATNRVILLANRLVGGLASENIRWAESVENFRSQGVTLCGDVLLISAFVSYVGYFTKKYRNELMEKFWIPYIHNLKVPIPITNGLDPLSLLTDDADVATWNNQGLPSDRMSTENATILGNTERWPLIVDAQLQGIKWIKNKYRSELKAIRLGQKSYLDVIEQAISEGDTLLIENIGETVDPVLDPLLGRNTIKKGKYIKIGDKEVEYHPKFRLILHTKYFNPHYKPEMQAQCTLINFLVTRDGLEDQLLAAVVAKERPDLEQLKANLTKSQNEFKIVLKELEDSLLARLSAASGNFLGDTALVENLETTKHTASEIEEKVVEAKITEVKINEARENYRPAAERASLLYFILNDLNKINPVYQFSLKAFNVVFEKAIQRTTPANEVKQRVINLTDEITYSVYMYTARGLFERDKLIFLAQVTFQVLSMKKELNPVELDFLLRFPFKAGVVSPVDFLQHQGWGGIKALSEMDEFKNLDSDIEGSAKRWKKLVESEAPEKEIFPKEWKNKTALQKLCMVRCLRPDRMTYAIKNFVEEKMGSKFVEGRSVEFSKSYEESSPSTSIFFILSPGVDPLKDVEALGKKLGFTIDNGKLHNVSLGQGQEVVAENALDVAAEKGHWVILQNIHLVARWLGTLDKKLERYSTGSHEDYRVFISAEPAPSPETHIIPQGILENAIKITNEPPTGMHANLHKALDLFTQDTLEMCTKEMEFKCMLFALCYFHAVVAERRKFGAQGWNRSYPFNNGDLTISINVLYNYLEANPKVPWDDLRYLFGEIMYGGHITDDWDRRLCRTYLAEYIRTEMLEGDVLLAPGFQIPPNLDYKGYHEYIDENLPPESPYLYGLHPNAEIGFLTVTSEKLFRTVLEMQPKETDSGAGTGVSREEKVKAVLDDILEKIPETFNMAEIMAKAAEKTPYVVVAFQECERMNILTNEMRRSLKELNLGLKGELTITTDVEDLSTALFYDTVPDTWVARAYPSMMGLAAWYADLLLRIRELEAWTTDFALPTTVWLAGFFNPQSFLTAIMQSMARKNEWPLDKMCLSVEVTKKNREDMTAPPREGSYVYGLFMEGARWDTQTGVIAEARLKELTPAMPVIFIKAIPVDRMETKNIYECPVYKTRIRGPTYVWTFNLKTKEKAAKWILAAVALLLQV

SEQ ID NO: 792604 - protein, 464 aa, Homo sapiens
MQPQGRGNGIFLYVAGSTGGSPQRGLGNKWDLYRQQGVGERSGKECLTNRTWVSACTALPMLTNCPLFQGYHEYIDENLPPESPYLYGLHPNAEIGFLTVTSEKLFRTVLEMQPKETDSGAGTGVSREEKAGSLKLLPSERKGEDLELRRGSQGLAAVQGNLLVRYTLPQPWAWVSETLGYGPQAGQQVLRRGSCRLRVKAVLDDILEKIPETFNMAEIMAKAAEKTPYVVVAFQECERMNILTNEMRRSLKELNLGLKGELTITTDVEDLSTALFYDTVPDTWVARAYPSMMGLAAWYADLLLRIRELEAWTTDFALPTTVWLAGFFNPQSFLTAIMQSMARKNEWPLDKMCLSVEVTKKNREDMTAPPREGSYVYGLFMEGARWDTQTGVIAEARLKELTPAMPVIFIKAIPVDRMETKNIYECPVYKTRIRGPTYVWTFNLKTKEKAAKWILAAVALLLQV

SEQ ID NO: 792605 - protein, 949 aa, Homo sapiens
MSLGGGQAEGFGQGSQGRTEYRQRGVNPAAKMSLITQGKSRCISQKGPRHRPGRRNRQGEVQCSSRDQKGGFKVAAWPGAGVKGGLYLCSSPLVTGRPTEPFPPPTARYIKIGDKEVEYHPKFRLILHTKYFNPHYKPEMQAQCTLINFLVTRDGLEDQLLAAVVAKERPDLEQLKANLTKSQNEFKIVLKELEDSLLARLSAASGNFLGDTALVENLETTKHTASEIEEKVVEAKITEVKINEARENYRPAAERASLLYFILNDLNKINPVYQFSLKAFNVVFEKAIQRTTPANEVKQRVINLTDEITYSVYMYTARGLFERDKLIFLAQVTFQVLSMKKELNPVELDFLLRFPFKAGVVSPVDFLQHQGWGGIKALSEMDEFKNLDSDIEGSAKRWKKLVESEAPEKEIFPKEWKNKTALQKLCMVRCLRPDRMTYAIKKKTRVYHDNGKLHNVSLGQGQEVVAENALDVAAEKGHWVILQNIHLVARWLGTLDKKLERYSTGSHEDYRVFISAEPAPSPETHIIPQGILENAIKITNEPPTGMHANLHKALDLFTQDTLEMCTKEMEFKCMLFALCYFHAVVAERRKFGAQGWNRSYPFNNGDLTISINVLYNYLEANPKVPWDDLRYLFGEIMYGGHITDDWDRRLCRTYLAEYIRTEMLEGDVLLAPGFQIPPNLDYKVKAVLDDILEKIPETFNMAEIMAKAAEKTPYVVVAFQECERMNILTNEMRRSLKELNLGLKGELTITTDVEDLSTALFYDTVPDTWVARAYPSMMGLAAWYADLLLRIRELEAWTTDFALPTTVWLAGFFNPQSFLTAIMQSMARKNEWPLDKMCLSVEVTKKNREDMTAPPREGSYVYGLFMEGARWDTQTGVIAEARLKELTPAMPVIFIKAIPVDRMETKNIYECPVYKTRIRGPTYVWTFNLKTKEKAAKWILAAVALLLQV

SEQ ID NO: 792606 - protein, 141 aa, Homo sapiens
MQAHNYKGLLFQLLAAGLKPFGVEPISAEGGECEDPTLPASPSLTYWQQHLTLSHTVPAGARWDTQTGVIAEARLKELTPAMPVIFIKAIPVDRMETKNIYECPVYKTRIRGPTYVWTFNLKTKEKAAKWILAAVALLLQV

SEQ ID NO: 792607 - protein, 163 aa, Homo sapiens
HLLMALPICCVIHTPFVCVEVVEAKITEVKINEARENYRPAAERASLLYFILNDLNKINPVYQFSLKVRPAAGAGCLPQGGAASGLHSQACCPHSHRAVPGPPSEGRPGPACRWSWKRGSQGPPSVLHPFSPGEGMSCSLLPALPLVPPGTHNPIKTNWMAWH

SEQ ID NO: 792608 - protein, 396 aa, Homo sapiens
MQPQGRGNGIFLYVAGSTGGSPQRGLGNKWDLYRQQGVGERSGKECLTNRTWVSACTALPMLTNCPLFQGYHEYIDENLPPESPYLYGLHPNAEIGFLTVTSEKLFRTVLEMQPKETDSGAGTGVSREEKVKAVLDDILEKIPETFNMAEIMAKAAEKTPYVVVAFQECERMNILTNEMRRSLKELNLGLKGELTITTDVEDLSTALFYDTVPDTWVARAYPSMMGLAAWYADLLLRIRELEAWTTDFALPTTVWLAGFFNPQSFLTAIMQSMARKNEWPLDKMCLSVEVTKKNREDMTAPPREGSYVYGLFMEGARWDTQTGVIAEARLKELTPAMPVIFIKAIPVDRMETKNIYECPVYKTRIRGPTYVWTFNLKTKEKAAKWILAAVALLLQV

SEQ ID NO: 792609 - protein, 1010 aa, Homo sapiens
MSLGGGQAEGFGQGSQGRTEYRQRGVNPAAKMSLITQGKSRCISQKGPRHRPGRRNRQGEVQCSSRDQKGGFKVAAWPGAGVKGGLYLCSSPLVTGRPTEPFPPPTARYIKIGDKEVEYHPKFRLILHTKYFNPHYKPEMQAQCTLINFLVTRDGLEDQLLAAVVAKERPDLEQLKANLTKSQNEFKIVLKELEDSLLARLSAASGNFLGDTALVENLETTKHTASEIEEKVVEAKITEVKINEARENYRPAAERASLLYFILNDLNKINPVYQFSLKAFNVVFEKAIQRTTPANEVKQRVINLTDEITYSVYMYTARGLFERDKLIFLAQVTFQVLSMKKELNPVELDFLLRFPFKAGVVSPVDFLQHQGWGGIKALSEMDEFKNLDSDIEGSAKRWKKLVESEAPEKEIFPKEWKNKTALQKLCMVRCLRPDRMTYAIKKKTRVYHDNGKLHNVSLGQGQEVVAENALDVAAEKGHWVILQNIHLVARWLGTLDKKLERYSTGSHEDYRVFISAEPAPSPETHIIPQGILENAIKITNEPPTGMHANLHKALDLFTQDTLEMCTKEMEFKCMLFALCYFHAVVAERRKFGAQGWNRSYPFNNGDLTISINVLYNYLEANPKVPWDDLRYLFGEIMYGGHITDDWDRRLCRTYLAEYIRTEMLEGDVLLAPGFQIPPNLDYKGYHEYIDENLPPESPYLYGLHPNAEIGFLTVTSEKLFRTVLEMQPKETDSGAGTGVSREEKVKAVLDDILEKIPETFNMAEIMAKAAEKTPYVVVAFQECERMNILTNEMRRSLKELNLGLKGELTITTDVEDLSTALFYDTVPDTWVARAYPSMMGLAAWYADLLLRIRELEAWTTDFALPTTVWLAGFFNPQSFLTAIMQSMARKNEWPLDKMCLSVEVTKKNREDMTAPPREGSYVYGLFMEGARWDTQTGVIAEARLKELTPAMPVIFIKAIPVDRMETKNIYECPVYKTRIRGPTYVWTFNLKTKEKAAKWILAAVALLLQV

SEQ ID NO: 792610 - protein, 40 aa, Homo sapiens
MAWLPALAPATFLAVIATCMGSGGPGPPVPVLPPTVSVTG

SEQ ID NO: 792611 - protein, 125 aa, Homo sapiens
FFFFLFSICLVDFSPSLHFEPMGVIACEMGFLKTAYYWVLLFIKLATLCLLIGSFSPFTFKVSIDMCGFDPVIVLLAVFEKVDICSFIVFRDFFCPPLFEISVNHKSFPIENNVASERRWEHNRR

SEQ ID NO: 792612 - protein, 125 aa, Homo sapiens
CFGVVSEMEKAKLFLPTCSLPCLFASCCIWPLKGKVKGKRRLRGRTVCELGLTVFPRLKYSVVISVHCNFCLLSSSNPLASASQVAGTDYRHEPPHLANFFCIFVEKTVSPCCTELLLKSLFTSW

SEQ ID NO: 792613 - protein, 114 aa, Homo sapiens
MGVGESSCESPLPWSELELLLHALRASRLLVSCPWPVSSWLSSPHCLRPSLPSLWRPHSVASPSCCLPTRCSPCFLGRSWVSFTDRWAPPARGCQCTREQVQVIPNSPAYLHLG

SEQ ID NO: 792614 - protein, 118 aa, Homo sapiens
FSSFPSQDLWLAGHPTIFTWQCQASQATASVSPKGGPPTNVAKEHPVPSDLLLFPVGHLSPSTRHTLYGAKSSTTLVISGPKDKHRCIHWTHELVPGPLALQNTEEKPLDWDIELSLN

SEQ ID NO: 792615 - protein, 68 aa, Homo sapiens
RRWRPQPRSQRESSRGELAPGRADVEPARREGLRYRASSQPSRGAHSAARARLVGKQGNIAGWQPGRP

SEQ ID NO: 792616 - protein, 118 aa, Homo sapiens
MREAGPACERAVLPGDGPPSPCACVPSQPSSLLSTHDPAWGASDGSPAISCILQEHSLKIWVALLIYFPGMQWVLFPWYFLSSAAFPFQTTRRRRKASPRQHANTQQKKTPGFDSQSC

SEQ ID NO: 792617 - protein, 148 aa, Homo sapiens
IIHTGEKPYKCEECGKAFNLSSHLTTHKIIHTGEKPYKCEECGKAFNQSSTLSKHKVIHTGEKPYKCGECGKAFNQSSHLTTHKIIHTGEKPYKCEECGKAFNNSSILNRHKMIHTGEKFYKPESCDNACDNISNISKHKRNCAGEKT

SEQ ID NO: 792618 - protein, 103 aa, Homo sapiens
LQQDDAVVEGHAAAAAALLDVEPAEDVDDAHDHVVDDLLPLGHAEVRLPLDDPEGHDAPVGHDEDAKIELVDAGEEREGQAAGGNAEQVPQHLCHGALVGQRP

SEQ ID NO: 792619 - protein, 172 aa, Homo sapiens
PTPAASTMLPKFDPNEIKVVYLRCTGGEVGATSALAPKIGPLGLSPKKVGDDIAKAMGDWKGLRITVKLTIQNRQAQIEVVPSASAMIIKALKEPPRDRKKQKNIKHSGNITFDEIVNIARQMRHQSLARELSGTTKEILGTAQSVGCNVDGRHPHDIIDDINSGAVECPAS

SEQ ID NO: 792620 - protein, 173 aa, Homo sapiens
NWILRTASQRLHPHTTRMHRSGHLSWVTSLVAIGLGSGAACTERRPWAQRAAGAPGGSFTEAGLGLAPEPVRSGVGSGAGDSAMATAGAACVSAVAPSDPIGARDLSGAAAAGPGRTGEGDAGRHGDLGRRAGGGGHAGGSAGRGRGGHRAAEKVPMAWGSGARVGKTQDIAS

SEQ ID NO: 792621 - protein, 94 aa, Homo sapiens
HLLWAVTCPLRGLISLPAAQPKRAEPRCTEETEPKSLSVSDEWARYPSPEGWPGATCAHRAWGNLEYECHAAACGRHHRCHHAPGPPGNAALFP

SEQ ID NO: 792622 - protein, 79 aa, Homo sapiens
SCLLPVPENGVQGGGWRRVEEGTEEGCEVKGVGEKSRTDNAEQLIPENYKVGGFEGLKGCAQVCNGERGLPALCWAPGI

SEQ ID NO: 792623 - protein, 115 aa, Homo sapiens
SFLGWKQVQEAPLPISYAPFPLTLLSFDCSLPPSYAPLRPPSGCLFPPPTPPLRLLVKFHEMLEEHLLVGHPALCWASPSAPLTFLSTSRGLEGNRADEALHPPSTPYTHHHPMR

SEQ ID NO: 792624 - protein, 109 aa, Homo sapiens
SPASGFYNDAFSYPPCDNLPEHFIFHLLSSRGMIYIICSSKAGYKKNNPSDFLGAMMSSRTQIHLETFKCSWTTVYSLEAEGTQEYDTPPWQKTVQWSTKGSSSPSRFF

SEQ ID NO: 792625 - protein, 94 aa, Homo sapiens
MIHIMDTGQLWQRMRYPSVCALGKVSKIHRTVRKTRSRTVHGVLPLTLQRRKCKINLQMANKHMKTCSTSLIIRKIKITTTVRYHLTSITMVVL

SEQ ID NO: 792626 - protein, 81 aa, Homo sapiens
KDGFMATFILHLGISPSLTHMQAGNRQTLEKAALRTNYGCLVIGQSEVRAWNVWTSPMTSCVPVGACAVGSGKEAMGTEHS

SEQ ID NO: 792627 - protein, 102 aa, Homo sapiens
MVTLRPSGCCGLKASETAKIRPELEMPVRSVPSIEAAMEAMNVIGSPRVHVKWEEGWGLGLSTGCPPGFLLKSPTLDRSPSASTTPTSINTRPTAAEILSAL

SEQ ID NO: 792628 - protein, 236 aa, Homo sapiens
MLVRGWFSSGRRSAVCVLRGKMGKVRGLRARVHQAAVRPKGEAAPGPRAPCGGGEPSAGLGRGEDWAFINTNIFARTKIDPSALVQKLELDVRSVTSVRRGAEAKTVLPKKEKMKLRREQWLQKIEAIKLAEQKHREERRRRATVVVGDLHPLRDALPELLGLEAGSRRQARSRESNKPRPSELSRMSAAQRQQLLEEERTRFQELLASPAYRASPLVAIGQTLARQMQLEDGGQL

SEQ ID NO: 792629 - protein, 173 aa, Homo sapiens
MDWAFINTNIFARTKIDPSALVQKLELDVRSVTSVRRGAEAKTVLPKKEKMKLRREQWLQKIEAIKLAEQKHREERRRRATVVVGDLHPLRDALPELLGLEAGSRRQARSRESNKPRPSELSRMSAAQRQQLLEEERTRFQELLASPAYRASPLVAIGQTLARQMQLEDGGQL

SEQ ID NO: 792630 - protein, 111 aa, Homo sapiens
EKCQKNRNFMAGSLRETKQNITIMLQCILLRRACPWPQLPLLWIDNTFNTSVIHKLKSLGRAWWLTPVTSALCEAEAGGSRGQAIETILANMVKPCLLKYKKLAGRGGVCL

SEQ ID NO: 792631 - protein, 121 aa, Homo sapiens
PRVQTSNFPRECIRRFFPKRKCFVFDRPTNDKDLLANIEKVSEKQLDPKFQEQTNIFCSYIFTHARTKTLREGITVTGNRLGTLAVTYVEAINMSRDCAIALQPGQQSLGDRVRLCLKKLN

SEQ ID NO: 792632 - protein, 75 aa, Homo sapiens
RGQSLAVKSFSRRTPNSSSYCPSEPMMSTPPPARELLQPQPQPQALHYALANVQQVQIHQCHETGALCCVLCPVS

SEQ ID NO: 792633 - protein, 118 aa, Homo sapiens
ARAYQAGATAPAGAAPAARALGSQAAGAAAALVERRDPGRRAGRRRRAALWPARTTLGAPAAHVADPKARGQRRQQRQQQQKQQRQEQRQARHGLLRDSGGASASRSAPRPPSSHRSR

SEQ ID NO: 792634 - protein, 148 aa, Homo sapiens
MGSQDEWSLSFICDTLFLERCVEERREVMRGSEEEEKGKQRRKEGVKRKREENREEKSFCTAKETTIRVNRQPTQWEKIFATYSSDKGLISRIYNELKQIYKKKRNNSIKKWTKDMNRHLSKEDIYAAKKHMKKMLTITGHQRNANQN

SEQ ID NO: 792635 - protein, 78 aa, Homo sapiens
MCWRALNPRSFTPRALQIYPWSLTSQHESVTQSFQMDAGGVGAGGKGDVMTEAEIGAMHFEMEEEATSQGMQVPLESD

SEQ ID NO: 792636 - protein, 84 aa, Homo sapiens
RNWVDGVFHDPILRHSTLNQAWATAKGALLDPGPLGRSLGAGANVLTAPLARAFPPAVPQDAPAAGAARELLALPKAGGKPFCA

SEQ ID NO: 792637 - protein, 76 aa, Homo sapiens
WQAALHRTHSDIQLPACQPQCVVPSLTTLAPQHPSRRGFCLWSPGHQPRPAGCGPAVTWGNPANLTVQWAAATSLQ

SEQ ID NO: 792638 - protein, 110 aa, Homo sapiens
IQDWRGKKSYAYINRQWEKGTQHYSAYFYPNVLLFQKKLKMIEGNPATEKASSSSTLTLSSESFFKISQEVLLHNLLKQAISSGKAALQISANKLLFHLRNNLENKCTKA

SEQ ID NO: 792639 - protein, 167 aa, Homo sapiens
MNRPAPVEISYENMRFLITHNPTNATLNKFTEELKKYGVTTLVRVCDATYDKAPVEKEGIHVLDWPFDDGAPPPNQIVDDWLNLLKTKFREEPGCCVAVHCVAGLGRAPVLVALALIECGMKYEDAVQFIRQKRRGAFNSKQLLYLEKYRPKMRLRFRDTNGHCCVQ

SEQ ID NO: 792640 - protein, 133 aa, Homo sapiens
MNRPAPVEISYENMRFLITHNPTNATLNKFTEELKKYGVTTLVRVCDATYDKAPVEKEGIHVLDWPFDDGAPPPNQIVDDWLNLLKTKFREEPGCCVAVHCVAGLGRAPVLVALALIECVCVHAQCPSVSVPA

SEQ ID NO: 792641 - protein, 265 aa, Homo sapiens
AKGKKAKGKKVAPAPAVVKKQEAKKVVNPLFEKRPKNFGIGQDIQPKRDLTRFVKWPRYIRLQRQRAILYKRLKVPPAINQFTQALDRQTATQLLKLAHKYRPETKQEKKQRLLARAEKKAAGKGDVPTKRPPVLRAGVNTVTTLVENKKAQLVVIAHDVDPIELVVFLPALCRKMGVPYCIIKGKARLGRLVHRKTCTTVAFTQVNSEDKGALAKLVEAIRTNYNDRYDEIRRHWGGNVLGPKSVARIAKLEKGKAKELATKLG

SEQ ID NO: 792642 - protein, 245 aa, Homo sapiens
AKGKKAKGKKVAPAPAVVKKQEAKKVVNPLFEKRPKNFGIGQDIQPKRDLTRFVKWPRYIRLQRQRAILYKRLKVPPAINQFTQALDRQTATQLLKLAHKYRPETKQEKKQRLLARAEKKAAGKGDVPTKRPPVLRAGVNTVTTLVENKKAQLVVIAHDVDPIELVVFLPALFHRKTCTTVAFTQVNSEDKGALAKLVEAIRTNYNDRYDEIRRHWGGNVLGPKSVARIAKLEKGKAKELATKLG

SEQ ID NO: 792643 - protein, 210 aa, Homo sapiens
AKGKKAKGKKVAPAPAVVKKQEAKKVVNPLFEKRPKNFGIGQDIQPKRDLTRFVKWPRYIRLQRQRAILYKRLKVPPAINQFTQALDRQTATQLLKLAHKYRPETKQEKKQRLLARAEKKAAGKGDVPTKRPPVLRAVHRKTCTTVAFTQVNSEDKGALAKLVEAIRTNYNDRYDEIRRHWGGNVLGPKSVARIAKLEKGKAKELATKLG

SEQ ID NO: 792644 - protein, 93 aa, Homo sapiens
VSIPERYVELDPEEPPSLEELQARYRKAEKIRNILARSSMCNLQPTSGQDQNSVADLDLQLQEQERIINISYALASEASQRSKQVAAQAVTDP

SEQ ID NO: 792645 - protein, 110 aa, Homo sapiens
GYRETDVLFFSILGGWFEQHLLTISLVGMFLLKTELGSHKMFLQYKVIIPLAFILLFSCSKCMHLSKRIWAAVQSERCQQRLPRPIQSSKSLFDLLFHTDSSDEHAHELT

SEQ ID NO: 792646 - protein, 34 aa, Homo sapiens
MTRSLFQVPAPRIPSSSPSRMPRSWASTDCALRP

SEQ ID NO: 792647 - protein, 111 aa, Homo sapiens
MALPRLTGALRSFSNVTKQDNYNEEVADLKIKRSKLHEQVLDLGLTWKKIIKFLNEKLEKSKMQSINEDLKDILHAAKQIVGTDNGREAIESGAAFLFMTFHLKDSVGHKE

SEQ ID NO: 792648 - protein, 111 aa, Homo sapiens
MALPRLTGALRSFSNVTKQDNYNEEVADLKIKRSKLHEQVLDLGLTWKKIIKFLNEKLEKSKMQSINEDLKDILHAAKQIEVNCPFQKRRLDGKEEDEKMSRASDRFRGLR

SEQ ID NO: 792649 - protein, 86 aa, Homo sapiens
LLFATKGKREASTHYTFGERTLSLNVLKPLALSCLLPLFAGTHAGCRQKSQSFKHVSSVYSLVLRNFCLGFKTAKGRKDRHQKCPS

SEQ ID NO: 792650 - protein, 279 aa, Homo sapiens
MGLSPGAEGEYALRLPRIPPPLPKPASRTAGTGPKDQPPALRRSAVPHSGLNSISPLELEESVGFAALVQLPAKQPPPGTLEQGRSIQQGEKAVVSLETTPSQKADWSSIPKPENEGKLIKQAAEGKPRPRPGDLIEIFRIGYEHWAIYVEDDCVVHLAPPSEEFEVGSITSIFSNRAVVKYSRLEDVLHGCSWKVNNKLDGTYLPLPVDKIIQRTKKMVNKIVQYSLIEGNCEHFVNGLRYGVPRSQQVEHALMEGAKAAGAVISAVVDSIKPKPITA

SEQ ID NO: 792651 - protein, 244 aa, Homo sapiens
MGLSPGAEGEYALRLPRIPPPLPKPASRTAGTGPKDQPPALRRSAVPHSGLNSISPLELRRIRGIRSVGPAPSQAASAGHIRTGQKHPARGKPRPRPGDLIEIFRIGYEHWAIYVEDDCVVHLAPPSEEFEVGSITSIFSNRAVVKYSRLEDVLHGCSWKVNNKLDGTYLPLPVDKIIQRTKKMVNKIVQYSLIEGNCEHFVNGLRYGVPRSQQVEHALMEGAKAAGAVISAVVDSIKPKPITA

SEQ ID NO: 792652 - protein, 98 aa, Homo sapiens
PTFVCLWSPGEEFEVGSITSIFSNRAVVKYSRLEDVLHGCSWKVNNKLDGTYLPLPVDKIIQRTKKMVNKIVQYSLIEGNCEHFVNGLRYGVPRSQQV

SEQ ID NO: 792653 - protein, 119 aa, Homo sapiens
MGLSPGAEGEYALRLPRIPPPLPKPASRTAGTGPKDQPPALRRSAVPHSEESVGFAALVQLPAKQPPPGTLEQGRSIQQGEKAVVSLETTPSQKADWSSIPKPENEGKLIKQAAEVLKF
